United States Patent Application Publication US 2024/0398993 A1 - sequence listing, part 14

SEQ ID NO: 45564 - protein, 157 aa, Homo sapiens
MLRGTMTAWRGMRPEVTLACLLLATAGCFADLNEVPQVTVQPASTVQKPGGTVILGCVVEPPRMNVTWRLNGKELNGSDDALGVLITHGTLVITALNNHTVGRYQCVARMPAGAVASVPATVTLASESAPLPPCHGAVPPHLSHPEAPTIHAASCYS

SEQ ID NO: 45565 - protein, 140 aa, Homo sapiens
MTRAIETTDIISRHLPGVCKVSTDLLREGAPIEPDPPVSHWKPEAVQYYEDGARIEAAFRNYIHRADARQEEDSYEIFICHANVIRYIVCRALQFPPEGWLRLSLNNGSITHLVIRPNGRVALRTLGDTGFMPPDKITRS

SEQ ID NO: 45566 - protein, 556 aa, Homo sapiens
MERFAEEADVVIVGAGPAGLSAAVRLKQLAVAHEKDIRVCLVEKAAQIGAHTLSGACLDPGAFKELFPDWKEKGAPLNTPVTEDRFGILTEKYRIPVPILPGLPMNNHGNYIVRLGHLVSWMGEQAEALGVEVYPGYAAAEVLFHDDGSVKGIATNDVGIQKDGAPKATFERGLELHAKVTIFAEGCHGHLAKQLYKKFDLRANCEPQTYGIGLKELWVIDEKNWKPGRVDHTVGWPLDRHTYGGSFLYHLNEGEPLVALGLVVGLDYQNPYLSPFREFQRWKHHPSIRPTLEGGKRIAYGARALNEGGFQSIPKLTFPGGLLIGCSPGFMNVPKIKGTHTAMKSGILAAESIFNQLTSENLQSKTIGLHVTEYEDNLKNSWVWKELYSVRNIRPSCHGVLGVYGGMIYTGIFYWILRGMEPWTLKHKGSDFERLKPAKDCTPIEYPKPDGQISFDLLSSVALSGTNHEHDQPAHLTLRDDSIPVNRNLSIYDGPEQRFCPAGVYEFVPVEQGDGFRLQINAQNCVHCKTCDIKDPSQNINWVVPEGGGGPAYNGM

SEQ ID NO: 45567 - protein, 35 aa, Homo sapiens
MDQALSLWFLLGWIGGDSCNLIGSFLADQLPLQTW

SEQ ID NO: 45568 - protein, 266 aa, Homo sapiens
MVCLKFPGGSCMAALTVTLMVLSSPLALAGDTRPRFLEQVKHECHFFNGTERVRFLDRYFYHQEEYVRFDSDVGEYRAVTELGRPDAEYWNSQKDLLEQRRAEVDTYCRHNYGVVESFTVQRRVYPEVTVYPAKTQPLQHHNLLVCSVNGFYPGSIEVRWFRNGQEEKTGVVSTGLIQNGDWTFQTLVMLETVPRSGEVYTCQVEHPSLTSPLTVEWRARSESAQSKMLSGVGGFVLGLLFLGAGLFIYFRNQKGHSGLQPTGFLS

SEQ ID NO: 45569 - protein, 359 aa, Homo sapiens
MVPGTPSPLLGRGKELWLESLACLPGAVKRDCTITGWSEPFPPYPVACPVPLELLAEEESYFSTVKIIYTVGHSISIVALFVAITILVALRRLHCPRNYVHTQLFTTFILKAGAVFLKDAALFHSDDTDHCSFSTVLCKVSVAASHFATMTNFSWLLAEAVYLNCLLASTSPSSRRAFWWLVLAGWGLPVLFTGTWVSCKLAFEDIACWDLDDTSPYWWIIKGPIVLSVGVNFGLFLNIIRILVRKLEPAQGSLHTQSQYWRLSKSTLFLIPLFGIHYIIFNFLPDNAGLGIRLPLELGLGSFQGFIVAILYCFLNQEVRTEISRKWHGHDPELLPAWRTRAKWTTPSRSAAKVLTSMC

SEQ ID NO: 45570 - protein, 72 aa, Homo sapiens
MNGVLIPHTPIAVDFWSLRRAGTARLFFLSHMHSDHTVGLSSTWARPLYCSPITAHLLHRHLQVIFDTHHPC

SEQ ID NO: 45571 - protein, 89 aa, Homo sapiens
MISKEFHLAATQDDCRKGRTQEDILVPSSHPELFASVLPMAPEEAARLQQPQPLPPPSGIHLSASRTLAPTLLYSSPPSHSPFGLSSLI

SEQ ID NO: 45572 - protein, 2653 aa, Homo sapiens
MVSPPLLIISVAGTIECKPDHLLWRPGSTSPQSVSFLHGKVVMESLGRPIPPTSSPSLLPSAQLPSSHNPPPVSCQMPLLDSNTSHQIMDTNPDEEFSPNSYLLRACSGPQQASSSGPPNHHSQSTLRPPLPPPHNHTLSHHHSSANSLNRNSLTNRRSQIHAPAPAPNDLATTPESVQLQDSWVLNSNVPLETRHFLFKTSSGSTPLFSSSSPGYPLTSGTVYTPPPRLLPRNTFSRKAFKLKKPSKYCSWKCAALSAIAAALLLAILLAYFIAMHLLGLNWQLQPADGHTFNNGIRTGLPGNDDVATMPSGGKVPWSLKNSSIDSGEAEVGRRVTQEVPPGVFWRSQIHISQPQFLKFNISLGKDALFGVYIRRGLPPSHAQYDFMERLDGKEKWSVVESPRERRSIQTLVQNEAVFVQYLDVGLWHLAFYNDGKDKEMVSFNTVVLDSVQDCPRNCHGNGECVSGVCHCFPGFLGADCAKAACPVLCSGNGQYSKGTCQCYSGWKGAECDVPMNQCIDPSCGGHGSCIDGNCVCSAGYKGEHCEEVDCLDPTCSSHGVCVNGECLCSPGWGGLNCELARVQCPDQCSGHGTYLPDTGLCSCDPNWMGPDCSVEVCSVDCGTHGVCIGGACRCEEGWTGAACDQRVCHPRCIEHGTCKDGKCECREGWNGEHCTIGRQTAGTETDGCPDLCNGNGRCTLGQNSWQCVCQTGWRGPGCNVAMETSCADNKDNEGDGLVDCLDPDCCLQSACQNSLLCRGSRDPLDIIQQGQTDWPAVKSFYDRIKLLAGKDSTHIIPGENPFNSSLVSLIRGQVVTTDGTPLVGVNVSFVKYPKYGYTITRQDGTFDLIANGGASLTLHFERAPFMSQERTVWLPWNSFYAMDTLVMKTEENSIPSCDLSGFVRPDPIIISSPLSTFFSAAPGQNPIVPETQVLHEEIELPGSNVKLRYLSSRTAGYKSLLKITMTQSTVPLNLIRVHLMVAVEGHLFQKSFQASPNLAYTFIWDKTDAYGQRVYGLSDAVVSVGFEYETCPSLILWEKRTALLQGFELDPSNLGGWSLDKHHILNVKSGILHKGTGENQFLTQQPAIITSIMGNGRRRSISCPSCNGLAEGNKLLAPVALAVGIDGSLYVGDFNYIRRIFPSRNVTSILELRNKEFKHSNNPAHKYYLAVDPVSGSLYVSDTNSRRIYRVKSLSGTKDLAGNSEVVAGTGEQCLPFDEARCGDGGKAIDATLMSPRGIAVDKNGLMYFVDATMIRKVDQNGIISTLLGSNDLTAVRPLSCDSSMDVAQVRLEWPTDLAVNPMDNSLYVLENNVILRITENHQVSIIAGRPMHCQVPGIDYSLSKLAIHSALESASAIAISHTGVLYITETDEKKINRLRQVTTNGEICLLAGAASDCDCKNDVNCNCYSGDDAYATDAILNSPSSLAVAPDGTIYIADLGNIRIRAVSKNKPVLNAFNQYEAASPGEQELYVFNADGIHQYTVSLVTGEYLYNFTYSTDNDVTELIDNNGNSLKIRRDSSGMPRHLLMPDNQIITLTVGTNGGLKVVSTQNLELGLMTYDGNTGLLATKSDETGWTTFYDYDHEGRLTNVTRPTGVVTSLHREMEKSITIDIENSNRDDDVTVITNLSSVEASYTVVQDQVRNSYQLCNNGTLRVMYANGMGISFHSEPHVLAGTITPTIGRCNISLPMENGLNSIEWRLRKEQIKGKVTIFGRKLRVHGRNLLSIDYDRNIRTEKIYDDHRKFTLRIIYDQVGRPFLWLPSSGLAAVNVSYFFNGRLAGLQRGAMSERTDIDKQGRIVSRMFADGKVWSYSYLDKSMVLLLQSQRQYIFEYDSSDRLLAVTMPSVARHSMSTHTSIGYIRNIYNPPESNASVIFDYSDDGRILKTSFLGTGRQVFYKYGKLSKLSEIVYDSTAVTFGYDETTGVLKMVNLQSGGFSCTIRYRKIGPLVDKQIYRFSEEGMVNARFDYTYHDNSFRIASIKPVISETPLPVDLYRYDEISGKVEHFGKFGVIYYDINQIITTAVMTLSKHFDTHGRIKEVQYEMFRSLMYWMTVQYDSMGRVIKRELKLGPYANTTKYTYDYDGDGQLQSVAVNDRPTWRYSYDLNGNLHLLNPGNSVRLMPLRYDLRDRITRLGDVQYKIDDDGYLCQRGSDIFEYNSKGLLTRAYNKASGWSVQYRYDGVGRRASYKTNLGHHLQYFYSDLHNPTRITHVYNHSNSEITSLYYDLQGHLFAMESSSGEEYYVASDNTGTPLAVFSINGLMIKQLQYTAYGEIYYDSNPDFQMVIGFHGGLYDPLTKLVHFTQRDYDVLAGRWTSPDYTMWKNVGKEPAPFNLYMFKSNNPLSSELDLKNYVTDVKSWLVMFGFQLSNIIPGFPRAKMYFVPPPYELSESQASENGQLITGVQQTTERHNQAFMALEGQVITKKLHASIREKAGHWFATTTPIIGKGIMFAIKEGRVTTGVSSIASEDSRKVASVLNNAYYLDKMHYSIEGKDTHYFVKIGSADGDLVTLGTTIGRKVLESGVNVTVSQPTLLVNGRTRRFTNIEFQYSTLLLSIRYGLTPDTLDEEKARVLDQARQRALGTAWAKEQQKARDGREGSRLWTEGEKQQLLSTGRVQGYEGYYVLPVEQYPELADSSSNIQFLRQNEMGKR

SEQ ID NO: 45573 - protein, 248 aa, Homo sapiens
MATSAPLRSLEEEVTCSICLDYLRDPVTIDCGHVFCRSCTTDVRPISGSRPVCPLCKKPFKKENIRPVWQLASLVENIERLKVDKGRQPGEVTREQQDAKLCERHREKLHYYCEDDGKLLCVMCRESREHRPHTAVLMEKAAQPHREKILNHLSTLRRDRDKIQGFQAKGEADILAALKKLQDQRQYIVAEFEQGHQFLREREEHLLEQLAKLEQELTEGREKFKSRGVGELARLALVISELEGKAQQ

SEQ ID NO: 45574 - protein, 32 aa, Homo sapiens
MCNILKTEGVTVRRPDPIDWSLKYKTPDFEST

SEQ ID NO: 45575 - protein, 679 aa, Homo sapiens
MFLRGRPITMYIPSGIRSLEELPSGPPPETLSLDWVYGYRGRDSRSNLFVLRSGEVVYFIACVVVLYRPGGGPGGPGGGGQRHYRGHTDCVRCLAVHPDGVRVASGQTAGVDKDGKPLQPVVHIWDSETLLKLQEIGLGAFERGVGALAFSAADQGAFLCVVDDSNEHMLSVWDCSRGMKLAEIKSTNDSVLAVGFNPRDSSCIVTSGKSHVHFWNWSGGVGVPGNGTLTRKQGVFGKYKKPKFIPCFVFLPDGDILTGDSEGNILTWGRSPSDSKTPGRGGAKETYGIVAQAHAHEGSIFALCLRRDGTVLSGGGRDRRLVQWGPGLVALQEAEIPEHFGAVRAIAEGLGSELLVGTTKNALLRGDLAQGFSPVIQGHTDELWGLCTHPSQNRFLTCGHDRQLCLWDGESHALAWSIDLKETGLCADFHPSGAVVAVGLNTGRWLVLDTETREIVSDVIDGNEQLSVVRYSPDGLYLAIGSHDNVIYIYSVSSDGAKSSRFGRCMGHSSFITHLDWSKDGNFIMSNSGDYEILYWDVAGGCKQLKNRYESRDREWATYTCVLGFHVYGVWPDGSDGTDINSLCRSHNERVVAVADDFCKVHLFQYPCARAKAPSRMYGGHGSHVTSVRFTHDDSHLVSLGGKDASIFQWRVLGAGGAGPAPATPSRTPSLSPASSLDV

SEQ ID NO: 45576 - protein, 434 aa, Homo sapiens
MKYTTATGRNITKVLIANRGEIACRVMRTAKKLGVQTVAVYSEADRNSMHVDMADEAYSIGPAPSQQSYLSMEKIIQVAKTSAAQAIHPGCGFLSENMEFAELCKQEGIIFIGPPPSAIRDMGIKSTSKSIMAAAGVPVVEGYHGEDQSDQCLKEHARRIGYPVMIKAVRGGGGKGMRIVRSEQEFQEQLESARREAKKSFNDDAMLIEKFVDTPRHVEVQVFGDHHGNAVYLFERDCSVQRRHQKIIEEAPAPGIKSEVRKKLGEAAVRAAKAVNYVGAGTVEFIMDSKHNFCFMEMNTRLQVEHPVTEMITGTDLVEWQLRIAAGEKIPLSQEEITLQGHAFEARIYAEDPSNNFMPVAGPLVHLSTPRADPSTRIETGVRQGDEVSVHYDPMIAKLVVWAADRQAALTKLRYSLRQYNINSLHFRLAVEED

SEQ ID NO: 45577 - protein, 118 aa, Homo sapiens
MACRGGAGNGHRASATLSRVSPGSLYTCRTRTHNICMVSDFFYPNMGGVESHIYQLSQCLIERGHKVIIVTHAYGNRKGIRYLTSGLKVYYLPLKVMYNQSTATTLFHSLPLLRDRFA

SEQ ID NO: 45578 - protein, 70 aa, Homo sapiens
MQGSTRRMGVMTDVHRRFLQLLMTHGVLEEWDVKRLQTHCYKVHDRMSFISLTSEKEKQRSFLARLCIGC

SEQ ID NO: 45579 - protein, 453 aa, Homo sapiens
MQQTSWNPLGGTCKQPPGRTHSAVELWKPGAQDASSQAQGGSSCILREEARMPHSAGGTAGVGLEAAEPTALLTRAEPPSEPTEIRPQKRKKGPAPKMLGNELCSVCGDKASGFHYNVLSCEGCKGFFRRSVIKGAHYICHSGGHCPMDTYMRRKCQECRLRKCRQAGMREECVLSEEQIRLKKLKRQEEEQAHATSLPPRASSPPQILPQLSPEQLGMIEKLVAAQQQCNRRSFSDRLRVTPWPMAPDPHSREARQQRFAHFTELAIVSVQEIVDFAKQLPGFLQLSREDQIALLKTSAIEVMLLETSRRYNPGSESITFLKDFSYNREDFAKAGLQVEFINPIFEFSRAMNELQLNDAEFALLIAISIFSADRPNVQDQLQVERLQHTYVEALHAYVSIHHPHDRLMFPRMLMKLVSLRTLSSVHSEQVFALRLQDKKLPPLLSEIWDVHE

SEQ ID NO: 45580 - protein, 33 aa, Homo sapiens
MPNSEPASLLELFNSIATQGELVRSLKAGNASK

SEQ ID NO: 45581 - protein, 137 aa, Homo sapiens
MSLFGTTSGFGTSGTSMFGSATTDNHNPMKDIEVTSSPDDSIGCLSFSPPTLPGNFLIAGSWANDVRCWEVQDSGQTIPKAQQMHTGPVLDVCWSDDGSKVFTASCDKTAKMWDLSSNQAIQIAQHDAPVKTIHWIK

SEQ ID NO: 45582 - protein, 190 aa, Homo sapiens
MEISRLAQSKRNIISLNMDLERDTQRIDEANQKLLLKIQEREDKIQRLESEIIQTRGLVEDEEWEKENRTTMERERALQELEEETARLERKNKTLVHSITELQQKLTRKSQKITNCEQSSPDGALEETKVKLQQLEASYACQEKELLKVMKEYAFVTQLCEDQALYIKVELLEVPGNVEENRRRTRGSVP

SEQ ID NO: 45583 - protein, 483 aa, Homo sapiens
MPEEAGFPPAKRFRPGSGPPSRAGSFPPGRQVVMLLTAGSGGRGGGGGRRQQPPLAQPSASPYPEAVELQRRSLPIFQARGQLLAQLRNLDNAVLIGSPFFTGHPGVPHWAGGDRSHEQDVPRHCKAPPRRLPCDAGPSSVRLPALCTAAPSLPRGPKDSGLEVLAVQRVSKTQAWQRTGRAGREDSGICYRLYTEDEFEKFDKMTVPEIQRCNLASVMLQLLAMKVPNVLTFDFMSKPSPDHIQAAIAQLDLLGALEHKDDQLTLTPMGRKMAAFPLEPKFAKTILMSPKFHCTEEILTIVSLLSVDSVLHNPPSRREEVQGVRKKFISSEGDHMTLLNIYRTFKNLGGNKDWCKENFVNSKNMTLVAEVRAQLRDICLKMSMPIASSRGDVESVRRCLAHSLFMSTAELQPDGTYATTDTHQPVAIHPSSVLFHCKPACVVYTELLYTNKCYMRDLCVIDAQWLYEAAPEYFRRKLRTARN

SEQ ID NO: 45584 - protein, 426 aa, Homo sapiens
MLYVGDPARHLATAQFNLLSSTMDQMSSRAASASPYTPEHAASVPTHSPYAQPSSTFDTMSPAPVIPSNTDYPGPHHFEVTFQQSSTAKSATWTYSPLLKKLYCQIAKTCPIQIKVSTPPPPGTAIRAMPVYKKAEHVTDVVKRCPNHELGRDFNEGQSAPASHLIRVEGNNLSQYVDDPVTGRQSVVVPYEPPQVGTEFTTILYNFMCNSSCVGGMNRRPILIIITLEMRDGQVLGRRSFEGRICACPGRDRKADEDHYREQQALNESSAKNGAASKRAFKQSPPAVPALGAGVKKRRHGDEDTYYLQVRGRENFEILMKLKESLELMELVPQPLVDSYRQQQQLLQRPPRDAQQPWPRSASQRRDEQQPQRPVHGLGVPLHSATPLPRRPQPRQFFNRIGVSKLHRVFHLPRVTEHLPPAEPDH

SEQ ID NO: 45585 - protein, 378 aa, Homo sapiens
MDSLAAPQDRLVEQLLSPRTQAQRRLKDIDKQYVGFATLPNQVHRKSVKKGFDFTLMVAGESGLGKSTLVHSLFLTDLYKDRKLLSAEERISQTVEILKHTVDIEEKGVKLKLTIVDTPGFGDAVNNTECWKPITDYVDQQFEQYFRDESGLNRKNIQDNRVHCCLYFISPFGHGLRPVDVGFMKALHEKVNIVPLIAKADCLVPSEIRKLKERIREEIDKFGIHVYQFPECDSDEDEDFKQQDRELKESAPFAVIGSNTVVEAKGQRVRGRLYPWGIVEVENQAHCDFVKLRNMLIRTHMHDLKDVTCDVHYENYRAHCIQQMTSKLTQDSRMESPIPILPLPTPDAETEKLIRMKDEELRRMQEMLQRMKQQMQDQ

SEQ ID NO: 45586 - protein, 447 aa, Homo sapiens
MQKPPLLLRRPLPPKFTKLSLHEKKTHTAKTGKIESLHVAFTEDETTSIKMDRTRFPDVLRNQSLTPINIQNIFLDHCVQERVTAISSPQKSTKHVREQIPDTATGSIFFPHCNSASTRIFGKQTNKMESSRKFKTMKDVYTEKRLENILILSSKFSKPKSTPGSVIAQKLEKMHPKHQPLPESPGYTYQHISRDLSATVPSPPPMTVSMKPEGQWPEHFKSTATLTLRVTEFPGFVSLPTPVLPRKPHRQSVIETLVTENGNIESVPKQIPPRPPEGLTKTEKIESEIHVVRGEGFKTVAATRYETITAMTNLAIVNCQVYGRNALNLKGFFILNCPDLTPLAFQLIYLNLSFNDLHYFPTEILCLKNLQILKLRNNPIKEIPSEIQQLEFLRIFTIAFNLITVLPIGPINLTGEFCAGDISGETSVFQIQTDKEIIKTEEKPQIA

SEQ ID NO: 45587 - protein, 34 aa, Homo sapiens
MKENVASATVFTLLLFLNTCLLNERHSCMNVQTT

SEQ ID NO: 45588 - protein, 176 aa, Homo sapiens
MFCVTPPELETKMNITKGGLVLFSANSNSSCMELSKKIAERLGVEMGKVQVYQEPNRETRVQIQESVRGKDVFIIQTVSKDVNTTIMELLIMVYACKTSCAKSIIGVIPYFPYSKQCKMRKRGSIVSKLLASMMCKAGLTHLITMDLHQKEIQGFFNIPVDNLRASPFLLQYIQEE

SEQ ID NO: 45589 - protein, 1224 aa, Homo sapiens
MPLPPPGPGPEPIPGCTAPTQSPVGRHVVGVKGVGGMSVACVLKRKAVLWQDSFSPHLKHHPQEPANPNMPVVLTSGTGSQAQPQPAANQALAAGTHSSPVPGSIGVAGRSQDDAMVDYFFQRQHGEQLGGGGSGGGGYNNSKHRWPTGDNIHAEHQVRSMDELNHDFQALALEGRAMGEQLLPGKKFWETDESSKDGPKGIFLGDQWRDSAWGTSDHSVSQPIMVQRRPGQSFHVNSEVNSVLSPRSESGGLGVSMVEYVLSSSPGDSCLRKGGFGPRDADSDENDKGEKKNKGTFDGDKLGDLKEEGDVMDKTNGLPVQNGIDADVKDFSRTPGNCQNSANEVDLLGPNQNGSEGLAQLTSTNGAKPVEDFSNMESQSVPLDPMEHVGMEPLQFDYSGTQVPVDSAAATVGLFDYNSQQQLFQRPNALAVQQLTAAQQQQYALAAAHQPHIGLAPAAFVPNPYIISAAPPGTDPYTAGLAAAATLGPAVVPHQYYGVTPWGVYPASLFQQQAAAAAAATNSANQQTTPQAQQGQQQVLRGGASQRPLTPNQNQQGQQTDPLVAAAAVNSALAFGQGLAAGMPGYPVLAPAAYYDQTGALVVNAGARNGLGAPVRLVAPAPVIISSSAAQAAVAAAAASANGAAGGLAGTTNGPFRPLGTQQPQPQPQQQPNNNLASSSFYGNNSLNSNSQSSSLFSQGSAQPANTSLGFGSSSSLGATLGSALGGFGTAVANSNTGSGSRRDSLTGSSDLYKRTSSSLTPIGHSFYNGLSFSSSPGPVGMPLPSQGPGHSQTPPPSLSSHGSSSSLNLGGLTNGSGRYISAAPGAEAKYRSASSASSLFSPSSTLFSSSRLRYGMSDVMPSGRSRLLEDFRNNRYPNLQLREIAGHIMEFSQDQHGSRFIQLKLERATPAERQLVFNEILQAAYQLMVDVFGNYVIQKFFEFGSLEQKLALAERIRGHVLSLALQMYGCRVIQKALEFIPSDQQVINEMVRELDGHVLKCVKDQNGNHVVQKCIECVQPQSLQFIIDAFKGQVFALSTHPYGCRVIQRILEHCLPDQTLPILEELHQHTEQLVQDQYGNYVIQHVLEHGRPEDKSKIVAEIRGNVLVLSQHKFASNVVEKCVTHASRTERAVLIDEVCTMNDGPHSALYTMMKDQYANYVVQKMIDVAEPGQRKIVMHKIRPHIATLRKYTYGKHILAKLEKYYMKNGVDLGPICGPPNGII

SEQ ID NO: 45590 - protein, 50 aa, Homo sapiens
MASATEDPVLERYFKGHKAAITSLDLSPNGKQLGEENSQNLKLIQLQFEV

SEQ ID NO: 45591 - protein, 184 aa, Homo sapiens
RPSSPVEELPSLAFENFLKPIKDGIQKSPCSEPQEPLVISPINTRARTGKCESLCFHSTPIIQRKLLERLPEAPGLSPLSTEPKTQKLSNKKGSNTDTLRRVLLTQAKNQFAAVNTPQKETSQIDGPSLNNTYGFKVSIQNLQEAKALHEISDIRLHYLLDLELQDSKSPMLLMRRHFFMKLQI

SEQ ID NO: 45592 - protein, 189 aa, Homo sapiens
MAAPRDNVTLLFKLYCLAVMTLMAAVYTIALRYTRTSDKELYFSTTAVCITEVIKLLLSVGILAKETGSLGRFKASLRENVLGSPKELLKLSVPSLVYAVQNNMAFLALSNLDAAVYQVTYQLKIPCTALCTVLMLNRTLSKLQWVSVFMLCAGVTLVQWKPAQATKVVFLQVLVASTLLLWLSTQTTS

SEQ ID NO: 45593 - protein, 178 aa, Homo sapiens
MAWQGLAAEFLQVPAVTRAYTAACVLTTAAVFQVRPPRAAHLWARPTHPAPDRPSPVGLEARHQLPLLRAPGIQLLLQHALRVPLLPHAGRGLLPRPHGRLRLHVSLRGRPYDPAGTPGQPVLPGPGSAGLGLWAVEGDPTVRGCLTGIAVGHIYYFLEDVFPNQPGGKRLLQTPGFL

SEQ ID NO: 45594 - protein, 451 aa, Homo sapiens
MEALLEGIQNRGHGGGFLTSCEAELQELMKQIDIMVAHKKSEWEGRTHALETCLKIREQELKSLRSQLDVTHKEVGMLHQQVEEHEKIKQEMTMEYKQELKKLHEELCILKRSYEKLQKKQMREFRGNTKNHREDRSEIERLTAKIEEFRQKSLDWEKQRLIYQQQVSSLEAQRKALAEQSEIIQAQLVNRKQKLESVELSSQSEIQHLSSKLERANDTICANELEIERLTMRVNDLVGTSMTVLQEQQQKEEKLRESEKLLEALQEEKRELKAALQSQENLIHEARIQKEKLQEKVKATNTQHAVEAISLESVSATCKQLSQELMEKYEELKRMEAHNNEYKAEIKKLKEQILQGEQSYSSALEGMKMEISHLTQELHQRDITIASTKGSSSDMEKRLRAEMQKAEDKAVEHKEILDQLESLKLENRHLSEMVMKLELGLHEANPWPAQT

SEQ ID NO: 45595 - protein, 376 aa, Homo sapiens
MWAAGCILAEMLTGRMLFAGAHELEQMQLILETIPVIREEDKDELLRVMPSFVSSTWEVKRPLRKLLPEVNSEAIDFLEKILTFNPMDRLTAEMGLQHPYMSPYSCPEDEPTSQHPFRIEDEIDDIVLMAANQSQLSNWDTCSSRYPVSLSSDLEWRPDRCQDASEVQRDPRAGSAPLAEDVQVDPRKDSHSSSERFLEQSHSSMERAFEADYGRSCDYKVGSPSYLDKLLWRDNKPHHYSEPKLILDLSHWKQAAGAPPTATGLADTGAREDEPASLFLEIAQWVKSTQGGPEHASPPADDPERRLSASPPGRPAPVDGGASPQFDLDVFISRALKLCTKPEDLPDNKLGDLNGACIPEHPGDLVQTEAFSKERW

SEQ ID NO: 45596 - protein, 49 aa, Homo sapiens
MVKLSIVLTPQFLSHDQGQLTKELQQHVKSVTCPCEYLRKVDGRMATWM

SEQ ID NO: 45597 - protein, 99 aa, Homo sapiens
MAVSLDDDVPLILTLDEGGSAPLAPSNGLGQEELPSKRRCCMLCSSKQKPWIPCRVISDVACKAASCFEGASGPCDISMWECYRVCKQMAAAMPSTTPR

SEQ ID NO: 45598 - protein, 485 aa, Homo sapiens
MTKAPCKAYPKRPLLGLVLTPTRELAVQVKQHIDAVARFTGIKTAILVGGMSTQKQQRMLNRRPEIVVATPGRLWELIKEKHYHLRNLRQLRCLVVDEADRMVEKGHFAELSQLLEMLNDSQYNPKRQTLVFSATLTLVHQAPARILHKKHTKKMDKTAKLDLLMQKIGMRGKPKVIDLTRNEATVETLTETKIHCETDEKDFYLYYFLMQYPGRSLVFANSISCIKRLSGLLKVLDIMPLTLHACMHQKQRLRNLEQFARLEDCVLLATDVAARGLDIPKVQHVIHYQVPRTSEIYVHRSGRTARATNEGLSLMLIGPEDVINFKKIYKTLKKDEDIPLFPVQTKYMDVVKERIRLARQIEKSEYRNFQACLHNSWIEQAAAALEIELEEDMYKGGKADQQEERRRQKQMKVLKKELRHLLSQPLFTESQKTKYPTQSGKPPLLVSAPSKSESALSCLSKQKKKKTKKPKEPQPEQPQPSTSAN

SEQ ID NO: 45599 - protein, 55 aa, Homo sapiens
MSTEGGGRRCQAQVSRRISFSASHRLYSKFLSDEENLKLFGKCNNPNGHGHNYKD

SEQ ID NO: 45600 - protein, 783 aa, Homo sapiens
MGCSLCSLQKQEEQYKLLYEVCQVNGRDLSRATHDQAVEAFKTAKEPIVVQVLRRTPRTKMFTPPSESQLVDTGTQTDITFEHIMALTKMSSPSPPVLDPYLLPEEHPSAHEYYDPNDYIGDIHQEMDREELELEEVDLYRMNSQDKLGLTVCYRTDDEDDIGIYISEIDPNSIAAKDGRIREGDRIIQINGIEVQNREEAVALLTSEENKNFSLLIARPELQLDEGWMDDDRNDFLDDLHMDMLEEQHHQAMQFTASVLQQKKHDEDGGTTDTATILSNQHEKDSGVGRTDESTRNDESSEQENNGDDATASSNPLAGQRKLTCSQDTLGSGDLPFSNESFISADCTDADYLGIPVDECERFRELLELKCQVKSATPYGLYYPSGPLDAGKSDPESVDKELELLNEELRSIELECLSIVRAHKMQQLKEQYRESWMLHNSGFRNYNTSIDVRRHELSDITELPEKSDKDSSSAYNTGESCRSTPLTLEISPDNSLRRAAEGISCPSSEGAVGTTEAYGPASKNLLSITEDPEVGTPTYSPSLKELDPNQPLESKERRASDGSRSPTPSQKLGSAYLPSYHHSPYKHAHIPAHAQHYQSYMQLIQQKSAVEYAQSQMSLVSMCKDLSSPTPSEPRMEWKVKIRSDGTRYITKRPVRDRLLRERALKIREERSGMTTDDDAVSEMKMGRYWSKEERKQHLVKAKEQRRRREFMMQSRLDCLKEQQAADDRKEMNILELSHKKMMKKRNKKIFDNWMTIQELLTHGTKSPDGTRVYNSFLSVTTV

SEQ ID NO: 45601 - protein, 106 aa, Homo sapiens
MAKFLSQDQINDGNGELDFSTFLTIMHMQIKQEDPKKEILLAMLMVDKEKKGYVMASDLRSKLTSLGEKLTHKEVDDLFREADIEPNGKVKYDEFIHKITLPGRDY

SEQ ID NO: 45602 - protein, 147 aa, Homo sapiens
MAIRAQHSNAAQTQTGEANRGWTGQESLSDSDPEMWELLQREKDRQCRGLELIASENFCSRAALEALGSCLNNKYSEGYPGKRYYGGAEVVDEIELLCQRRALEAFDLDPAQWGVNVQPYSGSPANLAVYTALLQPHDRIMGLDLPD

SEQ ID NO: 45603 - protein, 178 aa, Homo sapiens
MMRAMKPPGGESSNLFGSPEEATPSSRPNRMASNIFGPTEEPQNIPKRTNPPGGKGSGIFDESTPVQTRQHLNPPGGKTSDIFGSPVTATSRLAHPNKPKDHVFLCEGEEPKSDLKAARSIPAGAEPGEKGSARKAGPAKEQEPMPTVDSHEPRLGPRPRSHNKVLNPPGGKSSISFY

SEQ ID NO: 45604 - protein, 672 aa, Homo sapiens
MQNGFSRTLKSGDGITFGVFGSKFRIEYEPLVACSSCLDVSGKTALNQAILQLGGFTVNNWTEECTHLVMVSVKVTIKTICALICGRPIVKPEYFTEFLKAVESKKQPPQIESFYPPLDEPSIGSKNVDLSGRQERKQIFKGKTFIFLNAKQHKKLSSAVVFGGGEARLITEENEEEHNFFLAPGTCVVDTGITNSQTLIPDCQKKWIQSIMDMLQRQGLRPIPEAEIGLAVIFMTTKNYCDPQGHPSTGLKTTTPGPSLSQGVSVDEKLMPSAPVNTTTYVADTESEQADTWDLSERPKEIKVSKMEQKFRMLSQDAPTVKESCKTSSNNNSMVSNTLAKMRIPNYQLSPTKLPSINKSKDRASQQQQTNSIRNYFQPSTKKRERDEENQEMSSCKSARIETSCSLLEQTQPATPSLWKNKEQHLSENEPVDTNSDNNLFTDTDLKSIVKNSASKSHAAEKLRSNKKREMDDVAIEDEVLEQLFKDTKPELEIDVKVQKQEEDVNVRKRPRMDIETNDTFSDEAVPESSKISQENEIGKKRELKEDSLWSAKEISNNDKLQDDSEMLPKKLLLTEFRSLVIKNSTSRNPSGINDDYGQLKNFKKFKKVTYPGAGKLPHIIGGSDLIAHHARKNTELEEWLRQEMEVQNQHAKEESLADDLFRYNPYLKRRR

SEQ ID NO: 45605 - protein, 272 aa, Homo sapiens
MMFQDPVAFKDVAVNFTQEEWALLDISQRKLYREVMLETFRNLTSLGKRWKDQNIEYEHQNPRRNFRSLIEEKVNEIKDDSHCGETFTPVPDDRLNFQEKKASPEVKSCESFVCGEVGLGNSSFNMNIRGDIGHKAYEYQEYGPKPCKCQQPKKAFRYRPSFRTQERDHTGEKPNACKVCGKTFISHSSVRRHMVMHSGDGPYKCKFCGKAFHCLRLYLIHERIHTGEKPCECKQCGKSFSYSATHRIHKRTHTGEKPYEYQECGKAFHSPR

SEQ ID NO: 45606 - protein, 231 aa, Homo sapiens
MWPLLTMHITQLNRECLLHLFSFLDKDSRKSLARTCSQLHDVFEDPALWSLLHFRSLTELQKDNFLLGPALRSLSICWHSSRVQVCSIEDWLKSAFQRSICSRHESLVNDFLLRVCDRCPNLASVTLSGCGHVTDDCLARLLRCCPRLRALRLENCARVTNRTLAAVAADGRALQTLHVDFCRNVSAAGLRRLRAACPRLALRAEHSAAMLPDQPPRPRAPAAALGKLLQR

SEQ ID NO: 45607 - protein, 44 aa, Homo sapiens
MVKMTKSKTFQAYLPNCHRTYSCIHCRAHLANHDELISKSLAEC

SEQ ID NO: 45608 - protein, 44 aa, Homo sapiens
MSLMLDDQPPMEAQYAEEGPGPGIFRAEPGDQQHPSRPDWAIGE

SEQ ID NO: 45609 - protein, 40 aa, Homo sapiens
MVILEAPHLLRRKEPETPGLSSRIGPSLCPGFCRKRSVSC

SEQ ID NO: 45610 - protein, 61 aa, Homo sapiens
MKTGPFAEHSNQLWNISAVPSWSKVNQGLIRMYKAECLEKFPVIQHFKFGSLLPIHPVTSG

SEQ ID NO: 45611 - protein, 36 aa, Homo sapiens
MSGMRRYEVALEAEEEIYWGCFYFFPWLRMWRRERR

SEQ ID NO: 45612 - protein, 155 aa, Homo sapiens
MEEPQSDPSVEPPLSQETFSDLWKLLPENNVLYSPALNKMFCQLAKTCPVQLWVDSTPPPGTRVRAMAIYKQSQHMTEVVRRCPHHERCSDSDGLAPPQHLIRVEGNLRVEYLDDRNTFRHSVVVPYEPPEVGSDCTTIHYNYMCNSSCMGGMNR

SEQ ID NO: 45613 - protein, 304 aa, Homo sapiens
MSLMVISMACVAFFLLQGAWPHEGFRRKPSLLAHPGPLVKSEETVILQCWSDVMFEHFLLHREGTFNHTLRLIGEHIDGVSKGNFSIGRMTQDLAGTYRCYGSVTHSPYQLSAPSDPLDIVITGLYEKPSLSAQPGPTVLAGESVTLSCSSRSSYDMYHLSREGEAHERRLPAGPKVNGTFQADFPLDPATHGGTYRCFGSFRDSPYEWSKSSDPLLVSVTGNSSNSWPSPTEPSSKTGNPRHLHVLIGTSVVKLPFTILLFFLLHRWCSNKKNASVMDQGPAGNRTVNREDSDEQDHQEVSYA

SEQ ID NO: 45614 - protein, 239 aa, Homo sapiens
MSLMVIIMACVGFFLLQGAWPQEGVHRKPSFLALPGHLVKSEETVILQCWSDVMFEHFLLHREGKFNNTLHLIGEHHDGVSKANFSIGPMMPVLAGTYRCYGSVPHSPYQLSAPSDPLDMVIIGLYEKPSLSAQPGPTVQAGENVTLSCSSIYPGKGRPMNVGSLQCAASTEHSRPTFLWALPPTEGPTDASALSVTLPTSGQTRVIHCLFPSQETLQIVGLHPLNQAPKPVTPDTYMF

SEQ ID NO: 45615 - protein, 187 aa, Homo sapiens
MPVIQTESEHKPPVNGSYFAHVNPADGGCLLEKYSEKCHDFQCALLANLFASEGQPGKVIEVKAKRRTGPLNFVTCMRETLEKHYGNKPIGMGGTFIIQKGKVKSHIMPAEFSSCPLNSDEEVNKWLHFYEMKAPLVCLPVFVSRDPGFDLRLEHTHFFSRHGEGGHYHYDTTPDIVEYLGYFLPAE

SEQ ID NO: 45616 - protein, 64 aa, Homo sapiens
  MOD_RES (1)..(1): Any amino acid
XSTGNALDQVDDGEVPLREKEKKVRPFSMFDAVDQSNAPPSFGTLRKNQSSEDILRDAQYMVSL

SEQ ID NO: 45617 - protein, 133 aa, Homo sapiens
MQAMDPAAADLYEEDGKDLDFYDFEPLPTLPEDEENVSLADILSLRDRGLSEQEAWAVCLECSLSMRSVAHAAIFQSLCITPDTLAFNTSGNVCFMEQLSDDPEGAFVPPEFDVTGNTFEPPPHEAPLSTPLP

SEQ ID NO: 45618 - protein, 312 aa, Homo sapiens
MMIKKNASSEDFFILLGFSNWPQLEVVLFVVILIFYLMTLTGNLFIIILSYVDSHLHTPMYFFLSNLSFLDLCYTTSSIPQLLVNLRGPEKTISYAGCMVQLYFVLALGITECVLLVVMSYDRYVAVCRPLHYTVLMHPRFCHLLVAASWVIGFTISALHSSFTFWVPLCGHRLVDHFFCEVPALLRLSCVDTHANELTLMVMSSIFVLIPLILILTTYGAIARAVLSMQSTTGLQKVFRTCGAHLMVVSLFFIPVMCMYLQPPSENSPDQGKFIALFYTVVTPSLNPLIYTLRNKHVKGAAKRLLGWEWGK

SEQ ID NO: 45619 - protein, 1550 aa, Homo sapiens
MDPSAPQPRAETSGKDIWHPGERCLAPSPDNGKLCEASIKSITVDENGKSFAVVLYADFQERKIPLKQLQEVKFVKDCPRNLIFDDEDLEKPYFPNRKFPSSSVAFKLSDNGDSIPYTINRYLRDYQREGTRFLYGHYIHGGGCILGDDMGLGKTVQVISFLAAVLHKKGTREDIENNMPEFLLRSMKKEPLSSTAKKMFLIVAPLSVLYNWKDELDTWGYFRVTVLHGNRKDNELIRVKQRKCEIALTTYETLRLCLDELNSLEWSAVIVDEAHRIKNPKARVTEVMKALKCNVRIGLTGTILQNNMKELWCVMDWAVPGLLGSGTYFKKQFSDPVEHGQRHTATKRELATGRKAMQRLAKKMSGWFLRRTKTLIKDQLPKKEDRMVYCSLTDFQKAVYQTVLETEDVTLILQSSEPCTCRSGQKRRNCCYKTNSHGETVKTLYLSYLTVLQKVANHVALLQAASTSKQQETLIKRICDQVFSRFPDFVQKSKDAAFETLSDPKYSGKMKVLQQLLNHCRKNRDKVLLFSFSTKLLDVLQQYCMASGLDYRRLDGSTKSEERLKIVKEFNSTQDVNICLVSTMAGGLGLNFVGANVVVLFDPTWNPANDLQAIDRAYRIGQCRDVKVLRLISLGTVEEIMYLRQIYKQQLHCVVVGSENAKRYFEAVQGSKEHQGELFGIHNLFKFRSQGSCLTKDILEREGQVEAGIMTATTWLKEGPPAHKLEMPRQPDCQECRGTEQAAEPLAKEACDLCSDFSDEEPVGATGIKTAKNKAPDSSKASSSPGQLTLLQCGFSKLLETKCKAVEDSDGNTASDDESSDEQPTCLSTEAKDAGCEKNQDSLGTSKHQKLDNILNPKEKHIFYKSEKILEQNISSKSDEKKIKNTDKHCILQNVTESEDSDVICPTQYTTERFPDNSIRFKPPLEGSEDSETEHTVKTRNNDNSRNTDDKRNGIISKKLSPENTTLKSILKRKGTSDISDESDDIEISSKSRVRKRASSLRFKRIKETKKELHNSPKTMNKTNQVYAANEDHNSQFIDDYSSSDESLSVSHFSFSKQSHRPRTIRDRTSFSSKLPSHNKKNSTFIPRKPMKCSNEKVVNQEQSYESMDKFLDGVQEVAYIHSNQNVIGSSKAENHMSRWAAHDVFELKQFSQLPANIAVCSSKTYKEKVDADTLPHTKKGQQPSEGSISLPLYISNPVNQKKKKVYHTNQTTFIIGETPKGIRRKQFEEMASYFNSSSVNEFAKHITNATSEERQKMLRDFYASQYPEVKEFFVDSVSQFNNSSFEKGEQRTRKKSDKRESLIKPRLSDSETLSFKDSTNKISQVCSLKTYKRKSVKFQNHISYREEVFFNDAETKKSPVSSTQEIDSGKNSQASEDTVTSRSLNSESETRERRLENTMKDQQDLTRTGISRKEPLLKLENKKIENPVLENTSVISLLGDTSILDDLFKSHGNSPTQLPKKVLSGPMEKAKQRPKDFWDILNEQNDESLSKLTDLAVIETLCEKAPLAAPFKRREEPATSLWKSNEKFLWKKFSPSDTDENATNTQSTT

SEQ ID NO: 45620 - protein, 369 aa, Homo sapiens
MVWQIPENGLTLSLTEPVVILEGHSKRVGIVAWHPTARNVLLSAGCDNAIIIWNVGTGEALINLDDMHSDMIYNVSWNRNGSLICTASKDKKVRVIDPRKQEIVAEKEKAHEGARPMRAIFLADGNVFTTGFSRMSERQLALWNPKNMQEPIALHEMDTSNGVLLPFYDPDTSIIYLCGKGDSSIRYFEITDESPYVHYLNTFSSKEPQRGMGYMPKRGLDVNKCEIARFFKLHERKCEPIIMTVPRKSDLFQDDLYPDTAGPEAALEAEEWFEGKNADPILISLKHGYIPGKNRDLKVVKKNILDSKPTANKKCDLISIPKKTTDTASVQNEAKLDEILKEIKSIKDTICNQDERISKLEQQMAKIAA

SEQ ID NO: 45621 - protein, 147 aa, Homo sapiens
  MOD_RES (1)..(1): Any amino acid
XEFLFVLCSESVPRFIKYTGYGNAAGLLAARGLMAGGRPEGQYSEDEDTDTDEYKEAKASINPVTGRVEEKPPNPMEGMTEEQKEHEAMKLVTMFDKLSSPTAPFPNRNRVIQPMGMSPRGHLTSLQDAMCETMEQQLSSDPDSDPD

SEQ ID NO: 45622 - protein, 275 aa, Homo sapiens
VRRQEVSSPRKETSARSLGSPLLHERGNIEKTFWDLKEEFHKICMLAKAQKDHLSKLNIPDTATETQCSVPIQCTDKTDKQEALFKPQAKDDINRGAPSITSVTPRGLCRDEEDTSFESLSKFNVKFPPMDNDSTFLHSTPERPGILSPATSEAVCQEKFNMEFRDNPGNFVKTEETLFEIQGIDPIASAIQNLKTTDKTKPSNLVNTCIRTTLDRAACLPPGDHNALYVNSFPLLDPSDAPFPSLDSPGKAIRGPQQQGKQLVCDYNLMEKYSA

SEQ ID NO: 45623 - protein, 435 aa, Homo sapiens
MCGGVRGVGTGGIVSTAFCLLYKLFTLKLTRKQVMGLITHTDSPYIRALGFMYIRYTQPPTDLWDWFESFLDDEEDLDVKAGGGCVMTIGEMLRSFLTKLEWFSTLFPRIPVPVQKNIDQQIKTRPRKIKKDGKEGAEEIDRHVERRRSRSPRRSLSPRRSPRRSRSRSHHREGHGSSSFDRELEREKERQRLEREAKEREKERRRSRSIDRGLERRRSRSRERHRSRSRSRDRKGDRRDRDREREKENERGRRRDRDYDKERGNEREKERERSRERSKEQRSRGEVEEKKHKEDKDDRRHRDDKRDSKKEKKHSRSRSRERKHRSRSRSRNAGKRSRSRSKEKSSKHKNESKEKSNKRSRSGSQGRTDSVEKSKKREHSPSKEKSRKRSRSKERSHKRDHSDSKDQSDKHDRRRSQSIEQESQEKQHKNKDETV

SEQ ID NO: 45624 - protein, 554 aa, Homo sapiens
MESSDVNKRLEKLSALDYKIFYYEIPGPINKTTERHLAINCVHDRVVCWWPLVNDDAWPWAPISSEKDRANLLLLGYAQGRLEVLSSVRTEWDPLDVRFGTKQPYQVFTVEHSVSVDKEPMADSCIYECIRNKIQCVSVTRIPLKSKAISCCRNVTEDKLILGCEDSSLILYETHRRVTLLAQTELLPSLISCHPSGAILLVGSNQGELQIFDMALSPINIQLLAEDRLPRETLQFSKLFDASSSLVQMQWIAPQVVSQKGEGSDIYDLLFLRFERGPLGVLLFKLGVFTRGQLGLIDIIFQYIHCDEIYEAINILSSMNWDTLGHQCFISMSAIVNHLLRQKLTPEREAQLETSLGTFYAPTRPLLDSTILEYRDQISKYARRFFHHLLRYQRFEKAFLLAVDVGARDLFMDIHYLALDKGELALAEVARKRASDIDAESITSGVELLGPLDRGDMLNEAFIGLSLAPQGEDSFPDNLPPSCPTHRHILQQRILNGSSNRQIIDRRNELEKDICSGFLMTNTCNAEDGELREDGREQEIRDGGSLKMIHFGLV

SEQ ID NO: 45625 - protein, 335 aa, Homo sapiens
MVAVGICHTDDHVVSGNLVTPLPVILGHEAAGIVESVGEGVTTVKPGDKVIPLFTPQCGKCRVCKNPESNYCLKNDLGNPRGTLQDGTRRFTCRGKPIHHFLGTSTFSQYTVVDENAVAKIDAASPLEKVCLIGCGFSTGYGSAVNVAKVTPGSTCAVFGLGGVGLSAVMGCKAAGAARIIAVDINKDKFAKAKELGATECINPQDYKKPIQEVLKEMTDGGVDFSFEVIGRLDTMMASLLCCHEACGTSVIVGVPPASQNLSINPMLLLTGRTWKGAVYGGFKSKEGIPKLVADFMAKKFSLDALITHVLPFEKINEGFDLLHSGKSIRTVLTF

SEQ ID NO: 45626 - protein, 187 aa, Homo sapiens
MALLSRPALTLLLLLMAAVVRCQEQAQTTDWRATLKTIRNGVHKIDTYLNAALDLLGGEDGLCQYKCSDGSKPFPRYGYKPSPPNGCGSPLFGLNIGIPSLTKCCNQHDRCYETCGKSKNDCDEEFQYCLSKICRDVQKTLGLTQHVQACETTVELLFDSVIHLGCKPYLDSQRAACRCHYEEKTDL

SEQ ID NO: 45627 - protein, 297 aa, Homo sapiens
  MOD_RES (1)..(1): Any amino acid
XAGGLQHRVTAKTAPDVLRTKPAFIGKTNLDGMITVQLPEVPANENIKGYYIIIVPLKKSRGKFIKPWESPDEMELDELLKEISRKRRSIRYGREVELKPYIAAHFDVLPTEFTLGDDKHYGGFTNKQLQSGQEYVFFVLAVMEHAESKMYATSPYSDPVVSMDLDPQPITDEEEGLIWVVGPVLAVVFIICIVIAILLYKSKPDRKRAESDSRKSSIPNNKEIPSHHPTDPVELRRLNFQTPALSSNSVPYASLIGSVSSLSSQTTTQSIYDNNSLPRSARKGMASHPPIPILELA

SEQ ID NO: 45628 - protein, 128 aa, Homo sapiens
MATVAELKAVLKDTLEKKGVLGHLKARIRAEVFNALDDDREPRPSLSHENLLINELIREYLEFNKYKYTASVLIAAHCILRLLGSSSSPASASRVPGTTESGQPVVPLDRQFLIHELNAFEESKDNTI

SEQ ID NO: 45629 - protein, 130 aa, Homo sapiens
MGPLPVCLPIMLLLLLPSLLLLLLLPGPGSGEASRILRVHRRGILELAGTVGCVGPRTPIAYMKYGCFCGLGGHGQPRDAIDWCCHGHDCCYTRAEEAGCSPKTERYSWQCVNQSVLCVLLCHPGWSAVV

SEQ ID NO: 45630 - protein, 52 aa, Homo sapiens
MGQQISDQTQLVINKLPEKVAKHVTLVRESGSLTYEEFLGRVAELNDVTGYF

SEQ ID NO: 45631 - protein, 299 aa, Homo sapiens
MAVMAPRTLLLLLSGALALTQTWAGSHSMRYFFTSVSRPGRGEPRFIAVGYVDDTQFVRFDSDAASQKMEPRAPWIEQEGPEYWDQETRNMKAHSQTDRANLGTLRGYYNQSEDGSHTIQIMYGCDVGPDGRFLRGYRQDAYDGKDYIALNEDLRSWTAADMAAQITKRKWEAVHAAEQRRVYLEGRCVDGLRRYLENGKETLQRTDPPKTHMTHHPISDHEATLRCWALGFYPAEITLTWQRDGEDQTQDTELVETRPAGDGTFQKWAAVVVPSGEEQRYTCHVQHEGLPKPLTLRWV

SEQ ID NO: 45632 - protein, 64 aa, Homo sapiens
MSLWGLVSKMPPEKVQRLYVDFPQHLRHLLGDWLESQPWEFLVGSDAFCCNLASALLSDTVQHL

SEQ ID NO: 45633 - protein, 329 aa, Homo sapiens
MALGPRCGAIRACRRVLERAFSLRKAHSIKDMENTLQLVRNIIPPLSSTKHKGQDGRIGVVGGCQEYTGAPYFAAISALKVGADLSHVFCASAAAPVIKAYSPELIVHPVLDSPNAVHEVEKWLPRLHALVVGPGLGRDDALLRNVQGILEVSKARDIPVVIDADGLWLVAQQPALIHGYRKAVLTPNHVEFSRLYDAVLRGPMDSDDSHGSVLRLSQALGNVTVVQKGERDILSNGQQVLVCSQEGSSRRCGGQGDLLSGSLGVLVHWALLAGPQKTNGSSPLLVAAFGACSLTRQCNHQAFQKHGRSTTTSDMIAEVGAAFSKLFET

SEQ ID NO: 45634 - protein, 87 aa, Homo sapiens
MSLHFLYYCSEPTLDVKIAFCQGFDKQVDVSYIAKHYNMSKSKVDNQFYSVEVGDSTFTVLKRYQNLKPIGSGAQGIVWTSEYGWEV

SEQ ID NO: 45635 - protein, 246 aa, Homo sapiens
MDKNELVQKAKLAEQAERYDDMAACMKSVTEQGAELSNEERNLLSVAYKNVVGARRSSWRVVSSIEQKTEGAEKKQQMAREYREKIETELRDICNDVLSLLEKFLIPNASQAESKVFYLKMKGDYYRYLAEVAAGDDKKVRFGVSYPGIVDQSQQAYQEAFEISKKEMQPTHPIRLGLALNFSVFYYEILNSPEKACSLAKTAFDEAIAELDTLSEESYKDSTLIMQLLRDNLTLWTSDTQGDEAE

SEQ ID NO: 45636 - protein, 164 aa, Homo sapiens
MSRPLLITFTPATDPSDLWKDGQQQPQPEKPESTLDGAAALAFYEALIGDESSAPDSQRSQTEPARERKRKKRRIMKAPAAEAVAEGASGRHGQGRSLEAEDKMTHRILRAAQEGDLPELRRLLEPHEAGGAGGNINARDAFWWTPLMCAARAGQGAAVSYLLG

SEQ ID NO: 45637 - protein, 130 aa, Homo sapiens
MAPAKKGGEKKKGRSAINEVVTREYTINIHKRIHGVGFKKRAPRALKEIRKFAMKEMGTPDVRIDTRLNKAVWAKGIRNVPYRIRVRLSRKRNEDEDSPNKLYTLVTYVPVTTFKSLQNDDLFKTDCHHQ

SEQ ID NO: 45638 - protein, 228 aa, Homo sapiens
MEERTITIEIPEVLKKQLEDDCYYINRRKRLVKLPCQTNIITILESYVKHFAINAAFSANERPRHHHVMPHANMNVHYIPAEKNVDLCKEMVDGLRITFDYTLPLVLLYPYEQAQYKKVTSSKFFLPIKESATSTNRSQEELSPSPPLLNPSTPQSTESQPTTGEPATPKRRKAEPEALQSLRRSTRHSANCDRLSESSASPQPKRRQQDTSASMPKLFLHLEKNTCA

SEQ ID NO: 45639 - protein, 117 aa, Homo sapiens
  MOD_RES (1)..(1): Any amino acid
XWSAEDASCVVTFKGHKGGILDTAIVDRGRNVVSASRDGTARLWDCGRSACLGVLADCGSSINGVAVGAADNSINLGSPEQMPSVPLYWLRRFQLLYFSLWLLAIGWDSRWKHLSAG

SEQ ID NO: 45640 - protein, 115 aa, Homo sapiens
  MOD_RES (1)..(1): Any amino acid
XGKANSTGILSVRDATKITLAPSSADINLGDNLTLQCHASHDPTMDLTFTWTLDDFPIDFDKPGGHYRRTNVKETIGDLTILNAQLRHGGKYTCMAQTVVDSASKEATVLVRGPK

SEQ ID NO: 45641 - protein, 410 aa, Homo sapiens
MSLMVVSMACVGFFLLEGPWPHVGGQDKPFLSAWPGTVVSEGQHVTLQCRSHLGFNEFSLSKEDGMPVPELYNRIFRNSFLMGPVTPAHAGTYRCCSSHPHSPTGWSAPSNPVVIMVTGVHRKPSLLAHPGPLVKSGETVILQCWSDVRFERFLLHREGITEDPLRLVGQLHDAGSQVNYSMGPMTPALAGTYRCFGSVTHLPYELSAPSDPLDIVVVGLYGKPSLSAQPGPTVQAGENVTLSCSSRSLFDIYHLSREAEAGELRLTAVLRVNGTFQANFPLGPVTHGGNYRCFGSFRALPHAWSDPSDPLPVSVTGNSRYLHALIGTSVVIIPFAILLFFLLHRWCANKKNAVVMDQEPAGNRTVNREDSDEQDPQEVTYAQLNHCVFTQRKITRPSQRPKTPPTDTSV

SEQ ID NO: 45642 - protein, 179 aa, Homo sapiens
MASLLKVDQEVKLKVDSFRERITSEAEDLVANFFPKKLLELDSFLKEPILNIHDLTQIHSDMNLPVPDPILLTNSHDGLDGPTYKKRRLDECEEAFQGTKVFVMPNGMLKSNQQLVDIIEKVKPEIRLLIEKCNTEETVAELRTVESEAASYLDQISRYYITRAKLVSKIAKYPHVEDY

SEQ ID NO: 45643 - protein, 305 aa, Homo sapiens
MVSHGSSPSLLEALSSDFLACKICLEQLRAPKTLPCLHTYCQDCLAQLADGGRVRCPECRETVPVPPEGVASFKTNFFVNGLLDLVKARACGDLRAGKPACALCPLVGGTSTGGPATARCLDCADDLCQACADGHRCTRQTHTHRVVDLVGYRAGWYDEEARERQAAQCPQHPGEALRFLCQPCSQLLCRECRLDPHLDHPCLPLAEAVRARRPGLEGLLAGVDNNLVELEAARRVEKEALARLREQAARVGTQVEEAAEGVLRALLAQKQENHLNPGGGSCSELRSHHCTPAWVTRMKLHLKKK

SEQ ID NO: 45644 - protein, 123 aa, Homo sapiens
MDEEPERTKRWEGGYERTWEILKEDESGSLKATIEDILFKAKRKRVFEHHGQVRLGMMRHLYVVVDGSRTMEDQDLKPNRLTCTLKLLEYFVEEYFDQNPISQIGIIVTKSKRAEKLTELSGV

SEQ ID NO: 45645 - protein, 503 aa, Homo sapiens
MVEALRVWASTHMSPSWTLLKLCDVQPMQYFDLTCQLLGKAEVDGASFLLKVWDGTRTPFPSWRVLIQDLVLEGDLSHIHRLQNLTIDILVYDNHVHVARSLKVGSFLRIYSLHTKLQSMNSENQTMLSLEFHLHGGTSYGRGIRVLPESNSDVDQLKKDLESANLTANQHSDVICQSEPDDSFPSSGSVSLYEVERCQQLSATILTDHQYLERTPLCAILKQKAPQQYRIRAKLRSYKPRRLFQSVKLHCPKCHLLQEVPHEGDLDIIFQDGATKTPDVKLQNTSLYDSKIWTTKNQKGRKVAVHFVKNNGILPLSNECLLLIEGGTLSEICKLSNKFNSVIPVRSGHEDLELLDLSAPFLIQGTIHHYGCKQCSSLRSIQNLNSLVDKTSWIPSSVAEALGIVPLQYVFVMTFTLDDGTGVLEAYLMDSDKFFQIPASEVLMDDDLQKSVDMIMDMFCPPGIKIDAYPWLECFIKSYNVTNGTDNQICYQIFDTTVAEDVI

SEQ ID NO: 45646 - protein, 163 aa, Homo sapiens
MPLTRQQGRLLVTLSPVRTDRQADRRTDKQMLLGQLSTLLCLLSGALPTGSGRPEPQSPRPQSWAAANQTWALGPGALPPLVPASALGSWKAFLGLQKARQLGMGRLQRGQDEVAAVTLPLNPQEVIQGMCKAVPFVQTRESRYVAQASLELLASSNPPTSAS

SEQ ID NO: 45647 - protein, 97 aa, Homo sapiens
MAPRKRSHHGLGFLCCFGGSDIPEINLRDNHPLQFMEFSSPIPNAEELNIRFAELVDELDLTDKNREAMFALPPEKKWQIYCSKKKPCSRCWRNNSE

SEQ ID NO: 45648 - protein, 124 aa, Homo sapiens
MPKGGCPKAPQQEELPLSSDMVEKQTGKKDKDKVSLTKTPKLERGDGGKEVRERASKRKLPFTAGANGEQKDSDTGPPGSCLSWGSHEGALVRSAMGRSCLPSARGCFFGTRGKIMIFLFCFDL

SEQ ID NO: 45649 - protein, 308 aa, Homo sapiens
MRTHTRGAPSVFFIYLLCFVSAYITDENPEVMIPFTNANYDSHPMLYFSRAEVAELQLRAASSHEHIAARLTEAVHTMLSSPLEYLPPWDPKDYSARWNEIFGNNLGALAMFCVLYPENIEARDMAKDYMERMAAQPSWLVKDAPWDEVPLAHSLVGFATAYDFLYNYLSKTQQEKFLEVIANASGYMYETSYRRGWGFQYLHNHQPTNCMALLTGSLVLMNQGYLQEAYLWTKQVLTIMEKSLVLLREVTDGSLYEGVAYGSYTTRSLFQYMFLVQRHFNINHFGHPWLKQHFAFMYRTILPGMMAA

SEQ ID NO: 45650 - protein, 484 aa, Homo sapiens
MYFPSWLSQLYRGLSRPIRRTTQPIWGSLYRSLLQSSQRRIPEFSSFVVRTNTCGELRSSHLGQEVTLCGWIQYRRQNTFLVLRDFDGLVQVIIPQDESAASVKKILCEAPVESVVQVSGTVISRPAGQENPKMPTGEIEIKVKTAELLNACKKLPFEIKNFVKKTEALRLQYRYLDLRSFQMQYNLRLRSQMVMKMREYLCNLHGFVDIETPTLFKRTPGGAKEFLVPSREPGKFYSLPQSPQQFKQLLMVGGLDRYFQVARCYRDEGSRPDRQPEFTQIDIEMSFVDQTGIQSLIEGLLQYSWPNDKDPVVVPFPTMTFAEVLATYGTDKPDTRFGMKIIDISDVFRNTEIGFLQDALSKPHGTVKAICIPEGAKYLKRKDIESIRNFAADHFNQEDVKMLSHLLQALDYGAPPHGGIALGLDRLICLVTGSPSIRDVIAFPKSFRGHDLMSNTPDSVPPEELKPYHIRVSKPTDSKAERAH

SEQ ID NO: 45651 - protein, 904 aa, Homo sapiens
MADDDVLFEDVYELCEVIGKGPFSVVRRCINRETGQQFAVKIVDVAKFTSSPGLSTEGKRWISNLKREASICHMLKHPHIVELLETYSSDGMLYMVFEFMDGADLCFEIVKRADAGFVYSEAVASHYMRQILEALRYCHDNNIIHRDVKPHCVLLASKENSAPVKLGGFGVAIQLGESGLVAGGRVGTPHFMAPEVVKREPYGKPVDVWGCGVILFILLSGCLPFYGTKERLFEGIIKGKYKMNPRQWSHISESAKDLVRRMLMLDPAERITVYEALNHPWLKERDRYAYKIHLPETVEQLRKFNARRKLKGAVLAAVSSHKFNSFYGDPPEELPDFSEDPTSSGLLAAERAVSQVLDSLEEIHALTDCSEKDLDFLHSVFQDQHLHTLLDLYDKINTKSSPQIRNPPSDAVQRAKEVLEEISCYPENNDAKELKRILTQPHFMALLQTHDVVAHEVYSDEALRVTPPPTSPYLNGDSPESANGDMDMENVTRVRLVQFQKNTDEPMGITLKMNELNHCIVARIMHGGMIHRQGTLHVGDEIREINGISVANQTVEQLQKMLREMRGSITFKIVPSYRTQSSSCEDLPSTTQPKGRQIYVRAQFEYDPAKDDLIPCKEAGIRFRVGDIIQIISKDDHNWWQGKLENSKNGTAGLIPSPELQEWRVACIAMEKTKQEQQASCTWFGKKKKQYKDKYLAKHNADLVTYEEVVKLPAFKRKTLVLLGAHGVGRRHIKNTLITKHPDRFAYPIPHTTRPPKKDEENGKNYYFVSHDQMMQDISNNEYLEYGSHEDAMYGTKLETIRKIHEQGLIAILDVEPQALKVLRTAEFAPFVVFIAAPTITPGLNEDESLQRLQKESDILQRTYAHYFDLTIINNEIDETIRHLEEAVELVCTAPQWVPVSWVY

SEQ ID NO: 45652 - protein, 153 aa, Homo sapiens
MMMVDLKVAAYLDPQIRALWETKGPARESSGQSKKSPQMDCLDPKSSCWHFRNFTYDEAGGPREAVSKLQELCHLWLKPEIHSKEQILELLVLEQFLTILPRETQTQMQKHHPQSIEEAVALVEHLQRESGQTWNGVRRKIPDMYSEIGCRWI

SEQ ID NO: 45653 - protein, 237 aa, Homo sapiens
MAVFLQLLPLLLSRAQGNPGASLDGRPGDRVNLSCGGVSHPIRWVWAPSFPACKGLSKGRRPILWASSSGTPTVPPLQPFVGRLRSLDSGIRRLELLLSAGDSGTFFCKGRHEDESRTVLHVLGDRTYCKAPGPTHGSVYPQLLIPLLGAGLVLGLGALGLVWWLHRRLPPQPIGPLPRFALSPPHSSTCENRAPEASKGGRAQDSRGPGPGTEPALCGSGPSSPQQAPPAVHSGPC

SEQ ID NO: 45654 - protein, 931 aa, Homo sapiens
MSIAIPLGVTTSDTSYSDMAAGSDPESVEASPAVNEKSVYSTHNYGTTQRHGCRGLPYATIIPRSDLNGLPSPVEERCGDSPNSEGETVPTWCPCGLSQDGFLLNCDKCRGMSRGKVIRLHRRKQDNISGGDSSATESWDEELSPSTVLYTATQHTPTSITLTVRRTKPKKRKKSPEKGRAAPKTKKIKNSPSEAQNLDENTTEGWENRIRLWTDQYEEAFTNQYSADVQNALEQHLHSSKEFVGKPTILDTINKTELACNNTVIGSQMQLQLGRVTRVQKHRKILRAARDLALDTLIIEYRGKVMLRQQFEVNGHFFKKPYPFVLFYSKFNGVEMCVDARTFGNDARFIRRSCTPNAEVRHMIADGMIHLCIYAVSAITKDAEVTIAFDYEYSNCNYKVDCACHKGNRNCPIQKRNPNATELPLLPPPPSLPTIGAETRRRKARRKELEMEQQNEASEENNDQQSQEVPEKVTVSSDHEEVDNPEEKPEEEKEEVIDDQENLAHSRRTREDRKVEAIMHAFENLEKRKKRRDQPLEQSNSDVEITTTTSETPVGEETKTEAPESEVSNSVSNVTIPSTPQSVGVNTRRSSQAGDIAAEKLVPKPPPAKPSRPRPKSRISRYRTSSAQRLKRQKQANAQQAELSQAALEEGGSNSLVTPTEAGSLDSSGENRPLTGSDPTVVSITGSHVNRAASKYPKTKKYLVTEWLNDKAEKQECPVECPLRITTDPTVLATTLNMLPGLIHSPLICTTPKHYIRFGSPFIPERRRRPLLPDGTFSSCKKRWIKQALEEGMTQTSSVPQETRTQHLYQSNENSSSSSICKDNADLLSPLKKWKSRYLMEQNVTKLLRPLSPVTPPPPNSGSKSPQLATPGSSHPGEEECRNGYSLMFSPVTSLTTASRCNTPLQFEVIWVWLLGVLDMKIIICTFSFQI

SEQ ID NO: 45655 - protein, 126 aa, Homo sapiens
  MOD_RES (1)..(1): Any amino acid
XDHSRSSSSSASPSSPSSREEKESKKEREEEFKTHHEMKEYSGFAGVSRPRGTFHDDRDDGVDYWAKRGRGRGTFQRGRGRFNFKKSGSSPKWTHDKYQGDGIVEDEEETMENNEEKKDRRKEEKE

SEQ ID NO: 45656 - protein, 188 aa, Homo sapiens
MASLEVSRSPRRSRRELEVRSPRQNKYSVLLPTYNERENLPLIVWLLVKSFSESGINYEIIIIDDGSPDGTRDVAEQLEKIYGSDRILLRPREKKLGLGTAYIHGMKHATGNYIIIMDADLSHHPKFIPEFIRKQKEGNFDIVSGTRYKGNGGVYGWDLKRKIIRSDCFIWQPWGQFFNSDLAETRSI

SEQ ID NO: 45657 - protein, 284 aa, Homo sapiens
MPITRMRMRPWLEMQINSNQIPGLIWINKEEMIFQIPWKHAAKHGWDINKDACLFRSWAIHTGRYKAGEKEPDPKTWKANFRCAMNSLPDIEEVKDQSRNKGSSAVRVYRMLPPLTKNQRKERKSKSSRDAKSKAKRKSCGDSSPDTFSDGLSSSTLPDDHSSYTVPGYMQDLEVEQALTPATTDEDEEGKLPEDIMKLLEQSEWQPTNVDGKGYLLNEPGVQPTSVYGDFSCKEEPEIDSPGGDIGLSLQRVFTDLKNMDATWLDSLLTPVRLPSIQAIPCAP

SEQ ID NO: 45658 - protein, 132 aa, Homo sapiens
  MOD_RES (1)..(1): Any amino acid
XTDNTLERSFFIRMKSTLTKRGVHIKSSGYKVIHITGRLRLRVSLSHGRTVPSQIMGLVVVAHALPPPTINEVRIDCHMFVTRVNMDLNIIYCENRISDYMDLTPVDIVGKRCYHFIHAEDVEGIRHSHLDS

SEQ ID NO: 45659 - protein, 115 aa, Homo sapiens
  MOD_RES (1)..(1): Any amino acid
XQAFSFCTAGRWAAGEPVARDGAGLQAAWRRQIRQFSRVSPAVADAVVTAFPSPRLLQQALEACSTERERMGLLADLPVPPSEGGRPRRVGPDLSRRICLFLTTANPDLLLDLGS

SEQ ID NO: 45660 - protein, 153 aa, Homo sapiens
MLSSFRKRRVQKMDPSGVKVLETAEDIQERRQQVLDRYHRFKELSTLRRQKLEDSYRFQFFQRDAEELEKWIQEKLQIASDENYKDPTNLQGKLQKHQAFEAEVQANSGAIVKLDETGNLMISEGHFASETIRTRLMELHRQWELLLEKMREK

SEQ ID NO: 45661 - protein, 138 aa, Homo sapiens
MSNKEGSGGFRKRKHDNFPHNQRREGKDVNSSSPVMLAFKSFQQELDARHDKYERLVKLSRDITVESKRTIFLLHRITSAPDMEDILTESEIKLDGVRQKIFQVAQELSGEDMHQFHRAITTEVYRQDPTHRGSWDQG

SEQ ID NO: 45662 - protein, 210 aa, Homo sapiens
MPQTPPFSAMFDSSGYNRNLYQSAEDSCGGLYYHDNNLLSGSLEALIQHLVPNVDYYPDRTYIFTFLLSSRLFMHPYELMAKVCHLCVEHQRLSDPDSDKNQMRKIAPKILQLLTEWTETFPYDFRDERMMRNLKDLAHRIASGEEVGNLNLARLLEFPGRAWVGNGAELCILISTASSLFCLWASPPHHILVYLVCQVRMIIPSHFKGI

SEQ ID NO: 45663 - protein, 35 aa, Homo sapiens
MNKLKSSQKDKVRQFMIFTQSSEKTATLKMRIKLE

SEQ ID NO: 45664 - protein, 113 aa, Homo sapiens
MKLLTGLVFCSLVLSVSSRSFFSFLGEAFDGARDMWRAYSDMREANYIGSDKYFHARGNYDAAKRGPGGAWAAEVIRLKCHGMIMAHCNLDLPGLKRSSHFSLLNNWDCRCAP

SEQ ID NO: 45665 - protein, 57 aa, Homo sapiens
MNSRQAWRLFLSQGRGDRWVSRPRGHFSPALRRGNNSTTANGSFGCYQERHGHPREK

SEQ ID NO: 45666 - protein, 240 aa, Homo sapiens
MERLTLPLGGAAAVDEYLEYRRYKQHKTDLEAIPQQCPIDLPCQVTGCQCRAYLYVPLNGSQPIRCRCKHFADQHSAAPGFTCNTCSKCSGFHSCFTCACGQPAYAHDTVVETKQERLAQEKPVGQDIPYAAMGGLTGFSSLAEGYMRLDDSGIGVPSVEFLESPITAVDSPFLKAFQASSSSSPETLTDVGTSSQVSSLRRPEEDDMAFFERRYQERMKMEKAAKWKGKAPLPSATKPS

SEQ ID NO: 45667 - protein, 277 aa, Homo sapiens
MGHTGAVWCVDADWDTKHVLTGSADNSCRLWDCETGKQLALLKTNSAVRTCGFDFGGNIIMFSTDKQMGYQCFVSFFDLRDPSQIDNNEPYMKIPCNDSKITSAVWGPLGECIIAGHESGELNQYSAKSGEVLVNVKEHSRQINDIQLSRDMTMFVTASKDNTAKLFDSTTLEHQKTFRTERPVNSAALSPNYDHVVLGGGQEAMDVTTTSTRIGKFEARFFHLAFEEEFGRVKGHFGPINSVAFHPDGKSYSSGGEDGYVRIHYFDPQYFEFEFEA

SEQ ID NO: 45668 - protein, 231 aa, Homo sapiens
MAVQISKKRKFVADGIFKAELNEFLTRELAEDGYSGVEVRVTPTRTEIIILATRTQNVLGEKGRRIRELTAVVQKRFGFPEGSLCAIAQAESLRYKLLGGLAVRRACYGVLRFIMESGAKGCEVVVSGKLRGQRAKSMKFVDGLMIHSGDPVNYYVDTAVRHVLLRQGVLGIKVKIMLPWDPTGKIGPKKPLPDHVSIVEPKDEILPTTPISEQKGGKPEPPAMPQPVPTA

SEQ ID NO: 45669 - protein, 160 aa, Homo sapiens
QYHVASVLCQRAKVAMSHFEPNEYIHYDLLEKNINIVRKRLNRPLTLSEKIVYGHLDDPASQEIERGKSYLRLRPDRVAMQDATAQMAMLQFISSGLSKVAVPSTIHCDHLIEAQVGGEKDLRRAKGLALSLRLECSGAISAHCSLELLGSSDLPASACK

SEQ ID NO: 45670 - protein, 48 aa, Homo sapiens
MLMASTTSACPSSSSSPSATWKVAAGSLTAGPALRSPGAVAPMSPGLP

SEQ ID NO: 45671 - protein, 206 aa, Homo sapiens
MEGAPTVRQVMNEGDSSLATDLQEDVEENPSPTVEENNVVVKKQGPNLHNWSGDWSFWISSSTYKDRNEEYRRQFTHLPDTERLIADYACALQRDILLQGRLYLSENWLCFYSNIFRWETTFFFTSFGARDRSYLSIFRLWQNVLLDKSLTRQEFWQLLQQNYGTELGLNAEEMENLSLSIEDVQPRSPKMRNRPKRVSYQLWKRS

SEQ ID NO: 45672 - protein, 611 aa, Homo sapiens
MLENYRNLVSVEHQLSKPDVVSQLEEAEDFWPVERGIPQDTIPEYPELQLDPKLDPLPAESPLMNIEVVEVLTLNQEVAGPRNAQIQALYAEDGSLSADAPSEQVQQQGKHPGDPEAARQRFRQFRYKDMTGPREALDQLRELCHQWLQPKARSKEQILELLVLEQFLGALPVKLRTWVESQHPENCQEVVALVEGVTWMSEEEVLPAGQPAEGTTCCLEVTAQQEEKQEDAAICPVTVLPEEPVTFQDVAVDFSREEWGLLGPTQRTEYRDVMLETFGHLVSVGWETTLENKELAPNSDIPEEEPAPSLKVQESSRDCALSSTLEDTLQGGVQEVQDTVLKQMESAQEKDLPQKKHFDNRESQANSGALDTNQVSLQKIDNPESQANSGALDTNQVLLHKIPPRKRLRKRDSQVKSMKHNSRVKIHQKSCERQKAKEGNGCRKTFSRSTKQITFIRIHKGSQVCRCSECGKIFRNPRYFSVHKKIHTGERPYVCQDCGKGFVQSSSLTQHQRVHSGERPFECQECGRTFNDRSAISQHLRTHTGAKPYKCQDCGKAFRQSSHLIRHQRTHTGERPYACNKCGKAFTQSSHLIGHQRTHNRTKRKKKQPTS

SEQ ID NO: 45673 - protein, 161 aa, Homo sapiens
MPSKKKKYNARFPPSRNAKTMTTSHLKQCIELEQQFDFLKDLVASVPDMQGDGEDNHMDGDKGARRGRKPGSGGRKNGGMGTKSKDKKLSGTDSEQEDESEDTDTDGEEETSQPPPQASHPSAHFQSPPTPFLPFASTLPLPPAPPGPSAPDEEDEEDYDS

SEQ ID NO: 45674 - protein, 287 aa, Homo sapiens
MSLMVIIMACVGFFLLQGAWPQEGVHRKPSFLALPGHLVKSEETVILQCWSDVMFEHFLLHREGKFNNTLHLIGEHHDGVSKANFSIGPMMPVLAGTYRCYGSVPHSPYQLSAPSDPLDMVIIGLYEKPSLSAQPGPTVQAGENVTLSCSSRSSYDMYHLSREGEAHERRLPAVRSINGTFQADFPLGPATHGGTYRCFGSFRDAPYEWSNSSDPLLVSVTGNPRHLHVLIGTSVVKIPFTILLFFLLHRWCSDKKNAAVMDQEPAGNRTVNSEDSDEQDHQEVSYA

SEQ ID NO: 45675 - protein, 578 aa, Homo sapiens
MEEKRRKYSISSDNSDTTDSHATSTSASRCSKLPSSTKSGWPRQNEKKPSEVFRTDLITAMKIPDSYQLSPDDYYILADPWRQEWEKGVQVPAGAEAIPEPVVRILPPLEGPPAQASPSSTMLGEGSQPDWPGGSRYDLDEIDAYWLELINSELKEMERPELDELTLERVLEELETLCHQNMARAIETQEGLGIEYDEDVVCDVCRSPEGEDGNEMVFCDKCNVCVHQACYGILKVPTGSWLCRTCALGVQPKCLLCPKRGGALKPTRSGTKWVHVSCALWIPEVSIGCPEKMEPITKISHIPASRWALSCSLCKECTGTCIQCSMPSCVTAFHVTCAFDHGLEMRTILADNDEVKFKSFCQEHSDGGPRNEPTSEPTEPSQAGEDLEKVTLRKQRLQQLEEDFYELVEPAEVAERLDLAEALVDFIYQYWKLKRKANANQPLLTPKTDEVDNLAQQEQDVLYRRLKLFTHLRQDLERVRNLCYMVTRRERTKHAICKLQEQIFHLQMKLIEQDLCRGRRLPHLPPPPPCALSCGAGSQGGCVFGSWWGYVRGAKGHWPPLLPFTIQLVGPDGGLQGS

SEQ ID NO: 45676 - protein, 206 aa, Homo sapiens
MLQPRPHASKHRRRRGLTAAPHVTSHPRQSVPSSWISDIRAGTAPSCRNHIKSSCSLIAFNSDRPGVLGIVPLQGQGEDKRRVAHLGCHSDLVTDLDFSPFDDFLLATGSADRTVKLWRLPGPGQALPSAPGVVLGPEDLPVEVLQFHPTSDGILVSAAGTTVKVWDAAKQQPLTELAAHGDLVQSAVWSRDGALVGTACKDKQLR

SEQ ID NO: 45677 - protein, 131 aa, Homo sapiens
MEYPAPATVQAADGGAAGPYSSSELLEGQEPDGVRFDRERARRLWEAVSGAQPVGREEVEHMIQKNQCLFTNTQCKVCCALLISESQKLAHYQSKKHANKVKRYLAIHGMETLKGETKKLDSDQPCTRIER

SEQ ID NO: 45678 - protein, 133 aa, Homo sapiens
IGRRVNTRARNHVGRVALHWAAGAGHEQAVRLLLEHEAAVDEEDAVGALTEEGNTALHLAAGRGHMAVLQRLVDIGLDLEEQNAEGLTALHSAAGGSHPDCVQLLLRAGSTVNALTQVARPSQDCGRLLAAEP

SEQ ID NO: 45679 - protein, 1016 aa, Homo sapiens
MRGSGPRGAGRRRPPSGGGDTPITPASLAGCYSAPRRAPLWTCLLLCAALRTLLASPSNEVNLLDSRTVMGDLGWIAFPKNGWEEIGEVDENYAPIHTYQVCKVMEQNQNNWLLTSWISNEGASRIFIELKFTLRDCNSLPGGLGTCKETFNMYYFESDDQNGRNIKENQYIKIDTIAADESFTELDLGDRVMKLNTEVRDVGPLSKKGFYLAFQDVGACIALVSVRVYYKKCPSVVRHLAVFPDTITGADSSQLLEVSGSCVNHSVTDEPPKMHCSAEGEWLVPIGKCMCKAGYEEKNGTCQVCRPGFFKASPHIQSCGKCPPHSYTHEEASTSCVCEKDYFRRESDPPTMACTRPPSAPRNAISNVNETSVFLEWIPPADTGGRKDVSYYIACKKCNSHAGVCEECGGHVRYLPRQSGLKNTSVMMVDLLAHTNYTFEIEAVNGVSDLSPGARQYVSVNVTTNQAAPSPVTNVKKGKIAKNSISLSWQEPDRPNGIILEYEIKYFEKDQETSYTIIKSKETTITAEGLKPASVYVFQIRARTAAGYGVFSRRFEFETTPVSVAASSDQSQIPVIAVSVTVGVILLAVVIGVLLSGRRCGYSKAKQDPEEEKMHFHNGHIKLPGVRTYIDPHTYEDPNQAVHEFAKEIEASCITIERVIGAGEFGEVCSGRLKLPGKRELPVAIKTLKVGYTEKQRRDFLGEASIMGQFDHPNIIHLEGVVTKSKPVMIVTEYMENGSLDTFLKKNDGQFTVIQLVGMLRGISAGMKYLSDMGYVHRDLAARNILINSNLVCKVSDFGLSRVLEDDPEAAYTTRGGKIPIRWTAPEAIAFRKFTSASDVWSYGIVMWEVVSYGERPYWEMTNQDVIKAVEEGYRLPSPMDCPAALYQLMLDCWQKERNSRPKFDEIVNMLDKLIRNPSSLKTLVNASCRVSNLLAEHSPLGSGAYRSVGEWLEAIKMGRYTEIFMENGYSSMDAVAQVTLEDLRRLGVTLVGHQKKIMNSLQEMKVQLVNGMVPL

SEQ ID NO: 45680 - protein, 700 aa, Homo sapiens
MQVKRSQEILSVAKKNKKENEDENSSSTNLCVEDLQKNKDSNSIIKDRLSETVRQNTKFFFDPVRKCNGQPVPFQQPKHFTGGVMRWYQVEGMEWLRMLWENGINGILADEMGLGKTVQCIATIALMIQRGVPGPFLVCGPLSTLPNWMAEFKRFTPDIPTMLYHGTQEERQKLVRNIYKRKGTLQIHPVVITSFEIAMRDRNALQHCYWKYLIVDEGHRIKNMKCRLIRELKRFNADNKLLLTGTPLQNNLSELWSLLNFLLPDVFDDLKSFESWFDITSLSETAEDIIAKEREQNVLHMLHQILTPFLLRRLKSDVALEVPPKREVVVYAPLSKKQEIFYTAIVNRTIANMFGSSEKETIELSPTGRPKRRTRKSINYSKIDDFPNELEKLISQIQPEVDRERAVVEVNIPVESEVNLKLQNIMMLLRKCCNHPYLIEYPIDPVTQEFKIDEELVTNSGKFLILDRMLPELKKRGHKVLLFSQMTSMLDILMDYCHLRDFNFSRLDGSMSYSEREKNMHSFNTDPEVFIFLVSTRAGGLGINLTAADTVIIYDSDWNPQSDLQAQDRCHRIGQTKPVVVYRLVTANTIDQKIVERAAAKRKLEKLIIHKNHFKGGQSGLNLSKNFLDPKELMELLKSRDYEREIKGSREKVISDKDLELLLDRSDLIDQMNASGPIKEKMGIFKILENSEDSSPECLF

SEQ ID NO: 45681 - protein, 1580 aa, Homo sapiens
MPARTAPARVPTLAVPAISLPDDVRRRLKDLERDSLTEKECVKEKLNLLHEFLQTEIKNQLCDLETKLRKEELSEEGYLAKVKSLLNKDLSLENGAHAYNREVNGRLENGNQARSEARRVGMADANSPPKPLSKPRTPRRSKSDGEAKPEPSPSPRITRKSTRQTTITSHFAKGPAKRKPQEESERAKSDESIKEEDKDQDEKRRRVTSRERVARPLPAEEPERAKSGTRTEKEEERDEKEEKRLRSQTKEPTPKQKLKEEPDREARAGVQADEDEDGDEKDEKKHRSQPKDLAAKRRPEEKEPEKVNPQISDEKDEDEKEEKRRKTTPKEPTEKKMARAKTVMNSKTHPPKCIQCGQYLDDPDLKYGQHPPDAVDEPQMLTNEKLSIFDANESGFESYEALPQHKLTCFSVYCKHGHLCPIDTGLIEKNIELFFSGSAKPIYDDDPSLEGGVNGKNLGPINEWWITGFDGGEKALIGFSTSFAEYILMDPSPEYAPIFGLMQEKIYISKIVVEFLQSNSDSTYEDLINKIETTVPPSGLNLNRFTEDSLLRHAQFVVEQVESYDEAGDSDEQPIFLTPCMRDLIKLAGVTLGQRRAQARRQTIRHSTREKDRGPTKATTTKLVYQIFDTFFAEQIEKDDREDKENAFKRRRCGVCEVCQQPECGKCKACKDMVKFGGSGRSKQACQERRCPNMAMKEADDDEEVDDNIPEMPSPKKMHQGKKKKQNKNRISWVGEAVKTDGKKSYYKKVCIDAETLEVGDCVSVIPDDSSKPLYLARVTALWEDSSNGQMFHAHWFCAGTDTVLGATSDPLELFLVDECEDMQLSYIHSKVKVIYKAPSENWAMEGGMDPESLLEGDDGKTYFYQLWYDQDYARFESPPKTQPTEDNKFKFCVSCARLAEMRQKEIPRVLEQLEDLDSRVLYYSATKNGILYRVGDGVYLPPEAFTFNIKLSSPVKRPRKEPVDEDLYPEHYRKYSDYIKGSNLDAPEPYRIGRIKEIFCPKKSNGRPNETDIKIRVNKFYRPENTHKSTPASYHADINLLYWSDEEAVVDFKAVQGRCTVEYGEDLPECVQVYSMGGPNRFYFLEAYNAKSKSFEDPPNHARSPGNKGKGKGKGKGKPKSQACEPSEPEIEIKLPKLRTLDVFSGCGGLSEGFHQAGISDTLWAIEMWDPAAQAFRLNNPGSTVFTEDCNILLKLVMAGETTNSRGQRLPQKGDVEMLCGGPPCQGFSGMNRFNSRTYSKFKNSLVVSFLSYCDYYRPRFFLLENVRNFVSFKRSMVLKLTLRCLVRMGYQCTFGVLQAGQYGVAQTRRRAIILAAAPGEKLPLFPEPLHVFAPRACQLSVVVDDKKFVSNITRLSSGPFRTITVRDTMSDLPEVRNGASALEISYNGEPQSWFQRQLRGAQYQPILRDHICKDMSALVAARMRHIPLAPGSDWRDLPNIEVRLSDGTMARKLRYTHHDRKNGRSSSGALRGVCSCVEGGSSGKACDPAARQFNTLIPWCLPHTGNRHNHWAGLYGRLEWDGFFSTTVTNPEPMGKQGRVLHPEQHRVVSVRECARSQGFPDTYRLFGNILDKHRQLK

SEQ ID NO: 45682 - protein, 30 aa, Homo sapiens
VIDISMILAEAIRRTHNGESVSYLFSHVPL

SEQ ID NO: 45683 - protein, 147 aa, Homo sapiens
MMHQIYSCSDENIEVFTTVIPSKVSSPARRRAKSSQHLLTKNVVIESDLYTHQPLELLPHRGDRRDPGDRRRFGRLQTARPPTAHPAKASARPVGISEPKTSNLCGNRAYGKSLIPPVPRISVKTSASASLEATAMGTEKGAVLMRG

SEQ ID NO: 45684 - protein, 107 aa, Homo sapiens
MRMEKIVLEKVCWKVKATTAFQFLQLYYSLLQENLPLERRNSINFERLEAQLKACHCRIIFSKAKPSVLALSIIALEIQAQKCVELTEGIECLQKHSKDYYSTKKLL

SEQ ID NO: 45685 - protein, 174 aa, Homo sapiens
MSHRTSSTFRAERSFHSSSSSSSSSTSSSASRALPAQDPPMEKALSMFSDDFGSFMRPHSEPLAFPAHPTARPGGAGNIKTLGDAYEFAVDVRDFSPEDIIVTTSNNHIEVRAEKLAADGTVMNTFAHKCQLPEDVDPTSVTSALREDGSLTIRARRHPHTEHVQQTFRTEIKI

SEQ ID NO: 45686 - protein, 1439 aa, Homo sapiens
MAHSCRWRFPARPGTTGGGGGGGRRGLGGAPRQRVPALLLPPGPPVGGGGPGAPPSPPAVAAAAAAAGSSGAGVPGGAAAASAASSSSASSSSSSSSSASSGPALLRVGPGFDAALQVSAAIGTNLRRFRAVFGESGGGGGSGELTTQIPCSWRTKGHIHDKKTEPFRLLAWSWCLNDEQFLGFGSDEEVRVRSPTRSPSVKTSPRKPRGRPRSGSDRNSAILSDPSVFSPLNKSETKSGDKIKKKDSKSIEKKRGRPPTFPGVKIKITHGKDISELPKGNKEDSLKKIKRTPSATFQQATKIKKLRAGKLSPLKSKFKTGKLQIGRKGVQIVRRRGRPPSTERIKTPSGLLINSELEKPQKVRKDKEGTPPLTKEDKTVVRQSPRRIKPVRIIPSSKRTDATIAKQLLQRAKKGAQKKIEKEAAQLQGRKVKTQVKNIRQFIMPVVSAISSRIIKTPRRFIEDEDYDPPIKIARLESTPNSRFSAPSCGSSEKSSAASQHSSQMSSDSSRSSSPSVDTSTDSQASEEIQVLPEERSDTPEVHPPLPISQSPENESNDRRSRRYSVSERSFGSRTTKKLSTLQSAPQQQTSSSPPPPLLTPPPPLQPASSISDHTPWLMPPTIPLASPFLPASTAPMQGKRKSILREPTFRWTSLKHSRSEPQYFSSAKYAKEGLIRKPIFDNFRPPPLTPEDVGFASGFSASGTAASARLFSPLHSGTRFDMHKRSPLLRAPRFTPSEAHSRIFESVTLPSNRTSAGTSSSGVSNRKRKRKVFSPIRSEPRSPSHSMRTRSGRLSSSELSPLTPPSSVSSSLSISVSPLATSALNPTFTFPSHSLTQSGESAEKNQRPRKQTSAPAEPFSSSSPTPLFPWFTPGSQTERGRNKDKAPEELSKDRDADKSVEKDKSRERDREREKENKRESRKEKRKKGSEIQSSSALYPVGRVSKEKVVGEDVATSSSAKKATGRKKSSSHDSGTDITSVTLGDTTAVKTKILIKKGRGNLEKTNLDLGPTAPSLEKEKTLCLSTPSSSTVKHSTSSIGSMLAQADKLPMTDKRVASLLKKAKAQLCKIEKSKSLKQTDQPKAQGQESDSSETSVRGPRIKHVCRRAAVALGRKRAVFPDDMPTLSALPWEEREKILSSMGNDDKSSIAGSEDAEPLAPPIKPIKPVTRNKAPQEPPVKKGRRSRRCGQCPGCQVPEDCGVCTNCLDKPKFGGRNIKKQCCKMRKCQNLQWMPSKAYLQKQAKAVKKKEKKSKTSEKKDSKESSVVKNVVDSSQKPTPSAREDPAPKKSSSEPPPRKPVEEKSEEGNVSAPGPESKQATTPASRKSSKQVSQPALVIPPQPPTTGPPRKEVPKTTPSEPKKKQPPPPESGPEQSKQKKVAPRPSIPVKQKPKEKEKPPPVNKQENAGTLNILSTLSNGNSSKQKIPADGVHRIRVDFK

SEQ ID NO: 45687 - protein, 69 aa, Homo sapiens
MSKSVPAFLQDESDDRETDTASESSYQLSRHKKSPSSLTNLSSSSGMTSLSSVSGSVMSVYSGDFGNLE

SEQ ID NO: 45688 - protein, 172 aa, Homo sapiens
MPVPASWPHLPSPFLLMTLLLGRLTGVAGEDELQVIQPEKSVSVAAGESATLRCAMTSLIPVGPIMWFRGAGAGRELIYNQKEGHFPRVTTVSELTKRNNLDFSISISNITPADAGTYYCVKFRKGSPDDVEFKSGAGTELSVRAFFQESHMCSMCNKRRCHRLYQLGSQSS

SEQ ID NO: 45689 - protein, 59 aa, Homo sapiens
MSWKRHHLIPETFGVKRRRKRGPVESDPLRGEPEGASRAGGDQNRPAGLRLGCPWNYLH

SEQ ID NO: 45690 - protein, 1131 aa, Homo sapiens
AGGSLGTGRRRQRLPATGGTTRSPREGEVPGVDYNFLTVKEFLDLEQSGTLLEVGTYEGNYYGTPKPPSQPVSGKVITTDALHSLQSGSKQSTPKRTKSYNDMQNAGIVHAENEEEDDVPEMNSSFTADSGEQEEHTLQETALPPVNSSIIAAPITDPSQKFPQYLPLSAEDNLGPLPENWEMAYTENGEVYFIDHNTKTTSWLDPRCLNKQQKPLEECEDDEGVHTEELDSELELPAGWEKIEDPVYGIYYVDHINRKTQYENPVLEAKRKKQLEQQQQQQQQQQQQQQQQQQQQTEEWTEDHSALVPPVIPNHPPSNPEPAREVPLQGKPFFTRNPSELKGKFIHTKLRKSSRGFGFTVVGGDEPDEFLQIKSLVLDGPAALDGKMETGDVIVSVNDTCVLGHTHAQVVKIFQSIPIGASVDLELCRGYPLPFDPDDPNTSLVTSVAILDKEPIIVNGQETYDSPASHSSKTGKVNGMKDARPSSPADVASNSSHGYPNDTVSLASSIATQPELITVHIVKGPMGFGFTIADSPGGGGQRVKQIVDSPRCRGLKEGDLIVEVNKKNVQALTHNQVVDMLVECPKGSEVTLLVQRGGLPVPKKSPKSQPLERKDSQNSSQHSVSSHRSLHTASPSHSTQVLPEFPPAEAQAPDQTDSSGQKKPDPFKIWAQSRSMYENRPMSPSPASGLSKGEREREINSTNFGECPIPDYQEQDIFLWRKETGFGFRILGGNEPGEPIYIGHIVPLGAADTDGRLRSGDELICVDGTPVIGKSHQLVVQLMQQAAKQGHVNLTVRRKVVFAVPKTENEVPSPASSHHSSNQPASLTEEKRTPQGSQNSLNTVSSGSGSTSGIGSGGGGGSGVVSTVVQPYDVEIRRGENEGFGFVIVSSVSRPEAGTTFAGNACVAMPHKIGRIIEGSPADRCGKLKVGDRILAVNGCSITNKSHSDIVNLIKEAGNTVTLRIIPGDESSNATLLTNAEKIATITTTHTPSQQGTQETRNTTKPKQESQFEFKAPQATQEQDFYTVELERGAKGFGFSLRGGREYNMDLYVLRLAEDGPAERCGKMRIGDEILEINGETTKNMKHSRAIELIKNGGRRVRLFLKRGDGSVPEYGGSNYENIPSFPGMTP

SEQ ID NO: 45691 - protein, 542 aa, Homo sapiens
MSSSSSSPRETYEEDREYESQAKRLKTEEGEIDYSAEEGENRREATPRGGGDGGGGGRSFSQPEAGGSHHKVSVSPVVHVRGLCESVVEADLVEALEKFGTICYVMMMPFKRQALVEFENIDSAKECVTFAADEPVYIAGQQAFFNYSTSKRITRPGNTDDPSGGNKVLLLSIQNPLYPITVDVLYTVCNPVGKVQRIVIFKRNGIQAMLMFESVLCAQKAKAALNGADIYAGCCTLKIEYARPTRLNVIRNDNDSWDYTKPYLGRRDRGKGRQRQAILGEHPSSFRHDGYGSHGPLLPLPSRYRMGSRDTPELVAYPLPQASSSYMHGGNPSGSVVMVSGLHQLKMNCSRVFNLFCLYGNIEKVKFMKTIPGTALVEMGDEYAVERAVTHLNNVKLFGKRLNVCVSKQHSVVPSQIFELEDGTSSYKDFAMSKNNRFTSAGQASKNIIQPPSCVLHYYNVPLCVTEETFTKLCNDHEVLTFIKYKVFDAKPSAKTLSGLLEWECKTDAVEALTALNHYQIRVPNGSNPYTLKLCFSTSSHL

SEQ ID NO: 45692 - protein, 61 aa, Homo sapiens
MAAEADGPLKRLLVPILLPEKCYDQLFVQWDLLHVPCLKILLSKGLGLGIVAGSLLAAPGV

SEQ ID NO: 45693 - protein, 74 aa, Homo sapiens
MSLPPEKASELKQLIHQQLSKMDVHGRIREILAETIREELAPDQQHLSTEDLIKALRRRGIIDDVMKELNFVTC

SEQ ID NO: 45694 - protein, 252 aa, Homo sapiens
MAAPSGTVSDSESSNSSSDAEELERCREAAMPAWGLEQRPHVAGKPRAGAANSQLSTSQPSLRHKVNEHEQDGNELQTTPEFRAHVAKKLGALLDSFITISEAAKEPAKAKVQKVALEDDGREKEESPQPRRKRQPSSSSSEDSDEEWRRCREAAVSASDILQESAIHSPGTVEKEAKKKRKLKKKAKKVASVDSAVAATTPTSMATVQKQKSGELNGDQVSLGTKKKKKAKKASETSPFPPAKSATAIPAN

SEQ ID NO: 45695 - protein, 90 aa, Homo sapiens
MPLYEGLGSGGEKTAVVIDLGEAFTKCGFAGETGPRCIIPSVIKRAGMPKVLTLSPRLECSGTILAHCNLCLPATSTSWVQAVLPLQPPE

SEQ ID NO: 45696 - protein, 630 aa, Homo sapiens
MIQSDKGADPPDKKDMKLSTATNPQNGLSQILRLVLQELSLFYGRDVNGVCLLYDLLHSPWLQALLKIYDCLQEFKEKKLVPATPHAQVLSYEVVELLRETPTSPEIQELRQMLQAPHFKALLSAHDTIAQKDFEPLLPPLPDNIPESEEAMRIVCLVKNQQPLGATIKRHEMTGDILVARIIHGGLAERSGLLYAGDKLVEVNGVSVEGLDPEQVIHILAMSRGTIMFKVVPVSDPPVNSQQMVYVRAMTEYWPQEDPDIPCMDAGLPFQKGDILQIVDQNDALWWQARKISDPATCAGLVPSNHLLKRKQREFWWSQPYQPHTCLKSTLSISMEEEDDMKIDEKCVEAEELSEDKEEFVGYGQKFFIAGFRRSMRLCRRKSHLSPLHASVCCTGSCYSAVGAPYEEVVRYQRRPSDKYRLIVLMGPSGVGVNELRRQLIEFNPSHFQSAVPHTTRTKKSYEMNGREYHYVSKETFENLIYSHRMLEYGEYKGHLYGTSVDAVQTVLVEGKICVMDLEPQDIQGVRTHELKPYVIFIKPSNMRCMKQSRKNAKVITDYYVDMKFKDEDLQEMENLAQRMETQFGQFFDHVIVNDSLHDACAQLLSAIQKAQEEPQWVPATWISSDTESQ

SEQ ID NO: 45697 - protein, 336 aa, Homo sapiens
MSFLVSKPERIRRWVSEKFIVEGLRDLELFGEQPPGDTRRKTNDASSESIASFSKQEVMSSFLPEGGCYELLTVIGKGFEDLMTVNLARYKPTGEYVTVRRINLEACSNEMVTFLQGELHVSKLFNHPNIVPYRATFIADNELWVVTSFMAYGSAKDLICTHFMDGMNELAIAYILQGVLKALDYIHHMGYVHRSVKASHILISVDGKVYLSGLRSNLSMISHGQRQRVVHDFPKYSVKVLPWLSPEVLQQNLQGYDAKSDIYSVGITACELANGHVPFKDMPATQIKRRASEALPELLRPVTPITNFEGSQSQDHSGIFGLVTNLEELEVDDWEF

SEQ ID NO: 45698 - protein, 345 aa, Homo sapiens
MLPLLEVAEKEREALRTEADTISGRVDRLEREVDYLETQNPALPCVEFDEKVTGGPGTKGKGRRNEKYDMVTDCGYTISQVRSMKILKRFGGPAGLWTKDPLGQTEKIYVLDGTQNDTAFVFPRLRDFTLAMAARKASRVRVPFPWVGTGQLVYGGFLYFARRPPGRPGGGGEMENTLQLIKFHLANRTVVDSSVFPAEGLIPPYGLTADTYIDLAADEEGLWAVYATREDDRHLCLAKLDPQTLDTEQQWDTPCPRENAEAAFVICGTLYVVYNTRPASRARIQCSFDASGTLTPERAALPYFPRRYGAHASLRYNPRERQLYAWDDGYQIVYKLEMRKKEEEV

SEQ ID NO: 45699 - protein, 140 aa, Homo sapiens
MAELQEVQITEEKPLLPGQTPEAAKEAELAARILLDQGQTHSVETPYGSVTFTVYGTPKPKRPAILTYHDVGLNYKSCFQPLFQFEDMQEIIQNFVRVHVDAPGMEEGAPVFPLGYQYPSLDQLADMIPCVLQYLNFSTI

SEQ ID NO: 45700 - protein, 226 aa, Homo sapiens
MTPLVSRLSRLWAIMRKPRAAVGSGHRKQAASQEGRQKHAKNNSQAKPSACDACAGMIAECPGAPAGLARQPEEVVLQASVSSYHLFRDVAEVTAFRGSLLSWYDQEKRDLPWRRRAEDEMDLDRRAYAEVAYTAGPGQCFPGGGESTLGWPGLLFSWPAAAGGSSEGGRGARGPHATYSRDPAAAPAWRGALHSWGHCLYRLWPGNRCGGWQRSTGAVPCPSHWC

SEQ ID NO: 45701 - protein, 157 aa, Homo sapiens
MLRWLIGGGREPQGLAEKSPLQTIGEEQTQNPYTELLVLKAHHDIVRFLVQLDDYRFASAGDDGIVVVWNAQTGEKLLELNGHTQKITAIITFPSLESCEEKNQLILTASADRTVIVWDGDTTRQVQRISCFQSTVKVLVLWLKYLRTVLWQQLAKN

SEQ ID NO: 45702 - protein, 73 aa, Homo sapiens
MADHNPDSDSTPRTLLRRVLDTADPRTPRRPRSARAGARRALLETASPRKLSGQTRTIARGRSHGARPQNLPS

SEQ ID NO: 45703 - protein, 101 aa, Homo sapiens
MALLEVLSGRNLLHEYKSSSHRIFRLNNIAKALKFLEDSNVKLVSIDAAEIADGNPSLVLGLIWNIILFFQIKELTGNLSRNSPSSSLSPGSGGTDSDSSF

SEQ ID NO: 45704 - protein, 351 aa, Homo sapiens
DAFVNSQEWTLSRSVPELKVGIVGNLASGKSALVHRYLTGTYVQEESPEGGRFKKEIVVDGQSYLLLIRDEGGPPEAQFAMWVDAVIFVFSLEDEISFQTVYHYYSRMANYRNTSEIPLVLVGTQDAISSANPRVIDDARARKLSNDLKRCTYYETCATYGLNVERVFQDVAQKIVATRKKQQLSIGPCKSLPNSPSHSSVCSAQVSAVHISQTSNGGGSLSDYSSSVPSTPSTSQKELRIDVPPTANTPTPVRKQSKRRSNLFTSRKGSDPDKEKKGLESRADSIGSGRAIPIKQGLPFFVLALTASTYLRPAGARARQSSPWPGPRGGQTSPHCAEGPQSAQLSGAMMN

SEQ ID NO: 45705 - protein, 157 aa, Homo sapiens
MSSAAENGEAAPGKQNEEKTYKKTASSAIKGAIQLGIGYTVGNLTSKPERDVLMQDFYVVESVFLPSEGSNLTPAHHYPDFRFKTYAPLAFRYFRELFGIKPDDYLYSICSEPLIELSNPGASGSLFFVTSDDEFIIKTVQHKEAEFLQKLLPGYYM

SEQ ID NO: 45706 - protein, 201 aa, Homo sapiens
MNRFRVSKFRHTEARPPRRESWISDIRAGTAPSCRNHIKSSCSLIAFNSDRPGVLGIVPLQGQGEDKRRVAHLGCHSDLVTDLDFSPFDDFLLATGSADRTVKLWRLPGPGQALPSAPGVVLGPEDLPVEVLQFHPTSDGILSWQPMGTWCRAPSGAEMEPWWARRARTSSCGSLTPEQSRGPLRARRPMRTAGIAGWHGW

SEQ ID NO: 45707 - protein, 55 aa, Homo sapiens
MAVQRRLDVMEEMVEKTVDHLGTEVKGLLGLLEELAWNLPPGPFSPAPDLLGDGF

SEQ ID NO: 45708 - protein, 224 aa, Homo sapiens
ASTSRLDALPRVTCPNHPDAILVEDYRAGDMICPECGLVVGDRVIDVGSEWRTFSNDKATKDPSRVGDSQNPLLSDGDLSTMIGKGTGAASFDEFGNSKYQNRRTMSSSDRAMMNAFKEITTMADRINLPRNIVDRTNNLFKQVYEQKSLKGRANDAIASACLYIACRQEGVPRTFKEICAVSRISKKEIGRCFKLILKALETSVDLITTGDFMSRNWRYCWCC

SEQ ID NO: 45709 - protein, 152 aa, Homo sapiens
MASAKSLDRWKARLLEGGSTALTYALVRAEVSFPAEVAPVRQQGSVAGARAGVVSLLGCRSSWTAAMELSAEYLREKLQRDLEAEHVEVEDTTLNRCSCSFRVLVVSAKFEGKPLLQRHRLVNACLAEELPHIHAFEQKTLTPDQWARERQK

SEQ ID NO: 45710 - protein, 734 aa, Homo sapiens
MAECGASGSGSSGDSLDKSITLPPDEIFRNLENAKRFAIDIGGSLTKLAYYSTVQHKVAKVRSFDHSGKDTEREHEPPYEISVQEEITARLHFIKFENTYIEACLDFIKDHLVNTETKVIQATGGGAFVYQKDSDPEFRFQTNHPHIFPYLLVNIGSGVSIVKVETEDRFEWVGGSSIGGGTFWGLGALLTKTKKFDELLHLASRGQHSNVDMLVRDVYGGAHQTLGLSGNLIASSFGKSATADQEFSKEDMAKSLLHMISNDIGQLACLHARLHSLDRVYFGGFFIRGHPVTMRTITYSINFFSKGEVQALFLRHEGYLGAIGAFLKGAEQDNPNQYSWGENYAGSSGLMSASPELGPAQRARSGTFDLLEMDRLERPLVDLPLLLDPPSYVPDTVDLTDDALARKYWLTCFEEALDGVVKRAVASQPDSVDAAERAEKFRQKYWNKLQTLRQQPFAYGTLTVRSLLDTREHCLNEFNFPDPYSKVKQRENGVALRCFPGVVRSLDALGWEERQLALVKGLLAGNVFDWGAKAVSAVLESDPYFGFEEAKRKLQERPWLVDSYSEWLQRLKGPPHKCALIFADNSGIDIILGVFPFVRELLLRGTEVILACNSGPALNDVTHSESLIVAERIAGMDPVVHSALQEERLLLVQTGSSSPCLDLSRLDKGLAALVRERGADLVVIEGMGRAVHTNYHAALRCESLKLAVIKNAWLAERLGGRLFSVIFKYEVPAE

SEQ ID NO: 45711 - protein, 360 aa, Homo sapiens
MDNKKRLAYAIIQFLHDQLRHGGLSSDAQESLEVAIQCLETAFGVTVEDSDLALPQTLPEIFEAAATGKEMPQDLRSPARTPPSEEDSAEAERLKTEGNEQMKVENFEAAVHFYGKAIELNPANAVYFCNRAAAYSKLGNYAGAVQDCERAICIDPAYSKAYGRMGLALSSLNKHVEAVAYYKKALELDPDNETYKSNLKIAELKLREAPSPTGGVGSFDIAGLLNNPGFMSMHVRHDFGWQQPLGNSRHQPLAERPGQPHPGGPAVCPADAAAEPRVDRAAQEPDPESDAQRQQRRPAGVTLPAPGVTASFPGRPEGSLLVVCHFLLLDCLREGKRETSDLHVKMDFPLLSLPSSTPFL

SEQ ID NO: 45712 - protein, 421 aa, Homo sapiens
MDYSYDEDLDELCPVCGDKVSGYHYGLLTCESCKGFFKRTVQNNKHYTCTESQSCKIDKTQRKRCPFCRFQKCLTVGMRLEAVRADRMRGGRNKFGPMYKRDRALKQQKKAQIRANGFKLETGPPMGVPPPPPPAPDYVLPPSLHGPEPKGLAAGPPAGPLGDFGAPALPMAVPGAHGPLAGYLYPAFPGRAIKSEYPEPYASPPQPGLPYGYPEPFSGGPNVPELILQLLQLEPDEDQVRARILGCLQEPTKSRPDQPAAFGLLCRMADQTFISIVDWARRCMVFKELEVELTTVATQAGSLLHSLVLRAQELVLQLLALQLDRQEFVCLKFIILFSLDLKFLNNHILVKDAQEKANAALLDYTLCHYPHCGDKFQQLLLCLVEVRALSMQAKEYLYHKHLGNEMPRNNLLIEMLQAKQT

SEQ ID NO: 45713 - protein, 274 aa, Homo sapiens
MVMVKGVNKLALPPGSVISYPLENAVPFSLDSVANSIHSLFSEETPVVLQLAPSEERVYMVGKANSVFEDLSVTLRQLRNRLFQENSVLSSLPLNSLSRNNEVDLLFLSELQVLHDISSLLSRHKHLAKDHSPDLYSLELAGLDEIGKRYGEDSEQFRDASKILVDALQKFADDMYSLYGGNAVVELVTVKSFDTSLIRKTRTILEAKQAKNPASPYNLAYKYNFEYSVVFNMVLWIMIALALAVIITSYNIWNMDPGYDSIIYRMTNQKIRMD

SEQ ID NO: 45714 - protein, 266 aa, Homo sapiens
MSSKYPRSVRRCLPLCALTLEAALILLFYFFTHYDASLEDQKGLVASYQVGQDLTVMAALGLGFLTSNFRRHSWSSVAFNLFMLALGVQWAILLDGFLSQFPPGKVVITLFSIRLATMSAMSVLISAGAVLGKVNLAQLVVMVLVEVTALGTLRMVISNIFNVCCNRVLGIHHISVMHSIFSLLGLLGEITYIVLLVLHTVWNGNGMIGFQVLLSIGELSLAIVIALTSGLLTGLLLNLKIWKAPHVAKYFDDQVFWKFPHLAVGF

SEQ ID NO: 45715 - protein, 603 aa, Homo sapiens
MDIRKEKRLNMALQMSNFKKALNRFEKLVEQTAAQKRDERAGLFIHKEDAIGYDKFYASVQKLFGPDVKNQDVKRFYRKLCNNTDASADWCEIFGYFSSEEDPIASQLDEENLVFFVSRKRRILISGSRRRDVIKSIVKIPHLDLLITATQKGLITVFNNQMRVQTSTNVTDTSWITGCDYLLQLKRIVATTERTIIVWDYKAQGSSQENYFVIKPMDHCLLCVCVVPLPDHLCRDDILLGDDGGFVNRFTVNSDDFGIKQAKSKRKLQNQVLDSKNFKSVKRKLHNDWVMKIRYISALNCFGSCSLDSNHSLVLESLKRLEDNLPVREFSMPRGANTFCYCVKANVIVTGGDDKVIRLWHPNISTKPVGKLVGHMFSIAEIVTNEKDQHVVSLSSAKVFRVWDIQTLSLLQVFHDSQGGPGDMQIYSMIYDANHGMLITGSSVMDMYPLTRMIQDTKQVPHTHEREINVMLYNKYFHQVLTICSESIIRVWELETGLQVYQILEPHGFNTEVTSAAVDESGFLFATGAYNGTVRIWDFGSGQEMKVLPEGKDWKEDEHCLRRLIFLKAQEKHQQLVLALERNGTIKMIQVNDAICSGLFGED

SEQ ID NO: 45716 - protein, 128 aa, Homo sapiens
MNEPLVDCEGYPRSDVDLYQVRTARHNIICLQNDHKAVMKQVEEALHQLHARDKEKQARDMAEAHKEAMSRKLGQSESQGPPRAFAKVNSISPGSPASIAVIQGLATQVHAQGTRVCKWMMRLWSSAL

SEQ ID NO: 45717 - protein, 67 aa, Homo sapiens
IEKDQIIEMACLITDSDLNILAEGPNLIIKQPDELLDSMSDWCKEHHGKEIQFMKIRSFLTNTCPSS

SEQ ID NO: 45718 - protein, 130 aa, Homo sapiens
MRNAIIQGLFYGSLTFGIWTALLFIYLHHNHVSSWQKKSQEPLSAWSPGKKVHQQIIYGSEQIPKPHVIVKRTDEDKAKSMLGTDFNHTNPELHKELLKYGFNVIISRSLGIEREVPDTRSKICTVTLLP

SEQ ID NO: 45719 - protein, 120 aa, Homo sapiens
MLCVSYQVDERTCIQFSMKLLYFLLSALGLTVCVLAVAFAAHHYSQLTQFTCETTLDSCQCKLPSSEPLSRTFVYRDVTDCTSVTGTFKLFLLIQMILNLVCGLVCLLACFVMWKHRYQV

SEQ ID NO: 45720 - protein, 293 aa, Homo sapiens
  MOD_RES (1)..(1): Any amino acid
XAGRTVRAETRSRAKDDIKKVMATIEKVRRWEKRWVTVGDTSLRIFKWVPVVDPQEEERRRAGGGAERSRGRERRGRGASPRGGGPLILLDLNDENSNQSFHSEGSLQKGTEPSPGGTPQPSRPVSPAGPPEGVPEEAQPPRLGQERDPGGITAGSTDEPPMLTKEEPVPELLEAETMEMMLDKKQIQAIFLFELKMGHKAVETLRNINNTLGPGTANEHIVQWWFKKFCKEDKSLEDEKHSVWPSEVDNDQLKALIEADPVKTTQEVAQELNHRPFYGRLAFEANWKGEKAQ

SEQ ID NO: 45721 - protein, 256 aa, Homo sapiens
MGSTFIVQGVTLGAEGIISEFTPLPREVLHKWSPKQIGEHLLLKSLTYVVAMPFYSASLIETVQSEIIRDNTGILECVKEGIGRVIGMGVPHSKRLLPLLSLIFPTVLHGVLHYIISSVIQKFVLLILKRKTYNSHLAESTSPVQSMLDAYFPELIANFAASLCSDVILYPLETVLHRLHIQGTRTIIDNTDLGYEVLPINTQYEGMRDCINTIRQEEGVFGFYKGFGAVIIQYTLHAAVLQITKIIYSTLLQNNI

SEQ ID NO: 45722 - protein, 186 aa, Homo sapiens
MAAMAVGGAGGSRVSSGRDLNCVPEIADTLGAVAKQGFDFLCMPVFHPRFKREFIQEPAKNRPGPQTRSDLLLSGRVFVFLGWGSADWNTLIVGKLSPWIRPDSKVEKIRRNSEAAMLQELNFGAYLGLPAFLLPLNQEDNTNLARVLTNHIHTGHHSSMFWMRVPLVAPEDLRDDIIENAPTTHT

SEQ ID NO: 45723 - protein, 178 aa, Homo sapiens
MSGFSTEERAAPFSLEYRVFLKNEKGQYISPFHDIPIYADKDVFHMVVEVPRWSNAKMEIATKDPLNPIKQDVKKGKLRYVANLFPYKGYIWNYGAIPQTWEDPGHNDKHTGCCGDNDPIDVCEIGSKVCARGEIIGVKVLGILAMIDEGETDWKVIAINVDDPDAANYNVCNSVVIL

SEQ ID NO: 45724 - protein, 78 aa, Homo sapiens
MVHPNQEPAVIAGQGTIALEVLNQVPLVDALVVPVGGGGMLAGIAITVKALKPSVKVYAAEPSNADDCYQSKLKGKLM

SEQ ID NO: 45725 - protein, 1433 aa, Homo sapiens
MKKEGRKRWKRKEDKKRVVVSNLLFEGWSHKENPNRHHRGNQIKTSKYTVLSFVPKNIFEQLHRFANLYFVGIAVLNFIPVVNAFQPEVSMIPICVILAVTAIKDAWEDLRRYKSDKVINNRECLIYSRKEQTYVQKCWKDVRVGDFIQMKCNEIVPADILLLFSSDPNGICHLETASLDGETNLKQRCVVKGFSQQEVQFEPELFHNTIVCEKPNNHLNKFKGYMEHPDQTRTGFGCESLLLRGCTIRNTEMAVGIVIYAGHETKAMLNNSGPRYKRSKIERRMNIDIFFCIGILILMCLIGAVGHSIWNGTFEEHPPFDVPDANGSFLPSALGGFYMFLTMIILLQVLIPISLYVSIELVKLGQVFFLSNDLDLYDEETDLSIQCRALNIAEDLGQIQYIFSDKTGTLTENKMVFRRCTIMGSEYSHQENAKRLETPKELDSDGEEWTQYQCLSFSARWAQDPATMRSQKGAQPLRRSQSARVPIQGHYRQRSMGHRESSQPPVAFSSSIEKDVTPDKNLLTKVRDAALWLETLSDSRPAKASLSTTSSIADFFLALTICNSVMVSTTTEPRQRVTIKPSSKALGTSLEKIQQLFQKLKLLSLSQSFSSTAPSDTDLGESLGANVATTDSDERDDASVCSGGDSTDDGGYRSSMWDQGDILESGSGTSLEEALEAPATDLARPEFCYEAESPDEAALVHAAHAYSFTLVSRTPEQVTVRLPQGTCLTFSLLCTLGFDSVRKRMSVVVRHPLTGEIVVYTKGADSVIMDLLEDPACVPDINMEKKLRKIRARTQKHLDLYARDGLRTLCIAKKVVSEEDFRRWASFRREAEASLDNRDELLMETAQHLENQLTLLGATGIEDRLQEGVPDTIATLREAGIQLWVLTGDKQETAVNIAHSCRLLNQTDTVYTINTENQETCESILNCALEELKQFRELQKPDRKLFGFRLPSKTPSITSEAVVPEAGLVIDGKTLNAIFQGKLEKKFLELTQYCRSVLCCRSTPLQKSMIVKLVRDKLRVMTLSIGDGANDVSMIQAADIGIGISGQEGMQAVMSSDFAITRFKHLKKLLLVHGHWCYSRLARMVVYYLYKNVCYVNLLFWYQFFCGFSSSTMIDYWQMIFFNLFFTSLPPLVFGVLDKDISAETLLALPELYKSGQNSECYNLSTFWISMVDAFYQSLICFFIPYLAYKGSDIDVFTFGTPINTISLTTILLHQAMEMKTWTIFHGVVLLGSFLMYFLVSLLYNATCVICNSPTNPYWVMEGQLSNPTFYLVCFLTPVVALLPRYFFLSLQGTCGKSLISKAQKIDKLPPDKRNLEIQSWRSRQRPAPVPEVARPTHHPVSSITGQDFSASTPKSSNPPKRKHVEESVLHEQRCGTECMRDDSCSGDSSAQLSSGEHLLGPNRIMAYSRGQTDMCRCSKRSSHRRSQSSLTI

SEQ ID NO: 45726 - protein, 35 aa, Homo sapiens
  MOD_RES (1)..(1): Any amino acid
XRTCFVSDLKRGLKIQAAKFNIDGNNERFSCGNSF

SEQ ID NO: 45727 - protein, 229 aa, Homo sapiens
MMAAVKSTEAHPSSNKDPTQGQKSALQGNSPDSEASRQRFRQFCYQEVTGPHEAFSKLWELCCQWLRPKTHSKEEILELLVLEQFLTILPEEIQTWVREQHPENGEEAVALVEDVQRAPGQQPGLLLRLPGTCLKTQVSTTRRQVLWSGQLGPRDQPCVTTELYPSVSKNGCAQALHKGPSTGVPPRGRTVTSRWQQVCPGAMKRPRRSWLFLVVLNFMENSRPVSRTA

SEQ ID NO: 45728 - protein, 106 aa, Homo sapiens
MNQSIPVAPTPPRRVRLKPWLVAQVNSCQYPGLQWVNGEKKLFCIPWRHATRHGPSQDGDNTIFKAWAKETGKYTEGVDEADPAKWKANLRCALNKSRDFRLIYDG

SEQ ID NO: 45729 - protein, 87 aa, Homo sapiens
MSNNGADLTFGYISCFVAILLFGSNFVPLKKFDTGDGMFLQWVLCAAIWLVALVVNLILHCPKFWPFAMLGGCIWATGNIAVVPIIK

SEQ ID NO: 45730 - protein, 361 aa, Homo sapiens
MASANSSAGIRWSRQETRTLLSILGEAEYIQRLQTVHHNADVYQAVSKRMQQEGFRRTERQCRSKFKVLKALYLKAYVAHATSMGEPPHCPFYDTLDQLLRNQIVTDPDNLMEDAAWAKHCDQNLVASDAPGEEGTGILKSKRTQAADHQPILKTVKASDEDCQLRISDRIRETSDLEDSWDESSGAGCSQGTPSYSSSHSLFRGAVAPCQSSPMARLGVSGEPSPCTSTNRSTPGVASTPQTPVSSSRAGFVSGGDRPLTSEPPPRWARRRRRSVARTIAAELAENRRLARELSKREEEKLDRLIAIGEEASAQQDTANELRRDAVIAVRRLATAVEEATGAFQLGLEKLLQRLISNTKS

SEQ ID NO: 45731 - protein, 175 aa, Homo sapiens
  MOD_RES (1)..(1): Any amino acid
XQEQYLEAHDRLLAETHYQLGLAYGYNSQYDEAVAQFSKSIEVIENRMAVLNEQVKEAEGSSAEYKKEIEELKELLPEIREKIEDAKESQRSGNVAELALKATLVESSTSGFTPGGGGSSVSMIASRKPTDGASSSNCVTDISHLVRKKAENQAESRAAVEGTVEAGATVESTAC

SEQ ID NO: 45732 - protein, 64 aa, Homo sapiens
MMEVESSYSDFISCDRTGRRNAVPDIQGDSEAVSVRKLAGDMGELALEGAEMDLTMLPWLVSNS

SEQ ID NO: 45733 - protein, 216 aa, Homo sapiens
MSFLIDSSIMITSQIRQYVVQVIFSVTFAFSCTMFELIIFEILGVLNSSSRYFHWKMNLCVILLILVFMVPFYIGYFIVSNIRLLHKQRLLFSCLLWLTFMYFFWKLGDPFPILSPKHGILSIEQLISRVGVIGVTLMALLSGFGAVNCPYTYMSYFLRNVTDTDILALERRLLQTMDMIISKKKRMAMARRTMFQKGEVHNKPSGFWGMIKSVTT

SEQ ID NO: 45734 - protein, 145 aa, Homo sapiens
  MOD_RES (1)..(1): Any amino acid
XKEEFINDISGGKPLEVEMAGIEYMNDDPGMVDVLYAKVHMKDGSNRLQELVDRVLERFQASGLIVKEWNSVKLHATVMNTLFRKDPNAEGRYNLYTAEGKYIFKERESFDGRNILKVSLMHILRAYQENPRIEKGLGHRELVVV

SEQ ID NO: 45735 - protein, 174 aa, Homo sapiens
MTHCCSPGCQPTCCRTTCCRTTCWQPTIVTTCSSTPCCQPSCCVSSCCQPCCHPTCCQNTCCRTTCCQPTCVTSCYQPSCCSTPCCQPICCGSSCCGQTSCGSSCCQPSSCAPIYCRRTCYHPTSVYLPGCLNQSCGSSCCQPCCRPACCETTCCRTTCFQPTCVTSCCQPACC

SEQ ID NO: 45736 - protein, 723 aa, Homo sapiens
MFTPPSESQLVDTGTQTDITFEHIMALTKMSSPSPPVLDPYLLPEEHPSAHEYYDPNDYIGDIHQEMDREELELEEVDLYRMNSQDKLGLTVCYRTDDEDDIGIYISEIDPNSIAAKDGRIREGDRIIQINGIEVQNREEAVALLTSEENKNFSLLIARPELQLDEGWMDDDRNDFLDDLHMDMLEEQHHQAMQFTASVLQQKKHDEDGGTTDTATILSNQHEKDSGVGRTDESTRNDESSEQENNGDDATASSNPLAGQRKLTCSQDTLGSGDLPFSNESFISADCTDADYLGIPVDECERFRELLELKCQVKSATPYGLYYPSGPLDAGKSDPESVDKELELLNEELRSIELECLSIVRAHKMQQLKEQYRESWMLHNSGFRNYNTSIDVRRHELSDITELPEKSDKDSSSAYNTGESCRSTPLTLEISPDNSLRRAAEGISCPSSEGAVGTTEAYGPASKNLLSITEDPEVGTPTYSPSLKELDPNQPLESKERRASDGSRSPTPSQKLGSAYLPSYHHSPYKHAHIPAHAQHYQSYMQLIQQKSAVEYAQSQMSLVSMCKDLSSPTPSEPRMEWKVKIRSDGTRYITKRPVRDRLLRERALKIREERSGMTTDDDAVSEMKMGRYWSKEERKQHLVKAKEQRRRREFMMQSRLDCLKEQQAADDRKEMNILELSHKKMMKKRNKKIFDNWMTIQELLTHGTKSPDGTRVYNSFLSVTTV

SEQ ID NO: 45737 - protein, 275 aa, Homo sapiens
MEANGLGPQGFPELKNDTFLRAAWGEETDYTPVWCMRQAGRYLPEFRETRAAQDFFSTCRSPEACCELTLQPLRRFPLDAAIIFSDILVVPQNLSSWIPFWEPRCFLPLQALGMEVTMVPGKGPSFPEPLREEQDLERLRDPEVVASELGYVFQAITLTRQRLAGRVPLIGFAGAPWTLMTYMVEGGGSSTMAQAKRWLYQRPQASHQLLRILTDALVPYLVGQVVAGAQALQLFESHAGHLGPQLFNKFALPYIRDVAKQVKARLREAGLAPVP

SEQ ID NO: 45738 - protein, 152 aa, Homo sapiens
  MOD_RES (1)..(1): Any amino acid
XDVAVGAEHTLALASNGDVYAWGSNSEGQLGLGHTNHVREPTLVTGLQGKNVRQISAGRCHSAAWTAPPVPPRAPGVSVPLQLGLPDTVPPQYGALREVSIHTVRARLRLLYHFSDLMYSSWRLLNLSPNNQVTDWRGKQPGTDWLEQHIPL

SEQ ID NO: 45739 - protein, 56 aa, Homo sapiens
MKGFYFAKLYYEAKEYDLAKKYICTYINVQERDPKAHRFLGLLYELEENTEKAVEC

SEQ ID NO: 45740 - protein, 66 aa, Homo sapiens
MSYTGFVQGSETTLQSTYSDTSAQPTCDYGYGTWNSGTNRGYEGYGYGYGYGQDNTTNYGYELTSA

SEQ ID NO: 45741 - protein, 234 aa, Homo sapiens
MDFLRNLFSQTLSLGSQKERLLDELTLEGVARYMQSERCRRVICLVGAGISTSAGIPDFRSPSTGLYDNLEKYHLPYPEAIFEISYFKKHPEPFFALAKELYPGQFKPTICHYFMRLLKDKGLLLRCYTQNIDTLERIAGLEQEDLVEAHGTFYTSHCVSASCRHEYPLSWMKEKIFSEVTPKCEDCQSLVKPDIVFFGESLPARFFSCMQSDFLKVDLLLVMGTSLQGRGLAG

SEQ ID NO: 45742 - protein, 1096 aa, Homo sapiens
MLLELAGQEALKPAGAIYMEKSGCSPFPVCWAKEYDRYLASSKIMAAAYLDPNLNHTPNSSTKTHLGTGMERSPGAMERVLKVFHYFESNSEPTTWASIIRHGDATDVRGIIQKIVDSHKVKHVACYGFRLSHLRSEEVHWLHVDMGVSSVREKYELAHPPEEWKYELRIRYLPKGFLNQFTEDKPTLNFFYQQVKSDYMLEIADQVDQEIALKLGCLEIRRSYWEMRGNALEKKSNYEVLEKDVGLKRFFPKSLLDSVKAKTLRKLIQQTFRQFANLNREESILKFFEILSPVYRFDKECFKCALGSSWIISVELAIGPEEGISYLTDKGCNPTHLADFTQVQTIQYSNSEDKDRKGMLQLKIAGAPEPLTVTAPSLTIAENMADLIDGYCRLVNGTSQSFIIRPQKEGERALPSIPKLANSEKQGMRTHAVSVSETDDYAEIIDEEDTYTMPSTRDYEIQRERIELGRCIGEGQFGDVHQGIYMSPENPALAVAIKTCKNCTSDSVREKFLQEALTMRQFDHPHIVKLIGVITENPVWIIMELCTLGELRSFLQVRKYSLDLASLILYAYQLSTALAYLESKRFVHRDIAARNVLVSSNDCVKLGDFGLSRYMEDSTYYKASKGKLPIKWMAPESINFRRFTSASDVWMFGVCMWEILMHGVKPFQGVKNNDVIGRIENGERLPMPPNCPPTLYSLMTKCWAYDPSRRPRFTELKAQLSTILEEEKAQQEERMRMESRRQATVSWDSGGSDEAPPKPSRPGYPSPRSSEGFYPSPQHMVQTNHYQVSGYPGSHGITAMAGSIYPGQASLLDQTDSWNHRPQEIAMWQPNVEDSTVLDLRGIGQVLPTHLMEERLIRQQQEMEEDQRWLEKEERFLKPDVRLSRGSIDREDGSLQGPIGNQHIYQPVGKPDPAAPPKKPPRPGAPGHLGSLASLSSPADSYNEGVKLQPQEISPPPTANLDRSNDKVYENVTGLVKAVIEMSSKIQPAPPEEYVPMVKEVGLALRTLLATVDETIPLLPASTHREIEMAQKLLNSDLGELINKMKLAQQYVMTSLQQEYKKQMLTAAHALAVDAKNLLDVIDQARLKMLGQTRPH

SEQ ID NO: 45743 - protein, 163 aa, Homo sapiens
MAEFSQKRGKRRSDEGLGSMVDFLLANARLVLGVGGAAVLGIATLAVKRFIDRATSPRDEDDTKADSWKELSLLKATPHLQPRPPPAALSQPVLPLAPSSSAPGEWHSFPSFGVTFKRRSPGFALTDCVTLRESLLLSRLWAPQIFNGGGVSLPCSWSKVVAL

SEQ ID NO: 45744 - protein, 970 aa, Homo sapiens
MLPCKKRRTTVTESLQHKGNQEENNVDLESAVKPESDQVKDLSSVSLSWDPSHGRVAGFEVQSLQDAGNQLGMEDTSLSSGMLTQNTNVPILEGVDVAISQGITLPSLESFHPLNIHIGKGKLHATGSKRGKKMTLRPGPVTQEDRCDHLTLKEPFSGEPSEEVKEEGGKPQMNSEGEIPSLPSGSQSAKPVSQPRKSTQPDVCASPQEKPLRTLFHQPEEEIEDGGLFIPMEEQDNEESEKRRKKKKGTKRKRDGRGQEGTLAYDLKLDDMLDRTLEDGAKQHNLTAVNVRNILHEVITNEHVVAMMKAAISETEDMPMFEPKMTRSKLKEVVEKGVVIPTWNISPIKKANEIKPPQFVDIHLEEDDSSDEEYQPDDEEEDETAEESLLESDVESTASSPRGAKKSRLRQSSEMTETDEESGILSEAEKVTTPAIRHISAEVVPMGPPPPPKPKQTRDSTFMEKLHAVDEELASSPVCMDSFQPMDDSLIAFRTRSKMPLKDVPLGQLEAELQAPDITPDMYDPNTADDEDWKMWLGGLMNDDVGNEDEADDDDDPEYNFLEDLDEPDTEDFRTDRAVRITKKEVNELMEELFETFQDEMGFSNMEDDGPEEEECVAEPRPNFNTPQALRFEEPLANLLNEQHRTVKELFEQLKMKKSSAKQLQEVEKVKPQSEKVHQTLILDPAQRKRLQQQMQQHVQLLTQIHLLATCNPNLNPEATTTRIFLKELGTFAQSSIALHHQYNPKFQTLFQPCNLMGAMQLIEDFSTHVSIDCSPHKTVKKTANEFPCLPKQVAWILATSKVFMYPELLPVCSLKAKNPQDKIVFTKAEDNLLALGLKHFEGTEFPNPLISKYLLTCKTAHQLTVRIKNLNMNRAPDNIIKFYKKTKQLPVLGKCCEEIQPHQWKPPIEREEHRLPFWLKASLPSIQEELRHMADGARQSYRRKRRGVSQLKPLHLLKSPLMKEPQGQM

SEQ ID NO: 45745 - protein, 49 aa, Homo sapiens
  MOD_RES (1)..(1): Any amino acid
XSQSLRCDLIRYICGVVHPSNEVLSSDILPRWAIIGWLLTTCTTPSSPV

SEQ ID NO: 45746 - protein, 290 aa, Homo sapiens
MRTQTHGGHSSYGHAAPGTDAGKAFCMFYAVLGIPLTLVMFQSLGERMNTFVRYLLKRIKKCCGMRNTDVSMENMVTVGFFSCMGTLCIGAAAFSQCEEWSFFHAYYYCFITLTTIGFGDYVALQTKGALQKKPLYVAFSFMYILVGLTVIGAFLNLVVLRFLTMNSEDERRDAEERASLAGNRNSMVIHIPEEPRPSRPRYKADVPDLQSVCSCTCYRSQDYGGRSVAPQNSFSAKLAPHYFHSISYKIEEISPSTLKNSLFPSPISSISPGLHSFTDHQRLMKRRKSV

SEQ ID NO: 45747 - protein, 26 aa, Homo sapiens
MLFRNRFLLLLALAALLAFVSLSLQF

SEQ ID NO: 45748 - protein, 226 aa, Homo sapiens
  MOD_RES (1)..(1): Any amino acid
XLVEYLQAMRNFFLMEGGDTMYDFYTSIFDKIREKETWQNVSFLNVQLQEAVGQRYPEDSSRKWRPGTVAHTCNASTLGGRGGGSPEVRSSRPAWPTCLSISFENVDTAKKKLPVHILDGLTLSYKVPWPVDIVISLECQKIYNQVFLLLLQIKWAKYSLDVLLFGELVSTAEKPRLKEGLIHEQDTVAQFGPQKEPVRQQIHRMFLLRVKLMHFVNSLHNYIMTR

SEQ ID NO: 45749 - protein, 184 aa, Homo sapiens
MDDEEETYRLWKIRKTIMQLCHDRGYLVTQDELDQTLEEFKAQSGDKPSEGRPRRTDLTVLVAHNDDPTDQMFVFFPEEPKVGIKTIKVYCQRMQEENITRALIVVQQGMTPSAKQLVPEHVVMTKEEVTELLARYKLRENQLPRIQAGDPVARYFGIKRGQVVKIIRPSETAGRYITYRLVHP

SEQ ID NO: 45750 - protein, 45 aa, Homo sapiens
MAGWQSYVDNLMCDGCCQEAAIVGYCDAKYVWAATAGGVFQSITK

SEQ ID NO: 45751 - protein, 87 aa, Homo sapiens
MADKEAAFDDAVEERVINEEYKIWKKNTPFLYDLVMTHALEWPSLTAQWLPDVTRSFWRVQPRLASPWTSEGRLWAFLEPKSQWALT

SEQ ID NO: 45752 - protein, 97 aa, Homo sapiens
MPAERPAGSGGSEAPAMVEQLDTAVITPAMLEEEEQLEAAGLERERKMLEKARMSWDRESTEIRYRRLQHLLEKSNIYSKFLLTKMEQQQLETVMKI

SEQ ID NO: 45753 - protein, 86 aa, Homo sapiens
MDSSQHLVTFEDVAVDFTQEEWTLLDQAQRDLYRDVMLENYKNLIILAGSELFKRSLMSGLEQMEELRTGVTGVLQGEKQYCRETV

SEQ ID NO: 45754 - protein, 888 aa, Homo sapiens
SEVEALTEQLSEEEEEEEEEEEEEEEEEEEEEEEEDEESGNQSDRSGSSGRRKAKKKWRKDSPWVKPSRKRRKREPPRAKEPRGVSNDTSSLETERGFEELPLCSCRMEAPKIDRISERAGHKCMATESVDGELSGCNAAILKRETMRPSSRVALMVLCETHRARMVKHHCCPGCGYFCTAGTFLECHPDFRVAHRFHKACVSQLNGMVFCPHCGEDASEAQEVTIPRGDGVTPPAGTAAPAPPPLSQDVPGRADTSQPSARMRGHGEPRRPPCDPLADTIDSSGPSLTLPNGGCLSAVGLPLGPGREALEKALVIQESERRKKLRFHPRQLYLSVKQGELQKVILMLLDNLDPNFQSDQQSKRTPLHAAAQKGSVEICHVLLQAGANINAVDKQQRTPLMEAVVNNHLEVARYMVQRGGCVYSKEEDGSTCLHHAAKIGNLEMVSLLLSTGQVDVNAQDSGGWTPIIWAAEHKHIEVIRMLLTRGADVTLTDNEENICLHWASFTGSAAIAEVLLNARCDLHAVNYHGDTPLHIAARESYHDCVLLFLSRGANPELRNKEGDTAWDLTPERSDVWFALQLNRKLRLGVGNRAIRTEKIICRDVARGYENVPIPCVNGVDGEPCPEDYKYISENCETSTMNIDRNITHLQHCTCVDDCSSSNCLCGQLSIRCWYDKDGRLLQEFNKIEPPLIFECNQACSCWRNCKNRVVQSGIKVRLQLYRTAKMGWGVRALQTIPQGTFICEYVGELISDAEADVREDDSYLFDLDNKDGEVYCIDARYYGNISRFINHLCDPNIIPVRVFMLHQDLRFPRIAFFSSRDIRTGEELGFDYGDRFWDIKSKYFTCQCGSEKCKHSAEAIALEQSRLARLDPHPELLPELGSLPPVNT

SEQ ID NO: 45755 - protein, 255 aa, Homo sapiens
MILNKALMLGALALTTVMSPCGGEDIVADHVASYGVNLYQSYGPSGQYSHEFDGDEEFYVDLERKETVWQLPLFRRFRRFDPQFALTNIAVLKHNLNIVIKRSNSTAATNEVPEVTVFSKSPVTLGQPNTLICLVDNIFPPVVNITWLSNGHSVTEGVSETSFLSKSDHSFFKISYLTFLPSDDEIYDCKVEHWGLDEPLLKHWEPEIPTPMSELTETVVCALGLSVGLVGIVVGTVLIIRGLRSVGASRHQGPL

SEQ ID NO: 45756 - protein, 149 aa, Homo sapiens
MRTKAAGCAERRPLQPRTEAAAAPAGRAMPSEYTYVKLRSDCSRPSLQWYTRAQSKMRRPSLLLKDILKELRNMLSKSCRRNVVPSLPRHQWRCYLSTGIAWTYSLLCRRPPKTVKLSPSTILLLGSGSSPVKSRPSWNSCQSTTSLNT

SEQ ID NO: 45757 - protein, 197 aa, Homo sapiens
MTTDERKLFNHLKSPHLKYWVPFIWFGNLATKARNEGRIRDSVDLQSLMTEMNRYRSWCSLLFGYDWVGIPLVYTQVAEQLINPFGEDDDDFETNWCIDRNLQVSLLAVDEMHMSLPKMKKDIYWDDSAARPPYTLAAADYCIPSFLGSTVQMGRSRFNPVPFAECLLIPISDGLWHFSSKGASEAENLSRPKEKED

SEQ ID NO: 45758 - protein, 455 aa, Homo sapiens [sequence omitted]

SEQ ID NO: 45759 - protein, 145 aa, Homo sapiens
MVPGTPSPLLGRGKELWLESLACLPGAVKRDCTITGWSEPFPPYPVACPVPLELLAEEESYFSTVKIIYTVGHSISIVALFVAITILVALRRLHCPRNYVHTQLFTTFILKAGAVFLKDAALFHSDDTDHCSFSTGCPCSSLARG

SEQ ID NO: 45760 - protein, 438 aa, Homo sapiens
MSGYKRMRRQHQKQLIALENKLKAEMDEHRLKLQKEVETHANNSSIELEKLAKKQVAIIEKEAKVAAADEKKFQQQILAQQKKDLTTFLESQKKQYKICKEKIKEEMNEDHSTPKKEKQERISKHKENLQHTQAEEEAHLLTQQRLYYDKNCRFFKRKIMIKRHEVEQQNIREELNKKRTQKEMEHAMLIRHDESTRELEYRQLHTLQKLRMDLIRLQHQTELENQLEYNKRRERELHRKHVMELRQQPKNLKAMEMQIKKQFQDTCKVQTKQYKALKNHQLEVTPKNEHKTILKTLKDEQTRKLAILAEQYEQSINEMMASQALRLDEAQEAECQALRLQLQQEMELLNAYQSKIKMQTEAQHERELQKLEQRVSLRRAHLEQKIEEELAALQKERSERIKNLLERQEREIETFDMESLRMGFGNLVTLDFPKEDYR

SEQ ID NO: 45761 - protein, 337 aa, Homo sapiens
MMEEEELEFVEELEAVLQLTPEVQLAIEQVFPSQDPLDRADFNAVEYINTLFPTEQSLANIDEVVNKIRLKIRRLDDNIRTVVRGQTNVGQDGRQALEEAQKAIQQLFGKIKDIKDKAEKSEQMVKEITRDIKQLDHAKRHLTTSITTLNHLHMLAGGVDSLEAMTRRRQYGEVANLLQGVMNVLEHFHKYMGIPQIRQLSERVKAAQTELGQQILADFEEAFPSQGTKRPGGPSNVLRDACLVANILDPRIKQEIIKKFIKQHLSEYLVLFQENQDVAWLDKIDRRYAWIKRQLVDYEEKYGRMFPREWCMAERIAVEFCHVTRTCQDYAYQSEGN

SEQ ID NO: 45762 - protein, 177 aa, Homo sapiens
IFCMAGVFSFACALGVVTALGTPLWIKATVLCKTGALLVNASGQELDKFMGEMQYGLFHGEGVRQCGLGARPFRFSCYFLDPFMGLPTGVPHLLSLPCSTSCRREHTSERVQEPAGCFSAVRSKLHAGPAAATSFSRFAQSNPSEHPRQCHSLLCHPYCVNHGGDSLLHVQCFWKTF

SEQ ID NO: 45763 - protein, 327 aa, Homo sapiens
MVPGISETELSLQKEQLQLKIIEIEDEAEKWQKEKDRIKSFTTNEKAILEQNFRDLVRDLEKQKEEVRAALEQREQDAVDQVKVIMDALDERAKVLHEDKQTREQLHSISDSVLFLQEFGALMSNYSLPPPLPTYHVLLEGEGLGQSLGNFKDDLLNVCMRHVEKMCKADLSRNFIERNHMENGGDHRYVNNYTNSFGGEWSAPDTMKRYSMYLTPKGGVRTSYQPSSPGRFTKETTQKNFNNLYGTKGNYTSRVWEYSSSIQNSDNDLPVVQGSSSFSLKGYPSLMRSQSPKAQPQTWKSGKQTMLSHYRPFYVNKGNGIGSNEAP

SEQ ID NO: 45764 - protein, 369 aa, Homo sapiens
MKLKSLLLRYYPPGIMLEYEKHGELKTKSIDLLDLGPSTDVSALVEEIQKAEPLLTASRTEQVKLLIQRLQEKLGQNSNHTFYLFKVLKAHILPLTNVALNKSGSCFITGSYDRTCKLWDTASGEELNTLEGHRNVVYAIAFNNPYGDKIATGSFDKTCKLWSVETGKCYHTFRGHTAEIVCLSFNPQSTLVATGSMDTTAKLWDIQNGEEVYTLRGHSAEIISLSFNTSGDRIITGSFDHTVVVWDADTGRKVNILIGHCAEISSASFNWDCSLILTGSMDKTCKLWDATNGKCVATLTGHDDEILDSCFDYTGKLIATASADDGVSLCRPGWSAVARSWLTATCASQVQAILLPQPPELCHVLGNHV

SEQ ID NO: 45765 - protein, 411 aa, Homo sapiens
MAGSADSYTSRPSDSDVSLEEDREAIRQEREQQAAIQLERAKSKPVAFAVKTNVSYCGALDEDVPVPSTAISFDAKDFLHIKEKYNNDWWIGRLVKEGCEIGFIPSPLRLENIRIQQEQKRGRFHGGKSSGNSSSSLGEMVSGTFRATPTSTAKQKQKVTEHIPPYDVVPSMRPVVLVGPSLKGYEVTDMMQKALFDFLKHRFDGRISITRVTADISLAKRSVLNNPSKRAIIERSNTRSSLAEVQSEIERIFELARSLQLVVLDADTINHPAQLIKTSLAPIIVHVKVSSPKVLQRLIKSRGKSQSKHLNVQLVAADKLAQCPPSQRMRHSNHSTENSPIERRSLMTSDENYHNERARKSRNRLSSSSQHSRDHYPLVEEDYPDSYQDTYKPHRNRGSPGGYSHDSRHRL

SEQ ID NO: 45766 - protein, 126 aa, Homo sapiens
MFGFHKPKMYRSIEGCCICRAKSSSSRFTDSKRYEKDFQSCFGLHETRSGDICNACVLLVKRWKKLPAGSKKNWNHVVDARAGPSLKTTLKPKKVKTLSGNRIKSNQISKLQKEFKRHNSDAHSTT

SEQ ID NO: 45767 - protein, 132 aa, Homo sapiens
MQLFLLAVSVPLPAMPFLELDTNLPANRVPAGLEKRLCAAAASILGKPADRVNVTVRPGLAMALSGSTEPCAQLSISSIGVVGTAEDNRSHSAHFFEFLTKELALGQDRILIRFFPLESWQIGKIGTVMTFL

SEQ ID NO: 45768 - protein, 550 aa, Homo sapiens
MTVARPSVPAALPLLGELPRLLLLVLLCLPAVWGDCGLPPDVPNAQPALEGRTSFPEDTVITYKCEESFVKIPGEKDSVICLKGSQWSDIEEFCNRSCEVPTRLNSASLKQPYITQNYFPVGTVVEYECRPGYRREPSLSPKLTCLQNLKWSTAVEFCKKKSCPNPGEIRNGQIDVPGGILFGATISFSCNTGYKLFGSTSSFCLISGSSVQWSDPLPECREIYCPAPPQIDNGIIQGERDHYGYRQSVTYACNKGFTMIGEHSIYCTVNNDEGEWSGPPPECRGKSLTSKVPPTVQKPTTVNVPTTEVSPTSQKTTTKTTTPNAQGTETPSVLQKHTTENVSATRTPPTPQKPTTVNVPATIVTPTPKPTTINVPATGVSSTPQRHTIVNVSATGTLPTLQKPTRANDSATKSPAAAQTSFISKTLSTKTPSAAQNPMMTNASATQATLTAQKFTTAKVAFTQSPSAARKSTNVHSPVTNGLKSTQRFPSAHITATRSTPVSRTTKHFHETTPNKGSGTTSGTTRLLSGHTCFTLTGLLGTLVTMGLLT

SEQ ID NO: 45769 - protein, 112 aa, Homo sapiens
MASPTDGTDLEASLLSFEKLDRASPDLWPEQLPGVAEFAASFKSPITSSPPKWMAEIERDDIDMLKELGSLTTANLMEKVRGLQNLAYQLGLDESREMTRGKFLNILEKPKK

SEQ ID NO: 45770 - protein, 70 aa, Homo sapiens
MNQKLLKLENLLRFHTIYRQLHSLCQRRALRQWRHGFSSAYPVWTAQLCAWPWPTDVLTGAALSQYRLLV

SEQ ID NO: 45771 - protein, 184 aa, Homo sapiens
EFFLPRLVVTASGTPWFSSQCFPSGSSEGKSKEAEIKRINKELANIRSKFKGDKALDGYSKKKYVCKLLFIFLLGHDIDFGHMEAVNLLSSNRYTEKQIGYLFISVLVNSNSELIRLINNAIKNDLASRNPTFMGLALHCIASVGSREMAEAFAGEIPKVLVAGDTMDSVKQSAALCLLRLYRT

SEQ ID NO: 45772 - protein, 96 aa, Homo sapiens
MPNSVLWAVDLFGRVYTLSTAGQYWEMCKDSQLEFKRVSATTQCCWGIACDNQVYVYVCASDVPIRRREEAYENQAWVQGRLCVPGPQRWNPMGGF

SEQ ID NO: 45773 - protein, 82 aa, Homo sapiens
MAEVHVIGQIIGASGFSESSLFCKWGIHTETGSRYVAQAGLELLRSNRPPTSASQSARIKNGRHGSSCQACGRAKRKWTPRR

SEQ ID NO: 45774 - protein, 25 aa, Homo sapiens
MANDIDELIGIPFPNHSSEVLCSLN

SEQ ID NO: 45775 - protein, 96 aa, Homo sapiens
MAFTFAAFCYMLALLLTAALIFFAIWHIIAFDELKTDYKNPIDQCNTLNPLVLPEYLIHAFFCVMFLCAAEWLTLGLNMPLLAYHIWSMIYVLVSS

SEQ ID NO: 45776 - protein, 134 aa, Homo sapiens
  MOD_RES (1)..(1): Any amino acid
XNILNGNTPEQVNYTEWKFSETNSFIGDGFKNQHEEEEMTLSHSALKQKEPLHPVNADKESSEQGSEVSEAQTTDSDDVIVPPMSQKYPKADSEKMCIEIVSLAFYPEAEVMSDENIKQVYVEYKFYDLPLSET

SEQ ID NO: 45777 - protein, 240 aa, Homo sapiens
GNTEQPVQTSKIGLGRREYQSLQHRHHSQRSKCRPPKGMYLTQEDVVAVSCSPNAANTILRQLDMELISLKRQVQNAKQVNSALKQKMEGGIEEFKPPESNQKINARWTTEEQLLAVQGVRKYGKDFQAIADVIGNKTVGQVKNFFVNYRRRFNLEEAQTPQAPRTLGPSPPAPSSTPTPTAPIATLNQPPPLLRPTLPAAPALHRQPPPLQQQARFIQPRPTLNQPPPPLIRPANSMPP

SEQ ID NO: 45778 - protein, 183 aa, Homo sapiens
MKSDCMQTTICQERKKDPIEMFHSGQLVKVCAPMVRYSKWAMAEGYGACLINKPELVQDMVKQVRNQVETPGFSVSIKIRIHDDLKRTVDLCQKAEATGVSWITVHGRTAEERHQPVHYDSIKIIKENMSIPVIANGDIRSLKEAENVWRITGTDDGRRFFHLMSGVKLQLFGTRLSLPLSSY

SEQ ID NO: 45779 - protein, 67 aa, Homo sapiens
MLSRLQELRKEEETLLRLKAALHDQLNRLKVTPRPSPAPPPFLPSDHFPPTWASVVTTCCGQFSATH

SEQ ID NO: 45780 - protein, 361 aa, Homo sapiens
MYPEALPVGILSNPDTFKRRSGSYSNDKPEVWFAAGSGSPNQKLSSSCVGRACGEMDTPPLSDSESESDESLVTDRELQDAFSRGLLKPGLNVVLEGPKKAVNDVNGLKQCLAEFKRDLEWVERLDVTLGPVPEIGGSEAPAPQNKDQKAVDPEDDFQREMSFYRQAQAAVLAVLPRLHQLKVPTKRPTDYFAEMAKSDLQMQKIRQKLQTKQAAMERSEKAKQLRALRKYGKKVQTEVLQKRQQEKAHMMNAIKKYQKGFSDKLDFLEGDQKPLAQRKKAGAKGQQMRKGPSAKRRYKNQKFGFGGKKKGSKWNTRESYDDVSSFRAKTAHGRGLKRPGKKGSNKRPGKRTREKMKNRTH

SEQ ID NO: 45781 - protein, 193 aa, Homo sapiens
MQGSTRRMGVMTDVHRRFLQLLMTHGVLEEWDVKRLQTHCYKVHDRNATVDKLEDFINNINSVLESLYIEIKRGVTEDDGRPIYALVNLATTSISKMATDFAENELDLFRKALELIIDSETGFASSTNILNLVDQLKGKKMRKKEAEQVLQKFVQNKWLIEEGEFTLHGRAILEMEQYIRETYPDAVKICNIC

SEQ ID NO: 45782 - protein, 42 aa, Homo sapiens
MLISKNMPWRRLQGISFGMYSAEELNFWKKIPIPLPLKFGRN

SEQ ID NO: 45783 - protein, 303 aa, Homo sapiens
MLVVEVANGRSLVWGAEAVQALRERLGVGGRTVGALPRGPRQNSRLGLPLLLMPEEARLLAEIGAVTLVSAPRPDSRHHSLALTSFKRQQEESFQEQSALAAEARETRRQELLEKITEGQAAKKQKLEQASGASSSQEAGSSQAAKEDETSDGQASGEQEEAGPSNGVAPLPRSALLVQLATARPRPVKARPLDWRVQSKDWPHAGRPAHELRYSIYRDLWERGFFLSAAGKFGGDFLVYPGDPLRFHAHYIAQCWAPEDTIPLQDLVAAGRLGTSVRKTLLLCSPQPDGKVVYTSLQWASLQ

SEQ ID NO: 45784 - protein, 911 aa, Homo sapiens
MESAGLEQLLRELLLPDTERIRRATEQLQIVLRAPAALPALCDLLASAADPQIRQFAAVLTRRRLNTRWRRLAAEQRESLKSLILTALQRETEHCVSLSLAQLSATIFRKEGLEAWPQLLQLLQHSTHSPHSPEREMGLLLLSVVVTSRPEAFQPHHRELLRLLNETLGEVGSPGLLFYSLRTLTTMAPYLSTEDVPLARMLVPKLIMAMQTLIPIDEAKACEALEALDELLESEVPVITPYLSEVLTFCLEVARNVALGNAIRIRILCCLTFLVKVKSKALLKNRLLPPLLHTLFPIVAAEPPPGQLDPEDQDSEEEELEIELMGETPKHFAVQVVDMLALHLPPEKLCPQLMPMLEEALRSESPYQRKAGLLVLAVLSDGAGDHIRQRLLPPLLQIVCKGLEDPSQVVRNAALFALGQFSENLQPHISSYSREVMPLLLAYLKSVPLGHTHHLAKACYALENFVENLGPKVQPYLPELMECMLQLLRNPSSPRAKELAVSALGAIATAAQASLLPYFPAIMEHLREFLLTGREDLQPVQIQSLETLGVLARAVGEPMRPLAEECCQLGLGLCDQVDDPDLRRCTYSLFAALSGLMGEGLAPHLEQITTLMLLSLRSTEGIVPQYDGSSSFLLFDDESDGEEEEELMDEDVEEEDDSEISGYSVENAFFDEKEDTCAAVGEISVNTSVAFLPYMESVFEEVFKLLECPHLNVRKAAHEALGQFCCALHKACQSCPSEPNTAALQAALARVVPSYMQAVNRERERQVVMAVLEALTGVLRSCGTLTLKPPGRLAELCGVLKAVLQRKTACQDTDEEEEEEDDDQPLTWLHRLNTTPCCWSTLERPSLPWQPRLGETPLPHSLPVSCHYWCARQNRAAQWQRSPLQWGPWQRLFRAWVLPQPSLCLGCSLCC

SEQ ID NO: 45785 - protein, 113 aa, Homo sapiens
  MOD_RES (1)..(1): Any amino acid
XKPKVKVSFKNHSALITSVVPGDYDGDSQMDVLLTYLPKNYAKSELGAVIFWGQNQTLDPNNMTILNRTFQDEPLIMDFNGDLIPDIFGITNESNQPQILLGGHTTLNAPHLF

SEQ ID NO: 45786 - protein, 395 aa, Homo sapiens
MSSRQRGNFNYKLAFKSAIMDVLAEANGTFALNLLKTLGKDNSKNVFFSPMSMSCALAMVYMGAKGNTAAQMAQILSFNKSGGGGDIHQGFQSLLTEVNKTGTQYLLRMANRLFGEKSCDFLSSFRDSCQKFYQAEMEELDFISAVEKSRKHINTWVAEKTEGKIAELLSPGSVDPLTRLVLVNAVYFRGNWDEQFDKENTEERLFKVSKNEEKPVQMMFKQSTFKKTYIGEIFTQILVLPYVGKELNMIIMLPDETTDLRTVEKELTYEKFVEWTRLDMMDEEEVEVSLPRFKLEESYDMESVLRNLGMTDAFELGKADFSGMSQTDLSLSKVVHKSFVEVNEEGTEAAAATAAIMMMRCARFVPRFCADHPFLFFIQHSKTNGILFCGRFSSP

SEQ ID NO: 45787 - protein, 91 aa, Homo sapiens
NIWGPFLIISPASTLNNWHQEFTRFVPKFKVLPYWGNPHDRKVIRRFWSQCSLEDPLTVPVSESAFANRDPNSEHHGRALGSAAFHYANII

SEQ ID NO: 45788 - protein, 182 aa, Homo sapiens
  MOD_RES (1)..(1): Any amino acid
XRPVEHLNDKIKIKFGLAISQLVDVDEKNQLMTTNVWLKQEWIDVKLRWNPDDYGGIKVIRVPSDSVWTPDIVLFDNADGRFEGTSTKTVIRYNGTVTWTPPANYKSSCTIDVTFFPFDLQNCSMKFGSWTYDGSQVDIILEDQDVDKRDFFDNGEWEIVSATGSKGNRTDSCCWLLKIGNS

SEQ ID NO: 45789 - protein, 304 aa, Homo sapiens
MSLTVVSMACVGFFLLQGAWPHEGVHRKPSLLAHPGRLVKSEETVILQCWSDVMFEHFLLHREGMFNDTLRLIGEHHDGVSKANFSISRMKQDLAGTYRCYGSVTHSPYQLSAPSDPLDIVIIGLYEKPSLSAQPGPTVLAGENVTLSCSSRSSYDMYHLSREGEAHERRLPAGTKVNGTFQANFPLGPATHGGTYRCFGSFRDSPYEWSKSSDPLLVSVTGNPSNSWPSPTEPSSETGNPRHLHILIGTSVVKIPFTILLFFLLHRWCSDKKNAAVMDQEPAGNRTVNSEDSDEQDHQEVSYA

SEQ ID NO: 45790 - protein, 220 aa, Homo sapiens
MEGLTLSDAEQKYYSDLFSYCDIESTKKVVVNGRVLELFRAAQLPNDVVLQIMELCGATRLGYFGRSQFYIALKLVAVAQSGFPLRVESINTVKDLPLPRFVASKNEQESRHAASYSSDSENQGSYSGVIPPPPGRGQVKKGSVSHDTVQPRTSADAQEPASPVVSPQQSPPTSPHTWRKHSRHPSGGNSERPLAGPGPFWSPFGEAQSGNSQTLIKMVH

SEQ ID NO: 45791 - protein, 48 aa, Homo sapiens
MKGQQKTAETEEGTVQIQEGAVATGEDPTSVAIASIQSAATFPDPNVK

SEQ ID NO: 45792 - protein, 55 aa, Homo sapiens
MPWLLSAPKLVPAVANVRGLSGSYFVTQAGVQWRDPITLQPMSSRLKQSFYQLPE

SEQ ID NO: 45793 - protein, 508 aa, Homo sapiens
MDEAGNHHSEQTITRTENQTPHALAHRRMGPCLSCSQLYSQYLGLSQTHSSPPLALDPPRRQRQERTVYTESQQKVLEFYFQKDQYPNYDQRLNLAEMLSLREQQLQVWFKNRRAKLARERRLQQQPQRVPGQRGRGARAAPLVPAASASAPQRGPSGILPAAEPTICSLHQAWGGPGCRAQKGIPAALSPGPGPIPAPIPGPAQIPGPLPGSIPGPIPGPAQIPSPIPAPIPGPISGPVQIPGPFRGPIPGPISGPAPIPGPISGPFSGPNPGPIPGPNPGPIPGPISGPIPGPISVPIPGPIPGPISGPISGPNPGPIPGPIPGPISGPNPGPIPGPISGPNPGLIPGPIPGPISGPGPIIGPIPSPAQIPGPGRLQGPGPILSPGRMRSPGSLPGLAPILGPGSGPGSGSVPAPIPGPGSLPAPAPLWPQSPDASDFLPDTQLFPHFTELLLPLDPLEGSSVSTMTSQYQEGDDSMGKKHSGSQPQEEGGSVNENHSGPRLLLDL

SEQ ID NO: 45794 - protein, 200 aa, Homo sapiens
MPLVEERHRILNETGKILLEKFGGSFLNCVRESENSAQKLMHLVVESFPSYRDVTLFEGKRVSFYKRAQILVADTWSVLEGKGDGCFKDISSITMFADYRLPQVLAHLGALKYSDDLLKKLLKGEMLSYGDRQEVEIRGCSLWCVELIRDCLLELIEQKGEKPNGEINSILLDYYLWDYAHDHREDMKGIPFHRIRCIYY

SEQ ID NO: 45795 - protein, 60 aa, Homo sapiens
MSLLFSRCNSIVTVKKNKRHMAEVNASPLKHFVTAKKKINGIFEQLGAYIQESATFLEGN

SEQ ID NO: 45796 - protein, 354 aa, Homo sapiens
MAQPYASAQFAPPQNGIPAEYTAPHPHPAPEYTGQTTVPEHTLNLYPPAQTHSEQSPADTSAQTVSGTATQTDDAAPTDGQPQTQPSENTENKSQPKRLHVSNIPFRFRDPDLRQMFGQFGKILDVEIIFNERGSKGFGFVTFENSADADRAREKLHGTVVEGRKIEVNNATARVMTNKKTVNPYTNGWKLNPVVGAVYSPEFYAGTVLLCQANQEGSSMYSAPSSLVYTSAMPGFPYPAATAAAAYRGAHLRGRGRTVYNTFRAAAPPPPIPAYGGVVYQDGFYGADIYGGYAAYRYAQPTPATAAAYSDRNQFVFVAADEISCNTSAVTDEFMLPTPTTTHLLQPPPTALVP

SEQ ID NO: 45797 - protein, 38 aa, Homo sapiens
MCSLPRGFEPQAPEDLAQRSLVELREMLKRQERLLRNE

SEQ ID NO: 45798 - protein, 41 aa, Homo sapiens
MKFFVFALILALMLSMTGADSHAKEKHHSHRGYRSNYLYDN

SEQ ID NO: 45799 - protein, 370 aa, Homo sapiens
MSDTLTADVIGRRVEVNGEHATVRFAGVVPPVAGPWLGVEWDNPERGKHDGSHEGTVYFKCRHPTGGSFIRPNKVNFGTDFLTAIKNRYVLEDGPEEDRKEQIVTIGNKPVETIGFDSIMKQQSQLSKLQEVSLRNCAVSCAGEKGGVAEACPNIRKVDLSKNLLSSWDEVIHIADQLRHLEVLNVSENKLKFPSGSVLTGTLSVLKVLVLNQTGITWAEVLRCVAGCPGLEELYLESNNIFISERPTDVLQTVKLLDLSSNQLIDENQLYLIAHLPRLEQLILSDTGISSLHFPDAGIGCKTSMFPSLKYLVVNDNQISQWSFFNELEKLPSLRALSCLRNPLTKEDKEAETARLLIIASIGQLKTLNK

SEQ ID NO: 45800 - protein, 53 aa, Homo sapiens
MLQQDSNDDTEDVSLFDAEEETTNRPRKAKIRHPVASFFHLFFRVSAIIVCLL

SEQ ID NO: 45801 - protein, 51 aa, Homo sapiens
MPKTEETVLQNDPSVAENGAPEPKTPGQSQKSKSFCLDDQSPDLMSFLSQI

SEQ ID NO: 45802 - protein, 81 aa, Homo sapiens
MADVAGPSRPSAAAFWSRDFSDEEQSVVYVPGISAEGNVRSRHKLMSPKADVKLKTSRVTDASISMESLKGTGDSVDEQSK

SEQ ID NO: 45803 - protein, 53 aa, Homo sapiens
MGRAVKVLQLFKTLHRTRQQVFKNDARALEELVPRKDLLVENVPYCDAPTQKQ

SEQ ID NO: 45804 - protein, 155 aa, Homo sapiens
MKVIESRAQKDEEKMEIQEIQLKEAKHIAEDADRKYEEVARKLVIIESDLERAEERAELSEGKCAELEEELKTVTNNLKSLEAQAEKYSQKEDRYEEEIKVLSDKLKEAETRAEFAERSVTKLEKSIDDLEDQLYQQLEQNRRLTNELKLALNED

SEQ ID NO: 45805 - protein, 668 aa, Homo sapiens
MNGQEVFYLTYTPEDVEGNVQLETGDKINFVIDNNKHTGAVSARNIMLLKKKQARCQGVVCAMKEAFGFIERGDVVKEIFFHYSEFKGDLETLQPGDDVEFTIKDRNGKEVATDVRLLPQGTVIFEDISIEHFEGTVTKVIPKVPSKNQNDPLPGRIKVDFVIPKELPFGDKDTKSKVTLLEGDHVRFNISTDRRDKLERATNIEVLSNTFQFTNEAREMGVIAAMRDGFGFIKCVDRDVRMFFHFSEILDGNQLHIADEVEFTVVPDMLSAQRNHAIRIKKLPKGTVSFHSHSDHRFLGTVEKEATFSNPKTTSPNKGKEKEAEDGIIAYDDCGVKLTIAFQAKDVEGSTSPQIGDKVEFSISDKQRPGQQVATCVRLLGRNSNSKRLLGYVATLKDNFGFIETANHDKEIFFHYSEFSGDVDSLELGDMVEYSLSKGKGNKVSAEKVNKTHSVNGITEEADPTIYSGKVIRPLRSVDPTQTEYQGMIEIVEEGDMKGEVYPFGIVGMANKGDCLQKGESVKFQLCVLGQNAQTMAYNITPLRRATVECVKDQFGFINYEVGDSKKLFFHVKEVQDGIELQAGDEVEFSVILNQRTGKCSACNVWRVCEGPKAVAAPRPDRLVNRLKNITLDDASAPRLMVLRQPRGPDNSMGFGAERKIRQAGVID

SEQ ID NO: 45806 - protein, 55 aa, Homo sapiens
MANIHTFSACLAGGRGPWPWWAAAPPEGAQRTTGDDRKPATCSASCCCHLPHGAT

SEQ ID NO: 45807 - protein, 668 aa, Homo sapiens
MDPSADTWDLFSPLISLWINRFYIYLGFAVSISLWICVQIVIKTQGFATVLAEAVTSLDLPVAIINLKEYDPDDHLIEEVTSKNVCVFLVATYTDGLPTESAEWFCKWLEEASIDFRFGKTYLKGMRYAVFGLGNSAYASHFNKVGKNVDKWLWMLGAHRVMSRGEGDCDVVKSKHGSIEADFRAWKTKFISQLQALQKGERKKSCGGHCKKGKCESHQHGSEEREEGSHEQDELHHRDTEEEEPFESSSEEEFGGEDHQSLNSIVDVEDLGKIMDHVKKEKREKEQQEEKSGLFRNMGRNEDGERRAMITPALREALTKQVHAPRERRLLQTHILWNESHRCMETTPSLACANKCVFCWRHHTNPVGTEWRWKMDQPEMILKEAIENHQNMIKQFKGVPGVKAERFEEGMTVKHCALSLVGEPIMYPEINRFLKLLHQCKISSFLVTNAQFPAEIRNLEPVTQLYVSVDASTKDSLKKIDRPLFKDFWQRFLDSLKALAVKQQRTVYRLTLVKAWNVDELQAYAQLVSLGNPDFIEVKGVTYCGESSASSLTMAHVPWHEEVVQFVHELVDLIPEYEIACEHEHSNCLLIAHRKFKIGGEWWTWIDYNRFQELIQEYEDSGGSKTFSAKDYMARTPHWALFGASERGFDPKDTRHQRKNKSKAISGC

SEQ ID NO: 45808 - protein, 245 aa, Homo sapiens
MVLLHVKRGDESQFLLQAPGSTELEELTVQVARVYNGRLKVQRLCSEMEELAEHGIFLPPNMQGLTDDQIEELKLKDEWGEKCVPSGGAVFKKDDIGRRNGQAPNEKMKQVLKKTIEEAKAIISKKQVEAGVCVTMEMVKDALDQLRGAVMIVYPMGLPPYDPIRMEFENKEDLSGTQAGLNVIKEAEAQLWWAAKELRRTKKLSDYVGKNEKTKIIAKIQQVSTFCFNVSVVFVISLQTDKNVQ

SEQ ID NO: 45809 - protein, 136 aa, Homo sapiens
  MOD_RES (1)..(1): Any amino acid
XVLPLVEERKISMLMTACDLGAVTKPWEISRQVAELVTSEFFEQGDRERLELKLTPSAIFDRNRKDELPRLQLEWIDSICMPLYQALVKVNVKLKPMLDSVATNRSKWEELHQKRLLASTASSSPASVMVAKEDRN

SEQ ID NO: 45810 - protein, 126 aa, Homo sapiens
MPVQPPSKDTEEMEAEGDSAAEMNGEEEESEEERSGSQTESEEESSEMDDEDYERRRSECVSEMLDLEKQFSELKEKLFRERLSQLRLRLEEVGAERAPEYTEPLGGLQRSLKIRIQGSTRASVWM

SEQ ID NO: 45811 - protein, 1574 aa, Homo sapiens
MSSSHSRAGQSAAGAAPGGGVDTRDAEMPATEKDLAEDAPWKKIQQNTFTRWCNEHLKCVSKRIANLQTDLSDGLRLIALLEVLSQKKMHRKHNQRPTFRQMQLENVSVALEFLDRESIKLVSIDSKAIVDGNLKLILGLIWTLILHYSISMPMWDEEEDEEAKKQTPKQRLLGWIQNKLPQLPITNFSRDWQSGRALGALVDSCAPGLCPDWDSWDASKPVTNAREAMQQADDWLGIPQVITPEEIVDPNVDEHSVMTYLSQFPKAKLKPGAPLRPKLNPKKARAYGPGIEPTGNMVKKRAEFTVETRSAGQGEVLVYVEDPAGHQEEAKVTANNDKNRTFSVWYVPEVTGTHKVTVLFAGQHIAKSPFEVYVDKSQGDASKVTAQGPGLEPSGNIANKTTYFEIFTAGAGTGEVEVVIQDPMGQKGTVEPQLEARGDSTYRCSYQPTMEGVHTVHVTFAGVPIPRSPYTVTVGQACNPSACRAVGRGLQPKGVRVKETADFKVYTKGAGSGELKVTVKGPKGEERVKQKDLGDGVYGFEYYPMVPGTYIVTITWGGQNIGRSPFEVKVGTECGNQKVRAWGPGLEGGVVGKSADFVVEAIGDDVGTLGFSVEGPSQAKIECDDKGDGSCDVRYWPQEAGEYAVHVLCNSEDIRLSPFMADIRDAPQDFHPDRVKARGPGLEKTGVAVNKPAEFTVDAKHGGKAPLRVQVQDNEGCPVEALVKDNGNGTYSCSYVPRKPVKHTAMVSWGGVSIPNSPFRVNVGAGSHPNKVKVYGPGVAKTGLKAHEPTYFTVDCAEAGQGDVSIGIKCAPGVVGPAEADIDFDIIRNDNDTFTVKYTPRGAGSYTIMVLFADQATPTSPIRVKVEPSHDASKVKAEGPGLSRTGVELGKPTHFTVNAKAAGKGKLDVQFSGLTKGDAVRDVDIIDHHDNTYTVKYTPVQQGPVGVNVTYGGDPIPKSPFSVAVSPSLDLSKIKVSGLGEKVDVGKDQEFTVKSKGAGGQGKVASKIVGPSGAAVPCKVEPGLGADNSVVRFLPREEGPYEVEVTYDGVPVPGSPFSVKVTGEGRVKESITRRRRAPSVANVGSHCDLSLKIPEISIQDMTAQVTSPSGKTHEAEIVEGENHTYCIRFVPAEMGTHTVSVKYKGQHVPGSPFQFTVGPLGEGGAHKVRAGGPGLERAEAGVPAEFSIWTREAGAGGLAIAVEGPSKAEISFEDRKDGSCGVAYVVQEPGDYEVSVKFNEEHIPDSPFVVPVASPSGDARRLTVSSLQESGLKVNQPASFAVSLNGAKGAIDAKVHSPSGALEECYVTEIDQDKYAVRFIPRENGVYLIDVKFNGTHIPGSPFKIRVGEPGHGGDPGLVSAYGAGLEGGVTGNPAEFVVNTSNAGAGALSVTIDGPSKVKMDCQECPEGYRVTYTPMAPGSYLISIKYGGPYHIGGSPFKAKVTGPRLVSNHSLHETSSVFVDSLTKATCAPQHGAPGPGPADASKVVAKGLGLSKAYVGQKSSFTVDCSKAGNNMLLVGVHGPRTPCEEILVKHVGSRLYSVSYLLKDKGEYTLVVKWGDEHIPGSPYRVVVP

SEQ ID NO: 45812 - protein, 132 aa, Homo sapiens
MKLLTRAGSFSRFYSLKVAPKVKATAAPAGAPPQPQDLEFTKLPNGLVIASLENYSPVSRIGLFIKAGSRYEDFSNLGTTHLLRLTSSLTTKGASSFKITRGIEAVGGKLSVHSIFNQEQILSQETTLFAHP

SEQ ID NO: 45813 - protein, 42 aa, Homo sapiens
MISLTDTQKIGMGLTGFGVFFLFFGMILFFDKALLAIGNKLL

SEQ ID NO: 45814 - protein, 438 aa, Homo sapiens
MSLTVVSMACVGFFLLQGAWPLMGGQDKPFLSARPSTVVPRGGHVALQCHYRRGFNNFMLYKEDRSHVPIFHGRIFQESFIMGPVTPAHAGTYRCRGSRPHSLTGWSAPSNPLVIMVTGNHRKPSLLAHPGPLLKSGETVILQCWSDVMFEHFFLHREGISEDPSRLVGQIHDGVSKANFSIGPLMPVLAGTYRCYGSVPHSPYQLSAPSDPLDIVITGLYEKPSLSAQPGPTVQAGENVTLSCSSWSSYDIYHLSREGEAHERRLRAVPKVNRTFQADFPLGPATHGGTYRCFGSFHALPCVWSNSSDPLLVSVTGICRHLHVLIGTSVVIFLFILLLFFLLYRWCSNKKNAAVMDQEPAGDRTVNRQDSDEQDPQEVTYAQLDHCVFIQRKISRPSQRPKTPLTDTSVYTELPNAEPRSKVVSCPRAPQSGLEGVF

SEQ ID NO: 45815 - protein, 1566 aa, Homo sapiens
MYVRVSFDTKPDLLLHLMTKEWQLELPKLLISVHGGLQNFELQPKLKQVFGKGLIKAAMTTGAWIFTGGVNTGVIRHVGDALKDHASKSRGKICTIGIAPWGIVENQEDLIGRDVVRPYQTMSNPMSKLTVLNSMHSHFILADNGTTGKYGAEVKLRRQLEKHISLQKINTRIGQGVPVVALIVEGGPNVISIVLEYLRDTPPVPVVVCDGSGRASDILAFGHKYSEEGGLINESLRDQLLVTIQKTFTYTRTQAQHLFIILMECMKKKELITVFRMGSEGHQDIDLAILTALLKGANASAPDQLSLALAWNRVDIARSQIFIYGQQWPVGSLEQAMLDALVLDRVDFVKLLIENGVSMHRFLTISRLEELYNTRHGPSNTLYHLVRDVKKREYPGFGWIYFKGNLPPDYRISLIDIGLVIEYLMGGAYRCNYTRKRFRTLYHNLFGPKRPKALKLLGMEDDIPLRRGRKTTKKREEEVDIDLDDPEINHFPFPFHELMVWAVLMKRQKMALFFWQHGEEAMAKALVACKLCKAMAHEASENDMVDDISQELNHNSRDFGQLAVELLDQSYKQDEQLAMKLLTYELKNWSNATCLQLAVAAKHRDFIAHTCSQMLLTDMWMGRLRMRKNSGLKVILGILLPPSILSLEFKNKDDMPYMSQAQEIHLQEKEAEEPEKPTKEKEEEDMELTAMLGRNNGESSRKKDEEEVQSKHRLIPLGRKIYEFYNAPIVKFWFYTLAYIGYLMLFNYIVLVKMERWPSTQEWIVISYIFTLGIEKMREILMSEPGKLLQKVKVWLQEYWNVTDLIAILLFSVGMILRLQDQPFRSDGRVIYCVNIIYWYIRLLDIFGVNKYLGPYVMMIGKMMIDMMYFVIIMLVVLMSFGVARQAILFPNEEPSWKLAKNIFYMPYWMIYGEVFADQIDPPCGQNETREDGKIIQLPPCKTGAWIVPAIMACYLLVANILLVNLLIAVFNNTFFEVKSISNQVWKFQRYQLIMTFHERPVLPPPLIIFSHMTMIFQHLCCRWRKHESDPDERDYGLKLFITDDELKKVHDFEEQCIEEYFREKDDRFNSSNDERIRVTSERVENMSMRLEEVNEREHSMKASLQTVDIRLAQLEDLIGRMATALERLTGLERAESNKIRSRTSSDCTDAAYIVRQSSFNSQEGNTFKLQESIDPAGEETMSPTSPTLMPRMRSHSFYSVNMKDKGGIEKLESIFKERSLSLHRATSSHSVAKEPKAPAAPANTLAIVPDSRRPSSCIDIYVSAMDELHCDIDPLDNSVNILGLGEPSFSTPVPSTAPSSSAYATLAPTDRPPSRSIDFEDITSMDTRSFSSDYTHLPECQNPWDSEPPMYHTIERSKSSRYLATTPFLLEEAPIVKSHSFMFSPSRSYYANFGVPVKTAEYTSITDCIDTRCVNAPQAIADRAAFPGGLGDKVEDLTCCHPEREAELSHPSSDSEENEAKGRRATIAISSQEGDNSERTLSNNITVPKIERANSYSAEEPSAPYAHTRKSFSISDKLDRQRNTASLRNPFQRSKSSKPEGRGDSLSMRRLSRTSAFQSFESKHN

SEQ ID NO: 45816 - protein, 221 aa, Homo sapiens
MRNLKLFRTLEFRDIQGPGNPQCFSLRTEQGTVLIGSEHGLIEVDPVSREVKNEVSLVAEGFLPEDGSGRIVGVQDLLDQESVCVATASGDVILCSLSTQQLECVGSVASGISVMSWSPDQELVLLATGQQTLIMMTKDFEPILEQQIHQDDFGESKFITVGWGRKETQFHGSEGRQAAFQMQMHESALPWDDHRPQVTWRGDGQFFAVSVVCPETDPQAV

SEQ ID NO: 45817 - protein, 136 aa, Homo sapiens
MDTQTHSLPITHTQLHSNSQPQSRTCTRHCQTFSQSCRQSHRGSRSQSSSQSPASHRNPTGAHSSSGHQSQSPNTSPPPKRHKKTMNSHHSPMRPTILHCRCPKNRKNLEGKLKKKKMAKRIQQVYKTKTRSSGTL

SEQ ID NO: 45818 - protein, 107 aa, Homo sapiens
MKAENIKSFLRSFTKLPHLAGTEQNFLLAKKIQTQWKKFGLDSAKLVHYDVLLSYPNETNANYISIVDEHETEIFKTSYLEPPPDGYENVTNIVPPYNAFSAQGMPE

SEQ ID NO: 45819 - protein, 191 aa, Homo sapiens
MILRPPQQCGTAARMETNYLKRCFGNCLAQALAEVAKVRPSDPIEYLAHWLYHYRKTAKAKEENREKKIHLQEEYDSSLKEMEMTEMLKQEEYQIQQNCEKCHKELTSETVSTKKTIFMQEDTNPLEKEALKQEFLPGTSSLIPGMPQQVPPSESAGQIDQNFKMPQEINYKEAFQHEVAHEMPPGSKSPF

SEQ ID NO: 45820 - protein, 523 aa, Homo sapiens
MLNYDAASGTMRKSQAKYGISGEKDVSPDLSCADEISECYHKLDSLTYKIDECEKKKREDYESQSNPVFRRYLNKILIEAGKLGLPDENKGDMHYDAEIILKRETLLEIQKFLNGEDWKPGALDDALSDILINFKFHDFETWKWRFEDSFGVDPYNVLMVLLCLLCIVVLVATELWTYVRWYTQLRRVLIISFLFSLGWNWMYLYKLAFAQHQAEVAKMEPLNNVCAKKMDWTGSIWEWFRSSWTYKDDPCQKYYELLLVNPIWLVPPTKALAVTFTTFVTEPLKHIGKGTGEFIKALMKEIPALLHLPVLIIMALAILSFCYGAGKSVHVLRHIGGPESEPPQALRPRDRRRQEEIDYRPDGGAGDADFHYRGQMGPTEQGPYAKTYEGRREILRERDVDLRFQTGNKSPEVLRAFDVPDAEAREHPTVVPSHKSPVLDTKPKETGGILGEGTPKESSTESSQSAKPVSGQDTSGNTEGSPAAEKAQLKSEAAGSPDQGSTYSPARGVAGPRGQDPVSSPCG

SEQ ID NO: 45821 - protein, 342 aa, Homo sapiens
MAAGFGRCCRVLRSISRFHWRSQHTKANRQREPGLGFSFEFTEQQKEFQATARKFAREEIIPVAAEYDKTGEYPVPLIRRAWELGLMNTHIPENCGGLGLGTFDACLISEELAYGCTGVQTAIEGNSLGQMPIIIAGNDQQKKKYLGRMTEEPLMCAYCVTEPGAGSDVAGIKTKAEKKGDEYIINGQKMWITNGGKANWYFLLARSDPDPKAPANKAFTGFIVEADTPGIQIGRKELNMGQRCSDTRGIVFEDVKVPKENVLIGDGAGFKVAMGAFDKTRPVVAAGAVGLAQRALDEATKYALERKTFGKLLVEMESRSVAQARVQWHNLGSPQSPPPEFE

SEQ ID NO: 45822 - protein, 569 aa, Homo sapiens
MQGTRLPVCCACPVGSSKPAEAEKEKVRRGHPTVHSETKYVELIVINDHQLFEQMRQSVVLTSNFAKSVVNLADVIYKEQLNTRIVLVAMETWADGDKIQVQDDLLETLARLMVYRREGLPEPSDATHLFSGRTFQSTSSGAAYVGGICSLSHGGGVNEYGNMGAMAVTLAQTLGQNLGMMWNKHRSSAGDCKCPDIWLGCIMEDTGFYLPRKFSRCSIDEYNQFLQEGGGSCLFNKPLKLLDPPECGNGFVEAGEECDCGSVQECSRAGGNCCKKCTLTHDAMCSDGLCCRRCKYEPRGVSCREAVNECDIAETCTGDSSQCPPNLHKLDGYYCDHEQGRCYGGRCKTRDRQCQVLWGHAAADRFCYEKLNVEGTERGSCGRKGSGWVQCSKQDVLCGFLLCVNISGAPRLGDLVGDISSVTFYHQGKELDCRGGHVQLADGSDLSYVEDGTACGPNMLCLDHRCLPASAFNFSTCPGSGERRICSHHGVCSNEGKCICQPDWTGKDCSIHNPLPTSPPTGETERYKGPSGTNIIIGSIAGAVLVAAIVLGGTGWGFKNIRRGRSGGA

SEQ ID NO: 45823 - protein, 284 aa, Homo sapiens
MDAIKKKMQMLKLDKENALDRAEQAEADKKAAEDRSKQLEDELVSLQKKLKGTEDELDKYSEALKDAQEKLELAEKKATDAEADVASLNRRIQLVEEELDRAQERLATALQKLEEAEKAADESERGMKVIESRAQKDEEKMEIQEIQLKEAKHIAEDADRKYEEVARKLVIIESDLERAEERAELSEGKCAELEEELKTVTNNLKSLEAQAEKYSQKEDRYEEEIKVLSDKLKEAETRAEFAERSVTKLEKSIDDLEDELYAQKLKYKAISEELDHALNDMTSM

SEQ ID NO: 45824 - protein, 870 aa, Homo sapiens
MFSQQQQQQLQQQQQQLQQLQQQQLQQQQLQQQQLLQLQQLLQQSPPQAPLPMAVSRGLPPQQPQQPLLNLQGTNSASLLNGSMLQRALLLQQLQGLDQFAMPPATYDTAGLTMPTATLGNLRGYGMASPGLAAPSLTPPQLATPNLQQFFPQATRQSLLGPPPVGVPMNPSQFNLSGRNPQKQARTSSSTTPNRKDSSSQTMPVEDKSDPPEGSEEAAEPRMDTPEDQDLPPCPEDIAKEKRTPAPEPEPCEASELPAKRLRSSEEPTEKEPPGQLQVKAQPQARMTVPKQTQTPDLLPEALEAQVLPRFQPRVLQVQAQVQSQTQPRIPSTDTQVQPKLQKQAQTQTSPEHLVLQQKQVQPQLQQEAEPQKQVQPQVQPQAHSQGPRQVQLQQEAEPLKQVQPQVHTQAQPSVQPQEHPPAQVSVQPPEQTHEQPHTQPQVSLLAPEQTPVVVHVCGLEMPPDAVEAGGGMEKTLPEPVGTQVSMEEIQNESACGLDVGECENRAREMPGVWGAGGSLKVTILQSSDSRAFSTVPLTPVPRPSDSVSSTPAATSTPSKQALQFFCYICKASCSSQQEFQDHMSEPQHQQRLGEIQHMSQACLLSLLPVPRDVLETEDEEPPPRRWCNTCQLYYMGDLIQHRRTQDHKIAKQSLRPFCTVCNRYFKTPRKFVEHVKSQGHKDKAKELKSLEKEIAGQDEDHFITVDAVGCFEGDEEEEEDDEDEEEIEVEEELCKQVRSRDISREEWKGSETYSPNTAYGVDFLVPVMGYICRICHKFYHSNSGAQLSHCKSLGHFENLQKYKAAKNPSPTTRPVSRRCAINARNALTALFTSSGRPPSQPNTQDKTPSKVTARPSQPPLPRRSTRLKT

SEQ ID NO: 45825 - protein, 56 aa, Homo sapiens
MKSLKAKFRKSDTNEWNKNDDRLLQAVENGDAEKVASLLGKKGASATKHDSEGKTA

SEQ ID NO: 45826 - protein, 261 aa, Homo sapiens
MLRNSTFKNMQRRHTTLREKGRRQAIRGPAYMFNEKGTSLTPEEERFLDSAEYGNIPVVRKMLEESKTLNFNCVDYMGQNALQLAVGNEHLEVTELLLKKENLARVGDALLLAISKGYVRIVEAILNHPAFAQGQRLTLSPLEQELRDDDFYAYDEDGTRFSHDITPIILAAHCQEYEIVHILLLKGARIERPHDYFCKCNECTEKQRKDSFSHSRSRMNAYKGLASAAYLSLSSEDPVLTALELSNELARLANIETEFKE

SEQ ID NO: 45827 - protein, 183 aa, Homo sapiens
MCIEGSQGCENPKPSLTDLVVLEHGLYAGDPVSKVLLKPLTGRTHQLRVHCSALGHPVVGDLTYGEVSGREDRPFRMMLHAFYLRIPTDTECVEVCTPDPFLPSLDACWSPHTLLQSLDQLVQALRATPDPDPEDRGPRPGSPSALLPGPGRPPPPPTKPPETEAQRGPCLQWLSEWTLEPDS

SEQ ID NO: 45828 - protein, 80 aa, Homo sapiens
MEPTAPSLTEEDLTEVKKDVSNAAVPRAGGGGLQPSGRRKRKPGVRGQGGSSRSEERKVLAQEDCGEPCIRGTLVAVILQ

SEQ ID NO: 45829 - protein, 140 aa, Homo sapiens
MECYLKLLLQEQARLHEYYQPTALLRDAEEGEFLLSFLQGLTSLSFELSYKSAILNEWTLTPLALSGLCPLSELDPLSTSGAELQRKESLDSISHSSGSEDIEVHHSGHKIRRNQKLTASSLSLDTASSSQLSCSLNSDS

SEQ ID NO: 45830 - protein, 40 aa, Homo sapiens
MFTCWWSYLRSTLAAVPGEASRVQRPQPTSDRPQALLTSL

SEQ ID NO: 45831 - protein, 595 aa, Homo sapiens
MGDILAHESELLGLVKEYLDFAEFEDTLKTFSKECKIKGKPLCKTVGGSFRDSKSLTIQKDLVAAFDNGDQKVFFDLWEEHISSSIRDGDSFAQKLEFYLHIHFAIYLLKYSVGRPDKEELDEKISYFKTYLETKGAALSQTTEFLPFYALPFVPNPMVHPSFKELFQDSWTPELKLKLIKFLALISKASNTPKLLTIYKENGQSNKEILQQLHQQLVEAERRSVTYLKRYNKIQADYHNLIGVTAELVDSLEATVSGKMITPEYLQSVCVRLFSNQMRQSLAHSVDFTRPGTASTMLRASLAPVKLKDVPLLPSLDYEKLKKDLILGSDRLKAFLLQALRWRLTTSHPGEQRETVLQAYISNDLLDCYSHNQRSVLQLLHSTSDVVRQYMARLINAFASLAEGRLYLAQNTKVLQMLEGRLKEEDKDIITRENVLGALQKFSLRRPLQTAMIQDGLIFWLVDVLKDPDCLSDYTLEYSVALLMNLCLRSTGKNMCAKVAGLVLKVLSDLLGHENHEIQPYVNGALYSILSVPSIREEARAMLPDLSPEPRTPTGHSKHNLDHLSSIHSVPAIGLEAISSGNGRHPTLLHQRRQC

SEQ ID NO: 45832 - protein, 88 aa, Homo sapiens
MADTIFGSGNDQWVCPNDRQLALRAKLQTGWSVHTYQTEKQRRKQHLSPAEVEAILQVIQRAERLDVLEQQRIGRLVERLETMRRNVM

SEQ ID NO: 45833 - protein, 92 aa, Homo sapiens
MEAGGCMDSEHMVMSFRVSELQVLLGFAGRNKSGRKHELLAKALHLLKSSCAPSVQMKIKELYRRRFPRKTLGPSDLSLLSLPPGTSPVGSP

SEQ ID NO: 45834 - protein, 146 aa, Homo sapiens
MTSTGQDSTTTRQRRSRQNPQSPPQDSSVTSKRNIKKGAVPRSIPNLAEVKKKGKMKKLGQAMEEDLIVGLQGMDLNLEAEALAGTGLVLDEQLNEFHCLWDDSFPEGPERLHAIKEQLIQEGLLDRCVSFQARFAEKEELMLVHR

SEQ ID NO: 45835 - protein, 96 aa, Homo sapiens
MVVQDPLLCDLPIQVTLEEVNSQIALEYGQAMTVRVCKMDGESATVLDLKKAIQRYVQLKQEREGGIQHISWSYVWRTYHLTSAGEKLTEDRKKLR

SEQ ID NO: 45836 - protein, 165 aa, Homo sapiens
MLWFSGVGALAERYCRRSPGITCCVLLLLNCSGVPMSLASSFLTGSVAKCENEGEVLQIPFITDNPCIMCVCLVAPMKEIPITAPSNGRARLSLVFYASARRALSQSLGCAVLFIVKTLWSIWECAAPHVQAVCLRVCSIKKGRNFSQKEANVPSVPALEAGHNV

SEQ ID NO: 45837 - protein, 753 aa, Homo sapiens
MQKRQGYCSYCRVQYNNLEQDVLQHHPYHCQESSSTQDETHVNTGSSSEVVHLDDAFSEEEEEDEDKVEDEDATEERPSEVSEPIEELHSRPHKSQEGTQEVSVRPSVIQKLEKGQQQPLEFVHKIGASVRKCNLVDIGQATNNRSNLVRPPVICNAPASCLPESSNDRPVTANTTSLPPAAHLDSVSKCDPNKVEKYLEQPDGASRNPVPSSHVETTSFSYQKHKESNRKSLRMNSDKLVLWKDVKSQGKTLSAGLKFHERMGTKGSLRVKSPSKLAVNPNKTDMPSNKGIFEDTIAKNHEEFFSNMDCTQEEKHLVFNKTAFWEQKCSVSSEMKFDCISLQSASDQPQETAQDLSLWKEEQIDQEDNYESRGSEMSFDCSSSFHSLTDQSKVSAKEVNLSKEVRTDVQYKNNKSYVSKISSDCDDILHLVTNQSQMIVKEISLQNARHISLVDQSYESSSSETNFDCDASPQSTSDYPQQSVTEVNLPKEVHIGLVDKNYGSSSSEVSADSVFPLQSVVDRPPVAVTETKLRKKAHTSLVDNYGSSCSETSFDCDVSLESVVDHPQLTVKGRNLKGRQVHLKHKKRKPSSAKAHLDCDVSLGTVADESQRAVEKINLLKEKNADLMDMNCESHGPEMGFQADAQLADQSQVAEIERQKVDVDLENKSVQSSRSSLSSDSPASLYHSAHDEPQEALDEVNLKELNIDMEVRSYDCSSSELTFDSDPPLLSVTEQSHLDAEGKERHIDLEDES

SEQ ID NO: 45838 - protein, 361 aa, Homo sapiens
MARGDAPRDSYHLVGISFFILGLGTLLPWNFFITAIPYFQARLAGAGNSTARILSTNHTGPEDAFNFNNWVTLLSQLPLLLFTLLNSFLYQCVPETVRILGSLLAILLLFALTAALVKVDMSPGPFFSITMASVCFINSFSAVLQGSLFGQLGTMPSTYSTLFLSGQGLAGIFAALAMLLSMASGVDAETSALGYFITPCVGILMSIVCYLSLPHLKFARYYLANKSSQAQAQELETKAELLQSDLADSAVPCVGLHSHPVRLPRHHSHGDQLHQSWEVESVLQPHLLLPPLQHHGLAGTEPDLLLPVARRGQPAAAPAGLPAVPVRAPLHAVPRAPEVPAAHPLPTGCLLHHLHAALCRF

SEQ ID NO: 45839 - protein, 341 aa, Homo sapiens
MVHIKKGELTQEEKELLEVIGKGTVQEAGTLLSSKNVRVNCLDENGMTPLMHAAYKGKLDMCKLLLRHGADVNCHQHEHGYTALMFAALSGNKDITWVMLEAGAETDVVNSVGRTAAQMAAFVGQHDCVTIINNFFPRERLDYYTKPQGLDKEPKLPPKLAGPLHKIITTTNLHPVKIVMLVNENPLLTEEAALNKCYRVMDLICEKCMKQRDMNEVLAMKMHYISCIFQKCINFLKDGENKLDTLIKSLLKGRASDGFPVYQEKIIRESIRKFPYCEATLLQQLVRSIAPVEIGSDPTAFSVLTQAITGQVGFVDVEFCTTCGEKGASKRCSVCKMCREL

SEQ ID NO: 45840 - protein, 546 aa, Homo sapiens
MKVVQHALPTPRRGALTMSLNSSLSCRKELSNLTEEEGGEGGVIITQFIAIIVITIFVCLGNLVIVVTLYKKSYLLTLSNKFVFSLTLSNFLLSVLVLPFVVTSSIRREWIFGVVWCNFSALLYLLISSASMLTLGVIAIDRYYAVLYPMVYPMKITGNRAVMALVYIWLHSLIGCLPPLFGWSSVEFDEFKWMCVAAWHREPGYTAFWQIWCALFPFLVMLVCYGFIFRVARVKARKVHCGTVVIVEEDAQRTGRKNSSTSTSSSGSRRNAFQGVVYSANQCKALITILVVLGAFMVTWGPYMVVIASEALWGKSSVSPSLETWATWLSFASAVCHPLIYGLWNKTVRKELLGMCFGDRYYREPFVQRQRTSRLFSISNRITDLGLSPHLTALMAGGQPLGHSSSTGDTGFSCSQDSGTDMMLLEDYTSDDNPPSHCTCPPKRRSSVTFEDEVEQIKEAAKNSILHVKAEVHKSLDSYAASLAKAIEAEAKINLFGEEALPGVLVTARTVPGGGFGGRRGSRTLVSQRLQLQSIEEGDVLAAEQR

SEQ ID NO: 45841 - protein, 91 aa, Homo sapiens
MILLEVNNRIIEETLALKFENAAAGNKPEAVEVTFADFDGVLYHISNPNGDKTKVMVSISLKFYKELQAHGADELLKRVYGSFLVNPESVF

SEQ ID NO: 45842 - protein, 104 aa, Homo sapiens
MAAGFGRCCRVLRSISRFHWRSQHTKANRQREPGLGFSFEFTEQQKEFQATARKFAREEIIPVAAEYDKTGEYPVPLIRRAWELGLMNTHIPENCANAYYYCWK

SEQ ID NO: 45843 - protein, 209 aa, Homo sapiens
MGSGYLASFNLSHSVSEALTWSGPPTLEPPEPQRRRGGGSPSAEARRPGPSRSRHRVWALELLPAPRTAGGWQWDRSGGFSRAVPRLAPCEGSERPLSRAVPRDIQKTRNLRNKVAASDRGPGGRCQRRAPGRAASARPLRTQAQADPHGLLALAAAAAGARLREEPLRGGRRAEAAGRQSQPLRDAGEGVVPEPEDKVQTAEAGGGRA

SEQ ID NO: 45844 - protein, 334 aa, Homo sapiens
MASGTLAPGCRISATEVPGSRPNCHLTSSYFSHRIIPPIPFTPPTVQSTVADPLPQVAKQDSHNWAFDEVLSRWETTSGSAYVPKTHGGPCAQPRAPEPADPTRTVGIKDLGEKLRHRGWRLPLTTKYQSSETRAQYTGSPSGDPRAPEYFGPQPPQLADHHRGGPSQALIAWTKNPELSGRPFTVSDRGVLDRRQLYLTTSARDFRFYPKTELSGYPRKDSLTYWSFEETPQVWSHGPQRPPCPRSSRPPRPPRVRVPRVSPVTSAMPHRGALSLAQESYSPLLHPLRRLDRFCPLEAPWGGPHWKPLRGIYSVPKAYSTENSSYGSLKPALV

SEQ ID NO: 45845 - protein, 319 aa, Homo sapiens
MSRNETEHRYLGTHFGAESGSPETKKPTFMDEEVQSILTKMTGLNLQKTFKPAIQELKPPTYKLMTQAQLEEATRQAVEAAKVRLKMPPVLEERVPINDVLAEDKILEGTETTKYVFTDISYSIPHRERFIVVREPSGTLRKASWEERDRMIQVYFPKEGRKILTPIIFKEENLRTMYSQDRHVDVLNLCFAQFEPDSTEYIKVHHKTYEDIDKRGKYDLLRSTRYFGGMVWYFVNNKKIDGLLIDQIQRDLIDDATNLVQLYHVLHPDGQSAQGAKDQAAEGINLIKVFAKTEAQKGAYIELTLQTYQEALSRHSAAS

SEQ ID NO: 45846 - protein, 49 aa, Homo sapiens
MAASSLTVTLGRLASACSHSILRPSGPGAASLWSASRRFNSQSTSYLPG

SEQ ID NO: 45847 - protein, 143 aa, Homo sapiens
MTSSRLWFSLLLAAAFAGRATALWPWPQNFQTSDQRYVLYPNNFQFQYDVSSAAQPGCSVLDEAFQRYRDLLFGSGSWPRPYLTGKRHTLEKNVLVVSVVTPGCNQLPTLESVENYTLTINDDQCLLLSETVWGALRGCHGVQ

SEQ ID NO: 45848 - protein, 37 aa, Homo sapiens
MADTIFGSGNDQWVCPNDRQLALRAKLQTGWSVHTYQ

SEQ ID NO: 45849 - protein, 35 aa, Homo sapiens
MPQTFSGGRGFELDSGSDDMDPGRPRPPRDPDELH

SEQ ID NO: 45850 - protein, 111 aa, Homo sapiens
MRSGGRGRPRLRLGERGLMEPLLPPKRRLLPRVRLLPLLLALAVGSAFYTIWSGWHRRTEELPLGRELRVRLGGDPGTAGTLIPSPLLPRVDVALAYGPNRRCHRLRHLSA

SEQ ID NO: 45851 - protein, 305 aa, Homo sapiens
MKVLNELYSVMKTYHMYNADSISAQSKLKEAEKQEEKQIGKSVKQEDRQTPCSPDSTANVRIEEKHVRRSSVKKIEKMKEKHQAKYTENKLKAIKAQNEYLLALEATNASVFKYYIHDLSDLIDCCDLGYHASLNRALRTFLSAELNLEQSKHEGLDAIENAVENLDATSDKQRLMEMYNNVFCPPMKFEFQPHMGDMASQLCAQQPVQSELVQRCQQLQSRLSTLKIENEEVKKTMEATLQTIQDIVTVEDFDVSDCFQYSNSMESVKSTVSETFMSKPSIAKRRANQQETEQFYFTVRECYGF

SEQ ID NO: 45852 - protein, 257 aa, Homo sapiens
MSGHKCSYPWDLQDRYAQDKSVVNKMQQKYWETKQAFIKATGKKEDEHVVASDADLDAKLELFHSIQRTCLDLSKAIVLYQKRICFLSQEENELGKFLRSQGFQDKTRAGKMMQATGKALCFSSQQRLALRNPLCRFHQEVETFRHRAISDTWLTVNRMEQCRTEYRGALLWMKDVSQELDPDLYKQMEKFRKVQTQVRLAKKNFDKLKMDVCQKVDLLGASRCNLLSHMLATYQLAWDQWQGPRNLKVLTKMTCCC

SEQ ID NO: 45853 - protein, 49 aa, Homo sapiens
MLSPERLALPDYEYLAQRHVLTYMEDAVCQLLENREDISQYGIARFFTE

SEQ ID NO: 45854 - protein, 263 aa, Homo sapiens
MAGLEVLFASAAPAITCRQDALVCFLHWEVVTHGYFGLGVGDQPGPNDKKSELLPAGWNNNKDLYVLRYEYKDGSRKLLVKAITVESSMILNVLEYGSQQVADLTLNLDDYIDAEHLGDFHRTYKNSEELRSRIVSGIITPIHEQWEKANVSSPHREFPPATAREVDPLRIPPHHPHTSRQPPWCDPLGPFVVGGEDLDPFGPRRGGMIVDPLRSGFPRALIDPSSGLPNRLPPGAVPPGARFDPFGPIGTSPPGPRPDRRGQ

SEQ ID NO: 45855 - protein, 372 aa, Homo sapiens
MDSDRVEARKSLLESFLKQLCAIPEIANSEEVQEFLALNTDARIAFVKKPFMVSRIDKMVVSAIVDTLKTAFPRSEPQSPTEELSEAETESKPQTEGKKASKSRLRFSSSKISPALSVTEAQDKILYCLQEGNVESETLSMSAMESFIEKQTKLLEMQPTKAPEKDPEQPPKGRVDSCVSDAAVPAQDPSNSDPGTETELADTALDLLLLLLTEQWKWLCTENMQKFLRLIFGTLVQRWLEVQVANLTSPQRWVQYLLLLQESIWPGGVLPKFPRPVRTQEQKLAAEKQALQSLMGVLPDLVVEILGVNKCRLSWGLVLESLQQPLINRHLIYCLGDIILEFLDLSASVEESAATTSASDTPGNSKRMGVSS

SEQ ID NO: 45856 - protein, 40 aa, Homo sapiens
MMLGTEGGEGFVVKVRGLPWSCSADEVQRFFSALVTESDL

SEQ ID NO: 45857 - protein, 263 aa, Homo sapiens
MNSAAGFSHLDRRERVLKLGESFEKQPRCAFHTVRYDFKPASIDTSSEGYLEVGEGEQVTITLPNIEGSTPPVTVFKGSKKPYLKECILIINHDTGECRLEKLSSNITVKKTRVEGSSKIQYRKEQQQQQMWNSARTPNLVKHSPSEDKMSPASPIDDIERELKAEASLMDQMSSCDSSSDSKSSSSSSSEDSSSDSEDEDCKSSTSDTGNCVSGHPTMTQYRIPDIDASHNRFRDNSGLLMNTLNNLSSHSFSSLYDPLLSH

SEQ ID NO: 45858 - protein, 814 aa, Homo sapiens
MLERKYGGRLVTRHAARTIQTAFRQYQMNKNFERLRSSMSENRMSRRIVLSNMRMQFSFEGPEKVHSSYFEGKQVSVTNDGSQLGALVSPECGDLSEPTTLKSPAPSSDFADAITELEDAFSRQVKSLAESIDDALNCRSLHTEEAPALDAARARDTEPQTALHGMDHRKLDEMTASYSDVTLYIDEEELSPPLPLSQAGDRPSSTESDLRLRAGGAAPDYWALAHKEDKADTDTSCRSTPSLERQEQRLRVEHLPLLTIEPPSDSSVDLSDRSERGSLKRQSAYERSLGGQQGSPKHGPHSGAPKSLPREEPELRPRPPRPLDSHLAINGSANRQSKSESDYSDGDNDSINSTSNSNDTINCSSESSSRDSLREQTLSKQTYHKEARNSWDSPAFSNDVIRKRHYRIGLNLFNKKPEKGVQYLIERGFVPDTPVGVAHFLLQRKGLSRQMIGEFLGNRQKQFNRDVLDCVVDEMDFSTMELDEALRKFQAHIRVQGEAQKVERLIEAFSQRYCICNPGVVRQFRNPDTIFILAFAIILLNTDMYSPNVKPERKMKLEDFIKNLRGVDDGEDIPREMLMGIYERIRKRELKTNEDHVSQVQKVEKLIVGKKPIGSLHPGLGCVLSLPHRRLVCYCRLFEVPDPNKPQKLGLHQREIFLFNDLLVVTKIFQKKKNSVTYSFRQSFSLYGMQVLLFENQYYPNGIRLTSSVPGADIKVLINFNAPNPQDRKKFTDDLRESIAEVQEMEKHRIESELEKQKGVVRPSMSQCSSLKKESGNGTLSRACLDDSYASGEGLKRSALSSSLRDLSEAGVHH

SEQ ID NO: 45859 - protein, 651 aa, Homo sapiens
MGSWALLWPPLLFTGLLVRPPGTMAQAQYCSVNKDIFEVEENTNVTEPLVDIHVPEGQEVTLGALSTPFAFRIQGNQLFLNVTPDYEEKSLLEAQLLCQSGGTLVTQLRVFVSVLDVNDNAPEFPFKTKEIRVEEDTKVNSTVIPETQLQAEDRDKDDILFYTLQEMTAGASDYFSLVSVNRPALRLDRPLDFYERPNMTFWLLVRDTPGENVEPSHTATATLVLNVVPADLRPPWFLPCTFSDGYVCIQAQYHGAVPTGHILPSPLVLRPGPIYAEDGDRGINQPIIYSIFRGNVNGTFIIHPDSGNLTVARSVPSPMTFLLLVKGQQADLARYSVTQVTVEAVAAAGSPPRFPQSLYRGTVARGAGAGVVVKDAAAPSQPLRIQAQDPEFSDLNSAITYRITNHSHFRMEGEVVLTTTTLAQAGAFYAEVEAHNTVTSGTATTVIEIQVSEQEPPSTGGGPSEDKRFSVVDMAALGGVLGALLLLALLGLAVLVHKHYGPRLKCCSGKAPEPQPQGFDNQAFLPDHKANWAPVPSPTHDPKPAEAPMPAEPAPPGPASPGGAPEPPAAARAGGSPTAVRSILTKERRPEGGYKAVWFGEDIGTEADVVVLNAPTLDVDGASDSGSGDEGEGAGRGGGPYDAPGGDDSYI

SEQ ID NO: 45860 - protein, 217 aa, Homo sapiens
MMENLIRGRNPPQYQRSPCKEVRAALRKRPEEELQCLEMTTKRKIIGRLVPCRCFRGEEEIISVLDYSHCSLQQVPKEVFNFERTLEELYLDANQIEELPKQLFNCQALRKLSIPDNDLSNLPTTIASLVNLKELDISKNGVQEFPENIKCCKCLTIIEASVNPISKLPDGFTQLLNLTQLYLNDAFLEFLPANFGRLVKLRILELRENHLKTLPNI

SEQ ID NO: 45861 - protein, 130 aa, Homo sapiens
MATNFLAHEKIWFDKFKYDDAERRFYEQMNGPVAGASRQENGASVILRDIARARENIQKSLAGSSGPGASSGTSGDHGELVVRIASLEVENQSLRGVVQELQQAISKLEARLNVLEKSSPGHRATAPQTQ

SEQ ID NO: 45862 - protein, 348 aa, Homo sapiens
MYRQRFLYSLYRHTHWVRCAKFSPDGRLIVSCSEDKTIKIWDTTNKQCVNNFSDSVGFANFVDFNPSGTCIASAGSDQTVKVWDVRVNKLLQHYQVHSGGVNCISFHPSGNYLITASSDGTLKILDLLEGRLIYTLQGHTGPVFTVSFSKGGELFASGGADTQVLLWRTNFDELHCKGLTKRNLKRLHFDSPPHLLDIYPRTPHPHEEKVETVEINPKLEVIDLQISTPPVMDILSFDSTTTTETSGRTLPDKGEEACGYFLNPSLMSPECLPTTTKKKTEDMSDLPCESQRSIPLAVTDALEHIMEQLNVLTQTVSILEQRLTLTEDKLKDCLENQQKLFSAVQQKS

SEQ ID NO: 45863 - protein, 307 aa, Homo sapiens
MEEPEEPADSGQSLVPVYIYSPEYVSMCDSLAKIPKRASMVHSLIEAYALHKQMRIVKPKVASMEEMATFHTDAYLQHLQKVSQEGDDDHPDSIEYGLGYDCPATEGIFDYAAAIGGATITAAQCLIDGMCKVAINWSGGWHHAKKDEASGFCYLNDAVLGILRLRRKFERILYVDLDLHHGDGVEDAFSFTSKVMTVSLHKFSPGFFPGTGDVSDVGLGKGRYYSVNVPIQDGIQDEKYYQICESVLKEVYQAFNPKAVVLQLGADTIAGDPMCSFNMTPVGIGKCLKYILQWQLATLILGGDRRL

SEQ ID NO: 45864 - protein, 197 aa, Homo sapiens
MATRGGAGVAMAVWSLLSARAVTAFLLLFLPRFLQAQTFSFPFQQPEKCDNNQYFDISALSCVPCGANQRQDARGTSCVCLPGFQMISNNGGPAIICKKCPENMKGVTEDGWNCISCPSDLTAEGKCHCPIGHILVERDINGTLLSQATCELCDGNENSFMVVNALGDRQGDYVSAAQGIFLYVEFQLHVMEKLACL

SEQ ID NO: 45865 - protein, 2067 aa, Homo sapiens
MSNRPNNNPGGSLRRSQRNTAGAQPQDDSIGGRSHLGQAKHKGYSPPESRKSNSKAPKVQSNTTSELSRGHLSKRSCSSSSAVIVPQPEDPDRANTSERQKTGQVPKKDNSRGVKRSASPDYNRTNSPSSAKKPKALQHTESPSETNKPHSKSKKRHLDQEQQLKSAQSPSTSKAHTRKSGATGGSRSQKRKRTESSCVKSGSGSESTGAEERSAKPTKLASKSATSAKAGCSTITDSSSAASTSSSSSAVASASSTVPPGARVKQGKDQNKARRSRSASSPSPRRSSREKEQSKTGGSSKFDWAARFSPKVSLPKTKLSLPGSSKSETSKPGPSGLQAKLASLRKSTKKRSESPPAELPSLRRSTRQKTTGSCASTSRRGSGLGKRGAAEARRQEKMADPESNQEAVNSSAARTDEAPQGAAASSSVAGAVGMTTSGESESDDSEMGRLQALLEARGLPPHLFGPLGPRMSQLFHRTIGSGASSKAQQLLQGLQASDESQQLQAVIEMCQLLVMGNEETLGGFPVKSVVPALITLLQMEHNFDIMNHACRALTYMMEALPRSSAVVVDAIPVFLEKLQVIQCIDVAEQALTALEMLSRRHSKAILQAGGLADCLLYLEFFSINAQRNALAIAANCCQSITPDEFHFVADSLPLLTQRLTHQDKKSVESTCLCFARLVDNFQHEENLLQQVASKDLLTNVQQLLVVTPPILSSGMFIMVVRMFSLMCSNCPTLAVQLMKQNIAETLHFLLCGASNGSCQEQIDLVPRSPQELYELTSLICELMPCLPKEGIFAVDTMLKKGNAQNTDGAIWQWRDDRGLWHPYNRIDSRIIEAAHQVGEDEISLSTLGRVYTIDFNSMQQINEDTGTARAIQRKPNPLANSNTSGYSESKKDDARAQLMKEDPELAKSFIKTLFGVLYEVYSSSAGPAVRHKCLRAILRIIYFADAELLKDVLKNHAVSSHIASMLSSQDLKIVVGALQMAEILMQKLPDIFSVYFRREGVMHQVKHLAESESLLTSPPKACTNGSGSMGSTTSVSSGTATAATHAAADLGSPSLQHSRDDSLDLSPQGRLSDVLKRKRLPKRGPRRPKYSPPRDDDKVDNQAKSPTTTQSPKSSFLASLNPKTWGRLSTQSNSNNIEPARTAGGSGLARAASKDTISNNREKIKGWIKEQAHKFVERYFSSENMDGSNPALNVLQRLCAATEQLNLQVDGGAECLVEIRSIVSESDVSSFEIQHSGFVKQLLLYLTSKSEKDAVSREIRLKRFLHVFFSSPLPGEEPIGRVEPVGNAPLLALVHKMNNCLSQMEQFPVKVHDFPSGNGTGGSFSLNRGSQALKFFNTHQLKCQLQRHPDCANVKQWKGGPVKIDPLALVQAIERYLVVRGYGRVREDDEDSDDDGSDEEIDESLAAQFLNSGNVRHRLQFYIGEHLLPYNMTVYQAVRQFSIQAEDERESTDDESNPLGRAGIWTKTHTIWYKPVREDEESNKDCVGGKRGRAQTAPTKTSPRNAKKHDELWHDGVCPSVSNPLEVYLIPTPPENITFEDPSLDVILLLRVLHAISRYWYYLYDNAMCKEIIPTSEFINSKLTAKANRQLQDPLVIMTGNIPTWLTELGKTCPFFFPFDTRQMLFYVTAFDRDRAMQRLLDTNPEINQSDSQDSRVAPRLDRKKRTVNREELLKQAESVMQDLGSSRAMLEIQYENEVGTGLGPTLEFYALVSQELQRADLGLWRGEEVTLSNPKGSQEGTKYIQNLQGLFALPFGRTAKPAHIAKVKMKFRFLGKLMAKAIMDFRLVDLPLGLPFYKWMLRQETSLTSHDLFDIDPVVARSVYHLEDIVRQKKRLEQDKSQTKESLQYALETLTMNGCSVEDLGLDFTLPGFPNIELKKGGKDIPVTIHNLEEYLRLVIFWALNEGVSRQFDSFRDGFESVFPLSHLQYFYPEELDQLLCGSKADTWDAKTLMECCRPDHGYTHDSRAVKFLFEILSSFDNEQQRLFLQFVTGSPRLPVGGFRSLNPPLTIVRKTFESTENPDDFLPSVMTCVNYLKLPDYSSIEIMREKLLIAAREGQQSFHLS

SEQ ID NO: 45866 - protein, 165 aa, Homo sapiens
MRRTRRPRFVLMNKMDDLNLHYRFLNWRRRIREIREVRAFRYQERFKHILVDGDTLSYHGNSGEVGCYVASRPLTKDSNYFEVSIVDSGVRGTIAVGLVPQYYSLDHQPGWLPDSVAYHADDGKWALPSCPCPQMDCSQQWACTPWVRRCGCTSTLSWAVRTTAS

SEQ ID NO: 45867 - protein, 168 aa, Homo sapiens
MEAGSPENKKQRSRPRKPRKTRNEENEQDGDLEGPVIDESVLSTKELLGLQQAEERLKRDCIDRLKRRPRNYPTAKYTCRLCDVLIESIAFAHKHIKEKRHKKNIKEKQEEELLTTLPPPTPSQINAVGIAIDKVVQEFGLHNENLEQRLEIKRIMENVFQHKLPGIF

SEQ ID NO: 45868 - protein, 369 aa, Homo sapiens
MKSPEKKRRKSNTQGPAYSHLTEFAPPPTPMVDHLVASNPFEDDFGAPKVGVAAPPFLGSPVPFGGFRVQGGMAGQVPPGYSTGGGGGPQPLRRQPPPFPPNPMGPAFNMPPQGPGYPPPGNMNFPSQPFNQPLGQNFSPPSGQMMPGPVGGFGPMISPTMGQPPRAELGPPSLSQRFAQPGAPFGPSPLQRPGQGLPSLPPNTSPFPGPDPGFPGPGGEDGGKPLNPPASTAFPQEPHSGSPAAAVNGNQPSFPPNSSGRGGGTPDANSLAPPGKAGGGSGPQPPPGLVYPCGACRSEVNDDQDAILCEASCQKWFHRECTGMTESAYGLLTTEASAVWACDLCLKTKEIQSVYIREGMGQLVAANDG

SEQ ID NO: 45869 - protein, 248 aa, Homo sapiens
MEATRRRQHLGATGGPGAQLGASFLQARHGSVSADEAARTAPFHLDLWFYFTLQNWVLDFGRPIAMLVFPLEWFPLNKPSVGDYFHMAYNVITPFLLLKIDSFELLYYYDEYLGHCMWYIPFFLILFMYFSGCFTASKAESLIPGPALLLVAPSGLYYWYLVTEGQIFILFIFTFFAMLALVLHQKRKRLFLDSNGLFLFSSFALTLLLVALWVAWLWNDPVLRKKYPGVIYVPEPWAFYTLHVSSRH

SEQ ID NO: 45870 - protein, 628 aa, Homo sapiens
MNKGERLNQDQLDAVSKYQEVTNNLEFAKELQRSFMALSQDIQKTIKKTARREQLMREEAEQKRLKTVLELQYVLDKLGDDEVRTDLKQGLNGVPILSEEELSLLDEFYKLVDPERDMSLRLNEQYEHASIHLWDLLEGKEKPVCGTTYKVLKEIVERVFQSNYFDSTHNHQNGLCEEEEAASAPAVEDQVPEAEPEPAEEYTEQSEVESTEYVNRQFMAETQFTSGEKEQVDEWTVETVEVVNSLQQQPQAASPSVPEPHSLTPVAQADPLVRRQRVQDLMAQMQGPYNFIQDSMLDFENQTLDPAIVSAQPMNPTQNMDMPQLVCPPVHSESRLAQPNQVPVQPEATQVPLVSSTSEGYTASQPLYQPSHATEQRPQKEPIDQIQATISLNTDQTTASSSLPAASQPQVFQAGTSKPLHSSGINVNAAPFQSMQTVFNMNAPVPPVNEPETLKQQNQYQASYNQSFSSQPHQVEQTELQQEQLQTVVGTYHGSPDQSHQVTGNHQQPPQQNTGFPRSNQPYYNSRGVSRGGSRGARGLMNGYRGPANGFRGGYDGYRPSFSNTPNSGYTQSQFSAPRDYSGYQRDGYQQNFKRGSGQSGPRGAPRGRGGPPRPNRGMPQMNTQQVN

SEQ ID NO: 45871 - protein, 83 aa, Homo sapiens
MLATRVFSLVGKRAISTSVCVRAHESVVKSEDFSLPAYMDRRDHPLPEVAHVKHLSASQKALKEKEKASWSSLSMDEKVECGY

SEQ ID NO: 45872 - protein, 95 aa, Homo sapiens
MPGPPESLDMGPLTFRDVAIEFSLEEWQCLDTAQQDLYRKVMLENYRNLVFLAGIAVSKPDLVTCLEQGKDPWNMKGHSTVVKPPGFLPPSVTAS

SEQ ID NO: 45873 - protein, 193 aa, Homo sapiens
MRVAAATAAAGAGPAMAVWTRATKAGLVELLLRERWVRVVAELSGESLSLTGDAAAAELEPALGPAAAAFNGLPNGGGAGDSLPGSPSRGLGPPSPPAPPRGPAGEAGASPPVRRVRVVKQEAGGLGISIKGGRENRMPILISKIFPGLAADQSRALRLGDAILSVNGTDLRQATHDQAVQALKRAGKEVLLE

SEQ ID NO: 45874 - protein, 440 aa, Homo sapiens
MDVDEKNQVLTTNIWLQMSWTDHYLQWNVSEYPGVKTVRFPDGQIWKPDILLYNSADERFDATFHTNVLVNSSGHCQYLPPGIFKSSCYIDVRWFPFDVQHCKLKFGSWSYGGWSLDLQMQEADISGYIPNGEWDLVGIPGKRSERFYECCKEPYPDVTFTVTMRRRTLYYGLNLLIPCVLISALALLVFLLPADSGEKISLGITVLLSLTVFMLLVAEIMPATSDSVPLIAQYFASTMIIVGLSVVVTVIVLQYHHHDPDGGKMPKWTRVILLNWCAWFLRMKRPGEDKVRPACQHKQRRCSLASVEMSAVAPPPASNGNLLYIGFRGLDGVHCVPTPDSGVVCGRMACSPTHDEHLLHGGQPPEGDPDLAKILEEVRYIANRFRCQDESEAVCSEWKFAACVVDRLCLMAFSVFTIICTIGILMSAPNFVEAVSKDFA

SEQ ID NO: 45875 - protein, 238 aa, Homo sapiens
MPKAPKQQPPEPEWIGDGESTSPSDKVVKKGKKDKKIKKTFFEELAVEDKQAGEEEKVLKEKEQQQQQQQQQQKKKRDTRKGRRKKDVDDDGEEKELMERLKKLSRGFNLPYQDARKCLGRFGLESHAHTIQICKLSGGQKARVVFAELACREPDVLILDEPTNNLDIESIDALGEAINEYKGAVIVVSHDARLITETNCQLWVVEEQSVSQIDGDFEDYKREVLEALGEVMVSRPRE

SEQ ID NO: 45876 - protein, 49 aa, Homo sapiens
AVVVPSGEEQRYTCHVQHEGLPEPLTLRWGGKGGSCSQAASSNSAQGSD

SEQ ID NO: 45877 - protein, 321 aa, Homo sapiens [sequence omitted]

SEQ ID NO: 45878 - protein, 60 aa, Homo sapiens
MWGFLKRPVVVTADINLSLVALTGMGLLSRLWRLTYPRAVVLFRRIRWQFFVEQNWSRIQ

SEQ ID NO: 45879 - protein, 47 aa, Homo sapiens
  MOD_RES (1)..(1): Any amino acid
XDIYWRDNYTCPTEEEYKAMVLQKTGGLFGLAPYHLLKNLLFSRNSK

SEQ ID NO: 45880 - protein, 286 aa, Homo sapiens
MTEITAEGNASTTTTVIDSKNGSVPKSPGKVLKRTVTEDIVTTFSSPAAWLLVIALIITWSAVAIVMFDLVDYKNFSASSIAKIGSDPLKLVRDAMEETTDWIYGFFSLLSDIISSEDEEDDDGDEDTDKGEIDEPPLRKKEIHKDKTEKQEKPERKIQTKVTHKEKEKGKEKVREKEKPEKKATHKEKIEKKEKPETKTLAKEQKKAKTAEKSEEKTKKEVKGGKQEKVKQTAAKVKEVQKTPSKPKEKEDKEKAAVSKHEQKGKHSEQEAAGGSKRILGKKHMQ

SEQ ID NO: 45881 - protein, 649 aa, Homo sapiens
MAAGGAEGGSGPGAAMGDCAEIKSQFRTREGFYKLLPGDGAARRSGPASAQTPVPPQPPQPPPGPASASGPGAAGPASSPPPAGPGPGPALPAVRLSLVRLGEPDSAGAGEPPATPAGLGSGGDRVCFNLGRELYFYPGCCRRGSQRSIDLNKPIDKRIYKGTQPTCHDFNQFTAATETISLLVGFSAGQVQYLDLIKKDTSKLFNEERLIDKTKVTYLKWLPESESLFLASHASGHLYLYNVSHPCASAPPQYSLLKQGEGFSVYAAKSKAPRNPLAKWAVGEGPLNEFAFSPDGRHLACVSQDGCLRVFHFDSMLLRGLMKSYFGGLLCVCWSPDGRYVVTGGEDDLVTVWSFTEGRVVARGHGHKSWVNAVAFDPYTTRAEEAATAAGADGERSGEEEEEEPEAAGTGSAGGAPLSPLPKAGSITYRFGSAGQDTQFCLWDLTEDVLYPHPPLARTRTLPGTPGTTPPAASSSRGGEPGPGPLPRSLSRSNSLPHPAGGGKAGGPGVAAEPGTPFSIGRFATLTLQERRDRGAEKEHKRYHSLGNISRGGSGGSGSGGEKPSGPVPRSRLDPAKVLGTALCPRIHEVPLLEPLVCKKIAQERLTVLLFLEDCIITACQEGLICTWARPGKAGISSQPGNSPSGTVV

SEQ ID NO: 45882 - protein, 115 aa, Homo sapiens
MVRTKADSVPGTYRKVVAARAPRKVLGSSTSATNSTSVSSRKAENKYAGGNPVCVRPTPKWQKGIGEFFRLSPKDSEKENQIPEEAGSSGLGKAKRNQEPPILQHTEQQAGHTAH

SEQ ID NO: 45883 - protein, 126 aa, Homo sapiens
MATEGLHENETLASLKSEAESLKGKLEEERAKLHDVELHQVAERVEALGQFVMKTRRTLKGHGNKVLCMDWCKDKRRIVSSSQDGKVIVWDSFTTNKVRHCSQPRYRGFRIPAYLKVLWSSCPALS

SEQ ID NO: 45884 - protein, 112 aa, Homo sapiens
MSVMRPEQIMKSIIPVVMAGIIAIYGLVVAVLIANSLNDDISLYKSFLQLGAGLSVGLSGLAAGFAIGIVGDAGVRGTAQQPRLFVGMILILIFAEVLGLYGLIVALILSTK

SEQ ID NO: 45885 - protein, 217 aa, Homo sapiens
MSDRSLHLEASLDKELYYHGEPLNVNVHVTNNSTKTVKKIKVSVRQYADICLFSTAQYKCPVAQLEQDDQVSPSSTFCKVYTITPLLSDNREKRGLALDGKLKHEDTNLASSTIVKEGANKEVLGILVSYRVKVKLVVSRGGDVSVELPFVLMHPKPHDHIPLPRPQSAAPETDVPVDTNLIEFDTNYATDDDIVFEDFARLRLKGMKDDDYDDQLC

SEQ ID NO: 45886 - protein, 46 aa, Homo sapiens
MATLKDQLIYNLLKEEQTPQNKITVVGVGAVGMACAITVLIWSSVT

SEQ ID NO: 45887 - protein, 1070 aa, Homo sapiens
MVLDDLPNLEDIYTSLCSSTMEDSEMDFDSGLEDDDTKSDSILEDSTIFVAFKGNIDDKDFKWKLDAILKNVPNLLHMESSKLKVQKVEPWNSVRVTFNIPREAAERLRILAQSNNQQLRDLGILSVQIEGEGAINLALAQNRSQDVRMNGPMGAGNSVRMEAGFPMASGPGIIRMNNPATVMIPPGGNVSSSMMAPGPNPELQPRTPRPASQSDAMDPLLSGLHIQQQSHPSGSLAPPHHPMQPVSVNRQMNPANFPQLQQQQQQQQQQQQQQQQQQQQQQQQQLQARPPQQHQQQQPQGIRPQFTAPTQVPVPPGWNQLPSGALQPPPAQGSLGTMTANQGWKKAPLPGPMQQQLQARPSLATVQTPSHPPPPYPFGSQQASQAHTNFPQMSNPGQFTAPQMKSLQGGPSRVPTPLQQPHLTNKSPASSPSSFQQGSPASSPTVNQTQQQMGPRPPQNNPLPQGFQQPVSSPGRNPMVQQGNVPPNFMVMQQQPPNQGPQSLHPGLGGMPKRLPPGFSAGQANPNFMQGQVPSTTATTPGNSGAPQLQANQNVQHAGGQGAGPPQNQMQVSHGPPNMMQPSLMGIHGNMNNQQAGTSGVPQVNLSNMQGQPQQGPPSQLMGMHQQIVPSQGQMVQQQGTLNPQNPMILSRAQLMPQGQMMVNPPSQNLGPSPQRMTPPKQMLSQQGPQMMAPHNQMMGPQGQVLLQQNPMIEQIMTNQMQGNKQQFNTQNQSNVMPGPAQIMRGPTPNMQGNMVQFTGQMSGQMLPQQGPVNNSPSQVMGIQGQVLRPPGPSPHMAQQHGDPATTANNDVSLSQMMPDVSIQQTNMVPPHVQAMQGNSASGNHFSGHGMSFNAPFSGAPNGNQMSCGQNPGFPVNKDVTLTSPLLVNLLQSDISAGHFGVNNKQNNTNANKPKKKKPPRKKKNSQQDLNTPDTRPAGLEEADQPPLPGEQGINLDNSGPKLPEFSNRPPAPSQNLVSKETSTTALQASVARPELEVNAAIVSGQSSEPKEIVEKSKIPGRRNSRTEEPTVASESVENGHRKRSSRPASASSSTKDITSAVQSKRRKSK

SEQ ID NO: 45888 - protein, 57 aa, Homo sapiens
MASGAARWLVLAPVRSGALRSGPSLRKDGDVSAAWSGSGRSLVPSRCPSAFSVCSPL

SEQ ID NO: 45889 - protein, 166 aa, Homo sapiens
MPREDRATWKSNYFLKIIQLLDDYPKCFIVGADNVGSKQMQQIRMSLRGKAVVLMGKNTMMRKAIRGHLENNPALEKLLPHIRGNVGFVFTKEDLTEIRDMLLANKVPAAARAGAIAPCEVTVPAQNTGLGPEKTSFFQALGITTKISRGTIEILVFTAPLLSGSE

SEQ ID NO: 45890 - protein, 437 aa, Homo sapiens
  MOD_RES (1)..(1): Any amino acid
XSSAFNQLTNNTATAPSATPVFGQVAASTAPSLFGQQTGSTASTAAATPQVSSSGFSSPAFGTTAPGVFGQTTFGQASVFGQSASSAASVFSFSQPGFSSVPAFGQPASSTPTSTSGSVFGAASSTSSSSSFSFGQSSPNTGGGLFGQSNAPAFGQSPGFGQGGSVFGGTSAATTTAATSGFSFCQASGFGSSNTGSVFGQAASTGGIVFGQQSSSSSGSVFGSGNTGRGGGFFSGLGGKPSQDAANKNPFSSASGGFGSTATSNTSNLFGNSGAKTFGGFASSSFGEQKPTGTFSSGGGSVASQGFGFSSPNKTGGFGAAPVFGSPPTFGGSPGFGGVPAFGSAPAFTSPLGSTGGKVFGEGTAAASAGGFGFGSSSNTTSFGTLASQNAPTFGSLSQQTSGFGTQSSGFSGFGSGTGGGGGTEGFPQEAQRRADT

SEQ ID NO: 45891 - protein, 794 aa, Homo sapiens
MGQSGRSRHQKRARAQAQLRNLEAYAANPHSFVFTRGCTGRNIRQLSLDVRRVMEPLTASRLQVRKKNSLKDCVAVAGPLGVTHFLILSKTETNVYFKLMRLPGGPTLTFQVKKYSLVRDVVSSLRRHRMHEQQFAHPPLLVLNSFGPHGMHVKLMATMFQNLFPSINVHKVNLNTIKRCLLIDYNPDSQELDFRHYSIKVVPVGASRGMKKLLQEKFPNMSRLQDISELLATGAGLSESEAEPDGDHNITELPQAVAGRGNMRAQQSAVRLTEIGPRMTLQLIKVQEGVGEGKVMFHSFVSKTEEELQAILEAKEKKLRLKAQRQAQQAQNVQRKQEQREAHRKKSLEGMKKARVGGSDEEASGIPSRTASLELGEDDDEQEDDDIEYFCQAVGEAPSEDLFPEAKQKRLAKSPGRKRKRWEMDRGAKSCPANFLAAADDKLSGFQGDFLWPILVVEFLVAVASNGLALYRFSIRKQRPWHPAVVFSVQLAVSDLLCALTLPPLAAYLYPPKHWRYGEAACRLERFLFTCNLLGSVIFITCISLNRYLGIVHPFFARSHLRPKHAWAVSAAGWVLAALLAMPTLSFSHLKRPQQGAGNCSVARPEACIKCLGTADHGLAAYRAYSLVLAGLGCGLPLLLTLAAYGALGRAVLRSPGMTVAEKLRVAALVASGVALYASSYVPYHIMRVLNVDARRRWSTRCPSFADIAQATAALELGPYVGYQVMRGLMPLAFCVHPLLYMAAVPSLGCCCRHCPGYRDSWNPEDAKSTGQALPLNATAAPKPSEPQSRELSQ

SEQ ID NO: 45892 - protein, 58 aa, Homo sapiens
MSEEEAAQIPRSSVWEQDQQVRAAPPMEQGQKVLCGTVPSRSVSGQVSRPTPLLAGKT

SEQ ID NO: 45893 - protein, 81 aa, Homo sapiens
MTINPIYEHVGYTTLNREPAYKKHMPVLKETHDERDSTGQDGVSEKRLTSLVRRATLKENEQIPKYEKIHNFKVHTFRGPH

SEQ ID NO: 45894 - protein, 426 aa, Homo sapiens
MRHLLQHPTLSQRVLVKFIIGAHGCEVPVEDREDPYSCKLLNITNPVLNQEIEAFSLSEDTSSGLPEDRVVSVSFRVLYPIVITSLGVFYDANDVGFQRNITVKLYQAEQEEALFIARFSPPSCGVQVNKLWYKPVEQFILPESFEGTIVWESQDLHGLVSRNLHKVTVNDGGGVLRVITAGEGALPHEFLEGVEGVAGGFIYTIQEGDALLHNLHSRPQRLIDHIRNLHEEDALLKEESSIYDDIVFVDVVDTYRNVPAKLLNFYRWTVETTSFNLLLKTDDDCYIDLEAVFNRIVQKNLDGPNFWWGNFRLNWAVDRTGKWQELEYPSPAYPAFACGSGYVISKDIVKWLASNSGRLKTYQGEDVSMGIWMAAIGPKRYQDSLWLCEKTCETGMLSSPQYSPWELTELWKLKERCGDPCRCQAR

SEQ ID NO: 45895 - protein, 89 aa, Homo sapiens
MSLLLLVVSALHILILILLFVATLDKSWWTLPGKESLNLWYDCTWNNDTKTWACSNVSENGWLKAVQVLMVLSLILCCLSFILFMFQLY

SEQ ID NO: 45896 - protein, 291 aa, Homo sapiens
MNLRGLFQDFNPRAEGETCVEFKAMLIAVGIHLLLLMFEVLVCDRIERGSHFWLLVFMPLFFVSPVSVAACVWGFRHDRSLELEILCSVNILQFIFIALRLDKIIHWPWLVVCVPLWILMSFLCLVVLYYIVWSVLFLRSMDVIAEQRRTHITMALSWMTIVVPLLTFEILLVHKLDGHNAFSCIPIFVPLWLSLITLMATTFGQKGGNHWWFGIRKDFCQFLLEIFPFLREYGNISYDLHHEDNEETEETPVPEPPKIAPMFRKKARVVITQSPGKYVLPPPKLNIEMPD

SEQ ID NO: 45897 - protein, 115 aa, Homo sapiens
MHSTQDKSLHLEGDPNPSAAPTSTCAPRKMPKRISISKQLASVKALRKCSDLEKAIATTALIFRNSSDSDGKLEKAIAKDLLQTQFRNFAEPCEDSRRSWPSAKLEESTLSRHWI

SEQ ID NO: 45898 - protein, 489 aa, Homo sapiens
VALMTLTLFPVRLLVAAAMMLLAWPLALVASLGSAEKEPEQPPALWRKVVDFLLKAIMRTMWFAGGFHRVAVKGRQALPTEAAILTLAPHSSYFDAIPVTMTMSSIVMKAESRDIPIWGTLIQYIRPVFVSRSDQDSRRKTVEEIKRRAQSNGKWPQIMIFPEGTCTNRTCLITFKPGAFIPGAPVQPVVLRYPNKLDTITWTWQGPGALEILWLTLCQFHNQVEIEFLPVYSPSEEEKRNPALYASNVRRVMAEALGVSVTDYTFEDCQLALAEGQLRLPADTCLLEFARLVRGLGLKPEKLEKDLDRYSERARMKGGEKIGIAEFAASLEVPVSDLLEDMFSLFDESGSGEVDLRECVVALSVVCRPARTLDTIQLAFKMYGAQEDGSVGEGDLSCILKTALGVAELTVTDLFRAIDQEEKGKITFADFHRFAEMYPAFAEEYLYPDQTHFESCAETSPAPIPNGFCADFSPENSDAGRKPVRKKLD

SEQ ID NO: 45899 - protein, 90 aa, Homo sapiens
MRGYLVAIFLSAVFLYYVLHCILWGTNVYWVAPVEMKRRNKIQPCLSKPAFASLLSQSSAYILRKGIEELNQTSILFTQVSSVSPFSVCG

SEQ ID NO: 45900 - protein, 801 aa, Homo sapiens
MSLLFSRCNSIVTVKKNKRHMAEVNASPLKHFVTAKKKINGIFEQLGAYIQESATFLEDTYRNAELDPVTTEEQVLDVKGYLSKVRGISEVLARRHMKVAFFGRTSNGKSTVINAMLWDKVLPSGIGHTTNCFLRVEGTDGHEAFLLTEGSEEKRSAKTVNQLAHALHQDKQLHAGSLVSVMWPNSKCPLLKDDLVLMDSPGIDVTTELDSWIDKFCLDADVFVLVANSESTLMQTEKHFFHKVSERLSRPNIFILNNRWDASASEPEYMEEVRRQHMERCTSFLVDELGVVDRSQAGDRIFFVSAKEVLNARIQKAQGMPEGGGALAEGFQVRMFEFQNFERRFEECISQSAVKTKFEQHTVRAKQIAEAVRLIMDSLHMAAREQHALPVLCPPPDPHRRLKSAWLAAGSSSYLGRGRPCPWVRVCSPARVYCEEMREERQDRLKFIDKQLELLAQDYKLRIKQITEEVERQVSTAMAEEIRRLSVLVDDYQMDFHPSPVVLKVYKNELHRHIEEGLGRNMSDRCSTAITNSLQTMQQDMIDGLKPLLPVSVRSQIDMLVPRQCFSLNYDLNCDKLCADFQEDIEFHFSLGWTMLVNRFLGPKNSRRALMGYNDQVQRPIPLTPANPSMPPLPQGSLTQEEFMVSMVTGLASLTSRTSMGILVVGGVVWKAVGWRLIALSFGLYGLLYVYERLTWTTKAKERAFKRQFVEHASEKLQLVISYTGSNCSHQVQQELSGTFAHLCQQVDVTRENLEQEIAAMNKKIEVLDSLQSKAKLLRNKAGWLDSELNMFTHQYLQPSR

SEQ ID NO: 45901 - protein, 194 aa, Homo sapiens
MGQRDQGLDRERKGPQDDPGSYQGPERRNFLKEDAMKTKTHYHAMHADCLQELRRYLESGVVLRRTVPPMVNVTRSEASEGNITVTCRASSFYPRNIILTWRQDGVSLSHDTQQWGDVLPDGNGTYQTWVATRICRGEEQRFTCYMEHSGNHSTHPVPSGKVLVLQSHWQTFHVSAVAAGCCYFCYYYFLCPLL

SEQ ID NO: 45902 - protein, 117 aa, Homo sapiens
LEGEFSVTMWSSDEKKDIDHETVVEEQIIGENSPPDYSEYMTGKKLPPGGIPGIDLSDPKQLAEFARMKPRKIKEDDAPRTIACPHKLPFLGDPLASFSVKKGKEAKREEGTVGDGE

SEQ ID NO: 45903 - protein, 195 aa, Homo sapiens
MWVPVVFLTLSVTWIGAAPLILSRIVGGWECEKHSQPWQVLVASRGRAVCGGVLVHPQWVLTAAHCIRKPGDDSSHDLMLLRLSEPAELTDAVKVMDLPTQEPALGTTCYASGWGSIEPEEFLTPKKLQCVDLHVISNDVCAQVHPQKVTKFMLCAGRWTGGKSTCSWVILITELTMPALPMVLHGSLVPWRGGV

SEQ ID NO: 45904 - protein, 13 aa, Homo sapiens
EFLDKCAGSKDSD

SEQ ID NO: 45905 - protein, 367 aa, Homo sapiens
MWSWKCLLFWAVLVTATLCTARPSPTLPEQAQPWGAPVEVESFLVHPGDLLQLRCRLRDDVQSINWLRDGVQLAESNRTRITGEEVEVQDSVPADSGLYACVTSSPSGSDTTYFSVNVSVPIDALPSSEDDDDDDDSSSEEKETDNTKPNPVAPYWTSPEKMEKKLHAVPAAKTVKFKCPSSGTPNPTLRWLKNGKEFKPDHRIGGYKVRYATWSIIMDSVVPSDKGNYTCIVENEYGSINHTYQLDVVERSPHRPILQAGLPANKTVALGSNVEFMCKVYSDPQPHIQWLKHIEVNGSKIGPDNLPYVQILKHSGINSSDAEVLTLFNVTEAQSGEYVCKVSNYIGEANQSAWLTVTRPVAKDCWS

SEQ ID NO: 45906 - protein, 455 aa, Homo sapiens
MPQLNGGGGDDLGANDELISFKDEGEQEEKSSENSSAERDLADVKSSLVNESETNQNSSSDSEAERRPPPRSESFRDKSRESLEEAAKRQDGGLFKGPPYPGYPFIMIPDLTSPYLPNGSLSPTARTYLQMKWPLLDVQAGSLQSRQALKDARSPSPAHIVSNKVPVVQHPHHVHPLTPLITYSNEHFTPGNPPPHLPADVDPKTGIPRPPHPPDISPYYPLSPGTVGQIPHPLGWQGQPVYPITTGGFRHPYPTALTVNASMSRFPPHMVPPHHTLHTTGIPHPAIVTPTVKQESSQSDVGSLHSSKHQDSKKEEEKKKPHIKKPLNAFMLYMKEMRAKVVAECTLKESAAINQILGRRWHALSREEQAKYYELARKERQLHMQLYPGWSARDNYGKKKKRKRDKQPGETNEHSECFLNPCLSLPPITDLSAPKKCRARFGLDQQNNWCGPCSL

SEQ ID NO: 45907 - protein, 247 aa, Homo sapiens
MESGDEAAIERHRVHLRSATLRDAVPATLHLLPCEVAVDGPAPVGRFFTPAIRQGPEGLEVSFRGRCLRGEEVAVPPGLVGYVMVTEEKKVSMGKPDPLRDSGTDDQEEEPLERDFDRFIGATANFSRFTLWGLETIPGPDAKVRGALTWPSLAAAVSRRGVPSCPRVDGLGSTIAQTEPGGFYWVVCGKRSSLTTLPSMSRSGYSEQLGPSSGMGASLPPCLTSPTVEATPVADSRTGARGLRTRA

SEQ ID NO: 45908 - protein, 50 aa, Homo sapiens
KTGLTGSPSSLWDLLREMFVVCSKEQLQSGGKYSHQVWAPFSPLASGAAF

SEQ ID NO: 45909 - protein, 85 aa, Homo sapiens
  MOD_RES (1)..(1): Any amino acid
XDKDGSKVTTVVATPGQGPDRPQEVSYTDTKVIGNGSFGVVYQAKLCDSGELVAIKKVLQDKRFKALETTDLLPVYGFAHPGITQ

SEQ ID NO: 45910 - protein, 181 aa, Homo sapiens
LLLKQHLVQNPVRLWQLLGGTFYFNTSRLKQKNKEKDKSKGKAPEEDEEERRRRERDDQMYRERLRTLLVIAVVMSLLNALSTSGGSISWNDFVHEMLAKGEVQRVQVVPESDVVEVYLHPGAVVFGRPRLALMYRMQVANIDKFEEKLRAAEDELNIEAKDRIPVSYKRTGFFGKLILPA

SEQ ID NO: 45911 - protein, 172 aa, Homo sapiens
MAGSPELVVLDPPWDKELAAGTESQALVSATPREDFRVRCTSKRAVTEMLQLCGRFVQKLGDALPEEIREPALRDAQWTFESAVQENISINGQAWQEASDNCFMDSDIKVLEDQFDEIIVDIATKRKQYPRKILECVIKTIKAKQEILKQYHPVVHPLDLKYDPDPVLACIN

SEQ ID NO: 45912 - protein, 1629 aa, Homo sapiens
MEDDGSLLPEDELLADALLLEDERDELEDPEFDIKCLLQEAEDDVDPGHSSSVKELDTDADKLKKKTAEDRTQAFHLRQNLSALDKMHEEQELFTEKMRGELRACRQRRDLIDKQQEAVAAEIATEEEAGNMAAVGRLQAVSRRLFAELENERDLQSRTEAVLKESENTMWHIEIQEGRLEAFRTADREEVEATGRRLQVRAAEQLCREQEALGKVERNRLLRIRKSLNTQKELGLRHQKLLEDARKNHKVAVRFLKASLGRIREQEKKEEMECHEYMRRRMDAVVALKGSISANRDTLRKFQAWDRAKAELAEQRVQAEKKAILAQGRDAFRHLVHQRRRQELEAQKRAFEEEQKLRKQEIISRILKEEAEEEKRKKQHPPTSARHRLTLRDKTWNYISDFCKKTTVPTNTYTLDYEAAAGPGPSRLLEVVSSELIQGDPGASSEEETLAEPEISGLWNEDYKPYQVPKEDVDRKPVGGTKMDKDILERTVERLRSRVVHKQVVWGREFQGRPFNSKPELLHFQDFDIGKVYKKKITLVNTTYTINYCKLVGVEEHLRDFIHVDFDPPGPLSAGMSCEVLVTFKPMINKDLEGNISFLAQTGEFSVPLKCSTKKCSLSLDKELIDFGSYVVGETTSRTITLTNVGGLGTTFKFLPASEPCEMDDSQSALKLSSLLTYEDKSLYDKAATSFSEQQLEGTESSQADMQSRKELEKLDKEQEEEQPAEPERLTTVIPPSEEQTEITLGEVTEGEIGPFSSIKVPIVFTPVVPGDVQARFKVTFKNPQCPTLHFRVVGVAIDVPVWVPKPSVDLKICMYDRLYQDSVLVHTRSKAALRLKFEVCKELRAHLELLPKTGYIQAQSSYSVQLKFLPRHSLPEDAGRYFDKETRVLEAPMTIWVADQNKPVGFTVHAIVTTSDLELSPSEVDFGYCTIYEAIRTEISLHNHSLLPQEFGFVRLPKFVDVQPNDGFGTILPLETLQFCVIFQPTKAEEHRFQLTCKSEINRCFKLSCRAVGVHPPLELSHYQIKFAATALYDTSVATVYVINSHLSMSSPTHSKPRIGSEDASPMGPTSFEFLLPPDSPITISPSVGTVWPGKRCLVQVAFRPVLPEKLIRQEALPLLNKEMETKSFRKNMAPQRKDLHGLSFSVLRAQNRDKLFKVSVPHVLEMRKRELRPSSDEYQAARATLLRAFQAKFDTFVVPCVVASGDIKDRKGSEPLSFSPHNTLYLELWCPTVAPSVVVTSHKGKTIFNFGDVAVGHRSIKKISIQNVSPEDLALDFSLLNPNGPFVLLNHSSLLRAGGTQVLVLSFSPHESILAQETLDIITKRGTLTLTLMGTGVASMITCSIEGSVLNMGYVIAGESVSSGFKLQNNSLLPIKFSMHLDSLSSTRGRGQQQLPQFLSSPSQRTEVVGTQNLNGQSVFSVAPVKGVMDPGKTQDFTVTFSPDHESLYFSDKLQVVLFEKKISHQILLKGAACQHMMFVEGGDPLDVPVESLTAIPVFDPRHREEAEELRPILVTLDYIQFDTDTPAPPATRELQVGCIRTTQPSPKKTVEFSIDSVASLQHKGFSIEPSRGSVERGQTKTISISWVPPADFDPDHPLMVSALLQLRGDVKETYKVIFVAQVLTGP

SEQ ID NO: 45913 - protein, 150 aa, Homo sapiens
  MOD_RES (1)..(1): Any amino acid
XYGAGAFFILKQGGAVKFRDKEWIRPDKYGHFSQEFWNFCEVPVEAVDAGDCDINYEGLDNLLRLKELQSLSLQRCCHVDDWCLSRLYPLADSLQELSLAGCPRISERGLACLHHLQNLRRLDISDLPAVSNPGLTQILVEEMLPNCEGP

SEQ ID NO: 45914 - protein, 359 aa, Homo sapiens
MEPSSKKLTGRLMLAVGGAVLGSLQFGYNTGVINAPQKVIEEFYNQTWVHRYGESILPTTLTTLWSLSVAIFSVGGMIGSFSVGLFVNRFGRRNSMLMMNLLAFVSAVLMGFSKLGKSFEMLILGRFIIGVYCGLTTGFVPMYVGEVSPTALRGALGTLHQLGIVVGILIAQVFGLDSIMGNKDLWPLLLSIIFIPALLQCIVLPFCPESPRFLLINRNEENRAKSVLKKLRGTADVTHDLQEMKEESRQMMREKKVTILELFRSPAYRQPILIAVVLQLSQQLSGINAVFYYSTSIFEKAGVQQPVYATIGSGIVNTAFTVVSLFVVERAGRRTLHLIGLAGKSKTVAQIYSDKQQVL

SEQ ID NO: 45915 - protein, 48 aa, Homo sapiens
MGNSMKSTPAPAERPLPNPEGLDSDFLAVLSDYPSPDISPPIFRRGEK

SEQ ID NO: 45916 - protein, 18 aa, Homo sapiens
MPHTLWMVWVLGVIISLS

SEQ ID NO: 45917 - protein, 314 aa, Homo sapiens
MMDLRRYPLDEQNCTLEIESYGYTTDDIEFYWRGDDNAVTGVTKIELPQFSIVDYKLITKKVVFSTGSYPRLSLSFKLKRNIGYFILQTYMPSILITILSWVSFWINYDASAARVALGITTVLTMTTINTHLRETLPKIPYVKAIDMYLMGCFVFVFMALLEYALVNYIFFGRGPQRQKKAAEKAASANNEKMRLDVNKMDPHENILLSTLEIKNEMATSEAVMGLGDPRSTMLAYDASSIQYRKAGLPRHSFGRNALERHVAQKKSRLRRRASQLKITIPDLTDVNAIDRWSRIFFPVVFSFFNIVYWLYYVN

SEQ ID NO: 45918 - protein, 568 aa, Homo sapiens
MERAVRVESGVLVGVVCLLLACPATATGPEVAQPEVDTTLGRVRGRQVGVKGTDRLVNVFLGIPFAQPPLGPDRFSAPHPAQPWEGVRDASTAPPMCLQDVESMNSSRFVLNGKQQIFSVSEDCLVLNVYSPAEVPAGSGRPVMVWVHGGALITGAATSYDGSALAAYGDVVVVTVQYRLGVLGFFSTGDEHAPGNQGFLDVVAALRWVQENIAPFGGDLNCVTVFGGSAGGSIISGLVLSPVAAGLFHRAITQSGVITTPGIIDSHPWPLAQKIANTLACSSSSPAEMVQCLQQKEGEELVLSKKLKNTIYPLTVDGTVFPKSPKELLKEKPFHSVPFLMGVNNHEFSWLIPRGWGLLDTMEQMSREDMLAISTPVLTSLDVPPEMMPTVIDEYLGSNSDAQAKCQAFQEFMGDVFINVPTVSFSRYLRDSGSPVFFYEFQHRPSSFAKIKPAWVKADHGAEGAFVFGGPFLMDESSRLEATEEEKQLSLTMMAQWTHFARTGDPNSKALPPWPQFNQAEQYLEINPVPRAGQKFREAWMQFWSETLPSKIQQWHQKQKNRKAQEDL

SEQ ID NO: 45919 - protein, 76 aa, Homo sapiens
  MOD_RES (1)..(1): Any amino acid
XGEYQSSGPEDDFESCLRNMKSQYEVFRSSRLSSDATVLTPNTESSCDLMTKTKSTSGNDDSTSLDLEWEDEEGIL

SEQ ID NO: 45920 - protein, 854 aa, Homo sapiens
ATTVIQDEDYMLQVYGKPVYQGHRSTLKKGPYLRFNSPSPKSRPQRPKVIERVKGTKVKSIRTQTDFYATKPKKMDSKMKHSVPVLPHGDQQYLFSPSREMPTFSGTLEGHLIPMAILLGQTQSNSDTMPPAGVIVSKPHPVTVTTSIPPSSRKVETGVKKPNIAIVEMKSEKKDPPQLTVQVLPSVDIDSISNSSADVLSPLSSPKEASLPPVQTWIKTPEIMKVDEEEVKFPGTNFDEIIDVIQEEEKCDEIPDSEPILEFNRSVKADSTKYNGPPFPPVASTFQPTADILDKVIERKETLENSLIQWVEQEIMSRIISGLFPVQQQIAPSISVSVSETSEPLTSDIVEGTSSGALQLFVDAGVPVNSNVIKHFVNEALAETIAVMLGDREAKKQGPVATGVSGDASTNETYLPARVCTPLPTPQPTPPCSPSSPAKECVLVKTPDSSPCDSDHDMAFPVKEICAEKGDDMPAIMLVNTPTVTPTTTPPPAAAVFTPTLSDISIDKLKVSSPELPKPWGDGDLPLEEENPNSPQEELHPRAIVMSVAKDEEPESMDFPAQPPPPEPVPFMPFPAGTKAPSPSQMPGSDSSTLESTLSVTVTETETLDKPISEGEILFSCGQKLAPKILEDIGLYLTNLNDSLSSTLHDAVEMEDDPPSEGQVIRMSHKKFHADAILSFAKQNQESAVSQQAVYHSEDLENSVGELSEGQRPQLTAAAENILMGHSLYMQPPVTNTQSLDQQCDPKPLSRQFDTVSGSIYEDSCASHGPMSLGELELEPNSKLVLPTTLLTAQENDVNLPVAAEDFSQYQLKQNQDVKQVEHKPSQSYLRVRNKSDIAPSQQQDFVGFIIFFL

SEQ ID NO: 45921 - protein, 46 aa, Homo sapiens
DELTAAHSLCFSPDGSQLFCGFNRTVRVFSTARPGRDCEVRATFGC

SEQ ID NO: 45922 - protein, 212 aa, Homo sapiens
MEVLAKEDTEAAIQSILYKENSVIKGNAFIEHYDPKEYDPFYMSKKDPNFLKVTIPPFHDPLKKAQYDKDNEKRTLLQCETGKIYSIKEFKEVEKVQLHSRFPQISNSRHFITPNEWLKLPTRYIESEFCRRRRNKGSSFLEREPLCYQEGNNPSAKEAISEGYFSSLSLSQEREEDQDGSCSVSQLEWIQAWLASASTSRTQVILPPQLPE

SEQ ID NO: 45923 - protein, 470 aa, Homo sapiens
MSGRPRTTSFAESCKPVQQPSAFGSMKVSRDKDGSKVTTVVATPGQGPDRPQEVSYTDTKVIGNGSFGVVYQAKLCDSGELVAIKKVLQDKRFKNRELQIMRKLDHCNIVRLRYFFYSSGEKKDEVYLNLVLDYVPETVYRVARHYSRAKQTLPVIYVKLYMYQLFRSLAYIHSFGICHRDIKPQNLLLDPDTAVLKLCDFGSAKQLVRGEPNVSYICSRYYRAPELIFGATDYTSSIDVWSAGCVLAELLLGQPIFPGDSGVDQLVEIIKVLGTPTREQIREMNPNYTEFKFPQIKAHPWTKVFRPRTPPEAIALCSRLLEYTPTARLTPLEACAHSFFDELRDPNVKLPNGRDTPALFNFTTQELSSNPPLATILIPPHARIQAAASTPTNATAASGNLFCCHLLPIRWIILLPCALCSTPLLVSYMVLGTFLNLFVLPFSYLQNRDANTGDRGQTNNAASASASNST

SEQ ID NO: 45924 - protein, 563 aa, Homo sapiens
MEPLRAPALRRLLPPLLLLLLSLPPRARAKYVRGNLSSKEDWVFLTRFCFLSDYGRLDFRFRYPEAKCCQNILLYFDDPSQWPAVYKAGDKDCLAKESVIRPENNQVINLTTQYAWSGCQVVSEEGTRYLSCSSGRSFRSVRERWWYIALSKCGGDGLQLEYEMVLTNGKSFWTRHFSADEFGILETDVTFLLIFILIFFLSCYFGYLLKGRQLLHTTYKMFMAAAGVEVLSLLFFCIYWGQYATDGIGNESVKILAKLLFSSSFLIFLLMLILLGKGFTVTRGRISHAGSVKLSVYMTLYTLTHVVLLIYEAEFFDPGQVLYTYESPAGYGLIGLQVAAYVWFCYAVLVSLRHFPEKQPFYVPFFAAYTLWFFAVPVMALIANFGIPKWAREKIVNGIQLGIHLYAHGVFLIMTRPSAANKNFPYHVRTSQIASAGVPGPGGSQSADKAFPQHVYGNVTFISDSVPNFTELFSIPPPATSAGKQVEETAVAAAVAPRGRVVTMAEPGAASPPLPARFPKAADSGWDGPTPPYQPLVPQTAAPHTGFTEYFSMHTAGGTAPPV

SEQ ID NO: 45925 - protein, 237 aa, Homo sapiens
MLLPVFTLKLRHKISPRMVAIGRYDGTHPCLAAATQTGKVFIHNPHTRNQHVSASRVFQSPLESDVSLLSINQAVSCLTAGVLNPELGYDALLVGTQTNLLAYDVYNNSDLFYREVADGANAIVLGTLGDISSPLAIIGGNCALQGFNHEGSDLFWTVTGDNVNSLALCDFDGDGKKELLVGSEDFDIRVFKEDEIVAEMTETESFTPSPRLECGGAISAYCKLHLPSSSDSHASAS

SEQ ID NO: 45926 - protein, 283 aa, Homo sapiens
MNESHKSEFIELRKWLKARKFQDSNLAPACFPGTGRGLMSQTSLQEGQMIISLPESCLLTTDTVIRSYLGAYITKWKPPPSPLLALCTFLVSEKHAGHRSLWKPYLEILPKAYTCPVCLEPEVVNLLPKSLKAKAEEQRAHVQEFFASSRDFFSSLQPLFAEAVDSIFSYSALLWAWCTVNTRAVYLRPRQRECLSAEPDTCALAPYLDLLNHSPHVQVKAAFNEETHSYEIRTTSRWRKHEEVFICYGPHDNQRLFLEYGFVSVHNPHACVYVSRGWNQLCS

SEQ ID NO: 45927 - protein, 115 aa, Homo sapiens
MREIVHIQAGQCGNQIGTKFWEVISDEHGIDPAGGYVGDSALQLERINVYYNESSSQKYVPRAALVDLEPGTMDSVRSGPFGQLFRPDNFIFVTFLRATGAGTVSTSAHHIATPA

SEQ ID NO: 45928 - protein, 96 aa, Homo sapiens
MPKNSKVVKRELDDDVTESVKDLLSNEDAADDAFKTSELIVDGQEEKDTDVEEGSEVEDERPAWNSKLQYILAQVGFSVGLGNVWRFPYLCQKNGG

SEQ ID NO: 45929 - protein, 56 aa, Homo sapiens
  MOD_RES (1)..(1): Any amino acid
XSNFGGGGSYNDFGNYNNQSSNFGPMKGGNFGGRSSGPYGGGGQYFAKPRNQGNKA

SEQ ID NO: 45930 - protein, 512 aa, Homo sapiens
MPLLGLLPRRAWASLLSQLLRPPCASCTGAVRCQSQGEESLQVAEAVLTSQLKAHQEKPNFIIKTPKGTRDLSPQHMVVREKILDLVISCFKRHGAKGMDTPAFELKETLTEKYGEDSGLMYDLKDQGGELLSLRYDLTVPFARYLAMNKVKKMKRYHVGKVWRRESPTIVQGRYREFCQCDFDIAGQFDPMIPDAECLKIMCEILSGLQLGDFLIKVNDRRIVDGMFAVCGVPESKFRAICSSIDKLDKMAWKDVRHEMVVKKGLAPEVADRIGDYVQCHGGVSLVEQMFQDPRLSQNKQALEGLGDLKLLFEYLTLFGIADKISFDLSLARGLDYYTGVIYEAVLLQTPTQAGEEPLNVGSVAAGGRYDGLVGMFDPKGHKVPCVGLSIGVERIFYIVEQRMKTKGEKVRTTETQVFVATPQKNFLQERLKLIAELWDSGIKAEMLYKNNPKLLTQLHYCESTGIPLVVIIGEQELKEGVIKIRSVASREEVAIKRENFVAEIQKRLSES

SEQ ID NO: 45931 - protein, 36 aa, Homo sapiens
MVRTDGHTLSEKRNYQSGRIPSFIMFWLDFLTVCWS

SEQ ID NO: 45932 - protein, 372 aa, Homo sapiens
MAESRGRLYLWMCLAAALASFLMGFMVGWFIKPLKETTTSVRYHQSIRWKLVSEMKAENIKSFLRSFTKLPHLAGTEQNFLLAKKIQTQWKKFGLDSAKLVHYDVLLSYPNETNANYISIVDEHETEIFKTSYLEPPPDGYENVTNIVPPYNAFSAQGMPEGDLVYVNYARTEDFFKLEREMGINCTGKIVIARYGKIFRGNKVKNAMLAGAIGIILYSDPADYFAPEVQPYPKGWNLPGTAAQRGNVLNLNGAGDPLTPGYPAKDRYVILGGHRDSWVFGAIDPTSGVAVLQEIARSFGKLMSKGWRPRRTIIFASWDAEEFGLLGSTEWAEVNKTKKVLIIFLVNREQICMCLRMIKNIFHYLIWFCFGE

SEQ ID NO: 45933 - protein, 242 aa, Homo sapiens
  MOD_RES (1)..(1): Any amino acid
XGRKRVASPPGLQSPASHSAPGRVQPPAASSLPPLPASTQPKAPKGKSAGREKKVIHPYSRKAAQITREAHKQEKKEKLKNEKALRLNLVGEKLQWFQNHLDPQKKRYSKKDACELIERYLNRFSSELEQIELHNSIRDRQGRRHCSRETVIKQTMERERQQFEGYGLEIPDILNASNLKTFREWDFDLKKLPNIKMRKICANDAIPKTCKRKTIITVDQDLGELELNDESSDSDEEMTAVA

SEQ ID NO: 45934 - protein, 177 aa, Homo sapiens
  MOD_RES (1)..(1): Any amino acid
XSEILRMERIILDKLNWDLHTATPLDFLHIMDSSQLIHCRELVAHHLSTLQSSLPLNSVYVYRPLKHTLVTCDKGVFRLHPSSVPGPDFSKDNSKPEVPVRGTAAFYHHLPAASGCKQTSTKRKVEEMEVDDFYDGIKRLYNEDNVSENVGSVCGTDLSRQEGHASPCPPLQPVSVM

SEQ ID NO: 45935 - protein, 185 aa, Homo sapiens
MKVKMLSRNPDNYVRETKLDLQRVPRNYDPALHPFEVPREYIRALNATKLERVFAKPFLASLDGHRDGVNCLAKHPEKLATVLSGACDGEVGDDKTVKQWKMDGPGYGDEEEPLHTILGKTVYTGIDHHWKEAVFATCGQQVDIWDEQRTNPICSMTWGFDSISSVKFNPIEVMFFFKYVLLIMA

SEQ ID NO: 45936 - protein, 73 aa, Homo sapiens
  MOD_RES (1)..(1): Any amino acid
XNAPSQESDSHPRKKKKEKKEDIFRRFPVAPLIPYPLITKEDINAIEMEEDKRDLISREISKFRDTHKRSYGD

SEQ ID NO: 45937 - protein, 309 aa, Homo sapiens
MEQSNDSLRVNHNDGEESKTSAQVFEHLICMDSRDSSFGQNDSPTVLPITTREANNSLISQNIPGPLTQTQTLSAEQFHLVDQNGQAIQYELQSLGESNAQMMIVASPTENGQVLRVIPPTQTGMAQVIIPQGQLVDVNSPRDVPEEKPSNRNLPTVRVDTLADNTSNYILHPQTSFPLPKKSVTGMLEEPLLGPLQPLSSNTPIWACRLRSCEKIGDSYRGYCVSETELESVLTFHKQQTQSVWGTRQSPSPAKPATRLMWKSQYVPYDGIPFVNAGTFLKNYFKRFSSSHSPLSKCDFPKVITFLFW

SEQ ID NO: 45938 - protein, 464 aa, Homo sapiens
MSETFKNLTSVARIFLHKPELITKLEQEEEQWREFVHLPNTEGLSEGKKKELREQHPSLRDEGTSDDKVFLACRGAGQCPLSAPAGTMDRTRVLQASQAGPPFFCYTCGKCFSRRSYLYSHQFVHNPKLTNSCSQCGKLFRSPKSLSYHRRMHLGERPFCCTLCDKTYCDASGLSRHRRVHLGYRPHSCSVCGKSFRDQSELKRHQKIHQNQEPVDGNQECTLRIPGTQAEFQTPIARSQRSIQGLLDVNHAPVARSQEPIFRTEGPMAQNQASVLKNQAPVTRTQAPITGTLCQDARSNSHPVKPSRLNVFCCPHCSLTFSKKSYLSRHQKAHLTEPPNYCFHCSKSFSSFSRLVRHQQTHWKQKSYLCPICDLSFGEKEGLMDHWRGYKGKDLCQSSHHKCRVILGQWLGFSHDVPTMAGEEWKHGGDQSPPRIHTPRRRGLREKACKGDKTKEAVSILKHK

SEQ ID NO: 45939 - protein, 136 aa, Homo sapiens
MGFNLTFHLSYKFRLLLLLTLCLTVVGWATSNYFVGAIQEIPKAKEFMANFHKTLILGKGKTLTNEASTKKVELDNCPSVSPYLRGQSKLIFKPDLTLEEVQAENPKVSRGRYRPQECKALQRVAILVPHRNREKH

SEQ ID NO: 45940 - protein, 147 aa, Homo sapiens
MPTPAPPMFDKYPTKVDPFYRHSLFHSYPPAVSGIPPMIPPTGPFGSLQGAFQPKTSNPIDVAARPGTVPHTLLQKDPRLTDPFRPMLRKPGKWCAMHVHIAWQIYHHQQKVKKQMQSDPHKLDFGLKPEFLSRPPGPSLFGAIHHP

SEQ ID NO: 45941 - protein, 886 aa, Homo sapiens
  MOD_RES (1)..(1): Any amino acid
XNIMNNKVFYQHPNLMRALGMHETVMEVMVNVLGGGESKEIRFPKMVTSCCRFLCYFCRISRQNQRSMFDHLSYLLENSGIGLGMQGSTPLDVAAASVIDNNELALALQEQDLEKVVSYLAGCGLQSCPMLVAKGYPDIGWNPCGGERYLDFLRFAVFVNGESVEENANVVVRLLIRKPECFGPALRGEGGSGLLAAIEEAIRISEDPARDGPGIRRDRRREHFGEEPPEENRVHLGHAIMSFYAALIDLLGRCAPEMHLIQAGKGEALRIRAILRSLVPLEDLVGIISLPLQIPTLGKDGALVQPKMSASFVPDHKASMVLFLDRVYGIENQDFLLHVLDVGFLPDMRAAASLDTATFSTTEMALALNRYLCLAVLPLITKCAPLFAGTEHRAIMVDSMLHTVYRLSRGRSLTKAQRDVIEDCLMSLCRYIRPSMLQHLLRRLVFDVPILNEFAKMPLKLLTNHYERCWKYYCLPTGWANFGVTSEEELHLTRKLFWGIFDSLAHKKYDPELYRMAMPCLCAIAGALPPDYVDASYSSKAEKKATVDAEGNFDPRPVETLNVIIPEKLDSFINKFAEYTHEKWAFDKIQNNWSYGENIDEELKTHPMLRPYKTFSEKDKEIYRWPIKESLKAMIAWEWTIEKAREGEEEKTEKKKTRKISQSAQTYDPREGYNPQPPDLSAVTLSRELQAMAEQLAENYHNTWGRKKKQELEAKGGGTHPLLVPYDTLTAKEKARDREKAQELLKFLQMNGYAVTRGLKDMELDSSSIEKRFAFGFLQQLLRWMDISQEFIAHLEAVVSSGRVEKSPHEQEIKFFAKILLPLINQYFTNHCLYFLSTPAKVLGSGGHASNKEKEMITRDRRPSCGQLSSHPGPLPGCQDSDEVRP

SEQ ID NO: 45942 - protein, 419 aa, Homo sapiens
  MOD_RES (1)..(1): Any amino acid
XDAELRLLRHQKLKLDTQMKLSDLHHVTLFQEILLLKNFEKQENILQERVNSLDKEEQYMQWKINETLKEMEEKKNEITKLQEQEKALYAGFQAAIGENNKFANFLMKVLKKKIKRVKKKEVEGDADEDEESEESSEEESSLESDEDESESEDEVFDDSICPTNCDVALFELALHLREKRLDIEEALVEEKKIVDNLKKEYDTLSKKVKIVATNLNAAEEALEAYQREKQQRLNELLVVIPLKLHQIEYVVFGEIPSDLSGTLVFSNHALRRLQERIHELQEENSKQQKLNKEWRERRKQLIREKREMTKTIHKMEETVRQLMISKFGRVVNLEALQTLSVNTTLEELKIRKLRKELANAKEMKMWEEKIAQMRWELMMKTKEHTRKLYQMNDLCIEKKKLDSRLNTLQNQQNPGNGLS

SEQ ID NO: 45943 - protein, 149 aa, Homo sapiens
MWLKVGGLLRGTGGQLGQTVGWPCGALGPGPHRWGPCGGSWAQKFYQDGPGRGLGEEDIRRAREARPRKTPRPQLSDRSRERKVPASRISRLANFGGLAVGLGLGVLAEMAKKSMPGGRLQSEGGSGLDSSPFLSEANAERIVQTLCTV

SEQ ID NO: 45944 - protein, 156 aa, Homo sapiens
MFLTAVNPQPLSTPSWQIETKYSTKVLTGNWMEERRKGLPYKHLITHHQEPPHRYLISTYDDHYNRHGYNPGLPPLRTWNGQKLLWLPEKSDFPLLAPPTNYGLYEQLKQRQLTPKAGLKQSTYTSSYPRPPLCAMSWREHAVPVPPHRLHPLPHF

SEQ ID NO: 45945 - protein, 117 aa, Homo sapiens
  MOD_RES (1)..(1): Any amino acid
XGDLSKVPTMALTVGVGTVMDAREVMILITGAHKAFALYKAIEEGVNHMWTVSAFQQHPRTIFVCDEDATLELRVKTVKYFKEMALSYHKLIQENYLLNSVQGCASKARKKFATVWA

SEQ ID NO: 45946 - protein, 297 aa, Homo sapiens
  MOD_RES (1)..(1): Any amino acid
XDEEEEEPPDHQYYNDFPGKEPPLGGVVDMRLREGAAPGAARPTAPNAQTPSHLGATLPVGQPVGGDPEVRKQMPPPPPCPGRELFDDPSYVNVQNLDKARQAVGGAGPPNPAINGSAPRDLFDMKPFEDALRVPPPPQSVSMAEQLRGEPWFHGKLSRREAEALLQLNGDFLVRESTTTPGQYVLTGLQSGQPKHLLLVDPEGVRWGFAMLPKLFLNSRAQVIRLPRPPRVLGLQARTTMPSLHIFFCTVYTLLRHANFLQVKKGVYSSQLHSFRADVAFAFSHFTDLSIPTTVSF

SEQ ID NO: 45947 - protein, 474 aa, Homo sapiens
MWPQPRLPPHPAMSEKTQQGKLAAAKKKLKAYWQRKSPGIPAGANRKKKVNGSSPDTATSGGYHSPGDSATGVYGEGRASSTTLQDLESQYQELAVALDSSSAIISQLTENINSLVRTSKEEKKHEIHLVQKLGRSLFKLKNQTAEPLAPEPPAGPSKVEQLQDETNHLRKELESVGRQLQAEVENNQMLSLLNRRQEERLREQEERLHEQEERLHEQEERLLREQEERLCEQEERLREQEERLCEQEERLCEQEERLCEQEERLCEQEERLCEQEKLPGQERLLEEVEKLLEQERRQEEQERLLERERLLDEVEELLEQERLRQQDERLWQQETLRELERLRELERLRELERMLELGWEALYEQRAEPRSGFEELNNENKSTLQLEQQVKELEKSGGAEEPRGSESAAAARPVPGAPVPQGAWMCGQAGWTPQEHPGLSGEAVGTGEAAGGAEEAACHSFRAAENRELNITII

SEQ ID NO: 45948 - protein, 55 aa, Homo sapiens [sequence omitted]

SEQ ID NO: 45949 - protein, 62 aa, Homo sapiens
PPPYSRLSPRDEYKPLDLSDSTLSYTETEATNSLITAPGEFSADAGIGSRGNRGLESSVPCS

SEQ ID NO: 45950 - protein, 168 aa, Homo sapiens
PRIVKEFSSPKLFTAKMRKLSENATIQLDVVEAETEEITQGNTLLRARRTTKRLSVTSLPSGLQKGPYSPKKRPHFPALKKKKRGMENILRKSDLTVGKLQMQVDDLIETVTDKSMKLLAQRHAELQQCEFLGDEILQSSKQFQRISKRTMRKYKLKNVCFPCTCCCF

SEQ ID NO: 45951 - protein, 89 aa, Homo sapiens
  MOD_RES (1)..(1): Any amino acid
XGDVLLQLEGISLGPGASLKRKDPKDHEKENLRRIREIQKRFREQERSREQGQPRPLKALWRSPKYDKVESRVKAQLQEPGLGVDFIRH

SEQ ID NO: 45952 - protein, 285 aa, Homo sapiens
MLTNLRIFAMSHQTIPSVYINNICCYKIRASLKRLKPHVPLGRNCSSLPGLIGNDIKSLHSIINPPIAKIRNIGIMAHIDAGKTTTTERILYYSGYTRSLGGHVDFTLEVERCLRVLDGAVAVFDASAGVEAQTLTVWRQADKHNIPRICFLNKMDKTGASFKYAVESIREKLKAKPLLLQLPIGEAKTFKGVVDVVMKEKLLWNCNSNDGKDFERKPLLEMNDPELLKETTEARNALIEQVADLDDEFADLVLEEFSENFDLLPAEKLQTAIHRVTLAQTAVPV

SEQ ID NO: 45953 - protein, 142 aa, Homo sapiens
MKPDRDTLDEYFEYDAEEFLVSLALLITEGRTPECSVKGRTESFHCPPAQSCYPVTTKHECSDKLAQCRQARRTRSEVTLLWKNNLPIMVEMMLLPDCCYSDDGPTTEGIDLNDPAIKQDALLLERWILEPVPRQNGDRFIE

SEQ ID NO: 45954 - protein, 104 aa, Homo sapiens
MFRKKKKKRPEISAPQNFQHRVHTSFDPKEGKFVGLPPQWQNILDTLRRPKPVVDPSRITRVQLQPMKTVVRGSAMPVDGYISGLLNDIQKLSVISSNTLRGRS

SEQ ID NO: 45955 - protein, 85 aa, Homo sapiens
MDDDDFGGFEAAETFDGGSGETQTTSPAIPWAAFPAVSGVHLSPSSPEIVLDRDHSSSIGCLSSDAIISSPENTHAANSIVSQTI

SEQ ID NO: 45956 - protein, 229 aa, Homo sapiens
MTTSHQPQDRYKAVWLIFFMLGLGTLLPWNFFMTATQYFTNRLDMSQNVSLVTAELSKDAQASAAPAAPLPERNSLSAIFNNVMTLCAMLPLLLFTYLNSFLHQRIPQSVRILGSLVAILLVFLITAILVKVQLDALPFFVITMIKIVLINSFGAILQGSLFGLAGLLPASYTAPIMSGQGLAGFFASVAMICAIASGSELSESAFGYFITACAVIILTIICYLGLPRL

SEQ ID NO: 45957 - protein, 164 aa, Homo sapiens
METFPAVAEKVLKEFQVLLQHSPSPIGSTRMLQLMTINMFAVHNSQLKDCFSEECRSVIQEQAAALGLAMFSLLVRRCTCLLKESAKAQLSSPEDQDDQDDIKVSSFVPDLKELLPSVKVWSDWMLGYPDTWNPPPTSLDLPSHVAVDVWSTLADFCNILTAVN

SEQ ID NO: 45958 - protein, 40 aa, Homo sapiens
MAVLKLTDQPPLVQAIFSGDPEEIRMLIHKTEDVNTLELV

SEQ ID NO: 45959 - protein, 80 aa, Homo sapiens
MSNTTVVPSTAGPGPSGGPGGGGGGGGGGGGTEVIQVTNVSPSASSEQMRTLFGFLGKIDELRLFPPDSMIQTQQLWHSI

SEQ ID NO: 45960 - protein, 54 aa, Homo sapiens
  MOD_RES (1)..(1): Any amino acid
XLPNELTCTTALPGSSKRRRKEETTGKNVKKTQHELDHNGLVPLPVKVCFTCNS

SEQ ID NO: 45961 - protein, 236 aa, Homo sapiens
QSAFLGPTLWDKTLPYDGDTFQLEYMDLEEFLSENGIPPSPSQHDHSPHPPGLQPASSAAPSVMDLSSRASAPLHPGIPSPNCMQSPIRPGQLLPANRNTPSPIDPDTIQVPVGYEPDPADLALSSIPGQEMFDPRKRKFSEEELKPQPMIKKARKVFIPDDLKQDDKYWARRRKNNMAAKRSRDARRLKENQIAIRASFLEKENSALRQEVADLRKELGKCKNILAKYEARHGPL

SEQ ID NO: 45962 - protein, 108 aa, Homo sapiens
MEILAYLAYETVAQLVDLALLVRQDMVTKAGDPFSHAISATFIQYHNSAESTAACGVEAHSDAIQPCHIREAIRRYSHRIGPLSPFTISFSLTECLPQEWDGFSSLLM

SEQ ID NO: 45963 - protein, 788 aa, Homo sapiens
MAPYSLLVTRLQVKASPAQSAFLALSLPRKKRGPKQRRPGEERRHLFLLFEDSIACSRGVCFHSSRLNRPLTLSEKIVYGHLDDPASQEIERGKSYLRLRPDRVAMQDATAQMAMLQFISSGLSKVAVPSTIHCDHLIEAQVGGEKDLRRAKDINQEVYNFLATAGAKYGVGFWKPGSGIIHQIILENYAYPGVLLIGTDSHTPNGGGLGGICIGVGGADAVDVMAGIPWELKCPKVIGVKLTGSLSGWSSPKDVILKVAGILTVKGGTGAIVEYHGPGVDSISCTGMATICNMGAEIGATTSVFPYNHRMKKYLSKTGREDIANLADEFKDHLVPDPGCHYDQLIEINLSELKPHINGPFTPDLAHPVAEVGKVAEKEGWPLDIRVGLIGSCTNSSYEDMGRSAAVAKQALAHGLKCKSQFTITPGSEQIRATIERDGYAQILRDLGGIVLANACGPCIGQWDRKDIKKGEKNTIVTSYNRNFTGRNDANPETHAFVTSPEIVTALAIAGTLKFNPETDYLTGTDGKKFRLEAPDADELPKGEFDPGQDTYQHPPKDSSGQHVDVSPTSQRLQLLEPFDKWDGKDLEDLQILIKVKGKCTTDHISAAGPWLKFRGHLDNISNNLLIGAINIENGKANSVRNAVTQEFGPVPDTARYYKKHGIRWVVIGDENYGEGSSREHAALEPRHLGGRAIITKSFARIHETNLKKQGLLPLTFADPADYNKIHPVDKLTIQGLKDFTPGKPLKCIIKHPNGTQETILLNHTFNETQIEWFRAGSALNRMKELQQ

SEQ ID NO: 45964 - protein, 396 aa, Homo sapiens
MPMLLPHPHQHFLKGLLRAPFRCYHFIFHSSTHLGSGIPCAQPFNSLGLHCTKWMLLSDGLKRKLCVQTTLKDHTEGLSDKEQRFVDKLYTGLIQGQRACLAEAITLVESTHSRKKELAQVLLQKVLLYHREQEQSNKGKPLAFRVGLSGPPGAGKSTFIEYFGKMLTERGHKLSVLAVDPSSCTSGGSLLGDKTRMTELSRDMNAYIRPSPTRGTLGGVTRTTNEAILLCEGAGYDIILIETVAGGDELQGIKRGIIEMADLVAVTKSDGDLIVPARRIQAEYVSALKLLRKRSQVWKPKVIRISARSGEGISEMWDKMKDFQDLMLASGELTAKRRKQQKVWMWNLIQESVLEHFRTHPTVREQIPLLEQKVLIGALSPGLAADFLLKAFKSRD

SEQ ID NO: 45965 - protein, 56 aa, Homo sapiens
MELRVGNRYRLGRKIGSGSFGDIYLGWSAVARSRLTASSASQRWGFTVLARMVSIS

SEQ ID NO: 45966 - protein, 208 aa, Homo sapiens
MKQPNRKRKLNMDSKERLDQDGRLEQAEEEKKPKDSTTPLSHVPSAAAQGAWSWEWYLKEQKAVAAPVELFSKDQSFPEHENGFQIGMRLEGIDPRHPSVFCVLSVAEVCGYRLRLHFDGYLSCYDFWTNAGSPDIHPVGWCEKTKHELHIPKGYRKDKFVWMDYLKACKLQNAPKKLFRNRSPNGPMSKEFQVGMKLEAVDRKNPSL

SEQ ID NO: 45967 - protein, 52 aa, Homo sapiens
  MOD_RES (1)..(1): Any amino acid
XPLALALLPPRLDARLLRTARGDCRGHQSDRWHTGLGDPLQSGTFCTHRAAS

SEQ ID NO: 45968 - protein, 1111 aa, Homo sapiens
MVVSAGPWSSEKAEMNILEINEKLRPQLAENKQQFRNLKERCFLTQLAGFLANRQKKYKYEECKDLIKFMLRNERQFKEEKLAEQLKQAEELRQYKVLVHSQERELTQLREKLREGRDASRSLNEHLQALLTPDEPDKSQGQDLQEQLAEGCRLAQQLVQKLSPENDEDEDEDVQVEEDEKVLESSAPREVQKAEESKVPEDSLEECAITCSNSHGPCDSIQPHKNIKITFEEDKVNSTVVVDRKSSHDECQDALNILPVPGPTSSATNVSMVVSAGPLSSEKAEMNILEINEKLRPQLAEKKQQFRSLKEKCFVTQLAGFLAKQQNKYKYEECKDLIKSMLRNELQFKEEKLAEQLKQAEELRQYKVLVHSQERELTQLREKLREGRDASRSLNEHLQALLTPDEPDKSQGQDLQEQLAEGCRLAQHLVQKLSPENDNDDDEDVQVEVAEKVQKSSSPREMQKAEEKEVPEDSLEECAITCSNSHGPYDSNQPHRKTKITFEEDKVDSTLIGSSSHVEWEDAVHIIPENESDDEEEEEKGPVSPRNLQESEEEEVPQESWDEGYSTLSIPPERLASYQSYSSTFHSLEEQQVCMAVDIGRHRWDQVKKEDQEATGPRLSRELLAEKEPEVLQDSLDRCYSTPSVYLGLTDSCQPYRSAFYVLEQQRVGLAVDMDEIEKYQEVEEDQDPSCPRLSRELLAEKEPEVLQDSLDRCYSTPSGYLELPDLGQPYRSAVYSLEEQYLGLALDVDRIKKDQEEEEDQGPPCPRLSRELLEVVEPEVLQDSLDRCYSTPSSCLEQPDSCQPYRSSFYALEEKHVGFSLDVGEIEKKGKGKKRRGRRSKKKRRRGRKEGEEDQNPPCPRLSRELLAEKEPEVLQDSLDRCYSTPSGYLELPDLGQPYRSAVYSLEEQYLGLALDVDRIKKDQEEEEDQGPPCPRLSRELLEVVEPEVLQDSLDRCYSTPSSCLEQPDSCQPYRSSFYALEEKHVGFSLDVGEIEKKGKGKKRRGRRSKKKRRRGRKEGEEDQNPPCPRLNSVLMEVEEPEVLQDSLDRCYSTPSMYFELPDSFQHYRSVFYSFEEQHITFALDMDNSFFTLTVTSLHLVFQMGVIFPQ

SEQ ID NO: 45969 - protein, 71 aa, Homo sapiens
MSSEPPPPPQPPTHQASVGLLDTPRSRERSPSPLRGNVVPSPLPTRRTRTFSATVRASQGPVYKGVCKCFC

SEQ ID NO: 45970 - protein, 203 aa, Homo sapiens
MIRAAPPPLFLLLLLLLLLVSWASRGEAAPDQDEIQRLPGLAKQPSFRQYSGYLKGSGSKHLHYWFVESQKDPENSPVVLWLNGGPGCSSLDGLLTEHGPFLVQPDGVTLEYNPYSWNLIANVLYLESPAGVGFSYSDDKFYATNDTEVAQSNFEALQDFFRLFPEYKNNKLFLTGESYAGIYIPTLAVLVMQDPSMNLQLPA

SEQ ID NO: 45971 - protein, 41 aa, Homo sapiens
MTLLGSEHSLLIRSKFRSVLQLRLQQRRTQEQLANQGIIPH

SEQ ID NO: 45972 - protein, 114 aa, Homo sapiens
FMYFLRGSLPWQGLKADTLKERYQKIGDTKRATPIEVLCENFPEEMATYLRYVRRLDFFEKPDYDYLRKLFTDLFDRSGFVFDYDRPPSAPSTPTCPPSLSSGTKPSRTAKTRR

SEQ ID NO: 45973 - protein, 52 aa, Homo sapiens
MNPRVPGQDAFVELYGPSMRPLFDFSWLSLKTLLSLALVGACITLGAYLGHK

SEQ ID NO: 45974 - protein, 71 aa, Homo sapiens
MLSNCRQNTLGHNTQTSIAQDFSSEQGRTAPQDQKASIQIYPWMQRMNSHSVCFVPGSLGVGYGADRRRGR

SEQ ID NO: 45975 - protein, 69 aa, Homo sapiens
KDELYLNLVLEYVPETVYRVARHFTKAKLTIPILYVKVLGTPTREQIREMNPNYTEFKFPQIKAHPWTK

SEQ ID NO: 45976 - protein, 154 aa, Homo sapiens
MAKRIKAKPTSDKPGSPYRSVTHFDSLAVIDIPGADTLDKLFDHAVSKFGKKDSLGTREILSEENEMQPNGKVFKKLILGNYKWMNYLEVNRRVNNFGSGLTALGLKPKNTIAIFCETRAEWMIAAQTCFKYNFPLVTLYATLGKEAVVHGLNE

SEQ ID NO: 45977 - protein, 118 aa, Homo sapiens
MAGEKVEKPDTKEKKPEAKKVDAGGKVKKGNLKAKKPKKGKPHCSRNPVLVRGIGRYSRSAMYSRKAMYKRKYSAAKSKVEKKKKEKVLATVTKPVGGDKNGGTRVVKLRKMPRYYPT

SEQ ID NO: 45978 - protein, 295 aa, Homo sapiens
MPGEATETVPATEQELPQPQAETVPTLPPKQQFLPSSPGLVLESPSKPLAPADEDELLPLIPPEPISGGVPFQSVLVNMPTPKSAGIPVPTPSAKQPVTKNNKGSGTESDSDESVPELEEQDSTQATTQQAQLAAAAEIDEEPVSKAKQSRSEKKARKAMSKLGLRQVTGVTRVTIRKSKNILFVITKPDVYKSPASDTYIVFGEAKIEDLSQQAQLAAAEKFKVQGEAVSNIQENTQTPTVQEESEEEEVDETGVEVKDIELVMSQANVSRAKAVRALKNNSNDIVNAIMELTM

SEQ ID NO: 45979 - protein, 124 aa, Homo sapiens
EGTHVEKSQSASVESIPEVLEECTSPADHSDSASVHDMDYVNPRGVRFTQSSQKEALVPYGLPCIRELFRFLISLTNPHDRHNSEVMIHMGLHLLTVALESAPVAQCQTLLGLIKDEMCRHLFQ

SEQ ID NO: 45980 - protein, 1864 aa, Homo sapiens
MDRNYATSGFTEPPPPPPPAPPAAPVPASAAAQPPAPAWAYEPRAAAAAASSSCSSGSCSSGSSPSLKASLSYEEGHPSHSETDLLQRQSFAASHQLPGYAPTPQPTGLSGIFDTSVNSASSNTKESSVMNFLSTAESRTAQAAASGTTLLPQFRAPSWQTGMHSSAATELFATGPLPSTGTLPPSLSAYQHPTTFSNRNFATTSPLVLQDSTFNTTSNGILSHHDPLLQIKTSQGTVPTALAFERLGSSVLSNSIPPQSSTYRSAQESAPHLLQPQFSLLPSALGGSQQTPQAYSSTLFTSSTASIERALLRECSVIKHHQRPSGTQSIQAQLTGSQHSLHSYLSNSSVVNFQETTRQSSLSCSPIGDSTQVSNGGLQQKTSQVSVELAQSYSSAIPSSGYPPSTTKIKSCSTEQPLTSTKTPKPQSIIPPVQTLSYSKPLHNQSSVISGQAQIYSTAQLPSLLSVSQSQNYGLVQPHNVPSIVHSQVYRSSKVEKLPPLYKTLTFSGSSQTVTPENQTLNYSSNQQEVLSSVTNENYPAQTRDLSSVSQSQSYSSGHSQGLSPVSQTQVSYSSQSQVLSVVSLSESYASGESLTLTAPSLSYSSASRAQNLPDSSPTQNYISMHSSQNVQTQESSSPQSQKFLPAVQSSSFASSTHCQTLQNNITSPDPKSYAERKLDSDVYPSSKQEDGFPMQELQVLQPQASLESSTQRLSDGEINAQESTYKVSKADDRYSQSVIRSNSRLEDQVIGVALQASKKEESVVGSVTQLNQQIGQVNNAATLDLKNSTNLIQTPQIRLNTKDLKQQHPLILKVHESKVQEQHDQIINASSQIQIPNHALGHGHQASLPNTQVLLDSACDLQILQQSILQAGLGQVKASLQAQRVQSPQQIVHPFLQMEGHVIQSNGDHSQQQLHPQNSEVMKMDLSESSKPLQQHLTTKGHFSETNQHDSKNQFVSLGSMCFPEAVLLSDERNILSNVDDILAATAAACGVTPTDFSKSTSNETMQAVEDGDSKSHFQQSLDVRHVTSDFNSMTATVGKPQNINDTSLNGNQVTVNLSPVPALQSKMTLDQQHIETPGQNIPTKVTSAVVGPSHEVQEQSSGPFKKQSATNLESEEDSEAPVDSTLNNNRNQEFVSSSRSISGENATSESEFTLGGDDSGVSMNPARSALALLAMAQSGDAVSVKIEEENQDLMHFNLQKKRAKGKGQVKEEDNSNQKQLKRPAQGKRQNPRGTDIYLPYTPPSSESCHDGYQHQEKMRQKIKEVEEKQPEVKTGFIASFLDFLKSGPKQQFSTLAVRMPNRTRRPGTQMVRTFCPPPLPKPSSTTPTPLVSETGGNSPSDKVDNELKNLEHLSSFSSDEDDPGYSQDAYKSVSTPLTTLDATSDKKKKTEALQVATTSPTANTTGTATTSSTTVGAVKQEPLHSTSYAVNILENISSSESSKPIELDGLPSDQFAKGQDTVAIEGFTDEEDTESGGEGQYRERDEFVVKIEDIETFKEALKTGKEPPAIWKVQKALLQKFVPEIRDGQREFAATNSYLGYFGDAKSKYKRIYVKFIENANKKEYVRVCSKKPRNKPSQTIRTVQAKPSSSSKTSDPLASKTTTTKAPSVKPKVKQPKVKAEPPPKKRKKWKEEFSSSQSDSSPEIHTSSSDDEEFEPPAPFVTRFLNTRAMKETFKSYMELLVSIALDPDTMQALEKSNDELLLPHMKKIDGMLNDNRKRLLLNLHLDQSFKNALESFPELTIITRDSKAKSGGTAISKIKMNGKAYNKKTLRTSKTTTKSAQEFAVDPEKIQLYSLYHSLHHYKYHVYLICKDEISSVQKKNEDLGQEEIVQLCMKNVKWVEDLFEKFGELLNHVQQKCS

SEQ ID NO: 45981 - protein, 153 aa, Homo sapiens
MMHECYQIWAQLEHEAGTQLHRQTGLLLLGMKENQELKTIQANLSRQRVEHQCLSSEELKQRFPNIRLPRGEVGLLDNSGGVIYAYKALRALQDAIRQLGGIVRDGEKVVEINPGLLVTVKTTSRSYQAKSLVITAGPWTNQLLRPLGIEMPL

SEQ ID NO: 45982 - protein, 126 aa, Homo sapiens
MVKFPALTHYWPLIRFLVPLGITNIAIDFGEQVSPGPAPHARSPCLGLTRPDTGAEGSHLLRVPLYPETFGRVCSLSRVTFPAPHSLPPSPQLFSRLFQPSLENVKKTGWCEASPMEGFLVHGSIM

SEQ ID NO: 45983 - protein, 145 aa, Homo sapiens
MPPHMLPVLGSSTVVNIVGVCDSILYKAISGVLMPTVLQALPDSLTQVIRKFAKQLDEWLKVALHDLPENLRNIKFELSRRFSQILRRQTSLNHLCQASRTVIHSADITFQMLEDWRNVDLNSITKQTLYTMEDSRDEHRKLITQ

SEQ ID NO: 45984 - protein, 79 aa, Homo sapiens
EFLNRRKMTEFGNLALIDQDAGQEDGVAIPLPGVRKGDMSSRHFKPEIRVTSLRFSPTVIRAALSRCSRDHRACGAEDA

SEQ ID NO: 45985 - protein, 303 aa, Homo sapiens
GSVTESLAPQALNDSMINETARDAARVQVASTLSVLVGLFQVGLGLIHFGFVVTYLSEPLVRGYTTAAAVQVFVSQLKYVFGLHLSSHSGPLSLIYTVLEVCWKLPQSKLIGATGISYGMGLKHRFEVDVVGNIPAGLVPPVAPNTQLFSKLVGSAFTIAVVGFAIAISLGKIFALRHGYRVDSNQELVALGLSNLIGGIFQCFPVSCSMSRSLVQESTGGNSQVAGAISSLFILLIIVKLGELFHDLPKAVLAAIIIVNLKGMLRQLSDMRSLWKANRADLLIWLVTFTATILLNLDLGLVV

SEQ ID NO: 45986 - protein, 63 aa, Homo sapiens
MSERCCSRYRDGALLCCPCWSQTPDLKQSSHLGLLKHWDHSSGASIGCTPTSTQAKMVSKRIA

SEQ ID NO: 45987 - protein, 143 aa, Homo sapiens
MKSPQWWGSSVHLAWSSQSLSLHGSAVRENHPMKTRVLRKTLDPAFDETFTFYGIPYTQIQELALHFTILSFDRFSRDDIIGEVLIPLSGIELSEGKMLMNREIIKRNVRKSSGRGELLISLCYQSTTNTLTVVVLKARHLPK

SEQ ID NO: 45988 - protein, 77 aa, Homo sapiens
MAGRLLGKALAAVSLSLALASVTIRSSRCRGIQAFRNPAGRTGLVGRGLLGRWGPNHAADPIITRGWWIQERRLVPH

SEQ ID NO: 45989 - protein, 96 aa, Homo sapiens
MPARRLLLLLTLLLPGLGIFGSTSTVTLPETLLFVSTLDGSLHAVSKRTGSIKWTLKEGNLDLVLGRHGHLLNWFHRNIFWRKRKHYSLSNKINKK

SEQ ID NO: 45990 - protein, 272 aa, Homo sapiens
MVLKTEEEDVPSDLTAEERQELENIRRRKQELLADIQRLKDEIAEVANEIENLGSTEERKNMQRNKQVAMGRKKFNMDPKKGIQFLIENDLLKNTCEDIAQFLYKGEGLNKTAIGDYLGERDEFNIQVLHAFVELHEFTDLNLVQALRQFLWSFRLPGEAQKIDRMMEAFAQRYCQCNNGVFQSTDTCYVLSFAIIMLNTSLHNPNVKDKPTVERFIAMNRGINDGGDLPEELLRNLYESIKNEPFKIPEDDGNDLTHTFFNPDREGWLLKL

SEQ ID NO: 45991 - protein, 233 aa, Homo sapiens
MATIKSELIKNFAEEEAIHHNKISIVGTGSVGVACAISILLKGLSDELVLVDVDEGKLKGETMDLQHGSPFMKMPNIVSSKDYLVTANSNLVIITAGARQKKGETRLDLVQRNVSIFKLMIPNITQYSPHCKLLIVTNPVDILTYVAWKLSGFPKNRVIGSGCNLDSARFRYFIGQRLGIHSESCHGLILGEHGDSSVPVWSGVNIAGVPLKDLNPDIGTDKDPEQWENVHKK

SEQ ID NO: 45992 - protein, 44 aa, Homo sapiens
MMGSGCVAQADLELLGSSDPPPSASQSARIPGMSYYYRPNILIF

SEQ ID NO: 45993 - protein, 185 aa, Homo sapiens
MSRVPSPPPPAEMSSGPVAESWCYTQIKVVKFSYMWTINNFSFCREEMGEVIKSSTFSSGANDKLKWCLRVNPKGLDEESKDYLSLYLLLVSCPKSEVRAKFKFSILNAKGEETKAMESQRAYRFVQGKDWGFKKFIRRDFLLDEANGLLPDDKLTLFCEVSVVQDSVNISGQNTMNMVKVPECR

SEQ ID NO: 45994 - protein, 247 aa, Homo sapiens
MSAGGRDEERRKLADIIHHWNANRLDLFEISQPTEDLEFHGVMRFYFQDKAAGNFATKCIRVSSTATTQDVIETLAEKFRPDMRMLSSPKYSLYEVHVSGEERRLDIDEKPLVVQLNWNKDDREGRFVLKNENDAIPPKKAQSNGPEKQEKEGVIQNFKRTLSKKEKKEKKKREKEALRQASDKDDRPFQGEDVENSRLAAEVYKDMPETSFTRTISNPEVVMKRRRQQKLEKRMQEFRSSDGRPDS

SEQ ID NO: 45995 - protein, 444 aa, Homo sapiens
  MOD_RES (1)..(1): Any amino acid
XRPGTLLGTFNAMDPDSQIRYELVHDPANWVSVDKNSGVVITVEPIDRESPHVNNSFYVIIIHAVDDGFPPQTATGTLMLFLSDINDNVPTLRPRSRYMEVCESAVHEPLHIEAEDPDLEPFSDPFTFELDNTWGNAEDTWKLGRNWGQSVELLTLRSLPRGNYLVPLFIGDKQGLSQKQTVHVRICPCASGLTCVELADAEVGLHVGALFPVCAAFVALAVALLFLLRCYFVLEPKRHGCSVSNDEGHQTLVMYNAESKGTSAQTWSDVEGQRPALLICTAAAGPTQGVKAYPDATMHRQLLAPVEGRMAETLNQSKERNRFSLSRGCIIPQGRATAGRGLPQDIYKEMMPRRLTQTGKRKHGALARTPSFKKVVYDHKEDEENKAGRKQRSHLFKVMQLRNEQGGVRVQSAHSPSPLNKKACFPGDYRGESAGGHNCRAVSG

SEQ ID NO: 45996 - protein, 1616 aa, Homo sapiens
MRKRKISVCQQTWALLCKNFLKKWRMKRESLMEWLNSLLLLLCLYIYPHSHQVNDFSSLLTMDLGRVDTFNESRFSVVYTPVTNTTQQIMNKVASTPFLAGKEVLGLPDEESIKEFTANYPEEIVRVTFTNTYSYHLKFLLGHGMPAKKEHKDHTAHCYETNEDVYCEVSVFWKEGFVALQAAINAAIIEITTNHSVMEELMSVTGKNMKMHSFIGQSGVITDLYLFSCIISFSSFIYYASVNVTRERKRMKALMTMMGLRDSAFWLSWGLLYAGFIFIMALFLALVIRSTQFIILSGFMVVFSLFLLYGLSLVALAFLMSILVKKSFLTGLVVFLLTVFWGCLGFTSLYRHLPASLEWILSLLSPFAFMLGMAQLLHLDYDLNSNAFPHPSDGSNLIVATNFMLAFDTCLYLALAIYFEKILPNEYGHRRPPLFFLKSSFWSQTQKTDHVALEDEMDADPSFHDSFEQAPPEFQGKEAIRIRNVTKEYKGKPDKIEALKDLVFDIYEGQITAILGHSGAGKSTLLNILSGLSVPTKGSVTIYNNKLSEMADLENLSKLTGVCPQSNVQFDFLTVRENLRLFAKIKGILPQEVDKEIQRVLLELEMKNIQDVLAQNLSGGQKRKLTFGIAILGDPQIFLLDEPTAGLDPFSRHQVWNLLKERKTDRVILFSTQFMDEADILADRKVFLSQGKLKCAGSSLFLKKKWGIGYHLSLQLNEICVEENITSLVKQHIPDAKLSAKSEGKLIYTLPLERTNKFPELYKDLDSYPDLGIENYGVSMTTLNEVFLKLEGKSTINESDIAILGEVQAEKADDTERLVEMEQVLSSLNKMRKTIGGVALWRQQICAIARVRLLKLKHERKALLALLLILMAGFCPLLVEYTMVKIYQNSYTWELSPHLYFLAPGQQPHDPLTQLLIINKTGASIDDFIQSVEHQNIALEVDAFGTRNGTDDPSYNGAITVCCNEKNYSFSLACNAKRLNCFPVLMDIVSNGLLGMVKPSVHIRTERSTFLENGQDNPIGFLAYIMFWLVLTSSCPPYIAMSSIDDYKNRARSQLRISGLSPSAYWFGQALVDVSLYFLVFVFIYLMSYISNFEDMLLTIIHIIQIPCAVGYSFSLIFMTYVISFIFRKGRKNSGIWSFCFYVVTVFSVAGFAFSIFESDIPFIFTFLIPPATMIGCLFLSSHLLFSSLFSEERMDVQPFLVFLIPFLHFIIFLFTLRCLEWKFGKKSMRKDPFFSSDVCQNPEEPEGEDEDVQMERVRTANALNSTNFDEKPVIIASCLRKEYAGKRKGCFSKRKNKIATRNVSFCVRKGEVLGLLGHNGAGKSTSIKVITGDTKPTAGQVLLKGSGGGDALEFLGYCPQENALWPNLTVRQHLEVYAAVKGLRKGDAEVAITRLVDALKLQDQLKSPVKTLSEGIKRKLCFVLSILGNPSVVLLDEPSTGMDPEGQQQMWQAIRATFRNTERGALLTTHYMAEAEAVCDRVAIMVSGRLRCIGSIQHLKSKFGKDYLLEMKVKNLAQVEPLHAEILRLFPQAARQERYSSLMVYKLPVEDVQPLAQAFFKLEKVKQSFDLEEYSLSQSTLEQVFLELSKEQELGDFEEDFDPSVKWKLLPQEEP

SEQ ID NO: 45997 - protein, 158 aa, Homo sapiens
MAGARAAAAAASAGSSASSGNQPPQELGLGELLEEFSRTQYRAKDGSGTGGSKVERIEKRCLELFGRDYCFSVIPNTNGDICGHYPRHIVFLEYESSEKEKDTFESTVQGVQMMPGQMWRTSRRRTVLFEVVTRIFLIRSEAMTSSCFDTCQSNTSVT

SEQ ID NO: 45998 - protein, 335 aa, Homo sapiens
MRILHVNGFNGEGGEEDPQAARSNSDGEKATKVQDIKNNLKEAIETIVAAMSNLVPPVELANPENQFRVDYILSVMNVPDFDFPPEFYEHAKALWEDEGVRACYERSNEYQLIDCAQYFLDKIDVIKQADYVPSDQDLLRCRVLTSGIFETKFQVDKVNFHMFDVGGQRDERRKWIQCFNDVTAIIFVVASSSYNMVIREDNQTNRLQEALNLFKSIWNNRWLRTISVILFLNKQDLLAEKVLAGKSKIEDYFPEFARYTTPEDATPEPGEDPRVTRAKYFIRDEFLRISTASGDGRHYCYPHFTCAVDTENIRRVFNDCRDIIQRMHLRQYELL

SEQ ID NO: 45999 - protein, 47 aa, Homo sapiens
EDMDGFQADTEEEEEEEGDCMIVDVPDAAAMRSLFQSLSDSPSCHLL

SEQ ID NO: 46000 - protein, 630 aa, Homo sapiens
MKLGKVEFCHFLQLIALFLCFSGMSQAELSRSRSKPYFQSGRSRTKRSWVWNQFFVLEEYMGSDPLYVGKLHSDVDKGDGSIKYILSGEGASSIFIIDENTGDIHATKRLDREEQAYYTLRAQALDRLTNKPVEPESEFVIKIQDINDNEPKFLDGPYTAGVPEMSPVGTSVVQVTATDADDPTYGNSARVVYSILQGQPYFSVEPKTGVIKTALPNMDREAKDQYLLVIQAKDMVGQNGGLSGTTSVTVTLTDVNDNPPRFPRRSYQYNVPESLPVASVVARIKAADADIGANAEMEYKIVDGDGLGIFKISVDKETQEGIITIQKELDFEAKTSYTLRIEAANKDADPRFLSLGPFSDTTTVKIIVEDVDEPPVFSSPLYPMEVSEATQVGNIIGTVAAHDPDSSNSPVRYSIDRNTDLERYFNIDANSGVITTAKSLDRETNAIHNITVLAMESQNPSQVGRGYVAITILDINDNAPEFAMDYETTVCENAQPGQVIQKISAVDKDEPSNGHQFYFSLTTDATNNHNFSLKDNKDNTASILTRRNGFRRQEQSVYYLPIFIVDSGSPSLSSTNTLTIRVCDCDADGVAQTCNAEAYVLPAGLSTGALIAILACVLTLLGRYCFQGLL

SEQ ID NO: 46001 - protein, 102 aa, Homo sapiens
MSAETPITLNIDPQDLQVQTFTVEKLLEPLIIQVTTLVNCPQNPSSRKKGRSKRASVLLASVEEATWNLLDKGEKIAQEATVLKDELTASLEEVRKEISKDI

SEQ ID NO: 46002 - protein, 540 aa, Homo sapiens
MDALPRSGLNLKEEPLLPAGLGSVRSWMQGAGILDASTAAQSGVGLARAHFEKQPPSNLRKSNFFHFVLAMYDRQGQPVEVERTAFIDFVEKDREPGAEKTNNGIHYRLRLVYNNGLRTEQDLYVRLIDSMSKQAIIYEGQDKNPEMCRVLLTHEIMCSRCCDRKSCGNRNETPSDPVIIDRFFLKFFLKCNQNCLKNAGNPRDMRRFQVVVSTTVSVDGHVLAVSDNMFVHNNSKHGRRARRLDPSEAATPCIKAISPGEGWTTGGATVIVIGDNFFDGLQVVFGNVLVWSELITPHAIRVQTPPRHIPGVVEVTLSYKSKQFCKGCPGRFVYTALNEPTIDYGFQRLQKVIPRHPGDPERLPKEVLLKRAADLAEALYGVPGSNQELLLKRAADVAEALYSTPRAPGPLAPLAPSHPHPAVVGINAFSSPLAIAVGDATPGPEPGYARSCSSASPRGFAPSPGSQQSGYGGGLGAGLGGYGAPGVAGLGVPGSPSFLNGSTATSPFAKERLRPRAAPPKLPTPGLPQSPRRGASRPVF

SEQ ID NO: 46003 - protein, 308 aa, Homo sapiens
MAVDITLLFRASVKTVKTRNKALGVAVGGGVDGSRDELFRRSPRPKGDFSSRAREVISHIGKLRDFLLEHRKDYINAYSHTMSEYGRMTDTERDQIDQDAQIFMRTCSEAIQQLRTEAHKEIHSQQVKEHRTAVLDFIEDYLKRVCKLYSEQRAIRVKRVVDKKRLSKLEPEPNTKTRESTSSEKVSQSPSKDSEENPATEERPEKILAETQPELGTWGDGKGEDELSPEEIQMFEQENQRLIGEMNSLFDEVRQIEGRVVEISRLQEIFTEKVLQQEAEIDSIHQLVVGATENIKEGNEDIREVPHL

SEQ ID NO: 46004 - protein, 317 aa, Homo sapiens
MQAAWLLGALVVPQLLGFGHGARGAEREWEGGWGGAQEEEREREALMLKHLQEALGLPAGRGDENPAGTVEGKEDWEMEEDQGEEEEEEATPTPSSGPSPSPTPEDIVTYILGRLAGLDAGLHQLHVRLHALDTRVVELTQGLRQLRNAAGDTRDAVQALQEAQGRAEREHGRLEDSECMTPPPSLPGPAHRLPEGAAPGPQVLPALARLRSSGGGAGAVHGAGREPGAAGRPPADGGAHSVPARGARSLQLARVAGRARSARRGPLPLRKRPARVLLRLASLTPPRARRPAQRLAASAQPGPAQRWHARELRGAGL

SEQ ID NO: 46005 - protein, 307 aa, Homo sapiens
MQQVLENLTELPSSTGAEEIDLIFLKGIMENPIVKSLAKAHERLEDSKLEAVSDNNLELVNEILEDITPLINVDENVAELVGILKEPHFQSLLEAHDIVASKCYDSPPSSPEMNNSSINNQLLPVDAIRILGIHKRAGEPLGVTFRVENNDLVIARILHGGMIDRQGLLHVGDIIKEVNGHEVGNNPKELQELLKNISGSVTLKILPSYRDTITPQQVFVKCHFDYNPYNDNLIPCKEAGLKFSKGEILQIVNREDPNWWQASHVKEGGSAGLIPSQFLEEKRKAFVRRDWDNSGPFCGTISSKKKK

SEQ ID NO: 46006 - protein, 181 aa, Homo sapiens
MLRLSERNMKVYFDLRIGDEDVGRVIFGLFGKTVPKTVDNFVALATGEKGFGYKNSKFHRVIKDFMIQGGDFTRGDGTGGKSIYGERFPDENFKLKHYGPGWVSMANAGKDTNGSQFFITTVKTAWLDGKHVVFGKVLEGMEVVRKVESTKTDSRDKPLKDVIIADCGKIEVEKPFAIAKE

SEQ ID NO: 46007 - protein, 1809 aa, Homo sapiens
MAAFGLLSYEQRPLKRPRLGPPDVYPQDPKQKEDELTAVNVKQGFNNQPAFTGDEHGSARNIVINPSKIGAYFSSILAEKLKLNTFQDTGKKKPQVNAKDNYWLVTARSQSAIHSWFSDLAGNKPLSILAKKVPILSKKEDVFAYLAKYSVPMVRATWLIKMTCAYYSAISEAKIKKRQAPDPNLEWTQISTRYLREQLAKISDFYHMASSTGDGPVPVPPEVEQAMKQWEYNEKLAFHMFQEGMLEKHEYLTWILDVLEKIRPMDDDLLKLLLPLMLQVRARIYEVEQQIKQRGRAVEVRWSFDKCQESTAGVTISRVLHTLEVLDRHCFDRTDSSNSMETLYHKIFWANQNKDNQEVAPNDEAVVTLLCEWAVSCKRSGKHRAMAVAKLLEKRQAEIEAERCGESEVLDEKESISSSSLAGSSLPVFQNVLLRFLDTQAPSLSDPNSECEKVEFVNLVLLFCEFIRHDVFSHDAYMCTLISRGDLSVTASTRPRSPVGENADEHYSKDHDVKMEIFSPMPGESCENANTSLGRRMSVNCEKLVKREKPRELIFPSNYDLLRHLQYATHFPIPLDESSSHECNQRTILLYGVGKERDEARHQLKKITKDILKILNKKSTTETGVGDEGQKARKNKQETFPTLETVFTKLQLLSYFDQHQVTSQISNNVLEQITSFASGTSYHLPLAHHIQLIFDLMEPALNINGLIDFAIQLLNELSVVEAELLLKSSSLAGSYTTGLCVCIVAVLRRYHSCLILNPDQTAQVFEGLCGVVKHVVNPSECSSPERCILAYLYDLYVSCSHLRSKFGDLFSSACSKVKQTIYNNVMPANSNLRWDPDFMMDFIENPSARSINYSMLGKILSDNAANRYSFVCNTLMNVCMGHQDAGRINDIANFSSELTACCTVLSSEWLGVLKALCCSSNHVWGFNDVLCTVDVSDLSFHDSLATFIAILIARQCFSLEDVVQHVALPSLLAAACGDADAEPGARMTCRLLLHLFRAPQACFLPQATGKPFPGIRSSCDRHLLAAAHNSIEVGAVFAVLKAIMMLGDAKIGNNSVSSLKNDDFTMRGLRCDGNADDIWTASQNPKSCGKSISIETANLREYARYVLRTICQQEWVGEHCLKEPERLCTDKELILDPVLSNMQAQKLLQLICYPHGIKECTEGDNLQRQHIKRILQNLEQWTLRQSWLELQLMIKQCLKDPGSGSVAEMNNLLDNIAKATIEVFQQSADLNNSSNSGMSLFNPNSIGSADTSSTRQNGIKTFLSSSERRGVWLVAPLIARLPTSVQGRVLKAAGEELEKGQHLGSSSKKERDRQKQKSMSLLSQQPFLSLVLTCLKGQDEQREGLLTSLQNQVNQILSNWREERYQDDIKARQMMHEALQLRLNLVGGMFDTVQRSTQWTTDWALLLLQIITSGTVDMHTNNELFTTVLDMLGVLINGTLASDLSNASPGGSEENKRAYMNLVKKLKKELGDKRSESIDKVRQLLPLPKQTCDVITCEPMGSLIDTKGNKIAGFDSIDKKQGLQVSTKQKVSPWDLFEGQKNPAPLSWAWFGTVRVDRRVIKYEEQHHLLLYHTHPMPKPRSYYLQPLPLPPEEEEEEPTSPVSQEPERKSAELSDQGKTTTDEEKKTKGRKRKTKSSSRVDEYPQSNIYRVPPNYSPISSQMMHHPQSTLWGYNLVGQPQQPGFFLQNQSLTPGGSRLDPAGSFVPTNTKQALSNMLQRRSGAMMQPPSLHAITSQQQLIQMKLLQQQQQQRLLRQAQTRPFQQFPRQGLQQTQQQQQTAALVRQLQKQLSSNQPQQGVTPYGHPSHF

SEQ ID NO: 46008 - protein, 175 aa, Homo sapiens
MESEDLSGRELTIDSIMNKVRDIKNKFKNEDLTDELSLNKISADTTDNSGTVNQIMMMANNPEDWLSLLLKLEKNSVPLSDALLNKLIGRYSQAIEALPPDKYGQNESFARIQVRFAELKAIQEPDDARDYFQMARANCKKFAFVHISFAQFELSQGNVKKSKQLLQKAVERGAV

SEQ ID NO: 46009 - protein, 192 aa, Homo sapiens
MGKRRCVPPLEPKLAAGCCGVKKPKLSGSGTHSHGNQSTTVPGSSSGPLQNHQHVDSSSGRENVSDLTLGPGNSPITRMNPASGALSPLPRPNGTANTTKNLVVTAEMCCYCFDVLYCHLYGFPQPRLPRFTNDPYPLFVTWKTGRDKRLRGCIGTFSAMNLHSGLREYTLTSLTYVFCPPPVHLRTADFPP

SEQ ID NO: 46010 - protein, 98 aa, Homo sapiens
ETLRSFLQAAQQDLGALLEQHSISLGPLVTAVEKFEAEAAALGQRISTLQKGSPDPLQVRMLNDQLMLLERTFLNPRAFPEERYYSPPFTPTLSCLLS

SEQ ID NO: 46011 - protein, 199 aa, Homo sapiens
MTPQSLLQTTLFLLSLLFLVQGAHGRGHREDFRFCSQRNQTHRSSLHYKPTPDLRISIENSEEALTVHAPFPAAHPASRSFPDPRGLYHFCLYWNRHAGRLHLLYGKRDFLLSDKASSLLCFQHQEESLAQGPPLLATSVTSWWSPQNISLPSAASFTFSFHSPPHTAAHNASVDMCELKRDLQLLSQFLKHPQKASRR

SEQ ID NO: 46012 - protein, 93 aa, Homo sapiens
MGLSVRELNRHLRGLSAEEVTRLKQRRRTLKNRGYAASCRVKRVCQKEELQKQKSELEREVDKLARENAAMRLELDALRGKCEALQGFARSVA

SEQ ID NO: 46013 - protein, 149 aa, Homo sapiens
MTSPAAAQSREIDCLSPEAQKLAEARLAAKRAARAEAREIRMKELERQQKEEDSERYSRRSRRNTSASDEDERMSVGSRGSLRTNGYDGELYGSQSLNRRSGRVEERPEKDFTEKGSRNMPGLSAATLASLGGTSSRRGSGDTSISIDT

SEQ ID NO: 46014 - protein, 296 aa, Homo sapiens
MAHQTGIHATEELKEFFAKARAGSVRLIKVVIEDEQLVLGASQEPVGRWDQDYDRAVLPLLDAQQPCYLLYRLDSQNAQGFEWLFLAWSPDNSPVRLKMLYAATRATVKKEFGGGHIKDELFGTVKDDLSFAGYQKHLSSCAAPAPLTSAERELQQIRINEVKTEISVESKHQTLQGLAFPLQPEAQRALQQLKQKMVNYIQMKLDLERETIELVHTEPTDVAQLPSRVPRDAARYHFFLYKHTHEGDPLESVVFIYSMPGYKCSIKERMLYSSCKSRLLDSVEQDFHLEIAKKGI

SEQ ID NO: 46015 - protein, 102 aa, Homo sapiens
MLEHLSSLPTQMDYKGQKLAEQMFQGIILFSAIVGFIYGYVAEQFGWTVYIVMAGFAFSCLLTLPPWPIYRRHPLKWLPVQESSTDDKKPGERKIKRHAKNN

SEQ ID NO: 46016 - protein, 689 aa, Homo sapiens
MLSDDHVNEIIIQKLIASLIPMTSRDRIKAIRNQPRTMEEKRNLSRGGLTITTEDEGRAKAHLTWWKIVDKEKSKQTHRILQLNCCIQCLNSISRAYRRSKNSLSEILNSISLWQKTLKIIGGKFGTSVLSYFNFLRWLLKFNIFSFILNFSFIIIPQFTVAKKNTLQFTGLEFFTGVGYFRDTVMYYGFYTNSTIQHGNSGASYNMQLAYIFTIGACLTTCFFSLLFSMAKYFRNNFINPHIYSGGITKLIFCWDFTVTHEKAVKLKQKNLSTEIRENLSELRQENSKLTFNQLLTRFSAYMVAWVVSTGVAIACCAAVYYLAEYNLEFLKTHSNPGAVLLLPFVVSCINLAVPCIYSMFRLVERYEMPRHEVYVLLIRNIFLKISIIGILCYYWLNTVALSGEECWETLIGQDIYRLLLMDFVFSLVNSFLGEFLRRIIGMQLITSLGLQEFDIARNVLELIYAQTLVWIGIFFCPLLPFIQMIMLFIMFYSKNISLMMNFQPPSKAWRASQMMTFFIFLLFFPSFTGVLCTLAITIWRLKPSADCGPFRGLPLFIHSIYSWIDTLSTRPGYLWVVWIYRNLIGSVHFFFILTLIVLIITYLYWQITEGRKIMIRLLHEQIINEGKDKMFLIEKLIKLQDMEKKANPSSLVLERREVEQQGFLHLGEHDGSLDLRSRRSVQEGNPRA

SEQ ID NO: 46017 - protein, 607 aa, Homo sapiens
MGPPGPETRGHPHSASSPSERVFPMPLPRKAPLNIPGTPVLEDFPQNDDEKERLQRRRSRVFDLQFSTDSPRLLASPSSRSIDISATIPKFTNTQITEHYSTCIKLSTENKITTKNAFGLHLIDFMSEILKQKDTEPTNFKVAAGTLDASTKIYAVRVDAVHADVYRVLGGLGKDAPSLEEVEGHVADGSATEMGTTKKAVKPKKKHLHRTIEQNINNLNVSEADRKCEIDPMFQKTAASFDECSTAGVFLSTLHCQDYRSELLFPSDVQTLSTGEPLELPELGCVEMTDLKAPLQQCAEDRQICPSLAGFQFTQWDSETHNESVSALVDKFKKNDQVFDINAEVDESDCGDFPDGSLGDDFDANDEPDHTAVGDHEEFRSWKEPCQVQSCQEEMISLGDGDIRTMCPLLSMKPGEYSYFSPRTMSMWAGPDHWRFRPRRKQDAPSQSENKKKSTKKDFEIDFEDDIDFDVYFRKTKAATILTKSTLENQNWRATTLPTDFNYNVDTLVQLHLKPGTRLLKMAQGHRVETEHYEEIEDYDYNNPNDTSNFCPGLQAADSDDEDLDDLFVGPVGNSDLSPYPCHPPKTAQQNGDTPEAQGLDITTYGE

SEQ ID NO: 46018 - protein, 18 aa, Homo sapiens
CQKHFPTDPSKCVEYNAL

SEQ ID NO: 46019 - protein, 179 aa, Homo sapiens
MVRGRISRLSVRDVRFPTSLGGHGADAMHTDPDYSAAYVVIETDAEDGIKGCGITFTLGKGTEVVVCAVNALAHHVLNKDLKDIVGDFRGFYRQLTSDGQLRWIGPEKGVVHLATAAVLNAVWDLWAKQEGKPVWKLLVDMKYCRKVKLVKKKERSKCWHKDTLLTRHRAPGWGTQMTR

SEQ ID NO: 46020 - protein, 92 aa, Homo sapiens
  MOD_RES (1)..(1): Any amino acid
XAGPQETNMKEPLATLVDQSPESLKRKSSLTQEEAPVSWEKRPRVTENRQHQQPFQVSPQPFLNRGDRIQVRKVPPLKVSPRARFPVSITSP

SEQ ID NO: 46021 - protein, 151 aa, Homo sapiens
MVINKVHLKANHVVKRDVDEHLRIKTVYDKSVEELLPEKKNLVKNKLFPQAISYLEKTFQVRRPAGTILLSRQCATNQYLRKENDPHRYCTGECAAHTKCGPVIVPEEHLQQCRVYRGGKWPHGAVGVPDQEGISDADFVLYVGALATERC

SEQ ID NO: 46022 - protein, 234 aa, Homo sapiens
  MOD_RES (1)..(1): Any amino acid
XSQKLPDVKPSPINLRKKSLTVKVDVKKTVDTFRVASSYSTERQMSHDLVAVGRKSENFHPVFEHLDSTQNTENKPTGEFAQEIITIIHQVKANYFPSPGITLHERFSTMQDIHKADVNEIPLNSDPEIHRRIDMSLAELQSKQAVIYESEQTLIKIIDPNDLRHDIERRRKERLQNEDEHIFHIASAAERDDQNSSFSKGLALSPRLECGVTITAYCSLYLQDSSYLPPQPPE

SEQ ID NO: 46023 - protein, 67 aa, Homo sapiens
  MOD_RES (1)..(1): Any amino acid
XFSLVVFSCGGCWSVTAKMLRNLLALRQIGQRTISTASRRHFKNKVPEKQKLFQVLKYFIGDVTCNY

SEQ ID NO: 46024 - protein, 110 aa, Homo sapiens
  MOD_RES (1)..(1): Any amino acid
XHKPCYGALFGPRGVNIGGVGSYLYNPPTPSPGCTTPLSPSSFSPPRPRTGLPQGKKTEKVMSLGRNWHRPCLRCQRCHKTLTAGSHAEHDGVPYCHVPCYGYLFGPKAL

SEQ ID NO: 46025 - protein, 374 aa, Homo sapiens
MNCEREQLRGNQEAAAAPDTMAQPYASAQFAPPQNGIPAEYTAPHPHPAPEYTGQTTVPEHTLNLYPPAQTHSEQSPADTSAQTVSGTATQTDDAAPTDGQPQTQPSENTENKSQPKRLHVSNIPFRFRDPDLRQMFGQFGKILDVEIIFNERGSKGFGFVTFENSADADRAREKLHGTVVEGRKIEVNNATARVMTNKKTVNPYTNGWKLNPVVGAVYSPEFYAGTVLLCQANQEGSSMYSAPSSLVYTSAMPGFPYPAATAAAAYRGAHLRGRGRTVYNTFRAAAPPPPIPAYGGVVYQDGFYGADIYGGYAAYRYAQPTPATAAAYSDRNQFVFVAADEISCNTSAVTDEFMLPTPTTTHLLQPPPTALVP

SEQ ID NO: 46026 - protein, 114 aa, Homo sapiens
MVENFRNLLSVGHPPFKQDVSPIERNEQLWIMTTATRRQGNLGEKNQSKLITVQDRESEEELSCWQIWQQIANDLTRCQDSMINNSQCHKQGDFPYQVGTELSIQISEDENYIV

SEQ ID NO: 46027 - protein, 63 aa, Homo sapiens
  MOD_RES (1)..(1): Any amino acid
XRTITFQQFKEAVKELGQKRFKGKSPDEVLENIYGLMEGKDPATTGATLLPRTGWKNIFGVKR

SEQ ID NO: 46028 - protein, 2472 aa, Homo sapiens
MPPNINWKEIMKVDPDDLPRQEELADNLLISLSKVEVNELKSEKQENVIHLFRITQSLMKMKAQEVELALEEVEKAGEEQAKFENQLKTKVMKLENELEMAQQSAGGRDTRFLRNEICQLEKQLEQKDRELEDMEKELEKEKKVNEQLALRNEEAENENSKLRRENEQLCQDIIDYQKQIDSQKETLLSRRGEDSDYRSQLSKKNYELIQYLDEIQTLTEANEKIEVQNQEMRKNLEESVQEMEKMTDEYNRMKAIVHQTDNVIDQLKKENDHYQLQVQELTDLLKSKNEEDDPIMVAVNAKVEEWKLILSSKDDEIIEYQQMLHNLREKLKNAQLDADKSNVMALQQGIQERDSQIKMLTEQVEQYTKEMEKNTCIIEDLKNELQRNKGASTLSQQTHMKIQSTLDILKEKTKEAERTAELAEADAREKDKELVEALKRLKDYESGVYGLEDAVVEIKNCKNQIKIRDREIEILTKEINKLELKISDFLDENEALRERVGLEPKTMIDLTEFRNSKHLKQQQYRAENQILLKEIESLEEERLDLKKKIRQMAQERGKRSATSGLTTEDLNLTENISQGDRISERKLDLLSLKNMSEAQSKNEFLSRELIEKERDLERSRTVIAKFQNKLKELVEENKQLEEGMKEILQAIKEMQKDPDVKGGETSLIIPSLERLVNAIESKNAEGIFDASLHLKAQVDQLTGRNEELRQELRESRKEAINYSQQLAKANLKIDHLEKETSLLRQSEGSNVVFKGIDLPDGIAPSSASIINSQNEYLIHLLQELENKEKKLKNLEDSLEDYNRKFAVIRHQQSLLYKEYLSEKETWKTESKTIKEEKRKLEDQVQQDAIKVKEYNNLLNALQMDSDEMKKILAENSRKITVLQVNEKSLIRQYTTLVELERQLRKENEKQKNELLSMEAEVCEKIGCLQRFKEMAIFKIAALQKVVDNSVSLSELELANKQYNELTAKYRDILQKDNMLVQRTSNLEHLECENISLKEQVESINKELEITKEKLHTIEQAWEQETKLGNESSMDKAKKSITNSDIVSISKKITMLEMKELNERQRAEHCQKMYEHLRTSLKQMEERNFELETKFAELTKINLDAQKVEQMLRDELADSVSKAVSDADRQRILELEKNEMELKVEVSKLREISDIARRQVEILNAQQQSRDKEVESLRMQLLDYQAQSDEKSLIAKLHQHNVSLQLSEATALGKLESITSKLQKMEAYNLRLEQKLDEKEQALYYARLEGRNRAKHLRQTIQSLRRQFSGALPLAQQEKFSKTMIQLQNDKLKIMQEMKNSQQEHRNMENKTLEMELKLKGLEELISTLKDTKGAQKVINWHMKIEELRLQELKLNRELVKDKEEIKYLNNIISEYERTISSLEEEIVQQNKFHEERQMAWDQREVDLERQLDIFDRQQNEILNAAQKFEEATGSIPDPSLPLPNQLEIALRKIKENIRIILETRATCKSLEEKLKEKESALRLAEQNILSRDKVINELRLRLPATAEREKLIAELGRKEMEPKSHHTLKIAHQTIANMQARLNQKEEVLKKYQRLLEKAREEQREIVKKHEEDLHILHHRLELQADSSLNKFKQTAWDLMKQSPTPVPTNKHFIRLAEMEQTVAEQDDSLSSLLVKLKKVSQDLERQREITELKVKEFENIKLQLQENHEDEVKKVKAEVEDLKYLLDQSQKESQCLKSELQAQKEANSRAPTTTMRNLVERLKSQLALKEKQQKALSRALLELRAEMTAAAEERIISATSQKEAHLNVQQIVDRHTRELKTQVEDLNENLLKLKEALKTSKNRENSLTDNLNDLNNELQKKQKAYNKILREKEEIDQENDELKRQIKRLTSGLQGKPLTDNKQSLIEELQRKVKKLENQLEGKVEEVDLKPMKEKNAKEELIRWEEGKKWQAKIEGIRNKLKEKEGEVFTLTKQLNTLKDLFAKADKEKLTLQRKLKTTGMTVDQVLGIRALESEKELEELKKRNLDLENDILYMRAHQALPRDSVVEDLHLQNRYLQEKLHALEKQFSKDTYSKPSISGIESDDHCQREQELQKENLKLSSENIELKFQLEQANKDLPRLKNQVRDLKEMCEFLKKEKAEVQRKLGHVRGSGRSGKTIPELEKTIGLMKKVVEKVQRENEQLKKASGILTSEKMANIEQENEKLKAELEKLKAHLGHQLSMHYESKTKGTEKIIAENERLRKELKKETDAAEKLRIAKNNLEILNEKMTVQLEETGKRLQFAESRGPQLEGADSKSWKSIVVTRMYETKLKELETDIAKKNQSITDLKQLVKEATEREQKVNKYNEDLEQQIKILKHVPEGAETEQGLKRELQVLRLANHQLDKEKAELIHQIEANKDQSGAESTIPDADQLKEKIKDLETQLKMSDLEKQHLKEEIKKLKKELENFDPSFFEEIEDLKYNYKEEVKKNILLEEKVKKLSEQLGVELTSPVAASEEFEDEEESPVNFPIY

SEQ ID NO: 46029 - protein, 99 aa, Homo sapiens
MGKKGKKEKKGRGAEKTAAKMEKKVSKRSRKEEEDLEALIAHFQTLDAKRTQTVELPCPPPSPRLFCITSSMSTIPERTPGPKLTSPVHLRGAVLTRRW

SEQ ID NO: 46030 - protein, 177 aa, Homo sapiens
MELGPLEGGYLELLNSDADPLCLYHFYDQMDLAGEEEIELYSEPDTDTINCDQFSRLLCDMEGDEETREAYANIAELDQYVFQDSQLEGLSKDIFKHIGPDEVIGESMEMPAEVGQKSQKRPFPEELPADLKHWKPAEPPTVVTGSLLVGPVSDCSTLPCLPLPALFNQEPASGQMR

SEQ ID NO: 46031 - protein, 129 aa, Homo sapiens
MAPRGPEQEECEGLLQQWREEGLSQVLSTASEGPLIDKGLAQSSLALLMDNPGEENAASEDRWSSRQLSDLRAAENLDEPFPEMLGEEPLLEVEGVEGSMWAAIPMQSEPQYADCAALPVGALATEQWE

SEQ ID NO: 46032 - protein, 146 aa, Homo sapiens
TLALPARGRPRSRNGLASKGQRGAAPTGPGHRALPSRDTALPQERNKKLEAVGTGIEPKAMSQGLVTFGDVAVDFSQEEWEWLNPIQRNLYRKVMLENYRNLASLGLCVSKPDVISSLEQGKEPWTVKRKMTRAWCPDHSSLLETS

SEQ ID NO: 46033 - protein, 76 aa, Homo sapiens
MQEEIFGPILPIVPVKNVDEAINFINEREKPLALYVFSHNHKLIKRMIDETSSGGVTGNDVIMHFTLNSFPFGGVG

SEQ ID NO: 46034 - protein, 1165 aa, Homo sapiens
MALSDEPAAGGPEEEAEDETLAFGAALEAFGESAETRALLGRLREVHGGGAEREVALERFRVIMDKYQEQPHLLDPHLEWMMNLLLDIVQDQTSPASLVHLAFKFLYIITKVRGYKTFLRLFPHEVADVEPVLDLVTIQNPKDHEAWETRYMLLLWLSVTCLIPFDFSRLDGNLLTQPGQARMSIMDRILQIAESYLIVSDKARDAAAVLVSRFITRPDVKQSKMAEFLDWSLCNLARSSFQTMQGVITMDGTLQALAQIFKHGKREDCLPYAATVLRCLDGCRLPESNQTLLRKLGVKLVQRLGLTFLKPKVAAWRYQRGCRSLAANLQLLTQGQSEQKPLILTEDDDEDDDVPEGVERVIEQLLVGLKDKDTVVRWSAAKGIGRMAGRLPRALADDVVGSVLDCFSFQETDKAWHGGCLALAELGRRGLLLPSRLVDVVAVILKALTYDEKRGACSVGTNVRDAACYVCWAFARAYEPQELKPFVTAISSALVIAAVFDRDINCRRAASAAFQENVGRQGTFPHGIDILTTADYFAVGNRSNCFLVIRVIRELAARALHNLAQQAPEFSATQVFPRLLSMTLSPDLHMRHGSILACAEVAYALYKLAAQENRPVTDHLDEQAVQGLKQIHQQLYDRQLYRGLGGQLMRQAVCVLIEKLSLSKMPFRGDTVIDGWQWLINDTLRHLHLISSHSRQQMKDAAVSALAALCSEYYMKEPGEADPAIQEELITQYLAELRNPEEMTRCGFSLALGALPGFLLKGRLQQVLTGLRAVTHTSPEDVSFAESRRDGLKAIARICQTVGVKAGAPDEAVCGENVSQIYCALLGCMDDYTTDSRGDVGTWVRKAAMTSLMDLTLLLARSQPELIEAHTCERIMCCVAQQASEKIDRFRAHAASVFLTLLHFDSPPIPHVPHRGELEKLFPRSDVASVNWSAPSQAFPRITQLLGLPTYRYHVLLGLVVSLGGLTESTIRHSTQSLFEYMKGIQSDPQALGSFSGTLLQIFEDNLLNERVSVPLLKTLDHVLTHGCFDIFTTEEDHPFAVKLLALCKKEIKNSKDIQKLLSGIAVFCEMVQFPGDVRRQALLQLCLLLCHRFPLIRKTTASQVYETLLTYSDVVGADVLDEVVTVLSDTAWDAELAVVREQRNRLCDLLGVPRPQLVPQPGAC

SEQ ID NO: 46035 - protein, 100 aa, Homo sapiens
MATNFSDIVKQGYVKMKSRKLGIYRRCWLVFRKSSSKGPQRLEKYPDEKSVCLRGCPKVTEISNVKCVTRLPKETKRQAVAIIFTDDSARTFTCDSELEA

SEQ ID NO: 46036 - protein, 395 aa, Homo sapiens
MSRDVCIHTWPCTYYLEPKRRWVTGQLSLTSLSLRFMTDSTGEILVSFPLSSIVEIKKEASHFIFSSITILEKGHAKHWFSSLRPSRNVVFSIIEHFWRELLLSQPGAVADASVPRTRGEELTGLMAGSQKRLEDTARVLHHQGQQLDSVMRGLDKMESDLEVADRLLTELESPAWWPFSSKLWKTPPETKPREDVSMTSCEPFGKEGILIKIPAVISHRTESHVKPGRLTVLVSGLEIHDSSSLLMHRFEREDVDDIKVHSPYEISIRQRFIGKPDMAYRLISAKMPEVIPILEVQFSKKMELLEDALVLRSARTSSPAEKSCSVWHAASGLMGRTLHREPPAGDQEGTALHLQTSLPALSEADTQELTQELENALHLPQGPPFLVWLPSLPYP

SEQ ID NO: 46037 - protein, 166 aa, Homo sapiens
  MOD_RES (1)..(1): Any amino acid
XASCHLEYSPERGKAEGRESFYSTGSQLTPDRCGLRFEEHRHPGLGELGQGPDSYGSPSFRSTPEAPYASLTEIEHLVQSVCKSYRETCQLRLEDLLRQRSNIFSREEVTGYQRKEQWKWCWLGCAGPTMLTTARSFLKANTVAWSCSEPWAAASSSAPSLTSPTP

SEQ ID NO: 46038 - protein, 2077 aa, Homo sapiens
MAEVRKFTKRLSKPGTAAELRQSVSEAVRGSVVLEKAKVVEPLDYENVIAQRKTQIYSDPLRDLLMFPMEDISISVIGRQRRTVQSTVPEDAEKRAQSLFVKECIKTYSTDWHVVNYKYEDFSGDFRMLPCKSLRPEKIPNHVFEIDEDCEKDEDSSSLCSQKGGVIKQGWLHKANVNSTITVTMKVFKRRYFYLTQLPDGSYILNSYKDEKNSKESKGCIYLDACIDVVQCPKMRRHAFELKMLDKYSHYLAAETEQEMEEWLITLKKIIQINTDSLVQEKKETVETAQDDETSSQGKAENIMASLERSMHPELMKYGRETEQLNKLSRGDGRQNLFSFDSEVQRLDFSGIEPDIKPFEEKCNKRFLVNCHDLTFNILGQIGDNAKGPPTNVEPFFINLALFDVKNNCKISADFHVDLNPPSVREMLWGSSTQLASDGSPKGSSPESYIHGIAESQLRYIQQGIFSVTNPHPEIFLVARIEKVLQGNITHCAEPYIKNSDPVKTAQKVHRTAKQVCSRLGQYRMPFAWAARPIFKDTQGSLDLDGRFSPLYKQDSSKLSSEDILKLLSEYKKPEKTKLQIIPGQLNITVECVPVDLSNCITSSYVPLKPFEKNCQNITVEVEEFVPEMTKYCYPFTIYKNHLYVYPLQLKYDSQKTFAKARNIAVCVEFRDSDESDASALKCIYGKPAGSVFTTNAYAVVSHHNQNPEFYDEIKIELPIHLHQKHHLLFTFYHVSCEINTKGTTKKQDTVETPVGFAWVPLLKDGRIITFEQQLPVSANLPPGYLNLNDAESRRQCNVDIKWVDGAKPLLKIKSHLESTIYTQDLHVHKFFHHCQLIQSGSKEVPGELIKYLKCLHAMEIQVMIQFLPVILMQLFRVLTNMTHEDDVPINCTMVLLHIVSKCHEEGLDSYLRSFIKYSFRPEKPSAPQAQLIHETLATTMIAILKQSADFLSINKLLKYSWFFFEIIAKSMATYLLEENKIKLPRGQRFPETYHHVLHSLLLAIIPHVTIRYAEIPDESRNVNYSLASFLKRCLTLMDRGFIFNLINDYISGFSPKDPKVLAEYKFEFLQTICNHEHYIPLNLPMAFAKPKLQRVQDSNLEYSLSDEYCKHHFLVGLLLRETSIALQDNYEIRYTAISVIKNLLIKHAFDTRYQHKNQQAKIAQLYLPFVGLLLENIQRLAGRDTLYSCAAMPNSASRDEFPCGFTSPANRGSLSTDKDTAYGSFQNGHGIKREDSRGSLIPEGATGFPDQGNTGENTRQSSTRSSVSQYNRLDQYEIRSLLMCYLYIVKMISEDTLLTYWNKVSPQELINILILLEVCLFHFRYMGKRNIARVHDAWLSKHFGIDRKSQTMPALRNRSGVMQARLQHLSSLESSFTLNHSSTTTEADIFHQALLEGNTATEVSLTVLDTISFFTQCFKTQLLNNDGHNPLMKKVFDIHLAFLKNGQSEVSLKHVFASLRAFISKFPSAFFKGRVNMCAAFCYEVLKCCTSKISSTRNEASALLYLLMRNNFEYTKRKTFLRTHLQIIIAVSQLIADVALSGGSRFQESLFIINNFANSDRPMKATAFPAEVKDLTKRIRTVLMATAQMKEHEKDPEMLIDLQYSLAKSYASTPELRKTWLDSMAKIHVKNGDFSEAAMCYVHVAALVAEFLHRKKLFPNGCSAFKKITPNIDEEGAMKEDAGMMDVHYSEEVLLELLEQCVDGLWKAERYEIISEISKLIVPIYEKRREFEKLTQVYRTLHGAYTKILEVMHTKKRLLGTFFRVAFYGQSFFEEEDGKEYIYKEPKLTGLSEISLRLVKLYGEKFGTENVKIIQDSDKVNAKELDPKYAHIQVTYVKPYFDDKELTERKTEFERNHNISRFVFEAPYTLSGKKQGCIEEQCKRRTILTTSNSFPYVKKRIPINCEQQINLKPIDVATDEIKDKTAELQKLCSSTDVDMIQLQLKLQGCVSVQVNAGPLAYARAFLNDSQASKYPPKKVSELKDMFRKFIQACSIALELNERLIKEDQVEYHEGLKSNFRDMVKELSDIIHEQASIRILQEDTMHSPWMSNTLHVFCAISGTSSDRGYGSPRYAEV

SEQ ID NO: 46039 - protein, 69 aa, Homo sapiens
MNCDYYMEEKVLPPSSLEGKVKETVHNAFWDHLKEQLSATPPDFSCALELLKEIKEILLSLLLPRQNRL

SEQ ID NO: 46040 - protein, 283 aa, Homo sapiens
MHKLCCCFHAPSAAEFMKHSRDPNAVTVSWPSARSLLDGYIISISSESLMREEILPSTKRTFTFNSLSPGTDFLISIMTNKGLKRSHPTVLMVSTYPDPSDLLIWGQEENTICLSWKLSEGGFEKFQISYCMPSRQEKLIKVIVYGNKAKVKKLTLGMDYMFQVKKVKGKGYSVSVMKKVPIKPEQPEKLRAFNISTHSFSLHWSLPSGHVERYQVDLVPDSGFVTIRDLGGGEYQVDVSNVVPGTRYDITISSISTTYTSPVTRIVTTNVTKPGPPVFLAGE

SEQ ID NO: 46041 - protein, 91 aa, Homo sapiens
MAAAALGSSSGSASPAVAELCQNTPETFLEASKLLLTYADNILRCRATGSDGGYRGGWAAAPCSARDWGVRPELQRAATPGQTGTWSWFCS

SEQ ID NO: 46042 - protein, 746 aa, Homo sapiens
MDSKESLTPGREENPSSVLAQERGDVMDFYKTLRGGATVKVSASSPSLAVASQSDSKQRRLLVDFPKGSVSNAQQPDLSKAVSLSMGLYMGETETKVMGNDLGFPQQGQISLSSGETDLKLLEESIANLNRSTSVPENPKSSASTAVSAAPTEKEFPKTHSDVSSEQQHLKGQTGTNGGNVKLYTTDQSTFDILQDLEFSSGSPGKETNESPWRSDLLIDENCLLSPLAGEDDSFLLEGNSNEDCKPLILPDTKPKIKDNGDLVLSSPSNVTLPQVKTEKEDFIELCTPGVIKQEKLGTVYCQASFPGANIIGNKMSAISVHGVSTSGGQMYHYDMNTASLSQQQDQKPIFNVIPPIPVGSENWNRCQGSGDDNLTSLGTLNFPGRTVFSNGYSSPSMRPDVSSPPSSSSTATTGPPPKLCLVCSDEASGCHYGVLTCGSCKVFFKRAVEGQHNYLCAGRNDCIIDKIRRKNCPACRYRKCLQAGMNLEARKTKKKIKGIQQATTGVSQETSENPGYDSSVPDSTWRIMTTLNMLGGRQVIAAVKWAKAIPGFRNLHLDDQMTLLQYSWMFLMAFALGWRSYRQSSANLLCFAPDLIINEQRMTLPCMYDQCKHMLYVSSELHRLQVSYEEYLCMKTLLLLSSVPKDGLKSQELFDEIRMTYIKELGKAIVKREGNSSQNWQRFYQLTKLLDSMHEVVENLLNYCFQTFLDKTMSIEFPEMLAEIITNQIPKYSNGNIKKLLFHQK

SEQ ID NO: 46043 - protein, 185 aa, Homo sapiens
MAPVVTGKFGERPPPKRLTREAMRNYLKERGDQTVLILHAKVAQKSYGNEKRFFCPPPCVYLMGSGWKKKKEQMERDGCSEQESQPCAFIGIGNSDQEMQQLNLEGKNYCTAKTLYISDSDKRKHFMLSVKMFYGNSDDIGVFLSKRIKVISKPSKKKQSLKNADYIKTFRTDCMHCLRNKGGSV

SEQ ID NO: 46044 - protein, 506 aa, Homo sapiens
MAALLRRLLQRERPSAASGRPVGRREANLGTDAGVAVRVRFAPSPTGFLHLGGLRTALYNYIFAKKYQGSFILRLEDTDQTRVVPGAAENIEDMLEWAGIPPDESPRRGGPAGPYQQSQRLELYAQATEALLKTGAAYPCFCSPQRLELLKKEALRNHQTPRYDNRCRNMSQEQVAQKLAKDPKPAIRFRLEQVVPAFQDLVYGWNRHEVASVEGDPVIMKSDGFPTYHLACVVDDHHMGISHVLRGSEWLVSTAKHLLLYQALGWQPPHFAHLPLLLNRDGSKLSKRQGDVFLEHFAADGFLPDSLLDIITNCGSGFAENQMGRTLPELITQFNLTQVTCHSALLDLEKLPEFNRLHLQRLVSNESQRRQLVGKLQVLVEEAFGCQLQNRDVLNPVYVERILLLRQGHICRLQDLVSPVYSYLWTRPAVGRAQLDAISEKVDVIAKRVLGLLERSSMSLTQDMLNGELKKLSEGLEGTKYSNVMKLLRMALSGQQALSSILSIQR

SEQ ID NO: 46045 - protein, 627 aa, Homo sapiens
MAATEISVLSEQFTKIKELELMPEKGLKEEEKDGVCREKDHRSPSELEAERTSGAFQDSVLEEEVELVLAPSEESEKYILTLQTVHFTSEAVELQDMSLLSIQQQEGVQVVVQQPGPGLLWLEEGPRQSLQQCVAISIQQELYSPQEMEVLQFHALEENVMVASEDSKLAVSLAETTGLIKLEEEQEKNQLLAERTKEQLFFVETMSGDERSDEIVLTVSNSNVEEQEDQPTAGQADAEKAKSTKNQRKTKGAKGTFHCDVCMFTSSRMSSFNRHMKTHTSEKPHLCHLCLKTFRTVTLLRNHVNTHTGTRPYKCNDCNMAFVTSGELVRHRRYKHTHEKPFKCSMCKYASVEASKLKRHVRSHTGERPFQCCQCSYASRDTYKLKRHMRTHSGEKPYECHICHTRFTQSGTMKIHILQKHGENVPKYQCPHCATIIARKSDLRVHMRNLHAYSAAELKCRYCSAVFHERYALIQHQKTHKNEKRFKCKHCSYACKQERHMTAHIRTHTGEKPFTCLSCNKCFRQKQLLNAHFRKYHDANFIPTVYKCSKCGKGFSRWILWVGNSEVAELGGPGSGPLLRLQSGCPPGLHHPKAGLGPEDPLPGQLRHTTAGTGLSSLLQGPLCRAA

SEQ ID NO: 46046 - protein, 97 aa, Homo sapiens
MEPGSVENLSIVYRSRDFLVVNKHWDVRIDSKAWRETLTLQKQLRYRFPELADPDTCYGFRFCHQLDFSTSGALCVALNKAAAGSAYSCGGTSRRAG

SEQ ID NO: 46047 - protein, 62 aa, Homo sapiens
MSPESKKLFNIIILGVAFMFMFTAFQTCGNVAQTVIRSLNRTDFHGSGYTSMAIIYGVFSAS

SEQ ID NO: 46048 - protein, 102 aa, Homo sapiens
MASVLSRRLGKRSLLGARVLGPSASEGPSAAPPSEPLLEGAAPQPFTTSDDTPCQEQPKEVLKAPSTSGLQQVAFQPGQKVYVWYGGQECTGLVEQHSWMEG

SEQ ID NO: 46049 - protein, 190 aa, Homo sapiens
MADIIARLREDGIQKRVIQEGRGELPDFQDGTKATFHYRTLHSDDEGTVLDDSRARGKPMELIIGKKFKLPVWETIVCTMREGEIAQFLCDIKHVVLYPLVAKSLRNIAVGKDPLEGQRHCCGVAQMREHSSLGHADLDALQQNPQPLIFHMEMLKEHLALPYLPSPLLQLPAPLPVLRHASVYIKAFIY

SEQ ID NO: 46050 - protein, 127 aa, Homo sapiens
MAAARLLPVPAGPQPLSFQAKLTFEDVAVLLSQDEWDRLCPAQRGLYRNVMMETYGNVVSLGLPGSKPDIISQLERGEDPWVLDRKGAKKSQGLWSDYSDNLKYDHTTACTQQDSLSCPWDPVPQKP

SEQ ID NO: 46051 - protein, 150 aa, Homo sapiens
MDLSGVKKKSLLGVKENNKKSSTRAPSPTKRKDRSDEKSKDRSKDKGATKESSEKDRGRDKTRKRRSASSGSSSTRSRSSSTSSSGSSTSTGSSSGSSSSSASSRSGSSSTSRSSSSSSSSGSPSPSRRRHDNRRRSRSKSKPPKRDEKE

SEQ ID NO: 46052 - protein, 124 aa, Homo sapiens
QEMANILAQKQLRSIILTHVIRAQRAINNEMAHQLYVLQVLTFNLLEDRMMTKMDPQDQAQRDIIFELRRIAFDAESEPNNSSGSMEKRKSMYTRDYKKLGFIVSKLSPVCALPPASPGLTSAT

SEQ ID NO: 46053 - protein, 85 aa, Homo sapiens
GCAVCSKRDFMLITNKSLKEEDGEEIVTYDPDLCKNCHHVIARHEYTFSIMDEFQEYTMLCLLCGKAEDTISILPDDPRQMTLLF

SEQ ID NO: 46054 - protein, 99 aa, Homo sapiens
  MOD_RES (1)..(1): Any amino acid
XSNIPKPEMSTTMAESSLLDLLPKEEKLRHYFRYLGSLTTPTCDEKVVWTVFREPIQLHREQVHRAWGRAWAPTAWLPRNYPSVCPQRSLRIQVGSPGN

SEQ ID NO: 46055 - protein, 18 aa, Homo sapiens
MAATVNLELDPIFLKALG

SEQ ID NO: 46056 - protein, 96 aa, Homo sapiens
  MOD_RES (1)..(1): Any amino acid
XSPNDPVTNICQAADKQLFTLVEWAKRIPHFSSLPLDDQVILLRAGLHVHRNSAHSAGVGAIFDRVLTELVSKMRDMRMDKTELGCLRAIILFNPD

SEQ ID NO: 46057 - protein, 307 aa, Homo sapiens
MLEGQLEAREPKEGTHPEDPCPGAGAAMEKTPAAAEVPREDSNAGEMPSLQQQITSLHQELGRQQSLWADIHRKLQSHMDALRKQNRELREELRGLQRQQWEAGKKPAASPHAGRESHTLALEPAFGKISPLSADEETTPKYAGRKSQSATLLGQRWSSNHLAPPKPMSLKTERINSGKTPPQEDREKSPPGRRQDRSPAPTGRPTPGAERREVSEDGKIMHPSSRSLQNSGGRKSPVQASQAATLQEQTAAAGVADRSSSVLGSSEGGFLSRVQAEEFASSSPDSAERQKNSTPMAPKKSCFPMGQ

SEQ ID NO: 46058 - protein, 100 aa, Homo sapiens
VASRIAEGFSDTALIMVDNTKFTMDCVAPTIHVYEHHENRWRCRDPHHDYCEDWPEAQRISASLLDSRSYETLVDFDNHLDDIRNDWTNPEINKAVLHLC

SEQ ID NO: 46059 - protein, 445 aa, Homo sapiens
MVQKYQSPVRVYKYPFELIMAAYERRFPTCPLIPMFVGSDTVNEFKSEDGAIHVIERRCKLDVDAPRLLKKIAGVDYVYFVQKNSLNSRERTLHIEAYNETFSNRVIINEHCCYTVHPENEDWTCFEQSASLDIKSFFGFESTVEKIAMKQYTSNIKKGKEIIEYYLRQLEEEGITFVPRWSPPSITTSSETSSSSSKKQAASMAVVIPEAALKEGLSGDALSSPSAPEPVVGTPDDKLDADYIKRYLGDLTPLQESCLIRLRQWLQETHKGKIPKDEHILRFLRARDFNIDKAREIMCQSLTWRKQHQVDYILETWTPPQVLQDYYAGGWHHHDKDGRPLYVLRLGQMDTKGLVRALGEEALLRYVLSINEEGLRRCEENTKVFGRPISSWTCLVDLEGLNMRHLWRPGVKALLRIIEVVEANYPETLGRLLILRAPRVFPVLW

SEQ ID NO: 46060 - protein, 200 aa, Homo sapiens
LLGTDVQVEAAPAALELVCPSSVQSDESLDLSIQNRGGSGLEAAYSIVALGEEPARAVHPLCPSDTEIFPGNGHCYRLVVEKAAWLQAQEQCQAWAGAALAMVDSPAVQRFLVSRVTRGWRWAQRRRARPSAWRAARTGCPGSHTQPQPSTASGSGPPGGVTPTCAQRRTATSASCSPEAQCRMPRTSSWERPVGTCRDP

SEQ ID NO: 46061 - protein, 817 aa, Homo sapiens
  MOD_RES (1)..(1): Any amino acid
XITEEERQFLAPPMLKFTRSLSMPDTSEDIPPPPQSVPPSPPPPSPTTYNCPKSPTPRVYGTIKPAFNQNSAAKVSPATRSDTVATMMREKGMYFRRELDRYSLDSEDLYSRNAGPQANFRNKRGQMPENPYSEVGKIASKAVYVPAKPARRKGMLVKQSNVEDSPEKTCSIPIPTIIVKEPSTSSSGKSSQGSSMEIDPQAPEPPSQLRPDESLTVSSPFAAAIAGAVRDREKRLEARRNSPAFLSTDLGDEDVGLGPPAPRTRPSMFPEEGDFADEDSAEQLSSPMPSATPREPENHFVGGAEASAPGEAGRPLNSTSKAQGPESSPAVPSASSGTAGPGNYVHPLTGRLLDPSSPLALALSARDRAMKESQQGPKGEAPKADLNKPLYIDTKMRPSLDAGFPTVTRQNTRGPLRRQETENKYETDLGRDRKGDDKKNMLIDIMDTSQQKSAGLLMVHTVDATKLDNALQEEDEKAEVEMKPDSSPSEVPEGVSETEGALQISAAPEPTTVPGRTIVAVGSMEEAVILPFRIPPPPLASVDLDEDFIFTEPLPPPLEFANSFDIPDDRAASVPALSDLVKQKKSDTPQSPSLNSSQPTNSADSKKPASLSNCLPASFLPPPESFDAVADSGIEEVDSRSSSDHHLETTSTISTVSSISTLSSEGGENVDTCTVYADGQAFMVDKPPVPPKPKMKPIIHKSNALYQDALVEEDVDSFVIPPPAPPPPPGSAQPGMAKVLQPRTSKLWGDVTEIKSPILSGPKANVISELNSILQQMNREKLAKPGEGLDSPMGAKSASLAPSVVSSHSICHFHLLP

SEQ ID NO: 46062 - protein, 299 aa, Homo sapiens
MAVMAPRTLVLLLSGALALTQTWAGSHSMRYFYTSVSRPGRGEPRFIAVGYVDDTQFVRFDSDAASQRMEPRAPWIEQEGPEYWDRNTRNVKAHSQTDRANLGTLRGYYNQSEDGSHTIQRMYGCDVGPDGRFLRGYQQDAYDGKDYIALNEDLRSWTAADMAAQITQRKWETAHEAEQWRAYLEGRCVEWLRRYLENGKETLQRTDAPKTHMTHHAVSDHEATLRCWALSFYPAEITLTWQRDGEDQTQDTELVETRPAGDGTFQKWASVVVPSGQEQRYTCHVQHEGLPKPLTLRWV

SEQ ID NO: 46063 - protein, 42 aa, Homo sapiens
YEICQFLKGAKITRLQDQQVPYAVKGNQWVGYDDVKSMETKD

SEQ ID NO: 46064 - protein, 349 aa, Homo sapiens
MASVAAARAVPVGSGLRGLQRTLPLVVILGATGTGKSTLALQLGQRLGGEIVSADSMQVYEGLDIITNKVSAQEQRICRHHMISFVDPLVTNYTVVDFRNRATALIEDIFARDKIPIVVGGTNYYIESLLWKVLVNTKPQEMGTEKVIDRKVELEKEDGLVLHKRLSQVDPEMAAKLHPHDKRKVARSLQVFEETGISHSEFLHRQHTEEGGGPLGGPLKFSNPCILWLHADQAVLDERLDKRVDDMLAAGLLEELRDFHRRYNQKNVSENSQDYQHGIFQSIGFKEFHEYLITEGKCTLETSNQLLKKGIEALKQVTKRYARKQNRWVKNRFLSRPQAYSHSNKDAIQ

SEQ ID NO: 46065 - protein, 141 aa, Homo sapiens
MAEEKKLKLSNTVLPSESMKVVAESMGIAQIQEETCQLLTDEDALKFMHMGKRQKLTTSDIDYALKLKNVEPLYGFHAQEFIPFRFASGGGRELYFYEEKEVDLSDIINTPLPRVPLDVCLKAHWLSIEGCQPAIPENPPP

SEQ ID NO: 46066 - protein, 265 aa, Homo sapiens
MDPKQTTLLCLVLCLGQRIQAQEGDFPMPFISAKSSPVIPLDGSVKIQCQAIREAYLTQLMIIKNSTYREIGRRLKFWNETDPEFVIDHMDANKAGRYQCQYRIGHYRFRYSNTLELVVTGLYGKPFLSADRGLVLMPGENISLTCSSAHIPFDRFSLAKEGELSLPQHQSGEHPANFSLGPVDLNVSGIYRCYDSIHQDYTTQNLIRMAVAGLVLVALLAILVENWHSHTALNKEASADVAEPSWSQQMCQPGLTFARTPSVCK

SEQ ID NO: 46067 - protein, 308 aa, Homo sapiens
MEDGKRERWPTLMERLCSDGFAFPQYPIKPYHLKRIHRAVLHGNLEKLKYLLLTYYDANKRDRKERTALHLACATGQPEMVHLLVSRRCELNLCDREDRTPLIKAVQLRQEACATLLLQNGANPNITDFFGRTALHYAVYNEDTSMIEKLLSHGTNIEECSKCEYQPLLFAVSRRKVKMVEFLLKKKANVNAIDYLGRSALIHAVTLGEKDIVILLLQHNIDVLSRDAFRKIAGDYAIEAKNRVIFDLIYEYERKRYEDLPINSNPVSSQKQPAATEQDSMSKIKKRKLIVMKKKSMVIQRFLVTFCK

SEQ ID NO: 46068 - protein, 291 aa, Homo sapiens
MCPRKEQDSWSEAGGILFKGKVPMVVLQDILAVRPPQIKSLPATPQGKNMTPESEVLESFPEEDSVLSHSSLSSPSSTSSPEGPPAPPKQHSSTSPFPTSTPLRRDQERLGKQLKLRAEREEKEKLKEEAKRAKEEAKKKKEEEKELKEKERREKREKDEKEKAEKQRLKEERRKERQEALEAKLEEKRKKEEEKRLREEEKRIKAEKAEITRFFQKPKTPQAPKTLAGSCGKFAPFEIKEHMVLAPRRRTAFHPDLCSQLDQLLQQQSGEFSFLKDLKGRQPLRSGPTHV

SEQ ID NO: 46069 - protein, 182 aa, Homo sapiens
  MOD_RES (1)..(1): Any amino acid
XGRLALQRRYYSPSCREFCLSCPRLSLRSLTAVTCTVWLAAYGLFTLCENSMILSAAIFITLLGLLGYLHFVKIDQETLLIIDSLGIQMTSSYASGKESTTFIEMGKVKDIVINEAIYMQKVIYYLCILLKDPVEPHGISQVVPVFQAAWCIHSKLATRPSCFLNRTLPGPSGQPSQEPIPC

SEQ ID NO: 46070 - protein, 95 aa, Homo sapiens
MHRDSCPLDCKVYVGNLGNNGNKTELERAFGYYGPLRSVWVARNPPGFAFVEFEDPRDAADAVRELDGRLECNGVILARCNLCLLGSSDSPASAA

SEQ ID NO: 46071 - protein, 117 aa, Homo sapiens
  MOD_RES (1)..(1): Any amino acid
XFAEVKNQEVTIKALKEKIREYEQTLKNQAETIALEKEQKLQNDFAEKERKLQETQMSTTSKLEEAEHKVQSLQTALEKTRTELFDLKTKYDEETTAKSGRGESDLPHAARFHPGTL

SEQ ID NO: 46072 - protein, 212 aa, Homo sapiens
QRAVKTHGARTKYLKDLVEEEAEEAGVALRSTQSTLQAGLAADAWAAPIAMQIYKKHLDPRPGPCPPELGLGLGQLACCCLHRRAKRRPPMTQDWPLAALHHRRQSHRRLSSTLPDRRWSRSWPCTRMGPWTACSCCRPAPSQAWAWNRTGRGPKKVMNFRADVFTWADPPNPEVKVLMVRSSHGARVLSTLPAVGVGAHARGGEKEVALLF

SEQ ID NO: 46073 - protein, 197 aa, Homo sapiens
METGRQTGVSAEMFAIPRGLKGCNEDGIPEALDGNLEEPRAQECELRSEDVMDLTVVDNEASASAPPAAKRQKTDTKGQKERKPSVDAEEAQRMTTLLSAMSEEQLSRYEVCRQLAFPKALVARLMWSITGRSVPENMAIAMAGIAKVFVGEVVEEALDMCEMWGEMPPLQPMDLREAVCRLKPKGLFPNNYKKVMF

SEQ ID NO: 46074 - protein, 519 aa, Homo sapiens
  MOD_RES (1)..(1): Any amino acid
XLENDVEQLKQTLQEQHRRAFFFQEKSQIQKDLWRIEDVTAGLSANKENFRILVESVKNPERKTVPLFPHPPVPSLSTSESKPPPQPSPPTSPVRTPLEVRLFPQLQTYVPYRPHPPQLRKVTSPLQSPTKAKPKVQEDEAPPRPPLPELYSPEDQPPAVPPLPREATIIRHTSVRGLKRQSDERKRDRELGQCVNGDSRVELRSYVSEPELATLSGDMAQPSLGLVGPESRYQTLPGRGLSGSTSRLQQSSTIAPYVTLRRGLNAESSKATFPRPKSALERLYSGDHQRGKMSAEEQLERMKRHQKALVRERKRTLGQGERTGLPSSRYLSRPLPGDLGSWKREQDFDLQLLERVVQGEKKDKEENGWLKVQAMPVTELDLEPQDYDLDISRELSKPEKVSIPERYVELDPEEPPSLEELQARYRKAEKIRNILARSSMCNLQPTSGQDQNSVADLDLQLQEQERIINISYALASEASQRSKQVAAQQLALLPPKGPLSSRTVPPYPPFTNGLHYTFV

SEQ ID NO: 46075 - protein, 77 aa, Homo sapiens
MRLGSPGLLFLLFSSLRAEQLLGKRGQPLPEPSPDVTGRHAAGRLLPALVQRHPPGRAEVSLPGVEPIPGIPGGFER

SEQ ID NO: 46076 - protein, 215 aa, Homo sapiens
MPRERRERDAKERDTMKEDGGAEFSARSRKRKANVTVDPDEEMAKIDRTARDQCGSQPWDNNAVCADPCSLIPTPDKEDDDRVYPNSTCKPRIIAPSRGSPLPVLSWANREEVWKIMLNKEKTYLRDQHFLEQHPLLQPKMRAILLDWLMEVCEVYKLHRETFYLAQDFFDRYMATQENVVKTLLQLIGISSLFIAAKLEEIYPPKLHQFAYVTD

SEQ ID NO: 46077 - protein, 114 aa, Homo sapiens
FKLVICPDEGFYKSGKFVFSFKVGQGYPHDPPKVKCETMVYHPNIDLEGNVCLNILREDWKPVLTINSIIYGLQYLFLVSRNRWLGLGRLAFCPSGLLTPPTCTGHRSPTPRTH

SEQ ID NO: 46078 - protein, 321 aa, Homo sapiens
MSLRCGDAARTLGPRVFGRYFCSPVRPLSSLPDKKKELLQNGPDLQDFVSGDLADRSTWDEYKGNLKRQKGERLRLPPWLKTEIPMGKNYNKLKNTLRNLNLHTVCEEARCPNIGECWGGGEYATATATIMAGVQRPDDHSSLQPQTSGLKQSFCLSLPSSWDYRNPKILVECLTPDFRGDLKAIEKVALSGLDVYAHNVETVPELQSKVRDPRANFDQSLRVLKHAKKVQPDVISKTSIMLGLGENDEQVYATMKALREADVDCLTLGQYMQPTRRHLKVEEYITPEKFKYWEKVGNELGFHYTASGPLVRSSYKAGEFF

SEQ ID NO: 46079 - protein, 201 aa, Homo sapiens
MESNHKSGDGLSGTQKEAALRALVQRTGYSLVQENGQRKYGGPPPGWDAAPPERGCEIFIGKLPRDLFEDELIPLCEKIGKIYEMRMMMDFNGNNRGYAFVTFSNKVEAKNAIKQLNNYEIRNGRLLGVCASVDNCRLFVGGIPKTKKREEILSEMKKVTEGVVDVIVYPSAADKTKNRGFAFVEYESHRAAAMARRKLLP

SEQ ID NO: 46080 - protein, 4672 aa, Homo sapiens
MSEPGGGGGEDGSAGLEVSAVQNVADVSVLQKHLRKLVPLLLEDGGEAPAALEAALEEKSALEQMRKFLSDPQVHTVLVERSTLKEDVGDEGEEEKEFISYNINIDIHYGVKSNSLAFIKRTPVIDADKPVSSQLRVLTLSEDSPYETLHSFISNAVAPFFKSYIRESGKADRDGDKMAPSVEKKIAELEMGLLHLQQNIEIPEISLPIHPMITNVAKQCYERGEKPKVTDFGDKVEDPTFLNQLQSGVNRWIREIQKVTKLDRDPASGTALQEISFWLNLERALYRIQEKRESPEVLLTLDILKHGKRFHATVSFDTDTGLKQALETVNDYNPLMKDFPLNDLLSATELDKIRQALVAIFTHLRKIRNTKYPIQRALRLVEAISRDLSSQLLKVLGTRKLMHVAYEEFEKVMVACFEVFQTWDDEYEKLQVLLRDIVKRKREENLKMVWRINPAHRKLQARLDQMRKFRRQHEQLRAVIVRVLRPQVTAVAQQNQGEVPEPQDMKVAEVLFDAADANAIEEVNLAYENVKEVDGLDVSKEGTEAWEAAMKRYDERIDRVETRITARLRDQLGTAKNANEMFRIFSRFNALFVRPHIRGAIREYQTQLIQRVKDDIESLHDKFKVQYPQSQACKMSHVRDLPPVSGSIIWAKQIDRQLTAYMKRVEDVLGKGWENHVEGQKLKQDGDSFRMKLNTQEIFDDWARKVQQRNLGVSGRIFTIESTRVRGRTGNVLKLKVNFLPEIITLSKEVRNLKWLGFRVPLAIVNKAHQANQLYPFAISLIESVRTYERTCEKVEERNTISLLVAGLKKEVQALIAEGIALVWESYKLDPYVQRLAETVFNFQEKVDDLLIIEEKIDLEVRSLETCMYDHKTFSEILNRVQKAVDDLNLHSYSNLPIWVNKLDMEIERILGVRLQAGLRAWTQVLLGQAEDKAEVDMDTDAPQVSHKPGGEPKIKNVVHELRITNQVIYLNPPIEECRYKLYQEMFAWKMVVLSLPRIQSQRYQVGVHYELTEEEKFYRNALTRMPDGPVALEESYSAVMGIVSEVEQYVKVWLQYQCLWDMQAENIYNRLGEDLNKWQALLVQIRKARGTFDNAETKKEFGPVVIDYGKVQSKVNLKYDSWHKEVLSKFGQMLGSNMTEFHSQISKSRQELEQHSVDTASTSDAVTFITYVQSLKRKIKQFEKQVELYRNGQRLLEKQRFQFPPSWLYIDNIEGEWGAFNDIMRRKDSAIQQQVANLQMKIVQEDRAVESRTTDLLTDWEKTKPVTGNLRPEEALQALTIYEGKFGRLKDDREKCAKAKEALELTDTGLLSGSEERVQVALEELQDLKGVWSELSKVWEQIDQMKEQPWVSVQPRKLRQNLDALLNQLKSFPARLRQYASYEFVQRLLKGYMKINMLVIELKSEALKDRHWKQLMKRLHVNWVVSELTLGQIWDVDLQKNEAIVKDVLLVAQGEMALEEFLKQIREVWNTYELDLVNYQNKCRLIRGWDDLFNKVKEHINSVSAMKLSPYYKVFEEDALSWEDKLNRIMALFDVWIDVQRRWVYLEGIFTGSADIKHLLPVETQRFQSISTEFLALMKKVSKSPLVMDVLNIQGVQRSLERLADLLGKIQKALGEYLERERSSFPRFYFVGDEDLLEIIGNSKNVAKLQKHFKKMFAGVSSIILNEDNSVVLGISSREGEEVMFKTPVSITEHPKINEWLTLVEKEMRVTLAKLLAESVTEVEIFGKATSIDPNTYITWIDKYQAQLVVLSAQIAWSENVETALSSMGGGGDAAPLHSVLSNVEVTLNVLADSVLMEQPPLRRRKLEHLITELVHQRDVTRSLIKSKIDNAKSFEWLSQMRFYFDPKQTDVLQQLSIQMANAKFNYGFEYLGVQDKLVQTPLTDRCYLTMTQALEARLGGSPFGPAGTGKTESVKALGHQLGRFVLVFNCDETFDFQAMGRIFVGLCQVGAWGCFDEFNRLEERMLSAVSQQVQCIQEALREHSNPNYDKTSAPITCELLNKQVKVSPDMAIFITMNPGYAGRSNLPDNLKKLFRSLAMTKPDRQLIAQVMLYSQGFRTAEVLANKIVPFFKLCDEQLSSQSHYDFGLRALKSVLVSAGNVKRERIQKIKREKEERGEAVDEGEIAENLPEQEILIQSVCETMVPKLVAEDIPLLFSLLSDVFPGVQYHRGEMTALREELKKVCQEMYLTYGDGEEVGGMWVEKVLQLYQITQINHGLMMVGPSGSGKSMAWRVLLKALERLEGVEGVAHIIDPKAISKDHLYGTLDPNTREWTDGLFTHVLRKIIDSVRGELQKRQWIVFDGDVDPEWVENLNSVLDDNKLLTLPNGERLSLPPNVRIMFEVQDLKYATLATVSRCGMVWFSEDVLSTDMIFNNFLARLRSIPLDEGEDEAQRRRKGKEDEGEEAASPMLQIQRDAATIMQPYFTSNGLVTKALEHAFQLEHIMDLTRLRCLGSLFSMLHQACRNVAQYNANHPDFPMQIEQLERYIQRYLVYAILWSLSGDSRLKMRAELGEYIRRITTVPLPTAPNIPIIDYEVSISGEWSPWQAKVPQIEVETHKVAAPDVVVPTLDTVRHEALLYTWLAEHKPLVLCGPPGSGKTMTLFSALRALPDMEVVGLNFSSATTPELLLKTFDHYCEYRRTPNGVVLAPVQLGKWLVLFCDEINLPDMDKYGTQRVISFIRQMVEHGGFYRTSDQTWVKLERIQFVGACNPPTDPGRKPLSHRFLRHVPVVYVDYPGPASLTQIYGTFNRAMLRLIPSLRTYAEPLTAAMVEFYTMSQERFTQDTQPHYIYSPREMTRWVRGIFEALRPLETLPVEGLIRIWAHEALRLFQDRLVEDEERRWTDENIDTVALKHFPNIDREKAMSRPILYSNWLSKDYIPVDQEELRDYVKARLKVFYEEELDVPLVLFNEVLDHVLRIDRIFRQPQGHLLLIGVSGAGKTTLSRFVAWMNGLSVYQIKVHRKYTGEDFDEDLRTVLRRSGCKNEKIAFIMDESNVLDSGFLERMNTLLANGEVPGLFEGDEYATLMTQCKEGAQKEGLMLDSHEELYKWFTSQVIRNLHVVFTMNPSSEGLKDRAATSPALFNRCVLNWFGDWSTEALYQVGKEFTSKMDLEKPNYIVPDYMPVVYDKLPQPPSHREAIVNSCVFVHQTLHQANARLAKRGGRTMAITPRHYLDFINHYANLFHEKRSELEEQQMHLNVGLRKIKETVDQVEELRRDLRIKSQELEVKNAAANDKLKKMVKDQQEAEKKKVMSQEIQEQLHKQQEVIADKQMSVKEDLDKVEPAVIEAQNAVKSIKKQHLVEVRSMANPPAAVKLALESICLLLGESTTDWKQIRSIIMRENFIPTIVNFSAEEISDAIREKMKKNYMSNPSYNYEIVNRASLACGPMVKWAIAQLNYADMLKRVEPLRNELQKLEDDAKDNQQKANEVEQMIRDLEASIARYKEEYAVLISEAQAIKADLAAVEAKVNRSTALLKSLSAERERWEKTSETFKNQMSTIAGDCLLSAAFIAYAGYFDQQMRQNLFTTWSHHLQQANIQFRTDIARTEYLSNADERLRWQASSLPADDLCTENAIMLKRFNRYPLIIDPSGQATEFIMNEYKDRKITRTSFLDDAFRKNLESALRFGNPLLVQDVESYDPVLNPVLNREVRRTGGRVLITLGDQDIDLSPSFVIFLSTRDPTVEFPPDLCSRVTFVNFTVTRSSLQSQCLNEVLKAERPDVDEKRSDLLKLQGEFQLRLRQLEKSLLQALNEVKGRILDDDTIITTLENLKREAAEVTRKVEETDIVMQEVETVSQQYLPLSTACSSIYFTMESLKQIHFLYQYSLQFFLDIYHNVLYENPNLKGVTDHTQRLSIITKDLFQVAFNRVARGMLHQDHITFAMLLARIKLKGTVGEPTYDAEFQHFLRGNEIVLSAGSTPRIQGLTVEQAEAVVRLSCLPAFKDLIAKVQADEQFGIWLDSSSPEQTVPYLWSEETPATPIGQAIHRLLLIQAFRPDRLLAMAHMFVSTNLGESFMSIMEQPLDLTHIVGTEVKPNTPVLMCSVPGYDASGHVEDLAAEQNTQITSIAIGSAEGFNQADKAINTAVKSGRWVMLKNVHLAPGWLMQLEKKLHSLQPHACFRLFLTMEINPKVPVNLLRAGRIFVFEPPPGVKANMLRTFSSIPVSRICKSPNERARLYFLLAWFHAIIQERLRYAPLGWSKKYEFGESDLRSACDTVDTWLDDTAKGRQNISPDKIPWSALKTLMAQSIYGGRVDNEFDQRLLNTFLERLFTTRSFDSEFKLACKVDGHKDIQMPDGIRREEFVQWVELLPDTQTPSWLGLPNNAERVLLTTQGVDMISKMLKMQMLEDEDDLAYAETEKKTRTDSTSDGRPAWMRTLHTTASNWLHLIPQTLSHLKRTVENIKDPLFRFFEREVKMGAKLLQDVRQDLADVVQVCEGKKKQTNYLRTLINELVKGILPRSWSHYTVPAGMTVIQWVSDFSERIKQLQNISLAAASGGAKELKNIHVCLGGLFVPEAYITATRQYVAQANSWSLEELCLEVNVTTSQGATLDACSFGVTGLKLQGATCNNNKLSLSNAISTALPLTQLRWVKQTNTEKKASVVRRHCLSQAFCRDPCGNKGRGGSSSMPGFHLEREMRFTEEIHFAPVQTSPCRAPSAVPGSLPVFLLFP

SEQ ID NO: 46081 - protein, 117 aa, Homo sapiens
MALLLSQDRSLIASGLYGYNATLVGVLMAVFSDKGDYFWWLLLPVCAMSMTCPIFSSALNSMLSKWDLPVFTLPFNMALSMYLSATGHYNPFFPAKLVIPITTAPNISWSDLSALEL

SEQ ID NO: 46082 - protein, 73 aa, Homo sapiens
MSDQESLNPESLVRRHGEKWSQAHTMMADKGREADNLFFLRRSLALSPSLECSGAISTRCNLRLPGSRGKTFN

SEQ ID NO: 46083 - protein, 31 aa, Homo sapiens
MGGAVSAGEDNDELIDNLKEAQYIRTELVEQ

SEQ ID NO: 46084 - protein, 150 aa, Homo sapiens
MPNWGGGAKCGACEKTVYHAEEIQCNGRSFHKTCFHCSPQSRHAQLPPATLPNSLRSLESPRSALDVASQSMLLRRLWEVASLGTRPVSAVPSVGRVWSPQMSLTKMGNFIAKFAMPKILAPRVLGLEALHNKWKRKNEEVRRFSDFLRA

SEQ ID NO: 46085 - protein, 95 aa, Homo sapiens
MAAVELEWIPETLYNTAISAVVDNYIRSRRDIRSLPENIQFDVYYKLYQQGRLCQLGSEFCELEVFAKVLRALDKRLSFTKSKSFDICFIIVFRL

SEQ ID NO: 46086 - protein, 113 aa, Homo sapiens
MDDTLFQLKFTAKQLEKLAKKAEKDSKAEQAKVKKALLQKNVECARVYAENAIRKKNEGVNWLRMASRVDAVASKVQTAVTMKGAGVQWCSHSSLQPQPPGLKQSSCLSLASS

SEQ ID NO: 46087 - protein, 1517 aa, Homo sapiens
MSRNDKEPFFVKFLKSSDNSKCFFKALESIKEFQSEEYLQIITEEEALKIKENDRSLYICDPFSGVVFDHLKKLGCRIVGPQVVIFCMHHQRCVPRAEHPVYNMVMSDVTISCTSLEKEKREEVHKYVQMMGGRVYRDLNVSVTHLIAGEVGSKKYLVAANLKKPILLPSWIKTLWEKSQEKKITRYTDINMEDFKCPIFLGCIICVTGLCGLDRKEVQQLTVKHGGQYMGQLKMNECTHLIVQEPKGQKYECAKRWNVHCVTTQWFFDSIEKGFCQDESIYKTEPRPEAKTMPNSSTPTSQINTIDNVSNISNINASCVSESICNSLNSKLEPTLENLENLDVSAFQAPEDLLDGCRIYLCGFSGRKLDKLRRLINSGGGVRFNQLNEDVTHVIVGDYDDELKQFWNKSAHRPHVVGAKWLLECFSKGYMLSEEPYIHANYQPVEIPVSHKPESKAALLKKKNSSFSKKDFAPSEKHEQADEDLLSQYENGSSTVVEAKTSEARPFNDSTHAEPLNDSTHISLQEENQSSVSHCVPDVSTITEEGLFSQKSFLVLGFSNENESNIANIIKENAGKIMSLLSRTVADYAVVPLLGCEVEATVGEVVTNTWLVTCIDYQTLFDPKSNPLFTPVPVMTGMTPLEDCVISFSQCAGAEKESLTFLANLLGASVQEYFVRKSNAKKGMFASTHLILKERGGSKYEAAKKWNLPAVTIAWLLETARTGKRADESHFLIENSTKEERSLETEITNGINLNSDTAEHPGTRLQTHRKTVVTPLDMNRFQSKAFRAVVSQHARQVAASPAVGQPLQKEPSLHLDTPSKFLSKDKLFKPSFDVKDALAALETPGRPSQQKRKPSTPLSEVIVKNLQLALANSSRNAVALSASPQLKEAQSEKEEAPKPLHKVVVCVSKKLSKKQSELNGIAASLGADYRWSFDETVTHFIYQGRPNDTNREYKSVKERGVHIVSEHWLLDCAQECKHLPESLYPHTYNPKMSLDISAVQDGRLCNSRLLSAVSSTKDDEPDPLILEENDVDNMATNNKESAPSNGSGKNDSKGVLTQTLEMRENFQKQLQEIMSATSIVKPQGQRTSLSRSGCNSASSTPDSTRSARSGRSRVLEALRQSRQTVPDVNTEPSQNEQIIWDDPTAREERARLASNLQWPSCPTQYSELQVDIQNLEDSPFQKPLHDSEIAKQAVCDPGNIRVTEAPKHPISEELETPIKDSHLIPTPQAPSIAFPLANPPVAPHPREKIITIEETHEELKKQYIFQLSSLNPQERIDYCHLIEKLGGLVIEKQCFDPTCTHIVVGHPLRNEKYLASVAAGKWVLHRSYLEACRTAGHFVQEEDYEWGSSSILDVLTGINVQQRRLALAAMRWRKKIQQRQESGIVEGAFSGWKVILHVDQSREAGFKRLLQSGGAKVLPGHSVPLFKEATHLFSDLNKLKPDDSGVNIAEAAAQNVYCLRTEYIADYLMQESPPHVENYCLPEAISFIQNNKELGTGLSQKRKAPTEKNKIKRPRVH

SEQ ID NO: 46088 - protein, 137 aa, Homo sapiens
MDRTCEERPAEDGSDEEDPDSMEAPTRIRDTPEDIVLEAPASGLAFHPARDLLAAGDVDGDVFVFSYSCQEGETKELWSSGHHLKACRAVAFSEDGQSEYWGRQPAMWWKGAVSSTMTWAPFPQSSLLSPRTKPSMF

SEQ ID NO: 46089 - protein, 266 aa, Homo sapiens
MDLMNGQASSVNIAATASEGQITLMDVPVFKAIQPDELSSCGWNKKEKYSSAPNAVAFTRRFNHVSFWVVREILHAQTLKIRAEVLSHYIKTAKKLYELNNLHALMAVVSGLQSAPIFRLTKTWALLSRKDKTTFEKLEYVMSKEDNYKRLRDYISSLKMTPCIPYLGIYLSDLTYIDSAYPSTGSILENEQRSNLMNNILRIISDLQQSCEYDIPMLPHVQKYLNSVQYIEELQKFVEDDNYKLSLKIEPGTSTPRSAASREDLV

SEQ ID NO: 46090 - protein, 672 aa, Homo sapiens
MKPQTLVGDLVRKLKEDKAPQVDVDKAVAELKARKRVLEAKELALQPKDDIVDRAKMEDTLKRRFFYDQAFAIYGGVSGLYDFGPVGCALKNNIIQTWRQHFIQEEQILEIDCTMLTPEPVLKTSGHVDKFADFMVKDVKNGECFRADHLLKAHLQKLMSDKKCSVEKKSEMESVLAQLDNYGQQELADLFVNYNVKSPITGNDLSPPVSFNLMFKTFIGPGGNMPGYLRPETAQGIFLNFKRLLEFNQGKLPFAAAQIGNSFRNEISPRSGLIRVREFTMAEIEHFVDPSEKDHPKFQNVADLHLYLYSAKAQVSGQSARKMRLGDAVEQGVINNTVLGYFIGRIYLYLTKVGISPDKLRFRQHMENEMAHYACDCWDAESKTSYGWIEIVGCADRSCYDLSCHARATKVPLVAEKPLKEPKTVNVVQFEPSKGAIGKAYKKDAKLVMEYLAICDECYITEMEMLLNEKGEFTIETEGKTFQLTKDMINVKRFQKTLYVEEVVPNVIEPSFGLGRIMYTVFEHTFHVREGDEQRTFFSFPAVVAPFKCSVLPLSQNQEFMPFVKELSEALTRHGVSHKVDDSSGSIGRRYARTDEIGVAFGVTIDFDTVNKTPHTATLRDRDSMRQIRAEISELPSIVQDLANGNITWADVEARYPLFEGQETGKKETIEE

SEQ ID NO: 46091 - protein, 587 aa, Homo sapiens
  MOD_RES (1)..(1): Any amino acid
XRKGVTQAGSGLSGYKREPLGSAGHIWCPWLTEESDAEASMAVISLLFLAVMYVVHHPLMVSDRMDLDTLARSRQLEKRMSEEMRLLEMEFEERKRAAEQRQKAENFWTGDTSSDQLVLGKKDMGWPFQADGQEGPLGWMLGNLWNTGLFCLFLVFELLRQNMQHEPAFDSSSEEEEEEVRVVPVTSYNWLTDFPSQEALDSFYKHYVQNAIRDLPCTCEFVESFVDDLIEACRVLSRQEAHPQLEDCLGIGAAFEKWGTLHETQKFDILVPIVPPQGTMFVLEMRDPALGRRCGCVLVESECVCKREKLLGDVLCLVHHHRDPSAVLGKCSSSIKAALCTGFHLDVCKTVQWFRNMMGNAWALVAHKYDFKLSLPPSTTSCKLRLDYRSGRFLSIHLVLGVQREDTLVYLVSQAPDQEQLTSVDWPESFVACEHLFLKLVGRFAPENTCHLKCLQIILSLRQHQSLPHGASRPILTSYHFKTALMHLLLRLPLTDWAHNMLSQRLQDILWFLGRGLQQRSLHHFLIGNNFLPLTIPIPKTFRNAEPVNLFQHLVLNPKAHSQAVEEFQNLLTQVKTLPHAPLAAAP

SEQ ID NO: 46092 - protein, 81 aa, Homo sapiens
MGGPRGAGWVAAGLLLGAGACYCIYRLTRGRRRGDRELGIRSSKSADEKTETPKNSKCSLDGCTSFLKGEAKCYQHLRRLN

SEQ ID NO: 46093 - protein, 134 aa, Homo sapiens
  MOD_RES (1)..(1): Any amino acid
XQTKYDWDLLAARSIWAFGPDATGPNILVDDTLPSEVDKALLGSVKDSIVQGFQWGTREGPLCDELIRNVKFKILDAVVAQEPLHRGGGQIIPTARRVVYSAFLMGARDSGCTHPRLPSVHHQSFYPGHRLFWL

SEQ ID NO: 46094 - protein, 139 aa, Homo sapiens
MLLQLRDQASLGSKVKPISLADHCTQPGQKCTVSGWGTVTSPRENFPDTLNCAEVKIFPQKKCEDAYPGQITDGMVCAGSSKGADTCQGDSGGPLVCDGALQGITSWGSDPCGRSDKPGVYTNICRYLDWIKKIIGSKG

SEQ ID NO: 46095 - protein, 167 aa, Homo sapiens
MSSSCSGLSRVLVAVATALVSASSPCPQAWGPPGVQYGQPGRSVKLCCPGVTAGDPVSWFRDGEPKLLQGPDSGLGHELVLAQADSTDEGTYICQTLDGALGGTVTLQLGYPPARPVVSCQAADYENFSCTWSPSQISGLPTRYLTSYRKKTVLGADSQRRSPSTGP

SEQ ID NO: 46096 - protein, 223 aa, Homo sapiens
MDLPVDEWKSYLLQKWASLPTSVQVTISTAETLRDIFLHSSSLLQPEDELFLKRLSKGYLVGKDSDAPLFYREEGNKKFQEKDYTGAAVLYSKGVSHSRPNTEDMSLCHANRSAALFHLGQYETCLKDINRAQTHGYPERLQPKIMLRKAECLVALGRLQEASQTISDLERNFTATPALADVLPQTLQRNLHRLKMKMQEKDSLTESFPAALAKTLEDAALRE

SEQ ID NO: 46097 - protein, 123 aa, Homo sapiens
MAAQIPIVATTSTPGIVRNSKKRPASPSHNGSSGGGYGASKKKKASASSFAQVPGLGEPGGEGTDYLKITWRRSLIQAQAPRKGHARTQGEGQLSVSQKEPSLETKSARTFILDFPAFRDVKK

SEQ ID NO: 46098 - protein, 150 aa, Homo sapiens
  MOD_RES (1)..(1): Any amino acid
XYLAKLSSVGSISEEETCEKLKGLIQRQVQMCKRNLEVMDSVRRGAQLAIEECQYQFRNRRWNCSTLDSLPVFGKVVTQGGKAWHGGDSGCHLLTESRSGERTQRRKEGGSLGQCWPEAIVGTQDPMRSPPYLWGRNQGGTHTGSASEGH

SEQ ID NO: 46099 - protein, 221 aa, Homo sapiens
MASLEVSRSPRRSRRELEVRSPRQNKYSVLLPTYNERENLPLIVWLLVKSFSESGINYEIIIIDDGSPDGTRDVAEQLEKIYGSDRILLRPREKKLGLGTAYIHGMKHATGNYIIIMDADLSHHPKFIPEFISDGVLPCCPGWSLLGSSDPAILASWDYSRGANFLTQILLRPGASDLTGSFRLYRKEVLEKLIEKCVSKGYVFQMEMIVRARQLNYTIGE

SEQ ID NO: 46100 - protein, 287 aa, Homo sapiens
MEKLSALQEQKGELRKRLSYTTHKLEKLETEFDSTRHYLEIELRRAQEELEKVTEKLRRIQSNYMALQRINQELEDKLYRMGQHYEEEKRALSHEIVALNSHLLEAKVTIDKLSEDNELYRKDCNLAAQLLQCSQTYGRVHKVSELPSDFQERVSLHMEKHGCSLPSPLCHPAYADSVPTCVIAKVLEKPDPASLSSRLSDASARDLAFCDGVEKPGPRPPYKGDIYCSDTALYCPEERRRDRRPSVDAPVTDVGFLRAQNSTDSAAEEEEEAEAAAFPAGFQHEAF

SEQ ID NO: 46101 - protein, 354 aa, Homo sapiens
MSNKDRHIDSSCSSFIKTEPSSPASLTDSVNHHSPGGSSDASGSYSSTMNGHQNGLDSPPLYPSAPILGGSGPVRKLYDDCSSTIVEDPQTKCEYMLNSMPKRLCLVCGDIASGYHYGVASCEACKAFFKRTIQGNIEYSCPATNECEITKRRRKSCQACRFMKCLKVGMLKEGVRLDRVRGGRQKYKRRIDAENSPYLNPQLVQPAKKPYNKIVSHLLVAEPEKIYAMPDPTVPDSDIKALTTLCDLADRELVVIIGWAKHIPGFSTLSLADQMSLLQSAWMEILILGVVYRSLSFEDELVYADDYIMDEDQSKLAGLLDLNNAILQLVKKYKSMKLEKEEFVTLKAIALANS

SEQ ID NO: 46102 - protein, 161 aa, Homo sapiens
MREWYCRSEGWKAFQEGRSKQDLDDVLEKAKKANVVALVAVAEHSGEFEKIMQLSERYNGFVLPCLGVHPVQGLPPEDQRSVTLKDLDVALPIIENYKDRLLAIGEVGLDFSPRFAGTGEQKEEQRQVLIRQIQLAKRLNLPVNVHSRSAGRPTINLLQEQ

SEQ ID NO: 46103 - protein, 170 aa, Homo sapiens
  MOD_RES (1)..(1): Any amino acid
XFGTDFKKLESFYIQKVLDIIATINKGSIVWQEVFDDKAKLAPGTIVEVWKDSAYPEELSRVTASGFPVILSAPWYLDLISYGQDWRKYYKVEPLDFGGTQKQKQLFIGGEACLWGEYVDATNLTPRLWPRASAVGERLWSSKDVRDMDDAYDRLTRHRCRMVEGLASFL

SEQ ID NO: 46104 - protein, 87 aa, Homo sapiens
METAQHLAQPWTPTRPAIITVNAKPIPSLQCVGQMASPTCLPALLAATARISRAVRASPPSLLRTQPWFLENAPVLGAKRPSSLSSV

SEQ ID NO: 46105 - protein, 551 aa, Homo sapiens
  MOD_RES (1)..(1): Any amino acid
XTDSASADPDNLKYSSSRDRGGSSSYGLQPSNSAVVSRQRHDDTRVHADIQNDEKERSMSYSDESRLSNLLRRITREDDRDRRLATVKQLKEFIQQPENKLVLVKQLDNILAAVHDVLNESSKLLQELRQEGACCLGLLCASLSYEAEKIFKWIFSKFSSSAKDEVKLLYLCATYKALETVGEKKAFSSVMQLVMTSLQSILENVDTPELLCKCVKCILLVARCYPHIFSTNFRDTVDILVGWHIDHTQKPSLTQQVSGWLQSLEPFWVADLAFSTTLLGQFLEDMEAYAEDLSHVASGESVDEDVPPPSVSLPKLAALLRVFSTVVRSIGERFSPIRGPPITEAYVTDVLYRVMRCVTAANQVFFSEAVLTAANECVGVLLGSLDPSMTIHCDMVITYGLDQLENCQTCGTDYIISVLNLLTLIVEQINTKLPSSFVEKLFIPSSKLLFLRYHKEKEVVAVAHAVYQAVLSLKNIPVLETAYKLILGEMTCALNNLLHSLQLPEACSEIKHEAFKNHVFNVDNAKFVVIFDLSALTTIGNAKNSLIGVSL

SEQ ID NO: 46106 - protein, 79 aa, Homo sapiens
MILLNNSHKLLALYKSLARSIPESLKVYGSVYHINHGNPFNMEVLVDSWPEYQMVIIRPQKQEMTDDMDSYTNVYRMFS

SEQ ID NO: 46107 - protein, 110 aa, Homo sapiens
MNAPLGGIWLWLPLLLTWLTPEVNSSWWYMRATGGSSRVMCDNVPGLVSSQRQLCHRHPDVMRAISQGVAEWTAECQHQFRQHRWNCNTLDRDHSLFGRVLLRRPVAKEK

SEQ ID NO: 46108 - protein, 128 aa, Homo sapiens
RKAEAERAQRMAKERQEQEEARRKLEEQARAKTQTPPVSPAPQPTEERLPSSPVYEDAASFKAELSYRGPVSGTEPEPVYSMEAADYREASSQQGLAYATEAVYESAEAPGHYPAALSWLSFRGQHLR

SEQ ID NO: 46109 - protein, 370 aa, Homo sapiens
  MOD_RES (1)..(1): Any amino acid
XRQAELKRKFEQLKQERISRYQGVNLYIKNLDDTIDDEKLRKEFSPFGSITSAKDGRSKGFGFVCFSSPEEATKAVTEMNGRIVGSKPLYVALAQRKEERKAHLTNQYMQRVAGMRALPANAILNQFQPAAGGYFVPAVPQAQGRPPYYTPNQLAQMRPNPRWQQGGRPQGFQGMPSAIRQSGPRPTLRHLAPTGSECPDRLAMDFGGAGAAQQGLTDSCQSGGVPTAVQNLAPRAAVAAAAPRAVAPYKYASSVRSPHPAIQPLQAPQPAVHVQGQEPLTASMLAAAPPQEQKQMLGERLFPLIQTMHSNLAGKITGMLLEIDNSELLHMLESPESLRSKVDEAVAVLQAHHAKKEAAQKVGAVAAATS

SEQ ID NO: 46110 - protein, 44 aa, Homo sapiens
MAGLNSLEAVKRKIQALQQQADEAEDRAQGLQRELDGERERREK

SEQ ID NO: 46111 - protein, 232 aa, Homo sapiens
MLILMTSLAWDPTTVSTVEVLKKIDIPSVFIGESSANSLKDEFTYEKGGHLILVPEFSLPLEYYLIPFLIIVGICLILIVIFMITKFVQDRHRARRNRLRKDQLKKLPVHKFKKGDEYDVCAICLDEYEDGDKLRILPCSHAYHCKCVDPWLTKTKKTCPVCKQKVVPSQGDSDSDTDSSQEENEVTEHTPLLRPLASVSAQSFGALSESRSHQNMTESSDYEEDDNEDTDS

SEQ ID NO: 46112 - protein, 229 aa, Homo sapiens
MFQIPVENLDNIRKDLKGFDPGEKYFHNTSWGDVSLWEPSGKKVRYRTKPYCCGLCKYSTKVLTSFKNHLHRYHEDEIDQELVIPCPNCVFASQPKVVGRHFRMFHAPVRKVQNYTVNILGETKSSRSDVISFTCLKCNFSNTLYYSMKKHVLVAHFHYLINSYFGLRTEEMGEQPKTNDTVSIEKIPPPDKYYCKKCNANASSQDALMYHILTSDIHRDLENKLRSVI

SEQ ID NO: 46113 - protein, 233 aa, Homo sapiens
MTAEELTLEILDRRNVGIREKDYWTCFEVNEREEAERPLHFAEKVLPILHGLGTDSHLVVKKHQAMEAMLLYLASRVGDTKHGMMKFREDRSLLGLGLPSGGFHDRYFILNSSCLRLYKEVRSHRPEKEWPIKSLKVYLGVKKKLRPPTCWGFTVVHETEKHEKQQWYLCCDTQMELREWFATFLFVQHDGLVWPSEPSRVSRAVPEVRLGSVSLIPLRGTSAQRLSTGAHPW

SEQ ID NO: 46114 - protein, 66 aa, Homo sapiens
MAGTLDLDKGCTVEELLRGCIEAFELSGLLNPLLHLPTIPEGQLQFPAGENVPPGQVLDLRLPSGV

SEQ ID NO: 46115 - protein, 55 aa, Homo sapiens
MSLVSGFVEGKDEQGRLLRRTLIRYANLGNVLILRSVSTAVYKRFPSAQHLVQAA

SEQ ID NO: 46116 - protein, 288 aa, Homo sapiens
MPTAESEAKVKTKVRFEELLKTHSDLMREKKKLKKKLVRSEENISPDTIRSNLPHIKETTSDDVSAANTNNLKKSTRVTKNKLRNTQLATENPNGDASVEEDKQGKPNKKVIKTVPQLTTQDLKPETPENKVDSTHQKTHTKPQPGVDHQKSEKANEGREETDLEEDEELMQAYQCHVTEEMAKEIKRKIRKKLKEQLTYFPSDTLFHDDKLSSEKRKKKKEVPVFSKAETSTLTISGDTVEGEQKKESSVRSVSSDSHQDDEISSMEQSTEDSMQDDTKPKPKKTKK

SEQ ID NO: 46117 - protein, 227 aa, Homo sapiens
YEEEKIRTKQIQRDAVLDFVKQKASQSPQKQHPLLDGVDGECPFPSRRSQHTDDSALCMSLSGLNQVGCAATLPHSSAFTPLKSDDRPNALLSSPATETGHASPLPPSAAPTTDSTDSITGQNSRQREEELELIDQLRKHIEYRLKVSLPCDLGAALTDGVVLCHLANHVRPRSVPSIHVPSPAVPKLTMAKCRRNVENFLEACRKIGVPQDNLCSPSDILQLNLSV

SEQ ID NO: 46118 - protein, 129 aa, Homo sapiens
  MOD_RES (1)..(1): Any amino acid
XCAALHQELREYYRLLSVLHSQLQLEDDQGVNLGLESSLTLRRLLVWTYDPKIRLKTLAALVDHCQGRKGGELASAVHAYTKTGDPYMRSLVQHILSLVSHPVLSFLYRWIYDGELEDTYHEVRIGVRF

SEQ ID NO: 46119 - protein, 109 aa, Homo sapiens
MYFQQAWRDKRLSYNVIPLNLTLDNRVADQLWVPDTYFLNDKKSFVHGVTVKNRMIRLHPDGTVLYGLRITTTAACMMDLRRYPLDEQNCTLEIESYFQLKSSGPEVFF

SEQ ID NO: 46120 - protein, 154 aa, Homo sapiens
MASIWVGHRGTVRDYPDFSPSVDAEAIQKAIRGIGTDEKMLISILTERSNAQRQLIVKEYQAAYGKELKDDLKGDLSGHFEHLMVALVTPPAVFDAKQLKKSMKGAGTNEDALIEILTTRTSRQMKDISQAYYTVYKKSLGDDISSETSGDFRK

SEQ ID NO: 46121 - protein, 116 aa, Homo sapiens
MCSFLEWRDLKIVYKRYASLYFCCAIEDQDNELITLEIIHRYVELLDKYFGSVCELDIIFNFEKAYFILDEFLLGGEVQETSKKNVLKAIEQADLLQEDAKEAETPRSVLEEIGLT

SEQ ID NO: 46122 - protein, 914 aa, Homo sapiens
QMRQKSKQQAKIEATQKLEQVKNEQQQQQQQQFGSQHLLVQSGSDTPSSGIQSPLTPQPGNGNMSPAQSFHKELFTKQPPSTPTSTSSDDVFVKPQAPPPPPAPSRIPIQDSLSQAQTSQPPSPQVFSPGSSNSRPPSPMDPYAKMRQKLREIILQQQQQKKIAGRQEKGSQDSPAVPHPGPLQHWQPENVNQAFTRPPPPYPGNIRSPVAPPLGPRYAVFPKDQRGPYPPDVASMGMRPHGFRFGFPGGSHGTMPSQERFLVPPQQIQGSGVSPQLRRSVSVDMPRPLNNSQMNNPVGLPQHFSPQSLPVQQHNILGQAYIELRHRAPDGRQRLPFSAPPGSVVEASSNLRHGNFIPRPDFPGPRHTDPMRRPPQGLPNQLPVHPDLEQVPPSQQEQGHSVHSSSMVMRTLNHPLGGEFSEAPLSTSVPSETTSDNLQITTQPSDGLEEKLDSDDPSVKELDVKDLEGVEVKDLDDEDLENLNLDTEDGKVVELDTLDNLETNDPNLDDLLRSGEFDIIAYTDPELDMGDKKSMFNEELDLPIDDKLDNQCVSVEPKKKEQENKTLVLSDKHSPQKKSTVTNEVKTEVLSPNSKVESKCETEKNDENKDNVDTPCSQASAHSDLNDGEKTSLHPCDPDLFEKRTNRETAGPSANVIQASTQLPAQDVINSCGITGSTPVLSSLLANEKSDNSDIRPSGSPPPPTLPASPSNHVSSLPPFIAPPGRVLDNAMNSNVTVVSRVNHVFSQGVQVNPGLIPGQSTVNHSLGTGKPATQTGPQTSQSGTSSMSGPQQLMIPQTLAQQNRERPLLLEEQPLLLQDLLDQERQEQQQQRQMQAMIRQRSEPFFPNIDFDAITDPIMKAKMVALKGINKVMAQNNLGMPPMVMSRFPFMGQVVTGTQNSEGQNLGPQAIPQ

SEQ ID NO: 46123 - protein, 1528 aa, Homo sapiens
MWPSQLLIFMMLLAPIIHGGKHSERHPALAAPLRHAERSPGGALPPRHLLQQPAAERTAAHRGQGPRGATRGVRGPGAQGAQIAAQAFSRAPIPMAVVRRELSCESYPIELRCPGTDVIMIESANYGRTDDKICDSDPAQMENIRCYLPDAYKIMSQRCNNRTQCAVVAGPDVFPDPCPGTYKYLEVQYECVPYKVEQKVFLCPGLLKGVYQSEHLFESDHQSGAWCKDPLQASDKIYYMPWTPYRTDTLTEYSSKDDFIAGRPTTTYKLPHRVDGTGFVVYDGALFFNKERTRNIVKFDLRTRIKSGEAIIANANYHDTSPYRWGGKSDIDLAVDENGLWVIYATEQNNGKIVISQLNPYTLRIEGTWDTAYDKRSASNAFMICGILYVVKSVYEDDDNEATGNKIDYIYNTDQSKDSLVDVPFPNSYQYIAAVDYNPRDNLLYVWNNYHVVKYSLDFGPLDSRSGQAHHGQVSYISPPIHLDSELERPSVKDISTTGPLGMGSTTTSTTLRTTTLSPGRSTTPSVSGRRNRSTSTPSPAVEVLDDMTTHLPSASSQIPALEESCEAVEAREIMWFKTRQGQIAKQPCPAGTIGVSTYLCLAPDGIWDPQGPDLSNCSSPWVNHITQKLKSGETAANIARELAEQTRNHLNAGDITYSVRAMDQLVGLLDVQLRNLTPGGKDSAARSLNKLQKRERSCRAYVQAMVETVNNLLQPQALNAWRDLTTSDQLRAATMLLHTVEESAFVLADNLLKTDIVRENTDNIKLEVARLSTEGNLEDLKFPENMGHGSTIQLSANTLKQNGRNGEIRVAFVLYNNLGPYLSTENASMKLGTEALSTNHSVIVNSPVITAAINKEFSNKVYLADPVVFTVKHIKQSEENFNPNCSFWSYSKRTMTGYWSTQGCRLLTTNKTHTTCSCNHLTNFAVLMAHVEVKHSDAVHDLLLDVITWVGILLSLVCLLICIFTFCFFRGLQSDRNTIHKNLCISLFVAELLFLIGINRTDQPIACAVFAALLHFFFLAAFTWMFLEGVQLYIMLVEVFESEHSRRKYFYLVGYGMPALIVAVSAAVDYRSYGTDKVCWLRLDTYFIWSFIGPATLIIMLNVIFLGIALYKMFHHTAILKPESGCLDNIKSWVIGAIALLCLLGLTWAFGLMYINESTVIMAYLFTIFNSLQGMFIFIFHCVLQKKVRKEYGKCLRTHCCSGKSTESSIGSGKTSGSRTPGRYSTGSQSRIRRMWNDTVRKQSESSFITGDINSSASLNREGLLNNARDTSVMDTLPLNGNHGNSYSIASGEYLSNCVQIIDRGYNHNETALEKKILKELTSNYIPSYLNNHERSSEQNRNLMNKLVNNLGSGREDDAIVLDDATSFNHEESLGLELIHEESDAPLLPPRVYSTENHQPHHYTRRRIPQDHSESFFPLLTNEHTEDLQSPHRDSLYTSMPTLAGVAATESVTTSTQTEPPPAKCGDAEDVYYKSMPNLGSRNHVHQLHTYYQLGRGSSDGFIVPPNKDGTPPEGSSKGPAHLVTSL

SEQ ID NO: 46124 - protein, 1008 aa, Homo sapiens
MGPAPAGEQLRGATGEPEVMEPALEGTGKEGKKASSRKRTLAEPPAKGLLQPVKLSRAELYKEPTNEELNRLRETEILFHSSLLRLQVEELLKEVRLSEKKKDRIDAFLREVNQRVVRVPSVPETELTDQAWLPAGVRVPLHQVPYAVKGCFRFLPPAQVTVVGSYLLGTCIRPDINVDVALTMPREILQDKDGLNQRYFRKRALYLAHLAHHLAQDPLFGSVCFSYTNGCHLKPSLLLRPRGKDERLVTVRLHPCPPPDFFRPCRLLPTKNNVRSAWYRGQSPAGDGSPEPPTPRYNTWVLQDTVLESHLQLLSTILSSAQGLKDGVALLKVWLRQRELDKGQGGFTGFLVSMLVVFLVSTRKIHTTMSGYQVLRSVLQFLATTDLTVNGISLCLSSDPSLPALADFHQAFSVVFLDSSGHLNLCADVTASTYHQVQHEARLSMMLLDSRADDGFHLLLMTPKPMIRAFDHVLHLRPLSRLQAACHRLKLWPELQDNGGDYVSAALGPLTTLLEQGLGARLNLLAHSRPPVPEWDISQDPPKHKDSGTLTLGLLLRPEGLTSVLELGPEADQPEAAKFRQFWGSRSELRRFQDGAIREAVVWEAASMSQKRLIPHQVVTHLLALHADIPETCVHYVGGPLDALIQGLKETSSTGEEALVAAVRCYDDLSRLLWGLEGLPLTVSAVQGAHPVLRYTEVFPPTPVRPAFSFYETLRERSSLLPRLDKPCPAYVEPMTVVCHLEGSGQWPQDAEAVQRVRAAFQLRLAELLTQQHGLQCRATATHTDVLKDGFVFRIRVAYQREPQILKEVQSPEGMISLRDTAASLRLERDTRQLPLLTSALHGLQQQHPAFSGVARLAKRWVRAQLLGEGFADESLDLVAAALFLHPEPFTPPSSPQVGFLRFLFLVSTFDWKNNPLFVNLNNELTVEEQVEIRSGFLAARAQLPVMVIVTPQDRKNSVWTQDGPSAQILQQLVVLAAEALPMLEKQLMDPRGPGDIRMGPSENVALL

SEQ ID NO: 46125 - protein, 60 aa, Homo sapiens
MSNKFLGTWKLVSSENFDDYMKALEHRNPAERITESSAEMGWQRDNHKEKASEWENGSGM

SEQ ID NO: 46126 - protein, 74 aa, Homo sapiens
MEGESTSAVLSGFVLGALAFQHLNTDSDTEGFLLGEVKGEAKNSITDSQMDDVEVVYTIDIQKYIPCYQLFRMW

SEQ ID NO: 46127 - protein, 219 aa, Homo sapiens
MDLYSTPAAALDRFVARRLQPRKEFVEKARRALGALAAALRERGGRLGAAAPRVLKTVKGGSSGRGTALKGGCDSELVIFLDCFKSYVDQRARRAEILSEMRASLESWWQNPVPGLRLTFPEQSVPGALQFRLTSVDLEDWMDVSLVPAFNVLGQAGSGVKPKPQVYSTLLNSGCQGGEHAACFTELRRNFVNIRPAKLKNLILLVKHWYHQACDPGPS

SEQ ID NO: 46128 - protein, 681 aa, Homo sapiens
MEGPHLPNKKKHKKQAVKTEPEKKSQSTKLSVVHEKKSQEGKPKEHTEPKSLPKQASDTGSNDAHNKKAVSRSAEQQPSEKSTEPKTKPQDMISAGGESVAGITAISGKPGDKKKEKKSLTPAVPVESKPDKPSGKSGMDAALDDLIDTLGGPEETEEENTTYTGPEVSDPMSSTYIEELGKREVTIPPKYRELLAKPIGPDDAIDALSSDFTCGSPTAAGKKTEKEESTEVLKAQSAGTVRSAAPPQEKKRKVEKDTMSDQALEALSASLGTRQAEPELDLRSIKEVDEAKAKEEKLEKCGEDDETIPSEYRLKPATDKDGKPLLPEPEEKPKPRSESELIDELSEDFDRSECKEKPSKPTEKTEESKAAAPAPVSEAVCRTSMCSIQSAPPEPATLKGTVPDDAVEALADSLGKKEADPEDGKPVMDKVKEKAKEEDREKLGEKEETIPPDYRLEEVKDKDGKPLLPKESKEQLPPMSEDFLLDALSEDFSGPQNASSLKFEDAKLAAAISEVVSQTPASTTQAGAPPRDTSQSDKDLDDALDKLSDSLGQRQPDPDENKPMEDKVKEKAKAEHRDKLGERDDTIPPEYRHLLDDNGQDKPVKPPTKKSEDSKKPADDQDPIDALSGDLDSCPSTTETSQNTAKDKCKKAASSSKAPKNGGKAKDSAKTTEETSKPKDD

SEQ ID NO: 46129 - protein, 75 aa, Homo sapiens
  MOD_RES (1)..(1): Any amino acid
XKSRAAKVIKTLTEINIAFLPYESQVYSLDSADSFQSFYSPHKAQMKNPILERLAEQIATLCATLKEYPAVRYRG

SEQ ID NO: 46130 - protein, 390 aa, Homo sapiens
MHEHATPVTSAYGERHEELINLGSPDSHTISEGQKSSVTSKTTRKGKEKSSEKEKTAKEKQAPRFEPQISTVHPQQEDPNKPYWILRLVTEHNESELFEVKKDTERADEIRAMKQAWETTEPGRAIKASQARLHYLSGFIKKTSDAESPPISESQTKPKEEVETAARGVKEPNSKNSAGSESKEMTQTGSGSAVWKKWQLTKGLRDVAKSTSSESGGVSSPGKEEREQSTRKENIQTGPRTRSPTILETSPRLIRKALEFMDLSQYVRKTDTDPLLQTDELNQQQAMQKAEEIHQFRQHRTRVLSIRNIDQEERLKLKDEVLDMYKEMQDSLDEARQKIFDIREEYRNKLLEAEHLKLETLAAQEAAMKLETEKMTPAPDTQKKKKGKKK

SEQ ID NO: 46131 - protein, 158 aa, Homo sapiens
VSDVLESVTLSTESPKETIAPAKTDYVYPTAKAPLWPEEPKTEVVESITYVSEPPETTLETSPLPSQSITLPSPDEPQTEPAPKQTPRAPPKPKTSPRPRIPQTQPVPKVPQRVTAKPKTSPSPEVSYTTPAPLETRGIPFIPMISPSPSQEELQTTL

SEQ ID NO: 46132 - protein, 85 aa, Homo sapiens
MDGEDIPDFSSLKEETAYWKELSLKYKQSFQEARDELVEFQEGSRELEAELEAQLVQAACSGGYWALPSPGTLRDINTGYFLFSP

SEQ ID NO: 46133 - protein, 41 aa, Homo sapiens
MWLKPFEGEGWKATTCLCSPNSVTPSTMRCAGMSWRDTCTV

SEQ ID NO: 46134 - protein, 272 aa, Homo sapiens
VTILVLQGRLDEARQMLSKEADASPASAGICRIMGDLMRTMPILSPGNTQTLTELELKWQHWHEECERYLQDSTFATSPHLESLLKIMLGDEAALLEQKELLSNWYHFLVTRLLYSNPTVKPIDLHYYAQSSLDLFLGGESSPEPLDNILLAAFEFDIHQVIKECSFGSNMREFLLLEYASGLFAHPSLWQLGVDYFDYCPELGRVSLELHIERIPLNTEQKALKVLRICEQRQMTEQVRSICKILAMKAVRNNRLGSALSWSIRAKDAAFA

SEQ ID NO: 46135 - protein, 1739 aa, Homo sapiens
MTTMLQKSDSNASFLRAARAGNLDKVVEYLKGGIDINTCNQNGLNALHLAAKEGHVGLVQELLGRGSSVDSATKKGNTALHIASLAGQAEVVKVLVKEGANINAQSQNGFTPLYMAAQENHIDVVKYLLENGANQSTATEDGFTPLAVALQQGHNQAVAILLENDTKGKVRLPALHIAARKDDTKSAALLLQNDHNADVQSKSGFTPLHIAAHYGNVNVATLLLNRGAAVDFTARNGITPLHVASKRGNTNMVKLLLDRGGQIDAKTRDGLTPLHCAARSGHDQVVELLLERGAPLLARTKRGETALHMAARAGQVEVVRCLLRNGALVDARAREEQTPLHIASRLGKTEIVQLLLQHMAHPDAATTNGYTPLHISAREGQVDVASVLLEAGAAHSLATKKGFTPLHVAAKYGSLDVAKLLLQRRAAADSAGKNGLTPLHVAAHYDNQKVALLLLEKGASPHATAKNGYTPLHIAAKKNQMQIASTLLNYGAETNIVTKQGVTPLHLASQEGHTDMVTLLLDKGANIHMSTKSGLTSLHLAAQEDKVNVADILTKHGADQDAHTKLGYTPLIVACHYGNVKMVNFLLKQGANVNAKTKNGYTPLHQAAQQGHTHIINVLLQHGAKPNATTANGNTALAIAKRLGYISVVDTLKVVTEEVTTTTTTITEKHKLNVPETMTEVLDVSDEEGDDTMTGDGGEYLRPEDLKELGDDSLPSSQFLDGMNYLRYSLEGGRSDSLRSFSSDRSHTLSHASYLRDSAVMDDSVVIPSHQVSTLAKEAERNSYRLSWGTENLDNVALSSSPIHSGFLVSFMVDARGGAMRGCRHNGLRIIIPPRKCTAPTRVTCRLVKRHRLATMPPMVEGEGLASRLIEVGPSGAQFLGPVIVEIPHFAALRGKERELVVLRSENGDSWKEHFCDYTEDELNEILNGMDEVLDSPEDLEKKRICRIITRDFPQYFAVVSRIKQDSNLIGPEGGVLSSTVVPQVQAVFPEGALTKRIRVGLQAQPMHSELVKKILGNKATFSPIVTLEPRRRKFHKPITMTIPVPKASSDVMLNGFGGDAPTLRLLCSITGGTTPAQWEDITGTTPLTFVNECVSFTTNVSARFWLIDCRQIQESVTFASQVYREIICVPYMAKFVVFAKSHDPIEARLRCFCMTDDKVDKTLEQQENFAEVARSRDVEVLEGKPIYVDCFGNLVPLTKSGQHHIFSFFAFKENRLPLFVKVRDTTQEPCGRLSFMKEPKSTRGLVHQAICNLNITLPIYTKESESDQEQEEEIDMTSEKNPQDEQERIEERLAYIADHLGFSWTELARELDFTEEQIHQIRIENPNSLQDQSHALLKYWLERDGKHATDTNLVECLTKINRMDIVHLMETNTEPLQERISHSYAEIEQTITLDHSEGFSVLQEELCTAQHKQKEEQAVSKESETCDHPPIVSEEDISVGYSTFQDGVPKTEGDSSATALFPQTHKEQVQQDFSGKMQDLPEESSLEYQQEYFVTTPGTETSETQKAMIVPSSPSKTPEEVSTPAEEEKLYLQTPTSSERGGSPIIQEPEEPSEHREESSPRKTSLVIVESADNQPETCERLDEDAAFEKGDDMPEIPPETVTEEEYIDEHGHTVVKKVTRKIIRRYVSSEGTEKEEIMVQGMPQEPVNIEEGDGYSKVIKRVVLKSDTEQSEVTLCEPSILSSTSQFQAEPVEGRRVSKVVKTTVVLGERMEKHLGDSSLATDLPSAKDDFEEDNNE

SEQ ID NO: 46136 - protein, 53 aa, Homo sapiens
MSLHQFLLEPITCHAWNRDRTRPVCLDYYSLVRLPSVPIITKCTSIRRTGASG

SEQ ID NO: 46137 - protein, 138 aa, Homo sapiens
MEPAAGSSMEPSADWLATAAARGRVEEVRALLEAGALPNAPNSYGRRPIQVMMMGSARVAELLLLHGAEPNCADPATLTRPVHDAAREGFLDTLVVLHRAGARLDVRDAWGRLPVDLAEELGHRDVARHPRLKEPERL

SEQ ID NO: 46138 - protein, 46 aa, Homo sapiens
MAVEDHFELCLAKCRTSSQSVQHENTYRDPIAKYCYGESPPELFPA

SEQ ID NO: 46139 - protein, 125 aa, Homo sapiens
MHKDEFHLKFFMCVIQSRQLVRTPQRTAGEASTSSMLIPKPPPKTDILKSLDTMDDPDTVGSIPVFKTECAEVEIQVSKRKRAVVKARGDPTVETMKQREEWIMTHEEHHAAKTLGIGKAIAVLT

SEQ ID NO: 46140 - protein, 78 aa, Homo sapiens
MAFIAKSFYDLSAISLDGEKVDFNTFRGRAVLIENVASLCGTTTRDFTQLNELQCRFPRRLVVLGFPCNQFGHQERQK

SEQ ID NO: 46141 - protein, 134 aa, Homo sapiens
SRLLYHITDGDNPLLSPRCSIFSQSQRFNLDPESAPSPPSTQQFMMPRSSSRCSCGDGKEPQTITQLTKHIQSLKRKIRKFEEKFEQEKKYRPSHGDKTSNPEVLKWMNDLAKGRKQLKGKSQPKIFFPHKGSS

SEQ ID NO: 46142 - protein, 57 aa, Homo sapiens
MALRHLALLAGLLVGVASKSMENTAQLPECCVDVVGVNASCPGASLCGPGCYRRWNA

SEQ ID NO: 46143 - protein, 117 aa, Homo sapiens
MEFELSWVFLVAILQGVHCEVQLVESGRGLAQPGGYLKLSGAASGFTVGSWYMSWIHQAPGKGLEWVSYISSSGCSTNYADSVKGRFTISTDNSKNTLYLQMNSLRVEDTAVYYCAR

SEQ ID NO: 46144 - protein, 42 aa, Homo sapiens
MWETMRNLASIGKKWKDQNIKDHYKHRGRNLRSHMLERLYQT

SEQ ID NO: 46145 - protein, 173 aa, Homo sapiens
MAAAAAVEAAAPMGALWGLVHDFVVGQQEGPADQVAADVKSGNYTVLQVVEALGSSLENPEPRTRARAIQLLSQVLLHCHTLLLEKEVVHLILFYENRLKDHHLVIPSVLQGLKALSLCVALPPGLAVSVLKAIFQEVHVQSLPQVDRHTVYNIITNFMRTREEGDGWGKGSP

SEQ ID NO: 46146 - protein, 148 aa, Homo sapiens
  MOD_RES (1)..(1): Any amino acid
XRLTPPGSCGFYDGLLILLLQLLTEQGKASLIRDMSSSEMWTVLWHRFSMVLRLPEEASAQEGELSLSSPPSPEPDWTLISPQGMAALLSLAMATFTQEPQLCLSCLSQHGSILMSILKHLLCPSFLNQLRQASFASPLRWTWMLTSL

SEQ ID NO: 46147 - protein, 41 aa, Homo sapiens
  MOD_RES (1)..(1): Any amino acid
XCDEGHCTAKDCAGVILYSAECATQVALDGIQCFVSRGISS

SEQ ID NO: 46148 - protein, 73 aa, Homo sapiens
MGPLRESKKEHRVQHHDKEISRSRIPRLILRPHMPQQQHKVSPASESPFSEEESREFNPSSSGRSARTVSSNS

SEQ ID NO: 46149 - protein, 585 aa, Homo sapiens
MEDPRGINGQSVQTSQASSDVAVSSSCRSMEMQDLTSPHSRLSGSSESPSGPKLGNSHINSNSMTPNGTEVKTEPMSSSETASTTADGSLNNFSGSAIGSSSFSPRPTHQFSPPQIYPSKPYPHILPTPSSQTMAAYGQTQFTTGMQQATAYATYPQPGQPYGISSYGIKTEGGLSQSQSPGQTGFLSYGTSFSTPQPGQAPYSYQMQGSSFTTSSGIYTGNNSLTNSSGFNSSQQDYPSYPSFGQGQYAQYYNSSPYPAHYMTSSNTSPTTPSTNATYQLQEPPSGITSQAVTDPTAEYSTIHSPSTPIKDSDSDRLRRGSDGKSRGRGRRNNNPSPPPDSDLERVFIWDLDETIIVFHSLLTGSYANRYGRECDQVHIDDVSSDDNGQDLSTYNFGTDGFPAAATSANLCLATGVRGGVDWMRKLAFRYRRVKEIYNTYKNNVGGLLGPAKREAWLQLRAEIEALTDSWLTLALKALSLIHSRTNCVNILVTTTQLIPALAKVLLYGLGIVFPIENIYSATKIGKESCFERIIQRFGRKVVYVVIGDGVEEEQGAKKHAMPFWRISSHSDLMALHHALELEYL

SEQ ID NO: 46150 - protein, 229 aa, Homo sapiens
MFRAAAPGQLRRANLLPRVAAKLEVAPISDIIAIKSPDTFVRTIYAGNALCTVKCDEKVKVFSVRGTSFDAAATSGGSASSEKASSTSPVEISEWLDQKLTKSDRPELTGAKVVVSGGRGLKSGENFKLLYDLADQLHAAVGASRAAVDAGFVPNDMQVGQTGKIVAPELYIAVGISGAIQHLAGMKDSKTIVAINKDPEAPIFQVADYGIVADLFKVVPEMTEILKKK

SEQ ID NO: 46151 - protein, 120 aa, Homo sapiens
MAKNKLVGTPNPSTPLPNTVPQFIAREPYELTVPALYPSSPEVWAPYPLYPAELAPALPPPAFTYPASLHAQVIDTHRPGLHSLHHQSFQTWFPRAHHTTNTYPANRSTLKRLMIPSKSS

SEQ ID NO: 46152 - protein, 60 aa, Homo sapiens
MAEISRIQYEMEYTEGISQRMRVPEKLKVAPPNADLEQGFQEGVPNASVIMQVPERIVVA

SEQ ID NO: 46153 - protein, 60 aa, Homo sapiens
MESGHLLWALLFMQSLWPQLTDGATRVYYLGIRDVQWNYAPKGRNVITNQPLDSDIYVKM

SEQ ID NO: 46154 - protein, 115 aa, Homo sapiens
MTSPLCRAASANALPPQDQASTPSSRVKGREASGKPSHLRGKGTAQAWTPGRSKGGSFHRGAGKPSVHSQVAELHKKIQLLESHSVARWECSGTISAHCNLRLPESLEPGRRRLW

SEQ ID NO: 46155 - protein, 43 aa, Homo sapiens
  MOD_RES (1)..(1): Any amino acid
XSRNDDICIYGGLGLGGLLLLAVVLLSACLCWLHRREAASAQQ

SEQ ID NO: 46156 - protein, 169 aa, Homo sapiens
MSCQAFTSADTFIPLNSDASATLPLIMHHSAAECLPVSNHATNVMSTATGLHYSVPSCHYGNQPSTYGVMAGSLTPCLYKFPDHTLSHGFPPIHQPLLAEDPTAADFKQELRRKSKLVEEPIDMDSPEIRELEKFANEFKVRRIKLALLLKMLWRDTLENRINLLLKRS

SEQ ID NO: 46157 - protein, 115 aa, Homo sapiens
  MOD_RES (1)..(1): Any amino acid
XCNLLGMKIYEKDEEKQRALLGYADNQLPDLEDLMKRENQKILTPLVSLDTPGKATVQVVILADPDGHEICFVGDEAFRELSKMDPEGSKLLDDAMAADKSDEWFAKHNKPKASG

SEQ ID NO: 46158 - protein, 104 aa, Homo sapiens
MSGAPTAGAALMLCAATAVLLSAQGGPVQSKSPRFASWDEMNVLAHGLLQLGQGLREHAERTRSQLSALERRLSACGSACQGTEGSTDLPLAPESRVDPEVLHS

SEQ ID NO: 46159 - protein, 222 aa, Homo sapiens
MAFPVDMLENCSHEELENSAEDYMSDLRCGDPENPECFSLLNITIPISLSNVGFVPLYGGDQTQKILALFAPEDSLTAVALYLADQWWAIDDIVKTSVPSREGLKQVSTLGERVVLYVLNRIIYRKQEMERNEIPFLCHSSTDYAKILWKKGEAIGFYSVKPTGSICASFLTQSYQLPVLDTMFLRKKYRGKDFGLHMLEDFVDSFTEDALGLRYPLSSLMY

SEQ ID NO: 46160 - protein, 106 aa, Homo sapiens
HWTAYLRNKVDTYVEFPLRGLDMKCYLLEPENSGPESCLYDLAAVVVHHGSGVGSGHYTAYATHEGRWFHFNDSTVTLTDEETVVKAKAYILFYVEHQAKAGSDKL

SEQ ID NO: 46161 - protein, 76 aa, Homo sapiens
MEELVVEVRGSNGAFYKAFVKDVHEDSITVAFENKLSPSGFCGLGDPTIPVHADNVILISIQLPTARIDHLVGSKI

SEQ ID NO: 46162 - protein, 240 aa, Homo sapiens
MTSGANSSGSYLPSEIRSSKIDDNYLKELNEDLKLRKQELLEMLKPLEDKNNLLFQKLMSNLEEKQRSLQIMRQIMAGKGCEESSVMELLKEAEEMKQNLERKNKMLRKEMEMLWNKTFEAEELSDQQKAPQTKNKADLQDGKAPKSPSSPRKTESELEKSFAEKVKEIRKEKQQRKMEWVKYQEQNNILQNDFHGKVIELRIEALKNYQKANDLKLSLYLQQNFEPMQAFLNLPGSQAQ

SEQ ID NO: 46163 - protein, 200 aa, Homo sapiens
  MOD_RES (1)..(1): Any amino acid
XESIAAKNLQEAEEWYKSKYADLSDAANRNHEALRQAKQEMNESRRQIQSLTCEVDGLRGTNEALLRQLRELEEQFALEAGGYQAGAARLEEELRQLKEEMARHLREYQELLNVKMALDIEIATYRKLLEGEESRISVPVHSFASLNIKTTVPEVEPPQDSHSRKTVLIKTIETRNGEQVVTESQKEQRSELDKSSAHSY

SEQ ID NO: 46164 - protein, 383 aa, Homo sapiens
MKPILLQGHERSITQIKYNREGDLLFTVAKDPIVNVWYSVNGERLGTYMGHTGAVWCVDADWDTKHVLTGSADNSCRLWDCETGKQLALLKTNSAVRTCGFDFGGNIIMFSTDKQMGYQCFVSFFDLRDPSQIDNNEPYMKIPCNDSKITSAVWGPLGECIIAGHESGELNQYSAKSGEVLVNVKEHSRQINDIQLSRDMTMFVTASKDNTAKLFDSTTLEHQKTFRTERPVNSAALSPNYDHVVLGGGQEAMDVTTTSTRIGKFEARFFHLAFEEEFGRVKGHFGPINSVAFHPDGKRGRCQKRRHRRAQTAPTVALPQTPMTVGTGSPAATRSPGRGERWVPHAWGGHGRRLNGHSAAGRGGWPGEGAEQWARGSKFLDGG

SEQ ID NO: 46165 - protein, 357 aa, Homo sapiens
MSRKASENVEYTLRSLSSLMGERRRKQPEPDAASAAGECSLLAAAESSTSLQSAGAGGGGVGDLERAARRQFQQDETPAFVYVVAVFSALGGFLFGYDTGVVSGAMLLLKRQLSLDALWQELLVSSTVGAAAVSALAGGALNGVFGRRAAILLASALFTAGSAVLAAANNKETLLAGRLVVGLGIGIASMTVPVYIAEVSPPNLRGRLVTINTLFITGGQFFASVVDGAFSYLQKDGWRYMLGLAAVPAVIQFFGFLFLPESPRWLIQKGQTQKARRILSQMRGNQTIDEEYDSIKNNIEEEEKEVGSAGPVICRMLSYPPTRRALIVGCGLQMFQQLSGINTIMYVFLSGFLLKRL

SEQ ID NO: 46166 - protein, 212 aa, Homo sapiens; identical to SEQ ID NO: 43344

SEQ ID NO: 46167 - protein, 48 aa, Homo sapiens
MNRSQEVTRDEESTRSEEAMRSTTFMLPPSRAAVNQLSKTWPRLLKRS

SEQ ID NO: 46168 - protein, 164 aa, Homo sapiens
MQENLRFASSGDDIKIWDASSMTLVDKFNPHTSPHGISSICWSSNNNFLVTASSSGDKIVVSSCKCKPVPLLELAEGQKQTCVNLNSTSMYLVSGGLNNTVNIWDLKSKRVHRSLKDHKDQVTCVTYNWNDCYIASGSLSGEIILHSVTTNLSSTPFGHGSNQS

SEQ ID NO: 46169 - protein, 42 aa, Homo sapiens
MKARRRSPSLTYRLKPKPNYYYQQKQQKLLKELIFRIIWTQL

SEQ ID NO: 46170 - protein, 125 aa, Homo sapiens
  MOD_RES (1)..(1): Any amino acid
XKSDFVFRCNFAPTEAFQRDVGRKTNLTTFNPSILEKYYNNLLTIQDRNNFFLSLKKLDGAILWIPAFFFHTSATVTRTLVDFFVEHRGQLKVQLAWPGNIMQHVNRFFATLHCCKQCSDEHLWN

SEQ ID NO: 46171 - protein, 522 aa, Homo sapiens
EFKKCCPGSPDIDKLDVATMTEYLNFEKSSSVSRYGASQVEDMGNIILAMISEPYNHRFSDPERVNYKFESGTCSKMELIDDNTVVRARGLPWQSSDQDIARFFKGLNIAKGGAALCLNAQGRRNGEALVRFVSEEHRDLALQRHKHHMGTRYIEVYKATGEDFLKIAGGTSNEVAQFLSKENQVIVRMRGLPFTATAEEVVAFFGQHCPITGGKEGILFVTYPDGRPTGDAFVLFACEEYAQNALRKHKDLLGKRYIELFRSTAAEVQQVLNRFSSAPLIPLPTPPIIPVLPQQFVPPTNVRDCIRLRGLPYAATIEDILDFLGEFATDIRTHGVHMVLNHQGRPSGDAFIQMKSADRAFMAAQKCHKKNMKDRYVEVFQCSAEEMNFVLMGGTLNRNGLSPPPCKLPCLSPPSYTFPAPAAVIPTEAAIYQPSVILNPRALQPSTAYYPAGTQLFMNYTAYYPSPPGSPNSLGYFPTAANLSGVPPQPGTVVRMQGLAYNTGVKEILNFFQGYQCLKDVW

SEQ ID NO: 46172 - protein, 279 aa, Homo sapiens
MASRWQNMGTSVRRRSLQHQEQLEDSKELQPVVSHQETSVGALGSLCRQFQRRLPLRAVNLNLRAGPSWKRLETPEPGQQGLQAAARSAKSALGAVSQGINFRSCREGPVRGDLLSNESCCQEDVLILDRIQESCQSGTKWLVETQVKARRRKRGAQKGSGSPTHSLSQKSTRLSGAAPAHSAADPWEKEHHRLSVRMGSHAHPLRRSRREAAFRSPYSSTEPLCSPSESDSDLEPVGAGIQHLQKLSQELDEAIMAEERKQALSDRQGFILKDVYASP

SEQ ID NO: 46173 - protein, 640 aa, Homo sapiens
SDHALWWEKKRTWLLKTHWTLDKYGIQADAKLQFTPQHKLLRLQLPNMKYVKVKVNFSDRVFKAVSDICKTFNIRHPEELSLLKKPRDPTKKKKKKLDDQSEDEALELEGPLITPGSGTDVLYIGPLKGSIYSSPGLYSKTMTPTYDAHDGSPLSPTSAWFGDSALSEGNPGILAVSQPITSPEILAKMFKPQALLDKAKINQGWLDSSRSLMEQDVKENEALLLRFKYYSFFDLNPKYDAIRINQLYEQAKWAILLEEIECTEEEMMMFAALQYHINKLSIMTSENHLNNSDKEVDEVDAALSDLEITLEGGKTSTILGDITSIPELADYIKVFKPKKLTLKGYKQYWCTFKDTSISCYKSKEESSGTPAHQMNLRGCEVTPDVNISGQKFNIKLLIPVAEGMNEIWLRCDNEKQYAHWMAACRLASKGKTMADSSYNLEVQNILSFLKMQHLNPDPQLIPEQITTDITPECLVSPRYLKKYKNKQPGYIRDLITARILEAHQNVAQMSLIEAKMRFIQAWQSLPEFGITHFIARFQGGKKEELIGIAYNRLIRMDASTGDAIKTWRFSNMKQWNVNWEIKMVTVEFADEVRLSFICTEVDCKVVHEFIGGYIFLSTRAKDQNESLDEEMFYKLTSGWV

SEQ ID NO: 46174 - protein, 61 aa, Homo sapiens
MWNFRELSENSQQAANILSGACGLQRGDRVAVMLPRVPEWWLVILGCIRAGLIFMPGTIQM

SEQ ID NO: 46175 - protein, 348 aa, Homo sapiens
MGVKKKKEMQVAALTICHQDLETLKSFADVEGKNLASLLLHCVQLTDGVSQIHYIKQIVPLLEKADKNGMCDPTIQSCLDILAGIYLSLSLKNPLKKVLASSLNSLPDFFLPEAMHRFTSRLQEELNTTDLYSYRKVTDNISSCMENFNLGRASVNNLLKNVLHFLQKSLIEILEENRKCAGNHIIQTQLMNDLLVGIRVSMMLVQKVQDFQGNLWKTSDSPIWQNMCGLLSIFTKVLSDDDLLQTVQSTSGLAIILFIKTMFHPSEKIPHLISSVLLRSVDCTSVPEWFMSSCRSLCCGDISQSAVLFLCQGTLAMLDWQNGSMGRSGEALLLDTAHVLFTLSSQVL

SEQ ID NO: 46176 - protein, 215 aa, Homo sapiens
MAELCPLAEELSCSICLEPFKEPVTTPCGHNFCGSCLNETWAVQGSPYLCPQCRAVYQARPQLHKNTVLCNVVEQFLQADLAREPPADVWTPPARASAPSPNAQVACDHCLKEAAVKTCLVCMASFCQEHLQPHFDSPAFQDHPLQPPVRDLLRRKCSQHNRLREFFCPEHSECICHICLVEHKTCSPASLSQASADLEHLQGEQDPSSCCQRRQ

SEQ ID NO: 46177 - protein, 88 aa, Homo sapiens
MAENLKRLVSNETLRTLQEKLDFWLKEYNEDVMMVWKQSSHAFCLGWRLPLLLLPWENLLTARSPLCRTRLIGRDIKIPVLGIGICNS

SEQ ID NO: 46178 - protein, 255 aa, Homo sapiens
MDRSLPVFSIQDSPFGDAPLGRSHYWPSQSQTWCPKTLSPSRSQRSRLPQAPKALATGPNSPELFEESWPSSSGTPSLPSTTEGQMWASPAPTLIDSGDSVVAKYINRFRQAQPTSREERQPAGPTPADFWWLQSDSPDPSSQSAAGANKPEGRPHTAVPTAVNVTSASHAVAPLQEIKQNLHTWNSSLLDLETLSLQSRAARLLKRSKASISSSSSLSPSDASTSSFPTSSDGLSPFSETFIPDSSKGLGPRAP

SEQ ID NO: 46179 - protein, 287 aa, Homo sapiens
MHIITPSASENGSHLFVPWEPICPFEEKTKVERMVEDYLASGYQDSVTFDDVAVDFTPEEWALLDTTEKYLYRDVMLENYMNLASVEWEIQPRTKRSSLQQGFLKNQIFSGIQMTRGYSGWKLCDCKNCGEVFREQFCLKTHMRVQNGGNTSEGNCYGKDTLSVHKEASTGQELSKFNPCGKVFTLTPGLAVHLEVLNARQPYKCKECGKGFKYFASLDNHMGIHTDEKLCEFQEYGRAVTASSHLKQCVAVHTGKKSKKTKKCGKSFTNFSQLYAPVKTHKGEKSF

SEQ ID NO: 46180 - protein, 125 aa, Homo sapiens
MYSSSCETTRNTTGIEESTDGMILGPEDLSYQIYDVSGESNSAVSTEDLKECLKKQLEFCFSRENLSKDLYLISQMDSDQFIPIWTVANMEEIKKLTTDPDLILEVLRSSPMVQVDEKGEKVRPS

SEQ ID NO: 46181 - protein, 1001 aa, Homo sapiens
MIEDKGPRVADYFVVAGLTDVSKPLEEEIHFNDACHKVAKPKEPITDVSVIIKSLGEEVPQDYICIDVTPTGLSADLNNGSLVGPQIYLCYRRGRDKPPLTDLGVLYDWKERLKQGCEIIQSTPYGRPANISGSTSSQRIYITYRRASENMTQNTLAVTDICIIIPSKGESPPHTFCKVDKNLNNSMWGSAVYLCYKKSVAKTNTVSYKAGLICRYPQEDYESFSLPESVPLFCLPMGATIECWPSNSKYPLPVFSTFVLTGASAEKVYGAAIQFYEPYSEENLTEKQRLLLGLTSADGKSDSSKTIHTNKCICLLSHWPFFDAFRKFLTFLYRYSISGPHVLPIEKHISHFMHKVPFPSPQRPRILVQLSPHDNLILSQPVSSPLPLSGGKFSTLLQNLGPENAVTLLVFAVTEHKILIHSLRPSVLTSVTEALVSMIFPFHWPCPYVPLCPLALADVLSAPCPFIVGIDSRYFDLYDPPPDVSCVDVDTNTISQIGDKKNVAWKILPKKPCKNLMNTLNNLHQQLAKLQQRPRDDGLMDLAINDYDFNSGKRLHMIDLEIQEAFLFFMASILKGYRSYLRPITQAPSETATDAASLFALQAFLRSRDRSHQKFYNMMTKTQMFIRFIEECSFVSDKDASLAFFDDCVDKVDMDKSGEVRLIELDESFKSEHTVFVTPPEIPHLPNGEEPPLQYSYNGFPVLRNNLFERPEGFLQAKKNKLPSKSSSPNSPLPMFRRTKQEIKSAHKIAKRYSSIPQMWSRCLLRHCYGLWFICLPAYVKVCHSKVRALKTAYDVLKKMQSKKMDPPDEVCYRILMQLCGQYDQPVLAVRVLFEMQKAGIDPNAITYGYYNKAVLESTWPSRSRSGYFLWTKVRNVVLGVTQFKRALKKHAHLSQTTLSGGQSDLGYNSLSKDEVRRGDTSTEDIQEEKDKKGSDCSSLSESESTKGSADCLPKLSYQNSSSIVRLTGTSNNSAGKISGESMESTPELLLISSLEDTNET

SEQ ID NO: 46182 - protein, 47 aa, Homo sapiens
MSTQDERQINTEYAVSLLEQLKLFYEQQLFTDIVLIVEGTEFPCHKM

SEQ ID NO: 46183 - protein, 60 aa, Homo sapiens
MEPGDEDLDCDNDHVSKMSRIFNPHLNKTANGDCRRDPRERSRSPIERAVAPTMSLHGSH

SEQ ID NO: 46184 - protein, 274 aa, Homo sapiens
MAPAADREGYWGPTTSTLDWCEENYSVTWYIAEFWNTVSNLIMIIPPMFGAVQSVRDGLEKRYIASYLALTVVGMGSWCFHMTLKYEMQLLDELPMIYSCCIFVYCMFECFKIKNSVNYHLLFTLVLFSLIVTTVYLKVKEPIFHQVMYGMLVFTLVLRSIYIVTWVYPWLRGLGYTSLGIFLLGFLFWNIDNIFCESLSMLNRLNRNFRKKVPPIIGITTQFHAWWHILTGLGSYLHILFSLYTRTLYLRYRPKVKFLFGIWPVILFEPLRKH

SEQ ID NO: 46185 - protein, 356 aa, Homo sapiens
MFAKATRNFLREVDADGDLIAVSNLNDSDKLQLLSLVTKKKRFWCWQRPKYQFLSLTLGDVLIEDQFPSPVVVESDFVKYEGKFANHVSGTLETALGKVKLNLGGSSRVESQSSFGTLRKQEVDLQQLIRDSAERTINLRNPVLQQVLEGRNEVLCVLTQKITTMQKCVISEHMQVEEKCGGIVGIQTKTVQVSATEDGNVTKDSNVVLEIPAATTIAYGVIELYVKLDGQFEFCLLRGKQGGFENKKRIDSVYLDPLVFREFAFIDMPDAAHGISSQDGPLSVLKQATLLLERNFHPFAELPEPQQTALSDIFQAVLFDDELLMVLEPVVSPETSQGSVFTGVFWNRGGGRMELC

SEQ ID NO: 46186 - protein, 139 aa, Homo sapiens
NLFFLPGGARSEMMDDLATDARGRGAGRRDAAASASTPAQAPTSDSPVAEDASRRRPCRACVDFKTWMRTQQKRDTKFREDCPPDREELGRHSWAVLHTLAAYYPDLPTPEQQQDMAQFIHLFSKFYPCEECAEDLRKR

SEQ ID NO: 46187 - protein, 85 aa, Homo sapiens
MLLLEVISGERLAKPERGKMRVHKISNVNKALDFIASKGVKLVSIGAEEIVDGNVKMTLGMIWTIILRFAIQDISVEETSAKEGL

SEQ ID NO: 46188 - protein, 153 aa, Homo sapiens
MAAQCVTKVALNVSCANLLDKDIGSKSDPLCVLFLNTSGQQWYEVERTERIKNCLNPQFSKTFIIDYYFEVVQKLKFGVYDIDNKTIELSDDDFLGECECTLGQIVSSKKLTRPLVMKTGRPAGKGSITISAEEIKDNRVVLFEMEARKLDNK

SEQ ID NO: 46189 - protein, 58 aa, Homo sapiens
MWAVLRLALRPCARASPAGPRAYHGDSVASLGTQPDLGSALYQVSISGIIPVCRLPVI

SEQ ID NO: 46190 - protein, 272 aa, Homo sapiens
MAGSQKEEIMPPQQGVPFQESGCWGSMGAQSRERSGRDHSGTWICAGGSQETFHLGAPVETTCLAASLLTPRHVGPQACGAERAFGSWEEHPAEEAAPGAQRHLWLQRVPYHEEPEARRGERQREVMQRDIAAGDFIEHAEFSGNLYGTSKVAVQAVQAMNRICVLDVDLQGVRNIKATDLRPIYISVQPPSLHVLEQRLRQRNTETEESLVKRLAAAQADMESRNQESSKDRRLRLAVCSRHPGPIQDQGSSIEPPPWQAIRQLCALGQHV

SEQ ID NO: 46191 - protein, 56 aa, Homo sapiens
  MOD_RES (1)..(1): Any amino acid
XDVSVTAYRPLGGSCEGVDLIDNPVIKRIAKEHDFDPISNPEECDSDPRIYHPKSH

SEQ ID NO: 46192 - protein, 228 aa, Homo sapiens
MAAPGPALCLFDVDGTLTAPRQKITKEMDDFLQKLRQKIKIGVVGGSDFEKVQEQLGNDVVEKYDYVFPENGLVAYKDGKLLCRQNIQSHLGEALIQDLINYCLSYIAKIKLPKKRGTFIEFRNGMLNVSPIGRSCSQEERIEFYELDKKENIRQKFVADLRKEFAGKGLTFSIGGQISFDVFPDGWDKRYCLRHVENDGYKTIYFFGDKTMPVSREVFVHLHCCICA

SEQ ID NO: 46193 - protein, 29 aa, Homo sapiens
MQHNEGQERSSNNFNYGAYHSLEAIYHEM

SEQ ID NO: 46194 - protein, 116 aa, Homo sapiens
MQPTATMATAATTTTTTTATVALTTSWDNATGRPTAEPDPILDNYVLLVVVMSLFVGGTLVVLSGVLLLCKRCWDVHQRLNRAMEEAEKTTTTYLDNGTHPAQDWAQLDSDSSLFP

SEQ ID NO: 46195 - protein, 146 aa, Homo sapiens
MYVWPCAVVLAQYLWFHRRSLPGKAILEIGAGVSLPGILAAKCGAEVILSDSSELPHCLEVCRQSCQMNNLPHLQVVGLTWGHISWDLLALPPQDIILASDVFFEPEDFEDILATIYFLMHKNPKVQLWSTYQVRRQVWMTLTFYM

SEQ ID NO: 46196 - protein, 170 aa, Homo sapiens
MRRGRVRILLGQNRDGIVFSTDDYFHHQDGYRYNVNQLGDAHDWNQNRAKQAIDQGRSPVIIDNTNIQAWEMKPYVEVAIGKGYRVEFHEPETWWKFDPEELEKRNKHGVSRKKIAQMLDRYEYQMSISIVMNSVEPSHKSTQRPPPPQGRQRWGGSLGSHNRVCVTNNH

SEQ ID NO: 46197 - protein, 13 aa, Homo sapiens
METDLNSQDRKDL

SEQ ID NO: 46198 - protein, 347 aa, Homo sapiens
MAESVERLQQRVQELERELAQERSLQVPRSGDGGGGRVRIEKMSSEVVDSNPYSRLMALKRMGIVSDYEKIRTFAVAIVGVGGVGSVTAEMLTRCGIGKLLLFDYDKVELANMNRLFFQPHQAGLSKVQAAEHTLRNINPDVLFEVHNYNITTVENFQHFMDRISNGGLEEGKPVDLVLSCVDNFEARMTINTACNELGQTWMESGVSENAVSGHIQLIIPGESACFACAPPLVVAANIDEKTLKREGVCAASLPTTMGVVAGILVQNVLKFLLNFGTVSFYLGYNAMQDFFPTMSMKPNPQCDDRNCRKQQEEYKKKVAALPKQEVIQEEEEIIHEDNEWARRFCH

SEQ ID NO: 46199 - protein, 127 aa, Homo sapiens
  MOD_RES (1)..(1): Any amino acid
XPIADVSIVYDQQSRRSRGFAFVYFENVDDAKEAKERANGMELDGRRIRVDFSITKRPHTPTPGIYMGRPTYGSSRRRDYYDRGYDRGYDDRDYYSRSYRRRSPSPYYSRGGYRSRSRSRSYSPRRY

SEQ ID NO: 46200 - protein, 218 aa, Homo sapiens
  MOD_RES (1)..(1): Any amino acid
XKTYRMEPAGSQGVWGLDDFQFLPFIWGSSQLIDHPYLEPRHFVDEKAVNENHKDYMFLECILFITEMKTGPFAEHSNQLWNISAVPSWSKVNQGLIRMYKAEVSGGWPVCPSLLPHLVLGWGQSKRCGTWGSCFLLPHCFALNLRPAPLTLGASESPIWGMGSQRSTSHPSPEKLQSSSVLMSLEAEARTCCMGSGGDGGLPSPLSSGQRLLKARAV

SEQ ID NO: 46201 - protein, 196 aa, Homo sapiens
MEMQSPIVQRQERQVRDRGVTRSKAEKVRPPTVPVPQVDIVPGRLSEAEWMALTALEEGEDVVGDILADLLARVMDSAFKVYLTQQCIPFTISQAREAMLQITEWRFLARDEGESAVAEDPTWGEDEEPSACTTDSWAQGSVPVLHASTSEGLENFQGEVHSSGASPDSSAIAPALPFPTSHCPSAFPQDPGGVDR

SEQ ID NO: 46202 - protein, 142 aa, Homo sapiens
MPRTKQIHPRNLRDKIEEAQKELNGAEVSKKEILQAGVKGTSESLKGVKRKKIVAENHLKKIPKSPLRNPLQAKHKQNTEESSFAVLHSASESHKKQNYIPVKNGKQFTKQNGETPGIIAEASKSEESVSPKKPLFLQQPSE

SEQ ID NO: 46203 - protein, 50 aa, Homo sapiens
EAKGDFSSFLGPLYDRTKEQRATNEVVRSDLKKLPALPTQALKEHPSLAY

SEQ ID NO: 46204 - protein, 327 aa, Homo sapiens [sequence omitted]

SEQ ID NO: 46205 - protein, 191 aa, Homo sapiens
QSQTLRDMVKLSMRVCVCRPGGEEEWVDSSELVPGDCLVLPQEGGLMPCDAALVAGECMVNESSLTGESIPVLKTALPEGLGPYCAETHRRHTLFCGTLILQARAYVGPHVLAVVTRTGGLVSSILHPRPINFKFYKHSMKFVAALSVLALLGTIYSIFILYRNRVPLNEIVIRALDLVTVVVPPALPAAM

SEQ ID NO: 46206 - protein, 41 aa, Homo sapiens
MDVLSPGQGNNTTSPPAPFETGGNTTGISDVTVSYQVITSL

SEQ ID NO: 46207 - protein, 113 aa, Homo sapiens
MGTNEAAIIEILSGRTSDERQQIKQKYKATYGKELEEVLKSELSGNFEKTALALLDRPSEYAARQLQKAMKGLGTDESVLIEVLCTRTNKEIIAIKEAYQRLFDRSLESDVKG

SEQ ID NO: 46208 - protein, 225 aa, Homo sapiens
DPNHSKMRLRDHSSERSEVLKHHTDMSSSSYLAATHHPPHSPLVRQLSTSSDSPAPASSSSQVTASTSPVRRRRGESSFDINNIVIPMSVAATTRVEKLQYKEILTPSWREVDLQSLKGSPDEENEEIEDLSDAAFAALHAKCEEMERARWLWTTSVPPQRRGSRSYRSSDGRTTPQLGSANPSTPQPASPDVSSSHSLSEYSHGQSPRSPISPELHSAPLTPVA

SEQ ID NO: 46209 - protein, 239 aa, Homo sapiens
RLPRALCVHAAKTSKLSGPWSRPAAFMSTLLINQPQYAWLKELGLREENEGVYNGSWGGRGEVITTYCPANNEPIARVRQASVADYEETVKKAREAWKIWADVSLEMGKILVEGVGEVQEYVDICDYAVGLSRMIGGPILPSERSGHALIEQWNPVGLVGIITAFNFPVAVYGWNNAIAMICGNVCLWKGAPTTSLISVAVTKIIAKVLEDNKLPGAICSLTCGGADIGTAMAKDERVN

SEQ ID NO: 46210 - protein, 11 aa, Homo sapiens
MIGFLTEDKKK

SEQ ID NO: 46211 - protein, 287 aa, Homo sapiens
MAAASYDQLLKQVEALKMENSNLRQELEDNSNHLTKLETEASNMKEVLKQLQGSIEDEAMASSGQIDLLERLKELNLDSSNFPGVKLRSKMSLRSYGSREGSVSSRSGECSPVPMGSFPRRGFVNGSRESTGYLEELEKERSLLLADLDKEEKEKDWYYAQLQNLTKRIDSLPLTENFSLQTDMTRRQLEYEARQIRVAMEEQLGTCQDMEKRAQRRIARIQQIEKDILRIRQLLQSQATEAERSSQNKHETGSHDAERQNEGQGVGEINMATSGNGQIEKMRMFEC

SEQ ID NO: 46212 - protein, 153 aa, Homo sapiens
VPASCAVSATYERSPSPAHLPDDPKVAEKQRETHSVDRLPSALTATACKSVQVNGAATELRKPSYAEICQRTSKEPPSSPLQPQKEQKPNTVGCGKEEKKLAEPAERYREPPALKSTPGAPRDQRRPAGGRPSPSAMGKRLSREQSTPPKSPQ

SEQ ID NO: 46213 - protein, 172 aa, Homo sapiens
MWTLVSWVALTAGLVAGTRCPDGQFCPVACCLDPGGASYSCCRPLLDKWPTTLSRHLGGPCQVDAHCSAGHSCIFTVSGTSSCCPFPEASCCEDRVHCCPHGAFCDLVHTRCITPTGTHPLAKKLPAQRTNRAVALSSSVMCPDARSRCPDGSTCCELPSGKYGCCPMPNAT

SEQ ID NO: 46214 - protein, 131 aa, Homo sapiens
MGKKLDLSKLTDEEAQHVLEVVQRDFDLRRKEEERLEALKGKIKKESSKRELLSDTAHLNETHCARCLQPYQLLVNSKRQCLECGLFTCKSCGRVHPEEQGWICDPCHLARVVKIGSLEWYYEHVKARFKR

SEQ ID NO: 46215 - protein, 221 aa, Homo sapiens
MSTADALDDENTFKILVATDIHLGFMEKDAVRGNDTFVTLDEILRLAQENEVDFILLGGDLFHENKPSRKTLHTCLELLRKYCMGDRPVQFEILSDQSVNFGFSKFPWVNYQDGNLNISIPVFSIHGNHDDPTGADALCALDILSCAGFVNHFGRSMSVEKIDISPVLLQKGSTKIALYGLGSIPDERLYRMFVNKKVTMLRPKEDENSWFNLFVIHQNRV

SEQ ID NO: 46216 - protein, 276 aa, Homo sapiens
MEIVWEVLFLLQANFIVCISAQQNSPKIHEGWWAYKEVVQGSFVPVPSFWGLVNSAWNLCSVGKRQSPVNIETSHMIFDPFLTPLRINTGGRKVSGTMYNTGRHVSLRLDKEHLVNISGGPMTYSHRLEEIRLHFGSEDSQGSEHLLNGQAFSGEVQLIHYNHELYTNVTEAAKSPNGLVVVSIFIKVSDSSNPFLNRMLNRDTITRITYKNDAYLLQGLNIEELYPETSSFITYDGSMTIPPCYETASWIIMNKPVYITRMQMHSLRLLSQNQPS

SEQ ID NO: 46217 - protein, 43 aa, Homo sapiens
MSVPGPSSPDGALTRPPYCLEAGEPTPEPSCIVRHTGTRDFKI

SEQ ID NO: 46218 - protein, 10 aa, Homo sapiens
MSCGNEFVET

SEQ ID NO: 46219 - protein, 56 aa, Homo sapiens
MAAPRRGRGSSTVLSSVPLQMLFYLSGTYYALYFLATSASQAGRPGARVDSGFLKQ

SEQ ID NO: 46220 - protein, 154 aa, Homo sapiens
MPCCSHRRCREDPGTSESQEMEEWALLDISQRKLYKEVMLETFRNLTSVGKSWKDQNIEYEYQNPRRNFRSLIEKKVNEIKDDSHCGETFTQVPDDRLNFQEKKASPEIKSCDSFVCGEVGLGNSSFNMNIRGDIGHKAYEYQEYGPKPCKCQQ

SEQ ID NO: 46221 - protein, 575 aa, Homo sapiens
MPPGKVLQPVLKMKVDELFLYWLSEASTQRMLQDCLRRIKAPGRDQPTPGDGEQPGAWPTAPLAAPRPSGLEPPGTPGPGPALPLGAASSPRNAPHVRGTRRSAGTRVVQTRKEEPLPPATSQSIPTFYFPRGRPQDSVNVDAVISKIESTFARFPHERATMDDMGLVAKACGCPLYWKGPLFYGAGGERTGSVSVHKFVAMWRKILQNCHDDAAKFVHLLMSPGCNYLVQEDFVPFLQDVVNTHPGLSFLKEASEFHSRYITTVIQRIFYAVNRSWSGRITCAELRRSSFLQNVALLEEEADINQLTEFFSYEHFYVIYCKFGELDTDHDLLIDADDLARHNDHALSTKMIDRIFSGAVTRGRKVQKEGKISYADFVWFLISEEDKKTPTSIEYWFRCMDLDGDGALSMFELEYFYEEQCRRLDSMAIEALPFQDCLCQMLDLVKPRTEGKITLQDLKRCKLANVFFDTFFNIEKYLDHEQKEQISLLRDGDSGGPELSDWEKYAAEEYDILVAEETAGEPWEDGFEAELSPVEQKLSALRSPLAQRPFFEAPSPLGAVDLYEYACGDEDLEPL

SEQ ID NO: 46222 - protein, 221 aa, Homo sapiens
GKLPVLLLGRSSELRPGEFVVAIGSPFSLQNTVTTGIVSTTQRGGKELGLRNSDMDYIQTDAIINYGNSGGPLVNLDGEVIGINTLKVTAGISFAIPSDKIKKFLTESHDRQAKGKAITKKKYIGIRMMSLTSSKAKELKDRHRDFPDVISGAYIIEVIPDTPAEAGGLKENDVIISINGQSVVSANDVSDVIKRESTLNMVVRRGNEDIMITVIPEEIDP

SEQ ID NO: 46223 - protein, 191 aa, Homo sapiens
  MOD_RES (1)..(1): Any amino acid
XAKREGRGKRGAWAAPAGVLGGRPRGEPPCLPSGPQRPPLPRRMRFMLLFSRQGKLRLQKWYLATSDKERKKMVRELMQVVLARKPKMCSFLEWRDLKVVYKRYASLYFCCAIEGQDNELITLELIHRYVELLDKYFGSVCELDIIFNFEKAYFILDEFLMGGDVQDTSKKSVLKAIEQADLLQEEDESPR

SEQ ID NO: 46224 - protein, 113 aa, Homo sapiens
MWTFVTQLLVTLVLLSFFLVSCQNVMHIVRGSLCFVLKHIHQELDKELGESEGLSDDEETISTRVVRRRVFLKGNEFQNIPGEQVTEEQFTDEQGNIVTKKVELRGSGLQPDL

SEQ ID NO: 46225 - protein, 348 aa, Homo sapiens
MSEFWLISAPGDKENLQALERMNTVTSKSNLSYNTKFAIPDFKVGTLDSLVGLSDELGKLDTFAESLIRRMAQSVVEVMEDSKGKVQEHLLANGVDLTSFVTHFEWDMAKYPVKQPLVSVVDTIAKQLAQIEMDLKSRTAAYNTLKTNLENLEKKSMGNLFTRTLSDIVSKEDFVLDSEYLVTLLVIVPKPNYSQWQKTYESLSDMVVPRSTKLITEDKEGGLFTVTLFRKVIEDFKTKAKENKFTVREFYYDEKEIEREREEMARLLSDKKQQYQTSCVALKKGSSTFPDHKVKVTPLGNPDRPAAGQTDRERESEGEGEGPLLRWLKVNFSEAFIAWIHIKALRVF

SEQ ID NO: 46226 - protein, 1519 aa, Homo sapiens
MKPSFPPSTSAVKVNLSEKFTAAATSTPVSSSQSAPPMSPFSSASKPAASGPLSHPTPLSAPPSSVPLKSSVLPSPSGRSAQGSSSPVPSMVQKSPRITPPAAKPGSPQAKSLQPAVAEKQGHQWKDSDPVMAGIGEEIAHFQKELEELKARTSKACFQVGTSEEMKMLRTESDDLHTFLLEIKETTESLHGDISSLKTTLLEGFAGVEEAREQNERNRDSGYLHLLYKRPLDPKSEAQLQEIRRLHQYVKFAVQDVNDVLDLEWDQHLEQKKKQRHLLVPERETLFNTLANNREIINQQRKRLNHLVDSLQQLRLYKQTSLWSLSSAVPSQSSIHSFDSDLESLCNALLKTTIESHTKSLPKVPAKLSPMKQAQLRNFLAKRKTPPVRSTAPASLSRSAFLSQRYYEDLDEVSSTSSVSQSLESEDARTSCKDDEAVVQAPRHAPVVRTPSIQPSLLPHAAPFAKSHLVHGSSPGVMGTSVATSASKIIPQGADSTMLATKTVKHGAPSPSHPISAPQAAAAAALRRQMASQAPAVNTLTESTLKNVPQVVNVQELKNNPATPSTAMGSSVPYSTAKTPHPVLTPVAANQAKQGSLINSLKPSGPTPASGQLSSGDKASGTAKIETAVTSTPSASGQFSKPFSFSPSGTGFNFGIITPTPSSNFTAAQGATPSTKESSQPDAFSSGGGSKPSYEAIPESSPPSGITSASNTTPGEPAASSSRPVAPSGTALSTTSSKLETPPSKLGELLFPSSLAGETLGSFSGLRVGQADDSTKPTNKASSTSLTSTQPTKTSGVPSGFNFTAPPVLGKHTEPPVTSSATTTSVAPPAATSTSSTAVFGSLPVTSAGSSGVISFGGTSLSAGKTSFSFGSQQTNSTVPPSAPPPTTAATPLPTSFPTLSFGSLLSSATTPSLPMSAGRSTEEATSSALPEKPGDSEVSASAASLLEEQQSAQLPQAPPQTSDSVKKEPVLAQPAVSNSGTAASSTSLVALSAEATPATTGVPDARTEAVPPASSFSVPGQTAVTAAAISSAGPVAVETSSTPIASSTTSIVAPGPSAEAAAFGTVTSGSSVFAQPPAASSSSAFNQLTNNTATAPSATPVFGQVAASTAPSLFGQQTGSTASTAAATPQVSSSGFSSPAFGTTAPGVFGQTTFGQASVFGQSASSAASVFSFSQPGFSSVPAFGQPASSTPTSTSGSVFGAASSTSSSSSFSFGQSSPNTGGGLFGQSNAPAFGQSPGFGQGGSVFGGTSAATTTAATSGFSFCQASGFGSSNTGSVFGQAASTGGIVFGQQSSSSSGSVFGSGNTGRGGGFFSGLGGKPSQDAANKNPFSSASGGFGSTATSNTSNLFGNSGAKTFGGFASSSFGEQKPTGTFSSGGGSVASQGFGFSSPNKTGGFGAAPVFGSPPTFGGSPGFGGVPAFGSAPAFTSPLGSTGGKVFGEGTAAASAGGFGFGSSSNTTSFGTLASQNAPTFGSLSQQTSGFGTQSSGFSGFGSGTGGFSFGSNNSSVQGFGGWRS

SEQ ID NO: 46227 - protein, 102 aa, Homo sapiens
MEALSRAGQEMSLAALKQHDPYITSIADLTGQVALYTFCPKANQWEKTDIEGTLFVYRRSASPYHGFTIVNRLNMHNLVEPVNKDLEFQLHEPFLLYRNASC

SEQ ID NO: 46228 - protein, 58 aa, Homo sapiens
MAPEENAGTELLLQSFERRFLAARTLRSFPWQAVIVLVTGTQLPSPILKSQRRQDRRA

SEQ ID NO: 46229 - protein, 84 aa, Homo sapiens
MLKAIPSFLNSFNRLVFSVMREGRQKDKGSIDDLPTVLKCARLVERMYSHIAARAEEFAVFSPFMVAQYVLEVQKVTLYPAVKS

SEQ ID NO: 46230 - protein, 648 aa, Homo sapiens
MDRGSLYAQPQLPSPAQRKSLRERWLMDGAAAVPEPSEDPTSKDPQSPEGQAQARIRNLEDSLFTLQSQLQLLQSASTGAQHKPSGRPSWRRQGHRPLSQSIVEAGSVGQTDLNKRASLPAGLVGTPPESPSEPREDVLGFLPGPRQVPGAAGDSSEANGPCPSPIPTPEQGLSQRAVPSEGRVGEAKGGGVVSVVWEGLRATEDCATGATGPELEAKVEEVVLEAIGDRKGAGSLELPAWVKEDRGIVEVVWEGVGGSDAEAMGEIGRVPEVVQTSSPRLQERLEAAASIEGEDVPQGSPEGDGQGGSGGEEGSFIWVERVTLSEEWEELLVEGLEGPEVAGRERGDESPLGAEGAKTGGGEETWEAEKRKAEESMGIGSEEKPGTGRDEAEMSPVVERKGGEKKLELESRGSAEKLGTEREGGEEPLGIERKVEGHLRAEKEGDEEKRGAEEEEVEEPLGVEKKGGEEEPEATKEPLEAERKGGEETLEAEKRGGEESLETEKTQGTEGDLNLEQGSREGSESQAEEMNEAGPPLEANTETRPEKEGPQPQEKPVGALEEEGVKPQTAAEGQGPLGDATPLLAETPAPEQPAECQPLLQGEGPSANPSAHPVPTYAPARQPEPSAPTEGEEASGPKQKTCQCCAVM

SEQ ID NO: 46231 - protein, 153 aa, Homo sapiens
MRKDTDDIESPKRSIRDSGYIDCWDSERSDSLSPPRHGRDDSFDSLDSFGSRSRQTPSPDVVLRGSSDGRGSDSESDLPHRKLPDVKKDDMSARRTSHGEPKSAVPFNQYLPNKSNQTAYVPAPLRKKKAEREEYRKSWSTATSPLGGERPFR

SEQ ID NO: 46232 - protein, 1387 aa, Homo sapiens
MVKLANPLYTEWILEAIQKIKKQKQRPSEERICHAVSTSHGLDKKTVSEQLELSVQDGSVLKVTNKGLASYKDPDNPGRFSSVKPGTFPKSAKGSRGSCNDLRNVDWNKLLRRAIEGLEEPNGSSLKNIEKYLRSQSDLTSTTNNPAFQQRLRLGAKRAVNNGRLLKDGPQYRVNYGSLDGKGAPQYPSAFPSSLPPVSLLPHEKDQPRADPIPICSFCLGTKESNREKKPEELLSCADCGSSGHPSCLKFCPELTTNVKALRWQCIECKTCSACRVQGRNADNMLFCDSCDRGFHMECCDPPLSRMPKGMWICQVCRPKKKGRKLLHEKAAQIKRRYAKPIGRPKNKLKQRLLSVTSDEGSMNAFTGRGSPGRGQKTKVCTTPSSGHAASGKDSSSRLAVTDPTRPGATTKITTTSTYISASTLKVNKKTKGLIDGLTKFFTPSPDGRRSRGEIIDFSKHYRPRKKVSQKQSCTSHVLATGTTQKLKPPPSSLPPPTPISGQSPSSQKSSTATSSPSPQSSSSQCSVPSLSSLTTNSQLKALFDGLSHIYTTQGQSRKKGHPSYAPPKRMRRKTELSSTAKSKAHFFGKRDIRSRFISHSSSSSWGMARGSIFKAIAHFKRTTFLKKHRMLGRLKYKVTPQMGTPSPGKGSLTDGRIKPDQDDDTEIKINIKQESADVNVIGNKDVVTEEDLDVFKQAQELSWEKIECESGVEDCGRYPSVIEFGKYEIQTWYSSPYPQEYARLPKLYLCEFCLKYMKSKNILLRHSKKCGWFHPPANEIYRRKDLSVFEVDGNMSKIYCQNLCLLAKLFLDHKTLYYDVEPFLFYVLTKNDEKGCHLVGYFSKEKLCQQKYNVSCIMIMPQHQRQGFGRFLIDFSYLLSRREGQAGSPEKPLSDLGRLSYLAYWKSVILEYLYHHHERHISIKAISRATGMCPHDIATTLQHLHMIDKRDGRFVIIRREKLILSHMEKLKTCSRANELDPDSLRWTPILISNAAVSEEEREAEKEAERLMEQASCWEKEEQEILSTRANSRQSPAKVQSKNKYLHSPESRPVTGERGQLLELSKESSEEEEEEEDEEEEEEEEEEEEDEEEEEEEEEEEEEENIQSSPPRLTKPQSVAIKRKRPFVLKKKRGRKRRRINSSVTTETISETTEVLNEPFDNSDEERPMPQLEPTCEIEVEEDGRKPVLRKAFQHQPGKKRQTEEEEGKDNHCFKNADPCRNNMNDDSSNLKEGSKDNPEPLKCKQVWPKGTKRGLSKWRQNKERKTGFKLNLYTPPETPMEPDEQVTVEEQKETSEGKTSPSPIRIEEEVKETGEALLPQEENRREETCAPVSPNTSPGEKPEDDLIKPEEEEEEEEEEEEEEEEEEGEEEEGGGNVEKDPDGAKS

SEQ ID NO: 46233 - protein, 513 aa, Homo sapiens
MAELQMLLEEEIPGGRRALFDSYTNLERVADYCENNYIQSADKQRALEETKAYTTQSLASVAYLINTLANNVLQMLDIQASQLRRMESSINHISQTVDIHKEKVARREIGILTTNKNTSRTHKIIAPANLERPVRYIRKPIDYTILDDIGHGVKWLLRFKVSTQNMKMGGLPRTTPPTQKPPSPPMSGKGTLGRHSPYRTLEPVRPPVVPNDYVPSPTRNMAPSQQSPVRTASVNQRNRTYSSSGSSGGSHPSSRSSSRENSGSGSVGVPIAVPTPSPPSVFPAPAGSAGTPPLPATSASAPAPLVPATVPSSTAPDAAAGGAQTLADGFTSPTPPVVSSTPPTGHPVQFYSMNRPASRHTPPTIGGSLPYRRPPSITSQTSLQNQMNGGPFYSQNPVSDTPPPPPPVEEPVFDESPPPPPPPEDYEEEEAAVVEYSDPYAEEDPPWAPRSYLEKVVAIYDYTKDKEDELSFQEGAIIYVIKKNDDGWYEGVMNGVTGLFPGNYVESIMHYSE

SEQ ID NO: 46234 - protein, 525 aa, Homo sapiens
  MOD_RES (1)..(1): Any amino acid
XASKTVQEVHPGEPPFDLELFYVKYRNFSYLHCKWATMEELEKDPRIAQKIKRFRNKQAQMKHIFTEPDEDLFNPDYVEVDRILEVAHTKDAETGEEVTHYLVKWCSLPYEESTWELEEDVDPAKVKEFESLQVLPEIKHVERPASDSWQKLEKSREYKNSNQLREYQLEGMNWLLFNWYNRKNCILADEMGLGKTIQSITFLSEIFLRGIHGPFLIIAPLSTITNWEREFRTWTEMNAIVYHGSQISRQMIQQYEMVYRDAQGNPLSGVFKFHVVITTFEMILADCPELKKIHWGRWKDILTHGRFKWHLNEKDMEMICRALLVYCVKHYKGDEKIKSFIWELITPTKDGQAQTLQNHSGLSAPVPRGRKGKKTKNQLLIPELKDADWLATCNPEVVLHDDGYKKHLKQHCNKVLLRVRMLYYLKAEILGEAAEKAFEGSPARELDVPLPDIDYMEIPVDWWDAEADKSLLIGVFKHGYERYNAMRADPALCFLEKVGMPDEKSLSAEQGVTDGTSDIPERQHR

SEQ ID NO: 46235 - protein, 177 aa, Homo sapiens
  MOD_RES (1)..(1): Any amino acid
XALHTKRPQVVTKYGTLQGKQMHVGKTPIQVFLGVPFSRPPLGILRFAPPEPPEPWKGIRDATTYPPGWSLALSPGWSAVARSRLTATSASRVQASLLPQPLSIWGYRCLQESWGQLASMYVSTRERYKWLRFSEDCLYLNVYAPARAPGDPQLPVSDGLVPGRRLHRGRCFFVRGL

SEQ ID NO: 46236 - protein, 88 aa, Homo sapiens
MNDSLFVSLDRLLLEFVFQYEQDISTKEEMIQRINKCCEDIKENKVTICRIHETINATDEEIDHYCKHSEEIKDNCRNWKPTCDVFRK

SEQ ID NO: 46237 - protein, 189 aa, Homo sapiens
MADLDSPPKLSGVQQPSEGVGGGRCSEISAELIRSLTELQELEAVYERLCGEEKVVERELDALLEQQNTIESKMVTLHRMGPNLQLIEGDAKQLAGMITFTCNLAENVSSKVRQLDLAKNRLYQAIQRADDILDLKFCMDGVQTALRSEDYEQAAAHTHRYLCLDKSVICPRWSASSRSSHCWVCMRRD

SEQ ID NO: 46238 - protein, 99 aa, Homo sapiens
  MOD_RES (1)..(1): Any amino acid
XLLTPQGVKEVFQLQRPQGRERLRRLLNWEEFDEQRDSRRSILLDTLYESIIFAVGKGFPWVEVAQVVKFTEELLRETKGAGLQGLGDHLQEVPSSQCK

SEQ ID NO: 46239 - protein, 222 aa, Homo sapiens
LKKKELTLKDVECKFSKMKTAYEEVTTELEEFKEAFAGAVKANNSMSKKLMKSDKKIAVISTKLFTEKQRMKYFLSTLPTRPEPELPCVENLNSIELNRKYIPKTAIRIPTSNPQTSNNCKNFLTEMELDRVEQIITGTKKSFAMLSTCSRLLSFVESTAPRKHRRALPIMRSLVPNRRTTVASTESRTNRPGGVRSPGLQLEGTSTLQWEQGPIAHPRHRC

SEQ ID NO: 46240 - protein, 83 aa, Homo sapiens
HLADRVAMYVHAYTLYSAVRPFGCRIYIVHDEVKDKAFELELSWVGELTNGRHEIVPKDIREEAEKYAKESLKEEDESDDDNM

SEQ ID NO: 46241 - protein, 133 aa, Homo sapiens
MESSSSSNSYFSVGPTSPSAVVLLYSKELKKWDEFEDILEERRHVSDLKFAMKCYTPLVYKGITPCKPIDIKCSVLNSEEIHYVIKQTDQEKKQPGICQLTFSVPITRCLAAPGRVAFQGIPSICGCPPRGSE

SEQ ID NO: 46242 - protein, 148 aa, Homo sapiens
MSQSKHTEARELMYSGALLFFSHGQQNSAADLSMLVLESLEKAEVEVADELLENLAKVFSLMDPNSPERVTFVSRALKWSSGGSGKLGHPRLHQLLALTLWKEQNYCESRYHFLHSADGEGCANMLVEYSTSRGFRSEVDMFVAQAVL

SEQ ID NO: 46243 - protein, 1434 aa, Homo sapiens
MAAVGSGGYARNDAGEKLPSVMAGVPARRGQSSPPPAPPICLRRRTRLSTASEETVQNRVSLEKVLGITAQNSSGLTCDPGTGHVAYLAGCVVVILDPKENKQQHIFNTARKSLSALAFSPDGKYIVTGENGHRPAVRIWDVEEKNQVAEMLGHKYGVACVAFSPNMKHIVSMGYQHDMVLNVWDWKKDIVVASNKVSCRVIALSFSEDSSYFVTVGNRHVRFWFLEVSTETKVTSTVPLVGRSGILGELHNNIFCGVACGRGRMAGSTFCVSYSGLLCQFNEKRVLEKWINLKVSLSSCLCVSQELIFCGCTDGIVRIFQAHSLHYLANLPKPHYLGVDVAQGLEPSFLFHRKAEAVYPDTVALTFDPIHQWLSCVYKDHSIYIWDVKDINRVGKVWSELFHSSYVWNVEVYPEFEDQRACLPSGSFLTCSSDNTIRFWNLDSSPDSHWQKNIFSNTLLKVVYVENDIQHLQDMSHFPDRGSENGTPMDVKAGVRVMQVSPDGQHLASGDRSGNLRIHELHFMDELVKVEAHDAEVLCLEYSKPETGLTLLASASRDRLIHVLNVEKNYNLEQTLDDHSSSITAIKFAGNRDIQMISCGADKSIYFRSAQQGSDGLHFVRTHHVAEKTTLYDMDIDITQKYVAVACQDRNVRVYNTVNGKQKKCYKGSQGDEGSLLKVHVDPSGTFLATSCSDKSISVIDFYSGECIAKMFGHSEIITSMKFTYDCHHLITVSGDSCVFIWHLGPEITNCMKQHLLEIDHRQQQQHTNDKKRSGHPRQDTYVSTPSEIHSLSPGEQTEDDLEEECEPEEMLKTPSKDSLDPDPRCLLTNGKLPLWAKRLLGDDDVADGLAFHAKRSYQPHGRWAERAGQEPLKTILDAQDLDCYFTPMKPESLENSILDSLEPQSLASLLSESESPQEAGRGHPSFLPQQKESSEASELILYSLEAEVTVTGTDSQYCRKEVEAGPGDQQGDSYLRVSSDSPKDQSPPEDSGESEADLECSFAAIHSPAPPPDPAPRFATSLPHFPGCAGPTEDELSLPEGPSVPSSSLPQTPEQEKFLRHHFETLTESPCRALGDVEASEAEDHFFNPRLSISTQFLSSLQKASRFTHTFPPRATQCLVKSPEVKLMDRGGSQPRAGTGYASPDRTHVLAAGKAEETLEAWRPPPPCLTSLASCVPASSVLPTDRNLPTPTSAPTPGLAQGVHAPSTCSYMEATASSRARISRSISLGDSEGPIVATLAQPLRRPSSVGELASLGQELQAITTATTPSLDSEGQEPALRSWGNHEARANLRLTLSSACDGLLQPPVDTQPGVTVPAVSFPAPSPVEESALRLHGSAFRPSLPAPESPGLPAHPSNPQLPEARPGIPGGTASLLEPTSGALGLLQGSPARWSEPWVPVEALPPSPLELSRVGNILHRLQTTFQEALDLYRVVS

SEQ ID NO: 46244 - protein, 52 aa, Homo sapiens
MGPLSAPPCTQRITWKGVLLTGCSCPKPTGPSLYLVSQSILQDPMNVKYGTQ

SEQ ID NO: 46245 - protein, 118 aa, Homo sapiens
  MOD_RES (1)..(1): Any amino acid
XIRELIEVDDVMEDDSLRFGPNGGLVFCMEYFANNFDWLENCLGHVEDDYILFDCPGQIELYTHLPVMKQLVQQLEQWEFRVCGVFLVDSQFMVESFKIDDYSMVRFLPYDQSDEESM

SEQ ID NO: 46246 - protein, 59 aa, Homo sapiens
MTHEEHHAAKTLGIGKAIAVLTSGGDAQEDICVRSNGPPLWIPGPCHLSVLWGRLGFYS

SEQ ID NO: 46247 - protein, 76 aa, Homo sapiens
  MOD_RES (1)..(1): Any amino acid
XELWGLAIHASKSQFLTCGHDKHATLWDAVGHRPVWDKIIEGLWLQSEHSLGGGLCLTQKQKTWSPFTQMETNSSL

SEQ ID NO: 46248 - protein, 39 aa, Homo sapiens
  MOD_RES (1)..(1): Any amino acid
XVIGRRVEVNGEHATVRFAGVVPPVAGTRQEDPLFVRTR

SEQ ID NO: 46249 - protein, 531 aa, Homo sapiens
MRLCLGRPHPRGHSRVGKSERGRGARGLARQRTLEDEEEQERERRRRHRNLSSTTDDEAPRLSQNGDRQASASERLPSVEEAEVPKPLPPASKDEDEDIQSILRTRQERRQRRQVVEAAQAPIQERLEAEEGRNSLSPVQATQKPLVSKKELEIPPRRRLSREQRGPWALEEESLVGREPEERKKGVPEKSPVLEKSSMPKKTAPEKSLVSDKTSISEKVLASEKTSLSEKIAVSEKRNSSEKKSVLEKTSVSEKSLAPGMALGSGRRLVSEKASIFEKALASEKSPTADAKPAPKRATASEQPLAQEPPASGGSPATTKEQRGRALPGKNLPSLAKQGASDPPTVASRLPPVTLQVKIPSKEEEADMSSPTQRTYSSSLKRSSPRTISFRMKPKKENSETTLTRSASMKLPDNTVKLGEKLERYHTAIRRSESVKSRGLPCTELFVAPVGVASKRHLFEKELAGQSRAEPASSRKENLRLSGVVTSRLNLWISRTQESGDQDPQEAQKASSATERTQWGQKSDSSLDAEV

SEQ ID NO: 46250 - protein, 29 aa, Homo sapiens
MADSGLDKKSTKCPDCSSASQKDVLCVCS

SEQ ID NO: 46251 - protein, 7592 aa, Homo sapiens
MSSSDEETLSERSCRSERSCRSERSYRSERSGSLSPCPPGDTLPWNLPLHEQKKRKSQDSVLDPAERAVVRVADERDRVQKKTFTKWVNKHLMKVRKHINDLYEDLRDGHNLISLLEVLSGIKLEPAGLKTLRLVSMPSWCHTNNEEQAEEDDDDVPREKGRMRFHRLQNVQIALDFLKQRQVKLVNIRNDDITDGNPKLTLGLIWTIILHFQISDIYISGESGDMSAKEKLLLWTQKVTAGYTGIKCTNFSSCWSDGKMFNALIHRYRPDLVDMERVQIQSNRENLEQAFEVAERLGVTRLLDAEDVDVPSPDEKSVITYVSSIYDAFPKVPEGGEGISATEVDSRWQEYQSRVDSLIPWIKQHTILMSDKTFPQNPVELKALYNQYIHFKETEILAKEREKGRIEELYKLLEVWIEFGRIKLPQGYHPNDVEEEWGKLIIEMLEREKSLRPAVERLELLLQIANKIQNGALNCEEKLTLAKNTLQADAAHLESGQPVQCESDVIMYIQECEGLIRQLQVDLQILRDENYYQLEELAFRVMRLQDELVTLRLECTNLYRKGHFTSLELVPPSTLTTTHLKAEPLTKATHSSSTSWFRKPMTRAELVAISSSEDEGNLRFVYELLSWVEEMQMKLERAEWGNDLPSVELQLETQQHIHTSVEELGSSVKEARLYEGKMSQNFHTSYAETLGKLETQYCKLKETSSFRMRHLQSLHKFVSRATAELIWLNEKEEEELAYDWSDNNSNISAKRNYFSELTMELEEKQDVFRSLQDTAELLSLENHPAKQTVEAYSAAVQSQLQWMKQLCLCVEQHVKENTAYFQFFSDARELESFLRNLQDSIKRKYSCDHNTSLSRLEDLLQDSMDEKEQLIQSKSSVASLVGRSKTIVQLKPRSPDHVLKNTISVKAVCDYRQIEITICKNDECVLEDNSQRTKWKVISPTGNEAMVPSVCFLIPPPNKDAIEMASRVEQSYQKVMALWHQLHVNTKSLISWNYLRKDLDLVQTWNLEKLRSSAPGECHQIMKNLQAHYEDFLQDSRDSVLFSVADRLRLEEEVEACKARFQHLMKSMENEDKEETVAKMYISELKNIRLRLEEYEQRVVKRIQSLASSRTDRDAWQDNALRIAEQEHTQEDLQQLRSDLDAVSMKCDSFLHQSPSSSSVPTLRSELNLLVEKMDHVYGLSTVYLNKLKTVDVIVRSIQDAELLVKGYEIKLSQEEVVLADLSALEAHWSTLRHWLSDVKDKNSVFSVLDEEIAKAKVVAEQMSRLTPERNLDLERYQEKGSQLQERWHRVIAQLEIRQSELESIQEVLGDYRACHGTLIKWIEETTAQQEMMKPGQAEDSRVLSEQLSQQTALFAEIERNQTKLDQCQKFSQQYSTIVKDYELQLMTYKAFVESQQKSPGKRRRMLSSSDAITQEFMDLRTRYTALVTLTTQHVKYISDALRRLEEEEKVVEEEKQEHVEKVKELLGWVSTLARNTQGKATSSETKESTDIEKAILEQQVLSEELTTKKEQVSEAIKTSQIFLAKHGHKLSEKEKKQISEQLNALNKAYHDLCDGSANQLQQLQSQLAHQTEQKECRAVAGVIDLGTVEIFPIFKAMQKGLLDQDTGLVLLESQVIMSGLIAPETGENLSLEEGIARNLINPQMYQQLRELQDALALISRLTESRGPLSVVEAIEKRIISETVGLKILEAHLATGGFSLSPSENCINLEEAFHQGLISAWLHSVLESYLRTSKNLIDPNTAEKIGLLDLMQRCIVHQESGFKLLPVKQLAGGMVSLKSGRKVSIFRAVQEGLIDRQVTVRLLEAQLFAGGIVDPRTGHRLTVEEAVRHNLIDQDMACAILIRQLQTGGIIDTVTGQRLTIDEAVSNDLVAAKIALVILESLWSFMGLLWPESGEILPITDALEQGIVSTELAHKILSNRQHIKALFLPATTEILSWKKAIESGILDRDLANNLKSICIPDVMPHMQLADSAEQNINPGAAVLPCSKSHPKATASQSENLLFQLMTHSYINVQNGQRLLLLDKELMETLTSRDEYQTSPPKVVEIGHQRQKTPEGLQESANVKISGTFSSGWTVRLPEFQFSSQNKEYPDREDCTTEKGKKTTVETEDSSVENPEQDLFVEQKERNPNIDALKVINKVKLEVQRQLIGTQREDQTAVSVRENASRGHLLTIPPAEAEGVPLVVDKDVFSVETPKKEHQPLRNTSFTCQNEQAHTLETEYIHDETGGSHIKPQSKKLQVQVKKTLGIKLELKSETDGNVHPLDKKEMLKKTFLAKDDHKESQEAQNIAGGSMMMSEKTDEEDSGREIFLSCSHPLELLEEATLNVLSAQLLDGGIFHEQTGQKLLLNEAISRGIVPSHTAVKLMEKLNMFQGFFDSQTCESLTTEEVINEGLMDEKLLHNVLMADKAISGVLDPRTQTLCSVKDAVTVGLLDKETATRILERQVVTGGIIDLKRGKKVSVTLASTLGLVDVADQPELINLEKASKGRDAEKTVRERLISLQMETTGLIDPDSKAPLTVVQSIDRGLLEREEAVRLLTKQVVDGGIIHHISGMRLSVDNAFRHGLIGEDLAEKLKRVENLNIHQIFNPETKENISLPKAIKLDLITSDLKREIQEVQAFTGNFVDLISGQRLTLAEAKKEGLLTNEAVLSPGMMHGIVDPENCRIVPYSELVKKCKIDIESGQRYLEVIPFSDIKDGVSDKVLTLSQAIQLGKVDFASTLKVLEAQANTGGIIDTATGKRLTLASALEEKLVDENMVRIIASHQVLNGGIVDIFSDQRVTLVEAIEKRLISPELANMIQIDSSEFSDHRAQIEKQEGIEVCALQNEFLGKDMLIACNQTAEMSCNKVEESERLFQVENQSAQEKVKVRVSDGEQAKKSREISLKEFGCKDQRKPRMSSDAKEFISIINPHNLKGKSLGQVSLTHPYSECDFKLKEVARNNMGNDTNEEQEKAVTKIEIISHMKQSTSCLDSEEIRENQGEVILEVQETYCETSGKLPSEQVLQQPMNARVKSKREKREVIVEESIRTCKPAFLSEEKLYQETAIRDEHDSHIKSQPREMTSSEKGKEADTEMGFSITFKIEESSSQVVPQGISVKHLDALTLFSSKQANEGKVNNLSLCLTLKPEENLSREIACGAQSEPFPCMTPRPEGLHYQESDGKAQVTGPSQISKTDKSFQGTTRQETNYQDSWVTSKTKETKHQISSSNECKEKSYQEVSFDPARGLKLEEITVSRPDSKEVRYLEFSDRKDLHHQGSKSDDKLCGTLKSEIATQELTGEKFLEMANPNVAGLEAGSIEDIVTQRGSRVLGSFLPEKLFKGVSQKENTGQQNAIISPTVLETSEEKTVSLTVCSAVKTEKTPQEKLRESPGSEQTPFMTAPEGKGNGGVNPEPFRATQNVFTRQLCLEHDEKLVSYLSLLRNIEMRTKQIQPLELNLAELQDLLCQAKVLERELKDLTTLVSQELECVNQIIISQPQEVPAQLLKALEKDAKNLQKSLSSVSDTWNSRLLHFQNAVEIEKTKVLNQHTQLEGRLQDLRAWVGNKNLILNSKGSNSEIDVDSLNLCLQQYEDLKQPMAERKAQLDALAFDIQFFISEHAQDLSPQQNRQMLRLLNELQRSFQDILEQTAAQVDALQGHLQQMEQEALVKTLQKQQNTCHQQLEDLCSWVGQAERALAGHQGRTTQQDLSALQKNQSDLKDLQDDIQNRATSFATVVKDIEGFMEENQTKLSPRELTALREKLHQAKEQYEALQEETRVAQKELEEAVTSALQQETEKSKAAKELAENKKKIDALLDWVTSVGSSGGQLLTNLPGMEQLSGASLEKGALDTTDGYMGVNQAPEKLDKQCEMMKARHQELLSQQQNFILATQSAQAFLDQHGHNLTPEEQQMLQQKLGELKEQYSTSLAQSEAELKQVQTLQDELQKFLQDHKEFESWLERSEKELENMHKGGSSPETLPSLLKRQGSFSEDVISHKGDLRFVTISGQKVLDMENSFKEGKEPSEIGNLVKDKLKDATERYTALHSKCTRLGSHLNMLLGQYHQFQNSADSLQAWMQACEANVEKLLSDTVASDPGVLQEQLATTKQLQEELAEHQVPVEKLQKVARDIMEIEGEPAPDHRHVQETTDSILSHFQSLSYSLAERSSLLQKAIAQSQSVQESLESLLQSIGEVEQNLEGKQVSSLSSGVIQEALATNMKLKQDIARQKSSLEATREMVTRFMETADSTTAAVLQGKLAEVSQRFEQLCLQQQEKESSLKKLLPQAEMFEHLSGKLQQFMENKSRMLASGNQPDQDITHFFQQIQELNLEMEDQQENLDTLEHLVTELSSCGFALDLCQHQDRVQNLRKDFTELQKTVKEREKDASSCQEQLDEFRKLVRTFQKWLKETEGSIPPTETSMSAKELEKQIEHLKSLLDDWASKGTLVEEINCKGTSLENLIMEITAPDSQGKTGSILPSVGSSVGSVNGYHTCKDLTEIQCDMSDVNLKYEKLGGVLHERQESLQAILNRMEEVHKEANSVLQWLESKEEVLKSMDAMSSPTKTETVKAQAESNKAFLAELEQNSPKIQKVKEALAGLLVTYPNSQEAENWKKIQEELNSRWERATEVTVARQRQLEESASHLACFQAAESQLRPWLMEKELMMGVLGPLSIDPNMLNAQKQQVQFMLKEFEARRQQHEQLNEAAQGILTGPGDVSLSTSQVQKELQSINQKWVELTDKLNSRSSQIDQAIVKSTQYQELLQDLSEKVRAVGQRLSVQSAISTQPEAVKQQLEETSEIRSDLEQLDHEVKEAQTLCDELSVLIGEQYLKDELKKRLETVALPLQGLEDLAADRINRLQAALASTQQFQQMFDELRTWLDDKQSQQAKNCPISAKLERLQSQLQENEEFQKSLNQHSGSYEVIVAEGESLLLSVPPGEEKRTLQNQLVELKNHWEELSKKTADRQSRLKDCMQKAQKYQWHVEDLVPWIEDCKAKMSELRVTLDPVQLESSLLRSKAMLNEVEKRRSLLEILNSAADILINSSEADEDGIRDEKAGINQNMDAVTEELQAKTGSLEEMTQRLREFQESFKNIEKKVEGAKHQLEIFDALGSQACSNKNLEKLRAQQEVLQALEPQVDYLRNFTQGLVEDAPDGSDASQLLHQAEVAQQEFLEVKQRVNSGCVMMENKLEGIGQFHCRVREMFSQLADLDDELDGMGAIGRDTDSLQSQIEDVRLFLNKIHVLKLDIEASEAECRHMLEEEGTLDLLGLKRELEALNKQCGKLTERGKARQEQLELTLGRVEDFYRKLKGLNDATTAAEEAEALQWVVGTEVEIINQQLADFKMFQKEQVDPLQMKLQQVNGLGQGLIQSAGKDCDVQGLEHDMEEINARWNTLNKKVAQRIAQLQEALLHCGKFQDALEPLLSWLADTEELIANQKPPSAEYKVVKAQIQEQKLLQRLLDDRKATVDMLQAEGGRIAQSAELADREKITGQLESLESRWTELLSKAAARQKQLEDILVLAKQFHETAEPISDFLSVTEKKLANSEPVGTQTAKIQQQIIRHKALEEDIENHATDVHQAVKIGQSLSSLTSPAEQGVLSEKIDSLQARYSEIQDRCCRKAALLDQALSNARLFGEDEVEVLNWLAEVEDKLSSVFVKDFKQDVLHRQHADHLALNEEIVNRKKNVDQAIKNGQALLKQTTGEEVLLIQEKLDGIKTRYADITVTSSKALRTLEQARQLATKFQSTYEELTGWLREVEEELATSGGQSPTGEQIPQFQQRQKELKKEVMEHRLVLDTVNEVSRALLELVPWRAREGLDKLVSDANEQYKLVSDTIGQRVDEIDAAIQRSQQYEQAADAELAWVAETKRKLMALGPIRLEQDQTTAQLQVQKAFSIDIIRHKDSMDELFSHRSEIFGTCGEEQKTVLQEKTESLIQQYEAISLLNSERYARLERAQVLVNQFWETYEELSPWIEETRALIAQLPSPAIDHEQLRQQQEEMRQLRESIAEHKPHIDKLLKIGPQLKELNPEEGEMVEEKYQKAENMYAQIKEEVRQRALALDEAVSQSTQFHDKIEPMLETLENLSSRLRMPPLIPAEVDKIRECISDNKSATVELEKLQPSFEALKRRGEELIGRSQGADKDLAAKEIQDKLDQMVFFWEDIKARAEEREIKFLDVLELAEKFWYDMAALLTTIKDTQDIVHDLESPGIDPSIIKQQVEAAETIKEETDGLHEELEFIRILGADLIFACGETEKPEVRKSIDEMNNAWENLNKTWKERLEKLEDAMQAAVQYQDTLQAMFDWLDNTVIKLCTMPPVGTDLNTVKDQLNEMKEFKVEVYQQQIEMEKLNHQGELMLKKATDETDRDIIREPLTELKHLWENLGEKIAHRQHKLEGALLALGQFQHALEELMSWLTHTEELLDAQRPISGDPKVIEVELAKHHVLKNDVLAHQATVETVNKAGNELLESSAGDDASSLRSRLEAMNQCWESVLQKTEEREQQLQSTLQQAQGFHSEIEDFLLELTRMESQLSASKPTGGLPETAREQLDTHMELYSQLKAKEETYNQLLDKGRLMLLSRDDSGSGSKTEQSVALLEQKWHVVSSKMEERKSKLEEALNLATEFQNSLQEFINWLTLAEQSLNIASPPSLILNTVLSQIEEHKVFANEVNAHRDQIIELDQTGNQLKFLSQKQDVVLIKNLLVSVQSRWEKVVQRSIERGRSLDDARKRAKQFHEAWKKLIDWLEDAESHLDSELEISNDPDKIKLQLSKHKEFQKTLGGKQPVYDTTIRTGRALKEKTLLPEDSQKLDNFLGEVRDKWDTVCGKSVERQHKLEEALLFSGQFMDALQALVDWLYKVEPQLAEDQPVHGDLDLVMNLMDAHKVFQKELGKRTGTVQVLKRSGRELIENSRDDTTWVKGQLQELSTRWDTVCKLSVSKQSRLEQALKQAEVFRDTVHMLLEWLSEAEQTLRFRGALPDDTEALQSLIDTHKEFMKKVEEKRVDVNSAVAMGEVILAVCHPDCITTIKHWITIIRARFEEVLTWAKQHQQRLETALSELVANAELLEELLAWIQWAETTLIQRDQEPIPQNIDRVKALIAEHQTFMEEMTRKQPDVDRVTKTYKRKNIEPTHAPFIEKSRSGGRKSLSQPTPPPMPILSQSEAKNPRINQLSARWQQVWLLALERQRKLNDALDRLEELKEFANFDFDVWRKKYMRWMNHKKSRVMDFFRRIDKDQDGKITRQEFIDGILASKFPTTKLEMTAVADIFDRDGDGYIDYYEFVAALHPNKDAYRPTTDADKIEDEVTRQVAQCKCAKRFQVEQIGENKYRFFLGNQFGDSQQLRLVRILRSTVMVRVGGGWMALDEFLVKNDPCRVHHPGSKIKRSDSSSSISSQSPIARGRTNIELREKFILPEGASQGMTPFRSRGRRSKPSSRAASPTRSSSSASQSNHSCTSMPSSPATPASGTKTSLQFSRCYDKPWLVNSKAGTPIRDSHSPDLQLPTPEVIPSSGSKLKRPTPTFHSSRTSLAGDTSNSSSPASTGAKTNRADPKKSASRPGSRAGSRAGSRASSRRGSDASDFDLLETQSACSDTSESSAAGGQGNSRRGLNKPSKIPTMSKKTTTASPRTPGPKR

SEQ ID NO: 46252 - protein, 311 aa, Homo sapiens
MISQFFILSSKGDPLIYKDFRGDSGGRDVAELFYRKLTGLPGDESPVVMDYGYVQTTSTEMLRNFIQTEAVVSKPFSLFDLSSVGLFGAETQQSKVAPSSAASRPVLSSRSDQSQKNEVFLDVVERLSVLIASNGSLLKVDVQGEIRLKSFLPSGSEMRIGLTEEFCVGKSELRGYGPGIRVDEVSFHSSVNLDEFESHRILRLQPPQGELTVMRYQLSDDLPSPLPFRLFPSVQWDRGSGRLQVYLKLRCDLLSKSQALNVRLHLPLPRGVVSLSQELSSPEQKAELAEGALRWDLPRVQGGSQLSGLFQ

SEQ ID NO: 46253 - protein, 50 aa, Homo sapiens
MQVTFCRLRTHQWCFILFNVILFHALLFGTDFVEEYFLHSLPYIDVKVLE

SEQ ID NO: 46254 - protein, 69 aa, Homo sapiens
MEGKRQLEKRDFGKRLSLDSSLVEYMDSNKYIEHLLTQLEEQHRSLWREKLAVARLQREVAQRTSEGAM

SEQ ID NO: 46255 - protein, 350 aa, Homo sapiens
MSMLKPSGLKAPTKILKPGSTALKTPTAVVAPVEKTISSEKASSTPSSETQEEFVDDFRVGERVWVNGNKPGFIQFLGETQFAPGQWAGIVLDEPIGKNDGSVAGVRYFQCEPLKGIFTRPSKLTRKVQAEDEANGLQTTPASRATSPLCTSTASMVSSSPSTPSNIPQKPSQPAAKEPSATPPISNLTKTASESISNLSEAGSIKKGERELKIGDRVLVGGTKAGVVRFLGETDFAKGEWCGVELDEPLGKNDGAVAGTRYFQCQPKYGLFAPVHKVTKIGFPSTTPAKAKANAVRRVMATTSASLKRSPSASSLSSMSSVASSVSSRPSRTGLVRPLSHYLPPLPRQD

SEQ ID NO: 46256 - protein, 1056 aa, Homo sapiens
MPAIMTMLADHAARQLLDFSQKLDINLLDNVVNCLYHGEGAQQRMAQEVLTHLKEHPDAWTRVDTILEFSQNMNTKYYGLQILENVIKTRWKILPRNQCEGIKKYVVGLIIKTSSDPTCVEILKQEWPKHWPTFISDIVGASRTSESLCQNNMVILKLLSEEVFDFSSGQITQVKSKHLKDSMCNEFSQIFQLCQFVMENSQNAPLVHATLETLLRFLNWIPLGYIFETKLISTLIYKFLNVPMFRNVSLKCLTEIAGVSVSQYEEQFVTLFTLTMMQLKQMLPLNTNIRLAYSNGKDDEQNFIQNLSLFLCTFLKEHDQLIEKRLNLRETLMEALHYMLLVSEVEETEIFKICLEYWNHLAAELYRESPFSTSASPLLSGSQHFDVPPRRQLYLPMLFKVRLLMVSRMAKPEEVLVVENDQGEVVREFMKDTDSINLYKNMRETLVYLTHLDYVDTERIMTEKLHNQVNGTEWSWKNLNTLCWAIGSISGAMHEEDEKRFLVTVIKDLLGLCEQKRGKDNKAIIASNIMYIVGQYPRFLRAHWKFLKTVVNKLFEFMHETHDGVQDMACDTFIKIAQKCRRHFVQVQVGEVMPFIDEILNNINTIICDLQPQQVHTFYEAVGYMIGAQTDQTVQEHLIEKYMLLPNQVWDSIIQQATKNVDILKDPETVKQLGSILKTNVRACKAVGHPFVIQLGRIYLDMLNVYKCLSENISAAIQANGEMVTKQPLIRSMRTVKRETLKLISGWVSRSNDPQMVAENFVPPLLDAVLIDYQRNVPAAREPEVLSTMAIIVNKLGGHITAEIPQIFDAVFECTLNMINKDFEEYPEHRTNFFLLLQAVNSHCFPAFLAIPPTQFKLVLDSIIWAFKHTMRNVADTGLQILFTLLQNVAQEEAAAQSFYQTYFCDILQHIFSVVTDTSHTAGLTMHASILAYMFNLVEEGKISTSLNPGNPVNNQIFLQEYVANLLKSAFPHLQDAQVKLFVTGLFSLNQDIPAFKEHLRDFLVQIKEFAGEDTSDLFLEEREIALRQADEEKHKRQMSVPGIFNPHEIPEEMCD

SEQ ID NO: 46257 - protein, 159 aa, Homo sapiens
  MOD_RES (1)..(1): Any amino acid
XMIARLGKEINNPESVYYWAQKNHIPVFSPALTDGSLGDMIFFHSYKNPGLVLDIVEDLRLINTQAIFAKCTGMIILGGGVVKHHIANANLMVPDQTRLSPGARSGWMHSPSRSMLTPPWSSPCLWLKPLPRRWMPSCMRRTRTERLRSQEGLTPSSIY

SEQ ID NO: 46258 - protein, 155 aa, Homo sapiens
MFANLKYVSLGILVFQTTSLVLTMRYSRTLKEEGPRYLSSTAVVVAELLKIMACILLVYKDSKCSLRALNRVLHDEILNKPMETLKLAIPSGIYTLQNNLLYVALSNLDAATYQVTYQLKILTTALFSVSMLSKKLGVYQWLSLVILMTGVAFVQ

SEQ ID NO: 46259 - protein, 119 aa, Homo sapiens
MTGLDTPVLMVIKDSDGQVFGALASEPLKVSDGFYGTGETFVFTFCPEFEVFKWTGDNMFFIKGDMDSLAFGGGGGEFALWLDGDLYHGRSHSCKTFGNRTLSKKEDFFIQDIEIWAFE

SEQ ID NO: 46260 - protein, 194 aa, Homo sapiens
MWKLTRDETNYGIPQRALRGHSHFVSDVVISSDGQFALSGSWDGTLRLWDLTTGTTTRRFVGHTKDVLSVAFSSDNRQIVSGSRDKTIKLWNTLGVCKYTVQDESHSEWVSCVRFSPNSSNPIIVSCGWDKLVKVWNLANCKLKTNHIGHTGYLNTVTVSPDGSLCASGGKDGQAMLWDLNEGKHLYTLDGGDI

SEQ ID NO: 46261 - protein, 299 aa, Homo sapiens
MRWLWLLLFPDSPVTLREVLPSQPWRLRGCSDLRGENVFTGQSKIYSYMSPNKCSGMRFPLQEENSVTHHEVKCQGKPLAGIYRKREEKRNAGNAVRSAMKSEEQKIKDARKGPLVPFPNQKSEAAEPPKTPPSSCDSTNAAIAKQALKKPIKGKQAPRKKAQGKTQQNRKLTDFYPVRRSSRKSKAELQSEERKRIDELIESGKEEGMKIDLIDGKGRGVIATKQFSRGDFVVEYHGDLIEITDAKKREALYAQDPSTGCYMYYFQYLSKTYCVDATRETNRLGRLINHSKCGNCQTK

SEQ ID NO: 46262 - protein, 591 aa, Homo sapiens
MAAAAAATAAAAASIRERQTVALKRMLNFNVPHIKNSTGEPVWKVLIYDRFGQDIISPLLSVKELRDMGITLHLLLHSDRDPIPDVPAVYFVMPTEENIDRMCQDLRNQLYESYYLNFISAISRSKLEDIANAALAASAVTQVAKVFDQYLNFITLEDDMFVLCNQNKELVSYRAINRPDITDTEMETVMDTIVDSLFCFFVTLGAVPIIRCSRGTAAEMVAVKLDKKLRENLRDARNSLFTGDTLGAGQFSFQRPLLVLVDRNIDLATPLHHTWTYQALVHDVLDFHLNRVNLEESSGVENSPAGARPKRKNKKSYDLTPVDKFWQKHKGSPFPEVAESVQQELESYRAQEDEVKRLKSIMGLEGEDEGAISMLSDNTAKLTSAVSSLPELLEKKRLIDLHTNVATAVLEHIKARKLDVYFEYEEKIMSKTTLDKSLLDIISDPDAGTPEDKMRLFLIYYISTQQAPSEADLEQYKKALTDAGCNLNPLQYIKQWKAFTKMASAPASYGSTTTKPMGLLSRVMNTGSQFVMEGVKNLVLKQQNLPVTRILDNLMEMKSNPGKQGKHILYGCSELFNATQFIKQLSQLGQK

SEQ ID NO: 46263 - protein, 801 aa, Homo sapiens
VMEVVEAEKIVLLTSARFLFLLLGPAGKAPQYHEIGRSIATLMTDEIFHDVAYKAKDRNDLLSGIDEFLDQVTVLPPGEWDPSIRIEPPKSVPSQEKRKIPVFHNGSTPTLGETPKEAAHHAGPELQRTGRLFGGLILDIKRKAPFFLSDFKDALSLQCLASILFLYCACMSPVITFGGLLGEATEGRISAIESLFGASLTGIAYSLFAGQPLTILGSTGPVLVFEKILYKFCRDYQLSYLSLRTSIGLWTSFLCIVLVATDASSLVCYITRFTEEAFAALICIIFIYEALEKLFDLGETYAFNMHNNLDKLTSYSCVCTEPPNPSNETLAQWKKDNITAHNISWRNLTVSECKKLRGVFLGSACGHHGPYIPDVLFWCVILFFTTFFLSSFLKQFKTKRYFPTKVRSTISDFAVFLTIVIMVTIDYLVGVPSPKLHVPEKFEPTHPERGWIISPLGDNPWWTLLIAAIPALLCTILIFMDQQITAVIINRKEHKLKKGAGYHLDLLMVGVMLGVCSVMGLPWFVAATVLSISHVNSLKVESECSAPGEQPKFLGIREQRVTGLMIFILMGLSVFMTSVLKFIPMPVLYGVFLYMGVSSLKGIQLFDRIKLFGMPAKHQPDLIYLRYVPLWKVHIFTVIQLTCLVLLWVIKVSAAAVVFPMMVLALVFVRKLMDLCFTKRELSWLDDLMPESKKKKEDDKKKKEKEEAERMLQDDDDTVHLPFEGGSLLQIPVKALKYSVDPSIVNISDEMAKTAQWKALSMNTENAKVTRSNMSPDKPVSVKISFEDEPRKKYVDAETSL

SEQ ID NO: 46264 - protein, 118 aa, Homo sapiens
MGKQNSKLAPEVMEDLVKSTEFNEHELKQWYKGFLKDCPSGRLNLEEFQQLYVKFFPYGDASKFAQHAFRTFDKNGDGTIDFREFICALSITSRGSFEQKLNWAFNMYDLDGDGKITR

SEQ ID NO: 46265 - protein, 103 aa, Homo sapiens
YDDDLTDAVFKTLSRLAHRLKNACTAILSVEKRLNFTLRHLDVTCEAYDHFRSCLHALEQLADGKLRFVVEPVEASFPQLLVYERLQQLVGPGPEAGPLVALL

SEQ ID NO: 46266 - protein, 84 aa, Homo sapiens
MFVEHRCADFGMAADKNKFPGDSVVTGRGRINGRLVYVFSQDFTVFGGSLSGAHAQKICKIMDQAITVGAPVIGLNDSGGARIQ

SEQ ID NO: 46267 - protein, 97 aa, Homo sapiens
MTKEKEFFDVWSVLMGESQPYSGPRTPDGREIVFYKVIDYVLHGKEEIKVIPTPSADHWALASGLPSYVAESGFEGALDDSGWLIKNVLSMPIVNKK

SEQ ID NO: 46268 - protein, 166 aa, Homo sapiens
MGLLVFVRNLLLALCLFLVLGFLYYSAWKLHLLQWEEDSSKYSHSSSPQEKPVADSVVLSFDSAGQTLGSEYDRLGFLLNLDSKLPAELATKYANFSEGACKPGYASALMTAIFPRFSKPAPMFLDDSFRKWARIREFVPPFGIKGQECIGWLLEICGHSSAQGAP

SEQ ID NO: 46269 - protein, 297 aa, Homo sapiens
MQGSSLWLSLTFRSARVLSRARFFEWQSPGLPNTAAMENGTGPYGEERPREVQETTVTEGAAKIAFPSANEVFYNPVQEFNRDLTCAVITEFARIQLGAKGIQIKVPGEKDTQKVVVDLSEQEEEKVELKESENLASGDQPRTAAVGEICEEGLHVLEGLAASGLRSIRFALEVPGLRSVVANDASTRAVDLIRRNVQLNDVAHLVQPSQADARMLMYQHQRVSERFDVIDLDPYGSPATFLDAAVQAALRIVLHSLDLRANCYQRFVVPLLSISADFYVRVFVRVFTGQAKVKASA

SEQ ID NO: 46270 - protein, 39 aa, Homo sapiens
  MOD_RES (1)..(1): Any amino acid
XYSTPVFSQKMTVWILLLLSLYPGRKLSSYPHKLRFENE

SEQ ID NO: 46271 - protein, 146 aa, Homo sapiens
MRECQGFAPDAELHIFRVFTNNQVSYTSWFLDAFNYAILKKIDVLNLSIGGPDFMDHPFVDKVWELTANNVIMVSAIGNDGPLYGTLNNPADQMDVIGVGGIDFEDNIARFSSRGMTTWELPGGYGRMKPDIVTYGAGVRGSGVKG

SEQ ID NO: 46272 - protein, 780 aa, Homo sapiens
MWFFARDPVRDFPFELIPEPPEGGLPGPWALHRGRKKATGSPVSIFVYDVKPGAEEQTQVAKAAFKRFKTLRHPNILAYIDGLETEKCLHVVTEAVTPLGIYLKARVEAGGLKELEISWGLHQIVKALSFLVNDCSLIHNNVCMAAVFVDRAGEWKLGGLDYMYSAQGNGGGPPRKGIPELEQYDPPELADSSGRVVREKWSADMWRLGCLIWEVFNGPLPRAAALRNPGKIPKTLVPHYCELVGANPKVRPNPARFLQNCRAPGGFMSNRFVETNLFLEEIQIKEPAEKQKFFQELSKSLDAFPEDFCRHKVLPQLLTAFEFGNAGAVVLTPLFKVGKFLSAEEYQQKIIPVVVKMFSSTDRAMRIRLLQQMEQFIQYLDEPTVNTQIFPHVVHGFLDTNPAIREQTVKSMLLLAPKLNEANLNVELMKHFARLQAKDEQGPIRCNTTVCLGKIGSYLSASTRHRVLTSAFSRATRDPFAPSRVAGVLGFAATHNLYSMNDCAQKILPVLCGLTVDPEKSVRDQAFKAIRSFLSKLESVSEDPTQLEEVEKDVHAASSPGMGGAAASWAGWAVTGVSSLTSKLIRSHPTTAPTETNIPQRPTPEGVPAPAPTPVPATPTTSGHWETQEEDKDTAEDSSTADRWDDEDWGSLEEAESVLAQQDDWSTGGQVSRASQVSNSDHKSSKSPESDWSSWEAEGSWEQGWQEPSSQEPPPDGTRLASEYNWGGPESSDKGDPFATLSARPSTQDRSRLSWPGRSARSGGGRWRPNAPRGRWPRAP

SEQ ID NO: 46273 - protein, 256 aa, Homo sapiens
  MOD_RES (1)..(1): Any amino acid
XSEEKENALVKNAQVQRNKQHEVEEATNILTATRKCFRHIALDYVLQINVLQSKRRSEILKSMLSFMYAHLAFFHQGYDLFSELGPYMKDLGAQLDRLVVDAAKEKREMEQKHSTIQQKAALQDFSSDDSKLEYNVDAANGIVMEGYLFKRASNAFKTWNRRWFSIQNNQLVYQKKFKDNPTVVVEDLRLCTVKHCEDIERRFCFEVVSPTKSCMLQADSEKLRQAWIKAVQTSIATAYREKGDESEKLDKKSSPS

SEQ ID NO: 46274 - protein, 1104 aa, Homo sapiens
MAAMAPALTDAAAEAHHIRFKLAPPSSTLSPGSAENNGNANILIAANGTKRKAIAAEDPSLDFRNNPTKEDLGKLQPLVASYLCSDVTSVPSKESLKLQGVFSKQTVLKSHPLLSQSYELRAELLGRQPVLEFSLENLRTMNTSGQTALPQAPVNGLAKKLTKSSTHSDHDNSTSLNGGKRALTSSALHGGEMGGSESGDLKGGMTNCTLPHRSLDVEHTTLYSNNSTANKSSVNSMEQPALQGSSRLSPGTDSSSNLGGVKLEGKKSPLSSILFSALDSDTRITALLRRQADIESRARRLQKRLQVVQAKQVERHIQHQLGGFLEKTLSKLPNLESLRPRSQLMLTRKAEAALRKAASETTTSEGLSNFLKSNSISEELERFTASGIANLRCSEQAFDSDVTDSSSGGESDIEEEELTRADPEQRHVPLRRRSEWKWAADRAAIVSRWNWLQAHVSDLEYRIRQQTDIYKQIRANKGLIVLGEVPPPEHTTDLFLPLSSEVKTDHGTDKLIESVSQPLENHGAPIIGHISESLSTKSCGALRPVNGVINTLQPVLADHIPGDSSDAEEQLHKKQRLNLVSSSSDGTCVAARTRPVLSCKKRRLVRPNSIVPLSKKVHRNSTIRPGCDVNPSCALCGSGSINTMPPEIHYEAPLLERLSQLDSCVHPVLAFPDDVPTSLHFQSMLKSQWQNKPFDKIKPPKKLSLKHRAPMPGSLPDSARKDRHKLVSSFLTTAKLSHHQTRPDRTHRQHLDDVGAVPMVERVTAPKAERLLNPPPPVHDPNHSKMRLRDHSSERSEVLKHHTDMSSSSYLAATHHPPHSPLVRQLSTSSDSPAPASSSSQVTASTSQPVRRRRGESSFDINNIVIPMSVAATTRVEKLQYKEILTPSWREVDLQSLKGSPDEENEEIEDLSDAAFAALHAKCEEMERARWLWTTSVPPQRRGSRSYRSSDGRTTPQLGSANPSTPQPASPDVSSSHSLSEYSHGQSPRSPISPELHSAPLTPVARDTLRHLASEDTRCSTPELGLDEQSVQPWERRTFPLAHSPQAECEDQLDAQERAARCTRRTSGSKTGRETEAAPTSPPIVPLKSRHLVAAATAQRPTHR

SEQ ID NO: 46275 - protein, 42 aa, Homo sapiens
  MOD_RES (1)..(1): Any amino acid
XPPLPPPPYSCDPSGSDLPQDTKVLQYYFNLGLQVSAMLKFL

SEQ ID NO: 46276 - protein, 237 aa, Homo sapiens
MKLIILEHYSQASEWAAKYIRNRIIQFNPGPEKYFTLGLPTGSTPLGCYKKLIEYYKNGDLSFKYVKTFNMDEYVGLPRDHPESYHSFMWNNFFKHIDIHPENTHILDGNAVDLQAECDAFEEKIKAAGGIELFVGGIGPDGHIAFNEPGSSLVSRTRVKTLAMDTILANARFFDGELTKAIEEGVNHMWTVSAFQQHPRTVFVCDEDATLELKVKTVKYFKGLMLVHNKLVDPLYS

SEQ ID NO: 46277 - protein, 74 aa, Homo sapiens
MKRTTSFRMAEDDPYLGRPEQMFHLDPSLTHTIFNPEVFQPQMALPTDGPYLQILEQPKQRGFRFRYVCEGPSH

SEQ ID NO: 46278 - protein, 638 aa, Homo sapiens
MSYGSIARGGGLGSRGPFGGPSRQGCQPLECARCWTEYGIRHFPCPSPESKLQNRCVGKDGEGDLGPAGTPIVPRARKRGPGVAPEGSRMPEPTSSPTIGPRKDSAAGPHGRMAGPSTTRAKKRKPNFCPQETEVLVSKVSKHHQLLFGTGLLKAEPTRRYRVWSRILQAVNALGYCRRDVVDLKHKWRDLRAVVRRKLGDLRKAAHGPSPGSGKPQALALTPVEQVVAKTFSCQALPSEGFSLEPPRATQVDPCNLQELFQEMSANVFRINSSVTSLERSLQSLGTPSDTQELRDSLHTAQQETNKTIAASASSVKQMAELLRSSCPQERLQQERPQLDRLKTQLSDAIQCYGVVQKKIAEKSRALLPMAQRGSKQQSPQAPFAELADDEKVFNGSDNMWQGQEQALLPDITEEDLEAIRLREEAILQMESNLLDVNQIIKDLASMVSEQGEAVGSSSSKAICQQSCSPEPAAAALLLGAGPGSTPLRPGPHSRTKTRKPNFSPQETEVLVQRVRRHYPLLFGALRGTPARKHRVWSRILQAVNALGYCRRDLGDLKHKWRDLRGAVRKKLAEGGPAPGLLLTPVERMVAETFSAHGPQGEGQTTEPLPNSIEASLEAASSHAEAARQLLAGASRHQ

SEQ ID NO: 46279 - protein, 82 aa, Homo sapiens
MQAPVPHSQRRESFLYRSDSDYELSPKAMSRNSSVASDLHGEDMIVTPFAQVLASLRTVRSNVAALARQQCLGAAKQGPVGN

SEQ ID NO: 46280 - protein, 189 aa, Homo sapiens
MYCAWMWPDQTPTPTRFLKNCEEVGLFNELASPFENEFKKASEDDIKKMPLDLSPLATPIIRSKIEEPSVVETTHQDSPLPHPESTTSDEKEVPLAQTAQPTSAIVRPASLQVPNVLLTSSDSSVIIQQAVPSPTSSTVITQAPSSNRPIVPVPGPFPLLLHLPNGQTMPVAIPASITSSNVHVPAAVP

SEQ ID NO: 46281 - protein, 31 aa, Homo sapiens
  MOD_RES (1)..(1): Any amino acid
XSRDIKRKRKPVATASLSSPSAGGRRTAPLP

SEQ ID NO: 46282 - protein, 41 aa, Homo sapiens
MMWQKYAGSRRSMPLGARILFHGVFYAGGFAIVYYLIQRGC

SEQ ID NO: 46283 - protein, 122 aa, Homo sapiens
MMHQIYSCSDENIEVFTTVIPSKVSSPARRRAKSSQHLLTKNVVIESDLYTHQPLELLPHRGDRRDPGDRRRFGRLQTARPPTAHPAKASARPVGISEPKTSNLCGNRAYGKSLIQTSQEDD

SEQ ID NO: 46284 - protein, 455 aa, Homo sapiens
MSLTVVSMACVGFFLLQGAWPLMGGQDKPFLSARPSTVVPRGGHVALQCHYRRGFNNFMLYKEDRSHVPIFHGRIFQESFIMGPVTPAHAGTYRCRGSRPHSLTGWSAPSNPLVIMVTGNHRKPSLLAHPGPLLKSGETVILQCWSDVMFEHFFLHREGISEDPSHLVGQIHDGVSKANFSIGPLMPVLAGTYRCYGSVPHSPYQLSAPSDPLDIVITGLYEKPSLSAQPGPTVQAGENVTLSCSSWSSYDIYHLSREGEAHERRLRAVPKVNRTFQADFPLGPATHGGTYRCFGSFRALPCVWSNSSDPLLVSVTGNPSSSWPSPTEPSSKSGICRHLHVLIGTSVVIFLFILLLFFLLYRWCSNKKNAAVMDQEPAGDRTVNRQDSDEQDPQEVTYAQLDHCVFIQRKISRPSQRPKTPLTDTSVYTELPNAEPRSKVVSCPRAPQSGLEGVF

SEQ ID NO: 46285 - protein, 220 aa, Homo sapiens
MKQPIMADGPRCKRRKQANPRRKNVVNYDNVVDTGSETDEEDKLHIAEDDGIANPLDQETSPASVPNHESSPHVSQALLPREEEEDEIREGGVEHPWHNNEILQASVDGPDLPPGTPDAFAQLLTCPYCDRGYKRLTSLKEHIKYRHEKNEENFSCPLCSYTFAYRTQLERHMVTHKPGTDQHQMLTQGAGNRKFKCTECGKAFKYKHHLKEHLRIHSGT

SEQ ID NO: 46286 - protein, 92 aa, Homo sapiens
MAKTYDYLFKLLLIGDSGVGKTCLLFRFSEDAFNTTFISTIGIDFKIRTIELDGKKIKLQIWDTAGQERFRTITTAYYRGAMEGILGIKRTS

SEQ ID NO: 46287 - protein, 225 aa, Homo sapiens
MATTGALGNYYVDSFLLGADAADELSVGRYAPGTLGQPPRQAATLAEHPDFSPCSFQSKATVFGASWNPVHAAGANAVPAAVYHHHHHHPYVHPQAPVAAAAPDGRYMRSWLEPTPVDREKQPSEGAFSENNAENESGGDKPPIDPNNPAANWLHARSTRKKRCPYTKHQTLELEKEFLFNMYLTRDRRYEVARLLNLTERQVKIWFQNRRMKMKKINKDRAKDE

SEQ ID NO: 46288 - protein, 202 aa, Homo sapiens
MDPLFQQTHKQVHEIQSCMGRLETADKQSVHIVENEIQASIDQIFSRLERLEILSSKEPPNKRQNARLRVDQLKYDVQHLQTALRNFQHRRHAREQQERQREELLSRTFTTNDSDTTIPMDESLQFNSSLQKVHNGMDDLILDGHNILDGLRTQRLTLKGTQKKILDIANMLGLSNTVMRLIEKRAFQDKYFMIAANRFLDF

SEQ ID NO: 46289 - protein, 181 aa, Homo sapiens
MSDGLDNEEKPPAPPLRMNSNNRDSSALNHSSKPLPMAPEEKNKKARLRSIFPGGGDKTNKKKEKERPEISLPSDFEHTIHVGFDAVTGEFTNSPFQTSRPVTVASSQSEGKMPDLYGSQMCPGKLPEGIPEQWARLLQTSNITKLEQKKNPQAVLDVLKFYDSKETVNNQKYMSFTSGDK

SEQ ID NO: 46290 - protein, 57 aa, Homo sapiens
  MOD_RES (1)..(1): Any amino acid
XSGRRTRSGGAAQRSGPHLLLSLCGGPSGNQALNSRASSLKSGRRHPVRLQSESPSS

SEQ ID NO: 46291 - protein, 125 aa, Homo sapiens
MADDFGFFSSSESGAPEAAEEDPAAAFLAQQESEIAGIENDEGFGAPAGSHAAPAQPGPTSGAGSEDMGTTVNGDVFQEAFVKESKEETPGTEWEKVAQLCDFNPKSSKQCKDVSRLRSVLMSLK

SEQ ID NO: 46292 - protein, 170 aa, Homo sapiens
  MOD_RES (1)..(1): Any amino acid
XKLVEALCAAGHRAELLRFPERSTEIGKLLSSYLQKKSDVEDHSVHLLFSANRWEQVRFPLHSTLNVDNFSLDWCKQPDVGLPKPDLVLFLQLQLADAAKRGAFGHERYENGAFQERALRCFHQLMKDTTLNWKMVDASKSIEAVHEDIRVLSEDAIRTATEKPLGELWK

SEQ ID NO: 46293 - protein, 112 aa, Homo sapiens
MFAKLKKKIAEETAVAQRPGGATRIPRSVSKESVASMGADSGDDFASDGSSSREDLSSQLLRRNEQIRKLEARLSDYAEQVRNLQKIKEKLEIALEKHQDSSMRKFQEQNET

SEQ ID NO: 46294 - protein, 141 aa, Homo sapiens
MAAAPPSYCFVAFPPRAKDGLVVFGKNSARPRDEVQEVVYFSAADHEPESKVECTYISIDQVPRTYAIMISRPAWLWGAEMGANEHGVCIANEAINTREPAAEIEALLGMDLVRLGLERGETAKEALDVIVSLLEEHGQGG

SEQ ID NO: 46295 - protein, 156 aa, Homo sapiens
MHDSGLLNITKVSFSDRGKYTCVASNIYGTVNNTVTLRVIFTSGDMGVYYMVVCLVAFTIVMVLNITRLCMMSSHLKKTEKAINEFFRTEGAEKLQKAFEIAKRIPIITSAKTLELAKVTQFKTMEFARYIEELARSVPLPPLIMNCRTIMEEIME

SEQ ID NO: 46296 - protein, 2297 aa, Homo sapiens
MADLSLADALTEPSPDIEGEIKRDFIATLEAEAFDDVVGETVGKTDYIPLLDVDEKTGNSESKKKPCSETSQIEDLPLPPHPASLSFHLPLDTPSSKPTLLANGGHGVEGSDTTGSPTEFLEEKMAYQEYPNSQNWPEDTNFCFQPEQVVDPIQTDPFKMYHDDDLADLVFPSSATADTSIFAGQNDPLKDSYGMSPCNTAVVPQGWSVEALNSPHSESFVSPEAVAEPPQPTAVPLELAKEIEMASEERPPAQALEIMMGLKTTDMAPSKETEMALAKDMALATKTEVALAKDMESPTKLDVTLAKDMQPSMESDMALVKDMELPTEKEVALVKDVRWPTETDVSSAKNVVLPTETEVAPAKDVTLLKETERASPIKMDLAPSKDMGPPKENKKETERASPIKMDLAPSKDMGPPKENKIVPAKDLVLLSEIEVAQANDIISSTEISSAEKVALSSETEVALARDMTLPPETNVILTKDKALPLEAEVAPVKDMAQLPETEIAPAKDVAPSTVKEVGLLKDMSPLSETEMALGKDVTPPPETEVVLIKNVCLPPEMEVALTEDQVPALKTEAPLAKDGVLTLANNVTPAKDVPPLSETEATPVPIKDMEIAQTQKGISEDSHLESLQDVGQSAAPTFMISPETVTGTGKKCSLPAEEDSVLEKLGERKPCNSQPSELSSETSANFMYCGTPPTQAKQVCRPSDRRSTRPKPARVPPELLGGSPPWKTLDHRLGHCSLSESGWVSGSSSCGGPGNQRKSIHVDSLEPQRDLGREAWDIESTPIMMKKKKKKPKQKRYSQPRAGGPSDDDNADKPKGHPFAADTQKSGVLPSQPTTMGTEYGLVSGENLKRECLVNSSAARLVAENFVSESLRIPLYPSEEAPKTAISSQSKLRVEEESKSNKSVLQNQDKKLLKQHEYKPQPAPHLKTPVDKSQSVGPLNLKGPLAEVSAYNVETPLDIRLKEGCSPFLDQEVMGVVSKPTAAKEIPNLVPTLIASNPLECNLKEGNNESKMTKLQNVKLKEFPEGAEEDKELKKEAFPNERQEISIFTSEQLQGQVLVQVPGVENEPFKRMAGDGKSRKGRGSSGKMRTDSGKVKAKSELPFLLDSQKDGRAVLIPSEPVSKTEGMTTQDKSEELGLNSSKQPGTKADLTEAVVMGEPKEMTQPKVAGTMQALIPLESGSGMTQTSGVSTETGDVVKDMGVNNQSKEGRCPWKDHEAAPWISEKPKKRGNEGKSKKFKNNYSTQPARMERKEEILNPPFEGKDGDTGSIPHKSKEIGFTFPKMHDSSFSHTPDTPTVEAVDRKGGNFQVNFVELGTLGENKISTVKASTVTEPPAKVTDVSCQEQIQGAGFVPSVVSEENKTDAANRYTAVADKPSKRSNDGKSKKVKNSSPEKHILENKIDATKIHVPMETTGDQGIEGMAYMDENRNITFTCPRTPSELINKSSPLEVLESAACEKLPTPTPQVVKEGDSFPDTLAKNGQEIAPAQISKSLMVDNYTKDGVPGQERPKGPSAVVPSTSTGGVALPITTAIETVNIHGDHSLKNKAELADSMKNEAGIDEGHVIGESESVHSGASKHSVEKVTELAKGHLLPGVPVEDQSLPGEARALEGYADRGNFPAHPVNEEKETKEGSVAVQIPDLLEDKAQKLSFCEDQNAQDRNSKGSDSLNKKVDLTLLSPKSENDKLKEISLACKITELESVSLPTPEIQSDFLHSKVEAPPSEVADTLVIMTASKGVRLPEPKDKILETPQKMTEKSESKTPGEGKKEDKSRMAEPMKGYMRPTKSRGLTPLLPKSTIQEQERHKQLKSAGIARPEEGRPVVSGTGNDITTPPNKELPPSPEKKTKPLATTQPAKTSTSKAKTQPTSLPKQPAPTTIGGLNKKPMSLASGLVPAAPPKRPAVASARPSILPSKDVKPKPIADAKAPEKRASPSKPASAPASRSGSKSTQTVAKTTTAAAVASTGPSSRSPSTLLPKKPTAIKTEGKPAEVKKMTAKSVPADLSRPKSTSTSSMKKTTTLSGTAPAAGVVPSRVKATPMPSRPSTTPFIDKKPTSAKPSSTTPRLSRLATNTSAPDLKNVRSKVGSTENIKHQPGGGRAKVEKKTEAAATTRKPESNAVTKTAGPIASAQKQPAGKVQIVSKKVSYSHIQSKCGSKDNIKHVPGGGNVQIQNKKVDISKVSSKCGSKANIKHKPGGGDVKIESQKLNFKEKAQAKVGSLDNVGHLPAGGAVKTEGGGSEAPLCPGPPAGEEPAISEAAPEAGAPTSASGLNGHPTLSGGGDQREAQTLDSQIQETSI

SEQ ID NO: 46297 - protein, 406 aa, Homo sapiens
MSEHVEPAAPGPGPNGGGGGPAPARGPRTPNLNPNPLINVRDRLFHALFFKMAVTYSRLFPPAFRRLFEFFVLLKALFVLFVLAYIHIVFSRSPINCLEHVRDKWPREGILRVEVRHNSSRAPVFLQFCDSGGRGSFPGLAVEPGSNLDMEDEEEEELTMEMFGNSSIKFELDIEPKVFKPPSSTEALNDSQEFPFPETPTKVWPQDEYIVEYSLEYGFLRLSQATRQRLSIPVMVVTLDPTRDQCFGDRFSRLLLDEFLGYDDILMSSVKGLAENEENKGFLRNVVSGEHYRFVSMWMARTSYLAAFAIMVIFTLSVSMLLRYSHHQIFVFIVDLLQMLEMNMAIAFPAAPLLTVILALVGMEAIMSEFFNDTTTAFYIILIVWLADQYDAICCHTSTSKRHWLR

SEQ ID NO: 46298 - protein, 130 aa, Homo sapiens
MDIRKFFGVIPSGKKLVSETVKKNEKTKSDEETLKAKKGIKEIKVNSSRKEDDFKQKQPSKKKRIIYDSDSESEETLQVKNAKKPPEKLPVSSKPGKISRQDPVTYISETEETITGIIRDAVRERARPSA

SEQ ID NO: 46299 - protein, 728 aa, Homo sapiens
MLTDPDLPQEFERMSSKRPASPYGEADGEVAMVTSRQKVEEEESDGLPAFHLPLHEVDGNKVMSSFAPHNSSTSPQKAEEGGRQSGESLSSTALGTPERRKGSLADVVDTLKQRKMEELIKNEPEETPSIEKLLSKDWKDKLLAMGSGNFGEIKGTPESLAEKERQLMGMINQLTSLREQLLAAHDEQKKLAASQIEKQRQQMELAKQQQEQIARQQQQLLQQQHKINLLQQQIQVQGQLPPLMIPVFPPDQRTLAAAAQQGFLLPPGFSYKAGCSDPYPVQLIPTTMAAAAAATPGLGPLQLQQLYAAQLAAMQVSPGGKLPGIPQGNLGAAVSPTSIHTDKSTNSPPPKSKDEVAQPLNLSAKPKTSDGKSPTSPTSPHMPALRINSGAGPLKASVPAALASPSARVSTIGYLNDHDAVTKAIQEARQMKEQLRREQQVLDGKVAVVNSLGLNNCRTEKEKTTLESLTQQLAVKQNEEGKFSHAMMDFNLSGDSDGSAGVSESRIYRESRGRGSNEPHIKRPMNAFMVWAKDERRKILQAFPDMHNSNISKILGSRWKAMTNLEKQPYYEEQARLSKQHLEKYPDYKYKPRPKRTCLVDGKKLRIGEYKAIMRNRRQEMRQYFNVGQQAQIPIATAGVVYPGAIAMAGMPSPHLPSEHSSVSSSPEPGMPVIQSTYGVKGEEPHIKEEIQAEDINGEIYDEYDEEEDDPDVDYGSDSENHIAGQAN

SEQ ID NO: 46300 - protein, 211 aa, Homo sapiens
MSSLHRGCRAAMPPSTWPERTSSTLSEAYYQPSLTAEYDEDSPGGDFDFFSNLVTKWEAAARLPGDSTRQVVVRSGVVLGRGGGAMGHMLLPFRLGLGGPIGSGHQFFPWIHIGDLAGILTHALEANHVHGVLNGVAPSSATNAEFAQTLGAALGRRAFIPLPSAVVQAVFGRQRAIMLLEGQKVIPQRTLATGYQYSFPELGAALKEIVA

SEQ ID NO: 46301 - protein, 64 aa, Homo sapiens
MLQEWLAAVGDDYAAVVWRPEGEPRFYPDEEGPKHWTKERHQFLMELKQEALTFARNWGADYIL

SEQ ID NO: 46302 - protein, 152 aa, Homo sapiens
SYLQKLGLGEGKLKRVLYCCPEIFTMRQQDINDTVRLLKEKCLFTVQQVTKILHSCPSVLREDLGQLEYKFQYAYFRMGIKHPDIVKTASSYSVTAKKKTFVLQKKSSSVTPSTSPQLSQMAVAVLCQWKEFLLRGGAGGLIYYCATASPAH

SEQ ID NO: 46303 - protein, 146 aa, Homo sapiens
MGRTVVVLGGGISGLAASYHLSRAPCPPKVVLVESSERLGGWIRSVRGPNGAIFELGPRGIRPAGALGARTLLLVSELGLDSEVLPVRGDHPAAQNRFLYVGGALHALPTGLRGLLRPSPPFSKPLFWAGLRELTKPRGKEPDETV

SEQ ID NO: 46304 - protein, 405 aa, Homo sapiens
MFSLMASCCGWFKRWREPVRKVTLLMVGLDNAGKTATAKGIQGEYPEDVAPTVGFSKINLRQGKFEVTIFDLGGGIRIRGIWKNYYAESYGVIFVVDSSDEERMEETKEAMSEMLRHPRISGKPILVLANKQDKEGALGEADVIECLSLEKLVNEHKCLCQIEPCSAISGYGKKIDKSIKKGLYWLLHVIARDFDALNERIQKETTEQRALEEQEKQERAERVRKLREERKQNEQEQAELDGTSGLAELDPEPTNPFQPIASVIIENEGKLEREKKNQKMEKDSDGCHLKHKMEHEQIETQGQVNHNGQKNNEFGLVENYKEALTQQLKNEDETDRPSLESANGKKKTKKLRMKRNHRVEPLNIDDCAPESPTPPPPPPPDFYRKPLPPLAVPQRPNSDAHDVIS

SEQ ID NO: 46305 - protein, 159 aa, Homo sapiens
MDLLFGRRKTPEELLRQNQRALNRAMRELDRERQKLETQEKKIIADIKKMAKQGQMDAVRIMAKDLVRTRRYVRKFVLMRANIQAVSLKIQTLKSNNSMAQAMKGVTKAMGTMNRQLKLPQIQKIMMEFERQAEIMDMKEEMMNDAIDDAMGDEEDEEE

SEQ ID NO: 46306 - protein, 432 aa, Homo sapiens
MKSTKPSLSPSKPQSSLVIPTSLFCKTFPFHFMFDKDMTILQFGNGIRRLMNRRDFQGKPNFEEYFEILTPKINQTFSGIMTMLNMQFVVRVRRWDNSVKKSSRVMDLKGQMIYIVESSAILFLGSPCVDRLEDFTGRGLYLSDIPIHNALRDVVLIGEQARAQDGLKKRLGKLKATLEQAHQALEEEKKKTVDLLCSIFPCEVAQQLWQGQVVQAKKFSNVTMLFSDIVGFTAICSQCSPLQVITMLNALYTRFDQQCGELDVYKVETIGDAYCVAGGLHKESDTHAVQIALMALKMMELSDEVMSPHGEPIKMRIGLHSGSVFAGVVGVKMPRYCLFGNNVTLANKFESCSVPRKINVSPTTYRLLKDCPGFVFTPRSREELPPNFPSEIPGICHFLDAYQQGTNSKPCFQKKDVEDGNANFLGKASGID

SEQ ID NO: 46307 - protein, 80 aa, Homo sapiens
MKQYQGSGGVAMDVERSRFPYCVVWTPIPVLTWFFPIIGHMGICTSTGVIRDFAGPYFVSEDNMAFGKPAKLTLLPFGNK

SEQ ID NO: 46308 - protein, 116 aa, Homo sapiens
MEFVLSWVFLVAILKGVQCEVQLVQSGGGLVHPGGSLRLSCAGSGFTFSSYAMHWVRQAPGKGLEWVSAIGTGGGTYYADSVKGRFTISRDNAKNSLYLQMNSLRAEDMAVYYCAR

SEQ ID NO: 46309 - protein, 540 aa, Homo sapiens
MAGPQPLALQLEQLLNPRPSEADPEADPEEATAARVIDRFDEGEDGEGDFLVVGSIRKLASASLLDTDKRYCGKTTSRKAWNEDHWEQTLPGSSDEEISDEEGSGDEDSEGLGLEEYDEDDLGAAEEQECGDHRESKKSRSHSAKTPGFSVQSISDFEKFTKGMDDLGSSEEEEDEESGMEEGDDAEDSQGESEEDRAGDRNSEDDGVVMTFSSVKVSEEVEKGRAVKNQIALWDQLLEGRIKLQKALLTTNQLPQPDVFPLFKDKGGPEFSSALKNSHKALKALLRSLVGLQEELLFQYPDTRYLVDGTKPNAGSEEISSEDDELVEEKKQQRRRVPAKRKLEMEDYPSFMAKRFADFTVYRNRTLQKWHDKTKLASGKLGKGFGAFERSILTQIDHILMDKERLLRRTQTKRSVYRVLGKPEPAAQPVPESLPGEPEILPQAPANAHLKDLDEEIFDDDDFYHQLLRELIERKTSSLDPNDQVAMGRQWLAIQKLRSKIHKKVDRKASKGRKLRFHVLSKLLSFMAPIDHTTMNDDAR

SEQ ID NO: 46310 - protein, 344 aa, Homo sapiens
MTRYHFAMNGKSFSVILEHFQDLVPKLMLHGTVFARMAPDQKTQLIEALQNVDYFVGMCGDGANDCGALKRAHGGISLSELEASVASPFTSKTPSISCVPNLIREGRAALITSFCVFKFMALYSIIQYFSVTLLYSILSNLGDFQFLFIDLAIILVVVFTMSLNPAWKELVAQRPPSGLISGALLFSVLSQIIICIGFQSLGFFWVKQQPWYEVWHPKSDACNTTGSGFWNSSHVDNETELDEHNIQNYENTTVFFISSFQYLIVAIAFSKGKPFRQPCYKNWQVLLLYILCRSQWIGGENAAYPGPWAVERRHQRQSTCIWRRSSWLIQNGHQNLRQPQKLKL

SEQ ID NO: 46311 - protein, 210 aa, Homo sapiens
  MOD_RES (1)..(1): Any amino acid
XKPKNQAEAQKVTFSQDPTTVALCISKEGRPPARISWLSSLDWEAKETQVSGTLAGTVTVTSRFTLVPSGRADGVTVTCKVEHESFEEPALIPVTLSVRYPPEVSISGYDDNWYLGRTDATLSCDVRSNPEPTGYDWSTTSGTFPTSAVAQGSQLVIHAVDSLFNTTFVCTVTNAVGMGRAEQVIFVRALEDDMESQLDGSLISRRAVYV

SEQ ID NO: 46312 - protein, 152 aa, Homo sapiens
MSNVSEERRKRQQNIKEGLQFIQSPLSYPGTQEQYAVYLRALVRNLFNEGNDVYREHDWNNSISQYTEALNIADYAKSEEILIPKEIIEKLYINRIACYSNMGFHDKVLEDCNIVLSLNASNCKALYRKSKALSDLGRYKKAYDAVAKCSLA

SEQ ID NO: 46313 - protein, 228 aa, Homo sapiens
AELDQTTRDTLEPLPTILRAIEEGQPVLVSVPMRLPLPPAQVHSSLSAGEKPGFLAPRDLPKHTPLISKSQSLRSVRRSESWARPRPDEERPLRRPRPVQRTQSVPVRRPARRRQSAGPWPRPKGSLSMGPAPRARPWTRDSASLPRKPSVPWQRQMDQPQDRNQALGTHRPVNKLAELQCEVAALREEQKVLSRLVESLSTQIRALTEQQEQLRGQLQDLDSRLRAG

SEQ ID NO: 46314 - protein, 121 aa, Homo sapiens
MAAARATTPADGEEPAPEAEALAAARERSSRFLSGLELVKQGAEARVFRGRFQGRAAVIKHRFPKGYRHPALEARLGRRRTVQEARALLRCRRAGKEYLPQLSFLWTMLPTAYIWKKLKAQ

SEQ ID NO: 46315 - protein, 62 aa, Homo sapiens
  MOD_RES (1)..(1): Any amino acid
XPQETALENGEPAGSAPETDQGSGPDAVGRVQGWALTRQQLQALLLKRFLLARRSRRGLFAQ

SEQ ID NO: 46316 - protein, 403 aa, Homo sapiens
MDLRDRFTEMREMDLQVQNAMDQLEQRVSEFFMNAKKNKPEWREEQMASIKKDYYKALEDADEKVQLANQIYDLVDRHLRKLDQELAKFKMELEADNAGITEILERRSLELDTPSQPVNNHHAHSHTPVEKRKYNPTSHHTTTDHIPEKKFKSEALLSTLTSDASKENTLGCRNNNSTASSNNAYNVNSSQPLGSYNIGSLSSGTGAGAITMAAAQAVQATAQMKEGRRTSSLKASYEAFKNNDFQLGKEFSMARETVGYSSSSALMTTLTQNASSSAADSRSGRKSKNNNKSSSQQSSSSSSSSSLSSCSSSSTVVQEISQQTTVVPESDSNSQVDWTYDPNEPRYCICNQVSYGEMVGCDNQDCPIEWFHYGCVGLTEAPKGKWYCPQCTAAMKRRGSRHK

SEQ ID NO: 46317 - protein, 118 aa, Homo sapiens
MHWLRKVQGLCTLWGTQMSSRTLYINSRQLVSLQWGHQEVPAKFNFASDVLDHWADMEKAGKRLPSPALWWVNGKGKELMWNFRELSENSQQAANILSGACGLQRGDRVAVMLPRVPE

SEQ ID NO: 46318 - protein, 501 aa, Homo sapiens
MQSNKTFNLEKQNHTPRKHHQHHHQQQHHQQQQQQPPPPPIPANGQQASSQNEGLTIDLKNFRKPGEKTFTQRSRLFVGNLPPDITEEEMRKLFEKYGKAGEVFIHKDKGFGFIRLETRTLAEIAKVELDNMPLRGKQLRVRFACHSASLTVRNLPQYVSNELLEEAFSVFGQVERAVVIVDDRGRPSGKGIVEFSGKPAARKALDRCSEGSFLLTTFPRPVTVEPMDQLDDEEGLPEKLVIKNQQFHKEREQPPRFAQPGSFEYEYAMRWKALIEMEKQQQDQVDRNIKEAREKLEMEMEAARHEHQVMLMRQDLMRRQEELRRMEELHNQEVQKRKQLELRFFLWIGDVLAAHGPRSYLLKRKQLNAGLMRQEEERRRREEEMRRQQEEMMRRQQEGFKGTFPDAREQEIRMGQMAMGGAMGINNRGAMPPAPVPAGTPAPPGPATMMPDGTLGLTPPTTERFGQAATMEGIGAIGGTPPAFNRAAPGAEFAPNKRRRY

SEQ ID NO: 46319 - protein, 103 aa, Homo sapiens
MTPQSLLQTTLFLLSLLFLVQASASSGAHGRGHREDFRFCSQRNQTHRSSLHYKPTPDLRISIENSEEALTVHAPFPAAHPASRSFPDPRGLYHFCLYWNRHA

SEQ ID NO: 46320 - protein, 455 aa, Homo sapiens
  MOD_RES (1)..(1): Any amino acid
XAGREGSRLGCLCEKVPAIGAAGRHPGRRGRPPSAAVPGGAGGHAGPLATLKDAYLEVTLRPLEEVWRERAEEAMRRLQAWVPGMPGKGGPRPIRAALGAMKGALELAAQQMLSWAEATFSRALKRLCKPLLDLYSLSARNRSVVVMLPLLPAGDEPLDVARVTSYLMEEKLLRPLRELSGANVLAEYYWLRRRLLAGPWEYHALVAGAQHVVTFDGRVWDLSTQCGSILLAQDFAHNTFSLTLSRTGSGLTALFVELNHKTLILYPSLQAYRLYNSSLPGDSCPDLKLHPATTRKDVSRIELASEDGVSVSCDVPTGLCSLTLGLWQHGISAGLLGTNDNEAGNELMLPDGSMARSLEELSLAWQVGGDCRATEKPQQEQACPGQLPACWAFFEGPHSSLRDCFRVVDPTPFLSLCVQVPCGTQELQPACNLAAAYIHLCARGFVPLAPPPQCV

SEQ ID NO: 46321 - protein, 148 aa, Homo sapiens
VAQVVAEMWRRNGLSLISQVFYYQDVKCREEMYDKDIIMLQIGASLMDPNKFLLLVLQRYELAEAFNKTISTKDQDLIKQYNTLIEEMLQVLIYIVGERYVPGVGNVTKEEVTMREIIHLLCIEPMPHSAIAKNLPENETRCIRPWSL

SEQ ID NO: 46322 - protein, 139 aa, Homo sapiens [sequence omitted]

SEQ ID NO: 46323 - protein, 478 aa, Homo sapiens
MATITCTRFTEEYQLFEELGKGAFSVVRRCVKVLAGQEYAAKIINTKKLSARDHQKLEREARICRLLKHPNIVRLHDSISEEGHHYLIFDLVTGGELFEDIVAREYYSEADASHCIQQILEAVLHCHQMGVVHRDLKPENLLLASKLKGAAVKLADFGLAIEVEGEQQAWFGFAGTPGYLSPEVLRKDPYGKPVDLWACGVILYILLVGYPPFWDEDQHRLYQQIKAGAYDFPSPEWDTVTPEAKDLINKMLTINPSKRITAAEALKHPWISHRSTVASCMHRQETVDCLKKFNARRKLKGAILTTMLATRNFSGGKSGGNKKSDGVKESSESTNTTIEDEDTKVRKQEIIKVTEQLIEAISNGDFESYTKMCDPGMTAFEPEALGNLVEGLDFHRFYFENLWSRNSKPVHTTILNPHIHLMGDESACIAYIRITQYLDAGGIPRTAQSEETRVWHRRDGKWQIVHFHRSGAPSVLPQ

SEQ ID NO: 46324 - protein, 280 aa, Homo sapiens
MGAPPGYRPSAWVHLLHQLPRADFQLRPVPSVFAPQEQEYQQDQSSLAVTQRPPPTTPLHRLRPRPRLTPALARRPPEAARGDPRPQSPPEALLLVAALAGLGLGLSLIFIAVYLIRFCCCRPPEPPGSKIPSPGGGCVTWSCIVALLAGCTGIGIGFYGNSETSDGVSQLSSALLHANHTLSTIDHLVLETVERLGEAVRTELTTLEEVLEPRTELVAAARGARRQAEAAAQQLQGLAFWQGVPLSPLQVAENVSFVEEYRWLAYVLLLLLELLVCLFT

SEQ ID NO: 46325 - protein, 256 aa, Homo sapiens
MGIIQSILATSRDCYSFKKKPIPKKPTMLALAKILLISTLFYSLLSGSHGKENQDINTTQNIAEVFKTMENKPISLESEANLNSDKENITTSNLKASHSPPLNLPNNSHGITDFSSNSSAEHSLGSLKPTSTISTSPPLIHSFVSKVPWNAPIADEDLLPISAHPNATPALSSENFTWSLVNDTVKTPDNSSITVSILSSEPTSPSVTPLIVEPSGWLTTNSDSFTGFTPYQEKTTLQPTLKFTNNSKLFPNTSDP

SEQ ID NO: 46326 - protein, 82 aa, Homo sapiens
MKFEVMPPKRNEKYKLPIPFPEGKVLDDMEGNQWVLGKKIGSGGFGLIYLAFPTNKPEKDARHVVKVEYQENGPLFSELKFY

SEQ ID NO: 46327 - protein, 386 aa, Homo sapiens
  MOD_RES (1)..(1): Any amino acid
XIDVHNPKDAVQLETLELPPGCVRRAGAGDFMRYHYNGSLMDGTLFDSSYSRNHTYNTYIGQGYIIPGMDQGLQGACMGERRRITIPPHLAYGENGTDSIGFLQGSAPLRPFRSGEGQPSLGREGGYGKTEPAYPQDPAVLGASVSSPVKWASHADPQGDKIPGSAVLIFNVHVIDFHNPADVVEIRTLSRPSETCNETTKLGDFVRYHYNCSLLDGTQLFTSHDYGAPQEATLGANKVIEGLDTGLQGMCVGERRQLIVPPHLAHGESGARGVPGSAVLLFEVELVSREDGLPTGYLFVWHKDPPANLFEDMDLNKDGEVPPEEFSTFIKAQVSEGKGRLMPGQDPEKTIGDMFQNQDRNQDGKITVDELKLKSDEDEERVHEEL

SEQ ID NO: 46328 - protein, 174 aa, Homo sapiens
MATPYVPVPMPIGNSASSFTTNRNQRSSSFGSVSTSSNSSKGQLEDSNMGTASSIEYSTRPRDTEEQNPETVNWEDRPSTPTILGYEVMEERAKFTVYKILVKKTPEESWVVFRRYTDFSRLNDKLKEMFPGFRLALPPKRWFKDNYNADFLEDRQLGLQAFLQNLVAHKDIAN

SEQ ID NO: 46329 - protein, 151 aa, Homo sapiens
  MOD_RES (1)..(1): Any amino acid
XVESITYVSEPPETTLETSPLPSQSITLPSPDEPQTEPAPKQTPRAPPKPKTSPRPRIPQTQPVPKVPQRVTAKPKTSPSPEVSYTTPAPKDVLLPHKPYPEVSQSEPVLQPVTFRFEPPKTTIAPLETRGIPFIPMISPSPSQEELQTTL

SEQ ID NO: 46330 - protein, 59 aa, Homo sapiens
MAAAALRDPAQGYVTFEDVAVYFSQEEWRLLDDAQRLLYRNVMLENFTLLASLAGLCDL

SEQ ID NO: 46331 - protein, 479 aa, Homo sapiens
MLRRALLCLAVAALVRADAPEEEDHVLVLRKSNFAEALAAHKYLLVEFYAPWCGHCKALAPEYAKAAGKLKAEGSEIRLAKVDATEESDLAQQYGVRGYPTIKFFRNGDTASPKEYTAGREADDIVNWLKKRTGPAATTLPDGAAAESLVESSEVAVIGFFKDVESDSAKQFLQAAEAIDDIPFGITSNSDVFSKYQLDKDGVVLFKKFDEGRNNFEGEVTKENLLDFIKHNQLPLVIEFTEQTAPKIFGGEIKTHILLFLPKSVSDYDGKLSNFKTAAESFKGKILFIFIDSDHTDNQRILEFFGLKKEECPAVRLITLEEEMTKYKPESEELTAERITEFCHRFLEGKIKPHLMSQELPEDWDKQPVKVLVGKNFEDVAFDEKKNVFVEFYAPWCGHCKQLAPIWDKLGETYKDHENIVIAKMDSTANEVEAVKVHSFPTLKFFPASADRTGGGANARRLALGRDQPLHSSLSSTGH

SEQ ID NO: 46332 - protein, 13 aa, Homo sapiens
  MOD_RES (1)..(1): Any amino acid
XCSFGQGTKLEIK

SEQ ID NO: 46333 - protein, 158 aa, Homo sapiens [sequence omitted]

SEQ ID NO: 46334 - protein, 62 aa, Homo sapiens
MADLANEEKPAIAPPVFVFQKDKGQKVRGRGQLAAPVLKAEKILTEKMEITALLSSEKEHPL

SEQ ID NO: 46335 - protein, 88 aa, Homo sapiens
MDLKNMGAKNVCLMTDKNLSKLPPVQVAMDSLVKNGIPFTVYDNVRVEPTDSSFMEAIEFAQKGAFDAYVAVGGGSTMDTCKAANLYA

SEQ ID NO: 46336 - protein, 126 aa, Homo sapiens
MLENYSLLLSVGYCITKPEVVCKLEHGQVLWILEEESPSQSHLDCCIDDDLMEKRQENQDQHLQKVDFVNNKTLTMDRNGVLGKTFSLDTNPILSRKIRGNCDSSGMNLNNISELIISNRSSFVRN

SEQ ID NO: 46337 - protein, 30 aa, Homo sapiens
MDLTKGCVTFEDIAIYFSQDEWGLLDEAQR

SEQ ID NO: 46338 - protein, 107 aa, Homo sapiens
EACDDACWRIEKVPKVCRLQVSVDDQCEGSTEKYFFNLSSMTCEKFFSGGCHRNRIENRFPDEATCMGFCAPKKNTEPVMLSPILAVEGMTITLLAGRIANVHVQKL

SEQ ID NO: 46339 - protein, 127 aa, Homo sapiens
MTVVTMASARVQDLIGLICWQYTSEGREPKLNDNVSAYCLHIAEDDGEVDTDFPPLDSNEPIHKFGFSTLALVEKYSSPGLTSKESLFVRINAAHGFSLIQVDNTKVTMKEILLKAVKRRKGSQKVS

SEQ ID NO: 46340 - protein, 152 aa, Homo sapiens
MSRPQGLLWLPLLFTPVCVMLNSNVLLWLTALAIKFTLIDSQAQYPVVNTNYGKIRGLRTPLPNEILGPVEQYLGVPYASPPTGERRFQPPEPPSSWTGIRNTTQFAAVCPQHLDERSLLHDMLPIWFTANLDTLMTYVQDQNEDCLYLNIY

SEQ ID NO: 46341 - protein, 819 aa, Homo sapiens
MQRRGALFGMPGGSGGRKMAAGDIGELLVPHMPTIRVPRSGDRVYKNECAFSYDSPNSEGGLYVCMNTFLAFGREHVERHFRKTGQSVYMHLKRHVREKVRGASGGALPKRRNSKIFLDLDTDDDLNSDDYEYEDEAKLVIFPDHYEIALPNIEELPALVTIACDAVLSSKSPYRKQDPDTWENELPVSKYANNLTQLDNGVRIPPSGWKCARCDLRENLWLNLTDGSVLCGKWFFDSSGGNGHALEHYRDMGYPLAVKLGTITPDGADVYSFQEEEPVLDPHLAKHLAHFGIDMLHMHGTENGLQDNDIKLRVSEWEVIQESGTKLKPMYGPGYTGLKNLGNSCYLSSVMQAIFSIPEFQRAYVGNLPRIFDYSPLDPTQDFNTQMTKLGHGLLSGQYSKPPVKSELIEQVMKEEHKPQQNGISPRMFKAFVSKSHPEFSSNRQQDAQEFFLHLVNLVERNRIGSENPSDVFRFLVEERIQCCQTRKVRYTERVDYLMQLPVAMEAATNKDELIAYELTRREAEANRRPLPELVRAKIPFSACLQAFSEPENVDDFWSSALQAKSAGVKTSRFASFPEYLVVQIKKFTFGLDWVPKKFDVSIDMPDLLDINHLRARGLQPGEEELPDISPPIVIPDDSKDRLMNQLIDPSDIDESSVMQLAEMGFPLEACRKAVYFTGNMGAEVAFNWIIVHMEEPDFAEPLTMPGYGGAASAGASVFGASGLDNQPPEEIVAIITSMGFQRNQAIQALRATNNNLERALDWIFSHPEFEEDSDFVIEMENNANANIISEAKPEGPRVKDGSGMEFSRDYMVHDIATD

SEQ ID NO: 46342 - protein, 774 aa, Homo sapiens
  MOD_RES (1)..(1): Any amino acid
XDTPSKFDPINYLGEYLIRNNPNYIKDPGMSGYQRLMKEVTEDLKIYVPDTICNRVSKMKENVKQNRKQRESIDKIIVKVANTRKQALQEQFDEWILDPKGMIPKSVIQNVLQEFFQNPDFKLGSHCKQLDITDSTEPRLNKMEFTEYISSHIKDLKSEMFEELLKHLCHSADEFREVIKADMRRQMFAELFLHCDHGKVGFLDRQRTLALLELFYDHSSQMLRSLLRNPRQWPFIEFEEINLTELWGDMDNQKHIYEGFDKVLLEMNTLLSANHASKTQSKLLESPDQPKLNEQRTSTPSPNPPEQQRGVTAEQGPQRISIEEQQQGKKPTAEQELYIESVIEPGTHTESTLEQGSSRRLLTEQETHRESTTEQGQHKGSIEGQGPRRVSVSEQGSSRESVAEQGSRRESIAEQDRHKGSVAEQGSRRMSAAEQGSLRESVIEEPYQKSEQGPYGEIISEEQEDIGSTSQSRKDSILKSTKYGEPITSEYIEVPLQEKRSWEQTYEEEIFLSSELQEEVPTLSRKDHFPETTKKEVQKDKPCEPKSQKIEGKSWSGEFFTCNWKMKYVTFEDEEQANLIYGNSRFTDLHSIIRNIQSCKEVKGRTAFNGVSFNLLQFVQLLETFVGEDAPLSVSETLTSFFKEGYVETEQEKMNALEQFSQNAFQVRQRLLLEAIFQKWDSDGSGFLDLKEVDELLYTYKEGMEKESMKKDHSRTEVWKFGNVVIEHLYHWIHICSALMKITKQLNSGITPPLPSKTDNYMYAKMPGEGLQEK

SEQ ID NO: 46343 - protein, 92 aa, Homo sapiens
  MOD_RES (1)..(1): Any amino acid
XLVPSLLVQSLSFRWFVQDYTGGGLGAVEGLTSRGPPMMGAGYVHGAARGGPGVRVSPTPGAQRLCRLSVWIWQSVIHLLQMGQVWSSKRKT

SEQ ID NO: 46344 - protein, 100 aa, Homo sapiens
MTMDKSELVQKAKLAEQAERYDDMAAAMKAVTEQGHELSNEERNLLSVAYKNVVGARRSSWRVISSIEQKTERNEKKQQMGKEYREKIEAELQDICNDVL

SEQ ID NO: 46345 - protein, 50 aa, Homo sapiens
MATFSRQEFFQQLLQGCLLPTAQQGLDQIWLLLAICLACRLLWRLVRCTW

SEQ ID NO: 46346 - protein, 115 aa, Homo sapiens
  MOD_RES (1)..(1): Any amino acid
XTSSASETESVPSRSRRGKVEAAGPGGESEPTGSGGTLAHTPRRSLPSHHGKKMRMARCGHCRGCLRVQDCGSCVNCLDKPKFGGPNTKKQCCVPPVPYPGDVLLPSPDTGSVTK

SEQ ID NO: 46347 - protein, 1217 aa, Homo sapiens
MAQPVEISPPDSSLSKQQTSTPVLTQPGRAYRMEIQVPPSPTDVAKSNTAVCVCNESVRTVIVPSEKVVDLLSNRNNHTGPSHRTEEVRYGVSEQTSLKTVSRTTSPPLSIPTTHLIHQPAGSRSLEPSGILLKSGNYSGHSDGISSSRSQAVEAPSVSVNHYSPNSHQHIDWKNYKTYKEYIDNRRLHIGCRTIQERLDSLRAASQSTTDYNQVVPNRTTLQGRRRSTSHDRVPQSVQIRQRSVSQERLEDSVLMKYCPRSASQGALTSPSVSFSNHRTRSWDYIEGQDETLENVNSGTPIPDSNGEKKQTYKWSGFTEQDDRRGICERPRQQEIHKSFRGSNFTVAPSVVNSDNRRMSGRGVGSVSQFKKIPPDLKTLQSNRNFQTTCGMSLPRGISQDRSPLVKVRSNSLKAPSTHVTKPSFSQKSFVSIKDQRPVNHLHQNSLLNQQTWVRTDSAPDQQVETGKSPSLSGASAKPAPQSSENAGTSDLELPVSQRNQDLSLQEAETEQSDTLDNKEAVILREKPPSGRQTPQPLRHQSYILAVNDQETGSDTTCWLPNDARREVHIKRMEERKASSTSPPGDSLASIPFIDEPTSPSIDHDIAHIPASAVISASTSQVPSIATVPPCLTTSAPLIRRQLSHDHESVGPPSLDAQPNSKTERSKSYDEGLDDYREDAKLSFKHVSSLKGIKIADSQKSSEDSGSRKDSSSEVFSDAAKEGWLHFRPLVTDKGKRVGGSIRPWKQMYVVLRGHSLYLYKDKREQTTPSEEEQPISVNACLIDISYSETKRKNVFRLTTSDCECLFQAEDRDDMLAWIKTIQESSNLNEEDTGVTNRDLISRRIKEYNNLMSKAEQLPKTPRQSLSIRQTLLGAKSEPKTQSPHSPKEESERKLLSKDDTSPPKDKGTWRKGIPSIMRKTFEKKPTATGTFGVRLDDCPPAHTNRYIPLIVDICCKLVEERGLEYTGIYRVPGNNAAISSMQEELNKGMADIDIQDDKWRDLNVISSLLKSFFRKLPEPLFTNDKYADFIEANRKEDPLDRLKTLKRLIHDLPEHHYETLKFLSAHLKTVAENSEKNKMEPRNLAIVFGPTLVRTSEDNMTHMVTHMPDQYKIVETLIQHHDWFFTEEGAEEPLTTVQEESTVDSQPVPNIDHLLTNIGRTGVSPGDVSGEVGGVYHTVMSLVDSVMSLMDSWNCRKKEDCCPHCSCLVCRNPRFL

SEQ ID NO: 46348 - protein, 635 aa, Homo sapiens
  MOD_RES (1)..(1): Any amino acid
XPSPSMFGELLQNASTMGDLRNCPSNCGERIRIRRVLMNAPQIITIGLVWDSDHSDLAEDVIHSLGTCLKLGDLFFRVTDDRAKQSELYLVGMICYYGKHYSTFFFQTKIRKWMYFDDAHVKEIGPKWKDVVTKCIKGHYQPLLLLYADPQGTPVSTQDLPPQAEFQSYSRTCYDSEDSGREPSISSDTRTDSSTESYPYKHSHHESVVSHFSSDSQGTVIYNVENDSMSQSSRDTGHLTDSECNQKHTSKKGSLIERKRSSGRVRRKGDEPQASGYHSEGETLKEKQAPRNASKPSSSTNRLRDFKETVSNMIHNRPSLASQTNVGSHCRGRGGDQPDKKPPRTLPLHSRDWEIESTSSESKSSSSSKYRPTWRPKRESLNIDSIFSKDKRKHCGYTQLSPFSEDSAKEFIPDEPSKPPSYDIKFGGPSPQYKRWGPARPGSHLLEQHPRLIQRMESGYESSERNSSSPVSLDAALPESSNVYRDPSAKRSAGLVPSWRHIPKSHSSSILEVDSTASMGGWTKSQPFSGEEISSKSELDELQEEVARRAQEQELRRKREKELEAAKGFNPHPSRFMDLDELQNQGRSDGFERSLQEAESVFEESLHLEQKGDCAAALALCNEAILNSLSRSKYC

SEQ ID NO: 46349 - protein, 163 aa, Homo sapiens
MPHLMERMVGSGLLWLALVSCILTQASAVQRGEGGVRMSETCVQVHRCQTDAPMWLNGTHPALGDGITNHTACAHWSGNCCFWKTEVLVKACPGGYHVYRLEGTPWCNLRYCTDPSTVEDKCEKACRPEEECLALNSTWGCFCRQDLNSSDVHSLQPQLDCGP

SEQ ID NO: 46350 - protein, 458 aa, Homo sapiens
MLIQRTFISYYISYQNKSFDDEESVDGNRPSSAASAFKVPAPKTSGNPANSARKPGSAGGPKVGGASKEGGAGAVDEDDFIKAFTDVPSIQIYSSRELEETLNKIREILSDDKHDWDQRANALKKIRSLLVAGAAQYDCFFQHLRLLDGALKLSAKDLRSQVVREACITVAHLSTVLGNKFDHGAEAIVPTLFNLVPNSAKVMATSGCAAIRFIIRHTHVPRLIPLITSNCTSKSVPVRRRSFEFLDLLLQEWQTHSLERHAAVLVETIKKGIHDADAEARVEARKTYMGLRNHFPGEAETLYNSLEPSYQKSLQTYLKSSGSVASLPQSDRSSSSSQESLNRPFSSKWSTANPSTVAGRVSAGSSKASSLPGSLQRSRSDIDVNAAAGAKAHHAAGQSVRSGRLGAGALNAGSYASLGKRTDYGKLYHVLSLISVKTSSYTLIISIHSCYLRIVHMF

SEQ ID NO: 46351 - protein, 217 aa, Homo sapiens
MAVEGGMKCVKFLLYVLLLAFCACAVGLIAVGVGAQLVLSQTIIQGATPGSLLPVVIIAVGVFLFLVAFVGCCGACKENYCLMITFAIFLSLIMLVEVAAAIAGYVFRDKVMSEFNNNFRQQMENYPKNNHTASILDRMQADFKCCGAANYTDWEKIPSMSKNRVPDSCCINVTVGCGINFNEKAIHKEGCVEKIGGWLRKNVLVVAAAALGIAFVE

SEQ ID NO: 46352 - protein, 518 aa, Homo sapiens
MSSTDEVSVCRAGLGPEGGEQAGAHTASPGAPRGDGHGRDLNFGGQRSGKGKGKGESGFTDPESFSFESESELIEQGRVVLWGQEGRPGTPVDDQAGGGDYSFYLADEPATIMPPSSVQGHPSPEGATAKGSTDIWADLEVGPSWRGALSPSPGEWQQASAGPLHLSVPGPGPAWENPERGSKSRLSFQVDPQQPSAEGPAGLNTDDSDSADESSDLPVIRVIISTKEGSQAKPGSPKKPGDTCGRRSFHRRESYLQVQGPLLISPPRRLTPVVERPAVGELDVPSLKKMQSMVWGKRGVRPSCSGAAVRGPLPRGTLGRKVAQEKKSLEGAPELALRGAFPAWGQRLSAVPPDPASFPPVSGVGLLGKSVRPKEPKHSSPGKKPAGRKTRESQAAAREDNDPNRDEVPRAQLPTQKPELISLSVRRGEYSSGDPNIRAPQVLGTSQPSAFTLRRLVPRCHASSGDWQPPVHPPRPERQQQPPGAQGCPRCILLQREIEDLRDQLAAMQFLTDKFQDL

SEQ ID NO: 46353 - protein, 1872 aa, Homo sapiens
MTTMLQKSDSNASFLRAARAGNLDKVVEYLKGGIDINTCNQNGLNALHLAAKEGHVGLVQELLGRGSSVDSATKKGNTALHIASLAGQAEVVKVLVKEGANINAQSQNGFTPLYMAAQENHIDVVKYLLENGANQSTATEDGFTPLAVALQQGHNQAVAILLENDTKGKVRLPALHIAARKDDTKSAALLLQNDHNADVQSKMMVNRTTESGFTPLHIAAHYGNVNVATLLLNRGAAVDFTARNGITPLHVASKRGNTNMVKLLLDRGGQIDAKTRDGLTPLHCAARSGHDQVVELLLERGAPLLARTKNGLSPLHMAAQGDHVECVKHLLQHKAPVDDVTLDYLTALHVAAHCGHYRVTKLLLDKRANPNARALNGFTPLHIACKKNRIKVMELLVKYGASIQAITESGLTPIHVAAFMGHLNIVLLLLQNGASPDVTNIRGETALHMAARAGQVEVVRCLLRNGALVDARAREEQTPLHIASRLGKTEIVQLLLQHMAHPDAATTNGYTPLHISAREGQVDVASVLLEAGAAHSLATKKGFTPLHVAAKYGSLDVAKLLLQRRAAADSAGKNGLTPLHVAAHYDNQKVALLLLEKGASPHATAKNGYTPLHIAAKKNQMQIASTLLNYGAETNIVTKQGVTPLHLASQEGHTDMVTLLLDKGANIHMSTKSGLTSLHLAAQEDKVNVADILTKHGADQDAHTKLGYTPLIVACHYGNVKMVNFLLKQGANVNAKTKNGYTPLHQAAQQGHTHIINVLLQHGAKPNATTANGNTALAIAKRLGYISVVDTLKVVTEEVTTTTTTITEKHKLNVPETMTEVLDVSDEEGDDTMTGDGGEYLRPEDLKELGDDSLPSSQFLDGMNYLRYSLEGGRSDSLRSFSSDRSHTLSHASYLRDSAVMDDSVVIPSHQVSTLAKEAERNSYRLSWGTENLDNVALSSSPIHSGFLVSFMVDARGGAMRGCRHNGLRIIIPPRKCTAPTRVTCRLVKRHRLATMPPMVEGEGLASRLIEVGPSGAQFLGPVIVEIPHFAALRGKERELVVLRSENGDSWKEHFCDYTEDELNEILNGMDEVLDSPEDLEKKRICRIITRDFPQYFAVVSRIKQDSNLIGPEGGVLSSTVVPQVQAVFPEGALTKRIRVGLQAQPMHSELVKKILGNKATFSPIVTLEPRRRKFHKPITMTIPVPKASSDVMLNGFGGDAPTLRLLCSITGGTTPAQWEDITGTTPLTFVNECVSFTTNVSARFWLIDCRQIQESVTFASQVYREIICVPYMAKFVVFAKSHDPIEARLRCFCMTDDKVDKTLEQQENFAEVARSRDVEVLEGKPIYVDCFGNLVPLTKSGQHHIFSFFAFKENRLPLFVKVRDTTQEPCGRLSFMKEPKSTRGLVHQAICNLNITLPIYTKESESDQEQEEEIDMTSEKNPQDEQERIEERLAYIADHLGFSWTELARELDFTEEQIHQIRIENPNSLQDQSHALLKYWLERDGKHATDTNLVECLTKINRMDIVHLMETNTEPLQERISHSYAEIEQTITLDHSEGFSVLQEELCTAQHKQKEEQAVSKESETCDHPPIVSEEDISVGYSTFQDGVPKTEGDSSATALFPQTHKEQVQQDFSGKMQDLPEESSLEYQQEYFVTTPGTETSETQKAMIVPSSPSKTPEEVSTPAEEEKLYLQTPTSSERGGSPIIQEPEEPSEHREESSPRKTSLVIVESADNQPETCERLDEDAAFEKGDDMPEIPPETVTEEEYIDEHGHTVVKKVTRKIIRRYVSSEGTEKEEIMVQGMPQEPVNIEEGDGYSKVIKRVVLKSDTEQSETLSIVCPSIIRSLCVSPAFCPVPHNFRLSQWKAVESAKLLKQLWYLERGWRNIWGILV

SEQ ID NO: 46354 - protein, 78 aa, Homo sapiens
MYCLQWLLPVLLIPKPLNPALWFSHSMFMGFYLLSFLLERKPCTICALVFLAALFLICYSCWGNCFLYHCSDSPLPES

SEQ ID NO: 46355 - protein, 257 aa, Homo sapiens
LCNLLKLCGDHEVMRDECYCQVVKQITDNTSSKQDSCQRGWRLLYIVTAYHSCSEVLHPHLTRFLQDVSRTPGLPFQGIAKACEQNLQKTLRFGGRLELPSSIELRAMLAGRSSKRQLFLLPGGLERHLKIKTCTVALDVVEEICAEMALTRPEAFNEYVIFVVTNRGGKSRSTSQPSSTVQRQARPGSTWSASTGSRHRRSAPTRPVPSFWASSAPYLCSAPPSSSSRAAATLLCQPLASLPSTTMASTFSAQRLM

SEQ ID NO: 46356 - protein, 865 aa, Homo sapiens
MPTLFKGVWGVVEHSRALGRFCPACLPSGPHLHTQPALGTAEMTLLSSQSSSLVAPSGSVSAENPEQRMLEKRAKVIEELLQTERDYIRDLEMCIERIMVPMQQAQVPNIDFEGLFGNMQMVIKVSKQLLAALEISDAVGPVFLGHRDELEGTYKIYCQNHDEAIALLEIYEKDEKIQKHLQDSLADLKSLYNEWGCTNYINLGSFLIKPVQRVMRYPLLLMELLNSTPESHPDKVPLTNAVLAVKEINVNINEYKRRKDLVLKYRKGDEDSLMEKISKLNIHSIIKKSNRVSSHLKHLTGFAPQIKDEVFEETEKNFRMQERLIKSFIRDLSLYLQHIRESACVKVVAAVSMWDVCMERGHRDLEQFERVHRYISDQLFTNFKERTERLVISPLNQLLSMFTGPHKLVQKRFDKLLDFYNCTERAEKLKDKKTLEELQSARNNYEALNAQLLDELPKFHQYAQGLFTNCVHGYAEAHCDFVHQALEQLKPLLSLLKVAGREGNLIAIFHEEHSRVLQQLQVFTFFPESLPATKKPFERKTIDRQSARKPLLGLPSYMLQSEELRASLLARYPPEKLFQAERNFNAAQDLDVSLLEGDLVGVIKKKDPMGSQNRWLIDNGVTKGFVYSSFLKPYNPRRSHSDASVGSHSSTESEHGSSSPRFPRQNSGSTLTFNPSSMAVSFTSGSCQKQPQDASPPPKECDQGTLSASLNPSNSESSPSRCPSDPDSTSQPRSGDSADVARDVKQPTATPRSYRNFRHPEIVGYSVPGRNGQSQDLVKGCARTAQAPEDRSTEPDGSEAEGNQVYFAVYTFKARNPNELSVSANQKLKILEFKDVTGNTEWWLAEVNGKKGYVPSNYIRKTEYT

SEQ ID NO: 46357 - protein, 61 aa, Homo sapiens
MWSWKCLLFWAVLVTATLCTARPSPTLPEQACPDLQEAKWCSASFHSITPLPFGLGTRLSD

SEQ ID NO: 46358 - protein, 106 aa, Homo sapiens
MGCVQCKDKEATKLTEERDGSLNQSSGYRYGTDPTPQHYPSFGVTSIPNYNNFHAAGGQGLTVFGGVNSSSHTGTLRTRGGTGVTLFVALYDYEARTEDDLSFHKG

SEQ ID NO: 46359 - protein, 530 aa, Homo sapiens
MAAPVVAPPGVVVSRANKRSGAGPGGSGGGGARGAEEEPPPPLQAVLVADSFDRRFFPISKDQPRVLLPLANVALIDYTLEFLTATGVQETFVFCCWKAAQIKEHLLKSKWCRPTSLNVVRIITSELYRSLGDVLRDVDAKALVRSDFLLVYGDVISNINITRALEEHRLRRKLEKNVSVMTMIFKESSPSHPTRCHEDNVVVAVDSTTNRVLHFQKTQGLRRFAFPLSLFQGSSDGVEVRYDLLDCHISICSPQVAQLFTDNFDYQTRDDFVRGLLVNEEILGNQIHMHVTAKEYGARVSNLHMYSAVCADVIRRWVYPLTPEANFTDSTTQSCTHSRHNIYRGPEVSLGHGSILEENVLLGSGTVIGSNCFITNSVIGPGCHIGDNVVLDQTYLWQGVRVAAGAQIHQSLLCDNAEVKERVTLKPRSVLTSQVVVGPNITLPEGSVISLHPPDAEEDEDDGEFSDDSGADQEKDKVKMKGVRLNRLQSSRSRSCWQGLPLESCRHEHGGRGGTAAESVGTQDQHGRRE

SEQ ID NO: 46360 - protein, 133 aa, Homo sapiens
MFLRGRPVPMMIPDELAPTYSLDTRSELPSCRLKLEWVYGYRGRDCRANLYLLPTGEIVYFVASVAVLYSVEEQRQRHYLGHNDDIKCLAIHPDMVTIATGQVAGTTKEGKPLPPHVRIWDSVSLSTLHVLGL

SEQ ID NO: 46361 - protein, 144 aa, Homo sapiens
MSSLMLLFLFTYIYLGEVLKTYNVAMDYPTLLLTVWNFGAVGMVCIHWKGPLVLQQAYLIMISALMALVFIKYLPEWSAWVILGAISVYDLVAVLCPKGPLRMLVETAQERNEPIFPALIYSSAMVWTVGMAKLDPSSQGALQL

SEQ ID NO: 46362 - protein, 175 aa, Homo sapiens
MSTKQEARRDEGEARTRGQEAQLRDRAHLSQQRRLKQATQFLHKDSADLLPLDSLKRLGTSKDLQPRSVIQRRLVEGNPNWLQGEPPRMQDLIHGQESRRKTSRTEIPALLVNCKCQDQLLRVAVDTGTQYNRISAGCLSRLGLEKRVLKASAGDLAPGPPTQVEQLELQLGQET

SEQ ID NO: 46363 - protein, 405 aa, Homo sapiens
MQPSSLLPLALCLLAAPASALVRIPLHKFTSIRRTMSEVGGSVEDLIAKGPVSKYSQAVPAVTEGPIPEAQYYGEIGIGTPPQCFTVVFDTGSSNLWVPSIHCKLLDIACWIHHKYNSDKSSTYVKNGTSFDIHYGSGSLSGYLSQDTVSVPCQSASSASALGGVKVERQVFGEATKQPGITFIAAKFDGILGMAYPRISVNNVLPVFDNLMQQKLVDQNIFSFYLSRDPDAQPGGELMLGGTDSKYYKGSLSYLNVTRKAYWQVHLDQVEVASGLTLCKEGCEAIVDTGTSLMVGPVDEVRELQKAIGAVPLIQGEYMIPCEKVSTLPAITLKLGGKGYKLSPEDYTLKVSQAGKTLCLSGFMGMDIPPPSGPLWILGDVFIGRYYTVFDRDNNRVGFAEAARL

SEQ ID NO: 46364 - protein, 431 aa, Homo sapiens
MPFTLHLRSRLPSAIRSLILQKKPNIRNTSSMAGELRPASLVVLPRSLAPAFERFCQVNTGPLPLLGQSEPEKWMLPPQGAISETRMGHPQFWKYEFGACTGSLASLEQYSEQLKDMVAFFLGCSFSLEEALEKAGLPRRDPAGHSQAGAYKTTVPCVTHAGFCCPLVVTMRPIPKDKLEGLVRACCSLGGEQGQPVHMGDPELLGIKELSKPAYGDAMVCPPGEVPVFWPSPLTSLGAVSSCETPLAFASIPGCTVMTDLKDAKAPPGCLTPERIPEVHHISQDPLHYSIASVSASQKIRELESMIGIDPGNRGIGHLLCKDELLKASLSLSHARSVLITTGFPTHFNHEPPEETDGPPGAVALVAFLQALEKEVAIIVDQRAWNLHQKIVEDAVEQGVLKTQIPILTYQGGSVEAAQAFLCKNGDPQTP

SEQ ID NO: 46365 - protein, 28 aa, Homo sapiens
NTKMADGPDEYDTEAGCVPLLHPEIWNI

SEQ ID NO: 46366 - protein, 192 aa, Homo sapiens
  MOD_RES (1)..(1): Any amino acid
XELVREVLFDAVVTAPMEAYWTALALNMSEESEHVVDMAFLGTRAGLLRSSLFVGSEKVSDRKFLTPEDEASVFTLDRFPLWYRQASEHPAGSFVFNLRWAEGPESAGEPMVVTASTAVAVTVDKRTAIAAAAGVQMKLEFLQRKFWAATRQCSTVDGPCTQSCEDSDLDCFVIDNNGFILISKRSRESDYV

SEQ ID NO: 46367 - protein, 215 aa, Homo sapiens
GPVCGLDGKTYRNECALLKARCKEQPELEVQYQGRCKKTCRDVFCPGSSTCVVDQTNNAYCVTCNRICPEPASSEQYLCGNDGVTYSSACHLRKATCLLGRSIGLAYEGKCITKSCEDIQCTGGKKCLWDFKVGRGRCSLCDELCPDSKSDEPVCASDNATYASECAMKEAACSSGVLLEVKHSGSCNSISEDTEEEEEDEDQDYSFPISSILEW

SEQ ID NO: 46368 - protein, 51 aa, Homo sapiens
MDKVCAVFGGSRGIGRAVAQLMARKGYRLAVIARNLEGAKAAAGDLGGMVF

SEQ ID NO: 46369 - protein, 1588 aa, Homo sapiens
MEACLKEELPSPVELEESLRNGVLLAKLGHCFAPSVVPLKKIYDVEQLRYQATGLHFRHTDNINFWLSAIAHIGLPSTFFPETTDIYDKKNMPRVVYCIHALSLFLFRLGLAPQIHDLYGKVKFTAEELSNMASELAKYGLQLPAFSKIGGILANELSVDEAAVHAAVLAINEAVERGVVEDTLAALQNPSALLENLREPLAAVYQEMLAQAKMEKAANARNHDDRESQDIYDHYLTQAEIQGNINHVNVHGALEVVDDALERQSPEALLKALQDPALALRGVRRDFADWYLEQLNSDREQKAQELGLVELLEKEEVQAGVAAANTKGDQEQAMLHAVQRINKAIRRRVAADTVKELMCPEAQLPPVYPVASSMYQLELAVLQQQQGELGQEELFVAVEMLSAVVLINRALEARDASGFWSSLVNPATGLAEVEGENAQRYFDALLKLRQERGMGEDFLSWNDLQATVSQVNAQTQEETDRVLAVSLINEALDKGSPEKTLSALLLPAAGLDDVSLPVAPRYHLLLVAAKRQKAQVTGDPGAVLWLEEIRQGVVRANQDTNTAQRMALGVAAINQAIKEGKAAQTERVLRNPAVALRGVVPDCANGYQRALESAMAKKQRPADTAFWVQHDMKDGTAYYFHLQTFQGIWEQPPGCPLNTSHLTREEIQSAVTKVTAAYDRQQLWKANVGFVIQLQARLRGFLVRQKFAEHSHFLRTWLPAVIKIQAHWRGYRQRKIYLEWLQYFKANLDAIIKIQAWARMWAARRQYLRRLHYFQKNVNSIVKIQAFFRARKAQDDYRILVHAPHPPLSVVRRFAHLLNQSQQDFLAEAELLKLQEEVVRKIRSNQQLEQDLNIMDIKIGLLVKNRITLQEVVSHCKKLTKRNKEQLSDMMVLDKQKGLKSLSKEKRQKLEAYQHLFYLLQTQPIYLAKLIFQMPQNKTTKFMEAVIFSLYNYASSRREAYLLLQLFKTALQEEIKSKVEQPQDVVTGNPTVVRLVVRFYRNGRGQSALQEILGKVIQDVLEDKVLSVHTDPVHLYKNWINQTEAQTGQRSHLPYDVTPEQALSHPEVQRRLDIALRNLLAMTDKFLLAITSSVDQIPYGMRYVAKVLKATLAEKFPDATDSEVYKVVGNLLYYRFLNPAVVAPDAFDIVAMAAGGALAAPQRHALGAVAQLLQHAAAGKAFSGQSQHLRVLNDYLEETHLKFRKFIHRACQVPEPEERFAVDEYSDMVAVAKPMVYITVGELVNTHRLLLEHQDCIAPDHQDPLHELLEDLGELPTIPDLIGESIAADGHTDLSKLEVSLTLTNKFEGLEADADDSNTRSLLLSTKQLLADIIQFHPGDTLKEILSLSASREQEAAHKQLMSRRQACTAQTPEPLRRHRSLTAHSLLPLAEKQRRVLRNLRRLEALGLVSARNGYQGLVDELAKDIRNQHRHRHRRKAELVKLQATLQGLSTKTTFYEEQGDYYSQYIRACLDHLAPDSKSSGKGKKQPSLHYTAAQLLEKGVLVEIEDLPASHFRNVIFDITPGDEAGKFEVNAKFLGVDMERFQLHYQDLLQLQYEGVAVMKLFNKAKVNVNLLIFLLNKKFLRK

SEQ ID NO: 46370 - protein, 541 aa, Homo sapiens
MLQMLWHFLASFFPRAGCHGSREGDDREVRGTPAPAWRDQMASFLGKQDGRAEATEKRPTILLVVGPAEQFPKLIFSWRRKPLLWSGRCPQRHSSFQILRGCLLGSTENFAYCKIVQAGDKDLDGQLDFEEFVHYLQDHEKKLRLVFKSLDKKNDGRIDAQEIMQSLRDLGVKISEQQAEKILKRIRTGHFWGPVTYMDKNGTMTIDWNEWRDYHLLHPVENIPEIILYWKHSTIFDVGENLTVPDEFTVEERQTGMWWRHLVAGGGAGAVSRTCTAPLDRLKVLMQVHASRSNNMGIVGGFTQMIREGGARSLWRGNGINVLKIAPESAIKFMAYEQIKRLVGSDQETLRIHERLVAGSLAGAIAQSSIYPMEVLKTRMALRKTGQYSGMLDCARRILAREGVAAFYKGYVPNMLGIIPYAGIDLAVYETLKNAWLQHYAVNSADPGVFVLLACGTMSSTCGQLASYPLALVRTRMQAQASIEGAPEVTMSSLFKHILRTEGAFGLYRGLAPNFMKVIPAVSISYVVYENLKITLGVQSR

SEQ ID NO: 46371 - protein, 146 aa, Homo sapiens
MAQRSTVFPSRVTKERRVRTMPRHSQSLTMAPYSSVSLVEQLEDRILCHEKTTAALVEHAFRIKDDIVNSLQKMQNKGGGDRLARLFLEEHIRNITAIVKQLNRDIEVLQEQIRARDNISYGTNSALKTLEMRQLSGLGDLRGRVA

SEQ ID NO: 46372 - protein, 336 aa, Homo sapiens
MGCDGGTIPKRHELVKGPKKVEKIWHLKNGKEWCSLHSEGKNKNGKEWDMEYDVDKDAELVAQWNYCTLSQEILRRPIVACELGRLYNKDAVIEFLLDKSAEKALGKAASHIKSIKNVTELKLSDNPAWEGDKGNTKGDKHDDLQRARFICPVVGLEMNGRHRFCFLRCCGCVFSERALKEIKAEVCHTCGAAFQEDDVIMLNGTKEDVDVLKTRMEERRLRAKLEKKTKKPKAAESVSKPDVSEEAPGPSKVKTGKPEEASLDSREKKTNLAPKSTAMNESSSGKAGKPPCGATKRSIADSEESEAYKSLFTTHSSAKRSKEESAHWVTHTSYCF

SEQ ID NO: 46373 - protein, 281 aa, Homo sapiens
MSKPHSEAGTAFIQTQQLHAAMADTFLEHMCRLDIDSPPITARNTGIICTIGPASRSVETLKEMIKSGMNVARLNFSHGTHEYHAETIKNVRTATESFASDPILYRPVAVALDTKGPEIRTGLIKGSGTAEVELKKGATLKITLDNAYMEKCDENILWLDYKNICKVVEVGSKIYVDDGLISLQVKQKGADFLVTEVENGGSLGSKKGVNLPGAAVDLPAVSEKDIQDLKFGVEQDVDMVFASFIRKASDVHEVRKVLGEKGKNIKIISKIENHEGVRRQV

SEQ ID NO: 46374 - protein, 98 aa, Homo sapiens
LSDPPKAEAIRDMVRYARNVIEEFRRAKHYKSPSELLEICELSQEKMSSVFEDSNVYMLHMMYQAMGVCLYMQDWEGALQYGQKIIKPYSLGHCNHGS

SEQ ID NO: 46375 - protein, 14 aa, Homo sapiens
MTALRLLQRMKRDW

SEQ ID NO: 46376 - protein, 218 aa, Homo sapiens
MFLSTSKHGRQEAMLLFLLSALVLLTQPLGYLEAEMKTYSHRTMPSACTLVMCSSVESGLPGRDGRDGREGPRGEKGDPGLPGAAGQAGMPGQAGPVGPKGDNGSVGEPGPKGDTGPSGPPGPPGVPGPAGREGPLGKQGNIGPQGKPGPKGEAGPKGEVGAPGMQGSAGARGLAGPKGERGVPGERGVPGNTGAAGSAGAMGPQGSPGARGPPGLKG

SEQ ID NO: 46377 - protein, 394 aa, Homo sapiens
  MOD_RES (1)..(1): Any amino acid
XAPMEVAVCTDSAAPMWSCIVWELHSGANLLTYRGGQAGPRGLALLNGEYLLAAQLGKNYISAWELQRKVSTGNLLVILSRHYQDVSCLQFTGDSSHFISGGKDCLVLVWSLCSVLQADPSRIPAPRHVWSHHALPITDLHCGFGGPLARVATSSLDQTVKLWEVSSGELLLSVLFDVSIMAVTMDLAEHHMFCGGSEGSIFQVDLFTWPGQRERSFHPEQDAGKVFKGHRNQVTCLSVSTDGSVLLSGSHDETVRLWDVQSKQCIRTVALKGPVTNAAILLAPVSMLSSDFRPSLPLPHFNKHLLGAEHGDEPRHGGLTLRLGLHQQGSEPSYLDRTEQLQAVLCSTMEKSVLGGQDQLRVRVTELEDEVRNLRKINRDLFDFSTRFITRPAK

SEQ ID NO: 46378 - protein, 248 aa, Homo sapiens
MARSPGRAYALLLLLICFNVGSGLHLQVLSTRNENKLLPKHPHLVRQKRAWITAPVALREGEDLSKKNPIAKIHSDLAEERGLKITYKYTGKGITEPPFGIFVFNKDTGELNVTSILDREETPFFLLTGYALDARGNNVEKPLELRIKVLDINDNEPVFTQDVFVGSVEELSAAHTLVMKINATDADEPNTLNSKISYRIVSLEPAYPPVFYLNKDTGEIYTTSVTLDREDNSWNYSLLGMCCPIWAM

SEQ ID NO: 46379 - protein, 29 aa, Homo sapiens
  MOD_RES (1)..(1): Any amino acid
XALLLCIALLSSYSIHLLLTCAGIAGTGS

SEQ ID NO: 46380 - protein, 15 aa, Homo sapiens
MPVQLSEHPEWNESM

SEQ ID NO: 46381 - protein, 309 aa, Homo sapiens
MMGIFLVYVGFVFFSVLYVQQGLSSQAKFTEFPRNVTATEGQNVEMSCAFQSGSASVYLEIQWWFLRGPEDLDPGAEGAGAQVELLPDRDPDSDGTKISTVKVQGNDISHKLQISKVRKKDEGLYECRVTDANYGELQEHKAQAYLKVNANSHARRMQAFEASPMWLQDMKPRKNVSAAIPSSIHGSANQRTHSTSSPQVVAKIPKQSPQSVSPILPEVKHLHRPPLLVLPFFSLSSLFSTDPLPTFPTSHRTVKRLPAPLPQPGHGSTPGVQSCVLAPPAKSKSPVKSTERTAKLTLNSKHHPAPTVL

SEQ ID NO: 46382 - protein, 90 aa, Homo sapiens
MQLFLLLCLVLLSPQGASLHRHHPREMKKRVEDLHVGATVAPSSRRDFTFDLYRALASAAPSQSIFFSPVSISMSLAMLSLGAGSSTKMQ

SEQ ID NO: 46383 - protein, 81 aa, Homo sapiens
VVLRNDVAPTIIPTPMYRPRPANPDEIGNFIIEVLLLCRSPPWQEALATGYSLDPAWPVPPFPPTTPGKTKTQPFHKYMST

SEQ ID NO: 46384 - protein, 85 aa, Homo sapiens
MLPLFIFLISDLTHNFLGPLSLDPSRTTLATARGKEEMDKPCGCPPGVCDHGTGDRRDPWYSTVGLLPPVRAMSQRNLNAKTEQG

SEQ ID NO: 46385 - protein, 797 aa, Homo sapiens
MSVSDTPHYPPELESVSHPVQRDCLGLLVHAQRTPSWPPSPDEDPRLPSFPLEEPGSRPLVPRNLPFPALSLEEEEEEEEDEDAAEPEWLRSEEHPSQFFAEAQRLREQRLLLDEEVSVAGRVYGVHRVILAAISSLFRDRLLGGGGPRPPFSLEVSPGGWEAVLTFAYEGVLGPASQGDVLAAAEALGAPRVKAAAQQTCERAGNAREDVKKPSQAEELRENLRGIELLYREGVGCDLKLEAGGCQLSVHRAALACGSEFFGAMLLSGMRESQGTEVSLRTISTQDLRLLVSFAYSGVVRARWPGLLRAAQAALQYQSSSCLDLCQKGLARGLSPARCLALFPMAEAPGLERLWSKARHYLLTHLPAVALCPAFPSLPAACLAELLDSDELHVQEEFEAFVAARCWLAANPETQESEAKALLRCVRFGRMSTRELRRVRAAGLLPPLTPDLLHQLMVEADVPGQERRREPDRALVVIGGDGLRPDMALRQPSRAVWWARAFRCGVGLVRTVEWGQLPALPAPGRFRHGAASLAGSELYVCGGQDFYSHSNTLASTLRWEPSQEDWEEMAPLSQARSLFSLVALDGKLYALGGRHNDVALDSVETYNPELNVWRPAPALPAPCFAHAAAILEGQLYVSGGCGGTGQYLASLMHYDPKLEKPGTFLSPMGVPRAGHVMAALGGRLYVAGGLGETEDLLSFEAYELRTDSWTHLAPLPSPHVGAASAVLQGELLVLGGYSHRTYALSHLIHAYCPGLGRWLCLGTLPRPRAEMPACILTLPAVQHIALVPTPHQTKPAG

SEQ ID NO: 46386 - protein, 71 aa, Homo sapiens
MAANATTNPSQLLPLGNRRPLGSRNRELTFRIGGRGAVPRQALAECGEMYKTKCGSTLSSKSSRQQAAPAL

SEQ ID NO: 46387 - protein, 64 aa, Homo sapiens
MNPPAAFLAGRQARNETLSNTLVELSAQVGQLQAREQALTTMIKLKDKDIIEAVNHIADCSGKF

SEQ ID NO: 46388 - protein, 285 aa, Homo sapiens
MGIPGSHNLRYFWNFPGQGPIISDVGGADLGGAPSAPSSIPSGTMGCGCSSHPEDDWMENIDVCENCHYPIVPLDGKGTLLIRNGSEVRDPLVTYEGSNPPASPLQDNLVIALHSYEPSHDGDLGFEKGEQLRILEQSGEWWKAQSLTTGQEGFIPFNFVAKANSLEPEPWFFKNLSRKDAERQLLAPGNTHGSFLIRESESTAGSFSLSVRDFDQNQGEVVKHYKIRNLDNGGFYISPRITFPGLHELVRHYTNASDGLCTRLSRPCQTQKPQKPWWEDEWEVP

SEQ ID NO: 46389 - protein, 209 aa, Homo sapiens
MTPPRLFWVWLLVAGTQGVNDGDMRLADGGATNQGRVEIFYRGQWGTVCDNLWDLTDASVVCRALGFENATQALGRAAFGQGSGPIMLDEVQCTGTEASLADCKSLGWLKSNCRHERDAGVVCTNETRSTHTLDLSRELSEALGQIFDSQRGCDLSISVNVQGEDALGFCGHTVILTANLEAQALWKEPGSNVTMSVDAECVPMVRDLL

SEQ ID NO: 46390 - protein, 108 aa, Homo sapiens
  MOD_RES (1)..(1): Any amino acid
XKERRNPASGPNPMLRPLPPRPGLPDERLKKLELGRGRTSGPRPRGPLRADHGVPLPGSPPPTVALPLPSRTNLARSKGLSWTPYPVQHTDRAPCFPWLLPHDIRPVL

SEQ ID NO: 46391 - protein, 139 aa, Homo sapiens
MLEYALKQERAKYHKLKFGTDLNQGEKKADVSEQVSNGPVESVTLENSPLVWKEGRQLLRQYLEEVGYTDTILDMRSKRVRSLLGRSLELNGAVEPSEGAPRAPPGPAGLSGGESLLVKQIEEQIKRNAAGKDGKERLG

SEQ ID NO: 46392 - protein, 81 aa, Homo sapiens
MAAPDLAHGGHVSRDSVCLHEEQTQAAGMVAGWLINCYQDAVTFDDVAVDFTQEEWTLLDPSQRDLYRDVMLENYENLASV

SEQ ID NO: 46393 - protein, 211 aa, Homo sapiens
MGLPVSWAPPALWVLGCCALLLSLWALCTACRRPEDAVAPRKRARRQRARLQGSATAAEAVSARLSRGPGWGPQGTDQPSSPPVPTEADPPLLPQQVGHQTARAAPGPAQQQGPAACQHGSPAPTLAGGVQGHHRTAGSPLCLPTPGAAPGSAGSCSHRRVRWPRGHLFQRGAGGPSRGQPGGQPCGGRVCPRPEAQRDPSQSPRATAGED

SEQ ID NO: 46394 - protein, 47 aa, Homo sapiens
MKHMEPQVKQVFQSLPKSAFSGGYYRGGFEPKMTKREAALILGPYCQ

SEQ ID NO: 46395 - protein, 216 aa, Homo sapiens
YPSLWRRLATVEERKKIVASSHDHGYTTLATSVTLLKASEVEEILDGNDEKYKAVSISTEPPTYLREQKAKRNSQWVPTLPNSSHHLDAVPCSTTINRNRMGRDKKRTFPLWCGCIAALTLRADSALVLQHVSVPSSPEKHSALTLCSPQRHSTSSPLNCCVSLTSRTLSIASLALSAVTLPCPPHLSGPSSGVTQGAVLGPFLCPQFHMSGPQPV

SEQ ID NO: 46396 - protein, 7 aa, Homo sapiens
MDPLNLS

SEQ ID NO: 46397 - protein, 132 aa, Homo sapiens
EPHSFNTRMSSFDASLPDMNNLQISEGSKAEAVREEEDTTVHEDDLSSSINELPAAFECSDSFSLDMTEGEEKGNRALDQFTLASPQPVTMPRRPGAATSTSLCVTQMAPVLCIHFMCSPPCLRIFRKGSAS

SEQ ID NO: 46398 - protein, 158 aa, Homo sapiens
MGRLTEAAAAGSGSRAAGWAGSPPTLLPLSPTSPRCAATMASSDEDGTNGGASEAGEDREAPGERRRLGVLATAWLTFYDIAMTAGRRLILSPRLECIGAISAHCQPQPPEFKRFSCLGLRSSWDYKRGPPRPINFCIFGRDRVSPCWPGWSRTPDLK

SEQ ID NO: 46399 - protein, 119 aa, Homo sapiens
MEDFATRTYGTSGLDNRPLFGETSAKDRIINLVVGSLTSLLILVTLISAFVFPQLPPKPLNIFFAVCISLSSITACILVSTVENLNSVLEGLSCNAQDKNFQPWVYTKGYLLIISSSSP

SEQ ID NO: 46400 - protein, 306 aa, Homo sapiens
  MOD_RES (1)..(1): Any amino acid
XESEDGEDEVSCETVKMGRKDSLDLEEEAASGASSALEAGGSSGLEDVLPLLQQADELHRGDEQGKREGFQLLLNNKLVGVGEGQGPHSPQLRKKGPHPFLSGLQYGSRQDFLWRLARAYSDMCELTEEVSEKKSYALDGKEEAEAALEKGDESADCHLWYAVLCGQLAEHESIQRRIQSGFSFKEHVDKAIALQPENPMAHFLLGRWCYQVSHLSWLEKKTATALLESPLSATVEDALQSFLKAEELQPGFSKAGRVYISKCYRELGKNSEARWWMKLALELPDVTKEDLAIQKDLEELEVILRD

SEQ ID NO: 46401 - protein, 65 aa, Homo sapiens
MSDPEMGWVPEPPTMTLGASRVELRVSCHGLLDRDTLTKPHPCVLLKLYSDEQWVEPCLLPGAGP

SEQ ID NO: 46402 - protein, 256 aa, Homo sapiens
MAPTQGPRAPLEFGGPLGAAALLLLLPATMFHLLLAARSGPARLLGPPASLPGLEVLWSPRALLLWLAWLGLQAALYLLPARKAQVAPVSALAPGGNSGNPIYDFFLGRELNPRICFFDFKYFCELRPGLIGWVLINLALLMKEAELRGSPSLAMWLVNGFQLLYVGDALWHEEAVLTTMDITHDGFGFMLAFGDMAWVPFTYSLQAQFLLHHPQPLGLPMASVICLINATGYYIFRGANSQKNTFRKNPSDPRVA

SEQ ID NO: 46403 - protein, 31 aa, Homo sapiens
MLLNHPDKGGSPYIAAKINEAKDLLEGQAKK

SEQ ID NO: 46404 - protein, 139 aa, Homo sapiens
MLSRLVLNSWAQAIIRPRPPKVLGLQVTTFSEAYQEGRLQKLLKMNGPEDLPKSYDYDLIIIGGGSGGLAAAKEAAQYGKKVMVLDFVTPTPLGTRWGLGGTCVNVGCIPKKLMHQAALLGQALQDSRNYGWKVEETGM

SEQ ID NO: 46405 - protein, 488 aa, Homo sapiens
MSYGEIEGKFLGPREEVTSEPRCKKLKSTTESYVFHNHSNADFHRIQEKTGNDWVPVTIIDVRGHSYLQENKIKTTDLHRPLHDEMPGNRPDVIESIDSQVLQEARPPLVSADDEIYSTSKAFIGPIYKPPEKKKRNEGRNEAHVLNGINDRGGQKEKQKFNSEKSEIDNELFQFYKEIEELEKEKDGFENSCKESEPSQEQFVPFYEGHNNGLLKPDEEKKDLSNKAMPSHCDYQQNLGNEPDKYPCNGQVIPTFCDTSFTSFRPEWQSVYPFIVPYGPPLPSLNYHLNIQRFSGPPNPPSNIFQAQDDSQIQNGYYVNNCHVNWNCMTFDQNNEYTDCSENRSSVHPSGNGCSMQDRYVSNGFCEVRERCWKDHCMDKHNGTDRFVNQQFQEEKLNKLQKLLILLRGLPGSGKTTLSRILLGQNRDGIVFSTDDYFHHQDGYRYNVNQLGDAHDWNQNRGGINMVCLERRLLRCWIVMNIKCPFLL

SEQ ID NO: 46406 - protein, 80 aa, Homo sapiens
MDLRTMTQSLVTLAEDNIAFFSSQGPGETAQRLSGVFAGVREQALGLEPALGRLLGVAHLFDLDPETPANGYRSLVHTAR

SEQ ID NO: 46407 - protein, 630 aa, Homo sapiens
MLWKSKGRRRRASHPTAESSSEQGASEADIDSDSGYCSPKHSNNQPAAGALRNPDSGTMNHVESSMCAGGVNWSNVTCQATQKKPWMEKNQTFSRGGRQTEQRNNSQVGFRCRGHSTSSERRQNLQKRPDNKHLSSSQSHRSDPNSESLYFEDEDGFQELNENGNAKDENIQQKLSSKVLDDLPENSPINIVQTPIPITTSVPKRAKSQKKKALAAALATAQEYSEISMEQKKLQEALSKAAGKKNKTPVQLDLGDMLAALEKQQQAMKARQITNTRPLSYTVVTAASFHTKDSTNRKPLTKSQPCLTSFNSVDIASSKAKKGKEKEIAKLKRPTALKKVILKEREEKKGRLTVDHNLLGSEEPTEMHLDFIDDLPQEIVSQEDTGLSMPSDTSLSPASQNSPYCMTPVSQGSPASSGIGSPMASSTITKIHSKRFREYCNQVLCKEIDECVTLLLQELVSFQERIYQKDPVRAKARRRLVMGLREVTKHMKLNKIKCVIISPNCEKIQSKGGLDEALYNVIAMAREQEIPFVFALGRKALGRCVNKLVPVSVVGIFNYFGAESLFNKLVELTEEARKAYKDMVAAMEQEQAEEALKNVKKVPHHMGHSRNPSAASAISFCSVISEPISE

SEQ ID NO: 46408 - protein, 461 aa, Homo sapiens
MLAPSWEEHATCLANAEEQDMQRVLIDISEKEAVNLQQDAFVVIGRDTRPSSEKLSQSVIDGVTVLGGQFHDYGLLTTPQLHYMVYCRNTGGRYGKATIEGYYQKLSKAFVELTKQASCSGDEYRSLKVDCANGIGALKLREMEHYFSQGLSVQLFNDGSKGKLNHLCGADFVKSHQKPPQGMEIKSNERCCSFDGDADRIVYYYHDADGHFHLIDGDKIATLISSFLKELLVEIGESLNIGVVQTAYANGSSTRYLEEVMKVPVYCTKTGVKHLHHKAQEFDIGVYFEANGHGTALFSTAVEMKIKQSAEQLEDKKRKAAKMLENIIDLFNQAAGDAISDMLVIEAILALKGLTVQQWDALYTDLPNRQLKVQVADRRVISTTDAERQAVTPPGLQEAINDLVKKYKLSRAFVRPSGTEDVVRVYAEADSQESADHLAHEVSLAVFQLAGGIGERPQPGF

SEQ ID NO: 46409 - protein, 108 aa, Homo sapiens
MQSPWKILTVAPLFLLLSLQSSASPANDDQSRPSLSNGHTCVEKLFLKTTCYLVIDKFGSDIIKLLSADMNADVVCHTLEFCKQNTGQPLCHLYPLPKETWKFTLQKA

SEQ ID NO: 46410 - protein, 47 aa, Homo sapiens
MSNYSVSLVGPAPWGFRLQGGKDFNMPLTISSVSKLYKFYYRCSFSA

SEQ ID NO: 46411 - protein, 121 aa, Homo sapiens
MVVGESGLGKSTLINSLFLTDLYPERVIPGAAEKIERTVQIEASTVEIEERGVKLRLTVVDTPGYGDAINCRDCFKTIISYIDEQFERYLHDESGLNRRHIIDNRVHCCFYFISPFGHGLK

SEQ ID NO: 46412 - protein, 166 aa, Homo sapiens
GEIPVDFSKQYSASWMCLSLLAALACSAGDTWASEVGPVLSKSSPRLITTWEKVPVGTNGGVTVVGLVSSLLGGTFVGIAYFLTQLIFVNDLDISAPQWPIIAFGGLAGLLGSIVDSYLGATMQYTGLDESTGMVVNSPTNKNGQFMLKSLFMERALCNSIIKLPT

SEQ ID NO: 46413 - protein, 206 aa, Homo sapiens
MMDVSGVGFPSKVPWKKMSAEELENQYCPSRWVVRLGAEEALRTYSQIGIEATTRARATRKSLLHVPYGDGEGEKVDIYFPDESSEALPFFLFFHGGYWQSGSKDESAFMVHPLTAQGVAVVIVAYGIAPKGTLDHMVDQVTRSVAFVQKRYPSNKWVLPVDFLPVGPQWVGGQCNQYLGYSQAAPLACGAESKLGLFEGGLMLWG

SEQ ID NO: 46414 - protein, 458 aa, Homo sapiens
MAQWNQLQQLDTRYLEQLHQLYSDSFPMELRQFLAPWIESQDWAYAASKESHATLVFHNLLGEIDQQYSRFLQESNVLYQHNLRRIKQFLQSRYLEKPMEIARIVARCLWEESRLLQTAATAAQQGGQANHPTAAVVTEKQQMLEQHLQDVRKRVQDLEQKMKVVENLQDDFDFNYKTLKSQGDMQDLNGNNQSVTRQKMQQLEQMLTALDQMRRSIVSELAGLLSAMEYVQKTLTDEELADWKRRQQIACIGGPPNICLDRLENWITSLAESQLQTRQQIKKLEELQQKVSYKGDPIVQHRPMLEERIVELFRNLMKSAFVVERQPCMPMHPDRPLVIKTGVQFTTKVRLLVKFPELNYQLKIKVCIDKDSGDVAALRGSRKFNILGTNTKVMNMEESNNGSLSAEFKHLTLREQRCGNGGRANCDASLIVTEELHLITFETEVYHQGLKIDLEDLV

SEQ ID NO: 46415 - protein, 354 aa, Homo sapiens
MQLTRCCFVFLVQGSLYLVICGQDDGPPGSEDPERDDHEGQPRPRVPRKRGHISPKSRPMANSTLLGLLAPPGEAWGILGQPPNRPNHSPPPSAKVKKIFGWGDFYSNIKTVALNLLVTGKIVDHGNGTFSVHFQHNATGQGNISISLVPPSKAVEFHQEQQIFIEAKASKIFNCRMEWEKVERGRRTSLCTHDPAKICSRDHAQSSATWSCSQPFKVVCVYIAFYSTDYRLVQKGPSLLSGDVRHTPLLQTTLRSPPWRLETAGTGAAHQWTPTVCRSASHSAVETAGRRRKQWGQRPWAPSPPPLAELSAGTGGTLTPLLLLSSCGEPDAGDSWRARPSWHTVLPAPGMDSF

SEQ ID NO: 46416 - protein, 944 aa, Homo sapiens
MVVTTSARGGGGDRTPSRRRGCGLAPAGAAALLAGASCLCYGRSLQGEFVHDDVWAIVNNPDVRPGAPLRWGIFTNDFWGKGMAENTSHKSYRPLCVLTFKLNIFLTGMNPFYFHAVNIILHCLVTLVLMYTCDKTVFKNRGLAFVTALLFAVHPIHTEAVAGIVGRADVLACLLFLLAFLSYNRSLDQGCVGGSFPSTVSPFFLLLSLFLGTCAMLVKETGITVFGVCLVYDLFSLSNKQDKSSNGALCPRSPQQPGSPQPSSLPGHPHRENGKQQRFPHKGAWGGCHSPLPPEPKSSGFPVSPRAVWSMMRYLRASSNRNFLLTMRPFLKRAILVLSYVLVILYFRLWIMGGSMPLFSEQDNPASFSPYILTRFLTYSYLLAFNVWLLLAPVTLCYDWQVGSIPLVETIWDMRNLATIFLAVVMALLSLHCLAAFKRLEHKEVLVGLLFLVFPFIPASNLFFRVGFVVAERVLYMPSMGYCILFVHGLSKLCTWLNRCGATTLIVSTVLLLLLFSWKTVKQNEIWLSRESLFRSGVQTLPHNAKVHYNYANFLKDQGRNKEAIYHYRTALKLYPRHASALNNLGTLTRDTAEAKMYYQRALQLHPQHNRALFNLGNLLKSQEKKEEAITLLKDSIKYGPEFADAYSSLASLLAEQERFKEAEEIYQTGIKNCPDSSDLHNNYGVFLVDTGLPEKAVAHYQQAIKLSPSHHVAMVNLGRLYRSLGENSMAEEWYKRALQVAHKAEILSPLGALYYNTGRYEEALQIYQEAAALQPSQRELRLALAQVLAVMGQTKEAEKMTNHIVSEETGCLECYRLLSAIYSKQENHDKALDAIDKALQLKPKDPKVISELFFTKGNQLREQNLLDKAFESYRVAVQLNPDQAQAWMNMGGIQHIKGKYVSARAYYERALQLVPDSKLLKENLAKLDRLEKRLQEVREKDQT

SEQ ID NO: 46417 - protein, 97 aa, Homo sapiens
MEAVAKFDFTASGEDELSFHTGDVLKILSNQEEWFKAELGSQEGYVPKNFIDIQFPKWFHEGLSRHQAENLLMGKEVGFFIIRASQSSPGDFSISVR

SEQ ID NO: 46418 - protein, 42 aa, Homo sapiens
MSRYTRPPNTSLFIRNVADATRRSKAVHSSWQAPPSLNQPVS

SEQ ID NO: 46419 - protein, 152 aa, Homo sapiens
  MOD_RES (1)..(1): Any amino acid
XHRCSSPPPPHEFRAYQLYTLYRGKDGKVMQMRVLDKLMVERLSAERTECLNRLQQHSDTEKHEGEKRQISLVDELKTWCMLKIQNLEQKLSGDSRACRAKSTPSTCESSTGVDQLVVTAGPAAASDSSPPVVRPKEKALNSTATQRLQQEL

SEQ ID NO: 46420 - protein, 92 aa, Homo sapiens
MSRVRDAGCVAAGIVIGAGAWYCVYKYTRGRDQTKKRMAKPKNRAVAGTGARARAGLRAGFTIDLGSGFSPPTPVRAEAEDRAQDEASALDT

SEQ ID NO: 46421 - protein, 3086 aa, Homo sapiens
MRKKELSATKKDRVNHCLTICENIVAQSVRNSPEFQKLLGIAMELFLLCSDDAESDVRMVADECLNKVIKALMDSNLPRLQLELYKEIKKNGAPRSLRAALWRFAELAHLVRPQKCRPYLVNLLPCLTRTSKRPEESVQETLAAAVPKIMASFGNFANDNEIKVLLKAFIANLKSSSPTIRRTAAGSAVSICQHSRRTQYFYSWLLNVLLGLLVPVEDEHSTLLILGVLLTLRYLVPLLQQQVKDTSLKGSFGVTRKEMEVSPSAEQLVQVYELTLHHTQHQDHNVVTGALELLQQLFRTPPPELLQTLTAVGGIGQLTAAKEESGGRSRSGSIVELIAGGGSSCSPVLSRKQKGKVLLGEEEALEDDSESRSDVSSSALTASVKDEISGELAASSGVSTPGSAGHDIITEQPRSQHTLQADSVDLASCDLTSSATDGDEEDILSHSSSQVSAVPSDPAMDLNDGTQASSPISDSSQTTTEGPDSAVTPSDSSEIVLDGTDNQYLGLQIGQPQDEDEEATGILPDEASEAFRNSSMALQQAHLLKNMSHCRQPSDSSVDKFVLRDEATEPGDQENKPCRIKGDIGQSTDDDSAPLVHCVRLLSASFLLTGGKNVLVPDRDVRVSVKALALSCVGAAVALHPESFFSKLYKVPLDTTEYPEEQYVSDILNYIDHGDPQVRGATAILCGTLICSILSRSRFHVGDWMGTIRTLTGNTFSLADCIPLLRKTLKDESSVTCKLACTAVRNCVMSLCSSSYSELGLQLIIDVLTLRNSSYWLVRTELLETLAEIDFRLVSFLEAKAENLHRGAHHYTGLLKLQERVLNNVVIHLLGDEDPRVRHVAAASLIRLVPKLFYKCDQGQADPVVAVARDQSSVYLKLLMHETQPPSHFSVSTITRIYRGYNLLPSITDVTMENNLSRVIAAVSHELITSTTRALTFGCCEALCLLSTAFPVCIWSLGWHCGVPPLSASDESRKSCTVGMATMILTLLSSAWFPLDLSAHQDALILAGNLLAASAPKSLRSSWASEEEANPAATKQEEVWPALGDRALVPMVEQLFSHLLKVINICAHVLDDVAPGPAIKAALPSLTNPPSLSPIRRKGKEKEPGEQASVPLSPKKGSEASAASRQSDTSGPVTTSKSSSLGSFYHLPSYLKLHDVLKATHANYKVTLDLQNSTEKFGGFLRSALDVLSQILELATLQDIGKCVEEILGYLKSCFSREPMMATVCVQQLLKTLFGTNLASQFDGLSSNPSKSQGRAQRLGSSSVRPGLYHYCFMAPYTHFTQALADASLRNMVQAEQENDTSGWFDVLQKVSTQLKTNLTSVTKNRADKNAIHNHIRLFEPLVIKALKQYTTTTCVQLQKQVLDLLAQLVQLRVNYCLLDSDQVFIGFVLKQFEYIEVGQFRESEAIIPNIFFFLVLLSYERYHSKQIIGIPKIIQLCDGIMASGRKAVTHAIPALQPIVHDLFVLRGTNKADAGKELETQKEVVVSMLLRLIQYHQVLEMFILVLQQCHKENEDKWKRLSRQIADIILPMLAKQQMHIDSHEALGVLNTLFEILAPSSLRPVDMLLRSMFVTPNTMASVSTVQLWISGILAILRVLISQSTEDIVLSRIQELSFSPYLISCTVINRLRDGDSTSTLEEHSEGKQIKNLPEETFSRFLLQLVGILLEDIVTKQLKVEMSEQQHTFYCQELGTLLMCLIHIFKSGMFRRITAAATRLFRSDGCGGSFYTLDSLNLRARSMITTHPALVLLWCQILLLVNHTDYRWWAEVQQTPNLGDTARRCLWGKKKETEPRGVQPSESGPFRRHSLSSTKLLSPQMSGEEEDSDLAAKLGMCNREIVRRGALILFCDYVCQNLHDSEHLTWLIVNHIQDLISLSHEPPVQDFISAVHRNSAASGLFIQAIQSRCENLSTPTMLKKTLQCLEGIHLSQSGAVLTLYVDRLLCTPFRVLARMVDILACRRVEMLLAANLQSSMAQLPMEELNRIQEYLQSSGLAQRHQRLYSLLDRFRLSTMQDSLSPSPPVSSHPLDGDGHVSLETVSPDKDWYVHLVKSQCWTRSDSALLEGAELVNRIPAEDMNAFMMNSEFNLSLLAPCLSLGMSEISGGQKSALFEAAREVTLARVSGTVQQLPAVHHVFQPELPAEPAAYWSKLNDLFGDAALYQSLPTLARALAQYLVVVSKLPSHLHLPPEKEKDIVKFVVATLEALSWHLIHEQIPLSLDLQAGLDCCCLALQLPGLWSVVSSTEFVTHACSLIYCVHFILEAVAVQPGEQLLSPERRTNTPKAISEEEEEVDPNTQNPKYITAACEMVAEMVESLQSVLALGHKRNSGVPAFLTPLLRNIIISLARLPLVNSYTRVPPLVWKLGWSPKPGGDFGTAFPEIPVEFLQEKEVFKEFIYRINTLGWTSRTQFEETWATLLGVLVTQPLVMEQEESPPEEDTERTQINVLAVQAITSLVLSAMTVPVAGNPAVSCLEQQPRNKPLKALDTRFGRKLSIIRGIVEQEIQAMVSKRENIATHHLYQAWDPVPSLSPATTGALISHEKLLLQINPERELGSMSYKLGQVSIHSVWLGNSITPLREEEWDEEEEEEADAPAPSSPPTSPVNSRKHRAGVDIHSCSQFLLELYSRWILPSSSARRTPAILISEVVRSLLVVSDLFTERNQFELMYVTLTELRRVHPSEDEILAQYLVPATCKAAAVLGMDKAVAEPVSRLLESTLRSSHLPSRVGALHGVLYVLECDLLDDTAKQLIPVISDYLLSNLKGIAHCVNIHSQQHVLVMCATAFYLIENYPLDVGPEFSASIIQMCGVMLSGSEESTPSIIYHCALRGLERLLLSEQLSRLDAESLVKLSVDRVNVHSPHRAMAALGLMLTCMYTGKEKVSPGRTSDPNPAAPDSESVIVAMERVSVLFDRIRKGFPCEARVVARILPQFLDDFFPPQDIMNKVIGEFLSNQQPYPQFMATVVYKVFQTLHSTGQSSMVRDWVMLSLSNFTQRAPVAMATWSLSCFFVSASTSPWVAAILPHVISRMGKLEQVDVNLFCLVATDFYRHQIEEELDRRAFQSVLEVVAAPGSPYHRLLTCLRNVHKVTTC

SEQ ID NO: 46422 - protein, 296 aa, Homo sapiens
MPQHGPWQTRMRKISNHGSLRVAKVAYPLGLCVGVFIYVAYIKWHRATATQAFFSITRAAPGARWGQQAHSPLGTAADGHEVFYGIMFDAGSTGTRVHVFQFTRPPRETPTLTHETFKALKPGLSAYADDVEKSAQGIRELLDVAKQDIPFDFWKATPLVLKATAGLRLLPGEKAQKLLQKVKKVFKASPFLVGDDCVSIMNGTDEGVSAWITINFLTGSLKTPGGSSVGMLDLGGGSTQIAFLPRVEGTLQASPPGYLTALRMFNRTYKLYSYSYLGLGLMSARLAILGGVEGQP

SEQ ID NO: 46423 - protein, 218 aa, Homo sapiens
MSMTLGYWDIRGLAHAIRLLLEYTDSSYEEKKYTMGDAPDYDRSQWLNEKFKLGLDFPNLPYLIDGAHKITQSNAILCYIARKHNLCGETEEEKIRVDILENQAMDVSNQLARVCYSPDFEKLKPEYLEELPTMMQHFSQFLGKRPWFVGDKITFVDFLAYDVLDLHRIFEPNCLDAFPNLKDFISRFEGLEKISAYMKSSRFLPRPVFTKMAVWGNK

SEQ ID NO: 46424 - protein, 95 aa, Homo sapiens
MRMQFWKKTVEDIYCDNPPHQPVAIELWKAVKRHNLTKRWLMKIVDEREKNLDDKAYRNIKELENYAENTQSSLLYLTLEILGIKDLHADHAASH

SEQ ID NO: 46425 - protein, 245 aa, Homo sapiens
MARRSSFQSCQIISLFTFAVGVNICLGFTAHRIKRAEGWEEGPPTVLSDSPWTNISGSCKGRCFELQEAGPPDCRCDNLSRGWECTKDRCGEVRNEENACHCSEDCLARGDCCTNYQVVCKGESHWVDDDCEEIKAAECPAGFVRPPLIIFSVDGFRASYMKKGSKVMPNIEKLRSCGTHSPYMRPVYPTKTFPNLYTLATGLYPESHGIVGNSMYDPVFDATFHLRGREKFNHRWWGGQPVSFA

SEQ ID NO: 46426 - protein, 74 aa, Homo sapiens
MIIDASGESGLTQLLMTEVMKLQKKVQDLTALLSSKDDFIKELRVKDSLLRKHQERVQRLKEECEAGSRELKRC

SEQ ID NO: 46427 - protein, 199 aa, Homo sapiens
MSGPRPVVLSGPSGAGKSTLLKRLLQEHSGIFGFSVSRESRALVEGYHEEPEARRGERQREVMQRDIAAGDFIEHAEFSGNLYGTSKVAVQAVQAMNRICVLDVDLQGVRNIKATDLRPIYISVQPPSLHVLEQRLRQRNTETEESLVKRLAAAQADMESSKEPGLFDVVIINDSLDQAYAELKEALSEEIKKAQRTGA

SEQ ID NO: 46428 - protein, 38 aa, Homo sapiens
MLLAPQGRSFSKKRMGLNRWKRFTRKPSPKLRSWSMTG

SEQ ID NO: 46429 - protein, 53 aa, Homo sapiens
  MOD_RES (1)..(1): Any amino acid
XLVGVLWFVSVTTGPWGAVATSAGGEESLKCEDLKVGQYPLWRTPPHGGEIQK

SEQ ID NO: 46430 - protein, 60 aa, Homo sapiens
NLLTQQVTNLNLATGIINRSSASAPPTLRPIISPSGPTWSTQSDPQAPENHSSSPGSSFI

SEQ ID NO: 46431 - protein, 483 aa, Homo sapiens
MQTNQTPPTYNKTNKFTYGFQNIVDAYGIGTYREINPAPYTIITFPFLFAVMFGDFGHGILMTLFAVWMVLRESRILSQKNENEMFSTVFSGRYIILLMGVFSMYTGLIYNDCFSKSLNIFGSSWSVRPMFTYNWTEETLRGNPVLQLNPALPGVFGGPYPFGIDPIWNIATNKLTFLNSFKMKMSVILGIIHMLFGVSLSLFNHIYFKKPLNIYFGFIPEIIFMTSLFGYLVILIFYKWTAYDAHTSENAPSLLIHFINMFLFSYPESGYSMLYSGQKGIQCFLVVVALLCVPWMLLFKPLVLRRQYLRRKHLGTLNFGGIRVGNGPTEEDAEIIQHDQLSTHSEDADEPSEDEVFDFGDTMVHQAIHTIEYCLGCISNTASYLRLWALSLAHAQLSEVLWTMVIHIGLSVKSLAGGLVLFFFFTAFATLTVAILLIMEGLSAFLHALRLHWVEFQNKFYSGTGFKFLPFSFEHIREGKFEE

SEQ ID NO: 46432 - protein, 259 aa, Homo sapiens
MAVASTFIPGLNPQNPHYIPGYTGHCPLLRFSVGQTYGQVTGQLLRGPPGLAWPPVHRTLLPPIRPPRSPEVPRESLPVRRGQERLSSSMIPGYTGFVPRAQFIFAKNCSQVWAEALSDFTHLHEKQGSEELPKEAKGRKDTEKDQVPEPEGQLEEPTLEVVEQASPYSMDDRDPRKFFMSAFLCSPTRHCRNLGRSTHQAVPRTPNISPHFPEHTLRTWVFYNYGGYVPGYKFQFGHTFGHLTHDALGLSTFQKQLLA

SEQ ID NO: 46433 - protein, 167 aa, Homo sapiens
MSGGKYVDSEGNIYKPNNKAMADELSEKQVYDAHTKEIDLVNRDPKHLNDDVVKIDFEDVIAEPEGTHSFDGIWKASFTTFTVTKYWFYRLLSALFGIPMALIWGIYFAILSFLHIWAVVPCIKSFLIEIQCISRVYSIYVHTVCDPLFEAVGKIFSNVRINLQKEI

SEQ ID NO: 46434 - protein, 258 aa, Homo sapiens
MEPRTGDAADPRGSRGGRGPSPLAGPSARQLLARLDARPLAARAAVDVAALVRRAGATLRLRRKEAVSVLDSADIEVTDSRLPHATIVDHRPQVGDLVLHINGESTQGLTHAQAVERIRAGGPQLHLVIRRPLETHPGKPRGVGEPRKGVVPSWPDRSPDPGGPEVTGSRSSSTSLVQHPPSRTTLKKTRGSPEPSPEAAADGPTVSPPERRAEDPNDQIPGSPGPWLVPSEERLSRALGVRGAAQLAQEMAAGRRRH

SEQ ID NO: 46435 - protein, 620 aa, Homo sapiens
MRLETAEAYVGPGGPECPMRTPQLALLQVFFLVFPDGVRPQPSSSPSGAVPTSLELQRGTDGGTLQSPSEATATRPAVPGLPTVVPTLVTPSAPGNRTVDLFPVLPICVCDLTPGACDINCCCDRDCYLLHPRTVFSFCLPGSVRSSSWVCVDNSVIFRSNSPFPSRVFMDSNGIRQFCVHVNNSNLNYFQKLQKVNATNFQALAAEFGGESFTSTFQTQSPPSFYRAGDPILTYFPKWSVISLLRQPAGVGAGGLCAESNPAGFLESKSTTCTRFFKNLASSCTLDSALNAASYYNFTVLKVPRSMTDPQNMEFQVPVILTSQANAPLLAGNTCQNVVSQVTYEIETNGTFGIQKVSVSLGQTNLTVEPGASLQQHFILRFRAFQQSTAASLTSPRSGNPGYIVGKPLLALTDDISYSSQGNGSCSVKRHEVQFGVNAISGCKLRLKKADCSHLQQEIYQTLHGRPRPEYVAIFGNADPAQKGGWTRILNRHCSISAINCTSCCLIPVSLEIQVLWAYVGLLSNPQAHVSGVRFLYQCQSIQDSQQVTEVSLTTLVNFVDITQKPQPPRGQPKMDWKWPFDFFPFKVAFSRGVFSQKCSVSPILILCLLLLGVLNLETM

SEQ ID NO: 46436 - protein, 178 aa, Homo sapiens
MNPIALGSRWLAYAENKLIRCHQSRGGACGDNIQSYTATVISAAKTLKSGLTMVGKVVTQLTGTLPSGVTEDDVAIHSNSRRSPLVPGIITVIDTETVGEGQVLVSEDSDSDGIVAHFPAHEKPVCCMAFNTSGMLLVTTDTLGHDFHVFQILTHPWSSSQCAVHHLYTLHRGETEAK

SEQ ID NO: 46437 - protein, 95 aa, Homo sapiens
  MOD_RES (1)..(1): Any amino acid
XINVTTAVSEVSVPPKGTSAAWAILPLLLLVMAAVGGYLMWRNWQHKNMKSMNFDNPVYLKTTEEDLSIDIGRHSASVGHTYPAISVVSTDDDLA

SEQ ID NO: 46438 - protein, 238 aa, Homo sapiens
MLLLEVISGERLAKPERGKMRVHKISNVNKALDFIASKGVKLVSIGAEEIVDGNVKMTLGMIWTIILRFAIQDISVEETSAKEGLLLWCQRKTAPYKNVNIQNFHISWKDGLGFCALIHRHRPELIDYGKLRKDDPLTNLNTAFDVAEKYLDIPKMLDAEDIVGTARPDEKAIMTYVSSFYHAFSGAQKAETAANRICKVLAVNQENEQLMEDYEKLASDLLEWIRRTIPWLENRVPE

SEQ ID NO: 46439 - protein, 151 aa, Homo sapiens
MAAGGTGGLREEQRYGLSCGRLGQDNITVLHVKLTETAIRALETYQSHKNLIPFRPSIQFQGLHGVANLNSKDLSYTLKDYVFKELQRDWPGYSEIDRRSLESVLSRKLNPSQNAAGTSRSESPVCSSRDAVSSPQKRLLDSEFIDPLMNK

SEQ ID NO: 46440 - protein, 390 aa, Homo sapiens
MKNLTQYEQLKAHQGTGAGISPVILNSGEGKEVDILRMLIKAKDEYTKCKTCSEPKKITSSSAIYDNPNLIKPIPVKPSENQQQRIPQPNQTLDPEPQHLSLTALFGKQDKATCQETVEPPQTLHQQQQQQQQQQEKLPIRQGVVRSLSYEEPRRHSPPIEKQLCPAIQKLMVRSADLHPLSELPENRPCENGSTHSAGEFFTGPVQPGSPHNIGTSRGVQNASRTQNLFEKLQSTPGAANKCDPSTPAPASSAALNRSRAPTSVTPVAPGKGLAQPPQAYFNGSLPPQTVGHQAHGREQSTLPRQTLPISGSQTGSSGVISPQELLKKLQIVQQEQQLHASNRPALAAKFPVLAQSSGTGKPLESWINKTPNTEQQTPLFQYSQISRAE

SEQ ID NO: 46441 - protein, 128 aa, Homo sapiens
MCSLALQQLISMDLFWRLFFVCGQEGLRALEATGMMLRVLVGAVLPAMLLAAPPPINKLALFPDKSAWCEAKNITQIVGHSGCEAKSIQNRACLGQCFSYSVPNTFPQSTESLVHCDSCMPAQSMWEI

SEQ ID NO: 46442 - protein, 1741 aa, Homo sapiens
MDPRNTAMLGLGSDSEGFSRKSPSAISTGTLVSKREVELEKNTKEEEDLRKRNRERNIEAGKDDGLTDAQQQFSVKETNFSEGNLKLKIGLQAKRTKKPPKNLENYVCRPAIKTTIKHPRKALKSGKMTDEKNEHCPSKRDPSKLYKKADDVAAIECQSEEVIRLHSQGENNPLSKKLSPVHSEMADYINATPSTLLGSRDPDLKDRALLNGGTSVTEKLAQLIATCPPSKSSKTKPKKLGTGTTAGLVSKDLIRKAGVGSVAGIIHKDLIKKPTISTAVGLVTKDPGKKPVFNAAVGLVNKDSVKKLGTGTTAVFINKNLGKKPGTITTVGLLSKDSGKKLGIGIVPGLVHKESGKKLGLGTVVGLVNKDLGKKLGSTVGLVAKDCAKKIVASSAMGLVNKDIGKKLMSCPLAGLISKDAINLKAEALLPTQEPLKASCSTNINNQESQELSESLKDSATSKTFEKNVVRQNKESILEKFSVRKEIINLEKEMFNEGTCIQQDSFSSSEKGSYETSKHEKQPPVYCTSPDFKMGGASDVSTAKSPFSAVGESNLPSPSPTVSVNPLTRSPPETSSQLAPNPLLLSSTTELIEEISESVGKNQFTSESTHLNVGHRSVGHSISIECKGIDKEVNDSKTTHIDIPRISSSLGKKPSLTSESSIHTITPSVVNFTSLFSNKPFLKLGAVSASDKHCQVAESLSTSLQSKPLKKRKGRKPRWTKVVARSTCRSPKGLELERSELFKNVSCSSLSNSNSEPAKFMKNIGPPSFVDHDFLKRRLPKLSKSTAPSLALLADSEKPSHKSFATHKLSSSMCVSSDLLSDIYKPKRGRPKSKEMPQLEGPPKRTLKIPASKVFSLQSKEEQEPPILQPEIEIPSFKQGLSVSPFPKKRGRPKRQMRSPVKMKPPVLSVAPFVATESPSKLESESDNHRSSSDFFESEDQLQDPDDLDDSHRPSVCSMSDLEMEPDKKITKRNNGQLMKTIIRKINKMKTLKRKKLLNQILSSSVESSNKGKVQSKLHNTVSSLAATFGSKLGQQINVSKKGTIYIGKRRGRKPKTVLNGILSGSPTSLAVLEQTAQQAAGSALGQILPPLLPSSASSSEILPSPICSQSSGTSGGQSPVSSDAGFVEPSSVPYLHLHSRQGSMIQTLAMKKASKGRRRLSPPTLLPNSPSHLSELTSLKEATPSPISESHSDETIPSDSGIGTDNNSTSDRAEKFCGQKKRRHSFEHVSLIPPETSTVLSSLKEKHKHKCKRRNHDYLSYDKMKRQKRKRKKKYPQLRNRQDPDFIAELEELISRLSEIRITHRSHHFIPRDLLPTIFRINFNSFYTHPSFPLDPLHYIRKPDLKKKRGRPPKMREAMAEMPFMHSLSFPLSSTGFYPSYGMPYSPSPLTAAPIGLGYYGRYPPTLYPPPPSPSFTTPLPPPSYMHAGHLLLNPAKYHKKKHKLLRQEAFLTTSRTPLLSMSTYPSVPPEMAYGWMVEHKHRHRHKHREHRSSEQPQVSMDTGSSRSVLESLKRYRFGKDAVGERYKHKEKHRCHMSCPHLSPSKSLINREEQWVHREPSESSPLALGLQTPLQIDCSESSPSLSLGGFTPNSEPASSDEHTNLFTSAIGSCRVSNPNSSGRKKLTDSPGLFSAQDTSLNRLHRKESLPSNERAVQTLAGSQPTSDKPSQRPSESTNCSPTRKRSSSESTSSTDKTEDWYEYLEVTYILMIIETMRINMFPVGNKRSSLSKSKISCFWG

SEQ ID NO: 46443 - protein, 70 aa, Homo sapiens
  MOD_RES (1)..(1): Any amino acid
XRSGSGNFGGGRGGGFGGNDNFGRGGSYNDFGNYNNQSSNFGPMKGGNFGGRSSGPYGGGGQYFAKPRNQ

SEQ ID NO: 46444 - protein, 109 aa, Homo sapiens
MDFLLLGLCLYWLLRRPSGVVLCLLGACFQMLPAAPSGCPQLCRCEGRLLYCEALNLTEAPHNLSGLLGLSLRYNSLSELRAGQFTGLMQLTWLYLDHNHICSVQGDAF

SEQ ID NO: 46445 - protein, 383 aa, Homo sapiens
MDDTLFQLKFTAKQLEKLAKKAEKDSKAEQAKVKKALLQKNVECARVYAENAIRKKNEGVNWLRMASRVDAVASKVQTAVTMKGVGQEGTAVLETPRRRPFLHRPRAGSPRRRPFLHRPRAGSPRRRPFLHRPRAGSPRRRPFLHRPRAGSPRRRPFLHRPRAGSPRRRPFLHRPRAGSPRRRPFLHRPRAGSPRRRPFLHRPRAGSPRRRPFLHRPRAGSPRRRPFLHRPRAGSPRRRPFLHRPRAGSPRRRPFLHRPRAGSPRRRPFLHRPRAGCPRRRPFLHGPRAGSPRRRPFLHRPRAGSPRRRPFLHRPRAGSPRRRPFLHRPRAGSPRRRPFLHRPRAGSPRRRPFLHRPRAGSPRRRPFLHRPRTGSPRRRPFLH

SEQ ID NO: 46446 - protein, 175 aa, Homo sapiens
MKTCWTREQLQGKRQGEVVKGKQGGEYRHPDPARQAGWQETEMLRLPTVFRQMRPVSRVLAPHLTRAYAKDVKFGADARALMLQGVDLLADAVAVTMGPKGRTVIIEQSWGSPKVTKDGVTVAKSIDLKDKYKNIGAKLVQDVANNTNEEAGDGTTTATVLARSIAKEGFEKISK

SEQ ID NO: 46447 - protein, 112 aa, Homo sapiens
MGLLQGLLRVRKLLLVVCVPLLLLPLPVLHPSSEASCAYVLIVTAVYWVSEAVPLGAAALVPAFLYPFFGVLRSNEVAAEYFKNTTLLLVGVICVAAAVEKWNLHKRIALRM

SEQ ID NO: 46448 - protein, 720 aa, Homo sapiens
MQRHSRHFLLVQVLNDTWVSFPSWSEDSTFVSSKKTPYEEQLHRCEDERFELDVVLETNLATIRVLESVQKKLSRMAPEDQEKFRLDDSLGGTSEVIQRRAIYRIYGDKAPEIIESLKKNPVTAVPVVLKRLKAKEEEWREAQQGFNKIWREQYEKAYLKSLDHQAVNFKQNDTKALRSKSLLNEIESVYDEHQEQHSEGRSAPSSEPHLIFVYEDRQILEDAAALISYYVKRQPAIQKEDQGTIHQLLHQFVPSLFFSQQLDLGASEESADEDRDSPQGQTTDPSERKKPAPGPHSSPPEEKGAFGDAPATEQPPLPPPAPHKPLDDVYSLFFANNNWYFFLRLHQTLCSRLLKIYRQAQKQLLEYRTEKEREKLLCEGRREKGSDPAMELRLKQPSEVELEEYYPAFLDMVRSLLEGSIDPTQYEDTLREMFTIHAYVGFTMDKLVQNIARQLHHLVSDDVCLKVVELYLNEKKRGAAGGNLSSRCVRAARETSYQWKAERCMADENCFKVMFLQRKGQVIMTIELLDTEEAQTEDPVEVQHLARYVEQYVGTEGASSSPTEGFLLKPVFLQRNLKKFRRRWQSEQARALRGEARSSWKRLVGVESACDVDCRFKLSTHKMVFIVNSEDYMYRRGTLCRAKQVQPLVLLRHHQHFEEWHSRWLEDNVTVEAASLVQDWLMGEEDEDMVPCKTLCETVHVHGLPVTRYRVQYSRRPASP

SEQ ID NO: 46449 - protein, 60 aa, Homo sapiens
MKTVLMVAEKPSLAQSIAKILSRGSLSSHKGLNGACSVHEYTGTFAGQPVRFKMTSVCGH

SEQ ID NO: 46450 - protein, 1128 aa, Homo sapiens
MLSRPKPGESEVDLLHFQSQFLAAGAAPAVQLVKKGNRGGGDANSDRPPLQDHRDVVMLDNLPDLPPALVPSPPKRARPSPGHCLPEDEDPEERLRRHDQHITAVLTKIIERDTSSVAVNLPVPSGVAFPAVFLRSRDTQGKSATSGKRSIFAQEIAARRIAEAKGPSVGEVVPNVGPPEGAVTCETPTPRNQGCQLPGSSHSFQGPNLVTGKGLRDQEAEQEAQTIHEENIARLQAMAPEEILQEQQRLLAQLDPSLVAFLRSHSHTQEQTGETASEEQRPGGPSANVTKEEPLMSAFASEPRKRDKLEPEAPALALPVTPQKEWLHMDTVELEKLHWTQDLPPVRRQQTQERMQARFSLQGELLAPDVDLPTHLGLHHHGEEAERAGYSLQELFHLTRSQVSQQRALALHVLAQVISRAQAGEFGDRLAGSVLSLLLDAGFLFLLRFSLDDRVDGVIATAIRALRALLVAPGDEELLDSTFSWYHGALTFPLMPSQEDKEDEDEDEECPAGKAKRKSPEEESRPPPDLARHDVIKGLLATSLLPRLRYVLEVTYPGPAVVLDILAVLIRLARHSLESATRVLECPRLIETIVREFLPTSWSPVGAGPTPSLYKVPCATAMKLLRVLASAGRNIAARLLSSFDLRSRLCRIIAEAPQELALPPEEAEMLSTEALRLWAVAASYGQGGYLYRELYPVLMRALQVVPRELSTHPPQPLSMQRIASLLTLLTQLTLAAGSTPAETISDSAEASLSATPSLVTWTQVSGLQPLVEPCLRQTLKLLSRPEMWRAVGPVPVACLLFLGAYYQAWSQQPSSCPEDWLQDMQRLSEELLLPLLSQPTLGSLWDSLRHCSLLCNPLSCVPALEAPPSLVSLGCSGGCPRLSLAGSASPFPFLTALLSLLNTLAQIHKGLCGQLAAILAAPGLQNYFLQCVAPGAAPHLTPFSAWALRHEYHLQYLALALAQKAAALQPLPATHAALYHGMALALLSRLLPGSEYLTHELLLSCVFRLEFLPCLCPWSVTQCLLKTTWPSFSSTSGPWLLVRSAHVGAPCSMLWLWLMSIASSSLRTHRAQMRSKLPAGVCCRKHGCWQMRVSGSTSCTISFPIPRSQRALSSILSCPLCVSTTSRD

SEQ ID NO: 46451 - protein, 154 aa, Homo sapiens
MSGRSKRESRGSTRGKRESESRGSSGRVKRERDREREPEAASSRGSPVRVKREFEPASAREAPASVVPFVRVKREREVDEDSEPEREVRAKNGRVDSEDRRSRHCPYLDTINRSVLDFDFEKLCSISLSHINAYACLVCGKYFQAFHPSLQAGV

SEQ ID NO: 46452 - protein, 31 aa, Homo sapiens
MSDEGSRGSRLPLALPPASQGCSSGGGGGGS

SEQ ID NO: 46453 - protein, 171 aa, Homo sapiens
CGNLPFRRICKRFGADVTCGEMAVCTNLLQGQMSEWALLKRHQCEDIFGVQLEGAFPDTMTKCAELLSRTVEVDFVDINVGCPIDLVYKKGGGCALMNRSTKFQQIVRGMNQVLDVPLTVKIRTGVQERVNLAHRLLPELRDWGVALVTEMGTSCHLRMPTAPCRLVSPGS

SEQ ID NO: 46454 - protein, 451 aa, Homo sapiens
MDVDAEREKITQEIKELERILDPGSSGSHVEISESSLESDSEADSLPSEDLDPADPPISEEERWGEASNDEDDPKDKTLPEDPETCLQLNMVYQEVIQEKLAEANLLLAQNREQQEELMRDLAGSKGTKVKDGKSLPPSTYMGHFMKPYFKDKVTGVGPPANEDTREKAAQGIKAFEELLVTKWKNWEKALLRKSVVSDRLQRLLQPKLLKLEYLHQKQSKVSSELERQALEKQGREAEKEIQDINQLPEEALLGNRLDSHDWEKISNINFEGSRSAEEIRKFWQNSEHPSINKQEWSREEEERLQAIAAAHGHLEWQKIAEELGTSRSAFQCLQKFQQHNKALKRKEWTEEEDRMLTQLVQEMRVGSHIPYRRIVYYMEGRDSMQLIYRWTKSLDPGLKKGYWAPEEDAKLLQAVAKYGEQDWFKIREEVPGRSDAQCRDRYLRRLHFSL

SEQ ID NO: 46455 - protein, 141 aa, Homo sapiens
  MOD_RES (1)..(1): Any amino acid
XKEHLQVFWDGSFWKLSQNISELKDGELWNKFFVRILNANDEATVSVLGELAAEMNGVFDTTFQSHLNKALWKGVPLPGLETSTSLQWRTQDPAAQKEQPRPAEDWPSKVPGLPSPQRLRERPSAGEESRGRGGRRRKTVE

SEQ ID NO: 46456 - protein, 32 aa, Homo sapiens
MQEVETLTSHWTLYMNVGGFLVGLFSSTLLGA

SEQ ID NO: 46457 - protein, 119 aa, Homo sapiens
MLWALWPRWLADKMLPLLGAVLLQKREKRGPLWRHWRRETYPYYDLQVKVLRATNIRGTDLLSKADCYVQLWLPTASPSPAQTRIVANCSDPEWNLFWRRARCLHLKSSPTGFWWLTPV

SEQ ID NO: 46458 - protein, 900 aa, Homo sapiens
  MOD_RES (1)..(1): Any amino acid
XFSRTPGNCQNSANEVDLLGPNQNGSEGLAQLTSTNGAKPVEDFSNMESQSVPLDPMEHVGMEPLQFDYSGTQVPVDSAAATVGLFDYNSQQQLFQRPNALAVQQLTAAQQQQYALAAAHQPHIGMFSAGLAPAAFVPNPYIISAAPPGTDPYTAGLAAAATLGPAVVPHQYYGVTPWGVYPASLFQQQAAAAAAATNSANQQTTPQAQQGQQQVLRGGASQRPLTPNQNQQGQQTDPLVAAAAVNSALAFGQGLAAGMPGYPVLAPAAYYDQTGALVVNAGARNGLGAPVRLVAPAPVIISSSAAQAAVAAAAASANGAAGGLAGTTNGPFRPLGTQQPQPQPQQQPNNNLASSSFYGNNSLNSNSQSSSLFSQGSAQPANTSLGFGSSSSLGATLGSALGGFGTAVANSNTGSGSRRDSLTGSSDLYKRTSSSLTPIGHSFYNGLSFSSSPGPVGMPLPSQGPGHSQTPPPSLSSHGSSSSLNLGGLTNGSGRYISAAPGAEAKYRSASSASSLFSPSSTLFSSSRLRYGMSDVMPSGRSRLLEDFRNNRYPNLQLREIAGHIMEFSQDQHGSRFIQLKLERATPAERQLVFNEILQAAYQLMVDVFGNYVIQKFFEFGSLEQKLALAERIRGHVLSLALQMYGCRVIQKALEFIPSDQQVINEMVRELDGHVLKCVKDQNGNHVVQKCIECVQPQSLQFIIDAFKGQVFALSTHPYGCRVIQRILEHCLPDQTLPILEELHQHTEQLVQDQYGNYVIQHVLEHGRPEDKSKIVAEIRGNVLVLSQHKFASNVVEKCVTHASRTERAVLIDEVCTMNDGPHSALYTMMKDQYANYVVQKMIDVAEPGQRKIVMHKIRPHIATLRKYTYGKHILAKLEKYYMKNGVDLGPICGPPNGII

SEQ ID NO: 46459 - protein, 377 aa, Homo sapiens
  MOD_RES (1)..(1): Any amino acid
XMDMADYSAALDPAYTTLEFENVQVLTMGNDTSPSEGTNLNAPNSLGVSALCAICGDRATGKHYGASSCDGCKGFFRRSVRKNHMYSCRFSRQCVVDKDKRNQCRYCRLKKCFRAGMKKEAVQNERDRISTRRSSYEDSSLPSINALLQAEVLSRQITSPVSGINGDIRAKKIASIADVCESMKEQLLVLVEWAKYIPAFCELPLDDQVALLRAHAGEHLLLGATKRSMVFKDVLLLGNDYIVPRHCPELAEMSRVSIRILDELVLPFQELQIDDNEYAYLKAIIFFDPDAKGLSDPGKIKRLRSQVQVSLEDYINDRQYDSRGRFGELLLLLPTLQSITWQMIEQIQFIKLFGMAKIDNLLQEMLLGDRGGHRRPL

SEQ ID NO: 46460 - protein, 249 aa, Homo sapiens
MACTAWDSWSGASQTLGPAPLGPGPIPAAGSEGAAGQNCVPVAGEATSWSRAQAAGSNTSWDCSVGPDGDTYWGSGLGGEPRTDCTISWGGPAGPDCTTSWNPGLHAGGTTSLKRYQSSALTVCSEPSPQSDRASLARCPKTNHRGPIQLWQFLLELLHDGARSSCIRWTGNSREFQLCDPKEVARLWGERKRKPGMNYEKLSRGLRYYYRRDIVRKSGGRKYTYRFGGRVPSLAYPDCAGGGRGAETQ

SEQ ID NO: 46461 - protein, 339 aa, Homo sapiens
MDGIVPDIAVGTKRGSDELFSTCVTNGPFIMSSNSASAANGNDSKKFKGDSRSAGVPSRVIHIRKLPIDVTEGEVISLGLPFGKVTNLLMLKGKNQAFIEMNTEEAANTMVNYYTSVTPVLRGQPIYIQFSNHKELKTDSSPNQARAQAALQAVNSVQSGNLALAASAAAVDAGMAMAGQSPVLRIIVENLFYPVTLDVLHQIFSKFGTVLKIITFTKNNQFQALLQYADPVSAQHAKLSLDGQNIYNACCTLRIDFSKLTSLNVKYNNDKSRDYTRPDLPSGDSQPSLDQTMAAAFGAPGIISASPYAGAGFPPTFAIPQAAAPPGEREDRQWLEGCL

SEQ ID NO: 46462 - protein, 484 aa, Homo sapiens
MLHLTDIQLQDNKTFLAMLNHVLNVDGFYFSTTYDLTHTLQRLSNTSPEFQEMSLLERADQRFVWNGHLLRELSAQPEVHRFALPVLHGFITMHSCSINGKYFDWILISRRSCFRAGVRYYVRGIDSEGHAANFVETEQIVHYNGSKASFVQTRGSIPVFWSQRPNLKYKPLPQISKVANHMDGFQRHFDSQVIIYGKQVIINLINQKGSEKPLEQTFATMVSSLGSGMMRYIAFDFHKECKNMRWDRLSILLDQVAEMQDELSYFLVDSAGQVVANQEGVFRSNCMDCLDRTNVIQSLLARRSLQAQLQRLGVLHVGQKLEEQDEFEKIYKNAWADNANACAKQYAGTGALKTDFTRTGKRTHLGLIMDGWNSMIRYYKNNFSDGFRQDSIDLFLGNYSVDELESHSPLSVPRDWKFLALPIIMVVAFSMCIICLLMAGDTWTETLAYVLFWGVASIGTFFIILYNGKDFVDAPRLVQKEKID

SEQ ID NO: 46463 - protein, 70 aa, Homo sapiens
MRLAGPLRIVVLVVSVGVTWIVVSILLGGPGSGFPRIQQLFTMSHFVSQAGVQWCNLGSLQPLPPGFKRF

SEQ ID NO: 46464 - protein, 58 aa, Homo sapiens
MSSGTELLWPGAALLVLLGVAASLCVRCSRPGAKRSEKIYQQRSLREDQQSFTGSRTY

SEQ ID NO: 46465 - protein, 954 aa, Homo sapiens
MYIRQLRAPSHRSPARGPRIAGPRRPQGATMFSQQQQQQLQQQQQQLQQLQQQQLQQQQLQQQQLLQLQQLLQQSPPQAPLPMAVSRGLPPQQPQQPLLNLQGTNSASLLNGSMLQRALLLQQLQGLDQFAMPPATYDTAGLTMPTATLGNLRGYGMASPGLAAPSLTPPQLATPNLQQFFPQATRQSLLGPPPVGVPMNPSQFNLSGRNPQKQARTSSSTTPNRKDSSSQTMPVEDKSDPPEGSEEAAEPRMDTPEDQDLPPCPEDIAKEKRTPAPEPEPCEASELPAKRLRSSEEPTEKEPPGQLQVKAQPQARMTVPKQTQTPDLLPEALEAQVLPRFQPRVLQVQAQVQSQTQPRIPSTDTQVQPKLQKQAQTQTSPEHLVLQQKQVQPQLQQEAEPQKQVQPQVQPQAHSQGPRQVQLQQEAEPLKQVQPQVQPQAHSQPPRQVQLQLQKQVQTQTYPQVHTQAQPSVQPQEHPPAQVSVQPPEQTHEQPHTQPQVSLLAPEQTPVVVHVCGLEMPPDAVEAGGGMEKTLPEPVGTQVSMEEIQNESACGLDVGECENRAREMPGVWGAGGSLKVTILQSSDSRAFSTVPLTPVPRPSDSVSSTPAATSTPSKQALQFFCYICKASCSSQQEFQDHMSEPQHQQRLGEIQHMSQACLLSLLPVPRDVLETEDEEPPPRRWCNTCQLYYMGDLIQHRRTQDHKPPTPRRDVFAHVPVQGWSTARLVTDMIAKQSLRPFCTVCNRYFKTPRKFVEHVKSQGHKDKAKELKSLEKEIAGQDEDHFITVDAVGCFEGDEEEEEDDEDEEEIEVEEELCKQVRSRDISREEWKGSETYSPNTAYGVDFLVPVMGYICRICHKFYHSNSGAQLSHCKSLGHFENLQKYKAAKNPSPTTRPVSRRCAINARNALTALFTSSGRPPSQPNTQDKTPSKVTARPSQPPLPRRSTRLKT

SEQ ID NO: 46466 - protein, 184 aa, Homo sapiens
MSGSSLPSALALSLLLVSGSLLPGPGAAQNAAPDITGHKRSENKNEGQDATMYCKSVGYPHPDWIWRKKENGMPMDIVNTSGRFFIINKENYTELNIVNLQITEDPGEYECNATNAIGSASVVTVLRVRSHLAPLWPFLGILAEIIILVVIIVVYEKRKRPDEVPDDDEPAGPMKTNSTNNHKD

SEQ ID NO: 46467 - protein, 547 aa, Homo sapiens
MFTLDVKSNTVFDIITDNCDLHFKISRDRLSASSLTMESFAFLWAGGRASYGVSKGKVCFEMKVTEKIPVRHLYTKDIDIHEVRIGWSLTTSGMLLEEFSYGYSLKGIKTCNCETEDYGEKFDENDVITCFANFESDEVELSYAKNGQDLGVAFKISKEVLAGRPLFPHVLCHNCAVEFNFGQKEKPYFPIPEEYTFIQNVPLEDRVRGPKGPEEKKDCEVVMMIGLPGAGKTTWVTKHAAENPGKYNILGTNTIMDKMMVAGFKKQMADTGKLNTLLQRAPQCLGKFIEIAARKKRNFILDQTNVSAAAQRRKMCLFAGFQRKAVVVCPKDEDYKQRTQKKAEVEGKDLPEHAVLKMKGNFTLPEVAECFDEITYVELQKEEAQKLLEQYKEESKKALPPEKKQNTGSKKSNKNKSGKNQFNRGGGHRGRGGFNMRGGNFRGGAPGNRGGYNRRGNMPQRGGGGGGSGGIGYPYPRAPVFPGRGSYSNRGNYNRGGMPNRGNYNQNFRGRGNNRGYKNQSQGYNQWQQGQFWGQKPWSQHYHQGYY

SEQ ID NO: 46468 - protein, 252 aa, Homo sapiens
  MOD_RES (1)..(1): Any amino acid
XGYEKFIQQQLKEGKQLCAAPEPQLCLQTRILKPKEKILFINLCQWTRIPAPQSTTHPVPLTVGKPEDTTEISAEKDQVKKNQLIQMAMKCIEEKFQFTLSHSYHITKFRIKGSIQRMKQNLMGIQTDSIDLREKMRRELTLGQIRSSTMSNPDHFPQLLLPKDQVSGKAVCLIEEISSTEIQVEMKMPAYELKIVHDHSEKPLKIELKVELPGINSVSLCDLSVSEDDLLIEVSEKYRLHLNLPKLIDTEM

SEQ ID NO: 46469 - protein, 73 aa, Homo sapiens
KFSSASGASARINSSSVKQEATFCSQRDGDASLNKALSSSADDASLVNASISSSVCFHVSESYFSSEIYYIYH

SEQ ID NO: 46470 - protein, 236 aa, Homo sapiens
  MOD_RES (1)..(1): Any amino acid
XVESCPARSRLSVSVSPPPPGIVELGPPFAWEFCSRLGSAVTSQRAGPAAAMVAKDYPFYLTVKRANCSLELPPASGPAKDAEEPSNKRVKPLSRVTSLANLIPPVKATPLKRFSQTLQRSISFRSESRPDILAPRPWSRNAAPSSTKRRDSKLWSETFDVCVNQMLTSKEIKRQEAIFELSQGEEDLIEDLKLAKKAYHDPMLKLSIMTEQELNQIFGTLDSLIPLHEAPLPQLL

SEQ ID NO: 46471 - protein, 112 aa, Homo sapiens
MGAPEIRMSKPLEAEKQGLDSPSEHTDTERNGPDTNHQNPQNKTSPFSVSPTGPSTKIKAEDPSGDSAPAAPLPPQPAQPHLPQAQLMLTGSQLAGLHEVRLIVVSPEETEA

SEQ ID NO: 46472 - protein, 169 aa, Homo sapiens
RRTSLFANRRGSDSEKRSLDSRGETTGSGRAIPIKQSFLLKRSGNSLNKEWKKKYVTLSSNGFLLYHPSINDYIHSTHGKEMDLLRTTVKVPGKRPPRAISAFGPSASINGLVKDMSTVQMGEGLEATTPMPSPSPSPSSLQPPPDQTSKHLLKPDRNLARALSTGQWG

SEQ ID NO: 46473 - protein, 1500 aa, Homo sapiens
MLSLRGPDTHGKGHRMTPACPLLLSVILSLRLATAFDPAPSACSALASGVLYGAFSLQDLFPTIASGCSWTLENPDPTKYSLYLRFNRQEQVCAHFAPRLLPLDHYLVNFTCLRPSPEEAVAQAESEVGRPEEEEAEAAAGLELCSGSGPFTFLHFDKNFVQLCLSAEPSEAPRLLAPAALAFRFVEVLLINNNNSSQFTCGVLCRWSEECGRAAGRACGFAQPGCSCPGEAGAGSTTTTSPGPPAAHTLSNALVPGGPAPPAEADLHSGSSNDLFTTEMRYGEEPEEEPKVKTQWPRSADEPGLYMAQTVHGVWEEWGSWSLCSRSCGRGSRSRMRTCVPPQHGGKACEGPELQTKLCSMAACPVEGQWLEWGPWGPCSTSCANGTQQRSRKCSVAGPAWATCTGALTDTRECSNLECPATDSKWGPWNAWSLCSKTCDTGWQRRFRMCQATGTQGYPCEGTGEEVKPCSEKRCPAFHEMCRDEYVMLMTWKKAAAGEIIYNKCPPNASGSASRRCLLSAQGVAYWGLPSFARCISHEYRYLYLSLREHLAKGQRMLAGEGMSQVVRSLQELLARRTYYSGDLLFSVDILRNVTDTFKRATYVPSADDVQRFFQVVSFMVDAENKEKWDDAQQVSPGSVHLLRVVEDFIHLVGDALKAFQSSLIVTDNLVISIQREPVSAVSSDITFPMRGRRGMKDWVRHSEDRLFLPKEVLSLSSPGKPATSGAAGSPGRGRGPGTVPPGPGHSHQRLLPADPDESSYFVIGAVLYRTLGLILPPPRPPLAVTSRVMTVTVRPPTQPPAEPLITVELSYIINGTTDPHCASWDYSRADASSGDWDTENCQTLETQAAHTRCQCQHLSTFAVLAQPPKDLTLELAGSPSVPLVIGCAVSCMALLTLLAIYAAFWRFIKSERSIILLNFCLSILASNILILVGQSRVLSKGVCTMTAAFLHFFFLSSFCWVLTEAWQSYLAVIGRMRTRLVRKRFLCLGWGLPALVVAVSVGFTRTKGYGTSSYCWLSLEGGLLYAFVGPAAVIVLVNMLIGIIVFNKLMARDGISDKSKKQRAGASLWSSCVVLPLLALTWMSAVLAMTDRRSVLFQALFAVFNSAQGFVITAVHCFLRREVQDVVKCQMGVCRADESEDSPDSCKNGQLQILSDFEKDVDLACQTVLFKEVNTCNPSTITGTLSRLSLDEDEEPKSCLVGPEGSLSFSPLPGNILVPMAASPGLGEPPPPQEANPVYMCGEGGLRQLDLTWLRPTEPGSEGDYMVLPRRTLSLQPGGGGGGGEDAPRARPEGTPRRAAKTVAHTEGYPSFLSVDHSGLGLGPAYGSLQNPYGMTFQPPPPTPSARQVPEPGERSRTMPRTVPGSTMKMGSLERKKLRYSDLDFEKVMHTRKRHSELYHELNQKFHTFDRYRSQSTAKREKRWSVSSGGAAERSVCTDKPSPGERPSLSQHRRHQSWSTFKSMTLGSLPPKPRERLTLHRAAAWEPTEPPDGDFQTEV

SEQ ID NO: 46474 - protein, 388 aa, Homo sapiens
MKARRPNRDPFLLVFASGAQGEYAGLATIRAYLNQKGEGHRTVCLIPKSAHGTNPASAHMAGMKIQPVEVDKYGNIDAVHLKAMVDKHKENLAAIMITYPSTNGVFEENISDVCDLIHQHGGQVYLDGANMNAQVGICRPGDFGSDVSHLNLHKTFCIPHGGGGPGMGPIGVKKHLAPFLPNHPVISLKRNEDACPVGTVSAAPWGSSSILPISWAYIKMMGGKGLKQATETAILNANYMAKRLETHYRILFRGARGFHAPTMSWPVAGTLMVEPTESEDKAELDRFCDAMISIRQEIADIEEGRIDPRVNPLKMSPHSLTCVTSSHWDRPYSREVAAFPLPFVKPENKFWPTIARIDDIYGDQHLVCTCPPMEVYESPFSEQKRASS

SEQ ID NO: 46475 - protein, 47 aa, Homo sapiens
MAKYGEHEASPDNGQNEFSDIIKSRSDEHNDVQKKTFTKWINARFSK

SEQ ID NO: 46476 - protein, 449 aa, Homo sapiens
DSDLSMRTLSTPSPALICPPNLPGFQNGRGSSTSSSSITGETVAMVHSPPPTRLTHPLIRLASRPQKEQASIDRLPDHSMVQIFSFLPTNQLCRCARVCRRWYNLAWDPRLWRTIRLTGETINVDRALKVLTRRLCQDTPNVCLMLETVTVSGCRRLTDRGLYTIAQCCPELRRLEVSGCYNISNEAVFDVVSLCPNLEHLDVSGCSKVTCISLTREASIKLSPLHGKQISIRYLDMTDCFVLEDEGLHTIAAHCTQLTHLYLRRCVRLTDEGLRYLVIYCASIKELSVSDCRFVSDFGLREIAKLESRLRYLSIAHCGRVTDVGIRYVAKYCSKLRYLNARGCEGITDHGVEYLAKNCTKLKSLDIGKCPLVSDTGLECLALNCFNLKRLSLKSCESITGQGLQIVAANCFDLQTLNVQDCEVSVEALRFVKRHCKRCVIEHTNPAFF

SEQ ID NO: 46477 - protein, 647 aa, Homo sapiens
MFAGLDLNSSDNQSGGSTASKGRYIPPHLRNREATKGFYDKDSSGWSSSKDKDAYSSFGSRSDSRGKSSFFSDRGSGSRGRFDDRGRSDYDGIGSRGDRSGFGKFERGGNSRWCDKSDEDDWSKPLPPSERLEQELFSGGNTGINFEKYDDIPVEATGNNCPPHIESFSDVEMGEIIMGNIELTRYTRPTPVQKHAIPIIKEKRDLMACAQTGSGKTAAFLLPILSQIYSDGPGEALRAMKENGRYGRRKQYPISLVLAPTRELAVQIYEEARKFSYRSRVRPCVVYGGADIGQQIRDLERGCHLLVATPGRLVDMMERGKIGLDFCKYLVLDEADRMLDMGFEPQIRRIVEQDTMPPKGVRHTMMFSATFPKEIQMLARDFLDEYIFLAVGRVGSTSENITQKVVWVEESDKRSFLLDLLNATGKDSLTLVFVETKKGADSLEDFLYHEGYACTSIHGDRSQRDREEALHQFRSGKSPILVATAVAARGLDISNVKHVINFDLPSDIEEYVHRIGRTGRVGNLGLATSFFNERNINITKDLLDLLVEAKQEVPSWLENMAYEHHYKGSSRGRSKSRFSGGFGARDYRQSSGASSSSFSSSRASSSRSGGGGHGSSRGFGGGGYGGFYNSDGYGGNYNSQGVDWWGN

SEQ ID NO: 46478 - protein, 105 aa, Homo sapiens
MGDEDWEAEINPHMSSYVPIFEKDRYSGENGDNFNRTPASSSEMDDGPSRRDHFMKSGFASGRNFGNRDAGECNKRDNTSTMGGFGVGKSFGNRGFSNSRFEDGD

SEQ ID NO: 46479 - protein, 1553 aa, Homo sapiens
  MOD_RES (1)..(1): Any amino acid
XEPVTYYGIQYRAAGTEGPFQEVDGVATTRYSIGGLSPFSEYAFRVLAVNSIGRGPPSEAVRARTGEQAPSSPPRRVQARMLSASTMLVQWEPPEEPNGLVRGYRVYYTPDSRRPPNAWHKHNTDAGLLTTVGSLLPGITYSLRVLAFTAVGDGPPSPTIQVKTQQGVPAQPADFQAEVESDTRIQLSWLLPPQERIIMYELVYWAAEDEDQQHKVTFDPTSSYTLEDLKPDTLYRFQLAARSDMGVGVFTPTIEARTAQSTPSAPPQKVMCVSMGSTTVRVSWVPPPADSRNGVITQYSVAYEAVDGEDRGRHVVDGISREHSSWDLVGLEKWTEYRVWVRAHTDVGPGPESSPVLVRTDEDVPSGPPRKVEVEPLNSTAVHVYWKLPVPSKQHGQIRGYQVTYVRLENGEPRGLPIIQDVMLAEAQETTISGLTPETTYSVTVAAYTTKGDGARSKPKIVTTTVPGRPTMMISTTAMNTALLQWHPPKELPGELLGYRLQYCRADEARPNTIDFGKDDQHFTVTGLHKGTTYIFRLAAKNRAGLGEEFEKEIRTPEDLPSGFPQNLHVTGLTTSTTELAWDPPVLAERNGRIISYTVVFRDINSQQELQNITTDTRFTLTGLKPDTTYDIKVRAWTSKGSGPLSPSIQSRTMPVEQVFAKNFRVAAAMKTSVLLSWEVPDSYKSAVPFKILYNGQSVEVDGHSMRKLIADLQPNTEYSFVLMNRGSSAGGLQHLVSIRTAPDLLPHKPLPASAYIEDGRFDLSMPHVQDPSLVRWFYIVVVPIDRVGGSMLTPRWSTPEELELDELLEAIEQGGEEQRRRRRQAERLKPYVAAQLDVLPETFTLGDKKNYRGFYNRPLSPDLSYQCFVLASLKEPMDQKRYASSPYSDEIVVQVTPAQQQEEPEMLWVTGPVLAVILIILIVIAILLFKRKRTHSPSSKDEQSIGLKDSLLAHSSDPVEMRRLNYQTPGMRDHPPIPITDLADNIERLKANDGLKFSQEYESIDPGQQFTWENSNLEVNKPKNRYANVIAYDHSRVILTSIDGVPGSDYINANYIDGYRKQNAYIATQGPLPETMGDFWRMVWEQRTATVVMMTRLEEKSRVKCDQYWPARGTETCGLIQVTLLDTVELATYTVRTFALHKSGSSEKRELRQFQFMAWPDHGVPEYPTPILAFLRRVKACNPLDAGPMVVHCSAGVGRTGCFIVIDAMLERMKHEKTVDIYGHVTCMRSQRNYMVQTEDQYVFIHEALLEAATCGHTEVPARNLYAHIQKLGQVPPGESVTAMELEFKLLASSKAHTSRFISANLPCNKFKNRLVNIMPYELTRVCLQPIRGVEGSDYINASFLDGYRQQKAYIATQGPLAESTEDFWRMLWEHNSTIIVMLTKLREMGREKCHQYWPAERSARYQYFVVDPMAEYNMPQYILREFKVTDARDGQSRTIRQFQFTDWPEQGVPKTGEGFIDFIGQVHKTKEQFGQDGPITVHCSAGVGRTGVFITLSIVLERMRYEGVVDMFQTVKTLRTQRPAMVQTEDQYQLCYRAALEYLGSFDHYAT

SEQ ID NO: 46480 - protein, 140 aa, Homo sapiens
MDGFYDQQVPFMVPGKSRSEECRGRPVIDRKRKFLDTDLAHDSEELFQDLSQLQEAWLAEAQVPDDEQFVPDFQSDNLVLHAPPPTKIKRELHSPSSELSSCSHEQALGANYGEKCLYNYCAYDRKPPSGFKPLTPPTTP

SEQ ID NO: 46481 - protein, 193 aa, Homo sapiens
MADDIDIEAMLEAPYKKDENKLSSANGHEERSKKRKKSKSRSRSHERKRSKSKERKRSRDRERKKSKSRERKRSRSKERRRSRSRSRDRRFRGRYRSPYSGPKFNSAIRGKIGLPHSIKLSRRRSRSKSPFRKDKSPVREPIDNLTPEERDARTVFCMQLAARIRPRDLEEFFSTVGKVRDVRMISDRNSRRS

SEQ ID NO: 46482 - protein, 55 aa, Homo sapiens
MPRNSGAGYGCPHGDPSMLDSRETPQESRQDMIVRTTQEKLKTRDGVLLHCPGWP

SEQ ID NO: 46483 - protein, 235 aa, Homo sapiens
LPCKRCRPSVYSLSYIKRGKTRNYLYPIWSPYAYYLYCYKYRITLREKMLPRCYKSITYKEEEDLTLQPRSCLQCSESLVGLQEGKSTEQGNHDQLKELYSAGNLTVLATDPLLHQDPVQLDFHFRLTSQTSAHWHGLLCDRRLFLDIPYQALDQGNRESLTATLEYVEEKTNVDSVFVNFQNDRNDRGALLRAFSYMGFEVVRPDHPALPPLDNVIFMVYPLERDVGHLPSEPP

SEQ ID NO: 46484 - protein, 53 aa, Homo sapiens
MSANEDQEMELEALRSIYEGDESFRELSPVSFQYRIISCKAEYISQATGSSRS

SEQ ID NO: 46485 - protein, 81 aa, Homo sapiens
MAEAEGVPTTPGPASGSTFRGRRDVSGSWERDQQVEAAQRALVEVLGPYEPLLSRVQAALVWERPARSALWCLGLNAAFWY

SEQ ID NO: 46486 - protein, 188 aa, Homo sapiens
  MOD_RES (1)..(1): Any amino acid
XQFLDLMETIDKQREEMAKSSRASAARVGQLQEALNERHSIINALKAKLQMTEAALALSEQKAQDLGELLATAEQEQLSLSQRQAKELKLEQQEAAERESKLLRDLSAANEKNLLLQNQVDELERKFRCQQEQLFQTRQEMTSMSAELKMRAIQAEERLDMEKRRCRQSLEDSESLRIKEGGESVRRR

SEQ ID NO: 46487 - protein, 57 aa, Homo sapiens
MAQEKMKLGFKSLPSSTTADGNILRRVNSAPLINGLGCFVTSDLHLQPLEWKWLSSK

SEQ ID NO: 46488 - protein, 158 aa, Homo sapiens
MMCEVMPTISEAEGPPGGGGGHGSGSPSQPDADSHFEQLMVSMLEERDRLLDTLRETQETLALTQGKLHEVGHERDSLQRQLNTALPQEFAALTKELNVCREQLLEREEEIAELKAERNNTRLLLEHLECLVSRHERSLRMTVVKRQAQSPAGVSSEV

SEQ ID NO: 46489 - protein, 692 aa, Homo sapiens
MIEKMQGSRMDEQRCSFPPPLKTEEDYIPYPSVHEVLGREGPFPLILLPQFGGYWIEGTNHEITSIPETEPLQSPTTKVKLECNPTARIYRKHFLGKEHFNYYSLDAALGHLVFSLKYDVIGDQEHLRLLLRTKCRTYHDVIPISCLTEFPNVVQMAKLVCEDVNVDRFYPVLYPKASRLIVTFDEHVISNNFKFGVIYQKLGQTSEEELFSTNEESPAFVEFLEFLGQKVKLQDFKGFRGGLDVTHGQTGTESVYCNFRNKEIMFHVSTKLPYTEGDAQQLQRKRHIGNDIVAVVFQDENTPFVPDMIASNFLHAYVVVQAEGGGPDGPLYKVSVTARDDVPFFGPPLPDPAVFRKGPEFQEFLLTKLINAEYACYKAEKFAKLEERTRAALLETLYEELHIHSQSMMGLGGDEDKMENGSGGGGFFESFKRVIRSRSQSMDAMGLSNKKPNTVSTSHSGSFAPNNPDLAKAAGISLLIPGKSASRFGRRGSAIGIGTVEEVVVRGAAGSGGCLHALFSARSQDGGHIGDVAPLPPGQAPGRAGWSGGSSDGTQHLLWGLSLIVPGKSPTRKKSGPFGSRRSSAIGIENIQEVQEKRESPPAGQKTPDSGHVSQEPKSENSSTQSSPEMPTTKNRAETAAQRAEALKLPLLVQCQQLRQRGGGDGGCGRRGHRPGERVILRNTPQAGLLHL

SEQ ID NO: 46490 - protein, 861 aa, Homo sapiens
GKHKLLSTGPTEPWSIREKLCLASSVMRSGDQNWVSVSRAIKPFAEPGRPPDWFSQKHCASQYSELLETTETPKRKRGEKGEVVETVEDVIVRKLTAERVEELKKVIKETQERYRRLKRDAELIQAGHMDSRLDELCNDIATKKKLEEEEAEVKRKATDAAYQARQAVKTPPRRLPTVMVRSPIDSASPGGDYPLGDLTPTTMEEATSGVTPGTLPSTPVTSFPGIPDTLPPGSAPLEAPMTPVTDDSPQKKMLGQKATPPPSPLLSELLKKGSLLPTSPRLVNESEMAVASGHLNSTGVLLEVGGVLPMIHGGEIQQTPNTVAASPAASVSQPDNCVPMEAVGDPHTVTVSMDSSEISMIINSIKEECFRSGVAEAPVGSKAPSIDGKEELDLAEKMDIAVSYTGEELDFETVGDIIAIIEDKVDDHPEVLDVAAVEAALSFCEENDDPQSLPGPWEHPIQQERDKPVPLPAPEMTVKQERLDFEETENKGIHELVDIREPSAEIKVEPAEPEPVISGAEIVAGVVPATSMEPPELRSQDLDEELGSTAAGEIVEADVAIGKGDETPLTNVKTEASPESMLSPSHGSNPIEDPLEAETQHKFEMSDSLKEESGTIFGSQIKDAPGEDEEEDGVSEAASLEEPKEEDQGEGYLSEMDNEPPVSESDDGFSIHNATLQSHTLADSIPSSPASSQFSVCSEDQEAIQAQKIWKKAIMLVWRAAANHRYANVFLQPVTDDIAPGYHSIVQRPMDLSTIKKNIENGLIRSTAEFQRDIMLMFQNAVMYNSSDHDVYHMAVEMQRDVLEQIQQFLATQLIMQTSESGISAKSLRGRDSTRKQDASEKDGGTRGRRCAIEADMKMKK

SEQ ID NO: 46491 - protein, 494 aa, Homo sapiens
  MOD_RES (428)..(428): Any amino acid
MEAMAASTSLPDPGDFDRNVPRICGVCGDRATGFHFNAMTCEGCKGFFRRSMKRKALFTCPFNGDCRITKDNRRHCQACRLKRCVDIGMMKEFILTDEEVQRKREMILKRKEEEALKDSLRPKLSEEQQRIIAILLDAHHKTYDPTYSDFCQFRPPVRVNDGGGSHPSRPNSRHTPSFSGDSSSSCSDHCITSSDMMDSSSFSNLDLSEEDSDDPSVTLELSQLSMLPHLADLVSYSIQKVIGFAKMIPGFRDLTSEDQIVLLKSSAIEVIMLRSNESFTMDDMSWTCGNQDYKYRVSDVTKAGHSLELIEPLIKFQVGLKKLNLHEEEHVLLMAICIVSPDRPGVQDAALIEAIQDRLSNTLQTYIRCRHPPPGSHLLYAKMIQKLADLRSLNEEHSKQYRCLSFQPECSMKLTPLVLEVFGNEISXLGQPVAVPGWGCSSRATCQARGWRLLSSPPHPVWGSAPPLPPPLSTQPILSPVQPNPFPAGFSPVP

SEQ ID NO: 46492 - protein, 1658 aa, Homo sapiens
MLKCIPLWRCNRHVESVDKRHCSLQAVPEEIYRYSRSLEELLLDANQLRELPKPFFRLLNLRKLGLSDNEIQRLPPEVANFMQLVELDVSRNDIPEIPESIKFCKALEIADFSGNPLSRLPDGFTQLRSLAHLALNDVSLQALPGDVGNLANLVTLELRENLLKSLPASLSFLVKLEQLDLGGNDLEVLPDTLGALPNLRELWLDRNQLSALPPELGNLRRLVCLDVSENRLEELPAELGGLVLLTDLLLSQNLLRRLPDGIGQLKQLSILKVDQNRLCEVTEAIGDCENLSELILTENLLMALPRSLGKLTKLTNLNVDRNHLEALPPEIGGCVALSVLSLRDNRLAVLPPELAHTTELHVLDVAGNRLQSLPFALTHLNLKALWLAENQAQPMLRFQTEDDARTGEKVLTCYLLPQQPPPSLEDAGQQGSLSETWSDAPPSRVSVIQFLEAPIGDEDAEEAAAEKRGLQRRATPHPSELKVMKRSIEGRRSEACPCQPDSGSPLPAEEEKRLSAESGLSEDSRPSASTVSEAEPEGPSAEAQGGSQQEATTAGGEEDAEEDYQEPTVHFAEDALLPGDDREIEEGQPEAPWTLPGGRQRLIRKDTPHYKKHFKISKLPQPEAVVALLQGMQPDGEGPVAPGGWHNGPHAPWAPRAQKEEEEEEEGSPQEEEEEEEEENRAEEEEASTEEEDKEGAVVSAPSVKGVSFDQANNLLIEPARIEEEELTLTILRQTGGLGISIAGGKGSTPYKGDDEGIFISRVSEEGPAARAGVRVGDKLLEVNGVALQGAEHHEAVEALRGAGTAVQMRVWRERMVEPENAVTITPLRPEDDYSPRERRGGGLRLPLLPPESPGPLRQRHVACLARSERGLGFSIAGGKGSTPYRAGDAGIFVSRIAEGGAAHRAGTLQVGDRVLSINGVDVTEARHDHAVSLLTAASPTIALLLEREAGGPLPPSPLPHSSPPTAAVATTSITTATPGVPGLPSLAPSLLAAALEGPYPVEEIRLPRAGGPLGLSIVGGSDHSSHPFGVQEPGVFISKVLPRGLAARSGLRVGDRILAVNGQDVRDATHQEAVSALLRPCLELSLLVRRDPAPPGLRELCIQKAPGERLGISIRGGARGHAGNPRDPTDEGIFISKVSPTGAAGRDGRLRVGLRLLEVNQQSLLGLTHGEAVQLLRSVGDTLTVLVCDGFEASTDAALEVSPGVIANPFAAGIGHRNSLESISSIDRELSPEGPGKEKELPGQTLHWGPEATEAAGRGLQPLKLDYRALAAVPSAGSVQRVPSGAAGGKMAESPCSPSGQQTKPGVIQPLAQAWPRGSPAPRGRGCPHSPPSPPSPDELPANVKQAYRAFAAVPTSHPPEDAPAQPPTPGPAASPEQLSFRERQKYFELEVRVPQAEGPPKRVSLVGADDLRKMQEEEARKLQQKRAQMLREAAEAGAEARLALDGETLGEEEQEDEQPPWASPSPTSRQSPASPPPLGGGAPVRTAKAERRHQERLRVQSPEPPAPERALSPAELRALEAEKRALWRAARMKSLEQDALRAQMVLSRSQEGRGTRGPLERLAEAPSPAPTPSPTPVEDLGPQTSTSPGRLSPDFAEELRSLEPSPSPGPQEEDGEVALVLLGRPSPGAVGPEDVALCSSRRPVRPGRRGLGPVPS

SEQ ID NO: 46493 - protein, 387 aa, Homo sapiens
MGTRAFSHDSIFIPDGGAESEQTVQAMSQDNILGKVKTLQQQLGKNIKFGQRSPNAIPMNKANSGEASLEEDLFLTSPMEIVTQQDIVLSDAENKSSDTPSSLSPLNLPGAGSEMEEKVAPVKPSRPKRHFSSAGTIESVNLDAIPLAIARLDNSAAKHKLAVKPKKQRVSKKHRRLAQDPQHEQGGLESRPCLDQNGHPGEDKPTWHEEEPNPLDSEEERRRQEDYWRELEAKCKRQKAEAAEKRRLEEQRLQALERRLWEENRRQELLEEEGEGQEPPLEAERAPREEQQRSLEAPGWEDAERREREERERLEAEEERRRLQAQAQAEERRRLEEDARLEERRRQEEEEGRCAEELKRQEEEEAEGWEELEQQEAEVQGPPEALE

SEQ ID NO: 46494 - protein, 111 aa, Homo sapiens
MSSILEERILGADTSVDLEETGRVLSIGDGIARVHGLRNVQAEEMVEFSSGLKGMSLNLEPDNVGVVVFGNDKLIKEGDIVKRTGAIVDVPVGEELLGRVVDALGNAIDGK

SEQ ID NO: 46495 - protein, 367 aa, Homo sapiens
MSKRPSYAPPPTPAPATQMPSTPGFVGYNPYSHLAYNNYRLGGNPGTNSRVTASSGITIPKPPKPPDKPLMPYMRYSRKVWDQVKASNPDLKLWEIGKIIGGMWRDLTDEEKQEYLNEYEAEKIEYNESMKAYHNSPAYLAYINAKSRAEAALEEESRQRQSRMEKGEPYMSIQPAEDPDDYDDGFSMKHTATARFQRNHRLISEILSESVVPDVRSVVTTARMQVLKRQVQSLMVHQRKLEAELLQIEERHQEKKRKFLESTDSFNNELKRLCGLKVEVDMEKIAAEIAQAEEQARKRQEEREKEAAEQAERSQSSIVPEEEQAANKGEEKKDDENIPMETGNPLATNAEAVPRLCTAVFNLGFSF

SEQ ID NO: 46496 - protein, 246 aa, Homo sapiens
MATLNSASTTGTTPSPGHNAPSLPSDTFSSSTPSDPVTKDPPAASSTSENMRSSEPGGQLLESGCGLVPPKEIGEPQEGPDCGHFPPNDPGVEKDKEQEEEEEGLPPMDLSNHLFFTAGGEAYLVAKLSLPGGSELLLPKGFPWGEAGIKEEPSLPFLAYPPPSHLTALHIQHGFDPIQGFSSSDQILSHDTSAPSPAACEERHGAFWSYQLAPNPPGDPKDGPMGNSGGNHVAVFWLCLLCRLGF

SEQ ID NO: 46497 - protein, 645 aa, Homo sapiens
MWRVCARRAQNVAPWAGLEARWTALQEVPGTPRVTSRSGPAPARRNSVTTGYGGVRALCGWTPSSGATPRNRLLLQLLGSPGRRYYSLPPHQKVPLPSLSPTMQAGTIARWEKKEGDKINEGDLIAEVETDKATVGFESLEECYMAKILVAEGTRDVPIGAIICITVGKPEDIEAFKNYTLDSSAAPTPQAAPAPTPAATASPPTPSAQAPGSSYPPHMQVLLPALSPTMTMGTVQRWEKKVGEKLSEGDLLAEIETDKATIGFEVQEEGYLAKILVPEGTRDVPLGTPLCIIVEKEADISAFADYRPTEVTDLKPQVPPPTPPPVAAVPPTPQPLAPTPSAPCPATPAGPKGRVFVSPLAKKLAVEKGIDLTQVKGPDGRITKKDIDSFVPSKVAPAPAAVVPPTGPGMAPVPTGVFTDIPISNIRRVIAQRLMQSKQTIPHYYLSIDVNMGEVLLVRKELNKILEGRSKISVNDFIIKASALACLKVPEANSSWMDTVIRQNHVVDVSVAVSTPAGLITPIVFNAHIKGVETIANDVVSLATKAREGKLQPHEFQGGTFTISNLGMFGIKNFSAIINPPQACILAIGASEDKLVPADNEKGFDVASMMSVTLSCDHRVVDGAVGAQWLAEFRKYLEKPITMLL

SEQ ID NO: 46498 - protein, 1657 aa, Homo sapiens
MGLQARRWASGSRGAAGPRRGVLQLLPLPLPLPLLLLLLLRPGAGRAAAQGEAEAPTLYLWKTGPWGRCMGDECGPGGIQTRAVWCAHVEGWTTLHTNCKQAERPNNQQNCFKVCDWHKELYDWRLGPWNQCQPVISKSLEKPLECIKGEEGIQVREIACIQKDKDIPAEDIICEYFEPKPLLEQACLIPCQQDCIVSEFSAWSECSKTCGSGLQHRTRHVVAPPQFGGSGCPNLTEFQVCQSSPCEAEELRYSLHVGPWSTCSMPHSRQVRQARRRGKNKEREKDRSKGVKDPEARELIKKKRNRNRQNRQENKYWDIQIGYQTREVMCINKTGKAADLSFCQQEKLPMTFQSCVITKECQVSEWSEWSPCSKTCHDMVSPAGTRVRTRTIRQFPIGSEKECPEFEEKEPCLSQGDGVVPCATYGWRTTEWTECRVDPLLSQQDKRRGNQTALCGGGIQTREVYCVQANENLLSQLSTHKNKEASKPMDLKLCTGPIPNTTQLCHIPCPTECEVSPWSAWGPCTYENCNDQQGKKGFKLRKRRITNEPTGGSGVTGNCPHLLEAIPCEEPACYDWKAVRLGNCEPDNGKECGPGTQVQEVVCINSDGEEVDRQLCRDAIFPIPVACDAPCPKDCVLSTWSTWSSCSHTCSGKTTEGKQIRARSILAYAGEEGGIRCPNSSALQEVRSCNEHPCTVYHWQTGPWGQCIEDTSVSSFNTTTTWNGEASCSVGMQTRKVICVRVNVGQVGPKKCPESLRPETVRPCLLPCKKDCIVTPYSDWTSCPSSCKEGDSSIRKQSRHRVIIQLPANGGRDCTDPLYEEKACEAPQACQSYRWKTHKWRRCQLVPWSVQQDSPGAQEGCGPGRQARAITCRKQDGGQAGIHECLQYAGPVPALTQACQIPCQDDCQLTSWSKFSSCNGDCGAVRTRKRTLVGKSKKKEKCKNSHLYPLIETQYCPCDKYNAQPVGNWSDCILPEGKVEVLLGMKVQGDIKECGQGYRYQAMACYDQNGRLVETSRCNSHGYIEEACIIPCPSDCKLSEWSNWSRCSKSCGSGVKVRSKWLREKPYNGGRPCPKLDHVNQFQVYEVVPCHSDCNQYLWVTEPWSICKVTFVNMRENCGEGVQTRKVRCMQNTADGPSEHVEDYLCDPEEMPLGSRVCKLPCPEDCVISEWGPWTQCVLPCNQSSFRQRSADPIRQPADEGRSCPNAVEKEPCNLNKNCYHYDYNVTDWSTCQLSEKAVCGNGIKTRMLDCVRSDGKSVDLKYCEALGLEKNWQMNTSCMVECPVNCQLSDWSPWSECSQTCGLTGKMIRRRTVTQPFQGDGRPCPSLMDQSKPCPVKPCYRWQYGQWSPCQVQEAQCGEGTRTRNISCVVSDGSADDFSKVVDEEFCADIELIIDGNKNMVLEESCSQPCPGDCYLKDWSSWSLCQLTCVNGEDLGFGGIQVRSRPVIIQELENQHLCPEQMLETKSCYDGQCYEYKWMASAWKGSSRTVWCQRSDGINVTGGCLVMSQPDADRSCNPPCSQPHSYCSETKTCHCEEGYTEVMSSNSTLEQCTLIPVVVLPTMEDKRGDVKTSRAVHPTQPSSNPAGRGRTWFLQPFGPDGRLKTWVYGVAAGAFVLLIFIVSMIYLACKKPKKPQRRQNNRLKPLTLAYDGDADM

SEQ ID NO: 46499 - protein, 110 aa, Homo sapiens
  MOD_RES (1)..(1): Any amino acid
XLEKEKLENSRSLECRSDPESPIKKTSLSPTSKLGYSYSRDLDLAKKKHASLRQTESDPDADRTTLNHADHSSKIVQQQDEERRRQLRERARQLIAEARSGVKMSELPSY

SEQ ID NO: 46500 - protein, 55 aa, Homo sapiens
MQPLEVGLVPAPAGEPRLTRWLRRGSGILAHLVALGFTIFLTALSRPGTILPLHG

SEQ ID NO: 46501 - protein, 130 aa, Homo sapiens
MAASSSEISEMKGVEESPKVPGEGPGHSEAETGPPQVLAGVPDQPEAPQPGPNTTAAPVDSGPKAGLAPETTETPAGASETAQATDLSLSPGGESKANCSPEDPCQETVSKPEPMGPPPECCSSWLRRIE

SEQ ID NO: 46502 - protein, 42 aa, Homo sapiens
SKAKKRVLLPTRPAPPTVEQILEDVRGAPAEDPVFTILAPEG

SEQ ID NO: 46503 - protein, 275 aa, Homo sapiens
MSGLEMADHMMAMNHGRFPDGTNGLHHHPAHRMGMGQFPSPHHHQQQQPQHAFNALMGEHIHYGAGNMNATSGIRHAMGPGTVNGGHPPSALAPAARFNNSQFMGPPVASQGGSLPASMQLQKLNNQYFNHHPYPHNHYMPDLHPAAGHQMNGTNQHFRDCNPKHSGGSSTPGGSGGSSTPGGSGSSSGGGAGSSNSGGGSGSGNMPASVAHVPAAMLPPNVIDTDFIDEEVLMSLVIEMGLDRIKELPELWLGQNEFDFMTDFVCKQQPSRVSC

SEQ ID NO: 46504 - protein, 187 aa, Homo sapiens
MANRGPAYGLSREVQQKIEKQYDADLEQILIQWITTQCRKDVGRPQPGRENFQNWLKDGTVLCELINALYPEGQAPVKKIQASTMAFKQMEQISQFLQAAERYGINTTDIFQTVDLWEGKNMACVQRTLMNLGGLAVARDDGLFSGDPNWFPKKSKENPRNFSDNQLQEGKNVIGLQMGTNRGASQA

SEQ ID NO: 46505 - protein, 75 aa, Homo sapiens
YNVTEREVQQALRQKTGRRLLCGLIVDTDLSYSRTKYLIADIARGTFQVPGSLEEFQLPSYEVAVAFLLLLFPLS

SEQ ID NO: 46506 - protein, 79 aa, Homo sapiens
NTEETSVAVKEEVLPINVGMLNGGQRIDYVLQEKPIESFNEYLFALQSHLCYWESEDTVLLVLKEIYQTQGIFLDQPLQ

SEQ ID NO: 46507 - protein, 692 aa, Homo sapiens
MLGSLVLRRKALAPRLLLRLLRSPTLRGHGGASGRNVTTGSLGEPQWLRVATGGRPGTSPALFSGRGAATGGRQGGRFDTKCLAAATWGRLPGPEETLPGQDSWNGVPSRAGLGMCALAAALVVHCYSKSPSNKDAALLEAARANNMQEVSRLLSEGADVNAKHRLGWTALMVAAINRNNSVVQVLLAAGADPNLGDDFSSVYKTAKEQGIHSLEDGGQDGASRHITNQWTSALEFRRWLGLPAGVLITREDDFNNRLNNRASFKGCTALHYAVLADDYRTVKELLDGGANPLQRNEMGHTPLDYAREGEVMKLLRTSEAKYQEKQRKREAEERRRFPLEQRLKEHIIGQESAIATVGAAIRRKENGWYDEEHPLVFLFLGSSGIGKTELAKQTAKYMHKDAKKVAKFIGSPPGYVGHEEGGQLTKKLKQCPNAVVLFDEVDKAHPDVLTIMLQLFDEGRLTDGKGKTIDCKDAIFIMTSNVASDEIAQHALQLRQEALEMSRNRIAENLGDVQISDKITISKNFKENVIRPILKAHFRRDEFLGRINEIVYFLPFCHSELIQLVNKELNFWAKRAKQRHNITLLWDREVADVLVDGYNVHYGARSIKHEVERRVVNQLAAAYEQDLLPGGCTLRITVEDSDKQLLKSPELPSPQAEKRLPKLRLEIIDKDSKTRRLDIRAPLHPEKVCNTI

SEQ ID NO: 46508 - protein, 865 aa, Homo sapiens
MSALPQEPTENLAPFLKELDSAGELPLGPEPFLAAHQDLNDKRTPEERLPEVVPLLNRDQNQALVQLPRLKWVQTTDLDRAAGHQADEILVPLDSKVSRPTKFVVSPKNLKKDLAERWSLPEIVGIPHQLSKPQRQKQTLPDDYLSMDTLYPGSLPPELRVNADEPPGPPEQVGLSQFHLEPKSQNPETLEDIQSSSLQEEAPAQLLQLPQEVEPSTQQEAPALPPESSMESLAQTPLNHEVTVQPPGEDQAHYNLPKFTVKPADVEVTMTSEPKNETESTQAQQEAPIQPPEEAEPSSTALRTTDPPPEHPEVTLPPSDKGQAQHSHLTEATVQPLDLELSITTEPTTEVKPSPTTEETSAQPPDPGLAITPEPTTEIGHSTALEKTRAPHPDQVQTLHRSLTEVTGPPTKLESSQDSLVQSETAPEEQKASTSTNICELCTCGDETLSCVGLSPKQRLRQVPVPEPDTYNGIFTTLNFQGNYISYLDGNVWKAYSWTEKLILSENYLTELPKDSFEGLLYLQYLDLSCNKIRYIERQTFESLPFLQYINLGCNLITKLSLGTFQAWHGMQFLHNLILNRNPLTTVEDPYLFELPALKYLDMGTTHITLTTLKNILTMTVELEKLILPSHMACCLCQFKNSIEAVCKTVKLHCNTACLTNSIHCPEEASVGNPEGAFMKMLQARKQHMSTQLTIESEAPSDSSGINLSGFGGDQLEIQLTEQLRSLIPNEDVRKFMSHVIRTLKMECSETHVQGSCAKLMLRTGLLMKLLSEQQEAKALNVEWDTDQQKTNYINENMEQNEQKEQKSSELMKEVPGDDYKNKLIFAISVTVILIILIIIFCLIEVNSHKRASEKYKDNPSISGA

SEQ ID NO: 46509 - protein, 99 aa, Homo sapiens
MTKGRRFNPPSDKDGRWFPHIGLTQKTPESITSATSKEPQSPHLPRQAEGKLPPIYKVREKQAVNNQFPFSVHDNRHSLENSGCYLDSFADGLSWDFSL

SEQ ID NO: 46510 - protein, 425 aa, Homo sapiens
MADKTPGGSQKASSKTRSSDVHSSGSSDAHMDASGPSDSDMPSRTRPKSPRKHNYRNESARESLCDSPHQNLSRPLLENKLKAFSIGKMSTAKRTLSKKEQEELKKKEDEKAAAEIYEEFLAAFEGSDGNKVKTFVRGGVVNAAKEEHETDEKRGKIYKPSSRFADQKNPPNQSSNERPPSLLVIETKKPPLKKGEKEKKKSNLELFKEELKQIQEERDERHKTKGRLSRFEPPQSDSDGQRRSMDAPSRRNRSSGVLDDYAPGSHDVGDPSTTNLYLGNINPQMNEEMLCQEFGRFGPLASVKIMWPRTDEERARERNCGFVAFMNRRDAERALKNLNGKMIMSFEMKLGWGKAVPIPPHPIYIPPSMMEHTLPPPPSGLPFNAQPRERLKNPNAPMLPPPKNKEDFEKEFARPDTSNDRVCCT

SEQ ID NO: 46511 - protein, 159 aa, Homo sapiens
MRGHNQRSPWRIVDDCGGAFTMGVIGGGVFQAIKGFRNAPVCRLLSEAPLFIYSCSRSVSPTVNVSSERAESRPTLFMAVSLHMAWCLAHIGIRHRLRGSANAVRIRAPQIGGSFAVWGGLFSTIDCGLVRLRGKEDPWNSITSGALTGAVLAARSGPL

SEQ ID NO: 46512 - protein, 232 aa, Homo sapiens
MAGTLDLDKGCTVEELLRGCIEAFDDSGKVRDPQLVRMFLMMHPWYIPSSQLAAKLLHIYQQSRKDNSNSLQVKTCHLVRYWISAFPAEFDLNPELAEQIKELKALLDQEGNRRHSSLIDIDSVPTYKWKRQVTQRNPVGQKKRKMSLLFDHLEPMELAEHLTYLEYRSFCKILFQDYHSFVTHGCTVDNPVLERFISLFNSVSQWVQLMILSKPTAPQRALVITHFVHVAE

SEQ ID NO: 46513 - protein, 329 aa, Homo sapiens
MESIFHEKQEGSLCAQHCLNNLLQGEYFSPVELSSIAHQLDEEERMRMAEGGVTSEDYRTFLQPSGNMDDSGFFSIQVISNALKVWGLELILFNSPEYQRLRIDPINERSFICNYKEHWFTVRKLGKQWFNLNSLLTGPELISDTYLALFLAQLQQEGYSIFVVKGDLPDCEADQLLQMIRVQQMHRPKLIGEELAQLKEQRVHKTDLERVLEANDGSGMLDEDEEDLQRALALSRQEIDMEDEEADLRRAIQLSMQGSSRNISQDMTQTSGTNLTSEELRKRREAYFEKQQQKQQQQQQQQQQGDLSGQSSHPCERPATSSGALGSDL

SEQ ID NO: 46514 - protein, 186 aa, Homo sapiens
MSPTTSSQILARKRRRGIIEKRRRDRINNSLSELRRLVPSAFEKQGSAKLEKAEILQMTVDHLKMLHTAGGKGYFDAHALAMDYRSLGFRECLAEVARYLSIIEGLDASDPLRVRLVSHLNNYASQREAASGAHAGLGHIPWGTVFGHHPHIAHPLLLPQNGHGNAGTTASPTEPHHQGRLGSAHP

SEQ ID NO: 46515 - protein, 111 aa, Homo sapiens
MTGKKSSREKRRKRSSQEAAAALAAPDIVPALASGSSGSTSGCGSAGGCGSVSCCGNANFSGSVTGGGSGGSCWGGSSVERSERRKRRSTDSSSVSGSLQQEKGKIVMYSV

SEQ ID NO: 46516 - protein, 325 aa, Homo sapiens
MASVAQESAGSQRRLPPRHGALRGLLLLCLWLPSGRAALPPAAPLSELHAQLSGVEQLLEEFRRQLQQERPQEELELELRAGGGPQEDCPGPGSGGYSAMPDAIIRTKDSLAAGASFLRAPAAVRGWRQCVAACCSEPRCSVAVVELPRRPAPPAAVLGCYLFNCTARGRNVCKFALHSGYSSYSLSRAPDGAALATARASPRQEKDAPPLSKAGQDVVLHLPTDGVVLDGRESTDDHAIVQYEWALLQGDPSVDMKVPQSGTLKLSHLQEGTYTFQLTVTDTAGQRSSDNVSVTVLRAAYSTGDGWSICCICSKREAKEFSETS

SEQ ID NO: 46517 - protein, 1117 aa, Homo sapiens
MVLAGPLAVSLLLPSLTLLVSHLSSSQDVSSEPSSEQQLCALSKHPTVAFEDLQPWVSNFTYPGARDFSQLALDPSGNQLIVGARNYLFRLSLANVSLLQATEWASSEDTRRSCQSKGKTEWCEREISSIAPGELCCLLLSFLPQEECQNYVRVLIVAGRKVFMCGTNAFSPMCTSRQVGNLSRTIEKINGVARCPYDPRHNSTAVISSQGELYAATVIDFSGRDPAIYRSLGSGPPLRTAQYNSKWLNEPNFVAAYDIGLFAYFFLRENAVEHDCGRTVYSRVARVCKNDVGGRFLLEDTWTTFMKARLNCSRPGEVPFYYNELQSAFHLPEQDLIYGVFTTNVNSIAASAVCAFNLSAISQAFNGPFRYQENPRAAWLPIANPIPNFQCGTLPETGPNENLTERSLQDAQRLFLMSEAVQPVTPEPCVTQDSVRFSHLVVDLVQAKDTLYHVLYIGTESGTILKALSTASRSLHGCYLEELHVLPPGRREPLRSLRILHSARALFVGLRDGVLRVPLERCAAYRSQGACLGARDPYCGWDGKQQRCSTLEDSSNMSLWTQNITACPVRNVTRDGGFGPWSPWQPCEHLDGDNSGSCLCRARSCDSPRPRCGGLDCLGPAIHIANCSRNGAWTPWSSWALCSTSCGIGFQVRQRSCSNPAPRHGGRICVGKSREERFCNENTPCPVPIFWASWGSWSKCSSNCGGGMQSRRRACENGNSCLGCGVEFKTCNPEGCPEVRRNTPWTPWLPVNVTQGGARQEQRFRFTCRAPLADPHGLQFGRRRTETRTCPADGSGSCDTDALVEVLLRSGSTSPHTVSGGWAAWGPWSSCSRDCELGFRVRKRTCTNPEPRNGGLPCVGDAAEYQDCNPQACPVRGAWSCWTSWSPCSASCGGGHYQRTRSCTSPAPSPGEDICLGLHTEEALCATQACPEGWSPWSEWSKCTDDGAQSRSRHCEELLPGSSACAGNSSQSRPCPYSEIPVILPASSMEEATDCAGFNLIHLVATGISCFLGSGLLTLAVYLSCQHCQRQSQESTLVHPATPNHLHYKGGGTPKNEKYTPMEFKTLNKNNLIPDDRANFYPLQQTNVYTTTYYPSPLNKHSFRPEASPGQRCFPNS

SEQ ID NO: 46518 - protein, 832 aa, Homo sapiens
MELTGLEVALVLILQKVENGDLSNKILKITDFGLAREWHRTTKMSAAGTYAWMAPEVIRASMFSKGSDVWSYGVLLWELLTGEVPFRGIDGLAVAYGVAMNKLALPIPSTCPEPFAKLMEDCWNPDPHSRPSFTNILDQLTTIEESGFFEMPKDSFHCLQDNWKHEIQEMFDQLRAKEKELRTWEEELTRAALQQKNQEELLRRREQELAEREIDILERELNIIIHQLCQEKPRVKKRKGKFRKSRLKLKDGNRISLPSDFQHKFTVQASPTMDKRKSLINSRSSPPASPTIIPRLRAIQLTPGESSKTWGRSSVVPKEEGEEEEKRAPKKKGRTWGPGTLGQKELASGDEGLKSLVDGYKQWSSSAPNLVKGPRSSPALPGFTSLMEMALLAASWVVPIDIEEDEDSEGPGSGESRLQHSPSQSYLCIPFPRGEDGDGPSSDGIHEEPTPVNSATSTPQLTPTNSLKRGGAHHRRCEVALLGCGAVLAATGLGFDLLEAGKCQLLPLEEPEPPAREEKKRREGLFQRSSRPRRSTSPPSRKLFKKEEPMLLLGDPSASLTLLSLSSISECNSTRSLLRSDSDEIVVYEMPVSPVEAPPLSPCTHNPLVNVRVERFKRDPNQSLTPTHVTLTTPSQPSSHRRTPSDGALKPETLLASRSPSSNGLSPSPGAGMLKTPSPSRDPGEFPRLPDPNVVFPPTPRRWNTQQDSTLERPKTLEFLPRPRPSANRQRLDPWWFVSPSHARSTSPANSSSTETPSNLDSCFASSSSTVEERPGLPALLPFQAGPLPPTERTLLDLDAEGQSQDSTVPLCRAELNTHRPAPYEIQQEFWS

SEQ ID NO: 46519 - protein, 74 aa, Homo sapiens
  MOD_RES (1)..(1): Any amino acid
XEDDDLYGQSVEDDYCISPSTAAQFIYSRRDKPSVEPVEEYDYEDLKESSNSVSNHQLSGFDQAATQLSGHWSC

SEQ ID NO: 46520 - protein, 66 aa, Homo sapiens
  MOD_RES (1)..(1): Any amino acid
XCTLRAVPSPAAPCPPRPWQLGVGAVRTLRTGPALLSVRKFTEKHEWVTTENGIGTVGISNFAQVG

SEQ ID NO: 46521 - protein, 1539 aa, Homo sapiens
MESRETLSSSRQRGGESDFLPVSSAKPPAAPGCAGEPLLSTPGPGKGIPVGGERMEPEEEDELGSGRDVDSNSNADSEKWVAGDGLEEQEFSIKEANFTEGSLKLKIQTTKRAKKPPKNLENYICPPEIKITIKQSGDQKVSRAGKNSKATKEEERSHSKKKLLTASDLAASDLKGFQPQAYERPQKHSTLHYDTGLPQDFTGDTLKPKHQQKSSSQNHMDWSTNSDSGPVTQNCFISPESGRETASTSKIPALEPVASFAKAQGKKGSAGNTWSQLSNNNKDLLLGGVAPSPSSHSSPAPPSSSAECNGLQPLVDQDGGGTKEPPEPPTVGSKKKSSKKDVISQTIPNPDLDWVKNAQKAFDNTEGKREGYSADSAQEASPARQNVSSASNPENDSSHVRITIPIKAPSLDPTNHKRKKRQSIKAVVEKIMPEKALASGITMSSEVVNRILSNSEGNKKDPRVPKLSKMIENESPSVGLETGGNAEKVIPGGVSKPRKPPMVMTPPTCTDHSPSRKLPEIQHPKFAAKRRWTCSKPKPSTMLREAVMATSDKLMLEPPSAYPITPSSPLYTNTDSLTVITPVKKKRGRPKKQPLLTVETIHEGTSTSPVSPISREFPGTKKRKRRRNLAKLAQLVPGEDKPMSEMKFHKKVGKLGVLDKKTIKTINKMKTLKRKNILNQILSCSSSVALKAKAPPETSPGAAAIESKLGKQINVSKRGTIYIGKKRGRKPRAELPPPSEEPKTAIKHPRPVSSQPDVPAVPSNFQSLVASSPAAMHPLSTQLGGSNGNLSPASTETNFSELKTMPNLQPISALPTKTQKGIHSGTWKLSPPRLMANSPSHLCEIGSLKEITLSPVSESHSEETIPSDSGIGTDNNSTSDQAEKSSESRRRYSFDFCSLDNPEAIPSDTSTKNRHGHRQKHLIVDNFLAHESLKKPKHKRKRKSLQNRDDLQFLADLEELITKFQVFRISHRSYTFYHENPYPSIFRINFDHYYPVPYIQYDPLLYLRRTSDLKSKKKRGRPAKTNDTMTKVPFLQGFSYPIPSGSYYAPYGMPYTSMPMMNLGYYGQYPAPLYLSHTLGAASPFMRPTVPPPQFHTNSHVKMSGAAKHKAKHGVHLQGPVSMGLGDMQPSLNPPKVGSASLSSGRLHKRKHKHKHKHKEDRILGTHDNLSGLFAGKATGFSSHILSERLSSADKELPLVSEKNKHKEKQKHQHSEAGHKASKNNFEVDTLSTLSLSDAQHWTQAKEKGDLSSEPVDSCTKRYSGSGGDGGSTRSENLDVFSEMNPSNDKWDSDVSGSKRRSYEGFGTYREKDIQAFKMNRKERSSYDSSMSPVGSSLKKRFKRREIEAIQCEVRKMCNYTKILSTKKNLDHVNKILKAKRLQRQSKTGNNFVKKRRGRPRKQPTQFDEDSRDQMPVLEKCIDLPSKRGQKPSLSPLVLEPAASQDTIMATIEAVIHMAREAPPLPPPPPPPLPPPPPPPLPPPPPLPKTPRGGKRKHKPQAPAQPPQQSPPQQPLPQEEEVKAKRQRKSRGSESEVLP

SEQ ID NO: 46522 - protein, 99 aa, Homo sapiens
QLKELSGHLPALSSRLDLQEQMLGLRLSEAKTEWEGAERKSLEDLARWRKEVTEHLRGVREKVDGLPQQIESVSDKCLLHKSDSDLRISAEGKASFRTK

SEQ ID NO: 46523 - protein, 78 aa, Homo sapiens
MLTKFETKSARVKGLSFHPKRPWILTSLHNGVIQLWDYRMCTLIDKFDEHDGLELQASALSFHIAWALRLYSHHVFSS

SEQ ID NO: 46524 - protein, 28 aa, Homo sapiens
QARWRLVGLPVHLLFLRFYKRDKDEHYR

SEQ ID NO: 46525 - protein, 53 aa, Homo sapiens
MPQALERADGSWAWVVLLATMVTQGLTLGFPTCIGIFFTELQWEFQASNSETS

SEQ ID NO: 46526 - protein, 55 aa, Homo sapiens
MASPGCLWLLAVALLPWTCASRALQHLDPPAPLPLVIWHGMGERQLLQSLKHGCY

SEQ ID NO: 46527 - protein, 433 aa, Homo sapiens
MKPGATGESDLAEVLPQHKFDSKSLEAYLNQHLSGFGAEREATLTIAQYRAGKSNPTFYLQKGFQTYVLRKKPPGSLLPKAHQIDREFKVQKALFSIGFPVPKPILYCSDTSVIGTEFYVMEHVQGRIFRDLTIPGLSPAERSAIYVATVETLAQLHSLNIQSLQLEGYGIGAGYCKRQVSTWTKQYQAAAHQDIPAMQQLSEWLMKNLPDNDNEENLIHGDFRLDNIVFHPKECRVIAVLDWELSTIGHPLSDLAHFSLFYFWPRTVPMINQGSYSENSGIPSMEELISIYCRCRGINSILPNWNFFLALSYFKMAGIAQGVYSRYLLGNNSSEDSFLFANIVQPLAETGLQLSKRTFSTVLPQIDTTGQLFVQTRKGQEVLIKVKHFMKQHILPAEKTQGIWRFCTCMEVRNRRNSGLSLFFKGTLPLASV

SEQ ID NO: 46528 - protein, 117 aa, Homo sapiens
MRDAGDPSPPNKMLRRSDSPENKYSDSTGHSKAKNVHTHRVRERDGGTSYSPQENSHNHSALHSSNSHSSNPSNNPSKTSDAPYDSADDWSEHISSSGKKYYYNCRTEVSQWEKPKE

SEQ ID NO: 46529 - protein, 182 aa, Homo sapiens
  MOD_RES (1)..(1): Any amino acid
XVTDKPPKPSLSAWPSTMFKLGKDITLQCRGPLPGVEFVLEHDGEEAPQQFSEDGDFVINNVEGKGIGNYSCSYRLQAYPDIWSEPSDPLELVGAAGPVAQECTVGNIVRSSLIVVVVVALGVVLAIEWKKWPRLRTRGSETDGRDQTIALEECNQEGEPGTPANSPSSTSQRISVELPVPI

SEQ ID NO: 46530 - protein, 178 aa, Homo sapiens
MSTVDLARVGACILKHAVTGEAVELRSLWREHACVVAGLRRFGCVVCRWIAQDLSSLAGLLDQHGVRLVGVGPEALGLQEFLDGDYFAGELYLDESKQLYKELGFKRYNSLSILPAALGKPVRDVAAKAVPTPDRPRLLASRGTCLGTCCRAEGCWWSAKVVIKCSCISSRSPQATTS

SEQ ID NO: 46531 - protein, 396 aa, Homo sapiens
  MOD_RES (1)..(1): Any amino acid
XDKEVRAVFLRLFAQLFQGYRSCLQLIRIHAEPVIHFHKLVAFEVERIKVEENNPVKMIKHVRELAEQLFKNENPNPHMAFQKVPRPTEGSHLRVHILPFPEINEARVQELIQENVAKNQNAPPATRIEKKCVVPAGPPVVSIMDKVTTVFNSAQRLEVVRNCISFIFENKILETEKTLPAALRALKGKAARQCLTDELGLHVQQNRAILDHQQFDYIIRMMNCTLQDCSSLEEYNIAAALLPLTSAFYRKLAPGVSQFAYTCVQDHPIWTNQQFWETTFYNAVQEQVRSLYLSAKEDNHAPHLKQKDKLPDDHYQEKTAMDLAAEQLRLWPTLSKSTQQELVQHEESTVFSQAIHFANLMVNLLVPLDTSKNKLLRTSAPGDWESGSNSIVTNSI

SEQ ID NO: 46532 - protein, 620 aa, Homo sapiens
MMRSRSKSPRRPSPTARGANCDVELLKTTTRDREELKCMLEKYERHLAEIQGNVKVLKSERDKIFLLYEQAQEEITRLRREMMKSCKSPKSTTAHAILRRVETERDVAFTDLRRMTTERDSLRERLKIAQETAFNEKAHLEQRIEELECTVHNLDDERMEQMSNMTLMKETISTVEKEMKSLARKAMDTESELGRQKAENNSLRLLYENTEKDLSDTQRHLAKKKYELQLTQEKIMCLDEKIDNFTRQNIAQREEISILGGTLNDLAKEKECLQACLDKKSENIASLGESLAMKEKTISGMKNIIAEMEQASRQCTEALIVCEQDVSRMRRQLDETNDELAQIARERDILAHDNDNLQEQFAKAKQENQALSKKLNDTHNELNDIKQKVQDTNLEVNKLKNILKSEESENRQMMEQLRKANEDAENWENKARQSEADNNTLKLELITAEAEGNRLKEKVDSLNREVEQRENELDSAHSEIELLRSQMANERISMQNLEALLVANRDKEYQSQIALQEKESEIQLLKEHLCLAENKMAIQSRDVAQFRNVVTQLEADLDITKRQLGTERFERERAVQELRRQNYSSNAYHMSSTMKPNTKCHSPERAHHRSPDRGLDRSLE

SEQ ID NO: 46533 - protein, 203 aa, Homo sapiens
MRSLLLLSAFCLLEAALAAEVKKPAAAAAPGTAEKLSPKAATLAERSAGLAFSLYQAMAKDQAVENILVSPVVVASSLGLVSLGGKATTASQAKAVLSAEQLRDEEVHAGLGELLRSLSNSTARNVTWKLGSRLYGPSSVSFADDFVRSSKQHYNCEHSKINFRDKRSALQSINEWAAQTTDGKLPEVTKDVERTDGALLVNA

SEQ ID NO: 46534 - protein, 37 aa, Homo sapiens
MEPGGEPTGAKESSTLMESLAGEGTCPQSGPEFQGRN

SEQ ID NO: 46535 - protein, 1173 aa, Homo sapiens
MEPNDSTSTAVEEPDSLEVLVKTLDSQTRTFIVGAQMNVKEFKEHIAASVSIPSEKQRLIYQGRVLQDDKKLQEYNVGGKVIHLVERAPPQTHLPSGASSGTGSASATHGGGSPPGTRGPGASVHDRNANSYVMVGTFNLPSDGSAVDVHINMEQAPIQSEPRVRLVMAQHMIRDIQTLLSRMECRGGPQPQHSQPPPQPPAVTPEPVALSSQTSEPVESEAPPREPMEAEEVEERAPAQNPELTPGPAPAGPTPAPETNAPNHPSPAEYVEVLQELQRLESRLQPFLQRYYEVLGAAATTDYNNNHEGREEDQRLINLVGESLRLLGNTFVALSDLRCNLACTPPRHLHVVRPMSHYTTPMVLQQAAIPIQINVGTTVTMTGNGTRPPPTPNAEAPPPGPGQASSVAPSSTNVESSAEGAPPPGPAPPPATSHPRVIRISHQSVEPVVMMHMNIQDSGTQPGGVPSAPTGPLGPPGHGQTLGSTLIQLPSLPPEFMHAVAHQITHQAMVAAVASAAAALFGLSLLPPTGQQVPGFPTAPTRVVIARPTPPQARPSHPGGPPVSGTLQGAGLGTNASLAQMVSGLVGQLLMQPVLVAQGTPGMAPPPAPATASASAGTTNTATTAGPAPGGPAQPPPTPQPSMADLQFSQLLGNLLGPAGPGAGGSGVASPTITVAMPGVPAFLQGMTDFLQATQTAPPPPPPPPPPPPAPEQQTMPPPGSPSGGAGSPGGLGLESLSPEFFTSVVQGVLSSLLGSLGARAGSSESIAAFIQRLSGSSNIFEPGADGALGFFGALLSLLCQNFSMVDVVMLLHGHFQPLQRLQPQLRSFFHQHYLGGQEPTPSNIRMATHTLITGLEEYVRESFSLVQVQPGVDIIRTNLEFLQEQFNSIAAHVLHCTDSGFGARLLELCNQGLFECLALNLHCLGGQQMELAAVINGRIRRMSRGVNPSLVSWLTTMMGLRLQVVLEHMPVGPDAILRYVRRVGDPPQPLPEEPMEVQGAERASPEPQRENASPAPGTTAEEAMSRGPPPAPEGGSRDEQDGASAETEPWAAAVPPEWVPIIQQDIQSQRKVKPQPPLSDAYLSGMPAKRRKTMQGEGPQLLLSEAVSRAAKAAGARPLTSPESLSRDLEAPEVQESYRQQLRSDIQKRLQEDPNYSPQRFPNAQRAFADDP

SEQ ID NO: 46536 - protein, 195 aa, Homo sapiens
  MOD_RES (1)..(1): Any amino acid
XDMGFARLFNSPLKPLADLDPVVVTFWYRAPELLLGARHYTKAIDKDWEDIKKMPEHSTLMKDFRRNTYTNCSLIKYMEKHKVKPDSKAFHLLQKLLTMDPIKRITSEQAMQDPYFLEDPLPTSDVFAGCQIPYPKREFLTEEEPDDKGDKKNQQQQQGNNHTNGTGHPGNQDSSHTQGPPLKKVRVVPPTTTSG

SEQ ID NO: 46537 - protein, 147 aa, Homo sapiens
MNHPALTVHPAHQLGASPLQPPHSFFGAQHRDPLHFYPWVLRNRFFGHRFQASDVPQDGLLLHGPFARKPKRIRTAFSPSQLLRLERAFEKNHYVVGAERKQLAGSLSLSETQVRRVGVGLSDPQPSCCPGGGFQSLRAGRLPELRE

SEQ ID NO: 46538 - protein, 571 aa, Homo sapiens
MQCKVILLDGSEYTCDVEKRSRGQVLFDKVCEHLNLLEKDYFGLTYRDAENQKNWLDPAKEIKKQVRSGAWHFSFNVKFYPPDPAQLSEDITRYYLCLQLRDDIVSGRLPCSFVTLALLGSYTVQSELGDYDPDECGSDYISEFRFAPNHTKELEDKVIELHKSHRGMTPAEAEMHFLENAKKLSMYGVDLHHAKDSEGVEIMLGVCASGLLIYRDRLRINRFAWPKVLKISYKRNNFYIKIRPGEFEQFESTIGFKLPNHRAAKRLWKVCVEHHTFFRLLLPEAPPKKFLTLGSKFRYSGRTQAQTRRASALIDRPAPYFERSSSKRYTMSRSLDGASVNENHEIYMKDSMSAAEVGTGQYATTKGISQTNLITTVTPEKKAEEERDEEEDKRRKGEEVTPISAIRHEGKTDSERTDTAADGETTATESDQEEDAELKAQELEKTQDDLMKHQTNISELKRTFLETSTDTAVTNEWEKRLSTSPVRLAARQEDAPMIEPLVPEETKEETEISEKVIFLQQGSAPFLESQVKTKHKGFSRRNWSSDFSVIKMLLVFIFPLTFILFKTKVGT

SEQ ID NO: 46539 - protein, 153 aa, Homo sapiens
MNCKEGTDSSCGCRGNDEKKMLKCVVVGDGAVGKTCLLMSYANDAFPEEYVPTVFDHYAVTVTVGGKQHLLGLYDTAGQEDYNQLRPLSYPNTDVFLICFSVVWDLPPPHPGMRMAANLCGQAPAKKEGTTRKELPLHGGLPHHPLSPPNTAH

SEQ ID NO: 46540 - protein, 116 aa, Homo sapiens
MFTLAEVASLNDIQPTYRILKPWWDVFMDYLAVVMLMVAIFAGTMQLTKDQVVCLPVLPSPVNSKAHTPPGNAEVTTNIPKMEAATNQDQDGRTTNDISFGTSAVTPDIPLRATYP

SEQ ID NO: 46541 - protein, 352 aa, Homo sapiens
  MOD_RES (1)..(1): Any amino acid
XTSGVSLATTVAPGSFSTEATTSVGENGKTRGEIITDTTEGTSGKVLEPGSAHTEATTFPGGSGTTRAGPPGGTTGELSRMTIIPGSSNTEATTSTKGTGTSGTGFKTGTSWVAPGTTVSPGSFSTATISPGASRTTGAAPAAETTTSLEGGGTTGAEIKSGATSGVPGSKTGTAGVPSATTIAPGSSNSEATTSLGESGKTRVETITGTTEGKTLAAGSAHTEATTFSGGSGSTRAGPLGGASGTSGGYVPGRETEPTTSIEETGTSRTIFKTVGITSAPGRQAGTSVVAPSTTVAPGSFSTAATTSPGASGMTGVRTTSKTTTSLGGTGTTRTEIKSGATTGAPGIKTDI

SEQ ID NO: 46542 - protein, 127 aa, Homo sapiens
MELESKLNEAKEEFTSGGPLGQKRDPKEWIPRPPEKYALSGHRSPVTRVIFHPVFSVMVSASEDATIKVWDYETGDFERTLKGHTDSVQDISFDHSGKLLASCSADMTIKLWDFQGFECIRTMHATV

SEQ ID NO: 46543 - protein, 107 aa, Homo sapiens
MTPQSLLQTTLFLLSLLFLVQGAHGRGHREDFRFCSQRNQTHRSSLHYKPTPDLRISIENSEEALTVHAPFPAAHPASRSFPDPRGLYHFCLYWNRHAGRLHLLYGK

SEQ ID NO: 46544 - protein, 91 aa, Homo sapiens
  MOD_RES (1)..(1): Any amino acid
XDVKMAFDRDGEKADISANVYPDINIITGALKLYFRDLPIPVITYDTYSKFIDAAKISNADERLEAVHEVLMLLPPAHYETLRYLMIHLKK

SEQ ID NO: 46545 - protein, 79 aa, Homo sapiens [sequence omitted]

SEQ ID NO: 46546 - protein, 240 aa, Homo sapiens
  MOD_RES (1)..(1): Any amino acid
XSGSASPAVAELCQNTPETFLEASKLLLTYADNILRNPNDEKYRSIRIGNTAFSTRLLPVRGAVECLFEMGFEEGETHLIFPKKASVEQLQKIRDLIAIERSSRLDGSNKSHKVKSSQQPAASTQLPTTPSSNPSGLNQHTRNRQGQSSDPPSASTVAADSAILEVLQSNIQHVLVYENPALQEKALACIPVQELKRKSQEKLSRARKLDKDIITLRNFWKQDVDGVASGPIVLHCAAEL

SEQ ID NO: 46547 - protein, 47 aa, Homo sapiens
MEDSASASLSSAAATGTSTSTPAAPTARKQLDKEQDFQKNCQRSGRA

SEQ ID NO: 46548 - protein, 235 aa, Homo sapiens
MADGQVAELLLRRLEASDGGLDSAELAAELGMEHQAVVGAVKSLQALGEVIEAELRSTKHWELTAEGEEIAREGSHEARVFRSIPPEGLAQSELMRLPSGKVGFSKAMSNKWIRVDKSAADGPRVFRVVDSMEDEVQRRLQLVRGGQAEKLGEKERSELRKRKLLAEVTLKTYWVSKGSAFSTSISKQETELSPEMISSGSWRDRPFKPYNFLAHGVLPDSGHLHPLLKVHRDAD

SEQ ID NO: 46549 - protein, 867 aa, Homo sapiens
MVVSAGPWSSEKAEMNILEINEKLRPQLAENKQQFGNLKERCFLTQLAGFLANRQKKYKYEECKDLIKFMLRNERQFKEEKLAEQLKQAEELRQYKVLVHSQERELTQLKEKLREGRDASRSLNEHLQALLTPDEPDKSQGQDLQEQLAEGCRLAQHLVQKLSPENDEDEDEDVQVEEDEKVLESSAPREVQKAEESKVAEDSLEECAITCSNSHGPCDSNQPHKNIKITFEEDEVNSTLVVDRESSHDECQDALNILPVPGPTSSATNVSMVVSAGPLSSEKAEMNILEINEKLRPQLAEKKQQFRNLKEKCFLTQLAGFLANQQNKYKYEECKDLIKFMLRNERQFKEEKLAEQLKQAEELRQYKVLVHAQERELTQLREKLREGRDASRSLNEHLQALLTPDEPDKSQGQDLQEQLAEGCRLAQHLVQKLSPENDNDDDEDVQIEVAEKVQKSSAPREMQKAEEKEVPEDSLEECAITYSNSHGPYDSNQPHRKTKITFEEDKVDSTLIGSSSHVEREDAVHIIPENESDDEEEEEKGPVSPRNLQESEEEEVPQESWDEGYSTPSIPPEMLASYKSYSSTFHSLEEQQVCMAVDIGRHRWDQVKKEDQEATGPRLSRELLDEKEPEVLQDSLDRCYSTPSGYLELPDLGQPYSSAVYSLEEQYLGLALDVDRIKKDQEEEEDQGPPCPRLSRELLEVVEPEVLQDSLDRCYSTPSSCLEQPDSCQPYGSSFYALEEKHVGFSLDVGEIEKKGKGKKRRGRRSKKERRRGRKEGEEDQNPPCPRLNGVLMEVEEPEVLQDSLDGCYSTPSMYFELPDSFQHYRSVFYSFEEQHISFALYVDNRFFTLTVTSLHLVFQMEVIFPQ

SEQ ID NO: 46550 - protein, 169 aa, Homo sapiens
MREWWVQVGLLAVPLLAAYLHIPPPQLSPALHSWKSSGKFFTYKGLRIFYQDSVGVVGSPEIVVLLHGFPTSSYDWYKIWEGLTLRFHRVIALDFLGFGFSDKPRPHHYSIFEQASIVEALLRHLGLQNRRINLLSHDYGDIVAQELLYRYKQNRSGRLTIKSLCLSNG

SEQ ID NO: 46551 - protein, 79 aa, Homo sapiens
MSDSLVVCEVDPELTEKLRKFRFRKETDNAAIIMKVDKDRQMVVLEEEFQNISPEELKMELPERQPRLQAGTTDDVCRE

SEQ ID NO: 46552 - protein, 239 aa, Homo sapiens
MSGGEVVCSGWLRKSPPEKKLKRYAWKRRWFVLRSGRLTGDPDVLEYYKNDHAKKPIRIIDLNLCQQVDAGLTFNKKEFENSYIFDINTIDRIFYLVADSEEEMNKWVRCICDICGFNPTEEDPVKPPGSSLQAPADLPLAINTAPPSTQADSSSATLPPPYQLINVPPHLETLGIQEDPQDYLLLINCQSKKPEPTSQGSSFVSEEGEEYLLLEDFESKTIPLQTHADSAKSTSSETD

SEQ ID NO: 46553 - protein, 23 aa, Homo sapiens
MRPEDRMFHIRAVILRALSLAFL

SEQ ID NO: 46554 - protein, 432 aa, Homo sapiens
MEVVDPQQLGMFTEGELMSVGMDTFIHRIDSTEVIYQPRRKRAKLIGKYLMGDLLGEGSYGKVKEVLDSETLCRRAVKILKKKKLRRIPNGEANVKKEIQLLRRLRHKNVIQLVDVLYNEEKQKMYMVMEYCVCGMQEMLDSVPEKRFPVCQAHGYFCQLIDGLEYLHSQGIVHKDIKPGNLLLTTGGTLKISDLGVAEALHPFAADDTCRTSQGSPAFQPPEIANGLDTFSGFKVDIWSAGVTLYNITTGLYPFEGDNIYKLFENIGKGSYAIPGDCGPPLSDLLKGMLEYEPAKRFSIRQIRQHSWFRKKHPPAEAPVPIPPSPDTKDRWRSMTVVPYLEDLHGADEDEDLFDIEDDIIYTQDFTVPGQVPEEEASHNGQRRGLPKAVCMNGTEAAQLSTKSRAEAGPPTLPARPAASSKIRRLSACKQQ

SEQ ID NO: 46555 - protein, 121 aa, Homo sapiens
MAEAGPQAPPPPGTPSRHEKSLGLLTTKFVSLLQEAKDGVLDLKLAADTLAVRQKRRIYDITNVLEGIGLIEKKSKNSIQWKRYPLGHPGPIRHQPGGAHPRGSQWAEEVPDSPEECEWSH

SEQ ID NO: 46556 - protein, 175 aa, Homo sapiens
  MOD_RES (1)..(1): Any amino acid
XSTEPARKPGQKEKRVRPEEKQQAKPVKVERTRKRSEGFSMDRKVEKKKEPSVEEKLQKLHSEIKFALKVDSPDVKRCLNALEELGTLQVTSQILQKNTDVVATLKKIRRYKANKDVMEKAAEVYTRLKSRVLGPKIEAVQKVNKAQWSHSLTQQLPCAMPGWRQRGDPGDGCGL

SEQ ID NO: 46557 - protein, 1270 aa, Homo sapiens
MEPIYPFARPQMNTRFPSSRMVPFHFPPSKCALWNPTPTGDFIYLHLSYYRNPKLVVTEKTIRLAYRHAKQNKKNSSCFLLGSLTADEDEEGVTLTVDRFDPGREVPECLEITPTASLPGDFLIPCKVHTQELCSREMIVHSVDDFSSALKALQCHICSKDSLDCGKLLSLRVHITSRESLDSVEFDLHWAAVTLANNFKCTPVKPIPIIPTALARNLSSNLNISQVQGTYKYGYLTMDETRKLLLLLESDPKVYSLPLVGIWLSGITHIYSPQVWACCLRYIFNSSVQERVFSESGNFIIVLYSMTHKEPEFYECFPCDGKIPDFRFQLLTSKETLHLFKNVEPPDKNPIRCELSAESQNAETEFFSKASKNFSIKRSSQKLSSGKMPIHDHDSGVEDEDFSPRPIPSPHPVSQKISKIQPSVPELSLVLDGNFIESNPLPTPLEMVNNENPPLINHLEHLKPLQPQLYDEKHSPEVEAGEPSLRGIPNQLNQDKPALLRHCKVRQPPAYKKGNPHTRNSIKPSSHNGPSHDIFEKLQTVSAGNVQNEEYPIRPSTLNSRQSSLAPQSQPHDFVFSPHNSGRPMELQIPTPPLPSYCSTNVCRCCQHHSHIQYSPLNSWQGANTVGSIQDVQSEALQKHSLFHPSGCPALYCNAFCSSSSPIALRPQGDMGSCSPHSNIEPSPVARPPSHMDLCNPQPCTVCMHTPKTESDNGMMGLSPDAYRFLTEQDRQLRLLQAQIQRLLEAQSLMPCSPKTTAVEDTVQAGRQMELVSVEAQSSPGLHMRKGVSIAVSTGASLFWNAAGEDQEPDSQMKQDDTKISSEDMNFSVDINNEVTSLPGSASSLKAVDIPSFEESNIAVEEEFNQPLSVSNGQLAESVSMCLQTGPTGGASNNSETSEEPKIEHVMQPLLHQPSDNQKIYQDLLGQVNHLLNSSSKETEQPSTKAVIISHECTRTQNVYHTKKKTHHSRLVDKDCVLNATLKQLRSLGVKIDSPTKVKKNAHNVDHASVLACISPEAVISGLNCMSFANVGMSGLSPNGVDLSMEANAIALKYLNENQLSQLSVTRSNQNNCDPFSLLHINTDRSTVGLSLISPNNMSFATKKYMKRYGLLQSSDNSEDEEEPPDNADSKSEYLLNQNLRSIPEQLGGQKEPSKNDHEIINCSNCESVGTNADTPVLRNITNEVLQTKAKQQLTEKPAFLVKNLKPSPAVNLRTGKAEFTQHPEKENEGDITIFPESLQPSETLKQMNSMNSVGTFLDVKRLRQLPKLF

SEQ ID NO: 46558 - protein, 55 aa, Homo sapiens
MVSGRFYLSCLLLGSLGSMCILFTIYWMQYWRGGFAWNGSIYMFNWHPVLMVAGM

SEQ ID NO: 46559 - protein, 51 aa, Homo sapiens
KFRESGIASEYESNTDESEERDSWSQEELPRLLNVLQRQELGDGLDDEIAV

SEQ ID NO: 46560 - protein, 113 aa, Homo sapiens
MTSKGPEEEHPSVTLFRQYLRIRTVQPKPDYGAAVAFFEETARQLGLGCQKVEVAPGYVVTVLTWPGTNPTLSSILLNSHTDVVPVFKVPGSCEEAEGGGPPVPQNHPHDLCA

SEQ ID NO: 46561 - protein, 335 aa, Homo sapiens
MAQQRGSAAQCPSYTEPQNLTGVSEFLLLGLSEDPELQPVLAGLFLSMYLVTVLGNLLIILAVSSDSHLHTPMYFFLSNLSLADIGFTSTTVPKMIVDMQTHSRVISYEGCLTQMSFFVLFACMDDMLLSVMAYDRFVAICHPLHYRIIMNPRLCGFLILLSFFISLLDSQLHNLIMLQLTCFKDVDISNFFCDPSQLLHLRCSDTFINEMVIYFMGAIFGCLPISGILFSYYKIVSPILRVPTSDGKYKAFSTCGSHLAVVCLFYGTGLVGYLSSAVLPSPRKSMVASVMYTVVTPMLNPFIYSLRNKDIQSALCRLHGRIIKSHHLHPFCYMG

SEQ ID NO: 46562 - protein, 20 aa, Homo sapiens
MGVLLTQRTLLNTYPRPGCS

SEQ ID NO: 46563 - protein, 341 aa, Homo sapiens
MYDNLYLHGIEDSEAGSADSYTSRPSDSDVSLEEDREAIRQEREQQAAIQLERAKSKPVAFAVKTNVSYCGALDEDVPVPSTAISFDAKDFLHIKEKYNNDWWIGRLVKEGCEIGFIPSPLRLENIRIQQEQKRGRFHGGKSSGNSSSSLGEMVSGTFRATPTSTAKQKQKVTEHIPPYDVVPSMRPVVLVGPSLKGYEVTDMMQKALFDFLKHRFDGRISITRVTADISLAKRSVLNNPSKRAIIERSNTRSSLAEVQSEIERIFELARSLQLVVLDADTINHPAQLIKTSLAPIIVHVKVSSPKEMFDVILDENQLEDACEHLGEYLEAYWRATHTTSS

SEQ ID NO: 46564 - protein, 438 aa, Homo sapiens
MENEPGIVSPFKRVFLKGEKSRDKKAHEKVTERRPLHTVVLSLPERVEPDRLLSDYIEKEVKYLGQLTSIPGYLNPSSRTEILHFIDNAKRAHQLPGHLTQEHDAVLSLSAYNVKLAWRDGEDIILRVPIHDIAAVSYVRDDAAHLVVLKTAQDPGISPSQSLCAESSRGLSAGSLSESAVGPVEACCLVILAAESKVAAEELCCLLGQVFQVVYTESTIDFLDRAIFDGASTPTHHLSLHSDDSSTKVDIKETYEVEASTFCFPESVDVGGASPHSKTISESELSASATELLQDYMLTLRTKLSSQEIQQFAALLHEYRNGASIHEFCINLRQLYGDSRKFLLLGLRPFIPEKDSQHFENFLETIGVKDGRGIITDSFGRHRRALSTTSSSTTNGNRATGSSDDRSAPSEGDEWDRMISDISSDIEALGCSMDQDSA

SEQ ID NO: 46565 - protein, 48 aa, Homo sapiens
MEAAHFFEGTEKLLEVWFSRQQPDANQGSGDLRTIPRWSSILYGTYEF

SEQ ID NO: 46566 - protein, 182 aa, Homo sapiens
MPQTRSQAQATISFPKRKLSRALNKAKNSSDAKLEPTNVQTVTCSPRVKALPLSPRKRLGDDNLCNTPHLPPCSPPKQGKKENGPPHSHTLKGRRLVFDNQLTIKSPSKRELAKVHQNKILSSVRKSQEITTNSEQRCPLKKESACVRLFKQEGTCYQQAKLVLNTAVPDRLPAREREMDVI

SEQ ID NO: 46567 - protein, 362 aa, Homo sapiens
MPRSFLVKSKKAHTYHQPRVQEDEPLWPPALTPVPRDQAPSNSPVLSTLFPNQCLDWTNLKREPELEQDQNLARMAPAPEGPIVLSRPQDGDSPLSDSPPFYKPSFSWDTLATTYGHSYRQAPSTMQSAFLEHSVSLYGSPLVPSTEPALDFSLRYSPGMDAYHCVKCNKVFSTPHGLEVHVRRSHSGTRPFACDICGKTFGHAVSLEQHTHVHSQAAPMECPVPQGIPAGSSPEPAPDPPGPHFLRQERSFECRMCGKAFKRSSTLSTHLLIHSDTRPYPCQFCGKRFHQKSDMKKHTYIHTGEKPHKCQVCGKAFSQSSNLITHSRKHTGFKPFSCELCTKGFQRKVDLRRHRESQHNLK

SEQ ID NO: 46568 - protein, 478 aa, Homo sapiens
MKMSIRTPPRLLELAGRSLLRDQALAMSTLEELPTELFPPLFMEAFSRRRCEALKLMVQAWPFRRLPLRPLIKMPCLEAFQAVLDGLDALLTQGVCPRRWKLQVLDLQDVCENFWMVWSEAMARGSFLNAKRNKTPVQDCPRMRGQQPLTVFVELWLKNRTLDEYLTYLLLWVKQRKDLLHLCCKKLKILGMPFRNIRSILKMVNLDCIQEVEVNCKWVLPILTQFTPYLGHMRNLQKLVLSHMDVSRYVSPEQKKEIVTQFTTQFLKLHCLQKLYMNSVSFLEGHLDQLLSCLKTSLKVLTITNCVLLESDLKHLSQCPSISQLKTLDLSGIRLTNYSLVPLQILLEKVAATLEYLDLDDCGIIDSQVNAILPALSRCFELNAFSFCGNPISMATLENLLSHTIILKNLCVEVYPAPQESYGADGTLCWSRFAQIRAELMNRVRDLRHPKRIFFCIDNCPDCGNRSFYDLEADQYCC

SEQ ID NO: 46569 - protein, 154 aa, Homo sapiens
MKWEDTNIEDQHRNPRRSLRCHIIERFSESRQPDSTVNEKPPGVDPCKSSVCGEIMGCSFLNCYITFDAGHKPDECQEYGEKPHTHKQCGTAFNYHHSFQTQERPHTGKKRYDCKECGKTFSSSGNLRRHIIVQRGGGPYICKLCGKAFFWPSL

SEQ ID NO: 46570 - protein, 102 aa, Homo sapiens
MLDHKDLEAEIHPLKNEERKSQENLGNPSKNEDNVKSAPPQSRLSRCRAAAFFLSLFLCLFVVFVVSFVIPCPDRPASQRMWRIDYSAAVIYDFLAVDDING

SEQ ID NO: 46571 - protein, 155 aa, Homo sapiens
AYYAPGYTQTSYSTEVPSTYRSSGNSPTPVSRWIYPQQDCQTEAPPLRGQVPGYPPSQNPGMTLPHYPYGDGNRSVPQSGPTVRPQEDAWASPGAYGMGGRYPWPSSAPSAPPGNLYMTESTSPWPSSGSPQSPPSPPVQQPKVGDLNVVPLMCV

SEQ ID NO: 46572 - protein, 134 aa, Homo sapiens
LDPPAVVAESVSSLTIADAFIAAGESSAPTPPRPALPRRFICSFPDCSANYSKAWKLDAHLCKHTGERPFVCDYEGCGKAFIRDYHLSRHILTHTGEKPFVCAANGCDQKFNTKSNLKKHFERKHENQQKQYIF

SEQ ID NO: 46573 - protein, 2509 aa, Homo sapiens
MEEVVIAGMSGKLPESENLQEFWDNLIGGVDMVTDDDRRWKAGLYGLPRRSGKLKDLSRFDASFFGVHPKQAHTMDPQLRLLLEVTYEAIVDGGINPDSLRGTHTGVWVGVSGSETSEALSRDPETLVGYSMVGCQRAMMANRLSFFFDFRGPSIALDTACSSSLMALQNAYQAIHSGQCPAAIVGGINVLLKPNTSVQFLRLGMLSPEGTCKAFDTAGNGYCRSEGVVAVLLTKKSLARRVYATILNAGTNTDGFKEQGVTFPSGDIQEQLIRSLYQSAGVAPESFEYIEAHGTGTKVGDPQELNGITRALCATRQEPLLIGSTKSNMGHPEPASGLAALAKVLLSLEHGLWAPNLHFHSPNPEIPALLDGRLQVVDQPLPVRGGNVGINSFGFGGSNVHIILRPNTQPPPAPAPHATLPRLLRASGRTPEAVQKLLEQGLRHSQDLAFLSMLNDIAAVPATAMPFRGYAVLGGERGGPEVQQVPAGERPLWFICSGMGTQWRGMGLSLMRLDRFRDSILRSDEAVKPFGLKVSQLLLSTDESTFDDIVHSFVSLTAIQIGLIDLLSCMGLRPDGIVGHSLGEVACGYADGCLSQEEAVLAAYWRGQCIKEAHLPPGAMAAVGLSWEECKQRCPPGVVPACHNSKDTVTISGPQAPVFEFVEQLRKEGVFAKEVRTGGMAFHSYFMEAIAPPLLQELKKVIREPKPRSARWLSTSIPEAQWHSSLARTSSAEYNVNNLVSPVLFQEALWHVPEHAVVLEIAPHALLQAVLKRGLKPSCTIIPLMKKDHRDNLEFFLAGIGRLHLSGIDANPNALFPPVEFPAPRGTPLISPLIKWDHSLAWDVPAAEDFPNGSGSPSAAIYNIDTSSESPDHYLVDHTLDGRVLFPATGYLSIVWKTLARALGLGVEQLPVVFEDVVLHQATILPKTGTVSLEVRLLEASRAFEVSENGNLVVSGKVYQWDDPDPRLFDHPESPTPNPTEPLFLAQAEVYKELRLRGYDYGPHFQGILEASLEGDSGRLLWKDNWVSFMDTMLQMSILGSAKHGLYLPTRVTAIHIDPATHRQKLYTLQDKAQVADVVVSRWLRVTVAGGVHISGLHTESAPRRQQEQQVPILEKFCFTPHTEEGCLSERAALQEELQLCKGLVQALQTKVTQQGLKMVVPGLDGAQIPRDPSQQELPRLLSAACRLQLNGNLQLELAQVLAQERPKLPEDPLLSGLLDSPALKACLDTAVENMPSLKMKVVLAGHGHLYSRIPGLLSPHPLLQLSYTATDRHPQALEAAQAELQQHDVAQGQWDPADPAPSALGSADLLVCNCAVAALGDPASALSNMVAALREGGFLLLHTLLRGHPLGDIVAFLTSTEPQYGQGILSQDAWESLFSRVSLRLVGLKKSFYGSTLFLCRRPTPQDSPIFLPVDDTSFRWVESLKGILADEDSSRPVWLKAINCATSGVVGLVNCLRREPGGNRLRCVLLSNLSSTSHVPEVDPGSAELQKVLQGDLVMNVYRDGAWGAFRHFLLEEDKPEEPTAHAFVSTLTRGDLSSIRWVCSSLRHAQPTCPGAQLCTVYYASLNFRDIMLATGKLSPDAIPGKWTSQDSLLGMEFSGRDASGKRVMGLVPAKGLATSVLLSPDFLWDVPSNWTLEEAASVPVVYSTAYYALVVRGRVRPGETLLIHSGSGGVGQAAIAIALSLGCRVFTTVGSAEKRAYLQARFPQLDSTSFANSRDTSFEQHVLWHTGGKGVDLVLNSLAEEKLQASVRCLATHGRFLEIGKFDLSQNHPLGMAIFLKNVTFHGVLLDAFFNESSADWREVWALVQAGIRDGVVRPLKCTVFHGAQVEDAFRYMAQGKHIGKVVVQVLAEEPEAVLKGAKPKLMSAISKTFCPAHKSYIIAGGLGGFGLELAQWLIQRGVQKLVLTSRSGIRTGYQAKQVRRWRRQGVQVQVSTSNISSLEGARGLIAEAAQLGPVGGVFNLAVVLRDGLLENQTPEFFQDVCKPKYSGTLNLDRVTREACPELDYFVVFSSVSCGRGNAGQSNYGFANSAMERICEKRRHEGLPGLAVQWGAIGDVGILVETMSTNDTIVSGTLPQRMASCLEVLDLFLNQPHMVLSSFVLAEKAAAYRDRDSQRDLVEAVAHILGIRDLAAVNLDSSLADLGLDSLMSVEVRQTLERELNLVLSVREVRQLTLRKLQELSSKADEASELACPTPKEDGLAQQQTQLNLRSLLVNPEGPTLMRLNSVQSSERPLFLVHPIEGSTTVFHSLASRLSIPTYGLQCTRAAPLDSIHSLAAYYIDCIRQVQPEGPYRVAGYSYGACVAFEMCSQLQAQQSPAPTHNSLFLFDGSPTYVLAYTQSYRAKLTPGCEAEAETEAICFFVQQFTDMEHNRVLEALLPLKGLEERVAAAVDLIIKSHQGLDRQELSFAARSFYYKLRAAEQYTPKAKYHGNVMLLRAKTGGAYGEDLGADYNLSQVCDGKVSVHVIEGDHRTLLEGSGLESIISIIHSSLAEPRVSVREG

SEQ ID NO: 46574 - protein, 105 aa, Homo sapiens
MAATQELLLQLQKDNRDGRQRKQELEKLMRGLEAESESLNQRLQDLSERERSLLRRRSQAAQPLQGEAREAARERAERVRRRLEEAERHKEYLKPGKPRPYKPRP

SEQ ID NO: 46575 - protein, 49 aa, Homo sapiens
MGIVQICKGTFPEPSSSPSHWSHLCMSLPMSLMSLQCPPRSCWHPTPSL

SEQ ID NO: 46576 - protein, 614 aa, Homo sapiens
DETQKSVSLLRPPFSQLPSKSRSSSLTLPSSRDPQPLRIQSCYLGDHISDGAWDPEGEGMRGGSRALAAVREATQRIQAVLAVQGPLLLSRDPAQYCHAVWGDPDSPNYHRCSLLNPGYKGESCLGAKIPDTHLRGYALWPEQGPPQLVQPDGPGVQNTDFLLYVRVAHTSKCHQEPSVIAYAACCQLDSEDRPLAGTIVYCAQHLTSPSLSHSDIVMATLHELLHALGFSGQLFKKWRDCPSGFSVRENCSTRQLVTRQDEWGQLLLTTPAVSLSLAKHLGVSGASLGVPLEEEEGLLSSHWEARLLQGSLMTATFDGAQRTRLDPITLAAFKDSGWYQVNHSAAEELLWGQGSGPEFGLVTTCGTGSSDFFCTGSGLGCHYLHLDKGSCSSDPMLEGCRMYKPLANGIPGYYGLLFCPRGRLCQTNEDINAVTSPPVSLSTPDPLFQLSLELAGPPGHSLGKEQQEGLAEAVLEALASKGGTGRCYFHGPSITTSLVFTVHMWKSPGCQGPSVATLHKALTLTLQKKPLEVYHGGANFTTQPSKLLVTSDHNPSMTHLRLSMGLCLMLLILVGVMGTTAYQKRATLPVRPSASYHSPELHSTRVPVRGIREV

SEQ ID NO: 46577 - protein, 104 aa, Homo sapiens
  MOD_RES (1)..(1): Any amino acid
XAWPSGPSAPEAVTARLVGVLWFVSVTTGPWGAVATSAGGEESLKCEDLKVGQYPLWRTPPHGGEVELGSQGLTLSPWLEYSGTISAHCSLRLPGSVNSPASAS

SEQ ID NO: 46578 - protein, 38 aa, Homo sapiens
  MOD_RES (1)..(1): Any amino acid
XLLCHYNNWDPVMVGIRRIFAFICRKHRIQSSRRQRTV

SEQ ID NO: 46579 - protein, 297 aa, Homo sapiens
MYKQAQASFWTAEEVDLSKDLPHWNKLKADEKYFISHILAFFAASDGIVNENLVERFSQEVQVPEARCFYGFQILIENVHSEMYSLLIDTYIRDPKKREFLFNAIETMPYVKKKADWALRWIADRKSTFGERVVAFAAVEGVFFSGSFAAIFWLKKRGLMPGLTFSNELISRDEGLHCDFACLMFQYLVNKPSEERVREIIVDAVKIEQEFLTEALPVGLIGMNCILMKQYIEFVADRLLVELGFSKVFQAENPFDFMENISLEGKTNFFEKRVSEYQRFAVMAETTDNVFTLDADF

SEQ ID NO: 46580 - protein, 210 aa, Homo sapiens
MEQLRAAARLQIVLGHLGRPSAGAVVAHPTSGTISSASFHPQQFQYTLDNNVLTLEQRKFYEENGFLVIKNLVPDADIQRFRNEFEKICRKEVKPLGLTVMRDVTISKSEYAPSEKMITKVQDFQEDKELFRYCTLPEILKYVECFTGPNIMAMHTMLINKPPDSGNCKKTSRHPLHQDLHYFPFRPSDLIVCAWTAMEHISRNNGCLVV

SEQ ID NO: 46581 - protein, 249 aa, Homo sapiens
MITFLPIIFSILIVVTFVIGNFANGFIALVNSIEWFKRQKISFADQILTALAVSRVGLLWVLVLNWYATELNPAFNSIEVRITAYNVWAVINHFSNWLATSLSIFYLLKIANFSNLIFLHLKRRVKSVVLVILLGPLLFLVCHLFVINMNQIIWTKEYEGNMTWKIKLRSAMYLSNTTVTILANLVPFTLTLISFLLLICSLCKHLKKMQLHGKGSQDPSMKVHIKAMQTVTSFLLLCAIYFLSIIMSV

SEQ ID NO: 46582 - protein, 108 aa, Homo sapiens
MFKNTFQSGFLSILYSIGSKPLQIWDKKVRNGHIKRITDNDIQSLVLEIEGTNVSTTYITCPADPKKTLGIKLPFLVMIIKNLKKYFTFEVQMTRMCVVAFGQVTTRA

SEQ ID NO: 46583 - protein, 120 aa, Homo sapiens
  MOD_RES (1)..(1): Any amino acid
XYLEVMRKLQKTYRMEPAGSQGVWGLDDFQFLPFIWGSSQLIDHPYLEPRHFVDEKAVNENHKDYMFLECILFITEVRRRGEREAHGCLQAQMNQGWWPYSGSEEPELLPKMAGPAGAGY

SEQ ID NO: 46584 - protein, 195 aa, Homo sapiens
MGGLFWRSALRGLRCGPRAPGPSLLVRHGSGLPPSALKRGPSWTRERTLVAVKPDGVQRRLVGDVIQRFERRGFTLVGMKMLQAPESVLAEHYQDLRRKPFYPALIRYMSSGPVVAMVWEGYNVVRASRAMIGHTDSAEAAPGTIRGDFSVHISRNVIHASDSVEGAQREIQLWFQSSELVSWADGGQHSSIHPA

SEQ ID NO: 46585 - protein, 75 aa, Homo sapiens
MAAAAPRRPTQVVGVDQKMRRHLVSREFLYKESLRAGLLGQVFLLRRLTPVKCVASSWRMFFTLLTTRKLITSRS

SEQ ID NO: 46586 - protein, 86 aa, Homo sapiens
  MOD_RES (1)..(1): Any amino acid
XPVLSRDEDSEEDADSEAERETPRVTAVAVMAAEPGHMDMGAEALPGPDEAAAAAAFAGKCARRPLASSGSRAPTPRACPAQLSQR

SEQ ID NO: 46587 - protein, 302 aa, Homo sapiens
MGAGPSLLLAALLLLLSGDGAVRCDTPANCTYLDLLGTWVFQVGSSGSQRDVNCSVMGPQEKKVVVYLQKLDTAYDDLGNSGHFTIIYNQGFEIVLNDYKWFAFFKYKEEGSKVTTYCNETMTGWVHDVLGRNWACFTGKKVGTASENVYVNIAHLKNSQEKYSNRLYKYDHNFVKAINAIQKSWTATTYMEYETLTLGDMIRRSGGHSRKIPRPKPAPLTAEIQQKILHLPTSWDWRNVHGINFVSPVRNQASCGSCYSFASMGMLEARIRILTNNSQTPILSPQEVVSCSQYAQENKSER

SEQ ID NO: 46588 - protein, 1839 aa, Homo sapiens
MTWICLSCMLWPEDLEAPKTHRFKVKTFKKVKPCGICRQVITQEGCTCKVCSFSCHRKCQAKVAAPCVPPSNHELVPITTENAPKNVVDKGEGASRGGNTRKSLEDNGSTRVTPSVQPHLQPIRNMSVSRTMEDSCELDLVYVTERIIAVSFPSTANEENFRSNLREVAQMLKSKHGGNYLLFNLSERRPDITKLHAKVLEFGWPDLHTPALEKICSICKAMDTWLNADPHNVVVLHNKGNRGRIGVVIAAYMHYSNISASADQALDRFAMKRFYEDKIVPIGQPSQRRYVHYFSGLLSGSIKMNNKPLFLHHVIMHGIPNFESKGGCRPFLRIYQAMQPVYTSGIYNIPGDSQTSVCITIEPGLLLKGDILLKCYHKKFRSPARDVIFRVQFHTCAIHDLGVVFGKEDLDDAFKDDRFPEYGKVEFVFSYGPEKIQGMEHLENGPSVSVDYNTSDPLIRWDSYDNFSGHRDDGMEEVVGHTQGPLDGSLYAKVKKKDSLHGSTGAVNATRPTLSATPNHVEHTLSVSSDSGNSTASTKTDKTDEPVPGASSATAALSPQEKRELDRLLSGFGLEREKQGAMYHTQHLRSRPAGGSAVPSSGRHVVPAQVHVNGGALASERETDILDDELPNQDGHSAGSMGTLSSLDGVTNTSEGGYPEALSPLTNGLDKSYPMEPMVNGGGYPYESASRAGPAHAGHTAPMRPSYSAQEGLAGYQREGPHPAWPQPVTTSHYAHDPSGMFRSQSFSEAEPQLPPAPVRGGSSREAVQRGLNSWQQQQQQQQQPRPPPRQQERAHLESLVASRPSPQPLAETPIPSLPEFPRAASQQEIEQSIETLNMLMLDLEPASAAAPLHKSQSVPGAWPGASPLSSQPLSGSSRQSHPLTQSRSGYIPSGHSLGTPEPAPRASLESVPPGRSYSPYDYQPCLAGPNQDFHSKSPASSSLPAFLPTTHSPPGPQQPPASLPGLTAQPLLSPKEATSDPSRTPEEEPLNLEGLVAHRVAGVQAREKQPAEPPAPLRRRAASDGQYENQSPEATSPRSPGVRSPVQCVSPELALTIALNPGGRPKEPHLHSYKEAFEEMEGTSPSSPPPSGVRSPPGLAKTPLSALGLKPHNPADILLHPTGEPRSYVESVARTAVAGPRAQDSEPKSFSAPATQAYGHEIPLRNGTLGGSFVSPSPLSTSSPILSADSTSVGSFPSGESSDQGPRTPTQPLLESGFRSGSLGQPSPSAQRNYQSSSPLPTVGSSYSSPDYSLQHFSSSPESQARAQFSVAGVHTVPGSPQARHRTVGTNTPPSPGFGWRAINPSMAAPSSPSLSHHQMMGPPGTGFHGSTVSSPQSSAATTPGSPSLCRHPAGVYQVSGLHNKVATTPGSPSLGRHPGAHQGNLASGLHSNAIASPGSPSLGRHLGGSGSVVPGSPCLDRHVAYGGYSTPEDRRPTLSRQSSASGYQAPSTPSFPVSPAYYPGLSSPATSPSPDSAAFRQGSPTPALPEKRRMSVGDRAGSLPNYATINGKVSSPVASGMSSPSGGSTVSFSHTLPDFSKYSMPDNSPETRAKVKFVQDTSKYWYKPEISREQAIALLKDQEPGAFIIRDSHSFRGAYGLAMKVSSPPPTIMQQNKKGDMTHELVRHFLIETGPRGVKLKGCPNEPNFGSLSALVYQHSIIPLALPCKLVIPNRDPTDESKDSSGPANSTADLLKQGAACNVLFVNSVDMESLTGPQAISKATSETLAADPTPAATIVHFKVSAQGITLTDNQRKLFFRRHYPLNTVTFCDLDPQERKWMKTEGGAPAKLFGFVARKQGSTTDNACHLFAELDPNQPASAIVNFVSKVMLNAGQKR

SEQ ID NO: 46589 - protein, 89 aa, Homo sapiens
MSTAAFHISSLLEKMTSSDKDFRFMATSDLMSELQKDSIQLDEDSERKVVKMLLRLLEDKNGEVQNLAVKWDSDSGDGAGRELGQRMRL

SEQ ID NO: 46590 - protein, 312 aa, Homo sapiens
  MOD_RES (1)..(1): Any amino acid
XLSKYEDQITIFTDYLEEYPDTDELVWILGKQHLLKTGGTGPSSDAGWGCMLRCGQMMLAQALICRHLGRDWSWEKQKEQPKEYQRILQCFLDRKDCCYSIHQMAQMGVGEGKSIGEWFGPNTVAQVLKKLALFDEWNSLAVYVSMDNTVVIEDIKKMCRVLPLSADTAGDRPPDSLTASNQSKGTSAYCSAWKPLLLIVPLRLGINQINPVYVDAFKECFKMPQSLGALGGKPNNAYYFIGFLGDELIFLDPHTTQTFVDTEENGTVNDQTFHCLQSPQRMNILNLDPSVALGFFCKEEKDFDNWCSLVQK

SEQ ID NO: 46591 - protein, 50 aa, Homo sapiens
MQFLEEVQPYRALKHSNLLQCLAQCAEVTPYLLVMEFCPLAKGLLLPGAG

SEQ ID NO: 46592 - protein, 174 aa, Homo sapiens
  MOD_RES (1)..(1): Any amino acid
XQPNNTPFPLSPNSPYPPSPASSTYPNSPASSGPGSPFQLPADTPPPAYMPPDDQMGQDNSQPMDTSNNMIPQIMPSISSRDVQPVAYEEPKHWCSIVYYELNNRVGEAFHASSTSVLVDGFTDPSNNKSRFCLGLLSNVNRNSTIENTRRHIGKGNLVIFLHLIEFNHLLYLP

SEQ ID NO: 46593 - protein, 49 aa, Homo sapiens
MTELQSALLLRRQLAELNKNPVEGFSAGLIDDNDLYRWEVLIIGPPDTL

SEQ ID NO: 46594 - protein, 54 aa, Homo sapiens
  MOD_RES (1)..(1): Any amino acid
XGDGKFIPRKPFAEYIYKRIKQRDRVKKSEERRLPFPSQPNIVNPWRSRPYSTP

SEQ ID NO: 46595 - protein, 343 aa, Homo sapiens
  MOD_RES (1)..(1): Any amino acid
XANGEIQRHAEQQALRLEVRAGPDSAGIALYSHEDVCVFKCSVSRETECSRVGKQSFIITLGCNSVLIQFATPNDFCSFYNILKTCRGHTLERSVFSERTEESSAVQYFQFYGYLSQQQNMMQDYVRTGTYQRAILQNHTDFKDKIVLDVGCGSGILSFFAAQAGARKIYAVEASTMAQHAEVLVKSNNLTDRIVVIPGKVEEVSLPEQVDIIISEPMGYMLFNERMLESYLHAKKYLKPSGNMFPTIGDVHLAPFTDEQLYMEQFTKANFWYQPSFHGVDLSALRGAAVDEYFRQPVVDTFDIRILMAKSVKYTVNFLEAKEGDLHSACLASPAATALCLPG

SEQ ID NO: 46596 - protein, 168 aa, Homo sapiens
KSPDKLRKVIYRRKKVHHPFPNPCYRKKQSPGSGGCDMANKENELACAGHLPEKLHHDSRTYLVNSSDSGSSQTESPSSKYSGFFSEVSQDHETMAQVLFSRNMRLNVALTFWRKRSISELVAYLLRNIQILKQQLSGLWEQENHLTLVPGYTGNIAKDVDAYLLQLH

SEQ ID NO: 46597 - protein, 102 aa, Homo sapiens
MNKRIHYYSRLTTPADKALIAPDHVVPAPEECYVYSPLGSAYKLQSYTEGYGKNTSLVTIFMIWNTMMGTSILSIPWGIKQAGFTTGMCVIILMGLLTLYCC

SEQ ID NO: 46598 - protein, 884 aa, Homo sapiens
MLQTKDLIWTLFFLGTAVSLQVDIVPSQGEISVGESKFFLCQVAGDAKDKDISWFSPNGEKLTPNQQRISVVWNDDSSSTLTIYNANIDDAGIYKCVVTGEDGSESEATVNVKIFQKLMFKNAPTPQEFREGEDAVIVCDVVSSLPPTIIWKHKGRDVILKKDVRFIVLSNNYLQIRGIKKTDEGTYRCEGRILARGEINFKDIQVIVNVPPTIQARQNIVNATANLGQSVTLVCDAEGFPEPTMSWTKDGEQIEQEEDDEKYIFSDDSSQLTIKKVDKNDEAEYICIAENKAGEQDATIHLKVFAKPKITYVENQTAMELEEQVTLTCEASGDPIPSITWRTSTRNISSEEKASWTRPEKQEVHAPWNWQVGRQKGQAGSAGFPGSHETLDGHMVVRSHARVSSLTLKSIQYTDAGEYICTASNTIGQDSQSMYLEVQYAPKLQGPVAVYTWEGNQVNITCEVFAYPSATISWFRDGQLLPSSNYSNIKIYNTPSASYLEVTPDSENDFGNYNCTAVNRIGQESLEFILVQADTPSSPSIDQVEPYSSTAQVQFDEPEATGGVPILKYKAEWRAVGEEVWHSKWYDAKEASMEGIVTIVGLKPETTYAVRLAALNGKGLGEISAASEFKTQPVQGEPSAPKLEGQMGEDGNSIKVNLIKQDDGGSPIRHYLVRYRALSSEWKPEIRLPSGSDHVMLKSLDWNAEYEVYVVAENQQGKSKAAHFVFRTSAQPTAIPANGSPTSGLSTGAIVGILIVIFVLLLVVVDITCYFLNKCGLFMCIAVNLCGKAGPGAKGKDMEEGKAAFSKDESKEPIVEVRTEEERTPNHDGGKHTEPNETTPLTEPEKGPVEAKPECQETETKPAPAEVKTVPNDATQTKENESKA

SEQ ID NO: 46599 - protein, 204 aa, Homo sapiens
  MOD_RES (1)..(1): Any amino acid
XIKRLKDYLTVLQQRLESTTEQQGALSSELPSTSPSSVAAISSRSVIHKPFTQSRIPPDLPMHPAPRHITEEELSVLESCLHRWRTEIENDTRDLQESISRIHRTIELMYSDKSMIQVPYRLHAVLVHEGQANAGHYWAYIFDHRESRWMKYNDIAVTKSSWEELVRDSFGGYRNASAYCLMYINDKAQFLIQEEFNKETGQPL

SEQ ID NO: 46600 - protein, 170 aa, Homo sapiens
EQKRLPAFNRTLALLRQVLKSEDPRHRALAWCYLGMLLERKDTFSTTPMGVHDCGYSGTDPLDCFGKAIEIAKNQPPILNRLAKIFYFLGKQDMAIGTCNMALDVLRDPELNWQAYCTRAKLPALVPDLPPRAHTEPMCLRKPTRSSQFTSLQAEESSHPLIFSTTIHMT

SEQ ID NO: 46601 - protein, 708 aa, Homo sapiens
MGNPENIEDAYVAVIRPKNTASLNSREYRAKSYEILLHEVPIEGQKKKRKKVLLETKLQGNSEITQGILDYVVETTKPISPANQGIRGKRVVLMKKFPLDGEKMGREASLFIVPSVVKDNTKYTYTPGCPIFYCLQDIMRVCSESSTHFATLTARMLIALDKWLDERHAQSHFIPALFRPSPLERIKTNVINPAYATESGQTENSLHMGYSALEIKSKMLALEKADTCIYNPLFGSDLQYTNRVDKVVINPYFGLGAPDYSKIQIPKQEKWQRSMSSVTEDKERQWVDDFPLHRSACEGDSELLSRLLSERFSVNQLDSDHWAPIHYACWYGKVEATRILLEKGKCNPNLLNGQLSSPLHFAAGGGHAEIVQILLNHPETDRHITDQQGRSPLNICEENKQNNWEEAAKLLKEAINKPYEKVRIYRMDGSYRSVELKHGNNTTVQQIMEGMRLSQETQQYFTIWICSENLSLQLKPYHKPLQHVRDWPEILAELTNLDPQRETPQLFLRRDVRLPLEVEKQIEDPLAILILFDEARYNLLKGFYTAPDAKLITLASLLLQIVYGNYESKKHKQGFLNEENLKSIVPVTKLKSKAPHWTNRILHEYKNLSTSEGVSKEMHHLQRMFLQNCWEIPTYGAAFFTGQIFTKASPSNHKVIPVYVGVNIKGLHLLNMETKKSPPYIFSPIPFLGHAIAFGKSPIEFLENAYEK

SEQ ID NO: 46602 - protein, 181 aa, Homo sapiens
MAPLHSCLLGDRVRPCLRQTKTKGLPGAEACSHPWDTVIQAAMRKYPNPMNPSVLGVDVLQRRVDGRGRLHSLRLLSTEWGLPSLVRAILGTSRTLTYIREHSVVDPVEKKMELCSTNITLTNLVSVNERLVYTPHPENPEMTVLTQEAIITVKGISLGSYLESLMANTISSNAKKGWAAI

SEQ ID NO: 46603 - protein, 52 aa, Homo sapiens
MPARALLPRRMGHRTLASTPALWASIPCPRSELRLDLVLPSGQSFRWLTASA

SEQ ID NO: 46604 - protein, 38 aa, Homo sapiens
MDNTTLLIELEYCNGGNLYDKILRQKDKLFEEETPSRL

SEQ ID NO: 46605 - protein, 253 aa, Homo sapiens
  MOD_RES (1)..(1): Any amino acid
XKILKLKNLRPQDYANYSCIASVRNVCNIPDKMVSFRLSNKTGGEPAPSLTWVRSFGTLPEKTVLNGGTLTIPAITSDDAGTYSCIANNNVGNPAKKSTNIIVRALKKGRFWITPDPYHKDDNIQIGREVKISCQVEAVPSEELTFSWFKNGRPLRSSERMVITQTDPDVSPGTTNLDIIDLKFTDFGTYTCVASLKGGGISDISIDVNISSSTVPPNLTVPQEKSPLVTREGDTIELQCQVTGKPKPIILWS

SEQ ID NO: 46606 - protein, 118 aa, Homo sapiens
  MOD_RES (1)..(1): Any amino acid
XYPLYRLGGPQLRVFRTNFFIQLVRPGVAQPEDTVQFRIPMEMTRVDLRNYLEGIYNVPVAAVRTRVQHGSNKRRDHRNVRIKKPDYKVAYVQLVPKEQYPLLLVNPSHMLWPGLGLG

SEQ ID NO: 46607 - protein, 53 aa, Homo sapiens
MSSLVKEDLEKKLFKPLSQNLYEFIEIEFSVQDSDQKGRSKNSHGETLQNRFR

SEQ ID NO: 46608 - protein, 74 aa, Homo sapiens
MIQFYLEEVMPQAENQDPDIKAHVNSLGENLKTLRLRLRRCHRFLPCENKSKAVEQVKNAFNKLQEKGIYKAMS

SEQ ID NO: 46609 - protein, 136 aa, Homo sapiens
  MOD_RES (1)..(1): Any amino acid
XTEILGKSVRIIFSTLGVCIFYAFGYMVLPLFAYFIRDWRMLLVALTMPGVLCVALWWFIPESPRWLISQGRFEEAEVIIRKAAKANGIVVPSTIFDPSELQDLSSKKQQSHNILDLLRTWNIRMVTIMSIMLCDG

SEQ ID NO: 46610 - protein, 173 aa, Homo sapiens
  MOD_RES (1)..(1): Any amino acid
XILYYVYMGLLAVFCTNAINILAGINGLEAGQSLVISASIIVFNLVELEGDCRDDHVFSLYFMIPFFFTTLGLLYHNWYPSRVFVGDTFCYFAGMTFAVVGILGHFSKTMLLFFMPQVFNFLYSLPQLLHIIPCPRHRIPRLNIKTGKLEMSYSKFKTKSLSFLGTFILKVTG

SEQ ID NO: 46611 - protein, 606 aa, Homo sapiens
MCASVKYNIRGPALIPRMKTKHRIYYITLFSIVLLGLIATGMFQFWPHSIESSNDWNVEKRSIRDVPVVRLPADSPIPERGDLSCRMHTCFDVYRCGFNPKNKIKVYIYALKKYVDDFGVSVSNTISREYNELLMAISDSDYYTDDINRACLFVPSIDVLNQNTLRIKETAQAMAQLSRWDRGTNHLLFNMLPGGPPDYNTALDVPRDRALLAGGGFSTWTYRQGYDVSIPVYSPLSAEVDLPEKGPGASVVVPEEKMSDVYSILQSIPQRQIEEMQRQARWFWEAYFQSIKAIALATLQIINDRIYPYAAISYEEWNDPPAVKWGSVSNPLFLPLIPPQSQGFTAIVLTYDRVESLFRVITEVSKVPSLSKLLVVWNNQNKNPPEDSLWPKIRVPLKVVRTAENKLSNRFFPYDEIETEAVLAIDDDIIMLTSDELQFGYEVWREFPDRLVGYPGRLHLWDHEMNKWKYESEWTNEVSMVLTGAAFYHKYFNYLYTYKMPGDIKNWVDAHMNCEDIAMNFLVANVTGKAVIKVTPRKKFKCPECTAIDGLSLDQTHMVERSECINKFASVFGTMPLKVVEHRADPVLYKDDFPEKLKSFPNIGSL

SEQ ID NO: 46612 - protein, 26 aa, Homo sapiens
  MOD_RES (1)..(1): Any amino acid
XSITDILVTEFGNPAWSRATPPSPRS

SEQ ID NO: 46613 - protein, 433 aa, Homo sapiens
  MOD_RES (1)..(1): Any amino acid
XQAEKKELQHKIDEMEEKEQELQAKIEALQADNDFTNERLTALQENQTRAKESDFSDTLSPSKEKSSDDTTDAQMDEQDLNEPLAKVSLLKDDLQGAQSEIEAKQEIQHLRKELIEAQELARTSKQKCFELQALLEEERKAYRNQVEESTKQIQVLQAQLQRLHIDTENLREEKDSEITSTRDELLSARDEILLLHQAAAKVASERDTDIASLQEELKKVRAELERWRKAASEYEKEITSLQNSFQLRCQQCEDQQREEATRLQGELEKLRKEWNALETECHSLKRENVLLSSELQRQEKELHNSQKQSLELTSDLSILQMSRKELENQVGSLKEQHLRDSADLKTLLSKAENQAKDVQKEYEKTQTVLSELKLKFEMTEQEKQSITDELKQCKNNLKLLREKGNNPSILQPVPAVFIGLFLAFLFWCFGPLW

SEQ ID NO: 46614 - protein, 55 aa, Homo sapiens
MDVRALPWLPWLLWLLCRGGGDADSRAPFTPTWPRSREREAAAFRTSILEFFISQ

SEQ ID NO: 46615 - protein, 45 aa, Homo sapiens
MADSEALPSLAGDPVAVEALLRAVFGVVVDEAIQKGTSVSQKVHI

SEQ ID NO: 46616 - protein, 1392 aa, Homo sapiens
MARLSFWSQGVELARSTRCFSPEDISGKAPVLGTGMAVDMGMSFMGLPLAGQKHCPKSGQMEAMVMTCSLCHQDLPGMGSHLLSCQHLLRKDCFQGLIQELGQIAKAHETVADELISCPGCERVYLTRDVTEHFFLHCVPTEQPKMARNCSECKEKRAAHILCTYCNRWLCSSCTEEHRHSPVPGGPFFPRAQKGSPGVNGGPGDFTLYCPLHTQEVLKLFCETCDMLTCHSCLVVEHKEHRCRHVEEVLQNQRMLLEGVTTQVAHKKSSLQTSAKQIEDRIFEVKHQHRKVENQIKMAKMVLMNELNKQANGLIEELEGITNERKRKLEQQLQSIMVLNRQFEHVQNFINWAVCSKTSVPFLFSKELIVFQMQRLLETSCNTDPGSPWSIRFTWEPNFWTKQLASLGCITTEGGQMSRADAPAYGGLQGSSPFYQSHQSPVAQQEALSHPSHKFQSPAVCSSSVCCSHCSPVSPSLKGQVPPPSIHPAHSFRQPPEMVPQQLGSLQCSALLPREKELACSPHPPKLLQPWLETQPPVEQESTSQRLGQQLTSQPVCIVPPQDVQQGAHAQPTLQTPSIQVQFGHHQKLKLSHFQQQPQQQLPPPPPPLPHPPPPLPPPPQQPHPPLPPSQHLASSQHESPPGPACSQNMDIMHHKFELEEMQKDLELLLQAQQPSLQLSQTKSPQHLQQTIVGQINYIVRQPAPVQSQSQEETLQATDEPPASQGSKPALPLDKNTAAALPQASGEETPLSVPPVDSTIQHSSPNVVRKHSTSLSIMGFSNTLEMELSSTRLERPLEPQIQSVSNLTAGAPQAVPSLLSAPPKMVSSLTSVQNQAMPSLTTSHLQTVPSLVHSTFQSMPNLISDSPQAMASLASDHPQAGPSLMSGHTQAVPSLATCPLQSIPPVSDMQPETGSSSSSGRTSGSLCPRDGADPSLENALCKMESEDSTRFTDLLGQGPIVPGLDAPKDLAIPSELEEPINLSVKKPPLAPVVSTSTALQQYQNPKECENFEQGALELDAKENQSIRAFNSEHKIPYVRLERLKICAASSGEMPVFKLKPQKNDQDGSFLLIIECGTESSSMSIKVSQDRLSEATQAPGLEGRKVTVTSLAGQRPPEVEGTSPEEHRLIPRTPGAKKGPPAPIENEDFCAVCLNGGELLCCDRCPKVFHLSCHVPALLSFPGGEWVCTLCRSLTQPEMEYDCENACYNQPGMRASPGLSMYDQKKCEKLVLSLCCNNLSLPFHEPVSPLARHYYQIIKRPMDLSIIRRKLQKKDPAHYTTPEEVVSDVRLMFWNCAKFNYPDSEVAEAGRCLEVFFEGWLKEIYPEKRFAQPRQEDSDSEEVSSESGCSTPQGFPWPPYMQEGIQPKRRRRHMENERAKRMSFRLANSISQV

SEQ ID NO: 46617 - protein, 130 aa, Homo sapiens
MDDIADRMRMDAGEVTLVNHNSVFKTHLLPQTGFPEDQLSLSDQQILSSRQGHLDRSFTCSTRSAAYNPSYYSGPGLGVLARYSWGKMLTFGGHHGVTLMQIRHMAVAGFSSFINFQIILPQTVFLAQAI

SEQ ID NO: 46618 - protein, 382 aa, Homo sapiens
MSFLSRQQPPPPRRAGAACTLRQKLIFSPCSDCEEEEEEEEEEGSGHSTGEDSAFQEPDSPLPPARSPTEPGPERRRSPGPAPGSPGELEEDLLLPGACPGADEAGGGAEGDSWEEEGFGSSSPVKSPAAPYFLGSSFSPVRCGGPGDASPRGCGARRAGEGRRSPRPDHPGTPPHKTFRKLRLFDTPHTPKSLLSKARGIDSSSVKLRGSSLFMDTEKSGKREFDVRQTPQVNINPFTPDSLLLHSSGQCRRRKRTYWNDSCGEDMEASDYELEDETRPAKRITITESNMKSRYTTEFHELEKIGSGEFGSVFKCVKRLDGCIYAIKRSKKPLAGSVDEQNALREVYAHAVLGQHSHVVRYFSAWAEDDHMLIQNEYCNVL

SEQ ID NO: 46619 - protein, 69 aa, Homo sapiens
  MOD_RES (1)..(1): Any amino acid
XVNSGLLKTLSVYEKHSFFGGDEVQPECELITSPDHVILRAASLVIMKSLEIKFQNYSSASEVKDMEIK

SEQ ID NO: 46620 - protein, 83 aa, Homo sapiens
MAVNQSHTENRRGALIPNGESLLKRSPNVELSFPQRSEGSNVFSGRKTGTLFLTSYRYLLQTSLRELFRQLHMVAGKDKLLLN

SEQ ID NO: 46621 - protein, 434 aa, Homo sapiens
MGLLVFVRNLLLALCLFLVLGFLYYSAWKLHLLQWEEDSNSVVLSFDSAGQTLGSEYDRLGFLLNLDSKLPAELATKYANFSEGACKPGYASALMTAIFPRFSKPAPMFLDDSFRKWARIREFVPPFGIKGQDNLIKAILSVTKEYRLTPALDSLRCRRCIIVGNGGVLANKSLGSRIDDYDIVVRLNSAPVKGFEKDVGSKTTLRITYPEGAMQRPEQYERDSLFVLAGFKWQDFKWLKYIVYKERVSASDGFWKSVATRVPKEPPEIRILNPYFIQEAAFTLIGLPFNNGLMGRGNIPTLGSVAVTMALHGCDEVAVAGFGYDMSTPNAPLHYYETVRMAAIKEPRPHVENLNPSELRLPHFCFDHQPSTDPSLKPGNLGPVLQQLLCCYIWVMGGCWREPPICADSCFFLDAQYPARERVSAEAGESSRHH

SEQ ID NO: 46622 - protein, 24 aa, Homo sapiens
MAAVVQQNDLVFEFASNVMEDERQ

SEQ ID NO: 46623 - protein, 108 aa, Homo sapiens
  MOD_RES (1)..(1): Any amino acid
XPSSQPLPSTHRDPGCKGHKFAHSGLACQLPQPCEADEGLGEEEDSSSERSSCTSSSTHQRDGKFCDCCYCEFFGHNARSERLGVMKAEWKQKGSQSPKCDSQPRDRP

SEQ ID NO: 46624 - protein, 138 aa, Homo sapiens
MEQVNELKEKGNKALSVGNIDDALQCYSEAIKLDPHNHVLYSNRSAAYAKKGDYQKAYEDGCKTVDLKPDWGKGYSRKAAALEFLNRFEEAKRTYEEGLKHEANNPQLKEGLQNMEARLAVQPARQPRRCEATSHGRP

SEQ ID NO: 46625 - protein, 152 aa, Homo sapiens
  MOD_RES (1)..(1): Any amino acid
XDYSITTKGGKIPNPIRSWKDSSLPPHILEVIDKCGYKEPTPIQRQAIPIGLQNRDIIGVAETGSGKTAAFLIPLLVWITTLPKIDRLECSGVILAYSNRCLPGSYPPTSASQVAGITGSKSQTKALMPSSWLPPVSWLNRLRKRPSSLGNR

SEQ ID NO: 46626 - protein, 79 aa, Homo sapiens
MAAEEVLQTVDHYKTEIERLTKELTETTHEKIQAAEYGLVVLEEKLTLKQQYDELEAEYDSLKQELEQLKEGPLLVRED

SEQ ID NO: 46627 - protein, 170 aa, Homo sapiens
MACARPLISVYSEKGESSGKNVTLPAVFKAPIRPDIVNFVHTNLRKNNRQPYAVSELAGHQTSAESWGTGRAVARIPRVRGGGTHRSGQGAFGNMCRGGRMFAPTKTWRRWHRRVNTTQKRYAICSALAASALPALVMSKVEDKVEGYKKTKEAVLLLKKLKAWNDIKKV

SEQ ID NO: 46628 - protein, 166 aa, Homo sapiens
  MOD_RES (1)..(1): Any amino acid
XTLPRSGSSGGQQPSGMKEGVKRYEQEHAAIQDKLFQVAKREREAATKHSKASLPTGEGSISHEEQKSVRLARELESREAELRRRDTFYKEQLERIERKNAEMYKLSSEQFHEAASKMESTIKVEPVCSGLQAQILHCYRDRPHEVLLCSDLVKAYQRCVSAAHKG

SEQ ID NO: 46629 - protein, 203 aa, Homo sapiens
MRGRRGDRMTINIQEHMAINVCPGPIRPIRQISDYFPRGPGPEGGGGGGGEAPAHLVPLALAPPAALLGATTPEDGAEVDSYDSDDATALGTLEFDLLYDRASCTLHCSILRAKGLKPMDFNGLADPYVKLHLLPGACKANKLKTKTQRNTLNPVWNEDLTYSGITDDDITHKVLRIAVCDEDKLSHNEFIGEIRVPLRRLKP

SEQ ID NO: 46630 - protein, 473 aa, Homo sapiens
MAEAVFHAPKRKRRVYETYESPLPIPFGQDHGPLKEFKIFRAEMINNNVIVRNAEDIEQLYGKGYFGKGILSRSRPSFTISDPKLVAKWKDMKTNMPIITSKRYQHSVEWAAELMRRQGQDESTVRRILKDYTKPLEHPPVKRNEEAQVHDKLNSGMVSNMEGTAGGERPSVVNGDSGKSGGVGDPREPLGCLQEGSGCHPTTESFEKSVREDASPLPHVCCCKQDALILQRGLHHEDGSQHIGLLHPGDRGPDHEYVLVEEAECAMSEREAAPNEEEPLTIVKLWKAFTVVQPTFRTTYMAYHYFRSKGWVPKVGLKYGTDLLLYRKGPPFYHASYSVIIELVDDHFEGSLRRPLSWKSLAALSRVSVNVSKELMLCYLIKPSTMTDKEMESPECMKRIKVQSRSVVQAGVQCCDLGSLQPLPAGFKRFSCLSLLSSWDYRHAPPHTANFCIFSRDGVSLCWPGWSGTPDLK

SEQ ID NO: 46631 - protein, 550 aa, Homo sapiens
GNYTCICPPDYMQVNGGNNCMDMRRSLCYRNYYADNQTCDGELLFNMTKKMCCCSYNIGRAWNKPCEQCPIPSTDEFATLCGSQRPGFVIDIYTGLPVDIDECREIPGVCENGVCINMVGSFRCECPVGFFYNDKLLVCEDIDECQNGPVCQRNAECINTAGSYRCDCKPGYRFTSTGQCNDRNECQEIPNICSHGQCIDTVGSFYCLCHTGFKTNDDQTMCLDINECERDACGNGTCRNTIGSFNCRCNHGFILSHNNDCIDVDECASGNGNLCRNGQCINTVGSFQCQCNEGYEVAPDGRTCVDINECLLEPRKCAPGTCQNLDGSYRCICPPGYSLQNEKCEDIDECVEEPEICALGTCSNTEGSFKCLCPEGFSLSSSGRRCQDLRMSYCYAKFEGGKCSSPKSRNHSKQECCCALKGEGWGDPCELCPTEPDEAFRQICPYGSGIIVGPDDSAVDMDECKEPDVCKHGQCINTDGSYRCECPFGYILAGNECVDTDECSVGNPCGNGTCKNVIGGFECTCEEGFEPGPMMTCEGALHTKIPTIIL

SEQ ID NO: 46632 - protein, 40 aa, Homo sapiens
TESLMGISRMMAQQVQQSEEAMQSLVPFKRCESEATGETA

SEQ ID NO: 46633 - protein, 118 aa, Homo sapiens
MPIRPDLQLEKCIDDALRKNDFKPLKTLLQIDICEDVKIKCSKQFFHKVDNLICRELNKEDIHNVSAILVSVGRCGKNISVLGQAGLLTMIKQGLIQKMVAWFEKSKDIIQSQGNSKD

SEQ ID NO: 46634 - protein, 79 aa, Homo sapiens
MAPTWGPGMVSVVGPMGLLVVLLVGGCAAEEPPRFIKEPKDQIGVSGGVASFVCQATGDPKPRVTWNKKGKKVNSQRFE

SEQ ID NO: 46635 - protein, 90 aa, Homo sapiens
  MOD_RES (1)..(1): Any amino acid
XAAAQLSLTQLSSGNPVYEKYYRQVDTGNTGRVLASDAAAFLKKSGLPDLILGKIWDLADTDGKGILNKQHDTSSPLLISGTSAAELPWA

SEQ ID NO: 46636 - protein, 215 aa, Homo sapiens
MKRLVCVLLVCSSAVAQLHKDPTLDHHWHLWKKTYGKQYKEKNEEAVRRLIWEKNLKFVMLHNLEHSMGMHSYDLGMNHLGDMTSEEVMSLMSSLRVPSQWQRNITYKSNPNRILPDSVDWREKGCVTEVKYQGSCGACWAFSAVGALEAQLKLKTGKLVSLSAQNLVDCSTEKYGNKGCNGGFMTTAFQYIIDNKGIDSDASYPYKAMLGPQLW

SEQ ID NO: 46637 - protein, 59 aa, Homo sapiens
MSVPAFIDISEEDQAAELRAYLKSKGAEISEENSEGGLHVDLAQIIEACDVCLKEDDKG

SEQ ID NO: 46638 - protein, 192 aa, Homo sapiens
MWDVAEELKAMLVFAEHRYYGESLPFGDNSFKDSRHLNFLTSEQALADFAELIKHLKRTIPGAENQPVIAIGGSYGGMLAAWFRMKYPHMVVGALAASAPIWQFEDLVPCGVFMKIVTTDFRKSGPHCSESIHRSWDAINRLSNTGSGLQWLTGALHLCSPLTSQDIQHLKDWISETWVNLAMVDYPYASNF

SEQ ID NO: 46639 - protein, 122 aa, Homo sapiens
MSTAMNFGTKSFQPRPPDKGSFPLDHLGECKSFKEKFMKCLHNNNFENALCRKESKEYLECRMERSRLGLLHSGRLHLPELLGNPPEYPPGQQGEVRPPGRLGGGPSGVHGLPRERRRESQV

SEQ ID NO: 46640 - protein, 89 aa, Homo sapiens
  MOD_RES (1)..(1): Any amino acid
XDGQCSLPASWRPVTLTHVEYPAGDLSGHLLAYLSLSPVFVIVGFVTLIIFKRELHTAPTQQWAPSTGCPPAIPSLCGSSPSIPSFSCI

SEQ ID NO: 46641 - protein, 95 aa, Homo sapiens
MPPTQAESVIRSIIREIGQECAAHGEIVSETLIAFMVKAVVLDPSNGFNMDRTLMKSDVQNLVKLCMTRLLDTKNPSLDTIKMQVYFDMNYTNRA

SEQ ID NO: 46642 - protein, 220 aa, Homo sapiens
MIISTPQRLTSSGSVLIGSPYTPAPAMVTQTHIAEATGWVPGDRKRARKFIDSDFSESKRSKKGDKNGKGLRHFSMKVCEKVQRKGTTSYNEVADELVSEFTNSNNHLAADSAYDQKNIRRRVYDALNVLMAMNIISKEKKEIKWIGLPTNSAQECQNLEIEKQRRIERIKQKRAQLQELLLQQIAFKNLVQRNRQNEQQNQGPPALNSTIQLPFIIINT

SEQ ID NO: 46643 - protein, 2017 aa, Homo sapiens
MTSRTKRRQKVKISISKINHSSYRKEHRPFWEHQPPPHQNWAVGGRCGAGARPGLSQRRGREVRREAQGGASSRRLRARLYFSESTSLPLDRRGSPGPLGPAPHGLRRAAPRGPARRTPRSTALTSRRRAQRPRHGDRLRLRSEARPRAAGDWPCARGGAVRPGRPHRPPRVESARGAHAGRAATDQLERVFLRLGHAETDEQLQNIISKFLPPVLLKLSSTQEGVRKKVMELLVHLNKRIKSRPKIQLPVETLLVQYQDPAAVSFVTNFTIIYVKMGYPRLPVEKQCELAPTLLTAMEGKPQPQQDSLMHLLIPTLFHMKYPVESSKSASPFNLAEKPKTVQLLLDFMLDVLLMPYGYVLNESQSRQNSSSAQGSSSNSGGGSGIPQPPPGMSFYAAKRVIGDNPWTPEQLEQCKLGIVKFIEAEQVPELEAVLHLVIASSDTRHSVATAADLELKSKQSLIDWNNPAIINKMYKVYLGDIPLKTKEGAVLKPELKRDPVSTRVKLKIVPHLLRSRQAAETFPANIQVVYDGLFGTNTNSKLRTLSLQFVHHICITCPEIKIKPLGPMLLNGLTKLINEYKEDPKLLSMAYSAVGKLSSRMPHLFTKDIALVQQLFEALCKEEPETRLAIQEALSMMVGAYSTLEGAQRTLMEALVASYLIKPEVQVRQVAVKFASTVFPSDHIPSRYLLLLAAGDPREEVHGEAQRVLRCLPGRNRKESTSEQMPSFPEMVYYIQEKASHRMKTPVKYMTGTTVLPFNPAAFGEIVLYLRMCLAHSAGVVPTSQSLADMQDHAPAIGRYIRTLMSSGQMAPSSSNKSGETNPVQIYIGLLQQLLAGVGGLPVMYCLLEAVSVYPEKLATKFVDKTEWIKSLMNNSKEEMRELAALFYSVVVSTVSGNELKSMIEQLIKTTKDNHSPEIQHGSLLALGFTVGRYLAKKKMRMSEQQDLERNADTLPDQEELIQSATETIGSFLDSTSPLLAIAACTALGEIGRNGPLPIPSEGSGFTKLHLVESLLSRIPSSKETNKMKERAIQTLGYFPVGDGDFPHQKLLLQGLMDSVEAKQIELQFTIGEAITSAAIGTSSVAARDAWQMTEEEYTPPAGAKVNDVVPWVLDVILNKHIISPNPHVRQAACIWLLSLVRKLSTHKEVKSHLKEIQSAFVSVLSENDELSQDVASKGLGLVYELGNEQDQQELVSTLVETLMTGKRVKHEVSGETVVFQGGALGKTPDGQGLSTYKELCSLASDLSQPDLVYKFMNLANHHAMWNSRKGAAFGFNVIATRAGEQLAPFLPQLVPRLYRYQFDPNLGIRQAMTSIWNALVTDKSMVDKYLKEILQDLVKNLTSNMWRVRESSCLALNDLLRGRPLDDIIDKLPEIWETLFRVQDDIKESVRKAAELALKTLSKVCVKMCDPAKGAAGQRTIAALLPCLLDKGMMSTVTEVRALSINTLVKISKSAGAMLKPHAPKLIPALLESLSVLEPQVLNYLSLRATEQEKAAMDSARLSAAKSSPMMETINMCLQYLDVSVLGELVPRLCELIRSGVGLGTKGGCASVIVSLTTQCPQDLTPYSGKLMSALLSGLTDRNSVIQKSCAFAMGHLVRTSRDSSTEKLLQKLNGWYMEKEEPIYKTSCALTIHAIGRYSPDVLKNHAKEVLPLAFLGMHEIADEEKSEKEECNLWTEVWQENVPGSFGGIRLYLQELITITQKALQSQSWKMKAQGAIAMASIAKQTSSLVPPYLGMILTALLQGLAGRTWAGKEELLKAIACVVTACSAELEKSVPNQPSTNEILQAVLKECSKENVKYKIVAISCAADILKATKEDRFQEFSNIVIPLIKKNSLESSGVRTTKNEEENEKEKELQLEYLLGAFESLGKAWPRNAETQRCYRQELCKLMCERLKLSTWKVQLGVLQSMNAFFQGLMLLEEEHADPEALAEILLETCKSITYSLENKTYSSVRTEALSVIELLLKKLEESKQWECLTSECRVLLIESLATMEPDSRPELQEKAALLKKTLENLE

SEQ ID NO: 46644 - protein, 370 aa, Homo sapiens
MYGKIAVMELFRPKGESKDLLFILTAKYNACILEYKQSGESIDIITRAHGNVQDRIGRPSETGIIGIIDPECRMIGLRLYDGLFKVIPLDRDNKELKAFNIRLEELHVIDVKFLYGCQAPTICFVYQDPQGRHVKTYEVSLREKEFNKGPWKQENVEAEASMVIAVPEPFGGAIIIGQESITYHNGDKYLAIAPPIIKQSTIVCHNRVDPNGSRYLLGDMEGRLFMLLLEKEEQMDGTVTLKDLRVELLGETSIAECLTYLDNGVVFVGSRLGDSQLVKLNVDSNEQGSYVVAMETFTNLGPIVDMCVVDLERQGQGQLVTCSGAFKEGSLRIIRNGIGIHEHASIDLPGIKDHFSIGEVGLSRTQSSGQ

SEQ ID NO: 46645 - protein, 113 aa, Homo sapiens
  MOD_RES (1)..(1): Any amino acid
XKSKTNKGGITQPNINDSLEITKLDSSIISEGKISTITPQIQAFNLQKAAAGLMSLLREMGKGYLALCSYNCKEAINILSHLPSHHYNTGWVLCQIGRAYFELSEYMQTFSGS

SEQ ID NO: 46646 - protein, 271 aa, Homo sapiens
MFHLLLAARSGPARLLGPPASLPGLEVLWSPRALLLWLAWLGLQAALYLLPARKVAEGQELKDKSRLRYPINGNPIYDFFLGRELNPRICFFDFKYFCELRPGLIGWVLINLALLMKEAELRGSPSLAMWLVNGFQLLYVGDALWHEEAVLTTMDITHDGFGFMLAFGDMAWVPFTYSLQAQFLLHHPQPLGLPMASVICLINATGYYIFRGANSQKNTFRKNPSDPRVAGLETISTATGRKLLVSGWWGMVRHPNYLGDLIMALAWSLPC

SEQ ID NO: 46647 - protein, 582 aa, Homo sapiens
MASPSGSSEATGKPRGRDGRPRREEDDVPPEEKRLRLGLEGGSAQPEDCEDGKDAPRPGREETGTQTGGDGRGDLLCLPYSLVEGQDYKSENSTLLPGAKNSLQDSVSASQATGKAEETGQRTHASGTYSFLDRTQHSDIKADCNTCVEIEDRKVSRQQMNCEREQLRGNQEAAAAPDTMAQPYASAQFAPPQNGIPAEYTAPHPHPAPEYTGQTTVPEHTLNLYPPAQTHSEQSPADTSAQTVSGTATQTDDAAPTDGQPQTQPSENTENKSQPKRLHVSNIPFRFRDPDLRQMFGQFGKILDVEIIFNERGSKGFGFVTFENSADADRAREKLHGTVVEGRKIEVNNATARVMTNKKTVNPYTNGWKLNPVVGAVYSPEFYAGTVLLCQANQEGSSMYSAPSSLVYTSAMPGFPYPAATAAAAYRGAHLRGRGRTVYNTFRAAAPPPPIPAYGGVVYQDGFYGADIYGGYAAYRYAQPTPATAAAYSDRNQFVFVAADEISCNTSAVTDEFMLPTPTTTHLLQPPPTALVPCPKVPAPAQTSEELSCTLPGLCCQAAENLTASPPLLQFMFKVIVAQERK

SEQ ID NO: 46648 - protein, 379 aa, Homo sapiens
MSRPKNQNYKGHGLSKGKEREQRASIRFKTTLMNTLMDVLRHRPGWVEVKDEGEWDFYWCDVSWLRENFDHTYMDEHVRISHFRNHYELTRKNYMVKNLKRFRKQLEREAGKLEAAKCDFFPKTFEMPCEYHLFVEEFRKNPGITWIMKPVARSQGKGIFLFRRLKDIVDWRKDTRSSDDQKDDIPVENYVAQRYIENPYLIGGRKFDLRVYVLVMSYIPLRAWLYRDGFARFSNTRFTLNSIDDQYVHLTNVAVQKTSPDYHPKKGCKWTLQRFRQYLASKHGPEAVETLFRDIDNIFVKSLQSVQKVIISDKHCFELYGYDILIDQDLKPWLLEVNASPSLTASSQEDYELKTCLLEDTLHVVDMEARSLRADSPCW

SEQ ID NO: 46649 - protein, 55 aa, Homo sapiens
MAPFATPMVQALTTTRIQRQAEGFQCWRGCWWVLPRPWLFLGSRRIALEASSLAR

SEQ ID NO: 46650 - protein, 72 aa, Homo sapiens
MLKTPSLKGLMEAISDKYDVPHDKIGKIFKKCKKGILVNMDDNIVKHYSNEDTFQLQIEEAGGSYKLTLTEI

SEQ ID NO: 46651 - protein, 387 aa, Homo sapiens
KRWQCRMCEKSYTSKYNLVTHILGHNGIKPHSCPHCSKLFKQPSHLQTHLLTHQGTRPHKCQVCHKAFTQTSHLKRHMLLHSEVKPYSCHFCGRGFAYPSELKAHEVKHESGRCHVCVECGLDFSTLTQLKRHLASHQGPTLYQCLECDKSFHYRSQLQNHMLKHQNVRPFVCTECGMEFSQIHHLKQHSLTHKGVKEFKCEVCGREFTLQANMKRHMLIHTSVRPYQCHICFKTFVQKQTLKTHMIVHSPVKPFKCKVCGKSFNRMYNLLGHMHLHAGSKPFKCPYCSSKFNLKGNLSRHMKVKHGVMDIGLDSQGGWAKRNGQSRNDTNMTHSGASCPVRGVGRLAKAETSLGWAQVWKGGTLEGHDDNNDGIFMSSSKDLNEIT

SEQ ID NO: 46652 - protein, 367 aa, Homo sapiens
MRKGKGPICLFSRPTLRPSRSKVSLIEGRGANMAARWRFWCVSVTMVVALLIVCDVPSASAQRKKEMVLSEKVSQLMEWTNKRPVIRMNGDKFRRLVKAPPRNYSVIVMFTALQLHRQCVVCKQADEEFQILANSWRYSSAFTNRIFFAMVDFDEGSDVFQMLNMNSAPTFINFPAKGKPKRGDTYELQVRGFSAEQIARWIADRTDVNIRVIRPPNYAGPLMLGLLLAVIGGLVYLRRSNMEFLFNKTGWAFAALCFVLAMTSGQMWNHIRGPPYAHKNPHTGHVNYIHGSSQAQFVAETHIVLLFNGGVTLGMVLLCEAATSDMDIGKRKIMCVAGIGLVVLFFSWMLSIFRSKYHGYPYSFLMS

SEQ ID NO: 46653 - protein, 97 aa, Homo sapiens
MSHHWGYGKHNGPEHWHKDFPIAKGERQSPVDIDTHTAKYDPSLKPLSVSYDQATSLRILNNGHAFNVEFDDSQDKAASLGSLEHQIWGFWESCAAT

SEQ ID NO: 46654 - protein, 38 aa, Homo sapiens
MFILGFAGCIGALRENTFLLKFLKSPVLTEQAENYTFL

SEQ ID NO: 46655 - protein, 384 aa, Homo sapiens
MEDSGKTFSSEEEEANYWKDLAMTYKQRAENTQEELREFQEGSREYEAELETQLQQIETRNRDLLSENNRLRMELETIKEKFEVQHSEGYRQISALEDDLAQTKAIKDQLQKYIRELEQANDDLERAKRATIMSLEDFEQRLNQAIERNAFLESELDEKENLLESVQRLKDEARDLRQELAVQQKQEKPRTPMPSSVEAERTDTAVQATGSVPSTPIAHRGPSSSLNTPGSFRRGLDDSTGGTPLTPAARISALNIVGDLLRKVGRFNKVNQRVKDSRSGFPTSYKRSWIIGRHWSPNSLPAGTSCTISPQTEQVAQPLGGAARTEMAGRDGQAAPACLWVIRGWTRVAAGCPNQQPGRPAPAEACSWSFPVYHKRPPSPRTAG

SEQ ID NO: 46656 - protein, 36 aa, Homo sapiens
MAAGERSWCLCKLLRSCGVYGSWHNYPCTQFGGPKA

SEQ ID NO: 46657 - protein, 44 aa, Homo sapiens
MTCKWRGRALQLEFGPRGRLWSGAGGGSAGSAPPPRVPAVRGLP

SEQ ID NO: 46658 - protein, 93 aa, Homo sapiens
MDVNIAPLRAWDDFFPGSDRFARPDFRDISKWNNRVVSNLLYYQTNYLVVAAMMISIVGLECNGVISAHCNLHLLSSSDSPASASQVAGITGF

SEQ ID NO: 46659 - protein, 162 aa, Homo sapiens
MSLSFCGNNISSYNINDGVLQNSCFVDALNLVPHVFLLFITFPILFIGWGSQSSKVQIHHNTWLHFPGHNLRWILTFALLFVHVCEIAEGIVSDSRRESRHLHLFMPAVMGFVATTTSIVYYHNIETSNFPKLLLEKSCRSSKSDSIYMACNVQSFWATNST

SEQ ID NO: 46660 - protein, 783 aa, Homo sapiens
MEALGPGGDRASPASSTSSLDLWHLSMRADSAYSSFSAASGGPEPRTQSPGTDLLPYLDWDYVRVVWGGPGPAPPDAALCTSPRPRPAVAARSGPQPTEVPGTPGPLNRQATPLLYALAAEAEAAAQAAEPPSPPASRAAYRQRLQGAQRRVLRETSFQRKELRMSLPARLRPTVPARPPATHPRSASLSHPGGEGEPARSRAPAPGTAGRGPLANQQRKWCFSEPGKLDRVGRGGGPARECLGEACSSSGLPGPEPLEFQHPALAKFEDHEVGWLPETQPQGSMNLDSGSLKLGDAFRPASRSRSASGEVLGSWGGSGGTIPIVQAVPQGAETPRPLFQTKLSSVHASDQPYGTGLGQRTGQVTVPTEYPLHECPGTAGADDCWQGVNGSVGISRPTSHTPTGTANDNIPTIDPTGLTTNPPTAAESDLLKPVPADALGLSGNDTPGPSHNTALARGTGQPGSRPTWPSQCLEELVQELARLDPSLCDPLASQPSPEPPLGLLDGLIPLAEVRAAMRPACGEAGEEAASTFEPGSYQFSFTQLLPAPREETRLENPATHPVLDQPCGQGLPAPNNSIQGKKVELAARLQKMLQDLHTEQERLQGEAQAWARRQAALEAAVRQACAPQELERFSRFMADLERVLGLLLLLGSRLARVRRALARAASDSDPDEQASLLQRLRLLQRQEEDAKELKEHVARRERAVREVLVRALPVEELRVYCALLAGKAAVLAQQRNLDERIRLLQDQLDAIRDDLGHHAPSPSPARPPGTCPPVQPPFPLLLT

SEQ ID NO: 46661 - protein, 230 aa, Homo sapiens
MGCDGGTIPKRHELVKGPKKVEKVDKDAELVAQWNYCTLSQEILRRPIVACELGRLYNKDAVIEFLLDKSAEKALGKAASHIKSIKNVTELKLSDNPAWEGDKGNTKGDKHDDLQRARFICPVVGLEMNGRHRFCFLRCCGCVFSERALKEIKAEVCHTCGAAFQEDDVIMLNGTKEDVDVLKTRMEERRLRAKLEKKPQGHQKLRQGSLKKPALILERRKPTWLPKAQQ

SEQ ID NO: 46662 - protein, 296 aa, Homo sapiens
MAGTWLLLLLALGCPALPTGVGGTPFPSLAPPIMLLVDGKQQMVVVCLVLDVAPPGLDSPIWFSAGNGSALDAFTYGPSPATDGTWTNLAHLSLPSEELASWEPLVCHTGPGAEGHSRSTQPMHLSGEASTARTCPQEPLRGGCGLLRAPERFLLAGTPGGALWLGVLRLLLFKLLLFDLLLTCSCLCDPAGPLPSPATTTRLRALGSHRLHPATETGGREATSSPRPQPRDRRWGDTPPGRKPGSPVWGEGSYLSSYPTCPAQAWCSRSALRAPSSSLGAFFAGDLPPPLQAGAA

SEQ ID NO: 46663 - protein, 549 aa, Homo sapiens
MGKRQHQKDKMYITCAEYTHFYGGKKPDLPQTNFRRLPFDHCSLSLQPFVYPVCTPDGIVFDLLNIVPWLKKYGTNPSNGEKLDGRSLIKLNFSKNSEGKYHCPVLFTVFTNNTHIVAVRTTGNVYAYEAVEQLNIKAKNFRDLLTDEPFSRQDIITLQDPTNLDKFNVSNFYHVKNNMKIIDPDEEKAKQDPSYYLKNTNAETRETLQELYKEFKGDEILAATMKAPEKKKVDKLNAAHYSTGKVSASFTSTAMVPETTHEAAAIDEDVLRYQFVKKKGYVRLHTNKGDLNLELHCDLVGVEASHSPCPKVISGSSDSHVLNIGLPLTPKTCENFIRLCKKHYYDGTIFHRSIRNFVIQGGDPTGTGTGGESYWGKPFKDEFRPNLSHTGRGILSMANSGPNSNRSQFFITFRSCAYLDKKHTIFGRVVGGFDVLTAMENVESDPKTDRPKEEIRIDATTVFVDPYEEADAQIAQERKTQLKVAPETKVKSSQPQAGSQGPQTFRQGVGKYINPAATKRAAEEEPSTSATVPMSKKKPSRGFGDFSSW

SEQ ID NO: 46664 - protein, 111 aa, Homo sapiens
MSTRTPLPTVNERDTENHTSHGDGRQEVTSRTSRSGARCRNSIASCADEQPHIGNYRLLKTIGKGNFAKVKLARHILTGREVAIKIIDKTQLNPTSLQKVKYLTIWLHMAG

SEQ ID NO: 46665 - protein, 73 aa, Homo sapiens
MSKRSKFALITWIGENVSGLQRAKTGTDKTLVKEVVQNFAKEFVISDRKELEEDFIKSELKKAGGANYDAQTE

SEQ ID NO: 46666 - protein, 30 aa, Homo sapiens
MGLQACLLGLFALILSGKCSYSPEPDQRRT

SEQ ID NO: 46667 - protein, 370 aa, Homo sapiens
VFKGLLWYIVPLVVVYFAEYFINQGLFELLFFWNTSLSHAQQYRWYQMLYQAGVFASRSSLRCCRIRFTWALALLQVINSLAVYRHRETDFGVGVRDHPGQHGKTPSPQKLDNLIIIIIGFLRRYTFNVLFCTSCLCVSFLKTIFWSRNGHDGSMDVQQRAWRSNRSRQKGLRSICMHTKKRVSSFRGNKIGLKDVITLRRHVETKVRAKIRKRKVTTKINRHDKINGKRKTARKQKMFQRAQELRRRAEDYHKCKIPPSARKPLCNWVRMAAAEHCHSSGLPYWLYLTAETLKNRMGRQPPPPTQQHSITDNSLSLKTPPECLLTPLPPSVDDNIKECPLAPLPPSPLPPSVDDNLKECLFVPLPPSPL

SEQ ID NO: 46668 - protein, 87 aa, Homo sapiens
MEKPPSLGDQETRRKAREQAARLKKLQEQEKQQKVEFRKRMEKEVSDFIQDSGQIKKKFQPMNKIERSILLIPPPRPRNEMKHLYGL

SEQ ID NO: 46669 - protein, 34 aa, Homo sapiens
  MOD_RES (1)..(1): Any amino acid
XLLCAEMPKKAGATTKASSRVKARARNQRDHFLP

SEQ ID NO: 46670 - protein, 97 aa, Homo sapiens
MHPAAFPLPVVVAAVLWGAAPTRGLIRATSDHNASMDFADLPALFGATLSQEGLQGFLVEAHPDNACSPIAPPPPAPVNGSVFIALLRRFDCNFDLK

SEQ ID NO: 46671 - protein, 490 aa, Homo sapiens
MPLAFCGSENHSAAYRVDQGVLNNGCFVDALNVVPHVFLLFITFPILFIGWGSQSSKVHIHHSTWLHFPGHNLRWILTFMLLFVLVCEIAEGILSDGVTESHHLHLYMPAGMAFMAAVTSVVYYHNIETSNFPKLLIALLVYWTLAFITKTIKFVKFLDHAIGFSQLRFCLTGLLVILYGMLLLVEVNVIRVRRYIFFKTPREVKPPEDLQDLGVRFLQPFVNLLSKGTYWWMNAFIKTAHKKPIDLRAIGKLPIAMRALTNYQRLCEAFDAQRKDIQGTQGARAIWQALSHAFGRRLVLSSTFRILADLLGFAGPLCIFGIVDHLGKENDVFQPKTQFLGVYFVSSQEFLANAYVLAVLLFLALLLQRTFLQASYYVAIETGINLRGAIQTKIYNKIMHLSTSNLSMGEMTAGQICNLVAIDTNQLMWFFFLCPNLWAMPVQIIVGVILLYYILGVSALIGAAVIILLAPVQYFVATKLSQAQRSTLFS

SEQ ID NO: 46672 - protein, 244 aa, Homo sapiens
  MOD_RES (1)..(1): Any amino acid
XVAFGAEVGVRLALFAAFLVTELLPPFQRLIQPEEMWLYRNPYVEAEYFPTKPMFVIAFLSPLSLIFLAKFLKKADTRDSRQACLAASLALALNGVFTNTIKLIVGRPRPDFFYRCFPDGLAHSDLMCTGDKDVVNEGRKSFPSGHSSWKLHCFTPQGRGKSWRFCAFLSPLLFAAVIALSRTCDYKHHWQDVLVGSMIGMTFAYVCYRQYYPPLTDAECHKPFQDKLVLSTAQKPGDSYCFDI

SEQ ID NO: 46673 - protein, 61 aa, Homo sapiens
  MOD_RES (1)..(1): Any amino acid
XQSTINTVLPGGISCFKFASQICCRVKSHYVAQAGLEFLASNSWPQAILLPQPPKALGLQV

SEQ ID NO: 46674 - protein, 176 aa, Homo sapiens
MAAPGSCALWSYCGRGWSRAMRGCQLLGLRSSWPGDLLSARLLSQEKRAAETHFGFETVSEEEKGGKGDIAFRFLNYVQSQHQRKQKRQLRAQQNLSWEEIAKEYQNEEDSLGGSRVVVCDINKEMLKVGKQKALAQGYRAGLAWVLGDAEELPFDDDKFDIYTIAFGIRNVTHID

SEQ ID NO: 46675 - protein, 83 aa, Homo sapiens
NAFPVSGQLYTTHLLSLDALLTVIDSTEAHCQAKVLNSLTQQEKKETARPSCEIVDGTREASNIFTYLLLSYQLRELPAMGKL

SEQ ID NO: 46676 - protein, 90 aa, Homo sapiens
MNVAMPSWFDIIGLSPDSQEDESGIKQAAENIKALIDQEVKNGIPSNRIILGGFSQGGALSLYTALTTQQKLAGVTALSCWLPLRASFPQ

SEQ ID NO: 46677 - protein, 117 aa, Homo sapiens
MMYGGMRGMKGLVYETSVLDPDEGIRFRGFSIPECQKLLPKAKGGEEPLPEGLFWLLVTGHIPTEEQVSWLSKEWAKRAALPSHVVTMLDNFPTNLHPMSQLSAAVTALNSESNFAR

SEQ ID NO: 46678 - protein, 455 aa, Homo sapiens
MQSLKPHPRPAESALLQSSLRSTGLGLQDRLFSSESDNSLYFTYSGQPNTLEVRDLNYQVDLASQVPWFEQLAQFKMPWTSPSCQNSCELGIQNLSFKVRSGQMLAIIGSSGCGRASLLDVITGRGHGGKIKSGQIWINGQPSSPQLVRKCVAHVRQHNQLLPNLTVRETLAFIAQMRLPRTFSQAQRDKRVEDVIAELRLRQCADTRVGNMYVRGLSGGERRRVSIGVQLLWNPGILILDEPTSGLDSFTAHNLVKTLSRLAKGNRLVLISLHQPRSDIFRLFDLVLLMTSGTPIYLGAAQHMVQYFTAIGYPCPRYSNPADFYVDLTSIDRRSREQELATREKAQSLAALFLEKVRDLDDFLWKAETKDLDEDTCVESSVTPLDTNCLPSPTKMPGAVQQFTTLIRRQISNDFRDLPTLLIHGAEACLMSMTIGFLYFGHGSIQLSFMDTAAL

SEQ ID NO: 46679 - protein, 247 aa, Homo sapiens
MWTMSSWTMKMMRWRQQLGEMGLRPLPRRMSRAPMSPSTALAFVTSCSSQSCSGPLSTVALSIRQKVAVFFGGLSIKKDEEVLKKNCPHIVVGTPGRILALARNKSLNLKHIKHFILDECDKMLEQLDMRRDVQEIFRMTPHEKQVMMFSATLSKEIRPVCRKFMQDPMEIFVDDETKLTLHGLQQYYVKLKDNEKNRKLFDLLDVLEFNQVVIFVKSVQRCIALAQLLVEQNFPAIAIHRGMPQEE

SEQ ID NO: 46680 - protein, 67 aa, Homo sapiens
  MOD_RES (1)..(1): Any amino acid
XNEVRTLDNLNPDVRLILEEITRFLNMEKLLPSYRHTITVRLECSGAILAHHNLHLLGSSDSPASAS

SEQ ID NO: 46681 - protein, 219 aa, Homo sapiens
MESNLSGLVPAAGLVPALPPAVTLGLTAAYTTLYALLFFSVYAQLWLVLLYGHKRLSYQTVFLALCLLWAALRTTLFSFYFRDTPRANRLGPLPFWLLYCCPVCLQFFTLTLMNLYFAQVVFKAKVKRRPEMSRGLLAVRGAFVGASLLFLLVNVLCAVLSHRRRAQPWALLLVRVLVSDSLFVICALSLAACLCLVARRAPSTSIYLEAKGTSVCQAA

SEQ ID NO: 46682 - protein, 69 aa, Homo sapiens
MRRGAPQDQELVGPGPPGRGSRGAPPPLGPVVPVLVFPPDLVFRADQRSGPRQLLTLYNPTGTALRFRV

SEQ ID NO: 46683 - protein, 48 aa, Homo sapiens
MKLPARVFFTLGSRLPCGLAPRRRCYHLIVFKEKWHSLLGEVLALVKE

SEQ ID NO: 46684 - protein, 51 aa, Homo sapiens
MGRTGEHQANSPPVIVNTDTLEAPGYELQVNGTEGEMEYEEITLERGNSGL

SEQ ID NO: 46685 - protein, 253 aa, Homo sapiens
MSLLSSYEGLRQEIQRLAQENEELRRLVQLIQENQELKLVLRNRGSSLGFCSSGFLAEVAASPWLPRRRTIKFKNAERVFPGLPAEELLWDSSPTTMGSPEGRFHFAIDRGGTFTDVFAQCPGGHVRVLKLLSEDPANYADAPTEGIRRILEQEAGMLLPRDQPLDSSHIASIRMGTTVATNALLERKGERVALLVTRGFRDLLHIGTQARGDLFDLAVPMPEVLYEEVLEVDERVVLHRGEAGTGTPVKGRT

SEQ ID NO: 46686 - protein, 131 aa, Homo sapiens
MAQDSVDLSCDYQFWMQKLSVWDQASTLETQQDTCLHVAQFQEFLRKMYEALKEMDSNTVIERFPTIGQLLAKACWNPFILAYDESQKILIWCLCCLINKEPQNSGQSKLNSWIQTETSPLPGSKACWPSD

SEQ ID NO: 46687 - protein, 403 aa, Homo sapiens
MELEVRRVRQAFLSGRSRPLRFRLQQLEALRRMVQEREKDILTAIAADLCKSEFNVYSQEVITVLGEIDFMLENLPEWVTAKPVKKNVLTMLDEAYIQPQPLGVVLIIGAWNYPFVLTIQPLIGAIAAGNAVIIKPSELSENTAKILAKLLPQYLDQDLYIVINGGVEETTELLKQRFDHIFYTGNTAVGKIVMEAAAKHLTPVTLELGGKSPCYIDKDCDLDIVCRRITWGKYMNCGQTCIAPDYILCEASLQNQIVWKIKETVKEFYGENIKESPDYERIINLRHFKRILSLLEGQKIAFGGETDEATRYIAPTVLTDVDPKTKVMQEEIFGPILPIVPVKNVDEAINFINEREKPLALYVFSHNHKLIKRMIDETSSGGVTGNDVIMHFTLNSFPFGGVG

SEQ ID NO: 46688 - protein, 275 aa, Homo sapiens
MATMGLLMLLTLAASPHFLSICFHHVHTFRGPHWCEYCANFMWGLIAQGVKCADCGLNVHKQCSKMVPNDCKPDLKHVKKVYSCDLTTLVKAHTTKRPMVVDMCIREIESRGLNSEGLYRVSGFSDLIEDVKMAFDRDGEKADISVNMYEDINIITGALKLYFRDLPIPLITYDAYPKFIESAKIMDPDEQLETLHEALKLLPPAHCETLRYLMAHLKRVTLHEKENLMNAENLGIVFGPTLMRSPELDAMAALNDIRYQRLVVELLIKNEDILF

SEQ ID NO: 46689 - protein, 240 aa, Homo sapiens
MGRVGRAGRSQRTKQSTVLAPVIDLKRGGSSDDRQIVDTPPHVAAGLKDPVPSGFSAGEVLIPLADEYDPMFPNDYEKVVKRQREERQRQRELERQKEIEEREKRRKDRHEASGFARRPDPDSDEDEDYERERRKRSMGGAAIAPPTSLVEKDKELPRDFPYEEDSRPRSQSSKAAIPPPVYEEQDRPRSPTGPSNSFLANMGGTVAHKIMQKYGFREGQGLGKHEQGLSTALSVEKTSK

SEQ ID NO: 46690 - protein, 273 aa, Homo sapiens
MRLCPSCSTRLQIIQAKGRNLNVLVTPYGLGILPWPSSKALLGPGKAVAVVGLGLRIIPLLGQWMDSHPCLYCGPQDSEGTNWQTSPSTLFSTVDTDEIPAKRPRLDCFIHQVKNSLYNAASLFGFPFQLTTKPMVTSACNGTRNVAPSGEVFSNSSSCELTGSGSWNNMLKLGNKSPNGISDYPKIRVTVTRDQPRRVLPSFGFTLNSEGCNRRPGGRRHSKGNPESSLMWKPQEQAVTEMISEESGKGLRRPHCTVEEGVQKEEREKYRKL

SEQ ID NO: 46691 - protein, 159 aa, Homo sapiens
MSKCRKTPVQQLASPASFSPDILADIFELFAKNFSYGKPLNNEWQLPDPSEIFTCDHTELNAFLDLKNSLNEVKNLLSDKKLDEWHEHTAFTNKAGKIISHVRKSVNAELCTQAWCKFHEILCSFPLIPQEAFQNGKLNSLHLCEAPGAFIASLNHYLK

SEQ ID NO: 46692 - protein, 135 aa, Homo sapiens
MALKPPSATQPAPNAPATPDAPPTTGDPGASAAPGSPTTTGGPGAPAEVPQEPQEPTQTPEELAFYAPNYLCLTIFAILLFPPFGLAALYFSYETMKANQNSEWEEAYINSGRTGWFGAFVVMIGLGIIYGLVLY

SEQ ID NO: 46693 - protein, 330 aa, Homo sapiens
IPEALGYVRQALQLQGDDANSLHLLALLLSAQKHYHDALNIIDMALSEYPENFILLFSKVKLQSLCRGPDEALLTCKHMLQIWKSCYNLTNPSDSGRGSSLLDRTIADRRQLNTITLPDFSDPETGNSPEAYFHGFPSLFSVSSVHATSVAASRVEQALSEVASSLQSSAPKQGPLHPWMTLAQIWLHAAEVYIGIGKPAEATACTQEAANLFPMSHNVLYMRGQIAELRGSMDEARRWYEEALAISPTHVKSMQRLALILHQLGRYSLAEKILRDAVQVNSTAHEVWNGLGEVLQAQGNDAAATECFLTALELEASSPAVPFTIIPRVL

SEQ ID NO: 46694 - protein, 521 aa, Homo sapiens
MWRLPRALCVHAAKTSKLSGPWSRPAAFMSTLLINQPQYAWLKELGLREENEGVYNGSWGGRGEVITTYCPANNEPIARVRQASVADYEETVKKAREAWKIWADIPAPKRGEIVRQIGDALREKIQVLGSLVSLEMGKILVEGVGEVQEYVDICDYAVGLSRMIGGPILPSERSGHALIEQWNPVGLVGIITAFNFPVAVYGWNNAIAMICGNVCLWKGAPTTSLISVAVTKIIAKVLEDNKLPGAICSLTCGGADIGTAMAKDERVNLLSFTGSTQVGKQVGLMVQERFGRSLLELGGNNAIIAFEDADLSLVVPSALFAAVGTAGQRCTTARRLFIHESIHDEVVNRLKKAYAQIRVGNPWDPNVLYGPLHTKQAVSMFLGAVEEAKKEGGTVVYGGKVMDRPGNYVEPTIVTGLGHDASIAHTETFAPILYVFKFKNEEEVFAWNNEVKQGLSSSIFTKDLGRIFRWLGPKGSDCGIVNVNIPTSGAEIGGAFGGEKHTGGGRESGSDAWKQYMRRST

SEQ ID NO: 46695 - protein, 436 aa, Homo sapiens
MCPKNASYYGNRAATLMMLGRFREALGDAQQSVRLDDSFVRGHLREGKCHLSLGNAMAACRSFQRALELDHKNAQAQQEFKNANAVMEYEKIAETDFEKRDFRKVVFCMDRALEFAPACHRFKILKAECLAMLGRYPEAQSVASDILRMDSTNADALYVRGLCLYYEDCIEKAVQFFVQALRMAPDHEKACIACRNAKALKAKKEDGNKAFKEGNYKLAYELYTEALGIDPNNIKTNAKLYCNRGTVNSKLRKLDDAIEDCTNAVKLDDTYIKAYLRRAQCYMDTEQYEEAVRDYEKVYQTEKTKEHKQLLKNAQLELKKSKRKDYYKILGVDKNASEDEIKKAYRKRALMHHPDRHSGASAEVQKEEEKKFKEVGEAFTILSDPKKKTRYDSGQDLDEEGMNMGDFDPNNIFKAFFGGPGGFSFEASGPGNFFFQ

SEQ ID NO: 46696 - protein, 191 aa, Homo sapiens
MTWRHHVRLLFTVSLALQIINLGNSYQREKHNGGREEVTKVATQKHRQSPLNWTSSHFGEVTGSAEGWGPEEPLPYSWAFGEVNAAPWSTEPGPSAPATSAGASSGPCTASPSRRLTAVTRKTSWPPTLTGRAPGARPACYSCCPAHSCTASCARMRPRTLGPWSLPSSSGSGAPAEGRDLGIAFNFLCCK

SEQ ID NO: 46697 - protein, 211 aa, Homo sapiens
MRGRQVAPETGGGCTGLSANTVCAGVRARFRFCGDLDCPDWVLAEISTLAKMSSVKLRLLCSQVLKELLGQGIDYEKILKLTADAKFESGDVKATVAVLSFILSSAAKHSVDGESLSSELQQLGLPKEHAASLCRCYEEKQSPLQKHLRVCSLRMNRLAGVGWRVDYTLSSSLLQSVEEPMVHLRLEVAAAPGTPAQPVAMSLSADKFQVL

SEQ ID NO: 46698 - protein, 71 aa, Homo sapiens
MKGSNRNKDHSAEGEGVGKRPKRKCLQWHPLLAKKLLDFSEEEEEEDEEEDIDKVQLLGADGLEQDVGETE

SEQ ID NO: 46699 - protein, 36 aa, Homo sapiens
  MOD_RES (1)..(1): Any amino acid
XMDSWCQPGFDIKDVASFWKHLVCDVCQQLQRKGST

SEQ ID NO: 46700 - protein, 65 aa, Homo sapiens
MAAAYLDPNLNHTPNSSTKTHLGTGMERSPGAMERVLKVFHYFESNSEPTTWASIIRHGDATDVR

SEQ ID NO: 46701 - protein, 465 aa, Homo sapiens
MGSSASSLAAETESDHSFPGGPPYPGPPAAAGWCRSGPGGPVWGGALVSRQHQPPRPRARSHTHSPGSMATVGEWSCVRCTFLNPAGQRQCSICEAPRHKPDLNHILRLSVEEQKWPCARCTFRNFLGKEACEVCGFTPEPAPGAAFLPVLNGVLPKPPAILGEPKGSCQEEAGPVRTAGLVATEPARGQCEDKDEEEKEEQEEEEGAAEPRGGWACPRCTLHNTPVASSCSVCGGPRRLSLPRIPPEALVVPEVVAPAGFHVVPAAPPPGLPGEGAEANPPATSQGPAAEPEPPRVPPFSPFSSTLQNNPVPRSRREVPPQLQPPVPEAAQPSPSAGCRGAPQGSGWAGASRLAELLSGKRLSVLEEEATEGGTSRVEAGSSTSGSDIIDLAGDTVRYTPASPSSPDFTTWSCAKCTLRNPTVAPRCSACGCSKLHGFQEHGEPPTHCPDCGADKPSPCGRSCG

SEQ ID NO: 46702 - protein, 55 aa, Homo sapiens
ASPPSFPSGSPVLRLSPCLHRSLEGLNQELEEVFVKEQGEEELLRSPGHRRSLPS

SEQ ID NO: 46703 - protein, 29 aa, Homo sapiens
MQSTSNHLWLLSDILGQGATANVFRGRHK

SEQ ID NO: 46704 - protein, 216 aa, Homo sapiens
PNHIHIYSASWGPEDDGKTVDGPARLAEEAFFRGVSQGRGGLGSIFVWASGNGGREHDSCNCDGYTNSIYTLSISSATQFGNVPWYSEACSSTLATTYSSGNQNEKQIVTTDLRQKCTESHTGTSASAPLAAGIIALTLEANKNLTWRDMQHLVVQTSKPAHLNANDWATNGVGRKVSHSYGYGLLDAGAMVALAQNWTTVAPQRKCIIDILTEPK

SEQ ID NO: 46705 - protein, 290 aa, Homo sapiens
VSCWLSDSCQELQRRGIILCSYGVTSPIAVFGRPGRLRNRRHFERRLVPMKWLKKCLDTAPTPMWPDDLQNHTFLHTVYCQDGSPSVGLSEAYDEDQLFFFDFSQNTRVPRLPEFADWAQEQGDAPAILFDKEFCEWMIQQIGPKLDGKIPVSRGFPIAEVFTLKPLEFGKPNTLVCFVSNLFPPMLTVNWQHHSIPVEGFGPTFVSAVDGLSFQAFSYLNFTPEPSDIFSCIVTHEIDRYTAIAYWVPRNALPSDLLENVLCGVAFGLGVLGIIVGIVLIIYFRKPCSG

SEQ ID NO: 46706 - protein, 168 aa, Homo sapiens
MSKPHSEAGTAFIQTQQLHAAMADTFLEHMCRLDIDSPPITARNTGIICTIGPASRSVETLKEMIKSGMNVARLNFSHGTHEYHAETIKNVRTATESFASDPILYRPVAVALDTKGPEIRTGLIKGSGTAEVELKKGATLKITLDNAYMEKCDENILWLDYKNICKVV

SEQ ID NO: 46707 - protein, 765 aa, Homo sapiens
MKTPWKVLLGLLGAAALVTIITVPVVLLNKGNDATADSRKTYTLTDYLKNTYRLKLYSLRWISDHEYLYKQENNILVFNAEYGNSSVFLENSTFDEFGHSINDYSISPDGQFILLEYNYVKQWRHSYTASYDIYDLNKRQLITEERIPNNTQWVTWSPVGHKLAYVWNNDIYVKIEPNLPSYRITWTGKEDIIYNGITDWVYEEEVFSAYSALWWSPNGTFLAYAQFNDTEVPLIEYSFYSDESLQYPKTVRVPYPKAGAVNPTVKFFVVNTDSLSSVTNATSIQITAPASMLIGDHYLCDVTWATQERISLQWLRRIQNYSVMDICDYDESSGRWNCLVARQHIEMSTTGWVGRFRPSEPHFTLDGNSFYKIISNEEGYRHICYFQIDKKDCTFITKGTWEVIGIEALTSDYLYYISNEYKGMPGGRNLYKIQLSDYTKVTCLSCELNPERCQYYSVSFSKEAKYYQLRCSGPGLPLYTLHSSVNDKGLRVLEDNSALDKMLQNVQMPSKKLDFIILNETKFWYQMILPPHFDKSKKYPLLLDVYAGPCSQKADTVFRLNWATYLASTENIIVASFDGRGSGYQGDKIMHAINRRLGTFEVEDQIEAARQFSKMGFVDNKRIAIWGWSYGGYVTSMVLGSGSGVFKCGIAVAPVSRWEYYDSVYTERYMGLPTPEDNLDHYRNSTVMSRAENFKQVEYLLIHGTADDNVHFQQSAQISKALVDVGVDFQAMWYTDEDHGIASSTAHQHIYTHMSHFIKQCFSLP

SEQ ID NO: 46708 - protein, 341 aa, Homo sapiens
MKNWDSLDEHGVCTADKDCEDAYRVCQILDIPFHQVSYVKEYWNDVFSDFLNEYEKGRTPNPDIVCNKHIKFSCFFHYAVDNLGADAIATGHYARTSLEDEEVFEQKHVKKPEGLFRNRFEVRNAVKLLQAADSFKDQTFFLSQVSQDALRRTIFPLGGLTKEFVKKIAAENRLHHVLQKKESMGMCFIGKRNFEHFLLQYLQPRPGHFISIEDNKVLGTHKGWFLYTLGQRANIGGLREPWYVVEKDSVKGDVFVAPRTDHPALYRDLLRTSRVHWIAEEPPAALVRDKMMECHFRFRHQMALVCCVLQGGRVPGQREDPAAGAVCLHAPEGPAQSWDGH

SEQ ID NO: 46709 - protein, 1155 aa, Homo sapiens
MSLKPQQQQQQQQQQQQQQQQQQQQQQQPPPAAANVRKPGGSGLLASPAAAPSPSSSSVSSSSATAPSSVVAATSGGGRPGLGRGRNSNKGLPQSTISFDGIYANMRMVHILTSVVGSKCEVQVKNGGIYEGVFKTYSPKCDLVLDAAHEKSTESSSGPKREEIMESILFKCSDFVVVQFKDMDSSYAKRDAFTDSAISAKVNGEHKEKDLEPWDAGELTANEELEALENDVSNGWDPNDMFRYNEENYGVVSTYDSSLSSYTVPLERDNSEEFLKREARANQLAEEIESSAQYKARVALENDDRSEEEKYTAVQRNSSEREGHSINTRENKYIPPGQRNREVISWGSGRQNSPRMGQPGSGSMPSRSTSHTSDFNPNSGSDQRVVNGGVPWPSPCPSPSSRPPSRYQSGPNSLPPRAATPTRPPSRPPSRPSRPPSHPSAHGSPAPVSTMPKRMSSEGPPRMSPKAQRHPRNHRVSAGRGSISSGLEFVSHNPPSEAATPPVARTSPSGGTWSSVVSGVPRLSPKTHRPRSPRQNSIGNTPSGPVLASPQAGIIPTEAVAMPIPAASPTPASPASNRAVTPSSEAKDSRLQDQRQNSPAGNKENIKPNETSPSFSKAENKGISPVVSEHRKQIDDLKKFKNDFRLQPSSTSESMDQLLNKNREGEKSRDLIKDKIEPSAKDSFIENSSSNCTSGSSKPNSPSISPSILSNTEHKRGPEVTSQGVQTSSPACKQEKDDKEEKKDAAEQVRKSTLNPNAKEFNPRSFSQPKPSTTPTSPRPQAQPSPSMVGHQQPTPVYTQPVCFAPNMMYPVPVSPGVQPLYPIPMTPMPVNQAKTYRAGKVPNMPQQRQDQHHQSAMMHPASAAGPPIAATPPAYSTQYVAYSPQQFPNQPLVQHVPHYQSQHPHVYSPVIQGNARMMAPPTHAQPGLVSSSATQYGAHEQTHAMYACPKLPYNKETSPSFYFAISTGSLAQQYAHPNATLHPHTPHPQPSATPTGQQQSQHGGSHPAPSPVQHHQHQAAQALHLASPQQQSAIYHAGLAPTPPSMTPASNTQSPQNSFPAAQQTVFTIHPSHVQPAYTNPPHMAHVPQAHVQSGMVPSHPTAHAPMMLMTTQPPGGPQAALAQSALQPIPVSTTAHFPYMTHPSVQAHHQQQL

SEQ ID NO: 46710 - protein, 219 aa, Homo sapiens
MAPTQGPRAPLEFGGPLGAAALLLLLPATMFHLLLAARSGPARLLGPPASLPGLEVLWSPRALLLWLAWLGLQAALYLLPARKVLINLALLMKEAELRGSPSLAMWLVNGFQLLYVGDALWHEEAVLTTMDITHDGFGFMLAFGDMAWVPFTYSLQAQFLLHHPQPLGLPMASVICLINATGYYIFRGANSQKNTFRKNPSDPRVAGLETISTATGRKL

SEQ ID NO: 46711 - protein, 231 aa, Homo sapiens
MAGLRNESEQEPLLGDTPGSREWDILETEEHYKSRWRSIRILYLTMFLSSVGFSVVMMSIWPYLQKIDPTADTSFLGWVIASYSLGQMVASPIFGLWSNYRPRKEPLIVSILISVAANCLYAYLHIPASHNKYYMLVARGLLGIGAASTDEAQVPQGNIDQVAVVAINVLFFVTLFIFALFETIITPLTMDMYAWTQEQAVLYNGIILAALGVEAVVIFLGVKLLSKKFAQ

SEQ ID NO: 46712 - protein, 763 aa, Homo sapiens
  MOD_RES (1)..(1): Any amino acid
XRSYDQSLSDSSSHSQDKHHEKEKKKYKEKDKHKQKHKKQPEPSPALVPSLTVTTEKTYTSTSNNSISGSLKRLEDTTARFTNANFQEVSAHTSSGKDVSETRGSEGKGKKSSAHSSGQRGRKPGGGRNPGTTVSAASPFPQAGYKRAQTSGIEEETVKEKKRKGNKQSKHGPGRPKGNKNQENVSHLSVSSASPTSSVASAAGSITSSSLQKSPTLLRNGSLQSLSVGSSPVGSEISMQYRHDGACPTTTFSELLNAIHNGIYNSNDVAVSFPNVVSGSGSSTPVSSSHLPQQSSGHLQQVGALSPSAVSSAAPAVATTQANTLSGSSLSQAPSHMYGNRSNSSMAALIAQSENNQTDQDLGDNSRNLVGRGSSPRGSLSPRSPVSSLQIRYDQPGNSSLENLPPVAASIEQLLERQWSEGQQFLLEQGTPSDILGMLKSLHQLQVENRRLEEQIKNLTAKKERLQLLNAQLSVPFPTITANPSPSHQIHTFSAQTAPTTDSLNSSKSPHIGNSFLPDNSLPVLNQDLTSSGQSTSSSSALSTPPPAGQSPAQQGSGVSGVQQVNGVTVGALASGMQPVTSTIPAVSAVGGIIGALPGNQLAINGIVGALNGVMQTPVTMSQNPTPLTHTTVPPNATHPMPATLTNSASGLGLLSDQQRQILIHQQQFQQLLNSQQLTPEQHQAFLYQLMQHHHQQHHQPELQQLQIPGPTQIPINNLLAGTQAPPLHTATTNPFLTIHGDNASQKVARLSDKTGPVAQEKS

SEQ ID NO: 46713 - protein, 388 aa, Homo sapiens
MRAGTRVALGSSTPAERTTPSQGRCKPRPALPRAAPPSAAPRLLVSLSLKGPQTLAAERRRETVPVPAALPPWERWQMIRAVLKSRGLRIQQMKIQWMLSQTGPRLYRPSSAPDSGTLYFTSKKKKNVTMRSIKTTRDRVPTYQYNMNFEKLGKCIIINNKNFDKVTGMGVRNGTDKDAEALFKCFRSLGFDVIVYNDCSCAKMQDLLKKASEEDHTNAACFACILLSHGEENVIYGKDGVTPIKDLTAHFRGDRCKTLLEKPKLFFIQACRGTELDDGIQADSGPINDTDANPRYKIPVEADFLFAYSTVPGYYSWRSPGRGSWFVQALCSILEEHGKDLEIMQILTRVNDRVARHFESQSDDPHFHEKKQIPCVVSMLTKELYFSQ

SEQ ID NO: 46714 - protein, 252 aa, Homo sapiens
MGKSYDGRAYVITGMWNPNAPVFLALNEETPKDKQVYMTVAVDMVVTEVVEPVRFLLETVVRVYPANERFWYFSRKTFTETFFMRLKQSEGKGHTNAGDAIYEVVSLQRESDKEEPVTPTSGGGPMSPQDDEAEEESDNELSSGTGDVSKDCPEKILYSWGELLGKWHSNLGARPKGLSTLVKSGVPEALRAEVWQLLAGCHDNQAMLDRYRILITKVCWSLLEVHSRPCLPGYHQWKLQNSKYCRMANVAA

SEQ ID NO: 46715 - protein, 37 aa, Homo sapiens
  MOD_RES (1)..(1): Any amino acid
XDDDRANLMWKRYLEREDSKIVDLFVGQLKSCLKCQA

SEQ ID NO: 46716 - protein, 114 aa, Homo sapiens
MASVWQRLGFYASLLKRQLNGGPDVIKWERRVIPGCTRSIYSATGKWTKEYTLQTRKDVEKWWHQRIKEQASKISEADKSKPKFYVLSMFPYPSGKLHMGHVRVYTISDTIARF

SEQ ID NO: 46717 - protein, 50 aa, Homo sapiens
MSFRDLRNFTEMMRALGYPRHISMENFRTPNFGLVSEVLLWLVKRPPRHI

SEQ ID NO: 46718 - protein, 82 aa, Homo sapiens
MGEFNEKKTTCGTVCLKYLLFTYNCCFWLAGLAVMAVGIWTLALKSDYISLLASGTYLATAYILVVAGTVVMVTGVLGCCAT

SEQ ID NO: 46719 - protein, 71 aa, Homo sapiens
MSRFPAVAGRAPRRQEEGERSRDLQEERLSAVCIADREEKGCTSQEGGTTPTFPIQKQRKKIIQAGFHNMV

SEQ ID NO: 46720 - protein, 432 aa, Homo sapiens
MGRCCFYTAGTLSLLLLVTSVTLLVARVFQKAVDQSIEKKIVLRNGTEAFDSWEKPPLPVYTQFYFFNVTNPEEILRGETPRVEEVGPYTYRELRNKANIQFGDNGTTISAVSNKAYVFERDQSVGDPKIDLIRTLNIPVLTVIEWSQVHFLREIIEAMLKAYQQKLFVTHTVDELLWGYKDEILSLIHVFRPDISPYFGLFYEKNGTNDGDYVFLTGEDSYLNFTKIVEWNGKTSLDWWITDKCNMINGTDGDSFHPLITKDEVLYVFPSDFCRSVYITFSDYESVQGLPAFRYKVPAEILANTSDNAGFCIPEGNCLGSGVLNVSICKNGAPIIMSFPHFYQADERFVSAIEGMHPNQEDHETFVDINPLTGIILKAAKRFQINIYVKKLDDFVETGDIRTMVFPVMYLNEVSPETEGATGVFRLRKNPL

SEQ ID NO: 46721 - protein, 40 aa, Homo sapiens
MAVFPWHSRNRNYKAEFASCRLEAVPLEFGDYHPLKPITL

SEQ ID NO: 46722 - protein, 177 aa, Homo sapiens
MVVLRAGKKTFLPPLCRAFACRGCQLAPERGAERRDTAPSGVSRFCPPRKSCHDWIGPPDKYSNLRPVHFYIPENESPLEQKLRKLRQETQEWNQQFWANQNLTFSKEKEEFIHSRLKTKGLGLRTESDPTLPRVTETMERKTMDGGDSCAAAISLTQSESNIECRRNGGLLQGIFK

SEQ ID NO: 46723 - protein, 120 aa, Homo sapiens
MALYYDHQIEAPDAAGSPSFISWHPVHPFLAVAYISTTSTGSVDIYLEQGECVPDTHVERPFRVASLCWHPTRLVLAVGWETGEVTVFNKQDKEQHTMPLTHTADITVLRWSPSGNCLLS

SEQ ID NO: 46724 - protein, 146 aa, Homo sapiens
MEKEKGNDDGIPDQENSLDFSEHFNQLELLETHGHLIPTGTQSLWVGNSDEDEEQDDKNEEWYRLQEKKMEKDPSRLLLWAAEKNRVKKKITEGSVTVGKALGSSQKTCLYCYGHHTYLLILTTVRRLLSEKATHVNTRDEDEYTP

SEQ ID NO: 46725 - protein, 213 aa, Homo sapiens
MAQLFLPLLAALVLAQAPAALADVLEGDSSEDRAFRVRIAGDAPLQGVLGGALTIPCHVHYLRPPPSRRAVLGSPRVKWTFLSRGREAEVLVARGVRVKVNEAYRFRVALPAYPASLTDVSLALSELRPNDSGIYRCEVQHGIDDSSDAVEVKVKGVVFLYREGSARYAFSFSGAQEACARIGAHIATPEQLYAAYLGGYEQCDAGWLSDQTV

SEQ ID NO: 46726 - protein, 1264 aa, Homo sapiens
MQSFREQSSYHGNQQSYPQEVHGSSRLEEFSPRQAQMFQNFGGTGGSSGSSGSGSGGGRRGAAAAAAAMASETSGHQGYQGFRKEAGDFYYMAGNKDPVTTGTPQPPQRRPSGPVQSYGPPQGSSFGNQYGSEGHVGQFQAQHSGLGGVSHYQQDYTGPFSPGSAQYQQQASSQQQQQQVQQLRQQLYQSHQPLPQATGQPASSSSHLQPMQRPSTLPSSAAGYQLRVGQFGQHYQSSASSSSSSSFPSPQRFSQSGQSYDGSYNVNAGSQYEGHNVGSNAQAYGTQSNYSYQPQSMKNFEQAKIPQGTQQGQQQQQPQQQQHPSQHVMQYTNAATKLPLQSQVGQYNQPEVPVRSPMQFHQNFSPISNPSPAASVVQSPSCSSTPSPLMQTGENLQCGQGSVPMGSRNRILQLMPQLSPTPSMMPSPNSHAAGFKGFGLEGVPEKRLTDPGLSSLSALSTQVANLPNTVQHMLLSDALTPQKKTSKRPSSSKKADSCTNSEGSSQPEEQLKSPMAESLDGGCSSSSEDQGERVRQLSGQSTSSDTTYKGGASEKAGSSPAQGAQNEPPRLNASPAAREEATSPGAKDMPLSSDGNPKVNEKTVGVIVSREAMTGRVEKPGGQDKGSQEDDPAATQRPPSNGGAKETSHASLPQPEPPGGGGSKGNKNGDNNSNHNGEGNGQSGHSAAGPGFTSRTEPSKSPGSLRYSYKDSFGSAVPRNVSGFPQYPTGQEKGDFTGHGERKGRNEKFPSLLQEVLQGYHHHPDRRYSRSTQEHQGMAGSLEGTTRPNVLVSQTNELASRGLLNKSIGSLLENPHWGPWERKSSSTAPEMKQINLTDYPIPRKFEIEPQSSAHEPGGSLSERRSVICDISPLRQIVRDPGAHSLGHMSADTRIGRNDRLNPTLSQSVILPGGLVSMETKLKSQSGQIKEEDFEQSKSQASFNNKKSGDHCHPPSIKHESYRGNASPGAATHDSLSDYGPQDSRPTPMRRVPGRVGGREGMRGRSPSQYHDFAEKLKMSPGRSRGPGGDPHHMNPHMTFSERANRSSLHTPFSPNSETLASAYHANTRAHAYGDPNAGLNSQLHYKRQMYQQQPEEYKDWSSGSAQGVIAAAQHRQEGPRKSPRQQQFLDRVRSPLKNDKDGMMYGPPVGTYHDPSAQEAGRCLMSSDGLPNKGMELKHGSQKLQESCWDLSRQTSPAKSSGPPGMSSQKRYGPPHETDGHGLAEATQSSKPGSVMLRLPGQEDHSSQNPLIMRRRVRSFISPI

SEQ ID NO: 46727 - protein, 415 aa, Homo sapiens
  MOD_RES (1)..(1): Any amino acid
XRLLTPTFEGINGLLLKQHLVQNPVRLWQLLGGTFYFNTSRLKQKNKEKDKSKGKAPEEDEGMGTTDHVIVLASTNRADILDGALMRPGRLDRHVFIDLPTLQERREIFEQHLKSLKLTQSSTFYSQRLAELTPGFSGADIANICNEAALHAAREGHTSVHTLNFEYAVERVLAGTAKKSKILSKEEQKVVAFHESGHALVGWMLEHTEAVMKVSITPRTNAALGFAQMLPRDQHLFTKEQLFERMCMALGGRASEALSFNEVTSGAQDDLRKVTRIAYSMVKQFGMAPGIGPISFPEAQEGLMGIGRRPFSQGLQQMMDHEARLLVAKAYRHTEKVLQDNLDKLQALANALLEKEVINYEDIEALIGPPPHGPKKMIAPQRWIDAQREKQDLGEEETEETQQPPLGGEEPTWPK

SEQ ID NO: 46728 - protein, 354 aa, Homo sapiens
MSGPTDETAGDLPVKDTGLNLFGMGGLQETSTTRTMKSRQAVSRVSREELEDRFLRLHDENILLKQHARKQEDKIKRMATKLIRLVNDKKRYERVGGGPKRLGRDVEMEEMIEQLQEKVHELEKQNETLKNRLISAKQQLQTQGYRQTPYNNVQSRINTGRRKANENAGLQECPRKGIKFQDADVAETPHPMFTKYGNSLLEEARGEIRNLENVIQSQRGQIEELEHLAEILKTQLRRKENEIELSLLQLREQQATDQRSNIRDNVEMIKLHKQLVEKSNALSAMEGKFIQLQEKQRTLRISHDALMANGDELNMQLKEQRLKCCSLEKQLHSMKFSERRIEELQDRINDLEKE

SEQ ID NO: 46729 - protein, 148 aa, Homo sapiens
  MOD_RES (1)..(1): Any amino acid
XSPGLRPPGGESGRSRGPRSGAGRAGLRGPTGGPEPLAGQRPRGSRRPGRRTSDLKEKKEVVEEAENGRDAPANGNANEENGEQEADNEVDEEEEEGGEEEEEEEEGDGEEEDGDEDEEAESATGKRAAEDDEDDDVDTKKQKTDEDD

SEQ ID NO: 46730 - protein, 580 aa, Homo sapiens
MAPSTPLLTVRGSEGLYMVNGPPHFTESTVFPRESGKNCKVCIFSKDGTLFAWGNGENVTNKGLLHSFDLLKAVCLEFSPKNTVLATWQPYTTSKDGTAGIPNLQLYDVKTGTCLKSFIQKKMQNWCPSWSEDETLCARNVNNEVHFFENNNFNTIANKLHLQKINDFVLSPGPQPYKVAVYVPGSKGAPSFVRLYQYPNFAGPHAALANKSFFKADKVTMLWNKKATAVLVIASTDVDKTGASYYGEQTLHYIATNGESAVVQLPKNGPIYDVVWNSSSTEFCAVYGFMPAKATIFNLKCDPVFDFGTGPRNAAYYSPHGHILVLAGFGNLRGQMEVWDVKNYKLISKPVASDSTYFAWCPDGEHILTATCAPRLRVNNGYKIWHYTGSILHKYDVPSNAELWQVSWQPFLDGIFPAKTITYQAVPSEVPNEEPKVATAYRPPALRNKPITNSKLHEEEPPQNMKPQSGNDKPLSKTALKNQRKHEAKKAAKQEARSDKSPDLAPTPAPQSTPRNTVSQSISGDPEIDKKIKNLKKKLKAIEQLKEQAATGKQLEKNQLEKIQKETALLQELEDLELGI

SEQ ID NO: 46731 - protein, 611 aa, Homo sapiens
MQQGDLVSSSRAISGHLYLPSTSPDPEAWGQGGEVRCQQWKDSANNMPKQVEVRMHDSHLGSEEPKHRHLGLRLCDKLGKNLLLTLTVFGVILGAVCGGLLRLASPIHPDVVMLIAFPGDILMRMLKMLILPLIISSLITGLSGLDAKASGRLGTRAMVYYMSTTIIAAVLGVILVLAIHPGNPKLKKQLGPGKKNDEVSSLDAFLDLIRNLFPENLVQACFQQIQTVTKKVLVAPPPDEEANATSAVVSLLNETVTEVPEETKMVIKKGLEFKDGMNVLGLIGFFIAFGIAMGKMGDQAKLMVDFFNILNEIVMKLVIMIMWYSPLGIACLICGKIIAIKDLEVVARQLGMYMVTVIIGLIIHGGIFLPLIYFVVTRKNPFSFFAGIFQAWITALGTASSAGTLPVTFRCLEENLGIDKRVTRFVLPVGATINMDGTALYEAVAAIFIAQMNGVVLDGGQIVTVSLTATLASVGAASIPSAGLVTMLLILTAVGLPTEDISLLVAVDWLLDRMRTSVNVVGDSFGAGIVYHLSKSELDTIDSQHRVHEDIEMTKTQSIYDDMKNHRESNSNQCVYAAHNSVIVDECKVTLAANGKSADCSVEEEPWKREK

SEQ ID NO: 46732 - protein, 230 aa, Homo sapiens
  MOD_RES (1)..(1): Any amino acid
XDVVVGGHSNTFLYTGNPPSKEVPAGKYPFIVTSDDGRKVPVVQAYAFGKYLGYLKIEFDERGNVISSHGNPILLNSSIPEDPSIKADINKWRIKLDNYSTQELGKTIVYLDGSSQSCRFRECNMGNLICDAMINNNLRHTDEMFWNHVSMCILNGGGIRSPIDERNNGIHVVYDLSRKPGDRVVKLDVLCTKCRVPSYDPLKMDEVYKVILPNFLANGGDGFQMIKDEL

SEQ ID NO: 46733 - protein, 1521 aa, Homo sapiens
MKGSEVSLEKKKKIKMPVKRLREVVSQNHGDHLVLLKDELPCVPPALSANKRLPVGTGTSLNGTSRGSSDLTSARNCYQPLLENPMVSESDFSKDVAVQVLPLDKIEENNKQKANDIFISQYTMGQKDALRTVLKQKAQSMPVFKEVKVHLLEDAGIEKDAVTQETRISPSGIDSATTVAAATAAAIATAAPLIKVQSDLEAKVNSVTELLSKLQETDKHLQRVTEQQTSIQRKQEKLHCHDHEKQMNVFMEQHIRHLEKLQQQQIDIQTHFISAALKTSSFQPVSMPSSRAVEKYSVKPEHPNLGSCNPSLYNTFASKQAPLKEVEDTSFDKQKSPLETPAPRRFAPVPVSRDDELSKRENLLEEKENMEVSCHRGNVRLLEQILNNNDSLTRKSESSNTTSLTRSKIGWTPEKTNRFPSCEELETTKVTMQKSDDVLHDLGQKEKETNSMVQPKESLSMLKLPDLPQNSVKLQTTNTTRSVLKDAEKILRGVQNNKKVLEENLEAIIRAKDGAAMYSLINALSTNREMSEKIRIRKTVDEWIKTISAEIQDELSRTDYEQKRFDQKNQRTKKGQNMTKDIRTNTQDKTVNKSVIPRKHSQKQIEEHFRNLPMRGMPASSLQKERKEGLLKATTVIQDEDYMLQVYGKPVYQGHRSTLKKGPYLRFNSPSPKSRPQRPKVIERVKGTKVKSIRTQTDFYATKPKKMDSKMKHSVPVLPHGDQQYLFSPSREMPTFSGTLEGHLIPMAILLGQTQSNSDTMPPAGVIVSKPHPVTVTTSIPPSSRKVETGVKKPNIAIVEMKSEKKDPPQLTVQVLPSVDIDSISNSSADVLSPLSSPKEASLPPVQTWIKEEEKCDEIPDSEPILEFNRSVKADSTKYNGPPFPPVASTFQPTADILDKVIERKETLENSLIQWVEQEIMSRIISGLFPVQQQIAPSISVSVSETSEPLTSDIVEGTSSGALQLFVDAGVPVNSNVIKHFVNEALAETIAVMLGDREAKKQGPVATGVSGDASTNETYLPARVCTPLPTPQPTPPCSPSSPAKECVLVKTPDSSPCDSDHDMAFPVKEICAEKGDDMPAIMLVNTPTVTPTTTPPPAAAVFTPTLSDISIDKLKVSSPELPKPWGDGDLPLEEENPNSPQEELHPRAIVMSVAKDEEPESMDFPAQPPPPEPVPFMPFPAGTKAPSPSQMPGSDSSTLESTLSVTVTETETLDKPISEGEILFSCGQKLAPKILEDIGLYLTNLNDSLSSTLHDAVEMEDDPPSEGQVIRMSHKKFHADAILSFAKQNQESAVSQQAVYHSEDLENSVGELSEGQRPQLTAAAENILMGHSLYMQPPVTNTQSLDQQCDPKPLSRQFDTVSGSIYEDSCASHGPMSLGELELEPNSKLVLPTTLLTAQENDVNLPVAAEDFSQYQLKQNQDVKQVEHKPSQSYLRVRNKSDIAPSQQQVSPGDMDRTQIELNPYLTCVFSGGKAVPLSASQMPPAKMSVMLPSVNLEDCSQSLSLSTMQEDMESSGADTF

SEQ ID NO: 46734 - protein, 659 aa, Homo sapiens
APGRFHVGSAESMLHVRPGGYTPQRALINPFAPSRMPMKLTSNRRRWMHTFPVGMNPRTQNKDSLEDSVSTSPDPILTLSAPPVVPGFCCTVGVDWKSLTTPACLPLTTDYFPDRQGLQNDYTEGCYDLLPEADIDRRDEDGVQMTAQQVFEEFICQRLMQGYQIIVQPKTQKPNPAVPPPLSSSPLYSRGLVSRNRPEEEDQYWLSMGRTFHKVTLKDKMITVTRYLPKYPYESAQIHYTYSLCPSHSDSEFVSCWVEFSHERLEEYKWNYLDQYICSAGSEDFSLIESLKFWRTRFLLLPACVTATKRITEGEAHCDIYGDRPRADEDEWQLLDGFVRFVEGLNRIRRRHRSDRMMRKGTAMKGLQMTGPISTHSLESTAPPVGKKGTSALSALLEMEASQKCLGEQQAAVHGGKSSAQSAESSSVAMTPTYMDSPRKDGAFFMEFVRSPRTASSAFYPQVSVDQTATPMLDGTSLGICTGQSMDRGNSQTFGNSQNIGEQGYSSTNSSDSSSQQLVASSLTSSSTLTEILEAMKHPSTGVQLLSEQKGLSPYCFISAEVVHWLVNHVEGIQTQAMAIDIMQWPCSSPPPPGTQQEWTTSPASSASGLRWPLWQKSSCTLRFLPFSCPGCLAGQPPMQVGTAPLAEVLEDGARRQHF

SEQ ID NO: 46735 - protein, 180 aa, Homo sapiens
MAKPFFRLQKFLRRTQFLLFFLTAAYLMTGSLLLLQRVRVALPQGPRAPGPLQTLPVAAVALGVGLLDSRALHDPRVSPELLLGVDMLQSPLTRPRPGPRWLRSRNSELRQLRRRWFHHFMSDSQGPPALGPEAARPAIHSRGTYIGCFSDDGHERTLKGAVFYDLRKMTVSHCQDACAE

SEQ ID NO: 46736 - protein, 238 aa, Homo sapiens
MLLLVTSLLLCELPHPAFLLIPEKSDLRTVAPASSLNVRFDSRTMNLSWDCQENTTFSKCFLTDKKNRVVEPRLSNNECSCTFREICLHEGVTFEVHVNTSQRGFQQKLLYPNSGREGTAAQNFSCFIYNADLMNCTWARGPTAPRDVQYFLYIRNSKRRREIRCPYYIQDSGTHVGCHLDNLSGLTSRNYFLVNGTSREIGIQFFDSLLDTKKIERFNPPSNVTVRCNTTHCLVRWK

SEQ ID NO: 46737 - protein, 162 aa, Homo sapiens
MDNKKRLAYAIIQFLHDQLRHGGLSSDAQESLEVAIQCLETAFGVTVEDSDLALPQTLPEIFEAAATGKEMPQDLRSPARTPPSEEDSAEAERLKTEGNEQMKVENFEAAVHFYGKAIELNPANAVYFCNRAAAYSKLGNYAGAVQDCERAICIDPAYSKAY

SEQ ID NO: 46738 - protein, 116 aa, Homo sapiens
MGSRNSSSAGSGSGDPSEGLPRRGAGLRRSEEEEEEDEDVDLAQALLDSEEENDRAWDGRLGDRYNPPVDATPDTRELEFNEIKTQVELATGQLGLRRAAQKHSFPRMLHQRERGL

SEQ ID NO: 46739 - protein, 196 aa, Homo sapiens
MADSQLFCVAEERSGHCAVVDGNFLYVWGGYVEEQIFWGWHNDVHIFDTKTQTWFQPEIKGGVPPQPRAAHTCAVLGNKGYIFGGRVLQTRMNDLHYLNLDTWTWSGRITINGESPKHRSWHTLTPIADDKLFLCGGLSADNIPLSDGWIHNVTTNCWKQLTHLPKTRPRLWHTACLGKENEIMVFGGSKDDLLAL

SEQ ID NO: 46740 - protein, 636 aa, Homo sapiens
MNPYDRGSAFAIGSDGLCCQSREVKEWHGCRATKGLMKGKHYYEVSCHDQGLCRVGWSTMQASLDLGKKSHNKQFDNYGEEFTMHDTIGCYLDIDKGHVKFSKNGKDLGLAFEIPPHMKNQALFPACVLKNAELKFNFGEEEFKFPPKDGFVALSKAPDGYIVKSQHSGNAQVTQTKFLPNAPKALIVEPSRELAEQTLNNIKQFKKYIDNPKLRELLIIGGVAARDQLSVLENGVDIVVGTPGRLDDLVSTGKLNLSQVRFLVLDEADGLLSQGYSDFINRMHNQIPQVTSDGKRLQVIVCSATLHSFDVKKLSEKIMHFPTWVDLKGEDSVPDTVHHVVVPVNPKTDRLWERLGKSHIRTDDVHAKDNTRPGANSPEMWSEAIKILKGEYAVRAIKEHKMDQAIIFCRTKIDCDNLEQYFIQQGGGPDKKGHQFSCVCLHGDRKPHERKQNLERFKKGDVRFLICTDVAARGIDIHGVPYVINVTLPDEKQNYVHRIGRVGRAERMGLAISLVATEKEKVWYHVCSSRGKGCYNTRLKEDGGCTIWYNEMQLLSEIEEHLNCTISQVEPDIKVPVDEFDGKVTYGQKRAAGGGSYKGHVDILAPTVQELAALEKEAQTSFLHLGYLPNQLFRTF

SEQ ID NO: 46741 - protein, 196 aa, Homo sapiens
MGRFRGGLRCIKYLLLGFNLLFWLAGSAVIAFGLWFRFGGAIKELSSEDKSPEYFYVGLYVLVGAGALMMAVGFFGCCGAMRESQCVLGSAIRHVQTMYEEAYNDYLKDRGKGNGTLITFHSTFQCCGKESSEQVQPTCPKELLGHKNCIDEIETIISVKLQLIGIVGIGIAGLTIFGMIFSMVLCCAIRNSRDVI

SEQ ID NO: 46742 - protein, 139 aa, Homo sapiens
MVPWVRTMGQKLKQRLRLDVGREICRQYPLFCFLLLCLSAASLLLNRYIHILMIFWSFVAGVVTFYCSLGPDSLLPNIFFTIKYKPKQLGLQELFPQGHSCAVCGKVKCKRHRPSLLLENYQPWLDLKISSKVDASLSE

SEQ ID NO: 46743 - protein, 78 aa, Homo sapiens
MSKYKLIMLRHGEGAWNKENRFCSWVDQKLNSEGMEEARNCGKQLKALNFEFDLVFTSVLNRSIHTAWLILEELGQEW

SEQ ID NO: 46744 - protein, 35991 aa, Homo sapiens
MTTQAPTFTQPLQSVVVLEGSTATFEAHISGFPVPEVSWFRDGQVISTSTLPGVQISFSDGRAKLTIPAVTKANSGRYSLKATNGSGQATSTAELLVKAETAPPNFVQRLQSMTVRQGSQVRLQVRVTGIPTPVVKFYRDGAEIQSSLDFQISQEGDLYSLLIAEAYPEDSGTYSVNATNSVGRATSTAELLVQGEEEVPAKKTKTIVSTAQISESRQTRIEKKIEAHFDARSIATVEMVIDGAAGQQLPHKTPPRIPPKPKSRSPTPPSIAAKAQLARQQSPSPIRHSPSPVRHVRAPTPSPVRSVSPAARISTSPIRSVRSPLLMRKTQASTVATGPEVPPPWKQEGYVASSSEAEMRETTLTTSTQIRTEERWEGRYGVQEQVTISGAAGAAASVSASASYAAEAVATGAKEVKQDADKSAAVATVVAAVDMARVREPVISAVEQTAQRTTTTAVHIQPAQEQVRKEAEKTAVTKVVVAADKAKEQELKSRTKEVITTKQEQMHVTHEQIRKETEKTFVPKVVISAAKAKEQETRISEEITKKQKQVTQEAIRQETEITAASMVVVATAKSTKLETVPGAQEETTTQQDQMHLSYEKIMKETRKTVVPKVIVATPKVKEQDLVSRGREGITTKREQVQITQEKMRKEAEKTALSTIAVATAKAKEQETILRTRETMATRQEQIQVTHGKVDVGKKAEAVATVVAAVDQARVREPREPGHLEESYAQQTTLEYGYKERISAAKVAEPPQRPASEPHVVPKAVKPRVIQAPSETHIKTTDQKGMHISSQIKKTTDLTTERLVHVDKRPRTASPHFTVSKISVPKTEHGYEASIAGSAIATLQKELSATSSAQKITKSVKAPTVKPSETRVRAEPTPLPQFPFADTPDTYKSEAGVEVKKEVGVSITGTTVREERFEVLHGREAKVTETARVPAPVEIPVTPPTLVSGLKNVTVIEGESVTLECHISGYPSPTVTWYREDYQIESSIDFQITFQSGIARLMIREAFAEDSGRFTCSAVNEAGTVSTSCYLAVQVSEEFEKETTAVTEKFTTEEKRFVESRDVVMTDTSLTEEQAGPGEPAAPYFITKPVVQKLVEGGSVVFGCQVGGNPKPHVYWKKSGVPLTTGYRYKVSYNKQTGECKLVISMTFADDAGEYTIVVRNKHGETSASASLLEEADYELLMKSQQEMLYQTQVTAFVQEPKVGETAPGFVYSEYEKEYEKEQALIRKKMAKDTVVVRTYVEDQEFHISSFEERLIKEIEYRIIKTTLEELLEEDGEEKMAVDISESEAVESGFDSRIKNYRILEGMGVTFHCKMSGYPLPKIAWYKDGKRIKHGERYQMDFLQDGRASLRIPVVLPEDEGIYTAFASNIKGNAICSGKLYVEPAAPLGAPTYIPTLEPVSRIRSLSPRSVSRSPIRMSPARMSPARMSPARMSPARMSPGRRLEETDESQLERLYKPVFVLKPVSFKCLEGQTARFDLKVVGRPMPETFWFHDGQQIVNDYTHKVVIKEDGTQSLIIVPATPSDSGEWTVVAQNRAGRSSISVILTVEAVEHQVKPMFVEKLKNVNIKEGSRLEMKVRATGNPNPDIVWLKNSDIIVPHKYPKIRIEGTKGEAALKIDSTVSQDSAWYTATAINKAGRDTTRCKVNVEVEFAEPEPERKLIIPRGTYRAKEIAAPELEPLHLRYGQEQWEEGDLYDKEKQQKPFFKKKLTSLRLKRFGPAHFECRLTPIGDPTMVVEWLHDGKPLEAANRLRMINEFGYCSLDYGVAYSRDSGIITCRATNKYGTDHTSATLIVKDEKSLVEESQLPEGRKGLQRIEELERMAHEGALTGVTTDQKEKQKPDIVLYPEPVRVLEGETARFRCRVTGYPQPKVNWYLNGQLIRKSKRFRVRYDGIHYLDIVDCKSYDTGEVKVTAENPEGVIEHKVKLEIQQREDFRSVLRRAPEPRPEFHVHEPGKLQFEVQKVDRPVDTTETKEVVKLKRAERITHEKVPEESEELRSKFKRRTEEGYYEAITAVELKSRKKDESYEELLRKTKDELLHWTKELTEEEKKALAEEGKITIPTFKPDKIELSPSMEAPKIFERIQSQTVGQGSDAHFRVRVVGKPDPECEWYKNGVKIERSDRIYWYWPEDNVCELVIRDVTAEDSASIMVKAINIAGETSSHAFLLVQAKQLITFTQELQDVVAKEKDTMATFECETSEPFVKVKWYKDGMEVHEGDKYRMHSDRKVHFLSILTIDTSDAEDYSCVLVEDENVKTTAKLIVEGAVVEFVKELQDIEVPESYSGELECIVSPENIEGKWYHNDVELKSNGKYTITSRRGRQNLTVKDVTKEDQGEYSFVIDGKKTTCKLKMKPRPIAILQGLSDQKVCEGDIVQLEVKVSLESVEGVWMKDGQEVQPSDRVHIVIDKQSHMLLIEDMTKEDAGNYSFTIPALGLSTSGRVSVYSVDVITPLKDVNVIEGTKAVLECKVSVPDVTSVKWYLNDEQIKPDDRVQAIVKGTKQRLVINRTHASDEGPYKLIVGRVETNCNLSVEKIKIIRGLRDLTCTETQNVVFEVELSHSGIDVLWNFKDKEIKPSSKYKIEAHGKIYKLTVLNMMKDDEGKYTFYAGENMTSGKLTVAGGAISKPLTDQTVAESQEAVFECEVANPDSKGEWLRDGKHLPLTNNIRSESDGHKRRLIIAATKLDDIGEYTYKVATSKTSAKLKVEAVKIKKTLKNLTVTETQDAVFTVELTHPNVKGVQWIKNGVVLESNEKYAISVKGTIYSLRIKNCAIVDESVYGFRLGRLGASARLHVETVKIIKKPKDVTALENATVAFEVSVSHDTVPVKWFHKSVEIKPSDKHRLVSERKVHKLMLQNISPSDAGEYTAVVGQLECKAKLFVETLHITKTMKNIEVPETKTASFECEVSHFNVPSMWLKNGVEIEMSEKFKIVVQGKLHQLIIMNTSTEDSAEYTFVCGNDQVSATLTVTPIMITSMLKDINAEEKDTITFEVTVNYEGISYKWLKNGVEIKSTDKCQMRTKKLTHSLNIRNVHFGDAADYTFVAGKATSTATLYVEARHIEFRKHIKDIKVLEKKRAMFECEVSEPDITVQWMKDDQELQITDRIKIQKEKYVHRLLIPSTRMSDAGKYTVVAGGNVSTAKLFVEGRDVRIRSIKKEVQVIEKQRAVVEFEVNEDDVDAHWYKDGIEINFQVQERHKYVVERRIHRMFISETRQSDAGEYTFVAGRNRSSVTLYVNAPEPPQVLQELQPVTVQSGKPARFCAVISGRPQPKISWYKEEQLLSTGFKCKFLHDGQEYTLLLIEAFPEDAAVYTCEAKNDYGVATTSASLSVEVPEVVSPDQEMPVYPPAIITPLQDTVTSEGQPARFQCRVSGTDLKVSWYSKDKKIKPSRFFRMTQFEDTYQLEIAEAYPEDEGTYTFVASNAVGQVSSTANLSLEGFSKFEENTSNSQWHVSLSVSFKKEPLGQKPSFIQPLSSLRVHNGETVRFHARVSGIPKPEIQWFHNQQLILPTKDVVFHFEESTGMALMLIVDAYSEHAGQYSCKAANSAGEATCAATLTVTPKVQALDRQSSGKDVRESTKSQAVADSSFTKEESKISQKEIKSFQGSSYEYEVQVFESVSQSSIHTAASVQDTQLCHTASLSQIAESTELSKECAKESTGEAPKIFLHLQDVTVKCGDTAQFLCVLKDDSFIDVTWTHEGAKIEESERLKQSQNGNIQFLTICNVQLVDQGLYSCIVHNDCGERTTSAVLSVEGAPESILHERIEQEIEMEMKEFSSSFLSAEEEGLHSAELQLSKINETLELLSESPVYPTKFDSEKEGTGPIFIKEVSNADISMGDVATLSVTVIGIPKPKIQWFFNGVLLTPSADYKFVFDGDDHSLIILFTKLEDEGEYTCMASNDYGKTICSAYLKINSKGEGHKDTETESAVAKSLEKLGGPCPPHFLKELKPIRCAQGLPAIFEYTVVGEPAPTVTWFKENKQLCTSVYYTIIHNPNGSGTFIVNDPQREDSGLYICKAENMLGESTCAAELLVLLEDTDMTDTPCKAKSTPEAPEDFPQTPLKGPAVEALDSEQEIATFVKDTILKAALITEENQQLSYEHIAKANELSSQLPLGAQELQSILEQDKLTPESTREFLCINGSIHFQPLKEPSPNLQLQIVQSQKTFSKEGILMPEEPETQAVLSDTEKIFPSAMSIEQINSLTVEPLKTLLAEPEGNYPQSSIEPPMHSYLTSVAEEVLSPKEKTVSDTNREQRVTLQKQEAQSALILSQSLAEGHVESLQSPDVMISQVNYEPLVPSEHSCTEGGKILIESANPLENAGQDSAVRIEEGKSLRFPLALEEKQVLLKEEHSDNVVMPPDQIIESKREPVAIKKVQEVQGRDLLSKESLLSGIPEEQRLNLKIQICRALQAAVASEQPGLFSEWLRNIEKVEVEAVNITQEPRHIMCMYLVTSAKSVTEEVTIIIEDVDPQMANLKMELRDALCAIIYEEIDILTAEGPRIQQGAKTSLQEEMDSFSGSQKVEPITEPEVESKYLISTEEVSYFNVQSRVKYLDATPVTKGVASAVVSDEKQDESLKPSEEKEESSSESGTEEVATVKIQEAEGGLIKEDGPMIHTPLVDTVSEEGDIVHLTTSITNAKEVNWYFENKLVPSDEKFKCLQDQNTYTLVIDKVNTEDHQGEYVCEALNDSGKTATSAKLTVVKRAAPVIKRKIEPLEVALGHLAKFTCEIQSAPNVRFQWFKAGREIYESDKCSIRSSKYISSLEILRTQVVDCGEYTCKASNEYGSVSCTATLTVTEAYPPTFLSRPKSLTTFVGKAAKFICTVTGTPVIETIWQKDGAALSPSPNWRISDAENKHILELSNLTIQDRGVYSCKASNKFGADICQAELIIIDKPHFIKELEPVQSAINKKVHLECQVDEDRKVTVTWSKDGQKLPPGKDYKICFEDKIATLEIPLAKLKDSGTYVCTASNEAGSSSCSATVTVREPPSFVKKVDPSYLMLPGESARLHCKLKGSPVIQVTWFKNNKELSESNTVRMYFVNSEAILDITDVKVEDSGSYSCEAVNDVGSDSCSTEIVIKEPPSFIKTLEPADIVRGTNALLQCEVSGTGPFEISWFKDKKQIRSSKKYRLFSQKSLVCLEIFSFNSADVGEYECVVANEVGKCGCMATHLLKEPPTFVKKVDDLIALGGQTVTLQAAVRGSEPISVTWMKGQEVIREDGKIKMSFSNGVAVLIIPDVQISFGGKYTCLAENEAGSQTSVGELIVKEPAKIIERAELIQVTAGDPATLEYTVAGTPELKPKWYKDGRPLVASKKYRISFKNNVAQLKFYSAELHDSGQYTFEISNEVGSSSCETTFTVLDRDIAPFFTKPLRNVDSVVNGTCRLDCKIAGSLPMRVSWFKDGKEIAASDRYRIAFVEGTASLEIIRVDMNDAGNFTCRATNSVGSKDSSGALIVQEPPSFVTKPGSKDVLPGSAVCLKSTFQGSTPLTIRWFKGNKELVSGGSCYITKEALESSLELYLVKTSDSGTYTCKVSNVAGGVECSANLFVKEPATFVEKLEPSQLLKKGDATQLACKVTGTPPIKITWFANDREIKESSKHRMSFVESTAVLRLTDVGIEDSGEYMCEAQNEAGSDHCSSIVIVKESPYFTKEFKPIEVLKEYDVMLLAEVAGTPPFEITWFKDNTILRSGRKYKTFIQDHLVSLQILKFVAADAGEYQCRVTNEVGSSICSARVTLREPPSFIKKIESTSSLRGGTAAFQATLKGSLPITVTWLKDSDEITEDDNIRMTFENNVASLYLSGIEVKHDGKYVCQAKNDAGIQRCSALLSVKEPATITEEAVSIDVTQGDPATLQVKFSGTKEITAKWFKDGQELTLGSKYKISVTDTVSILKIISTEKKDSGEYTFEVQNDVGRSSCKARINVLDLIIPPSFTKKLKKMDSIKGSFIDLECIVAGSHPISIQWFKDDQEISASEKYKFSFHDNTAFLEISQLEGTDSGTYTCSATNKAGHNQCSGHLTVKEPPYFVEKPQSQDVNPNTRVQLKALVGGTAPMTIKWFKDNKELHSGAARSVWKDDTSTSLELFAAKATDSGTYICQLSNDVGTATSKATLFVKEPPQFIKKPSPVLVLRNGQSTTFECQITGTPKIRVSWYLDGNEITAIQKHGISFIDGLATFQISGARVENSGTYVCEARNDAGTASCSIELKVKEPPTFIRELKPVEVVKYSDVELECEVTGTPPFEVTWLKNNREIRSSKKYTLTDRVSVFNLHITKCDPSDTGEYQCIVSNEGGSCSCSTRVALKEPPSFIKKIENTTTVLKSSATFQSTVAGSPPISITWLKDDQILDEDDNVYISFVDSVATLQIRSVDNGHSGRYTCQAKNESGVERCYAFLLVQEPAQIVEKAKSVDVTEKDPMTLECVVAGTPELKVKWLKDGKQIVPSRYFSMSFENNVASFRIQSVMKQDSGQYTFKVENDFGSSSCDAYLRVLDQNIPPSFTKKLTKMDKVLGSSIHMECKVSGSLPISAQWFKDGKEISTSAKYRLVCHERSVSLEVNNLELEDTANYTCKVSNVAGDDACSGILTVKEPPSFLVKPGRQQAIPDSTVEFKAILKGTPPFKIKWFKDDVELVSGPKCFIGLEGSTSFLNLYSVDASKTGQYTCHVTNDVGSDSCTTMLLVTEPPKFVKKLEASKIVKAGDSSRLECKIAGSPEIRVVWFRNEHELPASDKYRMTFIDSVAVIQMNNLSTEDSGDFICEAQNPAGSTSCSTKVIVKEPPVFSSFPPIVETLKNAEVSLECELSGTPPFEVVWYKDKRQLRSSKKYKIASKNFHTSIHILNVDTSDIGEYHCKAQNEVGSDTCVCTVKLKEPPRFVSKLNSLTVVAGEPAELQASIEGAQPIFVQWLKEKEEVIRESENIRITFVENVATLQFAKAEPANAGKYICQIKNDGGMRENMATLMVLEPAVIVEKAGPMTVTVGETCTLECKVAGTPELSVEWYKDGKLLTSSQKHKFSFYNKISSLRILSVERQDAGTYTFQVQNNVGKSSCTAVVDVSDRAVPPSFTRRLKNTGGVLGASCILECKVAGSSPISVAWFHEKTKIVSGAKYQTTFSDNVCTLQLNSLDSSDMGNYTCVAANVAGSDECRAVLTVQEPPSFVKEPEPLEVLPGKNVTFTSVIRGTPPFKVNWFRGARELVKGDRCNIYFEDTVAELELFNIDISQSGEYTCVVSNNAGQASCTTRLFVKEPAAFLKRLSDHSVEPGKSIILESTYTGTLPISVTWKKDGFNITTSEKCNIVTTEKTCILEILNSTKRDAGQYSCEIENEAGRDVCGALVSTLEPPYFVTELEPLEAAVGDSVSLQCQVAGTPEITVSWYKGDTKLRPTPEYRTYFTNNVATLVFNKVNINDSGEYTCKAENSIGTASSKTVFRIQERQLPPSFARQLKDIEQTVGLPVTLTCRLNGSAPIQVCWYRDGVLLRDDENLQTSFVDNVATLKILQTDLSHSGQYSCSASNPLGTASSSARLTAREPKKSPFFDIKPVSIDVIAGESADFECHVTGAQPMRITWSKDNKEIRPGGNYTITCVGNTPHLRILKVGKGDSGQYTCQATNDVGKDMCSAQLSVKEPPKFVKKLEASKVAKQGESIQLECKISGSPEIKVSWFRNDSELHESWKYNMSFINSVALLTINEASAEDSGDYICEAHNGVGDASCSTALTVKAPPVFTQKPSPVGALKGSDVILQCEISGTPPFEVVWVKDRKQVRNSKKFKITSKHFDTSLHILNLEASDVGEYHCKATNEVGSDTCSCSVKFKEPPRFVKKLSDTSTLIGDAVELRAIVEGFQPISVVWLKDRGEVIRESENTRISFIDNIATLQLGSPEASNSGKYICQIKNDAGMRECSAVLTVLEPARIIEKPEPMTVTTGNPFALECVVTGTPELSAKWFKDGRELSADSKHHITFINKVASLKIPCAEMSDKGLYSFEVKNSVGKSNCTVSVHVSDRIVPPSFIRKLKDVNAILGASVVLECRVSGSAPISVGWFQDGNEIVSGPKCQSSFSENVCTLNLSLLEPSDTGIYTCVAANVAGSDECSAVLTVQEPPSFEQTPDSVEVLPGMSLTFTSVIRGTPPFKVKWFKGSRELVPGESCNISLEDFVTELELFEVQPLESGDYSCLVTNDAGSASCTTHLFVKEPATFVKRLADFSVETGSPIVLEATYTGTPPISVSWIKDEYLISQSERCSITMTEKSTILEILESTIEDYAQYSCLIENEAGQDICEALVSVLEPPYFIEPLEHVEAVIGEPATLQCKVDGTPEIRISWYKEHTKLRSAPAYKMQFKNNVASLVINKVDHSDVGEYSCKADNSVGAVASSAVLVIKARKLPPFFARKLKDVHETLGFPVAFECRINGSEPLQVSWYKDGVLLKDDANLQTSFVHNVATLQILQTDQSHIGQYNCSASNPLGTASSSAKLILSEHEVPPFFDLKPVSVDLALGESGTFKCHVTGTAPIKITWAKDNREIRPGGNYKMTLVENTATLTVLKVGKGDAGQYTCYASNIAGKDSCSAQLGVQEPPRFIKKLEPSRIVKQDEFTRYECKIGGSPEIKVLWYKDETEIQESSKFRMSFVDSVAVLEMHNLSVEDSGDYTCEAHNAAGSASSSTSLKVKEPPIFRKKPHPIETLKGADVHLECELQGTPPFHVSWYKDKRELRSGKKYKIMSENFLTSIHILNVDAADIGEYQCKATNDVGSDTCVGSIALKAPPRFVKKLSDISTVVGKEVQLQTTIEGAEPISVVWFKDKGEIVRESDNIWISYSENIATLQFSRVEPANAGKYTCQIKNDAGMQECFATLSVLEPATIVEKPESIKVTTGDTCTLECTVAGTPELSTKWFKDGKELTSDNKYKISFFNKVSGLKIINVAPSDSGVYSFEVQNPVGKDSCTASLQVSDRTVPPSFTRKLKETNGLSGSSVVMECKVYGSPPISVSWFHEGNEISSGRKYQTTLTDNTCALTVNMLEESDSGDYTCIATNMAGSDECSAPLTVREPPSFVQKPDPMDVLTGTNVTFTSIVKGTPPFSVSWFKGSSELVPGDRCNVSLEDSVAELELFDVDTSQSGEYTCIVSNEAGKASCTTHLYIKAPAKFVKRLNDYSIEKGKPLILEGTFTGTPPISVTWKKNGINVTPSQRCNITTTEKSAILEIPSSTVEDAGQYNCYIENASGKDSCSAQILILEPPYFVKQLEPVKVSVGDSASLQCQLAGTPEIGVSWYKGDTKLRPTTTYKMHFRNNVATLVFNQVDINDSGEYICKAENSVGEVSASTFLTVQEQKLPPSFSRQLRDVQETVGLPVVFDCAISGSEPISVSWYKDGKPLKDSPNVQTSFLDNTATLNIFKTDRSLAGQYSCTATNPIGSASSSARLILTEGKNPPFFDIRLAPVDAVVGESADFECHVTGTQPIKVSWAKDSREIRSGGKYQISYLENSAHLTVLKVDKGDSGQYTCYAVNEVGKDSCTAQLNIKERLIPPSFTKRLSETVEETEGNSFKLEGRVAGSQPITVAWYKNNIEIQPTSNCEITFKNNTLVLQVRKAGMNDAGLYTCKVSNDAGSALCTSSIVIKEPKKPPVFDQHLTPVTVSEGEYVQLSCHVQGSEPIRIQWLKAGREIKPSDRCSFSFASGTAVLELRDVAKADSGDYVCKASNVAGSDTTKSKVTIKDKPAVAPATKKAAVDGRLFFVSEPQSIRVVEKTTATFIAKVGGDPIPNVKWTKGKWRQLNQGGRVFIHQKGDEAKLEIRDTTKTDSGLYRCVAFNEHGEIESNVNLQVDERKKQEKIEGDLRAMLKKTPILKKGAGEEEEIDIMELLKNVDPKEYEKYARMYGITDFRGLLQAFELLKQSQEEETHRLEIEEIERSERDEKEFEELVSFIQQRLSQTEPVTLIKDIENQTVLKDNDAVFEIDIKINYPEIKLSWYKGTEKLEPSDKFEISIDGDRHTLRVKNCQLKDQGNYRLVCGPHIASAKLTVIEPAWERHLQDVTLKEGQTCTMTCQFSVPNVKSEWFRNGRILKPQGRHKTEVEHKVHKLTIADVRAEDQGQYTCKYEDLETSAELRIEAEPIQFTKRIQNIVVSEHQSATFECEVSFDDAIVTWYKGPTELTESQKYNFRNDGRCHYMTIHNVTPDDEGVYSVIARLEPRGEARSTAELYLTTKEIKLELKPPDIPDSRVPIPTMPIRAVPPEEIPPVVAPPIPLLLPTPEEKKPPPKRIEVTKKAVKKDAKKVVAKPKEMTPREEIVKKPPPPTTLIPAKAPEIIDVSSKAEEVKIMTITRKKEVQKEKEAVYEKKQAVHKEKRVFIESFEEPYDELEVEPYTEPFEQPYYEEPDEDYEEIKVEAKKEVHEEWEEDFEEGQEYYEREEGYDEGEEEWEEAYQEREVIQVQKEVYEESHERKVPAKVPEKKAPPPPKVIKKPVIEKIEKTSRRMEEEKVQVTKVPEVSKKIVPQKPSRTPVQEEVIEVKVPAVHTKKMVISEEKMFFASHTEEEVSVTVPEVQKEIVTEEKIHVAISKRVEPPPKVPELPEKPAPEEVAPVPIPKKVEPPAPKVPEVPKKPVPEEKKPVPVPKKEPAAPPKVPEVPKKPVPEEKIPVPVAKKKEAPPAKVPEVQKGVVTEEKITIVTQREESPPPAVPEIPKKKVPEERKPVPRKEEEVPPPPKVPALPKKPVPEEKVAVPVPVAKKAPPPRAEVSKKTVVEEKRFVAEEKLSFAVPQRVEVTRHEVSAEEEWSYSEEEEGVSISVYREEEREEEEEAEVTEYEVMEEPEEYVVEEKLHIISKRVEAEPAEVTERQEKKIVLKPKIPAKIEEPPPAKVPEAPKKIVPEKKVPAPVPKKEKVPPPKVPEEPKKPVPEKKVPPKVIKMEEPLPAKVTERHMQITQEEKVLVAVTKKEAPPKARVPEEPKRAVPEEKVLKLKPKREEEPPAKVTEFRKRVVKEEKVSIEAPKREPQPIKEVTIMEEKERAYTLEEEAVSVQREEEYEEYEEYDYKEFEEYEPTEEYDQYEEYEEREYERYEEHEEYITEPEKPIPVKPVPEEPVPTKPKAPPAKVLKKAVPEEKVPVPIPKKLKPPPPKVPEEPKKVFEEKIRISITKREKEQVTEPAAKVPMKPKRVVAEEKVPVPRKEVAPPVRVPEVPKELEPEEVAFEEEVVTHVEEYLVEEEEEYIHEEEEFITEEEVVPVIPVKVPEVPRKPVPEEKKPVPVPKKKEAPPAKVPEVPKKPEEKVPVLIPKKEKPPPAKVPEVPKKPVPEEKVPVPVPKKVEAPPAKVPEVPKKPVPEKKVPVPAPKKVEAPPAKVPEVPKKLIPEEKKPTPVPKKVEAPPPKVPKKREPVPVPVALPQEEEVLFEEEIVPEEEVLPEEEEVLPEEEEVLPEEEEVLPEEEEIPPEEEEVPPEEEYVPEEEEFVPEEEVLPEVKPKVPVPAPVPEVPKKPVPEKKVPVPAPKKVEPPPPPKVPEIKKKVTEKKVVIPKKEEAPPAKVSVVPKKPEPEKKVPPPGLKKAVAPPAKVPEVPKKVEEKRIILPKEEEVLPVEVTEEPEEEPISEEEIPEEPPSIEEVEEVAPPRVPEVIKKAVPEAPTPVPKKVEAPPAKVSKKIPEEKVPVPVQKKEAPPAKVPEVPKKVPEKKVLVPKKEAVPPAKGRTVLEEKVSVAFRQEVVVKERLELEVVEAEVEEIPEEEEFHEVEEYFEEGEFHEVEEFIKLEQHRVEEEHRVEKVHRVIEVFEAEEVEVFEKPKAPPKGPEISEKIIPPKKPPTKVVPRKEPPAKVPEVPKKIVVEEKVRVPEEPRVPPTKAPEVPKKIVPEEKVREAVLKKPEVPPAKVPGMPKKSVQEEKSPIVISEDTEMYIYEASEEAVLEEKVLVTQPQKTKPKLAKVPEPPKKVVPEDKIYVTIPKKRETPATKEPDTTRGIFPEVEPPEAIPEIPEHPPTEEFEVFKEVIPEGETPIVKRRKTPSPTVPESPREIVPVKETPMAAPLEIEIPPTKAPEAMKEVVPEMKIFEDVPEEPETPRMKTPEAPQEIIPAKTVPSKKREPPSVKVPEALQEIVPEKKTLVVPLRKPEVLPDEVPEALREVVPEKKVHPPQRAEVVPVKVHEAPKEIIPEKKVSVVPPKKPEVPPVKVPEASKEVIREEKVPLAPPKEPEVPPVKVPEPPKEVVPEKKAPVAPPKEPEVPPVKVPEAPKEVVPEKKVPVPPPKKPEVPPTKVPEVPKAAVPEKKLPEAIPPKPESPPPEVPEVLPPKEVVPEKKVPVPPAKKPEAPPPKVPEAPKEVVLEKKASVAVPKKPEAPRAKVPEAAQEVVPEKKIPKAPIKKPEAPAVTVPEVPQEATEKEIPVAPPKKPEAPIVPVPEAQEVVPEKKVPKAPPTKPEAPPATVPEVPQEIVPEKKTLVLPKKPEVPPVTVPEAPKEVVLEKKVPSAPPKKPEVPPVKVPEAPKEVVPEKKVPVPPPKKPEVPPTKVPEVPKAAVPEKKVPEAIPPKPESPPPEVPEVLPPKEVVPEKKVPVPPAKKPEAPPPKVPEAPKEVVLEKKASVAVPKKPEAPRAKVPEAAQEVVPEKKIPKAPIKKPEAPAVTVPEVPQEAAEKEIPVAPPKKPEAPIVPVPEAQEVVPEKKVPKAPPTKPEAPPATVPEVPQEIVPEKKTLVLPKKPEVPPVTVPEAPKEVVLEKKVPSTPPKKPEVPPVKVPEAPKEVVPEKKVPVPPPKKPEVPPTKVPEVPKAAVPEKKVPEAIPPKPESPPPEVPEVLPPKEVVPEKKVPVPPAKKPEAPPPKVPEAPKEVVLEKKVSVAVPKKPEAPRAKVPEAAQEVVPEKKIPKAPIKKPEAPAVTVPEVPQEAAEKEIPVAPPKKPEAPIVPVPEAQEVVPEKKVPKAPPTKPEAPPATVPEVPQEIVPEKKTLVLPKKPEVPPVTVPEAPKEVVLEKKVPLAPPKKPEVPPVKVPEAPKEVVPEKKVPVTPPKKPEVPPVKVPEAPIEVVPEKKMPLAPPKKPEVPPVKVPEAPKEVVPEKKVPSAPPKKPEVPPVKVPEAPKEVVPEKKVPAAPPKKPEVTPVKVPEAPKEVVPEKKVPVPPPKKPEVPPTKVPEVPKVAVPEKKVPEAIPPKPESPPPEVFEEPEEVALEEPPAEVVEEPEPAAPPQVTVPPKKPVPEKKAPAVVAKKPELPPVKVPEVPKEVVPEKKVPLVVPKKPEAPPAKVPEVPKEVVPEKKVAVPKKPEVPPAKVPEVPKKPVLEEKPAVPVPERAESPPPEVYEEPEEIAPEEEIAPEEEKPVPVAEEEEPEVPPPAVPEEPKKIIPEKKVPVIKKPEAPPPKEPEMPKKVVPVKKVPTVKKPETPAAKVPEVPKKLVPVKKEPVPVTKKPEVLPEKVPKVPEKIIPEKEVSVPIPAEPEVPPAEVEETPEEIIYEEKASITIGRKETPPVEEREIEKYIKPEEPEPEPQPEEIPVKEPEPEKVIEKPKLKPRPPPPPPAPPKEDVKEKIFQLKAIPKKKVPEKPQVPEKVELTPLKVPGGEKKVRKLLPERKPEPKEEVVLKSVLRKRPEEEEPKVEPKKLEKVKKPAVPEPPPPKPVEEVEVPTVTKRERKIPEPTKVPEIKPAIPLPAPEPKPKPEAEVKTIKPPPVEPEPTPIAAPVTVPVVGKKAEAKAPKEEAAKPKGPIKGVPKKTPSPIEAERRKLRPGSGGEKPPDEAPFTYQLKAVPLKFVKEIKDIILTESEFVGSSAIFECLVSPSTAITTWMKDGSNIRESPKHRFIADGKDRKLHIIDVQLSDAGEYTCVLRLGNKEKTSTAKLVVEELPVRFVKTLEEEVTVVKGQPLYLSCELNKERDVVWRKDGKIVVEKPGRIVPGVIGLMRALTINDADDTDAGTYTVTVENANNLECSSCVKVVEVIRDWLVKPIRDQHVKPKGTAIFACDIAKDTPNIKWFKGYDEIPAEPNDKTEILRDGNHLYLKIKNAMPEDIAEYAVEIEGKRYPAKLTLGEREVELLKPIEDVTIYEKESASFDAEISEADIPGQWKLKGELLRPSPTCEIKAEGGKRFLTLHKVKLDQAGEVLYQALNAITTAILTVKEIELDFAVPLKDVTVPERRQARFECVLTREANVIWSKGPDIIKSSDKFDIIADGKKHILVINDSQFDDEGVYTAEVEGKKTSARLFVTGIRLKFMSPLEDQTVKEGETATFVCELSHEKMHVVWFKNDAKLHTSRTVLISSEGKTHKLEMKEVTLDDISQIKAQVKELSSTAQLKVLEADPYFTVKLHDKTAVEKDEITLKCEVSKDVPVKWFKDGEEIVPSPKYSIKADGLRRILKIKKADLKDKGEYVCDCGTDKTKANVTVEARLIKVEKPLYGVEVFVGETAHFEIELSEPDVHGQWKLKGQPLTASPDCEIIEDGKKHILILHNCQLGMTGEVSFQAANAKSAANLKVKELPLIFITPLSDVKVFEKDEAKFECEVSREPKTFRWLKGTQEITGDDRFELIKDGTKHSMVIKSAAFEDEAKYMFEAEDKHTSGKLIIEGIRLKFLTPLKDVTAKEKESAVFTVELSHDNIRVKWFKNDQRLHTTRSVSMQDEGKTHSITFKDLSIDDTSQIRVEAMGMSSEAKLTVLEGDPYFTGKLQDYTGVEKDEVILQCEISKADAPVKWFKDGKEIKPSKNAVIKADGKKRMLILKKALKSDIGQYTCDCGTDKTSGKLDIEDREIKLVRPLHSVEVMETETARFETEISEDDIHANWKLKGEALLQTPDCEIKEEGKIHSLVLHNCRLDQTGGVDFQAANVKSSAHLRVKPRVIGLLRPLKDVTVTAGETATFDCELSYEDIPVEWYLKGKKLEPSDKVVPRSEGKVHTLTLRDVKLEDAGEVQLTAKDFKTHANLFVKEPPVEFTKPLEDQTVEEGATAVLECEVSRENAKVKWFKNGTEILKSKKYEIVADGRVRKLVIHDCTPEDIKTYTCDAKDFKTSCNLNVVPPHVEFLRPLTDLQVREKEMARFECELSRENAKVKWFKDGAEIKKGKKYDIISKGAVRILVINKCLLDDEAEYSCEVRTARTSGMLTVLEEEAVFTKNLANIEVSETDTIKLVCEVSKPGAEVIWYKGDEEIIETGRYEILTEGRKRILVIQNAHLEDAGNYNCRLPSSRTDGKVKVHELAAEFISKPQNLEILEGEKAEFVCSISKESFPVQWKRDDKTLESGDKYDVIADGKKRVLVVKDATLQDMGTYVVMVGAARAAAHLTVIEKLRIVVPLKDTRVKEQQEVVFNCEVNTEGAKAKWFRNEEAIFDSSKYIILQKDLVYTLRIRDAHLDDQANYNVSLTNHRGENVKSAANLIVEEEDLRIVEPLKDIETMEKKSVTFWCKVNRLNVTLKWTKNGEEVPFDNRVSYRVDKYKHMLTIKDCGFPDEGEYIVTAGQDKSVAELLIIEAPTEFVEHLEDQTVTEFDDAVFSCQLSREKANVKWYRNGREIKEGKKYKFEKDGSIHRLIIKDCRLDDECEYACGVEDRKSRARLFVEEIPVEIIRPPQDILEAPGADVVFLAELNKDKVEVQWLRNNMVVVQGDKHQMMSEGKIHRLQICDIKPRDQGEYRFIAKDKEARAKLELAAAPKIKTADQDLVVDVGKPLTMVVPYDAYPKAEAEWFKENEPLSTKTIDTTAEQTSFRILEAKKGDKGRYKIVLQNKHGKAEGFINLKVIDVPGPVRNLEVTETFDGEVSLAWEEPLTDGGSKIIGYVVERRDIKRKTWVLATDRAESCEFTVTGLQKGGVEYLFRVSARNRVGTGEPVETDNPVEARSKYDVPGPPLNVTITDVNRFGVSLTWEPPEYDGGAEITNYVIELRDKTSIRWDTAMTVRAEDLSATVTDVVEGQEYSFRVRAQNRIGVGKPSAATPFVKVADPIERPSPPVNLTSSDQTQSSVQLKWEPPLKDGGSPILGYIIERCEEGKDNWIRCNMKLVPELTYKVTGLEKGNKYLYRVSAENKAGVSDPSEILGPLTADDAFVEPTMDLSAFKDGLEVIVPNPITILVPSTGYPRPTATWCFGDKVLETGDRVKMKTLSAYAELVISPSERSDKGIYTLKLENRVKTISGEIDVNVIARPSAPKELKFGDITKDSVHLTWEPPDDDGGSPLTGYVVEKREVSRKTWTKVMDFVTDLEFTVPDLVQGKEYLFKVCARNKCGPGEPAYVDEPVNMSTPATVPDPPENVKWRDRTANSIFLTWDPPKNDGGSRIKGYIVERCPRGSDKWVACGEPVAETKMEVTGLEEGKWYAYRVKALNRQGASKPSRPTEEIQAVDTQEAPEIFLDVKLLAGLTVKAGTKIELPATVTGKPEPKITWTKADMILKQDKRITIENVPKKSTVTIVDSKRSDTGTYIIEAVNVCGRATAVVEVNVLDKPGPPAAFDITDVTNESCLLTWNPPRDDGGSKITNYVVERRATDSEVWHKLSSTVKDTNFKATKLIPNKEYIFRVAAENMYGVGEPVQASPITAKYQFDPPGPPTRLEPSDITKDAVTLTWCEPDDDGGSPITGYWVERLDPDTDKWVRCNKMPVKDTTYRVKGLTNKKKYRFRVLAENLAGPGKPSKSTEPILIKDPIDPPWPPGKPTVKDVGKTSVRLNWTKPEHDGGAKIESYVIEMLKTGTDEWVRVAEGVPTTQHLLPGLMEGQEYSFRVRAVNKAGESEPSEPSDPVLCREKLYPPSPPRWLEVINITKNTADLKWTVPEKDGGSPITNYIVEKRDVRRKGWQTVDTTVKDTKCTVTPLTEGSLYVFRVAAENAIGQSDYTEIEDSVLAKDTFTTPGPPYALAVVDVTKRHVDLKWEPPKNDGGRPIQRYVIEKKERLGTRWVKAGKTAGPDCNFRVTDVIEGTEVQFQVRAENEAGVGHPSEPTEILSIEDPTSPPSPPLDLHVTDAGRKHIAIAWKPPEKNGGSPIIGYHVEMCPVGTEKWMRVNSRPIKDLKFKVEEGVVPDKEYVLRVRAVNAIGVSEPSEISENVVAKDPDCKPTIDLETHDIIVIEGEKLSIPVPFRAVPVPTVSWHKDGKEVKASDRLTMKNDHISAHLEVPKSVRADAGIYTITLENKLGSATASINVKVIGLPGPCKDIKASDITKSSCKLTWEPPEFDGGTPILHYVLERREAGRRTYIPVMSGENKLSWTVKDLIPNGEYFFRVKAVNKVGGGEYIELKNPVIAQDPKQPPDPPVDVEVHNPTAEAMTITWKPPLYDGGSKIMGYIIEKIAKGEERWKRCNEHLVPILTYTAKGLEEGKEYQFRVRAENAAGISEPSRATPPTKAVDPIDAPKVILRTSLEVKRGDEIALDASISGSPYPTITWIKDENVIVPEEIKKRAAPLVRRRKGEVQEEEPFVLPLTQRLSIDNSKKGESQLRVRDSLRPDHGLYMIKVENDHGIAKAPCTVSVLDTPGPPINFVFEDIRKTSVLCKWEPPLDDGGSEIINYTLEKKDKTKPDSEWIVVTSTLRHCKYSVTKLIEGKEYLFRVRAENRFGPGPPCVSKPLVAKDPFGPPDAPDKPIVEDVTSNSMLVKWNEPKDNGSPILGYWLEKREVNSTHWSRVNKSLLNALKANVDGLLEGLTYVFRVCAENAAGPGKFSPPSDPKTAHDPISPPGPPIPRVTDTSSTTIELEWEPPAFNGGGEIVGYFVDKQLVGTNEWSRCTEKMIKVRQYTVKEIREGADYKLRVSAVNAAGEGPPGETQPVTVAEPQEPPAVELDVSVKGGIQIMAGKTLRIPAVVTGRPVPTKVWTKEEGELDKDRVVIDNVGTKSELIIKDALRKDHGRYVITATNSCGSKFAAARVEVFDVPGPVLDLKPVVTNRKMCLLNWSDPEDDGGSEITGFIIERKDAKMHTWRQPIETERSKCDITGLLEGQEYKFRVIAKNKFGCGPPVEIGPILAVDPLGPPTSPERLTYTERTKSTITLDWKEPRSNGGSPIQGYIIEKRRHDKPDFERVNKRLCPTTSFLVENLDEHQMYEFRVKAVNEIGESEPSLPLNVVIQDDEVPPTIKLRLSVRGDTIKVKAGEPVHIPADVTGLPMPKIEWSKNETVIEKPTDALQITKEEVSRSEAKTELSIPKAVREDKGTYTVTASNRLGSVFRNVHVEVYDRPSPPRNLAVTDIKAESCYLTWDAPLDNGGSEITHYVIDKRDASRKKAEWEEVTNTAVEKRYGIWKLIPNGQYEFRVRAVNKYGISDECKSDKVVIQDPYRLPGPPGKPKVLARTKGSMLVSWTPPLDNGGSPITGYWLEKREEGSPYWSRVSRAPITKVGLKGVEFNVPRLLEGVKYQFRAMAINAAGIGPPSEPSDPEVAGDPIFPPGPPSCPEVKDKTKSSISLGWKPPAKDGGSPIKGYIVEMQEEGTTDWKRVNEPDKLITTCECVVPNLKELRKYRFRVKAVNEAGESEPSDTTGEIPATDIQEEPEVFIDIGAQDCLVCKAGSQIRIPAVIKGRPTPKSSWEFDGKAKKAMKDGVHDIPEDAQLETAENSSVIIIPECKRSHTGKYSITAKNKAGQKTANCRVKVMDVPGPPKDLKVSDITRGSCRLSWKMPDDDGGDRIKGYVIEKRTIDGKAWTKVNPDCGSTTFVVPDLLSEQQYFFRVRAENRFGIGPPVETIQRTTARDPIYPPDPPIKLKIGLITKNTVHLSWKPPKNDGGSPVTHYIVECLAWDPTGTKKEAWRQCNKRDVEELQFTVEDLVEGGEYEFRVKAVNAAGVSKPSATVGPVTVKDQTCPPSIDLKEFMEVEEGTNVNIVAKIKGVPFPTLTWFKAPPKKPDNKEPVLYDTHVNKLVVDDTCTLVIPQSRRSDTGLYTITAVNNLGTASKEMRLNVLGRPGPPVGPIKFESVSADQMTLSWFPPKDDGGSKITNYVIEKREANRKTWVHVSSEPKECTYTIPKLLEGHEYVFRIMAQNKYGIGEPLDSEPETARNLFSVPGAPDKPTVSSVTRNSMTVNWEEPEYDGGSPVTGYWLEMKDTTSKRWKRVNRDPIKAMTLGVSYKVTGLIEGSDYQFRVYAINAAGVGPASLPSDPATARDPIAPPGPPFPKVTDWTKSSADLEWSPPLKDGGSKVTGYIVEYKEEGKEEWEKGKDKEVRGTKLVVTGLKEGAFYKFRVRAVNIAGIGEPGEVTDVIEMKDRLVSPDLQLDASVRDRIVVHAGGVIRIIAYVSGKPPPTVTWNMNERTLPQEATIETTAISSSMVIKNCQRSHQGVYSLLAKNEAGERKKTIIVDVLDVPGPVGTPFLAHNLTNESCKLTWFSPEDDGGSPITNYVIEKRESDRRAWTPVTYTVTRQNATVQGLIQGKAYFFRIAAENSIGMGPFVETSEALVIREPITVPERPEDLEVKEVTKNTVTLTWNPPKYDGGSEIINYVLESRLIGTEKFHKVTNDNLLSRKYTVKGLKEGDTYEYRVSAVNIVGQGKPSFCTKPITCKDELAPPTLHLDFRDKLTIRVGEAFALTGRYSGKPKPKVSWFKDEADVLEDDRTHIKTTPATLALEKIKAKRSDSGKYCVVVENSTGSRKGFCQVNVVDRPGPPVGPVSFDEVTKDYMVISWKPPLDDGGSKITNYIIEKKEVGKDVWMPVTSASAKTTCKVSKLLEGKDYIFRIHAENLYGISDPLVSDSMKAKDRFRVPDAPDQPIVTEVTKDSALVTWNKPHDGGKPITNYILEKRETMSKRWARVTKDPIHPYTKFRVPDLLEGCQYEFRVSAENEIGIGDPSPPSKPVFAKDPIAKPSPPVNPEAIDTTCNSVDLTWQPPRHDGGSKILGYIVEYQKVGDEEWRRANHTPESCPETKYKVTGLRDGQTYKFRVLAVNAAGESDPAHVPEPVLVKDRLEPPELILDANMAREQHIKVGDTLRLSAIIKGVPFPKVTWKKEDRDAPTKARIDVTPVGSKLEIRNAAHEDGGIYSLTVENPAGSKTVSVKVLVLDKPGPPRDLEVSEIRKDSCYLTWKEPLDDGGSVITNYVVERRDVASAQWSPLSATSKKKSHFAKHLNEGNQYLFRVAAENQYGRGPFVETPKPIKALDPLHPPGPPKDLHHVDVDKTEVSLVWNKPDRDGGSPITGYLVEYQEEGTQDWIKFKTVTNLECVVTGLQQGKTYRFRVKAENIVGLGLPDTTIPIECQEKLVPPSVELDVKLIEGLVVKAGTTVRFPAIIRGVPVPTAKWTTDGSEIKTDEHYTVETDNFSSVLTIKNCLRRDTGEYQITVSNAAGSKTVAVHLTVLDVPGPPTGPINILDVTPEHMTISWQPPKDDGGSPVINYIVEKQDTRKDTWGVVSSGSSKTKLKIPHLQKGCEYVFRVRAENKIGVGPPLDSTPTVAKHKFSPPSPPGKPVVTDITENAATVSWTLPKSDGGSPITGYYMERREVTGKWVRVNKTPIADLKFRVTGLYEGNTYEFRVFAENLAGLSKPSPSSDPIKACRPIKPPGPPINPKLKDKSRETADLVWTKPLSDGGSPILGYVVECQKPGTAQWNRINKDELIRQCAFRVPGLIEGNEYRFRIKAANIVGEGEPRELAESVIAKDILHPPEVELDVTCRDVITVRVGQTIRILARVKGRPEPDITWTKEGKVLVREKRVDLIQDLPRVELQIKEAVRADHGKYIISAKNSSGHAQGSAIVNVLDRPGPCQNLKVTNVTKENCTISWENPLDNGGSEITNFIVEYRKPNQKGWSIVASDVTKRLIKANLLANNEYYFRVCAENKVGVGPTIETKTPILAINPIDRPGEPENLHIADKGKTFVYLKWRRPDYDGGSPNLSYHVERRLKGSDDWERVHKGSIKETHYMVDRCVENQIYEFRVQTKNEGGESDWVKTEEVVVKEDLQKPVLDLKLSGVLTVKAGDTIRLEAGVRGKPFPEVAWTKDKDATDLTRSPRVKIDTRADSSKFSLTKAKRSDGGKYVVTATNTAGSFVAYATVNVLDKPGPVRNLKIVDVSSDRCTVCWDPPEDDGGCEIQNYILEKCETKRMVWSTYSATVLTPGTTVTRLIEGNEYIFRVRAENKIGTGPPTESKPVIAKTKYDKPGRPDPPEVTKVSKEEMTVVWNPPEYDGGKSITGYFLEKKEKHSTRWVPVNKSAIPERRMKVQNLLPDHEYQFRVKAENEIGIGEPSLPSRPVVAKDPIEPPGPPTNFRVVDTTKHSITLGWGKPVYDGGAPIIGYVVEMRPKIADASPDEGWKRCNAAAQLVRKEFTVTSLDENQEYEFRVCAQNQVGIGRPAELKEAIKPKEILEPPEIDLDASMRKLVIVRAGCPIRLFAIVRGRPAPKVTWRKVGIDNVVRKGQVDLVDTMAFLVIPNSTRDDSGKYSLTLVNPAGEKAVFVNVRVLDTPGPVSDLKVSDVTKTSCHVSWAPPENDGGSQVTHYIVEKREADRKTWSTVTPEVKKTSFHVTNLVPGNEYYFRVTAVNEYGPGVPTDVPKPVLASDPLSEPDPPRKLEVTEMTKNSATLAWLPPLRDGGAKIDGYITSYREEEQPADRWTEYSVVKDLSLVVTGLKEGKKYKFRVAARNAVGVSLPREAEGVYEAKEQLLPPKILMPEQITIKAGKKLRIEAHVYGKPHPTCKWKKGEDEVVTSSHLAVHKADSSSILIIKDVTRKDSGYYSLTAENSSGTDTQKIKVVVMDAPGPPQPPFDISDIDADACSLSWHIPLEDGGSNITNYIVEKCDVSRGDWVTALASVTKTSCRVGKLIPGQEYIFRVRAENRFGISEPLTSPKMVAQFPFGVPSEPKNARVTKVNKDCIFVAWDRPDSDGGSPIIGYLIERKERNSLLWVKANDTLVRSTEYPCAGLVEGLEYSFRIYALNKAGSSPPSKPTEYVTARMPVDPPGKPEVIDVTKSTVSLIWARPKHDGGSKIIGYFVEACKLPGDKWVRCNTAPHQIPQEEYTATGLEEKAQYQFRAIARTAVNISPPSEPSDPVTILAENVPPRIDLSVAMKSLLTVKAGTNVCLDATVFGKPMPTVSWKKDGTLLKPAEGIKMAMQRNLCTLELFSVNRKDSGDYTITAENSSGSKSATIKLKVLDKPGPPASVKINKMYSDRAMLSWEPPLEDGGSEITNYIVDKRETSRPNWAQVSATVPITSCSVEKLIEGHEYQFRICAENKYGVGDPVFTEPAIAKNPYDPPGRCDPPVISNITKDHMTVSWKPPADDGGSPITGYLLEKRETQAVNWTKVNRKPIIERTLKATGLQEGTEYEFRVTAINKAGPGKPSDASKAAYARDPQYPPGPPAFPKVYDTTRSSVSLSWGKPAYDGGSPIIGYLVEVKRADSDNWVRCNLPQNLQKTRFEVTGLMEDTQYQFRVYAVNKIGYSDPSDVPDKHYPKDILIPPEGELDADLRKTLILRAGVTMRLYVPVKGRPPPKITWSKPNVNLRDRIGLDIKSTDFDTFLRCENVNKYDAGKYILTLENSCGKKEYTIVVKVLDTPGPPVNVTVKEISKDSAYVTWEPPIIDGGSPIINYVVQKRDAERKSWSTVTTECSKTSFRVANLEEGKSYFFRVFAENEYGIGDPGETRDAVKASQTPGPVVDLKVRSVSKSSCSIGWKKPHSDGGSRIIGYVVDFLTEENKWQRVMKSLSLQYSAKDLTEGKEYTFRVSAENENGEGTPSEITVVARDDVVAPDLDLKGLPDLCYLAKENSNFRLKIPIKGKPAPSVSWKKGEDPLATDTRVSVESSAVNTTLIVYDCQKSDAGKYTITLKNVAGTKEGTISIKVVGKPGIPTGPIKFDEVTAEAMTLKWAPPKDDGGSEITNYILEKRDSVNNKWVTCASAVQKTTFRVTRLHEGMEYTFRVSAENKYGVGEGLKSEPIVARHPFDVPDAPPPPNIVDVRHDSVSLTWTDPKKTGGSPITGYHLEFKERNSLLWKRANKTPIRMRDFKVTGLTEGLEYEFRVMAINLAGVGKPSLPSEPVVALDPIDPPGKPEVINITRNSVTLIWTEPKYDGGHKLTGYIVEKRDLPSKSWMKANHVNVPECAFTVTDLVEGGKYEFRIRAKNTAGAISAPSESTETIICKDEYEAPTIVLDPTIKDGLTIKAGDTIVLNAISILGKPLPKSSWSKAGKDIRPSDITQITSTPTSSMLTIKYATRKDAGEYTITATNPFGTKVEHVKVTVLDVPGPPGPVEISNVSAEKATLTWTPPLEDGGSPIKSYILEKRETSRLLWTVVSEDIQSCRHVATKLIQGNEYIFRVSAVNHYGKGEPVQSEPVKMVDRFGPPGPPEKPEVSNVTKNTATVSWKRPVDDGGSEITGYHVERREKKSLRWVRAIKTPVSDLRCKVTGLQEGSTYEFRVSAENRAGIGPPSEASDSVLMKDAAYPPGPPSNPHVTDTTKKSASLAWGKPHYDGGLEITGYVVEHQKVGDEAWIKDTTGTALRITQFVVPDLQTKEKYNFRISAINDAGVGEPAVIPDVEIVEREMAPDFELDAELRRTLVVRAGLSIRIFVPIKGRPAPEVTWTKDNINLKNRANIENTESFTLLIIPECNRYDTGKFVMTIENPAGKKSGFVNVRVLDTPGPVLNLRPTDITKDSVTLHWDLPLIDGGSRITNYIVEKREATRKSYSTATTKCHKCTYKVTGLSEGCEYFFRVMAENEYGIGEPTETTEPVKASEAPSPPDSLNIMDITKSTVSLAWPKPKHDGGSKITGYVIEAQRKGSDQWTHITTVKGLECVVRNLTEGEEYTFQVMAVNSAGRSAPRESRPVIVKEQTMLPELDLRGIYQKLVIAKAGDNIKVEIPVLGRPKPTVTWKKGDQILKQTQRVNFETTATSTILNINECVRSDSGPYPLTARNIVGEVGDVITIQVHDIPGPPTGPIKFDEVSSDFVTFSWDPPENDGGVPISNYVVEMRQTDSTTWVELATTVIRTTYKATRLTTGLEYQFRVKAQNRYGVGPGITSACIVANYPFKVPGPPGTPQVTAVTKDSMTISWHEPLSDGGSPILGYHVERKERNGILWQTVSKALVPGNIFKSSGLTDGIAYEFRVIAENMAGKSKPSKPSEPMLALDPIDPPGKPVPLNITRHTVTLKWAKPEYTGGFKITSYIVEKRDLPNGRWLKANFSNILENEFTVSGLTEDAAYEFRVIAKNAAGAISPPSEPSDAITCRDDVEAPKIKVDVKFKDTVILKAGEAFRLEADVSGRPPPTMEWSKDGKELEGTAKLEIKIADFSTNLVNKDSTRRDSGAYTLTATNPGGFAKHIFNVKVLDRPGPPEGPLAVTEVTSEKCVLSWFPPLDDGGAKIDHYIVQKRETSRLAWTNVASEVQVTKLKVTKLLKGNEYIFRVMAVNKYGVGEPLESEPVLAVNPYGPPDPPKNPEVTTITKDSMVVCWGHPDSDGGSEIINYIVERRDKAGQRWIKCNKKTLTDLRYKVSGLTEGHEYEFRIMAENAAGISAPSPTSPFYKACDTVFKPGPPGNPRVLDTSRSSISIAWNKPIYDGGSEITGYMVEIALPEEDEWQIVTPPAGLKATSYTITGLTENQEYKIRIYAMNSEGLGEPALVPGTPKAEDRMLPPEIELDADLRKVVTIRACCTLRLFVPIKGRPAPEVKWARDHGESLDKASIESTSSYTLLIVGNVNRFDSGKYILTVENSSGSKSAFVNVRVLDTPGPPQDLKVKEVTKTSVTLTWDPPLLDGGSKIKNYIVEKRESTRKAYSTVATNCHKTSWKVDQLQEGCSYYFRVLAENEYGIGLPAETAESVKASERPLPPGKITLMDVTRNSVSLSWEKPEHDGGSRILGYIVEMQTKGSDKWATCATVKVTEATITGLIQGEEYSFRVSAQNEKGISDPRQLSVPVIAKDLVIPPAFKLLFNTFTVLAGEDLKVDVPFIGRPTPAVTWHKDNVPLKQTTRVNAESTENNSLLTIKDACREDVGHYVVKLTNSAGEAIETLNVIVLDKPGPPTGPVKMDEVTADSITLSWGPPKYDGGSSINNYIVEKRDTSTTTWQIVSATVARTTIKACRLKTGCEYQFRIAAENRYGKSTYLNSEPTVAQYPFKVPGPPGTPVVTLSSRDSMEVQWNEPISDGGSRVIGYHLERKERNSILWVKLNKTPIPQTKFKTTGLEEGVEYEFRVSAENIVGIGKPSKVSECYVARDPCDPPGRPEAIIVTRNSVTLQWKKPTYDGGSKITGYIVEKKELPEGRWMKASFTNIIDTHFEVTGLVEDHRYEFRVIARNAAGVFSEPSESTGAITARDEVDPPRISMDPKYKDTIVVHAGESFKVDADIYGKPIPTIQWIKGDQELSNTARLEIKSTDFATSLSVKDAVRVDSGNYILKAKNVAGERSVTVNVKVLDRPGPPEGPVVISGVTAEKCTLAWKPPLQDGGSDIINYIVERRETSRLVWTVVDANVQTLSCKVTKLLEGNEYTFRIMAVNKYGVGEPLESEPVVAKNPFVVPDAPKAPEVTTVTKDSMIVVWERPASDGGSEILGYVLEKRDKEGIRWTRCHKRLIGELRLRVTGLIENHDYEFRVSAENAAGLSEPSPPSAYQKACDPIYKPGPPNNPKVIDITRSSVFLSWSKPIYDGGCEIQGYIVEKCDVSVGEWTMCTPPTGINKTNIEVEKLLEKHEYNFRICAINKAGVGEHADVPGPIIVEEKLEAPDIDLDLELRKIINIRAGGSLRLFVPIKGRPTPEVKWGKVDGEIRDAAIIDVTSSFTSLVLDNVNRYDSGKYTLTLENSSGTKSAFVTVRVLDTPSPPVNLKVTEITKDSVSITWEPPLLDGGSKIKNYIVEKREATRKSYAAVVTNCHKNSWKIDQLQEGCSYYFRVTAENEYGIGLPAQTADPIKVAEVPQPPGKITVDDVTRNSVSLSWTKPEHDGGSKIIQYIVEMQAKHSEKWSECARVKSLQAVITNLTQGEEYLFRVVAVNEKGRSDPRSLAVPIVAKDLVIEPDVKPAFSSYSVQVGQDLKIEVPISGRPKPTITWTKDGLPLKQTTRINVTDSLDLTTLSIKETHKDDGGQYGITVANVVGQKTASIEIVTLDKPDPPKGPVKFDDVSAESITLSWNPPLYTGGCQITNYIVQKRDTTTTVWDVVSATVARTTLKVTKLKTGTEYQFRIFAENRYGQSFALESDPIVAQYPYKEPGPPGTPFATAISKDSMVIQWHEPVNNGGSPVIGYHLERKERNSILWTKVNKTIIHDTQFKAQNLEEGIEYEFRVYAENIVGVGKASKNSECYVARDPCDPPGTPEPIMVKRNEITLQWTKPVYDGGSMITGYIVEKRDLPDGRWMKASFTNVIETQFTVSGLTEDQRYEFRVIAKNAAGAISKPSDSTGPITAKDEVELPRISMDPKFRDTIVVNAGETFRLEADVHGKPLPTIEWLRGDKEIEESARCEIKNTDFKALLIVKDAIRIDGGQYILRASNVAGSKSFPVNVKVLDRPGPPEGPVQVTGVTSEKCSLTWSPPLQDGGSDISHYVVEKRETSRLAWTVVASEVVTNSLKVTKLLEGNEYVFRIMAVNKYGVGEPLESAPVLMKNPFVLPGPPKSLEVTNIAKDSMTVCWNRPDSDGGSEIIGYIVEKRDRSGIRWIKCNKRRITDLRLRVTGLTEDHEYEFRVSAENAAGVGEPSPATVYYKACDPVFKPGPPTNAHIVDTTKNSITLAWGKPIYDGGSEILGYVVEICKADEEEWQIVTPQTGLRVTRFEISKLTEHQEYKIRVCALNKVGLGEATSVPGTVKPEDKLEAPELDLDSELRKGIVVRAGGSARIHIPFKGRPTPEITWSREEGEFTDKVQIEKGVNYTQLSIDNCDRNDAGKYILKLENSSGSKSAFVTVKVLDTPGPPQNLAVKEVRKDSAFLVWEPPIIDGGAKVKNYVIDKRESTRKAYANVSSKCSKTSFKVENLTEGAIYYFRVMAENEFGVGVPVETVDAVKAAEPPSPPGKVTLTDVSQTSASLMWEKPEHDGGSRVLGYVVEMQPKGTEKWSIVAESKVCNAVVTGLSSGQEYQFRVKAYNEKGKSDPRVLGVPVIAKDLTIQPSLKLPFNTYSIQAGEDLKIEIPVIGRPRPNISWVKDGEPLKQTTRVNVEETATSTVLHIKEGNKDDFGKYTVTATNSAGTATENLSVIVLEKPGPPVGPVRFDEVSADFVVISWEPPAYTGGCQISNYIVEKRDTTTTTWHMVSATVARTTIKITKLKTGTEYQFRIFAENRYGKSAPLDSKAVIVQYPFKEPGPPGTPFVTSISKDQMLVQWHEPVNDGGTKIIGYHLEQKEKNSILWVKLNKTPIQDTKFKTTGLDEGLEYEFKVSAENIVGIGKPSKVSECFVARDPCDPPGRPEAIVITRNNVTLKWKKPAYDGGSKITGYIVEKKDLPDGRWMKASFTNVLETEFTVSGLVEDQRYEFRVIARNAAGNFSEPSDSSGAITARDEIDAPNASLDPKYKDVIVVHAGETFVLEADIRGKPIPDVVWSKDGKELEETAARMEIKSTIQKTTLVVKDCIRTDGGQYILKLSNVGGTKSIPITVKVLDRPGPPEGPLKVTGVTAEKCYLAWNPPLQDGGANISHYIIEKRETSRLSWTQVSTEVQALNYKVTKLLPGNEYIFRVMAVNKYGIGEPLESGPVTACNPYKPPGPPSTPEVSAITKDSMVVTWARPVDDGGTEIEGYILEKRDKEGVRWTKCNKKTLTDLRLRVTGLTEGHSYEFRVAAENAAGVGEPSEPSVFYRACDALYPPGPPSNPKVTDTSRSSVSLAWSKPIYDGGAPVKGYVVEVKEAAADEWTTCTPPTGLQGKQFTVTKLKENTEYNFRICAINSEGVGEPATLPGSVVAQERIEPPEIELDADLRKVVVLRASATLRLFVTIKGRPEPEVKWEKAEGILTDRAQIEVTSSFTMLVIDNVTRFDSGRYNLTLENNSGSKTAFVNVRVLDSPSAPVNLTIREVKKDSVTLSWEPPLIDGGAKITNYIVEKRETTRKAYATITNNCTKTTFRIENLQEGCSYYFRVLASNEYGIGLPAETTEPVKVSEPPLPPGRVTLVDVTRNTATIKWEKPESDGGSKITGYVVEMQTKGSEKWSTCTQVKTLEATISGLTAGEEYVFRVAAVNEKGRSDPRQLGVPVIARDIEIKPSVELPFHTFNVKAREQLKIDVPFKGRPQATVNWRKDGQTLKETTRVNVSSSKTVTSLSIKEASKEDVGTYELCVSNSAGSITVPITIIVLDRPGPPGPIRIDEVSCDSITISWNPPEYDGGCQISNYIVEKKETTSTTWHIVSQAVARTSIKIVRLTTGSEYQFRVCAENRYGKSSYSESSAVVAEYPFSPPGPPGTPKVVHATKSTMLVTWQVPVNDGGSRVIGYHLEYKERSSILWSKANKILIADTQMKVSGLDEGLMYEYRVYAENIAGIGKCSKSCEPVPARDPCDPPGQPEVTNITRKSVSLKWSKPHYDGGAKITGYIVERRELPDGRWLKCNYTNIQETYFEVTELTEDQRYEFRVFARNAADSVSEPSESTGPIIVKDDVEPPRVMMDVKFRDVIVVKAGEVLKINADIAGRPLPVISWAKDGIEIEERARTEIISTDNHTLLTVKDCIRRDTGQYVLTLKNVAGTRSVAVNCKVLDKPGPPAGPLEINGLTAEKCSLSWGRPQEDGGADIDYYIVEKRETSHLAWTICEGELQMTSCKVTKLLKGNEYIFRVTGVNKYGVGEPLESVAIKALDPFTVPSPPTSLEITSVTKESMTLCWSRPESDGGSEISGYIIERREKNSLRWVRVNKKPVYDLRVKSTGLREGCEYEYRVYAENAAGLSLPSETSPLIRAEDPVFLPSPPSKPKIVDSGKTTITIAWVKPLFDGGAPITGYTVEYKKSDDTDWKTSIQSLRGTEYTISGLTTGAEYVFRVKSVNKVGASDPSDSSDPQIAKEREEEPLFDIDSEMRKTLIVKAGASFTMTVPFRGRPVPNVLWSKPDTDLRTRAYVDTTDSRTSLTIENANRNDSGKYTLTIQNVLSAASLTLVVKVLDTPGPPTNITVQDVTKESAVLSWDVPENDGGAPVKNYHIEKREASKKAWVSVTNNCNRLSYKVTNLQEGAIYYFRVSGENEFGVGIPAETKEGVKITEKPSPPEKLGVTSISKDSVSLTWLKPEHDGGSRIVHYVVEALEKGQKNWVKCAVAKSTHHVVSGLRENSEYFFRVFAENQAGLSDPRELLLPVLIKEQLEPPEIDMKNFPSHTVYVRAGSNLKVDIPISGKPLPKVTLSRDGVPLKATMRFNTEITAENLTINLKESVTADAGRYEITAANSSGTTKAFINIVVLDRPGPPTGPVVISDITEESVTLKWEPPKYDGGSQVTNYILLKRETSTAVWTEVSATVARTMMKVMKLTTGEEYQFRIKAENRFGISDHIDSACVTVKLPYTTPGPPSTPWVTNVTRESITVGWHEPVSNGGSAVVGYHLEMKDRNSILWQKANKLVIRTTHFKVTTISAGLIYEFRVYAENAAGVGKPSHPSEPVLAIDACEPPRNVRITDISKNSVSLSWQQPAFDGGSKITGYIVERRDLPDGRWTKASFTNVTETQFIISGLTQNSQYEFRVFARNAVGSISNPSEVVGPITCIDSYGGPVIDLPLEYTEVVKYRAGTSVKLRAGISGKPAPTIEWYKDDKELQTNALVCVENTTDLASILIKDADRLNSGCYELKLRNAMGSASATIRVQILDKPGPPGGPIEFKTVTAEKITLLWRPPADDGGAKITHYIVEKRETSRVVWSMVSEHLEECIITTTKIIKGNEYIFRVRAVNKYGIGEPLESDSVVAKNAFVTPGPPGIPEVTKITKNSMTVVWSRPIADGGSDISGYFLEKRDKKSLGWFKVLKETIRDTRQKVTGLTENSDYQYRVCAVNAAGQGPFSEPSEFYKAADPIDPPGPPAKIRIADSTKSSITLGWSKPVYDGGSAVTGYVVEIRQGEEEEWTTVSTKGEVRTTEYVVSNLKPGVNYYFRVSAVNCAGQGEPIEMNEPVQAKDILEAPEIDLDVALRTSVIAKAGEDVQVLIPFKGRPPPTVTWRKDEKNLGSDARYSIENTDSSSLLTIPQVTRNDTGKYILTIENGVGEPKSSTVSVKVLDTPAACQKLQVKHVSRGTVTLLWDPPLIDGGSPIINYVIEKRDATKRTWSVVSHKCSSTSFKLIDLSEKTPFFFRVLAENEIGIGEPCETTEPVKAAEVPAPIRDLSMKDSTKTSVILSWTKPDFDGGSVITEYVVERKGKGEQTWSHAGISKTCEIEVSQLKEQSVLEFRVFAKNEKGLSDPVTIGPITVKELIITPEVDLSDIPGAQVTVRIGHNVHLELPYKGKPKPSISWLKDGLPLKESEFVRFSKTENKITLSIKNAKKEHGGKYTVILDNAVCRIAVPITVITLGPPSKPKGPIRFDEIKADSVILSWDVPEDNGGGEITCYSIEKRETSQTNWKMVCSSVARTTFKVPNLVKDAEYQFRVRAENRYGVSQPLVSSIIVAKHQFRIPGPPGKPVIYNVTSDGMSLTWDAPVYDGGSEVTGFHVEKKERNSILWQKVNTSPISGREYRATGLVEGLDYQFRVYAENSAGLSSPSDPSKFTLAVSPVDPPGTPDYIDVTRETITLKWNPPLRDGGSKIVGYSIEKRQGNERWVRCNFTDVSECQYTVTGLSPGDRYEFRIIARNAVGTISPPSQSSGIIMTRDENVPPIVEFGPEYFDGLIIKSGESLRIKALVQGRPVPRVTWFKDGVEIEKRMNMEITDVLGSTSLFVRDATRDHRGVYTVEAKNASGSAKAEIKVKVQDTPGKVVGPIRFTNITGEKMTLWWDAPLNDGCAPITHYIIEKRETSRLAWALIEDKCEAQSYTAIKLINGNEYQFRVSAVNKFGVGRPLDSDPVVAQIQYTVPDAPGIPEPSNITGNSITLTWARPESDGGSEIQQYILERREKKSTRWVKVISKRPISETRFKVTGLTEGNEYEFHVMAENAAGVGPASGISRLIKCREPVNPPGPPTVVKVTDTSKTTVSLEWSKPVFDGGMEIIGYIIEMCKADLGDWHKVNAEACVKTRYTVTDLQAGEEYKFRVSAINGAGKGDSCEVTGTIKAVDRLTAPELDIDANFKQTHVVRAGASIRLFIAYQGRPTPTAVWSKPDSNLSLRADIHTTDSFSTLTVENCNRNDAGKYTLTVENNSGSKSITFTVKVLDTPGPPGPITFKDVTRGSATLMWDAPLLDGGARIHHYVVEKREASRRSWQVISEKCTRQIFKVNDLAEGVPYYFRVSAVNEYGVGEPYEMPEPIVATEQPAPPRRLDVVDTSKSSAVLAWLKPDHDGGSRITGYLLEMRQKGSDFWVEAGHTKQLTFTVERLVEKTEYEFRVKAKNDAGYSEPREAFSSVIIKEPQIEPTADLTGITNQLITCKAGSPFTIDVPISGRPAPKVTWKLEEMRLKETDRVSITTTKDRTTLTVKDSMRGDSGRYFLTLENTAGVKTFSVTVVVIGRPGPVTGPIEVSSVSAESCVLSWGEPKDGGGTEITNYIVEKRESGTTAWQLVNSSVKRTQIKVTHLTKYMEYSFRVSSENRFGVSKPLESAPIIAEHPFVPPSAPTRPEVYHVSANAMSIRWEEPYHDGGSKIIGYWVEKKERNTILWVKENKVPCLECNYKVTGLVEGLEYQFRTYALNAAGVSKASEASRPIMAQNPVDAPGRPEVTDVTRSTVSLIWSAPAYDGGSKVVGYIIERKPVSEVGDGRWLKCNYTIVSDNFFTVTALSEGDTYEFRVLAKNAAGVISKGSESTGPVTCRDEYAPPKAELDARLHGDLVTIRAGSDLVLDAAVGGKPEPKIIWTKGDKELDLCEKVSLQYTGKRATAVIKFCDRSDSGKYTLTVKNASGTKAVSVMVKVLDSPGPCGKLTVSRVTQEKCTLAWSLPQEDGGAEITHYIVERRETSRLNWVIVEGECPTLSYVVTRLIKNNEYIFRVRAVNKYGPGVPVESEPIVARNSFTIPSPPGIPEEVGTGKEHIIIQWTKPESDGGNEISNYLVDKREKKSLRWTRVNKDYVVYDTRLKVTSLMEGCDYQFRVTAVNAAGNSEPSEASNFISCREPSYTPGPPSAPRVVDTTKHSISLAWTKPMYDGGTDIVGYVLEMQEKDTDQWYRVHTNATIRNTEFTVPDLKMGQKYSFRVAAVNVKGMSEYSESIAEIEPVERIEIPDLELADDLKKTVTIRAGASLRLMVSVSGRPPPVITWSKQGIDLASRAIIDTTESYSLLIVDKVNRYDAGKYTIEAENQSGKKSATVLVKVYDTPGPCPSVKVKEVSRDSVTITWEIPTIDGGAPVNNYIVEKREAAMRAFKTVTTKCSKTLYRISGLVEGTMYYFRVLPENIYGIGEPCETSDAVLVSEVPLVPAKLEVVDVTKSTVTLAWEKPLYDGGSRLTGYVLEACKAGTERWMKVVTLKPTVLEHTVTSLNEGEQYLFRIRAQNEKGVSEPRETVTAVTVQDLRVLPTIDLSTMPQKTIHVPAGRPVELVIPIAGRPPPAASWFFAGSKLRESERVTVETHTKVAKLTIRETTIRDTGEYTLELKNVTGTTSETIKVIILDKPGPPTGPIKIDEIDATSITISWEPPELDGGAPLSGYVVEQRDAHRPGWLPVSESVTRSTFKFTRLTEGNEYVFRVAATNRFGIGSYLQSEVIECRSSIRIPGPPETLQIFDVSRDGMTLTWYPPEDDGGSQVTGYIVERKEVRADRWVRVNKVPVTMTRYRSTGLTEGLEYEHRVTAINARGSGKPSRPSKPIVAMDPIAPPGKPQNPRVTDTTRTSVSLAWSVPEDEGGSKVTGYLIEMQKVDQHEWTKCNTTPTKIREYTLTHLPQGAEYRFRVLACNAGGPGEPAEVPGTVKVTEMLEYPDYELDERYQEGIFVRQGGVIRLTIPIKGKPFPICKWTKEGQDISKRAMIATSETHTELVIKEADRGDSGTYDLVLENKCGKKAVYIKVRVIGSPNSPEGPLEYDDIQVRSVRVSWRPPADDGGADILGYILERREVPKAAWYTIDSRVRGTSLVVKGLKENVEYHFRVSAENQFGISKPLKSEEPVTPKTPLNPPEPPSNPPEVLDVTKSSVSLSWSRPKDDGGSRVTGYYIERKETSTDKWVRHNKTQITTTMYTVTGLVPDAEYQFRIIAQNDVGLSETSPASEPVVCKDPFDKPSQPGELEILSISKDSVTLQWEKPECDGGKEILGYWVEYRQSGDSAWKKSNKERIKDKQFTIGGLLEATEYEFRVFAENETGLSRPRRTAMSIKTKLTSGEAPGIRKEMKDVTTKLGEAAQLSCQIVGRPLPDIKWYRFGKELIQSRKYKMSSDGRTHTLTVMTEEQEDEGVYTCIATNEVGEVETSSKLLLQATPQFHPGYPLKEKYYGAVGSTLRLHVMYIGRPVPAMTWFHGQKLLQNSENITIENTEHYTHLVMKNVQRKTHAGKYKVQLSNVFGTVDAILDVEIQDKPDKPTGPIVIEALLKNSAVISWKPPADDGGSWITNYVVEKCEAKEGAEWQLVSSAISVTTCRIVNLTENAGYYFRVSAQNTFGISDPLEVSSVVIIKSPFEKPGAPGKPTITAVTKDSCVVAWKPPASDGGAKIRNYYLEKREKKQNKWISVTTEEIRETVFSVKNLIEGLEYEFRVKCENLGGESEWSEISEPITPKSDVPIQAPHFKEELRNLNVRYQSNATLVCKVTGHPKPIVKWYRQGKEIIADGLKYRIQEFKGGYHQLIIASVTDDDATVYQVRATNQGGSVSGTASLEVEVPAKIHLPKTLEGMGAVHALRGEVVSIKIPFSGKPDPVITWQKGQDLIDNNGHYQVIVTRSFTSLVFPNGVERKDAGFYVVCAKNRFGIDQKTVELDVADVPDPPRGVKVSDVSRDSVNLTWTEPASDGGSKITNYIVEKCATTAERWLRVGQARETRYTVINLFGKTSYQFRVIAENKFGLSKPSEPSEPTITKEDKTRAMNYDEEVDETREVSMTKASHSSTKELYEKYMIAEDLGRGEFGIVHRCVETSSKKTYMAKFVKVKGTDQVLVKKEISILNIARHRNILHLHESFESMEELVMIFEFISGLDIFERINTSAFELNEREIVSYVHQVCEALQFLHSHNIGHFDIRPENIIYQTRRSSTIKIIEFGQARQLKPGDNFRLLFTAPEYYAPEVHQHDVVSTATDMWSLGTLVYVLLSGINPFLAETNQQIIENIMNAEYTFDEEAFKEISIEAMDFVDRLLVKERKSRMTASEALQHPWLKQKIERVSTKVIRTLKHRRYYHTLIKKDLNMVVSAARISCGGAIRSQKGVSVAKVKVASIEIGPVSGQIMHAVGEEGGHVKYVCKIENYDQSTQVTWYFGVRQLENSEKYEITYEDGVAILYVKDITKLDDGTYRCKVVNDYGEDSSYAELFVKGVREVYDYYCRRTMKKIKRRTDTMRLLERPPEFTLPLYNKTAYVGENVRFGVTITVHPEPHVTWYKSGQKIKPGDNDKKYTFESDKGLYQLTINSVTTDDDAEYTVVARNKYGEDSCKAKLTVTLHPPPTDSTLRPMFKRLLANAECQEGQSVCFEIRVSGIPPPTLKWEKDGQPLSLGPNIEIIHEGLDYYALHIRDTLPEDTGYYRVTATNTAGSTSCQAHLQVERLRYKKQEFKSKEEHERHVQKQIDKTLRMAEILSGTESVPLTQVAKEALREAAVLYKPAVSTKTVKGEFRLEIEEKKEERKLRMPYDVPEPRKYKQTTIEEDQRIKQFVPMSDMKWYKKIRDQYEMPGKLDRVVQKRPKRIRLSRWEQFYVMPLPRITDQYRPKWRIPKLSQDDLEIVRPARRRTPSPDYDFYYRPRRRSLGDISDEELLLPIDDYLAMKRTEEERLRLEEELELGFSASPPSRSPPHFELSSLRYSSPQAHVKVEETRKDFRYSTYHIPTKAEASTSYAELRERHAQAAYRQPKQRQRIMAEREDEELLRPVTTTQHLSEYKSELDFMSKEEKSRKKSRRQREVTEITEIEEEYEISKHAQRESSSSASRLLRRRRSLSPTYIELMRPVSELIRSRPQPAEEYEDDTERRSPTPERTRPRSPSPVSSERSLSRFERSARFDIFSRYESMKAALKTQKTSERKYEVLSQQPFTLDHAPRITLRMRSHRVPCGQNTRFILNVQSKPTAEVKWYHNGVELQESSKIHYTNTSGVLTLEILDCHTDDSGTYRAVCTNYKGEASDYATLDVTGGDYTTYASQRRDEEVPRSVFPELTRTEAYAVSSFKKTSEMEASSSVREVKSQMTETRESLSSYEHSASAEMKSAALEEKSLEEKSTTRKIKTTLAARILTKPRSMTVYEGESARFSCDTDGEPVPTVTWLRKGQVLSTSARHQVTTTKYKSTFEISSVQASDEGNYSVVVENSEGKQEAEFTLTIQKARVTEKAVTSPPRVKSPEPRVKSPEAVKSPKRVKSPEPSHPKAVSPTETKPTPTEKVQHLPVSAPPKITQFLKAEASKEIAKLTCVVESSVLRAKEVTWYKDGKKLKENGHFQFHYSADGTYELKINNLTESDQGEYVCEISGEGGTSKTNLQFMGQAFKSIHEKVSKISETKKSDQKTTESTVTRKTEPKAPEPISSKPVIVTGLQDTTVSSDSVAKFAVKATGEPRPTAIWTKDGKAITQGGKYKLSEDKGGFFLEIHKTDTSDSGLYTCTVKNSAGSVSSSCKLTIKAIKDTEAQKVSTQKTSEITPQKKAVVQEEISQKALRSEEIKMSEAKSQEKLALKEEASKVLISEEVKKSAATSLEKSIVHEEITKTSQASEEVRTHAEIKAFSTQMSINEGQRLVLKANIAGATDVKWVLNGVELTNSEEYRYGVSGSDQTLTIKQASHRDEGILTCISKTKEGIVKCQYDLTLSKELSDAPAFISQPRSQNINEGQNVLFTCEISGEPSPEIEWFKNNLPISISSNVSISRSRNVYSLEIRNASVSDSGKYTIKAKNFRGQCSATASLMVLPLVEEPSREVVLRTSGDTSLQGSFSSQSVQMSASKQEASFSSFSSSSASSMTEMKFASMSAQSMSSMQESFVEMSSSSFMGISNMTQLESSTSKMLKAGIRGIPPKIEALPSDISIDEGKVLTVACAFTGEPTPEVTWSCGGRKIHSQEQGRFHIENTDDLTTLIIMDVQKQDGGLYTLSLGNEFGSDSATVNIHIRSI

SEQ ID NO: 46745 - protein, 177 aa, Homo sapiens
MFQAFPGDYDSGSRCSSSPSAESQYLSSVDSFGSPPTAAASQECAGLGEMPGSFVPTVTAITTSQDLQWLVQPTLISSMAQSQGQPLASQPPVVDPYDMPGTSYSTPGMSGYSSGGASGSGGPSTSGTTSGPGPARPARARPRRPREETVSKGHQNLAWVGGSKRGRKFLMNGGGLH

SEQ ID NO: 46746 - protein, 300 aa, Homo sapiens
MSSVSPIQIPSRLPLLLTHEGVLLPGSTMRTSVDSARNLQLVRSRLLKGTSLQSTILGVIPNTPDPASDAQDLPPLHRIGTAALAVQVVGSNWPKPHYTLLITGLCRFQIVQVLKEKPYPIAEVEQLDRLEEFPNTCKMREELGELSEQFYKYAVQLVEMLDMSVPAVAKLRRLLDSLPREALPDILTSIIRTSNKEKLQILDAVSLEERFKMTIPLLVRQIEGLKLLQKTRKPKQDDDKRVIAIRPIRRITHISGTLEDEDEDEDNDDIVMLEKKIRTSSMPEQAHKVCVKEIKRPPGH

SEQ ID NO: 46747 - protein, 153 aa, Homo sapiens
  MOD_RES (1)..(1): Any amino acid
XSVQSPAQQQVPARPGAPSVQVPSPFLLQNQYEPVQPHWFYCKEVEYKQLWMPFSVFDSLNLEEIYNSVQPDPESVVLGTDGGRYDVYLYDRIRKAAYWEEEPAEVRRCTWFYKGDTDSRFIPYTEEFSEKLEVRVLYFFMSFFKKCRSYIHW

SEQ ID NO: 46748 - protein, 130 aa, Homo sapiens
MDHLGASLWPQVGSLCLLLAGAAWAPPPNLPDPKFESKAALLAARGPEELLCFTERLEDLVCFWEEAASAGVGPGNYSFSYQLDRGHWRETCGSRAGTPSMGRGANTPAITAGTRPQTSGWDNNASKSRG

SEQ ID NO: 46749 - protein, 315 aa, Homo sapiens
MESGNQSTVTEFIFTGFPQLQDGSLLYFFPLLFIYTFIIIDNLLIFSAVRLDTHLHNPMYNFISIFSFLEIWYTTATIPKMLSNLISEKKAISMTGCILQMYFFHSLENSEGILLTTMAIDRYVAICNPLRYQMIMTPRLCAQLSAGSCLFGFLILLPEIVMISTLPFCGPNQIHQIFCDLVPVLSLACTDTSMILIEDVIHAVTIIITFLIIALSYVRIVTVILRIPSSEGRQKAFSTCAGHLMVFPIFFGSVSLMYLRFSDTYPPVLDTAIALMFTVLAPFFNPIIYSLRNKDMNNAIKKLFCLQKVLNKPGG

SEQ ID NO: 46750 - protein, 53 aa, Homo sapiens
MSSVAVLTQESFAEHRSGLVPQQIKVATLNSEEESDPPTYKDAFPPLPEKAAC

SEQ ID NO: 46751 - protein, 102 aa, Homo sapiens
MFPVLEPHQVGLIRSYNSKTMTCNWGRPLKFCPTKYMKFQELVTFRDVAIDFSRQEWEYLDPNQRDLYRDVMLENYRNLVSLGGHSISKPVVVDLLERGKEP

SEQ ID NO: 46752 - protein, 130 aa, Homo sapiens
MFTVLTRQPCEQAGLKALYRTPTIIALVVLLVSIVVLVSITVIQIHKQEVLPPGLKIGFHRVDQASLELLTSGDPPTSASQSGGIISMSHRAQPQLRYGIVLDAGSSRTTVYVYQWPAEKENNTGVVSQT

SEQ ID NO: 46753 - protein, 78 aa, Homo sapiens
MPESKVGDTCVWDSKVENQQKKPVENRMKEDKSSIREAISKAKSTANIKTEQEGEASEKSLHLSPQHITHQTMPIGQR

SEQ ID NO: 46754 - protein, 335 aa, Homo sapiens; identical to SEQ ID NO: 45998

SEQ ID NO: 46755 - protein, 32 aa, Homo sapiens
MASDSIFESFPSYPQCFMRECILGMNPSRDVH

SEQ ID NO: 46756 - protein, 54 aa, Homo sapiens
MLACLPGPGDLSFQLLSHTQMNTGLQKSLFTISASVEAGQRKLINVDKCPLPYS

SEQ ID NO: 46757 - protein, 515 aa, Homo sapiens
MAAVGSGGYARNDAGEKLPSVMAGVPARRGQSSPPPAPPICLRRRTRLSTASEETVQNRVSLEKVLGITAQNSSGLTCDPGTGHVAYLAGCVVVILDPKENKQQHIFNTARKSLSALAFSPDGKYIVTGENGHRPAVRIWDVEEKNQVAEMLGHKYGVACVAFSPNMKHIVSMGYQHDMVLNVWDWKKDIVVASNKVSCRVIALSFSEDSSYFVTVGNRHVRFWFLEVSTETKVTSTVPLVGRSGILGELHNNIFCGVACGRGRMAGSTFCVSYSGLLCQFNEKRVLEKWINLKVSLSSCLCVSQELIFCGCTDGIVRIFQAHSLHYLANLPKPHYLGVDVAQGLEPSFLFHRKAEAVYPDTVALTFDPIHQWLSCVYKDHSIYIWDVKDINRVGKVWSELFHSSYVWNVEVYPEFEDQRACLPSGSFLTCSSDNTIRFWNLDSSPDSHWQKNIFSNTLLKVVYVENDIQHLQDMSHFPDRGSENGTPMDVKAGVRVMQDPRAALHGRAGQGGGP

SEQ ID NO: 46758 - protein, 483 aa, Homo sapiens
MLKFRTVHGGLRLLGIRRTSTAPAASPNVRRLEYKPIKKVMVANRGEIAIRVFRACTELGIRTVAIYSEQDTGQMHRQKADEAYLIGRGLAPVQAYLHIPDIIKVAKENNVDAVHPGYGFLSERADFAQACQDAGVRFIGPSPEVVRKMGDKVEARAIAIAAGVPVVPGTDAPITSLHEAHEFSNTYGFPIIFKAAYGGGGRGMRVVHSYEELEENYTRAYSEALAAFGNGALFVEKFIEKPRHIEVQILGDQYGNILHLYERDCSIQRRHQKVVEIAPAAHLDPQLRTRLTSDSVKLAKQVGYENAGTVEFLVDRHGKHYFIEVNSRLQVEHTVTEEITDVDLVHAQIHVAEGRSLPDLGLRQENIRINGCAIQCRVTTEDPARSFQPDTGRIEVFRSGEGMGIRLDNASAFQGAVISPHYDSLLVKVIAHGKDHPTAATKMSRALAEFRVRGVKTNIAFLQNVLNNQQFLAGTVDTQFIDE

SEQ ID NO: 46759 - protein, 255 aa, Homo sapiens
EPFTSLHVQLQSGRFDCSDRQFHSVAAAWQARLESPADVKELIPEFFYFPDFLENQNGFDLGCLQLTNEKVGDVVLPPWASSPEDFIQQHRQALESEYVSAHLHEWIDLIFGYKQRGPAAEEALNVFYYCTYEGAVDLDHVTDERERKALEGIISNFGQTPCQLLKEPHPTRLSAEEAAHRLARLDTNSPSIFQHLDELKAFFAEDAATAEWPVGARQWCEWTSTGSGPGWKAAIQRWPLGWQPAGDCTTPWQAV

SEQ ID NO: 46760 - protein, 188 aa, Homo sapiens
MADFGISAGQFVAVVWDKSSPVEALKGLVDKLQALTGNEGRVSVENIKQLLQSAHKESSFDIILSGLVPGSTTLHSAEILAEIARILRPGGCLFLKEPVETAVDNNSKVKTASKLCSALTLSGLVEVKELQREPLTPEEVQSVREHLGHESDNLLFVQITGKKPNFEVGSSRQLKLSITKKSSPSGSH

SEQ ID NO: 46761 - protein, 211 aa, Homo sapiens
MATSWGTVFFMLVVSCVCSAVSHRNQQTWFEGIFLSSMCPINVSASTLYGIMFDAGSTGTRIHVYTFVQKMPGQLPILEGEVFDSVKPGLSAFVDQPKQGAETVQGLLEVAKDSIPRSHWKKTPVVLKATAGLRLLPEHKAKALLFEVKEIFRKSPFLVPKGSVSIMDGSDEGILAWVTVNFLTGQLHGHRQETVGTLDLGGASTQITFLP

SEQ ID NO: 46762 - protein, 269 aa, Homo sapiens
MTMETVESQHDGSITASLTESKSAHVQTQTGQNSIPALAQVSVAGSGTRRGSPAVTLVQLPSGQTIHVQGVIQTPQPWVIQSSEIHTVQVAAIAETDESAESEGVIDSHKRREILSRRPSYRKILNELSSDVPGVPKIEEERSEEEGTPPSIATMAVPTSIYQTSTGQYTATGDMPTYQIRAPTAALPQGVVMAASPGSLHSPQQLAEEATRKRELRLMKNREAARECRRKKKEYVKCLENRVAVLENQNKTLIEELKALKDLYCHKVE

SEQ ID NO: 46763 - protein, 59 aa, Homo sapiens
KFYGPGEELEGEGKDPLQLKHNPLRTGRPLGTGPRLGACKVPTLQSLKSRRISNTSDSL

SEQ ID NO: 46764 - protein, 29 aa, Homo sapiens
MASASGAMAKHEQILVLDPPTDLKFKVIV

SEQ ID NO: 46765 - protein, 172 aa, Homo sapiens
MGSSGLGKAATLDELLCTCIEMFDDNGELDNSYLPRIVLLMHRWYLSSTELAEKLLCMYRNATGESCNEFRLKICYFMRYWILKFPAEFNLDLGLIRMTEEFREVASQLGYEKHVSLIDISSIPSYDWMRRVTQRKKVSKKGKACLLFDHLEPIELAEHLTFLEHKSFRRIS

SEQ ID NO: 46766 - protein, 45 aa, Homo sapiens
TPAARASKRIVLPEPSIRSVMQKYLAERNEITFDKIFNQKIDKGI

SEQ ID NO: 46767 - protein, 88 aa, Homo sapiens
METNFSTPLNEYEEVSYESAGYTVLRILPLVVLGVTFVLGVLGNGLVIWVAGFRMTRTVTTICYLNLALADFSFTATLPFLIVSMAMG

SEQ ID NO: 46768 - protein, 223 aa, Homo sapiens
MSGYQRRPGATPLSRARSLAIPDDFGYGKGKCSKQSPSGAHGTHFGDDRFEDLEEANPFSFREFLKTKNLGLSKEDPASRIYAKEASRHSLGLDHNSPPSQTGGYGLEYQQPFFEDPTGAGDLLDEEEDEDTGWSGAYLPSAIEQTHPERVPAGTSPCSTYLSFFSTPSELAGPESLPSWALSDTDSRVSPASPAGSPSADFAVHGESLGDRHLRTLQISYDA

SEQ ID NO: 46769 - protein, 91 aa, Homo sapiens
  MOD_RES (1)..(1): Any amino acid
XAMCQYSLKPPSTRKIYSDEEELLYLSFIEDVTDEILKLGLFSNRFLERLFERHIKQNKHLEEEKMRHLLHVLKVDLGCTSEENSVRIPDD

SEQ ID NO: 46770 - protein, 69 aa, Homo sapiens
MLQAKLHSQEEDFRLQNSTLMAEFSKLCSQMEQLEQENQQLKEGAAGAGVAQAGPLVDGELLRLQAENT

SEQ ID NO: 46771 - protein, 109 aa, Homo sapiens
MSWCNELRLPALKQHSIGRGLESHITMCIPPSYADLGKAARDIFNKGFGFGLVKLDVKTKSCSGVEFSTSGSSNTDTGKVTGTLETKYKWCEYGLTFTEKWNTDNTLGT

SEQ ID NO: 46772 - protein, 385 aa, Homo sapiens
MEDEMPKTLYVGNLSRDVTEALILQLFSQIGPCKNCKMIMDTAGNDPYCFVEFHEHRHAAAALAAMNGRKIMGKEVKVNWATTPSSQKKDTSSSTVVSTQRSQDHFHVFVGDLSPEITTEDIKAAFAPFGRISDARVVKDMATGKSKGYGFVSFFNKWDAENAIQQMGGQWLGGRQIRTNWATRKPPAPKSTYESNTKQLSYDEVVNQSSPSNCTVYCGGVTSGLTEQLMRQTFSPFGQIMEIRVFPDKGYSFVRFNSHESAAHAIVSVNGTTIEGHVVKCYWGKETLDMINPVQQNQIGYPQPYGQWGQWYGNAQQIGQYMPNGWQVPAYGMYGQAWNQQGFNQTQSSAPWMGPNYGVQPPQGQNGSMLPNQPSGYRVAGYETQ

SEQ ID NO: 46773 - protein, 2392 aa, Homo sapiens
MAAEEGVASAASAGGSWGTAAMGRVLPMLLVPVPAEAMGQLGSRAQLRTQPEALGSLTAAGSLQVLSLTPGSRGGGRCCLEGPFWHFLWEDSRNSSTPTEKPKLLALGENYELLIYEFNLKDGRCDATILYSCSREALQKLIDDQDISISLLSLRILSFHNNTSLLFINKCVILHIIFPERDAAIRVLNCFTLPLPAQAVDMIIDTQLCRGILFVLSSLGWIYIFDVVDGTYVAHVDLALHKEDMCNEQQQEPAKISSFTSLKVSQDLDVAVIVSSSNSAVALNLNLYFRQHPGHLLCERILEDLPIQGPKGVDEDDPVNSAYNMKLAKFSFQIDRSWKAQLSSLNETIKNSKLEVSCCAPWFQDILHLESPESGNHSTSVQSWAFIPQDIMHGQYNVLQKDHAKTSDPGRSWKIMHISEQEEPIELKCVSVTGFTALFTWEVERMGYTITLWDLETQGMQCFSLGTKCIPVDSSGDQQLCFVLTENGLSLILFGLTQEEFLNRLMIHGSASTVDTLCHLNGWGRCSIPIHALEAGIENRQLDTVNFFLKSKENLFNPSSKSSVSDQFDHLSSHLYLRNVEELIPALDLLCSAIRESYSEPQSKHFSEQLLNLTLSFLNNQIKELFIHTEELDEHLQKGVNILTSYINELRTFMIKFPWKLTDAIDEYDVHENVPKVKESNIWKKLSFEEVIASAILNNKIPEAQTFFRIDSHSAQKLEELIGIGLNLVFDNLKKNNIKEASELLKNMGFDVKGQLLKICFYTTNKNIRDFLVEILKEKNYFSEKEKRTIDFVHQVEKLYLGHFQENMQIQSFPRYWIKEQDFFKHKSVLDSFLKYDCKDEFNKQDHRIVLNWALWWDQLTQESILLPRISPEEYKSYSPEALWRYLTARHDWLNIILWIGEFQTQHSYASLQQNKWPLLTVDVINQNTSCNNYMRNEILDKLARNGVFLASELEDFECFLLRLSRIGGVIQDTLPVQNYKTKEGWDFHSQFILYCLEHSLQHLLYVYLDCYKLSPENCPFLEKKELHEAHPWFEFLVQCRQVASNLTDPKLIFQASLANAQILIPTNQASVSSMLLEGHTLLALATTMYSPGGVSQVVQNEENENCLKKVDPQLLKMALTPYPKLKTALFPQCTPPSVLPSDITIYHLIQSLSPFDPSRLFGWQSANTLAIGDAWSHLPHFSSPDLVNKYAIVERLNFAYYLHNGRPSFAFGTFLVQELIKSKTPKQLIQQVGNEAYVIGLSSFHIPSIGAACVCFLELLGLDSLKLRVDMKVANIILSYKCRNEDAQYSFIRESVAEKLSKLADGEKTTTEELLVLLEEGTWNSIQQQEIKRLSSESSSQWALVVQFCRLHNMKLSISYLRECAKANDWLQFIIHSQLHNYHPAEVKSLIQYFSPVIQDHLRLAFENLPSVPTSKMDSDQVCNKCPQELQGSKQEMTDLFEILLQCSEEPDSWHWLLVEAVKQQAPILSVLASCLQGASAISCLCVWIITSVEDNVATEAMGHIQDSTEDHTWNLEDLSVIWRTLLTRQKSKTLIRGFQLFFKDSPLLLVMEMYELCMFFRNYKEAEAKLLEFQKSLETLNTAATKVHPVIPAMWLEDQVCFLLKLMLQQCKTQYELGKLLQLFVEREHLFSDGPDVKKLCILCQILKDTSIAINHTIITSYSIENLQHECRSILERLQTDGQFALARRVAELAELPVDNLVIKEITQEMQTLKHIEQWSLKQARIDFWKKCHENFKKNSISSKAASSFFSTQAHVACEHPTGWSSMEERHLLLTLAGHWLAQEDVVPLDKLEELEKQIWLCRITQHTLGRNQEETEPRFSRQISTSGELSFDSLASEFSFSKLAALNTSKYLELNSLPSKETCENRLDWKEQESLNFLIGRLLDDGCVHEASRVCRYFHFYNPDVALVLHCRALASGEASMEDLHPEIHALLQSAELLEEEAPDIPLRRVHSTSSLDSQKFVTVPSSNEVVTNLEVLTSKCLHGKNYCRQVLCLYDLAKELGCSYTDVAAQDGEAMLRKILASQQPDRCKRAQAFISTQGLKPDTVAELVAEEVTRELLTSSQGTGHKQMFNPTEESQTFLQLTTLCQDRTLVGMKLLDKISSVPHGELSCTTELLILAHHCFTLTCHMEGIIRVLQAAHMLTDNHLAPSEEYGLVVRLLTGIGRYNEMTYIFDLLHKKHYFEVLMRKKLDPSGTLKTALLDYIKRCRPGDSEKHNMIALCFSMCREIGENHEAAARIQLKLIESQPWEDSLKDGHQLKQLLLKALTLMLDAAESYAKDSCVRQAQHCQRLTKLITLQIHFLNTGQNTMLINLGRHKLMDCILALPRFYQASIVAEAYDFVPDWAEILYQQVILKGDFNYLEEFKQQRLLKSSIFEEISKKILHFYLTH

SEQ ID NO: 46774 - protein, 873 aa, Homo sapiens
MFHLRTCAAKLRPLTASQTVKTFSQNRPAAARTFQQIRCYSAPVAAEPFLSGTSSNYVEEMYCAWLENPKSVHKGSMAWMSLTSTRSSTCPPPLSSGDRNQHFLCGRSSVGWRFEEFLQRKWSSEKRFGLEGCEVLIPALKTIIDKSSENGVDYVIMGMPHRGRLNVLANVIRKELEQIFCQFDSKLEAADEGSGDVKYHLGMYHRRINRVTDRNITLSLVANPSHLEAADPVVMGKTKAEQFYCGDTEGKKVMSILLHGDAAFAGQGIVYETFHLSDLPSYTTHGTVHVVVNNQIGFTTDPRMARSSPYPTDVARVVNAPIFHVNSDDPEAVMYVCKVAAEWRSTFHKDVVVDLVCYRRNGHNEMDEPMFTQPLMYKQIRKQKPVLQKYAELLVSQGVVNQPEYEEEISKYDKICEEAFARSKDEKILHIKHWLDSPWPGFFTLDGQPRSMSCPSTGLTEDILTHIGNVASSVPVENFTIHGGLSRILKTRGEMVKNRTVDWALAEYMAFGSLLKEGIHIRLSGQDVERGTFSHRHHVLHDQNVDKRTCIPMNHLWPNQAPYTVCNSSLSEYGVLGFELGFAMASPNALVLWEAQFGDFHNTAQCIIDQFICPGQAKWVRQNGIVLLLPHGMEGMGPEHSSARPERFLQMCNDDPDVLPDLKEANFDINQLYDCNWVVVNCSTPGNFFHVLRRQILLPFRKPLIIFTPKSLLRHPEARSSFDEMLPGTHFQRVIPEDGPAAQNPENVKRLLFCTGKVYYDLTRERKARDMVGQVAITRIEQLSPFPFDLLLKEVQKYPNAELAWCQEEHKNQGYYDYVKPRLRTTISRAKPVWYAGRDPAAAPATGNKKTHLTELQRLLDTAFDLDVFKNFS

SEQ ID NO: 46775 - protein, 760 aa, Homo sapiens
MAQWNQLQQLDTRYLEQLHQLYSDSFPMELRQFLAPWIESQDWAYAASKESHATLVFHNLLGEIDQQYSRFLQESNVLYQHNLRRIKQFLQSRYLEKPMEIARIVARCLWEESRLLQTAATAAQQGGQANHPTAAVVTEKQQMLEQHLQDVRKRVQDLEQKMKVVENLQDDFDFNYKTLKSQGDMQDLNGNNQSVTRQKMQQLEQMLTALDQMRRSIVSELAGLLSAMEYVQKTLTDEELADWKRRQQIACIGGPPNICLDRLENWITSLAESQLQTRQQIKKLEELQQKVSYKGDPIVQHRPMLEERIVELFRNLMKSAFVVERQPCMPMHPDRPLVIKTGVQFTTKVRLLVKFPELNYQLKIKVCIDKDSGDVAALRGSRKFNILGTNTKVMNMEESNNGSLSAEFKHLTLREQRCGNGGRANCDASLIVTEELHLITFETEVYHQGLKIDLETHSLPVVVISNICQMPNAWASILWYNMLTNNPKNVNFFTKPPIGTWDQVAEVLSWQFSSTTKRGLSIEQLTTLAEKLLGPGVNYSGCQITWAKFCKENMAGKGFSFWVWLDNIIDLVKKYIMGFISKERERAILSTKPPGTFLLRFSESSKEGGVTFTWVEKDISGKTQIQSVEPYTKQQLNNMSFAEIIMGYKIMDATNILVSPLVYLYPDIPKEEAFGKYCRPESQEHPEADPGAAPYLKTKFICVTPTTCSNTIDLPMSPRTLDSLMQFGNNGEGAEPSAGGQFESLTFDMELTSECATSPM

SEQ ID NO: 46776 - protein, 112 aa, Homo sapiens
MFRKKKKKRPEISAPQNFQHRVHTSFDPKEGKFVGLPPQWQNILDTLRRPKPVVDPSRITRVQLQPMKTVVRGSAMPVDGYISGLLNDIQKLSVISSNTLRGRSPTSRRRAQ

SEQ ID NO: 46777 - protein, 976 aa, Homo sapiens
  MOD_RES (1)..(1): Any amino acid
XLSNTLTTSLTSTSSESDTGQEAEYSLYDFLDSCRASTLLAELDDDEDLPEPDEEDDENEDDNQEDQEYEEILRRPSLQRRAGSRSDVTHHAVTSQLPQVPAGAGSRPIGEQEEEEYETKGGRRRTWDDDYVLKRQFSALVPAFDPRPGRTNVQQTTDLEIPPPGTPHSELLEEVECTPSPRLALTLKVTGLGTTREVELPLTNFRSTIFYYVQKLLQLSCNGNVKSDKLRRIWEPTYTIMYREMKDSDKEKENGKMGCWSIEHVEQYLGTDELPKNDLITYLQKNADAAFLRHWKLTGTNKSIRKNRNCSQLIAAYKDFCEHGTKSGLNQGAISTLQSSDILNLTKEQPQAKAGNGQNSCGVEDVLQLLRILYIVASDPYSRISQEDGDEQPQFTFPPDEFTSKKITTKILQQIEEPLALASGALPDWCEQLTSKCPFLIPFETRQLYFTCTAFGASRAIVWLQNRREATVERTRTTSSVRRDDPGEFRVGRLKHERVKVPRGESLMEWAENVMQIHADRKSVLEVEFLGEEGTGLGPTLEFYALVAAEFQRTDLGAWLCDDNFPDDESRHVDLGGGLKPPGYYVQRSCGLFTAPFPQDSDELERITKLFHFLGIFLAKCIQDNRLVDLPISKPFFKLMCMGDIKSNMSKLIYESRGDRDLHCTESQSEASTEEGHDSLSVGSFEEDSKSEFILDPPKPKPPAWFNGILTWEDFELVNPHRARFLKEIKDLAIKRRQILSNKGLSEDEKNTKLQELVLKNPSGSGPPLSIEDLGLNFQFCPSSRIYGFTAVDLKPSGEDEMITMDNAEEYVDLMFDFCMHTGIQKQMEAFRDGFNKVFPMEKLSSFSHEEVQMILCGNQSPSWAAEDIINYTEPKLGYTRDSPGFLRFVRVLCGMSSDERKAFLQFTTGCSTLPPGGLANLHPRLTVVRKVDATDASYPSVNTCVHYLKLPEYSSEEIMRERLLAATMEKGFHLN

SEQ ID NO: 46778 - protein, 99 aa, Homo sapiens
MAVWLAQWLGPLLLVSLWGLLAPASLLRRLGEHIQQFQESSAQGLGLSLGPGAAALPKVGWLEQLLDPFNVSDRRSFLQMSPVRIPDVLSPSSQHCPPS

SEQ ID NO: 46779 - protein, 189 aa, Homo sapiens
MFVARSIAADHKDLIHDVSFDFHGRRMATCSSDQSVKTHSGSVWRVTWAHPEFGQVLASCSFDRTAAVWEEIVGESNDKLRGQSHWVKRTTLVDSRTSVTDVKFAPKHMGLMLATCSADGIVRIYEAPDVMNLSQWSLQHEISCKLSCSCISWNPSSSRAHSPMIAVGSDDSSPNAMAKVQIFEYNENT

SEQ ID NO: 46780 - protein, 498 aa, Homo sapiens
GERRNSNVSQASMSSRMVPGLPANGKMHSTVDCNGVVSLGTTTETEVRKRRLSSYQISMEMLEDSSGRQRAVSIASILTNTMEELEESRQKCPPCWYRFANVFLIWDCCDAWLKVKHLVNLIVMDPFVDLAITICIVLNTLFMAMEHYPMTEQFSSVLTVGNLVFTGIFTAEMVLKIIAMDPYYYFQEGWNIFDGIIVSLSLMELGLSNVEGLSVLRSFRLLRVFKLAKSWPTLNMLIKIIGNSVGALGNLTLVLAIIVFIFAVVGMQLFGKSYKECVCKINDDCTLPRWHMNDFFHSFLIVFRVLCGEWIETMWDCMEVAGQTMCLIVFMLVMVIGNLVVLNLFLALLLSSFSSDNLAATDDDNEMNNLQIAVGRMQKGIDYVKNKMRECFQKAFFRKPKVIEIHEGNKIDSCMSNNTGIEISKELNYLRDGNGTTSGVGTGSSVEKYVIDENDYMSFINNPSLTVTVPIAVGESDFENLNTEEFSSESELEESKEE

SEQ ID NO: 46781 - protein, 193 aa, Homo sapiens
  MOD_RES (1)..(1): Any amino acid
XGSPVEDNEKDLVKLAKRLKKEKVNVDIINFGEEALRVSMEEQRQRQEEEARRAAAASAAEAGIATTGTEDSDDALLKMTISQQEFGRTGLPDLSSMTEEEQIAYAMQMSLQGAEFGQAESADIDASSAMDTSEPAKEEDDYDVMQDPEFLQSVLENLPGVDPNNEAIRNAMGSLASQATKDGKKDKKEEDKK

SEQ ID NO: 46782 - protein, 159 aa, Homo sapiens
MFPPSGHQDVSERRLDTQRPQVTMWERDVSSDRQEPGRRGRSWGLEGSQALSQQAEVIVRQLQELRRLEEEVRLLRETSLQQKMRLEAQAMELEALARAEKAGRAEAEGLRAALAGAEVVRKNLEEGSQRELEEVQRLHQEQLSSLTQAHEEALSSLTS

SEQ ID NO: 46783 - protein, 183 aa, Homo sapiens
MGLQTTKWPSHGAFFLKSWLIISLGLYSQVSKLLACPSVCRCDRNFVYCNERSLTSVPLGIPEGVTVLYLHNNQINNAGFPAELHNVQSVHTVYLYGNQLDEFPMNLPKNVRVLHLQENNIQTISRAALAQLLKLEELHLDDNSISTVGVEDGAFREAISLKLLFLSKNHLSSVPVGLPVDLQ

SEQ ID NO: 46784 - protein, 49 aa, Homo sapiens
  MOD_RES (1)..(1): Any amino acid
XLTMVGTAFFMYNAFGKPFETLHGPLGLYLLSFISEAAADPVWKHSPCL

SEQ ID NO: 46785 - protein, 160 aa, Homo sapiens
GKDPVQCSRDVVICPDASLEDAKKEGPYDVVVLPGGNLGAQNLSESAAVKEILKEQENRKGLIAAICAGPTALLAHEIGFGSKVTTHPLAKDKMMNGGCHLFCFYFAGHYTYSENRVEKDGLILTSRGPGTSFEFALAIVEALNGKEVAAQVKAPLVLKD

SEQ ID NO: 46786 - protein, 484 aa, Homo sapiens
MESHSRAGKSRKSAKFRSISRSLMLCNAKTSDDGSSPDEKYPDPFEISLAQGKEGIFHSSVQLADTSEAGPSSVPDLALASEAAQLQAAGNDRGKTCRRIFFMKESSTASSREKPGKLEAQSSNFLFPKACHQRARSNSTSVNPYCTREIDFPMTKKSAAPTDRQPYSLCSNRKSLSQQLDCPAGKAAGTSRPTRSLSTAQLVQPSGGLQASVISNIVLMKGQAKGLGFSIVGGKDSIYGPIGIYVKTIFAGGAAAADGRLQEGDEILELNGESMAGLTHQDALQKFKQAKKGLLTLTVRTRLTAPPSLCSHLSPPLCRSLSSSTCITKDSSSFALESPSAPISTAKPNYRIMVEVSLQKEAGVGLGIGLCSVPYFQCISGIFVHTLSPGSVAHLDGRLRCGDEIVEISDSPVHCLTLNEVYTILSHCDPGPVPIIVSRHPDPQVSEQQLKEAVAQAVENTKFGKERHQWSLEDAEMELGPPGS

SEQ ID NO: 46787 - protein, 155 aa, Homo sapiens
MMPLWTKDGQKHVVTLLQVQDCHVLKYTSKENCNGKMATLSVGGKTVSRFRKATSILEFYRELGLPPKQTVKIFNITDNAAIKPGTPLYAAHFRPGQYVDVTAKTIGKGFQGVMKRWGFKGQPATHGQTKTHRRPGAVATGDIGRVWPGTKMPGK

SEQ ID NO: 46788 - protein, 127 aa, Homo sapiens
MLSDELESKPECCLFSPQLLVQFVQNTSIPLGQGLVESEAKDITCLSLLPVTEASECSRLMLPDDTTNHSNSSKEVPSSAVLRSLRVNVGPDGEETRAQTVQKSPEFLSTSESSSLLQDLQPSDSTS

SEQ ID NO: 46789 - protein, 131 aa, Homo sapiens
MVRYSLDPENPTKSCKSRGSNLRVHFKNTRETAQAIKGMHIRKATKYLKDVTLQKQCVPFRRYNGGVGRCAQAKQWGWTQGRWPKKSAEFLLHMLKNAESNAELKGLDVDSLVIEHIQVNKAPKMRRRTYR

SEQ ID NO: 46790 - protein, 57 aa, Homo sapiens
MIAERLARLRQENKPKLVPSQAEIEARLAALKDERQGSIPSTQEMEARLAALQGRVL

SEQ ID NO: 46791 - protein, 88 aa, Homo sapiens
MRMSVGLSLLLPLSGRTFLLLLSVVMAQSHWPSEPSEAVRDWENQLEASMHSVLSDLHEAVPTVVGIPDGTAVVGRSFRVTIPTDLIA

SEQ ID NO: 46792 - protein, 200 aa, Homo sapiens
LILENTSKVPAPKDVLAHQVPNAKKLRRKEQLWEKLAKQGELPREVRRAQARLLNPSATRAKPGPQDTVERPFYDLWASDNPLDRPLVGQDEFFLEQTKKKGVKRPARLHTKPSQARREAEADKPRRLGRLKYQAPDIDVQLSSELTDSLRTLKPEGNILRDRFKSFQRRNMIEPRERAKFKRKYKVKLVEKRAFREIQL

SEQ ID NO: 46793 - protein, 74 aa, Homo sapiens
MENEPDHENVEQSLCAKTSEEELNKSFNLEASLSKFSYIDMDKELEFKNDLIDDKEFDIPQVDTPPTLESILNE

SEQ ID NO: 46794 - protein, 111 aa, Homo sapiens
MGKQNSKLRPEVMQDLLESTDFTEHEIQEWYKGFLRDCPSGHLSMEEFKKIYGNFFPYGDASKFAEHVFRTFDANGDGTIDFREFIIALSVTSRGKLEQKLKWAFSMYDLD

SEQ ID NO: 46795 - protein, 235 aa, Homo sapiens [sequence omitted]

SEQ ID NO: 46796 - protein, 35 aa, Homo sapiens
MAFSGSQAPYLSPVCCGLSDGLQWKRHCLPLQPSV

SEQ ID NO: 46797 - protein, 263 aa, Homo sapiens
MLRTDLGESTASLDSIVRDEGIQKLGVSSGLVRGSHGEPDASLMPRSCKDPPGHDSDSDSELSLDEQSSSYASSHSSDSEDDGVGAEEKWDPARGAVHSTPKGDAVANHVPAGWPDQSLAESDSEDPSGKPRLKVETKVSVELHREEQGSHRGEYPPDQESGGAARLASSQPPEQRKGILKNKVTYPPPLTLTEQTLKGRLREKLADCEQSPTSSRTSSLGSGGPDCAITVKSPGREPGRDHLNGVAMNVRTGSAQADGSDSE

SEQ ID NO: 46798 - protein, 89 aa, Homo sapiens
  MOD_RES (1)..(1): Any amino acid
XELIKIVMSWFVSPLLSGIMSGILFFLVRAFILHKADPVPNGLRALPVFYACTVGINLFSIMYTGAPWLKSPRRWLACAHFRRLQASVR

SEQ ID NO: 46799 - protein, 582 aa, Homo sapiens
MREQLKGHETQTTCWDHPKMTELYQSLADLNNVRFSAYRTAMKLRRLQKALCLDLLSLSAACDALDQHNLKQNDQPMDILQIINCLTTIYDRLEQEHNNLVNVPLCVDMCLNWLLNVYDTGRTGRIRVLSFKTGIISLCKAHLEDKYRYLFKQVASSTGFCDQRRLGLLLHDSIQIPRQLGEVASFGGSNIEPSVRSCFQFANNKPEIEAALFLDWMRLEPQSMVWLPVLHRVAAAETAKHQAKCNICKECPIIGFRYRSLKHFNYDICQSCFFSGRVAKGHKMHYPMVEYCTPTTSGEDVRDFAKVLKNKFRTKRYFAKHPRMGYLPVQTVLEGDNMETLAEMENSNGSYLNDSISPNESIDDEHLLIQHYCQSLNQDSPLSQPRSPAQILISLESEERGELERILADLEEENRNLQAEYDRLKQQHEHKGLSPLPSPPEMMPTSPQSPRDAELIAEAKLLRQHKGRLEARMQILEDHNKQLESQLHRLRQLLEQPQAEAKVNGTTVSSPSTSLQRSDSSQPMLLRVVGSQTSDSMGEEDLLSPPQDTSTGLEEVMEQLNNSFPSSRGRNTPGKPMREDTM

SEQ ID NO: 46800 - protein, 76 aa, Homo sapiens
KGYLTQTAAALDKSPSLSPQLAAPIRGRPKKCLVYPHAPKSSRLSRSVLRWLQGLDLSFFPRNINRNILYILPLGT

SEQ ID NO: 46801 - protein, 551 aa, Homo sapiens
MWRCGGRQGLCVLRRLSGGHAHHRAWRWNSNRACERALQYKLGDKIHGFTVNQVTSVPELFLTAVKLTHDDTGARYLHLAREDTNNLFSVQFRTTPMDSTGVPHILEHTVLCGSQKYPCRDPFFKMLNRSLSTFMNAFTASDYTLYPFSTQNPKDFQNLLSVYLDATFFPCLRELDFWQEGWRLEHENPSDPQTPLVFKGVVFNEMKGAFTDNERIFSQHLQNRLLPDHTYSVVSGGDPLCIPELTWEQLKQFHATHYHPSNARFFTYGNFPLEQHLKQIHEEALSKFQKIEPSTVVPAQTPWDKPREFQITCGPDSFATDPSKQTTISVSFLLPDITDTFEAFTLSLLSSLLTSGPNSPFYKALIESGLGTDFSPDVGYNGYTREAYFSVGLQGIAEKDIETVRSLIDRTIDEVVEKGFEDDRIEALLHKIEIQMKHQSTSFGLMLTSNNQHKLTLSMRPDDKYHEKQAQVEATKLKQKVEALSPGDRQQIYEKGLELRSQQSKPQDASCLPALKVSDIEPTIPVTELDVVLTGHCERYAFPGSRVPWGN

SEQ ID NO: 46802 - protein, 100 aa, Homo sapiens
MNKSQEQVSFKDVCVDFTQEEWYLLDPAQKILYRDVILENYSNLVSVGYCITKPEVIFKIEQGEEPWILEKGFPSQCHPERKWKVDDVLESSQENEDDHF

SEQ ID NO: 46803 - protein, 56 aa, Homo sapiens
MAEMDPVAEFPQPPGAARWAEALLRCFTWLRLCQISMFLSLKCLNTRSSHLGAHCR

SEQ ID NO: 46804 - protein, 200 aa, Homo sapiens
  MOD_RES (1)..(1): Any amino acid
XTPPSSPSVGGVPWRARLNSIKNSFLGSPRFHRRKLQVPTPEEMSNLTPESSPELAKKSWFGNFISLEKEEQIFVVIKDKPLSSIKADIVHAFLSIPSLSHSVISQTSFRAEYKATGGPAVFQKPVKFQVDITYTEGGEAQKENGIYSVTFTLLSGPSRRFKRVVETIQAQLLSTHDPPAAQHLSDTTNCMEMMTGRLSK

SEQ ID NO: 46805 - protein, 387 aa, Homo sapiens
MAGKAAAPGTAVLLVTANVGSLFDDPENLQKNWLREFYQVVHTHKPHFMALHCQEFGGKNYEASMSHVDKFVKELLSSDAMKEYNRARVYLDENYKSQEHFTALGSFYFLHESLKNIYQFDFKAKKYRKVAGKEIYSDTLESTPMLEKEKFPQDYFPECKWSRKGFIRTRWCIADCAFDLVNIHLFHDASNLVAWETSPSVYSGIRHKALGYVLDRIIDQRFEKVSYFVFGDFNFRLDSKSVVETLCTKATMQTVRAADTNEVVKLIFRESDNDRKVMLQLEKKLFDYFNQEVFRDNNGTALLEFDKELSVFKDRLYELDISFPPSYPYSEDARQGEQYMNTRCPAWCDRILMSPSAKELVLRVSVCCPSPGHRGMWSAGSGLAQPW

SEQ ID NO: 46806 - protein, 131 aa, Homo sapiens
LHPFHVIRINKMLSCAGADRLQTGMRGAFGKPQGTVARVHIGQVIMSIRTKLQNKEHVIEALRRAKFKFPGRQKAYLALPVLGDLQKHIVEGVQLLLYGLRSGVQRDQHQAGKDCKAQGPRAAIHSWTFSP

SEQ ID NO: 46807 - protein, 112 aa, Homo sapiens
MLEYALKQERAKYHKLKYGTELNQGDLKMPTFESEETKDTEAPTAPQNSQLTWKQGRQLLRQYLQEVGYTDTILDVRSQRVRSLLGLSNSEPNGSVETKNLEQILNGGESPK

SEQ ID NO: 46808 - protein, 133 aa, Homo sapiens
GFDKTQAETIVSALTALSNVSLDTIYKEMVTQAQQEITVQQLMAHLDAIRKDMVILEKSEFANLRAENEKMKIELDQVKQQLMHETSRIRADNKLDINLERSRVTDMFTDQEKQLMETTTEFTKKLRCLLAWQ

SEQ ID NO: 46809 - protein, 1122 aa, Homo sapiens
MSLQEMFRFPMGLLLGSVLLVASAPATLEPPGCSNKEQQVTVSHTYKIDVPKSALVQVDADPQPLSDDGASLLALGEAREEQNIIFRHNIRLQTPQKDCELAGSVQDLLARVKKLEEEMVEMKEQCSAQRCCQGVTDLSRHCSGHGTFSLETCSCHCEEGREGPACERLACPGACSGHGRCVDGRCLCHEPYVGADCGYPACPENCSGHGECVRGVCQCHEDFMSEDCSEKRCPGDCSGHGFCDTGECYCEEGFTGLDCAQVVTPQGLQLLKNTEDSLLVSWEPSSQVDHYLLSYYPLGKELSGKQIQVPKEQHSYEILGLLPGTKYIVTLRNVKNEVSSSPQHLLATTDLAVLGTAWVTDETENSLDVEWENPSTEVDYYKLRYGPMTGQEVAEVTVPKSSDPKSRYDITGLHPGTEYKITVVPMRGELEGKPILLNGRTEIDSPTNVVTDRVTEDTATVSWDPVQAVIDKYVVRYTSADGDTKEMAVHKDESSTVLTGLKPGEAYKVYVWAERGNQGSKKADTNALTDIDSPQNLVTDRVTENMATVSWDPVRATIDRYVVRYTSAKDGETREVPVGKEQSSTVLTGLRPGVEYTVHVWAQKGAQESKKADTKAQTDIDSPQNLVTDWVTENTATVSWDPVQATIDRYVVHYTSANGETREVPVGKEQSSTVLTGLRPGMEYTVHVWAQKGNQESKKADTKAQTEIDGPKNLVTDWVTENMATVSWDPVQATIDKYMVRYTSADGETREVPVGKEHSSTVLTGLRPGMEYMVHVWAQKGAQESKKADTKAQTELDPPRNLRPSAVTQSGGILTWTPPSAQIHGYILTYQFPDGTVKEMQLGREDQRFALQGLEQGATYPVSLVAFKGGRRSRNVSTTLSTVGARFPHPSDCSQVQQNSNAASGLYTIYLHGDASRPLQVYCDMETDGGGWIVFQRRNTGQLDFFKRWRSYVEGFGDPMKEFWLGLDKLHNLTTGTPARYEVRVDLQTANESAYAIYDFFQVASSKERYKLTVGKYRGTAGDALTYHNGWKFTTFDRDNDIALSNCALTHHGGWWYKNCHLANPNGRYGETKHSEGVNWEPWKGHEFSIPYVELKIRPHGYSREPVLGRKKRTLRGRLRTF

SEQ ID NO: 46810 - protein, 252 aa, Homo sapiens
MGAKNHGVVMPDANKENTLNQLVGAAFGAAGQRCMALSTAVLVGEAKKWLPELVEHAKNLRVNAGDQPGADLGPLITPQAKERVCNLIDSGTKEGASILLDGRKIKVKGYENGNFVGPTIISNVKPNMTCYKEEIFGPVLVVLETETLDEAIQIVNNNPYGNGTAIFTTNGATARKYAHLVDVGQVGVNVPIPVPLPMFSFTGSRSSFRGDTNFYGKQGIQFYTQLKTITSQWKEEDATLSSPAVVMPTMGR

SEQ ID NO: 46811 - protein, 55 aa, Homo sapiens
MELVQVLKRGLQQITGHGGLRGYLRVFFRTNDAKKEDSGVDPTFNTLQVKTMKNS

SEQ ID NO: 46812 - protein, 295 aa, Homo sapiens
MDKYDVIKAIGQGAFGKAYLAKGKSDSKHCVIKEINFEKMPIQEKEASKKEVILLEKMKHPNIVAFFNSFQENGRLFIVMEYCDGGDLMKRINRQRGVLFSEDQILGWFVQISLGLKHIHDRKILHRDIKAQNIFLSKNGMVAKLGDFGIARVLNNSMELARTCIGTPYYLSPEICQNKPYNNKTDIWSLGCVLYELCTLKHPFEGNNLQQLVLKICQAHFAPISPGFSRELHSLISQLFQVSPRDRPSINSILKRPFLENLIPKYLTPENSVTCLYAEQERQLLDMLGRWSRAC

SEQ ID NO: 46813 - protein, 79 aa, Homo sapiens
RPLPITPIGVTAAMRQSVYTMIHLCDSSSQTYIVPELSATSIFLHLPLLGERRNSSVESIIIQRTCRNLSQQHKLQDQA

SEQ ID NO: 46814 - protein, 106 aa, Homo sapiens
MPVRKQDTQRALHLLEEYRSKLSQTEDRQLRSSIERVINIFQSNLFQALIDIQEFYEVTLLDNPKCIDRSKPSEPIQPVNTWEISSLPSSTVTSETLPSSLSPSVE

SEQ ID NO: 46815 - protein, 584 aa, Homo sapiens
  MOD_RES (1)..(1): Any amino acid
XIENDTGTIYSTMSFDREHQTTYTFRVKAVDGGDPPRSATATVSLFVMDENDNAPTVTLPKNISYTLLPPSSNVRTVVATVLATDSDDGINADLNYSIVGGNPFKLFEIDPTSGVVSLVGKLTQKHYGLHRLVVQVNDSGQPSQSTTTLVHVFVNESVSNATAIDSQIARSLHIPLTQDIAGDPSYEISKQRLSIVIGVVAGIMTVILIILIVVMARYCRSKNKNGYEAGKKDHEDFFTPQQHDKSKKPKKDKKNKKSKQPLYSSIVTVEASKPNGQRYDSVNEKLSDSPSMGRYRSVNGGPGSPDLARHYKSSSPLPTVQLHPQSPTAGKKHQAVQDLPPANTFVGAGDNISIGSDHCSEYSCQTNNKYSKQLVMENNVLILDSFCQIAQKYHKPFRRVTFSVVSQPQDPHQGSLQSCYDSGLEESETPSSKSSSGPRLGALPLPEDNYERTTPDGSVDSRPLPDVALTGKCTRECDEYGHSDSCWMPVRTSPERKKSQPKLSTFMPVDERGSQEKLANGEAAIMGDRNRNLLNKKLTSSYETFSAASFSKNEEANPEDIPLTKTGEYKPSPVNTLTRREVYL

SEQ ID NO: 46816 - protein, 210 aa, Homo sapiens
MSSTAAFYLLSTLGGYLVTSFLLLKYPTLLHQRKKQRFLSKHISHRGGAGENLENTMAAFQHAVKIGTDMLELDCHITKDEQVVVSHDENLKRATGVNVNISDLKYCELPPYLGKLDVSFQRACQCEGKDNRIPLLKEVFEAFPNTPINIDIKVNNNVLIKKVSELVKRYNREHLTVWGNANYEIVEKCYKEAKRTTHHVQKSKVSHLAF

SEQ ID NO: 46817 - protein, 284 aa, Homo sapiens
MQEIIQNFVRVHVDAPGMEEGAPVFPLGYQYPSLDQLADMIPCVLQYLNFSTIIGVGVGAGAYILARYALNHPDTVEGLVLINIDPNAKGWMDWAAHKLTGLTSSIPEMILGHLFSQEELSGNSELIQKYRNIITHAPNLDNIELYWNSYNNRRDLNFERGGDITLRCPVMLVVGDQAPHEDAVVECNSKLDPTQTSFLKMADSGGQPQLTQPGKLTEAFKYFLQGMGYMASSCMTRLSRSRTASLTSAASVDGNRSRSRTLSQSSESGTLSSGPPGHTMEVSC

SEQ ID NO: 46818 - protein, 214 aa, Homo sapiens
HSRTEGLKPRERISDDIIIYDVTDDNADEENIPVIPETNEDVISDPSNCSQYPDIVIVEDDNEDEYAPVIQSGEQNEPARESLSSGSDGSSPLMSSAVQLNGSSSLTSEDPVTMMDSILNDNINLLGKVELLDYLDSIDCSLEDFQAMLSGRQFSIDPDLLVDSENKGLETTKNNVVQPVSEEGRKSKSKPDKQLIQYTAFPLLAFLDGNPASS

SEQ ID NO: 46819 - protein, 159 aa, Homo sapiens
  MOD_RES (1)..(1): Any amino acid
XDAPDHESLKLLQRVLDEINPQSVVTSAKQDENMTRFLGKLASQEHREPKRPEIIFLPSVDFGLEISKQRLLSGNYSFIPDAMTATEKILFLSSIIPFDCLLTVRALGGLLKFLGRRRIGVELEDYNVSVPILGFKKFMLTHLVNIDQDTYRNPQQMPL

SEQ ID NO: 46820 - protein, 1108 aa, Homo sapiens
MSGPTDETAGDLPVKDTGLNLFGMGGLQETSTTRTMKSRQAVSRVSREELEDRFLRLHDENILLKQHARKQEDKIKRMATKLIRLVNDKKRYERVGGGPKRLGRDVEMEEMIEQLQEKVHELEKQNETLKNRLISAKQQLQTQGYRQTPYNNVQSRINTGRRKANENAGLQECPRKGIKFQDADVAETPHPMFTKYGNSLLEEARGEIRNLENVIQSQRGQIEELEHLAEILKTQLRRKENEIELSLLQLREQQATDQRSNIRDNVEMIKLHKQLVEKSNALSAMEGKFIQLQEKQRTLRISHDALMANGDELNMQLKEQRLKCCSLEKQLHSMKFSERRIEELQDRINDLEKERELLKENYDKLYDSAFSAAHEEQWKLKEQQLKVQIAQLETALKSDLTDKTEILDRLKTERDQNEKLVQENRELQLQYLEQKQQLDELKKRIKLYNQENDINADELSEALLLIKAQKEQKNGDLSFLVKVDSEINKDLERSMRELQATHAETVQELEKTRNMLIMQHKINKDYQMEVEAVTRKMENLQQDYELKVEQYVHLLDIRAARIHKLEAQLKDIAYGTKQYKFKPEIMPDDSVDEFDETIHLERGENLFEIHINKVTFSSEVLQASGDKEPVTFCTYAFYDFELQTTPVVRGLHPEYNFTSQYLVHVNDLFLQYIQKNTITLEVHQAYSTEYETIAACQLKFHEILEKSGRIFCTASLIGTKGDIPNFGTVEYWFRLRVPMDQAIRLYRERAKALGYITSNFKGPEHMQSLSQQAPKTAQLSSTDSTDGNLNELHITIRCCNHLQSRASHLQPHPYVVYKFFDFADHDTAIIPSSNDPQFDDHMYFPVPMNMDLDRYLKSESLSFYVFDDSDTQENIYIGKVNVPLISLAHDRCISGIFELTDHQKHPAGTIHVILKWKFAYLPPSGSITTEDLGNFIRSEEPEVVQRLPPASSVSTLVLAPRPKPRQRLTPVDKKVSFVDIMPHQSDETSPPPEDRKEISPEVEHIPEIEINMLTVPHVPKVSQEGSVDEVKENTEKMQQGKDDVSLLSEGQLAEQSLASSEDETEITEDLEPEVEEDMSASDSDDCIIPGPISKNIKQLCENCHIQLD

SEQ ID NO: 46821 - protein, 256 aa, Homo sapiens
MAASAAVFSRLRSGLRLGSRGLCTRLATPPRRAPDQAAEIGSRGSTKAQGPQQQPGSEGPSYAKKVALWLAGLLGAGGTVSVVYIFDPILVQQLRRTYKYFKDYRQMIIEPTSPCLLPDPLQEPYYQPPYTLVLELTGVLLHPEWSLATGWRFKKRPGIETLFQQLAPLYEIVIFTSETGMTAFPLIDSVDPHGFISYRLFRDATRYMDGHHVKDISCLNRDPARVVVVDCKKEAFRLQPYNGVALRPWDGNSDDR

SEQ ID NO: 46822 - protein, 92 aa, Homo sapiens
MGPLQFRDVAIEFSLEEWHCLDAAQRNLYRDVMLENYRNLIFLGIVVSKPNLITCLEQGKKPLTMKRHEMIAKPPETGFHRVSQDGLHLLTL

SEQ ID NO: 46823 - protein, 95 aa, Homo sapiens
MADDPSAADRNVEIWKIKKLIKSLEAARGNGTSMISLIIPPKDQISRVAKMLADEFGTASNIKSRVNRLSVLGAITSVQQRLKLYNKGSYSTTFR

SEQ ID NO: 46824 - protein, 144 aa, Homo sapiens
MSSSGAKDKPELQFPFLQDEDTVATLLECKTLFILRGLPGSGKSTLARVIVDKYRDGTKMVSADAYKITPGARGAFSEEYKRLDEDLAAYCRRRDIRILVLDDTNHERERLEQLFEMADQYQYQVVLVEPKTAWRLDCAQLKEK

SEQ ID NO: 46825 - protein, 844 aa, Homo sapiens
MRLILPQLERERMAYGIKETMLAKLYIELLNLPRDGKDALKLLNYRTPTGTHGDAGDFAMIAYFVLKPRCLQKGSLTIQQVNDLLDSIASNNSAKRKDLIKKSLLQLITQSSALEQKWLIRMIIKDLKLGVSQQTIFSVFHNDAAELHNVTTDLEKVCRQLHDPSVGLSDISITLFSAFKPMLAAIADIEHIEKDMKHQSFYIETKLDGERMQMHKDGDVYKYFSRNGYNYTDQFGASPTEGSLTPFIHNAFKADIQICILDGEMMAYNPNTQTFMQKGTKFDIKRMVEDSDLQTCYCVFDVLMVNNKKLGHETLRKRYEILSSIFTPIPGRIEIVQKTQAHTKNEVIDALNEAIDKREEGIMVKQPLSIYKPDKRGEGWLKIKPEYVSGLMDELDILIVGGYWGKGSRGGMMSHFLCAVAEKPPPGEKPSVFHTLSRVGSGCTMKELYDLGLKLAKYWKPFHRKAPPSSILCGTEKPEVYIEPCNSVIVQIKAAEIVPSDMYKTGCTLRFPRIEKIRDDKEWHECMTLDDLEQLRGKASGKLASKHLYIGGDDEPQEKKRKAAPKMKKVIGIIEHLKAPNLTNVNKISNIFEDVEFCVMSGTDSQPKPDLENRIAEFGGYIVQNPGPDTYCVIAGSENIRVKNIILSNKHDVVKPAWLLECFKTKSFVPWQPRFMIHMCPSTKEHFAREYDCYGDSYFIDTDLNQLKEVFSGIKNSNEQTPEEMASLIADLEYRYSWDCSPLSMFRRHTVYLDSYAVINDLSTKNEGTRLAIKALELRFHGAKVVSCLAEGVSHVIIGEDHSRVADFKAFRRTFKRKFKILKESWVTDSIDKCELQEENQYLI

SEQ ID NO: 46826 - protein, 48 aa, Homo sapiens
MHTTESKNEHLEDENFQTSTTPQFCSRCCLSCCCCPLHDGAARKWIWC

SEQ ID NO: 46827 - protein, 199 aa, Homo sapiens
MANLLKTVVTGCSCPLLSNLGSCKGLRVKKDFLRTFYTHQELWCKAPVKPGIPYKQLTVGVPKEIFQNEKRVALSPAGVQNLVKQGFNVVVESGAGEASKFSDDHYRVAGAQIQGAKEVLASDLVVKVRAPMVNPTLGVHEADLLKTSGTLISFIYPAQNPELLNKLSQRKTTVLAMDQVPRVTIAQGYDALSSMANIA

SEQ ID NO: 46828 - protein, 257 aa, Homo sapiens
IVEKFNALHVEKPPAALHCVFCRRGPPLPAQKVCLRCEAPCCQSHVQTHLQQPSTARGHLLVEADDVRAWSCPQHNAYRLYHCEAEQVAVCQYCCYYSGAHQGHSVCDVEIRRNEIRKMLMKQQDRLEEREQDIEDQLYKLESDKRLVEEKVNQLKEEVRLQYEKLHQLLDEDLRQTVEVLDKAQAKFCSENAAQALHLGERMQEAKKLLGSLQLLFDKTEDVSFMKNTKSVKILMDRCPVHCPQDPDLHEQQPFPH

SEQ ID NO: 46829 - protein, 473 aa, Homo sapiens
MGLLQLLAFSFLALCRARVRAQEPEFSYGCAEGSCYPATGDLLIGRAQKLSVTSTCGLHKPEPYCIVSHLQEDKKCFICNSQDPYHETLNPDSHLIENVVTTFAPNRLKIWWQSENGVENVTIQLDLEAEFHFTHLIMTFKTFRPAAMLIERSSDFGKTWGVYRYFAYDCEASFPGISTGPMKKVDDIICDSRYSDIEPSTEGEVIFRALDPAFKIEDPYSPRIQNLLKITNLRIKFVKLHTLGDNLLDSRMEIREKYYYAVYDMVVRGNCFCYGHASECAPVDGFNEEVEGMVHGHCMCRHNTKGLNCELCMDFYHDLPWRPAEGRNSNACKKCNCNEHSISCHFDMAVYLATGNVSGGVCDDCQHNTMGRNCEQCKPFYYQHPERDIRDPNFCERCTCDPAGSQNEGICDSYTDFSTGLIAGQCRCKLNVEGEHCDVCKEGFYDLSSEDPFGCKCSLCLQSSGNNSWRESL

SEQ ID NO: 46830 - protein, 402 aa, Homo sapiens
MDFRTACEETKTGICLLQDGNQEPFKVRLHLAKDILMIQEQDVICVSGEPFYSGERTVTIRRQTVGGFGLSIKGGAEHNIPVVVSKISKEQRAELSGLLFIGDAILQINGINVRKCRHEEVVQVLRNAGEEVTLTVSFLKRAPAFLKLPLNEDCACAPSDQSSGTSSPLCDSGLHLNYHPNNTDTLSCSSWPTSPGLRWEKRWCDLRLIPLLHSRFSQYVPGTDLSRQNAFQVIAVDGVCTGIIQCLSAEDCVDWLQAIATNISNLTKHNIKKINRNFPVNQQIVYMGWCEAREQDPLQDRVYSPTFLALRGSCLYKFLAPPVTTWDWTRAEKTFSVYEIMCKILKDSDLLDRRKQCFTVQSESGEDLYFSVELESDLAQWERAFQTATFLEVERIQYPYLL

SEQ ID NO: 46831 - protein, 33 aa, Homo sapiens
DKEVSFQLGASTVRKQNQLFLFDLLSLLLMIQR

SEQ ID NO: 46832 - protein, 20 aa, Homo sapiens
  MOD_RES (1)..(1): Any amino acid
XEKERHDAIFRKVRGLWTKP

SEQ ID NO: 46833 - protein, 1377 aa, Homo sapiens
MASGLGSPSPCSAGSEEEDMDALLNNSLPPPHPENEEDPEEDLSETETPKLKKKKKPKKPRDPKIPKSKRQKKELGDSSGEGPEFVEEEEEVALRSDSEGSDYTPGKKKKKKLGPKKEKKSKSKRKEEEEEEDDDDDSKEPKSSAQLLEDWGMEDIDHVFSEEDYRTLTNYKAFSQFVRPLIAAKNPKIAVSKMMMVLGAKWREFSTNNPFKGSSGASVAAAAAAAVAVVESMVTATEVAPPPPPVEVPIRKAKTKEGKGPNARRKPKGSPRVPDAKKPKPKKVAPLKIKLGGFGSKRKRSSSEDDDLDVESDFDDASINSYSVSDGSTSRSSRSRKKLRTTKKKKKGEEEVTAVDGYETDHQDYCEVCQQGGEIILCDTCPRAYHMVCLDPDMEKAPEGKWSCPHCEKEGIQWEAKEDNSEGEEILEEVGGDLEEEDDHHMEFCRVCKDGGELLCCDTCPSSYHIHCLNPPLPEIPNGEWLCPRCTCPALKGKVQKILIWKWGQPPSPTPVPRPPDADPNTPSPKPLEGRPERQFFVKWQGMSYWHCSWVSELQLELHCQVMFRNYQRKNDMDEPPSGDFGGDEEKSRKRKNKDPKFAEMEERFYRYGIKPEWMMIHRILNHSVDKKGHVHYLIKWRDLPYDQASWESEDVEIQDYDLFKQSYWNHRELMRGEEGRPGKKLKKVKLRKLERPPETPTVDPTVKYERQPEYLDATGGTLHPYQMEGLNWLRFSWAQGTDTILADEMGLGKTVQTAVFLYSLYKEGHSKGPFLVSAPLSTIINWEREFEMWAPDMYVVTYVGDKDSRAIIRENEFSFEDNAIRGGKKASRMKKEASVKFHVLLTSYELITIDMAILGSIDWACLIVDEAHRLKNNQSKFFRVLNGYSLQHKLLLTGTPLQNNLEELFHLLNFLTPERFHNLEGFLEEFADIAKEDQIKKLHDMLGPHMLRRLKADVFKNMPSKTELIVRVELSPMQKKYYKYILTRNFEALNARGGGNQVSLLNVVMDLKKCCNHPYLFPVAAMEAPKMPNGMYDGSALIRASGKLLLLQKMLKNLKEGGHRVLIFSQMTKMLDLLEDFLEHEGYKYERIDGGITGNMRQEAIDRFNAPGAQQFCFLLSTRAGGLGINLATADTVIIYDSDWNPHNDIQAFSRAHRIGQNKKVMIYRFVTRASVEERITQVAKKKMMLTHLVVRPGLGSKTGSMSKQELDDILKFGTEELFKDEATDGGGDNKEGEDSSVIHYDDKAIERLLDRNQDETEDTELQGMNEYLSSFKVAQYVVREEEMGIGRTTSPTTSPITQWLQRKVMKTLMNVQKLPVGPVVRACGMIKISHCLLCWPVLVGILKYLVLMLVSEKPFLMQLCDMVCHLRMLLLPSGL

SEQ ID NO: 46834 - protein, 240 aa, Homo sapiens
MRWLWPLAVSLAVILAVGLSRVSGGAPLHLGRHRAETQEQQSRSKRGTEDEEAKGVQQYVPEEWAEYPRPIHPAGLQPTKPLVATSPNPGKDGGTPDSGQELRGNLTGAPGQRLQIQNPLYPVTESSYSAYAIMLLALVVFAVGIVGNLSVMCIVWHSYYLKSAWNSILASLALWDFLVLFFCLPIVIFNEITKQRLLGDVSCRAVPFMEGFALSPRLECSVVILAHCSLSLLGSSHPPT

SEQ ID NO: 46835 - protein, 902 aa, Homo sapiens
MNISGSSCGSPNSADTSSDFKDLWTKLKECHDREVQGLQVKVTKLKQERILDAQRLEEFFTKNQQLREQQKVLHETIKVLEDRLRAGLCDRCAVTEEHMRKKQQEFENIRQQNLKLITELMNERNTLQEENKKLSEQLQQKIENDQQHQAAELECEEDVIPDSPITAFSFSGVNRLRRKENPHVRYIEQTHTKLEHSVCANEMRKVSKSSTHPQHNPNENEILVADTYDQSQSPMAKAHGTSSYTPDKSSFNLATVVAETLGLGVQEESETQGPMSPLGDELYHCLEGNHKKQPFEESTRNTEDSLRFSDSTSKTPPQEELPTRVSSPVFGATSSIKSGLDLNTSLSPSLLQPGKKKHLKTLPFSNTCISRLEKTRSKSEDSALFTHHSLGSEVNKIIIQSSNKQILINKNISESLGEQNRTEYGKDSNTDKHLEPLKSLGGRTSKRKKTEEESEHEVSCPQASFDKENAFPFPMDNQFSMNGDCVMDKPLDLSDRFSAIQRQEKSQGSETSKNKFRQVTLYEALKTIPKGFSSSRKASDGNCTLPKDSPGEPCSQECIILQPLNKCSPDNKPSLQIKEENAVFKIPLRPRESLETENVLDDIKSAGSHEPIKIQTRSDHGGCELASVLQLNPCRTGKIKSLQNNQDVSFENIQWSIDPGADLSQYKMDVTVIDTKDGSQSKLGGETVDMDCTLVSETVLLKMKKQEQKGEKSSMLFYIDEERKMNDSLEDMFDRTTHEEYESCLADSFSQAADEEEELSTATKKLHTHGDKQDKVKQKAFVEPYFKGDERETSLQNFPHIEVVRKKEERRKLLGHTCKECEIYYADMPAEEREKKLASCSRHRFRYIPPNTPENFWEVGFPSTQTCMERGYIKEDLDPCPRPKRRQPYNAIFSPKGKEQKT

SEQ ID NO: 46836 - protein, 82 aa, Homo sapiens
MDIVDTFNHLIPTEHLDDALFLGSNLENEVCEDFSASQNVLEDSLKNMLSDKDPMLGSASNQFCLPVLDSNDPNFQMPCSTG

SEQ ID NO: 46837 - protein, 311 aa, Homo sapiens
  MOD_RES (1)..(1): Any amino acid
XGSTGTRVHVFQFTRPPRETPTLTHETFKALKPGLSAYADDVEKSAQGIRELLDVAKQDIPFDFWKATPLVLKATAGLRLLPGEKAQKLLQKVKKVFKASPFLVGDDCVSIMNGTDEGVSAWITINFLTGSLKTPGGSSVGMLDLGGGSTQIAFLPRVEGTLQASPPGYLTALRMFNRTYKLYSYSYLGLGLMSARLAILGGVEGQPAASLHELCAARVSEVLQNRVHRTEEVKHVDFYAFSYYYDLAAGVGLIDAEKGGSLVVGDFEIAAKYVCRTLETQPQSSPFSCMDLTYVSLLLQEFGFPRSKVLK

SEQ ID NO: 46838 - protein, 78 aa, Homo sapiens
MEEGARHRNNTEKKHPGGGESDASPEAGSGGGGVALKKEIGLVSACGIIVGNIIGSGIFVSPKGVLENAGSVGLALIV

SEQ ID NO: 46839 - protein, 426 aa, Homo sapiens
MAGAGPAPGLPGAGGPVVPGPGAGIPGKSGEERLKEMEAEMALFEQEVLGAPVPGIPTAVPAVPTVPTVPTVEAMQVPAAPVIRPIIATNTYQQVQQTLEARAAAAATVVPPMVGGPPFVGPAAGPRPMALRPPHQALVGPPLPGPPGPPMMLPPMARAPGPPLGSMAALRPPLEEPAAPRELGLGLGLGLKEKEEAVVAAAAGLEEASAAVAVGAGGAPAGPAVIGPSLPLALAMPLPEPEPLPLPLEVVRGLLPPLRIPELLSLRPRPRPPRPEPPPGLMALEVPEPLGEDKKKGKPEKLKRCIRTAAGSSWEDPSLLEWDADDFRIFCGDLGNEVNDDILARAFSRFPSFLKAKVIRDKRTGKTKGYGFVSFKDPSDYVRAMREMNGKYVGSRPIKLRKSMWKDRNLDVVRKKQKEKKKLGLR

SEQ ID NO: 46840 - protein, 35 aa, Homo sapiens
QTNSALKEKLDGGIEPYRLPEPSGNMAEIFRQSQT

SEQ ID NO: 46841 - protein, 68 aa, Homo sapiens
MACTIQKAEALDGAHLMQILWYDEEESLYPAVWLRDNCPCSDCYLDSAKARKLLVEALDVNIGIKGLI

SEQ ID NO: 46842 - protein, 150 aa, Homo sapiens
MGEIKVSPDYNWFRGTVPLKKIIVDDDDSKIWSLYDAGPRSIRCPLIFLPPVSGTADVFFRQILALTGWGYRVIALQYPVYWDHLEFCDGFRKLLDHLQLDKVHLFGASLGGFLAQKFAEYTHKSPRVHSLILCNSFSDTSIFNQTWTAN

SEQ ID NO: 46843 - protein, 55 aa, Homo sapiens
METRPRLGATCLLGFSFLLLVISSDGHNGLGKGFGDHIHWRTLEDGKKEAAARPY

SEQ ID NO: 46844 - protein, 241 aa, Homo sapiens
MRSRKLTGAVRSSARLKARSCSAARLASAQEVAGSTSAKTACLTSSSHKATDTRTSKKFKCDKGHLVKSELQKLVPKNDSASLPKVTPETPCENEFAEGSALLPGSEAGVSVQQGAASLPLGGCRVVSDSRLAKTRDGLSVPKHSAGSGAEESNSSSTVQKQNEPGLQTEDVQKPPLQMDNSVFLDDDSNQPMPVSRFFGNVELMQVRAAPSSSRGYSGSSCTFRSHTPHSVQVNNASTQH

SEQ ID NO: 46845 - protein, 165 aa, Homo sapiens
KEGRRASHTAPQVLFSHREPPLELKDTDAAVGDNIGYITFVLFPRHTNASARDNTINLIHTFRDYLHYHIKCSKAYIHTRMRAKTSDFLKVLNRARPDAEKKEMKTITFSLAELGPRKEKQETNSCIHPENQIMLLMGEDVFIPLILGIRGGSGWQLKAGTLATG

SEQ ID NO: 46846 - protein, 54 aa, Homo sapiens
TYHPADKDYGLMKIDEPSTPYHSMMGDDEDACSDTEATEAMAPDILARKKKATI

SEQ ID NO: 46847 - protein, 306 aa, Homo sapiens
KRQHIQGGCAAWMALLTGRGSPLSTPRLCQPHAPSSLSLCRAVQLLSSLTECLTVDPLSASVWRQLYPKHLSQSSLLLEHLLSSWEQIPKKVQKSLQETIQSLKLTNQELLRKGSSNNQDVVTCDMACKGLLQQVQGPRLPWTRLLLLLLVFAVGFLCHDLRSHSSFQASLTGRLLRSSGFLPASQQACAKLYSYSLQGYSWLGETLPLWGSHLLTVVRPSLQLAWAHTNATVSFLSAHCASHLAWFGDSLTSLSQRLQIQLPDSVNQLLRYLRELPLLFHQNVLLPLWHLLLEALAWAQEHCHEA

SEQ ID NO: 46848 - protein, 336 aa, Homo sapiens
MAFAAALSPSPASGPLFALNRRLHQPATSRVTWRLVIPAEGQSTGKGPPQSPVFEGVYNNSRMLHFLTAVVGSTCDVKVKNGTTYEGIFKTLSSKFELAVDAVHRKASEPAGGPRREDIVDTMVFKPSDVMLVHFRNVDFNYATKDKFTDSAIAMNSKVNGEHKEKVLQRWEGGDSNSDDYDLESDMSNGWDPNEMFKFNEENYGVKTTYDSSLSSYTVPLEKDNSEEFRQRELRAAQLAREIESSPQYRLRIAMENDDGRTEEEKHSAVQRQGSGRESPSLASREGKYIPLPQRVREGPRGGVRCSSSRGGRPGLSSLPPRGPHHLDNSSPGPGS

SEQ ID NO: 46849 - protein, 136 aa, Homo sapiens
MNLQPIFWIGLISSVCCVFAQTDENRCLKANAKSCGECIQAGPNCGWCTNSTFLQEGMPTSARCDDLEALKKKGCPPDDIENPRGSKDIKKNKNVTNRSKGTAEKLKPEDITQIQPQQLVLRLRSGEPQTFTLKFK

SEQ ID NO: 46850 - protein, 185 aa, Homo sapiens
  MOD_RES (1)..(1): Any amino acid
XPMGALLLHPSRRGPAGVVASWTSSPAGRDGGVGIAGAWYFPRASSQAREMPQCPTLESQEGENSEEKGDSSKEDPKETVALAFVRENPGAQNGLQNAQQQGKKKRKKKRMPLKNSRKRRFPCFKKALICPGNLVRLQYDSTILTYQDPTAACAFQFLFNISPCLAPFRLIDEGKLVHFLIHSFP

SEQ ID NO: 46851 - protein, 62 aa, Homo sapiens
MLLPLLLLLPMCWAVEVKRPRGVSLTNHHFYDESKPFTCLDGSATIPFDQVNDDYCDCKDGS

SEQ ID NO: 46852 - protein, 182 aa, Homo sapiens
MKGQEFVDEIQGRYPHLLEQLLSTSDTTGEENADPPIIHFGPGESSSEDAVMMNTPVVKSALEMGFNRDLVKQTVQSKILTTGENYKTVNDIVSALLNAEDEKREEEKEKQAEEMASDDLSLIRKNRMALFQQLTCVLPILDNLLKANVINKQEHDIIKQKTQIPLQARELIDTILVKGNAA

SEQ ID NO: 46853 - protein, 226 aa, Homo sapiens
MSNYVNDMWPGSPQEKDSPSTSRSGGSSRLSSRSRSRSFSRSSRSHSRVSSRFSSRSRRSKSRSRSRRRHQRKYRRYSRSYSRSRSRSRSRRYRERRYGFTRRYYRSPSRYRSRSRSRSRSRGRSYCGRAYAIARGQRYYGFGRTVYPEEHSRWRDRSRTRSRSRTPFRLSEKDRMELLEIAKTNAAKALGTTNIDLPASLRTVPSAKETSRGIGVSSNGAKPEMF

SEQ ID NO: 46854 - protein, 79 aa, Homo sapiens
MSLLSLPWLGLRPVATSPWLLLLLVVGSWLLARILAWTYAFYNNCRRLQCFPQPPKRNWFWGHLGLLPLHPRIISSSGS

SEQ ID NO: 46855 - protein, 104 aa, Homo sapiens
MNKLFSFWKRKNETRSQGYNLREKDLKKLHRAASVGDLKKLKEYLQIKKYDVNMQDKKYSVVQSSRWLLSYTTPLNDFIRTPLHLACANGHTDVVLFLIEQQCK

SEQ ID NO: 46856 - protein, 168 aa, Homo sapiens
EQECMLDLESYGYSSEDIVYYWSESQEHIHGLDKLQLAQFTITSYRFTTELMNFKSAGQFPRLSLHFHLRRNRGVYIIQSYMPSVLLVAMSWVSFWISQAAVPARVSLVPAPPCHGHQPSRHWTSTSGSAMSSCLPPWWSTPLLISTPTTGRSRRPRSRSPGRGQRWT

SEQ ID NO: 46857 - protein, 158 aa, Homo sapiens
  MOD_RES (1)..(1): Any amino acid
XCQGLLDWPATLPCGHSFCRHCLEALWGARDARRWACPTCRQGAAQQPHLRKNTLLQDLADKYRRAAREIQAGSDPAHCPCPGSSSLSSAAARPRRRPELQRAFSSGVDLSMASPKLVTSDTAAGKIRDILHDLEEIQEKLQESVTWKEAPEAQMQGE

SEQ ID NO: 46858 - protein, 1563 aa, Homo sapiens
  MOD_RES (1)..(1): Any amino acid
XEGRTEGEGKPGPARAVPAETACVTSGTRLGSRIRNLQIDLAAQYIKAAVKNVPSVFLMTDSQVAEEQFLVLINDLLASGEIPGLFMEDEVENIISSMRPQVKSLGMNDTRETCWKFFIEKVRRQLKVILCFSPVGSVLRVRARKFPAVVNCTAIDWFHEWPEDALVSVSARFLEETEGIPWEVKASISFFMSYVHTTVNEMSRVYLATERRYNYTTPKTFLEQIKLYQNLLAKKRTELVAKIERLENGLMKLQSTASQVDDLKAKLAIQEAELKQKNESADQLIQVVGIEAEKVSKEKAIADQEEVKVEVINKNVTEKQKACETDLAKAEPALLAAQEALDTLNKNNLTELKSFGSPPDAVVNVTAAVMILTAPGGKIPKDKSWKAAKIMMGKVDTFLDSLKKFDKEHIPEACLKAFKPYQGNPTFDPEFIRSKSTAAAGLCSWCINIVRFYEVYCDVAPKRQALEEANAELAEAQEKLSRIKNKIAELNANLSNLTSAFEKATAEKIKCQQEADATNRVILLANRLVGGLASENIRWAESVENFRSQGVTLCGDVLLISAFVSYVGYFTKKYRNELMEKFWIPYIHNLKVPIPITNGLDPLSLLTDDADVATWNNQGLPSDRMSTENATILGNTERWPLIVDAQLQGIKWIKNKYRSELKAIRLGQKSYLDVIEQAISEGDTLLIENIGETVDPVLDPLLGRNTIKKGKYIKIGDKEVEYHPKFRLILHTKYFNPHYKPEMQAQCTLINFLVTRDGLEDQLLAAVVAKERPDLEQLKANLTKSQNEFKIVLKELEDSLLARLSAASGNFLGDTALVENLETTKHTASEIEEKVVEAKITEVKINEARENYRPAAERASLLYFILNDLNKINPVYQFSLKAFNVVFEKAIQRTTPANEVKQRVINLTDEITYSVYMYTARGLFERDKLIFLAQVTFQVLSMKKELNPVELDFLLRFPFKAGVVSPVDFLQHQGWGGIKALSEMDEFKNLDSDIEGSAKRWKKLVESEAPEKEIFPKEWKNKTALQKLCMVRCLRPDRMTYAIKNFVEEKMGSKFVEGRSVEFSKSYEESSPSTSIFFILSPGVDPLKDVEALGKKLGFTIDNGKLHNVSLGQGQEVVAENALDVAAEKGHWVILQNIHLVARWLGTLDKKLEHYSTGSHEDYRVFISAEPAPSPETHIIPQGILENAIKITNEPPTGMHANLHKALDLFTQDTLEMCTKEMEFKCMLFALCYFHAVVAERRKFGAQGWNRSYPFNNGDLTISINVLYNYLEANPKVPWDDLRYLFGEIMYGGHITDDWDRRLCRTYLAEYIRTEMLEGDVLLAPGFQIPPNLDYKGYHEYIDENLPPESPYLYGLHPNAEIGFLTVTSEKLFRTVLEMQPKETDSGAGTGVSREEKVKAVLDDILEKIPETFNMAEIMAKAAEKTPYVVVAFQECERMNILTNEMRRSLKELNLGLKGELTITTDVEDLSTALFYDTVPDTWVARAYPSMMGLAAWYADLLLRIRRLVCPCRNSRPGRQTLPCPPPCGWPASSTPSRSSRPSCSPWPGRTSGPWTRCVCLSR

SEQ ID NO: 46859 - protein, 98 aa, Homo sapiens
MKGGEGDAGEQAPLNPEGESPAGSATYREFVHRGYLDLMGASQHSLRALSWRRLYLSRAKLKASSRTSALLSGFAMGTPGDGATGGHESPKGVVVGVG

SEQ ID NO: 46860 - protein, 199 aa, Homo sapiens
MEFSIKQSPLSVQSVVKCIKMKQAPEILGSANGKTPSCEVNRECSVFLSKAQLSSSLQEGVMQKFNGHDALPFIPADKLKDLTSRVFNGEPGAHDAKLRFESQEMKGIGTPPNTTPIKNGSPEIKLKITKTYMNGKPLFESSICGDSAADVSQSEENGQKPENKARRNRKRSIKYDSLLEQGLVEAALVSKISSPSDKK

SEQ ID NO: 46861 - protein, 50 aa, Homo sapiens
MVVERDDGSTLMEIDGDKGKQGGPTYYIDTNALRVPRENMEAISPLKNGM

SEQ ID NO: 46862 - protein, 521 aa, Homo sapiens
MNVSLSQKTVKIHRLFPMLAFSEPYEFVSLEWLQKWLDESTPTKPIDNHACLCSHDKLHPDKISIMKRISEYAADIFYSRYGGGPRLTVKALCKECVVERCRILRLKNQLNEDYKTVNNLLKAAVKGDGFWVGKSSLRSWRQLALEQLDEQDGDAEQSNGKMNGSTLNKDESKEERKEEEELNFNEDILCPHGELCISENERRLVSKEAWSKLQQYFPKAPEFPSYKECCSQCKILEREGEENEALHKMIANEQKTSLPNLFQDKNRPCLSNWPEDTDVLYIVSQFFVEEWRKFVRKPTRCSPVSSVGNSALLCPHGGLMFTFASMTKEDSKLIALIWPSEWQMIQKLFVVDHVIKITRIEVGDVNPSETQYISEPKLCPECREGLLCQQQRDLREYTQATIYVHKVVDNKKVMKDSAPELNVSSSETEEDKEEAKPDGEKDPDFNQIMHAFSVAPFDQNLSIDGKILSDDCATLGTLGVIPESVILLKADEPIADYAAMDDVMQVCMPEEGFKGTGLLGH

SEQ ID NO: 46863 - protein, 222 aa, Homo sapiens
MLGRNTWKTSAFSFLVEQMWAPLWSRSMRPGRWCSQRSCAWQTSNNTLHPLWTVPVSVPGGTRQSPINIQWRDSVYDPQLKPLRVSYEAASCLYIWNTGYLFQVEFDDATEASGISGGPLENHYRLKQFHFHWGAVNEGGSEHTVDGHAYPAELHLVHWNSVKYQNYKEAVVGENGLAVIGVFLKLGAHHQTLQRLVDILPEIKHKLAMSTTKSAFKLEFGC

SEQ ID NO: 46864 - protein, 108 aa, Homo sapiens
  MOD_RES (1)..(1): Any amino acid
XDNEEESDEVEDNDNDSEMERPVNRGGSRSRRVSLSDGSDSESSSASSPLHHEPPPPLLKTNNNQIVNLIEETGHFHITNTTFDFDLCSLDKTTVRKLQSYLETSGTS

SEQ ID NO: 46865 - protein, 106 aa, Homo sapiens
MTAEETVNVKEVEIIKLILDFLNSKKLHISMLALEKESGVINGLFSDDMLFLRQLILDGQWDEVLQFIQPLECMEKFDKKRFRYIILKQKFLEALCVNNAMSAEDE

SEQ ID NO: 46866 - protein, 73 aa, Homo sapiens
MDPNCSCAAGDSCTCAGSCKCKECKCTSCKKSKWDPLFPLPLPCPPACPLSTILRGIKAVWGCPIARKLLPPQ

SEQ ID NO: 46867 - protein, 150 aa, Homo sapiens
MALYDEDLLKNPFYLALQKCRPDLCSKVAQIHGIVLVPCKGSLSSSIQSTCQFESYILIPVEEHFQTLNGKDVFIQGNRIKLGAGFACLLSVPILFEETFYNEKEESFSILCIAHPLEKRESSEPLAPSDPFSLKTIEDVREFLGRHSER

SEQ ID NO: 46868 - protein, 162 aa, Homo sapiens
MGYLDSIGWRTHLNMWNPNAGQPGPNPYPPNIGCPGGSNPAHPPPINPPFPPGPCPPPPGAPHGNPAFPPGGPPHPVPQPGYPGCQPLGPYPPPYPPPAPGIPPVNPLAPGMVGPAVIVDKKMQKKMKKAHKKMHKHQKHHKYHKHGKHSSSSSSSSSSDSD

SEQ ID NO: 46869 - protein, 133 aa, Homo sapiens
MEPVPLQDFVRALDPASLPRVLRVCSGVYFEGYFTPLNTPQSYETLEELVSATTQSSKQLPTCFMSTHRIVTEGRVVTEDQLLMLEAVVMHLGIRSARCVLGMEGQQVILHLPLSQKGPFWTWEPSAPRTLLQ

SEQ ID NO: 46870 - protein, 188 aa, Homo sapiens
  MOD_RES (1)..(1): Any amino acid
XEREGEKREEEKEGEDKSQPKSIRERRRPREKRRSTGVSFWTQDSDENEQEQQSDTEEGSNKKETQTDSISRYETSSTSAGDRYDSLLGRSGSYSYLEERKPYSSRLEKDDSTDFKKLYEQILAENEKLKAQLHDTNMELTDLKLQLEKATQRQERFADRSLLEMEKRVTGKSQYLLGGTKSSRKKNI

SEQ ID NO: 46871 - protein, 1758 aa, Homo sapiens
MTTMLQKSDSNASFLRAARAGNLDKVVEYLKGGIDINTCNQNGLNALHLAAKEGHVGLVQELLGRGSSVDSATKKGNTALHIASLAGQAEVVKVLVKEGANINAQSQNGFTPLYMAAQENHIDVVKYLLENGANQSTATEDGFTPLAVALQQGHNQAVAILLENDTKGKVRLPALHIAARKDDTKSAALLLQNDHNADVQSKMMVNRTTESGFTPLHIAAHYGNVNVATLLLNRGAAVDFTARNGITPLHVASKRGNTNMVKLLLDRGGQIDAKTRDGLTPLHCAARSGHDQVVELLLERGAPLLARTKNGLSPLHMAAQGDHVECVKHLLQHKAPVDDVTLDYLTALHVAAHCGHYRVTKLLLDKRANPNARALNGFTPLHIACKKNRIKVMELLVKYGASIQAITESGLTPIHVAAFMGHLNIVLLLLQNGASPDVTNIRGETALHMAARAGQVEVVRCLLRNGALVDARAREEQTPLHIASRLGKTEIVQLLLQHMAHPDAATTNGYTPLHISAREGQVDVASVLLEAGAAHSLATKKGFTPLHVAAKYGSLDVAKLLLQRRAAADSAGKNGLTPLHVAAHYDNQKVALLLLEKGASPHATAKNGYTPLHIAAKKNQMQIASTLLNYGAETNIVTKQGVTPLHLASQEGHTDMVTLLLDKGANIHMSTKSGLTSLHLAAQEDKVNVADILTKHGADQDAHTKLGYTPLIVACHYGNVKMVNFLLKQGANVNAKTKNGYTPLHQAAQQGHTHIINVLLQHGAKPNATTANGNTALAIAKRLGYISVVDTLKVVTEEVTTTTTTITEKHKLNVPETMTEVLDVSDEEGDDTMTGDGGEYLRPEDLKELGDDSLPSSQFLDGMNYLRYSLEGGRSDSSDRSHTLSHASYLRDSAVMDDSVVIPSHQVSTLAKEAERNSYRLSWGTENLDNVALSSSPIHSGFLVSFMVDARGGAMRGCRHNGLRIIIPPRKCTAPTRVTCRLVKRHRLATMPPMVEGEGLASRLIEVGPSGAQFLGPVIVEIPHFAALRGKERELVVLRSENGDSWKEHFCDYTEDELNEILNGMDEVLDSPEDLEKKRICRIITRDFPQYFAVVSRIKQDSNLIGPEGGVLSSTVVPQVQAVFPEGALTKRIRVGLQAQPMHSELVKKILGNKATFSPIVTLEPRRRKFHKPITMTIPVPKASSDVMLNGFGGDAPTLRLLCSITGGTTPAQWEDITGTTPLTFVNECVSFTTNVSARFWLIDCRQIQESVTFASQVYREIICVPYMAKFVVFAKSHDPIEARLRCFCMTDDKVDKTLEQQENFAEVARSRDVEVLEGKPIYVDCFGNLVPLTKSGQHHIFSFFAFKENRLPLFVKVRDTTQEPCGRLSFMKEPKSTRGLVHQAICNLNITLPIYTKESESDQEQEEEIDMTSEKNPQDEQERIEERLAYIADHLGFSWTELARELDFTEEQIHQIRIENPNSLQDQSHALLKYWLERDGKHATDTNLVECLTKINRMDIVHLMETNTEPLQERISHSYAEIEQTITLDHSEGFSVLQEELCTAQHKQKEEQAVSKESETCDHPPIVSEEDISVGYSTFQDGVPKTEGDSSATALFPQTHKEQVQQDFSGKMQDLPEESSLEYQQEYFVTTPGTETSETQKAMIVPSSPSKTPEEVSTPAEEEKLYLQTPTSSERGGSPIIQEPEEPSEHREESSPRKTSLVIVESADNQPETCERLDEDAAFEKGDDMPEIPPETVTEEEYIDEHGHTVVKKDNNE

SEQ ID NO: 46872 - protein, 975 aa, Homo sapiens
MPPRAPPAPGPRPPPRAAAATDTAAGAGGAGGAGGAGGPGFRPLAPRPWRWLLLLALPAACSAPPPRPVYTNHWAVQVLGGPAEADRVAAAHGYLNLGQIGNLEDYYHFYHSKTFKRSTLSSRGPHTFLRMDPQVKWLQQQEVKRRVKRQVRSDPQALYFNDPIWSNMWYLHCGDKNSRCRSEMNVQAAWKRGYTGKNVVVTILDDGIERNHPDLAPNYDSYASYDVNGNDYDPSPRYDASNENKHGTRCAGEVAASANNSYCIVGIAYNAKIGGIRMLDGDVTDVVEAKSLGIRPNYIDIYSASWGPDDDGKTVDGPGRLAKQAFEYGIKKGRQGLGSIFVWASGNGGREGDYCSCDGYTNSIYTISVSSATENGYKPWYLEECASTLATTYSSGAFYERKIVTTDLRQRCTDGHTGTSVSAPMVAGIIALALEANSQLTWRDVQHLLVKTSRPAHLKASDWKVNGAGHKVSHFYGFGLVDAEALVVEAKKWTAVPSQHMCVAASDKRPRSIPLVQVLRTTALTSACAEHSDQRVVYLEHVVVRTSISHPRRGDLQIYLVSPSGTKSQLLAKRLLDLSNEGFTNWEFMTVHCWGEKAEGQWTLEIQDLPSQVRNPEKQGKLKEWSLILYGTAEHPYHTFSAHQSRSRMLELSAPELEPPKAALSPSQVEVPEDEEDYTAQSTPGSANILQTSVCHPECGDKGCDGPNADQCLNCVHFSLGSVKTSRKCVSVCPLGYFGDTAARRCRRCHKGCETCSSRAATQCLSCRRGFYHHQEMNTCVTLCPAGFYADESQKNCLKCHPSCKKCVDEPEKCTVCKEGFSLARGSCIPDCEPGTYFDSELIRCGECHHTCGTCVGPGREECIHCAKNFHFHDWKCVPACGEGFYPEEMPGLPHKVCRRYGPPGGERQAAVSSKGVPGGQSLAASSPGAGEGMLHHPTVDRSPFTELLRGLRPFVHWMHICWVPAVGRHRAAAG

SEQ ID NO: 46873 - protein, 115 aa, Homo sapiens
MNISVDLETNYAELVLDVGRVTLGENSRKKMKDCKLRKKQNESVSRAMCALLNSGGGVIKAEIENEDYSYTKDGIGLDLENSFSNILLFVPEYLDFMQNGNYFLIFVKSWSLNTS

SEQ ID NO: 46874 - protein, 428 aa, Homo sapiens
MARGERRRRAVPAEGVRTAERAARGGPGRRDGRGGGPRSTAGGVALAVVVLSLALGMSGRWVLAWYRARRAVTLHSAPPVLPADSSSPAVAPDLFWGTYRPHVYFGMKTRSPKPLLTGLMWAQQGTTPGTPKLRHTYGKEVLLPEVGAKGQLKFISGHTSELGDFRFTLLPPTSPGDTAPKYGSYNVFWTSNPGLPLLTEMVKSRLNSWFQHRPPGAPPERYLGLPGSLKWEDRGPSGQGQGQFLIQQVTLKIPISIEFVFESGSAQAGGNQALPRLAGSLLTQALESHAEGFRERFEKTFQLKEKGLSSGEQVLGQAALSGLLGGIGYFYGQGLVLPDIGVEGSEQKVDPALFPPVPLFTAVPSRSFFPRGFLWDEGFHQLVVQRWDPSLTREALGHWLGLLNADGWIGREQILGDEARARVPPEFL

SEQ ID NO: 46875 - protein, 70 aa, Homo sapiens
MAKSAEVKLAIFGRAGVGKSALVVRFLTKRFIWEYDPTLESTYRHQATIDDEVVSMEILDTAGQVNKEFS

SEQ ID NO: 46876 - protein, 393 aa, Homo sapiens
MLLPGRARQPPTPQPVQHPGLRRQVEPPGQLLRLFYCTVLVCSKEISALTDFSGYLTKLLQNHTTYACDGDYLNLQCPRHSTISVQSAFYGQDYQMCSSQKPASQREDSLTCVAATTFQKVLDECQNQRACHLLVNSRVFGPDLCPGSSKYLLVSFKCQPNELKNKTVCEDQELKLHCHESKFLNIYSATYGRRTQERDICSSKAERLPPFVPKNILTAIDPAIANLKPSLKQKDGEYGINFDPSGSKVLRKDGILVSNSLAAFAYIRAHPERAALLFVSSVCIGLALTLCALVIRESCAKDFRDLQLGREQLVPGSDKVEEDSEDEEEEEDPSESDFPGELSGFCRTSYPIYSSIEAAELAERIERREQIIQEIWMNSGLDTSLPRNMGQFY

SEQ ID NO: 46877 - protein, 355 aa, Homo sapiens
MKPILLQGHERSITQIKYNREGDLLFTVAKDPIVNVWYSVNGERLGTYMGHTGAVWCVDADWDTKHVLTGSADNSCRLWDCETGKQLALLKTNSAVRTCGFDFGGNIIMFSTDKQMGYQCFVSFFDLRDPSQIDNNEPYMKIPCNDSKITSAVWGPLGECIIAGHESGELNQYSAKSGEVLVNVKEHSRQINDIQLSRDMTMFVTASKDNTAKLFDSTTLEHQKTFRTERPVNSAALSPNYDHVVLGGGQEAMDVTTTSTRIGKFEARFFHLAFEEEFGRVKGHFGPINSVAFHPDGKRGRCQKRRHRRAQTAPTVALPQTPMTVGTGSPAATRSPGRGERFHHVGQNGLGLLTL

SEQ ID NO: 46878 - protein, 193 aa, Homo sapiens
MAAASVTPPGSLELLQPGFSKTLLGTKLEAKYLCSACRNVLRRPFQAQCGHRYCSFCLASILSSGPQNCAACVHEGIYEEGISILESSSAFPDNAARREVESLPAVCPSDGCTWKGTLKEYESCHEGRCPLMLTECPACKGLVRLGEKERHLEHECPERSLSCRHCRAPCCGADVKAHHEVCPKFPLTCDGCG

SEQ ID NO: 46879 - protein, 137 aa, Homo sapiens
MDLTAYAELLKESGNQVLKNGNFSLAIRKYDEAIQILLQLYQWGVPPRDLAVLLCNKSNAFFSLGKWNEAFVAAKECLQWDPTYVKGYYRAGYSLLRLHQPYEAARMFFEGLRLVQRSQDQAPVADFLVGVFTTMSS

SEQ ID NO: 46880 - protein, 2169 aa, Homo sapiens
MTHSPATSEDEERHSASECPEGGSESDSSPDGPGRGPRGTRGQGSGAPGSLASVRGLQGRSMSVPDDAHFSMMVFRIGIPDLHQTKCLRFNPDATIWTAKQQVLCALSESLQDVLNYGLFQPATSGRDANFLEEERLLREYPQSFEKGVPYLEFRYKTRVYKQTNLDEKQLAKLHTKTGLKKFLEYVQLGTSDKVARLLDKGLDPNYHDSDSGETPLTLAAQTEGSVEVIRTLCLGGAHIDFRARDGMTALHKAACARHCLALTALLDLGGSPNYKDRRGLTPLFHTAMVGGDPRCCELLLFNRAQLGIADENGWQEIHQACQRGHSQHLEHLLFYGAEPGAQNASGNTALHICALYNKETCARILLYRGADKDVKNNNGQTPFQVAVIAGNFELGELIRNHREQDVVPFQESPKYAARRRGPPGTGLTVPPALLRANSDTSMALPDWMVFSAPGAASSGAPGPTSGSQGQSQPSAPTTKLSSGTLRSASSPRGARARSPSRGRHPEDAKRQPRGRPSSSGTPREGPAGGTGGSGGPGGSLGSRGRRRKLYSAVPGRSFMAVKSYQAQAEGEISLSKGEKIKVLSIGEGGFWEGQVKGRVGWFPSDCLEEVANRSQESKQESRSDKAKRLFRHYTVGSYDSFDAPSLMDGIGPGSDYIIKEKTVLLQKKDSEGFGFVLRGAKAQTPIEEFTPTPAFPALQYLESVDEGGVAWRAGLRMGDFLIEVNGQNVVKVGHRQVVNMIRQGGNTLMVKVVMVTRHPDMDEAVHKKAPQQAKRLPPPTISLRSKSMTSELEEMVSPWKKKSEYEQQPAPVPSMEKKRTVYQMALNKLDEILAAAQQTISASESPGPGGLASLGKHRPKGFFATESSFDPHHRAQPSYERPSFLPPGPGLMLRQKSIGAAEDDRPYLAPPAMKFSRSLSVPGSEDIPPPPTTSPPEPPYSTPPVPSSSGRLTPSPRGGPFNPGSGGPLPASSPASFDGPSPPDTRVGSREKSLYHSGPLPPAHHHPPHHHHHHAPPPQPHHHHAHPPHPPEMETGGSPDDPPPRLALGPQPSLRGWRGGGPSPTPGAPSPSHHGSAGGGGGSSQGPALRYFQLPPRAASAAMYVPARSGRGRKGPLVKQTKVEGEPQKGGGLPPAPSPTSPASPQPPPAVAAPSEKNSIPIPTIIIKAPSTSSSGRSSQGSSTEAEPPTQPEPTGGGGGGGSSPSPAPAMSPVPPSPSPVPTPASPSGPATLDFTSQFGAALVGAARREGGWQNEARRRSTLFLSTDAGDEDGGDGGLGTGAAPGPRLRHSKSIDEGMFSAEPYLRLESAGSGAGYGGYGAGSRAYGGGGGSSAFTSFLPPRPLVHPLTGKALDPASPLGLALAARERALKESSEGGGAPQPPPRPPSPRYEAPPPTPHHHSPHAHHEPVLRLWGASPPDPARRELGYRAGLGSQEKSLPASPPAARRSLLHRLPPTAPGVGPLLLQLGTEPPAPHPGVSKPWRSAAPEEPERLPLHVRFLENCQPRAPVTSGRGPPSEDGPGVPPPSPRRSVPPSPTSPRASEENGLPLLVLPPPAPSVDVEDGEFLFVEPLPPPLEFSNSFEKPESPLTPGPPHPLPDTPAPATPLPPVPPPAVAAAPPTLDSTASSLTSYDSEVATLTQGASAAPGDPHPPGPPAPAAPAPAAPQPGPDPPPGTDSGIEEVDSRSSSDHPLETISSASTLSSLSAEGGGSAGGGGGAGAGVASGPELLDTYVAYLDGQAFGGSSTPGPPYPPQLMTPSKLRGRALGASGGLRPGPSGGLRDPVTPTSPTVSVTGAGTDGLLALRACSGPPTAGVAGGPVAVEPEVPPVPLPTASSLPRKLLPWEEGPGPPPPPLPGPLAQPQASALATVKASIISELSSKLQQFGGSSAAGGALPWARGGSGGGGDSHHGGASYVPERTSSLQRQRLSDDSQSSLLSKPVSSLFQNWPKPPLPPLPTGTGVSPTAAAAPGATSPSASSSSTSTRHLQGVEFEMRPPLLRRAPSPSLLPASEHKVSPAPRPSSLPILPSGPLYPGLFDIRGSPTGGAGGSADPFAPVFVPPHPGISGGLGGALSGASRSLSPTRLLSLPPDKPFGAKPLGFWTKFDVADWLEWLGLAEHRAQFLDHEIDGSHLPALTKEDYVDLGVTRVGHRMNIDRALKFFLER

SEQ ID NO: 46881 - protein, 130 aa, Homo sapiens
MGRPLHLVLLSASLAGLLLLGESLFIRREQANNILARVTRANSFLEEMKKGHLERECMEETCSYEEAREVFEDSDKTNEFWNKYKDGDQCETSPCQNQGKCKDGLGEYTCTCLEGFEGKNCELCMLIFAL

SEQ ID NO: 46882 - protein, 59 aa, Homo sapiens
MDLSALRVEEVQNVINAMQKILECPICLELIKEPVSTKCDHIFCKVLLCCPSWSTVVRS

SEQ ID NO: 46883 - protein, 210 aa, Homo sapiens
MSRRALRRLRGEQRGQEPLGPGALHFDLRDDDDAEEEGPKRELGVRRPGGAGKEGVRVNNRFELINIDDLEDDPVVNGERSGCALTDAVAPGNKGRGQRGNTESKTDGDDTETVPSEQSHASGKLRKKKKKQKNKKSSTGEASENGLEDIDRILERIEDSTGLNRPGPAPLSSRKHVLYVEHRPRQRQRVYPKCTWLTTPKSTWPRYSKP

SEQ ID NO: 46884 - protein, 170 aa, Homo sapiens
MVAFSMRKVPNREATEISHVLLCNVTQRVSFWFVVTDPSKNHTLPAVEVQSAIRMNKNRINNAFFLNDQTLEFLKIPSTLAPPMDPSVPIWIIIFGVIFCIIIVAIALLILSGIWQRRRKNKEPSEVDDAEDKCENMITIENGIPSDPLDMKGGHINDAFMTEDERLTPL

SEQ ID NO: 46885 - protein, 319 aa, Homo sapiens [sequence omitted]

SEQ ID NO: 46886 - protein, 95 aa, Homo sapiens
MACAEFSFHVPSLEELAGVMQKGLKDNFADVQVSVVDCPDLTKEPFTFPVKGICGKTRIAEVGGVPYLLPLVNQKKVYDLNKIAKEIKLPGAFIL

SEQ ID NO: 46887 - protein, 66 aa, Homo sapiens
MPLTGVGPGSCRRQIIRALCLLLLLLHAGSAKNIWKRALPARLAEKSRVSAWDGEAGAACVGGSQP

SEQ ID NO: 46888 - protein, 173 aa, Homo sapiens
MASDEGKLFVGGLSFDTNEQSLEQVFSKYGQISEVVVVKDRETQRSRGFGFVTFENIDDAKDAMMAMNGKSVDGRQIRVDQAGKSSDNRSRGYRGGSAGGRGFFRGGRGRGRGFSRGECHEWVPWGCCEVLLVGAGTHFFLYVQEEGTEAMGGTGSSPGVGATEAPETTIAGE

SEQ ID NO: 46889 - protein, 63 aa, Homo sapiens
MLRTAMGLRSWLAAPWGALPPRPPLLLLLLLLLLLQPPPPTWALSPRISLPLGWGYVKTLHRL

SEQ ID NO: 46890 - protein, 681 aa, Homo sapiens
MSKVNLEVIKPWITKRVTEILGFEDDVVIEFIFNQLEVKNPDSKMMQINLTGFLNGKNAREFMGELWPLLLSAQENIAGIPSAFLELKKEEIKQRQIEQEKLASMKKQDEDKDKRDKEEKESSREKRERSRSPRRRKSRSPSPRRRSSPVRRERKRSHSRSPRHRTKSRSPSPAPEKKEKTPELPEPSVKVKEPSVQEATSTSDILKVPKPEPIPEPKEPSPEKNSKKEKEKEKTRPRSRSRSKSRSRTRSRSPSHTRPRRRHRSRSRSYSPRRRPSPRRRPSPRRRTPPRRMPPPPRHRRSRSPVRRRRRSSASLSGSSSSSSSSRSRSPPKKPPKRTSSPPRKTRRLSPSASPPRRRHRPSPPATPPPKTRHSPTPQQSNRTRKSRVSVSPGRTSVTKHKGTEKRESPSPAPKPRKVELSESEEDKGGKMAAADSVQQRRQYRRQNQQSSSDSGSSSSSEDERPKRSHVKNGEVGRRRRHSPSRSASPSPRKRQKETSPRMQMGKRWQSPVTKSGRRRRSPSPPPTRRRRSPSPAPPPRRRRTPTPPPRRRTPSPPPRRRSPSPRRYSPPIQRRYSPSPPPKRRTASPPPPPKRRASPSPPPKRRVSHSPPPKQRSSPVTKRRSPSLSSKHRKGSSPSRSTREARSPQPNKRHSPSPRPRAPQTSSSPPPVRRGASSSP

SEQ ID NO: 46891 - protein, 293 aa, Homo sapiens
AIETLLCYLELHPHHWLELLATTYTHCRLNCPGGPAQLQALAHRCPPLAVCLAQQLPEDPGQGSSSVEFDMVKLVDSMGWELASVRRALCQLQWDHEPRTGVRRGTGVLVEFSELAFHLRSPGDLTAEEKDQICDFLYGRVQARERQALARLRRTFQAFHSVAFPSCGPCLEQQDEERSTRLKDLLGRYFEEEEGQEPGGMEDAQGPEPGQARVSALQDWEDQVRCDIRQFLSLRPEEKFSSRAVARIFHGIGSPCYPAQVYGQDRRFWRKYLHLSFHALVGLATEELLQVAR

SEQ ID NO: 46892 - protein, 87 aa, Homo sapiens
EDGPESIDSIIDMDAVCKRVTTLGLDVSVTISQDAGSLGSQKSKVKVVAGLVPSGGAEGKNPSLPKVTVFSAAEGGPGPSRLSVASP

SEQ ID NO: 46893 - protein, 36 aa, Homo sapiens
  MOD_RES (1)..(1): Any amino acid
XRHSSNPPLESHVGWVMDSREHRPRTASIRDGTDCK

SEQ ID NO: 46894 - protein, 101 aa, Homo sapiens
MAPLNSYMTLNPLSSPYPPGGLPASPLPSGPLAPPAPAAPLGPTFPGLGVSGGSSSSGYGAPGPGLVHGKEMPKGYRRPLAHAKPPYSYISLITMAIQQAP

SEQ ID NO: 46895 - protein, 188 aa, Homo sapiens
DIVLPATEFLDQNRGSRRTNPFGETEDESFPEAEVKTDSTTEVIYEAMRQVLAARAIHNIFRMTESHLMVTSQSLRLIDPQTQVSRANFELTSVTQFAAHQENKRLVGFVIRVPESTGEESLSTYIFESNSEGEKICYAINLGKEIIEVQKDPEALAQLMLSIPLTNDGKYVLLNDQPDDDDGNPNEH

SEQ ID NO: 46896 - protein, 99 aa, Homo sapiens
AVIICIKNKEFEKASKILKKHMSKDPTTQKLRNDLLNIIREKNLAHPVIQNFSYETFQQKMLRFLESHLDDAEPYLLTIGFVSELVCILSIFLVKEAEN

SEQ ID NO: 46897 - protein, 166 aa, Homo sapiens
MLLAQINRDSQGMTEFPGGGMEAQHVTLCLTEAVTVADGDNLENMEGVSLQAVTLADGSTAYIQHNSKDAKLIDGQVIQLEDGSAAYVQHVPIPKSTGDSLRLEDGQAVQLEDGTTAFIHHTSKVMTRVHYRRFSWKMVPQLISTMQCKSRSLTPSWQFRLMGQWQ

SEQ ID NO: 46898 - protein, 2457 aa, Homo sapiens
MDPSGVKVLETAEDIQERRQQVLDRYHRFKELSTLRRQKLEDSYRFQFFQRDAEELEKWIQEKLQIASDENYKDPTNLQGKLQKHQAFEAEVQANSGAIVKLDETGNLMISEGHFASETIRTRLMELHRQWELLLEKMREKGIKLLQAQKLVQYLRECEDVMDWINDKEAIVTSEELGQDLEHVEVLQKKFEEFQTDMAAHEERVNEVNQFAAKLIQEQHPEEELIKTKQDEVNAAWQRLKGLALQRQGKLFGAAEVQRFNRDVDETISWIKEKEQLMASDDFGRDLASVQALLRKHEGLERDLAALEDKVKALCAEADRLQQSHPLSATQIQVKREELITNWEQIRTLAAERHARLNDSYRLQRFLADFRDLTSWVTEMKALINADELASDVAGAEALLDRHQEHKGEIDAHEDSFKSADESGQALLAAGHYASDEVREKLTVLSEERAALLELWELRRQQYEQCMDLQLFYRDTEQVDNWMSKQEAFLLNEDLGDSLDSVEALLKKHEDFEKSLSAQEEKITALDEFATKLIQNNHYAMEDVATRRDALLSRRNALHERAMRRRAQLADSFHLQQFFRDSDELKSWVNEKMKTATDEAYKDPSNLQGKVQKHQAFEAELSANQSRIDALEKAGQKLIDVNHYAKDEVAARMNEVISLWKKLLEATELKGIKLREANQQQQFNRNVEDIELWLYEVEGHLASDDYGKDLTNVQNLQKKHALLEADVAAHQDRIDGITIQARQFQDAGHFDAENIKKKQEALVARYEALKEPMVARKQKLADSLRLQQLFRDVEDEETWIREKEPIAASTNRGKDLIGVQNLLKKHQALQAEIAGHEPRIKAVTQKGNAMVEEGHFAAEDVKAKLHELNQKWEALKAKASQRRQDLEDSLQAQQYFADANEAESWMREKEPIVGSTDYGKDEDSAEALLKKHEALMSDLSAYGSSIQALREQAQSCRQQVAPTDDETGKELVLALYDYQEKSPREVTMKKGDILTLLNSTNKDWWKVEVNDRQGFVPAAYVKKLDPAQSASRENLLEEQGSIALRQEQIDNQYHSLLELGEKRKGMLEKSCKKFMLFREANELQQWINEKEAALTSEEVGADLEQVEVLQKKFDDFQKDLKANESRLKDINKVAEDLESEGLMAEEVQAVQQQEVYGMMPRDETDSKTASPWKSARLMVHTVATFNSIKELNERWRSLQQLAEERSQLLGSAHEVQRFHRDADETKEWIEEKNQALNTDNYGHDLASVQALQRKHEGFERDLAALGDKVNSLGETAERLIQSHPESAEDLQEKCTELNQAWSSLGKRADQRKAKLGDSHDLQRFLSDFRDLMSWINGIRGLVSSDELAKDVTGAEALLERHQEHRTEIDARAGTFQAFEQFGQQLLAHGHYASPEIKQKLDILDQERADLEKAWVQRRMMLDQCLELQLFHRDCEQAENWMAAREAFLNTEDKGDSLDSVEALIKKHEDFDKAINVQEEKIAALQAFADQLIAAGHYAKGDISSRRNEVLDRWRRLKAQMIEKRSKLGESQTLQQFSRDVDEIEAWISEKLQTASDESYKDPTNIQLSKLLSKHQKHQAFEAELHANADRIRGVIDMGNSLIERGACAGSEDAVKARLAALADQWQFLVQKSAEKSQKLKEANKQQNFNTGIKDFDFWLSEVEALLASEDYGKDLASVNNLLKKHQLLEADISAHEDRLKDLNSQADSLMTSSAFDTSQVKDKRDTINGRFQKIKSMAASRRAKLNESHRLHQFFRDMDDEESWIKEKKLLVGSEDYGRDLTGVQNLRKKHKRLEAELAAHEPAIQGVLDTGKKLSDDNTIGKEEIQQRLAQFVEHWKELKQLAAARGQRLEESLEYQQFVANVEEEEAWINEKMTLVASEDYGDTLAAIQGLLKKHEAFETDFTVHKDRVNDVCTNGQDLIKKNNHHEENISSKMKGLNGKVSDLEKAAAQRKAKLDENSAFLQFNWKADVVESWIGEKENSLKTDDYGRDLSSVQTLLTKQETFDAGLQAFQQEGIANITALKDQLLAAKHVQSKAIEARHASLMKRWSQLLANSAARKKKLLEAQSHFRKVEDLFLTFAKKASAFNSWFENAEEDLTDPVRCNSLEEIKALREAHDAFRSSLSSAQADFNQLAELDRQIKSFRVASNPYTWFTMEALEETWRNLQKIIKERELELQKEQRRQEENDKLRQEFAQHANAFHQWIQETRTYLLDGSCMVEESGTLESQLEATKRKHQEIRAMRSQLKKIEDLGAAMEEALILDNKYTEHSTVGLAQQWDQLDQLGMRMQHNLEQQIQARNTTGVTEEALKEFSMMFKHFDKDKSGRLNHQEFKSCLRSLGYDLPMVEEGEPDPEFEAILDTVDPNRDGHVSLQEYMAFMISRETENVKSSEEIESAFRALSSEGKPYVTKEELYQNLTREQADYCVSHMKPYVDGKGRELPTAFDYVEFTRSLFVN

SEQ ID NO: 46899 - protein, 182 aa, Homo sapiens
MKVLLRLICFIALLISSLEADKCKEREEKIILVSSANEIDVRPCPLNPNEHKGTITWYKDDSKTPVSTEQASRIHQHKEKLWFVPAKVEDSGHYYCVVRNSSYCLRIKISAKFVENEPNLCYNAQAIFKQKLPVAGDGGLVCPYMEFFKNENNELPKLQWYKDCKPLLLDNIHFSGVKDRLI

SEQ ID NO: 46900 - protein, 732 aa, Homo sapiens
MMADAKYVLCRWEKRLWPAKVLARTATSTKNKRRKEYFLAVQILSLEEKIKVKSTEVEILEKSQIEAIASSLASQNEVPAAPLEELAYRRSLRVALDVLSEGSIWSQESSAGTGRADRSLRGKPMEHVSSPCDSNSSSLPRGDVLGSSRPHRRRPCVQQSLSSSFTCEKDPECKVDHKKGLRKSENPRGPLVLPAGGGAQDESGSRIHHKNWTLASKRGGNSAQKASLCLNGSSLSEDDTERDMGSKGGSWAAPSLPSGVREDDPCANAEGHDPGLPLGSLTAPPAPEPSACSEPGECPAKKRPRLDGSQRPPAVQLEPMAAGAAPSPGPGPGPRESVTPRSTARLGPPPSHASADATRCLPCPDSQKLEKECQSSEESMGSNSMRSILEEDEEDEEPPRVLLYHEPRSFEVGMLVWHKHKKYPFWPAVVKSVRQRDKKASVLYIEGHMNPKMKGFTVSLKSLKHFDCKEKQTLLNQAREDFNQDIGWCVSLITDYRVRLGCGSFAGSFLEYYAADISYPVRKSIQQDVLGTKLPQLSKGSPEEPVVGCPLGQRQPCRKMLPDRSRAARDRANQKLVEYIVKAKGAESHLRAILKSRKPSRWLQTFLSSSQYVTCVETYLEDEGQLDLVVKYLQGVYQEVGAKVLQRTNGDRIRFILDVLLPECWEMRVRALDPVRRRSRLLDPCAEMELLRSCQHQGVRTPSLLRAHRCFPASVGHHLCDLCGGRGGLQDG

SEQ ID NO: 46901 - protein, 213 aa, Homo sapiens
LQSLCRGPDEALLTCKHMLQIWKSCYNLTNPSDSGRGSSLLDRTIADRRQLNTITLPDFSDPETGSVHATSVAASRVEQALSEVASSLQSSAPKQGPLHPWMTLAQIWLHAGPDPSPARPLQSGGEDPPGRGAGELDSPRGLERAGRGPPSSGQRCGGYGVLPDSLGAGGQQPRRALHHHPPRALSRRLPASPAAQASEALPGTRACAIAPRG

SEQ ID NO: 46902 - protein, 124 aa, Homo sapiens
MSQPDVLLLVQECLKNSDSFIDVDADFHARVPVVVCREKQSGLLCKVSAGNENACLTTKHLTALGKLEPKLVPLVIAFRYWAKLCSIDRPEEGGLPPYVFALMAIFFLQQRKEPLLPVYLGSWV

SEQ ID NO: 46903 - protein, 32 aa, Homo sapiens
MTKKTRDLRRQLRKAVMDHVSDSFLETNVPLL

SEQ ID NO: 46904 - protein, 160 aa, Homo sapiens
LQAFMYILGICLIMELIGGVVALTFRNQTIDFLNDNIRRGIENYYDDLDFKNIMDFVQKKFKCCGGEDYRDWSKNQYHDCSAPGPLACGVPYTCCIRNTTEVVNTMCGYKTIDKERFSVQDVIYVRGCTNAVIIWFMDNYTIMAGILLGILLPQITGVSD

SEQ ID NO: 46905 - protein, 279 aa, Homo sapiens
PMHGNGLELPVVMETDHIASRVNGMSDSALSDSIHTVAMSTNSVSVALSTSHNLASLESVSLHEVGLSLEPVAVSSITQEVAMGTGHVDVSSDSLSFVSPSLQMEDSNSNKENMATLFTIWCTLCDRAYPSDCPEHGPVTFVPDTPIESRARLSLPKQLVLRQSIVGAEVVGVLPLTGVWTGETIPVRTCFGPLIGQQSHSMEVAEWTDKAVNHIWKIYHNGVLEFCIITTDENECNWMMFVRKARNREEQNLVAYPHDGKIFFCTSQDIPPENELLFY

SEQ ID NO: 46906 - protein, 439 aa, Homo sapiens
PTLAMNPQAQALRSLLEVVVLSRNSRDAIAALGLLQKAVEGLLDATSGADADLLLRYRECHLLVLKALQDGRAYGSPWCNKQITRCLIECRDEYKYNVEAVELLIRNHLVNMQQYDLHLAQSMENGLNYMAVAFAMQLVKILLVDERSVAHVTEADLFHTIETLMRINAHSRGNAPEGLPQLMEVVRSNYEAMIDRAHGGPNFMMHSGISQASEYDDPPGLREKAEYLLREWVNLYHSAAAGRDSTKAFSAFVGQVELLERKMHQQGILKTDDLITRFFRLCTEMCVEISYRAQAEQQHNPAANPTMIRAKCYHNLDAFVRLIALLVKHSGEATNTVTKINLLNKVLGIVVGVLLQDHDVRQSEFQQLPYHRIFIMLLLELNAPEHVLETINFQTLTAFCNTFHILRPTKAPGFVYAWLELISHRIFIARMLAHTPQQK

SEQ ID NO: 46907 - protein, 364 aa, Homo sapiens
MPPGDSDHGTSDLEKSFNLRPVLSPQQRVPVEARPRKCETHTESFKNSEILKPHRAKPYACNECGKAFSYCSSLSQHQKSHTGEKPYECSECGKAFSQSSSLIQHQRIHTGEKPYKCSECGRAFSQNANLTKHQRTHTGEKPYRCSECEKAFSDCSALVQHQRIHTGEKPYECSDCGKAFRHSANLTNHQRTHTGEKPYKCSECGKAFSYCAAFIQHQRIHTGEKPYRCAACGKAFSQSANLTNHQRTHTGEKPYKCSECGKAFSQSTNLIIHQKTHTGEKPYKCNECGKFFSESSALIRHHIIHTGEKPYECNECGKAFNQSSSLSQHQRIHTGVKPYECSECGKAFRCSSAFVRHQRLHAGE

SEQ ID NO: 46908 - protein, 150 aa, Homo sapiens
MKGFGSDKEAILDIITSRSNRQRQEVCQSYKSLYGKDLIADLKYELTGKFERLIVGLMRPPAYCDAKEIKDAISGIGTDEKCLIEILASRTNEQMHQLVAAYKDAYERDLEADIIGDTSGHFQKMLVVLLQGTREEDDVVSEDLVQQDVQ

SEQ ID NO: 46909 - protein, 9 aa, Homo sapiens
MKEQMVFEK

SEQ ID NO: 46910 - protein, 38 aa, Homo sapiens
MSDRLGQITKGKDGKSKYSTLSLFDKYKGKSVDAIRSS

SEQ ID NO: 46911 - protein, 863 aa, Homo sapiens
MATGLGEPVYGLSEDEGESRILRVKVVSGIDLAKKDIFGASDPYVKLSLYVADENRELALVQTKTIKKTLNPKWNEEFYFRVNPSNHRLLFEVFDENRLTRDDFLGQVDVPLSHLPTEDPTMERPYTFKDFLLRPRSHKSRVKGFLRLKMAYMPKNGGQDEENSDQRDDMEHGWEVVDSNDSASQHQEELPPPPLPPGWEEKVDNLGRTYYVNHNNRTTQWHRPSLMDVSSESDNNIRQINQEAAHRRFRSRRHISEDLEPEPSEGGDVPEPWETISEEVNIAGDSLGLALPPPPASPGSRTSPQELSEELSRRLQITPDSNGEQFSSLIQREPSSRLRSCSVTDAVAEQGHLPPPSVAYVHTTPGLPSGWEERKDAKGRTYYVNHNNRTTTWTRPIMQLAEDGASGSATNSNNHLIEPQIRRPRSLSSPTVTLSAPLEPGWEERIHLDGRTFYIDHNSKITQWEDPRLQNPAITGPAVPYSREFKQKYDYFRKKLKKPADIPNRFEMKLHRNNIFEESYRRIMSVKRPDVLKARLWIEFESEKGLDYGGVAREWFFLLSKEMFNPYYGLFEYSATDNYTLQINPNSGLCNEDHLSYFTFIGRVAGLAVFHGKLLDGFFIRPFYKMMLGKQITLNDMESVDSEYYNSLKWILENDPTELDLMFCIDEENFGQTYQVDLKPNGSEIMVTNENKREYIDLVIQWRFVNRVQKQMNAFLEGFTELLPIDLIKIFDENELELLMCGLGDVDVNDWRQHSIYKNGYCPNHPVIQWFWKAVLLMDAEKRIRLLQFVTGTSRVPMNGFAELYGSNGPQLFTIEQWGSPEKLPRAHTCFNRLDLPPYETFEDLREKLLMAVENAQGFEGVD

SEQ ID NO: 46912 - protein, 148 aa, Homo sapiens
MWLPPALLLLSLSGCFSIQGPESVRAPEQGSLTVQCHYKQGWETYIKWWCRGVRWDTCKILIETRGSEQGEKSDRVSIKDNQKDRTFTVTMEGLRRDDADVYWCGIERRGPDLGTQVKVIVDPEGAASTTASSPTNSNMAVFIGSHKR

SEQ ID NO: 46913 - protein, 43 aa, Homo sapiens
MRNQDPGKMGRQRKSIKLYPTHPLVTFPRSWAKFQEKALQSWA

SEQ ID NO: 46914 - protein, 472 aa, Homo sapiens
MEVAANCSLRVKRPLLDPRFEGYKLSLEPLPCYQLELDAAVAEVKLRDDQYTLEHMHAFGMYNYLHCDSWYQDSVYYIDTLGRIMNLTVMLDTALGKPREVFRLPTDLTACDNRLCASIHFSSSTWVTLSDGTGRLYVIGTGERGNSASEKWEIMFNEELGDPFIIIHSISLLNAEEHSIATLLLRIEKEELDMKGSGFYVSLEWVTISKKNQDNKKYEIIKRDILRGKSVPHYAAIEPDGNGLMIVSYKSLTFVQAGQDLEENMDEDISEKIKEPLYYWQQTEDDLTVTIRLPEDSTKEDIQIQFLPDHINIVLKDHQFLEGKLYSSIDHESSTWIIKESNSLEISLIKKNEGLTWPELVIGDKQGELIRDSAQCAAIAERLMHLTSEELNPNPDKEKPPCNAQELEECDIFFEESSSLCRFDGNTLKTTHVWILKKCPASVCAMMLMPYSGNHTPANKMICGSTSQLSML

SEQ ID NO: 46915 - protein, 321 aa, Homo sapiens
MPNIKIFSGSSHQDLSQKIADRLGLELGKVVTKKFSNQETCVEIGESVRGEDVYIVQSGCGEINDNLMELLIMINACKIASASRVTAVIPCFPYARQDKKDKSRAPISAKLVANMLSVAGADHIITMDLHASQIQGFFDIPVDNLYAEPAVLKWIRENISEWRNCTIVSPDAGGAKRVTSIADRLNVDFALIHKERKKANEVDRMVLVGDVKDRVAILVDDMADTCGTICHAADKLLSAGATRVYAILTHGIFSGPAISRINNACFEAAQCSKCFLGGRSLIHHHLLDYVAWILLCTYPFRFGFTFIYLDPFLAKYPLGPK

SEQ ID NO: 46916 - protein, 97 aa, Homo sapiens
MVSLTAPYVSGFLAFREVPFLLELVQQLREKEPGLMPQVLLVDGNGVLHHRGFGVACHLGVLTDLPCVGVAKKLLQVDGLENNALHKEKIRLLQTRG

SEQ ID NO: 46917 - protein, 940 aa, Homo sapiens
MAQGRERDEGPHSAGGASLSVRWVQGFPKQNVHFVNDNTICYPCGNYVIFINIETKKKTVLQCSNGIVGVMATNIPCEVVAFSDRKLKPLIYVYSFPGLTRRTKLKGNILLDYTLLSFSYCGTYLASYSSLPEFELALWNWESSIILCKKSQPGMDVNQMSFNPMNWRQLCLSSPSTVSVWTIERSNQEHCFRARSVKLPLEDGSFFNETDVVFPQSLPKDLIYGPVLPLSAIAGLVGKEAETFRPKDDLYPLLHPTMHCWTPTSDLYIGCEEGHLLMINGDTLQVTVLNKIEEESPLEDRRNFISPVTLVYQKEGVLASGIDGFVYSFIIKDRSYMIEDFLEIERPVEHMTFSPNYTVLLIQTDKGSVYIYTFGKEPTLNKVLDACDGKFQAIDFITPGTQYFMTLTYSGEICVWWLEDCACVSKIYLNTLATVLACCPSSLSAAVGTEDGSVYFISVYDKESPQVVHKAFLSESSVQHVVYDQQGIFLLVGTAEGKVFIINANSSSSFQIIGFTEVAKDILQISTVSLLETDIVEVMVLSSLPEAGRSRLEMFTLPTLLPQVSTTFADERGRLKDEIIHKYLYELEHALSSAVLGFQSNQIYGFCSQVPYICSYLLPEEEHTGIYILKPYKKVQSRQYGPGLLYLSSHGLWLITIAKCGILCIRDVYTLETFAWCRSHSHQGHGIQSMRISMDGQNILVNGRDDGTLVYLKWKRFGGHLASEILDYYQKLLISLSSAMDKENHYLSTTPKVSVDLGSDSEHTKQKASTDLSQDELVLTDVKKEIPWIQQKSQEAIKKEVNLFSKKRKEIKQGIKSLSKTILNMMEENDKLENIAKLDQQEFGLDLEELERLHDESQEEVAKMIKDVEMHNLAKSYLAELIKEECWNSMAVKGRALKCFHIPCVVENFPMKARTVEELKELERVLQQKKIEAECLKVLF

SEQ ID NO: 46918 - protein, 63 aa, Homo sapiens
MELCEFAFNMKKDEVCVNPYHYQRVETPVLPPVLVPRHTEIPAEFPPLDDYSHSIPENTNFPA

SEQ ID NO: 46919 - protein, 285 aa, Homo sapiens
MEDEMPKTLYVGNLSRDVTEALILQLFSQIGPCKNCKMIMDTAGNDPYCFVEFHEHRHAAAALAAMNGRKIMGKEVKVNWATTPSSQKKDTSNHFHVFVGDLSPEITTEDIKAAFAPFGRISDARVVKDMATGKSKGYGFVSFFNKWDAENAIQQMGGQWLGGRQIRTNWATRKPPAPKSTYESNTKQLSYDEVVNQSSPSNCTVYCGGVTSGLTEQLMRQTFSPFGQIMEIRVFPDKGYSFVRQTQSSAPWMGPNYGVQPPQGQNGSMLPNQPSGYRVAGYETQ

SEQ ID NO: 46920 - protein, 187 aa, Homo sapiens
EPREMAAMCLGLAHSLSRYRLKFSADKVDTMIVQAISLLDDLDKELNNYIMRCREWYGWHFPELGKIISDNLTYCKCLQKVGDRKNYASAKLSELLPEEVEAEVKAAAEISMGTEVSEEDICNILHLCTQVIEISEYRTQLYEYLQNRMMAIAPNVTVMVGELVGARLIAHADFSNAGSQNRFGYPL

SEQ ID NO: 46921 - protein, 356 aa, Homo sapiens
MLLSVPLLLGLLGLAVAEPAVYFKEQFLDGDGWTSRWIESKHKSDFGKFVLSSGKFYGDEEKDKGLQTSQDARFYALSASFEPFSNKGQTLVVQFTVKHEQNIDCGGGYVKLFPNSLDQTDMHGDSEYNIMFGPDICGPGTKKVHVIFNYKGKNVLINKDIRCKDDEFTHLYTLIVRPDNTYEVKIDNSQVESGSLEDDWDFLPPKKIKDPDASKPEDWDERAKIDDPTDSKPEDWDKPEHIPDPDAKKPEDWDEEMDGEWEPPVIQNPEYKGEWKPRQIDNPDYKGTWIHPEIDNPEYSPDPSIYAYDNFGVLGLDLWQVRLGGKRRIPGVPQVHKITQEERDRVGTPGQVWHHL

SEQ ID NO: 46922 - protein, 130 aa, Homo sapiens
MASPRTRKVLKEVRVQDENNVCFECGAFNPQWVSVTYGIWICLECSGRHRGLGVHLSFVRSVTMDKWKDIELEKMKAGGNAKFREFLESQEDYDPCWSLQEKYNSRAAALFRDKSLWPAAECDRLLGQGF

SEQ ID NO: 46923 - protein, 105 aa, Homo sapiens
MGSLSPVATPTHPGLACKTVFQTPTPTPCSIPDNPTKTSGPKGAMRCCWSTCRTWQAHWVACWLSPSYCRLWCSLACGTCKQHWRGLEGSLMREERPRAISFPVG

SEQ ID NO: 46924 - protein, 186 aa, Homo sapiens
NNFEMSLLPTTCLSPTGRRCGSCQKTPEPVIKAKDLSAQQVPASLNKTSLKEISGERLSSIPEASEYDWRNYQPSQMSESELQMLASLRWQQNEELEDAGTSHGLSASQVDNCNVSISTSSDDTTTWNSCLPPPVNQGRHYQKEMNPPSPSNPRDWLNMLSPPIVPPSQQPAEQRPDSCESLSVQG

SEQ ID NO: 46925 - protein, 154 aa, Homo sapiens
MKVSAAALAVILIATALCAPASASPYSSDTTPCCFAYIARPLPRAHIKEYFYTSGKCSNPAVVHRSRMPKREGQQVWQDFLYDSRLNKGKLCHPKEPPSVCQPREEMGSGVHQLFGDELGWRVLEPELTQICLFLLALVLAWEASPHYPTPPAP

SEQ ID NO: 46926 - protein, 144 aa, Homo sapiens
MLKEEQEVAMLGVPHNPAPPMSTVIHIRSETSVPDHVVWSLFNTLFMNTCCLGFIAFAYSVKEDGWRRDRGPGLCLHRQVPEHLGPDFGHLHDHSAHHHPSVGRPGPAIDQEASLRPGALPVTCIPRTLSSIPRPAPRGQELCP

SEQ ID NO: 46927 - protein, 529 aa, Homo sapiens
MKQQALTEFEAYKHRVEDMQLCAEAQHVQRIVTMSREVEEIRRKFEEKLRSFGQLQVQFEKDKRLALEDLQAAHRREIQELLKSQQDHSASVNKGQEKAEELHRMEVESLNKMLEELRLERKKLIEDYEGKLNKAQSFYERELDTLKRSQLFTAESLQASKEKEADLRKEFQGQEAILRKTIGKLKTELQMVQDEAGSLLDKCQKLQTALAIAENNVQVLQKQLDDAKEGEMALLSKHKEVESELAAARERLQQQASDLVLKASHIGMLQATQMTQEVTIKDLESEKSRVNERLSQLEEERAFLRSKTQSLDEEQKQQILELEKKVNEAKRTQQEYYERELKNLQSRLEEEVTQLNEAHSKTLEELAWKHHMAIEAVHSNAIRDKKKLQMDLEEQHNKDKLNLEEDKNQLQQELENLKEVLEDKLNTANQEIGHLQDMVRKSEQGLGSAEGLIASLQDSQERLQNELDLTKDSLKETKDALLNVELLVAPGILGIRQHNFHLCLSSHLKRIPGILEQGLILLQFDIILT

SEQ ID NO: 46928 - protein, 258 aa, Homo sapiens
MKVEVLPALTDNYMYLVIDDETKEAAIVDPVQPQKVVDAARKHGVKLTTVLTTHHHWDHAGGNEKLVKLESGLKVYGGDDRIGALTHKITHLSTLQVGSLNVKCLATPCHTSGHICYFVSKPGGSEPPAVFTGDTLFVAGCGKFYEGTADEMCKALLEVLGRLPPDTRVYCGHEYTINNLKFARHVEPGNAAIREKLAWAKEKYSIGEPTVPSTLAEEFTYNPFMRVSGPGSSGGRGSAQPAARCWPPQGEDGAAARR

SEQ ID NO: 46929 - protein, 162 aa, Homo sapiens
MSYTGFVQGSETTLQSTYSDTSAQPTCDYGYEGYGYGYGYGQDNTTNYGYGMATSHSWEMPSSDTNANTSASGSASADSVLSRINQRLDMVPHLETDMMQGGVYGSGGERYDSYESCDSRAVLSERDLYRSGYDYSELDPEMEMAYEGQYDAYRDQFRMRGN

SEQ ID NO: 46930 - protein, 156 aa, Homo sapiens
MSHLQSLREVKLNNNELETIPNLGPVSANITLLSLAGNRIVEILPEHLKEFQSLETLDLSSNNISELQTAFPALQLKYLYLNSNRVTSMEPGYFDNLANTLLVLKLNRNRISAIPPKMFKLPQLQHLELNRNKIKNVDGLTFQGLGALKSLKMQRN

SEQ ID NO: 46931 - protein, 145 aa, Homo sapiens
MQGSSLWLSLTFRSARVLSRARFFEWQSPGLPNTAAMENGTGPYGEERPREVQETTVTEGAAKIAFPSANEVFYNPVQEFNRDLTCAVITEFARIQLGAKGIQSEWRSRLLVGGGHTSLSPCLGSSAAQIQRGFSHIAGPGFCSF

SEQ ID NO: 46932 - protein, 301 aa, Homo sapiens
MGFSVKEDLSWPGLAVGNLFHRPRATVMVMVKGVNKLALPPGSVISYPLENAVPFSLDSVANSIHSLFSEETPVVLQLAPSEERVYMVGKANSVFEDLSVTLRQLRNRLFQENSVLSSLPLNSLSRNNEVDLLFLSELQVLHDISSLLSRHKHLAKDHSPDLYSLELAGLDEIGKRYGEDSEQFRDASKILVDALQKFADDMYSLYGGNAVVELVTVKSFDTSLIRKTRTILEAKQAKNPASPYNLAYKYNFEYSVVFNMVLWIMIALALAVIITSYNIWNMDPGYDSIIYRMTNQKIRMD

SEQ ID NO: 46933 - protein, 103 aa, Homo sapiens
MLITQGLISKGILSSHPKYGSIPKLILACIMGYFAGKLSYVKTCQEKFKKLENSPLGEALRSGQARRSSPPGHYYQKSKYDSSVSGQSSFVTSPAADNIEMLP

SEQ ID NO: 46934 - protein, 270 aa, Homo sapiens
MMRVCWLVRQDSRHQRIRLPHLEAVVIGRGPETKITDKKCSRQQVQLKAECNKGYVKVKQVGVNPTSIDSVVIGKDQEVKLQPGQVLHMESLGHWSQGLKISMQDPKMQVYKDEQVVVIKDKYPKARYHWLVLPWTSISSLKAVAREHLELLKHMHTVGEKVIVDFAGSSKLRFRLGYHAIPSMSHVHLHVISQDFDSPCLKNKKHWNSFNTEYFLESQAVIEMVQEAGRVTVRDGMPELLKLPLRCHECQQLLPSIPQLKEHLRKHWTQ

SEQ ID NO: 46935 - protein, 37 aa, Homo sapiens
MMVRWALLCGECRILGRHCQGILLEDSMPWPIPSVQL

SEQ ID NO: 46936 - protein, 57 aa, Homo sapiens
MYPHARLRCMCTCNRCTFCICQNFLNSDLLQSVKNKIFTAVLNRHENSPGSLPWRLH

SEQ ID NO: 46937 - protein, 239 aa, Homo sapiens
MADFGISAGQFVAVVWDKSSPVEALKGLVDKLQALTGNEGRVSVENIKQLLQSAHKESSFDIILSGLVPGSTTLHSAEILAEIARILRPGGCLFLKEPVETALQREPLTPEEVQSVREHLGHESDNLLFVQITGKKPNFEVGSSRQLKLSITKKSSPSVKPAVDPAAAKLWTLSANDMEDDSMHLWPCRRTGKREVKGTDELPTQVSLWKLLPGRCLPLCQLPLPWDASLQTWGKGASE

SEQ ID NO: 46938 - protein, 204 aa, Homo sapiens
MAHKPVYQVKQKVLTSLAWRCCPGYTGPNCEHHDSMAIPEPADPGDSHQEPQDGPVSFKPGHLAAVINEVEVQQEQQEHLLGDLQNDVHRVADSLPGLWKALPGNLTAAVMEANQTGHEFPDRSLEQVLLPHVDTFLQVHFSPIWRSFNQSLHSLTQAIRNLSLDVEANRQAISRVQDSAVARADFQELGAKFEAKVQENTQRV

SEQ ID NO: 46939 - protein, 241 aa, Homo sapiens
YLYTLNDNARSSPVVIDASTAIDAPSNLRFLATTPNSLLVSWQPPRARITGYIIKYEKPGSPPREVVPRPRPGVTEATITGLEPGTEYTIYVIALKNNQKSEPLIGRKKTVQKTPFVTHPGYDTGNGIQLPGTSGQQPSVGQQMIFEEHGFRRTTPPTTATPIRHRPRPYPPNVGEEIQIGHIPREDVDYHLYPHGPGLNPNASTGQEALSQTTISWAPFQDTSEYIISCHPVGTDEEPLQ

SEQ ID NO: 46940 - protein, 667 aa, Homo sapiens
MGAAGLQGAPGGAEHPGRCGPGAVPRIRGSVVLAPRWRSSPAGGWSDPLFFGGAGISFSKPELITQLEQGKETWREEKKCSPATCPDPEPELYLDPFCPPGFSSQKFPMQHVLCNHPPWIFTCLCAEGNIQPGDPGPGDQEKQQQASEGRPWSDQAEGPEGEGAMPLFGRTKKRTLGAFSRPPQRQPVSSRNGLRGVELEASPAQSGNPEETDKLLKRIEVLGFGTVNCGECGLSFSKMTNLLSHQRIHSGEKPYVCGVCEKGFSLKKSLARHQKAHSGEKPIVCRECGRGFNRKSTLIIHERTHSGEKPYMCSECGRGFSQKSNLIIHQRTHSGEKPYVCRECGKGFSQKSAVVRHQRTHLEEKTIVCSDCGLGFSDRSNLISHQRTHSGEKPYACKECGRCFRQRTTLVNHQRTHSKEKPYVCGVCGHSFSQNSTLISHRRTHTGEKPYVCGVCGRGFSLKSHLNRHQNIHSGEKPIVCKDCGRGFSQQSNLIRHQRTHSGEKPMVCGECGRGFSQKSNLVAHQRTHSGERPYVCRECGRGFSHQAGLIRHKRKHSREKPYMCRQCGLGFGNKSALITHKRAHSEEKPCVCRECGQGFLQKSHLTLHQMTHTGEKPYVCKTCGRGFSLKSHLSRHRKTTSVHHRLPVQPDPEPCAGQPSDSLYSL

SEQ ID NO: 46941 - protein, 74 aa, Homo sapiens
MSKTGVLFCHQAGVQWHDLSSLQLLPPTFKRFPWLSLRSSWDCRHVPPRWLIFWILVNSGFHRVGQDGLDLLTS

SEQ ID NO: 46942 - protein, 230 aa, Homo sapiens
MSEPEAVLTRRKSNVIRKPCAAEPALSAGSLAAEPAENRKGTAVPVECPTCHKKFLSKYYLKVHNRKHTGEKPFECPKCGKCYFRKENLLEHEARNCMNRSEQVFTCSVCQETFRRRMELRVHMVSHTGEMPYKCSSCSQQFMQKKDLQSHMIKLHGAPKPHACPTCAKCFLSRTELQLHEAFKHRGEKLFVCEECGHRASSRNGLQMHIKAKHRNERPHVCEFCSHAFT

SEQ ID NO: 46943 - protein, 78 aa, Homo sapiens
  MOD_RES (1)..(1): Any amino acid
XDVLTKDAGECVICLEELLQGDTIARLPCLCIYHKRDRAPLLQGGGSPDPGAELSLGHQREQGTPSALTSRSWFSLPP

SEQ ID NO: 46944 - protein, 198 aa, Homo sapiens
MPLEQRSQHCKPEEGLEARGEALGLVGAQAPATEEQEAASSSSTLVEVTLGEVPAAESPDPPQSPQGASSLPTTMNYPLWSQSYEDSSNQEEEGPSTFPDLESEFQAALSRKVAELVHFLLLKYRAREPVTKAEMLGSVVGNWQYFFPVIFSKASSSLQLVFGIELMEVDPIGHLYIFATCLGLSYDGLLGDNQIMPK

SEQ ID NO: 46945 - protein, 60 aa, Homo sapiens
MMEMFSNNSVQYTSPSHLWLWATVLNSSSSQSCVSQMPVAEGKSVQQTVELLTRKLEMLG

SEQ ID NO: 46946 - protein, 163 aa, Homo sapiens
MTALSSENCSFQYQLRQTNQPLDVNYLLFLIILGKILLNILTLGMRRKNTCQNFMEYFCISLAFVDLLLLVNISIILYFRDFVLLSIRFTKYHICLFTQIISFTYGFLHYPVFLTACIDYCLNFSKTTKLSFKCQKLFYFFTVILIWISVLAYVLGDPAIYQS

SEQ ID NO: 46947 - protein, 23 aa, Homo sapiens
PTLCCLSCFSSLWPRWEDHLRPG

SEQ ID NO: 46948 - protein, 174 aa, Homo sapiens
MDGTETRQRRLDSCGKPGELGLPHPLSTGGLPVASEDGALRAPESQSVTPKPLETEPSRETTWSIGLQVTVPFMFAGLGLSWAGMLLDYFQHWPVFVEVKDLLTLVPPLVGLKGNLEMTLASRLSTAVSGHLDIRGGHNVRQVQATVVGLLAAVAALLLGVVSREEVDVAKVEL

SEQ ID NO: 46949 - protein, 122 aa, Homo sapiens
  MOD_RES (1)..(1): Any amino acid
XGGDEYDNHCGKEQRRAVVMISCNRHTLADNFNPVSEERGKVQDCFYLFEMDSSLACSPEISHLSVGSILLVTFASLVAVYVVGGFLYQRLVVGAKGMEQFPHLAFWQDLGNLVAVSNRAAG

SEQ ID NO: 46950 - protein, 119 aa, Homo sapiens
MAKDAGLIEANGELKVFIDQNLSPGKGVVSLVAVHPSTVNPLGKQLLPKTFGQSNVNIAQQVEAQQERREEWQGPTAFLHEGLREGAEERDHFLQRSGRRAGCGVQCCRQPHLTKRVSL

SEQ ID NO: 46951 - protein, 175 aa, Homo sapiens
MGPERTGAAPLPLLLVLALSQGILNCCLAYNVGLPEAKIFSGPSSEQFGYAVQQFINPKGNWLLVGSPWSGFPENRMGDVYKCPVDLSTATCEKLNLQTSTSIPNVTEMKTNMSLGLILTRNMGTGGFLTCGPLWAQQCGNQYYTTGVCSDISPDFQLSASFSPATQRGVNSVCQ

SEQ ID NO: 46952 - protein, 52 aa, Homo sapiens
MWNPNAVIVDKKMQKKMKKAHKKMHKHQKHHKYHKHGKHSSSSSSSSSSDSD

SEQ ID NO: 46953 - protein, 51 aa, Homo sapiens
MAEYLASIFGTEKDKSGSAGTGTGAPGFTTSRHSARRCSQNCRRSMGRLKR

SEQ ID NO: 46954 - protein, 337 aa, Homo sapiens
MENQNPAISITENVLHFKAQGHGAKGDNVYEFHLEFLDLVKPEPVYKLTQRQVNITVQKKVSQWWERLTKQEKRPLFLAPDFDRWLDESDAEMELRAKEEERLNKLRLESEGSPETLTNLRKGYLFMYNLVQFLGFSWIFVNLTVRFCILGKESFYDTFHTVADMMYFCQMLAVVETINAAIGVTTSPVLPSLIQLLGRNFILFIIFGTMEEMQNKAVVFFVFYLWSAIEIFRYSFYMLTCIDMDWKVLTWLRYTLWIPLYPLGCLAEAVSVIQSIPIFNETGRFSFTLPYPVKIKVRFSFFLQIYLIMIFLGLYINFRHLYKQRRRRYGQKKKKIH

SEQ ID NO: 46955 - protein, 62 aa, Homo sapiens
MRSMKALQKALSRAGSHCGRGGWGHPSRSPLLGGGVRHHLSEAAAQGRETPHSHQPQHQDQH

SEQ ID NO: 46956 - protein, 498 aa, Homo sapiens
MNGPEDLPKSYDYDLIIIGGGSGGLAAAKEAAQYGKKVMVLDFVTPTPLGTRWGLGGTCVNVGCIPKKLMHQAALLGQALQDSRNYGWKVEETVKHDWDRMIEAVQNHIGSLNWGYRVALREKKVVYENAYGQFIGPHRIKATNNKGKEKIYSAERFLIATGERPRYLGIPGDKEYCISSDDLFSLPYCPGKTLVVGASYVALECAGFLAGIGLDVTVMVRSILLRGFDQDMANKIGEHMEEHGIKFIRQFVPIKVEQIEAGTPGRLRVVAQSTNSEEIIEGEYNTVMLAIGRDACTRKIGLETVGVKINEKTGKIPVTDEEQTNVPYIYAIGDILEDKVELTPVAIQAGRLLAQRLYAGSTVKCDYENVPTTVFTPLEYGACGLSEEKAVEKFGEENIEVYHSYFWPLEWTIPSRDNNKCYAKIICNTKDNERVVGFHVLGPNAGEVTQGFAAALKCGLTKKQLDSTIGIHPVCAEVFTTLSVTKRSGASILQAGCG

SEQ ID NO: 46957 - protein, 479 aa, Homo sapiens
MLLWPLLLLLLLLPTLALLRQQRSQDARLSWLAGLQHRVAWGALVWAATWQRRRLEQSTLHVHQSQQQALRWCLQGAQRPHCSLRRSTDISTFRNHLPLTKASQTQQEDSGEQPLPPTSNQDLGEASLQATLLGLAALNKAYPEVLAQGRTARVTLTSPWPRPLPWPGNTLGQVGTPGTKDPRALLLDALRSPGLRALEAGTAVELLDVFLGLETDGEELAGAIAAGNPGAPLRERAAELREALEQGPRGLALRLWPKLQVVVTLDAGGQAEAVAALGALWCQGLAFFSPAYAASGGVLGLNLQPEQPHGLYLLPPGAPFIELLPVKEGTQEEAASTLLLAEAQQGKEYELVLTDRASLTRCRLGDVVRVVGAYNQCPVVRFICRLDQTLSVRGEDIGEDLFSEALGRAVGQWAGAKLLDHGCVESSILDSSAGSAPHYEVFVALRGLRNLSEENRDKILASGSALGKREWTPAQPFPH

SEQ ID NO: 46958 - protein, 245 aa, Homo sapiens
MGKLVALVLLGVGLSLVGEMFLAFRERVNASREVEPVEPENCHLIEELESGSEDIDILPSGLAFISSGLKYPGMPNFAPDEPGKIFLMDLNEQNPRAQALEISGGFDKELFNPHGISIFIDKDNTVYLYVVNHPHMKSTVEIFKFEEQQRSLVYLKTIKHELLKSVNDIVVLGPEQFYATRDHYFTNSLLSFFEMILDLRWTYVLFYSPREVKVVAKGFCSANGITVSADQKYFASRMFCLRSPG

SEQ ID NO: 46959 - protein, 52 aa, Homo sapiens
MAVARLAAVAAWVPCRSWGWAAVPFGPHRGLSVLLARIPQRAPRWLPDSCWI

SEQ ID NO: 46960 - protein, 682 aa, Homo sapiens
MSTRTPLPTVNERDTENHTSHGDGRQEVTSRTSRSGARCRNSIASCADEQPHIGNYRLLKTIGKGNFAKVKLARHILTGREVAIKIIDKTQLNPTSLQKIVSAVQYCHQKRIVHRDLKAENLLLDADMNIKIADFGFSNEFTVGGKLDTFCGSPPYAAPELFQGKKYDGPEVDVWSLGVILYTLVSGSLPFDGQNLKELRERVLRGKYRIPFYMSTDCENLLKRFLVLNPIKRGTLEQIMKDRWINAGHEEDELKPFVEPELDISDQKRIDIMVGMGYSQEEIQESLSKMKYDEITATYLLLGRKSSELDASDSSSSSNLSLAKVRPSSDLNNSTGQSPHHKVQRSVSSSQKQRRYSDHAGPAIPSVVAYPKRSQTSTADSDLKEDGISSRKSSGSAVGGKGIAPASPMLGNASNPNKADIPERKKSSTVPSSNTASGGMTRRNTYVCSERTTADRHSVIQNGKENSTIPDQRTPVASTHSISSAATPDRIRFPRGTASRSTFHGQPRERRTATYNGPPASPSLSHEATPLSQTRSRGSTNLFSKLTSKLTRRLPTEYERNGRYEGSSRNVSAEQKDENKEAKPRSLRFTWSMKTTSSMDPGDMMREIRKVLDANNCDYEQRERFLLFCVHGDGHAENLVQWEMEVCKLPRLSLNGVRFKRISGTSIAFKNIASKIANELKL

SEQ ID NO: 46961 - protein, 123 aa, Homo sapiens
MSEGNAAGEPSTPGGPRPLLTGARGLIGRRPAPPLTPGRLPSIRSRDLTLGGVKKKTFTPNIISRKIKEEPKEEVTVKKEKRERDRDRQREGHGRGRGRPEVIQSHSIFEQGPAEMMKKKVPR

SEQ ID NO: 46962 - protein, 85 aa, Homo sapiens
MSTVEEDSDTVTVETVNSVTLTQDTEGNLILHCPQNEADEIDSEDSIEPPHKRLCLSSEDDQSIDDSTPCISVVALPLSENDQSF

SEQ ID NO: 46963 - protein, 365 aa, Homo sapiens
MAFPHLQQPSFLLASLKADSINKPFAQQCQDLVKVIEDFPAKELHTIFPWLVESIFGSLDGVLVGWNLRCLQGRVNPVEYSIVMEFLDPGGPMMKLVYKLQAEDYKFDFPVSYLPGPVKASIQECILPDSPLYHNKVQFTPTGGLGLNLALNPFEYYIFFFALSLITQKPLPVSLHVRTSDCAYFILVDRYLSWFLPTEGSVPPPLSSSPGGTSPSPPPRTPAIPFASYGLHHTSLLKRHISHQTSVNADPASHEIWRSETLLQVFVEMWLHHYSLEMYQKMQSPHAKLEVLHYRLSVSSALYSPAQPSLQALHAYQVLAHSFPSSCPECMSMPGKARGRRGRPLVTQRSRSRLLRSMCWWCACC

SEQ ID NO: 46964 - protein, 1655 aa, Homo sapiens
MLKCIPLWRCNRHVESVDKRHCSLQAVPEEIYRYSRSLEELLLDANQLRELPKPFFRLLNLRKLGLSDNEIQRLPPEVANFMQLVELDVSRNDIPEIPESIKFCKALEIADFSGNPLSRLPDGFTQLRSLAHLALNDVSLQALPGDVGNLANLVTLELRENLLKSLPASLSFLVKLEQLDLGGNDLEVLPDTLGALPNLRELWLDRNQLSALPPELGNLRRLVCLDVSENRLEELPAELGGLVLLTDLLLSQNLLRRLPDGIGQLKQLSILKVDQNRLCEVTEAIGDCENLSELILTENLLMALPRSLGKLTKLTNLNVDRNHLEALPPEIGGCVALSVLSLRDNRLAVLPPELAHTTELHVLDVAGNRLQSLPFALTHLNLKALWLAENQAQPMLRFQTEDDARTGEKVLTCYLLPQQPPPSLEDAGQQGSLSETWSDAPPSRVSVIQFLEAPIGDEDAEEAAAEKRGLQRRATPHPSELKVMKRSIEGRRSEACPCQPDSGSPLPAEEEKRLSAESGLSEDSRPSASTVSEAEPEGPSAEAQGGSQQEATTAGGEEDAEEDYQEPTVHFAEDALLPGDDREIEEGQPEAPWTLPGGRQRLIRKDTPHYKKHFKISKLPQPEAVVALLQGMQPDGEGPVAPGGWHNGPHAPWAPRAQKEEEEEEEGSPQEEEEEEEEENRAEEEEASTEEEDKEGAVVSAPSVKGVSFDQANNLLIEPARIEEEELTLTILRQTGGLGISIAGGKGSTPYKGDDEGIFISRVSEEGPAARAGVRVGDKLLEVNGVALQGAEHHEAVEALRGAGTAVQMRVWRERMVEPENAVTITPLRPEDDYSPRERRGGGLRLPLLPPESPGPLRQRHVACLARSERGLGFSIAGGKGSTPYRAGDAGIFVSRIAEGGAAHRAGTLQVGDRVLSINGVDVTEARHDHAVSLLTAASPTIALLLEREAGGPLPPSPLPHSSPPTAAVATTSITTATPGVPGLPSLAPSLLAAALEGPYPVEEIRLPRAGGPLGLSIVGGSDHSSHPFGVQEPGVFISKVLPRGLAARSGLRVGDRILAVNGQDVRDATHQEAVSALLRPCLELSLLVRRDPAPPGLRELCIQKAPGERLGISIRGGARGHAGNPRDPTDEGIFISKVSPTGAAGRDGRLRVGLRLLEVNQQSLLGLTHGEAVQLLRSVGDTLTVLVCDGFEASTDAALEVSPGVIANPFAAGIGHRNSLESISSIDRELSPEGPGKEKELPGQTLHWGPEATEAAGRGLQPLKLDYRALAAVPSAGSVQRVPSGAAGGKMAESPCSPSGQQPPSPPSPDELPANVKQAYRAFAAVPTSHPPEDAPAQPPTPGPAASPEQLSFRERQKYFELEVRVPQAEGPPKRVSLVGADDLRKMQEEEARKLQQKRAQMLREAAEAGAEARLALDGETLGEEEQEDEQPPWASPSPTSRQSPASPPPLGGGAPVRTAKAERRHQERLRVQSPEPPAPERALSPAELRALEAEKRALWRAARMKSLEQDALRAQMVLSRSQEGRGTRGPLERLAEAPSPAPTPSPTPVEDLGPQTSTSPGRLPLSGKKFDYRAFAALPSSRPVYDIQSPDFAEELRSLEPSPSPGPQEEDGEVALVLLGRPSPGAVGPEDVALCSSRRPVRPGRRGLGPVPS

SEQ ID NO: 46965 - protein, 75 aa, Homo sapiens
MAKRTKKVGIVGKYGTRYGASLRKMVKKIEISQHAKYTCSFCGKTKMKRRAVGIWHCGSCMKTVAGGAWTYNRME

SEQ ID NO: 46966 - protein, 168 aa, Homo sapiens
MMDPCSVGVQLRTTNECHKTYYTRHTGFKTLQELSSNDMLLLQLRTGMTLSGNNTICFHHVKIYIDRFEDLQKSCCDPFNIHKKLAKKNLHVIDLDDATFLSAKFGRQLVPGWKLCPKCTQIINGSVDVDTEDRQKRKPESDGRTAKALRSLQFTNPGRQTEFAPETG

SEQ ID NO: 46967 - protein, 166 aa, Homo sapiens
MRDEEGCLFDRRLCSHLEVCIQDGLFGQCQVGVGQARPLLQVTSPVLQRLQGVLRQLMSQGLSWHDDLTQYVISQEMERIPRLRPPEPRPRDRSGLAPKRPGPAGELLLQDIPTGSAPAAQHRLPQPPVGKGGAGASSSLSPLQAELLPPLLEHLLLPPQPPHPSL

SEQ ID NO: 46968 - protein, 185 aa, Homo sapiens
MILPCSISPWQKKSKISASRKLQLKTLLLQIAKQELEREAEERRGEKGRALSTRCQPLELAGLGFAELQDLCRQLHARVDKVDEERYDIEAKVTKNITEIADLTQKIFDLRGKFKRPTLRRVRISADAMMQALLGARAKESLDLRAHLKQVKKEDTEKENREVGDWRKNIDALSGMEGRKKKFES

SEQ ID NO: 46969 - protein, 22 aa, Homo sapiens
MALLVRVLTEFCSCCASWSAMA

SEQ ID NO: 46970 - protein, 65 aa, Homo sapiens
MAMAPSPSLVQVYTSPAAVAVWEWQDGLGTWHPYSATVCSFIEQQFVQQKGQRFGLGSLAHSIPL

SEQ ID NO: 46971 - protein, 38 aa, Homo sapiens [sequence omitted]

SEQ ID NO: 46972 - protein, 235 aa, Homo sapiens
  MOD_RES (1)..(1): Any amino acid
XSRAPQLHLEYRFYKQLSATGTGRPAGGAGAAQGQGGGCRRTPVRLSSAAEGVPQVYYFGPCGKYNAMVLELLGPSLEDLFDLCDRTFTLKTVLMIAIQLITRMEYVHTKSLIYRDVKPENFLVGRPGTKRQHAIHIIDFGLAKEYIDPETKKHIPYREHKSLTGTARYMSINTHLGKEQSRRDDLEALGHMFMYFLRGSLPWQGLKADTLKERYQKIGDTKRATPIEVLCENFP

SEQ ID NO: 46973 - protein, 400 aa, Homo sapiens
MENQVLTPHVYWAQRHRELYLRVELSDVQGLTLLPRLECSSVIIAHRSLELLGLSSPPGSAYQVGLQNPAISITENVLHFKAQGHGAKGDNVYEFHLEFLDLVKPEPVYKLTQRQVNITVQKKVSQWWERLTKQEKRPLFLAPDFDRWLDESDAEMELRAKEEERLNKLRLESEGSPETLTNLRKGYLFMYNLVQFLGFSWIFVNLTVRFCILGKESFYDTFHTVADMMYFCQMLAVVETINAAIGVTTSPVLPSLIQLLGRNFILFIIFGTMEEMQNKAVVFFVFYLWSAIEIFRYSFYMLTCIDMDWKVLTWLRYTLWIPLYPLGCLAEAVSVIQSIPIFNETGRFSFTLPYPVKIKVRFSFFLQIYLIMIFLGLYINFRHLYKQRRRRYGQKKKKIH

SEQ ID NO: 46974 - protein, 144 aa, Homo sapiens
  MOD_RES (1)..(1): Any amino acid
XELPPEPEPEPEPELEPEKADAENGEKEEVPEPTPEPPKKQAPPSPPPKKEEAGGEFWGELEVQRVKFLVSDSPPGEDDMEGSAAGDVSGAGSGGSSGWGLGAGEEAEGDEDENMVYYFLEESTGYMEPALRCLSLLHTLVAFL

SEQ ID NO: 46975 - protein, 133 aa, Homo sapiens
MASEGLAGALASVLAGQGSSVHSCDSAPAGEPPAPVRLRKNVCYVVLAVFLSEQDEVLLIQEAKRECRGSWYLPAGRMEPGETIVEALQREVKEEAGLHCEPETLLSVEERGPSWVRFVFLARPTGMAHLEAV

SEQ ID NO: 46976 - protein, 117 aa, Homo sapiens
  MOD_RES (1)..(1): Any amino acid
XADVEFATHEDAVAAMSKDKANMQHRYVELFLNSTAGASGEHRYVELFLNSTAGASGGAYGSQMMGGMGLSNQSSYGGPASQQLSGGYGGGYGGQSSMSGYDQVLQENSSDFQSNIA

SEQ ID NO: 46977 - protein, 61 aa, Homo sapiens
MAGDGVSLLMPSRLECNGAISAHCNLLLPEVLLSPLAPTENPASQEVATSGTPTNQGAVTC

SEQ ID NO: 46978 - protein, 101 aa, Homo sapiens
MESKEERALNNLIVENVNQENDEKDEKEQVANKGEPLALPLNVSEYCVPRGNRRRFRVRQPILQYRWDIMHRLGEPQARMREENMERIGEEVRQLMEKLRE

SEQ ID NO: 46979 - protein, 261 aa, Homo sapiens
MAGQAFRKFLPLFDRVLVERSAAETVTKGGIMLPEKSQGKVLQATVVAVGSGSKGKDFYNWPDESFDEMDSTLAVQQYIQQNIRADCSNIDKILEPPEGQDEGVWKYEHLRQFCLELNGLAVKLQSECHPDTCTQMTATEQWIFLCAAHKTPKECPAIDYTRHTLDGAACLLNSNKYFPSRVSIKESSVAKLGSVCRRIYRIFSHAYFHHRQIFDEYENETFLCHRFTKFVMKYNLMSKDNLIVPILEEEVQNSVSGESEA

SEQ ID NO: 46980 - protein, 281 aa, Homo sapiens
MALQGISVVELSGLAPGPFCAMVLADFGARVVRVDRPGSRYDVSRLGRGKRSLVLDLKQPRGAAVLRRLCKRSDVLLEPFRRGVMEKLQLGPEILQRENPRLIYARLSGFGQSGSFCRLAGHDINYLALSGGRNSIFKFFSVENSEIESVGSTSRTEHVGWWSTFLYDLQDSRWGIHGCWSNRTPVLRAADQRSGRTDLAENTTGSSIVPGKANPRQCEAMAIVAAQVMGFCVAVTVGGGNGHFELDVFKPMMIKNLCYTQAAGGCFSFLHRKLNSGNPDQ

SEQ ID NO: 46981 - protein, 116 aa, Homo sapiens
  MOD_RES (1)..(1): Any amino acid
XVEVLDKAQAKFCSENAAQALHLGERMQEAKKLLGSLQLLFDKTEDVSFMKNTKSVKILMDRTQTCTSSSLSPTKIGHLNSKLFLNEVAKKEKQLRKMLEARRCPSCRVSPCTLAA

SEQ ID NO: 46982 - protein, 129 aa, Homo sapiens
  MOD_RES (1)..(1): Any amino acid
XTALAPARPQGSPCFQHKHFTEDIQTRQYRAVEVLIGAEYGPPADIWSTACMAFELATGDYLFEPHSGEDYSRDEDHIAHIVELLGDIPPAFALSGRYSREFFNRRGELRHIHNLKHWGLYEVLMEKYE

SEQ ID NO: 46983 - protein, 230 aa, Homo sapiens
MVDYSVWDHIEVSDDEDETHPNIDTASLFRWRHQARVERMEQFQKEKEELDRGCRECKRKVAECQRKLKELEVAEGGKAELERLQAEAQQLRKEERSWEQKLEEMRKKEKSMPWNVDTLSKDGFSKSMVNTKPEKTEEDSEEFFTKIKTADRQYMEGFNDELEAFKERVRGRAKLRIEKAMKEYEEEERKKRLGPGGLDPVEVYESLPEELQKCFDVKDVQMLQDAISKM

SEQ ID NO: 46984 - protein, 65 aa, Homo sapiens
MAQWEMLQNLDSPFQDQLHQLYSHSLLPVDIRQYLAVWIEDQNWKLHLGVMIPRLPCYSSTSWIS

SEQ ID NO: 46985 - protein, 167 aa, Homo sapiens
MSYDHVELTFNDMKNVPEAFKGTKKGTVYLTPYRVIFLSKGKDAMQSFMMPFYLMKDCEIKQPVFGANYIKGTVKAEAGGGWEGSASYKLTFTAGGAIEFGQRMLQVASQASRGEVPSGAYGYSYMPSGAYVYPPPVANGMYPCPPGYPYPPPPPEFYPGPPMMDGA

SEQ ID NO: 46986 - protein, 18 aa, Homo sapiens
MLAGGVRSMPSPLLACWQ

SEQ ID NO: 46987 - protein, 163 aa, Homo sapiens
MKLLSLVAVVGCLLVPPAEANKVREVSLQHLVTTTVHGHPVYRADSESSEDIRCKCICPPYRNISGHIYNQNVSQKDCNCLHVVEPMPVPGHDVEAYCLLCECRYEERSTTTIKVIIVIYLSVVGALLLYMAFLMLVDPLIRKPDAYTEQLHNEEENEDARSM

SEQ ID NO: 46988 - protein, 340 aa, Homo sapiens
MLWFRGALGVWVWLAAASQPCKNSNAGRRGQHPRRPAGSCVQRLTMRNTSKELQGATHRYAPCDWYYHVPVKRSEKAVDAPPASQIPGLSNLGDSHSENLPGTRRYWIKETDSEYVKLAKQGGRPDLLKHFAPGTRKGSPVAYSLPDWYIHHSKPPTASQQEVRAVSMPDYMVHEEFNPDQANGSYASRRGPFDFDMKTVWQREAEELEKEKKKLRLPAIDSKYLSKAGTPLGPKNPAGSRLSFPPVPGQKNSSPTNFSKLISNGYKDEWLQQQQRADSDKRTPKTSRASVLSQSPRDLEGPQDAARLQDAEASEGPEDTPESSQSPEESVSASTPAELK

SEQ ID NO: 46989 - protein, 40 aa, Homo sapiens
MASYPSGSGKPKAKYPFKKRASLQASTAAPAALGTACASP

SEQ ID NO: 46990 - protein, 176 aa, Homo sapiens
  MOD_RES (1)..(1): Any amino acid
XFTQGEGARPLSTRVPRAAIVFTDGRAQDDVSEWASKAKANGITMYAVGVGKAIEEELQEIASEPTNKHLFYAEDFSTMDEISEKLKKGICEALEDSDGRQDSPAGELPKTVQQPTVQHRYLFEEDNLLRSTQKLSHSTKPSGSPLEEKHDQCKCENLIMFQNLANEEQRSSLSAL

SEQ ID NO: 46991 - protein, 128 aa, Homo sapiens
VVARRSDLKLIVTSATMDAEKFAAFFGNVPIFHIPGRTFPVDILFSKTPQEDYVEAAVKQSLQVHLSGAPGDILIFMPGQEDIEVTSDQIVEHLEELENAPALAVLPGQREVAGPIASKTGPGHLVYA

SEQ ID NO: 46992 - protein, 1224 aa, Homo sapiens
  MOD_RES (1)..(1): Any amino acid
XTGPLLVPFTLNFTITNLQYEENMGHPGSRKFNITESVLQGLLKPLFKSTSVGPLYSGCRLTLLRPEKDGVATRVDAICTHRPDPKIPGLDRQQLYWELSQLTHSITELGPYTLDRDSLYVNGFTQRSSVPTTSTPGTFTVQPETSETPSSLPGPTATGPVLLPFTLNFTITNLQYEEDMRRPGSRKFNTTERVLQGLLMPLFKNTSVSSLYSGCRLTLLRPEKDGAATRVDAVCTHRPDPKSPGLDRERLYWKLSQLTHGITELGPYTLDRHSLYVNGFTHQSSMTTTRTPDTSTMHLATSRTPASLSGPMTASPLLVLFTINFTITNLRYEENMHHPGSRKFNTTERVLQGLLRPVFKNTSVGPLYSGCRLTLLRPKKDGAATKVDAICTYRPDPKSPGLDREQLYWELSQLTHSITELGPYTLDRDSLYVNGFTQRSSVPTTSIPGTPTVDLGTSGTPVSKPGPSAASPLLVLFTLNFTITNLRYEENMQHPGSRKFNTTERVLQGLLRSLFKSTSVGPLYSGCRLTLLRPEKDGTATGVDAICTHHPDPKSPRLDREQLYWELSQLTHNITELGPYALDNDSLFVNGFTHRSSVSTTSTASHLLILFTLNFTITNLRYEENMWPGSRKFNTTERVLQGLLRPLFKNTSVGPLYSGCRLTLLRPEKDGEATGVDAICTHRPDPTGPGLDREQLYLELSQLTHSITELGPYTLDRDSLYVNGFTHRSSVPTTSTGVVSEEPFTLNFTINNLRYMADMGQPGSLKFNITDNVMQHLLSPLFQRSSLGARYTGCRVIALRSVKNGAETRVDLLCTYLQPLSGPGLPIKQVFHELSQQTHGITRLGPYSLDKDSLYLNGYNEPGPDEPPTTPKPATTFLPPLSEATTAMGYHLKTLTLNFTISNLQYSPDMGKGSATFNSTEGVLQHLLRPLFQKSSMGPFYLGCQLISLRPEKDGAATGVDTTCTYHPDPVGPGLDIQQLYWELSQLTHGVTQLGFYVLDRDSLFINGYAPQNLSIRGEYQINFHIVNWNLSNPDPTSSEYITLLRDIQDKVTTLYKGSQLHDTFRFCLVTNLTMDSVLVTVKALFSSNLDPSLVEQVFLDKTLNASFHWLGSTYQLVDIHVTEMESSVYQPTSSSSTQHFYLNFTITNLPYSQDKAQPGTTNYQRNKRNIEDAVRRGCSTNSSETAASRVIFLTVKFQHSGLSPTGTTPGWTPCVTSRHWLGE

SEQ ID NO: 46993 - protein, 1180 aa, Homo sapiens
  MOD_RES (1)..(1): Any amino acid
XHLNCFQALFLFEFRQLNLITRFLTPSELLFDLYLSPESDHDTVFQYLEKNADQVLLIFDGLDEALQPMGPDGPGPVLTLFSHLCNGTLLPGCRVMATSRPGKLPACLPAEAAMVHMLGFDGPRVEEYVNHFFSAQPSREGALVELQTNGRLRSLCAVPALCQVACLCLHHLLPDHAPGQSVALLPNMTQLYMQMVLALSPPGHLPTSSLLDLGEVALRGLETGKVIFYAKDIAPPLIAFGATHSLLTSFCVCTGPGHQQTGYAFTHLSLQEFLAALHLMASPKVNKDTLTQYVTLHSRWVQRTKARLGLSDHLPTFLAGLASCTCRPFLSHLAQGNEDCVGAKQAAVVQVLKKLATRKLTGPKVVELCHCVDETQEPELASLTAQSLPYQLPFHNFPLTCTDLATLTNILEHREAPIHLDFDGCPLEPHCPEALVGCGQIENLSFKSRKCGDAFAEALSRSLPTMGRLQMLGLAGSKITARGISHLVKALPLCPQLKEVSFRDNQLSDQVVLNIVEVLPHLPRLRKLDLSSNSICVSTLLCLARVAVTCPTVRMLQAREADLIFLLSPPTETTAELQRAPDLQESDGQRKGAQSRSLTLRLQKCQLQVHDAEALIALLQEGPHLEEVDLSGNQLEDEGCRLMAEAASQLHIARKLDLSNNGLSVAGVHCVLRAVSACWTLAELHISLQHKTVIFMFAQEPEEQKGPQERAAFLDSLMLQMPSELPLSSRRMRLTHCGLQEKHLEQLCKALGGSCHLGHLHLDFSGNALGDEGAARLAQLLPGLGALQSLNLSENGLSLDAVLGLVRCFSTLQWLFRLDISFESQHILLRGDKTSRDMWATGSLPDFPAAAKFLGFRQRCIPRSLCLSECPLEPPSLTRLCATLKDCPGPLELQLSCEFLSDQSLETLLDCLPQLPQLSLLQLSQTGLSPKSPFLLANTLSLCPRVKKVDLRSLHHATLHFRSNEEEEGVCCGFTGCSLSQEHVESLCWLLSKCKDLSQVDLSANLLGDSGLRCLLECLPQVPISGLLDLSHNSISQESALYLLETLPSCPRVREASVNLGSEQSFRIHFSREDQAGKTLRLSECSFRPEHVSRLATGLSKSLQLTELTLTQCCLGQKQLAILLSLVGRPAGLFSLRDSTRHTEKLSFPTLEACALGFKKKRKKERKKVSEDTELRTKIN

SEQ ID NO: 46994 - protein, 156 aa, Homo sapiens
MYFDRFDLDTIATTVLSIFGEAACPETVEHGFPHQPSALGYSPSLRILAIGTRSGAIKLYGAPGVEFMGLHQENNAVTQIHLLPGQCQLVTLLDDNSLHLWSLKVKGGASELQEDESFTLRGPPGAAPSATQITVVLPHSSCELLYLGTESGNVFV

SEQ ID NO: 46995 - protein, 312 aa, Homo sapiens
MSLRRHIGNPEYLMKRIPQNPRYQHIKSRLDTGNSMTKYTEKLEEIKKNYRYKKDELFKRLKVTTFAQLIIQVASLSDQTLEVTAEEIQRLEDNDSAASDPDAETTARTNGKGNPGEQSPSPEQFINNAGAGDSSRSTLQSVISGVGELDLDKGPVKKAEPHTKDKPYPDCPFLLLDVRDRDSYQQCHIVGGLKVLAQKFPEGLITGSLPASCQQALPPGSARKRSSPKGPPLPAENKWRFTPEDLKKIEYYLEEEQGPADHPSRLNQANSSGRESKVPGARSAQNLPGGGPASHSNPRSLSSGHLQGKPWK

SEQ ID NO: 46996 - protein, 1266 aa, Homo sapiens
MASVKVAVRVRPMNRREKDLEAKFIIQMEKSKTTITNLKIPEGGTGDSGRERTKTFTYDFSFYSADTKSPDYVSQEMVFKTLGTDVVKSAFEGYNACVFAYGQTGSGKSYTMMGNSGDSGLIPRICEGLFSRINETTRWDEASFRTEVSYLEIYNERVRDLLRRKSSKTFNLRVREHPKEGPYVEDLSKHLVQNYGDVEELMDAGNINRTTAATGMNDVSSRSHAIFTIKFTQAKFDSEMPCETVSKIHLVDLAGSERADATGATGVRLKEGGNINKSLVTLGNVISALADLSQDAANTLAKKKQVFVPYRDSVLTWLLKDSLGGNSKTIMIATISPADVNYGETLSTLRYANRAKNIINKPTINEDANVKLIRELRAEIARLKTLLAQGNQIALLDSPTALSMEEKLQQNEARVQELTKEWTNKWNETQNILKEQTLALRKEGIGVVLDSELPHLIGIDDDLLSTGIILYHLKEGQTYVGRDDASTEQDIVLHGLDLESEHCIFENIGGTVTLIPLSGSQCSVNGVQIVEATHLNQGAVILLGRTNMFRFNHPKEAAKLREKRKSGLLSSFSLSMTDLSKSRENLSAVMLYNPGLEFERQQREELEKLESKRKLIEEMEEKQKSDKAELERMQQEVETQRKETEIVQLQIRKQEESLKRRSFHIENKLKDLLAEKEKFEEERLREQQEIELQKKRQEEETFLRVQEELQRLKELNNNEKAEKFQIFQELDQLQKEKDEQYAKLELEKKRLEEQEKEQVMLVAHLEEQLREKQEMIQLLRRGEVQWVEEEKRDLEGIRESLLRVKEARAGGDEDGEELEKAQLRFFEFKRRQLVKLVNLEKDLVQQKDILKKEVQEEQEILECLKCEHDKESRLLEKHDESVTDVTEVPQDFEKIKPVEYRLQYKERQLQYLLQNHLPTLLEEKQRAFEILDRGPLSLDNTLYQVEKEMEEKEEQLAQYQANANQLQKLQATFEFTANIARQEEKVRKKEKEILESREKQQREALERALARLERRHSALQRHSTLGMEIEEQRQKLASLNSGSREQSGLQASLEAEQEALEKDQERINAYIEEEVQRRLQDLHRVISEGCSTSADTMKDNEKLHNGTIQRKLKYERMVSRSLGANPDDLKDPIKISIPRYVLCGQGKDAHFEFEVKITVLDETWTVFRRYSRFREMHKTLKLKYAELAALEFPPKKLFGNKDERVIAERRSHLEKYLRDFFSVMLQSATSPLHINKVGLTLSKHTICEFSPFFKKGVFDYSSHGTG

SEQ ID NO: 46997 - protein, 131 aa, Homo sapiens
RFSSSTEQSSASRLMRRHKRRRRKQKVSRIERSSSFSSITDSTMSLNIITVTLNMEKYNFLGISIVGQSNERGDGGIYIGSIMKGGAVAADGRIEPGDMLLQAHHPDCSQVLGPKSTWLLHIAQERAHPAH

SEQ ID NO: 46998 - protein, 16 aa, Homo sapiens
MLELQTWKKTKHHKTA

SEQ ID NO: 46999 - protein, 111 aa, Homo sapiens
MAAAADSFSGGPAGVRLPRSPPLKVLAEQLRRDAEGGPGAWRLSRAAAGRGPLDLAAVWMQGRVVMADRGEARLRDPSGDFSVRGLERVPRGRPCLVPDMLSLPWGLHETS

SEQ ID NO: 47000 - protein, 663 aa, Homo sapiens
MAPPPPPLAASTPLLHGEFGSYPARGPRFALTLTSQALHIQRLRPKPEARPRGGLVPLAEVSGCCTLRSRSPSDSAAYFCIYTYPRGRRGARRRATRTFRADGAATYEENRAEAQRWATALTCLLRGLPLPGDGEITPDLLPRPPRLLLLVNPFGGRGLAWQWCKNHVLPMISEAGLSFNLIQTERQNHARELVQGLSLSEWDGIVTVSGDGLLHEVLNGLLDRPDWEEAVKMPVGILPCGSGNALAGAVNQHGGFEPALGLDLLLNCSLLLCRGGGHPLDLLSVTLASGSRCFSFLSVAWGFVSDVDIQSERFRALGSARFTLGTVLGLATLHTYRGRLSYLPATVEPASPTPAHSLPRAKSELTLTPDPAPPMAHSPLHRSVSDLPLPLPQPALASPGSPEPLPILSLNGGGPELAGDWGGAGDAPLSPDPLLSSPPGSPKAALHSPVSEGAPVIPPSSGLPLPTPDARVGASTCGPPDHLLPPLGTPLPPDWVTLEGDFVLMLAISPSHLGADLVAAPHARFDDGLVHLCWVRSGISRAALLRLFLAMERGSHFSLGCPQLGYAAARAFRLEPLTPRGVLTVDGEQVEYGPLQAQMHPGIARGRTQTPALPAAPALYGRQPGAAHGLQPVCQGAALFFHNSWLWGSQDLFRIVLTEAVGG

SEQ ID NO: 47001 - protein, 79 aa, Homo sapiens
MGSRYVPRLASNSWAELLLPNSASQSAGITSVSHRARPHLFLQSSPTAMEAEETMECLQEFPEHHKMILDRLNEQREQD

SEQ ID NO: 47002 - protein, 536 aa, Homo sapiens
MWRLPRALCVHAAKTSKLSGPWSRPAAFMSTLLINQPQYAWLKELGLREENEGVYNGSWGGRGEVITTYCPANNEPIARVRQASVADYEETVKKAREAWKIWADIPAPKRGEIVRQIGDALREKIQVLGSLVSLEMGKILVEGVGEVQEYVDICDYAVGLSRMIGGPILPSERSGHALIEQWNPVGLVGIITAFNFPVAVYGWNNAIAMICGNVCLWKGAPTTSLISVAVTKIIAKVLEDNKLPGAICSLTCGGADIGTAMAKDERVNLLSFTGSTQVGKQVGLMVQERFGRSLLELGGNNAIIDADLSLVVPSALFAAVGTAGQRCTTARRLFIHESIHDEVVNRLKKAYAQIRVGNPWDPNVLYGPLHTKQAVSMFLGAVEEAKKEGGTVVYGGKVMDRPGNYVEPTIVTGLGHDASIAHTETFAPILYVFKFKNEEEVFAWNNEVKQGLSSSIFTKDLGRIFRWLGPKGSDCGIVNVNIPTSGAEIGGAFGGEKHTGGGRESGSDAWKQYMRRSTCTINYSKDLPLAQGIKFQ

SEQ ID NO: 47003 - protein, 129 aa, Homo sapiens
MAEVEQKKKRTFRKFTYRGVDLDQLLDMSYEQLMQLYSARQRRRLNRGLRRKQHSLLKRLRKAKKEAPPMEKPEVVKTHLRDMIILPEMVGSMVGVYNGKTFNQVEIKVCAAVPAGWGGLGSPDAGGIS

SEQ ID NO: 47004 - protein, 43 aa, Homo sapiens
FDLSKRLSENEIICNALQRQKERLEGENDEQKWWSVPVLDPCF

SEQ ID NO: 47005 - protein, 235 aa, Homo sapiens
DQEEEEDQDPPCPRELVEVVEPEVLQDSLDRCYSTPSSCLEQPDSCQPYGSSFYALEEKHVGFSLDVGGERGRKEGEEDQNPPCPRLSRELLDEKGPEVLQDSLDRCYSTPSGCLELTDSCQPYRSAFYILEQQCVGLAVDMDEIEKYQEVEEDQDPSCPRLSRELLDEKEPEVLQDSLDRCYSIPSGYLELPDLGQPYSSAVYSLEEQYLGLALDVDRIKKDQEEEEDQDPPCP

SEQ ID NO: 47006 - protein, 136 aa, Homo sapiens
MRKGVLKDPEIADLFYKDDPEELFIGLHEIGHGSFGAVYFATNAHTSEVVAIKKMSYSGKQTHEKWQDILKEVKFLRQLKHPNTIEYKGCYLKEHTAWLVMEYCLGSASDLLEVHKKPLQEVEIAAITHGALHGLA

SEQ ID NO: 47007 - protein, 82 aa, Homo sapiens
MRTWDYSNSGNMKPPLLVFIVCLLWLKDSHCAPTWKDKTAISENLKSFSEVGEIDADEEVKKALTGIKQMKIMMERKEKEHT

SEQ ID NO: 47008 - protein, 181 aa, Homo sapiens
MPMTLGYWNIRGLAHSIRLLLEYTDSSYEEKKYTMGDAPDYDRSQWLNEKFKLGLDFPNLPYLIDGTHKITQSNAILRYIARKHNLCGESEKEQIREDILENQFMDSRMQLAKLCYDPDFEKLKPEYLQALPEMLKLYSQFLGKQPWFLGDKGLEKISAYMKSSRFLPRPVFTKMAVWGNK

SEQ ID NO: 47009 - protein, 23 aa, Homo sapiens
MRPEDRMFHIRAVILRALSLAFL

SEQ ID NO: 47010 - protein, 687 aa, Homo sapiens
MATANFGKIQIGIYVEIKRSDGRIHQAMVTSLNEDNESVTVEWIENGDTKGKEIDLESIFSLNPDLVPDEEIEPSPETPPPPASSAKVNKIVKNRRTVASIKNDPPSRDNRVVGSARARPSQFPEQSSSAQQNARRKSNCVKEVEKLQEKREKRRLQQQELREKRAQDVDATNPNYEIMCMIRDFRGSLDYRPLTTADPIDEHRICVCVRKRPLNKKETQMKDLDVITIPSKDVVMVHEPKQKVDLTRYLENQTFRFDYAFDDSAPNEMVYRFTARPLVETIFERGMATCFAYGQTGSGKTHTMGGDFSGKNQDCSKGIYALAARDVFLMLKKPNYKKLELQVYATFFEIYSGKVFDLLNRKTKLRVLEDGKQQVQVVGLQEREVKCVEDVLKLIDIGNSCRTSGQTSANAHSSRSHAVFQIILRRKGKLHGKFSLIDLAGNERGADTSSADRQTRLEGAEINKSLLALKECIRALGRNKPHTPFRASKLTQVLRDSFIGENSRTCMIATISPGMASCENTLNTLRYANRVKELTVDPTAAGDVRPIMHHPPNQIDDLETQWGVGSSPQRDDLKLLCEQNEEEVSPQLFTFHEAVSQMVEMEEQVVEDHRAVFQESIRWLEDEKALLEMTEEVDYDVDSYATQLEAILEQKIDILTELRDKVKSFRAALQEEEQASKQINPKRPRAL

SEQ ID NO: 47011 - protein, 89 aa, Homo sapiens
MYVEGTLDLLELLIMHPFLKPDDQQKEVVNMAQKAIIRYFPVFEKILRGHGQSFLVGNQLSLADVILLQTILALEEKIPNILSAFPFLQ

SEQ ID NO: 47012 - protein, 1103 aa, Homo sapiens
LRWTPLNSSTIIGYRITVVAAGEGIPIFEDFVDSSVGYYTVTGLEPGIDYDISVITLINGGESAPTTLTQQTAVPPPTDLRFTNIGPDTMRVTWAPPPSIDLTNFLVRYSPVKNEEDVAELSISPSDNAVVLTNLLPGTEYVVSVSSVYEQHESTPLRGRQKTGLDSPTGIDFSDITANSFTVHWIAPRATITGYRIRHHPEHFSGRPREDRVPHSRNSITLTNLTPGTEYVVSIVALNGREESPLLIGQQSTVSDVPRDLEVVAATPTSLLISWDAPAVTVRYYRITYGETGGNSPVQEFTVPGSKSTATISGLKPGVDYTITVYAVTGRGDSPASSKPISINYRTEIDKPSQMQVTDVQDNSISVKWLPSSSPVTGYRVTTTPKNGPGPTKTKTAGPDQTEMTIEGLQPTVEYVVSVYAQNPSGESQPLVQTAVTTIPAPTDLKFTQVTPTSLSAQWTPPNVQLTGYRVRVTPKEKTGPMKEINLAPDSSSVVVSGLMVATKYEVSVYALKDTLTSRPAQGVVTTLENVSPPRRARVTDATETTITISWRTKTETITGFQVDAVPANGQTPIQRTIKPDVRSYTITGLQPGTDYKIYLYTLNDNARSSPVVIDASTAIDAPSNLRFLATTPNSLLVSWQPPRARITGYIIKYEKPGSPPREVVPRPRPGVTEATITGLEPGTEYTIYVIALKNNQKSEPLIGRKKTDELPQLVTLPHPNLHGPEILDVPSTVQKTPFVTHPGYDTGNGIQLPGTSGQQPSVGQQMIFEEHGFRRTTPPTTATPIRHRPRPYPPNVGEEIQIGHIPREDVDYHLYPHGPGLNPNASTGQEALSQTTISWAPFQDTSEYIISCHPVGTDEEPLQFRVPGTSTSATLTGLTRGATYNVIVEALKDQQRHKVREEVVTVGNSVNEGLNQPTDDSCFDPYTVSHYAVGDEWERMSESGFKLLCQCLGFGSGHFRCDSSRWCHDNGVNYKIGEKWDRQGENGQMMSCTCLGNGKGEFKCDPHEATCYDDGKTYHVGEQWQKEYLGAICSCTCFGGQRGWRCDNCRRPGGEPSPEGTTGQSYNQYSQRYHQRTNTNVNCPIECFMPLDVQADREDSRE

SEQ ID NO: 47013 - protein, 470 aa, Homo sapiens
  MOD_RES (1)..(1): Any amino acid
XAKDMAYEHLIDDLLAAQKEILSQQEVIMKLRKDLTEAHSRMSDLRGELNEKQKMELEQNVVLVQQQSKELSVLKEKMAQMSSLVEKKDRELKALEEALRASQEKHRLQLNTEKEQKPRKKTQTCDTSVQIEPVHTEAFSSSQEQQSFSDLGVRCKGSRHEEVIQRQKKALSELRARIKELEKARSPDHKDHQNESFLDLKNLRMENNVQKILLDAKPDLPTLSRIEILAPQNGLCNARFGSAMEKSGKMDVAEALELSEKLYLDMSKTLGSLMNIKNMSGHVSMKYLSRQEREKVNQLRQRDLDLVFDKITQLKNQLGRKEELLRGYEKDVEQLRRSKVSIEMYQSQVAKLEDDIYKEAEEKALLKEALERMEHQLCQEKRINRAIRQQKMRKLRLRELRGAQVHTAAGKDSWDLTPDPSDPGSPAVCRVGRKCRGARTEKRKRIDTLQLCLQRERQAGPAPPACSLNG

SEQ ID NO: 47014 - protein, 99 aa, Homo sapiens
MAWDMCNQDSESVWSDIECAALVGEDQPLCPDLPELDLSELDVNDLDTDSFLGGLKWCSDQSEIISNQYNNEPSNIFEVRTSFGNINFSLSLAWARLTW

SEQ ID NO: 47015 - protein, 40 aa, Homo sapiens
MDPGDPAGDPAAGERHRMGRDPLLLLQALQTLWSTRERKQ

SEQ ID NO: 47016 - protein, 271 aa, Homo sapiens
MKSLKKDSRLRITPTRLLEASENVKEKKRAKGPEQPTPTIQEEPEPVSNVLQGDDILALAIKKEDLKEQHIPRLTEKEDKRVITQKFIIRKLKPMDPRRKVCHLVARPANPDEATKPLDYSGTPSLSPGFTVFQLMGPGDSFDGSDQILPHHILGSLQDFKRIALARGNTQLAERIPTSPCLMTLISAEGESKQKAPKEEKRPPWAPPPQHNFLKNWQRNTALRKKQQEALSEHLKKPVSELLMHTGETYRRIQEERELIDCTLPTRRDRK

SEQ ID NO: 47017 - protein, 467 aa, Homo sapiens
  MOD_RES (1)..(1): Any amino acid
XVGAGPAVPPQACKAPSSNTDLLSCLLGPPEAASQGPPEDLLSEDPLLLASPAPPLSVQSTPRGGPPAAADPFGPLLPSSGNNSQPCSNPDLFGEFLNSDSVTVPPSFPSAHSAPPPSCSADFLHLGDLPGEPSKMTASSSNPDLLGGWAAWTETAASAVAPTPATEGPLFSPGGQPAPCGSQASWTKSQNPDPFADLGDLSSGLQDPQAQSTVSPRGQRVCTCSRRLPTGKLKPGVADTGTAASPHRHCGSPAGFPPGGFIPKTATTPKGSSSWQTSRPPAQGASWPPQAKPPPKACTQPRPNYASNFSVIGAREERGVRAPSFAQKPKVSENDFEDLLSNQGFSSRSDKKGPKTIAEMRKQDLAKDTDPLKLKLLDWIEGKERNIRALLSTLHTVLWDGESRWTPVGMADLVAPEQVKKHYRRAVLAVHPDKAAGQPYEQHAKMIFMELNDAWSEFENQGSRPLF

SEQ ID NO: 47018 - protein, 1247 aa, Homo sapiens
  MOD_RES (1)..(1): Any amino acid
XREIGRTRTQSKIERVKVKTESQDPTSSWRSLIPVIKVNVSTGRLAFGNHYQPQTLCINFDDAFLTYTTKPPSSHLDQFMHIVKGKLENVRVMLVPSPRYVGLQNDEPPRLMGEGFVVMQSNDVDIYYYMDEPGLVPEETEENIEGEMSSEDCKLQDLPPCWGLDIVCGKGTDFNYGPWADRQRDCLWKFFFPPDYQVLKVSEIAQPGRPRQILAFELRMNIIADATIDLLFTKNRETNAVHVNVGAGSYLEINIPMTVEENGYTPAIKGQLLHVDATTSMQYRTLLEAEMLAFHINASYPRIWNMPQTWQCELEVYKATYHFIFAQKNFFTDLIQDWSSDSPPDIFSFVPYTWNFKIMFHQFEMIWAANQHNWIDCSTKQQENVYLAACGETLNIDFSLPFTDFVPATCNTKFSLRGEDVDLHLFLPDCHPSKYSLFMLVKNCHPNKMIHDTGIPAECQSGQKTVKPKWRNVTQEKSGWVECWTVPSVMLTIDYTWHPIYPQKADEQLKQSLSEMEETMLSVLRPSQKTSDRVVSSPSTSSRPPIDPSELPPDKLHVEMELSPDSQITLYGPLLNAFLCIKENYFGEDDMYMDFEEVISSPVLSLSTSSSSGWTAVGMENDKKENEGSAKSIHPLALRPWDITVLVNLYKVHGRLPVHGTTDGPECPTAFLERLCFEMKKGFRETMLQLILSPLNVFVSDNYQRPPVDEVLREGHINLSGLQLRAHAMFSAEGLPLGSDSLEYAWLIDVQAGSLTAKVTAPQLACLLEWGQTFVFHVVCREYELERPKSVIICQHGIDRRFCESKLSCIPGPCPTSDDLKYTMIRLAVDGADIYIVEHGCATNIKMGAIRVANCNLHNQSVGEGISAAIQDFQVRQYIEQLNNCRIGLQPAVLRRAYWLEAGSANLGLITVDIALAADHHSKHEAQRHFLETHDARTKRLWFLWPDDILKNKRCRNKCGCLGGCRFFGGTVTGLDFFKLEELTPSSSSAFSSTSAESDMYYGQSLLQPGEWIITKEIPKIIDGNVNGMKRKEWENKSVGIEVERKTQHLSLQVPLRSHSSSSSSEENSSSSAAQPLLAGEKESPSSVADDHLVQKEFLHGTKRDDGQASIPTEISGNSPVSPNTQDKSVGQSPLRSPLKRQASVCSTRLGSTKSLTAAFYGDKQPVTVGVQFSSDVSRSDENVLDSPKQRRSFGSFPYTPSADSNSFHQYRSMDSSMSMADSEAYFSAAEEFEPISSDEGPGTYPG

SEQ ID NO: 47019 - protein, 53 aa, Homo sapiens
MAKSGLRQDPQSTAAATVLKRAVELDSESRYPQALVCYQEGIDLLLQVLKGEQ

SEQ ID NO: 47020 - protein, 297 aa, Homo sapiens
DGKEAMLRQKDYETATLSEIKALLKKHEAFESDLAAHQDRVEQIAAIAQELNELDYYDSPSVNARCQKICDQWDNLGALTQKRREALERTEKLLETIDQLYLEYAKRAAPFNNWMEGAMEDLQDTFIVHTIEEIQGLTTAHEQFKATLPDADKERLAILGIHNEVSKIVQTYHVNMAGTNPYTTITPQEINGKWDHLSHLRQYEKSIVNYKPKIDQLEGDHQLIQEALIFDNKHTNYTMEHIRVGWEQLLTTIARTINEVENQILTRDAKGISQEQMNEFRASFNHFDRDHSGTLGP

SEQ ID NO: 47021 - protein, 555 aa, Homo sapiens
MGLKAAQKTLFPLRSIDDVVRLFAAELGREEPDLVLLSLVLGFVEHFLAVNRVIPTNVPELTFQPSPAPDPPGGLTYFPVADLSIIAALYARFTAQIRGAVDLSLYPREGGVSSRELVKKVSDVIWNSLSRSYFKDRAHIQSLFSFITGTKLDSSGVAFAVVGACQALGLRDVHLALSEDHAWVVFGPNGEQTAEVTWHGKGNEDRRGQTVNAGVAERSWLYLKGSYMRCDRKMEVAFMVCAINPSIDLHTDSLELLQLQQKLLWLLYDLGHLERYPMALGNLADLEELEPTPGRPDPLTLYHKGIASAKTYYRDEHIYPYMYLAGYHCRNRNVREALQAWADTATVIQDYNYCREDEEIYKEFFEVANDVIPNLLKEAASLLEAGEERPGEQSQVRQKVRIVSREAEAAEAEEPWGEEAREGRRRGPRRESKPEEPPPPKKPALDKGLGTGQGAVSGPPRKPPGTVAGTARGPEGGSTAQVPAPTASPPPEGPVLTFQSEKMKGMKELLVATKINSSAIKLQLTAQSQVQMKKQKVSTPSDYTLSFLKRQRKGL

SEQ ID NO: 47022 - protein, 332 aa, Homo sapiens
MSVKEGAQRKWAALKEKLGPQDSDPTEANLESADPELCIRLLQMPSVVNYSGLRKRLEGSDGGWMVQFLEQSGLDLLLEALARLSGRGVARISDALLQLTCVSCVRAVMNSRQGIEYILSNQGYVRQLSQALDTSNVMVKKQVFELLAALCIYSPEGHVLTLDALDHYKTVCSQQYRFSIVMNELSGSDNVPYVVTLLSVINAVILGPEDLRARTQLRNEFIGLQLLDVLARLRDLEDADLLIQLEAFEEAKAEDEEELLRVSGGVDMSSHQEVFASLFHKPPRGGRHGGGHRGPGGPWLGLSMGPQPSAGEPTHTAHEEAELAEAAIQRGT

SEQ ID NO: 47023 - protein, 253 aa, Homo sapiens
MEPLGLVVHGKAEPFSAALRSLVNNPRYSDVCFVVGQERQEVFAHRCLLACRCNFFQRLLGTEPGPGVPSPVVLSTVPTEAFLAVLEFLYTNSVKLYRHSVAVTFGLGQLQERCVAFIEAHSQEALRTRGFLELSAAALLPLLRSDKLCVDEAELVRAARSWARVGAAVLERPVAEVAAPVVKELRLALLAPAELSALEEQNRQEPLIPVEQIVEAWKCHALRRGDEARGAPCRRRRGTLPREHHRFLDLSFK

SEQ ID NO: 47024 - protein, 93 aa, Homo sapiens
QSSNGPVKKSMREKAVERRSVNKEHNSNFKAGYIPIDEDRLHKTGLRGRKGNLAICVIILLFILAVINLILPGSQARDRRAFSGIPDAYRKKI

SEQ ID NO: 47025 - protein, 157 aa, Homo sapiens
DEADCPLGTCRGDEFQCGDGTCVLAIKHCNQEQDCPDGTGKSPSLIFTNRHEVRRIDLVKRNYSRLIPMLKNVVALDVEVATNRIYWCDLSYRKIYSAYMDKASDPKEQEVLIDEQLHSPEGLAVDWVHKHIYWTDSGNKTISVATVDGGRRRTLFS

SEQ ID NO: 47026 - protein, 147 aa, Homo sapiens
MEEAPLFPGESIKAIVKDVMYICPFMGAVSGTLTVTDFKLYFKNVERDPHFILDVPLGVISRVEKIGAQSHGDNSCGIEIVCKDMRNLRLAYKQEEQSKLGIFENLNKHAFPLSNGQALFAFSYKEKFPINGWKVYDPVSEYKRQGL

SEQ ID NO: 47027 - protein, 43 aa, Homo sapiens
MEKWYLMTVVVLIGLTVRWTVSLNSYSGNTFLLVKKKTKFSFE

SEQ ID NO: 47028 - protein, 78 aa, Homo sapiens
MGEEGTGGTVHLLCLAASSGVPLFCRSSRGGAPARQQNLEVQLSSARTENTTVVWKSFHDRSPGGNVGQGQGLGDSPC

SEQ ID NO: 47029 - protein, 26 aa, Homo sapiens
DVERALRAARLPRDRACDSPSPGTST

SEQ ID NO: 47030 - protein, 148 aa, Homo sapiens
MNREDRNVLRMKERERRNQEIQQGEDAFPPSSPLFAEPYKVTSKEDKLSSRIQSMLGNYDEMKDFIGDRSIPKLVAIPKPTVPPSADEKSNPNFFEQRHGGSHQSSKWTPVGPAPSTSQSQKRSSGLQSGHSSQRTSAGSSSGTNSSG

SEQ ID NO: 47031 - protein, 72 aa, Homo sapiens
MDLPVDEWKSYLLQKWASLPTSVQVTISTAETLRDIFLHSSSLLQLECDGAISAHCNLHLPGSSDSRASASQ

SEQ ID NO: 47032 - protein, 63 aa, Homo sapiens
MTGDTDKYLGPQDLKELGDDSLPAEGYMGFSLGARSASHAASTVAKELTDKTGRTNLSHIFQN

SEQ ID NO: 47033 - protein, 182 aa, Homo sapiens
MNQIEPGVQYNYVYDEDEYMIQEEEWDRDLLLDPAWEKQQRKTFTAWCNSHLRKAGTQIENIEEDFRNGLKLMLLLEVISGERLPKPDRGKMRFHKIANVNKALDYIASKGVKLVSIGAEEIVDGNVKMTLGMIWTIILRFAIQDISVEETSAKEGLLLWCQRKTAPYRNVNIQNFHTRMTP

SEQ ID NO: 47034 - protein, 104 aa, Homo sapiens
MVNEPPVMCSHFAQEFWPEQNIKDSFEKVTLRRYEKCGNDNFQLKGCKSVDECKLHKGGYNGLNQCLPTMQSKMFQCDKYVKVFNKFSHSDRHKIKHMENKPFK

SEQ ID NO: 47035 - protein, 241 aa, Homo sapiens
  MOD_RES (1)..(1): Any amino acid
XITTPGSIALAQAQAQAQVPAKAPLAGQVSTMVTTSTTTTVAKTVTVTRPTGVSFKKDVPPSINTTNIDTLLVATDQTERIVEPPENIQEKIAFIFNNLSQSNMTQKVEELKETVKEEFMPWVSQYLVMKRVSIEPNFHSLYSNFLDTLKNPEFNKMVLNETYRNIKDLDVKSLLLEAYVKGQQELLYVVPFVAKVLESSIRSVVFRPPNPWTMAIMNVLAELHQEHDLKLNLKFEIEVLC

SEQ ID NO: 47036 - protein, 174 aa, Homo sapiens
MPKRGKKGAVAEDGDELRTEPEAKKSKTAAKKNDKEAAGEGPALYEDPPDQKTSPSGKPATLKICSWNVDGLRAWIKKKGLDWVKEEAPDILCLQETKCSENKLPAELQELPGLSHQYWSAPSDKEGYSGVGLLSRQCPLKVSYGIGDEEHDQEGRVIVAEFDSFVLVTAYVPN

SEQ ID NO: 47037 - protein, 74 aa, Homo sapiens
MGLPRGSFFWLLLLLTAACSGLLFALYFSAVQRYPGPAAGASCQPRVPSTCGCWGEGRGLREAWPPFERGHHII

SEQ ID NO: 47038 - protein, 334 aa, Homo sapiens
MESYHKPDQQKLQALKDTANRLRISSIQATTAAGSGHPTSCCSAAEIMAVLFFHTMRYKSQDPRNPHNDRFVLSKGHAAPILYAVWAEAGFLAEAELLNLRKISSDLDGHPVPKQAFTDVATGSLGQGLGAACGMAYTGKYFDKASYRVYCLLGDGELSEGSVWEAMAFASIYKLDNLVAILDINRLGQSDPAPLQHQMDIYQKRCEAFGWHAIIVDGHSVEELCKAFGQAKHQPTAIIAKTFKGRGITGVEDKESWHGKPLPKNMAEQIIQEIYSQIQSKKKILATPPQEDAPSVDIANIRMPSLPSYKVGDKVQNSHPQGLRAGTGQAGPCQ

SEQ ID NO: 47039 - protein, 612 aa, Homo sapiens
MATPDQKSPNVLLQNLCCRILGRSEADVAQQFQYAVRVIGSNFAPTVERDEFLVAEKIKKELIRQRREADAALFSELHRKLHSQGVLKNKWSILYLLLSLSEDPRRQPSKVSSYATLFAQALPRDAHSTPYYYARPQTLPLSYQDRSAQSAQSSGSVGSSGISSIGLCALSGPAPAPQSLLPGQSNQAPGVGDCLRQQLGSRLAWTLTANQPSSQATTSKGVPSAVSRNMTRSRREGDTGGTMEITEAALVRDILYVFQGIDGKNIKMNNTENCYKVEGKANLSRSLRDTAVRLSELGWLHNKIRRYTDQRSLDRSFGLVGQSFCAALHQELREYYRLLSVLHSQLQLEDDQGVNLGLESSLTLRRLLVWTYDPKIRLKTLAALVDHCQGRKGGELASAVHAYTKTGDPYMRSLVQHILSLVSHPVLSFLYRWIYDGELEDTYHEFFVASDPTVKTDRLWHDKYTLRKSMIPSFMTMDQSRKVLLIGKSINFLHQVCHDQTPTTKMIAVTKSAESPQDAADLFTDLENAFQGKIDAAYFETSKYLLDVLNKKYSLLDHMQAMRRYLLLGQGDFIRHLMDLLKVKCMSFSTSSGPEPAVLLGLETVQTPAQAA

SEQ ID NO: 47040 - protein, 232 aa, Homo sapiens
MSTELFSSTREEGSSGSGPSFRSNQRKMLNLLLERDTSFTVCPDVPRTPVGKFLGDSANLSILSGGTPKRCLDLSNLSSGEITATQLTTSADLDETGHLDSSGLQEVHLAGMNHDQHLMKCSPAQLLCSTPNGLDRGHRKRDAMCSSSANKENDNGNLVDSEMKYLGSPITTVPKLDKNPNLGEDQAEEISDELMEFSLKDQEAKRWGLDVLPKLVWNSCAPAILLPLLRDL

SEQ ID NO: 47041 - protein, 32 aa, Homo sapiens
MAQETNHSQVPMLCSTGCGFYGNPRTNGMCSV

SEQ ID NO: 47042 - protein, 315 aa, Homo sapiens
MAVLAALLRSGARSRSPLLRRLVQEIRYVERSYVSKPTLKEVVIVSATRTPIGSFLGSLSLLPATKLGSIAIQGAIEKAGIPKEEVKEAYMGNVLQGGEGQAPTRQAVLGAGLPISTPCTTINKVCASGMKAIMMASQSLMCGHQDVMVAGGMESMSNVPYVMNRGSTPYGGVKLEDLIVKDGLTDVYNKIHMGSCAENTAKKLNIARNEQDAYAINSYTRSKAAWEAGKFGNEVIPVTVTVKGQPDVVVKEDEEYKRVDFSKVPKLKTVFQKENGTVTAANASTLNDGAAALVLMTADAAKRLNVTPLARIVGS

SEQ ID NO: 47043 - protein, 165 aa, Homo sapiens
MRSLLLLSAFCLLEAALAAEVKKPAAAAAPGTAEKLSPKAATLAERSAGLAFSLYQAMAKDQAVENILVSPVVVASSLGLVSLGGKATTASQAKAVLSAEQLRDEEVHAGLGELLRSLSNSTARNVTWKLGSRLYGPSSVSFADDFVRSSKQHYNCEHSKINFRD

SEQ ID NO: 47044 - protein, 244 aa, Homo sapiens
  MOD_RES (1)..(1): Any amino acid
XSLLNFWNPPTTAQVTIEAQPPKVSEGKDVLLLVHNLPQNLAGYIWYKGQMTYLYHYITSYVVDGQRIIYGPAYSGRERVYSNASLLIQNVTQEDAGSYTLHIIKRRDGTGGVTGHFTFTLHPKLSKPYITINNLNPRENKDVLTFTCEPKSKNYTYIWWLNGQSLPVSPRVKRPIENRILILPNVTRNETGPYQCEIRDRYGGIRSDPVTLNVLYGPDLPSIYPSFTYYRSGENLYLSCFAES

SEQ ID NO: 47045 - protein, 87 aa, Homo sapiens
  MOD_RES (1)..(1): Any amino acid
XRAERLQREVEGERRAREQAEAEVASLNRRIQLVEEELDRAQERLATALQKLEEAEKAADESERLECNGSISAHRNLHLLSSSDSPA

SEQ ID NO: 47046 - protein, 285 aa, Homo sapiens
MSASAPAAEGEGTPTQPASEKEPEMPGPREESEEEEDEDDEEEEEEEKEKSLIVEGKREKKKVERLTMQVSSLQREPFTIAQGKGQKLCEIERIHFFLSKKKTDELRNLHKLLYNRPGTVSSLKKNVGQFSGFPFEKGSVQYKKKEEMLKKFRNAMLKSICEVLDLERSGVNSELVKRILNFLMHPKPSGKPLPKSKKTCSKGSKKERNSSGMARKAKRTKCPEILSDESSSDEDEKKNKEESSDDEDKESEEEYNLSAVRTEFWLCDRRLFWRPSFKSPAAYKS

SEQ ID NO: 47047 - protein, 359 aa, Homo sapiens
MGQDQTKQQIEKGLQLYQSNQTEKALQVWTKVLEKSSDLMGRFRVLGCLVTAHSEMGRYKEMLKFAVVQIDTARELEDADFLLESYLNLARSNEKLCEFHKTISYCKTCLGLPGTRAGAQLGGQVSLSMGNAFLGLSVFQKALESFEKALRYAHNNDDAMLECRVCCSLGSFYAQVKESMKIALQHGDRPLQALCLLCFADIHRSRGDLETAFPRYDSAMSIMTEIGNRLGQVQALLGVAKCWVARKALDKALDAIERAQDLAEEVGNKLSQLKLHCLSESIYRSKGLQRELRAHVVRFHECVEETELYCGLCGESIGEKNSRLQALPCSHIFHLRCLQNNGTRSCPNCRRSSMKPGFV

SEQ ID NO: 47048 - protein, 159 aa, Homo sapiens
  MOD_RES (1)..(1): Any amino acid
XKYTIKPPRDLCSRFEQEQEVKKQQEIRAQEKKRLREEEERLMEAEKAKPDALHGLRVHSWVLVLSGKREVPENFFIDPFTGHSYSTQDEHFLGIESLWNHKNYWINMQDCWNCCKVPREGELGGCGRHSAGDRNRGKQWQPDLGESETPGHEGFEPSP

SEQ ID NO: 47049 - protein, 2095 aa, Homo sapiens
GLFSLLAERLMLQTNLITMTTYNVLFEILIEQIGTQVIHKQHPDPDSSVKIQNPQILKVIATLLRNSPQCPESMEVRRAFLSDMIKLFNNSRENRRSLLQCSVWQEWMLSLCYFNPKNSDEQKITEMVYAIFRILLYHAVKYEWGGWRVWVDTLSITHSKVTFEIHKENLANIFREQQGKVDEEIGLCSSTSVQAASGIRRDINVSVGSQQPDTKDSPVCPHFTTNGNENSSIEKTSSLESASNIELQTTNTSYEEMKAEQENQELPDEGTLEETLTNETRNADDLEVSSDIIEAVAISSNSFITTGKDSMTVSEVTASISSPSEEDASEMPEFLDKSIVEEEEDDDYVELKVEGSPTEEANLPTELQDNSLSPAASEAGEKLDMFGNDDKLIFQEGKPVTEKQTDTETQDSKDSGIQTMTASGSSAMSPETTVSQIAVESDLGQMLEEGKKATNLTRETKLINDCHGSVSEASSEQKIAKLDVSNVATDTERLELKASPNVEAPQPHRHVLEISRQHEQPGQGIAPDAVNGQRRDSRSTVFRIPEFNWSQMHQRLLTDLLFSIETDIQMWRSHSTKTVMDFVNSSDNVIFVHNTIHLISQVMDNMVMACGGILPLLSAATSATHELENIEPTQGLSIEASVTFLQRLISLVDVLIFASSLGFTEIEAEKSMSSGGILRQCLRLVCAVAVRNCLECQQHSQLKTRGDKALKPMHSLIPLGKSAAKSPVDIVTGGISPVRDLDRLLQDMDINRLRAVVFRDIEDSKQAQFLALAVVYFISVLMVSKYRDILEPQNERHSQSCTETGSENENVSLSEITPAAFSTLTTASVEESESTSSARRRDSGIGEETATGLGSHVEVTPHTAPPGVSAGPDAISEVLSTLSLEVNKSPETKNDRGNDLDTKATPSVSVSKNVNVKDILRSLVNIPADGVTVDPALLPPACLGALGDLSVEQPVQFRSFDRSVIVAAKKSAVSPSTFNTSIPTNAVSVVSSVDSAQASDMGGESPGSRSSNAKLPSVPTVDSVSQDPVSNMSITERLEHALEKAAPLLREIFVDFAPFLSRTLLGSHGQELLIEGTSLVCMKSSSSVVELVMLLCSQEWQNSIQKNAGLAFIELVNEGRLLSQTMKDHLVRVANEAEFILSRQRAEDIHRHAEFESLCAQYSADKREDEKMCDHLIRAAKYRDHVTATQLIQKIINILTDKHGAWGNSAVSRPLEFWRLDYWEDDLRRRRRFVRNPLGSTHPEATLKTAVEHATDEDILAKGKQSIRSQALGNQNSENEILLEGDDDTLSSVDEKDLENLAGPVSLSTPAQLVAPSVVVKGTLSVTSSELYFEVDEEDPNFKKIDPKILAYTEGLHGKWLFTEIRSIFSRRYLLQNTALEIFMANRVAVMFNFPDPATVKKVVNYLPRVGVGTSFGLPQTRRISLASPRQLFKASNMTQRWQHREISNFEYLMFLNTIAGRSYNDLNQYPVFPWVITNYESEELDLTLPTNFRDLSKPIGALNPKRAAFFAERYESWEDDQVPKFHYGTHYSTASFVLAWLLRIEPFTTYFLNLQGGKFDHADRTFSSISRAWRNSQRDTSDIKELIPEFYYLPEMFVNFNNYNLGVMDDGTVVSDVELPPWAKTSEEFVHINRLALESEFVSCQLHQWIDLIFGYKQQGPEAVRALNVFYYLTYEGAVNLNSITDPVLREAVEAQIRSFGQTPSQLLIEPHPPRGSAMQVYLLLQSPLMFTDKAQQDVIMVLKFPSNSPVTHVAANTQPGLATPAVITVTANRLFAVNKWHNLPAHQGAVQDQPYQLPVEIDPLIASNTGMHRRQITDLLDQSIQVHSQCFVITSDNRYILVCGFWDKSFRVYSTDTGRLIQVVFGHWDVVTCLARSESYIGGNCYILSGSRDATLLLWYWNGKCSGIGDNPGSETAAPRAILTGHDYEVTCAAVCAELGLVLSGSQEGPCLIHSMNGDLLRTLEGPENCLKPKLIQASREGHCVIFYENGLFCTFSVNGKLQATMETDDNIRAIQLSRDGQYLLTGGDRGVVVVRQVSDLKQLFAYPGCDAGIRAMALSYDQRCIISGMASGSIVLFYNDFNRWHHEYQTRY

SEQ ID NO: 47050 - protein, 389 aa, Homo sapiens [sequence omitted]

SEQ ID NO: 47051 - protein, 670 aa, Homo sapiens [sequence omitted]

SEQ ID NO: 47052 - protein, 1140 aa, Homo sapiens
MLGRRLGARASYSPYRAGRQGPQQRGRDPGIQLTELPRKDGADAVFPGPSLEPPAGSSGVKATGTLKRPTSLSRHASAAGFPLSGAASWTLGRSHRSPLTAASPGELPTEGAGPDVVEDISHLLADVARFAEGLEKLKECVLRDDLLEARRPRAHECLGEALRVMHQIISKYPLLNTVETLTAAGTLIAKVKAFHYESNNDLEKQEFEKALETIAVAFSSTVSEFLMGEVDSSTLLAVPPGDSSQSMESLYGPGSEGTPPSLEDCDAGCLPAEEVDVLLQRCEGGVDAALLYAKNMAKYMKDLISYLEKRTTLEMEFAKGLQKIAHNCRQSVMQEPHMPLLSIYSLALEQDLEFGHSMVQAVGTLQTQTFMQPLTLRRLEHEKRRKEIKEAWHRAQRKLQEAESNLRKAKQGYVQRCEDHDKARFLVAKAEEEQAGSAPGAGSTATKTLDKRRRLEEEAKNKAEEAMATYRTCVADAKTQKQELEDTKVTALRQIQEVIRQSDQTIKSATISYYQMMHMQTAPLPVHFQMLCESSKLYDPGQQYASHVRQLQRDQEPDVHYDFEPHVSANAWSPVMRARKSSFNVSDVARPEAAGSPPEEGGCTEGTPAKDHRAGRGHQVHKSWPLSISDSDSGLDPGPGAGDFKKFERTSSSGTMSSTEELVDPDGGAGASAFEQADLNGMTPELPVAVPSGPFRHEGLSKAARTHRLRKLRTPAKCRECNSYVYFQGAECEECCLACHKKCLETLAIQCGHKKLQGRLQLFGQDFSHAARSAPDGVPFIVKKCVCEIERRALRTKGIYRVNGVKTRVEKLCQAFENGKELVELSQASPHDISNVLKLYLRQLPEPLISFRLYHELVGLAKDSLKAEAEAKAASRGRQDGSESEAVAVALAGRLRELLRDLPPENRASLQYLLRHLRRIVEVEQDNKMTPGNLGIVFGPTLLRPRPTEATVSLSSLVDYPHQARVIETLIVHYGLVFEEEPEETPGGQDESSNQRAEVVVQVPYLEAGEAVVYPLQEAAADGCRESRVVSNDSDSDLEEASELLSSSEASALGHLSFLEQQQSEASLEVASGSHSGSEEQLEATAREDGDGDEDGPAQQLSGFNTNQSNNVLQAPLPPMRLRGGRMTLGSCRERQPEFV

SEQ ID NO: 47053 - protein, 159 aa, Homo sapiens
METKRVEIPGSVLDDLCSRFILHIPSEERDNAIRVCFQIELAHWFYLDFYMQNTPGLPQCGIRDFAKAVFSHCPFLLPQGEDVEKVLDEWKEYKMGVPTYGAIILDETLENVLLVQGYLAKSGWGFPKGKVNKEEAPHDCAAREPWLPDKCTIWDFLRS

SEQ ID NO: 47054 - protein, 240 aa, Homo sapiens
MSHDLVAVGRKSENFHPVFEHLDSTQNTENKPTGEFAQEIITIIHQVKANYFPSPGITLHERFSTMQDIHKADVNEIPLNSDPEIHRRIDMSLAELQSKQAVIYESEQTLIKIIDPNDLRHDIERRRKERLQNEDEHIFHIASAAERDDQNSSFSKNYTTQRKDIITHKPFEVEGNHRNTRVRPFKSNFRGGRCQPNYKSGLVQKSLYIQAKYQRLRFTGPRGFITHKFRERLMRKKKVP

SEQ ID NO: 47055 - protein, 116 aa, Homo sapiens
LLMCDTCSRVYHLDCLDPPLKTIPKGMWICPRCQDQMLKKEEAIPWPGTLAIVHSYIAYKAAKEEEKQKLLKWSSDLKQEREQLEQKVKQLSNSISSPERVGPSVRPSLALSSTPC

SEQ ID NO: 47056 - protein, 193 aa, Homo sapiens
  MOD_RES (1)..(1): Any amino acid
XFRQTIVFDFGLEPVLMQRVMIDAASTEVFFFRYMYVSLNRKVIRTTYRVSQPSAQSLCYYGFHLVLVLCYFFSPDLEYLMHAKQQLVTTAKRWDSSSKTIIDFEPNETTDLEKSLLIRYQIPLSADQLFTQSVLDKSLTKSNYQSRLHDLLYIEEIAQYKEISKFNLKVQLQILASFMLTGVSGGAKYAQNG

SEQ ID NO: 47057 - protein, 152 aa, Homo sapiens
MEVLRPQLIRIDGRNYRKNPVQEQTYQHEEDEEDFYQGSMECADEPCDAYEVEQTPQGFRSTLRAPSLLYKHIVGKRGDTRKKIEMETKTSISIPKPGQDGEIVITGQHRNGVISARTRIDVLLDTFRRKQPFTHFLAFFLNEVEVQEGFLR

SEQ ID NO: 47058 - protein, 283 aa, Homo sapiens
MSGPCGEKPVLEASPTMSLWEFEDSHSRQGTPRPGQELAAEEASALELQMKVDFFRKLGYSSTEIHSVLQKLGVQADTNTVLGELVKHGTATERERQTSPDPCPQLPLVPRGGGTPKAPNLEPPLPEEEKEGSDLRPVVIDGSNVAMSHGNKEVFSCRGILLAVNWFLERGHTDITVFVPSWRKEQPRPDVPITDQHILRELEKKKILVFTPSRRVGGKRVVCYDDRFIVKLAYESDGIVVSNDTYRDLQGERQEWKRFIEERLLMYSFVNDNKACHRPLLSN

SEQ ID NO: 47059 - protein, 129 aa, Homo sapiens
MKVFCEVLEELYKKVLLGATLENDSHDYIFYLNPAVSDQDCSTATSLEWANTCGIQGRHQPISVGVAPIAVAPVCLKTNSQMSGSREVMLLQLTVIKVMTTRILSVKTEFHAKEQYRDVIKILLESAKV

SEQ ID NO: 47060 - protein, 46 aa, Homo sapiens
  MOD_RES (1)..(1): Any amino acid
XAPSLQHLCRLTINKCTGAIWGLPLPTRLKDYLEEYKFQPAVFYPG

SEQ ID NO: 47061 - protein, 62 aa, Homo sapiens
MKNATIVMSVRREQGSSSGEGSLSFEDVAVGFTREEWQFLDQSQKVLYKEVMLENYINLVSI

SEQ ID NO: 47062 - protein, 369 aa, Homo sapiens
MVKLSIVLTPRFLSHDQGQLTKELQQHVKSVTCPCEYLRKVINTLADHRHRGTDFGGSPWLLIITVFLRSYKFAISLCTSYLCVSFLKTIFPSQNGHDGSTDVQQRARRSNRRRQEGIKIVLEDIFTLWRQVETKVRAKICKMKVTTKVNRHDKINGKRKTAKEHLRKLSMKEREHGEKERQVSEAEENGKLDMKEIHTYMEMFQRAQALRRRAEDYYRCKITPSARKPLCNRVRMAAAEHRHSSGLPYWPYLTAETLKNRMGHQPPPPTQQHSIIDNSLSLKTPPECLLTPLPPSALPSADDNLKTPAECLLYPLPPSADDNLKTPPECLLTPLPPSAPPSVDDNLKTPPKCVCSLPFHPQRMIISRN

SEQ ID NO: 47063 - protein, 186 aa, Homo sapiens
MGCCTGRCSLICLCALQLVSALERQIFDFLGFQWAPILGNFLHIIVVILGLFGTIQYRPRYIMVYTVWTALWVTWNVFIICFYLEVGGLSKDTDLMTFNISVHRSWWREHGPGCVRRVLPPSAHGMMDDYTYVSVTGCIVDFQYLEVIHSAVQILLSPEQVPRVSGAWNWKKSHLCHKHSTDCVHA

SEQ ID NO: 47064 - protein, 688 aa, Homo sapiens
MSPKKVQIKVEEKEDETEESSSEEEEEVEDKLPRRESLRPKRKRTRDVINEDDPEPEPEDEETRKAREKERRRRLKRGAEAKKFVSENEGALGKGKGKRWFAFKMMMAKKWAKFLRDFENFKAACVPWENKIKAIESQFGSSVASYFLFLRWMYGVNMVLFILTFSLIMLPEYLWGLPYGSLPRKTVPRAEEASAANFGVLYDFNGLAQYSVLFYGYYDNKRTIGWMNFRLPLSYFLVGIMCIGYSFLVVLKAMTKNIGDDGGGDDNTFNFSWKVFTSWDYLIGNPETADNKFNSITMNFKEAITEEKAAQVEENVHLIRFLRFLANFFVFLTLGGSGYLIFWAVKRSQEFAQQDPDTLGWWEKNEMNMVMSLLGMFCPTLFDLFAELEDYHPLIALKWLLGRIFALLLGNLYVFILALMDEINNKIEEEKLVKANITLWEANMIKAYNASFSENSTGPPFFVHPADVPRGPCWETMVGQEFVRLTVSDVLTTYVTILIGDFLRACFVRFCNYCWCWDLEYGYPSYTEFDISGNVLALIFNQGMIWMGSFFAPSLPGINILRLHTSMYFQCWAVMCCNVPEARVFKASRSNNFYLGMLLLILFLSTMPVLYMIVSLPPSFDCGPFSGKNRMFEVIGETLEHDFPSWMAKILRQLSNPGLVIAVILVMVLAIYYLNATAKGQKAANLDL

SEQ ID NO: 47065 - protein, 40 aa, Homo sapiens
  MOD_RES (1)..(1): Any amino acid
XDYEAAAGALLASGAAEETGCVRPPATTDEPGLPFHQDGK

SEQ ID NO: 47066 - protein, 97 aa, Homo sapiens
MERYAAALEEVADGARQQERHYQLLSALQSLVKELPSSFQQRLSYTTLSDLALALLDGTVFEIVQGLLEIQHLTEKSLYNQRLRLQNEHRGRGTPDP

SEQ ID NO: 47067 - protein, 113 aa, Homo sapiens
  MOD_RES (1)..(1): Any amino acid
XPVGSWYNVTILVKMDFKELQQVDPRLLNHMRLLHSLVGETDGGCLHPPCGSCSGRPRSPAPCNQWPPPSTTCTQPLGTPPPQCRGCYWACHGHCLWLTSPPCWVTLRSVSMK

SEQ ID NO: 47068 - protein, 392 aa, Homo sapiens
MDLPFQTPFQSSGLDTSRTTRHHGLVDRVYRERGRLGSPHRRPLSVDKHGRQADSCPYGTMYLSPPADTSWRRTNSDSALHQSTMTPTQPESFSSGSQDVHQKRVLLLTVPGMEETTSEADKNLSKQAWDTKKTGSRPKSCEVPGINIFPSADQENTTALIPATHNTGGSLPDLTNIHFPSPLPTPLDPEEPTFPALSSSSSTGNLAANLTHLGIGGAGQGMSTPGSSPQHRPAGVSPLSLSTEARRQQASPTLSPLSPITQLEQFNMMENAISSSSLYSPGSTLNYSQAAMMGLTGSHGSLPDSQQLGYASHSGIPNIILTVTGESPPSLSKELTSSLAGVGDVSFDSDSQFPLDELKIDPLTLDGLHMLNDPDMVLADPATEDTFRMDRL

SEQ ID NO: 47069 - protein, 51 aa, Homo sapiens
MILNSLSLCYHNKLILAPMVRVGTLPMRLLALDYGADIVYCEELIDLKMIQ

SEQ ID NO: 47070 - protein, 45 aa, Homo sapiens
MGPRGAASLPRGPGPRRLLLPVVLPLLLLLLLAPPGSGAGASRPP

SEQ ID NO: 47071 - protein, 95 aa, Homo sapiens
MQKSSTCSFMYGELTDKDTIEKVRQTFENYEMNSFEILMYKKNRTPVWFFVKIAPIRNEQDKVVLFLCTFSDITAFKQPIEDDSCKGWGKFARLT

SEQ ID NO: 47072 - protein, 157 aa, Homo sapiens
MTSRILLRQQLMREQMQEQERREQQQKLQAAQFMQQRVPVSQTPAINVSVPTTLPSATQVPMEVLKVQTHLENPTKYHIQQAQRQQGFYKFEEQNRAESECPGMNTHSRASCMQMDDVIDDIISLESSYNEEILGLMDPALQMANTLPVSGNLIDLY

SEQ ID NO: 47073 - protein, 54 aa, Homo sapiens
MLKAAAKRPELSGKNTISNNSDMAEVKSMFREVLPKQETGCHSATQAWVQLAQP

SEQ ID NO: 47074 - protein, 298 aa, Homo sapiens
  MOD_RES (1)..(1): Any amino acid
XLLAHEKLSVPVTCKIRVFPEIDKTVRYAQMLEKAGCQLLTVHGRTKEQKGPLSGAASWEHIKAVRKAVAIPVFANGNIQCLQDVERCLRDTGVQGVMSAEGNLHNPALFEGRSPAVWELAEEYLDIVREHPCPLSYVRAHLFKLWHHTLQVHQELREELAKVKTLEGIAAVSQELKLRCQEEISRQEGAKPTGDLPFHWICQPYIRPGPREGSKEKAGARSKRALEEEEGGTEVLSKNKQKKQLRNPHKTFDPSLKPKYAKCDQCGNPKMCVQPVPRLLQEASLQRDCRLPRSRIAF

SEQ ID NO: 47075 - protein, 134 aa, Homo sapiens
MAALTTLFKYIDENQDRYIKKLAKWVAIQSVSAWPEKRGEIRRMMEVAAADVKQLGGSVELVDIGKQKLPDGSEIPLPPILLGRLGSDPQKKTVCIYGHLDVQPAALEDGWDSEPFTLVERDGKLYGRGSTDDK

SEQ ID NO: 47076 - protein, 392 aa, Homo sapiens
MAPWPPKGLVPAMLWGLSLFLNLPGPIWLQPSPPPQSSPPPQPHPCHTCRGLVDSFNKGLERTIRDNFGGGNTAWEEENLSKYKDSETRLVEVLEGVCSKSDFECHRLLELSEELVESWWFHKQQEAPDLFQWLCSDSLKLCCPAGTFGPSCLPCPGGTERPCGGYGQCEGEGTRGGSGHCDCQAGYGGEACGQCGLGYFEAERNASHLVCSACFGPCARCSGPEESNCLQCKKGWALHHLKCVDCAKACLGCMGAGPGRCKKCSPGYQQVGSKCLDVDECETEVCPGENKQCENTEGGYRCICAEGYKQMEGICVKEQIPESAGFFSEMTEDELVVLQQMFFGIIICALATLAAKGDLVFTAIFIGAVAAMTGYWLSERSDRVLEGFIKGR

SEQ ID NO: 47077 - protein, 229 aa, Homo sapiens
KQAWRGSATRLGPQNSLRQECYAFNGTQRFLERYIYNREEFVRFDSDVGEFRAVTELGRPDEDYWNSQKDLLEEKRAVPDRVCRHNYELDEAVTLQRRVQPKVNVSPSKKGPLQHHNLLVCHVTDFYPGSIQVRWFLNGQEETAGVVSTNLIRNGDWTFQILVMLEMTPQQGDVYICQVEHTSLDSPVTVEWKAQSDSARSKTLTGAGGFVLGLIICGVGIFMHRRSKK

SEQ ID NO: 47078 - protein, 119 aa, Homo sapiens
MKRGRLPSSSEDSDDNGSLSTTWSQNSRSQHRRSSCSRHEDRKPSEVFRTDLITAMKLHDSYQLNPDEYYVLADPWRQEWEKGVQVPVSPGTIPQPVARVVSEEKSLMFIRPKKYIVSS

SEQ ID NO: 47079 - protein, 176 aa, Homo sapiens
MNQELLSVGSKRRRTGGSLRGNPSSSQVDEEQMNRVVEEEQQQQLRQQEEEHTARNGEVVGVEPRPGGQNDSQQGQLEENNNRFISVDEDSSGNQEEQEEDEEHAGEQDEEDEEEEEMDQESDDFDQSDDSSREDEHTHTNSVTNSSSIVDLPVHQLSSPFYTKTTKVSIFNILLT

SEQ ID NO: 47080 - protein, 158 aa, Homo sapiens
MEREKEQFRKLFIGGLSFETTEESLRNYYEQWGKLTDCVVMRDPASKRSRGFGFVTFSSMAEVDAAMAARPHSIDGRVVEPKRAVAREESGKPGAHVTVKKLFVGGIKEDTEEHHLRDYFEEYGKIDTIEIITDRQSGKKRGFGFVTFDDHDPVDKIV

SEQ ID NO: 47081 - protein, 60 aa, Homo sapiens
MAAQIPESDQIKQFKEFLGTYNKLTETCFLDCVKDFTTREVKPEENEALAAKAGLLGQPR

SEQ ID NO: 47082 - protein, 214 aa, Homo sapiens
MNGRSLIGGAGDARHGPVWKDPFGTKAGDAARRGIARLSLALADGSQEQEPEEEIAMEDSPTMVRVDSPTMVRGENQVSPCQGRRCFPKALGYVTGDMKELANQLKDKPVVLQFIDWILRGISQVVFVNNPVSGILILVGLLVQNPWWALTGWLGTVVSTLMALLLSQDRSLIASGLYGYNATLVGVLMAVFSDKGDYFWWLLLPVCAMSMTCC

SEQ ID NO: 47083 - protein, 47 aa, Homo sapiens
  MOD_RES (1)..(1): Any amino acid
XNEDDAKAARDAQECLALSPRLEYSGMISAHCNLHLLGSSDSPASAS

SEQ ID NO: 47084 - protein, 75 aa, Homo sapiens
MATGGYRTSSGLGGSTTDFLEEWKAKREKMRAKQNPPGPAPPGGGSSDAAGKPPAGALGTPAAAAANELNNNLPG

SEQ ID NO: 47085 - protein, 107 aa, Homo sapiens
MAVARAGVLGVQWLQRASRNVMPLGARTASHMTKDMFPGPYPRTPEERAAAAKKYNMRVEDYEPYPDDGMGYGDYPKLPDRSQHERDPWYSWDQPGLRLNWGEPDRP

SEQ ID NO: 47086 - protein, 41 aa, Homo sapiens
MMCSRVPSEQSSGTSLLPKDGAPFSWDSLDEDGLDDSLLEL

SEQ ID NO: 47087 - protein, 76 aa, Homo sapiens
MLRREARLRREYLYRKAREEAQRSAQERKERLRRALEENRLIPTELRREALALQGSLEFDDAGGEGNYTRCDQPRG

SEQ ID NO: 47088 - protein, 179 aa, Homo sapiens
MLSRCRSGLLHVLGLSFLLQTRRPILLCSPRLMKPLVVFVLGGPGAGKGTQCARIVEEMDQTMAANAQKNKFLIDGFPRNQDNLQGWNKTMDGKADVSFVLFFDCNNEICIERCLERGKSSGRSDDNRESLEKRIQTYLQSTKPIIDLYEEMGKVKKIDASKSVDEVFDEVVQIFDKEG

SEQ ID NO: 47089 - protein, 119 aa, Homo sapiens
MSSPPPARSGFYRQEVTKTAWEVRAVYRDLQPVGSGAYGAVCSAVDGRTGAKVAIKKLYRPFQSELFAKRAYRELRLLKHMRHENVIGLLDVFTPDETLDDFTDLKVPCSGPWHQVCGR

SEQ ID NO: 47090 - protein, 51 aa, Homo sapiens
AKLDIAFGTHHTKMMLLLYEEGLRVVIHTSNLIHADWHQKTQGHFVHLCLC

SEQ ID NO: 47091 - protein, 65 aa, Homo sapiens
MELRCGGLLFSSRFDSGNLAHVEKVESLSSDGEGVGGGASALTSGIASSPDYEFNVWTRPDCAET

SEQ ID NO: 47092 - protein, 260 aa, Homo sapiens
  MOD_RES (1)..(1): Any amino acid
XVMVKGEWVDESQTGEPGWLGGELKGKTGWFPANYAEKIPENEVPAPVKPVTDSTSAPAPKLALRETPAPLAVTSSEPSTTPNNWADFSSTWPTSTNEKPETDNWDAWAAQPSLTVPSAGQLRQRSAFTPATATGSSPSPVLGQPDFLLHPSMRLGHMQPRIVLLFPDPLQCSTSRLLPMLRPRPGVPFLRSPSCQSPSHPSRPISDAAPSVKFTLMPPGRIHPCFLFIPAVNSRNSFLVYFILPGGTLGCFYLCLPHYL

SEQ ID NO: 47093 - protein, 101 aa, Homo sapiens
MITSELPVLQDSTNETTAHSDAGSELEETEVKGKRKRGRPGRPPSTNKKPRKSPGEKSRIEAGIRGAGRGRANGHPQQNGEGEPVTLFEVVKLGKSAMQRC

SEQ ID NO: 47094 - protein, 220 aa, Homo sapiens [sequence omitted]

SEQ ID NO: 47095 - protein, 144 aa, Homo sapiens
  MOD_RES (1)..(1): Any amino acid
XHAFRKQSHPEIISYLEKVIPLISDAGLRWRLTDLCTKKALSRAMLLTSYLPPPLLRHRLKTHTTVIHQLDKALAKLGIGQLTAQEVKSACYLRGLNSTHIGEDRCRTWLGEWLQISCSLKEAELSLLLHNVVLLSTNYLGTRR

SEQ ID NO: 47096 - protein, 156 aa, Homo sapiens
MPKKLQSESPVKINQISLDESGEHMGVCSEDGKVQVFGLYSGEEFHETFDCPIKIIAVHPHFVRSSCKQFVTGGKKLLLFERSWMNRWKSAVLHEGEGNIRSVKWRGHLIAWANNMGVKIFDIISKQRITNVPRDDISLRPDMYPCSLCWKDNVTL

SEQ ID NO: 47097 - protein, 120 aa, Homo sapiens
MILRPPRPCGTCSVLKEELKQEDAHRELREAQEKELKLCKTLEHFRSQVIKATYGRAKPFRDKPVTDQQLIEKITQVTEDNINFQQKKWTLQKETQLSNSKQEETTENIEKLRTSLDSCQ

SEQ ID NO: 47098 - protein, 80 aa, Homo sapiens
MDCASCRARPHSDFCLGCAAAPPAPFRLLWPILGGALSLTFVLGLLSGFLVWRRCRRREKFTTPIEETGGEGCPAVALIQ

SEQ ID NO: 47099 - protein, 416 aa, Homo sapiens
NFLYPQVEDMQWAHREHTHPASVCSLPCKPGERKKTVKGVPCCWHCERCEGYNYQVDELSCELCPLDQRPNMNRTGCQLIPIIKLEWHSPWAVVPVFVAILGIIATTFVIVTFVRYNDTPIVRASGRELSYVLLTGIFLCYSITFLMIAAPDTIICSFRRVFLGLGMCFSYAALLTKTNRIHRIFEQGKKSVTAPKFISPASQLVITFSLISVQLLGVFVWFVVDPPHIIIDYGEQRTLDPEKARGVLKCDISDLSLICSLGYSILLMVTCTVYAIKTRGVPETFNEAKPIGFTMYTTCIIWLAFIPIFFGTAQSAEKMYIQTTTLTVSMSLSASVSLGMLYMPKVYIIIFHPEQNVQKRKRSFKAVVTAATMQSKLIQKGNDRPNGEVKSELCESLETNTSSTKTTYISYSNHSI

SEQ ID NO: 47100 - protein, 116 aa, Homo sapiens
MSWLFPLTKSASSSAAGSPGGLTSLQQQKQRLIESLRNSHSRLERSGAISVHCNLRLPDSSNHPPSAPHTPPSSWDYRLLPPQFPQEKPVISVYPPIRHHLMDKQGVYVTSPLVNN

SEQ ID NO: 47101 - protein, 142 aa, Homo sapiens
MWSWKCLLFWAVLVTATLCTARPSPTLPEQDALPSSEDDDDDDDSSSEEKETDNTKPNRMPVAPYWTSPEKMEKKLHAVPAAKTVKFKCPSSGTPNPTLRWLKNGKEFKPDHRIGGYKVRYATWSIIMDSVVPSDKGNYTCI

SEQ ID NO: 47102 - protein, 930 aa, Homo sapiens
  MOD_RES (1)..(1): Any amino acid
XLRQQAEIKDTTLEENNVKIGNLEKENKTLSKEIGIYKESCVRLKELEKENKELVKRATIDIKTLVTLREDLVSEKLKTQQMNNDLEKLTHELEKIGLNKERLLHDEQSTDDSRYKLLESKLESTLKKSLEIKEEKIAALEARLEESTNYNQQLRQELKTVKKNYEALKQRQDEERMVQSSPPISGEDNKWERESQETTRELLKVKDRLIEVERNNATLQAEKQALKTQLKQLETQNNNLQAQILALQRQTVSLQEQNTTLQTQNAKLQVENSTLNSQSTSLMNQNAQLLIQQSSLENENESVIKEREDLKSLYDSLIKDHEKLELLHERQASEYESLISKHGTLKSAHKNLEVEHRDLEDRYNQLLKQKGQLEDLEKMLKVEQEKMLLENKNHETVAAEYKKLCGENDRLNHTYSQLLKETEVLQTDHKNLKSLLNNSKLEQTRLEAEFSKLKEQYQQLDITSTKLNNQCELLSQLKGNLEEENRHLLDQIQTLMLQNRTLLEQNMESKDLFHVEQRQYIDKLNELRRQKEKLEEKIMDQYKFYDPSPPRRRGNWITLKMRKLIKSKKDINRERQKSLTLTPTRSDSSEGFLQLPHQDSQDSSSVGSNSLEDGQTLGTKKSSTMNDLVQSMVLAGQWTGSTENLEVPDDISTGKRRKELGAMAFSTTAINFSTVNSSAGFRSKQLVNNKDTTSFEDISPQGVSDDSSTGSRVHASRPASLDSGRTSTSNSNNNASLHEVKAGAVNNQSRPQSHSSGEFSLLHDHEAWSSSGSSPIQYLKRQTRSSPVLQHKISETLESRHHKIKTGSPGSEVVTLQQFLEESNKLTSVQIKSSSQENLLDEVMKSLSVSSDFLGKDKPVSCGLASVISTAEGTTRRTSIHDFLTKDSRLPISVDSPPAAADSNTTAASNVDKVQESRNSKSRSREQQSS

SEQ ID NO: 47103 - protein, 92 aa, Homo sapiens
  MOD_RES (1)..(1): Any amino acid
XLLSLAGKRKRRGNLPKESVKILRDWLYLHRYNAYPSEQEKLSLSGQTNLSVLQRVFYGSLPNIGIISSVQRSSTGRCQLAPLHCDGGPLLC

SEQ ID NO: 47104 - protein, 66 aa, Homo sapiens
  MOD_RES (1)..(1): Any amino acid
XLPMSRSQNTDMVQKSVSKTLPSTWSDPSVNISLDNLLPGMQPSKPQQPSLNTMIQQQILLSVFVW

SEQ ID NO: 47105 - protein, 34 aa, Homo sapiens
MSTVEEDSDTVTVETVNSVTLTQDTEGNLILHCP

SEQ ID NO: 47106 - protein, 229 aa, Homo sapiens
KQAWRGSATRLGPQNSGRQECYAFNGTQRFLERYIYNREEFVRFDSDVGEFRAVTELGRPDEEYWNSQKDILEEKRAVPDRMCRHNYELGGPMTLQRRVQPRVNVSPSKKGPLQHHNLLVCHVTDFYPGSIQVRWFLNGQEETAGVVSTNLIRNGDWTFQILVMLEMTPQQGDVYTCQVEHTSMDSPVTVEWKAQSDSARSKTLTGAGGFVLGLIICGVGIFMHRRSKK

SEQ ID NO: 47107 - protein, 157 aa, Homo sapiens
MDAMKRGLCCVLLLCGAVFVSPSQEIHARFRRGARSYQVICRDEKTQMIYQQHQSWLRPVLRSNRVEYCWCNSGRAQCHSVPVKSCSEPRCFNGGTCQQALYFSDFVCQCPEGFAGKCCEIDTRATCYEDQGISYRGTWSTAESGAECTNWNSSALA

SEQ ID NO: 47108 - protein, 125 aa, Homo sapiens
CGVSTYAPDMSRMLGGEEARPNSWPWQVSLQYSSNGQWYHTCGGSLIANSWVLTAAHCIRQIIKAHKVLQRCSLILFFVRDLCSSQLELTGVSAGSSGIYRVMLGQHNLYVAESGSLAVSVSKIV

SEQ ID NO: 47109 - protein, 186 aa, Homo sapiens
MFTLAEVASLNDIQPTYRILKPWWDVFMDYLAVVMLMVAIFAGTMQLTKDQVVCLPVLPSPVNSKAHTPPGNAEVTTNIPKMEAATNQDQDGRTTNDISFGTSAVTPDIPLRATYPRTDFALPNQEAKKEKKDPTGRKTNLDFQQYVFINQMCYHLALPWYSKYFPYLALIHTIILMVSSNFWFKY

SEQ ID NO: 47110 - protein, 264 aa, Homo sapiens
MAAADGALPEAAALEQPAELPASVRASIERKRQRALMLRQARLAARPYSATAAAATGGMANVKAAPKIIDTGGGFILEEEEEEEQKIGKVVHQPGPVMEFDYVICEECGKEFMDSYLMNHFDLPTCDNCRDADDKHKLITKTEAKQEYLLKDCDLEKREPPLKFIVKKNPHHSQWGDMKLYLKLQIVKRSLEVWGSQEALEEAKEVRQENREKMKQKKFDKKVKEVVPAFLNRPQRAETGVDTVEIRHKELTVQFSQKAQNREE

SEQ ID NO: 47111 - protein, 75 aa, Homo sapiens
MGLLVFVRNLLLALCLFLVLGFLYYSAWKLHLLQWEEDSKYDRLGFLLNLDSKLPAELATKYANFSEGACKPGYA

SEQ ID NO: 47112 - protein, 125 aa, Homo sapiens
MKFPGPLENQRLSFLLEKAITREAQMWKVNVRKMPSNQNVSPSQRDEVIQWLAKLKYQFNLYPETFALASSLLDRFLATVKAHPKYLSCIAISCFFLAAKTVEEDERIPVLKVLARDSFCGCSSS

SEQ ID NO: 47113 - protein, 106 aa, Homo sapiens
MRLTRCQAALAAAITLNLLVLFYVSWLQHQPRNSRARGPRRASAAGPRVTVLVREFEAFDNAVPELVDSFLQQDPAQPVVVAADTLPYPPLALPRIPNVRLALLQP

SEQ ID NO: 47114 - protein, 244 aa, Homo sapiens
MLGIWTLLPLVLTSVARLSSKSVNAQVTDINSKGLELRKTVTTVETQNLEGLHHDGQFCHKPCPPGERKARDCTVNGDEPDCVPCQEGKEYTDKAHFSSKCRRCRLCDEGHGLEVEINCTRTQNTKCRCKPNFFCNSTVCEHCDPCTKCEHGIIKECTLTSNTKCKEEGSRSNLGWLCLLLLPIPLIVWVKRKEVQKTCRKHRKENQGSHESPTLNPMESCSIAQAGVQGCNHGSLQPQSPGLK

SEQ ID NO: 47115 - protein, 40 aa, Homo sapiens
MGSCCSCPDKDTVPDNHRNKFKVINVDDDGNELGSGIMEL

SEQ ID NO: 47116 - protein, 609 aa, Homo sapiens
MNPTETKAVKTEPEKKSQSTKPKSLPKQASDTGSNDAHNKKAVSRSAEQQPSEKSTEPKTKPQDMISAGGESVAGITAISGKPGDKKKEKKSLTPAVPVESKPDKPSGKSGMDAALDDLIDTLGGPEETEEENTTYTGPEVSDPMSSTYIEELGKREVTIPPKYRELLAKPIGPDDAIDALSSDFTCGSPTAAGKKTEKEESTEVLKAQSAGTVRSAAPPQEKKRKVEKDTMSDQALEALSASLGTRQAEPELDLRSIKEVDEPRSESELIDELSEDFDRSECKEKPSKPTEKTEESKAAAPAPVSEAVCRTSMCSIQSAPPEPATLKGTVPDDAVEALADSLGKKEADPEDGKPVMDKVKEKAKEEDREKLGEKEETIPPDYRLEEVKDKDGKPLLPKESKEQLPPMSEDFLLDALSEDFSGPQNASSLKFEDAKLAAAISEVVSQTPASTTQAGAPPRDTSSDKDLDDALDKLSDSLGQRQPDPDENKPMEDKVKEKAKAEHRDKLGERDDTIPPEYRHLLDDNGQDKPVKPPTKKSEDSKKPADDQDPIDALSGDLDSCPSTTETSQNTAKDKCKKAASSSKAPKNGGKAKDSAKTTEETSKPKDD

SEQ ID NO: 47117 - protein, 505 aa, Homo sapiens
  MOD_RES (1)..(1): Any amino acid
XVDVWSLGVILYTLVSGSLPFDGQNLKELRERVLRGKYRIPFYMSTDCENLLKRFLVLNPIKRGTLEQIMKDRWINAGHEEDELKPFVEPELDISDQKRIDIMVGMGYSQEEIQESLSKMKYDEITATYLLLGRKSSEVRPSSDLNNSTGQSPHHKVQRSVSSSQKQRRYSDHAGPAIPSVVAYPKRSQTSTADSDLKEDGISSRKSSGSAVGGKGIAPASPMLGNASNPNKADIPERKKSSTVPSSNTASGGMTRRNTYVCSERTTADRHSVIQNGKENSTIPDQRTPVASTHSISSAATPDRIRFPRGTASRSTFHGQPRERRTATYNGPPASPSLSHEATPLSQTRSRGSTNLFSKLTSKLTRRNMSFRFIKRLPTEYERNGRYEGSSRNVSAEQKDENKEAKPRSLRFTWSMKTTSSMDPGDMMREIRKVLDANNCDYEQRERFLLFCVHGDGHAENLVQWEMEVCKLPRLSLNGVRFKRISGTSIAFKNIASKIANELKL

SEQ ID NO: 47118 - protein, 88 aa, Homo sapiens
MDLRVGQRPPVEPPPEPTLLALQRPQRLHHHLFLAGLQQQRSVEPMRLSMDTPMPELQVGPQEQELRQLLHKDKSKRSAVASSVVKQK

SEQ ID NO: 47119 - protein, 255 aa, Homo sapiens
MAKATSGAAGLRLLLLLLLPLLGKVALGLYFSRDAYWEKLYVDQAAGTPLLYVHALRDAPEEVPSFRLGQHLYGTYRTRLHENNWICIQEDTGLLYLNRSLDHSSWEKLSVRNRGFPLLTVYLKVFLSPTSLREGECQWPGCARVYFSFFNTSFPACSSLKPRELCFPETRPSFRIRENRPPGTFHQFRLLPVQFLCPNISVAYRLLEDRESLCGKLPGIQWHQRPVQAAFLWCQLQHARGGHLSRGHLGDPVCE

SEQ ID NO: 47120 - protein, 68 aa, Homo sapiens
  MOD_RES (1)..(1): Any amino acid
XFGEQSRVPSAFAAIYSKGGIPCRLVHGSVKHRLQWECPPESLSFDPLLITLAEVNMPSLEYLSENKH

SEQ ID NO: 47121 - protein, 129 aa, Homo sapiens
MESAIAEGGASRFSASSGGGGSRGAPQHYPKTAGNSEFLGKTPGQNAQKWIPARSTRRDDNSAANNSANEKERHDAIFRKVRGILNKLTPEKFDKLCLELLNVGVESKLILKGVILLIVDKALEEPKYS

SEQ ID NO: 47122 - protein, 204 aa, Homo sapiens
MKQQQWCGMTAKMGTVLSGVFTIMAVDMYLIFEQKHLGNGSCTEITPKYRGASNIINNFIICWSFKIVLFLSFITILISCFLLYSVYAQIFRGLVIYIVWIFFYETANVVIQILTNNDFDIKEVRIMRWFGLVSRTVMHCFWMFFVINYAHITYKNRSQGNIISYKRRISTAEILHSRNKRLSISSGFSGSHLESQYFERQRNL

SEQ ID NO: 47123 - protein, 350 aa, Homo sapiens
MAETSEEVAVLVQRVVKDITNAFRRNPHMKELILSGTLNPIKDLHLGKLALTKFPKSPETWIHRRWVLQQLIQETSLPSFVTKGNLGTIPTERAQRLIQEEMEVCGEAAGRYPSNYNAWSHRIWVLQHLAKLDVKILLDELSSTKHWASMHVSDHSGFHYRQFLLKSLISQTVIDSSVMEQNPLRSEPALVPPKDEEAAVSTEEPRINLPHLLEEEVEFSTDLIDSYPGHETLWCHRRHIFYLQHHLNGRFPHSMTQLSPADSPGGTLSDLHLIPAGSQLSQAMEVDGLNDSSKQGYSQETKRLKRTPVPDSLGLEMEHRFIDQVLSTCRNVEQARFASAYRKWLVTLSQ

SEQ ID NO: 47124 - protein, 654 aa, Homo sapiens
MSAANPETPNSTISREASTQSSSAAASQGWVLPEGKIVPNTVFVGGIDARMDETEIGSCFGRYGSVKEVKIITNRTGVSKGYGFVSFVNDVDVQKIVGSQIHFHGKKLKLGPAIRKQKLCARHVQPRPLVVNPPPPPQFQNVWRNPNTETYLQPQITPNPVTQHVQAYSAYPHSPGQVITGCQLLVYNYQEYPTYPDSAFQVTTGYQLPVYNYQPFPAYPRSPFQVTAGYQLPVYNYQAFPAYPNSPFQVATGYQFPVYNYQPFPAYPSSPFQVTAGYQLPVYNYQAFPAYPNSPFQVATGYQFPVYNYQPFPAYPSSPFQVTAGYQLPVYNYQAFPAYPNSPFQVATGYQFPVYNYQAFPAYPNSPVQVTTGYQLPVYNYQPFPAYPRSPFQVTAGYQLPVYNYQAFPAYPNSPFQVATGYQFPVYNYQAFPAYPNSPVQVTTGYQLPVYNYQAFPAYPSSPFQVTTGYQLPVYNYQAFPAYPSSPFQVTTGYQLPVYNYQAFPAYPSSPFQVTTGYQLPVYNYQAFPAYPSSPFQVTTGYQLPVYNYQAFPAYPSSPFQVTTGYQLPVYNYQAFPAYPSSPFQVTTGYQLPVYNYQAFPAYPNSAVQVTTGYQFHVYNYQMPPQCPVGEQRRNLWTEAYKWWYLVCLIQRRD

SEQ ID NO: 47125 - protein, 39 aa, Homo sapiens
MAAEARVSRWYFGGLASCGAACCTHPLDLLKGQPRGVVF

SEQ ID NO: 47126 - protein, 557 aa, Homo sapiens
MFQEPVYFQIFLFQLDSGASGEPGHSLGLTLGFSHCGNCQTAVVSAQPEGMASNGAYPALGPGVTANPGTSLSVFTALPFTTPAPGPAHGPLLVTAGAPPGGPLVLSNFPSTPLVTEQDGCGPSGAGASNVFVQMRTEVGPVKAAQAQTLVLTQTPLVWQAPGALCGGVVCPPPLLLAAAPVVPVMAAQVVGGTQACEGGWSQGLPLPPPPPPAAQLPPIVSQGNAGPWPQGAHGEGSLASSQAKAPPDDSCNPRSVYENFRLWQHYKPLARRHLPQSPDTEALSCFLIPVLRSLARRKPTMTLEEGLWRAMREWQHTSNFDRMIFYEMAEKFLEFEAEEEMQIQKSQWMKGPQCLPPPATPRLEPRGPPAPEVVKQPVYLPSKAGPKAPTACLPPPRPQRPVTKARRPPPRPHRRAETKARLPPPRPQRPAETKVPEEIPPEVVQEYVDIMEELLGPSLGATGEPEKQREEGEVKQPQEEDWTPPDPGLLSYTDKLCSQKDFVTKVEAVIHPQFLEELLSPDPQMDFLALSQELEQEEGLTLAQGAPSDAPGTDRC

SEQ ID NO: 47127 - protein, 59 aa, Homo sapiens
  MOD_RES (1)..(1): Any amino acid
XLKDCYLDIMKSKSNPDFLKKDRSCVTRQLRNIRSKSLKEGLTVQERLKLFESRDLKKD

SEQ ID NO: 47128 - protein, 106 aa, Homo sapiens
MGSRNSSSAGSGSGDPSEGLPRRGAGLRRSEEEEEEDEDVDLAQVLAYLLRRPSWTQRKRMTELGMVVLGIDTTHLWMLPLTPGSWNSMRSRHKWNWPQGSWGLGG

SEQ ID NO: 47129 - protein, 150 aa, Homo sapiens
MKATWIRLLKRAKGGRLKNSDICGSADSYTSRPSDSDVSLEEDREAVRREAERQAQAQLEKAKTKPVAFAVRTNVSYSAAHEDDVPVPGMAISFEAKDFLHVKEKFNNDWWIGRLVKEGCEIGFIPSPVKLENMRLQHEQRAKQGKFYSS

SEQ ID NO: 47130 - protein, 206 aa, Homo sapiens
  MOD_RES (1)..(1): Any amino acid
XSRAPQLHLEYRFYKQLSATGTGRPAGGAGAAQGQGGGCRRTPVRLSSAAEGVPQVYYFGPCGKYNAMVLELLGPSLEDLFDLCDRTFTLKTVLMIAIQLITRMEYVHTKSLIYRDVKPENFLVGRPGTKRQHAIHIIDFGLAKEYIDPETKKHIPYREHKSLTGTARYMSINTHLGKGRHAQGAVPEDRGHQTRHAHRGALRELP

SEQ ID NO: 47131 - protein, 194 aa, Homo sapiens
MTAELQQDDAAGAADGHGSSCQMLLNQLREITGIQDPSFLHEALKASNGDITQAVSLLTDERVKEPSQDTVATEPSEVEGSAANKEVLAKVIDLTHDNKDDLQAAIALSLLESPKIQADGRDLNRMHEATSAETKRSKRKRCEVWGENPNPNDWRRVDGWPVGLKNVGNTCWFSAVIQDASSGVPPCRPERVFI

SEQ ID NO: 47132 - protein, 76 aa, Homo sapiens
MQYVIYGIASFFFLYGIILLAEGFYTTSAVKELHGEFKTTACGRCISGMFVFLTYVLGVAWLGVFGFSAVPVFMFY

SEQ ID NO: 47133 - protein, 666 aa, Homo sapiens
MAQCVQSVQELIPDSFVPCVAALCSDEAERLTRLNHLSFAELLKPFSRLTSEVHMRDPNNQLHVIKNLKIAVSNIVTQPPQPGAIRKLLNDVVSGSQPAEGLVANVITAGDYDLNISATTPWFESYRETFLQSMPALDHEFLNHYLACMLVASSSEAEPVEQFSKLSQEQHRIQHNSDYSYPKWFIPNTLKYYVLLHDVSAGDEQRAESIYEEMKQKYGTQGCYLLKINSRTSNRASDEQIPDPWSQYLQKNSIQNQESYEDGPCTITSNKNSDNNLLSLDGLDNEVKDGLPNNFRAHPLQLEQSSDPSNSIDGPDHLRSASSLHETKKGNTGIIHGACLTLTDHDRIRQFIQEFTFRGLLPHIEKTIRQLNDQLISRKGLSRSLFSATKKWFSGSKVPEKSINDLKNTSGLLYPPEAPELQIRKMADLCFLVQHYDLAYSCYHTAKKDFLNDQAMLYAAGALEMAAVSAFLQPGAPRPYPAHYMDTAIQTYRDICKNMVLAERCVLLSAELLKSQSKYSEAAALLIRLTSEDSDLRSALLLEQAAHCFINMKSPMVRKYAFHMILAGHRFSKAGQKKHALRCYCQAMQVYKGKGWSLAEDHINFTIGRQSYTLRQLDNAVSAFRHILINESKQSAAQQGAFLREYLYVYKVTAYFHSGIDIKTVF

SEQ ID NO: 47134 - protein, 250 aa, Homo sapiens
  MOD_RES (1)..(1): Any amino acid
XRIKIGLNSKMPSRFPPVVFYTPKELGGLGMLSMGHVLIPQSDLRRLTLEDLEDSWDRGIPRINTLFQKDRHTLAYDKGWRVRTDFKQYQVLKQNPFWWTHQRHDGKLWNLNNYRTDMIQALGGVEGILEHTLFKGTYFPTWEGLFWEKASGFEESMKWKKLTNAQRSGLNQIPNRRFTLWWSPTINRANVYVGFQVQLDLTGIFMHGKIPTLKISLIQIFRAHLWQKIHESIVMDLCQVFDQELDALEI

SEQ ID NO: 47135 - protein, 189 aa, Homo sapiens
  MOD_RES (1)..(1): Any amino acid
XKKLEERKTDPLSLEGYVSSAPLTKPPEKGKASPTSPDKKAKRHEVKSDPTPFGVRGWSKTSHSLEAPEDDGGWSSAEEQINSSDAEEDGGLGPKKLVPGKYTVVADHEKGGPDALRVRSGDVVELVQEGDEGLWYVRDPTTGKEGWVPASSLSVRLGPSGSAQCLSSSESSPGSAVLSNSSSCSEGGQ

SEQ ID NO: 47136 - protein, 140 aa, Homo sapiens
MLPLLQLVPAKLLNSSCSLEKTLQCSCSFHGIPTPSVQWWMGGVPVGVDGMDGSLQVTSTMLGPWANSTISLTEEPEMGMRLLCEGKNQNGTHALSILLMSRKSSLAAQAFVKGLIQGAIYAGIVIALLFLCLLPLIVKH

SEQ ID NO: 47137 - protein, 157 aa, Homo sapiens
MHMMVSKPEQWVKPMAVAGANQYTFHLEATENPGALIKDIRENGMKVGLAIKPGTSVEYLAPWANQIDMALVMTVEPGFGGQKFMEDMMPKVHWLRTQFPSLDIEVDGGVGPDTVHKCAEIGVQWRDLCSLQSLPAGFKRFSCLSLLSSWDYRQELT

SEQ ID NO: 47138 - protein, 73 aa, Homo sapiens
  MOD_RES (1)..(1): Any amino acid
XRDALLAGSLNNTLHLSNEQERGDWPGEAPKPPEPYSHHKAHGRSKHPSGSNVSFSRDTEGGEEEPSKLLPVS

SEQ ID NO: 47139 - protein, 71 aa, Homo sapiens
MNCCIGLGEKARGSHRASYPSLSALFTEASILGFGSFAVKAQVVDRGLQKINLSSFRTNVQRCSSMVHHKS

SEQ ID NO: 47140 - protein, 166 aa, Homo sapiens
MPTSSVKDETNDNITIFTRILDGLLDGYDNRLRPGLGERITQVRTDIYVTSFGPVSDTEMEYTIDVFFRQSWKDERLRFKGPMQRLPLNNLLASKIWTPDTFFHNGKKSIAHNMTTPNKLLRLEDDGTLLYTMRLTISAECPMQLEDFPMDAHACPLKFGSYAYPN

SEQ ID NO: 47141 - protein, 144 aa, Homo sapiens
  MOD_RES (1)..(1): Any amino acid
XVPQVKASALKVVTLTANDKTSVSFSSLPGQGVIYNVIVWDPFLNTSAAYIPAHTYACSFEAGEGSCASLGRVSSKVFFTLFALLGFFICFFGHRFWKTELFFIGFIIMGFFFYILITRLTPIKYDAEHTDLWSHWLLFGGFSH

SEQ ID NO: 47142 - protein, 113 aa, Homo sapiens
MGLLTILKKMKQKERELRLLMLGLDNAGKTTILKKFNGEDIDTISPTLGFNIKTLEHRGFKLNIWDVGGQKSLRSYWRNYFESTDGLIWVVDSADRQRMQDCQRELQSLLVEE

SEQ ID NO: 47143 - protein, 125 aa, Homo sapiens
MDLKEKHLGEPPSALGLSTRKALSVLKEQLEAVLEGHLRERKKCLTWKEVWRSSFLHHSNRCSCFHWPGASLMLLAVLLLLGCCGGQPAGSRGVGLVNASALFLLLLLNLVLIGRQDRLKRREVE

SEQ ID NO: 47144 - protein, 200 aa, Homo sapiens
MRKFICPLTGLWPINTLKCTPRVCPFAGILENGAVRYTTFEYPNTISFSCNTGFYLNGADSAKCTEEGKWSPELPVCAPIICPPPSIPTFATLRVYKPSAGNNSLYRDTAVFECLPQHAMFGNDTITCTTHGNWTKLPECREVKCPFPSRPDNGFVNYPAKPTLYYKDKATFGCHDGYSLDGPEEIECTKLGNWSAMPSC

SEQ ID NO: 47145 - protein, 162 aa, Homo sapiens
MARRSSFQSCQIISLFTFAVGVNICLGFTAHRIKRAEGWEEGPPTVLSDSPWTNISGSCKGRCFELQEAGPPDCRCDNLCKSYTSCCHDFDELCLKTARGWECTKDRCGEVRNEENACHCSEDCLARGDCCTNYQVVCKGESHWVDDDCEEIKAAECPAGGP

SEQ ID NO: 47146 - protein, 239 aa, Homo sapiens
  MOD_RES (1)..(1): Any amino acid
XSSGLERTDPATISSTMSWLASYLADADCLPSAAQIRLSPVGSPVSEIAFEKPNLPSAADWSEFLSASTSEKVENEFAQLTLSDHEQRELYEAARLVQTAFRKYKGRPLREQQEVAAAVIQRCYRKYKQYALYKKMTQAAILIQSKFRSYYEQKKFQQSRRAAVLIQKYYRSYKKCGKRRQARRTAVIVQQKLRSSLLTKKQDQAARKIMRFLRRCRHRVKELKKAKELEDIQQHPLAM

SEQ ID NO: 47147 - protein, 458 aa, Homo sapiens
MPNGLKPVDTLDSLSSVSSAYCSGGQPGTCKYWILDLDSLSVSSNDASPPASVASLQPHMIGAQSSPGPKRPGNTLRKWLTSPVRRLSSGKADGHVKKLAHKHKKSREVRKSADAGSQKDSDDSAATPQDETVEERGRNEGLSSGTLSKSSSSGMQSCGEEEGEEGADAVPLPPPMAIQQHSLLQPDSQDDKASSRLLVRPTSSETPSAAELVSAIEELVKSKMALEDRPSSLLVDQGDSSSPSFNPSDNSLLSSSSPIDEMEERKSSSLKRRHYVLQELVETERDYVRDLGYVVEGYMALMKEDGVPDDMKGKDKIVFGNIHQIYDWHRDFFLGELEKCLEDPEKLGSLFVKHERRLHMYIAYCQNKPKSEHIVSEYIDTFFEDLKQRLGHRLQLTDLLIKPVQRIMKYQLLLKDFLKYSKKASLDTSELERAVEVMCIVPRRCNDMMNVGRLQGFD

SEQ ID NO: 47148 - protein, 39 aa, Homo sapiens
MASAGHIITLLLWGYLLELWTGGHTADTTHPRLRLSHKE

SEQ ID NO: 47149 - protein, 142 aa, Homo sapiens
MTTEQRRSLQAFQDYIRKTLDPTYILSYMAPWFREEEVQYIQAEKNNKGPMEAATLFLKFLLELQEEGWFRGFLDALDHAGYSGLYEAIESWDFKKIEKLEEYRLLLKRLQPEFKTRIIPTDIISDLSECLINQECEEILQV

SEQ ID NO: 47150 - protein, 109 aa, Homo sapiens
MRLNQNTLLLGKKVVLVPYTSEHVPSRYHEWMKSEELQRLTASEPLTLEQEYAMQCSWQEDADKCTFIVLDAEKWQAQPGATEESCMVGDVNLFLTDLEDLTLGEIEVM

SEQ ID NO: 47151 - protein, 101 aa, Homo sapiens
  MOD_RES (1)..(1): Any amino acid
XGTFRPGALVSSGNKMMVQMISDANTAGNGFMAMFSAAEPNERGKKKKRGPESTSPLSRVAMLCQGISIVEDSLTDLPALLKPPTGQTGITLQESLVCGTL

SEQ ID NO: 47152 - protein, 151 aa, Homo sapiens
MRVAGAAKLVVAVAVFLLTFYVISQVFEIKMDASLGNLFARSALDTAARSTKPPRYKCGISKACPEKHFAFKMASGAANVVGPKICLEDNVLMSGVKNNVGRGINVALANGKTGEVLDTKYFDMWGGDVAPFIEFLKAIQDGTIVLMGTYD

SEQ ID NO: 47153 - protein, 195 aa, Homo sapiens
TNNMSDPRRPNKVLRYKPPPSECNPALDDPTPDYMNLLGMIFSMCGLMLKTCPTVQPNMLNVHLLPHTHDDVGWLKTVDQYFYGIKNDIQHAGVQYILDSVISALLADPTRRFIYVEIAFFSRWWHQQTNATQEVVRDLVRQGRLEFANGGWVMNDEAATHYGAIVDQMTLGLRFLEDTFGNDGRPRVAWHIDPF

SEQ ID NO: 47154 - protein, 141 aa, Homo sapiens
MDNRQNVTPALIFAITVATIGSFQFGYNTGVINAPETIIKEFINKTLTDKANAPPSEVLLTNLWSLSVAIFSVGGMIGSFSVGLFVNRFGRRNSMLIVNLLAATGGCLMGLCKIAESVEMLILGRLVIGLFCGLCTGFVPM

SEQ ID NO: 47155 - protein, 52 aa, Homo sapiens
MGCHSSKSTTVAAESQKLEEEREGREPGLETGTQAADCKDAPLKDGTPEPKS

SEQ ID NO: 47156 - protein, 211 aa, Homo sapiens
MGACRMSLLSLSWLGLRPVAASPWLLLLVVGASWLLARILAWTYAFYHNGRRLRCFPQPRKQNWFLGHLGLVTPTEEGLRVLTQLVATYPQGFVRWLGPITPIINLCHPDIVRSVINTSDAITDKDIVFYKTLKPWLGDGLLLSVGDKWRHHRRLLTPAFHFNILKPYIKIFSKSANIMHAKWQRLAMEGSTCLDVFEHISLMTLDSLQKC

SEQ ID NO: 47157 - protein, 45 aa, Homo sapiens
ALTNIYKHLMITAQRFTVQIEEKLLLKLLSFFGYDQAESDLEFKL

SEQ ID NO: 47158 - protein, 95 aa, Homo sapiens
MASFGWKRKIGEKVSKVTSQQFEAEAADEKDVVDNDEGNWLHAIKRRKEILLEGCAEKSKQLKDEGASLAENKRGSPHWLNTRINWENFLENTNA

SEQ ID NO: 47159 - protein, 642 aa, Homo sapiens
MMEGLKKRTRKAFGIRKKEKDTDSTGSPDRDGIQPSPHEPPYNSKAECAREGGKKVSKKSNGAPNGFYAEIDWERYNSPELDEEGYSIRPEEPGSTKGKHFYSSSESEEEEESHKKFNIKIKPLQSKDILKNAATVDELKASIGNIALSPSPVGAIKRNLSSEEVARPRRSTPTPELISKKPPDDTTALAPLFGPPLESAFDEQKTEVLLDQPEIWGSGQPINPSMESPKLTRPFPTGTPPPLPPKNVPATPPRTGSPLTIGPGASSPARPATPLVPCRSTTPPPPPPRPPSRPKLPPGKPGVGDVSRPFSPPIHSSSPPPIAPLARAESTSSISSTNSLSAATTPTVVSEDDVFYDKLPSFERRCETPAGSSRGPSPLTMGAQDTLPVAAAFTETVNAYFKGADPSKCIVKITGEMVLSFPAGITRHFANNPSPAALTFRVINFSSDNTQNDANTKEFWVNMPNLMTHLKKVSEQKPQATYYNVDMLKYQVSAQGIQSTPLNLAVNWRCEPSSTDLRIDYKYNTDAMTTAVALNNVQFLVPIDGGVTKLQAVLPPAVWNAEQQRILWKIPDISQKSENGGVGSLLARFQLSEGPSKPSPLVVQFTSEGSTLSGCDIELVGAGYRFSLIKKRFAAGKYLADN

SEQ ID NO: 47160 - protein, 761 aa, Homo sapiens
MLILQRKINVCYQELEAMMTKADNDNRDHKEKLERLTRLLDLKNNRIKQLEGILRSHDLPTSEQLKDVAYGTRPLSLCLETLPAHGDEDKVDISLLHQGENLFELHIHQAFLTSAALAQAGDTQPTTFCTYSFYDFETHCTPLSVGPQPLYDFTSQYVMETDSLFLHYLQEASARLDIHQAMASEHSTLAAGWICFDRVLETVEKVHGLATLIGAGGEEFGVLEYWMRLRFPIKPSLQACNKRKKAQVYLSTDVLGGRKAQEEEFRSESWEPQNELWIEITKCCGLRSRWLGTQPSPYAVYRFFTFSDHDTAIIPASNNPYFRDQARFPVLVTSDLDHYLRREALSIHVFDDEDLEPGSYLGRARVPLLPLAKNESIKGDFNLTDPAEKPNGSIQVQLDWKFPYIPPESFLKPEAQTKGKDTKDSSKISSEEEKASFPSQDQMASPEVPIEAGQYRSKRKPPHGGERKEKEHQVVSYSRRKHGKRIGVQGKNRMEYLSLNILNGNTPEQVNYTEWKFSETNSFIGDGFKNQHEEEEMTLSHSALKQKEPLHPVNDKESSEQGSEVSEAQTTDSDDVIVPPMSQKYPKADSEKMCIEIVSLAFYPEAEVMSDENIKQVYVEYKFYDLPLSETETPVSLRKPRAGEEIHFHFSKVIDLDPQEQQGRRRFLFDMLNGQDPDQGHLKFTVVSDPLDEEKKECEEVGYAYLQLWQILESGRDILEQELDIVSPEDLATPIGRLKVSLQAAAVLHAIYKEMTEDLFS

SEQ ID NO: 47161 - protein, 218 aa, Homo sapiens
MSYFGEHFWGEKNHGFEVLYHSVKQGPISTKELADFIRERATIEETYSKAMAKLSKLASNGTPMGTFAPLWEVFRVSSDKLALCHLELTRKLQDLIKDVLRYGEEQLKTHKKCKEEVVSTLDAVQVLSGVSQLLPKSRENYLNRCMDQERLRRESTSQKEMDKAETKTKKAAESLRRSVEKYNSARADFEQKMLDSALRFQAMEETHLRHMKALLGSY

SEQ ID NO: 47162 - protein, 93 aa, Homo sapiens
MDGASAEQDGLQEDRSHSGPSSLPEAPLKPPGPLVPPDQQDKVQCAEVNRASTEGESPDGPGQGGLCQNGPTPPFPDPPSSLDPTTSPVGPDA

SEQ ID NO: 47163 - protein, 570 aa, Homo sapiens
MAEPQAESEPLLGGARGGGGDWPAGLTTYRSIQVGPGAAARWDLCIDQAVVFIEDAIQYRSINHRVDASSMWLYRRYYSNVCQRTLSFTIFLILFLAFIETPSSLTSTADVRYRAAPWEPPCGLTESVEVLCLLVFAADLSVKGYLFGWAHFQKNLWLLGYLVVLVVSLVDWTVSLSLVCHEPLRIRRLLRPFFLLQNSSMMKKTLKCIRWSLPEMASVGLLLAIHLCLFTMFGMLLFAGGKQDDGQDRERLTYFQNLPESLTSLLVLLTTANNPDVMIPAYSKNRAYAIFFIVFTVIGSLFLMNLLTAIIYSQFRGYLMKSLQTSLFRRRLGTRAAFEVLSSMVGEGGAFPQAVGVKPQNLLQVLQKVQLDSSHKQAMMEKVRSYGSVLLSAEEFQKLFNELDRSVVKEHPPRPEYQSPFLQSAQFLFGHYYFDYLGNLIALANLVSICVFLVLDADVLPAERDDFILGILNCVFIVYYLLEMLLKVFALGLRGYLSYPSNVFDGLLTVVLLNFLHKWDPRSHLQPLAGTPEATYQMTVELLFRDILEEPGEDELTERLSQHPHLWLCR

SEQ ID NO: 47164 - protein, 163 aa, Homo sapiens
MAQVLRGTVTDFPGFDERADAETLRKAMKGLGTDEESILTLLTSRSNAQRQEISAAFKTLFGRDLLDDLKSELTGKFEKLIVALMKPSRLYDAYELKHALKGAGTNEKVLTEIIASRTPEELRAIKQVYEEEYGSSLEDDVVGDTSGYYQRMLVVLLQVLRGD

SEQ ID NO: 47165 - protein, 455 aa, Homo sapiens
MQDDKTGGVPIRTVKSFLSKIPSVVTGTDIVQWLMKNLSIEDPVEAIHLGSLIAAQGYIFPISDHVLTMKDDGTFYRFQAPYFWPSNCWEPENTDYAIYLCKRTMQNKARLELADYEAENLARLQRAFARKWEFIFMQAEAQVKIDRKKDKTERKILDSQERAFWDVHRPVPGCVNTTEMDIRKCRRLKNPQKVKKSVYGVTEESQAQSPVHVLSQPIRKTTKEDIRKQITFLNAQIDRHCLKMSKVAESLIAYTEQYVEYDPLITPAEPSNPWISDDVALWDIEMSKEPSQQRVKRWGFSFDEILKDQVGRDQFLRFLESEFSSENLRFWLAVQDLKKQPLQDVAKRVEEIWQEFLAPGAPSAINLDSHSYEITSQNVKDGGRYTFEDAQEHIYKLMKSDSYARFLRSNAYQDLLLAKKKPESEQGRRTSLEKFTRSVGKSLAGKRLTGLMQSS

SEQ ID NO: 47166 - protein, 172 aa, Homo sapiens
MVLEMLNPIHYNITSIVPEAMPAATMPVLLLTGLFLLVWNYEGTSSIPGPGYCMGIGPLISHGRFLWMGIGSACNYYNRVYGEFMRVWISGEETLIISKSSSMFHIMKHNHYSSRFGSKLGLQCIGMHEKGIIFNNNPELWKTTRPFFMKALSGPGLVRMVTVCAESLKTHL

SEQ ID NO: 47167 - protein, 243 aa, Homo sapiens
MGSAKSVPVTPARPPPHNKHLARVADPRSPSAGILRTPIQVESSPQPGLPAGEQLEGLKHAQDSDPRSPTLGIARTPMKTSSGEPVLPPEAPLSSELDLPLGTQLSVEEQMPPWNQTEFPSKQVFSKEEARQPTETPVASQSSDKPSRDPETPRSSGSMRNRWKPNSSKVLGRSPLTILQDDNSPGTLTLRQGKRPSPLSENVSELKEGAILGTGRLLKTGGRAWEQGQDHDKENQHFPLVES

SEQ ID NO: 47168 - protein, 148 aa, Homo sapiens
  MOD_RES (1)..(1): Any amino acid
XLQGGEKQRVFTGIVTSLHDYFGVVDEEVFFQLSVVKGRLPQLGEKVLVKAAYNPGQAVPWNAVKVQTLSNQPLLKSPAPPLLHVAALGQKQGILGAQPQLIFQPHRIPPLFPQKPLSLFQTSHTLHLSHLNRFPARGPHGRLDQGRR

SEQ ID NO: 47169 - protein, 73 aa, Homo sapiens
  MOD_RES (1)..(1): Any amino acid
XNPETCYQRLKKRCREEEKVIPLEYLEAIHHLHEEWLIKGSLFPMAAPVLRSLQRHNKQAGRRDGRPGELHVP

SEQ ID NO: 47170 - protein, 71 aa, Homo sapiens
MSWIKEGELSLWERFCANIIKAGPMPKHIAFIMDGNRRYAKKCQVERQEGHSQGFNKLAETLRWCLNLGIL

SEQ ID NO: 47171 - protein, 91 aa, Homo sapiens
  MOD_RES (1)..(1): Any amino acid
XGYDFGYLIKILTNSNLPEEELDFFEILRLFFPVIYDVKYLMKSCKNLKMFFEDHIDDAKYCGHLYGLGSGSSYVQNGTGNAYEEEANKQS

SEQ ID NO: 47172 - protein, 95 aa, Homo sapiens
MKLPARVFFTLGSRLPCGLAPRRFFSYGTKILYQNTEALQSKFFSPLQKAMLPPNSFQGKVAFITGGGTGLGKGMTTLLSSLGAQCVIASRNAFL

SEQ ID NO: 47173 - protein, 110 aa, Homo sapiens
MITGGNLQDSKDALHLAQTNGMFFSTVGCHPTRCGEFEKNNPDLYLKELLNLAENNKGKVVAIGECGLDFDRLQFCPKDTQLKYFEKQFELSEQTKLPMFLHCRNSHAEF

SEQ ID NO: 47174 - protein, 110 aa, Homo sapiens
  MOD_RES (1)..(1): Any amino acid
XIYVAQDCTVYNSDVIDKQSASMTSDNADDKAVIILVPVRLGGERTNTDYLEFVKGILSLEYCVGIIGGKPKQSYYFAGFQDDSLIYMDPHYCQSFVDVSIKDFPLEVIL

SEQ ID NO: 47175 - protein, 55 aa, Homo sapiens
MSMSANTMIFMILGASVVMAIACLMDMNALLDRFHNYILPHLRGEDRVCHCNCGR

SEQ ID NO: 47176 - protein, 244 aa, Homo sapiens
MSVVLRLRNPGLNITALMWCLLCARHCFKNFTDVKTTVVYPATEKHLQKYLRQDLRLIRETGDDYRNITLPHLESQSLSIQWVYNILDKKAEADRIVFENPDPSDGFVLIPDLKWNQQQLDDLYLIAICHRRGIRSLRDLTPEHLPLLRNILHQGQEAILQRYRMKGDHLRVYLHYLPSYYHLHVHFTALGFEAPGSGVERAHLLAEVIENLECDPRHYQQRTLTFALRADDPLLKLLQEAQQS

SEQ ID NO: 47177 - protein, 1008 aa, Homo sapiens
MMSQSGHEYDPINYMKKPLGPPPPSYTCFRCGKPGHYIKNCPTNGDKNFESGPRIKKSTGIPRSFMMEVKDPNMKGAMLTNTGKYAIPTIDAEAYAIGKKEKPPFLPEEPSSSSEEDDPIPDELLCLICKDIMTDAVVIPCCGNSYCDECIRTALLESDEHTCPTCHQNDVSPDALIANKFLRQAVNNFKNETGYTKRLRKQLPPPPPPIPPPRPLIQRNLQPLMRSPISRQQDPLMIPVTSSSTHPAPSISSLTSNQSSLAPPVSGNPSSAPAPVPDITATVSISVHSEKSDGPFRDSDNKILPAAALASEHSKGTSSIAITALMEEKGYQVPVLGTPSLLGQSLLHGQLIPTTGPVRINTARPGGGRPGWEHSNKLGYLVSPPQQIRRGERSCYRSINRGRHHSERSQRTQGPSLPATPVFVPVPPPPLYPPPPHTLPLPPGVPPPQFSPQFPPGQPPPAGYSVPPPGFPPAPANLSTPWVSSGVQTAHSNTIPTTQAPPLSREEFYREQRRLKEEEKKKSKLDEFTNDFAKELMEYKKIQKERRRSFSRSKSPYSGSSYSRSSYTYSKSRSGSTRSRSYSRSFSRSHSRSYSRSPPYPRRGRGKSRNYRSRSRSHGYHRSRSRSPPYRRYHSRSRSPQAFRGQSPNKRNVPQGETEREYFNRYREVPPPYDMKAYYGRSVDFRDPFEKERYREWERKYREWYEKYYKGYAAGAQPRPSANRENFSPERFLPLNIRNSPFTRGRREDYVGGQSHRSRNIGSNYPEKLSARDGHNQKDNTKSKEKESENAPGDGKGNKHKKHRKRRKGEESEGFLNPELLETSRKSREPTGVEENKTDSLFVLPSRDDATPVRDEPMDAESITFKSVSEKDKRERDKPKAKGDKTKRKNDGSAVSKKENIVKPAKGPQEKVDGERERSPRSEPPIKKAKEETPKTDNTKSSSSSQKDEKITGTPRKAHSKSAKEHQETKPVKEEKVKKDYSKDVKSEKLTTKEEKAKKPNEKNKPLD

SEQ ID NO: 47178 - protein, 73 aa, Homo sapiens
MYNMRRLSLSPTFSMGFHLLVTVSLLFSHVDHVIAETEMEGEGNETGECTGSYYCKKGVILPIWEPQDPSFGD

SEQ ID NO: 47179 - protein, 123 aa, Homo sapiens
MADYLISGGTSYVPDDGLTAQQLFNCGDGLTYNDFLILPGYIDFTADQVDLTSALTKKITLKTPLVSSPMDTVTEAGMAIAMALTGGIGFIHHNCTPEFQANEVRKVKVRRATIISKRSWELH

SEQ ID NO: 47180 - protein, 1677 aa, Homo sapiens
MVKLANPLYTEWILEAIKKVKKQKQRPSEERICNAVSSSHGLDRKTVLEQLELSVKDGTILKVSNKGLNSYKDPDNPGRIALPKPRNHGKLDNKQNVDWNKLIKRAVEGLAESGGSTLKSIERFLKGQKDVSALFGGSAASGFHQQLRLAIKRAIGHGRLLKDGPLYRLNTKATNVDGKESCESLSCLPPVSLLPHEKDKPVAEPIPICSFCLGTKEQNREKKPEELISCADCGNSGHPSCLKFSPELTVRVKALRWQCIECKTCSSCRDQGKNADNMLFCDSCDRGFHMECCDPPLTRMPKGMWICQICRPRKKGRKLLQKKAAQIKRRYTNPIGRPKNRLKKQNTVSKGPFSKVRTGPGRGRKRKITLSSQSASSSSEEGYLERIDGLDFCRDSNVSLKFNKKTKGLIDGLTKFFTPSPDGRKARGEVVDYSEQYRIRKRGNRKSSTSDWPTDNQDGWDGKQENEERLFGSQEIMTEKDMELFRDIQEQALQKVGVTGPPDPQVRCPSVIEFGKYEIHTWYSSPYPQEYSRLPKLYLCEFCLKYMKSRTILQQHMKKCGWFHPPANEIYRKNNISVFEVDGNVSTIYCQNLCLLAKLFLDHKTLYYDVEPFLFYVLTQNDVKGCHLVGYFSKEKHCQQKYNVSCIMILPQYQRKGYGRFLIDFSYLLSKREGQAGSPEKPLSDLGRLSYMAYWKSVILECLYHQNDKQISIKKLSKLTGICPQDITSTLHHLRMLDFRSDQFVIIRREKLIQDHMAKLQLNLRPVDVDPECLRWTPVIVSNSVVSEEEEEEAEEGENEEPQCQERELEISVGKSVSHENKEQDSYSVESEKKPEVMAPVSSTRLSKQVLPHDSLPANSQPSRRGRWGRKNRKTQERFGDKDSKLLLEETSSAPQEQYGECGEKSEATQEQYTESEEQLVASEEQPSQDGKPDLPKRRLSEGVEPWRGQLKKSPEALKCRLTEGSERLPRRYSEGDRAVLRGFSESSEEEEEPESPRSSSPPILTKPTLKRKKPFLHRRRRVRKRKHHNSSVVTETISETTEVLDEPFEDSDSERPMPRLEPTFEIDEEEEEEDENELFPREYFRRLSSQDVLRCQSSSKRKSKDEEEDEESDDADDTPILKPVSLLRKRDVKNSPLEPDTSTPLKKKKGWPKGKSRKPIHWKKRPGRKPGFKLSREIMPVSTQACVIEPIVSIPKAGRKPKIQESEETVEPKEDMPLPEERKEEEEMQAEAEEAEEGEEEDAASSEVPAASPADSSNSPETETKEPEVEEEEEKPRVSEEQRQSEEEQQELEEPEPEEEEDAAAETAQNDDHDADDEDDGHLESTKKKELEEQPTREDVKEEPGVQESFLDANMQKSREKIKDKEETELDSEEEQPSHDTSVVSEQMAGSEDDHEEDSHTKEELIELKEEEEIPHSELDLETVQAVQSLTQEESSEHEGAYQDCEETLAACQTLQSYTQADEDPQMSMVEDCHASEHNSPISSVQSHPSQSVRSVSSPNVPALESGYTQISPEQGSLSAPSMQNMETSPMMDVPSVSDHSQQVVDSGFSDLGSIESTTENYENPSSYDSTMGGSICGNSSSQSSCSYGGLSSSSSLTQSSCVVTQQMASMGSSCSMMQQSSVQPAANCSIKSPQSCVVERPPSNQQQQPPPPPPQQPQPPPPQPQPAPQPPPPQQ

SEQ ID NO: 47181 - protein, 660 aa, Homo sapiens
MSRIEKMSILGVRSFGIEDKDKQIITFFSPLTILVGPNGAGKTTIIECLKYICTGDFPPGTKGNTFVHDPKVAQETDVRAQIRLQFRDVNGELIAVQRSMVCTQKSKKTEFKTLEGVITRTKHGEKVSLSSKCAEIDREMISSLGVSKAVLNNVIFCHQEDSNWPLSEGKALKQKFDEIFSATRYIKALETLRQVRQTQGQKVKEYQMELKYLKQYKEKACEIRDQITSKEAQLTSSKEIVKSYENELDPLKNRLKEIEHNLSKIMKLDNEIKALDSRKKQMEKDNSELEEKMEKVFQGTDEQLNDLYHNHQRTVREKERKLVDCHRELEKLNKESRLLNQEKSELLVEQGRLQLQADRHQEHIRARDSLIQSLATQLELDGFERGPFSERQIKNFHKLVRERQEGEAKTANQLMNDFAEKETLKQKQIDEIRDKKTGLGRIIELKSEILSKKQNELKNVKYELQQLEGSSDRILELDQELIKAADKDEQIRKIKSRHSDELTSLLGYFPNKKQLEDWLHSKSKEINQTRDRLAKLNKELASSEQNKNHINNELKRKEEQLSSYEDKLFDVCGSQDFESDLDRLKEEIEKSSKQRAMLAGATAVYSQFITQLTDENQSCCPVCQRVFQTEAELQEVISDLQSKLRLAPDKLKSTESELKK

SEQ ID NO: 47182 - protein, 828 aa, Homo sapiens
MENEIFTPLLEQFMTSPLVTWVKTFGPLAAGNGTNLDEYVALVDGVFLNQVMLQINPKLESQRVNKKVNNDASLRMHNLSILVRQIKFYYQETLQQLIMMSLPNVLIIGKNPFSEQGTEEVKKLLLLLLGCAVQCQKKEEFIERIQGLDFDTKAAVAAHIQEVTHNQENVFDLQWMEVTDMSQEDIEPLLKNMALHLKRLIDERDEHSETIIELSEERDGLHFLPHASSSAQSPCGSPGMKRTESRQHLSVELADAKAKIRRLRQELEEKTEQLLDCKQELEQMEIELKRLQQENMNLLSDARSARMYRDELDALREKAVRVDKLESEVSRYKERLHDIEFYKARVEELKEDNQVLLETKTMLEDQLEGTRARSDKLHELEKENLQLKAKLHDMEMERDMDRKKIEELMEENMTLEMAQKQSMDESLHLGWELEQISRTSELSEAPQKSLGHEVNELTSSRLLKLEMENQSLTKTVEELRTTVDSVEGNASKILKMEKENQRLSKKVEILENEIVQEKQSLQNCQNLSKDLMKEKAQLEKTIETLRENSERQIKILEQENEHLNQTVSSLRQRSQISAEARVKDIEKENKILHESIKETSSKLSKIEFEKRQIKKELEHYKEKGERAEELENELHHLEKENELLQKKITNLKITCEKIEALEQENSELERENRKLKKTLDSFKNLTFQLESLEKENSQLDEENLELRRNVESLKCASMKMAQLQLENKELESEKEQLKKGLELLKASFKKTERLEVSYQGLDIENQRLQKTLENSNKKIQQLESELQDLEMENQTLQKNLEELKISSKRLEQLEKENKSLEQETSQLE

SEQ ID NO: 47183 - protein, 152 aa, Homo sapiens
MVAEPPVICSHFAQDFSPEQNIKDSFQKVTPRRYGKCEHENLQLSKSVDECKVQKGGYNGLNQCLPTTQSKIFQCDKYMKIFHKFSNLNGHKVRHTRKKPFKYKEFGKSFCIFSNLTQHKIICTRVNFYKCEDCGKAFNGSSIFTKHKRIHI

SEQ ID NO: 47184 - protein, 80 aa, Homo sapiens
  MOD_RES (1)..(1): Any amino acid
XSLFLGAPFPSWLHGLLRILGAAQFQVAKPPRNNPFLYNQINWLQKMTIRRANPGRVWWFMPLIPALQEAEEGSWHCLHS

SEQ ID NO: 47185 - protein, 68 aa, Homo sapiens
MSNPGGRRNGPVKLRLTVLCAKNLVKKDFFRLPDPFAKVVVDGSGQCHSTDTVKNTLDPKWNQHYDLQ

SEQ ID NO: 47186 - protein, 290 aa, Homo sapiens
MNTIVFNKLSGAVLFEDGGASERERGGRPYSGVLDSPHARPEVGIPDGPPLKDNLGLRHRRTGARQNGGKVRHKRQALQDMARPLKQWLYKHRDNPYPTKTEKILLALGSQMTLVQVSNWFANARRRLKNTVRQPDLSWALRIKLYNKYVQGNAERLSVSSDDSCSEDGENPPRTHMNEGGYNTPVHHPVIKSENSVIKAGVRPESRASEDYVAPPKYKSSLLNRYLNDSLRHVMATNTTMMGKTRQRNHSGSFSSNEFEEELVSPSSSETEGNFVYRTVENLGSLSEDS

SEQ ID NO: 47187 - protein, 344 aa, Homo sapiens
SGGAREGARVAALCLLWYALSAGGNVVNKVILSAFPFPVTVSLCHILALCAGLPPLLRAWRVPPAPPVSGPGPSPHPSSGPLLPPRFYPRYVLPLAFGKYFASVSAHVSIWKVPVSYAHTVKATMPIWVVLLSRIIMKEKQSTKVLRDSRIHHLRLLNILGCHAVFFMIPTWVLVDLSAFLVSSDLTYVYQWPWTLLLLAVSGFCNFAQNVIAFSILNLVSPLSYSVANATKRIMVITVSLIMLRNPVTSTNVLGMMTAILGVFLYNKTKYDANQQARKHLLPVTTADLSSKERHRSPLEKPHNGLLFPQHGDYQYGRNNILTDHFQYSRQSYPNSYSLNRYDV

SEQ ID NO: 47188 - protein, 54 aa, Homo sapiens
MLETYNHLVSLEIPSSKPKLIAQLERGEAPWREERKCPLDLCPGGMVSAFAHSV

SEQ ID NO: 47189 - protein, 147 aa, Homo sapiens
MFEQTQIQEFKEAFTIMDQNRDGFIDKNDLRDTFAALGRVNVKNEEIDEMIKEAPGPINFTVFLTMFGEKLKGADPEETILNAFKVFDPEGKGVLKADYVREMLTTQAERFSKEEVDQMFAAFPPDVTGNLDYKNLVHIITHGEEKD

SEQ ID NO: 47190 - protein, 657 aa, Homo sapiens
MIQAHISVSTQPNEVGPVAVLEFWVQALISQHLWYREQPILFLMDHLCKAAFQLMQEDCIQKLLYQQHKNALGYHCDRSLLSSLVSWIVAGNITPSFVEGLATPTQVWFAWTVLNMESIFEEDSQLRRVIEGELVINSAFTPDQALKKAQTQLKLPIVPSLQRLLIYRWAHQALVTPSDHPLLPLIWQKFFLLYLHRPGPQYGLPIDGCIGRRFFQSPAHINLLKEMKRRLTEVADFHHAASKALRVPAEGSEGLPESHSGTPGYLTSPELHKELVRLFNVYILWLEDENFQKGDTYIPSLPKHYDIHRLAKVMQNQQDLWMEYLNMERIYHEFQETVGLWTQAKLESHSTPCSLSVQLDFTDPLLAKERVLSNLRKHEAPQPPLALHPTKPPVPVISSAVLLSQKDATQLVCTDLNLLQQQARTAALRESQQVALDGELLDTMPKQYVNREEQTTLHLECRGSSGKKCQGAAVVTVQFEGMHKNEAISQQLHVLRKEVKQLQAEAAKPPSLNIVEAAVHAENLITALVNAYKLQPTPGIQKVGISLFFTIVDYVSDETQRHPPTRQFFTSCIEILGQVFISGIKSECRKVLETILKNSRLCSLLSPFFTPNAAPAEFIQLYEQVVKFLSEDNSDMIFMLLTKASGVHSLGTYCLGP

SEQ ID NO: 47191 - protein, 115 aa, Homo sapiens
MANRELAFKAGDVIKVLDASNKDWWWGQIDDEEGWFPASFVRLWVNQEDEVEEGPSDVQNGHLDPNSDCLCLGRPLQNRDQMRANVINEIMSTERHYIKHLKDICEGYLKQCRKR

SEQ ID NO: 47192 - protein, 333 aa, Homo sapiens
MSLTVVSMACVGFFLLQGAWPLMGGQDKPFLSARPSTVVPRGGHVALQCHYRRGFNNFMLYKEDRSHVPIFHGRIFQESFIMGPVTPAHAGTYRCRGSRPHSLTGWSTPSNPLVIMVTGNHRKPSLLAHPGPLLKSGETVILQCWSDVMFEHFFLHREGISEDPSRLVGQIHDGVSKANFSIGPLMPVLAGTYRCYGSVPHSPYQLSAPSDPLDIVITGLYEKPSLSAQPGPTVQAGENVTLSCSSWSSYDIYHLSREGEAHERRLRAVPKVNRTFQADFPLGPATHGGTYRCFGSFRALPCVWSNSSDPLLVSVTGNPSSSWPSPTEPSSKS

SEQ ID NO: 47193 - protein, 523 aa, Homo sapiens
MTLRAAVFDLDGVLALPAVFGVLGRTEEALALPRGLLNDAFQKGGPEGATTRLMKGEITLSQWIPLMEENCRKCSETAKVCLPKNFSIKEIFDKAISARKINRPMLQAALMLRKKGFTTAILTNTWLDDRAERDGLAQLMCELKMHFDFLIESCQVGMVKPEPQIYKFLLDTLKASPSEVVFLDDIGANLKPARDLGMVTILVQDTDTALKELEKVTGIQLLNTPAPLPTSCNPSDMSHGYVTVKIPALAQAGYRVLAMDMKGYGESSAPPEIEEYCMEVLCKEMVTFLDKLGLSQAVFIGHDWGGMLVWYMALFYPERVRAVASLNTPFIPANPNMSPLESIKANPVFDYQLYFQEPGVAEAELEQNLSRTFKSLFRASDESVLSMHKVCEAGGLFVNSPEEPSLSRMVTEEEIQFYVQQFKKSGFRGPLNWYRNMERNWKWACKSLGRKILIPALMVTAEKDFVLVPQMSQHMEDWIPHLKRGHIEDCGHWTQMDKPTEVNQILIKWLDSDARNPPVVSKM

SEQ ID NO: 47194 - protein, 111 aa, Homo sapiens
  MOD_RES (1)..(1): Any amino acid
XLRYEQEKRNSLKRPRDVDHSKYFSSRRDDPYWSENKKLSLDTDARFGHGSDYSRQQNRFNDFDHRERGRFPESSAVQSSSFERRDRFVGQSEGKKARPTARREDPSFERY

SEQ ID NO: 47195 - protein, 118 aa, Homo sapiens
  MOD_RES (1)..(1): Any amino acid
XYSAHEINKGHPNLAATPPGHASSPGLSQTPYPSGQNAGPTTLVYPQTPQTMNSQPQTRSPQNSANTLHRQLEEEEGFGTDSRLQVLGWKRLDKILHFCSGASTSPSSVFPEASNTAS

SEQ ID NO: 47196 - protein, 786 aa, Homo sapiens
MSSSSWLLLSLVAVTAAQSTIEEQAKTFLDKFNHEAEDLFYQSSLASWNYNTNITEENVQNMNNAGDKWSAFLKEQSTLAQMYPLQEIQNLTVKLQLQALQQNGSSVLSEDKSKRLNTILNTMSTIYSTGKVCNPDNPQECLLLEPGLNEIMANSLDYNERLWAWESWRSEVGKQLRPLYEEYVVLKNEMARANHYEDYGDYWRGDYEVNGVDGYDYSRGQLIEDVEHTFEEIKPLYEHLHAYVRAKLMNAYPSYISPIGCLPAHLLGDMWGRFWTNLYSLTVPFGQKPNIDVTDAMVDQAWDAQRIFKEAEKFFVSVGLPNMTQGFWENSMLTDPGNVQKAVCHPTAWDLGKGDFRILMCTKVTMDDFLTAHHEMGHIQYDMAYAAQPFLLRNGANEGFHEAVGEIMSLSAATPKHLKSIGLLSPDFQEDNETEINFLLKQALTIVGTLPFTYMLEKWRWMVFKGEIPKDQWMKKWWEMKREIVGVVEPVPHDETYCDPASLFHVSNDYSFIRYYTRTLYQFQFQEALCQAAKHEGPLHKCDISNSTEAGQKLFNMLRLGKSEPWTLALENVVGAKNMNVRPLLNYFEPLFTWLKDQNKNSFVGWSTDWSPYADQSIKVRISLKSALGDKAYEWNDNEMYLFRSSVAYAMRQYFLKVKNQMILFGEEDVRVANLKPRISFNFFVTAPKNVSDIIPRTEVEKAIRMSRSRINDAFRLNDNSLEFLGIQPTLGPPNQPPVSIWLIVFGVVMGVIVVGIVILIFTGIRDRKKALCWKGQENISAKPDC

SEQ ID NO: 47197 - protein, 137 aa, Homo sapiens
  MOD_RES (1)..(1): Any amino acid
XVQACEERQKRGWDSVQQSITMVRSKIDRLETTLAGIKNIDTKVQKILEVLQKMPRWRRHGGALHAREVGAAGARAGAAAHRGEPERLRTAVLRAGTALPEPRLLRGRAAVAPGRAGPPGGRARAGCAGGARKGCPA

SEQ ID NO: 47198 - protein, 136 aa, Homo sapiens
MPAIMTMLADHAARQLLDFSQKLDINLLDNVVNCLYHGEGAQQRMAQEVLTHLKEHPDAWTRVDTILEFSQNMNTKEEKGCLPVQLTQLGFDGRPPQVLWTTNFGKCDKNKVEDSSKEPVRRNKKIRCWPHYQDVI

SEQ ID NO: 47199 - protein, 200 aa, Homo sapiens
MEVAEPSSPTEEEEEEEEHSAEPRPRTRSNPEGAEDRAVGAQASVGSRSEGEGEAASADDGSLNTSGAGPKSWQVPPPAPEVQIRTPRVNCPEKVIICLDLSEEMSLPKLESFNGSKTNALNVSQKMIEMFVRTKHKIDKSHEFALVVVNDDTAWLSGLTSDPRELCSCLYDLETASCSTFNLEGLFSLIQQKTELPVTE

SEQ ID NO: 47200 - protein, 96 aa, Homo sapiens
MQGDARRRRNENYFDDIPRSKLERQMAQTGDWGEPSITLRPPNEATASTPVQYWQHHPEKLIFQSCDYKAFYLGSMLIKELRGTESTQDACAKMRV

SEQ ID NO: 47201 - protein, 145 aa, Homo sapiens
  MOD_RES (1)..(1): Any amino acid
XPAEWGQRLLLVLLLGGCSGRIHQLALTGEKRADIQLNSFGFYTNGSLEVELSVLRLGLREAEEKSLLVGFSLSRVRSGRVRSYSGPGAEVWRAEDVVYLSRAPPGSTLQTRAPEATGHSPPQGGWRRDLCSQQAQVNTRSDSGS

SEQ ID NO: 47202 - protein, 3931 aa, Homo sapiens
MEDEERQKKLEAGKAKLAQFRQRKAQSDGQSPSKKQKKKRKTSSSKHDVSAHHDLNIDQSQCNEMYINSSQRVESTVIPESTIMRTLHSGEITSHEQGFSVELESEISTTADDCSSEVNGCSFVMRTGKPTNLLREEEFGVDDSYSEQGAQDSPTHLEMMESELAGKQHEIEELNRELEEMRVTYGTEGLQQLQEFEAAIKQRDGIITQLTANLQQARREKDETMREFLELTEQSQKLQIQFQQLQASETLRNSTHSSTAADLLQAKQQILTHQQQLEEQDHLLEDYQKKKEDFTMQISFLQEKIKVYEMEQDKKVENSNKEEIQEKETIIEELNTKIIEEEKKTLELKDKLTTADKLLGELQEQIVQKNQEIKNMKLELTNSKQKERQSSEEIKQLMGTVEELQKRNHKDSQFETDIVQRMEQETQRKLEQLRAELDEMYGQQIVQMKQELIRQHMAQMEEMKTRHKGEMENALRSYSNITVNEDQIKLMNVAINELNIKLQDTNSQKEKLKEELGLILEEKCALQRQLEDLVEELSFSREQIQRARQTIAEQESKLNEAHKSLSTVEDLKAEIVSASESRKELELKHEAEVTNYKIKLEMLEKEKNAVLDRMAESQEAELERLRTQLLFSHEEELSKLKEDLEIEHRINIEKLKDNLGIHYKQQIDGLQNEMSQKIETMQFEKDNLITKQNQLILEISKLKDLQQSLVNSKSEEMTLQINELQKEIEILRQEEKEKGTLEQEVQELQLKTELLEKQMKEKENDLQEKFAQLEAENSILKDEKKTLEDMLKIHTPVSQEERLIFLDSIKSKSKDSVWEKEIEILIEENEDLKQQCIQLNEEIEKQRNTFSFAEKNFEVNYQELQEEYACLLKVKDDLEDSKNKQELEYKSKLKALNEELHLQRINPTTVKMKSSVFDEDKTFVAETLEMGEVVEKDTTELMEKLEVTKREKLELSQRLSDLSEQLKQKHGEISFLNEEVKSLKQEKEQVSLRCRELEIIINHNRAENVQSCDTQVSSLLDGVVTMTSRGAEGSVSKVNKSFGEESKIMVEDKVSFENMTVGEESKQEQLILDHLPSVTKESSLRATQPSENDKLQKELNVLKSEQNDLRLQMEAQRICLSLVYSTHVDQVREYMENEKDKALCSLKEELIFAQEEKIKELQKIHQLELQTMKTQETGDEGKPLHLLIGKLQKAVSEECSYFLQTLCSVLGEYYTPALKCEVNAEDKENSGDYISENEDPELQDYRYEVQDFQENMHTLLNKVTEEYNKLLVLQTRLSKIWGQQTDGMKLEFGEENLPKEETEFLSIHSQMTNLEDIDVNHKSKLSSLQDLEKTKLEEQVQELESLISSLQQQLKETEQNYEAEIHCLQKRLQAVSESTVPPSLPVDSVVITESDAQRTMYPGSCVKKNIDGTIEFSGEFGVKEETNIVKLLEKQYQEQLEEEVAKVIVSMSIAFAQQTELSRISGGKENTASSKQAHAVCQQEQHYFNEMKLSQDQIGFQTFETVDVKFKEEFKPLSKELGEHGKEILLSNSDPHDIPESKDCVLTISEEMFSKDKTFIVRQSIHDEISVSSMDASRQLMLNEEQLEDMRQELVRQYQEHQQATELLRQAHMRQMERQREDQEQLQEEIKRLNRQLAQRSSIDNENLVSERERVLLEELEALKQLSLAGREKLCCELRNSSTQTQNGNENQGEVEEQTFKEKELDRKPEDVPPEILSNESLHGGIWPLRFWLPHWIISMERSQYGTQTRKTVYALQKANNRLLKILLEVVKTTAAVEETIGRHVLGILDRSSKSQSSASLIWRSEAEASVKSCVHEEHTRVTDESIPSYSGSDMPRNDINMWSKVTEEGTELSQRLVRSGFAGTEIDPENEELMLNISSRLQAAVEKLLEAISETSSQLEHAKVTQTELMRESFRQKQEATESLKCQEELRERLHEESRAREQLAVELSKAEGVIDGYADEKTLFERQIQEKTDIIDRLEQELLCASNRLQELEAEQQQIQEERELLSRQKEAMKAEAGPVEQQLLQETEKLMKEKLEVQCQAEKVRDDLQKQVKALEIDVEEQVSRFIELEQEKNTELMDLRQQNQALEKQLEKMRKFLDEQAIDREHERDVFQQEIQKLEQQLKVVPRFQPISEHQTREVEQLANHLKEKTDKCSELLLSKEQLQRDIQERNEEIEKLEFRVRELEQALLVEDRKHFGAVEAKPELSLEVQLQAERDAIDRKEKEITNLEEQLEQFREELENKNEEVQQLHMQLEIQKKESTTRLQELEQENKLFKDDMEKLGLAIKESDAMSTQDQHVLFGKFAQIIQEKEVEIDQLNEQVTKLQQQLKITTDNKVIEEKNELIRDLETQIECLMSDQECVKRNREEEIEQLNEVIEKLQQELANIGQKTSMNAHSLSEEADSLKHQLDVVIAEKLALEQQVETANEEMTFMKNVLKETNFKMNQLTQELFSLKRERESVEKIQSIPENSVNVAIDHLSKDKPELEVVLTEDALKSLENQTYFKSFEENGKGSIINLETRLLQLESTVSAKDLELTQCYKQIKDMQEQGQFETEMLQKKIVNLQKIVEEKVAAALVSQIQLEAVQEYAKFCQDNQTISSEPERTNIQNLNQLREDELGSDISALTLRISELESQVVEMHTSLILEKEQVEIAEKNVLEKEKKLLELQKLLEGNEKKQREKEKKRSPQDVEVLKTTTELFHSNEESGFFNELEALRAESVATKAELASYKEKAEKLQEELLVKETNMTSLQKDLSQVRDHLAEAKEKLSILEKEDETEVQESKKACMFEPLPIKLSKSIASQTDGTLKISSSNQTPQILVKNAGIQINLQSECSSEEVTEIISQFTEKIEKMQELHAAEILDMESRHISETETLKREHYVAVQLLKEECGTLKAVIQCLRSKEGSSIPELAHSDAYQTREICSSDSGSDWGQGIYLTHSQGFDIASEGRGEESESATDSFPKKIKGLLRAVHNEGMQVLSLTESPYSDGEDHSIQQVSEPWLEERKAYINTISSLKDLITKMQLQREAEVYDSSQSHESFSDWRGELLLALQQVFLEERSVLLAAFRTELTALGTTDAVGLLNCLEQRIQEQGVEYQAAMECLQKADRRSLLSEIQALHAQMNGRKITLKREQESEKPSQELLEYNIQQKQSQMLEMQVELSSMKDRATELQEQLSSEKMVVAELKSELAQTKLELETTLKAQHKHLKELEAFRLEVKDKTDEVHLLNDTLASEQKKSRELQWALEKEKAKLGRSEERDKEELEDLKFSLESQKQRNLQLNLLLEQQKQLLNESQQKIESQRMLYDAQLSEEQGRNLELQVLLESEKVRIREMSSTLDRERELHAQLQSSDGTGQSRPPLPSEDLLKELQKQLEEKHSRIVELLNETEKYKLDSLQTRQQMEKDRQVHRKTLQTEQEANTEGQKKMHELQSKVEDLQRQLEEKRQQVYKLDLEGQRLQGIMQEFQKQELEREEKRESRRILYQNLNEPTTWSLTSDRTRNWVLQQKIEGETKESNYAKLIEMNGGGTGCNHELEMIRQKLQCVASKLQVLPQKASERLQFETADDEDFIWVQENIDEIILQLQKLTGQQGEEPSLVSPSTSCGSLTERLLRQNAELTGHISQLTEEKNDLRNMVMKLEEQIRWYRQTGAGRDNSSRFSLNGGANIEAIIASEKEVWNREKLTLQKSLKRAEAEVYKLKAELRNDSLLQTLSPDSEHVTLKRIYGKYLRAESFRKALIYQKKYLLLLLGGFQECEDATLALLARMGGQPAFTDLEVITNRPKGFTRFRSAVRVSIAISRMKFLVRRWHRVTGSVSININRDGFGLNQGAEKTDSFYHSSGGLELYGEPRHTTYRSRSDLDYIRSPLPFQNRYPGTPADFNPGSLACSQLQNYDPDRALTDYITRLEALQRRLGTIQSGSTTQFHAGMRR

SEQ ID NO: 47203 - protein, 178 aa, Homo sapiens
  MOD_RES (1)..(1): Any amino acid
XLFVGFALLRLVAFHLGLLFVWLCQRFSRALMAAKRSSGAAPAPASASAPAPVPGGEAERVRVFHKQAFEYISIALRIDEDEKAGQKEQAVEWYKKGIEELEKGIAVIVTGQGEQCERARRLQAKMMTNLVMAKDRLQLLEKMQPVLPFSKSQTDVYNDSTNLACRNGHLQSGYSENK

SEQ ID NO: 47204 - protein, 12 aa, Homo sapiens
  MOD_RES (1)..(1): Any amino acid
XWVWFQDTVTEH

SEQ ID NO: 47205 - protein, 74 aa, Homo sapiens
  MOD_RES (1)..(1): Any amino acid
XDLEHMRTIKPEKHLRFCQENGFSSHFVSAKTGDSVFLCFQKVAAEILGIKLNKAEIEQSQGHFIIFISSTNRE

SEQ ID NO: 47206 - protein, 710 aa, Homo sapiens
MCVRSCFQSPRLQWVWRTAFLKHTQRRHQGSHRWTHLGGSTYRAVIFDMGGVLIPSPGRVAAEWEVQNRIPSGTILKALMEGGENGPWMRFMRAEITAEGFLREFGRLCSEMLKTSVPVDSFFSLLTSERVAKQFPVMTEAITQIRAKGLQTAVLSNNFYLPNQKSFLPLDRKQFDVIVESCMEGICKPDPRIYKLCLEQLGLQPSESIFLDDLGTNLKEAARLGIHTIKVNDPETAVKELEALLGFTLRVGVPNTRPVKKTMEIPKDSLQKYLKDLLGIQTTGPLELLQFDHGQSNPTYYIRLANRDLVLRKKPPGTLLPSAHAIEREFRIMKALANAGVPVPNVLDLCEDSSVIGTPFYVMEYCPGLIYKDPSLPGLEPSHRRAIYTAMNTVLCKIHSVDLQAVGLEDYGKQGDYIPRQVRTWVKQYRASETSTIPAMERLIEWLPLHLPRQQRTTVVHGDFRLDNLVFHPEEPEVLAVLDWELSTLGDPLADVAYSCLAHYLPSSFPVLRGINDCDLTQLGIPAAEEYFRMYCLQMGLPPTENWNFYMAFSFFRVAAILQGVYKRSLTGQASSTYAEQTGKLTEFVSNLAWDFAVKEGFRVFKEMPFTNPLTRSYHTWARPQSQWCPTGSRSYSSVPEASPAHTSRGGLVISPESLSPPVRELYHRLKHFMEQRVYPAEPELQSHQASAARWSPSPLIEDLKVKQPW

SEQ ID NO: 47207 - protein, 147 aa, Homo sapiens
MKMEEMSLSGLDNSKLEAIAQEIYADLVEDSCLGFCFEVHRAVKCGYFFLDDTDPDSMKDFEIVDQPGLDIFGQVFNQWKSKECVCPNCSRSIAASRFAPHLEKCLGMGRNSSRIANRRIANSNNMNKSESDQEDNDDINDNDWSYG

SEQ ID NO: 47208 - protein, 41 aa, Homo sapiens
MDAEAEDKTLRTRSKGTEVPMDSLIQELRISVPVDMRPLTW

SEQ ID NO: 47209 - protein, 273 aa, Homo sapiens
MSIRVTQKSYKVSTSGPRAFSSRSYTSGPGSRISSSSFSRVGSSNFRGGLGGGYGGASGMGGITAVTVNQSLLSPLVLEVDPNIQAVRTQEKEQIKTLNNKFASFIDKVRFLEQQNKMLETKWSLLQQQKTARSNMDNMFESYINNLRRQLETLGQEKLKLEAELGNMQGLVEDFKNKYEDEINKRTEMENEFVLIKKDVDEAYMNKVELESRLEGLTDEINFLRQLYEEEIRELQSQISDTSVVLSMDNSRSLDMDSIIAEVKAQYEDIANR

SEQ ID NO: 47210 - protein, 243 aa, Homo sapiens
MFRGIYRGVQKHQGMFFSTVGCHPTRCGEFEKNNPDLYLKELLNLAENNKGKVVAIGECGLDFDRLQFCPKDTQLKYFEKQFELSEQTKLPMFLHCRNSHAEFLDIMKRNRDRCVGGVVHSFDGTKEAAAALIDLDLYIGFNGCSLKTEANLEVLKSIPSEKLMIETDAPWCGVKSTHAGSKYIRTAFPTKKKWESGHCLKDRNEPCHIIQILEIMSAVRDEDPLELANTLYNNTIKVFFPGI

SEQ ID NO: 47211 - protein, 21 aa, Homo sapiens
MGKVYRQDRKSVQRIKAKDIV

SEQ ID NO: 47212 - protein, 74 aa, Homo sapiens
  MOD_RES (1)..(1): Any amino acid
XRDIRRTQNADGFSTYVCLVLLVANILRILFCLSVRADWKVSAALPMKRAWWRGGEKESRQLVSRTLLLTLVTE

SEQ ID NO: 47213 - protein, 696 aa, Homo sapiens
MLLKKHAGKGGGREPRSEDPTPAEQHCARTMPPCAVLAALLSVVAVVSCLYLGVKTNDLQARIAALESAKGAPSIHLLPDTLDHLKTMVQEKVERLLAQKSYEHMAKIRIAREAPSECNCPAGPPGKRGKRGRRGESGPPGQPGPQGPPGPKGDKGEQGDQGPRMVFPKINHGFLSADQQLIKRRLIKGDQGQAGPPGPPGPPGPRGPPGDTGKDGPRGMPGVPGEPGKPGEQGLMGPLGPPGQKGSIGAPGIPGMNGQKGEPGLPGAVGQNGIPGPKGEPGEQGEKGDAGENGPKGDTGEKGDPGSSAAGIKGEPGESGRPGQKGEPGLPGLPGLPGIKGEPGFIGPQGEPGLPGLPGTKGERGEAGPPGRGERGEPGAPGPKGKQGESGTRGPKGSKGDRGEKGDSGAQGPRGPPGQKGDQGATEIIDYNGNLHEALQRITTLTVTGPPGPPGPQGLQGPKGEQGSPGIPGMDGEQGLKGSKGDMGDPGMTGEKGGIGLPGLPGANGMKGEKGDSGMPGPQGPSIIGPPGPPGPHGPPGPMGPHGLPGPKGEPGLNGVKGLKGEPGQKGDRGPLGLPGASGLDGKPGSRGTDGPMGPHGPAGPKGERGEKGAMGEPGPRGPYGLPGKDGEPGLDGFPGPRGEKGDLGEKGEKGEKGKKGKKGPKGEKGEQGAPGLDAPCPLGPDGLPMPGCWQK

SEQ ID NO: 47214 - protein, 198 aa, Homo sapiens
MKLSKKDRGEDEESDSAKKKLDWSCSLLVASLAGAFGSSFLYGYNLSVVNAPTPYIKAFYNESWERRHGRPIDPDTLTLLWSVTVSIFAIGGLVGTLIVKMIGKVLGRKHTLLANNGFAISAALLMACSLQAGAFEMLIVGRFIMGIDGGVALSVLPMYLSEISPKEIRGSLGQVTAIFICIGVFTGQLLGLPELLGK

SEQ ID NO: 47215 - protein, 999 aa, Homo sapiens
  MOD_RES (1)..(1): Any amino acid
XGTLYESCNQPQDAIKCYLNATRSKSCSNTSALAARIKYLQNTSDNWSGGHAVSHPPVQQQAHSWCLTPQKLQHLEQLRANRNNLNPAQKLMLEQLESQFVLMQQHQMRPTGVAQVRSTGIPNGPTADSSLPTNSVSGQQPQLALTRVPSVSQPGVRPACPGQPLANGPFSAGHVPCSTSRTLGSTDTILIGNNHITGSGSNGNVPYLQRNALTLPHNRTNLTSSAEEPWKNQLSNSTQGLHKGQSSHSAGPNGERPLSSTGPSQHLQAAGSGIQNQNGHPTLPSNSVTQGAALNHLSSHTATSGGQQGITLTKESKPSGNILTVPETSRHTGETPNSTASVEGLPNHVHQMTADAVCSPSHGDSKSPGLLSSDNPQLSALLMGKANNNVGTGTCDKVNNIHPAVHTKTDNSVASSPSSAISTATPSPKSTEQTTTNSVTSLNSPHSGLHTINGEGMEESQSPMKTDLLLVNHKPSPQIIPSMSVSIYPSSAEVLKACRNLGKNGLSNSSILLDKCPPPRPPSSPYPPLPKDKLNPPTPSIYLENKRDAFFPPLHQFCTNPNNPVTVIRGLAGALKLDLGLFSTKTLVEANNEHMVEVRTQLLQPADENWDPTGTKKIWHCESNRSHTTIAKYAQYQASSFQESLREENEKRSHHKDHSDSESTSSDNSGRRRKGPFKTIKFGTNIDLSDDKKWKLQLHELTKLPAFVRVVSAGNLLSHVGHTILGMNTVQLYMKVPGSRTPGHQENNNFCSVNINIGPGDCEWFVVPEGYWGVLNDFCEKNNLNFLMGSWWPNLEDLYEANVPVYRFIQRPGDLVWINAGTVHWVQAIGWCNNIAWNVGPLTACQYKLAVERYEWNKLQSVKSIVPMVHLSWNMARNIKVSDPKLFEMIKYCLLRTLKQCQTLREALIAAGKEIIWHGRTKEEPAHYCSICEVEVFDLLFVTNESNSRKTYIVHCQDCARKTSGNLENFVVLEQYKMEDLMQVYDQFTLAPPLPSASS

SEQ ID NO: 47216 - protein, 510 aa, Homo sapiens
MTPILTVLICLGLSLGPRTHVQAGHLPKPTLWAEPGSVITQGSPVTLRCQGGQETQEYRLYREKKTALWITRIPQELVKKGQFPIPSITWEHAGRYRCYYGSDTAGRSESSDPLELVVTGAYIKPTLSAQPSPVVNSGGNVILQCDSQVAFDGFSLCKEGEDEHPQCLNSQPHARGSSRAIFSVGPVSPSRRWWYRCYAYDSNSPYEWSLPSDLLELLVLGVSKKPSLSVQPGPIVAPEETLTLQCGSDAGYNRFVLYKDGERDFLQLAGAQPQAGLSQANFTLGPVSRSYGGQYRCYGAHNLSSEWSAPSDPLDILIAGQFYDRVSLSVQPGPTVASGENVTLLCQSQGWMQTFLLTKEGAADDPWRLRSTYQSQKYQAEFPMGPVTSAHAGTYRCYGSQSSKPYLLTHPSDPLELVVSGPSGGPSSPTTGPTSTSGPEDQPLTPTGSDPQSGLGRHLGVVIGILVAVILLLLLLLLLFLILRHRRQGKHWTSSPAQLPMPRKKTSMLP

SEQ ID NO: 47217 - protein, 216 aa, Homo sapiens
MPCSLTWRLPPRTCQGQGLPKSALRSLSPLPHPMATSHSTVCKPRSPKPAAPAAPPFSSSSGVLGTGLCELDRLLQELNATQFNITDEIMSQFPSSKVASGEQKEDQSEDKKRPSLPSSPSPGLPKASATSATLELDRLMASLSDFRVQNHLPASGPTQPPVVSSTNEGSPSPPEPTGKGSLDTMLGLLQSDLSRRGVPTQAKGLCGSCNKPIAGQ

SEQ ID NO: 47218 - protein, 70 aa, Homo sapiens
MRPTLLWSLLLLLGVFAAAAAAPPAQLTLETYQEWCNDSAATHEMGDGEQACGGRNNGPQRCPRPHPQSP

SEQ ID NO: 47219 - protein, 227 aa, Homo sapiens
  MOD_RES (1)..(1): Any amino acid
XSCIPAQVVAAIDVNTVANEVYKYNFPHTQLLAKTIEGITLEEFDRLSFDMILMSPPCQPFTRDLLIQTIENCGFQYQEFLLSPTSLGIPNSRLRYFLIAKLQSEPLPFQAPGQVLMEFPKIESVHPQKYAMDVENKIQEKNVEPNISFDGSIQCSGKDAILFKLETAEEIHRKNQQDSDLSVKMLKDFLEDDTDVNQYLLPPKSLLRYALLLDIVQPTCRRSVCFT

SEQ ID NO: 47220 - protein, 179 aa, Homo sapiens
MSMRSPISAQLALDGVGTMVNCTIKSEEKKEPCHEAPQGSATAAEPQPGDPARASQDSADPQAPAQGNFRGSWDCSSPEGNGSPEPKRPGVSEAASGSQEKLDFNRNLKEVVPAIEKLLSSDWKERFLGRNSMEAKDVKGTQESLAEKELQLLVMIHQLSTLRDQLLTAHSEQKNMAAM

SEQ ID NO: 47221 - protein, 99 aa, Homo sapiens
MNDCIIRGDLANVRVGRHCVVKSRSVIRPPFKKFSKGVAFFPLHIGDHVFIEEDCVVNAAQIGSYVHVGKNCVIGRRCVLKDCCKILDNTVLPPETVVP

SEQ ID NO: 47222 - protein, 10 aa, Homo sapiens
MVGNETTYED

SEQ ID NO: 47223 - protein, 59 aa, Homo sapiens
MVEDTLAGLGGPQKPPPHTEPDSPSPVLQGEESSERESLPESLELSSPRSPETDWGRPP

SEQ ID NO: 47224 - protein, 192 aa, Homo sapiens
MASSCPGTPSPAGLPPPSVATPGETLGPAAPPEPAFPDIYGGDAQLWEAHFRGIGRAYRALGKQDDFAIRVLTENFTLPFPFAWPPGSDPACGPLFYDPRDRADFDFLLRGPGASPPALLRPLHATAQAAMRKRRLERLALSCARARGPGPASSCCCPAPPPPSRSPRPALPATAPPGWPRPRRCPESEQNK

SEQ ID NO: 47225 - protein, 369 aa, Homo sapiens
MNGEEEFFDAVTGFDSDNSSGEFSEANQKVTGMIDLDTSKNNRIGKTGERPSQENGIQKHRTSLPAPMFSRSDFSVWTILKKCVGLELSKITMPIAFNEPLSFLQRITEYMEHVYLIHRASCQPQPLERMQSVAAFAVSAVASQWERTGKPFNPLLGETYELIREDLGFRFISEQVSHHPPISAFHSEGLNHDFLFHGSIYPKLKFWGKSVEAEPRGTITLELLKHNEAYTWTNPTCCVHNVIIGKLWIEQYGTVEILNHRTGHKCVLHFKPCGLFGKELHKVEGHIQDKNKKKLFMIYGKWTECLWGIDPVSYESFKKQERRGDHLRKAKLLLGRLRQENLLNSGGRGCSDPRSHHCTPAWATERDSV

SEQ ID NO: 47226 - protein, 352 aa, Homo sapiens
MLAVGCALLAALLAAPGAALAPRRCPAQEVARGVLTSLPGDSVTLTCPGVEPEDNATVHWVLRKPAAGSHPSRWAGMGRRLLLRSVQLHDSGNYSCYRAGRPAGTVHLLVDVPPEEPQLSCFRKSPLSNVVCEWGPRSTPSLTTKAVLLVRKFQNSPAEDFQEPCQYSQESQKFSCQLAVPEGDSSFYIVSMCVASSVGSKFSKTQTFQGCGILQPDPPANITVTAVARNPRWLSVTWQDPHSWNSSFYRLRFELRYRAERSKTFTTWMVKDLQHHCVIHDAWSGLRHVVQLRAQEEFGQGEWSEWSPEAMGTPWTDRLSPRCPGWSTAVQSQLTATSASWVQAILPPQPPK

SEQ ID NO: 47227 - protein, 677 aa, Homo sapiens
MPHKIGFVVVSSSGHEDGFSARELMIHAPTVSGWRSPRFCQFPQEIVLQMVERCRIRKLQLLAHQYMISSKIEFYISESLPEYFAPYQAERFRRLGYVSLCDNEKTGCKARELKSVYVDAVGQFLKLIFHQNHVNKYNIYNQVALVAINIIGDPADFSDESNTASREKLIDHYLGHNSEDPALEGTYARKSDYISPLDDLAFDMYQDPEVAQIIRKLDERKREAVQKERYDYAKKLKQAIADLQKVGERLGRYEVEKRCAVEKEDYDLAKEKKQQMEQYRAEVYEQLELHSLLDAELHSAVDPLLPATDPHPKINAESLPYDERPLPAIRKHYGEAVVEPEMSNADISDARRGGMLGEPEPLTEKALREASSAIDVLGETLVAEAYCKTWSYREDALLALSKKLMEMPVGTPKEDLKNTLRASVFLVRRAIKDIVTSVFQASLKLLKMIITQYIPKHKLSKLETAHCVERTIPVLLTRTGDSSARLRVTAANFIQEMALFKEVKSLQIIPSYLVQPLKANSSVHLAMSQMGLLARLLKDLGTGSSGFTIDNVMKFSVSALEHRVYEVRETAVRIILDMYRQHQASILEYLPPDDSNTRRNILYKTIFEGFAKIDGRATDAEMRARRKAATEEAEKQKKEEIKALQGQLAALKEIQAEVQLSSHLQRQRRKISLTIKV

SEQ ID NO: 47228 - protein, 24 aa, Homo sapiens
MQLFLLLCLVLLSPQGASLHRHHP

SEQ ID NO: 47229 - protein, 183 aa, Homo sapiens
MWLKVGGLLRGTGGQLGQTVGWPCGALGPGPHRWGPCGGSWAQKFYQDGPGRGLGEEDIRRAREARPRKTPRPQLSDRSRERKVPASRISRLANFGGLAVGLGLGVLAEMAKKSMPGGRLQSEGGSGLDSSPFLSEANAERIVQTLCTVRGAALKTTASSALSCSTSLSGSARAPTSCPAGRC

SEQ ID NO: 47230 - protein, 67 aa, Homo sapiens
MAEPGEGLPEEVLALIFRHLSLRDRAAAARVCRAWAAAATCSAVWHDTKISQPSPWLRCASTSQATP

SEQ ID NO: 47231 - protein, 126 aa, Homo sapiens
MAEPDYIEDDNPELIRPQKLINPVKTSRNHQDLHRELLMNQKRGLAPQNKPELQKVMEKRKRDQVIKQKEEEAQKKKSDLEIELLKRQQKLEQLELEKQKLQEEQENAPEFVKVKGNLRRTGQEVA

SEQ ID NO: 47232 - protein, 235 aa, Homo sapiens
MVEFLLKRKASSHAVDRLRRSALMLAVYYDSPGIVNILLKQNIDVFAQDMCGRDAEDYAISHHLTKIQQQILEHKKKILKKEKSDVGSSDESAVSIFHELRVDSLPASDDKDLNVATKCVPEKVSEPLPGSSHEKGNRIVNGQGEEQALPVASEEEQERHERSEKKQPQVKEGNNTNKSEKIQLSENICDSTSSAAAGRLTQQRKIGKTYPQQFPKKLKEEHDRCTLKQENEEKT

SEQ ID NO: 47233 - protein, 1282 aa, Homo sapiens [sequence omitted]

SEQ ID NO: 47234 - protein, 76 aa, Homo sapiens
MAETKDVFGQEPHPVEDDLYKERTRKRRKSDRDQRFRAFPSMEQSALKEYTSFGDLVLYPCQVPAGDISLLIPDEK

SEQ ID NO: 47235 - protein, 81 aa, Homo sapiens
MGSDKRVSRTERSGRYGSIIDRDDRDERESRSRRRDSDYKRSSDDRRGDRYDDYRDYDSPELFSLVTQAGVQWCDLSYSGG

SEQ ID NO: 47236 - protein, 263 aa, Homo sapiens
MADAKYVLCRWEKRLWPAKVLARTATSTKNKRRKEYFLAVQILSLEEKIKVKSTEVEILEKSQIEAIASSLASQNEVPAAPLEELAYRRSLRVALDVLSEGSIWSQESSAGTGRADRSLRGKPMEHVSSPCDSNSSSLPRGDVLGSSRPHRRRPCVQQSLSSSFTCEKDPECKVDHKKGLRKSENPRGPLVLPAGGGAQDESGSRIHHKNWTLASKRGGNSAQKASLCLNGSSLSEDDTERDMGSKGGSWAAPSLPSGVREDD

SEQ ID NO: 47237 - protein, 174 aa, Homo sapiens
MTTPGKENFRLKSYKNKSLNPDEMRRRREEEGLQLRKQKREEQLFKRRNVATAEEETEEEVMSDGGFHEAQISNMEMAPGGVITSDMIEMIFSKSPEQQLSATQKFRKLLSKEPNPPIDEVISTPGVVARFVEFLKRKENCTLQFESAWVLTNIASGNSLQTRIVIQAGAVPIF

SEQ ID NO: 47238 - protein, 111 aa, Homo sapiens
AHGFANLLTLDKKTLQEILVHYPDSERILMKKARVLLKQKAKTAEATPPRKDLALLFPPKEETPKLFKTLLGGTGKASLARLLKLKREQAAQGQFLPVSFTAGIFLGHLRL

SEQ ID NO: 47239 - protein, 141 aa, Homo sapiens
MKEINLLPDRVLSTPSVQLVQSWYVQSLLDIMEFLDKDPEDHRTLSQFTDALVTIRNRHNDVVPTMAQGVLEYKDTYGDDPVSNQNIQYFLDRFYLSRISIRMLINQHTLIFDGSTNPAHPKHIGSIDPNCNVSEVVKDAY

SEQ ID NO: 47240 - protein, 112 aa, Homo sapiens
LFPRSCPECRITSNFVIPTTRRAGILMKDVGAAHLEGTVFTSMRTLMAVERSHRDRKWEHQADTGPNEGTTSGNSLRKERTATPLTTMKKRLSPLSWARCCLCFWLQVGTTN

SEQ ID NO: 47241 - protein, 188 aa, Homo sapiens
MGSQGSPVKSYDYLLKFLLVGDSDVGKGEILESLQDGAAESPYAYSNGIDYKTTTILLDGRRVKLELWDTSGQGRFCTIFRSYSRGAQGILLVYDITNRWSFDGIDRWIKEIDEHAPGVPRILVGNRLHLAFKRQVPTEQARAYAEKNCMTFFEVSPLCNFNVIESFTELSRIVLMRHGMEKIWRPNR

SEQ ID NO: 47242 - protein, 124 aa, Homo sapiens
MKKQFNRMKQLANQTVGRAEKTEVLSEDLLQIERRLDTVRSICHHSHKRLVACFQGQHGTDAERRHKKLPLTALAQNMQEASTQLEDSLLGCWRRVEMLRISWLSSSPSTKSLLRRRSWTLCTA

SEQ ID NO: 47243 - protein, 39 aa, Homo sapiens
MGSSEVSIIPGLQKEEKAAVERRRLHVLKALKKLRIEAD

SEQ ID NO: 47244 - protein, 104 aa, Homo sapiens
MSQNGYFEDSSYYKCDTDDTFEAREEILGDEAFDTANSSIVSGESIRFFVNVNLEMQATNTENEATSGGCVLLHTSRKYLKLKNFKEEIRAHRDLDGFLAQASI

SEQ ID NO: 47245 - protein, 89 aa, Homo sapiens
  MOD_RES (1)..(1): Any amino acid
XHFKSSHSNQTNHKPSPDQIIQPLLELDQNRSKLKLYIGHLTTLCHDRDPLILRGLTPPASYNLDDDQAAWENELQKMTRGQVSLSLKL

SEQ ID NO: 47246 - protein, 475 aa, Homo sapiens
  MOD_RES (1)..(1): Any amino acid
XSNSAVSMELSEPIENGETEMSPEESWEHKEEISEAEPGGGSLGDGRPPEESAHEMMEEEEEIPKPKSVVAPPGAPKKEHVNVVFIGHVDAGKSTIGGQIMYLTGMVDKRTLEKYEREAKEKNRETWYLSWALDTNQEERDKGKTVEVGRAYFETEKKHFTILDAPGHKSFVPNMIGGASQADLAVLVISARKGEFETGFEKGGQTREHAMLAKTAGVKHLIVLINKMDDPTVNWSNERYEECKEKLVPFLKKVGFNPKKDIHFMPCSGLTGANLKEQSDFCPWYIGLPFIPYLDNLPNFNRSVDGPIRLPIVDKYKDMGTVVLGKLESGSICKGQQLVMMPNKHNVEVLGILSDDVETDTVAPGENLKIRLKGIEEEEILPGFILCDPNNLCHSGRTFDAQALICLVDKKSGEKSKTRPRFVKQDQVCIARLRTAGTICLETFKDFPQMGRFTLRDEGKTIAIGKVLKLVPEKD

SEQ ID NO: 47247 - protein, 329 aa, Homo sapiens
VNGQQGGGSEPAAAAAVVAAGDKWKPPQGTDSIKMENGQSTAAKLGLPPLTPEQQEALQKAKKYAMEQSIKSVLVKQTIAHQQQQLTNLQMAAVTMGFGDPLSPLQSMAAQRQRALAIMCRVYVGSIYYELGEDTIRQAFAPFGPIKSIDMSWDSVTMKHKGFAFVEYEVPEAAQLALEQMNSVMLGGRNIKVGRPSNIGQAQPIIDQLAEEARAFNRIYVASVHQDLSDDDIKSVFEAFGKIKSCTLARDPTTGKHKGYGFIEYEKAQSSQDAVSSMNLFDLGGQYLRVGKAVTPPMPLLTPATPGGLPPAAAVAAAAATAKITAQVR

SEQ ID NO: 47248 - protein, 19 aa, Homo sapiens
  MOD_RES (1)..(1): Any amino acid
XLCREAAMHALLHSEKFQV

SEQ ID NO: 47249 - protein, 103 aa, Homo sapiens
MEDRRAEKSCEQACESLKRQDYEMALKHCTEALLSLGQYSMADFTGPCPLEIERIKIESLLYRIASFLQLKNYVQADEDCRHVLGEGLAKGEDAFRAVLCCMQ

SEQ ID NO: 47250 - protein, 282 aa, Homo sapiens
MGGAVSAGEDNDELIDNLKEAQYIRTELVEQAFRAIDRADYYLEEFKENAYKDLAWKHGNIHLSAPCIYSEVMEALDLQPGLSFLNLGSGTGYLSSMVGLILGPFGVNHGVELHSDVIEYAKQKLDFFIRTSDSFDKFDFCEPSFVTGNCLEISPDCSQYDRVYCGAGVQKEHEEYMKNLLKVGGILVMPLEEKLTKITRTGPSAWETKKILAVSFAPLIQPCHSESGKSRLVQLRSPSFVQGWSVVVLSQLTAASTFQAEAILPSQSPTWLTLQVLATMPN

SEQ ID NO: 47251 - protein, 109 aa, Homo sapiens
MDWIRLTKSGKDLTGLKGRLIEVTEEELKKHNKKDDCWICIRGFVYNVSPYMEYHPGGEDELMRAAGSDGTELFDQVHRWVNYESMLKECLVGRMAIKPAVLKGKLWHL

SEQ ID NO: 47252 - protein, 52 aa, Homo sapiens
MRRSAAPSQLQGNSFKKPKFIPPGRSNPGLNEEITKLNPDIKLFEFIRLLKK

SEQ ID NO: 47253 - protein, 182 aa, Homo sapiens
LPELKDAVLDQYSMWGNKFGVLLFLYSVLLTKGIENIKNEIEDASEPLIDPVYGHGSQSLINLLLTGHAVSNVWDGDRECSGMKLLGIHEQAAVGFLTLMEALRYCKVGSYLKSPKFPIWIVGSETHLTVFFAKDMALVAPEAPSEQARRVFQTYDPEDNGFIPDSLLEDVMKALDLVSDPE

SEQ ID NO: 47254 - protein, 21 aa, Homo sapiens
  MOD_RES (1)..(1): Any amino acid
XIKAAGNKLTFGGGTRVLVKP

SEQ ID NO: 47255 - protein, 54 aa, Homo sapiens
MMGHRPVLVLKTEFHHVDQAGLQLLMSSGDPPTSASQSAEITGVSHRARSLIFF

SEQ ID NO: 47256 - protein, 222 aa, Homo sapiens
MLQTLYDYFWWERLWLPVNLTWADLEDRDGRVYAKASDLYITLPLALLFLIVRYFFELYVATPLAALLNIKEKTRLRAPPNATLEHFYLTSGKQPKQVEVELLSRQSGLSGRQVERWFRRRRNQDRPSLLKKFREASWRFTFYLIAFIAGMAVIVDKPWFYDMKKVWEGYPIQSTIPSQYWYYMIELSFYWSLLFSIASDVKRKDFKEQIIHHVATIILISF

SEQ ID NO: 47257 - protein, 132 aa, Homo sapiens
MSSEDREAQEDELLALASIYDGDEFRKAESVQGGETRIYLDLPQNFKIFVSGNSNECLQNSGFEYTICFLPPLVLNFELPPDYPSSSPPSFTLSGKWLSPTQLSALCKHLDNLWEEHRGSVVLFAWMQFLKE

SEQ ID NO: 47258 - protein, 80 aa, Homo sapiens
MAKKSMPGGRLQSEGGSGLDSSPFLSEANAERIVQTLCTVRGAALKVGQMLSIQASSALSCSTSLSGSARAPTSCPAGRC

SEQ ID NO: 47259 - protein, 226 aa, Homo sapiens
MLLLKKHTEDISSVYEIRERLGSGAFSEVVLAQERGSAHLVALKCIPKKALRGKEALVENEIAVLRRISHPNIVALEDVHESPSHLYLAMELVTGGELFDRIMERGSYTEKDASHLVGQVLGAVSYLHSLGIVHRDLKPENLLYATPFEDSKIMVSDFGLSKIQAGNMLGTACGTPGYVAPELLEQKPYGKAVDVWALGVISYILLCGYPPFYDESDPELFSQILR

SEQ ID NO: 47260 - protein, 268 aa, Homo sapiens
  MOD_RES (1)..(1): Any amino acid
XGEIRNGQIDVPGGILFGATISFSCNTGYKLFGSTSSFCLISGSSVQWSDPLPECREIYCPAPPQIDNGIIQGERDHYGYRQSVTYACNKGFTMIGEHSIYCTVNNDEGEWSGPPPECRGKSLTSKVPPTVQKPTTVNVPTTEVSPTSQKTTTKTTTPNAQATRSTPVSRTTKHFHETTPNKGSGTTSGTTRLLSESYSVTQAGVWWCDLRSLQPLPPEFKQFSCLSLRSSWDYRIITGHLLPGDFSVPSTIVDGIYFPTPLSPFFVG

SEQ ID NO: 47261 - protein, 52 aa, Homo sapiens
  MOD_RES (1)..(1): Any amino acid
XEQRRVREAKTEEDGPANTEQGISFPSLTLPPGWTLRNSGWWKEIHKEAASQ

SEQ ID NO: 47262 - protein, 139 aa, Homo sapiens
MLIKLSSPAVINARVSTISLPTTPPAAGTECLISGWGNTLSFGADYPDELKCLDAPVLTQAECKASYPGKITNSMFCVGFLEGGKDSCQRDSGGPVVCNGQLQGVVSWGHGCAWKNRPGVYTKVYNYVDWIKDTIAANS

SEQ ID NO: 47263 - protein, 237 aa, Homo sapiens
MLVPCFLYSLQNRKPSLYGSLTCQGIGLDGIPEVTASEGFTVNEINKKSIHISCPKENASSKFLAPYTTFSRIHTKSITCLDISSRGGLGVSSSTDGTMKIWQASNGELRRVLEGHVFDVNCCRFFPSGLVVLSGGMDAQLKIWSAEDASCVVTFKGHKGGILDTAIVDRGRNVVSASRDGTARLWDCGRSACLGVLADCGSSINGVAVGAADNSINLGSPEQMPSEREVGTEAKML

SEQ ID NO: 47264 - protein, 92 aa, Homo sapiens
MKLMVLVFTIGLTLLLGVQAMPANRLSCYRKILKDHNCHNLPEGVADLTQIDVNVQDHFWDGKGCEMICYCNFSELLCCPKCHHIFILLRNL

SEQ ID NO: 47265 - protein, 630 aa, Homo sapiens
MYDNMSTMVYIKEDKLEKLTQDEIISKTKQVIQGLEALKNEHNSILQSLLETLKCLKKDDESNLVEEKSNMIRKSLEMLELGLSEAQVMMALSNHLNAVESEKQKLRAQVRRLCQENQWLRDELANTQQKLQKSEQSVAQLEEEKKHLEFMNQLKKYDDDISPSEDKDTDSTKEPLDDLFPNDEDDPGQGIQQQHSSAAAAAQQGGYEIPARLRTLHNLVIQYASQGRYEVAVPLCKQALEDLEKTSGHDHPDVATMLNILALVYRDQNKYKDAANLLNDALAIREKTLGKDHPAVAATLNNLAVLYGKRGKYKEAEPLCKRALEIREKVLGKDHPDVAKQLNNLALLCQNQGKYEEVEYYYQRALEIYQTKLGPDDPNVAKTKNNLASCYLKQGKFKQAETLYKEILTRAHEREFGSVDDENKPIWMHAEEREECKGKQKDGTSFGEYGGWYKACKVDSPTVTTTLKNLGALYRRQGKFEAAETLEEAAMRSRKQGLDNVHKQRVAEVLNDPENMEKRRSRESLNVDVVKYESGPDGGEEDGTGSLKRSGSFSKLRASIRRSSEKLVRKLKGGSSRESEPKNPGMKRASSLNVLNVGGKAAEDRFQGVSGRASFCGKRQQQQWPGRRHR

SEQ ID NO: 47266 - protein, 210 aa, Homo sapiens
MVSDEDELNLLVIVVDANPIWWGKQALKESQHHHLMPQPPEYLGLQFTLSKCIDAVMVLGNSHLFMNRSNKLAVIASHIQESRFLYPGKNGRLGDFFGDPGNPPEFNPSGSKDGKYELLTSANEVIVEEIKDLMTKSDIKGQHTETLLAGSLAKALCYIHRMNKEVKDNQEMKSRILVIKAAEDSALQYMNFMNVIFAAQKQNILIDACV

SEQ ID NO: 47267 - protein, 127 aa, Homo sapiens
MDTQNLEKTAIKIQSWWRGNMVRRTLLQAALRAWVIQCWWRSMQAKMLEQRRRLALRLYTCQEWAVVKVQAQVRMWQARRRFLQARQAACIIQSHWRWHASQTRGLIRGHYEVRASRLELDIEILMT

SEQ ID NO: 47268 - protein, 587 aa, Homo sapiens
MENLPAVTTEEPTPMGRGPVGPSGGGSTRDQVRTVVMRPSVSWEKAGPEEAKAPVRGDEAPPARVAGPAAGTPPCQMGVYPTDLTLQLLAVRRKSRLRDPGLQQTLRGQLRLLENDSREMARVLGELSARLLSIHSDQDRIVVTFKTFEEIWKFSTYHALGFTHHCLANLLMDQAFWLLLPSEEEETAIQVHVDENALRLTHESLLIQEGPFFVLCPDHHVRVMTGPRDAGNGPQALRQASGAPQGEAAPETDSSPPSPSVSSEEVAVAAAPEPLIPFHQWALRIPQDPIDDAMGGPVMPGNPLMAVGLASALADFQGSGPEEMTFRGGDLIEILGAQVPSLPWCVGRHAASGRVGFVRSSLISMQGPVSELESAIFLNEEEKSFFSEGCFSEEDARQLLRRMSGTDVCSVYSLVEEAETEQPQEKGVFVTCRNTSTLPEPGATGDLAEGEECSGTMQDLPRLPPGASVLGSLCGIQRRELAGPRGALLLLGSRGRLGGPRGPELTAAVPERPWVQGQLPWPVRCGAAVAEQRVPQLQRRGGADWAPGTGPGGGQESWPPHGPGQALLPPGAAVQQEAQAVPGPGVL

SEQ ID NO: 47269 - protein, 87 aa, Homo sapiens
MTLDVGPEDELPDWAAAKEFYQKYDPKDVIGRGVSSVVRRCVHRATGHEFAVKIMEVTAERLSPEQLEESPSSIPTSLLASCSWCLT

SEQ ID NO: 47270 - protein, 451 aa, Homo sapiens
MSVTYDDSVGVEVSSDSFWEVGNYKRTVKRIDDGHRLCSDLMNCLHERARIEKAYAQQLTEWARRWRQLVEKGPQYGTVEKAWMAFMSEAERVSELHLEVKASLMNDDFEKIKNWQKEAFHKQMMGGFKETKEAEDGFRKAQKPWAKKLKEVEAAKKAHHAACKEEKLAISREANSKADPSLNPEQLKKLQDKIEKCKQDVLKTKEKYEKSLKELDQGTPQYMENMEQVFEQCQQFEEKRLRFFREVLLEVQKHLDLSNVAGYKAIYHDLEQSIRAADAVEDLRWFRANHGPGMAMNWPQFEDEEWSADLNRTLSRREKKKATDGVTLTGINQTGDQSLPSKPSSTLNVPSNPAQSAQSQSSYNPFEDEDDTGSTVSEKDDTKAKNVSSYEKTQSYPTDWSDDESNNPFSSTDANGDSNPFDDDATSGTEVRVRALYDYEGQEHDELSFKA

SEQ ID NO: 47271 - protein, 243 aa, Homo sapiens
MVTDYGAFIKIPGCRKQGLVHRTHMSSCRVDKPSEIVDVGDKVWVKLIGREMKNDRIKVSLSMKVVNQGTGKDLDPNNVIIEQEERRRRSFQDYTGQKITLEAVLNTTCKKCGCKGRVKPLPFPRFSPCGWTLFWKKEAAQCHFAKDCFMQPGGTKYSLIPDEEEEKEEAKSAEFEKPDPTRNPSRKRKKEKKKKKHRDRKSSDSDSSDSESDTGKRARHTSKDSKAAKKKKKKKKHKKKHKE

SEQ ID NO: 47272 - protein, 69 aa, Homo sapiens
MKTMRVREVEVVPSNMWGGQGLLGASVRFCSFRRASEQVWHVLDVEPSSPAALAGLRPYTDYVVGSDQI

SEQ ID NO: 47273 - protein, 600 aa, Homo sapiens
MYYDDDEPSEVGSADSYTSRPSDSDVSLEEDREAVRREAERQAQAQLEKAKTKPVAFAVRTNVSYSAAHEDDVPVPGMAISFEAKDFLHVKEKFNNDWWIGRLVKEGCEIGFIPSPVKLENMRLQHEQRAKQGKFYSSKSGGNSSSSLGDIVPSSRKSTPPSSAIDIDATGLDAEENDIPANHRSPKPSANSVTSPHSKEKRMPFFKKTEHTPPYDVVPSMRPVVLVGPSLKGYEVTDMMQKALFDFLKHRFEGRISITRVTADISLAKRSVLNNPSKHAIIERSNTRSSLAEVQSEIERIFELARTLQLVVLDADTINHPAQLSKTSLAPIIVYVKISSPKVLQRLIKSRGKSQAKHLNVQMVAADKLAQCPPELFDVILDENQLEDACEHLADYLEAYWKATHPPSSSLPNPLLSRTLATSSLPLSPTLASNSQGSQGDQRTDRSAPIRSASQAEEEPSVEPVKKSQHRSSSSAPHHNHRSGTSRGLSRQETFDSETQESRDSAYVEPKEDYSHDHVDHYASHRDHNHRDETHGSSDHRHRESRHRSRDVDREQDHNECNKQRSRHKSKDRYCEKDGEVISKKRNEAGEWNRDVYIRQ

SEQ ID NO: 47274 - protein, 158 aa, Homo sapiens
KDYITFIEGRSYHITQSGENGKEETQYERTEPSPNTAVVQKLLVCGLSLLFHLTICTTLPVEYNIDEHFQATASWPTKIIYLYISLLAARPKYYFAWTLADAINNAAGFGFRGYDENGAARWDLISNLRIQQIEMSTSFKMFLDNWNIQTALWLKRIF

SEQ ID NO: 47275 - protein, 172 aa, Homo sapiens
MEQLSDEEIDHGAEEDSDKEDQDLDKMFGAWLGELDKLTQSLDSDKPMEPVKRSPLRQETNMANFSYRFSIYNLNEALNQGETVDLDALMADLCSIEQELSSIGSGNSKRQITETKATQKLPVSRHTLKHGTLKGLSSSSNRIAKPSHASYSLDDVTAQLEQASLSMDEAAQ

SEQ ID NO: 47276 - protein, 187 aa, Homo sapiens
MRVIRVGTRKSQLARIQTDSVVATLKASYPGLQFEIIAMSTTGDKILDTALSKIGEKSLFTKELEHALEKNEVDLVVHSLKDLPTVLPPGFTIGAICKRENPHDAVVFHPKFVGKTLETLPEKSVVGTSSLRRAAQLQRKFPHLEFRSIRGNLNTRLRKLDEQQEFSAIILATAGLQRMGWHNRVGQ

SEQ ID NO: 47277 - protein, 57 aa, Homo sapiens
MAEMDPTQGRVVFEDVAIYFSQEEWGHLDEAQRLLYRDVMLENLALLSSLGSWHGAE

SEQ ID NO: 47278 - protein, 62 aa, Homo sapiens
MGPLTFMDVAIEFSLEEWQCLDTAQRNVYRHVMLENYRNLVFLARPDYLSGTRKRALEYEET

SEQ ID NO: 47279 - protein, 234 aa, Homo sapiens
  MOD_RES (1)..(1): Any amino acid
XMFDVLQRFGSQRNEVRFFLRHERPPGRDIVSGPRSQDPSLKRNGVKVPGEYRRKENGVNSPRMDLTLAELQEMASRQQQQIEAQQQLLATKEQRLKFLKQQDQRQQQQVAEQEKLKRLKEIAENQEAKLKKVRALKGHVVSLVPESLSPEDVGNASTENSDMPAPSPGLDYEPEGVPDNSPNLQNNPEEPNPEAPHVLDVYLEEYPPYPPPPYPSGEPEGPGEDSVSMRPPEI

SEQ ID NO: 47280 - protein, 237 aa, Homo sapiens
MAGLRNESEQEPLLGDTPGSREWDILETEEHYKSRWRSIRILYLTMFLSSVGFSVVMMSIWPYLQKIDPTADTSFLGWVIASYSLGQMVASPIFGLWSNYRPRKEPLIVSILISVAANCLYAYLHIPASHNKYYMLVARGLLGIGAGNVAVVRSYTAGATSLQERTSSMANISMCQALGFILGPVFQTCFTFLGEKGVTWDVIKLQINMYTTPVLLSAFLGILNIILILAILRTSCG

SEQ ID NO: 47281 - protein, 194 aa, Homo sapiens
MASPDWGYDDKNVLKGGPFSDSYRLFQFHFHWGSTNEHGSEHTVDGVKYSAELHVAHWNSAKYSSLAEAASKADGLAVIGVLMKVGEANPKLQKVLDALQAIKTKGKRAPFTNFDPSTLLPSSLDFWTYPGSLTHPPLYESVTWIICKESISVSSEQLAQFRSLLSNVEGDNAVPMQHNNRPTQPLKGRTVRAS

SEQ ID NO: 47282 - protein, 77 aa, Homo sapiens
METEQPEETFPNTETNGEFGKRPAEDMEEEQAFKRSRNTDEMVELRILLQSKNAGAVIGKGGKNIKALRTDHIEYQC

SEQ ID NO: 47283 - protein, 86 aa, Homo sapiens
MPLFFSALLVLLLVALSALFLGRWLVVRLATKWCQRKLQAELKIGSFRFFWIQNVSLKFQQHQQTVTLCGIVLWRSAYQNGPTESF

SEQ ID NO: 47284 - protein, 45 aa, Homo sapiens
MKMASGCSCRMRKTTACVASAWMPSSTVSYWSVGTWLPAPSAASA

SEQ ID NO: 47285 - protein, 146 aa, Homo sapiens
MVGELIAFCTSTHKVGLTSEILNSFEHEFLSKRLSKARHSTCKDSGHAGARDIVSIQELIEVEEEEEILLNSYTTPSKGSQKRAISTPETPLTKRSVSTRSPHQLLSPSSFSPSATPSQKYNSRSNRGEVVTSFGLAQGVSWSGRG

SEQ ID NO: 47286 - protein, 71 aa, Homo sapiens
MRRRVHQINGHKFMATYLRQPTYCSHCREFIWGVFGKQGYQCQVCTCVVHKRCHHLIVTACTCQNNINKVD

SEQ ID NO: 47287 - protein, 349 aa, Homo sapiens
MHQDGISSMNQLGGLFVNGRPLPLDTRQQIVRLAVSGMRPCDISRILKVSNGCVSKILGRYYRTGVLEPKGIGGSKPRLATPPVVARIAQLKGECPALFAWEIQRQLCAEGLCTQDKTPSVSSINRVLRALQEDQGLPCTRLRSPAVLAPAVLTPHSGSETPRGTHPGTGHRNRTIFSPSQAEALEKEFQRGQYPDSVARGKLATATSLPEDTVRVWFSNRRAKWRRQEKLKWEMQLPGASQGLTVPRVAPGIISAQQSPGSVPTAALPALEPLGPSCYQLCWATAPERCLSDTPPKACLKPCWDCGSFLLPVIAPSCVDVAWPCLDASLAHHLIGGAGKATPTHFSHP

SEQ ID NO: 47288 - protein, 32 aa, Homo sapiens
MFPALETHLKQTIPDPYEDFMYRHLQYYGYFK

SEQ ID NO: 47289 - protein, 392 aa, Homo sapiens
MGSLSTANVEFCLDVFKELNSNNIGDNIFFSSLSLLYALSMVLLGARGETEEQLEKVLHFSHTVDSLKPGFKDSPKCSQAGRIHSEFGVEFSQINQPDSNCTLSIANRLYGTKTMAFHQQYLSCSEKWYQARLQTVDFEQSTEETRKTINAWVENKTNGKVANLFGKSTIDPSSVMVLVNAIYFKGQWQNKFQVRETVKSPFQLSEGKNVTVEMMYQIGTFKLAFVKEPQMQVLELPYVNNKLSMIILLPVGIANLKQIEKQLNSGTFHEWTSSSNMMEREVEVHLPRFKLETKYELNSLLKSLGVTDLFNQVKADLSGMSPTKGLYLSKAIHKSYLDVSEEGTEAAAATGDSIAVKSLPMRAQFKANHPFLFFIRHTHTNTILFCGKLASP

SEQ ID NO: 47290 - protein, 217 aa, Homo sapiens
MAEKILEKLDVLDKQAEIILARRTKINRLQSEGRKTTMAIPLTFDFQLEFEEALATSASKAISKIKEDKSCSITKSKMHVSFKCEPEPRKSNFEKSNLRPFFIQTNVKNKESESTEPVEEHLKSRSIRPYLYLKDTTEMENAGPLNVLYSQHRQACRRSLGSTDFSPMFNIQSNAHKKEKDSTLFTAQIEKKPRKPLDSVGLLEGDRNKRNKRTQIP

SEQ ID NO: 47291 - protein, 442 aa, Homo sapiens
MPRARKGNTLRKGGQRRGGGARSSAQADSGSSDDEAASEARSTASECPSLLSTTAEDSLGGDVVDEQGQQEDLEEKLKEYVDCLTDKSAKTRQGALESLRLALASRLLPDFLLERRLTLADALEKCLKKGKGEEQALAAAVLGLLCVQLGPGPKGEELFHSLQPLLVSVLSDSTASPAARLHCASALGLGCYVAAADIQDLVSCLACLESVFSRFYGLGGSSTSPVVPASLHGLLSAALQAWALLLTICPSTQISHILDRQLPRLPQLLSSESVNLRIAAGETIALLFELARDLEEEFVYEDMEALCSVLRTLATDSNKYRAKADRRRQRSTFRAVLHSVEGGECEEEIVRFGFEVLYMDSWARHRIYAAFKEVLGSGMHHHLQNNELLRDIFGLGPVLLLDATALKACKVPRFEKHLYNAAAFKARTKARSRVRDKRADIL

SEQ ID NO: 47292 - protein, 35 aa, Homo sapiens
MASKQTKKKEVHRINSAHGSDKSKESKAEDALQNQ

SEQ ID NO: 47293 - protein, 97 aa, Homo sapiens
  MOD_RES (1)..(1): Any amino acid
XDRLSFLHRLLLAPSPAPTPLSCPPAAPSRGLPSRAFQAGPAERKGDGHSQTLGERTGLGQHSVASDGREGAADPVDVEPLCPCCWRPGGLAARRPP

SEQ ID NO: 47294 - protein, 175 aa, Homo sapiens
MAVVKTPSRGLKNAKEPFNNASPHLLKNLVEEPKKRKEVPNHLLESKVYAKLVNNKVIQARPGIIHFGGYQVEKQHQQILHLVNVSNEDTRVHILPPQTKYFEINYVRKEHHLVPGLSLTVTVTFSPDEWRYYYDCIRVHCKGDDTLLVPIHAYPVMNSLDFPSFINLSNVLLGE

SEQ ID NO: 47295 - protein, 130 aa, Homo sapiens
MYLQVETRTSSRLHLKRAPGIRSWSLLVGILSIGLAAAYYSGDSLGWKLFYVTGCLFVAVQNLEDWEEAIFDKSTGKVVLKTFSLYKKLLTLFRAGHDQVVVLLHDVRDVSVEEEKVRYFGKGYMVVLRL

SEQ ID NO: 47296 - protein, 155 aa, Homo sapiens
MGEPSREEYKIQSFDAETQQLLKTALKAPSLECTVACFETEDGEYSVCQRSYSNCSRLMPSRCNTQYRDPGAVDLEKVANVIVDHSLQDCVFSKEAGRMCYAIIQAESKQAGQSVFRRGLLNRLQQEYQAREQLRARSLQGWVCYVTFICNIFDY

SEQ ID NO: 47297 - protein, 46 aa, Homo sapiens
KLTKFSPEEKGETLDIQSLETAIKRTEVGLRPLSLYLGNHLHLQQK

SEQ ID NO: 47298 - protein, 693 aa, Homo sapiens
MIPPQEASARRREIEDKLKQEEETLSFIRDSLEKSDQLTKNMVSILSSFESRLMKLENSIIPVHKQTENLQRLQENVEKTLSCLDHVISYYHVASDTEKIIREGPTGRLEEYLGSMAKIQKAVEYFQDNSPDSPELNKVKLLFERGKEALESEFRSLMTRHSKVVSPVLILDLISGDDDLEAQEDVTLEHLPESVLQDVIRISRWLVEYGRNQDFMNVYYQIRSSQLDRSIKGLKEHFHKSSSSSGVPYSPAIPNKRKDTPTKKPVKRPGTIRKAQNLLKQYSQHGLDGKKGGSNLIPLEGHEHDFRVKHLSEALNDKHGPLAGRDDMLDVETDAYIHCVSAFVKLAQSEYQLLADIIPEHHQKKTFDSLIQDALDGLMLEGENIVSAARKAIVRHDFSTVLTVFPILRHLKQTKPEFDQVLQGTAASTKNKLPGLITSMETIGAKALEDFADNIKNDPDKEYNMPKDGTVHELTSNAILFLQQLLDFQETAGAMLASQETSSSATSYSSEFSKRLLSTYICKVLGNLQLNLLSKSKVYEDPALSAIFLHNNYNYILKSLEKSELIQLVAVTQKTAERSYREHIEQQIQTYQRSWLKVTDYIAEKNLPVFQPGVKGFNDGLEELCKIQKAWAIPDTEQRDRIRQAQKTIVKETYGAFLQKFGSVPFTKNPEKYIKYGVEQVGDMIDRLFDTSA

SEQ ID NO: 47299 - protein, 389 aa, Homo sapiens
MEPSATPGAQMGVPPGSREPSPVPPDYEDEFLRYLWRDYLYPKQYEWVLIAAYVAVFVVALVGNTLVCLAVWRNHHMRTVTNYFIVNLSLADVLVTAICLPASLLVDITESWLFGHALCKVIPYLQAVSVSVAVLTLSFIALDRWYAICHPLLFKSTARRARGSILGIWAVSLAIMVPQAAVMECSSVLPELANRTRLFSVCDERWADDLYPKIYHSCFFIVTYLAPLGLMAMAYFQIFRKLWGRQIPGTTSALVRNWKRPSDQLGDLEQGLSGEPQPRARAFLAEVKQMRARRKTAKMLMVVLLVFALCYLPISVLNVLKRVFGMFRQASDREAVYACFTFSHWLVYANSAANPIIYNFLSGCKEKSLALSCPSCPGHDPHLAAALCS

SEQ ID NO: 47300 - protein, 288 aa, Homo sapiens
MATPNNLTPTNCSWWPISALESDAAKPAEAPDAPEAASPAHWPRESLVLYHWTQSFSSQKVRLVIAEKGLVCEERDVSLPQSEHKEPWFMRLNLGEEVPVIIHRDNIISDYDQIIDYVERTFTGGHLANATTDLMKLDHEEEPQLSEPYLSKQKKLMAKILEHDDVSYLKKILGELAMVLDQIEAELEKRKLENEGQKCELWLCGCAFTLADVLLGATLHRLKFLGLSKKYWEDGSRPNLQSFFERVQRRFAFRKVLGDIHTTLLSAVIPNAFRLVKRKPPSFFGASF

SEQ ID NO: 47301 - protein, 178 aa, Homo sapiens
MAMIELGFGRQNFHPLKRKSSLLLKLIAVVFAVLLFCEFLIYYLAIFQCNWPEVKTTASDGEQTTREPVLKAMFLADTHLLGEFLGHWLDKLRREWQMERAFQTALWLLQPEVVFILGDIFDEGKWSTPEAWADDVERFQKMFRHPSHVQLKVVAGNHDIGFHYEMNTYKVERFEKVF

SEQ ID NO: 47302 - protein, 99 aa, Homo sapiens
  MOD_RES (1)..(1): Any amino acid
XNLMAIVSDRKMIYEQKIAELQRQLAEEPMDTDQGNSMLSAIQSEVAKNQMLIEEEVQKLKRYKIENIRRKHNYLPFIMELLKTLAEHQQLIPLVEKIF

SEQ ID NO: 47303 - protein, 183 aa, Homo sapiens
MDLEAAKNGTAWRPTSAEGDFELGISSKQKRKKTKTVKMIGVLTLFRYSDWQDKLFMSLGTIMAIAHGSGLPLMMIVFGEMTDKFVDTAGNFSFPVNFSLSLLNPGKILEEEMTRYAYYYSGLGAGVLVAAYIQVSFWTLAAGRQIRKIRQKFFHAILRQEIGWFDINDTTELNTRLTECDLF

SEQ ID NO: 47304 - protein, 356 aa, Homo sapiens
MWQLWASLCCLLVLANARSRPSFHPLSDELVNYVNKRNTTWQAGHNFYNVDMSYLKRLCGTFLGGPKPPQRVMFTEDLKLPASFDAREQWPQCPTIKEIRDQGSCGSCWRAQPGHGSLTRWGSFLQAFGAVEAISDRICIHTNAHVSVEVSAEDLLTCCGSMCGDGCNGGYPAEAWNFWTRKGLVSGGLYESHVGCRPYSIPPCEHHVNGSRPPCTGEGDTPKCSKICEPGYSPTYKQDKHYGYNSYSVSNSEKDIMAEIYKNGPVEGAFSVYSDFLLYKSGVYQHVTGEMMGGHAIRILGWGVENGTPYWLVANSWNTDWGDNGFFKILRGQDHCGIESEVVAGIPRTDQYWEKI

SEQ ID NO: 47305 - protein, 164 aa, Homo sapiens
MTPQSLLQTTLFLLSLLFLVQASASSGAHGRGHREDFRFCSQRNQTHRSSLHYKPTPDLRISIENSEEALTVHAPFPAAHPASRSFPDPRGLYHFCLYWNRHAGRLHLLYGKRDFLLSDKASSLLCFQHQEESLAQGPPLLATSVTSWWSPQNISLPSAASFTF

SEQ ID NO: 47306 - protein, 59 aa, Homo sapiens
MGATEPGGDTSSVMSSTRSSRHCCLTSALSPTPGSTCRRGSASTSRSMKSGCRRTRSGR

SEQ ID NO: 47307 - protein, 165 aa, Homo sapiens
MSEEEQGSGTTTGCGLPSSFSPLDSSLPEDIPVFTAAAAATPVPSVVLTRSPPMELQPPVSPQQSECNPVGALQELVVQKGWRLPEYTVTQESGPAHRKEFTMTCRVERFIEIGCGLPPGWSSKPGPRLHLGFSTKFSRREDPVPPQLLPGLPGCPGPCLLPCPQ

SEQ ID NO: 47308 - protein, 455 aa, Homo sapiens
MKKRKELNALIGLAGDSRRKKPKKGPSSHRLLRTEPPDSDSESSSEEEEEFGVVGNRSRFAKGDYLRCCKICYPLCGFVILAACVVACVGLVWMQVALKEDLDALKEKFRTMESNQKSSFQEIPKLNEELLSKQKQLEKIESGEMGLNKVWINITEMNKQISLLTSAVNHLKANVKSAADLISLPTTVEGLQKSVASIGNTLNSVHLAVEALQKTVDEHKKTMELLQSDMNQHFLKETPGSNQIIPSPSATSELDNKTHSENLKQDILYLHNSLEEVNSALVGYQRQNDLKLEGMNETVSNLTQRVNLIESDVVAMSKVEKKANLSFSMMGDRSATLKRQSLDQVTNRTDTVKIQSIKKEDSSNSQVSKLREKLQLISALTNKPESNRPPETADEEQVESFTSKPSALPKFSQFLGDPVEKAAQLRPISLPGVSSTEGKFLYHGVVMGMFKVITF

SEQ ID NO: 47309 - protein, 129 aa, Homo sapiens
MFYVIGGITVSVVAFFFTIKFLFELAARVVSFLQNEDRERRGDRTIYDYVRGNYLDPRSCKVSWDWKDPYEVGHSMAFRVHLFYKNGQPFPAHRPVGLRVHISHVELAVEIPVTQEVLQEPNSNVVKVA

SEQ ID NO: 47310 - protein, 64 aa, Homo sapiens
MQEITKHFVVCHVDAPGQQVGASQFPQGYQFPSMEQLAAMLPSVVQHFGFKYVIGIGVGAGAYV

SEQ ID NO: 47311 - protein, 336 aa, Homo sapiens
MRILHVNGFNGEGGEEDPQAARSNSDGSEKATKVQDIKNNLKEAIETIVAAMSNLVPPVELANPENQFRVDYILSVMNVPDFDFPPEFYEHAKALWEDEGVRACYERSNEYQLIDCAQYFLDKIDVIKQADYVPSDQDLLRCRVLTSGIFETKFQVDKVNFHMFDVGGQRDERRKWIQCFNDVTAIIFVVASSSYNMVIREDNQTNRLQEALNLFKSIWNNRWLRTISVILFLNKQDLLAEKVLAGKSKIEDYFPEFARYTTPEDATPEPGEDPRVTRAKYFIRDEFLRISTASGDGRHYCYPHFTCAVDTENIRRVFNDCRDIIQRMHLRQYELL

SEQ ID NO: 47312 - protein, 105 aa, Homo sapiens
MGSDKRVSRTERSGRYGSIIDRDDRDERESRSRRRDSDYKRSSDDRRGDRYDDYRDYDSPERERERRNSDRSEDGYHSDGDYGEHDYRHDISDERESKTIMLRGL

SEQ ID NO: 47313 - protein, 73 aa, Homo sapiens
MSWIKEGELSLWERFCANIIKAGPMPKHIAFIMDGNRRYAKKCQVERQEGHSQGFNKLAELLAFSPLRLCGGV

SEQ ID NO: 47314 - protein, 51 aa, Homo sapiens
  MOD_RES (1)..(1): Any amino acid
XLGRRDLSSADPAVLGATMESRCYGCAVKFTLFKKERVFCQCLQVVTTSEL

SEQ ID NO: 47315 - protein, 280 aa, Homo sapiens
MKTLFEEIKASIKNNYNQDRSFCRPVLPWGGVFTIKAGRKAVSCTPLYVEIRLKNTCTIDGFLMLLYVILNENENFPRELSLHFGREFVDCFLYLMDTYSFTTVKLLWIWDKMEKQQYKSEVHKASLIIDLFGNEHDNFTKNLENLMSTIQESYCSNWRCPTRVQEDQQRTINIKCGGLREFSQRIFCHGAPPFVVLNMQHWKSEDLAYVPYYLDLSDHKYLLEGATLFNKEEHHYSAAFQIGGHWMHYDGLRNVNLILLNKPPEFLLLSSLVYIRATEK

SEQ ID NO: 47316 - protein, 55 aa, Homo sapiens
  MOD_RES (1)..(1): Any amino acid
XVIHIRSETSVPDHVVWSLFNTLFMNTCCLGFIAFAYSVKTGTQALPESEKGTHR

SEQ ID NO: 47317 - protein, 94 aa, Homo sapiens
  MOD_RES (1)..(1): Any amino acid
XSETERKQMAVGSGLRFCYYASRGVCFRGESCMYLHGDICDMCGLQTLHPMDAAQREEHMRACIEAHEKDMELSFAVQRGMDKVYPQVEKCQTV

SEQ ID NO: 47318 - protein, 132 aa, Homo sapiens
  MOD_RES (1)..(1): Any amino acid
XHCHYVVVKLFSEKLLKIQDKAIQAVLRSLCLLYSLYGISQNAGDFLQGSIMTEPQITQVNQRVKELLTLIRSDAVALVDAFDFQDVTLGSVLGRYDGNVYENLFEWAKNSPLNKAEVHESYKHLKSLQSKL

SEQ ID NO: 47319 - protein, 278 aa, Homo sapiens
MAWIRSTCILFFTLLFAHIAAVPIKYLPEENVHDADFGEQKDISEINLAAGLDLFQGDILLQKSRNGLRDPNTRWTFPIPYILADNLGLNAKGAILYAFEMFRLKSCVDFKPYEGESSYIIFQQFDGCWSEVGDQHVGQNISIGQGCAYKAIIEHEILHALGFYHEQSRTDRDDYVNIWWDQILSGYQHNFDTYDDSLITDLNTPYDYESLMHYQPFSFNKNASVPTITAKIPEFNSIIGQRLDFSAIDLERLNRMYNCNDKNIICSHNSHSFGPLYF

SEQ ID NO: 47320 - protein, 263 aa, Homo sapiens
MDDGGYSMNFNMSSSRGPLPVKRGPPPRSGGPPPKRSAPSGPVRSSSGMGGRAPVSRGRDSYGGPPRREPLPSRRDVYLSPRDDGYSTKDSYSSRDYPSSRDTRDYAPPPRDYTYRDYGHSSSRDDYPSRGYSDRDGYGRDRDYSDHPSGGSYRDSYESYGNSRSAPPTRGPPPSYGGSSRYDDYSSSRDGYGGSRDSYSSSRSDLYSSGRDRVGRQERGLPPSMERGYPPPRDSYSSSSRGAPRGGGRGGSRSDRGGGRSRY

SEQ ID NO: 47321 - protein, 101 aa, Homo sapiens
  MOD_RES (1)..(1): Any amino acid
XIATVSENTKQEAIDEVKRQWREEVASLQAVMKETVRDYEHQFHLRLEQERTQWAQYRESAEREIADLRRRLSEGQEEENLENEMKKDPIQDTILHLVVSP

SEQ ID NO: 47322 - protein, 217 aa, Homo sapiens
MAEGTAEAPLENGGGGDSGAGALERGVAPIKRQYLTTKEQFHQFLEAKGQEKTCRETEVGDPAGNELAEPEAKRIRLEDGQTADGQTEEAAEPGEQLQTQKRARGQNKGRPHVKPTNYDKNRTWCRRSWRPAGPSPRPSATAWTKPCSSSCGSARSASSELSRPCAGSARAPHPLPLSPRARQPRALPGRKTVVPSRSPQGRALAPLPAAPCGPAGP

SEQ ID NO: 47323 - protein, 73 aa, Homo sapiens
  MOD_RES (1)..(1): Any amino acid
XKNGKAAQGEAECPGGEAEQGGTAAIQAHYKSAHLDHRHPGEGSPMSDGNPEHPSGPASWKLFKQPPQNCWFP

SEQ ID NO: 47324 - protein, 48 aa, Homo sapiens
MEEFDLVKTLHKTSSSVGSDENSLHSLGLNLNTDSNAITSWAQKLKQN

SEQ ID NO: 47325 - protein, 630 aa, Homo sapiens
MARQPPPPWVHAAFLLCLLSLGGAIEIPMDLTQPPTITKQSAKDHIVDPRDNILIECEAKGNPAPSFHWTRNSRFFNIAKDPRVSMRRRSGTLVIDFRSGGRPEEYEGEYQCFARNKFGTALSNRIRLQVSKSPLWPKENLDPVVVQEGAPLTLQCNPPPGLPSPVIFWMSSSMEPITQDKRVSQGHNGDLYFSNVMLQDMQTDYSCNARFHFTHTIQQKNPFTLKVLTNHPYNDSSLRNHPDMYSARGVAERTPSFMYPQGTASSQMVLRGMDLLLECIASGVPTPDIAWYKKGGDLPSDKAKFENFNKALRITNVSEEDSGEYFCLASNKMGSIRHTISVRVKAAPYWLDEPKNLILAPGEDGRLVCRANGNPKPTVQWMVNGEPLQSAPPNPNREVAGDTIIFRDTQISSRAVYQCNTSNEHGYLLANAFVSVLDVPPRMLSPRNQLIRVILYNRTRLDCPFFGSPIPTLRWFKNGQGSNLDGGNYHVYENGSLEIKMIRKEDQGIYTCVATNILGKAENQVRLEVKDPTRIYRMPEDQVARRGTTVQLECRVKHDPSLKLTVSWLKDDEPLYIGNRMKKEDDSLTIFGVAERDQGSYTCVASTELDQDLAKAYLTVLGNCPCSPWH

SEQ ID NO: 47326 - protein, 44 aa, Homo sapiens
MAHQTGIHATEELKEFFAKARAGSVRLIKVVIEDGASRPLGSGL

SEQ ID NO: 47327 - protein, 438 aa, Homo sapiens
MAALRALCGFRGVAAQVLRPGAGVRLPIQPSRGVRQWQPDVEWAQQFGGAVMYPSKETAHWKPPPWNDVDPPKDTIVKNITLNFGPQHPAAHGVLRLVMELSGEMVRKCDPHIGLLHRGTEKLIEYKTYLQALPYFDRLDYVSMMCNEQAYSLAVEKLLNIRPPPRAQWIRVLFGEITRLLNHIMAVTTHALDLGAMTPFFWLFEEREKDLPLGLMDDIYQFSKNFSLRLDELEELLTNNRIWRNRTIDIGVVTAEEALNYGFSGVMLRGSGIQWDLRKTQPYDVYDQVEFDVPVGSRGDCYDRYLCRVEEMRQSLRIIAQCLNKMPPGEIKVDDAKVSPPKRAEMKTSMESLIHHFKLYTEGYQVPPGATYTAIEAPKGEFGVYLVSDGSSRPYRCKIKAPGFAHLAGLDKMSKGHMLADVVAIIGTQDIVFGEVDR

SEQ ID NO: 47328 - protein, 41 aa, Homo sapiens
MYKENLVRIFRKKKRICHSFSSLFNLSTSKSWLHGSIFGDI

SEQ ID NO: 47329 - protein, 464 aa, Homo sapiens
MQLPRWWELGDPCAWTGQGRGTRRMSPATTGTFLLTVYSIFSKVHSDRNVYPSAGVLFVHVLEREYFKGEFPPYPKPGEISNDPITFNTNLMGYPDRPGWLRYIQRTPYSDGVLYGSPTAENVGKPTIIEITAYNRRTFETARHNLIINIMSAEDGVLLSSPRLECNGTISANCNLRLLGSDFPLPYQAEFFIKNMNVEEMLASEVLGDFLGAVKNVWQPERLNAINITSALDRGGRVPLPINDLKEGVYVMVGADVPFSSCLREVENPQNQLRCSQEMEPVITCDKKFRTQFYIDWCKISLVDKTKQVSTYQEVIRGEGILPDGGEYKPPSDSLKSRDYYTDFLITLAVPSAVALVLFLILAYIMCCRREGVEKRNMQTPDIQLVHHSAIQKSTKELRDMSKNREIAWPLSTLPVFHPVTGEIIPPLHTDNYDSTNMPLMQTQQNLPHQTQIPQQQTTGKWYP

SEQ ID NO: 47330 - protein, 32 aa, Homo sapiens
MVGFKATDVPPTATVKFLGAGTAACIADLITF

SEQ ID NO: 47331 - protein, 50 aa, Homo sapiens
MVTLHGYIESQVQCGQVHCRLPYTAPPVHLKADMDGPLSNRGEKVILFQY

SEQ ID NO: 47332 - protein, 374 aa, Homo sapiens
MEQPGTAASPVSGSMFSWVSKDARRKKEPELFQTVAEGLRQLYAQKLLPLEEHYRFHEFHSPALEDADFDNKPMVLLVGQYSTGKTTFIRHLIEQDFPGMRIGPEPTTDSFIAVMHGPTEGVVPGNALVVDPRRPFRKLNAFGNAFLNRFMCAQLPNPVLDSISIIDTPGILSGEKQRISRGYDFAAVLEWFAERVDRIILLFDAHKLDISDEFSEVIKALKNHEDKIRVVLNKADQIETQQLMRVYGALMWSLGKIINTPEVVRVYIGSFWSHPLLIPDNRKLFEAEEQDLFKDIQSLPRNAALRKLNDLIKRARLAKVHAYIISSLKKEMPNVFGKESKKKELVNNLGEIYQKIEREHQISPGDFPSLRKMQ

SEQ ID NO: 47333 - protein, 75 aa, Homo sapiens
MAVARLAAVAAWVPCRSWGWAAVPFGPHRGLSVLLARIPQRAPRWLPGLITQELEVQMVTQRKAHWGNGEKMFFL

SEQ ID NO: 47334 - protein, 83 aa, Homo sapiens
MLAPEGALNIHEKAWNAYPYCRTVITNEYMKEDFLIKIETWHKPDLGTQENVHKLEPEAWKHVEAVYIDIADRSQVLSKDYKA

SEQ ID NO: 47335 - protein, 295 aa, Homo sapiens
YATSISMAQASDGLSPLQLSGQLNSLPCSLTFRQEETISIIRLIEQFLSCLVQLPPLLSTTDILWLSCFCYPLLSISLLGKPPHSSIMSMATGKNLQSIPKKTQHYFLLCFLLKFSLTISSCLICFGFTLQSFCDSSRDRNLTNCSSVMLPSNDDRAPAWFEDFANGLLSAQKLTAALIVLHTVFISITHVHRTKPLWRKSPLTNLWWAVTVPVVLLGQVVQTAVDLQLWTHRDSHVHFGLEDVPLLTWLLGCLSLVLVVVTNEIVKLHEIRVRVRYQKRQKLQFETKLGMNSPF

SEQ ID NO: 47336 - protein, 83 aa, Homo sapiens [sequence omitted]

SEQ ID NO: 47337 - protein, 355 aa, Homo sapiens
  MOD_RES (1)..(1): Any amino acid
XKKDYNEAYNYYTKAIDMCPKNASYYGNRAATLMMLGRFREALGDAQQSVRLDDSFVRGHLREGKCHLSLGNAMAACRSFQRALELDHKNAQAQQEFKNANAVMEYEKIAETDFEKRDFRKVVFCMDRALEFAPACHRFKILKAECLAMLGRYPEAQSVASDILRMDSTNADALYVRGLCLYYEDCIEKAVQFFVQALRMAPDHEKACIACRNAKALKAKKEDGNKAFKEGNYKLAYELYTEALGIDPNNIKTNAKLYCNRGTVNSKLRKLDDAIEDCTNAVKLDDTYIKAYLRRAQCYMDTEQYEEAVRDYEKVYQTEKTKDFDPNNIFKAFFGGPGGFSFEASGPGNFFFQFG

SEQ ID NO: 47338 - protein, 110 aa, Homo sapiens
MANSSFIGDHVHGAPHAVMPEVEFPDQFFTVLTMDHELVTLRDVVINFSQEEWEYLDSAQRNLYWDVMMENYSNLLSLDLESRNETKHLSVGKDIIQNTGSQWEVMESSK

SEQ ID NO: 47339 - protein, 267 aa, Homo sapiens
MDDDDFGGFEAAETFDGGSGETQTTSPAIPWAAFPAVSGVHLSPSSPEIVLDRDHSSSIGCLSSDAIISSPENTHAANSIVSQTIPKAQIQQSTHTHLDISLFPLGLTDEKSNGTIALVDDSEDPGANVSNIQLQQKISSLEIKLKVSEEEKQRIKQDVESLMEKHNVLEKGFLKEKEQEAISFQDRYKELQEKHKQELEDMRKAGHEALSIIVDEYKALLQSSVKQQVEAIEKQYISAIEKQAHKCEELLNAQSALFSILPAIGCF

SEQ ID NO: 47340 - protein, 1516 aa, Homo sapiens
MEEISAAAVKVVPGPERPSPFSQLVYTSNDSYIVHSGDLRKIHKAASRGQVRKLEKMTKRKKTINLNIQDAQKRTALHWACVNGHEEVVTFLVDRKCQLDVLDGEHRTPLMKALQCHQEACANILIDSGADINLVDVYGNTALHYAVYSEILSVVAKLLSHGAVIEVHNKASLTPLLLSITKRSEQIVEFLLIKNANANAVNKYKCTALMLAVCHGSSEIVGMLLQQNVDVFAADICGVTAEHYAVTCGFHHIHEQIMEYIRKLSKNHQNTNPEGTSAGTPDEAAPLAERTPDTAESLVEKTPDEAAPLVERTPDTAESLVEKTPDEAASLVEGTSDKIQCLEKATSGKFEQSAEETPREITSPAKETSEKFTWPAKGRPRKIAWEKKEDTPREIMSPAKETSEKFTWAAKGRPRKIAWEKKETPVKTGCVARVTSNKTKVLEKGRSKMIACPTKESSTKASANDQRFPSESKQEEDEEYSCDSRSLFESSAKIQVCIPESIYQKVMEINREVEEPPKKPSAFKPAIEMQNSVPNKAFELKNEQTLRADPMFPPESKQKDYEENSWDSESLCETVSQKDVCLPKATHQKEIDKINGKLEESPNKDGLLKATCGMKVSIPTKALELKDMQTFKAEPPGKPSAFEPATEMQKSVPNKALELKNEQTLRADEILPSESKQKDYEENSWDTESLCETVSQKDVCLPKAAHQKEIDKINGKLEGSPVKDGLLKANCGMKVSIPTKALELMDMQTFKAEPPEKPSAFEPAIEMQKSVPNKALELKNEQTLRADEILPSESKQKDYEESSWDSESLCETVSQKDVCLPKAAHQKEIDKINGKLEGSPVKDGLLKANCGMKVSIPTKALELMDMQTFKAEPPEKPSAFEPAIEMQKSVPNKALELKNEQTLRADEILPSESKQKDYEESSWDSESLCETVSQKDVCLPKATHQKEIDKINGKLEESPDNDGFLKAPCRMKVSIPTKALELMDMQTFKAEPPEKPSAFEPAIEMQKSVPNKALELKNEQTLRADQMFPSESKQKKVEENSWDSESLRETVSQKDVCVPKATHQKEMDKISGKLEDSTSLSKILDTVHSCERARELQKDHCEQRTGKMEQMKKKFCVLKKKLSEAKEIKSQLENQKVKWEQELCSVRLTLNQEEEKRRNADILNEKIREELGRIEEQHRKELEVKQQLEQALRIQDIELKSVESNLNQVSHTHENENYLLHENCMLKKEIAMLKLEIATLKHQYQEKENKYFEDIKILKEKNAELQMTLKLKEESLTKRASQYSGQLKVLIAENTMLTSKLKEKQDKEILEAEIESHHPRLASAVQDHDQIVTSRKSQEPAFHIAGDACLQRKMNVDVSSTIYNNEVLHQPLSEAQRKSKSLKINLNYAGDALRENTLVSEHAQRDQRETQCQMKEAEHMYQNEQDNVNKHTEQQESLDQKLFQLQSKNMWLQQQLVHAHKKADNKSKITIDIHFLERKMQHHLLKEKNEEIFNYNNHLKNRIYQYEKEKAETENS

SEQ ID NO: 47341 - protein, 35 aa, Homo sapiens
MRENYETLVSVEPGRAVGGGSHADEGQEPAGCGDP

SEQ ID NO: 47342 - protein, 418 aa, Homo sapiens
PEVLKSEPYGEKADVWAVGCILYQMATLSPPFYSTNMLSLATKIVEAVYEPVPEGIYSEKVTDTISRCLTPDAEARPDIVEVSSMISDVMMKYLDNLSTSQLSLEKKLERERRRTQRYFMEANRNTVTCHHELAVLSHETFEKASLSSSSSGAASLKSELSESADLPPEGFQASYGKDEDRACDEILSDDNFNLENAEKDTYSEVDDELDISDNSSSSSSSPLKESTFNILKRSFSASGGERQSQTRDFTGGTGSRPRPASAGIAVSQRKVRQISDPIQQILIQLHKIIYITQLPPALHHNLKRRVIERFKKSLFSQQSNPCNLKSEIKKLSQGSPEPIEPNFFTADYHLLHRSSGGNSLSPNDPTGLPTSIELEEGITYEQMQTVIEEVLEESGYYNFTSNRYHSYPWGTKNHPTKR

SEQ ID NO: 47343 - protein, 627 aa, Homo sapiens
MLWFSGVGALAERYCRRSPGITCCVLLLLNCSGVPMSLASSFLTGSVAKCENEGEVLQIPFITDNPCIMCVCLNKEVTCKREKCPVLSRDCALAIKQRGACCEQCKGCTYEGNTYNSSFKWQSPAEPCVLRQCQEGVVTESGVRCVVHCKNPLEHLGMCCPTCPGCVFEGVQYQEGEEFQPEGSKCTKCSCTGGRTQCVREVCPILSCPQHLSHIPPGQCCPKCLGQRKVFDLPFGSCLFRSDVYDNGSSFLYDNCTACTCRDSTVVCKRKCSHPGGCDQGQEGCCEECLLRVPPEDIKVCKFGNKIFQDGEMWSSINCTICACVKGRTECRNKQCIPISSCPQVLVKNDARRTRSFSWTKSVELVLGESRVSLQQHLTVRWNGSRIALPCRAPHFHIDLDGYLLKVTTKAGLEISWDGDSFVEVMAAPHLKGKLCGLCGNYNGHKRDDLIGGDGNFKFDVDDFAESWRVESNEFCNRPQRKPVPELCQGTVKVKLRAHRECQKLKSWEFQTCHSTVDYATFYRSCVTDMCECPVHKNCYCESFLAYTRACQREGIKVHWEPQQNCAATQCKHGAVYDTCGPGCIKTCDNWNEIGPCNKPCVAGCHCPANLVLHKGRCIKPVLCPQR

SEQ ID NO: 47344 - protein, 106 aa, Homo sapiens
MPNDDFCPGLTIKAMGAERAPQRQPCTLHLLVLVPILLSLVASQDWKAERSQDPFEKCMQDPDYEQLLKVVTWGLNRTLKPQRVIVVGAGVAGLVAAKVLSDAGHK

SEQ ID NO: 47345 - protein, 2425 aa, Homo sapiens
MSAAKENPCRKFQANIFNKSKCQNCFKPRESHLLNDEDLTQAKPIYGGWLLLAPDGTDFDNPVHRSRKWQRRFFILYEHGLLRYALDEMPTTLPQGTINMNQCTDVVDGEGRTGQKFSLCILTPEKEHFIRAETKEIVSGWLEMLMVYPRTNKQNQKKKRKVEPPTPQEPGPAKVAVTSSSSSSSSSSSIPSAEKVPTTKSTLWQEEMRTKDQPDGSSLSPAQSPSQSQPPAASSLREPGLESKEEESAMSSDRMDCGRKVRVESGYFSLEKTKQDLKAEEQQLPPPLSPPSPSTPNHRYSCPESPSQELGGPLPSPGPRLPHQMVCSISLSSLDVASQPPAYVDSGSTRGRGTERLGSAFAFKASRQYATLADVPKAIRISHREAFQVERRRLERRTRARSPGREEVARLFGNERRRSQVIEKFEALDIEKAEHMETNAVGPSPSSDTRQGRSEKRAFPRKRDFTNEAPPAPLPDASASPLSPHRRAKSLDRRSTEPSVTPDLLNFKKGWLTKQYEDGQWKKHWFVLADQSLRYYRDSVAEEAADLDGEIDLSACYDVTEYPVQRNYGFQIHTKEGEFTLSAMTSGIRRNWIQTIMKHVHPTTAPDVTSSLPEEKNKSSCSFETCPRPTEKQEAELGEPDPEQKRSRARERRREGRSKTFDWAEFRPIQQALAQERVGGVGPADTHEPLRPEAEPGELERERARRREERRKRFGMLDATDGPGTEDAALRMEVDRSPGLPMSDLKTHNVHVEIEQRWHQVETTPLREEKQVPIAPVHLSSEDGGDRLSTHELTSLLEKELEQSQKEASDLLEQNRLLQDQLRVALGREQSAREGYVLQTEVAASPSGAWQRLHRVNQDLQSELEAQCQRQELITHQIQTLKRSYGEAKDTIRHHEAEIRSLQARLSNAAAELAIKEQALAKLKGDLKREQGRVREQLEERQHSEAALSSQLRASEQKLKSAEALLLEKTQELRGLETQQALQRDRQKEVQRLQERIADLSQQLGASEQAQRLMEEKLQRNYELLLESCEKEKQALLQNLKEVEDKASAYEDQLQGQAQQVETLQKEKLSATFEGSEQVHQLEEQLEAREASVRRLAEHVQSLCDERDLLRQRFQELTERVATSDEDVAELREKLRRREADNQSLEHSYQRVSSQLQSMHTLLREKEEELERIKEAHEKVLEKKEQDLNEALVKMVALGSSLEETEIKLQAKEEILRKFASESPKDMEEPRSTPEETERDGTLLPGQPVQATRAPLGLPHTRLEDEDEDLGAPPGEEYGDGSPSREDSMVPPKSVEVLDREGHQQGTAKLDQGAPGVKRQRIRFSTIQCQRYIHPEGSEKTWTSSTSSDTSQDRSPSEESMSSEPAPSVLPATGDSDTYLSIIHSLETKLYVTEEKLKDVTVRLESQQGQSREALLALHHQWAGTEAQLREQLRASLLQVGALASQLEQERQERARRVEGHVGELGDFQVKNSQALMCLENCREQLRSLPRASQEDEQDARAASLASVESALVSAIQALQHWPAPAHGGARAQLETGGTEENGKPASLQQCSQSELTEQEQVRLLSDQIALEASLISQIADSLKNTTSDVSRMLHEISWSGQPPMESAGAPVDTWARKVLVDGEFWSQVESLRKHLGTLGGEAVGASGDGQQSIPQGLAPILANATWVRAELSFATQSVRESFHRRLQSIQETLRGTQTALRQHKCLLREILGAYQTPDFERVMQQVLEALRLPAGHEDGVQLSWDLSPLGEVLGRDSDSSQEPFDVSDQSPGAFVAIQEELAQQLKEKASLLEEIAAALPSLPPVESLRDCQKLLQVSQSLSYNTCLGGLGQYSSLLVQDAIIQAQVCYASCRIRLEYEKELQLCKESWQTREPSCSEQAQAARALREEYEELLRKQKSEYLDVIAIVERENAELKAKAAQLDHQQQCLEDAESKHSMSMFTLRGRYEEEIRCVVEQLTRTESTLQAERSRVLSQLDASVRDRQDMERHHGEQIQTLEDRFQLKVRELQTIHEEELRTLQEHYSQSLRCLQDTLCLHQGPHPKALPAPAPNWQATQGEADSMTGLRERIQELEAQMDVMREELGHKDLEGDAATLREKYQRDLESLKATCERGFAAMEETHQKKIEDLQRQHQRELEKLREEKDRLLAEETAATISAIEAMKNAHREEMERELEKSQRSQISSVNSDVEALRRQYLEELQSVQRELEVLSEQYSQKCLENAHLAQALEAERQALRQCQRENQELNAHNQELNNRLAAEITRLRTLLTGDGGGEATGSPLAQGKDAYELEVLLRVKESEIQYLKQEISSLKDELQTALRDKKYASDKYKDIYTELSIAKAKADCDISRLKEQLKAATEALGEKSPDSATVSGYDIMKSKSNPDFLKKDRSCVTRQLRNIRSKSLKEGLTVQERLKLFESRDLKKD

SEQ ID NO: 47346 - protein, 130 aa, Homo sapiens
MMNSDQKAVKFLANFYINGGKHWTHGHLRQTQPEPTQPKASVLLLGPEPGMAWDETQPPKMKEIPVGLRLQTGTPQESLPTYTQTLRELLLEQRPLITADLEVPSPTRGRWPQGMADFVVPERKPLHAES

SEQ ID NO: 47347 - protein, 729 aa, Homo sapiens
MVAVGGCRCQPGYQPARGDKACQACPRGLYKSSAGNAPCSPCPARSHAPNPAAPVCPCLEGFYRASSDPPEAPCTGPPSAPQELWFEVQGSALMLHWRLPRELGGRGDLLFNVVCKECEGRQEPASGGGGTCHRCRDEVHFDPRQRGLTESRVLVGGLRAHVPYILEVQAVNGVSELSPDPPQAAAINVSTSHEVPSAVPVVHQVSRASNSITVSWPQPDQTNGNILDYQLRYYDQAEDESHSFTLTSETNTATVTQLSPGHIYGFQVRARTAAGHGPYGGKVYFQTLPQGELSSQLPERLSLVIGSILGALAFLLLAAITVLAVVFQRKRRGTGYTEQLQQYSSPGLGVKYYIDPSTYEDPCQAIRELAREVDPAYIKIEEVIGTGSFGEVRQGRLQPRGRREQTVAIQALWAGGAESLQMTFLGRAAVLGQFQHPNILRLEGVVTKSRPLMVLTEFMELGPLDSFLRQREGQFSSLQLVAMQRGVAAAMQYLSSFAFVHRSLSAHSVLVNSHLVCKVARLGHSPQGPSCLLRWAAPEVIAHGKHTTSSDVWSFGILMWEVMSYGERPYWDMSEQEVLNAIEQEFRLPPPPGCPPGLHLLMLDTWQKDRARRPHFDQLVAAFDKMIRKPDTLQAGGDPGERPSQALLTPVALDFPCLDSPQAWLSAIGLECYQDNFSKFGLCTFSDVAQLSLEDLPALGITLAGHQKKLLHHIQLLQQHLRQQGSVEV

SEQ ID NO: 47348 - protein, 2076 aa, Homo sapiens
  MOD_RES (1)..(1): Any amino acid
XGAECPHQNKTVLHMDGCLDTETPTVSIQENVDVASLKPISDSGINFTDAIWSPTCERRTCECHESIEKNKDKTDLPQSVVYQNEEGRWVTDLAYYTSFNSKQNLNVSLSDEMNEDFRSGSEAFDLIAQDEEEFNKEHQFIQPSFGYFIRSPEKREPIALIRKSDVSRGNLEKEMAHLNHDLYSGDLNEQSQAQLSEGSITLQVEAVESTSQVDENDVTLTADKGKTEDTFFMSNKPQRYKDKLPDSGDSMLRISTIASAIAEASVNTDPSQLAAMIKALSNKTRDKTFQEDEKQKDYSHVRHFLPNDLEKSNGSNALDMEKYLKKTEVSRYESALENFSRASMSDTWDLSLPKEQTTQDIHPVDLSATSVSVRAPEENTAAIVYVENGESENQESFRTINSSNSVTNRENNSAVVDVKTCSIDNKLQDVGNDEKATSISTPSDSYSSVRNPRITSLCLLKDCEEIRDNRENQRQNECVSEISNSEKHVTFENHRIVSPKNSDLKNTSPEHGGRGSEDEQESFRPSTSPLSHSSPSEISGTSSSGCALESFGSAAQQQQPPCEQELSPLVCSPAGVSRLTYVSEPESSYPTTATDDALEDRKSDITSELSTTIIQGSPAALEERAMEKLREKVPFQNRGKGTLSSIIQNNSDTRKATETTSLSSKPEYVKPDFRWSKDPSSKSGNLLETSEVGWTSNPEELDPIRLALLGKSGLSCQVGSATSHPVSCQEPIDEDQRISPKDKSTAGREFSGQVSHQTTSENQCTPIPSSTVHSSVADMQNMPAAVHALLTQPSLSAAPFAQRYLGTLPSTGSTTLPQCHAGNATVCGFSGGLPYPAVAGEPVQNSVAVGICLGSNIGSGWMGTSSLCNPYSNTLNQNLLSTTKPFPVPSVGTNCGIEPWDSGVTSGLGSVRVPEELKLPHACCVGIASQTLLSVLNPTDRWLQVSIGVLSISVNGEKVDLSTYRCLVFKNKAIIRPHATEEIKVLFIPSSPGVFRCTFSVASWPCSTDAETIVQAEALASTVTLTAIAESPVIEVETEKKDVLDFGDLTYGGWKALPLKLINRTHATVPIRLIINANAVAWRCFTFSKESVRAPVEVAPCADVVTRLAGPSVVNHMMPASYDGQDPEFLMIWVLFHSPKKQISSSDILDSAEEFSAKVDIEVDSPNPTPVLRSVSLRARAGIARIHAPRDLQTMHFLAKVASSRKQHLPLKNAGNIEVYLDIKVPEQGSHFSVDPKNLLLKPGEEHEVIVSFTPKDPEACEERILKIFVQPFGPQYEVVLKGEVISSGSKPLSPGPCLDIPSILSNKQFLAWGGVPLGRTQLQKLALRNNSASTTQHLRLLIRGQDQDCFQLQNTFGSEQRLTSNCEIRIHPKEDIFISVLFAPTRLSCMLARLEIKQLGNRSQPGIKFTIPLSGYGGTSNLILEGVKKLSDSYMVTVNGLVPGKESKIVFSVRNTGSRAAFVKAVGFKDSQKKVLLDPKVLRIFPDKFVLKERTQENVTLIYNPSDRGINNKTATELSTVYLFGGDEISRQQYRRALLHKPEMIKQILPEHSVLQNINFVEAFQDELLVTEVYDLPQRPNDVQLFYGSMCKIILSVIGEFRDCISSREFLQPSSKASLESTSDLGASGKHGGNVSLDVLPVKGPQGSPLLSRAARPPLDQLASEEPWTVLPEHLILVAPSPCDMAKTGRFQIVNNSVRLLRFELCWPAHCLTVTPQHGCVAPESKLQILVSPNSSLSTKQSMFPWSGLIYIHCDDGQKKIVKVQIREDLTQVELLTRLTSKPFGILSPVSEPSVSHLVKPMTKPPSTKVEIRNKSITFPTTEPGETSESCLELENHGTTDVKWHLSSLAPPYVKGVDESGDVFRATYAAFRCSPISGLLESHGIQKVSITFLPRGRGDYAQFWDVECHPLKEPHMKHTLRFQLSGQSIEAENEPENACLSTDSLIKIDHLVKPRRQAVSEASARIPEQLDVTARGVYAPEDVYRFRPTSVGESRTLKVNLRNNSFITHSLKFLSPREPFYVKHSKYSLRAQHYINMPVQFKPKSAGKFEALLVIQTDEGKSIAIRLIGEALGKN

SEQ ID NO: 47349 - protein, 142 aa, Homo sapiens
MASGSGDSVTRRSVASQFFTQEEGPGIDGMTTSERVVDLLNQAALITNDSKITVLKQVQELIINKDPTLLDNFLDEIIAFQADKSIEVRKFVIGFIEEACKRDIELLLKLIANLNMLLRDENVNVVKKAILTMTQLYKVALQ

SEQ ID NO: 47350 - protein, 38 aa, Homo sapiens
  MOD_RES (1)..(1): Any amino acid
XCSLLFAILLAFLLAIAYLIVKAFSGLQMAWHLKPYNA

SEQ ID NO: 47351 - protein, 136 aa, Homo sapiens
MSFSATILFSPPSGSEARCCCCACKSETNGGNTGSQGGNPPPSTPITVTGHGLAVQSSEQLLHVIYQRVDKAVGLAEAALGLARANNELLKRLQEEVGDLRQGKVSIPDEDGESRAHSSPPEEPGPLKESPGEAFK

SEQ ID NO: 47352 - protein, 10 aa, Homo sapiens
MNSSPAGTPS

SEQ ID NO: 47353 - protein, 268 aa, Homo sapiens
MSPPPLLQPLLLLLPLLNVEPSGATLIRIPLHRVQPGRRILNLLRGWREPAELPKLGAPSPGDKPIFVPLSNYRDVQYFGEIGLGTPPQNFTVAFDTGSSNLWVPSRRCHFFSVPCSSSSFQANGTKFAIQYGTGRVDGILSEDKLTIGGIKGASVIFGEALWEPSLVFAFAHFDGILGLGFPILSVEGVRPPMDVLVEQGLLDKPVFSFYLNRDPEEPDGGELVLGGSDPAHYIPPLTFVPVTVPAYWQIHMERVKVGPGLTLCAKG

SEQ ID NO: 47354 - protein, 358 aa, Homo sapiens
MRAHAQRGRGCTRRSAAVLMARHGLPLLPLLSLLVGAWLKLGNGQATSMVQLQGGRFLMGTNSPDSRDGDGPVREATVKPFAIDIFPVTNKDFRDFVREKKYRTEAEMFGWSFVFEDFVSDELRNKATQPMKSVLWWLPVEKAFWRQPAGPGSGIRERLEHPVLHVSWNDARAYCAWRGKRLPTEEEWEFAARGGLKGQVYPWGNWFQPNRTNLWQGKFPKGDKAEDGFHGVSPVNAFPAQNNYGWATLQIQPQTTSVSAVLQTQAGRQGSCKQPGGDKEKSLLGSLSFPGHVANSAIPSSRASASGKNFPFPVSHPSVAGASHQGRRGLSLLCFGEGAQCVLTMAGGQVFLLEAKYY

SEQ ID NO: 47355 - protein, 174 aa, Homo sapiens
MKPQFVGILLSSLLGAALGNRMRCYNCGGSPSSSCKEAVTTCGEGRPQPGLEQIKLPGNRRCFLRGLKIPLGSLKSHLLCPRRQVLKPGVQHPSFILSLSPSDLDSPTSSLRRSPSLQSSGDRVGGRRDLSSPQGLLPGRPVQQRRGKPCGPCRHFGCSSYRPDLSLARTVERI

SEQ ID NO: 47356 - protein, 81 aa, Homo sapiens
MAEGSVMFSDVSIDFSQEEWDCLDPVQRDLYRDVMLENYGNLVSMGKGICTSDSQFSSGMSPSSTVNFSAAFQDFTLLSLK

SEQ ID NO: 47357 - protein, 84 aa, Homo sapiens
MEEFDLVKTLHKTSSSVGSDENSLHSLGLNLNTDRSSPHLSTNGVSSFSGKTRPSVIQGTVEVLTSLMQELQNSGKTDSELWKN

SEQ ID NO: 47358 - protein, 113 aa, Homo sapiens
MSSNSDTGDLQESLKHGLTPIDNTENTGTRKMREQHTTISHLFRRAEPPRCAGKESFPAAPRSSGSASGAAARARSGRRRGLRAHGGRALGGSRPRGRSWAPAARSPSWPLPK

SEQ ID NO: 47359 - protein, 138 aa, Homo sapiens
  MOD_RES (1)..(1): Any amino acid
XSALPQQLLQEVLLLPPPCELQVLVGGRHPRVRGAAHRLERRHDEGAAPGHPRQDHPGEAGPSGDSSVPDDGSAVPGEDVLPRVFPQRAAKHLPGAGAPHPERHHRKPHRLSAPLWHLPVRDHLLQQLHRLARRLLWL

SEQ ID NO: 47360 - protein, 196 aa, Homo sapiens
  MOD_RES (1)..(1): Any amino acid
XRYHFCEKCFTEIQGENVTLGDDPSQPQTTISKDQFEKKKNDTLDPEPFVDCKECGRKMHQICVLHYDIIWPSGFVCDNCLKKTGRPRKENKFSAKRLQTTRLGNHLEDRVNKFLRRQNHPEAGEVFVRVVASSDKTVEVKPGMKSRFVDSGEMSESFPYRTKALFAFEEIDGVDVCFFGMHVQEYGSDCPPPNTR

SEQ ID NO: 47361 - protein, 80 aa, Homo sapiens
MDSAAKDEMQPALSPGPEWPEQERAEQLARGAALKWASGIFYRPEQLARLGQYRSREVQRTCSLESRLKAGNDGEPGVGA

SEQ ID NO: 47362 - protein, 512 aa, Homo sapiens
MASTTTCTRFTDEYQLFEELGKGAFSVVRRCMKIPTGQEYAAKIINTKKLSARDHQKLEREARICRLLKHPNIVRLHDSISEEGFHYLVFDLVTGGELFEDIVAREYYSEADASHCIQQILEAVLHCHQMGVVHRDLKPENLLLASKSKGAAVKLADFGLAIEVQGDQQAWFGFAGTPGYLSPEVLRKDPYGKPVDMWACGVILYILLVGYPPFWDEDQHRLYQQIKAGAYDFPSPEWDTVTPEAKDLINKMLTINPAKRITASEALKHPWICQRSTVASMMHRQETVDCLKKFNARRKLKGAILTTMLATRNFSAAKSLLKKPDGVKINNKANVVTSPKENIPTPALEPQTTVIHNPDGNKESTESSNTTIEDEDVKARKQEIIKVTEQLIEAINNGDFEAYTKICDPGLTAFEPEALGNLVEGMDFHRFYFENALSKSNKPIHTIILNPHVHLVGDDAACIAYIRLTQYMDGSGMPKTMQSEETRVWHRRDGKWQNVHFHRSGSPTVPIK

SEQ ID NO: 47363 - protein, 77 aa, Homo sapiens
MVDTEMPFWPTNFGISSVDLSVMEDHSHSFDIKPFTTVDFSSISTPHYEDIPFTRTDPVVADYKCNQSGACISTLLF

SEQ ID NO: 47364 - protein, 182 aa, Homo sapiens
  MOD_RES (1)..(1): Any amino acid
XTATAEEQPVEPDGPLPGSDNNQEKKVRLSPAKMSTKNSTDLVEYVDKSHAFLPIIPNTQRGQLEDRLNNQARTIAFLLEQAFRIKEDISACLQGTHGFRKEESLARKLLESHIQTITSIVKKLSQNIEILEDQIRARDQAATGTNFAVHEINIKHLQGVGDLRGRVARTSLLARLYLRETG

SEQ ID NO: 47365 - protein, 71 aa, Homo sapiens
  MOD_RES (1)..(1): Any amino acid
XEILELAGNAARDNKKARIAPRHILLAVANDEELNQLLKGVTIASGGVLPRIHPELLAKKRGTKVQTKGQR

SEQ ID NO: 47366 - protein, 55 aa, Homo sapiens
LWNNYFHLAVAFITQDSLQLEQFSHAKYNKILNKSEQNLLHPRHGRTYIRDDTYP

SEQ ID NO: 47367 - protein, 279 aa, Homo sapiens
  MOD_RES (1)..(1): Any amino acid
XEVVTSSLPELYVEKVLEFLASSFEVSRHLEFYLLWTHKLLMLHGQKLKSRAGTLLPVIQFLQKSIQRHLDDLSKLILVHLSRGGAEVQIFAPDVPQMHVIDHTKGQPSEGESRNVLTESARIARGKITDLANLSAANHDAAIFPGGFGAAKNLSTFAVDGKDCKVNKEVERVLKEFHQAGKPIGLCCIAPVLAAKVLRGVEVTVGHEQEEGGKWPYAGTAEAIKALGAKHCVKEVVEAHVDQKNKVVTTPAFMCETALHYIHDGIGAMVRKVLELTGK

SEQ ID NO: 47368 - protein, 257 aa, Homo sapiens
MALNKNHSEGGGVIVNNTESILMSYDHVELTFNDMKNVPEAFKGTKKGTVYLTPYRVIFLSKGKDAMQSFMMPFYLMKDCEIKQPVFGANYIKGTVKAEAGGGWEGSASYKLTFTAGGAIEFGQRMLQVASQASRGEVPSGAYGYSYMPSGAYVYPPPVANGMYPCPPGYPYPPPPPGPPMMDGAMGYVQPPPPPYPGPMEPPVSGPDVPSTPAAEAKAAEAAASAYYNPGNPHNVYMPTSQPPPPPYYPPEDKKTQ

SEQ ID NO: 47369 - protein, 374 aa, Homo sapiens
MGTAGKVIKCKAAVLWEQKQPFSIEEIEVAPPKTKEVRIKILATGICRTDDHVIKGTMVSKFPVIVGHEATGIVESIGEGVTTVKPGDKVIPLFLPQCRECNACRNPDGNLCIRSDITGRGVLADGTTRFTCKGKPVHHFMNTSTFTEYTVVDESSVAKIDDAAPPEKVCLIGCGFSTGYGAAVKTGKVKPGSTCVVFGLGGVGLSVIMGCKSAGASRIIGIDLNKDKFEKAMAVGATECISPKDSTKPISEVLSEMTGNNVGYTFEVIGHLETMIDALASCHMNYGTSVVVGVPPSAKMLTYDPMLLFTGRTWKGCVFGGLKSRDDVPKLVTEFLAKKFDLDQLITHVLPFKKISEGFELLNSGQSIRTVLTF

SEQ ID NO: 47370 - protein, 2023 aa, Homo sapiens
MIQEEQIQLEGSLVDGPEASLMEQDRTNHVEGNRLSPFLIPSPPICQTEPLATKLQNGSPLPERAHPEVNGDTKWHSFKSYYGIPCMKGSQNSRVSPDFTQESRGYSKCLQNGGIKRTVSEPSLSGLLQIKKLKQDQKANGERRNFGVSQERNPGESSQPNVSDLSDKKESVSSVAQENAVKDFTSFSTHNCSGPENPELQILNEQEGKSANYHDKNIVLLKNKAVLMPNGATVSASSVEHTHGELLEKTLSQYYPDCVSIAVQKTTSHINAINSQATNELSCEITHPSHTSGQINSAQTSNSELPPKPAAVVSEACDADDADNASKLAAMLNTCSFQKPEQLQQQKSVFEICPSPAENNIQGTTKLASGEEFCSGSSSNLQAPGGSSERYLKQNEMNGAYFKQSSVFTKDSFSATTTPPPPSQLLLSPPPPLPQVPQLPSEGKSTLNGGVLEEHHHYPNQSNTTLLREVKIEGKPEAPPSQSPNPSTHVCSPSPMLSERPQNNCVNRNDIQTAGTMTVPLCSEKTRPMSEHLKHNPPIFGSSGELQDNCQQLMRNKEQEILKGRDKEQTRDLVPPTQHYLKPGWIELKAPRFHQAESHLKRNEASLPSILQYQPNLSNQMTSKQYTGNSNMPGGLPRQAYTQKTTQLEHKSQMYQVEMNQGQSQGTVDQHLQFQKPSHQVHFSKTDHLPKAHVQSLCGTRFHFQQRADSQTEKLMSPVLKQHLNQQASETEPFSNSHLLQHKPHKQAAQTQPSQSSHLPQNQQQQQKLQIKNKEEILQTFPHPQSNNDQQREGSFFGQTKVEECFHGENQYSKSSEFETHNVQMGLEEVQNINRRNSPYSQTMKSSACKIQVSCSNNTHLVSENKEQTTHPELFAGNKTQNLHHMQYFPNNVIPKQDLLHRCFQEQEQKSQQASVLQGYKNRNQDMSGQQAAQLAQQRYLIHNHANVFPVPDQGGSHTQTPPQKDTQKHAALRWHLLQKQEQQQTQQPQTESCHSQMHRPIKVEPGCKPHACMHTAPPENKTWKKVTKQENPPASCDNVQQKSIIETMEQHLKQFHAKSLFDHKALTLKSQKQVKVEMSGPVTVLTRQTTAAELDSHTPALEQQTTSSEKTPTKRTAASVLNNFIESPSKLLDTPIKNLLDTPVKTQYDFPSCRCVEQIIEKDEGPFYTHLGAGPNVAAIREIMEERFGQKGKAIRIERVIYTGKEGKSSQGCPIAKWVVRRSSSEEKLLCLVRERAGHTCEAAVIVILILVWEGIPLSLADKLYSELTETLRKYGTLTNRRCALNEERTCACQGLDPETCGASFSFGCSWSMYYNGCKFARSKIPRKFKLLGDDPKEEEKLESHLQNLSTLMAPTYKKLAPDAYNNQIEYEHRAPECRLGLKEGRPFSGVTACLDFCAHAHRDLHNMQNGSTLVCTLTREDNREFGGKPEDEQLHVLPLYKVSDVDEFGSVEAQEEKKRSGAIQVLSSFRRKVRMLAEPVKTCRQRKLEAKKAAAEKLSSLENSSNKNEKEKSAPSRTKQTENASQAKQLAELLRLSGPVMQQSQQPQPLQKQPPQPQQQQRPQQQQPHHPQTESVNSYSASGSTNPYMRRPNPVSPYPNSSHTSDIYGSTSPMNFYSTSSQAAGSYLNSSNPMNPYPGLLNQNTQYPSYQCNGNLSVDNCSPYLGSYSPQSQPMDLYRYPSQDPLSKLSLPPIHTLYQPRFGNSQSFTSKYLGYGNQNMQGDGFSSCTIRPNVHHVGKLPPYPTHEMDGHFMGATSRLPPNLSNPNMDYKNGEHHSPSHIIHNYSAAPGMFNSSLHALHLQNKENDMLSHTANGLSKMLPALNHDRTACVQGGLHKLSDANGQEKQPLALVQGVASGAEDNDEVWSDSEQSFLDPDIGGVAVAPTHGSILIECAKRELHATTPLKNPNRNHPTRISLVFYQHKSMNEPKHGLALWEAKMAEKAREKEEECEKYGPDYVPQKSHGKKVKREPAEPHETSEPTYLRFIKSLAERTMSVTTDSTVTTSPYAFTRVTGPYNRYI

SEQ ID NO: 47371 - protein, 360 aa, Homo sapiens
MQSNKTFNLEKQNHTPRKHHQHHHQQQHHQQQQQQPPPPPIPANGQQASSQNEGLTIDLKNFRKPGEKTFTQRSRLFVGNLPPDITEEEMRKLFEKYGKAGEVFIHKDKGFGFIRLETRTLAEIAKVELDNMPLRGKQLRVRFACHSASLTVRNLPQYVSNELLEEAFSVFGQVERAVVIVDDRGRPSGKGIVEFSGKPAARKALDRCSEGSFLLTTFPRPVTVEPMDQLDDEEGLPEKLVIKNQQFHKEREQPPRFAQPGSFEYEYAMRWKALIEMEKQQQDQVDRNIKEAREKLEMEMEAARHEHQVMLMRQDLMRRQEELRRMEELHNQEVQKRKQLELRESRRFGWVRWLWEVLWA

SEQ ID NO: 47372 - protein, 296 aa, Homo sapiens
MAATASAGAGGIDGKPRTSPKMGATVFVQPLDLVKNRMQLSGEGAKTREYKTSFHALTSILKAEGLRGIYTGLSAGLLRQATYTTTRLGIYTVLFERLTGADGTPPGFLLKAVIGMTAGATGAFVGTPAEVALIRMTADGRLPADQRRGYKNVFNALIRITREEGVLTLWRGCIPTMARAVVVNAAQLASYSQSKQFLLDSGYFSDNILCHFCASMISGLVTTAASMPVDIAKTRIQNMRMIDGKPEYKNGLDVLFKVVRYEGFFSLWKGFTPYYARLGPHTVLTFIFLEQMNKAY

SEQ ID NO: 47373 - protein, 48 aa, Homo sapiens
  MOD_RES (1)..(1): Any amino acid
XTAIRCCKALTGIDLSVCTQWHRNTGTNAHHTLHNKHTWRNITGNSDW

SEQ ID NO: 47374 - protein, 85 aa, Homo sapiens
MMENYSNLLSLDLESRNETKHLSVGKDIIQNTGSQWEVMESSKLCGLEGSIFRNDWQSKSKIDLQGPEVGYFSQMKIISENVPSY

SEQ ID NO: 47375 - protein, 65 aa, Homo sapiens
MGNLLKVLTCTDLEQGPNFFLDFENAQPTESEKEIYNQVNVVLKDAEGILEDLQSYRGAGHEIRE

SEQ ID NO: 47376 - protein, 95 aa, Homo sapiens
MAAANPWDPASAPNGAGLVLGHFIASGMVNQEMLNMSKKTVSCFVNFTRLQQITNIQAEIYQKNLEIELLKLEKDTADVVHPFFLDIWYICWSWL

SEQ ID NO: 47377 - protein, 83 aa, Homo sapiens
  MOD_RES (1)..(1): Any amino acid
XKIKFETMIIDNCCMQLVQNPYQFDVLVMPNLYGNIIDNLAAGLVGGAGVVPGCPAPICPGSGQEYSQSHGHAAVGFQHAAAS

SEQ ID NO: 47378 - protein, 123 aa, Homo sapiens
  MOD_RES (1)..(1): Any amino acid
XYAPVGILFLIAGKIVEMEDMGVIGGQLAMYTVTVIVGLLIHAVIVLPLLYFLVTRKNPWVFIGGLLQALITALGTSSSITATAASIGAAGIPQAGLVTMVIVLTSVGLPTDDITLIIAVDWF

SEQ ID NO: 47379 - protein, 353 aa, Homo sapiens
MIAKEELESVLEEEVDDFPTFGDSQSDYDTVVHPFYAYWQSFCTQKNFAWKEEYDTRQASNRWEKRAMEKENKKIRDKARKEKNELVRQLVAFIRKRDKRVQAHRKLVEEQNAEKARKAEEMRRQQKLKQAKLVEQYREQSWMTMANLEKELQEMEARYEKEFGDGSDENEMEEHELKDEEDGKDSDEAEDAELYDDLYCPACDKSFKTEKAMKNHEKSKKHREMVALLKQQLEEEEENFSRPQIDENPLDDNSEEEMEDAPKQKLSKKQKKKKQKPAQDVPGKDSYLPAAHFQMAWGKKCVLGERRDGESEHKCAKMLLENRQNYDDNFNVNGPGEGVKVDPEDTNLNQDSA

SEQ ID NO: 47380 - protein, 806 aa, Homo sapiens
MITSAAGIISLLDEDEPQLKEFALHKLNAVVNDFWAEISESVDKIEVLYEDEGFRSRQFAALVASKVFYHLGAFEESLNYALGAGDLFNVNDNSEYVETIIAKCIDHYTKQCVENADLPEGEKKPIDQRLEGIVNKMFQRCLDDHKYKQAIGIALETRRLDVFEKTILESNDVPGMLAYSLKLCMSLMQNKQFRNKVLRVLVKIYMNLEKPDFINVCQCLIFLDDPQAVSDILEKLVKEDNLLMAYQICFDLYESASQQFLSSVIQNLRTVGTPIASVPGSTNTGTVPGSEKDSDSMETEEKTSSAFVGKTPEASPEPKDQTLKMIKILSGEMAIELHLQFLIRNNNTDLMILKNTKDAVRNSVCHTATVIANSFMHCGTTSDQFLRDNLEWLARATNWAKFTATASLGVIHKGHEKEALQLMATYLPKDTSPGSAYQEGGGLYALGLIHANHGGDIIDYLLNQLKNASNDIVRHGGSLGLGLAAMGTARQDVYDLLKTNLYQDDAVTGEAAGLALGLVMLGSKNAQAIEDMVGYAQETQHEKILRGLAVGIALVMYGRMEEADALIESLCRDKDPILRRSGMYTVAMAYCGSGNNKAIRRLLHVAVSDVNDDVRRAAVESLGFILFRTPEQCPSVVSLLSESYNPHVRYGAAMALGICCAGTGNKEAINLLEPMTNDPVNYVRQGALIASALIMIQQTEITCPKVNQFRQLYSKVINDKHDDVMAKFGAILAQGILDAGGHNVTISLQSRTGHTHMPSVVGVLVFTQFWFWFPLSHFLSLAYTPTCVIGLNKDLKSTEYLKPMLF

SEQ ID NO: 47381 - protein, 161 aa, Homo sapiens
MRPMRIFVNDDRHVMAKHSSVYPTQEELEAVQNMVSHTERALKAVSDWIDEQEKGSSEQAESDNMDVPPEDDSKEGAGEQKTEHMTRTLRGVMRVGLVAKGLLLKGDLDLELVLLCKEKPTTALLDKVADNLAIQLAAVTEDKYEILQSVDDAAIVIKNTK

SEQ ID NO: 47382 - protein, 143 aa, Homo sapiens
LQRKINVCYQEELEAMMTKADNDNRDHKEKLERLTRLLDLKNNRIKQLEEQLKDVAYGTRPLSLCLETLPAHGDEDKVDISLLHQGENLFELHIHQAFLTSAALAQAGDTQPTTFCTYSFYDFETHCTPLSVGPQPLYDFTSQ

SEQ ID NO: 47383 - protein, 119 aa, Homo sapiens
  MOD_RES (1)..(1): Any amino acid
XSAEFQWYKDDKRLIEGKKGVKVENRPFLSKLIFFNVSEHDYGNYTCVASNKLGHTNASIMLFELNEPTSSTLLQEVKTTALTPWKGPGAVSEVSNGTSRRAGCVWLLPLLVLHLLLKF

SEQ ID NO: 47384 - protein, 158 aa, Homo sapiens
MEYQLLDIKGNEQIEKYSWREACDTGSSRMDRKHGKYILNVEHSENQPVKEYCRNDWSMWKVFLACLLACVIMTAIGVLIICLVNNKGSANSSIVIQLSTNDGECVTVKPGTPSPACPPTMTTTSTVPASTATESTTSTATAATTSTEPITVAPTDHL

SEQ ID NO: 47385 - protein, 245 aa, Homo sapiens
MGRKEEDDCSSWKKQTTNIRKTFIFMEVLGSGAFSEVFLVKQRLTGKLFALKCIKKSPAFRDSSLENEIAVLKKIKHENIVTLEDIYESTTHYYLVMQLVSGGELFDRILERGVYTEKDASLVIQQVLSAVKYLHENGIVHRDLKPENLLYLTPEENSKIMITDFGLSKMEQNGIMSTACGTPGYVGSVDTPHSMKKRSLSFSRRSRRATMSLSLHSGMTFLSQPRTLFATCLRRIRTSGTPVRR

SEQ ID NO: 47386 - protein, 679 aa, Homo sapiens
  MOD_RES (1)..(1): Any amino acid
XHSFQWLRNLPGCPKSKGNNVFVVHKPSAVPSREGSESGPGPSSGSPSEESPPGPGGGLEDALPFPAALLRVPAEAPSDPRSASGEDDPCAPKKVKVDCDSFLCQNPGEPGLQEAQKAGGLPADASPLFRQLFLKSQEPLVSHEQMQVFQMITKSQRIFSHAQVAAVSSQLPAPEGKPAALRPLQGPWPQQPPPLAPAVDSLHAGPGNPEAEGSPARRRKTTPGVPREASPGSTRRDAKGGLKVAAVPTPLAAPSLDPSRNPDISSLAKQLRSSKGTLDLEDIFPSTGQRQTQLGGEEPPGASLPGKQAPAENGAASRITKGEKGPACSRGGGYRLLGNPRAPRFSGFRKEKAKMDMCCAASPSQVAMASFSSAGPPADPSKSKLTIFSRIQGGNIYRLPHPVKEENVAGRGNQQNGSPTDWTKPRSTFVCKNCSQMFYTEKGLSSHMCFHSDQWPSPRGKQEPQVFGTEFCKPLRQVLRPEGDRHSPPGTKKPLDPTAAAPLVVPQSIPVVPVTRHIGSMAMIQTKTVAQCVEYYYIWKKMIKFDCGRAPGLEKRVKREPEEVERTEEKVPCSPRERPSHHPTPKLKTKSYRRESILSSSPNAGSKRTPELLGSAESQGIFPCRECERVFDKIKSRNAHMKRHRLQDHVEPIIRVKWPVKPFQLKEEELGADIGPLQW

SEQ ID NO: 47387 - protein, 147 aa, Homo sapiens
MPLKMKEILQSVPKFCFPFDVERVSQNQVGQHFTFVLTDIESKQRFGFCRLTSGGTICLCILSYLPWFEVYYKLLNTLADYLAKELENDLNETLRSLYNHPVPKANTPVNLSVHSYFIAPDVTGLPTIPESRNLTEYFVAVDVNNML

SEQ ID NO: 47388 - protein, 146 aa, Homo sapiens
MVSVTMATSEWIQFFKEAGIPPGPAVNYAVMFVDNRIQKSMLLDLNKEIMNELGVTVVGDIIAILKHAKVVHRQDMCKAATESVPCSPSPLAGEIRRGTSAASRMITNSLNHDSPPSTPPRRPDTSTSKISVTVSNKMAAKSAKAT

SEQ ID NO: 47389 - protein, 129 aa, Homo sapiens
  MOD_RES (1)..(1): Any amino acid
XGSGPQLFQTFTVHRSPVTKIMLSEKHLISVCADNNHVRTWSVTRFRGMISTQPGSTPLASFKILALESADGHGGCSAGNDIGPYGERDDQQVFIQKVVPSASQLFVRLSSTGQRWPDGARADGTAGTL

SEQ ID NO: 47390 - protein, 156 aa, Homo sapiens
MADKQISLPAKLINGGIAGLIGVTCVFPIDLAKTRLQNQQNGQRVYTSMSDCLIKTVRSEGYFGMYRGAAVNLTLVTPEKAIKLAANDFFRHQLSKDGQKLTLLKEMLAGCGAGTCQVIVTTPMEMLKIQLQDAGRIAAQRKILAAQGQLSAQGGA

SEQ ID NO: 47391 - protein, 77 aa, Homo sapiens
MTMTANKNSSITHGAGGTKAPRGTLSRKSFEFEDASSLQSLYPSSPTENGTENQPKFGSKSTLEENAYEDIVGDLPK

SEQ ID NO: 47392 - protein, 9 aa, Homo sapiens
  MOD_RES (1)..(1): Any amino acid
XEKRSQPGP

SEQ ID NO: 47393 - protein, 767 aa, Homo sapiens
MGPEALSSLLLLLLVASGDADMKGHFDPAKCRYALGMQDRTIPDSDISASSSWSDSTAARHSRLESSDGDGAWCPAGSVFPKEEEYLQVDLQRLHLVALVGTQGRHAGGLGKEFSRSYRLRYSRDGRRWMGWKDRWGQEVISGNEDPEGVVLKDLGPPMVARLVRFYPRADRVMSVCLRVELYGCLWRDGLLSYTAPVGQTMYLSEAVYLNDSTYDGHTVGGLQYGGLGQLADGVVGLDDFRKSQELRVWPGYDYVGWSNHSFSSGYVEMEFEFDRLRAFQAMQVHCNNMHTLGARLPGGVECRFRRGPAMAWEGEPMRHNLGGNLGDPRARAVSVPLGGRVARFLQCRFLFAGPWLLFSEISFISDVVNNSSPALGGTFPPAPWWPPGPPPTNFSSLELEPRGQQPVAKAEGSPTAILIGCLVAIILLLLLIIALMLWRLHWRRLLSKVLESHPRTRSPGLVGIRPTLLPVSPMALVHLCEVDSPQDLVSLDFPLNVRKGHPLLVAVKILRPDATKNARNDFLKEVKIMSRLKDPNIIRLLGVCVQDDPLCMITDYMENGDLNQFLSAHQLEDKAAEGAPGDGQAAQGPTISYPMLLHVAAQIASGMRYLATLNFVHRDLATRNCLVGENFTIKIADFGMSRNLYAGDYYRVQGRAVLPIRWMAWECILMGKFTTASDVWAFGVTLWEVLMLCRAQPFGQLTDEQVIENAGEFFRDQGRQVYLSRPPACPQGLYELMLRCWSRESEQRPPFSQLHRFLAEDALNTV

SEQ ID NO: 47394 - protein, 80 aa, Homo sapiens
MKYGNHCYYFSVEEKDWNSSLEFCLARDSHLLVITDNQEMSLLQVFLSEAFCWIGLRNNSGWRWEDGSPLNFSRISSNSF

SEQ ID NO: 47395 - protein, 38 aa, Homo sapiens
MVNVLKGVLIEWLECNGVISAHYTPHLLGSSDSPSSAS

SEQ ID NO: 47396 - protein, 32 aa, Homo sapiens
MAGEAEDLHLRDPLCLPSWRMMNSRGCPAGWM

SEQ ID NO: 47397 - protein, 55 aa, Homo sapiens
MAMESTATAAVAAELVSADKMSGRARWLTPVIQHFGRPRWADHEVRRSRPSWLTR

SEQ ID NO: 47398 - protein, 1671 aa, Homo sapiens
MASGLGSPSPCSAGSEEEDMDALLNNSLPPPHPENEEDPEEDLSETETPKLKKKKKPKKPRDPKIPKSKRQKKELGDSSGEGPEFVEEEEEVALRSDSEGSDYTPGKKKKKKLGPKKEKKSKSKRKEEEEEEDDDDDSKEPKSSAQLLEDWGMEDIDHVFSEEDYRTLTNYKAFSQFVRPLIAAKNPKIAVSKMMMVLGAKWREFSTNNPFKGSSGASVAAAAAAAVAVVESMVTATEVAPPPPPVEVPIRKAKTKEGKGPNARRKPKGSPRVPDAKKPKPKKVAPLKIKLGGFGSKRKRSSSEDDDLDVESDFDDASINSYSVSDGSTSRSSRSRKKLRTTKKKKKGEEEVTAVDGYETDHQDYCEVCQQGGEIILCDTCPRAYHMVCLDPDMEKAPEGKWSCPHCEKEGIQWEAKEDNSEGEEILEEVGGDLEEEDDHHMEFCRVCKDGGELLCCDTCPSSYHIHCLNPPLPEIPNGEWLCPRCTCPALKGKVQKILIWKWGQPPSPTPVPRPPDADPNTPSPKPLEGRPERQFFVKWQGMSYWHCSWVSELQLELHCQVMFRNYQRKNDMDEPPSGDFGGDEEKSRKRKNKDPKFAEMEERFYRYGIKPEWMMIHRILNHSVDKKGHVHYLIKWRDLPYDQASWESEDVEIQDYDLFKQSYWNHRELMRGEEGRPGKKLKKVKLRKLERPPETPTVDPTVKYERQPEYLDATGGTLHPYQMEGLNWLRFSWAQGTDTILADEMGLGKTVQTAVFLYSLYKEGHSKGPFLVSAPLSTIINWEREFEMWAPDMYVVTYVGDKDSRAIIRENEFSFEDNAIRGGKKASRMKKEASVKFHVLLTSYELITIDMAILGSIDWACLIVDEAHRLKNNQSKFFRVLNGYSLQHKLLLTGTPLQNNLEELFHLLNFLTPERFHNLEGFLEEFADIAKEDQIKKLHDMLGPHMLRRLKADVFKNMPSKTELIVRVELSPMQKKYYKYILTRNFEALNARGGGNQVSLLNVVMDLKKCCNHPYLFPVAAMEAPKMPNGMYDGSALIRASGKLLLLQKMLKNLKEGGHRVLIFSQMTKMLDLLEDFLEHEGYKYERIDGGITGNMRQEAIDRFNAPGAQQFCFLLSTRAGGLGINLATADTVIIYDSDWNPHNDIQAFSRAHRIGQNKKVMIYRFVTRASVEERITQVAKKKMMLTHLVVRPGLGSKTGSMSKQELDDILKFGTEELFKDEATDGGGDNKEGEDSSVIHYDDKAIERLLDRNQDETEDTELQGMNEYLSSFKVAQYVVREEEMGEEEEVEREIIKQEESVDPDYWEKLLRHHYEQQQEDLARNLGKGKRIRKQVNYNDGSQEDRDWQDDQSDNQSDYSVASEEGDEDFDERSEAPRRPSRKGLRNDKDKPLPPLLARVGGNIEVLGFNARQRKAFLNAIMRYGMPPQDAFTTQWLVRDLRGKSEKEFKAYVSLFMRHLCEPGADGAETFADGVPREGLSRQHVLTRIGVMSLIRKKVQEFEHVNGRWSMPELAEVEENKKMSQPGSPSPKTPTPSTPGDTQPNTPAPVPPAEDGIKIEENSLKEEESIEGEKEVKSTAPETAIECTQAPAPASEDEKVVVEPPEGEEKVEKAEVKERTEEPMETEPKGVLLVAQAGVQWCDLGLLQPPPPEFKRFSCLSLLSSWDYRCC

SEQ ID NO: 47399 - protein, 431 aa, Homo sapiens
MSSLGCWCGVEDEAAPSKQSIYIQRETQVRTPVTGVSPKKAHPCEMCGPILGDILHVADHQGTHHKQKLHRCEAWGNKLYDSGNFHQHQNEHIGEKPYRGSVEEALFVKRCKLHVSGESSVFSESGKDFLPRSGLLQQEASHTGEKSNSKTECVSPFQCGGAHYSHGDSMKHFSTKHILSQHQRLLPREECYVCCECGKSFSKYVSFSNHQRVHSGKRPYECGECEKSFSQKSSLIQHQQFHTGGKPYGCEECGKYFSLEGYLRRHQKVHAGKGPYECGECGKSFSSNVNLKSHQRIHTGERPYKCGECEKSFSRKPSLSYHQRIHTEVRPYKCGECGKSYISKGHLRIHQRMHTGERPYKCGDCGKSFNEKGHLRSHQRVHTTERPYKCGECGKCFSHKGNLILHQHGHTRKRPYMCWECGKLFKKKSHL

SEQ ID NO: 47400 - protein, 104 aa, Homo sapiens
MGKIADIVHRNLETTQDLSSLSVLMVNISSLISRHFQQQLVNKTELLFDTIDSSEVNVAKSIAKFLRNVRYRYQPLLERCNNVFLSNVDHLDLDSISKILSVYK

SEQ ID NO: 47401 - protein, 224 aa, Homo sapiens
  MOD_RES (1)..(1): Any amino acid
XLFAFLNHLSQFSEENMMDPYNLAICFGPSLMSVPEGHDQVSCQAHVNELIKTIIIQHENIFPSPRELEGPVYSRGGSMEDYCDSPHGETTSVEDSTQDVTAEHHTSDDECEPIEAIAKFDYVGRTARELSFKKGASLLLYQRASDDWWEGRHNGIDGLIPHQYIVVQDTEDGVVERSSPKSEIEVISEPPEEKVTARAGASCPSGGHVADIYLANINNFHCGC

SEQ ID NO: 47402 - protein, 183 aa, Homo sapiens
  MOD_RES (1)..(1): Any amino acid
XTLKRSSTGSYEERVKRLSVSELNEILEEIETAIKEYSEELVQQLALRDELEFEKEVKNSFISVLIEVQNKQKEHKETAKKKKKLKNGSSQNGKNERSHMPGTYLTTVIPYEKKNGPPSVEDLQILTKKRRLLVNNPVPLFLSPLFGNFKSGKQLSVLRAMKEDSEKVPSLLTDYILKVLCPT

SEQ ID NO: 47403 - protein, 4054 aa, Homo sapiens
GRGSGFPGKRRPRGAGLSGRGGRGRSKLKSGIGAVVLPGVSTADISSNKDDEENSMHNTVVLFSSSDKFTLNQDMCVVCGSFGQGAEGRLLACSQCGQCYHPYCVSIKITKVVLSKGWRCLECTVCEACGKATDPGRLLLCDDCDISYHTYCLDPPLQTVPKGGWKCKWCVWCRHCGATSAGLRCEWQNNYTQCAPCASLSSCPVCYRNYREEDLILQCRQCDRWMHAVCQNLNTEEEVENVADIGFDCSMCRPYMPASNVPSSDCCESSLVAQIVTKVKELDPPKTYTQDGVCLTESGMTQLQSLTVTVPRRKRSKPKLKLKIINQNSVAVLQTPPDIQSEHSRDGEMDDSREGELMDCDGKSESSPEREAVDDETKGVEGTDGVKKRKRKPYRPGIGGFMVRQRSRTGQGKTKRSVIRKDSSGSISEQLPCRDDGWSEQLPDTLVDESVSVTESTEKIKKRYRKRKNKLEETFPAYLQEAFFGKDLLDTSRQSKISLDNLSEDGAQLLYKTNMNTGFLDPSLDPLLSSSSAPTKSGTHGPADDPLADISEVLNTDDDILGIISDDLAKSVDHSDIGPVTDDPSSLPQPNVNQSSRPLSEEQLDGILSPELDKMVTDGAILGKLYKIPELGGKDVEDLFTAVLSPANTQPTPLPQPPPPTQLLPIHNQDAFSRMPLMNGLIGSSPHLPHNSLPPGSGLGTFSAIAQSSYPDARDKNSAFNPMASDPNNSWTSSAPTVEGENDTMSNAQRSTLKWEKEEALGEMATVAPVLYTNINFPNLKEEFPDWTTRVKQIAKLWRKASSQERAPYVQKARDNRAALRINKVQMSNDSMKRQQQQDSIDPSSRIDSELFKDPLKQRESEHEQEWKFRQQMRQKSKQQAKIEATQKLEQVKNEQQQQQQQQFGSQHLLVQSGSDTPSSGIQSPLTPQPGNGNMSPAQSFHKELFTKQPPSTPTSTSSDDVFVKPQAPPPPPAPSRIPIQDSLSQAQTSQPPSPQVFSPGSSNSRPPSPMDPYAKMVGTPRPPPVGHSFSRRNSAAPVENCTPLSSVSRPLQMNETTANRPSPVRDLCSSSTTNNDPYAKPPDTPRPVMTDQFPKSLGLSRSPVVSEQTAKGPIAAGTSDHFTKPSPRADVFQRQRIPDSYARPLLTPAPLDSGPGPFKTPMQPPPSSQDPYGSVSQASRRLSVDPYERPALTPRPIDNFSHNQSNDPYSQPPLTPHPAVNESFAHPSRAFSQPGTISRPTSQDPYSQPPGTPRPVVDSYSQSSGTARSNTDPYSQPPGTPRPTTVDPYSQQPQTPRPSTQTDLFVTPVTNQRHSDPYAHPPGTPRPGISVPYSQPPATPRPRISEGFTRSSMTRPVLMPNQDPFLQAAQNRGPALPGPLVRPPDTCSQTPRPPGPGLSDTFSRVSPSAARDPYDQSPMTPRSQSDSFGTSQTAHDVADQPRPGSEGSFCASSNSPMHSQGQQFSGVSQLPGPVPTSGVTDTQNTVNMAQADTEKLRQRQKLREIILQQQQQKKIAGRQEKGSQDSPAVPHPGPLQHWQPENVNQAFTRPPPPYPGNIRSPVAPPLGPRYAVFPKDQRGPYPPDVASMGMRPHGFRFGFPGGSHGTMPSQERFLVPPQQIQGSGVSPQLRRSVSVDMPRPLNNSQMNNPVGLPQHFSPQSLPVQQHNILGQAYIELRHRAPDGRQRLPFSAPPGSVVEASSNLRHGNFIPRPDFPGPRHTDPMRRPPQGLPNQLPVHPDLEQVPPSQQEQGHSVHSSSMVMRTLNHPLGGEFSEAPLSTSVPSETTSDNLQITTQPSDGLEEKLDSDDPSVKELDVKDLEGVEVKDLDDEDLENLNLDTEDGKVVELDTLDNLETNDPNLDDLLRSGEFDIIAYTDPELDMGDKKSMFNEELDLPIDDKLDNQCVSVEPKKKEQENKTLVLSDKHSPQKKSTVTNEVKTEVLSPNSKVESKCETEKNDENKDNVDTPCSQASAHSDLNDGEKTSLHPCDPDLFEKRTNRETAGPSANVIQASTQLPAQDVINSCGITGSTPVLSSLLANEKSDNSDIRPSGSPPPPTLPASPSNHVSSLPPFIAPPGRVLDNAMNSNVTVVSRVNHVFSQGVQVNPGLIPGQSTVNHSLGTGKPATQTGPQTSQSGTSSMSGPQQLMIPQTLAQQNRERPLLLEEQPLLLQDLLDQERQEQQQQRQMQAMIRQRSEPFFPNIDFDAITDPIMKAKMVALKGINKVMAQNNLGMPPMVMSRFPFMGQVVTGTQNSEGQNLGPQAIPQDGSITHQISRPNPPNFGPGFVNDSQRKQYEEWLQETQQLLQMQQKYLEEQIGAHRKSKKALSAKQRTAKKAGREFPEEDAEQLKHVTEQQSMVQKQLEQIRKQQKEHAELIEDYRIKQQQQCAMAPPTMMPSVQPQPPLIPGATPPTMSQPTFPMVPQQLQHQQHTTVISGHTSPVRMPSLPGWQPNSAPAHLPLNPPRIQPPIAQLPIKTCTPAPGTVSNANPQSGPPPRVEFDDNNPFSESFQERERKERLREQQERQRIQLMQEVDRQRALQQRMEMEQHGMVGSEISSSRTSVSQIPFYSSDLPCDFMQPLGPLQQSPQHQQQMGQVLQQQNIQQGSINSPSTQTFMQTNERRQVGPPSFVPDSPSIPVGSPNFSSVKQGHGNLSGTSFQQSPVRPSFTPALPAAPPVANSSLPCGQDSTITHGHSYPGSTQSLIQLYSDIIPEEKGKKKRTRKKKRDDDAESTKAPSTPHSDITAPPTPGISETTSTPAVSTPSELPQQADQESVEPVGPSTPNMAAGQLCTELENKLPNSDFSQATPNQQTYANSEVDKLSMETPAKTEEIKLEKAETESCPGQEEPKLEEQNGSKVEGNAVACPVSSAQSPPHSAGAPAAKGDSGNELLKHLLKNKKSSSLLNQKPEGSICSEDDCTKDNKLVEKQNPAEGLQTLGAQMQGGFGCGNQLPKTDGGSETKKQRSKRTQRTGEKAAPRSKKRKKDEEEKQAMYSSTDTFTHLKQLSLLPLMEPIIGVNFAHFLPYGSGQFNSGNRLLGTFGSATLEGVSDYYSQLIYKQNNLSNPPTPPASLPPTPPPMACQKMANGFATTEELAGKAGVLVSHEVTKTLGPKPFQLPFRPQDDLLARALAQGPKTVDVPASLPTPPHNNQEELRIQDHCGDRDTPDSFVPSSSPESVVGVEVSRYPDLSLVKEEPPEPVPSPIIPILPSTAGKSSESRRNDIKTEPGTLYFASPFGPSPNGPRSGLISVAITLHPTAAENISSVVAAFSDLLHVRIPNSYEVSSAPDVPSMGLVSSHRINPGLEYRQHLLLRGPPPGSANPPRLVSSYRLKQPNVPFPPTSNGLSGYKDSSHGIAESAALRPQWCCHCKVVILGSGVRKSFKDLTLLNKDSRESTKRVEKDIVFCSNNCFILYSSTAQAKNSENKESIPSLPQSPMRETPSKAFHQYSNNISTLDVHCLPQLPEKASPPASPPIAFPPAFEAAQVEAKPDELKVTVKLKPRLRAVHGGFEDCRPLNKKWRGMKWKKWSIHIVIPKGTFKPPCEDEIDEFLKKLGTSLKPDPVPKDYRKCCFCHEEGDGLTDGPARLLNLDLDLWVHLNCALWSTEVYETQAGALINVELALRRGLQMKCVFCHKTGATSGCHRFRCTNIYHFTCAIKAQCMFFKDKTMLCPMHKPKGIHEQELSYFAVFRRVYVQRDEVRQIASIVQRGERDHTFRVGSLIFHTIGQLLPQQMQAFHSPKALFPVGYEASRLYWSTRYANRRCRYLCSIEEKDGRPVFVIRIVEQGHEDLVLSDISPKGVWDKILEPVACVRKKSEMLQLFPAYLKGEDLFGLTVSAVARIAESLPGVEACENYTFRYGRNPLMELPLAVNPTGCARSEPKMSAHVKRFVLRPHTLNSTSTSKSFQSTVTGELNAPYSKQFVHSKSSQYRKMKTEWKSNVYLARSRIQGLGLYAARDIEKHTMVIEYIGTIIRNEVANRKEKLYESQNRGVYMFRMDNDHVIDATLTGGPARYINHSCAPNCVAEVVTFERGHKIIISSSRRIQKGEEVRV

SEQ ID NO: 47404 - protein, 119 aa, Homo sapiens
MGTQDWAKKRQRWGRERQRSRGDKRERDIQTCKGWGLRQRQAPTTNQRQSPGAEDLGDTERQRCMTSTPLQASTQGHLLRHPSSLPELAQKYDHQREQELREWIEGVTGRRIGNNFMDG

SEQ ID NO: 47405 - protein, 185 aa, Homo sapiens
MEDSFQKVLLRKYEKCGHENLQLRKGCKSVDECKVHKEGYNKLNQCLTTAQSKVFQCGKYLKVFYKFLNSNRHTIRHTGKKCFKCKKCVKSFCIRLHKTQHKCVYITEKSCKCKECEKTFHWSSTLTNHKEIHTEDKPYKCEECGKAFKQLSTLTTHKIICAKEKIYKCEECGKAFLWSSTLTRH

SEQ ID NO: 47406 - protein, 95 aa, Homo sapiens
MGLTPSPCLQPLLTPQPWQLPCSRRKRDRDDNSVVGSDFEPWTNKRGEILARYTTTEKLSINLFMGSEKGKAGTATLAMSEKVRTRLEELDDFEE

SEQ ID NO: 47407 - protein, 122 aa, Homo sapiens
MATGTGKHKLLSTGPTEPWSIREKLCLASSVMRSGDQNWGWSYSVTQAGVQWRDLGSLQPLDFLGSRDPPTSAAQVAGTTGRRVSVSRAIKPFAEPGRPPDWFSQKHCASQYSELLETTETP

SEQ ID NO: 47408 - protein, 91 aa, Homo sapiens
MALTQGPLKFMDVAIEFSQEEWKCLDPAQRTLYRDVMLENYRNLVSLGICLPDLSVTSMLEQKRDPWTLQSEEKIANDPDGRECIKGVNTG

SEQ ID NO: 47409 - protein, 17 aa, Homo sapiens
  MOD_RES (1)..(1): Any amino acid
XFVPSFSGLQTLSHSVT

SEQ ID NO: 47410 - protein, 259 aa, Homo sapiens
MVKLANPLYTEWILEAIQKIKKQKQRPSEERICHAVSTSHGLDKKTVSEQLELSVQDGSVLKVTNKGLASYKDPDNPGRFSSVKPGTFPKSAKGSRGSCNDLRNVDWNKLLRRAIEGLEEPNGSSLKNIEKYLRSQSDLTSTTNNPAFQQRLRLGAKRAVNNGRLLKDGPQYRVNYGSLDGKGAPQYPSAFPSSLPPVSLLPHEKDQPRADPIPICSFCLGTKESNREKKPEELLSCADCGSSGKLCFSYVLYNDFPLS

SEQ ID NO: 47411 - protein, 888 aa, Homo sapiens
MDDSEVESTASILASVKEQEAQFEKLTRALEEERRHVSAQLERVRVSPQDANPLMANGTLTRRHQDHSHLLYSTIPRMQEPGQIVETYTEEDPEGAMSVVSVETSDDGTTRRTETTVKKVVKTVTTRTVQPVAMGPDGLPVDASSVSNNYIQTLGRDFRKNGNGGPGPYVGQAGTATLPRNFHYPPDGYSRHYEDGYPGGSDNYGSLSRVTRIEERYRPSMEGYRAPSRQDVYGPQPQVRVGGSSVDLHRFHPEPYGLEDDQRSMGYDDLDYGMMSDYGTARRTGTPSDPRRRLRSYEDMIGEEVPSDQYYWAPLAQHERGSLASLDSLRKGGPPPPNWRQPELPEVIAMLGFRLDAVKSNAAAYLQHLCYRNDKVKTDVRKLKGIPVLVGLLDHPKKEVHLGACGALKNISFGRDQDNKIAIKNCDGVPALVRLLRKARDMDLTEVITGTLWNLSSHDSIKMEIVDHALHALTDEVIIPHSGWEREPNEDCKPRHIEWESVLTNTAGCLRNVSSERSEARRKLRECDGLVDALIFIVQAEIGQKDSDSKLVENCVCLLRNLSYQVHREIPQAERYQEAAPNVANNTGPHAASCFGAKKGKGKKPIEDPANDTVDFPKRTSPARGYELLFQPEVVRIYISLLKESKTPAILEASAGAIQNLCAGRWTYGRYIRSALRQEKALSAIADLLTNEHERVVKAASGALRNLAVDARNKELIGKHAIPNLVKNLPGGQQNSSWNFSEDTVISILNTINEVIAENLEAAKKLRETQGIEKLVLINKSGNRSEKEVRAAALVLQTIWGYKELRKPLEKEGWKKSDFQVNLNNASRSQSSHSYDDSTLPLIDRNQKSDNNYSTPNERGDHNRTLDRSGDLGDMEPLKGTTPLMQKI

SEQ ID NO: 47412 - protein, 637 aa, Homo sapiens
MNVRDAKEKCPQLVLVNGEDLTRYREMSYKVTELLEEFSPVVERLGFDENFVDLTEMVEKRLQQLQSDELSAVTVSGHVYNNQSINLLDVLHIRLLVGSQIAAEMREAMYNQLGLTGCAGVASNKLLAKLVSGVFKPNQQTVLLPESCQHLIHSLNHIKEIPGIGYKTAKCLEALGINSVRDLQTFSPKILEKELGISVAQRIQKLSFGEDNSPVILSGPPQSFSEEDSFKKCSSEVEAKNKIEELLASLLNRVCQDGRKPHTVRLIIRRYSSEKHYGRESRQCPIPSHVIQKLGTGNYDVMTPMVDILMKLFRNMVNVKMPFHLTLLSVCFCNLKALNTAKKGLIDYYLMPSLSTTSRSGKHSFKMKDTHMEDFPKDKETNRDFLPSGRIESTRTRESPLDTTNFSKEKDINEFPLCSLPEGVDQEVFKQLPVDIQEEILSGKSREKFQGKGSVSCPLHASRGVLSFFSKKQMQDIPINPRDHLSSSKQVSSVSPCEPGTSGFNSSSSSYMSSQKDYSYYLDNRLKDERISQGPKEPQGFHFTNSNPAVSAFHSFPNLQSEQLFSRNHTTDSHKQTVATDSHEGLTENREPDSVDEKITFPSDIDPQVFYELPEAVQKELLAEWKRAGSDFHIGHK

SEQ ID NO: 47413 - protein, 260 aa, Homo sapiens
MAELDPFGAPAGAPGGPALGNGVAGAGEEDPAAAFLAQQESEIAGIENDEAFAILDGGAPGPQPHGEPPGGPDAVDGVMNGEYYQESNGPTDSYAAISQVDRLQSEPESIRKWREEQMERLEALDANSRKQEAEWKEKAIKELEEWYARQDEQLQKTKANNRVSLLPRLECNGVISAHCNLCLPGSSNSPASASRGAGITDMCHRARLIFVFLVEMGFHHVGQAGLKILTSNDLPASARARITGRWKGVKDVAMYVPSLP

SEQ ID NO: 47414 - protein, 141 aa, Homo sapiens
MSAAPAYSEDKGGSAGPGEPEYGHDPASGGIFSSDYKRHDDLKEMLDTNKDSLKLEAMKRIVAMIARGKNASDLFPAVVKNVACKNIEVKKLVYVYLVRYAEEQQDLALLSISTFQRGLKEPVVMAASSMNHLSPRRVESL

SEQ ID NO: 47415 - protein, 143 aa, Homo sapiens
MAKVSVLNVAVLENPSPFHSPFRFEISFECSEALADDLEWKIIYVGSAESEEFDQILDSVLVGPVPAGRHMFVFQLQRNILASNPRVTRFHINWDNNMDRLEAIETQDPSLGCGLPLNCTPIKGLGLPGCIPGLLPENSMDCI

SEQ ID NO: 47416 - protein, 64 aa, Homo sapiens
MIMEETGKIFKKEKEMKKGIAFPTSISVNNCVCHFSPLKSDQDYILKEGDLVKIDLGVHVDGFI

SEQ ID NO: 47417 - protein, 46 aa, Homo sapiens
MADFDTYDDRAYSSFGGGRGITLWLPASPGRFRRVFVAWLLLHHAD

SEQ ID NO: 47418 - protein, 42 aa, Homo sapiens
  MOD_RES (1)..(1): Any amino acid
XVYSFQEEEPVLDPHLAKHLAHFGIDMLHMHGRMGSRTMTSS

SEQ ID NO: 47419 - protein, 175 aa, Homo sapiens; identical to SEQ ID NO: 45445

SEQ ID NO: 47420 - protein, 65 aa, Homo sapiens
  MOD_RES (1)..(1): Any amino acid
XSNPARPGGFPGANSPGPVADLYGPASQDSGVGNYISAASPQPGSGFGHGIASIPGCPGKTGRSF

SEQ ID NO: 47421 - protein, 136 aa, Homo sapiens
  MOD_RES (1)..(1): Any amino acid
XNEEIVMPEEQTGLVRENYVWNVLLHRGATPEGIFLRVPTASYDLDLFTMTWGPTIAALSYVFDKSLEETIIQKAISGFSLLRTCPVYLEATLKPILQPRQYSIWPIVMVTSCGRAGRISWRPCCSSSEPNYCPRL

SEQ ID NO: 47422 - protein, 290 aa, Homo sapiens; identical to SEQ ID NO: 43868

SEQ ID NO: 47423 - protein, 129 aa, Homo sapiens
  MOD_RES (1)..(1): Any amino acid
XKHSSGEQDTSTLPSPPLLTTVEDVNQDNKTKTWPPKAPWQHPSPLPSTLPSPSAPLYAVTSPGSQWNDTMQMLQSPVWAATNDCSAAAFSYVQTPPQPPPPPAHKAAPKGFKAFPGKGERRPAYLPQY

SEQ ID NO: 47424 - protein, 54 aa, Homo sapiens
  MOD_RES (1)..(1): Any amino acid
XHDDLYLNASSFLALINGERDHPNATVWRKNFLRVGHLVLIGGPDDGVITPWQS

SEQ ID NO: 47425 - protein, 78 aa, Homo sapiens
ATMLSLESELQRLQEPVEISGAIEEEFTVARLYISKIKSEVKSVVKRCRQLENLQVECHRKMEVTGRELSSCQLLISQ

SEQ ID NO: 47426 - protein, 25 aa, Homo sapiens
MAAAAKPNNLSLVVHGPGDLRLLHC

SEQ ID NO: 47427 - protein, 39 aa, Homo sapiens
  MOD_RES (1)..(1): Any amino acid
XSEEEVEEPEERQQTPEVVPDDSGTFYDQAVVRHFLGHL

SEQ ID NO: 47428 - protein, 44 aa, Homo sapiens
LSEMSVTLLRDPSMSPLGVATLTPSSTCPSLVEGRYGATDLRPP

SEQ ID NO: 47429 - protein, 17 aa, Homo sapiens
  MOD_RES (1)..(1): Any amino acid
XNWFDPWGQGTLVTVSS

SEQ ID NO: 47430 - protein, 392 aa, Homo sapiens
  MOD_RES (1)..(1): Any amino acid
XFLLVFSCLVLSVFSTIKEYEKSSEGALYILEIVTIVVFGVEYFVRIWAAGCCCRYRGWRGRLKFARKPFCVIDIMVLIASIAVLAAGSQGNVFATSALRSLRFLQILRMIRMDRRGGTWKLLGSVVYAHSKELVTAWYIGFLCLILASFLVYLAEKGENDHFDTYADALWWGLITLTTIGYGDKYPQTWNGRLLAATFTLIGVSFFALPAGILGSGFALKVQEQHRQKHFEKRRNPAAGLIQSAWRFYATNLSRTDLHSTWQYYERTVTVPMYSSQTQTYGASRLIPPLNQLELLRNLKSKSGLAFRKDPPPEPSPSQKVSLKDRVFSSPRGVAAKGKGSPQAQTVRRSPSADQSLEDSPSKVPKSWSFGDRSRARQAFRIKGAASRQNSE

SEQ ID NO: 47431 - protein, 53 aa, Homo sapiens
PIYANRFAVPTYAAKQPQQFPSRPPPPQPKVSSQGNLIPARPAPAPPLYSSLT

SEQ ID NO: 47432 - protein, 40 aa, Homo sapiens
MLAKLLCDQVVGAPIAVSAFYAESCFIAQPGVCSGLISAH

SEQ ID NO: 47433 - protein, 109 aa, Homo sapiens
MAPWLQLLSLLGLLPGAVAAPAQPRAASFQAWGPPSPELLAPTRFALEMFNRGRAAGTRAVLGLVRGRVRRAGQGSLYSLEATLEEPPCNDPMVCRLPVSKKTLLPSPG

SEQ ID NO: 47434 - protein, 59 aa, Homo sapiens
RLPGRRGPGAAAWGWSPIADSAQQRCSAVAARCGMGTAVWGSCYVPKQRNSPLEASTLE

SEQ ID NO: 47435 - protein, 1494 aa, Homo sapiens
MDDDSLDELVARSPGPDGHPQVGPADPAGDFEESSVGSSGDSGDDSDSEHGDGTDGEDEGASEEEDLEDRSGSEDSEDDGETLLEVAGTQGKLEAAGSFNSDDDAESCPICLNAFRDQAVGTPENCAHYFCLDCIVEWSKNANSCPVDRTLFKCICIRAQFGGKILRKIPVENTKASEEEEDPTFCEVCGRSDREDRLLLCDGCDAGYHMECLDPPLQEVPVDEWFCPECAAPGVVLAADAGPVSEEEVSLLLADVVPTTSRLRPRAGRTRAIARTRQSERVRATVNRNRISTARRVQHTPGRLGSSLLDEAIEAVATGLSTAVYQRPLTPRTPARRKRKTRRRKKVPGRKKTPSGPSAKSKSSATRSKKRQHRVKKRRGKKVKSEATTRSRIARTLGLRRPVHSSCIPSVLKPVEPSLGLLRADIGAASLSLFGDPYELDPFDSSEELSANPLSPLSAKRRALSRSALQSHQPVARPVSVGLSRRRLPAAVPEPDLEEEPVPDLLGSILSGQSLLMLGSSDVIIHRDGSLSAKRAAPVSFQRNSGSLSRGEEGFKGCLQPRALPSGSPAQGPSGNRPQSTGLSCQGRSRTPARTAGAPVRLDLPAAPGAVQARNLSNGSVPGFRQSHSPWFNGTNKHTLPLASAASKISSRDSKPPCRSVVPGPPLKPAPRRTDISELPRIPKIRRDDGGGRRDAAPAHGQSIEIPSACISRLTGREGTGQPGRGTRAESEASSRVPREPGVHTGSSRPPAPSSHGSLAPLGPSRGKGVGSTFESFRINIPGNMAHSSQLSSPGFCNTFRPVDDKEQRKENPSPLFSIKKTKQLRSEVYDPSDPTGSDSSAPGSSPERSGPGLLPSEITRTISINSPKAQTVQAVRCVTSYTVESIFGTEPEPPLGPSSAMSKLRGAVAAEGASDTEREEPTESQGLAARLRRPSPPEPWDEEDGASCSTFFGSEERTVTCVTVVEPEAPPSPDVLQAATHRVVELRPPSRSRSTSSSRSRKKAKRKRVSREHGRTRSGTRSESRDRSSRSASPSVGEERPRRQRSKAKSRRSSSDRSSSRERAKRKKAKDKSREHRRGPWGHSRRTSRSRSGSPGSSSYEHYESRKKKKRRSASRPRGRECSPTSSLERLCRHKHQRERSHERPDRKESVAWPRDRRKRRSRSPSSEHRAREHRRPRSREKWPQTRSHSPERKGAVREASPAPLAQGEPGREDLPTRLPALGEAHVSPEVATADKAPLQAPPVLEVAAECEPDDLDLDYGDSVEAGHVFDDFSSDAVFIQLDDMSSPPSPESTDSSPERDFPLKPALPPASLAVAAIQREVSLMHDEDPSQPPPLPEGTQEPHLLRPDAAEKAEAPSSPDVAPAGKEDSPSASGRVQEAARPEEVVSQTPLLRSRALVKRVTWNLQESESSAPAEDRAPRAPLHRPQKPREGAWDMEDVAPTGVRQAFSELPFPSHVLPEPGFPDTDPSQPQSQPVKPLQPATRRRRPRPPG

SEQ ID NO: 47436 - protein, 52 aa, Homo sapiens
LSKKKARRRHTDDPSKECFTLKFDLNVDIETEIVPAMKKKSLGSQACVWAGV

SEQ ID NO: 47437 - protein, 82 aa, Homo sapiens
MRQRLLPSVTSLLLVALLFPGSSQARHVNHSATEALGELRERAPGQGTNGFQLLRHAVKRDLLQPRTPPYQGTGQQHRQRCG

SEQ ID NO: 47438 - protein, 83 aa, Homo sapiens
  MOD_RES (1)..(1): Any amino acid
XNEEIVMPEEQTGLVRENYVWNVLLHRGATPEGIFLRVPTASYDLDLFTMTWGPTIAALSYVFDKSLEETIIQKAISGFSSQQ

SEQ ID NO: 47439 - protein, 36 aa, Homo sapiens
VHLALFLAQSLFLNQLFLQGGLVLFSYTYERTTSLC

SEQ ID NO: 47440 - protein, 66 aa, Homo sapiens
DAAVSALAALCSEYYMKEPGEADPAIQEELITQYLAELRNPEEMTRCGFSLALGALPGFLLKGRLQ

SEQ ID NO: 47441 - protein, 34 aa, Homo sapiens
  MOD_RES (1)..(1): Any amino acid
XDEEEVEEEAERRKERCKRGRFVVKEEKKDSNEA

SEQ ID NO: 47442 - protein, 241 aa, Homo sapiens
  MOD_RES (1)..(1): Any amino acid
XPDGRLLRGHNQYAYDGKDYIALNEDLRSWTAADTAAQITQRKWEAARVAEQDRAYLEGTCVEWLRRYLENGKDTLERADPPKTHVTHHPISDHEATLRCWALGFYPAEITLTWQRDGEDQTQDTELVETRPAGDRTFQKWAAVVVPSGEEQRYTCHVQHEGLPKPLTLRWEPSSQSTVPIVGIVAGLAVLAVVVIGAVVAAVMCRRKSSGHFLPTGGKGGSYSQAACSDSAQGSDVSLTA

SEQ ID NO: 47443 - protein, 65 aa, Homo sapiens
NFGIFSEYEYEILWTTNFGKCDKNKVEDSSKEPVRRDGVSLCCPCCWLLGLSNPPTLACQSAGIE

SEQ ID NO: 47444 - protein, 58 aa, Homo sapiens
  MOD_RES (1)..(1): Any amino acid
XPSSVNEKKRREREERQNIVLWRQPLITLQYFSLEILVILKEWTSKTLPPGPNWQFKN

SEQ ID NO: 47445 - protein, 47 aa, Homo sapiens
  MOD_RES (1)..(1): Any amino acid
XTKPPTTSTEGGAASPTSPRCHMTGRVLWETLISLRWCGPEQSWYLG

SEQ ID NO: 47446 - protein, 202 aa, Homo sapiens
MGRRSRGRRLQQQQRPEDAEDGAEGGGKRGEAGWEGGYPEIVKENKLFEHYYQELKIVPEGEWGQFMDALREPLPATLRITGYKSHAKEILHCLKNKYFKELEDLEVDGQKVEVPQPLSWYPEELAWHTNLSRKILRKSPHLEKFHQFLVSETESGNISRQEAVSMIPPLLLNVRPHHKRDLLLRMMWTTSAATCSSIKPRG

SEQ ID NO: 47447 - protein, 295 aa, Homo sapiens
MAPEENAGTELLLQGFERRFLAVRTLRSFPWQSLEAKLRDSSDSELLRDILQKTVRHPVCVKHPPSVKYAWCFLSELIKKSSGGSVTLSKSTAIISHGTTGLVTWDAALYLAEWAIENPAAFINRTVLELGSGAGLTGLAICKMCRPRAYIFSDPHSRILEQLRGNVLLNGLSLEADITGNLDSPRVTVAQLDWDVAMVHQLSAFQPDVVIAADVLYCPEAIVSLVGVLQRLAACREHKRAPEVYVAFTVRNPETCQLFTTELGRDGIRWEAEAHHDQKLFPYGEHLEMAMLNLT

SEQ ID NO: 47448 - protein, 845 aa, Homo sapiens
MPAVKKEFPGREDLALALATFHPTLAALPLPPLPGYLAPLPAAAALPPAASLPASAAGYEALLAPPLRPPRAYLSLHEAAPHLHLPRDPLALERFSATAAAAPDFQPLLDNGEPCIEVECGANRALLYVRKLCQGSKGPSIRHRGEWLTPNEFQFVSGRETAKDWKRSIRHKGKSLKTLMSKGILQVHPPICDCPGCRISSPVNRGRLADKRTVALPAARNLKKERTPSFSASDGDSDGSGPTCGRRPGLKQEDGPHIRIMKRRVHTHWDVNISFREASCSQDGNLPTLISSVHRSRHLVMPEHQSRCEFQRGSLEIGLRPAGDLLGKRLGRSPRISSDCFSEKRARSESPQAEALLLPRELGPSMAPEDHYRRLVSALSEASTFEDPQRLYHLGLPSHDLLRVRQEVAAAALRGPSGLEAHLPSSTAGQRRKQGLAQHREGAAPAAAPSFSERELPQPPPLLSPQNAPHVALGPHLRPPFLGVPSALCQTPGYGFLPPAQAEMFAWQQELLRKQNLARLELPADLLRQKELESARPQLLAPETALRPNDGAEELQRRGALLVLNHGAAPLLALPPQGPPGSGPPTPSRDSARRAPRKGGPGPASARPSESKEMTGARLWAQDGSEDEPPKDSDGEDPETAAVGCRGPTPGQAPAGGAGAEGKGLFPGSTLPLGFPYAVSPYFHTGAVGGLSMDGEEAPAPEDVTKWTVDDVCSFVGGLSGCGEYTRVFREQGIDGETLPLLTEEHLLTNMGLKLGPALKIRAQVARRLGRVFYVASFPVALPLQPPTLRAPERELGTGEQPLSPTTATSPYGGGHALAGQTSPKQENGTLALLPGAPDPSQPLC

SEQ ID NO: 47449 - protein, 70 aa, Homo sapiens
EWGNPSSDEKHKNYIKRYCPYQNIKPQHYPSIHITAYENDERVPLKGIVSYTEKLKEAIAEHAKDTGEGA

SEQ ID NO: 47450 - protein, 198 aa, Homo sapiens
MGIFPGIILIFLRVKFATAAVIVSGHQKSTTVSHEMSGLNWKPFVYGGLASIVAEFGTFPVDLTKTRLQVQGQSIDARFKEIKYRGMFHALFRICKEEGVLALYSGIAPALLRQASYGTIKIGIYQSLKRLFVERLEDETLLINMICGVVSGVISSTIANPTDVLKIRMQAQGSLFQGSMIGSFIDIYQQEGTRGLWR

SEQ ID NO: 47451 - protein, 1135 aa, Homo sapiens
MAAEEGVASAASAGGSWGTAAMGRVLPMLLVPVPAEAMGQLGSRAQLRTQPEALGSLTAAGSLQVLSLTPGSRGGGRCCLEGPFWHFLWEDSRNSSTPTEKPKLLALGENYELLIYEFNLKDGRCDATILYSCSREALQKLIDDQDITHVDLALHKEDMCNEQQQEPAKISSFTSLKVSQDLDVAVIVSSSNSAVALNLNLYFRQHPGHLLCERILEDLPIQGPKGVDEDDPVNSAYNMKLAKFSFQIDRSWKAQLSSLNETIKNSKLEVSCCAPWFQDILHLESPESGNHSTSVQSWAFIPQDIMHGQYNVLQKDHAKTSDPGRSWKIMHISEQEEPIELKCVSVTGFTALFTWEVERMGYTITLWDLETQGMQCFSLGTKCIPVDSSGDQQLCFVLTENGLSLILFGLTQEEFLNRLMIHGSASTVDTLCHLNGWGRCSIPIHALEAGIENRQLDTVNFFLKSKENLFNPSSKSSVSDQFDHLSSHLYLRNVEELIPALDLLCSAIRESYSEPQSKHFSEQLLNLTLSFLNNQIKELFIHTEELDEHLQKGVNILTSYINELRTFMIKFPWKLTDAIDEYDVHENVPKVKESNIWKKLSFEEVIASAILNNKIPEAQTFFRIDSHSAQKLEELIGIGLNLVFDNLKKNNIKEASELLKNMGFDVKGQLLKICFYTTNKNIRDFLVEILKEKNYFSEKEKRTIDFVHQVEKLYLGHFQENMQIQSFPRYWIKEQDFFKHKSVLDSFLKYDCKDEFNKQDHRIVLNWALWWDQLTQESILLPRISPEEYKSYSPEALWRYLTARHDWLNIILWIGEFQTQHSYASLQQNKWPLLTVDVINQNTSCNNYMRNEILDKLARNGVFLASELEDFECFLLRLSRIGGVIQDTLPVQNYKTKEGWDFHSQFILYCLEHSLQHLLYVYLDCYKLSPENCPFLEKKELHEAHPWFEFLVQCRQVASNLTDPKLIFQASLANAQILIPTNQASVSSMLLEGHTLLALATTMYSPGGVSQVVQNEENENCLKKVDPQLLKMALTPYPKLKTALFPQCTPPSVLPSDITIYHLIQSLSPFDPSRLFGWQSANTLAIGALWEVKVGRSPEARSSRPAWPTWRNPVSTMHGVISHISLALTWLINML

SEQ ID NO: 47452 - protein, 616 aa, Homo sapiens
  MOD_RES (1)..(1): Any amino acid
XRAPTLPDTLQGSLLWAAGQRQQGQCLLLWQARAQQFQGTARWYQHTRQRRIFLSWSRWATAQWAWRELASHRAWDRTCRAVLGLWRQRLLQSRLVEWWAQERGWRLARDALCHWHSCWQGQQFLHEKCQTWVQVHLQGLQKVVFRSWQQAAAHQRCTVTRPEQLLLQSYFQAWCEVVRDTGVLRAQHQAFQDGLRRRALGAVFATWREAQEVAAGAQEQRVAQASLARWRSCGQQGQEDGQQKKARAPQAFPAWPVAPGMHHEAQQQAGESAGAQAAQCWTWCWALWVHESCRGQVSRAHASWKPRAWVLEASVQSAVRGGVQRAILTQLRPAELRRFLRTVQLRVRLGLPGAGKTRSCWTQATELVPPAPSLQCSLGGRRKPRGTAWAQRCREHSLCPAFQLWPQWPGQSSWVPGLPLWTRDQGPRAHSSPEPRACKAQSKAHKRRLRARSCRILEKQAQAHGSALLLALKGHDALGHQEEVPAAPVPRGTASRAAGFPAGQVPGSGMAALGGCPRGRAAGADPAQGVAPEMGLADVVAADPATASGSAVTAAGRWAFKKWHQRLAARSPRRGAASSPRPWSKPGPKGPESGQEAARAPRGWGLGAEHGAQLQL

SEQ ID NO: 47453 - protein, 93 aa, Homo sapiens
KRFRPGSGPPSRAGSFPPGRQVVMLLTAGSGGRGGGGGRRQQPPLAQPSASPYPEAVELQRRSLPIFQARGQLLAQLRNLDNAVLIGWLYSAL

SEQ ID NO: 47454 - protein, 321 aa, Homo sapiens
MADNLDEFIEEQKARLAEDKAELESDPPYMEMKGKLSAKLSENSKILISMAKENIPPNSQQTRGSLGIDYGLSLPLGEDYERKKHKLKEELRQDYRRYLTQERLKLERNKEYNQFLRGKEESSEKFRQVEKSTEPKSQRNKKPIGQVKPDLTSQIQTSCENSEGPRKDVLTPSEAYEELLNQRRLEEDRYRQLDDEIELRNRRIIKKANEEVGISNLKHQRFASKAGIPDRRFHRFNEDRVFDRRYHRPDQDPEVSEEMDERFRYESDFDRRLSRVYTNDRIAPLPPPPLLPPLATNYRTPYDDAYYFYGSRNTFDPSLAY

SEQ ID NO: 47455 - protein, 199 aa, Homo sapiens
MAQWEMLQNLDSPFQDQLHQLYSHSLLPVDIRQYLAVWIEDQNWQEAALGSDDSKATMLFFHFLDQLNYECGRCSQDPESLLLQHNLRKFCRDIQDPTQLAEMIFNLLLEEKRILIQAQRAQLEQGEPVLETPVESQQHEIESRILDLRAMMEKLVKSISQLKDQQDVFCFRYKIQAKGRKHIEGLEKDKCLLRSRSWK

SEQ ID NO: 47456 - protein, 153 aa, Homo sapiens
MSVGVSTSAPLSPTSGTSVGMSTFSIMDYVVFVLLLVLSLAIGLYHACRGWGRHTVGELLMADRKMGCLPVALSLLATFQSAVAILGVPSEIYRFGTQYWFLGCCYFLGLLIPAHIFIPVFYRLHLTSAYEYLELRFNKTVRVCGTVTFIFQM

SEQ ID NO: 47457 - protein, 14 aa, Homo sapiens
MVQGKELPLLHRVA

SEQ ID NO: 47458 - protein, 125 aa, Homo sapiens
MAGVLKKTTGLVGLAVCNTPHERLRILYTKILDVLEEIPKNAAYRKYTEQITNEKLAMVKAEPDVKKLEDQLQGGQLEEVILQICIFFLQLLAEHELNLARKMREWKLWEPLVEEPPADQWKWPI

SEQ ID NO: 47459 - protein, 72 aa, Homo sapiens
SIRLWTSPTFQWLIPDSADTTATPTHCAYDRIVVAGMLLRGAVVPDSALPFNFQAAYGLSDQLVCVLPCTAT

SEQ ID NO: 47460 - protein, 117 aa, Homo sapiens
MLSNESLHPPAFSRSNSEASVDSASMEDFWREIESIKDSSMGGQEEPPPAEVTPVDEGELEAEWLQDVGLSTLISGDEEEDGKALLSTLTRTQAAAVQKRYHTYTQTMRKKDKQSIR

SEQ ID NO: 47461 - protein, 542 aa, Homo sapiens
MHCKVSLLDDTVYECVVEKHAKGQDLLKRVCEHLNLLEEDYFGLAIWDNATSKTWLDSAKEIKKQVRGVPWNFTFNVKFYPPDPAQLTEDITRYYLCLQLRQDIVAGRLPCSFATLALLGSYTIQSELGDYDPELHGVDYVSDFKLAPNQTKELEEKVMELHKSYRSMTPAQADLEFLENAKKLSMYGVDLHKAKDLEGVDIILGVCSSGLLVYKDKLRINRFPWPKVLKISYKRSSFFIKIRPGEQEQYESTIGFKLPSYRAAKKLWKVCVEHHTFFRLTSTDTIPKSKFLALGSKFRYSGRTQAQTRQASALIDRPAPHFERTASKRASRSLDGAAVDSADRSPRPTSAPAITQGQVAEGGVLDASAKKTVVPKAQKETVKAEVKKEDEPPEQAEPEPTEAWKVEKTHIEVTVPTSNGDQTQDLDKSQEEIKKHHASISELKKNFMESVPEPRPSEWDKRLSTHSPFRTLNINGQIPTGEGVKKTSVLPSERKVGGPESPSYFLPDTYHLGVCKEPVLNFQTDQRRLAQLRELRAKFFLS

SEQ ID NO: 47462 - protein, 65 aa, Homo sapiens
MGWALVDLLLVSGAAAATTVAWYQVSPLAARLLYPYLAWLAFTTTLNYCVWRDNHGWRGGRRLPE

SEQ ID NO: 47463 - protein, 159 aa, Homo sapiens
MESPEEPGASMDENYFVNYTFKDRSHSGRVAQGIMKLCLEEELFADVTISVEGREFQLHRLVLSAQSCFFRSMFTSNLKEAHNRVIVLQDVSESVFQLLVDYIYHGTVKLRAEELQEIYEVSDMYQLTSLFEECSRFLARTVQVGNCLQVMWLADRHSD

SEQ ID NO: 47464 - protein, 79 aa, Homo sapiens
MLYLQGWSMPAVAEVKLRDDQYTLEHMHAFGMYNYLHCDSWYQDSVYYIDTLGRIMNLTVMLILKYLNHSIGYCTHLSD

SEQ ID NO: 47465 - protein, 230 aa, Homo sapiens
MAAVPELLQQQEEDRSKTTLPTFQSPEFSVTRQHEDFVWLHDTLIETTDYAGLIIPPAPTKPDFDGPREKMQKLGEGEGSMTKEEFAKMKQELEAEYLAVFKKTVSSHEVFLQRLSSHPVLSKDRNFHVFLEYDQDLSVRRKNTKEMFGGFFKSVVKSADEVLFTGVKEVDDFFEQEKNFLINYYNRIKDSCVKADKMTRSHKNVADDYIHTAACLHSLALEEPTVIKKY

SEQ ID NO: 47466 - protein, 254 aa, Homo sapiens
  MOD_RES (1)..(1): Any amino acid
XDSDHDMAFPVKEICAEKGDDMPAIMLVNTPTVTPTTTPPPAAAVFTPTLSDISIDKLKVSSPELPKPWGDGDLPLEEENPNSPQEELHPRAIVMSVAKDEEPESMDFPAQPPPPEPVPFMPFPAGTKAPSPSQMPGSDSSTLESTLSVTVTETETLDKPISEGEILFSCGQKLAPKILEDIGLYLTNLNDSLSSTLHDAVEMEDDPPSEGQVIRMSHKKFHADAILSFAKQNQESAVSQQAVYHSEVSGSFDL

SEQ ID NO: 47467 - protein, 41 aa, Homo sapiens
MPQLYIYIRLLGAYLFIISRVQGQNLDSMLHGTGMKSDSDQ

SEQ ID NO: 47468 - protein, 435 aa, Homo sapiens
IASNSWNASSSPGEAREDGPEGLDKGLDNDAEGVWSPDIEQSFQEALAIYPPCGRRKIILSDEGKMYGRNELIARYIKLRTGKTRTRKQVSSHIQVLARKKVREYQVGIKAMNLDQVSKDKALQSMASMSSAQIVSASVLQNKFSPPSPLPQAVFSTSSRFWSSPPLLGQQPGPSQDIKPFAQPAYPIQPPLPPTLSSYEPLAPLPSAAASVPVWQDRTIASSRLRLLEYSAFMEVQRDPDTYSKHLFVHIGQTNPAFSDPPLEAVDVRQIYDKFPEKKGGLKELYEKGPPNAFFLVKFWADLNSTIQEGPGAFYGVSSQYSSADSMTISVSTKVCSFGKQVVEKVETEYARLENGRFVYRIHRSPMCEYMINFIHKLKHLPEKYMMNSVLENFTILQVVTSRDSQETLLVIAFVFEVSTSEHGAQHHVYKLVKD

SEQ ID NO: 47469 - protein, 40 aa, Homo sapiens
MLLTQSLFGGLFPRTRETMRREAVPDDNELPRNKHLNWKS

SEQ ID NO: 47470 - protein, 139 aa, Homo sapiens
MPGWEFCLRCWEPVTCSTQVEDAMLMFDKTTNRHRGFGFVTFENEDVVEKVCEIHFHEINNKMVECKKAQPKEVMFPPGTRGRARGLPYTMDAFMLGMGMLGYPNFVATYGRGYPGFAPSYGYQFPDYLPVSQDIIFIN

SEQ ID NO: 47471 - protein, 578 aa, Homo sapiens
MCSEARLARRAVEELLRCGADPNLVLEDGAAAVHLAAGARHPRGLRCLGALLRQGGDPNARSVEALTPLHVAAAWGCRRGLELLLSQGADPALRDQDGLRPLDLALQQGHLECARVLQDLDTRTRTRTRIGAETQEPEPAPGTPGLSGPTDETLDSIALQKQPCRGDNRDIGLEADPGPPSLPVPLETVDKHGSSASPPGHWDYSSDASFVTAVEVSGAEDPASDTPPWAGSLPPTRQGLLHVVHANQRVPRSQGTEAELNARLQALTLTPPNAAGFQSSPSSMPLLDRSPAHSPPRTPTPGASDCHCLWEHQTSIDSDMATLWLTEDEASSTGGREPVGPCRHLPVSTVSDLELLKGLRALGPEFSGHSLELAAALRTGCIPDVQADEDALAQQFEQPDPARRWREGVVKSSFTYLLLDPRETQDLPARAFSLTPAERLQTFIRAIFYVGKGTRARPYVHLWEALGHHGRSRKQPHQACPKVRQILDIWASGCGVVSLHCFQHVVAVEAYTREACIVEALGIQTLTNQKQGHCYGVVAGWPPARRRRLGVHLLHRALLVFLAEGERQLHPQDIQARG

SEQ ID NO: 47472 - protein, 35 aa, Homo sapiens
MVVVIVCLLNHYKVSTRSFINRPNQSRRREDGLPQ

SEQ ID NO: 47473 - protein, 81 aa, Homo sapiens
ELVVDKTKRKKRRELSEEQKQEIKDAFELFDTDKDEAIDYHELKVAMRALGFDVKKADVLKILKDYDREATGKITFEDFNE

SEQ ID NO: 47474 - protein, 375 aa, Homo sapiens
MIVPAAPYLPGLIQGNQEAAAAPDTMAQPYASAQFAPPQNGIPAEYTAPHPHPAPEYTGQTTVPEHTLNLYPPAQTHSEQSPADTSAQTVSGTATQTDDAAPTDGQPQTQPSENTENKSQPKRLHVSNIPFRFRDPDLRQMFGQFGKILDVEIIFNERGSKGFGFVTFENSADADRAREKLHGTVVEGRKIEVNNATARVMTNKKTVNPYTNGWKLNPVVGAVYSPEFYAVPGFPYPAATAAAAYRGAHLRGRGRTVYNTFRAAAPPPPIPAYGGVVYQDGFYGADIYGGYAAYRYAQPTPATAAAYSDSYGRVYAADPYHHALAPAPTYGVGAMNAFAPLTDAKTRSHADDVGLVLSSLQASIYRGGYNRFAPY

SEQ ID NO: 47475 - protein, 183 aa, Homo sapiens
MSSEQKSQHCKPEEGVEAQEEALGLVGAQAPTTEEQEAAVSSSSPLVPGTLEEVPAAESAGPPQSPQGASALPTTISFTCWRQPNEGSSSQEEEGPSTSPDAESLFREALSNKVDELAHFLLRKYRAKELVTKAEMLERVIKNYKRCFPVIFGKASESLKMIFGIDVKEVDPASNTYTLVTCL

SEQ ID NO: 47476 - protein, 166 aa, Homo sapiens
MVLHSDEFHPFIEALLPHVRAIAYTWFNLQARKRKYFKKHEKRMSKDEERAVKDELLSEKPEIKQKWASRLLAKLRKDIRQEYREDFVLTVTGKKHPCCVLSNPDQKGKIRRIDCLRQADKVWRLDLVMVILFKGIPLESTDGERLMKSPHCTNPALCVQPHHITV

SEQ ID NO: 47477 - protein, 80 aa, Homo sapiens
VTFEDVAVHFTKTEWTGLSPAQRALYRSVMLENFGNLTALGYPVPKPALISLLERGDMAWGLEAQDDPPAERTKNVCKGR

SEQ ID NO: 47478 - protein, 73 aa, Homo sapiens
MADAGIRRVVPSDLYPLVLGFLRDNQLSEVANKFAKATGATQQDANASSLLDIYSFWLNRSASWEGCSQSIRE

SEQ ID NO: 47479 - protein, 61 aa, Homo sapiens
MNYDKLSRALRYYYNKRILHKTKGKRFTYKFNFNKLVLVNYPFIDVGLAGAVPHRGPPLTT

SEQ ID NO: 47480 - protein, 1292 aa, Homo sapiens
MSRSRASIHRGSIPAMSYAPFRDVRGPSMHRTQYVHSPYDRPGWNPRFCIISGNQLLMLDEDEIHPLLIRDRRSESSRNKLLRRTVSVPVEGRPHGEHEYHLGRSRRKSVPGGKQYSMEGAPAAPFRPSQGFLSRRLKSSIKRTKSQPKLDRTSSFRQILPRFRSADHDRARLMQSFKESHSHESLLSPSSAAEALELNLDEDSIIKPVHSSILGQEFCFEVTTSSGTKCFACRSAAERDKWIENLQRAVKPNKDNSRRVDNVLKLWIIEARELPPKKRYYCELCLDDMLYARTTSKPRSASGDTVFWGEHFEFNNLPAVRALRLHLYRDSDKKRKKDKAGYVGLVTVPVATLAGRHFTEQWYPVTLPTGSGGSGGMGSGGGGGSGGGSGGKGKGGCPAVRLKARYQTMSILPMELYKEFAEYVTNHYRMLCAVLEPALNVKGKEEVASALVHILQSTGKAKDFLSDMAMSEVDRFMEREHLIFRENTLATKAIEEYMRLIGQKYLKDAIGEFIRALYESEENCEVDPIKCTASSLAEHQANLRMCCELALCKVVNSHCVFPRELKEVFASWRLRCAERGREDIADRLISASLFLRFLCPAIMSPSLFGLMQEYPDEQTSRTLTLIAKVIQNLANFSKFTSKEDFLGFMNEFLELEWGSMQQFLYEISNLDTLTNSSSFEGYIDLGRELSTLHALLWEVLPQLSKEALLKLGPLPRLLNDISTALRNPNIQRQPSRQSERPRPQPVVLRGPSAEMQGYMMRDLNSSMDMARLPSPTKEKPPPPPPGGGKDLFYVSRPPLARSSPAYCTSSSDITEPEQKMLSVNKSVSMLDLQGDGPGGRLNSSSVSNLAAVGDLLHSSQASLTAALGLRPAPAGRLSQGSGSSITAAGMRLSQMGVTTDGVPAQQLRIPLSFQNPLFHMAADGPGPPGGHGGGGGHGPPSSHHHHHHHHHHRGGEPPGDTFAPFHGYSKSEDLSSGVPKPPAASILHSHSYSDEFGPSGTDFTRRQLSLQDNLQHMLSPPQITIGPQRPAPSGPGGGSGGGSGGGGGGQPPPLQRGKSQQLTVSAAQKPRPSSGNLLQSPEPSYGPARPRQQSLSKEGSIGGSGGSGGGGGGGLKPSITKQHSQTPSTLNPTMPASERTVAWVSNMPHLSADIESAHIEREEYKLKEYSKSMDESRLDREYEEEIHSLKERLHMSNRKLEEYERRLLSQEEQTSKILMQYQARLEQSEKRLRQQQAEKDSQIKSIIGRLMLVEEELRRDHPAMAEPLPEPKKRLLDAQRGSFPPWVQQTRV

SEQ ID NO: 47481 - protein, 130 aa, Homo sapiens
MEGATDVNESGSRSSKTFKPKKNIPEGSHQYELLKHAEATLGSGNLRMAVMLPEGEDLNEWVAVNTVDFFNQINMLYGTITDFCTEESCPVMSAGPKYEYHWADGTNIKKPIKCSAPKYIDYLMTWVQDQ

SEQ ID NO: 47482 - protein, 92 aa, Homo sapiens
MSVSEIFVELQGFLAAEQDIREEIRKVVQSLEQTAREILTLLQGVHQGAGFQDSKFFVLYPIISLLFRGRVSIQKTFYNEKWLSCFMFQRGV

SEQ ID NO: 47483 - protein, 203 aa, Homo sapiens
AQAAGPPEWPPGSPQALRQPGRARVAMAALVWLLAGASMSSLNKWIFTVHGFGRPLLLSALHMLVAALACHRGARRPMPGGTRCRVLLLSLTFGTSMACGNVGLRAVPLDLAQLVTTTTPLFTLALSALLLGRRHHPLQLAAMGPLCLGAACSLAGEFRTPPTGCGFLLAATCLRGLKSVQQNPDLVHSAEDCRSLRSLKIST

SEQ ID NO: 47484 - protein, 212 aa, Homo sapiens
MDLFGDLPEPERSPRPAAGKEAQKGPLLFDDLPPASSTDSGSGGPLLFDDLPPASSGDSGSLATSISQMVKTEGKGAKRKTSEEEKNGSEELVEKKVSSSVIFGLKGYVAERKGEREEMQDAHVILNDITEECRPPSSLITRVSYFAVFDGHGGIRASKFAAQNLHQNLIRKFPKGDVISVEKTVKRCLLDTFKHTDEEFLKQASSQKPAWK

SEQ ID NO: 47485 - protein, 49 aa, Homo sapiens
MNGHLEAEEQQDQRSPLTCYLGRPGCFYWSIPLGVGAWPGSGVRTTCFP

SEQ ID NO: 47486 - protein, 1690 aa, Homo sapiens
MNQADAPRPLNWTIRKLCHAAFLPSVRLLKAQKSWIERAFYKRECVHIIPSTKDPHRCCCGRLIGQHVGLTPSISVLQNEKNESRLSRNDIQSEKWSISKHTQLSPTDAFGTIEFQGGGHSNKAMYVRVSFDTKPDLLLHLMTKEWQLELPKLLISVHGGLQNFELQPKLKQVFGKGLIKAAMTTGAWIFTGGVNTGVIRHVGDALKDHASKSRGKICTIGIAPWGIVENQEDLIGRDVVRPYQTMSNPMSKLTVLNSMHSHFILADNGTTGKYGAEVKLRRQLEKHISLQKINTRIGQGVPVVALIVEGGPNVISIVLEYLRDTPPVPVVVCDGSGRASDILAFGHKYSEEGGLINESLRDQLLVTIQKTFTYTRTQAQHLFIILMECMKKKELITVFRMGSEGHQDIDLAILTALLKGANASAPDQLSLALAWNRVDIARSQIFIYGQQWPVGSLEQAMLDALVLDRVDFVKLLIENGVSMHRFLTISRLEELYNTRHGPSNTLYHLVRDVKKREYPGFGWIYFKGNLPPDYRISLIDIGLVIEYLMGGAYRCNYTRKRFRTLYHNLFGPKRPKALKLLGMEDDIPLRRGRKTTKKREEEVDIDLDDPEINHFPFPFHELMVWAVLMKRQKMALFFWQHGEEAMAKALVACKLCKAMAHEASENDMVDDISQELNHNSRDFGQLAVELLDQSYKQDEQLAMKLLTYELKNWSNATCLQLAVAAKHRDFIAHTCSQMLLTDMWMGRLRMRKNSGLKVILGILLPPSILSLEFKNKDDMPYMSQAQEIHLQEKEAEEPEKPTKEKEEEDMELTAMLGRNNGESSRKKDEEEVQSKHRLIPLGRKIYEFYNAPIVKFWFYTLAYIGYLMLFNYIVLVKMERWPSTQEWIVISYIFTLGIEKMREILMSEPGKLLQKVKVWLQEYWNVTDLIAILLFSVGMILRLQDQPFRSDGRVIYCVNIIYWYIRLLDIFGVNKYLGPYVMMIGKMMIDMMYFVIIMLVVLMSFGVARQAILFPNEEPSWKLAKNIFYMPYWMIYGEVFADQIDPPCGQNETREDGKIIQLPPCKTGAWIVPAIMACYLLVANILLVNLLIAVFNNTFFEVKSISNQVWKFQRYQLIMTFHERPVLPPPLIIFSHMTMIFQHLCCRWRKHESDPDERDYGLKLFITDDELKKVHDFEEQCIEEYFREKDDRFNSSNDERIRVTSERVENMSMRLEEVNEREHSMKASLQTVDIRLAQLEDLIGRMATALERLTGLERAESNKIRSRTSSDCTDAAYIVRQSSFNSQEGNTFKLQESIDPAGEETMSPTSPTLMPRMRSHSFYSVNMKDKGGIEKLESIFKERSLSLHRATSSHSVAKEPKAPAAPANTLAIVPDSRRPSSCIDIYVSAMDELHCDIDPLDNSVNILGLGEPSFSTPVPSTAPSSSAYATLAPTDRPPSRSIDFEDITSMDTRSFSSDYTHLPECQNPWDSEPPMYHTIERSKSSRYLATTPFLLEEAPIVKSHSFMFSPSRSYYANFGVPVKTAEYTSITDCIDTRCVNAPQAIADRAAFPGGLGDKVEDLTCCHPEREAELSHPSSDSEENEAKGRRATIAISSQEGDNSERTLSNNITVPKIERANSYSAEEPSAPYAHTRKSFSISDKLDRQRNTASLRNPFQRSKSSKPEGRGDSLSMRRLSRTSAFQSFESKHN

SEQ ID NO: 47487 - protein, 535 aa, Homo sapiens
MTPESRDTTDLSPGGTQEMEGIVIVKVEEEDEEDHFQKERNKVESSPQVLSRSTTMNERALLSSYLVAYRVAKEKMAHTAAEKIILPACMDMVRTIFDDKSADKLRTIPLSDNTISRRICTIAKHLEAMLITRLQSGIDFAIQLDESTDIASCPTLLVYVRYVWQDDFVEDLLCCLNLNSHITGLDLFTELENCLLGQYKLNWKHCKGISSDGTANMTGKHSRLTEKLLEATHNNAVWNHCFIHREALVSKEISPSLMDVLKNAVKTVNFIKGSSLNSRLLEIFCSEIGVNHTHLLFHTEVRWLSQGKVLSRVYELRNEIYIFLVEKQSHLANIFEDDIWVTKLAYLSDIFGILNELSLKMQGKNNDIFQYLEHILGFQKTLLLWQARLKSNRPSYYMFPTLLQHIEENIINEDCLKEIKLEILLHLTSLSQTFNYYFPEEKFESLKENIWMKDPFAFQNPESIIELNLEPEEENELLQLSSSFTLKNYYKILSLSAFWIKIKDDFPLLSRKSILLLLPFTTTYLCELGFSILTR

SEQ ID NO: 47488 - protein, 69 aa, Homo sapiens
MGRKSSKAKEKKQKRLEERAAMDAVCAKVDAANRVMPNLTLLGLSTKAFLAHVTSELGKWWVLGGCSWF

SEQ ID NO: 47489 - protein, 45 aa, Homo sapiens
MASLSRPSLPSCLCSFLLLLLLQVSSSYAVQSDRTKTPYPGSGRG

SEQ ID NO: 47490 - protein, 126 aa, Homo sapiens
FPKVATNIMRAWLFQHLSAGAGRHVIAPSLRLPWSPSWGAQRRSEAPVLPDVCLGLGSPSPGPRWARPWGSDCGRPGRQSDSCWWLQHPYPSEEQKKQLAQDTGLTILQVNNWFINARRRIVQPMI

SEQ ID NO: 47491 - protein, 276 aa, Homo sapiens
  MOD_RES (1)..(1): Any amino acid
XASGGARRLPGGSGLGAQSGRGSPAPAAMDEERALYIVRAGEAGAIERVLRDYSDKHRATFKFESTDEDKRKSDSHQFRVMAAVLRHCLLIVGPTEDKTEELHSNAVNLLSNVPVSCLDVLICPLTHEETAQEATTLDELPSNKTAEKETVLKNNTMVYNGMNMEAIHVLLNFMEKRIDKGSSYREGLTPVLSLLTECSRAHRNIRKFLKDQVLPPLRDVTNRPEVGSTVRNKLVRLMTHVDLGVKQIAAEFLFVLCKERVDSLLKYTGYGNAAGL

SEQ ID NO: 47492 - protein, 56 aa, Homo sapiens
YPSLKPLGSYVNDFLARLKFLQVFSFTDYFWMELPGIERSRNLQNRIPKFFMIQCL

SEQ ID NO: 47493 - protein, 46 aa, Homo sapiens
MGAPPGYRPSAWVHLLHQLPRADFQLRPVPSVFAPQEQEYQQDQSR

SEQ ID NO: 47494 - protein, 85 aa, Homo sapiens
MAEQATKSVLFVCLGNICRSPIAEAVFRKLVTDQNISENWVIDSGAVSDWNVGRSPDPRAVSCLRNHGIHTAHKARQVDKLLFNF

SEQ ID NO: 47495 - protein, 440 aa, Homo sapiens
MIEEEVAKLLKLKAQLGPDESKQKFVLKTPKETLMGKYGEDSKLIYDLKDQGGELLSLRYDLTVPFARYLAMNKLTNIKRYHIAKVYRRDNPAMTRGRYREFYQCDFDIAGNFDPMIPDAECLKIMCEILSSLQIGDFLVKVNDRRILDGMFAICGVSDSKFRTICSSVDKLDKVSWEEVKNEMVGEKGLAPEVADRIGDYVQQHGGVSLVEQLLQDPKLSQNKQALEGLGDLKLLFEYLTLFGIDDKISFDLSLARGLDYYTGVIYEAVLLQTPAQAGEEPLGVGSVAAGGRYDGLVGMFDPKGRKVPCVGLSIGVERIFSIVEQRLEALEEKIRTTETQVLVASAQKKLLEERLKLVSELWDAGIKAELLYKKNPKLLNQLQYCEEAGIPLVAIIGEQELKDGVIKLRSVTSREEVDVRREDLVEEIKRRTGQPLCIC

SEQ ID NO: 47496 - protein, 533 aa, Homo sapiens
MESERSKRMGNACIPLKRIAYFLCLLSALLLTEGKKPAKPKCPAVCTCTKDNALCENARSIPRTVPPDVISLLFTSNSFDVISDDAFIGLPHLEYLFIENNNIKSISRHTFRGLKSLIHLSLANNNLQTLPKDIFKGLDSLTNVDLRGNSFNCDCKLKWLVEWLGHTNATVEDIYCEGPPEYKKRKINSLSSKDFDCIITEFAKSQDLPYQSLSIDTFSYLNDEYVVIAQPFTGKCIFLEWDHVEKTFRNYDNITGTSTVVCKPIVIETQLYVIVAQLFGGSHIYKRDSFANKFIKIQDIEILKIRKPNDIETFKIENNWYFVVADSSKAGFTTIYKWNGNGFYSHQSLHAWYRDTDVEYLEIVRTPQTLRTPHLILSSSSQRPVIYQWNKATQLFTNQTDIPNMEDVYAVKHFSVKGDVYICLTRFIGDSKVMKWGGSSFQDIQRMPSRGSMVFQPLQINNYQYAILGSDYSFTQVYNWDAEKAKFVKFQELNVQAPRSFTHVSINKRNFLFASSFKGNTQIYKHVIVDLSA

SEQ ID NO: 47497 - protein, 1036 aa, Homo sapiens
MATRGGAGVAMAVWSLLSARAVTAFLLLFLPRFLQAQTFSFPFQQPEKCDNNQYFDISALSCVPCGANQRQDARGTSCVCLPGFQMISNNGGPAIICKKCPENMKGVTEDGWNCISCPSDLTAEGKCHCPIGHILVERDINGTLLSQATCELCDGNENSFMVVNALGDRCVRCEPTFVNTSRSCACSEPNILTGGLCFSSTGNFPLRRISAARYGEVGMSLTSEWFAKYLQSSAAACWVYANLTSCQALGNMCVMNMNSYDFATFDACGLFQFIFENTAGLSTVHSISFWRQNLPWLFYGDQLGLAPQVLSSTSLPTNFSFKGENQNTKLKFVAASYDIRGNFLKWQTLEGGVLQLCPDTETRLNAAYSFGTTYQQNCEIPISKILIDFPTPIFYDVYLEYTDENQHQYILAVPVLNLNLQHNKIFVNQDSNSGKWLLTRRIFLVDAVSGRENDLGTQPRVIRVATQISLSVHLVPNTINGNIYPPLITIAYSDIDIKDANSQSVKVSFSVTYEMDHGEAHVQTDTEFCTCCPGWSAMARSWLTATSASRVQAILLSQPPEYLGLQIALGVLGGLAVLASLLKTAGWKRRIGSPMIDLQTVVKFLVYYAGDLANVFFIITVGTGLYWLIFFKAQKSVSVLLPMPIQEERFVTYVGCAFALKALQFLHKLISQITIDVFFIDWERPKGKVLKAVEGEGGVRSATVPVSIWRTYFVANEWNEIQTVRKINSLFQVLTVLFFLEVVGFKNLALMDSSSSLSRNPPSYIAPYSCILRYAVSAALWLAIGIIQVVFFAVFYERFIEDKIRQFVDLCSMSNISVFLLSHKCFGYYIHGRSVHGHADTNMEEMNMNLKREAENLCSQRGLVPNTDGQTFEIAISNQMRQHYDRIHETLIRKNGPARLLSSSASTFEQSIKAYHMMNKFLGSFIDHVHKEMDYFIKDKLLLERILGMEFMEPMEKSIFYNDEGYSFSSVLYYGNEATLLIFDLLFFCVVDLACQNFILASFLTYLQQEIFRYIRNTVGQKNLASKTLVDQRFLI

SEQ ID NO: 47498 - protein, 276 aa, Homo sapiens
  MOD_RES (1)..(1): Any amino acid
XLHQDSPSLIHGDIKSSNVLLDERLTPKLGDFGLARFSRFAGSSPSQSSMVARTQTVRGTLAYLPEEYIKTGRLAVDTDTFSFGVVVLETLAGQRAVKTHGARTKYLENSYVSSTGRAHSGAAPWQPLAAPSGASAQAAEQLQRGPNQPVESDESLGGLSAALRSWHLTPSCPLDPAPLREAGCPQGDTAGESSWGSGPGSRPTAVEGLALGSSASSSSEPPQIIINPARQKMVQKLALYEDGALDSLQLLSSSSLPGLGLEQDRQGPEESDEFQS

SEQ ID NO: 47499 - protein, 4174 aa, Homo sapiens
MSEPGGGGGEDGSAGLEVSAVQNVADVSVLQKHLRKLVPLLLEDGGEAPAALEAALEEKSALEQMRKFLSDPQVHTVLVERSTLKEDVGDEGEEEKEFISYNINIDIHYGVKSNSLAFIKRTPVIDADKPVSSQLRVLTLSEDSPYETLHSFISNAVAPFFKSYIRESGKADRDGDKMAPSVEKKIAELEMGLLHLQQNIEIPEISLPIHPMITNVAKQCYERGEKPKVTDFGDKVEDPTFLNQLQSGVNRWIREIQKVTKLDRDPASGTALQEISFWLNLERALYRIQEKRESPEVLLTLDILKHGKRFHATVSFDTDTGLKQALETVNDYNPLMKDFPLNDLLSATELDKIRQALVAIFTHLRKIRNTKYPIQRALRLVEAISRDLSSQLLKVLGTRKLMHVAYEEFEKVMVACFEVFQTWDDEYEKLQVLLRDIVKRKREENLKMVWRINPAHRKLQARLDQMRKFRRQHEQLRAVIVRVLRPQVTAVAQQNQGEVPEPQDMKVAEVLFDAADANAIEEVNLAYENVKEVDGLDVSKEGTEAWEAAMKRYDERIDRVETRITARLRDQLGTAKNANEMFRIFSRFNALFVRPHIRGAIREYQTQLIQRVKDDIESLHDKFKVQYPQSQACKMSHVRDLPPVSGSIIWAKQIDRQLTAYMKRVEDVLGKGWENHVEGQKLKQDGDSFRMKLNTQEIFDDWARKVQQRNLGVSGRIFTIESTRVRGRTGNVLKLKVNFLPEIITLSKEVRNLKWLGFRVPLAIVNKAHQANQLYPFAISLIESVRTYERTCEKVEERNTISLLVAGLKKEVQALIAEGIALVWESYKLDPYVQRLAETVFNFQEKVDDLLIIEEKIDLEVRSLETCMYDHKTFSEILNRVQKAVDDLNLHSYSNLPIWVNKLDMEIERILGVRLQAGLRAWTQVLLGQAEDKAEVDMDTDAPQVSHKPGGEPKIKNVVHELRITNQVIYLNPPIEECRYKLYQEMFAWKMVVLSLPRIQSQRYQVGVHYELTEEEKFYRNALTRMPDGPVALEESYSAVMGIVSEVEQYVKVWLQYQCLWDMQAENIYNRLGEDLNKWQALLVQIRKARGTFDNAETKKEFGPVVIDYGKVQSKVNLKYDSWHKEVLSKFGQMLGSNMTEFHSQISKSRQELEQHSVDTASTSDAVTFITYVQSLKRKIKQFEKQVELYRNGQRLLEKQRFQFPPSWLYIDNIEGEWGAFNDIMRRKDSAIQQQVANLQMKIVQEDRAVESRTTDLLTDWEKTKPVTGNLRPEEALQALTIYEGKFGRLKDDREKCAKAKEALELTDTGLLSGSEERVQVALEELQDLKGVWSELSKVWEQIDQMKEQPWVSVQPRKLRQNLDALLNQLKSFPARLRQYASYEFVQRLLKGYMKINMLVIELKSEALKDRHWKQLMKRLHVNWVVSELTLGQIWDVDLQKNEAIVKDVLLVAQGEMALEEFLKQIREVWNTYELDLVNYQNKCRLIRGWDDLFNKVKEHINSVSAMKLSPYYKVFEEDALSWEDKLNRIMALFDVWIDVQRRWVYLEGIFTGSADIKHLLPVETQRFQSISTEFLALMKKVSKSPLVMDVLNIQGVQRSLERLADLLGKIQKALGEYLERERSSFPRFYFVGDEDLLEIIGNSKNVAKLQKHFKKMFAGVSSIILNEDNSVVLGISSREGEEVMFKTPVSITEHPKINEWLTLVEKEMRVTLAKLLAESVTEVEIFGKATSIDPNTYITWIDKYQAQLVVLSAQIAWSENVETALSSMGGGGDAAPLHSVLSNVEVTLNVLADSVLMEQPPLRRRKLEHLITELVHQRDVTRSLIKSKIDNAKSFEWLSQMRFYFDPKQTDVLQQLSIQMANAKFNYGFEYLGVQDKLVQTPLTDRCYLTMTQALEARLGGSPFGPAGTGKTESVKALGHQLGRFVLVFNCDETFDFQAMGRIFVGLCQVGAWGCFDEFNRLEERMLSAVSQQVQCIQEALREHSNPNYDKTSAPITCELLNKQVKVSPDMAIFITMNPGYAGRSNLPDNLKKLFRSLAMTKPDRQLIAQVMLYSQGFRTAEVLANKIVPFFKLCDEQLSSQSHYDFGLRALKSVLVSAGNVKRERIQKIKREKEERGEAVDEGEIAENLPEQEILIQSVCETMVPKLVAEDIPLLFSLLSDVFPGVQYHRGEMTALREELKKVCQEMYLTYGDGEEVGGMWVEKVLQLYQITQINHGLMMVGPSGSGKSMAWRVLLKALERLEGVEGVAHIIDPKAISKDHLYGTLDPNTREWTDGLFTHVLRKIIDSVRGELQKRQWIVFDGDVDPEWVENLNSVLDDNKLLTLPNGERLSLPPNVRIMFEVQDLKYATLATVSRCGMVWFSEDVLSTDMIFNNFLARLRSIPLDEGEDEAQRRRKGKEDEGEEAASPMLQIQRDAATIMQPYFTSNGLVTKALEHAFQLEHIMDLTRLRCLGSLFSMLHQACRNVAQYNANHPDFPMQIEQLERYIQRYLVYAILWSLSGDSRLKMRAELGEYIRRITTVPLPTAPNIPIIDYEVSISGEWSPWQAKVPQIEVETHKVAAPDVVVPTLDTVRHEALLYTWLAEHKPLVLCGPPGSGKTMTLFSALRALPDMEVVGLNFSSATTPELLLKTFDHYCEYRRTPNGVVLAPVQLGKWLVLFCDEINLPDMDKYGTQRVISFIRQMVEHGGFYRTSDQTWVKLERIQFVGACNPPTDPGRKPLSHRFLRHVPVVYVDYPGPASLTQIYGTFNRAMLRLIPSLRTYAEPLTAAMVEFYTMSQERFTQDTQPHYIYSPREMTRWVRGIFEALRPLETLPVEGLIRIWAHEALRLFQDRLVEDEERRWTDENIDTVALKHFPNIDREKAMSRPILYSNWLSKDYIPVDQEELRDYVKARLKVFYEEELDVPLVLFNEVLDHVLRIDRIFRQPQGHLLLIGVSGAGKTTLSRFVAWMNGLSVYQIKVHRKYTGEDFDEDLRTVLRRSGCKNEKIAFIMDESNVLDSGFLERMNTLLANGEVPGLFEGDEYATLMTQCKEGAQKEGLMLDSHEELYKWFTSQVIRNLHVVFTMNPSSEGLKDRAATSPALFNRCVLNWFGDWSTEALYQVGKEFTSKMDLEKPNYIVPDYMPVVYDKLPQPPSHREAIVNSCVFVHQTLHQANARLAKRGGRTMAITPRHYLDFINHYANLFHEKRSELEEQQMHLNVGLRKIKETVDQVEELRRDLRIKSQELEVKNAAANDKLKKMVKDQQEAEKKKVMSQEIQEQLHKQQEVIADKQMSVKEDLDKVEPAVIEAQNAVKSIKKQHLVEVRSMANPPAAVKLALESICLLLGESTTDWKQIRSIIMRENFIPTIVNFSAEEISDAIREKMKKNYMSNPSYNYEIVNRASLACGPMVKWAIAQLNYADMLKRVEPLRNELQKLEDDAKDNQQKANEVEQMIRDLEASIARYKEEYAVLISEAQAIKADLAAVEAKVNRSTALLKSLSAERERWEKTSETFKNQMSTIAGDCLLSAAFIAYAGYFDQQMRQNLFTTWSHHLQQANIQFRTDIARTEYLSNADERLRWQASSLPADDLCTENAIMLKRFNRYPLIIDPSGQATEFIMNEYKDRKITRTSFLDDAFRKNLESALRFGNPLLVQDVESYDPVLNPVLNREVRRTGGRVLITLGDQDIDLSPSFVIFLSTRDPTVEFPPDLCSRVTFVNFTVTRSSLQSQCLNEVLKAERPDVDEKRSDLLKLQGEFQLRLRQLEKSLLQALNEVKGRILDDDTIITTLENLKREAAEVTRKVEETDIVMQEVETVSQQYLPLSTACSSIYFTMESLKQIHFLYQYSLQFFLDIYHNVLYENPNLKGVTDHTQRLSIITKDLFQVAFNRVARGMLHQDHITFAMLLARIKLKGTVGEPTYDAEFQHFLRGNEIVLSAGSTPRIQGLTVEQAEAVVRLSCLPAFKDLIAKVQADEQFGIWLDSSSPEQTVPYLWSEETPATPIGQAIHRLLLIQAFRPDRLLAMAHMFVSTNLGESFMSIMEQPLDLTHIVGTEVKPNTPVLMCSVPGYDASGHVEDLAAEQNTQITSIAIGSAEGFNQADKAINTAVKSGRWVMLKNVHLAPGWLMQLEKKLHSLQPHACFRLFLTMEINPKVPVNLLRAGRIFVFEPPPGVKANMLRTFSSIPVSRICKVEK

SEQ ID NO: 47500 - protein, 71 aa, Homo sapiens
MPVKKKRKSPGVAAAVAEDGGLKKCKISRYHLPPPFKLPSSLLCWTTGGKGVGPGLPGWGWRQLLQIPTPC

SEQ ID NO: 47501 - protein, 110 aa, Homo sapiens
SSTVKTETISFGSVSPGGVKLEISTKEVPVVHTETKTITYESSQVDPGTDLEPGVLMSAQTITSETTSTTTTTHITKTVKGGISETRIEKRIVITGDADIDHDQVVCVRR

SEQ ID NO: 47502 - protein, 155 aa, Homo sapiens
METCDSPPISRQENGQSTSKLCGTTQLDNEVPEKVAGMEPDRENSSTDDNLKTDERKSEALLGFSVENAAATQVTSAKEIPCNECATSFPSLQKYMEHHCPNARLPVLKDDNESEISELEDSDVENLTGEIVYQPDGSAYIIEDSKESGQNAQTG

SEQ ID NO: 47503 - protein, 132 aa, Homo sapiens
MVSESDFSKDVAVQVLPLDKIEENNKQKANDIFISQYTMGQKDALRTVLKQKAQSMPVFKEVKVHLLEDAGIEKDAVTQETRISPSGIDSATTVAAATAAAIATAAPLIKVQSDLEAKVNSVTELLSKLQET

SEQ ID NO: 47504 - protein, 336 aa, Homo sapiens
MGLSHSKTHLRVIKVAPLQNKEVETPSAGRVDFAFNQNLEEKTSYSLARLQDQNKALEGQLPPLQENWYGRYSTASRDMYFDIPLEHRETSIIKRHPPQRLQKLEPIDLPRVITSGRLLSQREARTMHKAKVLEKKMQTPMYTSENRQYLHKMQVLEMIRKRQEAQMELKKSLHGEARINKQSPRDHKAKKTLQSTPRNDDHDLLTMLPDEILNRGPDRVSLLLPRLECNGMISAHRKLRLPSSNDSPASASRVAGITGNSKNTEFLKHQAVNNYCPWKIGKMETWLHEQEAQGQLLWDSSSSDSDEQGKDEKKPRALVRTRTERIPLFDEFFDQE

SEQ ID NO: 47505 - protein, 2162 aa, Homo sapiens
MAALVLEDGSVLRGQPFGAAVSTAGEVVFQTGMVGYPEALTDPSYKAQILVLTYPLIGNYGIPPDEMDEFGLCKWFESSGIHVAALVVGECCPTPSHWSATRTLHEWLQQHGIPGLQGVDTRELTKKLREQGSLLGKLVQNGTEPSSLPFLDPNARPLVPEVSIKTPRVFNTGGAPRILALDCGLKYNQIRCLCQRGAEVTVVPWDHALDSQEYEGLFLSNGPGDPASYPSVVSTLSRVLSEPNPRPVFGICLGHQLLALAIGAKTYKMRYGNRGHNQPCLLVGSGRCFLTSQNHGFAVETDSLPADWAPLFTNANDGSNEGIVHNSLPFFSVQFHPEHQAGPSDMELLFDIFLETVKEATAGNPGGQTVRERLTERLCPPGIPTPGSGLPPPRKVLILGSGGLSIGQAGEFDYSGSQAIKALKEENIQTLLINPNIATVQTSQGLADKVYFLPITPHYVTQVIRNERPDGVLLTFGGQTALNCGVELTKAGVLARYGVRVLGTPVETIELTEDRRAFAARMAEIGEHVAPSEAANSLEQAQAAAERLGYPVLVRAAFALGGLGSGFASNREELSALVAPAFAHTSQVLVDKSLKGWKEIEYEVVRDAYGNCVTYYIIEVNARLSRSSALASKATGYPLAYVAAKLALGIPLPELRNSVTGGTAAFEPSVDYCVVKIPRWDLSKFLRVSTKIGSCMKSVGEVMGIGRSFEEAFQKALRMVDENCVGFDHTVKPVSDMELETPTDKRIFVVAAALWAGYSVDRLYELTRIDRWFLHRMKRIIAHAQLLEQHRGQPLPPDLLQQAKCLGFSDKQIALAVLSTELAVRKLRQELGICPAVKQIDTVAAEWPAQTNYLYLTYWGTTHDLTFRTPHVLVLGSGVYRIGSSVEFDWCAVGCIQQLRKMGYKTIMVNYNPETVSTDYDMCDRLYFDEISFEVVMDIYELENPEGVILSMGGQLPNNMAMALHRQQCRVLGTSPEAIDSAENRFKFSRLLDTIGISQPQWRELSDLESARQFCQTVGYPCVVRPSYVLSGAAMNVAYTDGDLERFLSSAAAVSKEHPVVISKFIQEAKEIDVDAVASDGVVAAIAISEHVENAGVHSGDATLVTPPQDITAKTLERIKAIVHAVGQELQVTGPFNLQLIAKDDQLKVIECNVRVSRSFPFVSKTLGVDLVALATRVIMGEEVEPVGLMTGSGVVGVKVPQFSFSRLAGADVVLGVEMTSTGEVAGFGESRCEAYLKAMLSTGFKIPKKNILLTIGSYKNKSELLPTVRLLESLGYSLYASLGTADFYTEHGVKVTAVDWHFEEAVDGECPPQRSILEQLAEKNFELVINLSMRGAGGRRLSSFVTKGYRTRRLAADFSVPLIIDIKCTKLFVEALGQIGPAPPLKVHVDCMTSQKLVRLPGLIDVHVHLREPGGTHKEDFASGTAAALAGGITMVCAMPNTRPPIIDAPALALAQKLAEAGARCDFALFLGASSENAGTLGTVAGSAAGLKLYLNETFSELRLDSVVQWMEHFETWPSHLPIVAHAEQQTVAAVLMVAQLTQRSVHICHVARKEEILLIKAAKARGLPVTCEVAPHHLFLSHDDLERLGPGKGEVRPELGSRQDVEALWENMAVIDCFASDHAPHTLEEKCGSRPPPGFPGLETMLPLLLTAVSEGRLSLDDLLQRLHHNPRRIFHLPPQEDTYVEVDLEHEWTIPSHMPFSKAHWTPFEGQKVKGTVRRVVLRGEVAYIDGQVLVPPGYGQDVRKWPQGAVPQLPPSAPATSEMTTTPERPRRGIPGLPDGRFHLPPRIHRASDPGLPAEEPKEKSSRKVAEPELMGTPDGTCYPPPPVPRQASPQNLGTPGLLHPQTSPLLHSLVGQHILSVQQFTKDQMSHLFNVAHTLRMMVQKERSLDILKGKVMASMFYEVSTRTSSSFAAAMARLGGAVLSFSEATSSVQKGESLADSVQTMSCYADVVVLRHPQPGAVELAAKHCRRPVINAGDGVGEHPTQALLDIFTIREELGTVNGMTITMVGDLKHGRTVHSLACLLTQYRVSLRYVAPPSLRMPPTVRAFVASRGTKQEEFESIEEALPDTDVLYMTRIQKERFGSTQEYEACFGQFILTPHIMTRAKKKMVVMHPMPRVNEISVEVDSDPRAAYFRQAENGMYIRMALLATVLGRF

SEQ ID NO: 47506 - protein, 192 aa, Homo sapiens
MQWLNTMKELALGVRTSKTCTFSAAMTTMQGMEQAMPGAGPGVPQLGNMAVIHSHLWKGLQEKFLKGEPKVLGVVQILTALMSLSMGITMMCMASNTYGSNPISVYIGYTIWGSVMFIISGSLSIAAGIRTTKGLGLDGMVLLLSVLEFCIAVSLSAFGCKVLCCTPGGVVLILPSHSHMAETASPTPLNEV

SEQ ID NO: 47507 - protein, 105 aa, Homo sapiens
MDEKTKKAEEMALSLTRAVAGGDEQVAMKCAIWLAEQRVPLSVQLKPEVSPTQDIRFLMVQNGHSSSIQPSHHRRKGRKTPLHTLLKSIAQKLYTLLPLIPVDQN

SEQ ID NO: 47508 - protein, 63 aa, Homo sapiens
MYKENLVRIFRKKKRICHSFSSLFNLSTSKSWLHGSIFGDINSSPSEDNWLKGTRRLDTDHCN

SEQ ID NO: 47509 - protein, 135 aa, Homo sapiens
MAHLRSPSGFGDPGKKDQKESEEELEEEEEEEEVEEEEEEVTDIGDYDDDFPDVRPRLASIVSPSLTSTFVPSQSATSTETPSASPPSSTSSHKSFPKIFQTFRKDMSEMSIDRNIHRNLSPGIPVSVQTEESWL

SEQ ID NO: 47510 - protein, 80 aa, Homo sapiens
  MOD_RES (1)..(1): Any amino acid
XVRSVRALLCTLRAVPSPAAPCPPRPWQLGVGAVRTLRTGPALLSVRKFTEKHEWVTTENGIGTVGISNFAQMSLVLWKV

SEQ ID NO: 47511 - protein, 1339 aa, Homo sapiens
MAKFGVHRILLLAISLTKCLESTKLLADLKKCGDLECEALINRVSAMRDYRGPDCRYLNFTKGEEISVYVKLAGEREDLWAGSKGKEFGYFPRDAVQIEEVFISEEIQMSTKESDFLCLLGVSYTFDNEDSELNGDYGENIYPYEEDKDEKSSIYESDFQIEPGFYATYESTLFEDQVPALEAPEDIGSTSESKDWEEVVVESMEQDRIPEVHVPPSSAVSGVKEWFGLGGEQAEEKAFESVIEPVQESSFRSRKIAVEDENDLEELNNGEPQTEHQQESESEIDSVPKTQSELASESEHIPKPQSTGWFGGGFTSYLGFGDEDTGLELIAEESNPPLQDFPNSISSDKEATVPCTEILTEKKDTITNDSLSLKPSWFDFGFAILGFAYAKEDKIMLDDRKNEEDGGADEHEHPLTSELDPEKEQEIETIKIIETEDQIDKKPVSEKTDESDTIPYLKKFLYNFDNPWNFQNIPKETELPFPKQILDQNNVIENEETGEFSIDNYPTDNTKVMIFKSSYSLSEDASEFQILKYLFQIDVYDFMNSAFSPIVILTERVVAALPEGMRPDSNLYGFPWELVICAAVVGFFAVLFFLWRSFRSVRSRLYVGREKKLALMLSGLIEEKSKLLEKFSLVQKEYEGYEVESSLKDASFEKEATEAQSLEATCEKLNRSNSELEDEILCLEKELKEEKSKHSEQDELMADISKRIQSLEDESKSLKSQVAEAKMTFKIFQMNEERLKIAIKDALNENSQLQESQKQLLQEAEVWKEQVSELNKQKVTFEDSKVHAEQVLNDKESHIKTLTERLLKMKDWAAMLGEDITDDDNLELEMNSESENGAYLDNPPKGALKKLIHAAKLNASLKTLEGERNQIYIQLSEVDKTKEELTEHIKNLQTEQASLQSENTHFENENQKLQQKLKVMTELYQENEMKLHRKLTVEENYRLEKEEKLSKVDEKISHATEELETYRKRAKDLEEELERTIHSYQGQIISHEKKAHDNWLAARNAERNLNDLRKENAHNRQKLTETELKFELLEKDPYALDVPNTAFGREHSPYGPSPLGWPSSETRAFLSPPTLLEGPLRLSPLLPGGGGRGSRGPGNPLDHQITNERGESSCDRLTDPHRAPSDTGSLSPPWDQDRRMMFPPPGQSYPDSALPPQRQDRFCSNSGRLSGPAELRSFNMPSLDKMDGSMPSEMESSRNDTKDDLGNLNVPDSSLPAENEATGPGFVPPPLAPIRGPLFPVDARGPFLRRGPPFPPPPPGAMFGASRDYFPPGDFPGPPPAPFAMRNVYPPRGFPPYLPPRPGFFPPPPHSEGRSEFPSGLIPPSNEPATEHPEPQQET

SEQ ID NO: 47512 - protein, 125 aa, Homo sapiens
MSDNDDIEVESDADKRAHHNALERKRRDHIKDSFHSLRDSVPSLQGEKASRAQILDKATEYIQYMRRKNHTHQQDIDDLKRQNALLEQQGEHPSSWGSWPCCAPARSGFGTWACRVRASHGVCAQ

SEQ ID NO: 47513 - protein, 96 aa, Homo sapiens
MKERRAPQPVVARCKLVLVGDVQCGKTAMLQVLAKDCYPEVSCPPARWPAFLPACPPWGRFPPAQETWLPQPQPILSRFLRLYHPQLLFGWRTALP

SEQ ID NO: 47514 - protein, 37 aa, Homo sapiens
MVAGMLGLSCKMGFRSVLKPVVPGPRREKQLPGEVSS

SEQ ID NO: 47515 - protein, 128 aa, Homo sapiens
MAVQISKKRKFVADGIFKAELNEFLTRELAEDGYSGVEVRVTPTRTEIIILATRTQNVLGEKGRRIRELTAVVQKRSVCHCPGRVSALQTPRRACCAEGLLWCAAVHHGEWGQRLRGCGVWETPRTEG

SEQ ID NO: 47516 - protein, 100 aa, Homo sapiens
MEEKEALVPIQKATDSFHTELHPRVAFWIIKLPRRRSHQDALEGGHWLSEKRHRLQAIRDGLRKGTHKDVLEEGTESSSHSRLSPRKTHLLYILRPSRQL

SEQ ID NO: 47517 - protein, 110 aa, Homo sapiens
  MOD_RES (1)..(1): Any amino acid
XIRSILQRSVANPAFLKASEKDIAPPPEECLQLLSRATQVFREQYILKQDLAKEEIQRRVKLLCDQKKKQLEDLSYCREERKSLREMAERLADKYEEAKEKQEDIMNSSL

SEQ ID NO: 47518 - protein, 130 aa, Homo sapiens
MAQAHRTPQPRAAPSQPRVFKLVLLGSGSVGAFFTKVVDVGATSLKLEIWDTAGQEKYHSVCHLYFRGANAALLVYDITRKDSFLKAQQWLKDLEEELHPGEVLVMLVGNKTDLSQEREVTFQEGKEFAD

SEQ ID NO: 47519 - protein, 79 aa, Homo sapiens
MFRFMRDVEPEDPMFLMDPFAIHRQHMSRMLSGGFGYSPFLSITDGNMPGTRPASRRMQQAGAVSPFGMLGMSGGFMDM

SEQ ID NO: 47520 - protein, 543 aa, Homo sapiens [sequence omitted]

SEQ ID NO: 47521 - protein, 183 aa, Homo sapiens
MRLNQNTLLLGKKVVLVPYTSEHVPRYHEWMKSEELQRLTASEPLTLEQEYAMQCSWQEDADKCTFIVLDAEKWQAQPGATEESCMVGDVNLFLTDLEDLTLGEIEVMIAEPSCRGKGLGTEAVLAMLSYGVTTLGLTKFEAKIGQGNEPSIRMFQKLHFEQVATSSVFQEVTLRLTVSESEH

SEQ ID NO: 47522 - protein, 523 aa, Homo sapiens
MPPCQPQRPLLLLLLLLACQPQVPSAQVMDFLFEKWKLYGDQCHHNLSLLPPPTELVCNRTFDKYSCWPDTPANTTANISCPWYLPWHHKVQHRFVFKRCGPDGQWVRGPRGQPWRDASQCQMDGEEIEVQKEVAKMYSSFQVMYTVGYSLSLGALLLALAILGGLSKLHCTRNAIHANLFASFVLKASSVLVIDGLLRTRYSQKIGDDLSVSTWLSDGVSPPRRPQAGGWVGSQAGGHVAALTLHLYQAVAGCRVAAVFMQYGIVANYCWLLVEGLYLHNLLGLATLPERSFFSLYLGIGWGAPMLFVVPWAVVKCLFENVQCWTSNDNMGFWWILRFPVFLAILINFFIFVRIVQLLVAKLRARQMHHTDYKFRLAKSTLTLIPLLGVHEVVFAFVTDEHAQGTLRSAKLFFDLFLSSFQVPARPPAPPPGAQCATPDHPVSPGPAGGCPLLLPQQGGAVGAAAALAPLAPGQSAMGGAEHQQPQGLIFARPRPSQQGAAVWEGWWQPGFICGDPLGWWPP

SEQ ID NO: 47523 - protein, 199 aa, Homo sapiens
  MOD_RES (1)..(1): Any amino acid
XSEEEEAKDEKAEPNRDKSVGPLPQADPEVGTAAHQTNRQEKSPQDPGDPVQYNRTTDEELSELEDRVAVTASEVQQAESEVSDIESRIAALRAAGLTVKPSGKPRRKSNLPIFLPRVAGKLGKRPEDPNADPSSEAKAMAVPYLLRRKFSNSLKSQGKDDDSFDRKSVYRGSLTQRNPNARKGMASHTFAMKEWPQPM

SEQ ID NO: 47524 - protein, 131 aa, Homo sapiens
MRVMAPRALLLLLSGGLALTETWACSHSMRYFDTAVSRPGRGEPRFISVGYVDDTQFVRFDSDAASPRGEPRAPWVEQEGPEYWDRETQKYKRQAQADRVSLRNLRGYYNQSEDEDVWLRPGARRAPPPRV

SEQ ID NO: 47525 - protein, 230 aa, Homo sapiens
MLTQFAEGRLEDQLDKYDHWADRFEDLPLYFMTFHGQQSIRTVIDTMQHAVYVYDICHVIIDNLQFMMGHEQLSTDRIAAQDYIIGVFRKFATDNNCHVTLVIHPRKEDDDKELQTASIFGSAKASQEADNVLILQDRKLVTGPGKRYLQVSKNRFDGDVGVFPLEFNKNSLTFSIPPKNKARLKKIKDDTGPVAKKPSSGKKGATTQNSEICSGQAPTPDQPDTSKRSK

SEQ ID NO: 47526 - protein, 221 aa, Homo sapiens
MCFPKVLSDDMKKLKARMVMLLPTSAQGLGAWVSACDTEDTVGHLGPWRDKDPALWCQLCLSSQHQAIERFYDKMQNAESGRGQVMSSLAELEDDFKEGYLETVAAYYEEQHPELTPLLEKERDGLRCRGNRSPVPDVEDPATEEPGESFCDKVMRWFQAMLQRLQTWWHGVLAWVKEKVVALVHAVQALWKQFQSFCCSLSELFMSSFQSYGATRGARRS

SEQ ID NO: 47527 - protein, 541 aa, Homo sapiens
MLRLPTVFRQMRPVSRVLAPHLTRAYAKDVKFGADARALMLQGVDLLADAVAVTMGPKGRTVIIEQSWGSPKVTKDGVTVAKSIDLKDKYKNIGAKLVQDVANNTNEEAGDGTTTATVLARSIAKEGFEKISKGANPVEIRRGVMLAVDAVIAELKKQSKPVTTPEEIAQDGKTLNDELEIIEGMKFDRGYISPYFINTSKGQKCEFQDAYVLLSEKKISSIQSIVPALEIANAHRKPLVIIAEDVDGEALSTLVLNRLKVGLQVVAVKAPGFGDNRKNQLKDMAIATGGAVFGEEGLTLNLEDVQPHDLGKVGEVIVTKDDAMLLKGKGDKAQIEKRIQEIIEQLDVTTSEYEKEKLNERLAKLSDGVAVLKVGGTSDVEVNEKKDRVTDALNATRAAVEEGIVLGGGCALLRCIPALDSLTPANEDQKIGIEIIKRTLKIPAMTIAKNAGVEGSLIVEKIMQSSSEVGYDAMAGDFVNMVEKGIIDPTKVVRTALLDAAGVASLLTTAEVVVTEIPKEEKDPGMGAMGGMGGGMGGGMF

SEQ ID NO: 47528 - protein, 209 aa, Homo sapiens
MWRSLGLALALCLLPSGGTESQDQSSLCKQPPAWSIRDQDPMLNSNGSVTVVALLQASCYLCILQASKLEDLRVKLKKEGYSNISYIVVNHQGISSRLKYTHLKNKVSEHIPVYQQEENQTDVWTLLNGSKDDFLIYDRCGRLVYHLGLPFSFLTFPYVEEAIKIAYCEKKCGNCSLTTLKDEDFCKRVSLATVDKTVETPSPHYHHEH

SEQ ID NO: 47529 - protein, 85 aa, Homo sapiens
  MOD_RES (1)..(1): Any amino acid
XLIEEQKQIHQHRRLTRAQSHHGSEEERKKRKILARKKSKRSALENSEEHSAKYSNSNNSGSGASSPLTSPSSPTPPSTSEHAPF

SEQ ID NO: 47530 - protein, 132 aa, Homo sapiens
MKIRDVTKCLEEFELLGKAYGKAKSIVDKEGVPRFYIRILADLEDYLNELWEDKEGKKKMNKNNAKALSTLRQKIRKYNRDFESHITSYKQNPEQSADEDAEKNEEDSEGSSDEDEDEDGVSAATFLKKKSE

SEQ ID NO: 47531 - protein, 455 aa, Homo sapiens
MAGLRNESEQEPLLGDTPGSREWDILETEEHYKSRWRSIRILYLTMFLSSVGFSVVMMSIWPYLQKIDPTADTSFLGWVIASYSLGQMVASPIFGLWSNYRPRKEPLIVSILISVAANCLYAYLHIPASHNKYYMLVARGLLGIGAGNVAVVRSYTAGATSLQERTSSMANISMCQALGFILGPVFQTCFTFLGEKGVTWDVIKLQINMYTTPVLLSAFLGILNIILILAILREHRVDDSGRQCKSINFEEASTDEAQVPQGNIDQVAVVAINVLFFVTLFIFALFETIITPLTMDMYAWTQEQAVLYNGIILAALGVEAVVIFLGVKLLSKKIGERAILLGGLIVVWVGFFILLPWGNQFPKIQWEDLHNNSIPNTTFGEIIIGLWKSPMEDDNERPTGCSIEQAWCLYTPVIHLAQFLTSAVLIGLGYPVCNLMSYTLYSKILGPKPQVSQVP

SEQ ID NO: 47532 - protein, 48 aa, Homo sapiens
AINSIGSNANTDVPSWLKSLRLHKYAALFSQMSYEEMMTLTEQHLESQ

SEQ ID NO: 47533 - protein, 8 aa, Homo sapiens
MADTDLFM

SEQ ID NO: 47534 - protein, 185 aa, Homo sapiens
MLIFWTITLFLLGAAKGKEVCYEDLGCFSDTEPWGGTAIRPLKILPWSPEKIGTRFLLYTNENPNNFQILLLSDPSTIEASNFQMDRKTRFIIHGFIDKGDESWVTDMCKTEYSYPPSKVHLIGHSLGAHVAGEAGSKTPGLSRITGLDPVEASFESTPEEVRLDPSDADFVDVIHTDAAPLIPF

SEQ ID NO: 47535 - protein, 110 aa, Homo sapiens
  MOD_RES (1)..(1): Any amino acid
XDLVLVSAGFDAAEGHPAPLGGYHVSAKCFGYMTQQLMNLAGGAVVLALEGGHDLTAICDASEACVAALLGNRVSRLPPPSMLLSGRWIPFQKKAGNRNPTSMPSALWRP

SEQ ID NO: 47536 - protein, 27 aa, Homo sapiens
MWVTLPIDLNNKSAKQQEVQFKAYYLP

SEQ ID NO: 47537 - protein, 108 aa, Homo sapiens
FPGPEPEPVRTHEMEEELAEAVALLSQRGPDALLTVALRKPPGQRTDEELDLIFEELLHIKAVAHLSNSVKRELAAVLLFEPHSKAGTVSRGTRALRGTLSGRDLSTW

SEQ ID NO: 47538 - protein, 201 aa, Homo sapiens
MALSLEEFVHSLDLRTLPRVLEIQAGIYLEGSIYEMFGNECCFSTGEVIKITGLKVKKIIAEICEQIEGCESLQPFELPMNFPVRKDIIRILPSLDVEVKDITDSYDANWFLQLLSTEDLFEMTSKEFPIVTEVIEAPEGNHLPQSILQPGKTIVIHKKYQASRILASEIRSNFPKRHFLIPTSYKGKFKRRPREFPTAYD

SEQ ID NO: 47539 - protein, 283 aa, Homo sapiens
GLSFEQMTDAHVWNKSVTLYTVKDKATGEVLGQFYLDLYPREGKYNHAACFGLQPGCLLPDGSRMMAVAALVVNFSQPVAGRPSLLRHDEVRTYFHEFGHVMHQICAQTDFARFSGTNVETDFVEVPSQMLENWVWDVDSLRRLSKHYKDGSPIADDLLEKLVASRLVNTGLLTLRQIVLSKVDQSLHTNTSLDAASEYAKYCSEILGVAATPGTNMPATFGHLAGGYDGQYYGYLWSEVFSMDMFYSCFKKEGIMNPETSKHHGISLIMFHYSKGEVDLVPF

SEQ ID NO: 47540 - protein, 35 aa, Homo sapiens
MGLQFPECTKAGTRPRGIELSCIRIAPFEEQMRGL

SEQ ID NO: 47541 - protein, 158 aa, Homo sapiens
FFEKPDYEYLRTLFTDLFEKKGYTFDYAYDWVGRPIPTPVGSVHVDSGASAITRESHTHRDRPSQQQPLRNQVVSSTNGELNVDDPTGAHSNAPITAHAEVEVVEEAKYVHLSRGLLSHGLKNLFCLFLSVCCSSQTGFLMLVTTAFFLNCFNFCMVP

SEQ ID NO: 47542 - protein, 471 aa, Homo sapiens
MLTFMASDSEEEVCDERTSLMSAESPTPRSCQEGRQGPEDGENTAQWRSQENEEDGEEDPDRYVCSGVPGRPPGLEEELTLKYGAKHVIMLFVPVTLCMIVVVATIKSVRFYTEKNGQLIYTPFTEDTPSVGQRLLNSVLNTLIMISVIVVMTIFLVVLYKYRCYKFIHGWLIMSSLMLLFLFTYIYLGEVLKTYNVAMDYPTLLLTVWNFGAVGMVCIHWKGPLVLQQAYLIMISALMALVFIKYLPEWSAWVILGAISVYDLVAVLCPKGPLRMLVETAQERNEPIFPALIYSSAMVWTVGMAKLDPSSQGALQLPYDPEMEEDSYDSFGEPSYPEVFEPPLTGYPGEELEEEEERGVKLGLGDFIFYSVLVGKAAATGSGDWNTTLACFVAILIMASHSCCPGWSAMVRFGSLWPLPPGFKRFSCLSLPYQFNFFRFHVHTAGGHLPDSPAASCGYVIEGQPVKRGQK

SEQ ID NO: 47543 - protein, 206 aa, Homo sapiens
MAVPFVEDWDLVQTLGEGAYGEVQLAVNRVTEEAVAVKIVDMKRAVDCPENIKKEICINKMLNHENVVKFYGHRREGNIQYLFLEYCSGGELFDRIEPDIGMPEPDAQRFFHQLMAGVVYLHGIGITHRDIKPENLLLDERDNLKISDFGLATVFRYNNRERLLNKMCGTLPYVAPELLKRREFHAEPVDVWSCGIVLTAMLAGEL

SEQ ID NO: 47544 - protein, 151 aa, Homo sapiens
MAAVLLRRLLSSAFDEVYPALPSDVQTAIKSELLMIIQMETQSSMRKKVCDIAAELARNLIDEDGNNQWPEGLKFLFDSVSSQNVGLREAALHIFWNFPGIFGNQQQHYLDVIKRMLVQCMQDQEHPSIRTLSARATAAFILANEHNVALF

SEQ ID NO: 47545 - protein, 331 aa, Homo sapiens
  MOD_RES (1)..(1): Any amino acid
XIRFIGGLLAAYYLSGEEIFKIKAVQLAEKLLPAFNTPTGIPWAMVNLKSGVGRNWGWASAGSSILAEFGTLHMEFIHLSYLTGDLTYYKKVMHIRKLLQKMDRPNGLYPNYLNPRTGRWGQYHTSVGGLGDSFYEYLLKAWLMSDKTDHEARKMYDDAIEAIEKHLIKKSRGGLTFIGEWKNGHLEKKMGHLACFAGGMFALGADGSRADKAGHYLELGAEIARTCHESYDRTALKLGPESFKFDGAVEAVAVRQAEKYYILRPEVIETYWYLWRFTHDPRYRQWGWEAALAIEKYCRVNGGFSGVKDVYSSTPTHDDVQQSFFLAETLN

SEQ ID NO: 47546 - protein, 49 aa, Homo sapiens
  MOD_RES (1)..(1): Any amino acid
XRVLWGGLSLLRVLWCLLPQTGYVHPDEFFQSPEVMAGSGRSWGRGLAW

SEQ ID NO: 47547 - protein, 1393 aa, Homo sapiens
MAALLRSARWLLRAGAAPRLPLSLRLLPGGPGRLHAASYLPAARAGPVAGGLLSPARLYAIAAKEKDIQEESTFSSRKISNQFDWALMRLDLSVRRTGRIPKKLLQKVFNDTCRSGGLGGSHALLLLRSCGSLLPELKLEERTEFAHRIWDTLQKLGAVYDVSHYNALLKVYLQNEYKFSPTDFLAKMEEANIQPNRVTYQRLIASYCNVGDIEGASKILGFMKTKDLPVTEAVFSALVTGHARAGDMENAENILTVMRDAGIEPGPDTYLALLNAYAEKGDIDHVKQTLEKVEKSELHLMDRDLLQIIFSFSKAGYPQYVSEILEKVTCERRYIPDAMNLILLLVTEKLEDVALQILLACPVSKEDGPSVFGSFFLQHCVTMNTPVEKLTDYCKKLKEVQMHSFPLQFTLHCALLANKTDLAKALMKAVKEEGFPIRPHYFWPLLVGRRKEKNVQGIIEILKGMQELGVHPDQETYTDYVIPCFDSVNSARAILQENGCLSDSDMFSQAGLRSEAANGNLDFVLSFLKSNTLPISLQSIRSSLLLGFRRSMNINLWSEITELLYKDGRYCQEPRGPTAVGYFLYNLIDSMSDSEVQAKEEHLRQYFHQLEKMNVKIPENIYRGIRNLLESYHVPELIKDAHLLVESKNLDFQKTVQLTSSELESTLETLKAENQPIRDVLKQLILVLCSEENMQKALELKAKYESDMVTGGYAALINLCCRHDKVEDALNLKEEFDRLDSSAVLDTGKYVGLVRVLAKHGKLQDAINILKEMKEKDVLIKDTTALSFFHMLNGAALRGEIETVKQLHEAIVTLGLAEPSTNISFPLVTVHLEKGDLSTALEVAIDCYEKYKVLPRIHDVLCKLVEKGETDLIQKAMDFVSQEQGEMVMLYDLFFAFLQTGNYKEAKKIIETPGIRARSARLQWFCDRCVANNQVETLEKLVELTQKLFECDRDQMYYNLLKLYKINGDWQRADAVWNKIQEENVIPREKTLRLLAEILREGNQEVPFDVPELWYEDEKHSLNSSSASTTEPDFQKDILIACRLNQKKGAYDIFLNAKEQNIVFNAETYSNLIKLLMSEDYFTQAMEVKAFAETHIKGFTLNDAANSRLIITQVRRDYLKEAVTTLKTVLDQQQTPSRLAVTRVIQALAMKGDVENIEVVQKMLNGLEDSIGLSKMVFINNIALAQIKNNNIDAAIENIENMLTSENKVIEPQYFGLAYLFRKVIEEQLEPAVEKISIMAERLANQFAIYKPVTDFFLQLVDAGKVDDARALLQRCGAIAEQTPILLLFLLRNSRKQGKASTVKSVLELIPELNEKEEAYNSLMKSYVSEKDVTSAKALYEHLTAKNTKLDDLFLKRYASLLKYAGEPVPFIEPPESFEFYAQQLRKLRENSS

SEQ ID NO: 47548 - protein, 231 aa, Homo sapiens
MMTPQVITPQQMQQILQQQVLSPQQLQVLLQQQQALMLQQQQLQEFYKKQQEQLQLQLLQQQHAGKQPKEQVATQQLAFQQQLLQMQQLQQQHLLSLQRQGLLTIQPGQPALPLQPLAQGMIPTELQQLWKEVTSAHTAEETTGNNHSSLDLTTTCVSSSAPSKTSLIMNPHASTNGQLSVHTPKRESLSHEEHPHSHPLYGHGVCKWPGCEAVCEDFQSFLKHLNSEHAL

SEQ ID NO: 47549 - protein, 46 aa, Homo sapiens
MGKSCKVVVCGQASVGKTSILEQLLYGNHVVGSEMIETQEDIYVGS

SEQ ID NO: 47550 - protein, 352 aa, Homo sapiens
MATDVQLADYPLMSPKAELKLEKKSGRKPRSPRDSGPQKELVIPGIVDFERIRRALRTPKPQTPGTYCFGRLSHHSFFSRHHPHPQHVTHIQDLTGKPVCVVRDFPAPLPESTVFSGCQMGIPTISVPIGDPQSNRNPQLSSEAWKKELKELASRVAFLTKEDELKKKEQKEQKEEPLREQGAKYSAETGRLIPASTRAVGRRRSHQGQQSQSSSRHEGVQAFLLQDQELLVLELLCRILETDLLSAIQFWLLYAPPKEKDLALGLLQTAVAQLLPQPLVSIPTEKLLSQLPEVHEPPQEKQEPPCSQSPKKTKISPFTKSEKPEYIGEAQVLQMHSSQNTEKKTSKPRAES

SEQ ID NO: 47551 - protein, 325 aa, Homo sapiens
MDCTFEDMLQLINNQDSDFPGLFDPPYAGSGAGGTDPASPDTSSPGSLSPPPATLSSSLEAFLSGPQAAPSPLSPPQPAPTPLKMYPSMPAFSPGPGIKEESVPLSILQTPTPQPLPGALLPQSFPAPAPPQFSSTPVLGYPSPPGGFSTGSPPGNTQQPLPGLPLASPPGVPPVSLHTQVQSVVPQQLLTVTAAPTAAPVTTTVTSQIQQVLLQPHFIKADSLLLTAMKTDGATVKAAGLSPLVSGTTVQTGPLPTLVSGGTILATVPLVVDAEKLPINRLAAGSKAPASAQSRGEKRTAHNAIEKRYRSSINDKIIELKDLVV

SEQ ID NO: 47552 - protein, 172 aa, Homo sapiens
MEPKASCPAAAPLMERKFHVLVGVTGSVAALKLPLLVSKLLDIPGIWKSRSDPVLHIDLRRWADLLLVAPLDANTLGKVASGICDNLLTCVMRAWDRSKPLLFCPAMNTAMWEHPITAQQVDQLKAFGYVEIPCVAKKLVCGDEGLGAMAEVGTIVDKVKEVLFQHSGFQQS

SEQ ID NO: 47553 - protein, 1034 aa, Homo sapiens
MFHLRTCAAKLRPLTASQTVKTFSQNRPAAARTFQQIRCYSAPVAAEPFLSGTSSNYVEEMYCAWLENPKSVHKSWDIFFRNTNAGAPPGTAYQSPLPLSRGSLAAVAHAQSLVEAQPNVDKLVEDHLAVQSLIRAYQVRGHHIAKLDPLGISCVNFDDAPVTVSSNVDLAVFKERLRMLTVGGFYGLDESDLDKVFHLPTTTFIGGQESALPLREIIRRLEMAYCQHIGVEFMFINDLEQCQWIRQKFETPGIMQFTNEEKRTLLARLVRSTRFEEFLQRKWSSEKRFGLEGCEVLIPALKTIIDKSSENGVDYVIMGMPHRGRLNVLANVIRKELEQIFCQFDSKLEAADEGSGDVKYHLGMYHRRINRVTDRNITLSLVANPSHLEAADPVVMGKTKAEQFYCGDTEGKKVMSILLHGDAAFAGQGIVYETFHLSDLPSYTTHGTVHVVVNNQIGFTTDPRMARSSPYPTDVARVVNAPIFHVNSDDPEAVMYVCKVAAEWRSTFHKDVVVDLVCYRRNGHNEMDEPMFTQPLMYKQIRKQKPVLQKYAELLVSQGVVNQPEYEEEISKYDKICEEAFARSKDEKILHIKHWLDSPWPGFFTLDGQPRSMSCPSTGLTEDILTHIGNVASSVPVENFTIHGGLSRILKTRGEMVKNRTVDWALAEYMAFGSLLKEGIHIRLSGQDVERGTFSHRHHVLHDQNVDKRTCIPMNHLWPNQAPYTVCNSSLSEYGVLGFELGFAMASPNALVLWEAQFGDFHNTAQCIIDQFICPGQAKWVRQNGIVLLLPHGMEGMGPEHSSARPERFLQMCNDDPDVLPDLKEANFDINQLYDCNWVVVNCSTPGNFFHVLRRQILLPFRKPLIIFTPKSLLRHPEARSSFDEMLPGTHFQRVIPEDGPAAQNPENVKRLLFCTGKVYYDLTRERKARDMVGQVAITRIEQLSPFPFDLLLKEVQKYPNAELAWCQEEHKNQGYYDYVKPRLRTTISRAKPVWYAGRDPAAAPATGNKKTHLTELQRLLDTAFDLDVFKNFS

SEQ ID NO: 47554 - protein, 1142 aa, Homo sapiens
MDALIIPVTMEVPCDSRGQRMWWAFLASSMVTFFGGLFIILLWRTLKYLWTVCCHCGGKTKEAQKINNGSSQADGTLKPVDEKEEAVAAEVGWMTSVKDWAGVMISAQTLTGRVLVVLVFALSIGALVIYFIDSSNPIESCQNFYKDFTLQIDMAFNVFFLLYFGLRFIAANDKLWFWLEVNSVVDFFTVPPVFVSVYLNRSWLGLRFLRALRLIQFSEILQFLNILKTSNSIKLVNLLSIFISTWLTAAGFIHLVENSGDPWENFQNNQALTYWECVYLLMVTMSTVGYGDVYAKTTLGRLFMVFFILGGLAMFASYVPEIIELIGNRKKYGGSYSAVSGRKHIVVCGHITLESVSNFLKDFLHKDRDDVNVEIVFLHNISPNLELEALFKRHFTQVEFYQGSVLNPHDLARVKIESADACLILANKYCADPDAEDASNIMRVISIKNYHPKIRIITQMLQYHNKAHLLNIPSWNWKEGDDAICLAELKLGFIAQSCLAQGLSTMLANLFSMRSFIKIEEDTWQKYYLEGVSNEMYTEYLSSAFVGLSFPTVCELCFVKLKLLMIAIEYKSANRESRILINPGNHLKIQEGTLGFFIASDAKEVKRAFFYCKACHDDITDPKRIKKCGCKRLIYFEDEQPSTLSPKKKQRNGGMRNSPNTSPKLMRHDPLLIPGNDQIDNMDSNVKKYDSTGMFHWCAPKEIEKVILTRSEAAMTVLSGHVVVCIFGDVSSALIGLRNLVMPLRASNFHYHELKHIVFVGSIEYLKREWETLHNFPKVSILPGTPLSRADLRAVNINLCDMCVILSANQNNIDDTSLQDKECILASLNIKSMQFDDSIGVLQANSQGFTPPGMDRSSPDNSPVHGMLRQPSITTGVNIPIITELAKPGKLPLVSVNQEKNSGTHILMITELVNDTNVQFLDQDDDDDPDTELYLTQPFACGTAFAVSVLDSLMSATYFNDNILTLIRTLVTGGATPELEALIAEENALRGGYSTPQTLANRDRCRVAQLALLDGPFADLGDGGCYGDLFCKALKTYNMLCFGIYRLRDAHLSTPSQCTKRYVITNPPYEFELVPTDLIFCLMQFDHNAGQSRASLSHSSHSSQSSSKKSSSVHSIPSTANRQNRPKSRESRDKQKKEMVYR

SEQ ID NO: 47555 - protein, 1058 aa, Homo sapiens
MEQDTAAVAATVAAADATATIVVIEDEQPGPSTSQEEGAAAAATEATAATEKGEKKKEKNVSSFQLKLAAKAPKSEKEMDPEYEEKMKADRAKRFEFLLKQTELFAHFIQPSAQKSPTSPLNMKLGRPRIKKDEKQSLISAGDYRHRRTEQEEDEELLSESRKTSNVCIRFEVSPSYVKGGPLRDYQIRGLNWLISLYENGVNGILADEMGLGKTLQTIALLGYLKHYRNIPGPHMVLVPKSTLHNWMNEFKRWVPSLRVICFVGDKDARAAFIRDEMMPGEWDVCVTSYEMVIKEKSVFKKFHWRYLVIDEAHRIKNEKSKLSEIVREFKSTNRLLLTGTPLQNNLHELWALLNFLLPDVFNSADDFDSWFDTKNCLGDQKLVERLHAVLKPFLLRRIKTDVEKSLPPKKEIKIYLGLSKMQREWYTKILMKDIDVLNSSGKMDKMRLLNILMQLRKCCNHPYLFDGAEPGPPYTTDEHIVSNSGKMVVLDKLLAKLKEQGSRVLIFSQMTRLLDILEDYCMWRGYEYCRLDGQTPHEEREEAIEAFNAPNSSKFIFMLSTRAGGLGINLASADVVILYDSDWNPQVDLQAMDRAHRIGQKKPVRVFRLITDNTVEERIVERAEIKLRLDSIVIQQGRLIDQQSNKLAKEEMLQMIRHGATHVFASKESELTDEDITTILERGEKKTAEMNERLQKMGESSLRNFRMDIEQSLYKFEGEDYREKQKLGMVEWIEPPKRERKANYAVDAYFREALRVSEPKIPKAPRPPKQPNVQDFQFFPPRLFELLEKEILYYRKTIGYKVPRNPDIPNPALAQREEQKKIDGAEPLTPEETEEKEKLLTQGFTNWTKRDFNQFIKANEKYGRDDIDNIAREVEGKSPEEVMEYSAVFWERCNELQDIEKIMAQIERGEARIQRRISIKKALDAKIARYKAPFHQLRIQYGTSKGKNYTEEEDRFLICMLHKMGFDRENVYEELRQCVRNAPQFRFDWFIKSRTAMEFQRRCNTLISLIEKENMEIEERERAEKKKRATKTPMSQKRKAESATESSGKKDVKKVKS

SEQ ID NO: 47556 - protein, 80 aa, Homo sapiens
MDDDANGDVDVEESDEFLREDLNYHDPTVKHSTFHGEDKLISVEDLWKAWKSSEVYNWTVDEVVQWLITYVELPQYEETF

SEQ ID NO: 47557 - protein, 417 aa, Homo sapiens
MQLRNPELHLGCALALRFLALVSWDIPGARALDNGLARTPTMGWLHWERFMCNLDCQEEPDSCISEKLFMEMAELMVSEGWKDAGYEYLCIDDCWMAPQRDSEGRLQADPQRFPHGIRQLANYVHSKGLKLGIYADVGNKTCAGFPGSFGYYDIDAQTFADWGVDLLKFDGYKHMSLALNRTGRSIVYSCEWPLYMWPFQKPNYTEIRQYCNHWRNFADIDDSWKSIKSILDWTSFNQERIVDVAGPGGWNDPDMLVIGNFGLSWNQQVTQMALWAIMAAPLFMSNDLRHISPQAKALLQDKDVIAINQDPLGKQGYQLRQGDNFEVWERPLSGLAWAVAMINRQEIGGPRSYTIAVASLGKGVACNPACFITQLLPVKRKLGFYEWTSRLRSHINPTGTVLLQLENTMQMSLKDLL

SEQ ID NO: 47558 - protein, 139 aa, Homo sapiens
MSSSCSGLSRVLVAVATALVSASSPCPQAWGPPGVQYGQPGRSVKLCCPGVTAGDPVSWFRDGEPKLLQGPDSGLGHELVLAQADSTDEGTYICQTLDGALGGTVTLQLGYPPARPVVSCQAADYENFSCTWSPSQISG

SEQ ID NO: 47559 - protein, 773 aa, Homo sapiens
MPTVISASVAPRTAAEPRSPGPVPHPAQSKATEAGGGNPSGIYSAIISRNFPIIGVKEKTFEQLHKKCLEKKVLYVDPEFPPDETSLFYSQKFPIQFVWKRPPEICENPRFIIDGANRTDICQGELGDCWFLAAIACLTLNQHLLFRVIPHDQSFIENYAGIFHFQFWRYGEWVDVVIDDCLPTYNNQLVFTKSNHRNEFWSALLEKAYAKLHGSYEALKGGNTTEAMEDFTGGVAEFFEIRDAPSDMYKIMKKAIERGSLMGCSIDTIIPVQYETRMACGLVRGHAYSVTGLDEVPFKGEKVKLVRLRNPWGQVEWNGSWSDRWKDWSFVDKDEKARLQHQVTEDGEFWMSYEDFIYHFTKLEICNLTADALQSDKLQTWTVSVNEGRWVRGCSAGGCRNFPDTFWTNPQYRLKLLEEDDDPDDSEVICSFLVALMQKNRRKDRKLGASLFTIGFAIYEVPKEMHGNKQHLQKDFFLYNASKARSKTYINMREVSQRFRLPPSEYVIVPSTYEPHQEGEFILRVFSEKRNLSEEVENTISVDRPVKKKKTKPIIFVSDRANSNKELGVDQESEEGKGKTSPDKQKQSPQPQPGSSDQESEEQQQFRNIFKQIAGDDMEICADELKKVLNTVVNKHKDLKTHGFTLESCRSMIALMDTDGSGKLNLQEFHHLWNKIKAWQKIFKHYDTDQSGTINSYEMRNAVNDAGFHLNNQLYDIITMRYADKHMNIDFDSFICCFVRLEGMFRAFHAFDKDGDGIIKLNVLEWLQLTMYA

SEQ ID NO: 47560 - protein, 60 aa, Homo sapiens
MEKLRLLGLRYQEYVTRHPAATAQLETAVRGFSYLLAGRFADSHELSELGRSSVRLENSH

SEQ ID NO: 47561 - protein, 261 aa, Homo sapiens
  MOD_RES (1)..(1): Any amino acid
XEGKPYNQKSDIWALGCVLYELASLKRAFEAANLPALVLKIMSGTFAPISDRYSPELRQLVLSLLSLEPAQRPPLSHIMAQPLCIRALLNLHTDVGSVRMRRPVQGQRAVLGGRVWAPSGSTGGPHLSCRAEKSVAPSNTGSRTTSVRCRGIPRGPVRPAIPPPLSSVYAWGGGLGTPLRLPMLNTEVVQVAAGRTQKAGVTRSGRLILWEAPPLGAGGGSLLPGAVEQPQPQFISRFLEGQSGVTIKHVACGDFFTACLT

SEQ ID NO: 47562 - protein, 354 aa, Homo sapiens
MASGLGSPSPCSAGSEEEDMDALLNNSLPPPHPENEEDPEEDLSETETPKLKKKKKPKKPRDPKIPKSKRQKKERMLLCRQLGDSSGEGPEFVEEEEEVALRSDSEGSDYTPGKKKKKKLGPKKEKKSKSKRKEEEEEEDDDDDSKEPKSSAQLLEDWGMEDIDHVFSEEDYRTLTNYKAFSQFVRPLIAAKNPKIAVSKMMMVLGAKWREFSTNNPFKGSSGASVAAAAAAAVAVVESMVTATEVAPPPPPVEVPIRKAKTKEGKGPNARRKPKGSPRVPDAKKPKPKKVAPLKIKLGGFGSKRKRSSSEDDDLDVESDFDDASINSYSVSDGSTSRSSRSRKKLRTTKKKKK

SEQ ID NO: 47563 - protein, 84 aa, Homo sapiens
MQKATYYDSSAIYGGYPYQAANGFAYNANQQPYPASAALGADGEYHRPACSLQSPSSAGGHPKAHELSEACLRTLSAPPSQPPS

SEQ ID NO: 47564 - protein, 156 aa, Homo sapiens
MLQGHSSVFQALLGTFFTWGMTAAGAALVFVFSSGQRRILDGSLGFAAGVMLAASYWSLLAPAVEMATSSGGFGAFAFFPVAVGFTLGAAFVYLADLLMPHLGAAEDPQTTLALNFGSTLMKKKSDPEGPALLFPESELSIRIGRAGLLSDKSENG

SEQ ID NO: 47565 - protein, 1022 aa, Homo sapiens
MSVSFHTHTKELWTWMEDLQKEMLEDVCADSVDAVQELIKQFQQQQTATLDATLNVIKEGEDLIQQLRSAPPSLGEPSEARDSAVSNNKTPHSSSISHIESVLQQLDDAQVQMEELFHERKIKLDIFLQLRIFEQYTIEVTAELDAWNEDLLRQMNDFNTEDLTLAEQRLQRHTERKLAMNNMTFEVIQQGQDLHQYITEVQASGIELICEKDIDLAAQVQELLEFLHEKQHELELNAEQTHKRLEQCLQLRHLQAEVKQVLGWIRNGESMLNASLVNASSLSEAEQLQREHEQFQLAIESLFHATSLQKTHQSALQVQQKAEVLLQAGHYDADAIRECAEKVALHWQQLMLKMEDRLKLVNASVAFYKTSEQVCSVLESLEQEYRRDEDWCGGRDKLGPAAEIDHVIPLISKHLEQKEAFLKACTLARRNAEVFLKYIHRNNVSMPSVASHTRGPEQQVKAILSELLQRENRVLHFWTLKKRRLDQCQQYVVFERSAKQALDWIQETGEFYLSTHTSTGETTEETQELLKEYGEFRVPAKQTKEKVKLLIQLADSFVEKGHIHATEIRKWVTTVDKHYRDFSLRMGKYRYSLEKALGVNTEDNKDLELDIIPASLSDREVKLRDANHEVNEEKRKSARKKEFIMAELLQTEKAYVRDLHECLETYLWEMTSGVEEIPPGILNKEHIIFGNIQEIYDFHNNIFLKELEKYEQLPEDVGHCFVTWADKFQMYVTYCKNKPDSNQLILEHAGTFFDEIQQRHGLANSISSYLIKPVQRITKYQLLLKELLTCCEEGKGELKDGLEVMLSVPKKANDAMHVSMLEGFDENLDVQGELILQDAFQVWDPKSLIRKGRERHLFLFEISLVFSKEIKDSSGHTKYVYKNKLLTSELGVTEHVEGDPCKFALWSGRTPSSDNKTVLKASNIETKQEWIKNIREVIQERIIHLKGALKEPLQLPKTPAKQRNNSKRDGVEDIDSQGDGSSQPDTISIASRTSQNTVDSDKDGNLVPRWHLGPGDPFSTYV

SEQ ID NO: 47566 - protein, 2262 aa, Homo sapiens
MARFGDEMPARYGGGGSGAAAGVVVGSGGGRGAGGSRQGGQPGAQRMYKQSMAQRARTMALYNPIPVRQNCLTVNRSLFLFSEDNVVRKYAKKITEWPPFEYMILATIIANCIVLALEQHLPDDDKTPMSERLDDTEPYFIGIFCFEAGIKIIALGFAFHKGSYLRNGWNVMDFVVVLTGILATVGTEFDLRTLRAVRVLRPLKLVSGIPSLQVVLKSIMKAMIPLLQIGLLLFFAILIFAIIGLEFYMGKFHTTCFEEGTDDIQGESPAPCGTEEPARTCPNGTKCQPYWEGPNNGITQFDNILFAVLTVFQCITMEGWTDLLYNSNDASGNTWNWLYFIPLIIIGSFFMLNLVLGVLSGEFAKERERVENRRAFLKLRRQQQIERELNGYMEWISKAEEVILAEDETDGEQRHPFDVGALRRTTIKKSKTDLLNPEEAEDQLADIASVGSPFARASIKSAKLENSTFFHKKERRMRFYIRRMVKTQAFYWTVLSLVALNTLCVAIVHYNQPEWLSDFLYYAEFIFLGLFMSEMFIKMYGLGTRPYFHSSFNCFDCGVIIGSIFEVIWAVIKPGTSFGISVLRALRLLRIFKVTKYWASLRNLVVSLLNSMKSIISLLFLLFLFIVVFALLGMQLFGGQFNFDEGTPPTNFDTFPAAIMTVFQILTGEDWNEVMYDGIKSQGGVQGGMVFSIYFIVLTLFGNYTLLNVFLAIAVDNLANAQELTKDEQEEEEAANQKLALQKAKEVAEVSPLSAANMSIAVKEQQKNQKPAKSVWEQRTSEMRKQNLLASREALYNEMDPDERWKAAYTRHLRPDMKTHLDRPLVVDPQENRNNNTNKSRAAEPTVDQRLGQQRAEDFLRKQARYHDRARDPSGSAGLDARRPWAGSQEAELSREGPYGRESDHHAREGSLEQPGFWEGEAERGKAGDPHRRHVHRQGGSRESRSGSPRTGADGEHRRHRAHRRPGEEGPEDKAERRARHREGSRPARGGEGEGEGPDGGERRRRHRHGAPATYEGDARREDKERRHRRRKENQGSGVPVSGPNLSTTRPIQQDLGRQDPPLAEDIDNMKNNKLATAESAAPHGSLGHAGLPQSPAKMGNSTDPGPMLAIPAMATNPQNAASRRTPNNPGNPSNPGPPKTPENSLIVTNPSGTQTNSAKTARKPDHTTVDIPPACPPPLNHTVVQVNKNANPDPLPKKEEEKKEEEEDDRGEDGPKPMPPYSSMFILSTTNPLRRLCHYILNLRYFEMCILMVIAMSSIALAAEDPVQPNAPRNNVLRYFDYVFTGVFTFEMVIKMIDLGLVLHQGAYFRDLWNILDFIVVSGALVAFAFTGNSKGKDINTIKSLRVLRVLRPLKTIKRLPKLKAVFDCVVNSLKNVFNILIVYMLFMFIFAVVAVQLFKGKFFHCTDESKEFEKDCRGKYLLYEKNEVKARDREWKKYEFHYDNVLWALLTLFTVSTGEGWPQVLKHSVDATFENQGPSPGYRMEMSIFYVVYFVVFPFFFVNIFVALIIITFQEQGDKMMEEYSLEKNERACIDFAISAKPLTRHMPQNKQSFQYRMWQFVVSPPFEYTIMAMIALNTIVLMMKFYGASVAYENALRVFNIVFTSLFSLECVLKVMAFGILNYFRDAWNIFDFVTVLGSITDILVTEFGNNFINLSFLRLFRAARLIKLLRQGYTIRILLWTFVQSFKALPYVCLLIAMLFFIYAIIGMQVFGNIGIDVEDEDSDEDEFQITEHNNFRTFFQALMLLFRSATGEAWHNIMLSCLSGKPCDKNSGILTRECGNEFAYFYFVSFIFLCSFLMLNLFVAVIMDNFEYLTRDSSILGPHHLDEYVRVWAEYDPAACGRIHYKDMYSLLRVISPPLGLGKKCPHRVACKRLLRMDLPVADDNTVHFNSTLMALIRTALDIKIAKGGADKQQMDAELRKEMMAIWPNLSQKTLDLLVTPHKSTDLTVGKIYAAMMIMEYYRQSKAKKLQAMREEQDRTPLMFQRMEPPSPTQEGGPGQNALPSTQLDPGGALMAHESGLKESPSWVTQRAQEMFQKTGTWSPEQGPPTDMPNSQPNSQSVEMREMGRDGYSDSEHYLPMEGQGRAASMPRLPAENQRRRGRPRGNNLSTISDTSPMKRSASVLGPKARRLDDYSLERVPPEENQRHHQRRRDRSHRASERSLGRYTDVDTGLGTDLSMTTQSGDLPSKERDQERGRPKDRKHRQHHHHHHHHHHPPPPDKDRYAQERPDHGRARARDQRWSRSPSEGREHMAHRQ

SEQ ID NO: 47567 - protein, 576 aa, Homo sapiens
MIWRNNWKSTTGRLNVKLQSDKLQHGCGPDYSSAWLPANESLWQATTVPSNHRNNHIRRHSIASDSGDTGIGTSCSDSVEDHSTSSGTLSFKPSQSLITLPTAHVMPSNSSASISKLRESLTPDGSKWSTSLMQTLGNHSRGEQDSSLDMKDFRPLRKWSSLSKLTAPDNCGQGGTVCREESRNGLEKIGKAKALTSQLRTIGPSCLHDSMEMLRLEDKEINKKRSSTLDCKYKFESCSKEDFRASSSTLRRQPVDMTYSALPESKPIMTSSEAFEPPKYLMLGQQAVGGVPIQPSVRTQMWLTEQLRTNPLEGRNTEDSYSLAPWQQQQIEDFRQGSETPMQVLTGSSRQSYSPGYQDFSKWESMLKIKEGLLRQKEIVIDRQKQQITHLHERIRDNELRAQHAMLGHYVNCEDSYVASLQPQYENTSLQTPFSEESVSHSQQGEFEQKLASTEKEVLQLNEFLKQRLSLFSEEKKKLEEKLKTRDRYISSLKKKCQKESEQNKEKQRRIETLEKYLADLPTLDDVQSQSLQLQILEEKNKNLQEALIDTEKKLEEIKKQCQDKETQLICQKKKE

SEQ ID NO: 47568 - protein, 166 aa, Homo sapiens
VTVKSCDCLNGGSCVSDRNFSPGSGVYLCVCLPGFHGSLCEVDISGCQSNPCGLGSYISGFHSYSCDCPPELKGKNCQEDVDECDSKPCFEGVACLNTFGSYHCGSCPEGFYGDGKICHVETQFVNQFTTQTVVLTRSDKSVNKEEDDKNAQGRKRHVKPTSGNAF

SEQ ID NO: 47569 - protein, 101 aa, Homo sapiens
MCKDMEELLRQRAQAEERYGKELVQIARKAGGQTEINSLRASFDSLKQQMENVGSSHIQLALTLREELRSLEEFRERQKEQRKKSQERCCASSQGHSVLLA

SEQ ID NO: 47570 - protein, 118 aa, Homo sapiens
MPAARRFPGLELSFPLLARLRRRLYTRLGGGRMQPEEGTGWLLELLSEVQLQQYFLRLRDDLNVTRLSHFEYVKNEDLEKIGMGRPGQRRLWEAVKRRKALCKRKSWMSKDEGQPTPW

SEQ ID NO: 47571 - protein, 252 aa, Homo sapiens
MADTRSVHETRFEAAVKVIQSLPKNGSFQPTNEMMLKFYSFYKQATEGPCKLSRPGFWDPIGRYKWDAWSSLGDMTKEEAMIAYVEEMKKIIETMPMTEKVEELLRVIGPFYEIVEDKKSGRSSDITSVRLEKISKCLEDLGNVLTSTPNAKTVNGKAESSDSGAESEEEEAQEEVKGAEQSDNDKKMMKKSADHKNLEVIVTNGYDKDGFVQDIQNDIHASSSLNGRSTEEVKPIDENLGQTGKSAVCIHQ

SEQ ID NO: 47572 - protein, 206 aa, Homo sapiens
MDTIFLWSLLLLFFGSQASRCSAQKNTEFAVDLYQEVSLSHKDNIIFSPLGITLVLEMVQLGAKGKAQQQIRQTLKQQETSAGEEFFVLKSFFSAISEKKQEFTFNLANALYLQEGFTVKEQYLHGNKEFFQSAIKLVDFQDAKACAEMISTWVERKTDGKIKDMFSGEEFGPLTRLVLVNAIYFKGDWKQKFRKEDTQLINFTKK

SEQ ID NO: 47573 - protein, 378 aa, Homo sapiens
MEALLEGIQNRGHGGGFLTSCEAELQELMKQIDIMVAHKKSEWEGRTHALETCLKIREQELKSLRSQLDVTHKEEFRQKSLDWEKQRLIYQQQVSSLEAQRKALAEQSEIIQAQLVNRKQKLESVELSSQSEIQHLSSKLERANDTICANELEIERLTMRVNDLVGTSMTVLQEQQQKEEKLRESEKLLEALQEEKRELKAALQSQENLIHEARIQKEKLQEKVKATNTQHAVEAISLESVSATCKQLSQELMEKYEELKRMEAHNNEYKAEIKKLKEQILQGEQSYSSALEGMKMEISHLTQELHQRDITIASTKGSSSDMEKRLRAEMQKAEDKAVEHKEILDQLESLKLENRHLSEMVMKLELGLHEANPWPAQT

SEQ ID NO: 47574 - protein, 222 aa, Homo sapiens
MTAAVFFGCAFIAFGPALALYVFTIATEPLRIIFLIAGAFFWLVSLLISSLVWFMARVIIDNKDGPTQKYLLIFGAFVSVYIQEMFRFAYYKLLKKASEGLKSINPGETAPSMRLLAYVSGLGFGIMSGVFSFVNTLSDSLGPGTVGIHGDSPQFFLYSDLHKFLLWNKPGVSIYNPGAHGHLGILSCGRQLPKPETLPALPRQELSSLQPALQITSGNQHF

SEQ ID NO: 47575 - protein, 105 aa, Homo sapiens
MYRVIQVSEGQLDGQTEGTGAISGYPATQSMTQAVIQGAFTSDDAVDTEGTAAETHYTYFPSTAVGDGAGGTTSGSTAAVVTTQGSEALLGQATPPGTGQFFVMM

SEQ ID NO: 47576 - protein, 203 aa, Homo sapiens
MSPYGISSLGNGLSKWLSLNAGAFYALSTLLNRMVIWHYPGEEVNAGRIGLTIVIAGMLGAVISGIWLDRSKTYKETTLVVYIMTLVGMVVYTFTLNLGHLWVVFITAGTMGFFMTGYLPLGFEFAVELTYPESEGISSGLLNISAQVFGIIFTISQGQIIDNYGTKPGNIFLCVFLTLGAALTAFIKADLRRQKANKETLEN

SEQ ID NO: 47577 - protein, 407 aa, Homo sapiens
  MOD_RES (1)..(1): Any amino acid
XRTKAAGCAERRPLQPRTEAAAAPAGRAMPSEYTYVKLRSDCSRPSLQWYTRAQSKMRRPSLLLKDILKCTLLVFGVWILYILKLNYTTEECDMKKMHYVDPDHVKRAQKYAQQVLQKECRPKFAKTSMALLFEHRYSVDLLPFVQKAPKDSEAESKYDPPFGFRKFSSKVQTLLELLPEHDLPEHLKAKTCRRCVVIGSGGILHGLELGHTLNQFDVVIRLNSAPVEGYSEHVGNKTTIRMTYPEGAPLSDLEYYSNDLFVAVLFKSVDFNWLQAMVKKETLVAEKIPLQPKHFRILNPVIIKETAFDILQYSEPQSRFWGRDKNVPTIGVIAVVLATHLCDEVSLAGFGYDLNQPRTPLHYFDSQCMAAMNFQTMHNVTTETKFLLKLVKEGVVKDLSGGIDREF

SEQ ID NO: 47578 - protein, 902 aa, Homo sapiens
MVPWVRTMGQKLKQRLRLDVGREICRQYPLFCFLLLCLSAASLLLNRYIHILMIFWSFVAGVVTFYCSLGPDSLLPNIFFTIKYKPKQLGLQELFPQGHSCAVCGKVKCKRHRPSLLLENYQPWLDLKISSKVDASLSEVDIPSIITKKLLKAAMKHIEVIVKARQKVKNTEFLQQAALEEYGPELHVALRSRRDELHYLRKLTELLFPYILPPKATDCRSLTLLIREILSGSVFLPSLDFLADPDTVNHLLIIFIDDSPPEKATEPASPLVPFLQKFAEPRNKKPSVLKLELKQIREQQDLLFRFMNFLKQEGAVHVLQFCLTVEEFNDRILRPELSNDEMLSLHEELQKIYKTYCLDESIDKIRFDPFIVEEIQRIAEGPYIDVVKLQTMRCLFEAYEHVLSLLENVFTPMFCHSDEYFRQLLRGAESPTRNSKLNRGSLSLDDFRNTQKRGESFGISRIGSKIKGVFKSTTMEGAMLPNYGVAEGEDDFIEEGIVVMEDDSPVEAVSTPNTPRNLAAWKISIPYVDFFEDPSSERKEKKERIPVFCIDVERNDRRAVGHEPEHWSVYRRYLEFYVLESKLTEFHGAFPDAQLPSKRIIGPKNYEFLKSKREEFQEYLQKLLQHPELSNSQLLADFLSPNGGETQFLDKILPDVNLGKIIKSVPGKLMKEKGQHLEPFIMNFINSCESPKPKPSRPELTILSPTSENNKKLFNDLFKNNANRAENTERKQNQNYFMEVMTVEGVYDYLMYVGRVVFQVPDWLHHLLMGTRILFKNTLEMYTDYYLQCKLEQLFQEHRLVSLITLLRDAIFCENTEPRSLQDKQKGAKQTFEEMMNYIPDLLVKCIGEETKYESIRLLFDGLQQPVLNKQLTYVLLDIVIQELFPELNKVQKEVTSVTSWM

SEQ ID NO: 47579 - protein, 99 aa, Homo sapiens
MGETKIIYHLDGQETPYLVKLPLPAERVTLADFKGVLQRPSYKFFFKSMDDDFGLEHSGVISAHCNLHLPDSSDSPALASQVAGITGLVDVRAGISPQA

SEQ ID NO: 47580 - protein, 165 aa, Homo sapiens
MSKPSRLARPFFSNAASKLPSARRDDLNSKQKKNSLGEKILRTGSEGNLVKQQQVQTAATPAQRKATPHKEQGKGNLHVTSPEDAECRRTKERLSNGNSRGSVSKSSRNIPRRHTLGGPRSSKEILGMQTSEMDRKREAFLEHLKQKYPHHASAIMGHQERLRDQ

SEQ ID NO: 47581 - protein, 910 aa, Homo sapiens
  MOD_RES (1)..(1): Any amino acid
XKRGALDGNSPPQRQDVDHDFFLLFSVVDENLSWHLNENIATYCSDPASVDKEDETFQESNRMHAINGFVFGNLPELNMCAQKRVAWHLFGMGNEIDVHTAFFHGQMLTTRGHHTDVANIFPATFVTAEMVPWEPGTWLISCQVNSHFRDGMQALYKVKSCSMAPPVDLLTGKVRQYFIEAHEIQWDYGPMGHDGSTGKNLREPGSISDKFFQKSSSRIGGTYWKVRYEAFQDETFQEKMHLEEDRHLGILGPVIRAEVGDTIQVVFYNRASQPFSMQPHGVFYEKDYEGTVYNDDPIRDTNSGLVGPLLVCRAGALGADGKQKGVDKEFFLLFTVLDENKSWYSNANQAAAMLDFRLLSEDIEGFQDSNRMHAINGFLFSNLPRLDMCKGDTVAWHLLGLGTETDVHGVMFQGNTVQLQGMRKGAAMLFPHTFVMAIMQPDNLGTFEIYCQAGSHREAGMRAIYNVSQCPGHQATPRQRYQAARIYYIMAEEVEWDYCPDRSWEREWHNQSEKDSYGYIFLSNKDGLLGSRYKKAVFREYTDGTFRIPRPRTGPEEHLGILGPLIKGEVGDILTVVFKNNASRPYSVHAHGVLESTTVWPLAAEPGEVVTYQWNIPERSGPGPNDSACVSWIYYSAVDPIKDMYSGLVGPLAICQKGILEPHGGRSDMDREFALLFLIFDENKSWYLEENVATHGSQDPGSINLQDETFLESNKMHAINGKLYANLRGLTMYQGERVAWYMLAMGQDVDLHTIHFHAESFLYRNGENYRADVVDLFPGTFEVVEMVASNPGTWLMHCHVTDHVHAGMETLFTVFSRTEHLSPLTVITKETEKAVPPRDIEEGNVKMLGMQIPIKNVEMLASVLVAISVTLLLVVLALGGVVWYQHRQRKLRRNRRSILDDSFKLLSFKQ

SEQ ID NO: 47582 - protein, 38 aa, Homo sapiens
MATRVRTASIWAGVQWLSLLTTTSASRVQVVLLPQPPE

SEQ ID NO: 47583 - protein, 1131 aa, Homo sapiens
MMATRRTGLSEGDGDKLKACEVSKNKDGKEQSETVSLSEDETFSWPGPKTVTLKRTSQGFGFTLRHFIVYPPESAIQFSYKDEENGNRGGKQRNRLEPMDTIFVKQVKEGGPAFEAGLCTGDRIIKVNGESVIGKTYSQVIALIQNSDTTLELSVMPKDEDILQVLQFTKDVTALAYSQDAYLKGNEAYSGNARNIPEPPPICYPWLPSAPSAMAQPVEISPPDSSLSKQQTSTPVLTQPGRAYRMEIQVPPSPTDVAKSNTAVCVCNESVRTVIVPSEKVVDLLSNRNNHTGPSHRTEEVRYGVSEQTSLKTVSRTTSPPLSIPTTHLIHQPAGSRSLEPSGILLKSGNYSGHSDGISSSRSQAVEAPSVSVNHYSPNSHQHIDWKNYKTYKEYIDNRRLHIGCRTIQERLDSLRAASQSTTDYNQVVPNRTTLQGRRRSTSHDRVPQSVQIRQRSVSQERLEDSVLMKYCPRSASQGALTSPSVSFSNHRTRSWDYIEGQDETLENVNSGTPIPDSNGEKKQTYKWSGFTEQDDRRGICERPRQQEIHKSFRGSNFTVAPSVVNSDNRRMSGRGVGSVSQFKKIPPDLKTLQSNRNFQTTCGMSLPRGISQDRSPLVKVRSNSLKAPSTHVTKPSFSQKSFVSIKDQRPVNHLHQNSLLNQQTWVRTDSAPDQQVETGKSPSLSGASAKPAPQSSENAGTSDLELPVSQRNQDLSLQEAETEQSDTLDNKEAVILREKPPSGRQTPQPLRHQSYILAVNDQETGSDTTCWLPNDARREVHIKRMEERKASSTSPPGDSLASIPFIDEPTSPSIDHDIAHIPASAVISASTSQVPSIATVPPCLTTSAPLIRRQLSHDHESVGPPSLDAQPNSKTERSKSYDEGLDDYREDAKLSFKHVSSLKGIKIADSQKSSEDSGSRKDSSSEVFSDAAKEGWLHFRPLVTDKGKRVGGSIRPWKQMYVVLRGHSLYLYKDKREQTTPSEEEQPISVNACLIDISYSETKRKNVFRLTTSDCECLFQAEDRDDMLAWIKTIQESSNLNEEDTGVTNRDLISRRIKEYNNLMSKAEQLPKTPRQSLSIRQTLLGAKSEPKTQSPHSPKEESERKLLSKDDTSPPKDKGTWRKGIPSIM

SEQ ID NO: 47584 - protein, 102 aa, Homo sapiens
MVLNVEREKNMILEQQAQLQREKEQDQMKLYAKLEKLDVLEKECFRLTTTQKTAEDKIKHLEEKLKEEEHQRKLFQDKASELQTGLEISKIIMSSVSNLKHS

SEQ ID NO: 47585 - protein, 58 aa, Homo sapiens
MEGGRRARVVIESKRNFFLGAFPTPFPAEHVELGRLGDSETAMVPGKGGADGLQQKSL

SEQ ID NO: 47586 - protein, 111 aa, Homo sapiens
  MOD_RES (1)..(1): Any amino acid
XVNGQCGYVLKPACLRQPDSTFDPEYPGPPRTTLSIQVLTAQQLPKLNAEKPHSIVDPLVRIEIHGVPADCARQETDYVLNNGYRHIHLLSKDGASLSPATLFIQIRIQRS

SEQ ID NO: 47587 - protein, 322 aa, Homo sapiens
MDKLSSGLDIYRNPLKNKTEVTMFILTGFTDDFELQVFLFLLFFAIYLFTLIGNLGLVVLVIEDSWLHNPMYYFLSVLSFLDACYSTVVTPKMLVNFLAKNKSISFIGCATQMLLFVTFGTTECFLLAAMAYDHYVAIYNPLLYSVSMSPRVYVPLITASYVAGILHATIHIVATFSLSFCGSNEIRHVFCDMPPLLAISCSDTHTNQLLLFYFVGSIEIVTILIVLISCDFILLSILKMHSAKGRQKAFSTCGSHLTGVTIYHGTILVSYMRPSSSYASDHDIIVSIFYTIVIPKLNPIIYSLRNKEVKKAVKKMLKLVYK

SEQ ID NO: 47588 - protein, 221 aa, Homo sapiens
MEGPLSVFGDRSTGETIRSQNGMPKRIVNAKIACLDFSLQKTKMKLGVQVVITDPEKLDQIRQRESDITKERIQKILATGANVILTTGGIDDMCLKYFVEAGAMAVRRVLKRDLKRIAKASGATILSTLANLEGEETFEAAMLGQAEEVVQERICDDELILIKNTKARTSASIILRGANDFMCDEMERSLHDALCVVKRVLESKSVVPGGGAVEAALSIYL

SEQ ID NO: 47589 - protein, 177 aa, Homo sapiens
MQRGIKKPFTEVIRANIGDAQAMGQQPITFLRQVMALCTYPNLLDSPSFPEDAKKRARRILQACGGNSLGSYSASQGVNCIREDVAAYITRRDGGVPADPDNIYLTTGASDGISTILKILVSGGGKSRTGVMIPIPQYPLYSAVISELDAIQVNYYLDEENCWALNVNELRRAVQEA

SEQ ID NO: 47590 - protein, 55 aa, Homo sapiens
MQPRVLLVVALLALLASARASEAEDASLLSFMQGYMKHATKTAKDALSSVQESQV

SEQ ID NO: 47591 - protein, 38 aa, Homo sapiens
  MOD_RES (1)..(1): Any amino acid
XKLGIQGSYFCSQECFKGSWATHKLLHKKAKRRCYVMS

SEQ ID NO: 47592 - protein, 641 aa, Homo sapiens
MPDNRQPRNRQPRIRSGNEPRSAPAMEPDGRGAWAHSRAALDRLEKLLRCSRCTNILREPVCLGGCEHIFCSNCVSDCIGTGCPVCYTPAWIQDLKINRQLDSMIQLCSKLRNLLHDNELSDLKEDKPRKSLFNDAGNKKNSIKMWFSPRSKKVRYVVSKASVQTQPAIKKDASAQQDSYEFVSPSPPADVSERAKKASARSGKKQKKKTLAEINQKWNLEAEKEDGEFDSKEESKQKLVSFCSQPSVISSPQINGEIDLLASGSLTESECFGSLTEVSLPLAEQIESPDTKSRNEVVTPEKGDIPSVEYLLQNGSDPNVKDHAGWTPLHEACNHGHLKVVELLLQHKALVNTTGYQNDSPLHDAAKNGHVDIVKLLLSYGASRNAVNIFGLRPVDYTDDESMKSLLLLPEKNESSSASHCSVMNTGQRRDGPLVLIGSGLSSEQQKMLSELAVILKAKKYTEFDSTVTHVVVPGDAVQSTLKCMLGILNGCWILKFEWVKACLRRKVCEQEEKYEIPEGPRRSRLNREQLLPKLFDGCYFYLWGTFKHHPKDNLIKLVTAGGGQILSRKPKPDSDVTQTINTVAYHARPDSDQRFCTQYIIYEDLCNYHPERVRQGKVWKAPSSWFIDCVMSFELLPLDS

SEQ ID NO: 47593 - protein, 1121 aa, Homo sapiens
MEQVPSAGRLVQITVTEGYDLKGFKGDTPVTFIRAEFNQVVLGDSAKITVSPEGSAKYNFTSSFEFNPEGGITSDDLAHKPVFLTVTEVLPKEKKQKEEKTLILGQAVVDLLPLLEGQSSFQTTVPLHPVQGSPLETPRSSAKQCSLEVKVLVAEPLLTTAQISGGNLLKVTLEAAYSVPESFIPTGPGQNYMVGLQVPSLGEKDYPILFKNGTLKLGGEREPVPRPKKWPIANILAPGANNIPDAFIVGGPYEEEEGELNHPEDSEFRNQAECIKKRIIWDLESRCYLDPSAVVSFQKRIADCRLWPVEITRVPLVTIPKGKAGKTEKTDEEAQLSFHGVAYVNMVPLLYPGVKRIRGAFHVYPYLDSVVHEKTKCLLSLFRDIGHHLIHNNKIGGINSLLSKQAVSKNLKEDKPVKEKDIDGRPRPGDVQAPSIKSQSSDTPLEGEPPLSHNPEGQQYVEAGTYIVLEIQLDKALVPKRMPEELARRVKEMIPPRPPLTRRTGGAQKAVSDYHIQIKNISRAILDEYYRMFGKQVAKLESDMDSETLEEQKCQLSYELNCSGKYFAFKEQLKHAVVKIVRDKYLKTTSFESQEELQTFISELYVFLVDQMHVALNQTMPDDVQGTVATIYTSSEQLQLFAFEAEVNENFEMAAAYYKERLVREPQNLDHWLDYGAFCLLTEDNIKAQECFQKALSLNQSHIHSLLLCGVLAVLLENYEQAEIFFEDATCLEPTNVVAWTLLGLYYEIQNNDIRMEMAFHEASKQLQARMLQAQVTKQKSTGVEDTEERGKRESSLGPWGITNGSATAIKVEAPAGPGAALSILDKFLEESSKLQSDSQEPILTTQTWDPSISQKPSNTFIKEIPTKKEASKCQDSSALLHPGLHYGVSQTTTIFMETIHFLMKVKAVQYVHRVLAHELLCPQGGPSCEYYLVLAQTHILKKNFAKAEEYLQQAAQMDYLNPNVWGLKGHLYFLSGNHSEAKACYERTISFVVDASEMHFIFLRLGLIYLEEKEYEKAKKTYMQACKRSPSCLTWLGLGIACYRLEELTEAEDALSEANALNNYNAEVWAYLALVCLKVGRQLEAEQAYKYMIKLKLKDEALLAEIHTLQETVGFGNPSF

SEQ ID NO: 47594 - protein, 521 aa, Homo sapiens
MDSTLTASEIRQRFIDFFKRNEHTYVHSSATIPLDDPTLLFANAGMNQFKPIFLNTIDPSHPMAKLSRAANTQKCIRAGGKHNDLDDVGKDVYHHTFFEMLGSWSFGDYFKELACKMALELLTQEFGIPIERLYVTYFGGDEAAGLEADLECKQIWQNLGLDDTKILPGNMKDNFWEMGDTGPCGPCSEIHYDRIGGRDAAHLVNQDDPNVLEIWNLVFIQYNREADGILKPLPKKSIDTGMGLERLVSVLQNKMSNYDTDLFVPYFEAIQKGTGARPYTGKVGAEDADGIDMAYRVLADHARTITVALADGGRPDNTGRGYVLRRILRRAVRYAHEKLNASRGFFATLVDVVVQSLGDAFPELKKDPDMVKDIINEEEVQFLKTLSRGRRILDRKIQSLGDSKTIPGDTAWLLYDTYGFPVDLTGLIAEEKGLVVDMDGFEEERKLAQLKSQGKGAGGEDLIMLDIYAIEELRARGLEVTDDSPKYNYHLDSSGSYENRVYSEECSGPRRVCATHWNHLR

SEQ ID NO: 47595 - protein, 125 aa, Homo sapiens
MLLRSAGKLNVGTKKEDGESTAPTPRPKVLRCKCHHHCPEDSVNNICSTDGYCFTMIEEDDSGLPVVTSGCLGLEGSDFQCRDTPIPHQRRSIECCTERNECNKDLHPTLPPLKNRDFVDGPIHH

SEQ ID NO: 47596 - protein, 151 aa, Homo sapiens
GDHRVELYKVLSSLGYHVVTFDYRGWGDSVGTPSERGMTYDALHVFDWIKARSGDNPVYIWGHSLGTGVATNLVRRLCERETPPDALILESPFTNIREEAKSHPFSVIYRYFPGFDWFFLDPITSSGIKFANDEKYGGIVYLWSQLHGRLS

SEQ ID NO: 47597 - protein, 113 aa, Homo sapiens
LQCLAALLLLGDPLGLEGCQHSVQPQPLQALWARREAKCSERALQLPAQEDSGLGAAATPHPSARSRVRMPPLSDHCPNRLLVLGPRVADSLVLDQAQEGSALGQITRKYPPF

SEQ ID NO: 47598 - protein, 77 aa, Homo sapiens
MGLSDGEWQLVLNVWGKVEADIPGHGQEVLIRLFKGHPETLEKFDKFKHLKSEDEMKASEDLKKHGATVLTALGGIL

SEQ ID NO: 47599 - protein, 77 aa, Homo sapiens
MAGVLKKTTGLVGLAVCNTPHEEPDVKKLEDQLQGGQLEEVILQAEHELNLARKMREWKLWEPLVEEPPADQWKWPI

SEQ ID NO: 47600 - protein, 24 aa, Homo sapiens
MVDKDTERDSTYSGITPMLRKNSS

SEQ ID NO: 47601 - protein, 284 aa, Homo sapiens
ATRPYTIHPHGVFYEKDSEGSLYPDGSSGPLKADDSVPPGGSHIYNWTIPEGHAPTDADPACLTWIYHSHVDAPRDIATGLIGPLITCKRGALDGNSPPQRQDVDHDFFLLFSVVDENLSWHLNENIATYCSDPASVDKEDETFQESNRMHAINGFVFGNLPELNMCAQKRVAWHLFGMGNEIDVHTAFFHGQMLTTRGHHTDVANIFPATFVTAEMVPWEPGTWLISCQVNSHFRVSQISFSRRAPAELGALTGKCDMKPFKMRHSKRRCIWRKIGILESWGQ

SEQ ID NO: 47602 - protein, 114 aa, Homo sapiens
MSHLFDPRLPALAASPMLYLYGPERPGLPLAFAPAAALAASGRAETPQKPPYSYIALIAMAIQDAPEQRVTLNGIYQFIMDRFPFYHDNRQGWQNSIRHNLSLNDCFVKVPREK

SEQ ID NO: 47603 - protein, 183 aa, Homo sapiens
MIAKLAKTCTLRISPDKLNFILCDKLANGGVSMWCELEQENFFNEFQMEGVSAENNEIYLELTSENLSRALKTAQNARALKIKLTNKHFPCLTVSVELLSMSSSSRIVTHDIPIKVIPRKLWKDLQEPVVPDPDVSIYLPVLKTMKSVVEKMKNISNHLVIEANLDGELNLKIETELVCVTTH

SEQ ID NO: 47604 - protein, 128 aa, Homo sapiens
  MOD_RES (1)..(1): Any amino acid
XYSRYQTLELEKEFLFNPYLTRKRRIEVSHALGLTERQVKIWFQNRRMKWKKENNKDKFPSSKCEQEELEKQKLERAPEAADEGDAQKGDKKNGSVQGPWAGSCALGAPRKTCSISARISGAPRETES

SEQ ID NO: 47605 - protein, 685 aa, Homo sapiens
MKYKVITPVRTGHGYVYEYPSRYQKDVYDIPPSHTTQGVYDIPPSSAKGPVFSVPVGEIKPQGVYDIPPTKGVYAIPPSACRDEAGLREKDYDFPPPMRQAGRPDLRPEGVYDIPPTCTKPAGKDLHVKYNCDIPGAAEPVARRHQSLSPNHPPPQLGQSVGSQNDAYDVPRGVQFLEPPAETSEKANPQERDGVYDVPLHNPPDAKGSRDLVDGINRLSFSSTGSTRSNMSTSSTSSKESSLSASPAQDKRLFLDPDTAIERLQRLQQALEMGVSSLMALVTTDWRCYGYMERHINEIRTAVDKVELFLKEYLHFVKGAVANAACLPELILHNKMKRELQRVEDSHQILSQTSHDLNECSWSLNILAINKPQNKCDDLDRFVMVAKTVPDDAKQLTTTINTNAEALFRPGPGSLHLKNGPESIMNSTEYPHGGSQGQLLHPGDHKAQAHNKALPPGLSKEQAPDCSSSDGSERSWMDDYDYVHLQGKEEFERQQKELLEKENIMKQNKMQLEHHQLSQFQLLEQEITKPVENDISKWKPSQSLPTTNSGVSAQDRQLLCFYYDQCETHFISLLNAIDALFSCVSSAQPPRIFVAHSKFVILSAHKLVFIGDTLTRQVTAQDIRNKVMNSSNQLCEQLKTIVMATKMAALHYPSTTALQEMVHQVTDLSRNAQLFKRSLLEMATF

SEQ ID NO: 47606 - protein, 41 aa, Homo sapiens
MSRSLLLWFLLFLLLLPPLPVLLADPGAPTPAPGHLCPLRP

SEQ ID NO: 47607 - protein, 80 aa, Homo sapiens
MSEYIRVTEDENDEPIEIPSEDDGTVLLSTVTAQFPGACGLRYRNPVSQCMRGVRLVEGILHAPDAGWGNLVYVVNYPKV

SEQ ID NO: 47608 - protein, 224 aa, Homo sapiens
MRVMAPRALLLLLSGGLALTETWACSHSMRYFDTAVSRPGRGEPRFISVGYVDDTQFVRFDSDAASPRGEPRAPWVEQEGPEYWDRETQNYKRQAQADRVSLRNLRGYYNQSEDGSHTLQRMYGCDLGPDGRLLRGYDQSAYDGKDYIALNEDLRSWTAADTAAQITQRKLEAARAAEQLRAYLEGTCVEWLRRYLENGKETLQRAGQDQKSLFLPQRLELSNE

SEQ ID NO: 47609 - protein, 135 aa, Homo sapiens
MFRDFGEPGPSSGNGGGYGGPAQPPAAAQAAQQKFHLVPSINTMSGSQELQWMVQPHFLGPSSYPRPLTYPQYSPPQPRPGVIRALGPPPGVRRRPCEQPGGRGAPPSKARAEQAGCGQVQEPEEGTDRLPAGGD

SEQ ID NO: 47610 - protein, 583 aa, Homo sapiens
MSATSVDQRPKGQGNKVQNGSIHQKDAVNDDDFEPYLSSQTNQSNSYPPMSDPYMPSYYAPSIGFPYSLGEAAWSTAGDQPMPYLTTYGQMSNGEHHYIPDGVFSQPGALGNTPPFLGQHGFNFFPGNADFSTWGTSGSQGQSTQSSAYSSSYGYPPSSLGRAITDGQAGFGNDTLSKVPGISSIEQGMTGLKIGGDLTAAVTKTVGTALSSSGMTSIATNSVPPVSSAAPKPTSWAAIARKPAKPQPKLKPKGNVGIGGSAVPPPPIKHNMNIGTWDEKGSVVKAPPTQPVLPPQTIIQQPQPLIQPPPLVQSQLPQQQPQPPQPQQQQGPQPQAQPHQVQPQQQQLQNRWVAPRNRGAGFNQNNGAGSENFGLGVVPVSASPSSVEVHPVLEKLKAINNYNPKDFDWNLKNGRVFIIKSYSEDDIHRSIKYSIWCSTEHGNKRLDAAYRSLNGKGPLYLLFSVNGSGHFCGVAEMKSVVDYNAYAGVWSQDKWKGKFEVKWIFVKDVPNNQLRHIRLENNDNKPVTNSRDTQEVPLEKAKQVLKIIATFKHTTSIFDDFAHYEKRQEEEEAMRRERNRNKQ

SEQ ID NO: 47611 - protein, 175 aa, Homo sapiens
MAEKFDCHYCRDPLQGKKYVQKDGHHCCLKCFDKFCANTCVECRKPIGADSKEVHYKNRFWHDTCFRCAKCLHPLANETFVAKDNKILCNKCTTREDSPKCKGCFKAIVAGDQNVEYKGTVWHKDCFTCSNCKQVIGTGSFFPKGEDFYCVTCHETKFAKHCVKCNKAITSGGIT

SEQ ID NO: 47612 - protein, 150 aa, Homo sapiens
MEKWQTRSIYNAAVWYYHHCQDRMPIVMVTEDEEAIQQYGSETEGVFVITFKNYLDNFWPDLKAAHELCDSILQSRRERENESQESHGKEYPEHLPLEVLEAGIKSGRYIQGILNVNKHRAQIEAFVRLQGASSKDSDLVSDILIHGMKA

SEQ ID NO: 47613 - protein, 50 aa, Homo sapiens
MALPQGLLTFRDVAIEFSQEEWKCLDPAQRTLYRDVMLENYRNLVSLGFL

SEQ ID NO: 47614 - protein, 89 aa, Homo sapiens
MKLLLLHPAFQSCLLLTLLGLWRTTPEAHASSLGAPAISAASFLQDLIHRYGEGDSLTLQQLKALLNHLDVGVGRGNVTQHVQGHRNLS

SEQ ID NO: 47615 - protein, 438 aa, Homo sapiens
MAALVVSGAAEQGGRDGPGRGRAPRGRVANQIPPEILKNPQLQAAIRVLPSNYNFEIPKTIWRIQQAQAKKVALQMPEGLLLFACTIVDILERFTEAEVMVMGDVTYGACCVDDFTARALGADFLVHYGHSCLIPMDTSAQDFRVLYVFVDIRIDTTHLLDSLRLTFPPATALALVSTIQFVSTLQAAAQELKAEYRVSVPQCKPLSPGEILGCTSPRLSKEVEAVVYLGDGRFHLESVMIANPNVPAYRYDPYSKVLSREHYDHQRMQAARQEAIATARSAKSWGLILGTLGRQGSPKILEHLESRLRALGLSFVRLLLSEIFPSKLSLLPEVDVWVQVACPRLSIDWGTAFPKPLLTPYEAAVALRDISWQQPYPMDFYAGSSLGPWTVNHGQDRRPHAPGRPARGKVQEGSARPPSAVACEDCSCRDEKVAPLAP

SEQ ID NO: 47616 - protein, 54 aa, Homo sapiens
MAWPNVFQRGSLLSQFSHHHVVVFLLTFFRCLSLVRSQNGCVSTTNGCTAACGL

SEQ ID NO: 47617 - protein, 41 aa, Homo sapiens
MPVLYDSLECSGMISAHYNLRLLGSSDSPASASLEAGITGY

SEQ ID NO: 47618 - protein, 92 aa, Homo sapiens
  MOD_RES (1)..(1): Any amino acid
XWGPGRPGWHIECSAIASMVFGSQLDIHSGGIDLAFPHHENEIAQCEVFHQCEQWGNYFLHSGHLHAKGKEEKMSKSLKNYITIKAQSWLDP

SEQ ID NO: 47619 - protein, 183 aa, Homo sapiens
MDFENQDKEKDSNSSSGSFNGNSTNNSIQTIDSTQALFLPIGASVSLLVMFFFFDSVQVVFTICTAVLATIAFAFLLLPMCQYLTRPCSPQNKISFGCCGRFTAAELLSFSLSVMLVLIWVLTGHWLLMDALAMGLCVAMIAFVRLPSLKVSCLLLSGLLIYDVFWVFFSAYIFNSNVMVKVA

SEQ ID NO: 47620 - protein, 48 aa, Homo sapiens
MHTPPALPRRFQGGGRVRTPGSHRQGKDNVAGTHLWRRSSSGPQWGPR

SEQ ID NO: 47621 - protein, 71 aa, Homo sapiens
LCRLINEDVNEQVMQVLGPEDLQSIIYKLEEHEEFFPAFQAFTNDLLEILEWLFAFRRGDEAWYENKGMSQ

SEQ ID NO: 47622 - protein, 227 aa, Homo sapiens
MHVSLAEALEVRGGPLQEEEIWAVLNQSAESLQELFRKVSLADPAALGFIISPWSLLLLPSGSVSFTDENISNQDLRAFTAPEVLQNQSLTSLSDVEKIHIYSLGMTLYWGADYEVPQSQPIKLGDHLNSILLGMCEDVIYARVSVRTVLDACSAHIRNSNCAPSFSYVKHLVKLVLGNLSGVFPKPSPLSLLLGTLLPSVSRESMLVSLPDFPKTWTLLVFLLFWI

SEQ ID NO: 47623 - protein, 164 aa, Homo sapiens
MRVVRLLRLRAALTLLGEVPRRPASRGVPGSRRTQKGSGARNSQKGPFRNVCCTCFPLSDPSETSCCSEDTHPSRPGPPGPQQHYLAGVTCRSPGSGRWEKEKHEDGVKWRQLEHKGPYFAPPYEPLPDGVRFFYEGRPVRLSVAAEEVATFYGRMLDHEYTTK

SEQ ID NO: 47624 - protein, 226 aa, Homo sapiens
  MOD_RES (1)..(1): Any amino acid
XKAKPRMDQYFNQMEKIIKEKKTSSRIRFMLQDVLDLRGSNWVPRRGDQGPKTIDQIHKEAEMEEHREHIKVQQLMAKGSDKRRGGPPGPPISRGLPLVDDGGWNTVPISKGSRPIDTSRLTKITKVGPGSIDSNNQLFAPGGRLSWGKGSSGGSGAKPSDAASEAARPATSTLNRFSALQQAVPTESTDNRRVVQRSSLSRERGEKAGDRGDRLERSERGGDRGD

SEQ ID NO: 47625 - protein, 120 aa, Homo sapiens
MRDRRGPLGTCLAQVQQAGGGDSDKLSCSLKKRMPEGPWPADAPSWMNKPVVDGNSQSEALSLEMRKDPSGAGLWLHSGGPVLPYVRESVRRNPASAATPSTAVGLFPAPTECFARVSCS

SEQ ID NO: 47626 - protein, 128 aa, Homo sapiens
MWLSSKAMLRNLGKSGLRVSCLGLGTWVTFGGQISDEVAERLMTIAYESGVNLFDTAEVYAAGKAEVILGSIIKKKGWRRSSLVITTKLYWGGKAETERGLSRKHIIEEIVRAMTHVINQGMAMYWGT

SEQ ID NO: 47627 - protein, 129 aa, Homo sapiens
MEKTKWLDIKGNHDAFNIPSLDSIKNYYRKYSAVRRDGSFHYVHSTPFGNYSFICVDATVNPGPKRPYNFFGILDKKKMEELLLLAKESSRSNHTIWFGHFTTSTILSPSPGIRSIMSSAIAYLCGHLH

SEQ ID NO: 47628 - protein, 119 aa, Homo sapiens
MSQKQEEENPAEETGEEKQDTQEKEGILPERAEEAKLKAKYPSLGQKPGGSDFLMKRLQKGYFDSGDYNMAKAKMKNKQLPSAGPDKNLVTGDHIPTPQDLPQRKSSLVTSKLAGGQVE

SEQ ID NO: 47629 - protein, 1160 aa, Homo sapiens
  MOD_RES (1)..(1): Any amino acid
XTNEDSPIIEYYPPDFKTDLNGKQQEWEAVVLIPFIDERLLEAMETCNHSLKKEERKRNQHSECLMCWYDRDTEFIYPSPWPEKFPAIERCCTRYKIISLDAWRVDINKNKITRIDQKALYFCGFPTLKHIRHKFFLKKSGVQVFQQSSRGENMMLEILVDAESDELTVENVASSVLGKSVFVNWPHLEEARVVAVSDGETKFYLEEPPGTQKLYSGRTAPPSKVVHLGDKEQSNWAKEVQGISEHYLRRKGIIINETSAVVYAQLLTGRKYQINQNGEVRLEKQWSKQVVPFVYQTIVKDIRAFDSRFSNIKTLDDLFPLRSMVFMLGTPYYGCTGEVQDSGDVITEGRIRVIFSIPCEPNLDALIQNQHKYSIKYNPGYVLASRLGVSGYLVSRFTGSIFIGRGSRRNPHGDHKANVGLNLKFNKKNEEVPGYTKKVGSEWMYSSAAEQLLAEYLERAPELFSYIAKNSQEDVFYEDDIWPGENENGAEKVQEIITWLKGHPVSTLSRSSCDLQILDAAIVEKIEEEVEKCKQRKNNKKVRVTVKPHLLYRPLEQQHGVIPDRDAEFCLFDRVVNVRENFSVPVGLRGTIIGIKGANREADVLFEVLFDEEFPGGLTIRCSPGRGYRLPTSALVNLSHGSRSETGNQKLTAIVKPQPAVHQHSSSSSVSSGHLGALNHSPQSLFVPTQVPTKDDDEFCNIWQSLQGSGKMQYFQPTIQEKGAVLPQEISQVNQHHKSGFNDNSVKYQQRKHDPHRKFKEECKSPKAECWSQKMSNKQPNSGIENFLASLNISKENEVQSSHHGEPPSEEHLSPQSFAMKGTRMLKEILKIDGSNTVDHKNEIKQIANEIPVSSNRRDEYGLPSQPKQNKKLASYMNKPHSANEYHNVQSMDNMCWPAPSQIPPVSTPVTELSRICSLVGMPQPDFSFLRMPQTMTVCQVKLSNGLLVHGPQCHSENEAKEKAALFALQQLGSLGMNFPLPSQVFANYPSAVPPGTIPPAFPPPTANIMPSSSHLFGSMPWGPSVPVPGKPFHHTLYSGTMPMAGGIPGGVHNQFIPLQVTKKRVANKKNFENKEAQSSQATPVQTSQPDSSNIVKVSPRESSSASLKSSPIAQPASSFQVETASQGHSISHHKSTPISSSRRKSRKLAVNFGVSKPSE

SEQ ID NO: 47630 - protein, 46 aa, Homo sapiens
MESPTKEIEEFESNSLKYLQPEQIEKIWLRLRGLRKYKKTSQRLRS

SEQ ID NO: 47631 - protein, 214 aa, Homo sapiens
MRRDVRILLLGEAQVGKTSLILSLVGEEFPEEVPPRAEEITIPADVTPEKVPTHIVDYSEAEQTDEELREEIHKANVVCVVYDVSEEATIEKIRTKWIPLVNGGTTQGPRVPIILVGNKSDLRSGSSMEAVLPIMSQFPEIETCVECSAKNLRNISELFYYAQKAVLHPTAPLYDPEAKQKSCFGHPLAPQALEDVKTVVCRNVAGGVREDRLT

SEQ ID NO: 47632 - protein, 577 aa, Homo sapiens
MLQTIYESDSCFSSDGVAGREQLLAQQRMHSMISSVDVKSEVPVGLEPISPLDLRTDLRMMMPVVDPVVREKQLQQELLLIQQQQQIQKQLLIAEFQKQHENLTRQHQAQLQEHIKLQQELLAIKQQQELLEKEQKLEQQRQEQEVERHRREQQLPPLRGKDRGRERAVASTEVKQKLQEFLLSKSATKDTPTNGKNHSVSRHPKLWYTAAHHTSLDQSSPPLSGTSPSYKYTLPGAQDAKDDFPLRKTESSVSSSSPGSGPSSPNNGPTGSVTENETSVLPPTPHAEQMVSQQRILIHEDSMNLLSLYTSPSLPNITLGLPAVPSQLNASNSLKEKQKCETQTLRQGVPLPGQYGGSIPASSSHPHVTLEGKPPNSSHQALLQHLLLKEQMRQQKLLVAGGVPLHPQSPLATKERISPGIRGTHKLPRHRPLNRTQSAPLPQSTLAQLVIQQQHQQFLEKQKQYQQQIHMNKLLSKSIEQLKQPGSHLEEAEEELQGDQAMQEDRAPSSGNSTRSDSSACVDDTLGQVGAVKVKEEPVDSDEDAQIQEMESGEQAAFMQQVIGKDLAPGFVIKVII

SEQ ID NO: 47633 - protein, 105 aa, Homo sapiens
MKPFEDALKNQPLGPVLSKAASVECISPVSPRAPDAKMLEELQAETWYQGEMSRKEAEGLLEKDGDFLVRKSTTNPGSFVLTGMHNGQAKHLLLVDPEGTRSNSY

SEQ ID NO: 47634 - protein, 75 aa, Homo sapiens
MPVSLEEQILNSTFEACDPQRTGTVAVAQVLAYLEAVTGQGPQDARLQTLANSLDPNGEGPKATVDLDTFLVVMR

SEQ ID NO: 47635 - protein, 173 aa, Homo sapiens
  MOD_RES (1)..(1): Any amino acid
XADNRLKTTKYTLLSFLPKNLFEQFHRPANVYFVFIALLNFVPAVNAFQPGLALAPVLFILAITAFRDLWEDYSRHRSDHKINHLGCLVFSREEKKYVNRFWKEIHVGDFVRLRCNEIFPADILLLSSSDPDGLCHIETANLDGETNLKRRQVVRGFSELVTLMPEVGCHGLG

SEQ ID NO: 47636 - protein, 183 aa, Homo sapiens
MPRSHRPPPTAQRAATAAAAEPKSEGVVAMTFKIFLLFAGLMVKVPVGLYFSCKLLLFQSLMLMSPEDSGFYATIVAVVGLHVQQFSECTLIDATHRDVDVLLLLSNSAYYVAYYDDEVDKVNQYQRLSLENLEKIEIGPEPTLFGKPKFSCMRLHYRYKEASGYFHTLRAVMRNPEEDGKDT

SEQ ID NO: 47637 - protein, 80 aa, Homo sapiens
MFNSKFGSIPKFYVRAPGRVNIIGEHIDYCGYSVLPMAVEQDVLIAVEPVKTYALQLANTNPLYPDFSTSANNIQIDKTK

SEQ ID NO: 47638 - protein, 530 aa, Homo sapiens
  MOD_RES (1)..(1): Any amino acid
XCEAAGENSDGGDNESLESSSNSNETINCSSGSSSRDSLREPPATGLCKQTYQRETRHSWDSPAFNNDVVQRRHYRIGLNLFNKKPEKGIQYLIERGFLSDTPVGVAHFILERKGLSRQMIGEFLGNRQKQFNRDVLDCVVDEMDFSSMDLDDALRKFQSHIRVQGEAQKVERLIEAFSQRYCVCNPALVRQFRNPDTIFILAFAIILLNTDMYSPSVKAERKMKLDDFIKNLRGVDNGEDIPRDLLVGIYQRIQGRELRTNDDHVSQVQAVERMIVGKKPVLSLPHRRLVCCCQLYEVPDPNRPQRLGLHQREVFLFNDLLVVTKIFQKKKILVTYSFRQSFPLVEMHMQLFQNSYYQFGIKLLSAVPGGERKVLIIFNAPSLQDRLRFTSDLRESIAEVQEMEKYRVESELEKQKGMMRPNASQPGGAKDSVNGTMARSSLEDTYGAGDGLKRGALSSSLRDLSDAGKRGRRNSVGSLDSTIEVSQGRQLAKAAAGATYAFDAASWTRLEGLKSLDPQGPESSPINIF

SEQ ID NO: 47639 - protein, 137 aa, Homo sapiens
MEQTWTRDYFAEDDGEMVPRTSHTAAFLSDTKDRGPPVQSQIWRSGEKVPFVQTYSLRAFEKPPQQQVALLDLQSALFCSQLEIQKLQRVVRQKERQLADAKQCVQFVEAAAHESEQQKEASWKHNQELRKALQQLQ

SEQ ID NO: 47640 - protein, 103 aa, Homo sapiens
MASASTQPAALSAEQAKVVLAEVIQAFSAPENAVRMDEARDNACNDMGKMLQFVLPVATQIQQEVIKAYGFSCDGEGGSDAGRRVRRGKAGVGSGEGAGSVGP

SEQ ID NO: 47641 - protein, 92 aa, Homo sapiens
MRGQWFIDGTWQPLEEEESNLIEQEHLNCFRGQQMQENFDIEVSKSIDGKDAVHSFKLSRNHVDWHSVDEVYLYSDATTSKIARTVTQKLGF

SEQ ID NO: 47642 - protein, 47 aa, Homo sapiens
MARGSLRRLLRLLVLGLWLALLRSVAGEQAPDPRIAESRPQPLTRGP

SEQ ID NO: 47643 - protein, 271 aa, Homo sapiens
YTGGIAKLERDMSNVSLGPTPIPELTHIMVGLESCSFLEEDFIPFAVLNMMMGGGGSFSAGGPGKGMFSRLYLNVLNRHHWMYNATSYHHSYEDTGLLCIHASADPRQVREMVEIITKEFILMGGTVDTVELERAKTQLTSMLMMNLESRPVIFEDVGRQVLATRSRKLPHELCTLIREYRRGSEGLPQASARLRGGRLALPQAVVGLWYVHHTQNLGPSPVVLSRGGQGQGRGVADLVSLPGPTMHLLPPWQVTPPSAPLGGAVTTAQSC

SEQ ID NO: 47644 - protein, 481 aa, Homo sapiens
MLRRALLCLAVAALVRADAPEEEDHVLVLRKSNFAEALAAHKYLLVEFYAPWCGHCKALAPEYAKAAGKLKAEGSEIRLAKVDATEESDLAQQYGVRGYPTIKFFRNGDTASPKEYTAAESLVESSEVAVIGFFKDVESDSAKQFLQAAEAIDDIPFGITSNSDVFSKYQLDKDGVVLFKKFDEGRNNFEGEVTKENLLDFIKHNQLPLVIEFTEQTAPKIFGGEIKTHILLFLPKSVSDYDGKLSNFKTAAESFKGKILFIFIDSDHTDNQRILEFFGLKKEECPAVRLITLEEEMTKYKPESEELTAERITEFCHRFLEGKIKPHLMSQELPEDWDKQPVKVLVGKNFEDVAFDEKKNVFVEFYAPWCGHCKQLAPIWDKLGETYKDHENIVIAKMDSTANEVEAVKVHSFPTLKFFPASADRTVIDYNGERTLDGFKKFLESGGQDGAGDDDDLEDLEEAEEPDMEEDDDQKAVKDEL

SEQ ID NO: 47645 - protein, 905 aa, Homo sapiens
MPARRLLLLLTLLLPGLGIFGSTSTVTLPETLLFVSTLDGSLHAVSKRTGSIKWTLKEDPVLQVPTHVEEPAFLPDPNDGSLYTLGSKNNEGLTKLPFTIPELVQASPCRSSDGILYMGKKQDIWYVIDLLTGEKQQTLSSAFADSLCPSTSLLYLGRTEYTITMYDTKTRELRWNATYFDYAASLPEDDVDYKMSHFVSNGDGLVVTVDSESGDVLWIQNYASPVVAFYVWQREGLRKVMHINVAVETLRYLTFMSGEVGRITKWKYPFPKETEAKSKLTPTLYVGKYSTSLYASPSMVHEGVAVVPRGSTLPLLEGPQTDGVTIGDKGECVITPSTDVKFDPGLKSKNKLNYLRNYWLLIGHHETPLSASTKMLERFPNNLPKHRENVIPADSEKKSFEEVINLVDQTSENAPTTVSRDVEEKPAHAPARPEAPVDSMLKDMATIILSTFLLIGWVAFIITYPLSMHQQQQLQHQQFQKELEKIQLLQQQQQQLPFHPPGDTAQDGELLDTSGPYSESSGTSSPSTSPRASNHSLCSGSSASKAGSSPSLEQDDGDEETSVVIVGKISFCPKDVLGHGAEGTIVYRGMFDNRDVAVKRILPECFSFADREVQLLRESDEHPNVIRYFCTEKDRQFQYIAIELCAATLQEYVEQKDFAHLGLEPITLLQQTTSGLAHLHSLNIVHRDLKPHNILISMPNAHGKIKAMISDFGLCKKLAVGRHSFSRRSGVPGTEGWIAPEMLSEDCKENPTYTVDIFSAGCVFYYVISEGSHPFGKSLQRQANILLGACSLDCLHPEKHEDVIARELIEKMIAMDPQKRPSAKHVLKHPFFWSLEKQLQFFQDVSDRIEKESLDGPIVKQLERGGRAVVKMDWRENITVPLQTGDHAAACERAGCKSRCRLSKK

SEQ ID NO: 47646 - protein, 29 aa, Homo sapiens
  MOD_RES (1)..(1): Any amino acid
XGPRGEKGDLGEKGEKGPDGLPMPGCWQK

SEQ ID NO: 47647 - protein, 2439 aa, Homo sapiens
MVQRWLLLSCCGALLSAGLANTSYTSPGLQRLKDSPQTAPDKGQCSTWGAGHFSTFDHHVYDFSGTCNYIFAATCKDAFPTFSVQLRRGPDGSISRIIVELGASVVTVSEAIISVKDIGVISLPYTSNGLQITPFGQSVRLVAKQLELELEVVWGPDSHLMVLVERKYMGQMCGLCGNFDGKVTNEFVSEEGKFLEPHKFAALQKLDDPGEICTFQDIPSTHVRQAQHARICTQLLTLVAPECSVSKEPFVLSCQADVAAAPQPGPQNSSCATLSEYSRQCSMVGQPVRRWRSPGLCSVGQCPANQVYQECGSACVKTCSNPQHSCSSSCTFGCFCPEGTVLNDLSNNHTCVPVTQCPCVLHGAMYAPGEVTIAACQTCRCTLGRWVCTERPCPGHCSLEGGSFVTTFDARPYRFHGTCTYILLQSPQLPEDGALMAVYDKSGVSHSETSLVAVVYLSRQDKIVISQDEVVTNNGEAKWLPYKTRNITVFRQTSTHLQMATSFGLELVVQLRPIFQAYVTVGPQFRGQTRGLCGNFNGDTTDDFTTSMGIAEGTASLFVDSWRAGNCPAALERETDPCSMSQLNKVCAETHCSMLLRTGTVFERCHATVNPAPFYKRCMYQACNYEETFPHICAALGDYVHACSLRGVLLWGWRSSVDNCTIPCTGNTTFSYNSQACERTCLSLSDRATECHHSAVPVDGCNCPDGTYLNQKGECVRKAQCPCILEGYKFILAEQSTVINGITCHCINGRLSCPQRPQMFLASCQAPKTFKSCSQSSENKFGAACAPTCQMLATGVACVPTKCEPGCVCAEGLYENADGQCVPPEECPCEFSGVSYPGGAELHTDCRTCSCSRGRWACQQGTHCPSTCTLYGEGHVITFDGQRFVFDGNCEYILATDVCGVNDSQPTFKILTENVICGNSGVTCSRAIKIFLGGLSVVLADRNYTVTGEEPHVQLGVTPGALSLVVDISIPGRYNLTLIWNRHMTILIRIARASQDPLCGLCGNFNGNMKDDFETRSRYVASSELELVNSWKESPLCGDVSFVTDPCSLNAFRRSWAERKCSVINSQTFATCHSKVYHLPYYEACVRDACGCDSGGDCECLCDAVAAYAQACLDKGVCVDWRTPAFCPIYCGFYNTHTQDGHGEYQYTQEANCTWHYQPCLCPSQPQSVPGSNIEGCYNCSQDEYFDHEEGVCVPCMPPTTPQPPTTPQLPTTGSRPTQVWPMTGTSTTIGLLSSTGPSPSSNHTPASPTQTPLLPATLTSSKPTASSGEPPRPTTAVTPQATSGLPPTATLRSTATKPTVTQATTRATASTASPATTSTAQSTTRTTMTLPTPATSGTSPTLPKSTNQELPGTTATQTTGPRPTPASTTGPTTPQPGQPTRPTATETTQTRTTTEYTTPQTPHTTHSPPTAGSPVPSTGPVTATSFHATTTYPTPSHPETTLPTHVPPFSTSLVTPSTHTVITPTHAQMATSASIHSAPTGTIPPPTTLKATGSTHTAPPITPTTSGTSQAHSSFSTNKTPTSLHSHTSSTHHPEVTPTSTTTITPNPTSTRTRTPVAHTNSATSSRPPPPFTTHSPPTGSSPFSSTGPMTATSFKTTTTYPTPSHPQTTLPTHVPPFSTSLVTPSTHTVITPTHAQMATSASIHSMPTGTIPPPTTLKATGSTHTAPTMTLTTSGTSQALSSLNTAKTSTSLHSHTSSTHHAEATSTSTTNITPNPTSTGTPPMTVTTSGTSQSRSSFSTAKTSTSLHSHTSSTHHPEVTSTSTTSITPNHTSTGTRTPVAHTTSATSSRLPTPFTTHSPPTGTTPISSTGPVTATSFQTTTTYPTPSHPHTTLPTHVPSFSTSLVTPSTHTVIIPTHTQMATSASIHSMPTGTIPPPTTIKATGSTHTAPPMTPTTSGTSQSPSSFSTAKTSTSLPYHTSSTHHPEVTPTSTTNITPKHTSTGTRTPVAHTTSASSSRLPTPFTTHSPPTGSSPFSSTGPMTATSFQTTTTYPTPSHPQTTLPTHVPPFSTSLVTPSTHTVIITTHTQMATSASIHSTPTGTVPPPTTLKATGSTHTAPPMTVTTSGTSQTHSSFSTATASSSFISSSSWLPQNSSSRPPSSPITTQLPHLSSATTPVSTTNQLSSSFSPSPSAPSTVSSYVPSSHSSPQTSSPSVGTSSSFVSAPVHSTTLSSGSHSSLSTHPTTASVSASPLFPSSPAASTTIRATLPHTISSPFTLSALLPISTVTVSPTPSSHLASSTIAFPSTPRTTASTHTAPAFSSQSTTSRSTSLTTRVPTSGFVSLTSGVTGIPTSPVTNLTTRHPGPTLSPTTRFLTSSLTAHGSTPASAPVSSLGTPTPTSPGVCSVREQQEEITFKGCMANVTVTRCEGACISAASFNIITQQVDARCSCCRPLHSYEQQLELPCPDPSTPGRRLVLTLQVFSHCVCSSVACGD

SEQ ID NO: 47648 - protein, 130 aa, Homo sapiens
MAEAHQAVGFRPSLTSDGAEVELSAPVLQEIYLSGLRSWKRHLSRFWNDFLTGVFPASPLSWLFLFSAIQLAWFLQLDPSLGLMEKIKELLPDWPWSASSLAATRCCSVTSAPCHASPCPLCRTPCASTW

SEQ ID NO: 47649 - protein, 68 aa, Homo sapiens
MAATASAGVPATVSEKQEFYQLLKNLINPSCMVRRQAEEIYENIPGSSSKGEGCSLYYTWTDGYRFCT

SEQ ID NO: 47650 - protein, 1650 aa, Homo sapiens
MERCSRCHRLLLLLPLVLGLSAAPGWAGAPPVDVLRALRFPSLPDGVRRAKGICPADVAYRVARPAQLSAPTRQLFPGGFPKDFSLLTVVRTRPGLQAPLLTLYSAQGVRQLGLELGPPVRFLYEDQTGRPQPPSQPVFRGLSLADGKWHRVAVAVKGQSVTLIVDCKKRVTRPLPRSARPVLDTHGVIIFGARILDEEVFEGDVQELAIVPGVQAAYESCEQKELECEGGQRERPQNQQPHRAQRSPQQQPSRLHRPQNQEPQSQDPTPGEEEEILESSLLPPLEEAAHGPRGLKGEKGEPAVLEPGMLVEGPPGPEGPAGLIGPPGIQGNPGPVGDPGERGPPGRAGLPGSDGAPGPPGTSLMLPFRFGSGGGDKGPVVAAQEAQAQAILQQARLALRGPPGPMGYTGRPGPLGQPGSPGLKGESGDLGPQGPRGPQGLTGPPGKAGRRGRAGADGARGMPGDPGVKGDRGFDGLPGLPGEKGHRGDTGAQGLPGPPGEDGERGDDGEIGPRGLPGESGPRGLLGPKGPPGIPGPPGVRGMDGPQGPKGSLGPQGEPGPPGQQGTPGTQGLPGPQGAIGPHGEKGPQGKPGLPGMPGSDGPPGHPGKEGPPGTKGNQGPSGPQGPLGYPGPRGVKGVDGIRGLKGHKGEKGEDGFPGFKGDIGVKGDRGEVGVPGSRGEDGPEGPKGRTGPTGDPGPPGLMGEKGKLGVPGLPGYPGRQGPKGSLGFPGFPGASGEKGARGLSGKSGPRGERGPTGPRGQRGPRGATGKSGAKGTSGGDGPHGPPGERGLPGPQGPNGFPGPKGPPGPPGKDGLPGHPGQRGEVGFQGKTGPPGPPGVVGPQGAAGETGPMGERGHPGPPGPPGEQGLPGTAGKEGTKGDPGPPGAPGKDGPAGLRGFPGERGLPGTAGGPGLKGNEGPSGPPGPAGSPGERGAAGSGGPIGPPGRPGPQGPPGAAGEKGVPGEKGPIGPTGRDGVQGPVGLPGPAGPPGVAGEDGDKGEVGDPGQKGTKGNKGEHGPPGPPGPIGPVGQPGAAGADGEPGARGPQGHFGAKGDEGTRGFNGPPGPIGLQGLPGPSGEKGETGDVGPMGPPGPPGPRGPAGPNGADGPQGPPGGVGNLGPPGEKGEPGESGSPGIQGEPGVKGPRGERGEKGESGQPGEPGPPGPKGPTGDDGPKGNPGPVGFPGDPGPPGEGGPRGQDGAKGDRGEDGEPGQPGSPGPTGENGPPGPLGKRGPAGSPGSEGRQGGKGAKGDPGAIGAPGKTGPVGPAGPAGKPGPDGLRGLPGSVGQQGRPGATGQAGPPGPVGPPGLPGLRGDAGAKGEKGHPGLIGLIGPPGEQGEKGDRGLPGPQGSPGQKGEMGIPGASGPIGPGGPPGLPGPAGPKGAKGATGPGGPKGEKGVQGPPGHPGPPGEVIQPLPIQMPKKTRRSVDGSRLMQEDEAIPTGGAPGSPGGLEEIFGSLDSLREEIEQMRRPTGTQDSPARTCQDLKLCHPELPDGEYWVDPNQGCARDAFRVFCNFTAGGETCVTPRDDVTQFSYVDSEGSPVGVVQLTFLRLLSVSAHQDVSYPCSGAARDGPLRLRGANEDELSPETSPYVKEFRDGCQTQQGRTVLEVRTPVLEQLPVLDASFSDLGAPPRRGGVLLGPVCFMG

SEQ ID NO: 47651 - protein, 33 aa, Homo sapiens
  MOD_RES (1)..(1): Any amino acid
XRTGSGKSSFSLAFFRMVDTFEGPRPLQRHHPI

SEQ ID NO: 47652 - protein, 454 aa, Homo sapiens
MMKGEFYVIEYAACDATYNEIVTFERLRPVNQNKTVKKNTFFKCTVDVPEDLREACANENAHKDFKKAVGACRIFYHPETTQLMILSASEATVKRVNILSDMHLRSIRTKLMLMSRNEEATKHLECTKQLAAAFHEEFVVREDLMGLAIGTHGSNIQQARKVPGVTAIELDEDTGTFRIYGESADAVKKARGFLEFVEDFIQVPRNLVGKVIGKNGKVIQEIVDKSGVVRVRIEGDNENKLPREDGMVPFVFVGTKESIGNVQVLLEYHIAYLKEVEQLRMERLQIDEQLRQIGSRSYSGRGRGRRGPNYTSGYGTNSELSNPSETESERKDELSDWSLAGEDDRDSRHQRDSRRRPGGRGRSVSGGRGRGGPRGGKSSISSVLKDPDSNPYSLLDNTESDQTADTDASESHHSTNRRRRSRRRRTDEDAVLMDGMTESDTASVNENGLGKRCD

SEQ ID NO: 47653 - protein, 233 aa, Homo sapiens
MASSTPSSSATSSNAGADPNTTNLRPTTYDTWCGVAHGCTRKLGLKICGFLQRTNSLEEKSRLVSAFKERQSSKNLLSCENSDRDARFRRTETDFSNLFARDLLPAKNGEEQTVQFLLEVVDILLNYVRKTFDRSTKVLDFHHPHQLLEGMEGFNLELSDHPESLEQILVDCRDTLKYGVRTGHPRFFNQLSTGLDIIGLAGEWLTSTANTNMGRHIQHVQHHGCSLQVLPGS

SEQ ID NO: 47654 - protein, 1785 aa, Homo sapiens
MTTMLQKSDSNASFLRAARAGNLDKVVEYLKGGIDINTCNQNGLNALHLAAKEGHVGLVQELLGRGSSVDSATKKGNTALHIASLAGQAEVVKVLVKEGANINAQSQNGFTPLYMAAQENHIDVVKYLLENGANQSTATEDGFTPLAVALQQGHNQAVAILLENDTKGKVRLPALHIAARKDDTKSAALLLQNDHNADVQSKMMVNRTTESGFTPLHIAAHYGNVNVATLLLNRGAAVDFTARNGITPLHVASKRGNTNMVKLLLDRGGQIDAKTRDGLTPLHCAARSGHDQVVELLLERGAPLLARTKNGLSPLHMAAQGDHVECVKHLLQHKAPVDDVTLDYLTALHVAAHCGHYRVTKLLLDKRANPNARALNGFTPLHIACKKNRIKVMELLVKYGASIQAITESGLTPIHVAAFMGHLNIVLLLLQNGASPDVTNIRGETALHMAARAGQVEVVRCLLRNGALVDARAREEQTPLHIASRLGKTEIVQLLLQHMAHPDAATTNGYTPLHISAREGQVDVASVLLEAGAAHSLATKKGFTPLHVAAKYGSLDVAKLLLQRRAAADSAGKNGYTPLHIAAKKNQMQIASTLLNYGAETNIVTKQGVTPLHLASQEGHTDMVTLLLDKGANIHMSTKSGLTSLHLAAQEDKVNVADILTKHGADQDAHTKLGYTPLIVACHYGNVKMVNFLLKQGANVNAKTKNGYTPLHQAAQQGHTHIINVLLQHGAKPNATTANGNTALAIAKRLGYISVVDTLKVVTEEVTTTTTTITEKHKLNVPETMTEVLDVSDEEGDDTMTGDGGEYLRPEDLKELGDDSLPSSQFLDGMNYLRYSLEGGRSDSLRSFSSDRSHTLSHASYLRDSAVMDDSVVIPSHQVSTLAKEAERNSYRLSWGTENLDNVALSSSPIHSGFLVSFMVDARGGAMRGCRHNGLRIIIPPRKCTAPTRVTCRLVKRHRLATMPPMVEGEGLASRLIEVGPSGAQFLGPVIVEIPHFAALRGKERELVVLRSENGDSWKEHFCDYTEDELNEILNGMDEVLDSPEDLEKKRICRIITRDFPQYFAVVSRIKQDSNLIGPEGGVLSSTVVPQVQAVFPEGALTKRIRVGLQAQPMHSELVKKILGNKATFSPIVTLEPRRRKFHKPITMTIPVPKASSDVMLNGFGGDAPTLRLLCSITGGTTPAQWEDITGTTPLTFVNECVSFTTNVSARFWLIDCRQIQESVTFASQVYREIICVPYMAKFVVFAKSHDPIEARLRCFCMTDDKVDKTLEQQENFAEVARSRDVEVLEGKPIYVDCFGNLVPLTKSGQHHIFSFFAFKENRLPLFVKVRDTTQEPCGRLSFMKEPKSTRGLVHQAICNLNITLPIYTKESESDQEQEEEIDMTSEKNPQDEQERIEERLAYIADHLGFSWTELARELDFTEEQIHQIRIENPNSLQDQSHALLKYWLERDGKHATDTNLVECLTKINRMDIVHLMETNTEPLQERISHSYAEIEQTITLDHSEGFSVLQEELCTAQHKQKEEQAVSKESETCDHPPIVSEEDISVGYSTFQDGVPKTEGDSSATALFPQTHKEQVQQDFSGKMQDLPEESSLEYQQEYFVTTPGTETSETQKAMIVPSSPSKTPEEVSTPAEEEKLYLQTPTSSERGGSPIIQEPEEPSEHREESSPRKTSLVIVESADNQPETCERLDEDAAFEKGDDMPEIPPETVTEEEYIDEHGHTVVKKVTRKIIRRYVSSEGTEKEEIMVQGMPQEPVNIEEGDGYSKVIKRVVLKSDTEQSEDNNE

SEQ ID NO: 47655 - protein, 33 aa, Homo sapiens
MKENVASATVFTLLLFLNTCLLNDPFCWAANRV

SEQ ID NO: 47656 - protein, 329 aa, Homo sapiens
  MOD_RES (1)..(1): Any amino acid
XVSVTPIRDTKWLTLEVCREFQRGTCSRPDTECKFAHPSKSCQVENGRVIACFDSLKGRCSRENCKYLHPPPHLKTQLEINGRNNLIQQKNMAMLAQQMQLANAMMPGAPLQPVPMFSVAPSLATNASAAAFNPYLGPVSPSLVPAEILPTAPMLVTGNPGVPVPAAAAAAAQKLMRTDRLEVCREYQRGNCNRGENDCRFAHPADSTMIDTNDNTVTVCMDYIKGRCSREKCKYFHPPAHLQAKIKAAQYQVNQAAAAQAAATAAAMGIPQAVLPPLPKRPALEKTNGATAVFNTGIFQYQQALANMQLQQHTAFLPPDTHNICRTSD

SEQ ID NO: 47657 - protein, 46 aa, Homo sapiens
MLAENLVEEFEMKEDEPWYDHQDLQQVSDEASGTSTADERTTCKGL

SEQ ID NO: 47658 - protein, 1145 aa, Homo sapiens
MVHCDTAVGTPDYISPEVLKSQGGDGFYGRECDWWSVGVFLYEMLVGDTPFYADSLVGTYSKIMDHKNSLCFPEDAEISKHAKNLICAFLTDREVRLGRNGVEEIRQHPFFKNDQWHWDNIRETAAPVVPELSSDIDSSNFDDIEDDKGDVETFPIPKAFVGNQLPFIGFTYYRENLLLSDSPSCRETDSIQSRKNEESQEIQKKLYTLEEHLSNEMQAKEELEQKCKSVNTRLEKTAKELEEEITLRKSVESALRQLEREKALLQHKNAEYQRKADHEADKKRNLENDVNSLKDQLEDLKKRNQNSQISTEKVNQLQRQLDETNALLRTESDTAARLRKTQAESSKQIQQLESNNRDLQDKNCLLETAKLKLEKEFINLQSALESERRDRTHGSEIINDLQGRICGLEEDLKNGKILLAKVELEKRQLQERFTDLEKEKSNMEIDMTYQLKVIQQSLEQEEAEHKATKARLADKNKIYESIEEAKSEAMKEMEKKLLEERTLKQKVENLLLEAEKRCSLLDCDLKQSQQKINELLKQKDVLNEDVRNLTLKIEQETQKRCLTQNDLKMQTQQVNTLKMSEKQLKQENNHLMEMKMNLEKQNAELRKERQDADGQMKELQDQLEAEQYFSTLYKTQVRELKEECEEKTKLGKELQQKKQELQDERDSLAAQLEITLTKADSEQLARSIAEEQYSDLEKEKIMKELEIKEMMARHKQELTEKDATIASLEETNRTLTSDVANLANEKEELNNKLKDVQEQLSRLKDEEISAAAIKAQFEKQLLTERTLKTQAVNKLAEIMNRKEPVKRGNDTDVRRKEKENRKLHMELKSEREKLTQQMIKYQKELNEMQAQIAEESQIRIELQMTLDSKDSDIEQLRSQLQALHIGLDSSSIGSGPGDAEADDGFPESRLEGWLSLPVRNNTKKFGWVKKYVIVSSKKILFYDSEQDKEQSNPYMVLDIDKLFHVRPVTQTDVYRADAKEIPRIFQILYANEGESKKEQEFPVEPVGEKSNYICHKGHEFIPTLYHFPTNCEACMKPLWHMFKPPPALECRRCHIKCHKDHMDKKEEIIAPCKVYYDISTAKNLLLLANSTEEQQKWVSRLVKKIPKKPPAPDPFARSSPRTSMKIQQNQSIRRPSRQLAPNKPS

SEQ ID NO: 47659 - protein, 154 aa, Homo sapiens
MAEPVSPLKHFVLAKKAITAIFDQLLEFVTEGSHFVEATYKNPELDRIATEDDLVEMQGYKDKLSIIGEVLSRRHMKVAFFGRTSSGKSSVINAMLWDKVLPSGIGHITNCFLSVEGTDGDKAYLMTEGSDEKKSVKTVNQLAHALHMDKDLKA

SEQ ID NO: 47660 - protein, 68 aa, Homo sapiens
MTTHVTLEDALSNVDLLEELPLPDQQPCIEPPPSSIMYQANFDTNFEDRNAFVTGIASARPSSGSAAR

SEQ ID NO: 47661 - protein, 219 aa, Homo sapiens
MAQNLKDLAGRLPAGPRGMGTALKLLLGAGAVAYGVRESVFTVEGGHRAIFFNRIGGVQQDTILAEGLHFRIPWFQYPIIYDIRARPRKISSPTGSKDLQMVNISLRVLSRPNAQELPSMYQRLGLDYEERVLPSIVNEVLKSVVAKFNASQLITQRAQVSLLIRRELTERAKDFSLILDDVAITELSFSREYTAAVEAKQVAQRRTGARECGKDRARD

SEQ ID NO: 47662 - protein, 40 aa, Homo sapiens
  MOD_RES (1)..(1): Any amino acid
XHFKGFSLRQPVDFPGALAGAEITGRSLWPASSTVRPVKG

SEQ ID NO: 47663 - protein, 17 aa, Homo sapiens
MIWEYNVVIIVMACREF

SEQ ID NO: 47664 - protein, 285 aa, Homo sapiens
MHSARLDSFLSQLRWELLCGRDTGSPSMPGPLQPTSQTGPDVQPSHQLRASGALEEDSVCCVEEEEEEEEEAVVTEDRDAALGGPREHALDWDSGFSEVSGSTWREEELPVSQRPAPSAQPLRRQCLSVSGLPMPSRAPVASVPPVHHPRPKSTPDACLEHWQGLEAEDWTAALLNRGRSRQPLVLGDNCFADLVHNWMELPETGSEGGDGGGHRARARPPQFLLGLSEQLRRRLARARRTAMAGKRLSCPPRPEPELPADVSRFAALMSCRSRQPIICNDVSYL

SEQ ID NO: 47665 - protein, 487 aa, Homo sapiens
MEYEEITLERGNSGLGFSIAGGTDNPHIGDDPSIFITKIIPGGAAAQDGRLRVNDSILFVNEVDVREVTHSAAVEALKEAGSIVRLYVMRRKPPAEKVMEIKLIKGPKGLGFSIAGGVGNQHIPGDNSIYVTKIIEGGAAHKDGRLQIGDKILAVNSVGLEDVMHEDAVAALKNTYDVVYLKVAKPSNAYLSDSYAPPDITTSYSQHLDNEISHSSYLGTDYPTAMTPTSPRRYSPVAKDLLGEEDIPREPRRIVIHRGSTGLGFNIVGGEDGEGIFISFILAGGPADLSGELRKGDQILSVNGVDLRNASHEQAAIALKNAGQTVTIIAQYKPEEYSRFEAKIHDLREQLMNSSLGSGTASLRSNPKRGFYIRALFDYDKTKDCGFLSQALSFRFGDVLHVIDASDEEWWQARRVHSDSETDDIGFIPSKRRVERREWSRLKAKDWGSSSGSQGREDSVLSYETVTQMEVHYARPIIILGPTKDRA

SEQ ID NO: 47666 - protein, 148 aa, Homo sapiens
  MOD_RES (1)..(1): Any amino acid
XHGVKGQKGERGLPGLQGVIGFPGMQGPEGPQGPPGQKGDTGEPGLPGTKGTRGPPGASGYPGNPGLPGIPGQDGPPGPPGIPGCNGTKGERGPLGPPGLPGFAGNPGPPGLPGMKGDPGEILGHVPGMLLKGERGFPGIPGTPVSIC

SEQ ID NO: 47667 - protein, 56 aa, Homo sapiens
MLEAHMQSYKGNDPLGEWERYIQWVEENFPENKEYLITLLEHLMKEFLDKKKYHND

SEQ ID NO: 47668 - protein, 140 aa, Homo sapiens
  MOD_RES (1)..(1): Any amino acid
XIISTMQAVFSSVFYFASVPLYQGFLMVGYATIYTMFPVFSLVLDQDVKPEMAMLYPELYKDLTKSQQDGRSNRRQHERLTSGTSGHVWDPGSFFRIRVSGKGARNAGKILVLQNLPHLGFNKYLPRRHPHVWGPGALRV

SEQ ID NO: 47669 - protein, 91 aa, Homo sapiens
MAAASIANIVKSSLGPVGLDKMLVDDIGDVTITNDGATILKLLEVEHPAAKVLCELADLQDKEVGDGTTSVVIIAAELLKNADELVKQKIH

SEQ ID NO: 47670 - protein, 243 aa, Homo sapiens
  MOD_RES (1)..(1): Any amino acid
XSLKTSAMRSNTRYYTGTQSRIRRMWNDTVRKQTESSFMAGDINSTPTLNRGTMGNHLLTNPVLQPRGGTSPYNTLIAESVGFNPSSPPVFNSPEHPLGGREACGMDTLPLNGNFNNSYSLRSGDFPPGDGGPEPPRGRNLADAAAFEKMIISELVHNNLRGSSSAAKGPPPPEPPVPPVPGGGGEEEAGGPGGADRAEIELLYKALEEPLLLPRAQSVLYQSDLDESESCTAEDGATSRPLS

SEQ ID NO: 47671 - protein, 248 aa, Homo sapiens
MASSSSLVPDRLRLPLCFLGVFVCYFYYGILQEKMTRVGPLLVLPDACKQPIRPRPWCHSRNTVSSCLGTRGKYGEGAKQETFTFALTLVFIQCVINAVFAKILIQFFDTARVDRTRSWLYAACSISYLGAMVSSNSALQFVNYPTQVLGKSCKPIPVMLLGVTLLKKKYPLAKYLCVLLIVAGVALFMYKPKKVVGIEEHTVGYGELLLLLSLTLDGLTGVSQDHMRAHYQTGSNHMMLNINLWSTL

SEQ ID NO: 47672 - protein, 46 aa, Homo sapiens
LIFQITPLNVTQWLMVLKISLPVILMDETLKFVARNYLEPVLSSEL

SEQ ID NO: 47673 - protein, 269 aa, Homo sapiens
MAPKQDPKPKFQEGERVLCFHGPLLYEAKCVKVAIKDKQVKYFIHYSGWNKNWDEWVPESRVLKYVDTNLQKQRELQKANQKTKKNKQKTPGNGDGGSTSETPQPPRKKRARVDPTVENEETFMNRVEVKVKIPEELKPWLVDDWDLITRQKQLFYLPAKKNVDSILEDYANYKKSRGNTDNKEYAVNEVVAGIKEYFNVMLGTQLLYKFERPQYAEILADHPDAPMSQVYGAPHLLRLFVRIGAMLAYTPLDEKSLALLLNYLHDFLK

SEQ ID NO: 47674 - protein, 73 aa, Homo sapiens
LVKEAIDKAGYTEKIVIGMDVAASEFYRDGKYDLDFKSPTDPSRYITGDQLGALYQDFVRDYPGNKGACSCLM

SEQ ID NO: 47675 - protein, 655 aa, Homo sapiens
MMEEEELEFVEELEAVLQLTPEVQLAIEQVFPSQDPLDRADFNAVEYINTLFPTEQSLANIDEVVNKIRLKIRRLDDNIRTVVRGQTNVGQDGRQALEEAQKAIQQLFGKIKDIKDKAEKSEQMVKEITRDIKQLDHAKRHLTTSITTLNHLHMLAGGVDSLEAMTRRRQYGEVANLLQGVMNVLEHFHKYMGIPQIRQLSERVKAAQTELGQQILADFEEAFPSQGTKPKKPKAPDNPFHGIVSKCFEPHLYVYIESQDKNLGELIDRFVADFKAQGPPKPNTDEGGAVLPSCADLFVYYKKCMVQCSQLSTGEPMIALTTIFQKYLREYAWKILSGNLPKTTTSSGGLTISSLLKEKEGSEVAKFTLEELCLICNILSTAEYCLATTQQLEEKLKEKVDVSLIERINLTGEMDTFSTVISSSIQLLVQDLDAACDPALTAMSKMQWQNVEHVGDQSPYVTSVILHIKQNVPIIRDNLASTRKYFTQFCVKFANSFIPKFITHLFKCKPISMVGAEQLLLDTHSLKMVLLDLPSISSQVVRKAPASYTKIVVKGMTRAEMILKVVMAPHEPLVVFVDNYIKLLTDCNTETFQKILDMKGLKRSEQSSMLELLRQRLPAPPSGAESSGSLSLTAPTPEQESSRIRKLEKLIKKRL

SEQ ID NO: 47676 - protein, 3842 aa, Homo sapiens
  MOD_RES (1)..(1): Any amino acid
XLVLRDGCMHCDADGLHSLSYHPALNAILAVTSRGTIKVIDGTSGATLQASALSAKPGGQVKCQYISAVDKVIFVDDYAVGCRKDLNGILLLDTALQTPVSKQDDVVQLELPVTEAQQLLSACLEKVDISSTEGYDLFITQLKDGLKNTSHETAANHKVAKWATVTFHLPHHVLKSIASAIVNELKKINQNVAALPVASSVMDRLSYLLPSARPELGVGPGRSVDRSLMYSEANRRETFTSWPHVGYRWAQPDPMAQAGFYHQPASSGDDRAMCFTCSVCLVCWEPTDEPWSEHERHSPNCPFVKGEHTQNVPLSVTLATSPAQFPCTDGTDRISCFGSGSCPHFLAAATKRGKICIWDVSKLMKVHLKFEINAYDPAIVQQLILSGDPSSGVDSRRPTLAWLEDSSSCSDIPKLEGDSDDLLEDSDSEEHSRSDSVTGHTSQKEAMEVSLDITALSILQQPEKLQWEIVANVLEDTVKDLEELGANPCLTNSKSEKTKEKHQEQHNIPFPCLLAGGLLTYKSPATSPISSNSHRSLDGLSRTQGESISEQGSTDNESCTNSELNSPLVRRTLPVLLLYSIKESDEKAGKIFSQMNNIMSKSLHDDGFTVPQIIEMELDSQEQLLLQDPPVTYIQQFADAAANLTSPDSEKWNSVFPKPGTLVQCLRLPKFAEEENLCIDSITPCADGIHLLVGLRTCPVESLSAINQVEALNNLNKLNSALCNRRKGELESNLAVVNGANISVIQHESPADVQTPLIIQPEQRNVSGGYLVLYKMNYATRIVTLEEEPIKIQHIKDPQDTITSLILLPPDILDNREDDCEEPIEDMQLTSKNGFEREKTSDISTLGHLVITTQGGYVKILDLSNFEILAKVEPPKKEGTEEQDTFVSVIYCSGTDRLCACTKGGELHFLQIGGTCDDIDEADILVDGSLSKGIEPSSEGSKPLSNPSSPGISGVDLLVDQPFTLEILTSLVELTRFETLTPRFSATVPPCWVEVQQEQQQRRHPQHLHQQHHGDAAQHTRTWKLQTDSNSWDEHVFELVLPKACMVGHVDFKFVLNSNITNIPQIQVTLLKNKAPGLGKVNGLRLCPFLEDHKEDILCGPVWLASGLDLSGHAGMLTLTSPKLVKGMAGGKYRSFLIHVKAVNERGTEEICNGGMRPVVRLPSLKHQSNKGYSLASLLAKVAAGKEKSSNVKNENTSGTRKSENLRGCDLLQEVSVTIRRFKKTSISKERVQRCAMLQFSEFHEKLLNTLCRKTDDGQITEHAQSLVLDTLCWLAGVHSNGPGSSKEGNENLLSKTRKFLSDIVRVCFFEAGRSIAHKCARFLALCISNGKCDPCQPAFGPVLLKALLDNMSFLPAATTGGSVYWYFVLLNYVKDEDLAGCSTACASLLTAVSRQLQDRLTPMEALLQTRYGLYSSPFDPVLFDLEMSGSSCKNVYNSSIGVQSDEIDLSDVLSGNGKVSSCTAAEGSFTSLTGLLEVEPLHFTCVSTSDGTRIERDDASTFTVSSFGVTPAVGGLSSGTVGEASTALSSAAQVALQSLSHAMASAEQQLQVLQEKQQQLLKLQQQKAKLEAKLHQTTAAAAAAASAVGPVHNSVPSNPVAAPGFFIHPSDVIPPTPKTTPLFMTPPLTPPNEAVSVVINAELAQLFPGSVIDPPAVNLAAHNKNSNKSRMNPLGSGLALAISHASHFLQPPPHQSIIIERMHSGARRFVTLDFGRPILLTDVLIPTCGDLASLSIDIWTLGEEVDGRRLVVATDISTHSLILHDLIPPPVCRFMKITVIGRYGSTNARAKIPLGFYYGHTYILPWESELKLMHDPLKGEGESANQPEIDQHLAMMVALQEDIQCRYNLACHRLETLLQSIDLPPLNSANNAQYFLRKPDKAVEEDSRVFSAYQDCIQLQLQLNLAHNAVQRLKVALGASRKMLSETSNPEDLIQTSSTEQLRTIIRYLLDTLLSLLHASNGHSVPAVLQSTFHAQACEELFKHLCISGTPKIRLHTGLLLVQLCGGERWWGQFLSNVLQELYNSEQLLIFPQDRVFMLLSCIGQRSLSNSGVLESLLNLLDNLLSPLQPQLPMHRRTEGVLDIPMISWVVMLVSRLLDYVATVEDEAAAAKKPLNGKDRERFLTGNQWSFINNNLHTQSLNRSSKGSSSLDRLYSRKIRKQLVHHKQQLNLLKAKQKALVEQMEKEKIQSNKGSSYKLLVEQAKLKQATSKHFKDLIRLRRTAEWSRSNLDTEVTTAKESPEIEPLPFTLAHERCISVVQKLVLFLLSMDFTCHADLLLFVCKVLARIANATRPTIHLCEIVNEPQLERLLLLLVGTDFNRGDISWGGAWAQYSLTCMLQDILAGELLAPVAAEAMEEGTVGDDVGATAGDSDDSLQQSSVQLLETIDEPLTHDITGAPPLSSLEKDKEIDLELLQDLMEVDIDPLDIDLEKDPLAAKVFKPISSTWYDYWGADYGTYNYNPYIGGLGIPVAKPPANTEKNGSQTVSVSVSQALDARLEVGLEQQAELMLKMMSTLEADSILQALTNTSPTLSQSPTGTDDSLLGGLQAANQTSQLIIQLSSVPMLNVCFNKLFSMLQVHHVQLESLLQLWLTLSLNSSSTGNKENGADIFLYNANRIPVISLNQASITSFLTVLAWYPNTLLRTWCLVLHSLTLMTNMQLNSGSSSAIGTQESTAHLLVSDPNLIHVLVKFLSGTSPHGTNQHSPQVGPTATQAMQEFLTRLQVHLSSTCPQIFSEFLLKLIHILSTERGAFQTGQGPLDAQVKLLEFTLEQNFEVVSVSTISAVIESVTFLVHHYITCSDKVMSRSGSDSSVGARACFGGLFANLIRPGDAKAVCGEMTRDQLMFDLLKLVNILVQLPLSGNREYSARVSVTTNTTDSVSDEEKVSGGKDGNGSSTSVQGSPAYVADLVLANQQIMSQILSALGLCNSSAMAMIIGASGLHLTKHENFHGGLDAISVGDGLFTILTTLSKKASTVHMMLQPILTYMACGYMGRQGSLATCQLSEPLLWFILRVLDTSDALKAFHDMGGVQLICNNMVTSTRAIVNTARSMVSTIMKFLDSGPNKAVDSTLKTRILASEPDNAEGIHNFAPLGTITSSSPTAQPAEVLLQATPPHRRARSAAWSYIFLPEEAWCDLTIHLPAAVLLKEIHIQPHLASLATCPSSVSVEVSADGVNMLPLSTPVVTSGLTYIKIQLVKAEVASAVCLRLHRPRDASTLGLSQIKLLGLTAFGTTSSATVNNPFLPSEDQVSKTSIGWLRLLHHCLTHISDLEGMMASAAAPTANLLQTCAALLMSPYCGMHSPNIEVVLVKIGLQSTRIGLKLIDILLRNCAASGSDPTDLNSPLLFGRLNGLSSDSTIDILYQLGTTQDPGTKDRIQALLKWVSDSARVAAMKRSGRMNYMCPNSSTVEYGLLMPSPSHLHCVAAILWHSYELLVEYDLPALLDQELFELLFNWSMSLPCNMVLKKAVDSLLCSMCHVHPNYFSLLMGWMGITPPPVQCHHRLSMTDDSKKQDLSSSLTDDSKNAQAPLALTESHLATLASSSQSPEAIKQLLDSGLPSLLVRSLASFCFSHISSSESIAQSIDISQDKLRRHHVPQQCNKMPITADLVAPILRFLTEVGNSHIMKDWLGGSEVNPLWTALLFLLCHSGSTSGSHNLGAQQTSARSASLSSAATTGLTTQQRTAIENATVAFFLQCISCHPNNQKLMAQVLCELFQTSPQRGNLPTSGNISGFIRRLFLQLMLEDEKVTMFLQSPCPLYKGRINATSHVIQHPMYGAGHKFRTLHLPVSTTLSDVLDRVSVEMGFCHIGHADVELLTSSDLPSSASQSAEITDTPSITA

SEQ ID NO: 47677 - protein, 2508 aa, Homo sapiens
MARFGDEMPARYGGGGSGAAAGVVVGSGGGRGAGGSRQGGQPGAQRMYKQSMAQRARTMALYNPIPVRQNCLTVNRSLFLFSEDNVVRKYAKKITEWPPFEYMILATIIANCIVLALEQHLPDDDKTPMSERLDDTEPYFIGIFCFEAGIKIIALGFAFHKGSYLRNGWNVMDFVVVLTGILATVGTEFDLRTLRAVRVLRPLKLVSGIPSLQVVLKSIMKAMIPLLQIGLLLFFAILIFAIIGLEFYMGKFHTTCFEEGTDDIQGESPAPCGTEEPARTCPNGTKCQPYWEGPNNGITQFDNILFAVLTVFQCITMEGWTDLLYNSNDASGNTWNWLYFIPLIIIGSFFMLNLVLGVLSGEFAKERERVENRRAFLKLRRQQQIERELNGYMEWISKAEEVILAEDETDGEQRHPFDVGALRRTTIKKSKTDLLNPEEAEDQLADIASVGSPFARASIKSAKLENSTFFHKKERRMRFYIRRMVKTQAFYWTVLSLVALNTLCVAIVHYNQPEWLSDFLYYAEFIFLGLFMSEMFIKMYGLGTRPYFHSSFNCFDCGVIIGSIFEVIWAVIKPGTSFGISVLRALRLLRIFKVTKYWASLRNLVVSLLNSMKSIISLLFLLFLFIVVFALLGMQLFGGQFNFDEGTPPTNFDTFPAAIMTVFQILTGEDWNEVMYDGIKSQGGVQGGMVFSIYFIVLTLFGNYTLLNVFLAIAVDNLANAQELTKDEQEEEEAANQKLALQKAKEVAEVSPLSAANMSIAVKEQQKNQKPAKSVWEQRTSEMRKQNLLASREALYNEMDPDERWKAAYTRHLRPDMKTHLDRPLVVDPQENRNNNTNKSRAAEPTVDQRLGQQRAEDFLRKQARYHDRARDPSGSAGLDARRPWAGSQEAELSREGPYGRESDHHAREGSLEQPGFWEGEAERGKAGDPHRRHVHRQGGSRESRSGSPRTGADGEHRRHRAHRRPGEEGPEDKAERRARHREGSRPARGGEGEGEGPDGGERRRRHRHGAPATYEGDARREDKERRHRRRKENQGSGVPVSGPNLSTTRPIQQDLGRQDPPLAEDIDNMKNNKLATAESAAPHGSLGHAGLPQSPAKMGNSTDPGPMLAIPAMATNPQNAASRRTPNNPGNPSNPGPPKTPENSLIVTNPSGTQTNSAKTARKPDHTTVDIPPACPPPLNHTVVQVNKNANPDPLPKKEEEKKEEEEDDRGEDGPKPMPPYSSMFILSTTNPLRRLCHYILNLRYFEMCILMVIAMSSIALAAEDPVQPNAPRNNVLRYFDYVFTGVFTFEMVIKMIDLGLVLHQGAYFRDLWNILDFIVVSGALVAFAFTGNSKGKDINTIKSLRVLRVLRPLKTIKRLPKLKAVFDCVVNSLKNVFNILIVYMLFMFIFAVVAVQLFKGKFFHCTDESKEFEKDCRGKYLLYEKNEVKARDREWKKYEFHYDNVLWALLTLFTVSTGEGWPQVLKHSVDATFENQGPSPGYRMEMSIFYVVYFVVFPFFFVNIFVALIIITFQEQGDKMMEEYSLEKNERACIDFAISAKPLTRHMPQNKQSFQYRMWQFVVSPPFEYTIMAMIALNTIVLMMKFYGASVAYENALRVFNIVFTSLFSLECVLKVMAFGILNYFRDAWNIFDFVTVLGSITDILVTEFGNNFINLSFLRLFRAARLIKLLRQGYTIRILLWTFVQSFKALPYVCLLIAMLFFIYAIIGMQVFGNIGIDVEDEDSDEDEFQITEHNNFRTFFQALMLLFRSATGEAWHNIMLSCLSGKPCDKNSGILTRECGNEFAYFYFVSFIFLCSFLMLNLFVAVIMDNFEYLTRDSSILGPHHLDEYVRVWAEYDPAACGRIHYKDMYSLLRVISPPLGLGKKCPHRVACKRLLRMDLPVADDNTVHFNSTLMALIRTALDIKIAKGGADKQQMDAELRKEMMAIWPNLSQKTLDLLVTPHKSTDLTVGKIYAAMMIMEYYRQSKAKKLQAMREEQDRTPLMFQRMEPPSPTQEGGPGQNALPSTQLDPGGALMAHESGLKESPSWVTQRAQEMFQKTGTWSPEQGPPTDMPNSQPNSQSVEMREMGRDGYSDSEHYLPMEGQGRAASMPRLPAENQRRRGRPRGNNLSTISDTSPMKRSASVLGPKARRLDDYSLERVPPEENQRHHQRRRDRSHRASERSLGRYTDVDTGLGTDLSMTTQSGDLPSKERDQERGRPKDRKHRQHHHHHHHHHHPPPPDKDRYAQERPDHGRARARDQRWSRSPSEGREHMAHRQGSSSVSGSPAPSTSGTSTPRRGRRQLPQTPSTPRPHVSYSPVIRKAGGSGPPQQQQQQQQQQQQQAVARPGRAATSGPRRYPGPTAEPLAGDRPPTGGHSSGRSPRMERRVPGPARSESPRACRHGGARWPASGPHVSEGPPGPRHHGYYRGSDYDEADGPGSGGGEEAMAGAYDAPPPVRHASSGATGRSPRTPRASGPACASPSRHGRRLPNGYYPAHGLARPRGPGSRKGLHEPYSESDDDWC

SEQ ID NO: 47678 - protein, 155 aa, Homo sapiens
MNPPKYDKIEDMAMMTHLHEPAVLYNLKERYAAWMIYTYSGLFCVTVNPYKWLPVYKPEVVTAYRGKKRQEAPPHIFSISDNAYQFMLTDRENQSILITGESGAGKTVNTKRVIQYFATIAVTGEKKKEEITSGKIQGTLEDQIISANPLLEAFG

SEQ ID NO: 47679 - protein, 54 aa, Homo sapiens
MTKFQEMVTFKDVAVVFTEEELGLLDSVQRKLYRDVMLENFRNLLLHISPSSQT

SEQ ID NO: 47680 - protein, 170 aa, Homo sapiens
  MOD_RES (1)..(1): Any amino acid
XLQEKAKRYHMDASGEAVSETLQFKAQDLLRAVPRSRAEMYDDVHSDGRYSLSGSVAHSRDAGREGLRSDVFPGPSFRSSNPSISDDSYFRKECGRDLEFSHSDSRDQVIGHRKLGHFRSQDWKFALRGSWEQDFGHPVSQESSWSQEYSFDPSGAGSEESSAPQKKDEL

SEQ ID NO: 47681 - protein, 68 aa, Homo sapiens
MGNCHTVGPNEALVVSGGCCGSDYKQYVFGGWAWAWWCISDTQRDPDSGADLSGPGPVCQAGAGGGSP

SEQ ID NO: 47682 - protein, 510 aa, Homo sapiens
MRKPAAGFLPSLLKVLLLPLAPAAAQDSTQASTPGSPLSPTEYERFFALLTPTWKAETTCRLRATHGCRNPTLVQLDQYENHGLVPDGAVCSNLPYASWFESFCQFTHYRCSNHVYYAKRVLCSQPVSILSPNTLKEIEASAEVSPTTMTSPISPHFTAPEHKQEQGVEHRQEPTQEHKQEEGQKQEEQEEEQEEEGKQEEGQGTKEGREAVSQLQTDSEPKFHSESLSSNPSSFAPRVREVESTPMIMENIQELIRSAQEIDEMNEIYDENSYWRNQNPGSLLQLPHTEALLVLCYSIVENTCIITPTAKAWKYMEEEILGFGKSVCDSLGRRHMSTCALCDFCSLKLEQCHSEASLQRQQCDTSHKTPFVSPLLASQSLSIGNQVGSPESGRFYGLDLYGGLHMDFWCARLATKGCEDVRVSGWLQTEFLSFQDGDFPTKICDTDYIQYPNYCSFKSQQCLMRNRNRKVSRMRCLQNETYSALSPGKSEDVVLRWSQEFSTLTLGQFG

SEQ ID NO: 47683 - protein, 72 aa, Homo sapiens
MFLVNSFLKGGGGGGGGGGGLGGGLGNVLGGLISGAGGGGGGGGGGGGGGGGGGGGTAMRILGGVISAISEA

SEQ ID NO: 47684 - protein, 191 aa, Homo sapiens
  MOD_RES (1)..(1): Any amino acid
XNGNIQCLQDVERCLRDTGVQGVMSAGGQGPGQQPGPHAHGLIPPPRGQPAQPRPVRGPEPCRVGAGRGVSGHRAGAPLPPVLRPGPPLQAVAPHAAGAPGAARGAGQGEDPGGHRCCEPGAEAAVSGRRYPGRRERSPPATCPSTGSASPTSGRGPGRGARRRQVRAASGPWRKRRVARRSCPRTSKRSS

SEQ ID NO: 47685 - protein, 37 aa, Homo sapiens
MKRDDLKATLTARNREAKQLTQLERTRQRNPSDRHVI

SEQ ID NO: 47686 - protein, 82 aa, Homo sapiens
  MOD_RES (1)..(1): Any amino acid
XEYQALVQRALQRLNEEARTYVLAPEPPTALSTDQGLVQWLQELNVDSGTIQMGRDGMPHLEGHLGTASRIHTSHLWTLRAE

SEQ ID NO: 47687 - protein, 41 aa, Homo sapiens
  MOD_RES (1)..(1): Any amino acid
XSTQRSYNTCCSWTQHPLIQKNRRVVLASFLLLLLGLGEWP

SEQ ID NO: 47688 - protein, 592 aa, Homo sapiens
MCMYLFFLDFSIVGSGLRSGVWVSGSSSQAICVTPVRVESSEATAISQEKSQEEERMAVGLLKAMYQELVTFRDVAVDFSQEEWDCLDSSQRHLYSNVMLENYRILVSLGLCFSKPSVILLLEQGKAPWMVKRELTKGLCSGWEPICETEELTPKQDFYEEHQSQKIIETLTSYNLEYSSLREEWKCEGYFERQPGNQKACFKEEIITHEEPLFDEREQEYKSWGSFHQNPLLCTQKIIPKEEKVHKHDTQKRSFKKNLMAIKPKSVCAEKKLLKCNDCEKVFSQSSSLTLHQRIHTGEKPYKCIECGKAFSQRSNLVQHQRIHTGEKPYECKECRKAFSQNAHLVQHLRVHTGEKPYECKVCRKAFSQFAYLAQHQRVHTGEKPYECIECGKAFSNRSSIAQHQRVHTGEKPYECNVCGKAFSLRAYLTVHQRIHTGERPYECKECGKAFSQNSHLAQHQRIHTGEKPYKCQECRKAFSQIAYLAQHQRVHTGEKPYECIECGKAFSNDSSLTQHQRVHTGEKPYECTVCGKAFSYCGSLAQHQRIHTGERPYECKECKKTFRQHAHLAHHQRIHIGESLSPPNPVNHQVL

SEQ ID NO: 47689 - protein, 307 aa, Homo sapiens
GGTVPVGVWGGAGQGREGRSWGEGPRGPGLGRRDLSSADPAVLGATMESRCYGCAVKFTLFKKEYGCKNCGRAFCSGCLSFSAAVPRTGNTQQKVCKQCHEVLTRGSSANASKWSPPQNYKKRVAALEAKQKPSTSQSQGLTRQDQMIAERLARLRQENKPKLVPSQAEIEARLAALKDERQGSIPSTQEMEARLAALQGRVLPSQTPQPAHHTPDTRTQAQQTQDLLTQLAAEVAIDESWKGGGPGLPLQVTLQDYRLPDSDDDEDEETAIQRVLQQLTEEASLDEASGFNIPAEQASRPWTQPRG

SEQ ID NO: 47690 - protein, 52 aa, Homo sapiens
  MOD_RES (1)..(1): Any amino acid
XVETFAFQAEIAQLMSLIINTFYSNKEIFLRELISNSSDVNLWVVEQKLSYT

SEQ ID NO: 47691 - protein, 730 aa, Homo sapiens
MVQFSTSEFRLTPHIDNLEVANSFAVTNAFCSQFSRGVYAIFGFYDKKSVNTITSFCGTLHVSFITPSFPTDGTHPFVIQMRPDLKGALLSLIEYYQWDKFAYLYDSDRGLSTLQAVLDSAAEKKWQVTAINVGNINNDKKDEMYRSLFQDLELKKERRVILDCERDKVNDIVDQVITIGKHVKGYHYIIANLGFTDGDLLKIQFGGANVSGFQIVDYDDSLVSKFIERWSTLEEKEYPGAHTTTIKYTSALTYDAVQVMTEAFRNLRKQRIEISRRGNAGDCLANPAVPWGQGVEIERALKQVQVEGLSGNIKFDQNGKRINYTINIMELKTNGPRKIGYWSEVDKMVVTLTELPSGNDTSGLENKTVVVTTILESPYVMMKKNHEMLEGNERYEGYCVDLAAEIAKHCGFKYKLTIVGDGKYGARDADTKIWNGMVGELVYGKADIAIAPLTITLVREEVIDFSKPFMSLGISIMIKKPQKSKPGVFSFLDPLAYEIWMCIVFAYIGVSVVLFLVSRFSPYEWHTEEFEDGRETQSSESTNEFGIFNSLWFSLGAFMQQGCDISPRSLSGRIVGGVWWFFTLIIISSYTANLAAFLTVERMVSPIESAEDLSKQTEIAYGTLDSGSTKEFFRRSKIAVFDKMWTYMRSAEPSVFVRTTAEGVARVRKSKGKYAYLLESTMNEYIEQRKPCDTMKVGGNLDSKGYGIATPKGSSLSGVTFKTLLFVCCG

SEQ ID NO: 47692 - protein, 188 aa, Homo sapiens
  MOD_RES (1)..(1): Any amino acid
XCVYPLAAAFAVLNNFTEVNSDALKMCRVFKRPFSEPSANIGVWQIIFCLDTGVKRGLNCKVMRNLLGEMEMSCVLFVVVVVSQLAFETMSVISVVTNCALIGMSPQVNAVFPESKADLILIVVAVEHALLALKFILAFAIPDKPRHIQMKLARLEFESLEALKQQQMKLVTENLKEEPMESGKEKAT

SEQ ID NO: 47693 - protein, 30 aa, Homo sapiens
MKFGCLSFRQPYAGFVLNGIKTVETRWRPL

SEQ ID NO: 47694 - protein, 108 aa, Homo sapiens
MGAGPSLLLAALLLLLSGDGAVRCDTPANCTYLDLLGTWVFQVGSSGSQRDVNCSVMGPQEKKVVVYLQKLDTAYDDLGNSGHFTIIYNQGFEIVLNDYKWFAFFKVF

SEQ ID NO: 47695 - protein, 58 aa, Homo sapiens
MQSWSRVYCSLAKRGHFNRISHGLQGLSAVPLRTYADQPSFIEQLSLLPYGPWKRFCI

SEQ ID NO: 47696 - protein, 158 aa, Homo sapiens
MVEADRPGKLFIGGLNTETNEKALETVFGKYGRIVEVLLIKDRETNKSRGFAFVTFESPADAKDAARDMNGKSLDGKAIKVEQATKPSFERGRHGPPPPPRSRGPPRGFGAGRGGSGGTRGPPSRGGHMDDGGYSMNFNMSSSRGPLPVKRGPPPRSG

SEQ ID NO: 47697 - protein, 278 aa, Homo sapiens
MTGSNEFKLNQPPEDGISSVKFSPNTSQFLLVSSWDTSVRLYDVPANSMRLKYQHTGAVLDCAFYDPTHAWSGGLDHQLKMHDLNTDQENLVGTHDAPIRCVEYCPEVNVMVTGSWDQTVKLWDPRTPCNAGTFSQPEKVYTLSVSGDRLIVGTAGRRVLVWDLRNMGYVQQRRESSLKYQTRCIRAFPNKQGYVLSSIEGRVAVEYLDPSPEVQKKKYAFKCHRLKENNIEQIYPVNAISFHNIHNTFATGGSDGFVNIWDPFNKKRLCQFHRYPTS

SEQ ID NO: 47698 - protein, 282 aa, Homo sapiens
MDSLVVLVLCLSCLLLLSLWRQSSGRGKLPPGPTPLPVIGNILQIGIKDISKSLTNLSKVYGPVFTLYFGLKPIVVLHGYEAVKEALIDLGEEFSGRGIFPLAERANRGFGIVFSNGKKWKEIRRFSLMTLRNFGMGKRSIEDRVQEEARCLVEELRKTKASPCDPTFILGCAPCNVICSIIFHKRFDYKDQQFLNLMEKLNENIKILSSPWIQICNNFSPIIDYFPGTHNKLLKNVAFMKSYILEKVKEHQESMDMNNPQDFIDCFLMKMEKLKSRKRLNV

SEQ ID NO: 47699 - protein, 56 aa, Homo sapiens
MTSGSKCPSTDSASLLPRKSRGLMAYILPLVQLTSSVGEDCSFQISTFLFDLSSIS

SEQ ID NO: 47700 - protein, 832 aa, Homo sapiens
METKENRWVPVTVLPGCVGCRTVAALASWTVRDVKERIFAETGFPVSEQRLWRGGRELSDWIKIGDLTSKNCHLFVNLQSKGLKGGGRFGQTTPPLVDFLKDILRRYPEGGQILKELIQNAEDAGATEVKFLYDETQYGTETLWSKDMAPYQGPALYVYNNAVFTPEDWHGIQEIARSRKKDDPLKVGRFGIGFNSVYHITDVPCIFSGDQIGMLDPHQTLFGPHESGQCWNLKDDSKEISELSDQFAPFVGIFGSTKETFINGNFPGTFFRFPLRLQPSQLSSNLYNKQKVLELFESFRADADTVLLFLKSVQDVSLYVREADGTEKLVFRVTSSESKALKHERPNSIKILGTAISNYCKKTPSNNITCVTYHVNIVLEEESTKDAQKTSWLVCNSVGGRGISSKLDSLADELKFVPIIGIAMPLSSRDDEAKGATSDFSGKAFCFLPLPPGEESSTGLPVHISGFFGLTDNRRSIKWRELDQWRDPAALWNEFLVMNVVPKAYATLILDSIKRLEMEKSSDFPLSVDVIYKLWPEASKVKVHWQPVLEPLFSELLQNAVIYSISCDWVRLEQVYFSELDENLEYTKTVLNYLQSSGKQIAKVPGNVDAAVQLTAASGTTPVRKVTPAWVRQVLRKCAHLGCAEEKLHLLEFVLSDQAYSELLGLELLPLQNGNFVPFSSSVSDQDVIYITSAEYPRSLFPSLEGRFILDNLKPHLVAALKEAAQTRGRPCTQLQLLNPERFARLIKEVMNTFWPGRELIVQWYPFDENRNHPSVSWLKMVWKNLYIHFSEDLTLFDEMPLIPRTILEEGFLFDEDSNGKLKMVAVLITSC

SEQ ID NO: 47701 - protein, 129 aa, Homo sapiens
  MOD_RES (1)..(1): Any amino acid
XIGLMYTFGDGRHGKLGLGLENFTNHFIPTLCSNFLRFIVKLVACGGCHMVVFAAPHRGVAKEIEFDEINDTCLSVATFLPYSSLTSGNVLQRTLSARMRRRERLSLMSSGSLYTINNEMGKQRNKDFN

SEQ ID NO: 47702 - protein, 116 aa, Homo sapiens
  MOD_RES (1)..(1): Any amino acid
XGDQTCAMSYLTVLPRGMECVVFSIDGSFAASVSIMGSDPKVRPGAVDVVRHWQDLGYMILYITGRPDMQKQRVVSWLSQHNFPQGMIFFSDGLVHDPLRQKAIFLRNLMQEMCFP

SEQ ID NO: 47703 - protein, 86 aa, Homo sapiens
MSLSHLYRDGEGRIDDDDDERENFEITDWDLQNEFNPNRQRHWQTKEEATYGVWAERDSDDERPSFGGKRARDYSAPVNFISAGLK

SEQ ID NO: 47704 - protein, 589 aa, Homo sapiens
MNTKKRGSPARTHSMMSLSVRPQRRLLSARVNRSQSFAGVLGSHERGPRAYLEVHQQEQEKLQGQIRESKRNSRLGFLYDLDKQVKSIERFLRRLEFHASKIDELYEAYCVQRRLRDGAYNMVRAYTTGSPGSREARDSLAEATRGHREYTESMCLLESELEAQLGEFHLRMKGLAGFARLCVGDQYEICMKYGRQRWKLRGRIEGSGKQVWDSEETIFLPLLTEFLSIKVTELKGLANHVVVGSVSCETKDLFAALPQVVAVDINDLGTIKLSLEVTWSPFDKDDQPSAASSVNKASTVTKRFSTYSQSPPDTPSLREQAFYNMLRRQEELENGTAWSLSSESSDDSSSPQLSGTARHSPAPRPLVQQPEPLPIQVAFRRPETPSSGPLDEEGAVAPVLANGHAPYSRTLSHISEASVDAALAEASVEAVGPESLAWGPSPPTHPAPTHGEHPSPVPPALDPGHSATSSTLGTTGSVPTSTDPAPSAHLDSVHKSTDSGPSELPGPTHTTTGSTYSAITTTHSAPSPLTHTTTGSTHKPIISTLTTTGPTLNIIGPVQTTTSPTHTMPSPTHTTASPTHTSTSPTHTP

SEQ ID NO: 47705 - protein, 252 aa, Homo sapiens
SSRRHGGVSLWARWCKGGFRAAQWPQDNAVDRLAPGDLGRTRALRWVYLSGNRITEVSLGALGPARELEKLHLDRNQLREVPTGALEGLPALLELQLSGNPLRALRDGAFQPVGRSLQHLFLNSSGLEQICPGAFSGLGPGLQSLHLQKNQLRALPALPSLSQLELIDLSSNPFHCDCQLLPLHRWLTGLNLRVGATCATPPNARGQRVKAAAAVFEDCPGWAARKAKRTPASRPSARRTPIKGRQCGADKV

SEQ ID NO: 47706 - protein, 81 aa, Homo sapiens
MATEEFIIRIPPYHYIHVLDQNSNVSRVEVGPKTYIRQDNERFWIWWTPSSLRKRQPCTSGLGGTSGTSGECPAALGRSGW

SEQ ID NO: 47707 - protein, 149 aa, Homo sapiens
MPGLAAEGEAEGWSPSPPLYEEYRPPPLDSIRLPRYVLYLLLAALVVVAVAYAIVGHLIKDLAHDLADWAFGPKPDQEAAPRELRPSLTGEDLEGLDLQLALAWQGEEDAGGGGEGAPSEPPPPPEPRRPSIAFKDPPSRSSFWKLMAT

SEQ ID NO: 47708 - protein, 171 aa, Homo sapiens
MSSEDREAQEDELLALASIYDGDEFRKAESVQGGETRIYLDLPQNFKIFVSGNSNECLQNSGFEYTICFLPPLVLNFELPPDYPSSSPPSFTLSGKWLSPTQLSALCKHLDNLWEEHRGSVVLFAWMQFLKEETLAYLNIVSPFELKIGSQKKVQRRTAQASPNTELDFGG

SEQ ID NO: 47709 - protein, 1353 aa, Homo sapiens
MDTKLMCLLFFFSLPPLLVSNHTGRIKVVFTPSICKVTCTKGSCQNSCEKGNTTTLISENGHAADTLTATNFRVVICHLPCMNGGQCSSRDKCQCPPNFTGKLCQIPVHGASVPKLYQHSQQPGKALGTHVIHSTHTLPLTVTSQQGVKVKFPPNIVNIHVKHPPEASVQIHQVSRIDGPTGQKTKEAQPGQSQVSYQGLPVQKTQTIHSTYSHQQVIPHVYPVAAKTQLGRCFQETIGSQCGKALPGLSKQEDCCGTVGTSWGFNKCQKCPKKPSYHGYNQMMECLPGYKRVNNTFCQDINECQLQGVCPNGECLNTMGSYRCTCKIGFGPDPTFSSCVPDPPVISEEKGPCYRLVSSGRQCMHPLSVHLTKQLCCCSVGKAWGPHCEKCPLPGTAAFKEICPGGMGYTVSGVHRRRPIHHHVGKGPVFVKPKNTQPVAKSTHPPPLPAKEEPVEALTFSREHGPGVAEPEVATAPPEKEIPSLDQEKTKLEPGQPQLSPGISTIHLHPQFPVVIEKTSPPVPVEVAPEASTSSASQVIAPTQVTEINECTVNPDICGAGHCINLPVRYTCICYEGYRFSEQQRKCVDIDECTQVQHLCSQGRCENTEGSFLCICPAGFMASEEGTNCIDVDECLRPDVCGEGHCVNTVGAFRCEYCDSGYRMTQRGRCEDIDECLNPSTCPDEQCVNSPGSYQCVPCTEGFRGWNGQCLDVDECLEPNVCANGDCSNLEGSYMCSCHKGYTRTPDHKHCRDIDECQQGNLCVNGQCKNTEGSFRCTCGQGYQLSAAKDQCEDIDECQHRHLCAHGQCRNTEGSFQCVCDQGYRASGLGDHCEDINECLEDKSVCQRGDCINTAGSYDCTCPDGFQLDDNKTCQDINECEHPGLCGPQGECLNTEGSFHCVCQQGFSISADGRTCEDVNECELLSGVCGEAFCENVEGSFLCVCADENQEYSPMTGQCRSRTSTDLDVDVDQPKEEKKECYYNLNDASLCDNVLAPNVTKQECCCTSGVGWGDNCEIFPCPVLGTAEFTEMCPKGKGFVPAGESSSEAGGENYKDADECLLFGQEICKNGFCLNTRPGYECYCKQGTYYDPVKLQCFDMDECQDPSSCIDGQCVNTEGSYNCFCTHPMVLDASEKRCIRPAESNEQIEETDVYQDLCWEHLSDEYVCSRPLVGKQTTYTECCCLYGEAWGMQCALCPLKDSDDYAQLCNIPVTGRRQPYGRDALVDFSEQYTPEADPYFIQDRFLNSFEELQAEECGILNGCENGRCVRVQEGYTCDCFDGYHLDTAKMTCVDVNECDELNNRMSLCKNAKCINTDGSYKCLCLPGYVPSDKPNYCTPLNTALNLEKDSDLE

SEQ ID NO: 47710 - protein, 147 aa, Homo sapiens
MGSGARFPSGTLRVRWLLLLGLVGPVLGAARPGFQQTSHLSSYEIITPWRLTRERREAPRPYSKQVSYVIQAEGKEHIIHLERNKDLLPEDFVVYTYNKEGTLITDHPNIQRCGPLCIREQSTPGDRAGQNTQNNWQMSNLAFCVYY

SEQ ID NO: 47711 - protein, 81 aa, Homo sapiens
  MOD_RES (1)..(1): Any amino acid
XCTFNLKIEGQLLETSGLCIPANNTLFIVSISKTLAANEPHLTLEFLEECISGFSKSRLFFLRLYKNIFAKCLFSRPDSRY

SEQ ID NO: 47712 - protein, 180 aa, Homo sapiens
MPDPDFTVRDVKLLVGSRRLVDVMDVNTQKGTEMSMSQFVRYYETPEAQRDKLYNVISLEFSHTKLEHLVKRPTVVDLVDWVDNMWPQHLKEKQTEATNAIAEMKYPKVKKYCLMSVKGCFTDFHIDFGGTSVWYHVFRGGKIFWLIPPTLHNLALYEEWVLSGKQSDIFLGDRVERCQR

SEQ ID NO: 47713 - protein, 118 aa, Homo sapiens
  MOD_RES (1)..(1): Any amino acid
XDRSEQEGSTLSVISATSSAGRLLPPRERLREVAFEYCQRLIEQSNRRALRKGDSDLQKACLVEAVLVLDVLCRQDPSFLYRSLSCLKALHGRVRGDPASVRVLLPLAHFFLSHAQET

SEQ ID NO: 47714 - protein, 138 aa, Homo sapiens
MSPKPRASGPPAKATEAGKRKSSSQPSPSDPKKKTTKVAKKGKAVRRGRRGKKGAATKMAAVTAPEAESAPAAPGPSDQPSQELPQHELPPEEPVSEGTQHDPLSQEAELEEPLSQESEVEEPLSVTAKYSPISESSD

SEQ ID NO: 47715 - protein, 18 aa, Homo sapiens
  MOD_RES (1)..(1): Any amino acid
XIRPRKGGPHRDRGDAGA

SEQ ID NO: 47716 - protein, 477 aa, Homo sapiens
MALQLWALTLLGLLGAGASLRPRKLDFFRSEKELNHLAVDEASGVVYLGAVNALYQLDAKLQLEQQVATGPALDNKKCTPPIEASQCHEAEMTDNVNQLLLLDPPRKRLVECGSLFKGICALRALSNISLRLFYEDGSGEKSFVASNDEGVATVGLVSSTGPGGDRVLFVGKGNGPHDNGIIVSTRLLDRTDSREAFEAYTDHATYKAGYLSTNTQQFVAAFEDGPYVFFVFNQQDKHPARNRTLLARMCREDPNYYSYLEMDLQCRDPDIHAAAFGTCLAASVAAPGSGRVLYAVFSRDSRSSGGPGAGLCLFPLDKVHAKMEANRNACYTGTREARDIFYKPFHGDIQCGGHAPGSSKSFPCGSEHLPYPLGSRDGLRGTAVLQRGGLNLTAVTVAAENNHTVAFLGTSDGRILKVYLTPDGTSSEYDSILVEINKRVKRDLVLSGDLGSLYAMTQDKVFRLPVQECLSYPTCTQ

SEQ ID NO: 47717 - protein, 60 aa, Homo sapiens
MMDVSGVGFPSKVPWKKMSAEELENQYCPSRWVVRLGAEEALRTYSQIGIEEIWTWEPVN

SEQ ID NO: 47718 - protein, 188 aa, Homo sapiens
  MOD_RES (1)..(1): Any amino acid
XHLVSSHHELAVLFRTDHGISSGGFSATYLAFNATESRCPWANPCGPSELSCQAGGCKGVQWMCDMWRDCTDGSDDNCSGPLFPPPELACEPVQVEMCLGLSYNTTAFPNIWVGMITQEEVVEVLSGYKSLTSLPCYQHFRRLLCGLLVPRCTPLGSVLPPCRSVCQEAEHQCQSGLALLGTPWPFNC

SEQ ID NO: 47719 - protein, 70 aa, Homo sapiens
MATERSRSAMDSPVPASMFAPEPSSPGAARAAAAAARLHGGFDSDCSEDGEALNGEPELDLTSKMGLSMG

SEQ ID NO: 47720 - protein, 135 aa, Homo sapiens
MEGDAVEAIVEESETFIKGKERKTYQRRREGGQEEDACHLPQNQTDGGEVVQDVNSSVQMVMMEQLDPTLLQMKTEVMEGTVAPEAEAAVDDTQIITLQVVNMEEQPINIGELQLVQVPVPVTVPVATTSVEELQ

SEQ ID NO: 47721 - protein, 512 aa, Homo sapiens
MAAHEASHHQQQAAQNSLLPLLSSAVEPPDQKPLLPIPITQKPQGAPETLKDAIGIKKEKPKTSFVCTYCSKAFRDSYHLRRHESCHTGIKLVSRPKKTPTTVVPLISTIAGDSSRTSLVSTIAGILSTVTTSSSGTNPSSSASTTAMPVTQSVKKPSKPVKKNHACEMCGKAFRDVYHLNRHKLSHSDEKPFECPICNQRFKRKDRMTYHVRSHEGGITKPYTCSVCGKGFSRPDHLSCHVKHVHSTERPFKCQTCTAAFATKDRLRTHMVRHEGKVSCNICGKLLSAAYITSHLKTHGQSQSINCNTCKQGISKTCMSEETSNQKQQQQQQQQQQQQQQQQQQHVTSWPGKQVETLRLWEEAVKARKKEAANLCQTSTAATTPVTLTTPFSITSSVSSGTMSNPVTVAAAMSMRSPVNVSSAVNITSPMNIGHPVTITSPLSMTSPLTLTTPVNLPTPVTAPVNIAHPVTITSPMNLPTPMTLAAPLNIAMRPVESMPFLPQALPTSPPW

SEQ ID NO: 47722 - protein, 55 aa, Homo sapiens
MAAVPELLQQQEEDRSKNQRRGTLAPAQAPVPSGLGEMISGDPGMFFLKLSSASW

SEQ ID NO: 47723 - protein, 87 aa, Homo sapiens [sequence omitted]

SEQ ID NO: 47724 - protein, 67 aa, Homo sapiens
  MOD_RES (1)..(1): Any amino acid
XNLMQAQLEDEQAQREELEKHKTAFVEHLNGSFLFDSMYAEDSEGNNLSYLPGVVAWSPEDVVGTCH

SEQ ID NO: 47725 - protein, 93 aa, Homo sapiens
MEPVGCCGECRGSSVDPRSTFVLSNLAEVVERVLTFLPAKALLRVACVCRLWRECVRRVLRTHRSVTWISAGLAEAGHLEGHCLVRVVAEELE

SEQ ID NO: 47726 - protein, 964 aa, Homo sapiens
MKGYGSAVWSLMWKYCISVRTLSVEGEAPSSETGTSLDSPSAYPQGPLVPGSSLSPDHYEHTSVGAYGLYSGPPGQQQRTRRPKLQHSTSILRKQAEEEAIKRSRSLSESYELSSDLQDKQVEMLERKYGGRLVTRHAARTIQTAFRQYQMNKNFERLRSSMSENRMSRRIVLSNMRMQFSFEGPEKVHSSYFEGKQVSVTNDGSQLGALVSPECGDLSEPTTLKSPAPSSDFADAITELEDAFSRQVKSLAESIDDALNCRSLHTEEAPALDAARARDTEPQTALHGMDHRKLDEMTASYSDVTLYIDEEELSPPLPLSQAGDRPSSTESDLRLRAGGAAPDYWALAHKEDKADTDTSCRSTPSLERQEQRLRVEHLPLLTIEPPSDSSVDLSDRSERGSLKRQSAYERSLGGQQGSPKHGPHSGAPKSLPREEPELRPRPPRPLDSHLAINGSANRQSKSESDYSDGDNDSINSTSNSNDTINCSSESSSRDSLREQTLSKQTYHKEARNSWDSPAFSNDVIRKRHYRIGLNLFNKKPEKGVQYLIERGFVPDTPVGVAHFLLQRKGLSRQMIGEFLGNRQKQFNRDVLDCVVDEMDFSTMELDEALRKFQAHIRVQGEAQKVERLIEAFSQRYCICNPGVVRQFRNPDTIFILAFAIILLNTDMYSPNVKPERKMKLEDFIKNLRGVDDGEDIPREMLMGIYERIRKRELKTNEDHVSQVQKVEKLIVGKKPIGSLHPGLGCVLSLPHRRLVCYCRLFEVPDPNKPQKLGLHQREIFLFNDLLVVTKIFQKKKNSVTYSFRQSFSLYGMQVLLFENQYYPNGIRLTSSVPGADIKVLINFNAPNPQDRKKFTDDLRESIAEVQEMEKHRIESELEKQKGVVRPSMSQCSSLKKESGNGTLSRACLDDSYASGEGLKRSALSSSLRDLSEAGKRGRRSSAGSLESNVEFQPFEPLQPSVLCS

SEQ ID NO: 47727 - protein, 674 aa, Homo sapiens
MTIRYQGRQYRLRMAFLQKIEALVKDMQNPETGVRMQNQRVLVTSVPHAMTGSDVLQWIVQRLWISSLEAQNLGNFIVRYGYIYPLQDPKNLILKPDGSLYRFQTPYFWPTQQWPAEDTDYAIYLAKRNIKKKGILEEYEKENYNFLNQKMNYKWDFVIMQAKEQYRAGKERNKADRYALDCQEKAYWLVHRCPPGMDNVLDYGLDRVTNPNEVKVNQKQTVVAVKKEIMYYQQALMRSTVKSSVSLGGIVKYSEQFSSNDAIMSGCLPSNPWITDDTQFWDLNAKLVEIPTKMRVERWAFNFSELIRDPKGRQSFQYFLKKEFSGENLGFWEACEDLKYGDQSKVKEKAEEIYKLFLAPGARRWINIDGKTMDITVKGLKHPHRYVLDAAQTHIYMLMKKDSYARYLKSPIYKDMLAKAIEPQETTKKSSTLPFMRRHLRSSPSPVILRQLEEEAKAREAANTVDITQPGQHMAPSPHLTVYTGTCMPPSPSSPFSSSCRSPRKPFASPSRFIRRPSTTICPSPIRVALESSSGLEQKGECSGSMAPRGPSVTESSEASLDTSWPRSRPRAPPKARMALSFSRFLRRGCLASPVFARLSPKCPAVSHGRVQPLGDVGQQLPRLKSKRVANFFQIKMDVPTGSGTCLMDSEDAGTGESGDRATEKEVICPWESL

SEQ ID NO: 47728 - protein, 114 aa, Homo sapiens
MGGEWGQSAICPESAQEWTYQVGQHLVDMDLGAITKYSALHAKPNGLILQYGTAGFRTKAEHLDHVMFRMGLLAVLRSKQTKSTIGVMVTASHNPEEDNGVKLVDPLGEMLAPS

SEQ ID NO: 47729 - protein, 256 aa, Homo sapiens
MGSTESSEGRRVSFGVDEEERVRVLQGVRLSENVVNRMKEPSSPPPAPTSSTFGLQDGNLRAPHKESTLPRSGSSGGQQPSGMKEGVKRYEQEHAAIQDKLFQVAKREREAATKHSKASLPTGEGSISHEEQKSVRLQARELESREAELRRRDTFYKEQLERIERKNAEMYKLSSEQFHEAASKMESTIKPRRVEPVCSGLQAQILHCYRDRPHEVLLCSDLVKAYQRCVSAAHKVRPCLPPRFPRALGGRRGTSI

SEQ ID NO: 47730 - protein, 742 aa, Homo sapiens
MADILSQSETLASQDLSGDFKKPALPVSPAARSKAPASSSSNPEEVQKEGPTALQDSNSGEPDIPPPQPDCGDFRSLQEEQSRPPTAVSSPGGPARAPPYQEPPWGGPATAPYSLETLKGGTILGTRSLKGTSYCLFGRLSGCDVCLEHPSVSRYHAVLQHRASGPDGECDSNGPGFYLYDLGSTHGTFLNKTRIPPRTYCRVHVGHVVRFGGSTRLFILQGPEEDREAESELTVTQLKELRKQQQILLEKKMLGEDSDEEEEMDTSERKINAGSQDDEMGCTWGMGEDAVEDDAEENPIVLEFQQEREAFYIKDPKKALQGFFDREGEELEYEFDEQGHSTWLCRVRLPVDDSTGKQLVAEAIHSGKKKEAMIQCSLEACRILDTLGLLRQEAVSRKRKAKNWEDEDFYDSDDDTFLDRTGLIEKKRLNRMKKAGKIDEKPETFESLVAKLNDAERELSEISERLKASSQVLSESPSQDSLDAFMSEMKSGSTLDGVSRKKLHLRTFELRKEQQRLKGLIKIVKPAEIPELKKTETQTTGAENKAKKLTLPLFGAMKGGSKFKLKTGTVGKLPPKRPELPPTLMRMKDEPEVEEEEEEEEEEEKEKEEHEKKKLEDGSLSRPQPEIEPEAAVQEMRPPTDLTHFKETQTHENMSQLSEEEQNKDYQDCSKTTSLCAGPSASKNEYEKSRGELKKKKTPGPGKLPPTLSSKYPEDDPDYCVWVPPEGQSGDGRTHLNDKYGY

SEQ ID NO: 47731 - protein, 112 aa, Homo sapiens
  MOD_RES (1)..(1): Any amino acid
XLKQLGQPIQQPSGPGEVKLPSGPSNRTSQVKVVEVKPDMFPPYKYSCTVTLDLGLATSRGRGKCKNPSCSYVYTNRHKPRICPSCGVNLAKDRTEKTTKAIVSLMWGTSCW

SEQ ID NO: 47732 - protein, 502 aa, Homo sapiens
MPKTEETVLQNDPSVAENGAPEPKTPGQSQKSKSFCLDDQSPDLIETVNEVSKLSISHEIVVNQDFYVEETILPPNSVEGRFAEAMYNAFWNHLKEQLLSTPPDFTCALELLKDVKETLLSLLLPWQNRLRNEIEEALDTDLLKQEAEHGALDVPHLSNYILNLMALLCAPVRDEAIQKLETIRDPVQLLRGILRVLGLMKMDMVNYTIQSFRPYLQEHSIQYEQAKFQELLDKQPSLLDYTTKWLTKAATDITTLCPSSPDSPSSSCSMVCSLPSGAGNNSEPPSPTMVLYQGYLNLLLWDLENVEFPETLLMDRIRLQELAFQLHQLTVLASVLLVARSFSGEVLFRSPEFVDRLKCTTKALTEEFISRPEETMLSVSEQVSQEVHQGLKDMGLTTLSSENTASLLGQLQNITKKENCIRSIVDQWIRFFLKCCLLHGMQESLLHFPGGLILIEKELAELGWKFLNLMHHNQQVFGPYYAEILKHIIHPAQAQETDVEPN

SEQ ID NO: 47733 - protein, 82 aa, Homo sapiens
MLGITSCSDQQAKEGEGLEGSSTGSSSGNHGGSGGGNGHKPGNSETSPGMFNFDTFWKNFKSKLGFINWDAINKDQRSSRIP

SEQ ID NO: 47734 - protein, 212 aa, Homo sapiens
MTPLVSRLSRLWAIMRKPRAAVGSGHRKQAASQEGRQKHAKNNSQAKPSACDGLARQPEEVVLQASVSSYHLFRDVAEVTAFRGSLLSWYDQEKRDLPWRRRAEDEMDLDRRAYAEVAYTAGPGQCFPGGGESTLGWPGLLFSWPAAAGGSSEGGRGARGPHATYSRDPAAAPAWRGALHSWGHCLYRLWPGNRCGGWQRSTGAVPCPSHWC

SEQ ID NO: 47735 - protein, 99 aa, Homo sapiens
MSAKRAELKKTHLSKNYKAVCLELKPEPTKVRSPFEAMQAARPEIHGEVTRSQGSFADPSGQDLSQTFDYKAVKQEGRFTKAGRTPRLLEELSLLLLPL

SEQ ID NO: 47736 - protein, 1429 aa, Homo sapiens
MWSLTASEGESTTAHFFLGAGDEGLGTRGIGMRPEESDSELLEDEEDEVPPEPQIIVGICAMTKKSKSKPMTQILERLCRFDYLTVVILGEDVILNEPVENWPSCHCLISFHSKGFPLDKAVAYSKLRNPFLINDLAMQYYIQDRREVYRILQEEGIDLPRYAVLNRDPARPEECNLIEGEDQVEVNGAVFPKPFVEKPVSAEDHNVYIYYPSSAGGGSQRLFRKIGSRSSVYSPESSVRKTGSYIYEEFMPTDGTDVKVYTVGPDYAHAEARKSPALDGKVERDSEGKEIRYPVMLTAMEKLVARKVCVAFKQTVCGFDLLRANGHSFVCDVNGFSFVKNSMKYYDDCAKILGNTIMRELAPQFQIPWSIPTEAEDIPIVPTTSGTMMELRCVIAIIRHGDRTPKQKMKMEVKHPRFFALFEKHGGYKTGKLKLKRPEQLQEVLDITRLLLAELEKEPGGEIEEKTGKLEQLKSVLEMYGHFSGINRKVQLTYYPHGVKASNEGQDPQRETLAPSLLLVLKWGGELTPAGRVQAEELGRAFRCMYPGGQGDYAGFPGCGLLRLHSTFRHDLKIYASDEGRVQMTAAAFAKGLLALEGELTPILVQMVKSANMNGLLDSDGDSLSSCQHRVKARLHHILQQDAPFGPEDYDQLAPTRSTSLLNSMTIIQNPVKVCDQVFALIENLTHQIRERMQDPRSVDLQLYHSETLELMLQRWSKLERDFRQKSGRYDISKIPDIYDCVKYDVQHNGSLGLQGTAELLRLSKALADVVIPQEYGISREEKLEIAVGFCLPLLRKILLDLQRTHEDESVNKLHPLYSRGVLSPGRHVRTRLYFTSESHVHSLLSVFRYGGLLDETQDAQWQRALDYLSAISELNYMTQIVIMLYEDNTQDPLSEERFHVELHFSPGVKGVEEEGSAPAGCGFRPASSENEEMKTNQGSMENLCPGKASDEPDRALQTSPQPPEGPGLPRRSPLIRNRKAGSMEVLSETSSSRPGGYRLFSSSRPPTEMKQSGLGSQCTGLFSTTVLGGSSSAPNLQDYARSHGKKLPPASLKHRDELLFVPAVKRFSVSFAKHPTNGFEGCSMVPTIYPLETLHNALSLRQVSEFLSRVCQRHTDAQAQASAALFDSMHSSQASDNPFSPPRTLHSPPLQLQQRSEKPPWYSSGPSSTVSSAGPSSPTTVDGNSQFGFSDQPSLNSHVAEEHQGLGLLQETPGSGAQELSIEGEQELFEPNQSPQVPPMETSQPYEEVSQPCQEVPDISQPCQDISEALSQPCQKVPDISQQCQENHDNGNHTCQEVPHISQPCQKSSQLCQKVSEEVCQLCLENSEEVSQPCQGVSVEVGKLVHKFHVGVGSLVQETLVEVGSPAEEIPEEVIQPYQEFSVEVGRLAQETSAINLLSQGIPEIDKPSQEFPEEIDLQAQEVPEEIN

SEQ ID NO: 47737 - protein, 128 aa, Homo sapiens
MSGAPTAGAALMLCAATAVLLSAQGGPVQSKSPRFASWDEMNVLAHGLLQLGQGLREHAERTRSQLSALERRLSACGSFTACRHNSRLRTAGSSNSSTRWPSSSGTWRSSTCEFSICKASLASWTTST

SEQ ID NO: 47738 - protein, 309 aa, Homo sapiens
MEESKTLKSENHEPKKNVICEESKAVQVIGNQTLKARNDKSVKEIENSSPNRNSSKKNKQNDICIEKTEVKSCKVNAANLPGPKDLGLVLRDQSHCKAKKFPNSPVKAEKATISQAKSEKATSLQAKAEKSPKSPNSVKAEKASSYQMKSEKVPSSPAEAEKGPSLLLKDMRQKTELQQIGKKIPSSFTSVDKVNIEAVGGEKCALQNSPRSQKQQTCTDNTGDSDDSASGIEDVSDDLSKMKNDESNKENSSEMDYLENATVIDESALTPEQRLGLKQAEERLERDHIFRLEKVYYVVLVIWGEMCVS

SEQ ID NO: 47739 - protein, 109 aa, Homo sapiens
MNVHRGSDSDRLLRQEASCLVDDTLAVAQEKEANSLASSGPHNLTYPLGPRNEDLSLDYASQPANLQFPHIMPLAEDIKGSCFQSGNKRNHEPFIAPERFGNSSVGFGS

SEQ ID NO: 47740 - protein, 96 aa, Homo sapiens
MDLPEHKEPRCRDPDQDARSRDRVAEVHTAKESPRGERDRDRQRERRRDAKDREKEKLKEKHREAEKSHSRGKDREKEKDRRARKEELRQTVAHHN

SEQ ID NO: 47741 - protein, 42 aa, Homo sapiens
MLATLARVAALRRTCLFSGRGGGRGLWTGRPQSESWRDLLLL

SEQ ID NO: 47742 - protein, 41 aa, Homo sapiens
MASLDDPGEVREGFLCPLCLKDLQSFYQLHSHYEEEHSGED

SEQ ID NO: 47743 - protein, 146 aa, Homo sapiens
METPQEDHLRGQHYHQKGQNGSFDAPNERPYSLKIRNTTSCNSGTYRCTLQDPDGQRNLSGKVILRVTGCPAQRKEETFKKYRAEIVLLLALVIFYLTLIIFTCKFARLQSIFPDFSKAGMERAFLPVTSPNKHLGLVTPHKTELV

SEQ ID NO: 47744 - protein, 111 aa, Homo sapiens
MASAELDYTIEIPDQPCWSQKNSPSPGGKEAETRQPVVILLGWGGCKDKNLAKYSAIYHKRVFCMASCLLLSPLLVDGISAGTEGQLTLRPDWAAQVLTRLGCHLQCITRS

SEQ ID NO: 47745 - protein, 1362 aa, Homo sapiens
MREAAERRQQLQLEHDQALAVLSAKQQEIDLLQKAQVEAKKEHEGAVRLLESKVRELEEKCRTQSEQFNLLSRDLEKFRQHAGKIDLLGGSAVAPLDISTAPSKPFPQFMNGLATSLGKGQESAIGGSSAIGEYIRPLPQPGDRPEPLSAKPTFLSRSGSARCRSESDMENERNSNTSKQRYSGKVHLCVARYSYNPFDGPNENPEAELPLTAGKYLYVYGDMDEDGFYEGELLDGQRGLVPSNFVDFVQDNESRLASTLGNEQDQNFINHSGIGLEGEHILDLHSPTHIDAGITDNSAGTLDVNIDDIGEDIVPYPRKITLIKQLAKSVIVGWEPPAVPPGWGTVSSYNVLVDKETRMNLTLGSRTKALIEKLNMAACTYRISVQCVTSRGSSDELQCTLLVGKDVVVAPSHLRVDNITQISAQLSWLPTNSNYSHVIFLNEEEFDIVKAARYKYQFFNLRPNMAYKVKVLAKPHQMPWQLPLEQREKKEAFVEFSTLPAGPPAPPQDVTVQAGVTPATIRVSWRPPVLTPTGLSNGANVTGYGVYAKGQRVAEVIFPTADSTAVELVRLRSLEAKGVTVRTLSAQGESVDSAVAAVPPELLVPPTPHPRPAPQSKPLASSGVPETKDEHLGPHARMDEAWEQSRAPGPVHGHMLEPPVGPGRRSPSPSRILPQPQGTPVSTTVAKAMAREAAQRVAESSRLEKRSVFLERSSAGQYAASDEEDAYDSPDFKRRGASVDDFLKGSELGKQPHCCHGDEYHTESSRGSDLSDIMEEDEEELYSEMQLEDGGRRRPSGTSHNALKDCTDHRTSEGTFWEQPEFPHQPHRKRLFSIPEVAEEDGECCGLLHKQGAGPSPRARTGLAREPRPGRPYRGDEAPRGSWFPVKHRGSGAVPHVEDFLLEDRGCRFSRSATRSPDSGLDCGSEEDESRFGFGNTVAACSPGPGHCPCRRGPRPLLARRRTLTRQSSVEEDFGEQVGPGGLLRNDDPQPGPERPPPRKHGWGEPTEHQDFRGVWKKSITMPDSRAAAPHAKPPPRVAQGPLILGNPASAGRVDHMGRRFPRGSAGPQRSRPVTVPSIDDYGRDRLSPDFYEESETDPGAEELPARIFVALFDYDPLTMSPNPDAAEEELPFKEGQIIKVYGDKDADGFYRGETCARLGLIPCNMVSEIQADDEEMMDQLLRQGFLPLNTPVEKIERSRRSGRRHSVSTRRMVALYDYDPRESSPNVDVEAELTFCTGDIITVFGEIDEDGFYYGELNGQKGLVPSNFLEEVPDDVEVYLSDAPSHYSQDTPMRSKAKRVPPEGSGTARRAPSPTVHLHSGSPTSSMGSGSPGRGREMSSKKKKGLLSKGKKLLKKLGAVK

SEQ ID NO: 47746 - protein, 266 aa, Homo sapiens
  MOD_RES (1)..(1): Any amino acid
XVSTGADGTVCFWQWDLESLKFSPRPLKFTEKPRPGVQMLCSSFSVGGMFLATGSTDHVIRMYFLGFEAPEKIAELESHTDKVDSIQFCNNGDRFLSGSRDGTARIWRFEQLEWRSILLDMATRISGDLSSEEERFMKPKVTMIAWNQNDSIVVTAVNDHVLKVWNSYTGQLLHNLMGHADEVFVLETHPFDSRIMLSAGHDGSIFIWDITKGTKMKHYFNMIEGQGHGAVFDCKFSQDGQHFACTDSHGHLLIFGFGCSKPYEKM

SEQ ID NO: 47747 - protein, 97 aa, Homo sapiens
  MOD_RES (1)..(1): Any amino acid
XGYGGGGPGYSGGSRGYGSGGQGYGNQGSGYGGSGSYDSYNNGGGGGFGGGGGSYNDFGNYNNQSSNFGPMKGGNFGGRSSGPYGGGGQYFAKPRNQ

SEQ ID NO: 47748 - protein, 47 aa, Homo sapiens
MDLIRGVLLRLLLLASSLGPGAVSLRAAIRKPGRCWRMTVTKTWTEP

SEQ ID NO: 47749 - protein, 201 aa, Homo sapiens
MGATTMDQKSLWAGVVVLLLLQGGSAYKLVCYFTNWSQDRQEPGKFTPENIDPFLCSHLIYSFASIENNKVIIKDKSEVMLYQTINSLKTKNPKLKILLSIGGYLFGSKGFHPMVDSSTSRLEFINSIILFLRNHNFDGLDVSWIYPDQKENTHFTVLIHELAEAFQKDFTKSTKERLLLTAGVSAGRQMIDNSYQVEKLA

SEQ ID NO: 47750 - protein, 48 aa, Homo sapiens
MWNLLHETDSAVATARRPRWLCAGALVLAGGFFLLGFLFVTEASLGTV

SEQ ID NO: 47751 - protein, 523 aa, Homo sapiens
MVRARVVLPGRSCGRGGGVCRVGRCVCSDTLVLGAAGHITGDMPNGVRQRSRVSTVERPRWQGLPGVHTSRCVTREGPMHGASSSCIRQCRISPTVCFLLRQRPHACLLPPLQVKRSRSKGGLAGPDGTKSVFGQMCAKMSSFGPDSLLLPHRVWKVKFVGESVDDCGGGYSESIAEICEELQNGLTPLLIVTPNGRDESGANRDCYLLSPAARAPVHSSMFRFLGVLLGIAIRTGSPLSLNLAEPVWKQLAGMSLTIADLSEVDKDFIPGLMYIRDNEATSEEFEAMSLPFTVPSASGQDIQLSSKHTHITLDNRAEYVRLAINYRLHEFDEQVAAVREGMARVVPVPLLSLFTGYELETMVCGSPDIPLHLLKSVATYKGIEPSASLIQWFWEVMESFSNTERSLFLRFVWGRTRLPRTIADFRGRDFVIQVLDKYNPPDHFLPESYTCFFLLKLPRYSCKQVLEEKLKYAIHFCKSIDTDDYARIALTGEPAADDSSDDSDNEDVDSFASDSTQDYLTGH

SEQ ID NO: 47752 - protein, 95 aa, Homo sapiens
MTPSEGARAGTGRELEMLDSLLALGGLVLLRDSVEWEGRSLLKALVKKSALCGEQVHILGCEVSEEEFREGFDSDINNRLVYHDFFRDPLNWSKT

SEQ ID NO: 47753 - protein, 398 aa, Homo sapiens
MGPRGAASLPRGPGPRRLLLPVVLPLLLLLLLAPPGSGAGASRPPHLVFLLADDLGWNDVGFHGSRIRTPHLDALAAGGVLLDNYYTQPLCTPSRSQLLTGRYQIRTGLQHQIIWPCQPSCVPLDEKLLPQLLKEAGYTTHMVGKWHLGMYRKECLPTRRGFDTYFGYLLGSEDYYSHERCTLIDALNVTRCALDFRDGEEVATGYKNMYSTNIFTKRAIALITNHPPEKPLFLYLALQSVHEPLQVPEEYLKPYDFIQDKNRHHYAGMVSLMDEAVGNVTAALKSSGLWNNTVFIFSTDNGGQTLAGGNNWPLRGRKWSLWEGGVRGVGFVASPLLKQKGVKNRELIHISDWLPTLVKLARGHTNGTKPLDGFDVWKTIRYLHPALFPPRTETPRAA

SEQ ID NO: 47754 - protein, 474 aa, Homo sapiens
MPKVKALQCALALEISSVTCPGVVLKDKEDIYLSICVFGQYKKTQCVPATFPLVFNARMVFEKVFPDAVDPGDVVTQLELGETLSTYDENTRDFMFPGPNQMSGHHDSNRQVTMRRISGLRGNAPRLEFSTTSVITECLISSRKCHTQDKFIYHLAPVEKSHGRLQNRTSRSQKKKSKSPERSKYCINAKNYEQPTISSKSHSPSPYTKRRMCELSEDTRRRLAHLNLGPYEFKKETDKPPFVIRHVDPPSPRADTLLGSSGRDCERDGWSRVHNDHSHLGCCRPKDYKVIRTPHGRDFDDSLEKCEEYLSPRSCSKPRHSARTLLVHSAPSTMPKHSPSPVLNRASLRERFHSDWCSPSNCDEIHDRVKNVLKSHQAHQRHLYDERDLEKDDELELKRSLLCRDSAYDSDPEYSSCQQPRGTFHLDDGEYWSNRAASYKGKSHRPIFENSMDKMYRNLYKKACSSASHTQESF

SEQ ID NO: 47755 - protein, 29 aa, Homo sapiens
MAATGANAEKAESHNDCPVRLLNPNIAKM

SEQ ID NO: 47756 - protein, 232 aa, Homo sapiens
MATLKEKLIAPVAEEEATVPNNKITVVGVGQVGMACAISILGKSLADELALVDVLEDKLKGEMMDLQHGSLFLQTPKIVADKDYSVTANSKIVVVTAGVRQQEGESRLNLVQRNVNVFKFIIPQIVKYSPDCIIIVVSNPVDILTYVTWKLSGLPKHRVIGSGCNLDSARFRYLMAEKLGIHPSSCHGWILGEHGDSSVAVWSGVNVAGVSLQELNPEMGTDNDSENWKEVH

SEQ ID NO: 47757 - protein, 172 aa, Homo sapiens
MLAAYLDALQTLKGKIPTLIDRMLVSSNTKTGAAGAEALSLLLKRPWDPAVGVLSHNKPSKLPGSPLILIASSGPSSSVFPTSRRHRFWQSQLSCLGKVIPVATHLLNNGSGVGVLQCLEHMIGAVRSKVLEIHSHFPHKPIILIGWNTGALVACHVSNFYLIWRLSWDGIP

SEQ ID NO: 47758 - protein, 266 aa, Homo sapiens
MAKGEGAESGSAAGLLPTSILQSTERPAQKEPKKKKQQLSVCNKLCYALGGAPYQVTGCALGFFLQIYLLDVAQVGPFSASIILFVGRAWDAITDPLVGLCISKSPWTCLGRLMPWIIFSTPLAVIAYFLIWFVPDFPHGQTYWYLLFYCLFETMVTCFHVPYSALTMFISTEQTERDSATAYRMTVEVLGTVLGTAIQGQIVGQADTPCFQDLNSSTVASQSANHTHGTTSHRETQKAYLLAAGVIVCIYIICAVILILGVREQR

SEQ ID NO: 47759 - protein, 31 aa, Homo sapiens
MGTIHLFRKPQRSFFGKLLREFRLVAADRRV

SEQ ID NO: 47760 - protein, 23 aa, Homo sapiens
MRPEDRMFHIRAVILRALSLAFL

SEQ ID NO: 47761 - protein, 148 aa, Homo sapiens
MALSKSMHARNRYKDKPPDFAYLASKYPDFKQHVQINLNGRVSLNFKDPEAVRALTCTLLREDFGLSIDIPLERLIPTVPLRLNYIHWVEDLIGHQDSDKSTLRRGIDIVVKVPQKTLLMDALKEESEIIYDFCMCNPPFFANQLEAK

SEQ ID NO: 47762 - protein, 387 aa, Homo sapiens
MQLPRWWELGDPCAWTGQGRGTRRMSPATTGTFLLTGEISNDPITFNTNLMGYPDRPGWLRYIQRTPYSDGVLYGSPTAENVGKPTIIEITAYNRRTFETARHNLIINIMSAEDFPLPYQAEFFIKNMNVEEMLASEVLGDFLGAVKNVWQPERLNAINITSALDRGGRVPLPINDLKEGVYVMVGADVPFSSCLREVENPQNQLRCSQEMEPVITCDKKFRTQFYIDWCKISLVDKTKQVSTYQEVIRGEGILPDGGEYKPPSDSLKSRDYYTDFLITLAVPSAVALVLFLILAYIMCCRREGVIQLVHHSAIQKSTKELRDMSKNREIAWPLSTLPVFHPVTGEIIPPLHTDNYDSTNMPLMQTQQNLPHQTQIPQQQTTGKWYP

SEQ ID NO: 47763 - protein, 139 aa, Homo sapiens
MEARSMLVPPQASVCFEDVAMAFTQEEWEQLDLAQRTLYREVTLETWEHIVSLGLFLSKSDVISQLEQEEDLCRAEQEAPREKGMLPGSFLGLPIEDRFSLLEGCLIQFPQQLPLAQERGPAKSRDGTGPEGSERVWPA

SEQ ID NO: 47764 - protein, 77 aa, Homo sapiens
MGLLTFRDVAVEFSLEEWEHLEPAQKNLYQDVMLENYRNLVSLGLVVSKPDLITFLEQRKEPWNVKSEETVAIQPGH

SEQ ID NO: 47765 - protein, 56 aa, Homo sapiens
MTTGDCCHLPGSLCDCSGSPAFSKVVEATGLGPPQYVAQVTSRDGRLLSTVIRALD

SEQ ID NO: 47766 - protein, 91 aa, Homo sapiens
MPDSPVDVKTQSRLTPPTMPPPPTTQGAPRTSSFTPTTLTNGTSHSPTALNGAPSPPNGFSNGPSSSSSSSLANQQLPPACGARQLSKLKR

SEQ ID NO: 47767 - protein, 1580 aa, Homo sapiens
MPLAFCGSENHSAAYRVDQGVLNNGCFVDALNVVPHVFLLFITFPILFIGWGSQSSKVHIHHSTWLHFPGHNLRWILTFMLLFVLVCEIAEGILSDGVTESHHLHLYMPAGMAFMAAVTSVVYYHNIETSNFPKLLIALLVYWTLAFITKTIKFVKFLDHAIGFSQLRFCLTGLLVILYGMLLLVEVNVIRVRRYIFFKTPREVKPPEDLQDLGVRFLQPFVNLLSKGTYWWMNAFIKTAHKKPIDLRAIGKLPIAMRALTNYQRLCEAFDAQRKDIQGTQGARAIWQALSHAFGRRLVLSSTFRILADLLGFAGPLCIFGIVDHLGKENDVFQPKTQFLGVYFVSSQEFLANAYVLAVLLFLALLLQRTFLQASYYVAIETGINLRGAIQTKIYNKIMHLSTSNLSMGEMTAGQICNLVAIDTNQLMWFFFLCPNLWAMPVQIIVGVILLYYILGVSALIGAAVIILLAPVQYFVATKLSQAQRSTLEYSNERLKQTNEMLRGIKLLKLYAWENIFRTRVETTRRKEMTSLRAFAIYTSISIFMNTAIPIAAVLITFVGHVSFFKEADFSPSVAFASLSLFHILVTPLFLLSSVVRSTVKALVSVQKLSEFLSSAEIREEQCAPHEPTPQGPASKYQAVPLRVVNRKRPAREDCRGLTGPLQSLVPSADGDADNCCVQIMGGYFTWTPDGIPTLSNITIRIPRGQLTMIVGQVGCGKSSLLLAALGEMQKVSGAVFWSSLPDSEIGEDPSPERETATDLDIRKRGPVAYASQKPWLLNATVEENIIFESPFNKQRYKMVIEACSLQPDIDILPHGDQTQIGERGINLSGGQRQRISVARALYQHANVVFLDDPFSALDIHLSDHLMQAGILELLRDDKRTVVLVTHKLQYLPHADWIIAMKDGTIQREGTLKDFQRSECQLFEHWKTLMNRQDQELEKETVTERKATEPPQGLSRAMSSRDGLLQDEEEEEEEAAESEEDDNLSSMLHQRAEIPWRACAKYLSSAGILLLSLLVFSQLLKHMVLVAIDYWLAKWTDSALTLTPAARNCSLSQECTLDQTVYAMVFTVLCSLGIVLCLVTSVTVEWTGLKVAKRLHRSLLNRIILAPMRFFETTPLGSILNRFSSDCNTIDQHIPSTLECLSRSTLLCVSALAVISYVTPVFLVALLPLAIVCYFIQKYFRVASRDLQQLDDTTQLPLLSHFAETVEGLTTIRAFRYEARFQQKLLEYTDSNNIASLFLTAANRWLEVRMEYIGACVVLIAAVTSISNSLHRELSAGLVGLGLTYALMVSNYLNWMVRNLADMELQLGAVKRIHGLLKTEAESYEGLLAPSLIPKNWPDQGKIQIQNLSVRYDSSLKPVLKHVNALIAPGQKIGICGRTGSGKSSFSLAFFRMVDTFEGHIIIDGIDIAKLPLHTLRSRLSIILQDPVLFSGTIRFNLDPERKCSDSTLWEALEIAQLKLVVKALPGGLDAIITEGGENFSQGQRQLFCLARAFVRKTSIFIMDEATASIDMATENILQKVVMTAFADRTVVTIAHRVHTILSADLVIVLKRGAILEFDKPEKLLSRKDSVFASFVRADK

SEQ ID NO: 47768 - protein, 155 aa, Homo sapiens
MAEPGHSHHLSARVRGRTERRIPRLWRLLLWAGTAFQVTQGTGPELHACKESEYHYEYTACDSTGSRWRVAVPHTPGLCTSLPDPIKGTECSFSCNAGEFLDMKDQSCKPCAEGRYSLGTGIRFDEWDELPHGFASLSANMELDDSAAESTGNCT

SEQ ID NO: 47769 - protein, 54 aa, Homo sapiens
  MOD_RES (1)..(1): Any amino acid
XQINNVSAMLVLARPVTGPREYVLDLEMVTMNSLMSYRASSVLRLTVFVGAYTF

SEQ ID NO: 47770 - protein, 250 aa, Homo sapiens
  MOD_RES (1)..(1): Any amino acid
XQQRRIFLPPPPGIRKCVISTNISATSLTIDGIRYVVDGGFVKQLNHNPRLGLDILEVVPISKSEALQRSGRAGRTSSGKCFRIYSKDFWNQCMPDHVIPEIKRTSLTSVVLTLKCLAIHDVIRSGHVTRLGLSMVEFPLPPHLTCAVIKAASLDCEDLLLPIAAMLSVENVFIRPVDPEYQKEAEQRHRELAAKAGGFNDFATLAVIFEQCKSSGAPASWCQKHWIHWRCLFSAFRVEAQLRELIRKLK

SEQ ID NO: 47771 - protein, 170 aa, Homo sapiens
MTGTASSLAARAALLTGRLPIRNGFYTTNAHARNAYTPQEIVGGIPDSEQLLPELLKKAGYVSKIVGKWHLGHRPQFHPLKHGFDEWFGSPNCHFGPYDNKARPNIPVYRDWEMVGRYYEEFPINLKTGEANLTQIYLQEALDFIKRQARHHPFFLYWAVDATHAPVYAS

SEQ ID NO: 47772 - protein, 161 aa, Homo sapiens
MLGESVPAAVEQEQLGEVKLEEEEAVSPEDPRRPESRLRPEVAHQLFRCFQYQEDMGPRASLSRLRELCGHWLRPALHTKKQILELLVLEQFLSVLPPHLLGRLQGQPLRDGEEVVLLLEGIHREPSHAGPLDFSCNAGKSCPRADVTLEEKGCASQVPSH

SEQ ID NO: 47773 - protein, 149 aa, Homo sapiens
MGCGCSSHPEDDWMENIDVCENCHYPIVPLDGKGTLLIRNGSEVRDPLVTYEGSNPPASPLQGDPRQQGLKDKACGSLAVGFHLSPTYFLPGLAFLVPHPVTPGFLPIPARFSLMPLVFTDNLVIALHSYEPSHDGDLGFEKGEQLRIL

SEQ ID NO: 47774 - protein, 84 aa, Homo sapiens
MESAIAEGGASRFSEFLGKTPGQNAQKWIPARSTRRDDNSAANNSANEKERHDAIFRKVRGILNKLTPEKFDKLCLELLNVGVE

SEQ ID NO: 47775 - protein, 190 aa, Homo sapiens
  MOD_RES (1)..(1): Any amino acid
XHPLHRRSGDKPGRQFDGSAFGANYSSQPLDESWPRQQPPWKDEKHPGFRLTSALNRTNSDSALHTSALSTKPQDPYGGGGQSAWPAPYMVASFPGPLKEENLLNVPKPLPKQLWETKEIQSLSGRPRSCDVGGGNAFPHNGQNLGLSPFLGTLNTGGSLPDLTNLHYSTPLPASLDTTDHHFGSMSVGN

SEQ ID NO: 47776 - protein, 73 aa, Homo sapiens
MAEKTQKSVKIAPGAVVCVESEIRGDVTIGPRTVIHPKARIIAEAGPIVIGEGNLIEEQALIINAFPSHEDGR

SEQ ID NO: 47777 - protein, 387 aa, Homo sapiens
MATKTAGVGRWEVVKKGRRPGVGAGAGGRGGGRNRRALGEANGVWKYDLTPAIQTTSTLYERGFENIMKRQNKEQVPPPAVEPKKPGNKKQPKKVATPPNQNQKQGRFRSLEEALKALDVADLQKELDKSQSVFSGNPSIWLKDLASYLNYKLQAPLSEPTLSQHTHDYPYSLVSRELRGIIRGLLAKAAGSLELFFDHCLFTMLQELDKTPGESLHGYRICIQAILQDKPKIATANLGKFLELLRSHQSRPAKCLTIMWALGQAGFANLTEGLKVWLGIMLPVLGIKSLSPFAITYLDRLLLMHPNLTKGFGMIGPKDFFPLLDFAYMPNNSLTPSLQEQLCQLYPRLKVLAFGAKPDSTLHTYFPSFLSRATPSCPPEMKKESPF

SEQ ID NO: 47778 - protein, 181 aa, Homo sapiens
MPPRCSSPTVGPPPLPQKSLETRAQKKLSCSLEDLRSESVDKCMDGNQPFPVLEPKDSPFLAEHKYPTLPGKLSGATPNGEAAKSPPTICQPDATGSSLLRLNRGRSVSAPVLGTVPIPGDTESGWDDTAVVNDLSSTSSGTESGPQSPLTPDGKRNPKGIKKFWGKIRRTQSGNFYTDTL

SEQ ID NO: 47779 - protein, 38 aa, Homo sapiens
MKKEDVMNILDWKTKQSNVEVPFFPARVLLQDFTGIPA

SEQ ID NO: 47780 - protein, 236 aa, Homo sapiens
MAAKQPPPLMKKHSQTDLVSRLKTRKILGVGGEDDDGEVHRSKISQVLGNEIKFTIREPLGLRVWQFVSAVLFSGIAIMALAFPDQLYDAVFDGAQVTSKTPIRLYGGALLKVETESDRGEVTCLRSQLVSGEAKIGTQAIQLGRTKDGVSETSPASALLLAFSLIQTWLQPLGWDWPPYLPFNPVLPCCQKELSRKHMSPQPSLAGTQPLQETKLPPTDHRTSKTHHRHLLLFLP

SEQ ID NO: 47781 - protein, 82 aa, Homo sapiens
  MOD_RES (1)..(1): Any amino acid
XRPRLQLLEHLLPPRPASGGGGRAAGPGPAHRSGPRAAGKAQFGPLAVGGHAQETDRPEGGRLRPPQQPAAGQRGPREEMRG

SEQ ID NO: 47782 - protein, 88 aa, Homo sapiens
AEYEVTPDDKRKACGRQLTQNFLSHTADPRVPERGPFCRLPRQHLLQPFPAVEVAGKAASDQKHLQAIPSPGQRWLWGGVRLPGAGHR

SEQ ID NO: 47783 - protein, 126 aa, Homo sapiens
WRTEILDYCPSTRVLLIGCKTDLRTDLSTLMELSHQKQAPISYEQGCAIAKQLGAEIYLEGSAFTSEKSIHSIFRTASMLCLNKPSPLPQKSPVRSLSKRLLHLPSRSELISSTFKKEKAKSCSIM

SEQ ID NO: 47784 - protein, 68 aa, Homo sapiens
MLLGEARAVLKWADGKMIKNEVDMQVLHLLGPKLEADLEKKFKVAKARLEETDRRTAKDVVENGETAD

SEQ ID NO: 47785 - protein, 176 aa, Homo sapiens
MASETEKTHALLQTCSTESLISSLGLGAFCLVADRLLQFSTIQQNDWLRALSDNAVHCVIGMWSWAVVTGIKKKTDFGEIILAGFLASVIDVDHFFLAGSMSLKAALTLPRRPFLHCSTVIPVVVLTLKFTMHLFKLKDSWCFLPWMLFISWTSHHIRDGIRHGLWICPFGKTSPL

SEQ ID NO: 47786 - protein, 569 aa, Homo sapiens
MSKKGRSKGEKPEMETDAVQMANEELRAKLTSIQIEFQQEKSKVGKLRERLQEAKLEREQEQRRHTAYISELKAKLHEEKTKELQALREGLIRQHEQEAARTAKIKEGELQRLQATLNVLRDGAADKVKTALLTEAREEARRAFDGERLRLQQEILELKAARKQAEEALSNCMQADKTKAADLRAAYQAHQDEVHRIKRECERDIRRLMDEIKGKDRVILALEKELGVQAGQTQKLLLQKEALDEQLVQVKEAERHHSSPKRELPPGIGDMVELMGVQDQHMDERDVRRFQLKIAELNSVIRKLEDRNTLLADERNELLKRSRETEVQLKPLVEKNKRMNKKNEDLLQSIQRMEEKIKNLTRENVEMKEKLSAQASLKRHTSLNDLSLTRDEQEIEFLRLQVLEQQHVIDDLSLERERLLRSKRHRGKSLKPPKKHVVETFFGFDEESVDSETLSETSYNTDRTDRTPATPEEDLDDATAREEADLRFCQLTREYQALQRAYALLQEQVGGTLDAEREARTREQLQADLLRCQAKIEDLEKLLVEKGQDSKWVEEKQLLIRTNQDLLEK

SEQ ID NO: 47787 - protein, 27 aa, Homo sapiens
MSEVLPADSGVDTLAVFMASSGTTDVT

SEQ ID NO: 47788 - protein, 44 aa, Homo sapiens
MAAQIPESDQIKQFKEFLGTYNKLTETCFLDCVKDFTTREVKPE

SEQ ID NO: 47789 - protein, 146 aa, Homo sapiens
  MOD_RES (1)..(1): Any amino acid
XEKQGAGQPATDGGRKPTKAEVQATLLLPGEAFRFLVSPELKDRKEDAKGMEDEGQTKIKQRRSRTNFTLEQLNELERLFDETHYPDAFMREELSQRLGLSEARVQVWFQNRRAKCRKQENQLHKGVLIGAASQFEACRVAPYVNV

SEQ ID NO: 47790 - protein, 282 aa, Homo sapiens
MAAPRQIPSHIVRLKPSCSTDSSFTRTPVPTVSLASRELPVSSWQVTEPSSKNLWEQICKEYEAEQPPFPEGYKVKQEPVITVAPVEEMLFHGFSAEHYFPVSHFTMISRTPCPQDKSETINPKTCSPKEYLETFIFPVLLPGMASLLHQAKKEKCFERKRTKFIACDFLTEWLYNQNPKRAGEPFTEFFSIPFVEERLKQHPRPPIPLSLLLTEEEAALYIQSFWRACVVRCDPEIQELRQWQKKLREAKHIHQQVKIFWAKQEQKGKLLDSLSLVHSRKA

SEQ ID NO: 47791 - protein, 688 aa, Homo sapiens
MDIEFDFKGSPLGGVITNYLLEKSRLVKQLKGERNFHIFYQLLAGADEQLLKALKLERDTTGYAYLNHEVSRVDGMDDASSFRAVQSAMAVIGFSEEEIRQVLEVTSMVLKLGNVLVADEFQASGIPASGIRDGRGVREIGEMVGLNSEEVERALCSRTMETAKEKVVTALNVMQAQYARDALAKNIYSRLFDWIVNRINESIKVGIGEKKKVMGVLDIYGFEILEDNSFEQFVINYCNEKLQQVFIEMTLKEEQEEYKREGIPWTKVDYFDNGIICKLIEHNQRGILAMLDEECLRPGVVSDSTFLAKLNQLFSKHGHYESKVTQNAQRQYDHTMGLSCFRICHYAGKVTYNVTSFIDKNNDLLFRDLLQAMWKAQHPLLRSLFPEGNPKQASLKRPPTAGAQFKSSVAILMKNLYSKSPNYIRCIKPNEHQQRGQFSSDLVATQARYLGLLENVRVRRAGYAHRQGYGPFLERYRLLSRSTWPHWNGGDREGVEKVLGELSMSSGELAFGKTKIFIRSPKTLFYLEEQRRLRLQQLATLIQKIYRGWRCRTHYQLMRKSQILISSWFRGNMQKKCYGKIKASVLLIQAFVRGWKARKNYRKYFRSEAALTLADFIYKSMVQKFLLGLKNNLPSTNVLDKTWPAAPYKCLSTANQELQQLFYQWKAKVPGSAVPEAGRDPEGKALCQ

SEQ ID NO: 47792 - protein, 74 aa, Homo sapiens
HHCRACGQIFCGKCSSKYSTIPKFGIEKEVRVCEPCYEQLNSCPPRGTRRPCRRRRSCSWPWRCHSQRRRRRRG

SEQ ID NO: 47793 - protein, 966 aa, Homo sapiens
MASVAWAVLKVLLLLPTQTWSPVGAGNPPDCDSPLASALPRSSFSSSSELSSSHGPGFSRLNRRDGAGGWTPLVSNKYQWLQIDLGERMEVTAVATQGGYGSSDWVTSYLLMFSDGGRNWKQYRREESIWGFPGNTNADSVVHYRLQPPFEARFLRFLPLAWNPRGRIGMRIEVYGCAYKSEVVYFDGQSALLYTLDKKPLKPIRDVISLKFKAMQSNGILLHREGQHGNHITLELIKGKLVFFLNSGNAKLPSTIAPVTLTLGSLLDDQHWHSVLIELLDTQVNFTVDKHTHHFQAKGDSSNLDLNFEISFGGILSPGRSRAFTRKSFHGCLENLYYNGVDVTELAKKHKPQILMMGNVSFSCPQPQTVPVTFLSSRSYLALPGNSGEDKVSVTFQFRTWNRAGHLLFGELQRGSGSFVLFLKDGKLKLSLFQAGQSPRNVTAGAGLNDGQWHSVSFSAKWSHMNVVVDDDTAVQPLVAVLIDSGDTYYFGALYEQSCEAHKHRGNPSGLYYIDADGSGPLGPFLVYCNMTDSAWTVVRHGGPDAVTLRGAPSGHPLSAVSFAYAAGAGQLRAAVNLAERCEQRLALRCGTARRPDSRDGTPLSWWVGRTNETHTSWGGSLPDAQKCTCGLEGNCIDSQYYCNCDAGQNEWTSDTIVLSQKEHLPVTQIVMTDTGQPHSEADYTLGPLLCRGDKSFWNSASFNTETSYLHFPAFHGELTADVCFFFKTTVSSGVFMENLGITDFIRIELRAPTEVTFSFDVGNGPCEVTVQSPTPFNDNQWHHVRAERNVKGASLQVDQLPQKMQPAPADGHVRLQLNSQLFIGGTATRQRGFLGCIRSLQLNGVALDLEERATVTPGVEPGCAGHCSTYGHLCRNGGRCREKRRGVTCDCAFSAYDGPFCSNEISAYFATGSSMTYHFQEHYTLSENSSSLVSSLHRDVTLTREMITLSFRTTRTPSLLLKFAD

SEQ ID NO: 47794 - protein, 188 aa, Homo sapiens
MYLRERPEEARLGMPVSLEEQILNSTFEACDPQRTGTVAVAQVLAYLEAVTGQGPQDARLQTLANSLDPNGEGPKATVDLDTFLVVMRDWIAACQLHGGLELEEETAFQGALTSRQLPSGCPEAEEPANLESFGGEDPRPELQATADLLSSLEDLELSNRRLVGENAKLQRSMETAEEGSARLGEEIL

SEQ ID NO: 47795 - protein, 196 aa, Homo sapiens
MVMVKGVNKLALPPGSVISYPLENVDLLFLSELQVLHDISSLLSRHKHLAKDHSPDLYSLELAGLDEIGKRYGEDSEQFRDASKILVDALQKFADDMYSLYGGNAVVELVTVKSFDTSLIRKTRTILEAKQAKNPASPYNLAYKYNFEYSVVFNMVLWIMIALALAVIITSYNIWNMDPGYDSIIYRMTNQKIRMD

SEQ ID NO: 47796 - protein, 89 aa, Homo sapiens
MQPDEALHVEEPGNPEETVCVEETTEPDRIQFVEGPVEPGKPTSPEHVVYEGETVTRAEKSNPEESLRAEQSPSMEENLSIEDLELLEG

SEQ ID NO: 47797 - protein, 78 aa, Homo sapiens
MASTMSCWPAFTVLGEAWRDQVDWSRLLRDTGLVKMSRKPRASSPLSNNHPPTPKRFPRQPGREKGPIKEVPGTKGSP

SEQ ID NO: 47798 - protein, 230 aa, Homo sapiens
  MOD_RES (1)..(1): Any amino acid
XPFVLAAAVSRKKKRRMGTYSLVPKKKTKVLKQRTVIEMFKSITHSTVGSKGEKDLGASSLHVNGESLEMDSDEDDSEELEEDDGHGAEQAAAFPTEDSRTSKESMSEADRAQKSSESSIKKKFLKRKGKTDSPWIKPARKRRRRSRKKPSGALGSESYKSSAGSAEQTAPGDSTGYMEVSLDSLDLRVKGILSSQAEGLANGPDVLETDGLQEVPLCSCRMETPKSREI

SEQ ID NO: 47799 - protein, 249 aa, Homo sapiens
MTPSPTLGAASSSLLSPPAASAPVSSLGRVVDLVSADLEEVAQKCGLSYKALVALRRVLLAQFSAFPVNGADLYEELKTSTAILSTGIGSLDKLLDAGLYTGEVTEIVGGPGSGKTQVCLCMAANVAHGLQQNVLYVDSNGGLTASRLLQLLQAKTQDEEEQAEALRRIQVVHAFDIFQMLDVLQELRGTVAQQVTGSSGTVKVVVVDSVTAVVSPLLGGQQREGLALMMQLARELKTLARDLGMAVVV

SEQ ID NO: 47800 - protein, 189 aa, Homo sapiens
MEAATTLHPGPRPALPLGGPGPLGEFLPPPECPVFEPSWEEFADPFAFIHKIRPIAEQTGICKVRPPPDWQPPFACDVDKLHFTPRIQRLNELEAQTRVKLNFLDQIAKYWELQGSTLKIPHVERKILDLFQLNKLQKKVDLQLFARIENGPKLLPRWGLLLAKQWAHISEGIMNEFSTPTTYSCPETA

SEQ ID NO: 47801 - protein, 56 aa, Homo sapiens
  MOD_RES (1)..(1): Any amino acid
XSRITLNLAFTCVPSVAMSCSPAARSMHTRLHGRRSPRPFTPTAWPSVRSTIDLKP

SEQ ID NO: 47802 - protein, 133 aa, Homo sapiens
MSFPCKFVASFLLIFNVSSKGAVSKEITNALETWGALGQDINLDIPSFQMSDDIDDIKWEKTSDKKKIAQFRKEKETFKEKDTYKLFKNGTLKIKHLKTDDQDIYKVSIYDTKGKNVLEKIFDLKIQGKCSFP

SEQ ID NO: 47803 - protein, 1433 aa, Homo sapiens
MATSRGASRCPRDIANVMQRLQDEQEIVQKRTFTKWINSHLAKRKPPMVVDDLFEDMKDGVKLLALLEVLSGQKLPCEQGRRMKRIHAVANIGTALKFLEGRKSMHRGSPIKLVNINSTDIADGRPSIVLGLMWTIILYFQIEELTSNLPQLQSLSSSASSVDSIVSSETPSPPSKRKVTTKIQGNAKKALLKWVQYTAGKQTGIEVKDFGKSWRSGVAFHSVIHAIRPELVDLETVKGRSNRENLEDAFTIAETELGIPRLLDPEDVDVDKPDEKSIMTYVAQFLKHYPDIHNASTDGQEDDREDRVIFKEMKVWIEQFERDLTRAQMVESNLQDKYQSFKHFRVQYEMKRKQIEHLIQPLHRDGKLSLDQALVKQSWDRVTSRLFDWHIQLDKSLPAPLGTIGAWLYRAEVALREEITVQQVHEETANTIQRKLEQHKDLLQNTDAHKRAFHEIYRTRSVNGIPVPPDQLEDMAERFHFVSSTSELHLMKMEFLELKYRLLSLLVLAESKLKSWIIKYGRRESVEQLLQNYVSFIENSKFFEQYEVTYQILKQTAEMYVKADGSVEEAENVMKFMNETTAQWRNLSVEVRSVRSMLEEVISNWDRYGNTVASLQAWLEDAEKMLNQSENAKKDFFRNLPHWIQQHTAMNDAGNFLIETCDEMVSRDLKQQLLLLNGRWRELFMEVKQYAQADEMDRMKKEYTDCVVTLSAFATEAHKKLSEPLEVSFMNVKLLIQDLEDIEQRVPVMDAQYKIITKTAHLITKESPQEEGKEMFATMSKLKEQLTKVKECYSPLLYESQQLLIPLEELEKQMTSFYDSLGKINEIITVLEREAQSSALFKQKHQELLACQENCKKTLTLIEKGSQSVQKFVTLSNVLKHFDQTRLQRQIADIHVAFQSMVKKTGDWKKHVETNSRLMKKFEESRAELEKVLRIAQEGLEEKGDPEELLRRHTEFFSQLDQRVLNAFLKACDELTDILPEQEQQGLQEAVRKLHKQWKDLQGEAPYHLLHLKIDVEKNRFLASVEECRTELDRETKLMPQEGSEKIIKEHRVFFSDKGPHHLCEKRLQLIEELCVKLPVRDPVRDTPGTCHVTLKELRAAIDSTYRKLMEDPDKWKDYTSRFSEFSSWISTNETQLKGIKGEAIDTANHGEVKRAVEEIRNGVTKRGETLSWLKSRLKVLTEVSSENEAQKQGDELAKLSSSFKALVTLLSEVEKMLSNFGDCVQYKEIVKNSLEELISGSKEVQEQAEKILDTENLFEAQQLLLHHQQKTKRISAKKRDVQQQIAQAQQGEGGLPDRGHEELRKLESTLDGLERSRERQERRIQVTLRKWERFETNKETVVRYLFQTGSSHERFLSFSSLESLSSELEQTKEFSKRTESIAVQAENLVKEASEIPLGPQNKQLLQQQAKSIKEQVKKLEDTLEEEYVIDKS

SEQ ID NO: 47804 - protein, 153 aa, Homo sapiens
MARPPPLPGLVGRRNGRAVDRAIGWRLFLLLWHPALGAQARPPRRAPGGRWRSRRVFLLVRRTRAAAYAFAIRRGVVRVVGGGGQLLRPAPGEAAAAAAAGFGAAGEAGVAGAGLEAWRHPSGPARTQLGGQEGAGGWLVVGFLLCLFLLMPP

SEQ ID NO: 47805 - protein, 204 aa, Homo sapiens
MATHGQTCARPMCIPPSYADLGKAARDIFNKGFGFGLVKLDVKTKSCSGVEFSTSGSSNTDTGKVTGTLETKYKWCEYGLTFTEKWNTDNTLGTEIAIEDQICQGLKLTFDTTFSPNTGKKSGKIKSSYKRECINLGCDVDFDFAGPAIHGSAVFGYEGWLAGYQMTFDSAKSKLTRNNFAVGYRTGDFQLHTNVNDGTEFGGS

SEQ ID NO: 47806 - protein, 38 aa, Homo sapiens
MWSCSWFNGTGLVEELPACQDLQLGLSLLSLLGLVVGV

SEQ ID NO: 47807 - protein, 285 aa, Homo sapiens
MATGADVRDILELGGPEGDAASGTISKKDIINPDKKKSKKSSETLTFKRPEGMHREVYALLYSDKNKGSCLLSRMQEDLKSFAPGHDFLAIGDAPPLLPSDTGQGYRTVKAKLGSKKVRPWKWMPFTNPARKDGAMFFHWRRAAEEGKDYPFARFNKTVQVPVYSEQEYQLYLHDDAWTKAETDHLFDLSRRFDLRFVVIHDRYDHQQFKKRSVEDLKERYYHICAKLANVRAVPGTDLKIPVFDAGHERRRKEQLERLYNRTPEQVAEEEYLLQELRKIEARKK

SEQ ID NO: 47808 - protein, 198 aa, Homo sapiens
  MOD_RES (1)..(1): Any amino acid
XVADASMARLYGRGLQHYLLTLASIANRLYSHASIENHIRLAVVKVVVLGDKDKSLEVSKNAATTLKNFCKWQHQHNQLGDDHEEHYDAAILFTREDLCGHHSCDTLGMADVGTICSPERSCAVIEDDGLHAAFTVAHEIGHLLGLSHDDSKFCEETFGSTEDKRLMSSILTSIDASKPWSKCTSATITEFLDDGHDL

SEQ ID NO: 47809 - protein, 198 aa, Homo sapiens
MPCQRTAWIGCDRQRTPPFHWREIKSRVLMTPLALSPPRSTPEPDLSSIPQDAATVPSLAAPQALTVCLYINKQANAGPYLERKKVQQLPEHFGPERPSAVLQQAVQACIDCAHQQKLVFSLVKQGYGGEMVSVSASFDGKQHLRSLPVVNSIGYVLRFLAKLCRSLLCDDLFSHQPFPRGCSASEKVQEKEEGRMES

SEQ ID NO: 47810 - protein, 200 aa, Homo sapiens
  MOD_RES (1)..(1): Any amino acid
XDTDPRVIHPKTDEQRCRLQEACKDILLFKNLDQEQLSQVLDAMFERIVKADEHVIDQGDDGDNFYVIERGTYDILVTKDNQTRSVGQYDNRGSFGELALMYNTPRAATIVATSEGSLWGLDRVTFRRIIVKNNAKKRKMFESFIESVPLLKSLEDGQRFNPHLHFASEGPFIRPLVKITPTQFLYLWFKTACLSNNLSA

SEQ ID NO: 47811 - protein, 30 aa, Homo sapiens
MLPPGEWMCHRCTVRRKKREQKKELGHVNG

SEQ ID NO: 47812 - protein, 169 aa, Homo sapiens
KKKERKSLPEEDVAEIQHAEEFLIKPESKVAKLDTSQWPLLLKNFDKLNVRTTHYTPLACGSNPLKREIGDYIRTGFINLDKPSNPSSHEVVAWIRRILRVEKTGHSGTLDPKVTGCLIVCIERATRLVKSQQSAGPRNSDRCLIPATPTYCCSKEAAPSEDHLREQND

SEQ ID NO: 47813 - protein, 130 aa, Homo sapiens
MPVSVLTTLERRFNLQSADVGVIASSFEIGNLALILFVSYFGARGHRPRLIGCGGIVMALGALLSALPEFLTHQYKYEAGEIRWGAEGRDVCAANGSGGDEGPDPDLICRNRTATNMMYLLLIGAQVLLG

SEQ ID NO: 47814 - protein, 293 aa, Homo sapiens
MREEMSLGCQEAFEIFKRDHADSVTIDDNKQILKQRFSEAKALGESINEARSKIGHLKEEITQRHIQQVALGISENMAVPLMPDQQEEKLRSQLEEEKRRYKTMFTRLKALKVEIEHLQLLMDKAKVKLQKEFEVWWAEEATNLQVNSPAVNSLDHTKPFLQTSDSQHEWSQLLSNKSSGGWEVQDQGTGRFDVCDVNARKILPSPCPSPHSQKQSSTSTPLEDSIPKRPVSSIPLTGDSQTDSDIIAFIKARQSILQKQYLQLLCSLFPKSAVSSAQASTNRKGLSDVLVTR

SEQ ID NO: 47815 - protein, 120 aa, Homo sapiens
  MOD_RES (1)..(1): Any amino acid
XHIIEELQIFSSGQPVQNLLLDTHRGLLYAASHSGVVQVPMANCSLYRSCGDCLLARDPYCAWSGSSCKHVSLYQPQLATRILSGPQAVDPGHRGSQRQGPLQRVFGCVPVFCTNRGEAM

SEQ ID NO: 47816 - protein, 230 aa, Homo sapiens
MSVKEGAQRKWAALKEKLGPQDSDPTEANLESADPELCIRLLQMPSVVNYSGLRKRLEGSDGGWMVQFLEQSGLDLLLEALARLSGRGVARISDALLQLTCVSCVRAVMNSRQGIEYILSNQGYVRQLSQALDTSNVMVKKQVFELLAALCIYSPEGHVLTLDALDHYKTVCSQQYRFSIVMNELSGSDNVPYVVTLLSVINAVILGPEDLRARTQLRNEFIETWRMPTC

SEQ ID NO: 47817 - protein, 83 aa, Homo sapiens
NEERVSAQKENSLQQNDDDENKIAEKPDWEAEKTTESRNERHLNGTDTSFSLEDLFQLLSSQPENSLEVIGTLAFILAGTYLH

SEQ ID NO: 47818 - protein, 262 aa, Homo sapiens
MARPVSDRTPAPLLLGGPAGTPPGGGALLGLRSLLQGTSKPKEPASCLLKEKERKAALPAATTPGPGLETAGPADAPAGAVVGGGSPRGRPGPVPAPGLLAPLLWERTLPFGDVEYVDLDAFLLEHGLPPSPPPPGGPSPEPSPARTPAPSPGPGSCGSASPRSSPGHAPARAALGTASGHRAGLTSRDTPSPVDPDTVEVLMTFEPDPADLALSSIPGHETFDPRRHRFSEEELKPQPIMKKARKIQVPEEQKVSRAGCGR

SEQ ID NO: 47819 - protein, 122 aa, Homo sapiens
MCTGRPGWLTVSLRVGKYKKTHKNIMINLMDILEVDTKKQIVRVEPLVTMGQVTALLTSIGWTLPVLPELDDLTVGGLIMGTGIESSSHKYGLFQHICTAYELVLADGSFVRCTPSENSDLF

SEQ ID NO: 47820 - protein, 191 aa, Homo sapiens
  MOD_RES (1)..(1): Any amino acid
XDAYWEKLYVDQAAGTPLLYVHALRDAPEEVPSFRLGQHLYGTYRTRLHENNWICIQEDTGLLYLNRSLDHSSWEKLSVRTCSSLKPRELCFPETRPSFRIRENRPPGTFHQFRLLPVQFLCPNISVAYRLLEGECRPCGAAPQCLLLLVLLCEPLTQAIWFILHLHAISSFNIPEVPLACLPGARYCSRS

SEQ ID NO: 47821 - protein, 66 aa, Homo sapiens
MNTSLSWFEQLDVLLNATDGNVVRNKQWLYPLGVSTELIGLCICFFCSSGCIFLGSPPQASTRSCC

SEQ ID NO: 47822 - protein, 173 aa, Homo sapiens
  MOD_RES (1)..(1): Any amino acid
XLHLMLACFKLRAFTDNRDDMALGHVIVLLQQEWPRGENLFLKAVNKICQQGNFQYENFFNYVTNIDMLEEFAYLRTQEGGKIHLELLPNQGMLIKPSSPPMGLLQQEFLPVLQPSIQTADRHHTVTRGITKGVKEDFRLAMERQVSRCGENLMVVLHRFCINEKILLLQTLT

SEQ ID NO: 47823 - protein, 225 aa, Homo sapiens
MCEGPSRISGPIPPDPTLCPDNYRRPTSAQGRLEGNALKLDLLTSDRALDTTAPRGPCIGPGAGEILERGQRGVGDVLLQLEGISLGPGASLKRKDPKDHEKENLRRIREIQKRFREQERSREQGQPRPLKALWRSPKYDKVESRVKAQLQEPGPASGTESAHFLRAHSRCGPGLPPPHVSSPQPTPPGPEAKLVGAQGPVAAGGRGPQAEPAGPCHAPRPHAHA

SEQ ID NO: 47824 - protein, 104 aa, Homo sapiens
RTQWIEVDTRRTTRFTGVITQGRDSSIHDDFVTTFFVGFSNDSQTWVMYTNGYEEMVGTMPRLLALLPLSGRGVGSQRGWQYCSEACLSPDLSWERGQGHTRAE

SEQ ID NO: 47825 - protein, 45 aa, Homo sapiens
MEDEVVRFAKKMDKMVQKKNAAGALDLLKELKNIPMTLELLQLLP

SEQ ID NO: 47826 - protein, 162 aa, Homo sapiens
MIRNWLTIFILFPLKLVEKCESSVSLTVPPVVKLENGSSTNVSLTLRPPLNATLVITFEITFRSKNITILELPDEVVVPPGVTNSSFQVTSQNVGQLTVYLHGNHSNQTGPRIRFLVIRSSAISIINQVIGWIYFVAWSISFYPQVIMNWRRKSVIGLSFDF

SEQ ID NO: 47827 - protein, 429 aa, Homo sapiens
MAAAMPLALLVLLLLGPGGWCLAEPPRDSLREELVITPLPSGDVAATFQFRTRWDSELQREGVSHYRLFPKALGQLISKYSLRELHLSFTQGFWRTRYWGPPFLQAPSGAELWVWFQDTVTDVDKSWKELSNVLSGIFCASLNFIDSTNTVTPTASFKPLGLANDTDHYFLRYAVLPREVVCTENLTPWKKLLPCSSKAGLSVLLKADRLFHTSYHSQAVHIRPVCRNARCTSISWELRQTLSVVFDAFITGQGKKDWSLFRMFSRTLTEPCPLASESRVYVDITTYNQDNETLEVHPPPTTTYQDVILGTRKTYAIYDLLDTAMINNSRNLNIQLKWKRPPENEAPPVPFLHAQRYVSGYGLQKGELSTLLYNTHPYRAFPVLLLDTVPWYLRLLHPLPACPGPAATPPPGDADSAAGQLSHQGFHPV

SEQ ID NO: 47828 - protein, 311 aa, Homo sapiens
MPLHVKWPFPAVPPLTWTLASSVVMGLVGTYSCFWTKYMNHLTVHNREVLYELIEKRGPATPLITVSNHQSCMDDPHLWGILKLRHIWNLKLMRWTPAAADICFTKELHSHFFSLGKCVPVCRGAEFFQAENEGKGVLDTGRHMPGAGKRREKASPGFQPARSSQHWLQKEGGDGVYQKGMDFILEKLNHGDWVHIFPEGKVNMSSEFLRFKWGIGRLIAECHLNPIILPLWHVGMNDVLPNSPPYFPRFGQKITVLIGKPFSALPVLERLRAENKSAVEMRKALTDFIQEEFQHLKTQAEQLHNHLQPGR

SEQ ID NO: 47829 - protein, 181 aa, Homo sapiens
  MOD_RES (1)..(1): Any amino acid
XATGSPLAQGKDAYELEVLLRVKESEIQYLKQEISSLKDELQTALRDKKYASDKYKDIYTELSIAKAKADCDISRLKEQLKAATEALGEKSPDSATVSGYDIMKSKSNPDFLKKDRSCVTRQLRNIRSKCTTPVLPGNANPELQIRTQTWETPRPEAALLFPALLSSGPVMGYAEPAMCTH

SEQ ID NO: 47830 - protein, 150 aa, Homo sapiens
  MOD_RES (1)..(1): Any amino acid
XAALAVILIATALCAPASASPYSSDTTPCCFAYIARPLPRAHIKEYFYTSGKCSNPAVVHRSRMPKREGQQVWQDFLYDSRLNKGKLCHPKEPPSVCQPREEMGSGVHQLFGDELGWRVLEPELTQICLFLLALVLAWEASPHYPTPPAP

SEQ ID NO: 47831 - protein, 88 aa, Homo sapiens
MLQLYKSRDLGVQITSPRFLSLCLAMGTSSIFLCVLFLCGALGLTMSPARGRLRCYICGFTKPCHPVPTECRDDEACGISIGTSDAHC

SEQ ID NO: 47832 - protein, 210 aa, Homo sapiens
MLGLGTLLPWNFFMTATQYFTNRLDMSQNVSLVTAELSKDAQASAAPAAPLPERNSLSAIFNNVMTLCAMLPLLLFTYLNSFLHQRIPQSVRILGSLVAILLVFLITAILVKVQLDALPFFVITMIKIVLINSFGAILQGSLFGLAGLLPASYTAPIMSGQGLAGFFASVAMICAIASGSELSESAFGYFITACAVIILTIICYLGLPRL

SEQ ID NO: 47833 - protein, 85 aa, Homo sapiens
  MOD_RES (1)..(1): Any amino acid
XYGNVVELRINSGGKLPNFGFVVFDDSEPVQKVLSNRPIMFRGEVRLNVEEKKTRAAREGDRRDNRLRGPGGPRAISPKECLAYY

SEQ ID NO: 47834 - protein, 167 aa, Homo sapiens
  MOD_RES (1)..(1): Any amino acid
XLLELQNRPPAVDAVVGQIVPSILFLFLGLKQVCATRQLVNREDRSKAEKADMEENEEISSDEEETNVTAQAMQSNNGRGEDEEEEDDDWDEEVLEETALEGFSTPLDLDNSVDEYQFFTQALITVQSRDAAWYQLLMAPLSEDQRTALQEVYTLAEHRRTVAGQPE

SEQ ID NO: 47835 - protein, 1055 aa, Homo sapiens
  MOD_RES (1)..(1): Any amino acid
XFKMQDYNKDDMSYRRISAVEPKTALPFNRFLPNKSRQPSYVPAPLRKKKPDKHEDNRRSWASPVYTEADGTFSSQFLLLQALQTYSDDILSSETHTKIDPTSGPRLITRRKNLSYAPGYRRDDLEMAALDPDLENDDFFVRKTGAFHANPYVLRAFEDFRKFSEQDDSVERDIILQCREGELVLPDLEKDDMIVRRIPAQKKEVPLSGAPDRYHPVPFPEPWTLPPEIQAKFLCVLERTCPSKEKSNSCRILVPSYRQKKDDMLTRKIQSWKLGTTVPPISFTPGPCSEADLKRWEAIREASRLRHKKRLMVERLFQKIYGENGSKSMSDVSAEDVQNLRQLRYEEMQKIKSQLKEQDQKWQDDLAKWKDRRKSYTSDLQKKKEEREEIEKQALEKSKRSSKTFKEMLQDRESQNQKSTVPSRRRMYSFDDVLEEGKRPPTMTVSEASYQSERVEEKGATYPSEIPKEDSTTFAKREDRVTTEIQLPSQSPVEEQSPASLSSLRSRSTQMESTRVSASLPRSYRKTDTVRLTSVVTPRPFGSQTRGISSLPRSYTMDDAWKYNGDVEDIKRTPNNVVSTPAPSPDASQLASSLSSQKEVAATEEDVTRLPSPTSPFSSLSQDQAATSKATLSSTSGLDLMSESGEGEISPQREVSRSQDQFSDMRISINQTPGKSLDFGFTIKWDIPGIFVASVEAGSPAEFSQLQVDDEIIAINNTKFSYNDSKEWEEAMAKAQETGHLVMDVRRYGKAGSPETKWIDATSGIYNSEKSSNLSVTTDFSESLQSSNIESKEINGIHDESNAFESKASESISLKNLKRRSQFFEQGSSDSVVPDLPVPTISAPSRWVWDQEEERKRQERWQKEQDRLLQEKYQREQEKLREEWQRAKQEAERENSKYLDEELMVLSSNSMSLTTREPSLATWEATWSEGSKSSDREGTRAGEEERRQPQEEVVHEDQGKKPQDQLVIERERKWEQQLQEEQEQKRLQAEAEEQKRPAEEQKRQAEIERETSVRIYQYRRPVDSYDIPKTEEASSGFLPGDRNKSRSTTELDDYS

SEQ ID NO: 47836 - protein, 444 aa, Homo sapiens
MSYTGFVQGSETTLQSTYSDTSAQPTCDYGYGTWNSGTNRGYEGYGYGYGYGQDNTTNYGYGMATSHSWEMPSSDTNANTSASGSASADSVLSRINQRLDMVPHLETDMMQGGVYGSGGERYDSYESCDSRAVLSERDLYRSGYDYSELDPEMEMAYEGQYDAYRDQFRMRGNDTFGPRAQGWARDARSGRPMASGYGRMWEDPMGARGQCMSGASRLPSLFSQNIIPEYGMFQGMRGGGAFPGGSRFGFGFGNGMKQMRRTWKTWTTADFRTKKKKRKQGGSPDEPDSKATRTDCSDNSDSDNDEGTEGEATEGLEGTEAVEKGSRVDGEDEEGKEDGREEGKEDPEKGALTTQDENGQTKRKLQAGKKSQDKQKKRQRDRMVESLAGARPLGSPDKADPVAQIRTSGRGSSLCVLCANTGPSMRTRWPAILTASSTRNTLST

SEQ ID NO: 47837 - protein, 45 aa, Homo sapiens
  MOD_RES (1)..(1): Any amino acid
XPVALVVHMAPASVLVDSRYQQWMERYGAQPSGTWGLGLTPSTWS

SEQ ID NO: 47838 - protein, 37 aa, Homo sapiens
MGKVNVAKLRYMSRDDFRVLTAVRNPPFLFSLPLNTV

SEQ ID NO: 47839 - protein, 70 aa, Homo sapiens
MAAQQRDCGGAAQLAGPAAEADPLGRFTCPVCLEVYEKPVQVPCGHVSSCPRSGPTWLLVPNTRITSWKV

SEQ ID NO: 47840 - protein, 109 aa, Homo sapiens
MNRTVLFLGTGDGQLLKVILGENLTSNCPEVIYEIKEETPVFYKLVPDPVKNIYIYLTAGKEVRRIRVANCNKHKSCSECLTATDPHCGWCHSLQRCTFQGDCVHSENL

SEQ ID NO: 47841 - protein, 271 aa, Homo sapiens
MPLRLDIKRKLTARSDRVKSVDLHPTEPWMLASLYNGSVCVWNHETQTLVKTFEVCDLPVRAAKFVARKNWVVTGADDMQIRVFNYNTLERVHMFEAHSDYIRCIAVHPTQPFILTSSDDMLIKLWDWDKKWSCSQVFEGHTHYVMQIVINPKDNNQFASASLDRTIKVWQLGSSSPNFTLEGHEKGVNCIDYYSGGDKPYLISGADDRLVKIWDYQNKTCVQTLEGHAQNVSCASFHPELPIIITGSEDGSIYIVLFRNSTYLAFKHLPA

SEQ ID NO: 47842 - protein, 184 aa, Homo sapiens
MSGIALSRLAQERKAWRKDHPFGFVAVPTKNPDGTMNLMNWECAIPGKKGTPWEGGLFKLRMLFKDDYPSSPPKCKFEPPLFHPNVYPSGTVCLSILEEDKDWRPAITIKQILLGIQELLNEPNIQDPAQAEAYTIYWLVAALAPLVAAPPRPSQGRLAGREWRTQAHPTDSQGPRLCGEGRGA

SEQ ID NO: 47843 - protein, 31 aa, Homo sapiens
MASKPEKRVASSVFITLAPPRRDVAVAEEVR

SEQ ID NO: 47844 - protein, 829 aa, Homo sapiens
MVPWVRTMGQKLKQRLRLDVGREICRQYPLFCFLLLCLSAASLLLNRYIHILMIFWSFVAGVVTFYCSLGPDSLLPNIFFTIKYKPKQLGLQELFPQGHSCAVCGKVKCKRHRPSLLLENYQPWLDLKISSKVDASLSEVDIPSIITKKLLKAAMKHIEVIVKARQKVKNTEFLQQAALEEYGPELHVALRSRRDELHYLRKLTELLFPYILPPKATDCRSLTLLIREILSGSVFLPSLDFLADPDTVNHLLIIFIDDSPPEKATEPASPLVPFLQKFAEPRNKKPSVLKLELKQIREQQDLLFRFMNFLKQEGAVHVLQFCLTVEEFNDRILRPELSNDEMLSLHEELQKIYKTYCLDESIDKIRFDPFIVEEIQRIAEGPYIDVVKLQTMRCLFEAYEHVLSLLENVFTPMFCHSDEIEEGIVVMEDDSPVEAVSTPNTPRNLAAWKISIPYVDFFEDPSSERKEKKERIPVFCIDVERNDRRAVGHEPEHWSVYRRYLEFYVLESKLTEFHGAFPDAQLPSKRIIGPKNYEFLKSKREEFQEYLQKLLQHPELSNSQLLADFLSPNGGETQFLDKILPDVNLGKIIKSVPGKLMKEKGQHLEPFIMNFINSCESPKPKPSRPELTILSPTSENNKKLFNDLFKNNANRAENTERKQNQNYFMEVMTVEGVYDYLMYVGRVVFQVPDWLHHLLMGTRILFKNTLEMYTDYYLQCKLEQLFQEHRLVSLITLLRDAIFCENTEPRSLQDKQKGAKQTFEEMMNYIPDLLVKCIGEETKYESIRLLFDGLQQPVLNKQLTYVLLDIVIQELFPELNKVQKEVTSVTSWM

SEQ ID NO: 47845 - protein, 458 aa, Homo sapiens
MGAKSMRSWCLCQICSCGRHHCPRGTTRIYENSGVFCPTTEYLEKYPMYDNVLPPQSLKAKQEIRACHGKMEGITTFKSDYCPYEIVKQPRHVPEEYKPKQGKIDLGTTYKRDLNSYKVQPVAIVRPLERQVKKGKLDTVPTYKDDYRAWDLHKSELYKPEQTYHPPTVKFGNSTTFQDDFVPQEIKPRQSFKPSSVVKRSTAPFNGITSHRLDYIPHQLELKFERPKEVYKPTDQRFEDLTTHRCDFQGLIGETAKLCRPVHTRVTQNALFEGSTEFRESFQPWEIPPPEVKKVPEYVPPTGSMLLNSTSHLDYVPYQANHVVPIRPVSQKRSNNFPFQGKSIMKEDFPAWESCRQGLIKKQQQIPNPSGKFDGLSTFRSHYVPHELIPTESCKPLNIAFKSSVPFDDVTMYSVEYTPKRQEICPASYPSPPGYIFDNTNSQGHKFFRKIIPAVKAF

SEQ ID NO: 47846 - protein, 134 aa, Homo sapiens
MSTNENANTPAARLHRFKNKGKDSTEMRRRRIEVNVELRKAKKDDQMLKRRNVSSFPDDATSPLQENRNNQGTVNWSVDDIVKGINSSNVENQLQATQAARKLLSREKQPPIDNIIRAGLIPKFVSFLGRTDCS

SEQ ID NO: 47847 - protein, 123 aa, Homo sapiens
  MOD_RES (1)..(1): Any amino acid
XDSKKVYASSGDGEVYVWDVNSRKCLNRFVDEGSLYGLSIATSRNGQYVACGSNCGVVNIYNQDSCLQETNPKPIKAIMNLVTGVTSLTFNPTTEILAIASEKMKEAVRLACCLNRTEAILGF

SEQ ID NO: 47848 - protein, 158 aa, Homo sapiens
MLGQKERQSQLLPCSTAPVAFISSFSSSSLHFPEPKNVKGVHGDLSPQGSRPRAPSGHLAPSPPAFDGELDLQRYSNGPAVSAGSLGMGAVSWSESRAGERRFPCPVCGKRFRFNSILALHLRAHPGAQAFQCPHCGHRAAQRALLRSHLRTHQPERP

SEQ ID NO: 47849 - protein, 170 aa, Homo sapiens
MVGSTPHFGDPCAGSPGPGGRGDPDGRGDPDGQGPELPRKDGADAVFPGPSLEPPAGSSGVKATGTLKRPTSLSRHASAAGFPLSGAASWTLGRSHRSPLTAASPGELPTEGAGPDVVEDISHLLADVARFAEGLEKLKECVLRDDLLEARRPRAHECLGEALRVMHQII

SEQ ID NO: 47850 - protein, 153 aa, Homo sapiens
TPLPLPQVLTDIWVQALPTSPKQGSLPDIQGPAAAPPLPEPSLTDTQVQKLTPSLEQKSLIDAHVPAATPLPERGGSLDIQGLSPTPVQTTMVLSKPGGSLASHVARNLWAFTGPRGLLMPPSTCEPGHEASLKQGFQPDAIDPQNLTWKSRH

SEQ ID NO: 47851 - protein, 40 aa, Homo sapiens
MTPQEIAVNLRPEQWPRVPDGGLTRDAQCLGNGLTQCCMW

SEQ ID NO: 47852 - protein, 141 aa, Homo sapiens
MDSTKEKCDSYKDDLLLRMGLNDNKAGMEGLDKEKINKIIMEATKGSRFYGNELKKEKQVNQRIENMMQQKAQITSQQLRKAQLQVDRFAMELEQSRNLSNTIVHIDMDAFYAAVEMRDNPELKDKPIAVGSMSMLSTSNY

SEQ ID NO: 47853 - protein, 1954 aa, Homo sapiens
  MOD_RES (1)..(1): Any amino acid
XDPAFSAVIHDKLQVPNTIRKAWNDRDNRCDICATHLNQLKQEAIQMVLTLEQAAGSEHYDASPCSPPPLSNIPTLVGSRHVGGLQQPRDWAFVPAPCATSNYTGFANKHGSKPSSLGVSNGAEKKSGSPTHQAKVSLQMATSPSNGNILNSVAIQAHQYLDGTWSLSRTNGVTLYPYQISQLMTESSREGLTEAVLNRYNADKPSACSVPASQGSCVASETSTGTSVAASFFARAAQKLNLSSKKKKHRPSTSSAAEPPLFATSFSGILQTSPPPAPPCLLRAVNKVKDTPGLGKVKVMLRICSTLARDTSESSSFLKVDPRKKQITLYDPLTCGGQNAFQKRGNQVPPKMFAFDAVFPQDASQAEVCAGTVAEVIQSVVNGADGCVFCFGHAKLGKSYTMIGKDDSMQNLGIIPCAISWLFKLINERKEKTGARFSVRVSAVEVWGKEENLRDLLSEVATGSLQDGQSPGVYLCEDPICGTQLQNQSELRAPTAEKAAFFLDAAIASRRSHQQDCDEDDHRNSHVFFTLHIYQYRMEKSGKGGMSGGRSRLHLIDLGSCVKALSKNREGGSGLCLSLSALGNVILALVNGSKHIPYKESKLAMLLRESLGNMNCRTTMIAHISAAVGSYAETLSTIQIASRVLRMKKKKTKYTSSSSGGESSCEEGRMRRPTQLRPFHTRATVDPDFPIAHLSSDPDYSSSSEQSCDTVIYIGPNGTALSDKELTDNEGPPDFVPIVPALQKTRGDSRPAEAGEAAAGKSERDCLKCNTFAELQERLDCIDGSEEPSSFPFEELPAQFGPEQASRGPRLSQAAGASPLSESDKEDNGSEGQLTNREGPELPASKMQRSHSPVPAAAPAHSPSPASPRSVPGSSSQHSASPLVQSPSLQSSRESLNSCGFVEGKPRPMGSPRLGIASLSKTSEYKPPSSPSQRCKVYTQKGVLPSPAPLPPSSKDSGVASRESLLQPEVRTPPVGMSPQVLKKSMSAGSEGFPETPVDDEQQAATPSESKKEILSTTMVTVQQPLELNGEDELVFTLVEELTISGVLDSGRPTSIISFNSDCSARALASGSRPVSIISSISEDLECYSSTAPVSEVSITQFLPLPKMSLDEKAQDAGSRRSSISSWLSEMSAGSEGEQSCHSFIAQTCFGHGEAMAEPVASEFVSSLQNTAVVCREKPKASPDNLLILSEMGDDSFNKAAPIKGCKISTVSKAMVTISNTANLSSCEGYIPMKTNITVYPCIAMSPRNIQEPEAPTATPKAGPTLAQSRESKENSAKKEMKFEDPWLKREEEVKKETAHPNEEGMMRCETATGPSNAETRAEQEQDGKPSPGDRLSSSSGEVSASPVTDNFRRVVDGCEMALPGLATQSPVHPNKSVKSSSLPRAFQKASRQEEPDSLSYYCAAETNGVGAASGTPPSKATLEGKVASPKHCVLARPKGTPPLPPVRKSSLDQKNRASPQHSASGSGTSSPLNQPAAFPAGLPDEPSGKTKDASSSSKLFSAKLEQLASRSNSLGRATVSHYECLSLERAESLSSVSSRLHAGKDGTMPRAGRSLGRSAGTSPPSSGASPKAGQSKISAVSRLLLASPRARGPSASTTKTLSFSTKSLPQAVGQGSSSPPGGKHTPWSTQSLSRNRSSGLASKLPLRAVSGRISELLQGGAGARGLQLRAGPEAEARGGALAEDEPAAAHLLPSPYSKITPPRRPHRCSSGHGSDNSSVLSGELPPAMGKTALFYHSGGSSGYESVMRDSEATGSASSAQDSTSENSSSVGGRCRSLKTPKKRSNPGSQRRRLIPALSLDTSSPVRKPPNSTGVRWVDGPLRSSPRGLGEPFEIKVYEIDDVERLQRRRGGASKEAMCFNAKLKILEHRQQRIAEVRAKYEWLMKELEATKQYLMLDPNKWLSEFDLEQVWELDSLEYLEALECVTERLESRVNFCKAHLMMITCFDITSRRR

SEQ ID NO: 47854 - protein, 73 aa, Homo sapiens
MNLIQGKSIPRCRRINRMLSNESLHPPAFSRSNSEASVDSASMEDFWREIESIKDSSMGGQEEPPPAEVTPVD

SEQ ID NO: 47855 - protein, 739 aa, Homo sapiens
MSDPRQSQEEKHKLGRASSKFKDPPRIMQSDDYFARKFKAINGNMGPTTSLNASNSNETGGGGPANGTPAVPKMGVRARVSEWPPKKDCSKELTCKALWESRSQTSYESITSVLQNGQSDQSEGQQDEQLDLDFVEAKYTIGDIFVHSPQRGLHPIRQRSNSDVTISDIDAEDVLDQNAVNPNTGAALHREYGSTSSIDRQGLSGENFFAMLRGYRVENYDHKAMVPFGFPEFFRCDPAISPSLHAAAQISRGEFVRISGLDYVDSALLMGRDRDKPFKRRLKSESVETSLFRKLRTVKSEHETFKFTSELEESRLERGIRPWNCQRCFAHYDVQSILFNINEAMATRANVGKRKNITTGASAASQTQMPTGQTGNCESPLGSKEDLNSKENLDADEGDGKSNDLVLSCPYFRNETGGEGDRRIALSRANSSSFSSGESCSFESSLSSHCTNAGVSVLEVPRENQPIHREKVKRYIIEHIDLGAYYYRKFFYGKEHQNYFGIDENLGPVAVSIRREKVEDAKEKEGSQFNYRVAFRTSELTTLRGAILEDAIPSTARHGTARGLPLKEVLEYVIPELSIQCLRQASNSPKVSEQLLKLDEQGLSFQHKIGILYCKAGQSTEEEMYNNETAGPAFEEFLDLLGQRVRLKGFSKYRAQLDNKTDSTGTHSLYTTYKDYELMFHVSTLLPYMPNNRQQCWSFQIKRCATIWPTDSQRCNFSKVSRVPGLPFSQSNQCRKCSP

SEQ ID NO: 47856 - protein, 979 aa, Homo sapiens
MPAIMTMLADHAARQLLDFSQKLDINLLDNVVNCLYHGEGAQQRMAQEVLTHLKEHPDAWTRVDTILEFSQNMNTKYYGLQILENVIKTRWKILPRNQCEGIKKYVVGLIIKTSSDPTCVEENSQNAPLVHATLETLLRFLNWIPLGYIFETKLISTLIYKFLNVPMFRNVSLKCLTEIAGVSVSQYEEQFVTLFTLTMMQLKQMLPLNTNIRLAYSNGKDDEQNFIQNLSLFLCTFLKEHDQLIEKRLNLRETLMEALHYMLLVSEVEETEIFKICLEYWNHLAAELYRESPFSTSASPLLSGSQHFDVPPRRQLYLPMLFKVRLLMVSRMAKPEEVLVVENDQGEVVREFMKDTDSINLYKNMRETLVYLTHLDYVDTERIMTEKLHNQVNGTEWSWKNLNTLCWAIGSISGAMHEEDEKRFLVTVIKDLLGLCEQKRGKDNKAIIASNIMYIVGQYPRFLRAHWKFLKTVVNKLFEFMHETHDGVQDMACDTFIKIAQKCRRHFVQVQVGEVMPFIDEILNNINTIICDLQPQQVHTFYEAVGYMIGAQTDQTVQEHLIEKYMLLPNQVWDSIIQQATKNVDILKDPETVKQLGSILKTNVRACKAVGHPFVIQLGRIYLDMLNVYKCLSENISAAIQANGEMVTKQPLIRSMRTVKRETLKLISGWVSRSNDPQMVAENFVPPLLDAVLIDYQRNVPAAREPEVLSTMAIIVNKLGGHITAEIPQIFDAVFECTLNMINKDFEEYPEHRTNFFLLLQAVNSHCFPAFLAIPPTQFKLVLDSIIWAFKHTMRNVADTGLQILFTLLQNVAQEEAAAQSFYQTYFCDILQHIFSVVTDTSHTAGLTMHASILAYMFNLVEEGKISTSLNPGNPVNNQIFLQEYVANLLKSAFPHLQDAQVKLFVTGLFSLNQDIPAFKEHLRDFLVQIKEFAGEDTSDLFLEEREIALRQADEEKHKRQMSVPGIFNPHEIPEEMCD

SEQ ID NO: 47857 - protein, 434 aa, Homo sapiens
GIPLLWPCLGATENSQTKKVKQPVRSHLRVKRGWVWNQFFVPEEMNTTSHHIGQLRSDLDNGNNSFQYKLLGAGAGSTFIIDERTGDIYAIQKLDREERSLYILRAQVIDIATGRAVEPESEFVIKVSDINDNEPKFLDEPYEAIVPEMSPEGTLVIQVTASDADDPSSGNNARLLYSLLQGQPYFSVEPTTGVIRISSKMDRELQDEYWVIIQAKDMIGQPGALSGTTSVLIKLSDVNDNKPIFKESLYRLTVSESAPTGTSIGTIMAYDNDIGENAEMDYSIEEDDSQTFDIITNHETQEGIVILKKKVDFEHQNHYGIRAKVKNHHVPEQLMKYHTEASTTFIKIQVEDVDEPPLFLLPYYVFEVFEETPQGSFVGVVSATDPDNRKSPIRYSITRSKVFNINDNGTITTSNSLDREISAWYNLSITATEK

SEQ ID NO: 47858 - protein, 89 aa, Homo sapiens
MLREEAAQKRKGKEPGMALPQGRLTFRDVAIEFSLAEWKCLNPSQRALYREVMLENYRNLEAVESHFVTQAGVQWCDPGSLQPLPPRFK

SEQ ID NO: 47859 - protein, 304 aa, Homo sapiens
ETLSGLAKNATDLQNSSMSEEELTKAMEGLGMDEGDGEGNILPIMQSIMQNLLSKDVLYPSLKEITEKYPEWLQSHRESLPPEQFEKYQEQHSVMCKICEQFEAETPTDSETTQKARFEMVLDLMQQLQDLGHPPKELAGEMLTWLFFCGSQWVYGPWLTYVETGFTMLAWFQTSFELLTSSDPPTSASQSARITGMSHRARPDLTFLKSTLAALCLTVMAIMEVDKRGSLSSSPEEMSGAEEGRETSSGIEVEASDLSLSLTGDDGGPNRTSTESRGTDTESSGEDKDSDSMEDTGHYSINDE

SEQ ID NO: 47860 - protein, 85 aa, Homo sapiens
MGRSTFLRGSRDNGPDGMEPEGVIESNWNEIVDSFDDMNLSESLLRGIYAYGFEKPSAIQQRAILPCIKGYDVIAQAQSGTGKTA

SEQ ID NO: 47861 - protein, 265 aa, Homo sapiens
MASGILVNVKEEVTCPICLELLTQPLSLDCGHSFCQACLTANHKKSMLDKGESSCPVCRISYQPENIRPNRHVANIVEKLREVKLSPEGQKVDHCARHGEKLLLFCQEDGKVICWLCERSQEHRGHHTFLTEEVAREYQVKLQAALEMLRQKQQEAEELEADIREEKASWKTQIQYDKTNVLADFEQLRDILDWEESNELQNLEKEEEDILKSLTNSETEMVQQTQSLRELISDLEHRLQGSVMELLQGVDGVIKRADRCPTLLG

SEQ ID NO: 47862 - protein, 1223 aa, Homo sapiens
MARAKLPRSPSEGKAGPGGAPAGAAAPEEPHGLSPLLPARGGGSVGSDVGQRVQVEFYVNENTFKERLKLFFIKNQRSSLRIRLFNFSLKLLTCLLYIVRVLLDDPALGIGCWGCPKQNYSFNDSSSEINWAPILWVERKMTLWAIQVIVAIISFLETMLLIYLSYKGNIWEQIFRVSFVLEMINTLPFIITIFWPPLRNLFIPVFLNCWLAKHALENMINDFHRAILRTQSAMFNQVLILFCTLLCLVFTGTCGIQHLERAGENLSLLTSFYFCIVTFSTVGYGDVTPKIWPSQLLVVIMICVALVVLPLQFEELVYLWMERQKSGGNYSRHRAQTEKHVVLCVSSLKIDLLMDFLNEFYAHPRLQDYYVVILCPTEMDVQVRRVLQIPLWSQRVIYLQGSALKDQDLMRAKMDNGEACFILSSRNEVDRTAADHQTILRAWAVKDFAPNCPLYVQILKPENKFHVKFADHVVCEEECKYAMLALNCICPATSTLITLLVHTSRGQEGQESPEQWQRMYGRCSGNEVYHIRMGDSKFFREYEGKSFTYAAFHAHKKYGVCLIGLKREDNKSILLNPGPRHILAASDTCFYINITKEENSAFIFKQEEKRKKRAFSGQGLHEGPARLPVHSIIASMGTVAMDLQGTEHRPTQSGGGGGGSKLALPTENGSGSRRPSIAPVLELADSSALLPCDLLSDQSEDEVTPSDDEGLSVVEYVKGYPPNSPYIGSSPTLCHLLPVKAPFCCLRLDKGCKHNSYEDAKAYGFKNKLIIVSAETAGNGLYNFIVPLRAYYRSRKELNPIVLLLDNKPDHHFLEAICCFPMVYYMEGSVDNLDSLLQCGIIYADNLVVVDKESTMSAEEDYMADAKTIVNVQTMFRLFPSLSITTELTHPSNMRFMQFRAKDSYSLALSKLEKRERENGSNLAFMFRLPFAAGRVFSISMLDTLLYQSFVKDYMITITRLLLGLDTTPGSGYLCAMKITEGDLWIRTYGRLFQKLCSSSAEIPIGIYRTESHVFSTSEPHDLRAQSQISVNVEDCEDTREVKGPWGSRAGTGGSSQGRHTGGGDPAEHPLLRRKSLQWARRLSRKAPKQAGRAAAAEWISQQRLSLYRRSERQELSELVKNRMKHLGLPTTGYEDVANLTASDVMNRVNLGYLQDEMNDHQNTLSYVLINPPPDTRLEPSDIVYLIRSDPLAHVASSSQSRKSSCSHKLSSCNPETRDETQL

SEQ ID NO: 47863 - protein, 115 aa, Homo sapiens
  MOD_RES (1)..(1): Any amino acid
XRMLVPGRPVKDATPPPVPAERPSYKEKFIPPELSMWDYFVAKPFLPLSDSGVIYDSDESIHSDEEDDAFFSDTQIQEHQDPNSYSWALLHLTMVKLALHNVKNFFPIAGLEFSG

SEQ ID NO: 47864 - protein, 83 aa, Homo sapiens
MPFTLHLRSRLPSAIRSLILQKKPNIRNTSSMAGELRPASLVVLPRSLAPAFERFCQVNTGPLPLLGQSEPEKWMLPPQGAIS

SEQ ID NO: 47865 - protein, 79 aa, Homo sapiens
MTVPWRPGKRRITYKEEEDLTLQPRSCLQCSESLVGLQEGKSTEQGNHDQLKELYSFDCNPGVRGREDKCGLCVCELPE

SEQ ID NO: 47866 - protein, 1439 aa, Homo sapiens
MSLLMFTQLLLCGFLYVRVDGSRLRQEDFPPRIVEHPSDVIVSKGEPTTLNCKAEGRPTPTIEWYKDGERVETDKDDPRSHRMLLPSGSLFFLRIVHGRRSKPDEGSYVCVARNYLGEAVSRNASLEVALLRDDFRQNPTDVVVAAGEPAILECQPPRGHPEPTIYWKKDKVRIDDKEERISIRGGKLMISNTRKSDAGMYTCVGTNMVGERDSDPAELTVFERPTFLRRPINQVVLEEEAVEFRCQVQGDPQPTVRWKKDDADLPRGRYDIKDDYTLRIKKTMSTDEGTYMCIAENRVGKMEASATLTVRAPPQFVVRPRDQIVAQGRTVTFPCETKGNPQPAVFWQKEGSQNLLFPNQPQQPNSRCSVSPTGDLTITNIQRSDAGYYICQALTVAGSILAKAQLEVTDVLTDRPPPIILQGPANQTLAVDGTALLKCKATGDPLPVISWLKEGFTFPGRDPRATIQEQGTLQIKNLRISDTGTYTCVATSSSGETSWSAVLDVTESGATISKNYDLSDLPGPPSKPQVTDVTKNSVTLSWQPGTPGTLPASAYIIEAFSQSVSNSWQTVANHVKTTLYTVRGLRPNTIYLFMVRAINPQGLSDPSPMSDPVRTQDISPPAQGVDHRQVQKELGDVLVRLHNPVVLTPTTVQVTWTVDRQPQFIQGYRVMYRQTSGLQATSSWQNLDAKVPTERSAVLVNLKKGVTYEIKVRPYFNEFQGMDSESKTVRTTEEAPSAPPQSVTVLTVGSYNSTSISVSWDPPPPDHQNGIIQEYKIWCLGNETRFHINKTVDAAIRSVIIGGLFPGIQYRVEVAASTSAGVGVKSEPQPIIIGRRNEVVITENNNSITEQITDVVKQPAFIAGIGGACWVILMGFSIWLYWRRKKRKGLSNYAVTFQRGDGGLMSNGSRPGLLNAGDPSYPWLADSWPATSLPVNNSNSGPNEIGNFGRGDVLPPVPGQGDKTATMLSDGAIYSSIDFTTKTSYNSSSQITQATPYATTQILHSNSIHELAVDLPDPQWKSSIQQKTDLMGFGYSLPDQNKGNNGGKGGKKKKNKNSSKPQKNNGSTWANVPLPPPPVQPLPGTELEHYAVEQQENGYDSDSWCPPLPVQTYLHQGLEDELEEDDDRVPTPPVRGVASSPAISFGQQSTATLTPSPREEMQPMLQAHLDELTRAYQFDIAKQTWHIQSNNQPPQPPVPPLGYVSGALISDLETDVADDDADDEEEALEIPRPLRALDQTPGSSMDNLDSSVTGSMVNGWGSASDEDRNFSSHRSSVGSSSDGSIFASGSFAQALVAAADKAGFRLDGTSLTRTGKAFTSSQRPRPTSPFSTDSNTSAALSQSQRPRPTKKHKGGRMDQQPALPHRREGMTDEEALVPYSKPSFPSPGGHSSSGTASSKGSTGPRKTEVLRAGHQRNASDLLDIGYMGSNSQGQFTGEL

SEQ ID NO: 47867 - protein, 17 aa, Homo sapiens
MLILMTSLAWDPTTLRY

SEQ ID NO: 47868 - protein, 910 aa, Homo sapiens
  MOD_RES (1)..(1): Any amino acid
XNPLIAGISNVLNTPSSAAFPTASAGSSSVKSQPGLLGMPLNQILNQHNAASFPASSLLSAAAKAQLANQNKLAGNNSSSSSNSGAVAGSGNTEGHSTLNTMFPPTANMLLPTGEGQSGRAALRDKLMSQQKDALRKRKQPPTTVLSLLRQSQMDSSAVPKPGPDLLRKQGQGSFPISSMSQLLQSMSCQSSHLSSNSTPGCGASNTALPCSANQLHFTDPSMNSSVLQNIPLRGEAVHCHNANTNFVHSNSPVPNHHLAGLINQIQASGNCGMLSQSGMALGNSLHPNPPQSRISTSSTPVIPNSIVSSYNQTSSEAGGSGPSSSIAIAGTNHPAITKTTSVLQDGVIVTTAAGNPLQSQLPIGSDFPFVGQEHALHFPSNSTSNNHLPHPLNPSLLSSLPISLPVNQQHLLNQNLLNILQPSAGEGDMSSINNTLSNHQLTHLQSLLNNNQMFPPNQQQQQLLQGYQNLQAFQGQSTIPCPANNNPMACLFQNFQVRMQEDAALLNKRISTQPGLTALPENPNTTLPPFQDTPCELQPRIDPSLGQQVKDGLVVGGPGDASVDAIYKAVVDAASKGMQVVITTAVNSTTQISPIPALSAMSAFTASIGDPLNLSSAVSAVIHGRNMGGVDHDGRLRNSRGARLPKNLDHGKNVNEGDGFEYFKSASCHTSKKQWDGEQSPRGERNRWKYEEFLDHPGHIHSSPCHERPNNVSTLPFLPGEQHPILLPPRNCPGDKILEENFRYNNYKRTMMSFKERLENTVERCAHINGNRPRQSRGFGELLSTAKQDLVLEEQSPSSSNSLENSLVKDYIHYNGDFNAKSVNGCVPSPSDAKSISSEDDLRNPDSPSSNELIHYRPRTFNVGDLVWGQIKGLTSWPGKLVREDDVHNSCQQSPEEGKVYQSLSIVKY

SEQ ID NO: 47869 - protein, 500 aa, Homo sapiens
MSKGPAVGIDLGTTYSCVGVFQHGKVEIIANDQGNRTTPSYVAFTDTERLIGDAAKNQVAMNPTNTVFDAKRLIGRRFDDAVVQSDMKHWPFMVVNDAGRPKHKKDISENKRAVRRLRTACERAKRTLSSSTQASIEIDSLYEGIDFYTSITRARFEELNADLFRGTLDPVEKALRDAKLDKSQIHDIVLVGGSTRIPKIQKLLQDFFNGKELNKSINPDEAVAYGAAVQAAILSGDKSENVQDLLLLDVTPLSLGIETAGGVMTVLIKRNTTIPTKQTQTFTTYSDNQPGVLIQVYEGERAMTKDNNLLGKFELTGIPPAPRGVPQIEVTFDIDANGILNVSAVDKSTGKENKITITNDKGRLSKEDIERMVQEAEKYKAEDEKQRDKVSSKNSLESYAFNMKATVEDEKLQGKINDEDKQKILDKCNEIINWLDKNQTAEKEEFEHQQKELEKVCNPIITKLYQSAGGMPGGMPGGFPGGGAPPSGGASSGPTIEEVD

SEQ ID NO: 47870 - protein, 122 aa, Homo sapiens
MATNFSDIVKQGYVKMKSRKLGIYRRCWLVFRKSSSKGPQRLEKYPDEKSVCLRGCPKVTEISNVKCVTRLPKETKRQAVAIIFTDDSARTFTCDSELEAEEWYKTLSVECLGSRLNDISLG

SEQ ID NO: 47871 - protein, 172 aa, Homo sapiens
GLTKEGEKTSYVLTDRLGERDPRSLTLYVEVACNGLLGAGKGSMIAAPDPEKMFQLSRAELAVFHRDVHMLLVDLELLLGIAKGLGKDNQRSFQALYTANQMVNVCDPAQPETFPVAQALASRFFGQHGGESQHTIHATGHCHIDTAPEGIDSDAAEVLGSQNKGFLCCAKM

SEQ ID NO: 47872 - protein, 1595 aa, Homo sapiens
MTTETGPDSEVKKAQEEAPQQPEAAAAVTTPVTPAGHGHPEANSNEKHPSQQDTRPAEQSLDMEEKDYSEADGLSERTTPSKAQKSPQKIAKKYKSAICRVTLLDASEYECEVEKHGRGQVLFDLVCEHLNLLEKDYFGLTFCDADSQKNWLDPSKEIKKQIRSSPWNFAFTVKFYPPDPAQLTEDITRYYLCLQLRADIITGRLPCSFVTHALLGSYAVQAELGDYDAEEHVGNYVSELRFAPNQTRELEERIMELHKTYRGMTPGEAEIHFLENAKKLSMYGVDLHHAKDSEGIDIMLGVCANGLLIYRDRLRINRFAWPKILKISYKRSNFYIKIRPGEYEQFESTIGFKLPNHRSAKRLWKVCIEHHTFFRLVSPEPPPKGFLVMGSKFRYSGRTQAQTRQASALIDRPAPFFERSSSKRYTMSRSLDGAEFSRPASVSENHDAGPDGDKRDEDGESGGQRSEAEEGEVRTPTKIKELKPEQETTPRHKQEFLDKPEDVLLKHQASINELKRTLKEPNSKLIHRDRDWERERRLPSSPASPSPKGTPEKANESQRTQDISQRDLVPEPGAAAGLEVFTQKSLAASPEGSEHWVFIEREYTRPEELGLLKVTTMQQEERQAGLAGILANGRLSKVDVLVDKFKVEVATEEMVGNRRANTQQQGKMIASPEDFESVGEEGPWIRESPGGAALASGRTLAEKLLEGSELRADTREATIRNRCMSDGQPEGQTELRKGLEEPHTCGRPTAPGTRPAEVDVLSPASDKGGLQSFLLDPAHAEARAELSNETDTSFAERSFYLNYEEKDSEDQVLPPPLEERKGRLDAPPGGEPRPTLNSLDLRVSAAASSRSKDEAHMTSPKEGAGTPKNHGGPGDLKGSPAGQTFAEGWEDAQWGVEGEFPHLTASAAREEGTPVSGDLLGKAEESPTEELKKHPPHRGQGVHPDPQACALPRAIPLNVRKPVKPDRGNFPPKERGVVPTQKGGAELKDREASAFLHMEVIIPLPASPGHSEDLAALEEASPSPTSHGSGEPSELREPFLRHVHLSKASPEPKDQVGFVVSPATGGERRPPPITSRKPRVVPEEAEGRIPLGFGFPSGKRREMTSFQAGDQEGSLEDISKTSVANKIRIFETHGAETRRMSEGEARSLPNDVSSEAPVGQAEQQRSTLSDLGFAQLQPPGDFASPKATHSTVIPLATRHFREDTSASYQEAHTELEPVSPNSGCETTLAEATGTGNKSGDAVREEKRSTNLAANTPGKGGRLRFASPSGPQRAGLREGSEEKVKPPRPRAPESDTGDEDQDQERDTVFLKDNHLAIERKCSSITVSSTSSLEAEVDFTVIGDYHGSAFEDFSRSLPELDRDKSDSDTEGLLFSRDLNKGAPSQDDESGGIEDSPDRGACSTPDMPQFEPVKTETMTVSSLAIRKKIEPEAVLQTRVSAMDNTQVDGSASVGREFIATTPSITTETISTTMENSLKSGKGAAAMIPGPQTVATEIRSLSPIIGKDVLTSTYGATAETLSTSTTTHVTKTVKGGFSETRIEKRIIITGDEDVDQDQALALAIKEAKLQHPDMLVTKAVVYRETDPSPEERDKKPQES

SEQ ID NO: 47873 - protein, 85 aa, Homo sapiens
MKGSNRNKDHSAEGEGVGKRPKRKCLQWHPLLAKKLLDFSEEEEEEDEEEDIDKVQLLGADGLEQDVGETEDDESPEQRARRPMN

SEQ ID NO: 47874 - protein, 82 aa, Homo sapiens
MASQPPEDTAESQASDELECKICYNRYNLKQRKPKVLECCHRVCAKCLYKIIDFGDSPQGVIVCPFCRFETCLPDDEVSSLP

SEQ ID NO: 47875 - protein, 321 aa, Homo sapiens
MESRVLLRTFCLIFGLGAVWGLGVDPSLQIDVLTELELGESTTGVRQVPGLHNGTKAFLFQDTPRSIKASTATAEQFFQKLRNKHEFTILVTLKQTHLNSGVILSIHHLDHRYLELESSGHRNEVRLHYRSGSHRPHTEVFPYILADDKWHKLSLAISASHLILHIDCNKIYERVVEKPSTDLPLGTTFWLGQRNNAHGYFKGIMQDVQLLVMPQGFIAQCPDLNRTCPTCNDFHGLVQKIMELQDILAKTSAKLSRAEQRMNRLDQCYCERTCTMKGTTYREFESWIDGCKNCTCLNGTIQCETLICPNPDCPLKSALAY

SEQ ID NO: 47876 - protein, 1089 aa, Homo sapiens
MSSQSHPDGLSGRDQPVELLNPARVNHMPSTVDVATALPLQVAPSAVPMDLRLDHQFSLPVAEPALREQQLQQELLALKQKQQIQRQILIAEFQRQHEQLSRQHEAQLHEHIKQQQEMLAMKHQQELLEHQRKLERHRQEQELEKQHREQKLQQLKNKEKGKESAVASTEVKMKLQEFVLNKKKALAHRNLNHCISSDPRYWYGKTQHSSLDQSSPPQSGVSTSYNHPVLGMYDAKDDFPLRKTASEPNLKLRSRLKQKVAERRSSPLLRRKDGPVVTALKKRPLDVTDSACSSAPGSGPSSPNNSSGSVSAENGIAPAVPSIPAETSLAHRLVAREGSAAPLPLYTSPSLPNITLGLPATGPSAGTAGQQDAERLTLPALQQRLSLFPGTHLTPYLSTSPLERDGGAAHSPLLQHMVLLEQPPAQAPLVTDWYLSGLGALPLHAQSLVGADRVSPSIHKLRQHRPLGRTQSAPLPQNAQALQHLVIQQQHQQFLEKHKQQFQQQQLQMNKIIPKPSEPARQPESHPEETEEELREHQALLDEPYLDRLPGQKEAHAQAGVQVKQEPIESDEEEAEPPREVEPGQRQPSEQELLFRQQALLLEQQRIHQLRNYQASMEAAGIPVSFGGHRPLSRAQSSPASATFPVSVQEPPTKPRFTTGLVYDTLMLKHQCTCGSSSSHPEHAGRIQSIWSRLQETGLRGKCECIRGRKATLEELQTVHSEAHTLLYGTNPLNRQKLDSKKLLGSLASVFVRLPCGGVGVDSDTIWNEVHSAGAARLAVGCVVELVFKVATGELKNGFAVVRPPGHHAEESTPMGFCYFNSVAVAAKLLQQRLSVSKILIVDWDVHHGNGTQQAFYSDPSVLYMSLHRYDDGNFFPGSGAPDEVGTGPGVGFNVNMAFTGGLDPPMGDAEYLAAFRTVVMPIASEFAPDVVLVSSGFDAVEGHPTPLGGYNLSARCFGYLTKQLMGLAGGRIVLALEGGHDLTAICDASEACVSALLGNELDPLPEKVLQQRPNANAVRSMEKVMEIHSKYWRCLQRTTSTAGRSLIEAQTCENEEAETVTAMASLSVGVKPAEKRPDEEPMEEEPPL

SEQ ID NO: 47877 - protein, 306 aa, Homo sapiens
MTAREHSPRHGARARAMQRASTIDVAADMLGLSLAGNIQDPDEPILEFSLACSELHTPSLDRKPNSFVAVSVTTPPQATSSASADMLPVITGNRDGFNVRVPLPGPLFDALPREIQSGMLLRVQPVLFNVGINEQQTLAERFGDTSLQEVINVESLVRLNSYFEQFKEVLPEDCLPRSRSQTCLPELLRFLGQNVHARKNKNVDILWQAAEICRRLNGVRFTSCKSAKDRTAMSVTLEQCLILQHEHGMAPQVFTQALECMRSEGCRRENTMKNVGSRKYAFNSLQLKAFPKHYRPPEGTYGKVET

SEQ ID NO: 47878 - protein, 588 aa, Homo sapiens
MKSDCMQTTICQERKKDPIEMFHSGQLVKVCAPMVRYSKLAFRTLVRKYSCDLCYTPMIVAADFVKSIKARDSEFTTNQGDCPLIVQFAANDARLLSDAARIVCPYANGIDINCGCPQRWAMAEGYGACLINKPELVQDMVKQVRNQVETPGFSVSIKIRIHDDLKRTVDLCQKAEATGVSWITVHGRTAEERHQPVHYDSIKIIKENMSIPVIANGDIRSLKEAENVWRITGTDGVKKKMTLQWAAVATFLYAEIGLILIFCLPFIPPQRWQKIFSFNVWGKIATFWNKAFLTIIILLIVLFLDAVREVRKYSSVHTIEKSSTSRPDAYEHTQMKLFRSQRNLYISGFSLFFWLVLRRLVTLITQLAKELSNKGVLKTQAENTNKAAKKFMEENEKLKRILKSHGKDEECVLEAENKKLVEDQEKLKTELRKTSDALSKAQNDVMEMKMQSERLSKEYDQLLKEHSELQHSSFGEFLSKRSHKNGSIGKQTGSRKGSFRKRQQEKTVNFIKDTCNILCQNDNFVMLASRKFKFRKMHYDRFVIFLMPHIGCIVMALSKYLMMFQIYCKVCIPALKKNISMLNTIFTY

SEQ ID NO: 47879 - protein, 90 aa, Homo sapiens
MTPQSLLQTTLFLLSLLFLVQAPATGSHLQPLPPQVPTAGATGKTFASAASGTRHTGAASTTNPHQTCASPSRTPKRPSQSMPLSLQPTL

SEQ ID NO: 47880 - protein, 1048 aa, Homo sapiens
MDSQELKTLINYYCQERYFHHVLLVASEGIKRYGSDPVFRFYHAYGTLMEGKTQEALREFEAIKNKQDVSLCSLLALIYAHKMSPNPDREAILESDARVKEQRKGAGEKALYHAGLFLWHIGRHDKAREYIDRMIKISDGSKQGHVLKAWLDITRGKEPYTKKALKYFEEGLQDGNDTFALLGKAQCLEMRQNYSGALETVNQIIVNFPSFLPAFVKKMKLQLALQDWDQTVETAQRLLLQDSQNVEALRMQALYYVCREGDIEKASTKLENLGNTLDAMEPQNAQLFYNITLAFSRTCGRSQLILQKIQTLLERAFSLNPQQSEFATELGYQMILQGRVKEALKWYKTAMTLDETSVSALVGFIQCQLIEGQLQDADQQLEFLNEIQQSIGKSAELIYLHAVLAMKKNKRQEEVINLLNDVLDTHFSQLEGLPLGIQYFEKLNPDFLLEIVMEYLSFCPMQPASPGQPLCPLLRRCISVLETVVRTVPGLLQTVFLIAKVKYLSGDIEAAFNNLQHCLEHNPSYADAHLLLAQVYLSQEKVKLCSQSLELCLSYDFKVRDYPLYHLIKAQSQKKMGEIADAIKTLHMAMSLPGMKRIGASTKSKDRKTEVDTSHRLSIFLELIDVHRLNGEQHEATKVLQDAIHEFSGTSEEVRVTIANADLALAQGDIERALSILQNVTAEQPYFIEAREKMADIYLKHRKDKMLYITCFREIAERMANPRSFLLLGDAYMNILEPEEAIVAYEQALNQNPKDGTLASKMGKALIKTHNYSMAITYYEAALKTGQKNYLCYDLAELLLKLKWYDKAEKVLQHALAHEPVNELSALMEDGRCQVLLAKVYSKMEKLGDAITALQQARELQARVLKRVQMEQPDAVPAQKHLAAEICAEIAKHSVAQRDYEKAIKFYREALVHCETDNKIMLELARLYLAQDDPDSCLRQCALLLQSDQDNEAATMMMADLMFRKQDYEQAVFHLQQLLERKPDVENSRMSQDFSQWLRNVTPEQNWNQDFSIVKDCIFGTLENQMMPFDILIKLGKIVTGAKMPFII

SEQ ID NO: 47881 - protein, 64 aa, Homo sapiens
LYMYQLFRSLAYIHSFGICHRDIKPQNLLLDPDTAVLKLCDFGSWSEENPMFRISVLGTIGHQS

SEQ ID NO: 47882 - protein, 507 aa, Homo sapiens
MSGGEQKPERYYVGVDVGTGSVRAALVDQSGVLLAFADQPIKNWEPQFNHHEQSSEDIWAACCVVTKKVVQGIDLNQIRGLGFDATCSLVVLDKQFHPLPVNQEGDSHRNVIMWLDHRAVSQVNRINETKHSVLQYVGGVMSVEMQAPKLLWLKENLREICWDKAGHFFDLPDFLSWKATGVTARSLCSLVCKWTYSAEKGWDDSFWKMIGLEDFVADNYSKIGNQVLPPGASLGNGLTPEAARDLGLLPGIAVAASLIDAHAGGLGVIGADVRGHGLICEGQPVTSRLAVICGTSSCHMGISKDPIFVPGVWGPYFSAMVPGFWLNEGGQSVTGKLIDHMVQGHAAFPELQVKATARCQSIYAYLNSHLDLIKKAQPVGFLTVDLHVWPDFHGNRSPLADLTLKGMVTGLKLSQDLDDLAILYLATVQAIALGTRFIIEAMEAAGHSISTLFLCGGLSKNPLFVQMHADITGMPVVLSQEVESVLVGAAVLGACASGDFASVQWGK

SEQ ID NO: 47883 - protein, 305 aa, Homo sapiens
MKVLNELYSVMKTYHMYNADSISAQSKLKEAEKQEEKQIGKSVKQEDRQTPRSPDSTANVRIEEKHVRRSSVKKIEKMKEKRQAKYTENKLKAIKARNEYLLALEATNASVFKYYIHDLSDLIDCCDLGYHASLNRALRTFLSAELNLEQSKHEGLDAIENAVENLDATSDKQRLMEMYNNVFCPPMKFEFQPHMGDMASQLCAQQPVQSELVQRCQQLQSRLSTLKIENEEVKKTMEATLQTIQDIVTVEDFDVSDCFQYSNSMESVKSTVSETFMSKPSIAKRRANQQETEQFYFTVRECYGF

SEQ ID NO: 47884 - protein, 36 aa, Homo sapiens
MNNETTTLISLKEAMKRLLRAIGREQAWVCYSGKME

SEQ ID NO: 47885 - protein, 189 aa, Homo sapiens
MQPMSFGWDHSLHKRKRLPPVKRSLVYYLKNREVRLQNETSYSRVLHGYAAQQLPSLLKEREFHLGTLNKVFASQWLNHRQVVCGTKCNTLFVVDVQTSQITKIPILKDREPGGVTQQGCGIHAIELNPSRTLLATGGDNPNSLAIYRLPTLDPVCVGDDGHKDWIFSIAWISDTMAVSGSRDGSMGLW

SEQ ID NO: 47886 - protein, 79 aa, Homo sapiens
  MOD_RES (1)..(1): Any amino acid
XRLHTRGAAEMVLQMISACKGETGAMVSSTLKLGISILNGGNAEVQQKMLDYLKDKKEVGFFQSIQALMQTCRREGHGG

SEQ ID NO: 47887 - protein, 1374 aa, Homo sapiens
MALRGFCSADGSDPLWDWNVTWNTSNPDFTKCFQNTVLVWVPCFYLWACFPFYFLYLSRHDRGYIQMTPLNKTKTALGFLLWIVCWADLFYSFWERSRGIFLAPVFLVSPTLLGITMLLATFLIQLERRKGVQSSGIMLTFWLVALVCALAILRSKIMTALKENPCPESSASFLSRITFWWITGLIVRGYRQPLEGSDLWSLNKEDTSEQVVPVLVKNWKKECAKTRKQPVKVVYSSKDPAQPKESSKVDANEEVEALIVKSPQKEWNPSLFKVLYKTFGPYFLMSFFFKAIHDLMMFSGPQILKLLIKFVNDTKAPDWQGYFYTVLLFVTACLQTLVLHQYFHICFVSGMRIKTAVIGAVYRKALVITNSARKSSTVGEIVNLMSVDAQRFMDLATYINMIWSAPLQVILALYLLWLNLGPSVLAGVAVMVLMVPVNAVMAMKTKTYQVAHMKSKDNRIKLMNEILNGIKVLKLYAWELAFKDKVLAIRQEELKVLKKSAYLSAVGTFTWVCTPFLVALCTFAVYVTIDENNILDAQTAFVSLALFNILRFPLNILPMVISSIVQASVSLKRLRIFLSHEELEPDSIERRPVKDGGGTNSITVRNATFTWARSDPPTLNGITFSIPEGALVAVVGQVGCGKSSLLSALLAEMDKVEGHVAIKTRILVTHSMSYLPQVDVIIVMSGGKISEMGSYQELLARDGAFAEFLRTYASTEQEQDAEENGVTGVSGPGKEAKQMENGMLVTDSAGKQLQRQLSSSSSYSGDISRHHNSTAELQKAEAKKEETWKLMEADKAQTGQVKLSVYWDYMKAIGLFISFLSIFLFMCNHVSALASNYWLSLWTDDPIVNGTQEHTKVRLSVYGALGISQGIAVFGYSMAVSIGGILASRCLHVDLLHSILRSPMSFFERTPSGNLVNRFSKELDTVDSMIPEVIKMFMGSLFNVIGACIVILLATPIAAIIIPPLGLIYFFVQRFYVASSRQLKRLESVSRSPVYSHFNETLLGVSVIRAFEEQERFIHQSDLKVDENQKAYYPSIVANRWLAVRLECVGNCIVLFAALFAVISRHSLSAGLVGLSVSYSLQVTTYLNWLVRMSSEMETNIVAVERLKEYSETEKEAPWQIQETAPPSSWPQVGRVEFRNYCLRYREDLDFVLRHINVTINGGEKVGIVGRTGAGKSSLTLGLFRINESAEGEIIIDGINIAKIGLHDLRFKITIIPQDPVLFSGSLRMNLDPFSQYSDEEVWTSLELAHLKDFVSALPDKLDHECAEGGENLSVGQRQLVCLARALLRKTKILVLDEATAAVDLETDDLIQSTIRTQFEDCTVLTIAHRLNTIMDYTRVIVLDKGEIQEYGAPSDLLQQRGLFYSMAKDAGLV

SEQ ID NO: 47888 - protein, 56 aa, Homo sapiens
  MOD_RES (1)..(1): Any amino acid
XKWEIGYERNTHLHGNVSTCASVAAAGRGLLQMQNHPFCKKASLQPVHLQFGITWE

SEQ ID NO: 47889 - protein, 61 aa, Homo sapiens
MQRNGSASRGLEKTRLRLCREARIPESAFLTGLTRESWEARCWCAAESPNLLSRRRTLVKW

SEQ ID NO: 47890 - protein, 1034 aa, Homo sapiens
MDECGSRIRRRVSLPKRNRPSLGCIFGAPTAAELVPGDEGKEEEEMVAENRRRKTAGVLPVEVQPLLLSDSPECLVLGGGDTNPDLLRHMPTDRGVGDQPNDSEVDMFGDYDSFTENSFIAQVDDLEQKYMQLPEHKKHATDFATENLCSESIKNKLSITTIGNLTELQTDKHTENQSGYEGVTIEPGADLLYDVPSSQAIYFENLQNSSNDLGDHSMKERDWKSSSHNTVNEELPHNCIEQPQQNDESSSKVRTSSDMNRRKSIKDHLKNAMTGNAKAQTPIFSRSKQLKDTLLSEEINVAKKTVESSSNDLGPFYSLPSKVRDLYAQFKGIEKLYEWQHTCLTLNSVQERKNLIYSLPTSGGKTLVAEILMLQELLCCRKDVLMILPYVAIVQEKLHMIGEGSRGATLEMTLAKILYTSKTTQIIGMSATLNNVEDLQKFLQAEYYTSQFRPVELKEYLKINDTIYEVDSKAENGMTFSRLLNYKYSDTLKKMDPDHLVALVTEVIPNYSCLVFCPSKKNCENVAEMICKFLSKEYLKHKEKEKCEVIKNLKNIGNGNLCPVLKRTIPFGVAYHHSGLTSDERKLLEEAYSTGVLCLFTCTSTLAAGVNLPARRVILRAPYVAKEFLKRNQYKQMIGRAGRAGIDTIGESILILQEKDKQQVLELITKPLENCYSHLVQEFTKGIQTLFLSLIGLKIATNLDDIYHFMNGTFFGVQQKVLLKEKSLWEITVESLRYLTEKGLLQKDTIYKSEEEVQYNFHITKLGRASFKGTIDLAYCDILYRDLKKGLEGLVLESLLHLIYLTTPYDLVSQCNPDWMIYFRQFSQLSPAEQNVAAILGVSESFIGKKASGQAIGKKVDKNVVNRLYLSFVLYTLLKETNIWTVSEKFNMPRGYIQNLLTGTASFSSCVLHFCEELEEFWVYRALLVELTKKLTYCVKAELIPLMEVTGVLEGRAKQLYSAGYKSLMHLANANPEVLVRTIDHLSRRQAKQIVSSAKMLLHEKAEALQEEVEELLRLPSDFPGAVASSTDKA

SEQ ID NO: 47891 - protein, 84 aa, Homo sapiens
  MOD_RES (1)..(1): Any amino acid
XIDASSAMDTSEPAKSSINRVLSRPLYLEEDDYDVMQDPEFLQSVLENLPGVDPNNEAIRNAMGSLASQATKDGKKDKKEEDKK

SEQ ID NO: 47892 - protein, 233 aa, Homo sapiens
MAAAAAAGPSPGSGPGDSPEGPEGEAPERRRKAHGMLKLYYGLSEGEAAGRPAGPDPLDPTDLNGAHFDPEVYLDKLRRECPLAQLMDSETDMVRQIRALDSDMQTLVYENYNKFISATGVHALLRKLQFLFELPSRLTKCVELGAYGQAVRYQGRAQAVLQQYQHLPSFRAIQDDCQVITARLAQQLRQRFREGGSGAPEQAECVELLLALGEPAEELCEEFLAHARGRLEK

SEQ ID NO: 47893 - protein, 1117 aa, Homo sapiens
MESKAWESNNEDLLSSSGVTSNGGSSSSFFVSSIRGTIIENTSSAGTLTQVPFFPKYEVELDSPRKIIPSPGKEHFERVLEEYSHQVKDLQRRLNESNELHEKQKFYLRQSVIDLQTKLQEMQMERDAMADIRRRESQSQEDLRNQLQNTVHELEAAKCLKEDMLKDSNTQIEQLRKMMLSHEGVLQEIRSILVDFEEASGKKICEHDSMSTLHFRSLGSAISKILRELDTEISYLKGRIFPVEDQLEALKSESQNKIELLLQQHQDRIEQLISEHEVEITGLTEKASSARSQANSIQSQMEIIQEQARNQNSMYMRQLSDLESTVSQLRSELREAKRMYEDKTEELEKQLVLANSELTEARTERDQFSQESGNLDDQLQKLLADLHKREKELSLEKEQNKRLWDRDTGNSITIDHLRRELDNRNMEVQRLEALLKALKSECQGQMERQMAAIQGKNESLEKVSSLTAQLESTKEMLRKVVEELTAKKMTLESSERTISDLTTSLQEKERAIEATNAEITKLRSRVDLKLQELQHLKNEGDHLRNVQTECEALKLQMTEKDKVIEILRQQIENMTQLVGQHGRTAGAMQVEKAQLEKEINDRRMELKELKILKDKKDAKIRELEARVSDLELEKVKLVNAGSERLRAVKDIKQERDQLLNEVKTSRSELNNLSEEYEVLKRNFRNKSEEMEMTTNKLKMQLKSAQSELEQTRNTLKSMEGSDGHAMKVAMGMQKQITAKRGQIDALQSKIQFLEEAMTNANKEKHFLKEEKSKLSQELSTVATEKNKMAGELEVLRSQERRLKEKVTNMEVALDKASLQFAECQDIIQRQEQESVRLKLQHTLDIKELQGPGYTSNSSLKPRLLQPASVTRSHSNVPSSQSTASFLSHHSTKANTLKEDPTRDLKQLLQELRSVINEEPAVSLSKTEEDGRTSLGALYVAVEDRVRDCITESSLRSDMCHRSNNSLRDSTEGSKSSETLSREPVTLHAGDREDPSGCFTFTSAASPSVKNSASRSFNSSPKKSPVHSLLTSSVEGSIGSTSQYRSAKPIHSSDSVKDSQSPPIETTGKTCRKLQNRLESLQTLVEDLQLKNQAMSSMIRNQEKRIQKVKDQEKMLLK

SEQ ID NO: 47894 - protein, 160 aa, Homo sapiens
  MOD_RES (1)..(1): Any amino acid
XGKPVRPDSAHKMLVRENGVHSLIIEPVTSRDAGIYTCIATNRAGQNSFSLELVVAAKEAHKPPVFIEKLQNTGVADGYPVRLECRVLGVPPPQIFWKKENESLTHSTDRVSMHQDNHGYICLLIQGATKEDAGWYTVSAKNEAGIVSCTARLDVYISRH

SEQ ID NO: 47895 - protein, 72 aa, Homo sapiens
MSKQQPTQFINPETPGYVGFANLPNQVHRKSVKKGFEFTLMVVGESGLGKSTLINSLFLTDLYPERVIPGAA

SEQ ID NO: 47896 - protein, 478 aa, Homo sapiens
MEQPHDEKDPASKRPHPVCLFVLPALRTHPSAQLGPLGGDAMIPTFTALLCLGPLPKPTLWAEPGSVISWGNSVTIWCQGTLEAREYRLDKEESPAPWDRQNPLEPKNKARFSIPSMTEDYAGRYRCYYRSPVGWSQPSDPLELVMTGAYSKPTLSALPSPLVTSGKSVTLLCQSRSPMDTFLLIKERAAHPLLHLRSEHGAQQHQAEFPMSPVTSVHGGTYRCFSSHGFSHYLLSHPSDPLELIVSGSLEDPRPSPTRSVSTAAGPEDQPLMPTGSVPHSGLRRHWEVLIGVLVVSILLLSLLLFLLLQHWRQGKHRTLAQRQADFQRPPGAAEPEPKDGGLQRRSSPAADVQGENFSGAAVKNTQPEDGVEMDTRQSPHDEDPQAVTYAKVKHSRPRREMASPPSPLSGEFLDTKDRQAEEDRQMDTEAAASEAPQDVTYAQLHSFTLRQKATEPPPSQEGASPAEPSVYATLAIH

SEQ ID NO: 47897 - protein, 126 aa, Homo sapiens
MDEKNTPIRTYQVCNVMEPSQNNWLRTDWITREGAQRVYIEIKFTLRDCNSLPGVMGTCKETFNLYYYESDNDKERFIRENQFVKIDTIAADESFTQVDIGDRIMKLNTEIRDVGPLSKKGFYLAF

SEQ ID NO: 47898 - protein, 732 aa, Homo sapiens
MQQLYSFSLPVFPSPLYPLQDIAKDFPRGEESLETLEEQSAGVIRNTSPLGAEKITGELEEMRKVLEKLRALWEEEEERLRGLLRSRGAWEQQIKQLEAELSEFRMVLQRLAQEGLQPAAKAGTEDELVAHWRRYSATRAALASEEPRVDRLQAQLKELIVFPHNLKPLSDSVIATIQEYQSLKVKSARLRNAAAVELWQHFQRPLQDLQLWKALAQRLLEVTASLPDLPSLHTFLPQIEAALMESSRLKELLTMLQLKKDLLIGIFGQERATALLEQVAGSMRDRDLLHNSLLQRKSKLQSLLAQHKDFGAAFEPLQRKLLDLQVRVQAEKGLQRDLPGKQAQLSRLQGLQEEGLDLGAQMEAARPLVQENPNHQHKMDQLSSDFQALQRSLEDLVDRCRQSVQEHCTFSHQLLELRQWIVVTTQKLEAHRGEAGPGDAESQEAEFERLVAEFPEKEAQLSLVEAQGWLVMEKSSPEGAAVVQEELRELAESWRALRLLEESLLSLIRNWHLQRMEVDSGKKMVFTNNIPKSGFLINPMDPIPRHRRRANLLQEEEGSHEDFSQLLRNFGQWLQVENSKLVRIIAMRTSTAEDLRTRKSKLQELEARVPEGQHLFENLLRLGPARGTSDELEDLRYQWMLYKSKLKDSGHLLTQSSPGEPTGFQKTRRWRGLGSLFRRACCVALPLQLLLLLFLLLLFLLPIREEDRSCTLANNFARSFTLMLRYNGPPPT

SEQ ID NO: 47899 - protein, 625 aa, Homo sapiens
MKDKQKKKKERTWAEAARLVLENYSDAPMTPKQILQVIEAEGLKEMRSGTSPLACLNAMLHSNSRGGEGLFYKLPGRISLFTLKKDALQWSRHPATVEGEEPEDTADVESCGSNEASTVSGENDVSLDETSSNASCSTESQSRPLSNPRDSYRASSQANKQKKKTGVMLPRVVLTPLKVNGAHVESASGFSGCHADGESGSPSSSSSGSLALGSAAIRGQAEVTQDPAPLLRGFRKPATGQMKRNRGEEIDFETPGSILVNTNLRALINSRTFHALPSHFQQQLLFLLPEVDRQVGTDGLLRLSSSALNNEFFTHAAQSWRERLADGEFTHEMQVRIRQEMEKEKKVEQWKEKFFEDYYGQKLGLTKEESLQQNVGQEEAEIKSGLCVPGESVRIQRGPATRQRDGHFKKRSRPDLRTRARRNLYKKQESEQAGVAKDAKSVASDVPLYKDGEAKTDPAGLSSPHLPGTSSAAPDLEGPEFPVESVASRIQAEPDNLARASASPDRIPSLPQETVDQEPKDQKRKSFEQAASASFPEKKPRLEDRQSFRNTIESVHTEKPQPTKEEPKVPPIRIQLSRIKPPWVVKGQPTYQICPRIIPTTESSCRGWTGARTLADIKARALQSH

SEQ ID NO: 47900 - protein, 865 aa, Homo sapiens
MPAVSLPPKENALFKRILRCYEHKQYRNGLKFCKQILSNPKFAEHGETLAMKGLTLNCLGKKEEAYELVRRGLRNDLKSHVCWHVYGLLQRSDKKYDEAIKCYRNALKWDKDNLQILRDLSLLQIQMRDLEGYRETRYQLLQLRPAQRASWIGYAIAYHLLEDYEMAAKILEEFRKTQQTSPDKVDYEYSELLLYQNQVLREAGLYREALEHLCTYEKQICDKLAVEETKGELLLQLCRLEDAADVYRGLQERNPENWAYYKGLEKALKPANMLERLKIYEEAWTKYPRGLVPRRLPLNFLSGEKFKECLDKFLRMNFSKGCPPVFNTLRSLYKDKEKVAIIEELVVGYETSLKSCRLFNPNDDGKEEPPTTLLWVQYYLAQHYDKIGQPSIALEYINTAIESTPTLIELFLVKAKIYKHAGNIKEAARWMDEAQALDTADRFINSKCAKYMLKANLIKEAEEMCSKFTREGTSAVENLNEMQCMWFQTECAQAYKAMNKFGEALKKCHEIERHFIEITDDQFDFHTYCMRKITLRSYVDLLKLEDVLRQHPFYFKAARIAIEIYLKLHDNPLTDENKEHEADTANMSDKELKKLRNKQRRAQKKAQIEEEKKNAEKEKQQRNQKKKKDDDDEEIGGPKEELIPEKLAKVETPLEEAIKFLTPLKNLVKNKIETHLFAFEIYFRKEKFLLMLQSVKRAFAIDSSHPWLHECMIRLFNTVCESKDLSDTVRTVLKQEMNRLFGATNPKNFNETFLKRNSDSLPHRLSAAKMVYYLDPSSQKRAIELATTLDESLTNRNLQTCMEVLEALYDGSLGDCKEAAEIYRANCHKLFPYALAFMPPGYEEDMKITVNGDSSAEAEELANEI

SEQ ID NO: 47901 - protein, 4418 aa, Homo sapiens
MGSSAAAAAAAAAAADSAQWLSVKEETIFLHDGLIRVTDLAELPSEILGAPEAADTDLEILTFETKNPSELAERLRSVCGNQSNAYARLLEYRLNALRGLWNAQRQLALEEQHERESSGDEETLALLKRQGLLQQPEQAPFTSRMGLLLVFPLIQSQSRTDPSLCNITAEVLLNCLRDCQPLSLTKEPADCLNGIETLLCSWLEETSDTGRHIPHKQKENAAAALVALACARGSLKTFVHTVHLLQKQTDLGSLPVADVLYRLLLLEGGPGSPSCLLGGKHIVSWGYEDMLPAPDSNTGSSSENKDADLGRCLTADGLYLYTTNSVGRGVSKLGSGLHGTLRGFVYCRNEELEPGWVAFGSGSLLHRPVSFDNKPHSLFQVIDQNTLQVCQVVPMPANHLPIGSTMSTVHLSSDGTYFYWIWSPASLNEKTPKGHSVFMDIFELVVENGVFVANPLQERTILMRKEGESAKSINEMLLSRLSRYRASPSATLAALTGSTISNTLKEDQAANTSCGLPLKMLRKTPIYTCGTYLVMLVPPPGGSGSSATRSLFGGTSGLSSLKILASSLVYNISDGQFTSRADLIDAAGSSLGRGALVPGLGACYDTVNNMLWTCSNDYIDQWCNPGNQAFHYVCQRLGVSHIITEPKEEAITTNEVINQLLHHVGAMCIHQLNLLATNPNLPITSVLGKQHPIEAHHLSSICDIMEKAMVNGDTCIIRCILVVFQVVFKFFFSPQTERNRDIIRRSGLLLWQLLMAPKDQICPEIQKEVCLAISSGLNILYPGETEINNLLKLVLTEGERNSGLSQLRDVILTNLAEQLQNNRFGSDEDDHYRLNDELLHYILKIVVRESCILITKCQTVSKDDFQKLLSTVPAASSCLRYLMAVQNHLLSNTILIKPDENDDSDSSLQGETLKVQELKVSILALATQILTGCDEVLEMLQQVTTALINSDIADREQRLKGLEQVTKATMLGHLLPVLLTSLMHPNLQTLIMADALMPQLVQLVLYTSQTALLLKTQCPVFAEVGCSPCGAPDQKCRLFPDERMLEEKEEPGFLTGLKIPAPWAAGKTVETVHPVRDNYKFKETVHIPGARCLYLRFDSRCSSQYDYDKLVIYAGPNTNSRKVAEYGGNTLGYGSRSVLGTGWPKDLVKVEGDTVTFSFEMRSGREHNTPDKAMWGFACTVRAQESSEDVSGGLPFLVDLALGLSVLACSMLRILYNGPEITKEEEACQELLRSKLLQRCQWQVEANGVISPALTPSPSPLPLTIEEDREFTYPSDVLVPPVGNYFDLPRIRLPPGIMIKLREISGRARPQFRPSIKEVIQPDVMEEMVVSCVIKHLNLVDALQSLINFQYQEEHAEEYDLLCKIMGETFKKLNAMERQLQSVAELEQKWQSEVDDAMQGKLENNMPFFYDYHFNENKMKELELLCSMKEVSFDGNDLENMVLSLREKFLQEVNSLIQKPSHPLAKTKTLVKSLMNRAELLLHVTIAAQSGLTRSISGTPAETPACKSASETKVISHAVRQPVFLRSMSAPSDLEMIGNEDLEFTRANQRRRHVTSHRSSSFTLLQSLAIEDSRDKPTYSVLLGQLFAFIGTNPDQAVSSSSFLLAAQTRWRRGNTRKQALVHMRELLTAAVRVGGVTHLVGPVTMVLQGGPRIEELTCGGMVEQVQEAFGETMTSVVSLCARYPIACANSIGLLCTIPYTRSEEKCLVRSGLVQLMDRLCSLSNQTESSSSEKQTKKQKVATMAWAAFQVLANRCVEWEKEEGGSTEAVHSGLARQVSSLLTNHLARATECCGNQAAGNDALQDVLSLLNDLSRSHIGKAILSQPACVSKLLSLLLDQRPSPKLVLIILQLCRAALPLMSVEDCGNVELPPWSYSVPSLNSEQEDPSDPASKIASLLLAKLADYVVPGCQTVLSPTASEPDTTLTKTSPKNSLKGDKDPGEESEAVDGKLSIFIHKREDQSSHEVLQPLLSSSEGRPFRLGTGANMEKVVKMDRDMTKGGCCEVITEEAAAALRKATKWAQSGLIVSIGPPVESINPETVSGLSTGDKKKTAQTSICRERNSELARTDPVRPFISGHVANSMAAEVIALLHSLLMAPESNAAQIWTTTAEKVLSRALMYIPQLGKYAESILENGSSSGRKLAKLQRIARQAVAALCALGGFKETIKIGSEVQVLGRGISGSIGVVASINEQEGIATVRFPPIDCRKTSQASDTLTIPLSRLCVPRSEALPLHKLSITEKVVQAVQSMLLPQEGSLSIHTSLPATGDGSAPVMAVVRLLAEIRTRACLVMAQLLEDSLFCEEFIQQCPAAVEVLNLVAQECSAGERLAVVEVQCERLRMLYRDCARPPPPPLQADRRQPKEITWSPSRVFPPVRACMFSSHLTSVTFLADPSAGGGLPRGTFIYATSPLPVQAPSFYWEIEIVSYGDTDDDTGPIVSFGFTTEAEKRDGAWTNPVGTCLFHNNGRAVHYNGSSLLQWKSVRLDVTLSPGDVAGIGWERTEGTPPPPGQPAKGRVYFTYCGQRLSPYLEDVSGGMWPVVHIQKKNTKTRANFGSRPFAYAEGQAHRNAADLCTDLAEEISANFEALPFAMASDSDNDAGTSIASDPGTHGPPCRIAAVATAQQQYDSDTSCHYKVELSYENFITSGPDPHPPPIADDESDDDDDDDIPQEDHYALLVKAWETKVFPTIRRRFRNEAERKSGLDQIKGALQLGMVDIARQTVEFLYEENGGIPRDLYLPTIEDIKDEANKFTIDKVRKGLTVVTRSPDSNNVASSAVGTALPKFAIRGMLKTFGLHGVVLDVDSVNELVQVETYLRSEGVLVRYWYPIDMLERPPAGYRRTATNGLVTLDNTNLQIHRELLRCEAALARLYCRMALLNIFAPKLPHLFTRLFHIPAIRDITLEHLQLLSNQLLAPPLPDGTISSSSILLAQSLQHCIHSQNCSATDLFYQGNSQTVREWLNVAITRTLHQGEESLLELTKQICSFLQTAPEQFPSEEFPISESKVNMDVNFPGAAFVVVSCKESQSGFRKDSSLYKAPWARVLVYGLGHKVKRNGQLNLIEAACYPRDASPANTGLAPPPTADQYPSVVLSTDRVHIKLGVSPPPGAVLVLHSLPLEFPLAMAFAEQLLSWKSEDSEGKSEDEPDTIPTSVLLQVVELLGNFLWTTDMAACVKELVFHLLAELLRTVHTLEQRRHPAGLSSSIALQLNPCLAMLMALQSELHKLYDEETQNWVSGGACGGSGGAAAGDQGRFSTYFHALMEGCLAVAEVTLPTNMSVTASGVTSATAPNLSDSSSSSSSSPGQTPQSPSLLSKRKKVKMKREKASSSGKRQSSRTVDSDPTVLSIGGSKPEDMLWFHRALTLLIILRHLTRKDPQGLGVTSDAIADACQALVGPTAHSRLLVISGIPTHLDEGVVRGAIRKACNAHGGVFKDEIYIPLQEEDTKKPKDKAEGGDGKVEPEKTLAFPGTDSMEVSTSSSLTPAMSISASASTSQASICSSQGISQTVSDLSVDPLPAGLELPIPPGLLEPHAVSSQESLDISLCSTGSLGSLGSLGEPLDNAETASVSDMGSMYTVTSLDNQPLAARPIKGFAVVEIRSRAKIEKIRASLFNNNDLIGLSSLDGEDELMEMSTEEILTVSVVNQSLFDTQGSPGLEDYFNDKSIKGEKLVPGAREVLTEIFKSCAHSEQTLSLTPAKPIRVSDIYLSKEQINSQTPGNLLHLFFTNVRPPKKVLEDQLTQILRKYGVPKPKFDKSKYSKAGKEQHPVKVVSTKRPITKPPAKDKAVLNSVSRTALSEKKPTVKPKSPEKSKPDEKDPEKSPTKKQEVPEEKYLTLEGFHKFVIDRARQDIRSVWRAILSCGYDLHFERCACIDVRHAQKASRKWTLEMDVALVQYINQLCRHLAITPARLHPHEVYLDPADAADPRVACLLNVPIESLRLRFALLQSLNTTLETFFLPLVELRQTPMYTHSIAALLKEAKGLIFYDTKVTVMNRVLNATVQRTADHAAPEITLDPLEIVGGEIRASENSYFCQAARQLASVPSSQLCVKLASGGDPTYAFNIRFTGEEVHGTSGSFRHFLWQVCKELQSSSLSLLLLCPSSAVNKNKGKYILTPSPITYGEEQLLHFLGQLLGIAIRADVPLPLDLLPSFWKTLVGEPLDPEQDLQEADILTYNYVKKFESINDETELEALCAEIASQHLATESPDSPNKPCCRFTYLTMTGEEVELCSRGRHILVAWENKDIYAAAIRSLRLRELQNVECVTAVRAGLGSIIPLQLLTMLSPLEMELRTCGLPYINLEFLKAHTMYQVGLMETDQHIEFFWGALEMFTQEELCKFIKFACNQERIPFTCPCKDGGPDTAHVPPYPMKIAPPDGTAGSPDSRYIRVETCMFMIKLPQYSSLEIMLEKLRCAIHYREDPLSG

SEQ ID NO: 47902 - protein, 237 aa, Homo sapiens
  MOD_RES (1)..(1): Any amino acid
XEKIDEFLATGKLRKLEKIRQDDTSSSINFLTRVSGIGPSAARKFVDEGIKTLEDLRKNEDKLNHHQRIGLKYFGDFEKRIPREEMLQMQDIVLNEVKKVDSEYIATVCGSFRRGAESSGDMDVLLTHPSFTSESTKQGVCQLPSKNDEKEYPHRRIDIRLIPKDQYYCGVLYFTGSDIFNKNMRAHALEKGFTINEYTIRPLGVTGVAGEPLPVDSEKDIFDYIQWKYREPKDRSE

SEQ ID NO: 47903 - protein, 131 aa, Homo sapiens
MFSTKALLLAGLISTALAGPWANICAGKSSNEIRTCDRHGCGQYSAQRSQRPHQGVDILCSAGSTVYAPFTGMIVGQEKPYQNKNAINNGVRISGREITTDTPIFNNYYPDQSAAVNIKTRSSTSKKMMTH

SEQ ID NO: 47904 - protein, 242 aa, Homo sapiens
MVHCSCVLFRKYGNFIDKLRLFTRGGSGGMGYPRLGGEGGKGGDVWVVAQNRMTLKQLKDRYPRKRFVAGVGANSKISALKGSKGKDCEIPVPVGISVTDENGKIIVTTLKPELGKIMYSDFKQISVADLPGLIEGAHMNKGMGHKFLKHIERTRQLLFVVDISGFQLSSHTQYRTAFETIILLTKELELYKEELQTKPALLAVNKMDLPDAQDKFHELMSQLQNPKDFLHLFEKNMIPERT

SEQ ID NO: 47905 - protein, 95 aa, Homo sapiens
  MOD_RES (1)..(1): Any amino acid
XRQAWRLFLSQGRGDRWVSRPRGHFSPALRREFFTTTTKEGYDRRPVDITPLEQRKLTFDTHALVQDLETHGNNSTTANGSFGCYQERHGHPREK

SEQ ID NO: 47906 - protein, 145 aa, Homo sapiens
MAERNEDHHLQVLKESEVLLQAKRAELEKLKSQVTSQQQEMAVLDRQLGHKKEELHLLQGSMVQAKADLQEALRLGETEVTEKCNHIREVKSLLEELSFQKGELNVQISERKTQLTLIKQEIEKEEENLQVVLRQMSKHKTAFLQ

SEQ ID NO: 47907 - protein, 160 aa, Homo sapiens
MGKRDRADRDKKKSRKRHYEDEEDDEEDAPGNDPQEAVPSAAGKQVDESGTKVDEYGAKDYRLQMPLKDDHTSRPLWVAPDGHIFLEAFSPVYKYAQDFLVAIAEPVCRPTHVHEYKLTAYSLYAAVSVGLQTSDITEYLRKLSKTGVPDGIMQFIKILR

SEQ ID NO: 47908 - protein, 127 aa, Homo sapiens
MSTADALDDENTFKILVATDIHLGFMEKDAVRGNDTFVTLDEILRLAQENEVDFILLGGDLFHENKPSRKTLHTCLELLRKYCMGDRPVQFEILSDQSVNFGFSKFPWVNYQDGNLNISIPVFSIHG

SEQ ID NO: 47909 - protein, 2080 aa, Homo sapiens
MASAVSPANLPAVLLQPRWKRVVGWSGPVPRPRHGHRAVAIKELIVVFGGGNEGIVDELHVYNTATNQWFIPAVRGDIPPGCAAYGFVCDGTRLLVFGGMVEYGKYSNDLYELQASRWEWKRLKAKTPKNGPPPCPRLGHSFSLVGNKCYLFGGLANDSEDPKNNIPRYLNDLYILELRPGSGVVAWDIPITYGVLPPPRESHTAVVYTEKDNKKSKLVIYGGMSGCRLGDLWTLDIDTLTWNKPSLSGVAPLPRSLHSATTIGNKMYVFGGWVPLVMDDVKVATHEKEWKCTNTLACLNLDTMAWETILMDTLEDNIPRARAGHCAVAINTRLYIWSGRDGYRKAWNNQVCCKDLWYLETEKPPPPARVQLVRANTNSLEVSWGAVATADSYLLQLQKYDIPATAATATSPTPNPVPSVPANPPKSPAPAAAAPAVQPLTQVGITLLPQAAPAPPTTTTIQVLPTVPGSSISVPTAARTQGVPAVLKVTGPQATTGTPLVTMRPASQAGKAPVTVTSLPAGVRMVVPTQSAQGTVIGSSPQMSGMAALAAAAAATQKIPPSSAPTVLSVPAGTTIVKTMAVTPGTTTLPATVKVASSPVMVSNPATRMLKTAAAQVGTSVSSATNTSTRPIITVHKSGTVTVAQQAQVVTTVVGGVTKTITLVKSPISVPGGSALISNLGKVMSVVQTKPVQTSAVTGQASTGPVTQIIQTKGPLPAGTILKLVTSADGKPTTIITTTQASGAGTKPTILGISSVSPSTTKPGTTTIIKTIPMSAIITQAGATGVTSSPGIKSPITIITTKVMTSGTGAPAKIITAVPKIATGHGQQGVTQVVLKGAPGQPGTILRTVPMGGVRLVTPVTVSAVKPAVTTLVVKGTTGVTTLGTVTGTVSTSLAGAGGHSTSASLATPITTLGTIATLSSQVINPTAITVSAAQTTLTAAGGLTTPTITMQPVSQPTQVTLITAPSGVEAQPVHDLPVSILASPTTEQPTATVTIADSGQGDVQPGTVTLVCSNPPCETHETGTTNTATTTVVANLGGHPQPTQVQFVCDRQEAAASLVTSTVGQQNGSVVRVCSNPPCETHETGTTNTATTATSNMAGQHGCSNPPCETHETGTTNTATTAMSSVGANHQRDARRACAAGTPAVIRISVATGALEAAQGSKSQCQTRQTSATSTTMTVMATGAPCSAGPLLGPSMAREPGGRSPAFVQLAPLSSKVRLSSPSIKDLPAGRHSHAVSTAAMTRSSVGAGEPRMAPVCESLQGGSPSTTVTVTALEALLCPSATVTQVCSNPPCETHETGTTNTATTSNAGSAQRVCSNPPCETHETGTTHTATTATSNGGTGQPEGGQQPPAGRPCETHQTTSTGTTMSVSVGALLPDATSSHRTVESGLEVAAAPSVTPQAGTALLAPFPTQRVCSNPPCETHETGTTHTATTVTSNMSSNQDPPPAASDQGEVESTQGDSVNITSSSAITTTVSSTLTRAVTTVTQSTPVPGPSVPKISSMTETAPRALTTEVPIPAKITVTIANTETSDMPFSAVDILQPPEELQVSPGPRQQLPPRQLLQSASTALMGESAEVLSASQTPELPAAVDLSSTGEPSSGQESAGSAVVATVVVQPPPPTQSEVDQLSLPQELMAEAQAGTTTLMVTGLTPEELAVTAAAEAAAQAAATEEAQALAIQAVLQAAQQAVMAGTGEPMDTSEAAATVTQAELGHLSAEGQEGQATTIPIVLTQQELAALVQQQQLQEAQAQQQHHHLPTEALAPADSLNDPAIESNCLNELAGTVPSTVALLPSTATESLAPSNTFVAPQPVVVASPAKLQAAATLTEVANGIESLGVKPDLPPPPSKAPMKKENQWFDVGVIKGTNVMVTHYFLPPDDAVPSDDDLGTVPDYNQLKKQELQPGTAYKFRVAGINACGRGPFSEISAFKTCLPGFPGAPCAIKISKSPDGAHLTWEPPSVTSGKIIEYSVYLAIQSSQAGGELKSSTPAQLAFMRVYCGPSPSCLVQSSSLSNAHIDYTTKPAIIFRIAARNEKGYGPATQVRWLQETSKDSSGTKPANKRPMSSPEMKSAPKKSKADGQ

SEQ ID NO: 47910 - protein, 322 aa, Homo sapiens
MVERRGPGRPRTDGENVFTGQSKIYSYMSPNKCSGMRFPLQEENSVTHHEVKCQGKPLAGIYRKREEKRNAGNAVRSAMKSEEQKIKDARKGPLVPFPNQKSEAAEPPKTPPSSCDSTNAAIAKQALKKPIKGKQAPRKKAQGKTQQNRKLTDFYPVRRSSRKSKAELQSEERKRIDELIESGKEEGMKIDLIDGKGRGVIATKQFSRGDFVVEYHGDLIEITDAKKREALYAQDPSTGCYMYYFQYLSKTYCVDATRETNRLGRLINHSKCGNCQTKLHDIDGVPHLILIASRDIAAGEELLYDYGDRSKASIEAHPWLKH

SEQ ID NO: 47911 - protein, 182 aa, Homo sapiens
MAEAEFKDHSTAMDTEPNPGTSSVSTTTSSTTTTTITTSSSRMQQPQISVYSGSDRHAVQVIQQALHRPPSSAAQYLQQMYAAQQQHLMLHTAALQQQHLSSSQLQSLAAVQASLSSGRPSTSPTGSVTQQSSMSQTSVQNLTLRSQKLGVLSSSQNGPPKSTSQTQSLTICHNKTTVTSSK

SEQ ID NO: 47912 - protein, 892 aa, Homo sapiens
MITSAAGIISLLDEDEPQLKEFALHKLNAVVNDFWAEISESVDKIEVLYEDEGFRSRQFAALVASKVFYHLGAFEESLNYALGAGDLFNVNDNSEYVETIIAKCIDHYTKQCVENADLPEGEKKPIDQRLEGIVNKMFQRCLDDHKYKQAIGIALETRRLDVFEKTILESNDVPGMLAYSLKLCMSLMQNKQFRNKVLRVLVKIYMNLEKPDFINVCQCLIFLDDPQAVSDILEKLVKEDNLLMAYQICFDLYESASQQFLSSVIQNLRTVGTPIASVPGSTNTGTVPGSEKDSDSMETEEKTSSAFVGKTPEASPEPKDQTLKMIKILSGEMAIELHLQFLIRNNNTDLMILKNTKDAVRNSVCHTATVIANSFMHCGTTSDQFLRDNLEWLARATNWAKFTATASLGVIHKGHEKEALQLMATYLPKDTSPGSAYQEGGGLYALGLIHANHGGDIIDYLLNQLKNASNDIVRHGGSLGLGLAAMGTARQDVYDLLKTNLYQDDAVTGEAAGLALGLVMLGSKNAQAIEDMVGYAQETQHEKILRGLAVGIALVMYGRMEEADALIESLCRDKDPILRRSGMYTVAMAYCGSGNNKAIRRLLHVAVSDVNDDVRRAAVESLGFILFRTPEQCPSVVSLLSESYNPHVRYGAAMALGICCAGTGNKEAINLLEPMTNDPVNYVRQGALIASALIMIQQTEITCPKVNQFRQLYSKVINDKHDDVMAKFGAILAQGILDAGGHNVTISLQSRTGHTHMPSVVGVLVFTQFWFWFPLSHFLSLAYTPTCVIGLNKDLKVSTAVLSITAKAKKKEKEKEKKEEEKMEVDEAEKKEEKEKKKEPEPNFQLLDNPARVMPAQLKVLTMPETCRYQPFKPDLTCLSEEDCPGSYWECL

SEQ ID NO: 47913 - protein, 258 aa, Homo sapiens
MPCVQAQYGSSPQGASPASQSYSYHSSGEYSSDFLTPEFVKFSMDLTNTEITATTSLPSFSTFMDNYSTGYDVKPPCLYQMPLSGQQSSIKVEDIQMHNYQQHSHLPPQSEEMMPHSGSVYYKPSSPPTPTTPGFQVQHSPMWDDPGSLHNFHQNYVATTHMIEQRKTPVSRLSLFSFKQSPPGTPVSSCQMRFDGPLHVPMNPEPAGSHHVVDGQTFAVPNPIRKPASMGFPGLQIGHASQLLDTQVPSPPSRGSPS

SEQ ID NO: 47914 - protein, 82 aa, Homo sapiens
NARGKDLDTDFTNNASQPETKAIIENLIQKQDFSLSVALDGGSMLVTYPYDKPVQTVENKETLKHLASLYANNHPSMHMVLW

SEQ ID NO: 47915 - protein, 38 aa, Homo sapiens
  MOD_RES (1)..(1): Any amino acid
XIHVVTWNVASAAPPLDLSDLLQLNNRNLNLDIYVIGN

SEQ ID NO: 47916 - protein, 244 aa, Homo sapiens
VSFFSFLQNGFWVGPLGGGSASESDPTGFLHDSRHRLSSDVGMFVALTKLGQPDAEQWNSRLDLLERSRQAVDGVCRHNYRLGAPFTVGRKVQPEVTVYPERTPLLHQHNLLHCSVTGFYPGDIKIKWFLNGQEERAGVMSTGPIRNGDWTFQTVVMLEMTPELGHVYTCLVDHSSLLSPVSVEWRAQSEYSWRKMLSGIAAFLLGLIFLLVGIVIQLRAQKGYVRTQMSGNEVSRAVLLPQSC

SEQ ID NO: 47917 - protein, 125 aa, Homo sapiens
MAQQANVGELLAMLDSPMLGVRDDVTAVFKENLNSDRGPMLVNTLVDYYLETSSQPALHILTTLQEPHDKHLLDRINEYVGKAATRLSILSLLGHVIRLQPSWKHKLSQAPLLPSLLKCLKMDTD

SEQ ID NO: 47918 - protein, 115 aa, Homo sapiens
  MOD_RES (1)..(1): Any amino acid
XIHGIVQSVVYHEESPPQYQTSYLQSFGFNGLWRFAGPFSKQTQIPDYAELIVKFLDALIDTYLPGIDEETSEESLLTPTSPYPPALQSQLSITANLNLSNSMTSLATSQHSPGQ

SEQ ID NO: 47919 - protein, 139 aa, Homo sapiens
MAPGNLWHMRNNFLFGSRCWMTRFSAENIFKSVSFRLFGVKCHNTDSEPLKNEDLLKNLLTMGVDIDMARKRQPGVFHRMITNEQDLKMFLLSKGASKEVIASIISRYPRAITRTPENLSKRWDLWRKIVTSDLEIVNI

SEQ ID NO: 47920 - protein, 183 aa, Homo sapiens
  MOD_RES (1)..(1): Any amino acid
XAGGEAGVTLGQPHLSRQDLTTLDVTKLTPLSHEVISRQATINIGTIGHVAHGKSTVVKAISGVHTVRFKNELERNITIKLGYANAKIYKLDDPSCPRPECYRSCGSSTPDEFPTDIPGTKGNFKLVRHVSFVDCPGHDILMATMLNGAAVMDAALLLIGKYLTIGLDKSMWNKSKMKYLKGN

SEQ ID NO: 47921 - protein, 121 aa, Homo sapiens
MAAAGAGPGQEAGAGPGPGAVANATGAEEGEMKPVAAGAAAPPGEGISAAPTVEPSSGEAEGGEANLVDVSGGLETESSNGKDTLILSTFHDQLQFSLQRLPSQWEYLFPPEASKLEGNVP

SEQ ID NO: 47922 - protein, 212 aa, Homo sapiens
MGGPRAWALLCLGLLLPGGGAAWSIGAAPFSGRRNWCSYVVTRTISCHVQNGTYLQRVLQNCPWPMSCPGSSYRTVVRPTYKVMYKIVTAREWRCCPGHSGVSCEEVAASSASLEPMWSGSTMRRMALRPTAFSGCLNCSKVSELTERLKVLEAKMTMLTVIEQPVPPTPATPEDPAPLWGPPPAQGSPGDGGLQGDPLLSNTFTETNNHWP

SEQ ID NO: 47923 - protein, 54 aa, Homo sapiens
MASAVLSSVPTTASRFALLQVDSGSGSDSEPGKGKGRNTGKSQTLGSKSTTNEK

SEQ ID NO: 47924 - protein, 96 aa, Homo sapiens
  MOD_RES (1)..(1): Any amino acid
XLAYNNYRLGGNPGTNSRVTASSGITIPKPPKPPDKPLMPYMRYSRKVWDQVKASNPDLKLWEIGKIIGGMWRDLTDEEKQEYLNEYEAEKSTMNL

SEQ ID NO: 47925 - protein, 166 aa, Homo sapiens
MEHAFTPLEPLLSTGNLKYCLVILNQPLDNYFRHLWNKALLRACADGGANRLYDITEGERESFLPEFINGDFDSIRPEVREYYATKGCELISTPDQDHTDFTKCLKMLQKKIEEKDLKVDVIVTLGGLAGRFDQIMASVNTLFQATHITPFPIIIIQEESLIYLLQ

SEQ ID NO: 47926 - protein, 77 aa, Homo sapiens
MDEDGLPLMGSGIDLTKVPAIQQKRTVAFLNQFVVHTVQFLNRFSTVCEETGSCCITEAGVQWRDHSSGQPQLPGLK

SEQ ID NO: 47927 - protein, 71 aa, Homo sapiens
MNESELFGRTIRVNLAKPMRIKEGSSRPVWSDDDWLKKFSGKTLEENKEEEGSEPPKAETQEGEPIAKKAR

SEQ ID NO: 47928 - protein, 99 aa, Homo sapiens
MLDGRWTVTTLSGDMGPRAGFGHLARCHDLLICTAELLQMALTSPEEEEHVELTVFSLIVVDECHHTHKDTVYNVIMSQYLELKLQRAQPLPQVLGLTA

SEQ ID NO: 47929 - protein, 259 aa, Homo sapiens
MLIWSEVSWIPNKHYSGIYGLMKLVLTKTLPANLERVIVLDTDITFATDIAELWAVFHKFKGQQVLGLVENQSDWYLGNLWKNHRPWPALGRGYNTGVILLLLDKLRKMKWEQMWRLTAERELMGMLSTSLADQDIFNAVIKQNPFLVYQLPCFWNVQLSDHTRSEQCYRDVSDLKVIHWNSPKKLRVKNKHVEFFRNLYLTFLEYDGNLLRRELFGCPSEADVNSENFFMACFVHGTLCLPPSHLILTSISWEEVIVL

SEQ ID NO: 47930 - protein, 1622 aa, Homo sapiens
MSLLCVRVKRAKFQGSPDKFNTYVTLKVQNVKSTTVAVRGDQPSWEQDFMFEISRLDLGLSVEVWNKGLIWDTMVGTVWIALKTIRQSDEEGPGEWSTLEAETLMKDDEICGTRNPTPHKILLDTRFELPFDIPEEEARYWTYKWEQINALGADNEYSSQEESQRKPLPTAAAQCCHWTYLGWGEQQTFEDPDSAVDDRDSDYRSETSNSFPPPYHTASQPNASVHQFPVPVRSPQQLLLQGSSRDSCNDSMQSYDLDYPERRAISPTSSSRYGSSCNVSQGSSQLSELDQYHEQDDDHRETDSIHSCHSSHSLSRDGQAGFGEQEKPLEVTGQAEKEAACEPKEMKEDATTHPPPDLVLQKDHFLGPQESFPEENASSPFTQARAHWIRAVTKVRLQLQEIPDDGDPSLPQWLPEGPAGGLYGIDSMPDLRRKKPLPLVSDLSLVQSRKAGITSAMATRTSLKDEELKSHVYKKTLQALIYPISCTTPHNFEVWTATTPTYCYECEGLLWGIARQGMRCSECGVKCHEKCQDLLNADCLQRAAEKSCKHGAEDRTQNIIMAMKDRMKIRERNKPEIFEVIRDVFTVNKAAHVQQMKTVKQSVLDGTSKWSAKITITVVCAQGLQAKDKTGSSDPYVTVQVSKTKKRTKTIFGNLNPVWEEKFHFECHNSSDRIKVRVWDEDDDIKSRVKQRLKRESDDFLGQTIIEVRTLSGEMDVWYNLEKRTDKSAVSGAIRLQISVEIKGEEKVAPYHVQYTCLHENLFHYLTDIQGSGGVRIPEARGDDAWKVYFDETAQEIVDEFAMRYGIESIYQAMTHFACLSSKYMCPGVPAVMSTLLANINAYYAHTTASTNVSASDRFAASNFGKERFVKLLDQLHNSLRIDLSTYRNNFPAGSPERLQDLKSTVDLLTSITFFRMKVQELQSPPRASQVVKDCVKACLNSTYEYIFNNCHDLYSRQYQLKQELPPEEQGPSIRNLDFWPKLITLIVSIIEEDKNSYTPVLNQFPQELNVGKVSAEVMWHLFAQDMKYALEEHEKDHLCKSADYMNLHFKVKWLHNEYVRDLPVLQGQVPEYPAWFEQFVLQWLDENEDVSLEFLRGALERDKKDGFQQTSEHALFSCSVVDVFTQLNQSFEIIRKLECPDPSILAHYMRRFAKTIGKVLMQYADILSKDFPAYCTKEKLPCILMNNVQQLRVQLEKMFEAMGGKELDLEAADSLKELQVKLNTVLDELSMVFGNSFQVRIDECVRQMADILGQVRGTGNASPDARASAAQDADSVLRPLMDFLDGNLTLFATVCEKTVLKRVLKELWRVVMNTMERMIVLPPLTDQTGTQLIFTAAKELSHLSKLKDHMVREETRNLTPKQCAVLDLALDTIKQYFHAGGNGLKKTFLEKSPDLQSLRYALSLYTQTTDTLIKTFVRSQTTQVHDGKGIRFTANEDIRPEKGSGVDDPVGEVSIQVDLFTHPGTGEHKVTVKVVAANDLKWQTAGMFRPFVEVTMVGPHQSDKKRKFTTKSKSNNWAPKYNETFHFLLGNEEGPESYELQICVKDYCFAREDRVLGLAVMPLRDVTAKGSCACWCPLGRKIHMDETGLTILRILSQRSNDEVAREFVKLKSESRSTEEGS

SEQ ID NO: 47931 - protein, 194 aa, Homo sapiens
  MOD_RES (1)..(1): Any amino acid
XRKDRLWRNLSRMQSRFGKKEFSFFPQSFILPQDAKLLRKAWESSSRQKWIVKPPASARGIGIQVIHKWSQLPKRRPLLVQRYLHKPYLISGSKFDLRIYVYVTSYDPLRIYLFSDGLVRFASCKALKALWNYLSQKGVNSDAIWEKIKDVVVKTIISSEPYVTSLLKMYVRRPYSCHELFGFDIMLDENLKPW

SEQ ID NO: 47932 - protein, 182 aa, Homo sapiens
  MOD_RES (1)..(1): Any amino acid
XGMNAGFEDCLVFDELMDKFSNDLSLCLPVFSRLRIPDDHAISDLSMYNYIEMRAHVNSSWFIFQKNMERFLHAIMPSTFIPLYTMVTFSRIRYHEAVQRWHWQKKVINKGLFFLGSLIAISSTYLLIHYMSPRSFLRLRRPWNWIAHFRNTTCFPAKAVDSLEQISNLISRLLSHSEILQT

SEQ ID NO: 47933 - protein, 470 aa, Homo sapiens
MAEQVLPQALYLSNMRKAVKIRERTPEDIFKPTNGIIHHFKTMHRYTLEMFRTCQFCPQFREIIHKALIDRNIQATLESQKKLNWCREVRKLVALKTNGDGNCLMHATSQYMWGVQDTDLVLRKALFSTLKETDTRNFKFRWQLESLKSQEFVETGLCYDTRNWNDEWDNLIKMASTDTPMARSGLQYNSLEEIHIFVLCNILRRPIIVISDKMLRSLESGSNFAPLKVGGIYLPLHWPAQECYRYPIVLGYDSHHFVPLVTLKDSGPEIRAVPLVNRDRGRFEDLKVHFLTDPENEMKEKLLKEYLMVIEIPVQGWDHGTTHLINAAKLDEANLPKEINLVDDYFELVQHEYKKWQENSEQGRREGHAQNPMEPSVPQLSLMDVKCETPNCPFFMSVNTQPLCHECSERRQKNQNKLPKLNSKPGPEGLPGMALGASRGEAYEPLAWNPEESTGGSFGPTDSTQPFSVQ

SEQ ID NO: 47934 - protein, 97 aa, Homo sapiens
MSKQNGGEGGIIINMSSLAGLMPVAQQPVYCASKHGIVGFTRSAALAANLMNSGVRLNAICPGFVNTAILESIEKEENMGQYIEYKDHIKDMIKYYG

SEQ ID NO: 47935 - protein, 874 aa, Homo sapiens
MDHYDSQQTNDYMQPEEDWDRDLLLDPAWEKQQRKTFTAWCNSHLRKAGTQIENIEEDFRDGLKLMLLLEVISEIVDGNVKMTLGMIWTIILRFAIQDISVEETSAKEGLLLWCQRKTAPYKNVNIQNFHISWKDGLGFCALIHRHRPELIDYGKLRKDDPLTNLNTAFDVAEKYLDIPKMLDAEDIVGTARPDEKAIMTYVSSFYHAFSGAQKAETAANRICKVLAVNQENEQLMEDYEKLASDLLEWIRRTIPWLENRVPENTMHAMQQKLEDFRDYRRLHKPPKVQEKCQLEINFNTLQTKLRLSNRPAFMPSEGRMVSDINNAWGCLEQVEKGYEEWLLNEIRRLERLDHLAEKFRQKASIHEAWTDGKEAMLRQKDYETATLSEIKALLKKHEAFESDLAAHQDRVEQIAAIAQELNELDYYDSPSVNARCQKICDQWDNLGALTQKRREALERTEKLLETIDQLYLEYAKRAAPFNNWMEGAMEDLQDTFIVHTIEEIQGLTTAHEQFKATLPDADKERLAILGIHNEVSKIVQTYHVNMAGTNPYTTITPQEINGKWDHVRQLVPRRDQALTEEHARQQHNERLRKQFGAQANVIGPWIQTKMEEIGRISIEMHGTLEDQLSHLRQYEKSIVNYKPKIDQLEGDHQLIQEALIFDNKHTNYTMEHIRVGWEQLLTTIARTINEVENQILTRDAKGISQEQMNEFRASFNHFDRDHSGTLGPEEFKACLISLGYDIGNDPQKKTGMMDTDDFRACLISMGYNMGEAEFARIMSIVDPNRLGVVTFQAFIDFMSRETADTDTADQVMASFKILAGDKNYITMDELRRELPPDQAEYCIARMAPYTGPDSVPGALDYMSFSTALYGESDL

SEQ ID NO: 47936 - protein, 182 aa, Homo sapiens
MGLPEERVRSGSGSRGQEEAGAGGRARSWSPPPEVSRSAHVPSLQRYRELHRRSVEEPREFWGDIAKEFYWKTPCPGPFLRYNFDVTKGKIFIEWMKGATTNICYNVLDRNVHEKKLGDKVAFYCGDVVLPCWPGWSQLPDLREGNEPGETTQITYHQLLVQVCQFSNVLRKQGIQKGDRVA

SEQ ID NO: 47937 - protein, 338 aa, Homo sapiens
MAQLGAVVAVASSFFCASLFSAVHKIEEGHIGVYYRGGALLTSTSGPGFHLMLPFITSYKSVQTTLQTDEVKNVPCGTSGGVMIYFDRIEVVNFLVPNAVYDIVKNYTADYDKALIFNKIHHELNQFCSVHTLQEVYIELFDQIDENLKLALQQDLTSMAPGLVIQAVRVTKPNIPEAIRRNYELMESEKTKLLIAAQKQKVVEKEAETERKKALIEAEKVAQVAEITYGQKVMEKETEKKISEIEDAAFLAREKAKADAECYTAMKIAEANKLKLTPEYLQLMKYKAIASNSKIYFGKDIPNMFMDSAGSVSKQFEGLADKLSFGLEDEPLETATKE

SEQ ID NO: 47938 - protein, 107 aa, Homo sapiens
MQGDARRRRNENYFDDIPRSKLERQMAQTGDWGEPSITLRPPNEATASTPVQYWQHHPEKLIFQSCDYKAFYLGSMLIKELRGTESTQDACAKMRLSNFNFRSLQSK

SEQ ID NO: 47939 - protein, 262 aa, Homo sapiens
MNCEREQLRGNQEAAAAPDTMAQPYASAQFAPPQNGIPAEYTAPHPHPAPEYTGQTTVPEHTLNLYPPAQTHSEQSPADTSAQTVSGTATTDDAAPTDGQPQTQPSENTENKSQPKRLHVSNIPFRFRDPDLRQMFGQFGKILDVEIIFNERGSKGFGFVTFENSADADRAREKLHGTVVEGRKIEVNNATARVMTNKKTVNPYTNGWKLNPVVGAVYSPEFYAGTVLLCQANQEGSSMYSAPSSLVYTSAMPGFPYPAATA

SEQ ID NO: 47940 - protein, 97 aa, Homo sapiens
MSGELSNRFQGGKAFGLLKARQERRLAEINREFLCDQKYSDEENLPEKLTAFKEKYMEFDLNNEGEIDLMSLKRMMEKLGVPKTHLEMKKMISEGGY

SEQ ID NO: 47941 - protein, 229 aa, Homo sapiens
MDRSSLLQLIQEQQLDPENTGFIGADTFTGLVHSHELPLDPAKLDMLVALAQSNEQGQVCYQELVDLIIVFLCYGARLNKWVLQTYHPEYMKSPLVYHPGHRARAWRFLTYMFMHVGLEQLGFNALLQLMIGVPLEMVHGLLRISLLYLAGVLAGSLTVSITDMRAPVVGGSGGVYALCSAHLANVVMNWAGMRCPYKLLRMVLALVCMSSEVGRAVWLRFSPPLPASG

SEQ ID NO: 47942 - protein, 71 aa, Homo sapiens
MSDPITLNVGGKLYTTSLATLTSFPDSMLGAMFSGKMPTKRDSQGNCFIDRDGKVFRYILNFLRTSHLDLP

SEQ ID NO: 47943 - protein, 73 aa, Homo sapiens
MDVTSQARGVGLEMYPGTAQPAAPNTTSPELNLSHPLLGTALANGTGELSEHQQYVIGLFLSCLYTIFLFPIG

SEQ ID NO: 47944 - protein, 60 aa, Homo sapiens
MDEQALLGLNPNADSDFRQRALAYFEQLKISPDAWQVCAEALAQRTYSDDHVKFFCFQVL

SEQ ID NO: 47945 - protein, 1932 aa, Homo sapiens
MFRQFYLWTCLASGIILGSLFEICLGQYDDGTILVDNMLIKGTAGGPDPTIELSLKDNVDYWVLMDPVKQMLFLNSTGRVLDRDPPMNIHSIVVQVQCINKKVGTIIYHEVRIVVRDRNDNSPTFKHESYYATVNELTPVGTTIFTGFSGDNGATDIDDGPNGQIEYVIQYNPDDPTSNDTFEIPLMLTGNIVLRKRLNYEDKTRYFVIIQANDRAQNLNERRTTTTTLTVDVLDGDDLGPMFLPCVLVPNTRDCRPLTYQAAIPELRTPEELNPIIVTPPIQAIDQDRNIQPPSDRPGILYSILVGTPEDYPRFFHMHPRTAELSLLEPVNRDFHQKFDLVIKAEQDNGHPLPAFAGLHIEILDENNQSPYFTMPSYQGYILESAPVGATISDSLNLTSPLRIVALDKDIEDTKDPELHLFLNDYTSVFTVTQTGITRYLTLLQPVDREEQQTYTFSITAFDGVQESEPVIVNIQVMDANDNTPTFPEISYDVYVYTDMRPGDSVIQLTAVDADEGSNGEITYEILVGAQGDFIINKTTGLITIAPGVEMIVGRTYALTVQAADNAPPAERRNSICTVYIEVLPPNNQSPPRFPQLMYSLEISEAMRVGAVLLNLQATDREGDSITYAIENGDPQRVFNLSETTGILTLGKALDRESTDRYILIITASDGRPDGTSTATVNIVVTDVNDNAPVFDPYLPRNLSVVEEEANAFVGQVKATDPDAGINGQVHYSLGNFNNLFRITSNGSIYTAVKLNREVRDYYELVVVATDGAVHPRHSTLTLAIKVLDIDDNSPVFTNSTYTVLVEENLPAGTTILQIEAKDVDLGANVSYRIRSPEVKHFFALHPFTGELSLLRSLDYEAFPDQEASITFLVEAFDIYGTMPPGIATVTVIVKDMNDYPPVFSKRIYKGMVAPDAVKGTPITTVYAEDADPPGLPASRVRYRVDDVQFPYPASIFEVEEDSGRVITRVNLNEEPTTIFKLVVVAFDDGEPVMSSSATVKILVLHPGEIPRFTQEEYRPPPVSELATKGTMVGVISAAAINQSIVYSIVSGNEEDTFGINNITGVIYVNGPLDYETRTSYVLRVQADSLEVVLANLRVPSKSNTAKVYIEIQDENNHPPVFQKKFYIGGVSEDARMFTSVLRVKATDKDTGNYSVMAYRLIIPPIKEGKEGFVVETYTGLIKTAMLFHNMRRSYFKFQVIATDDYGKGLSGKADVLVSVVNQLDMQVIVSNVPPTLVEKKIEDLTEILDRYVQEQIPGAKVVVESIGARRHGDAFSLEDYTKCDLTVYAIDPQTNRAIDRNELFKFLDGKLLDINKDFQPYYGEGGRILEIRTPEAVTSIKKRGESLGYTEGALLALAFIIILCCIPAILVVLVSYRQRQAECTKTARIQAALPAAKPAVPAPAPVAAPPPPPPPPPGAHLYEELGDSSMHNLFLLYHFQQSRGNNSVSEDRKHQQVVMPFSSNTIEAHKSAHVDGSLKSNKLKSARKFTFLSDEDDLSAHNPLYKENISQVSTNSDISQRTDFVDPFSPKIQAKSKSLRGPREKIQRLWSQSVSLPRRLMRKVPNRPEIIDLQQWQGTRQKAENENTGICTNKRGSSNPLLTTEEANLTEKEEIRQGETLMIEGTEQLKSLSSDSSFCFPRPHFSFSTLPTVSRTVELKSEPNVISSPAECSLELSPSRPCVLHSSLSRRETPICMLPIETERNIFENFAHPPNISPSACPLPPPPPISPPSPPPAPAPLAPPPDISPFSLFCPPPSPPSIPLPLPPPTFFPLSVSTSGPPTPPLLPPFPTPLPPPPPSIPCPPPPSASFLSTECVCITGVKCTTNLMPAEKIKSSMTQLSTTTVCKTDPQREPKGILRHVKNLAELEKSVANMYSQIEKNYLRTNVSELQTMCPSEVTNMEITSEQNKGSLNNIVEGTEKQSHSQSTSL

SEQ ID NO: 47946 - protein, 88 aa, Homo sapiens
MLRILCLALCSLLTGTRADPGALLRLGMDIMNREVQSAMDESHILEKMAAEAGKKQPGMKPIKGITNEQGHFEEEMRLESQISTLHAT

SEQ ID NO: 47947 - protein, 73 aa, Homo sapiens
QTPESLDFLKVPDQGAAGVRRQTTSRPPPAGGRPKPQPKPKPQVRGWGLGAGLLALLSLGLQLECGWPILVCV

SEQ ID NO: 47948 - protein, 868 aa, Homo sapiens
  MOD_RES (1)..(1): Any amino acid
XDLPDESVSVQKDFMVLKTKDEHAQSNEIVVNDSGSDNVKKQRTEMSSKAMPDSFSEQQAKDLACHITSDLATRGPWDKKVFRTWESSGATNNKSQKEKLSHVLVHDVRENHIGHPESKSVDQKNEFMSVTERERKLLTNGSLSEIKEMTVKSPSKKVLYREYVVKEGDHPGGLLDQPSRRSESSAVSHIPVRVADERRMLSSNIPDGFCEQSAFPKHELSQKLSQSSMSKETVETQHFNSIEDEKVTYSEISKVSKHQSYVGLCPPLEETETSPTKSPDSLEFSPGKESPSSDVFDHSPIDGLEKLAPLAQTEGGKEIKTLPVYVSFVQVGKQYEKEIQQGGVKKIISQECKTVQETRGTFYTTRQQKQPPSPQGSPEDDTLEQVSFLDSSGKSPLTPETPSSEEVSYEFTSKTPDSLIAYIPGKPSPIPEVSEESEEEEQAKSTSLKQTTVEETAVEREMPNDVSKDSNQRPKNNRVAYIEFPPPPPLDADQIESDKKHHYLPEKEVDMIEVNLQDEHDKYQLAEPVIRVQPPSPVPPGADVSDSSDDESIYQPVPVKKYTFKLKEVDDEQKEKPKASAEKASNQKELESNGSGKDNEFGLGLDSPQNEIAQNGNNDQSITECSIATTAEFSHDTDATEIDSLDGYDLQDEDDGLTESDSKLPIQAMEIKKDIWNTEGILKPADRSFSQSKLEVIEEEGKVGPDEDKPPSKSSSSEKTPDKTDQKSGAQFFTLEGRHPDRSVFPDTYFSYKVDEEFATPFKTVATKGLDFDPWSNNRGDDEVFDSKSREDETKPFGLAVEDRSPATTPDTTPARTPTDESTPTSEPNPFPFHEGKMFEMTRSGAIDMSKRDFVEERLQFFQIVVRP

SEQ ID NO: 47949 - protein, 188 aa, Homo sapiens
MDRFLGFVKAIRRSRRRKGKKYRPEEDYHEGYEDVYYYASEHFRNESPYTKSASQTKPPDGALAVRRQSIPEEFKGSTVVELMKKEGTTLGLTVSGGIDKDGKPRVSNLRQGGIAARSDQLDVGDYIKAVNGINLAKFRHDEIISLLKNVGERVVLEVEYELPPVSVQGSSVIFRTVEVTLHKEGNTF

SEQ ID NO: 47950 - protein, 52 aa, Homo sapiens
MSVLNKTKWKGGTLQIQLAKESFLHRLAQEREAAKAKKEESTTGNANLLEKT

SEQ ID NO: 47951 - protein, 128 aa, Homo sapiens
MSSRKSKSNSLIHTECLSQVQRILRERFCRQSPHSNLFGVQVQYKHLSELLKRTALHGESNSVLIIGPRGSGKTMLINHALKELMEIEEVSENVLQVHLNGLLQINDKIALKEITRQLNLENVVGDKV

SEQ ID NO: 47952 - protein, 157 aa, Homo sapiens
MDSNTAPLGPSCPQPPPAPQPQARSRLNATASLEQERSERPRAPGPQAGPGPGVRDAAAPAEPQAQHTRSRERADGTGPTKGDMEIPFEEVLERAKAGDPKAQTEVGKHYLQLAGDTDEELNSCTAVDWLVLAAKQGRREAVKLLRRCLADRRGGSV

SEQ ID NO: 47953 - protein, 128 aa, Homo sapiens
EELTSTSVEHIIVNPNAAYDKFKDKRVGTKGLDFSDRIGKTKRTGYESGEYEMLGEGLGVKETPQQKYQRLLHEVQELTTEVEKIKNPLSAGLQGACLMETVELLQAKVSALDLAVLDQVEARLQSVL

SEQ ID NO: 47954 - protein, 693 aa, Homo sapiens
MPLAFCGSENHSAAYRVDQGVLNNGCFVDALNVVPHVFLLFITFPILFIGWGSQSSKVHIHHSTWLHFPGHNLRWILTFMLLFVLVCEIAEGILSDGVTESHHLHLYMPAGMAFMAAVTSVVYYHNIETSNFPKLLIALLVYWTLAFITKTIKFVKFLDHAIGFSQLRFCLTGLLVILYGMLLLVEVNVIRVRRYIFFKTPREVKPPEDLQDLGVRFLQPFVNLLSKGTYWWMNAFIKTAHKKPIDLRAIGKLPIAMRALTNYQRLCEAFDAQRKDIQGTQGARAIWQALSHAFGRRLVLSSTFRILADLLGFAGPLCIFGIVDHLGKENDVFQPKTQFLGVYFVSSQEFLANAYVLAVLLFLALLLQRTFLQASYYVAIETGINLRGAIQTKIYNKIMHLSTSNLSMGEMTAGQICNLVAIDTNQLMWFFFLCPNLWAMPVQIIVGVILLYYILGVSALIGAAVIILLAPVQYFVATKLSQAQRSTLEYSNERLKQTNEMLRGIKLLKLYAWENIFRTRVETTRRKEMTSLRAFAIYTSISIFMNTAIPIAAVLITFVGHVSFFKEADFSPSVAFASLSLFHILVTPLFLLSSVVRSTVKALVRATKNEAIPSPRGCPMDIRRHPLCLSFPGQVSPTLSTAPEPSQPQPVKQLPPSAGSCSDWPTALGGSHFQALEPHGDSATVPEALPSWE

SEQ ID NO: 47955 - protein, 259 aa, Homo sapiens
MATAAQGPLSLLWGWLWSERFWLPENVSWADLEGPADGYGYPRGRHILSVFPLAAGIFFVRLLFERFIAKPCALCIGIEDSGPYQAQPNAILEKVFISITKYPDKKRLEGLSKQLDWNVRKIQCWFRHRRNQDKPPTLTKFCESMWRFTFYLCIFCYGIRFLWSSPWFWDIRQCWHNYPFQDFLIMFVHHLVTIGLISFSYINNMVRVGTLIMCLHDVSDFLLEAAKLANYAKYQRLCDTLFVIFSAVFMVTRLGIYPF

SEQ ID NO: 47956 - protein, 231 aa, Homo sapiens
MPASKRRIPVSQPGMADPHQLFDDTSSAQSRGYGAQRAPGGLSYPAASPTPHAAFLADPVSNMAMAYGSSLAAQGKELVDKNIDRFIPITKLKYYFAVDTMYVGRKLGLLFFPYLHQDWEVQYQQDTPVAPRFDVNAPDLYIPAMAFITYVLVAGLALGTQDRFSPDLLGLQASSALAWLTLEVLAILLSLYLVTVNTDLTTIDLVAFLGYKYVGMIGGVLMGLLFGKIGY

SEQ ID NO: 47957 - protein, 37 aa, Homo sapiens
DSFQQIMSFSPQDLRRRLWVIFPGEEGLDYGGVAREG

SEQ ID NO: 47958 - protein, 204 aa, Homo sapiens
MALRGVSVRLLSRGPGLHVLRTWVSSAAQTEKGGRTQSQLAKSSRPEFDWQDPLVLEEQLTTDEILIRDTFRTYCQERLMPRILLANRNEESGSVAQAGVQWHDLGSLQILPPRLKRFSCLHPSSSWDYRIWLCWGFVCGLWAPGPRAGAGGQWLQVGDECPVLPRHAPYLCLWQRGTAAEVPAPAGQGGAPGLLRAHRAQQRK

SEQ ID NO: 47959 - protein, 39 aa, Homo sapiens
MESKALLVLTLAVWLQSLTASRGGVAAADLILKLQIFKF

SEQ ID NO: 47960 - protein, 171 aa, Homo sapiens
  MOD_RES (1)..(1): Any amino acid
XSQSHGNSMTELKPSSKAHLTKLKIPSQPLDASASGDVSCVDEILKESQQSNFGTGEQKRYNPSKTSNGHQSKSMLKDDLKLSSSEDSDGEQDCDKTMPRSTPGSNSEPSHHNSEGADNSRDDSSSHSGSESSSGSDSESESSSSDSEANEPSQSASPEPEPPPTNKWQLD

SEQ ID NO: 47961 - protein, 104 aa, Homo sapiens
NGSPSLERMDARQAEHPKPSACRNLFGPVDHEELTRDLEKHCRDMEEASQRKWNFDFQNHKPLEDSSTQNKRANRTEENVSDGSPNAGSVEQTPKKPGLRRRQT

SEQ ID NO: 47962 - protein, 76 aa, Homo sapiens
MPAPTQLFFPLIRNCELSRIYGTACYCHHKHLCCSSSYIPQSRLRYTPHPAYATFCRPKENWWQYTQGRRYASTPQ

SEQ ID NO: 47963 - protein, 199 aa, Homo sapiens
  MOD_RES (1)..(1): Any amino acid
XEPISSEHLHRAVSVNDEDLLVRILQGGRVKVDVPNKFGFTALMVAAQKGYTRLVKILVSNGTDVNLKNGSGKDSLMLACYAGHLDVVKYLRRHGASWQARDLGGCTALHWAADGGHCSVIEWMIKDGCEVDVVDTGSGWTPLMRVSAVSGNQRVASLLIDAGANVNVKDRNGKTPLMSVVSLLEERKKKQRPKKSCVC

SEQ ID NO: 47964 - protein, 145 aa, Homo sapiens
MWSWKCLLFWAVLVTATLCTARPSPTLPEQDALPSSEDDDDDDDSSSEEKETDNTKPNPVAPYWTSPEKMEKKLHAVPAAKTVKFKCPSSGTPNPTLRWLKNGKEFKPDHRIGGYKVRYATWSIIMDSVVPSDKGNYTCIVENEY

SEQ ID NO: 47965 - protein, 457 aa, Homo sapiens
MYDDSYVPGFEDSEAGSADSYTSRPSLDSDVSLEEDRESARREVESQAQQQLERAKHKPVAFAVRTNVSYCGVLDEECPVQGSGVNFEAKDFLHIKEKYSNDWWIGRLVKEGGDIAFIPSPQRLESIRLKQEQKARRSGNPSSLSDIGNRRSPPPSLAKQKQKQVTDMMQKALFDFLKHRFDGRISITRVTADLSLAKRSVLNNPGKRTIIERSSARSSIAEVQSEIERIFELAKSLQLVVLDADTINHPAQLAKTSLAPIIVFVKVSSPKVLQRLIRSRGKSQMKHLTVQMMAYDKLVQCPPESFDVILDENQLEDACEHLAEYLEVYWRATHHPAPGPGLLGPPSAIPGLQNQQLLGERGEEHSPLERDSLMPSDEASESSRQAWTGSSQRSSRHLEEDYADAYQDLYQPHRQHTSGLPSANGHDPQDRLLAQDSEHNHSDRNWQRNRPWPKDSY

SEQ ID NO: 47966 - protein, 75 aa, Homo sapiens
MRQGLLVLALVLVLVLVLAAGSQVQEWYPRESHALNWNKGQEEAGGVRGKGEQSGPAPRAPRLQTIGRMFRASRV

SEQ ID NO: 47967 - protein, 992 aa, Homo sapiens
MDGFAGSLDDSISAASTSDVQDRLSALESRVQQQEDEITVLKAALADVLRRLAISEDHVASVKKSVSSKGQPSPRAVIPMSCITNGSGANRKPSHTSAVSIAGKETLSSAAKSGTEKKKEKPQGQREKKEESHSNDQSPQIRASPSPQPSSQPLQIHRQTPESKNATPTKSIKRPSPAEKSHNSWENSDDSRNKLSKIPSTPKLIPKVTKTADKHKDVIINQAKMSTREKNSQEGEYIKMFMRGRPITMFIPSDVDNYDDIRTELPPEKLKLEWAYGYRGKDCRANVYLLPTGKIVYFIASVVVLFNYEERTQRHYLGHTDCVKCLAIHPDKIRIATGQIAGVDKDGRPLQPHVRVWDSVTLSTLQIIGLGTFERGVGCLDFSKADSGVHLCIIDDSNEHMLTVWDWQKKAKGAEIKTTNEVVLAVEFHPTDANTIITCGKSHIFFWTWSGNSLTRKQGIFGKYEKPKFVQCLAFLGNGDVLTGDSGGVMLIWSKTTVEPTPGKGPKGVYQISKQIKAHDGSVFTLCQMRNGMLLTGGGKDRKIILWDHDLNPEREIEVPDQYGTIRAVAEGKADQFLVGTSRNFILRGTFNDGFQIEVQGHTDELWGLATHPFKDLLLTCAQDRQVCLWNSMEHRLEWTRLVDEPGHCADFHPSGTVVAIGTHSGRWFVLDAETRDLVSIHTDGNEQLSVMRYSIDGTFLAVGSHDNFIYLYVVSENGRKYSRYGRCTGHSSYITHLDWSPDNKYIMSNSGDYEILYWDIPNGCKLIRNRSDCKDIDWTTYTCVLGFQVFGVWPEGSDGTDINALVRSHNRKVIAVADDFCKVHLFQYPCSKAKAPSHKYSAHSSHVTNVSFTHNDSHLISTGGKDMSIIQWKLVEKLSLPQNETVADTTLTKAPVSSTESVIQSNTPTPPPSQPLNETAEEESRISSSPTLLENSLEQTVEPSEDHSEEESEEGSGDLGEPLYEEPCNEISKEQAKATLLEDQQDPSPSS

SEQ ID NO: 47968 - protein, 109 aa, Homo sapiens
  MOD_RES (1)..(1): Any amino acid
XATSPSSSWAATLALWLGLLFPMETAQHLAQPWTPTRPAIITVNAKPIPSLQCVGQMASPTCLPALLAATARISRAVRASPPSLLRTQPWFLENAPVLGAKRPSSLSSV

SEQ ID NO: 47969 - protein, 98 aa, Homo sapiens
MSDRPTARRWGVDLCVPERTSWWLSKGSGLKLSGKQSQRNFWPCLFLFSSAWDPPSTGVEQKSLYRSTWFSSPFALDSALQPWCSALAISAVATSTLQ

SEQ ID NO: 47970 - protein, 112 aa, Homo sapiens
  MOD_RES (1)..(1): Any amino acid
XKRWKELSKEDLSPAFDHSPNKIMTEKYNGNRIGLEEEKLTGDRCTGLSSKMQDTMEENSESALRKRIREDRKATTAQKVQQMKQRLNENERKRKSFPHFKKKSKQRNKSFS

SEQ ID NO: 47971 - protein, 204 aa, Homo sapiens
FSISKIHSLYGKCLSTLSAVKDGSILSHPALPGTEEAMFADSEHRMKVAALFLQQCHFLRQAGHSEKAISLFQAMVDFTFFKPDSVKDLPTKGQVEFFEPFWDSGEPRAGEKGARGWKAWMHQQERGGWVVINPDEDDDEPEEDDQEIKDKTLPRWQIWLAAERSRDQRHWRPWRPDKTKKQTEEDCEDPERQVLFDDIGQSLI

SEQ ID NO: 47972 - protein, 154 aa, Homo sapiens
MVTFLQGELHVSKLFNHPNIVPYRATFIADNELWVVTSFMAYGSAKDLICTHFMDGMNELAIAYILQGVLKALDYIHHMGYVHRSVKASHILISVDGKVYLSGLRSNLSMISHGQRQRVVHDFPKYSVKVLPWLSPEVLQQNLQGYDAKSDIYS

SEQ ID NO: 47973 - protein, 94 aa, Homo sapiens
MQYVIYGIASFFFLYGIILLAEGFYTTSAVKELHGEFKTTACGRCISGMFVFLTYVLGVAWLGVFGFSAVPVFMFYNIWSTCEVIKSPQTNGTT

SEQ ID NO: 47974 - protein, 35 aa, Homo sapiens
MEIRGALDLRKRLSTHRSITASVPSLPEVALTPVP

SEQ ID NO: 47975 - protein, 105 aa, Homo sapiens
  MOD_RES (1)..(1): Any amino acid
XPQENTEEALLLLLISESMANRDAVLSRIPEHKSDRLISLQSASVVYDLLTIALGRRGQYEMLSEGPQPVTHRSPSSFLPGSAACHLQTDPRGSGVCPPSSSASR

SEQ ID NO: 47976 - protein, 85 aa, Homo sapiens
MPFTLHLRSRLPSAIRSLILQKKPNIRNTSSMAGELRPASLVVLPRSLAPAFERFCQVNTGPLPLLGQSEPEKWMLPPQGAISET

SEQ ID NO: 47977 - protein, 281 aa, Homo sapiens
  MOD_RES (1)..(1): Any amino acid
XIWDDLRAGIQQVYTRQSMAKSRYMELYTHVYNYCTSVHQSNQARGAGVPPSKSKKGQTPGGAQFVGLELYKRLKEFLKNYLTNLLKDGEDLMDESVLKFYTQQWEDYRFSSKVLNGICAYLNRHWVRRECDEGRKGIYEIYSAEARLLEEQRRVQVYLHESTQDELARKCEQVLIEKHLEIFHTEFQNLLDADKNEDLGRMYNLVSRIQDGLGELKKLLETHIHNQGLAAIEKCGEAALNDPKMYVQTVLDVHKKYNALVMSAFNNDAGFVAALDKACGR

SEQ ID NO: 47978 - protein, 126 aa, Homo sapiens
  MOD_RES (1)..(1): Any amino acid
XQEAAAKKAVVLSARVHPGESNGSWVMKGFLDFILSNSPDAQLLRDIFVFKVLPMLNPDGVIVGNYRCSLAGRDLNRHYKTILKESFPCIWYTRNMIKSSLFTVVILRSKNAKKEQDELLCGGWES

SEQ ID NO: 47979 - protein, 659 aa, Homo sapiens
MAAFSKYLTARNSSLAGAAFLLLCLLHKRRRALGLHGKKSGKPPLQNNEKEGKKERAVVDKVFFSRLIQILKIMVPRTFCKETGYLVLIAVMLVSRTYCDVWMIQNGTLIESGIISRNKALFKKPFFKFIAATPMISLVNNFLKYGLNELKLCFRVRLTKYLYEEYLQAFTYYKMGNLDNRIANPDQLLTQDVEKFCNSVVDLYSNLSKPFLDIVLYIFKLTSAIGAQGPASMMAYLVVSGLFLTRLRRPIGKMTITEQKYEGEYRYVNSRLITNSEEIAFYNGNKREKQTVHSVFRKLVEHLHNFILFRFSMGFIDSIIAKYLATVVGYLVVSRPFLDLSHPRHLKSTHSELLEDYYQSGRMLLRMSQALGRIVLAGREMTRLAGFTARITELMQVLKDLNHGKYERTMVSQQEKGIEGVQVIPLIPGAGEIIIADNIIKFDHVPLATPNGDVLIRDLNFEVRSGANVLICGPNGCGKSSLFRVLGELWPLFGGRLTKPERGKLFYVPQRPYMTLGTLRDQVIYPDGREDQKRKGISDLVLKEYLDNVQLGHILEREGGWDSVQDWMDVLSGGEKQRMAMARLFYHKPQFAILDECTSAVSVDVEGYIYSHCRKVGITLFTVSHRKSLWKHHEYYLHMDGRGNYEFKQITEDTVEFGS

SEQ ID NO: 47980 - protein, 1070 aa, Homo sapiens
MARRHERVTRRMWTWAPGLLMMTVVFWGHQGNGQGQGSRLRQEDFPPRIVEHPSDVIVSKGEPTTLNCKAEGRPTPTIEWYKDGERVETDKDDPRSHRMLLPSGSLFFLRIVHGRRSKPDEGSYVCVARNYLGEAVSRNASLEVALLRDDFRQNPTDVVVAAGEPAILECQPPRGHPEPTIYWKKDKVRIDDKEERISIRGGKLMISNTRKSDAGMYTCVGTNMVGERDSDPAELTVFERPTFLRRPINQVVLEEEAVEFRCQVQGDPQPTVRWKKDDADLPRGRYDIKDDYTLRIKKTMSTDEGTYMCIAENRVGKMEASATLTVRARPVAPPQFVVRPRDQIVAQGRTVTFPCETKGNPQPAVFWQKEGSQNLLFPNQPQQPNSRCSVSPTGDLTITNIQRSDAGYYICQALTVAGSILAKAQLEVTDVLTDRPPPIILQGPANQTLAVDGTALLKCKATGDPLPVISWLKEGFTFPGRDPRATIQEQGTLQIKNLRISDTGTYTCVATSSSGETSWSAVLDVTESGATISKNYDLSDLPGPPSKPQVTDVTKNSVTLSWQPGTPGTLPASAYIIEAFSQSVSNSWQTVANHVKTTLYTVRGLRPNTIYLFMVRAINPQGLSDPSPMSDPVRTQDISPPAQGVDHRQVQKELGDVLVRLHNPVVLTPTTVQVTWTVDRQPQFIQGYRVMYRQTSGLQATSSWQNLDAKVPTERSAVLVNLKKGVTYEIKVRPYFNEFQGMDSESKTVRTTEEAPSAPPQSVTVLTVGSYNSTSISVSWDPPPPDHQNGIIQEYKIWCLGNETRFHINKTVDAAIRSVIIGGLFPGIQYRVEVAASTSAGVGVKSEPQPIIIGRRNEVVITENNNSITEQITDVVKQPAFIAGIGGACWVILMGFSIWLYWRRKKRKGLSNYAVTFQRGDGGLMSNGSRPGLLNAGDPSYPWLADSWPATSLPVNNSNSGPNEIGNFGRGDVLPPVPGQGDKTATMLSDGAIYSSIDFTTKTSYNSSSQITQATPYATTQILHSNSIHELAVDLPDPQWKSSIQQKTDLMGFGYSLPDQNKGNNGGKGG

SEQ ID NO: 47981 - protein, 372 aa, Homo sapiens
MFTLDVKSNTVFDIITDNCDLHFKISRDRLSASSLTMESFAFLWAGGRASYGVSKGKVCFEMKVTEKIPVRHLYTKDIDIHEVRIGWSLTTSGMLLGEEEFSYGYSLKGIKTCNCETEDYGEKFDENDVITCFANFESDEVELSYAKNGQDLGVAFKISKEVLAGRPLFPHVLCHNCAVEFNFGQKEKPYFPIPEEYTFIQNVPLEDRVRGPKGPEEKKDCEVVMMIGLPGAGKTTWVTKHAAENPGKYNILGTNTIMDKMMVAGFKKQMADTGKLNTLLQRAPQCLGKFIEIAARKKRNFILDQTNVSAAAQRRKMCLFAGFQRKAVVVCPKDEDYKQRTQKKAEVEGKDLPEHAVLKMKEGRSPKTLGAI

SEQ ID NO: 47982 - protein, 151 aa, Homo sapiens
RRLPRLRGHRHPQPLQQPAQLPAAQPAALTRAAPPAGSPANNLISKVPRGALSRQTQLRELYLQHNQLTDSGLDATTFSKLHSLEYLDLSHNQLTTVPAGLPRTLAILHLGRNRIRQVEAARLHGARGLRYLLLQHNQLGSSGLPAGALRP

SEQ ID NO: 47983 - protein, 369 aa, Homo sapiens
MDPAARVVRALWPGGCALAWRLGGRPQPLLPTQSRAGFAGAAGGPSPVAAARKGSPRLLGAAALALGGALGLYHTARWHLRAQDLHAERSAAQLSLSSRLQLTLYQYKTCPFCSKVRAFLDFHALPYQVVEVNPVRRAEIKFSSYRKVPILVAQEGESSQQLNDSSVIISALKTYLVSGQPLEEIITYYPAMKAVNEQGKEVTEFGNKYWLMLNEKEAQQVEEMKWRQWADDWLVHLISPNVYRTPTEALASFDYIVREGKFGAVEGAVAKYMGAAAMYLISKRLKSRHRLQDNVREDLYEAADKWVAAVGKDRPFMGGQKPNLADLAVYGVLRVMEGLDAFDDLMQHTHIQPWYLRVERAITEASPAH

SEQ ID NO: 47984 - protein, 28 aa, Homo sapiens
MQRSIMSFFHPKKEGKAKKPEKEASNSS

SEQ ID NO: 47985 - protein, 138 aa, Homo sapiens
MKWCATCRFYRPPRCSHCSVCDNCVEEFDHHCPWVNNCIGRRNYRYFFLFLLSLTAHIMGVFGFGLLYVLYHIEELSGVRTAVTMAVMCVAGLFFIPVAGLTGFHVVLVARGRTTNEQVTGKFRGGVNPFTNGCCNNV

SEQ ID NO: 47986 - protein, 67 aa, Homo sapiens
MNKLRQSFRRKKDVYVPEASRPHQWQTDEEGVRTGKCSFPVKYLGHVEVDESRGMHICEDAVKRLKA

SEQ ID NO: 47987 - protein, 314 aa, Homo sapiens
MCLEMAFPKMRLMYICLLVLGALCLYFSMYSLNPFKEQSFVYKKDGNFLKLPDTDCRQTPPFLVLLVTSSHKQLAERMAIRQTWGKERMVKGKQLKTFFLLGTTSSAAETKEVDQESQRHGDIIQKDFLDVYYNLTLKTMMGIEWVHRFCPQAAFVMKTDSDMFINVDYLTELLLKKNRTTRFFTGFLKLNEFPIRQPFSKWFVSKSEYPWDRYPPFCSGTGYVFSGDVASQVYNVSKSVPYIKLEDVFVGLCLERLNIRLEELHSQPTFFPGGLRFSVCLFRRIVACHFIKPRTLLDYWQALENSRGEDCPPV

SEQ ID NO: 47988 - protein, 1120 aa, Homo sapiens
MDLYSTPAAALDRFVARRLQPRKEFVEKARRALGALAAALRERGGRLGAAAPRVLKTVKGGSSGRGTALKGGCDSELVIFLDCFKSYVDQRARRAEILSEMRASLESWWQNPVPGLRLTFPEQSVPGALQFRLTSVDLEDWMDVSLVPAFNVLGQAGSGVKPKPQVYSTLLNSGCQGGEHAACFTELRRNFVNIRPAKLKNLILLVKHWYHQVCLQGLWKETLPPVYALELLTIFAWEQGCKKDAFSLAEGLRTVLGLIQQHQHLCVFWTVNYGFEDPAVGQFLQRQLKRPRPVILDPADPTWDLGNGAAWHWDLLAQEAASCYDHPCFLRGMGDPVQSWKGPGLPRAGCSGLGHPIQLDPNQKTPENSKSLNAVYPRAGSKPPSCPAPGPTGAASIVPSVPGMALDLSQIPTKELDRFIQDHLKPSPQFQEQVKKAIDIILRCLHENCVHKASRVSKGGSFGRGTDLRDGCDVELIIFLNCFTDYKDQGPRRAEILDEMRAQLESWWQDQVPSLSLQFPEQNVPEALQFQLVSTALKSWTDVSLLPAFDAVGQLSSGTKPNPQVYSRLLTSGCQEGEHKACFAELRRNFMNIRPVKLKNLILLVKHWYRQVAAQNKGKGPAPASLPPAYALELLTIFAWEQGCRQDCFNMAQGFRTVLGLVQQHQQLCVYWTVNYSTEDPAMRMHLLGQLRKPRPLVLDPADPTWNVGHGSWELLAQEAAALGMQACFLSRDGTSVQPWDVMPALLYQTPAGDLDKFISEFLQPNRQFLAQVNKAVDTICSFLKENCFRNSPIKVIKVVKGGSSAKGTALRGRSDADLVVFLSCFSQFTEQGNKRAEIISEIRAQLEACQQERQFEVKFEVSKWENPRVLSFSLTSQTMLDQSVDFDVLPAFDALGQLVSGSRPSSQVYVDLIHSYSNAGEYSTCFTELQRDFIISRPTKLKSLIRLVKHWYQQCTKISKGRGSLPPQHGLELLTVYAWEQGGKDSQFNMAEGFRTVLELVTQYRQLCIYWTINYNAKDKTVGDFLKQQLQKPRLECNGAILAHCNPPPPGFKQFFCLSLLSSWDQRRMPPGLSSWIRLTRQATWATMPAGTCWPRKLQPAHLPCAAWDGMASPSSHGQ

SEQ ID NO: 47989 - protein, 211 aa, Homo sapiens
MFHLRTCAAKLRPLTASQTVKTFSQNRPAAARTFQQIRCYSAPVAAEPFLSGTSSNYVEEMYCAWLENPKSVHKSWDIFFRNTNAGAPPGTAYQSPLPLSRGSLAAVAHAQSLVEAQPNVDKLVEDHLAVQSLIRAYQIRGHHVAQLDPLGILDADLDSSVPADIISSTDKLGFYGLDESDLDKVFHLPTTTFIGGQESALPLREIIRRLE

SEQ ID NO: 47990 - protein, 195 aa, Homo sapiens
MWRWIRQQLGFDPPHQSDTRTIYVANRFPQNGLYTPQKFIDNRIISSKYTVWNFVPKNLFEQFRRVANFYFLIIFLVQLMIDTPTSPVTSGLPLFFVITVTAIKQGYEDWLRHNSDNEVNGAPVYVVRSGGLVKTRSKNIRVGDIVRIAKDEIFPADLVLLSSDRLDGSCHVTTASLDGETNLKVCLHMFEYCSW

SEQ ID NO: 47991 - protein, 56 aa, Homo sapiens
DRGRSHAAEAPGDPQAAASLLAPMDVGEEPLEKAARARTAKDPNTYKVLSLEEEEY

SEQ ID NO: 47992 - protein, 296 aa, Homo sapiens
MTGPGGRRNDPWGRQRAREGAHTSKHPTPRTGWTARRRRGAWALRPGTAGGWAKGQDFPSQFHLLIPAPPGDFVQLPVPVIQQLYHWDCGLACSRMVLRYLGQLDDSEFERALQKLQLTRSIWTIDLAYLMHHFGVRHRFCTQTLGVDKGYKNQSFYRKHFDTEETRVNQLFAQAKACKVLVEKCTVSVKDIQAHLAQGHVAIVLVNSGVLHCDLCSSPVKYCCFTPSGHHCFCRTPDYQGHFIVLRGYNRATGCIFYNNPAYADPGMCSTSISNFEEARTSYGTDEDILFVYLDS

SEQ ID NO: 47993 - protein, 114 aa, Homo sapiens
MSHIQIPPGLTELLQGYTVEVLRQQPPDLVEFAVEYFTRLREARAPASVLPAATPRQSLGHPPPEPGPDRVADAKGDSESEEDEDLEVCAETYNPDEEEEDTDPRVIHPKTDEQ

SEQ ID NO: 47994 - protein, 354 aa, Homo sapiens
PDSSNEENDARWETKLDEVVTSEGKTKPLIPEMCFIYSEENIEYSPPNAFLEEDGTSLLISCAKCCVRVHASCYGIPSHEICDGWLCARCKRNAWTAECCLCNLRGGALKQTKNNKWAHVMCAVAVPEVRFTNVPERTQIDVGRIPLQRLKLKCIFCRHRVKRVSGACIQCSYGRCPASFHVTCAHAAGVLMEPDDWPYVVNITCFRHKVNPNVFTAQSKHSKNESCIATTTSAAAAGATILCELGHKSKACEKVISVGQTVITKHRNTRYYSCRVMAVTSQTFYEVMFDDGSFSRDTFPEDIVSRDCLKLGPPAEGEVVQVKWPDGKLYGAKYFGSNIAHMYQVEFEDGSQIA

SEQ ID NO: 47995 - protein, 866 aa, Homo sapiens
  MOD_RES (1)..(1): Any amino acid
XKSKGNNVFVVHKPSAVPSREGSESGPGPSSGSPSEESPPGPGGGLEDALPFPAALLRVPAEAPSDPRSASGEDDPCAPKKVKVDCDSFLCQNPGEPGLQEAQKAGGLPADASPLFRQLFLKSQEPLVSHEQMQVFQMITKSQRIFSHAQVAAVSSQLPAPEGKPAALRPLQGPWPQQPPPLAPAVDSLHAGPGNPEAEGSPARRRKTTPGVPREASPGSTRRDAKGGLKVAAVPTPLAAPSLDPSRNPDISSLAKQLRSSKGTLDLEDIFPSTGQRQTQLGGEEPPGASLPGKQAPAENGAASRITKGEKGPACSRGGGYRLLGNPRAPRFSGFRKEKAKMDMCCAASPSQVAMASFSSAGPPADPSKSKLTIFSRIQGGNIYRLPHPVKEENVAGRGNQQNGSPTDWTKPRSTFVCKNCSQMFYTEKGLSSHMCFHSDQWPSPRGKQEPQGQEKDGEERDSKESSQQRKRKKRPPPSTAGEPGPAGCHQSRLRSPMFLVDCLLKGLFQCSPYTPPPMLSPIREGSGVYFNTLCSTSTQASPDQLISSMLDQVDGSFGICVVKDDTKISIEPHINIGSRFQAEIPELQERSLAGTDEHVASLVWKPWGDMMISSETQDRVTELCNVACSSVMPGGGTNLELALHCLHEAQGNVQVALETLLLRGPHKPRTHLLADYRYTGSDVWTPIEKRLFKKAFYAHKKDFYLIHKMIQTKTVAQCVEYYYIWKKMIKFDCGRAPGLEKRVKREPEEVERTEEKVPCSPRERPSHHPTPKLKTKSYRRESILSSSPNAGSKRTPELLGSAESQGIFPCRECERVFDKIKSRNAHMKRHRLQDHVEPIIRVKWPVKPFQLKEEELGADIGPLQW

SEQ ID NO: 47996 - protein, 108 aa, Homo sapiens
MALKIPAKRIFGDNFDPDFIKQRRAGLNEFIQNLVRYPELYNHPDVRAFLQMDSPKHQSDPSEDEDERSSQKLHSTSQNINLGPSGNPHAKPTDFDFLKVIGKGSFGK

SEQ ID NO: 47997 - protein, 133 aa, Homo sapiens
MHPAAFPLPVVVAAVLWGAAPTRGLIRAGFLVEAHPDNACSPIAPPPPAPVNGSVFIALLRRFDCNFDLKVLNAQKAGYGAAVVHNVNSNELLNMVWNSEEIQQQIWIPSVFIGERSSEYLRALFVYEKGRPV

SEQ ID NO: 47998 - protein, 114 aa, Homo sapiens
  MOD_RES (1)..(1): Any amino acid
XIHPTAKVAPSAVLGPNVSIGKGVTVGEGVRLRESIVLHGATLQEHTCVLHSIVGWGSTVGRWARVEGTPSDPNPNDPRARMDSESLFKDGKLLPAITILGMASWGPGLGEPLS

SEQ ID NO: 47999 - protein, 460 aa, Homo sapiens
MQLPRWWELGDPCAWTGQGRGTRRMSPATTGTFLLTVYSIFSKVHSDRNVYPSAGVLFVHVLEREYFKGEFPPYPKPGEISNDPITFNTNLMGYPDRPGWLRYIQRTPYSDGVLYGSPTAENVGKPTIIEITAYNRRTFETARHNLIINIMSAEDFPLPYQAEFFIKNMNVEEMLASEVLGDFLGAVKNVWQPERLNAINITSALDRGGRVPLPINDLKEGVYVMVGADVPFSSCLREVENPQNQLRCSQEMEPVITCDKKFRTQFYIDWCKISLVDKTKQVSTYQEVIRGEGILPDGGEYKPPSDSLKSRDYYTDFLITLAVPSAVALVLFLILAYIMCCRREGVEKRNMQTPDIQLVHHSAIQKSTKELRDMSKNREIAWPLSTLPVFHPVTGEIIPPLHTDNYDSTNMPLMQTQQNLPHQTQIPQQQTTGDFRLTTFQRFEVNGIPEERKLTEAMNL

SEQ ID NO: 48000 - protein, 71 aa, Homo sapiens
RKWDRCLADAVVKIGTGFGLGIVFSLTFFKRRMWPLAFGSGMGLGMAYSNCQHDFQAPYLLHGKYVKEQEQ

SEQ ID NO: 48001 - protein, 68 aa, Homo sapiens
MLKLEAEKKKLRTILQVQYVLQNLTQEHVQKDFKGGLNGAVYLPSKELDYLIKFSKLTCPERNESLSV

SEQ ID NO: 48002 - protein, 1032 aa, Homo sapiens
MAHLGPTPPPHSLNYKSEDRLSEQDWPAYFKVPCCGVDTSQIEAIRCTLVNCTCECFQPGKINLRTCDQCKHGWVAHALDKLSTQHLYHPTQVEIVQSNVVFDISSLMLYGTQAVPVRLKILLDRLFSVLKQEEVLHILHGLGWTLRDYVRGYILQDAAGKVLDRWAIMSREEEIITLQQFLRFGETKSIVELMAIQEKEGQAVAVPSSKTDSDIRTFIESNNRTRSPSLLAHLENSNPSSIHHFENIPNSLAFLLPFQYINPVSAPLLGLPPNGLLLEQPGLRLREPSLSTQNEYNESSESEVSPTPYKNDQTPNRNALTSITNVEPKTEPACVSPIQNSAPVSDLTKTEHPKSSFRIHRMRRMGSASRKGRVFCNACGKTFYDKGTLKIHYNAVHLKIKHRCTIEGCNMVFSSLRSRNRHSANPNPRLHMPMLRNNRDKDLIRATSGAATPVIASTKSNLALTSPGRPPMGFTTPPLDPVLQNPLPSQLVFSGLKTVQPVPPFYRSLLTPGEMVSPPTSLPTSPIIPTSGTIEQHPPPPSEPVVPAVMMATHEPSADLAPKKKPRKSSMPVKIEKEIIDTADEFDDEDDDPNDGGAVVNDMSHDNHCHSQEEMSPGMSVKDFSKHNRTRCISRTEIRRADSMTSEDQEPERDYENESESSEPKLGEESMEGDEHIHSEVSEKVLMNSERPDENHSEPSHQDVIKVKEEFTDPTYDMFYMSQYGLYNGGGASMAALHESFTSSLNYGSPQKFSPEGDLCSSPDPKICYVCKKSFKSSYSVKLHYRNVHLKEMHVCTVAGCNAAFPSRRSRDRHSANINLHRKLLTKELDDMGLDSSQPSLSKDLRDEFLVKIYGAQHPMGLDVREDASSPAGTEDSHLNGYGRGMAEDYMVLDLSTTSSLQSSSSIHSSRESDAGSDEGILLDDIDGASDSGESAHKAEAPALPGSLGAEVSGSLMFSSLSGSNGGIMCNICHKMYSNKGTLRVHYKTVHLREMHKCKVPGCNMMFSSVRSRNRHSQNPNLHKNIPFTSVD

SEQ ID NO: 48003 - protein, 182 aa, Homo sapiens
  MOD_RES (1)..(1): Any amino acid
XGVRPGMPPQPQGPAPLRRPDSSDDRYVMTKHATIYPTEEELQAVQKIVSITERALKLVSDSLSEHEKNKNKEGDDKKEGGKDRALKGVLRVGVLAKGLLLRGDRNVNLVLLCSEKPSKTLLSRIAENLPKQLAVISPEKYDIKCAVSEAAIILNSCVEPKMQVTITLTSPIIREENMREGG

SEQ ID NO: 48004 - protein, 672 aa, Homo sapiens
MGDILAHESELLGLVKEYLDFAEFEDTLKTFSKECKIKGKPLCKTVGGSFRDSKSLTIQKDLVAAFDNGDQKVFFDLWEEHISSSIRDGDSFAQKLEFYLHIHFAIYLLKYSVGRPDKEELDEKISYFKTYLETKGAALSQTTEFLPFYALPFVPNPMVHPSFKELFQDSWTPELKLKLIKFLALISKASNTPKLLTIYYRKVFNTDIHPNCNKEILQQLHQQLVEAERRSVTYLKRYNKIQADYHNLIGVTAELVDSLEATVSGKMITPEYLQSVCVRLFSNQMRQSLAHSVDFTRPGTASTMLRASLAPVKLKDVPLLPSLDYEKLKKDLILGSDRLKAFLLQALRWRLTTSHPGEQRETVLQAYISNDLLDCYSHNQRSVLQLLHSTSDVVRQYMARLINAFASLAEGRLYLAQNTKVLQMLEGRLKEEDKDIITRENVLGALQKFSLRRPLQTAMIQDGLIFWLVDVLKDPDCLSDYTLEYSVALLMNLCLRSTGKNMCAKVAGLVLKVLSDLLGHENHEIQPYVNGALYSILSVPSIREEARAMGMEDILRCFIKEGNAEMIRQIEFIIKQLNSEELPDGVLESDDDEDEDDEEDHDIMEADLDKDELIQPQLGELSGEKLLTTEYLGIMTNTGKTRRKGLANVQWSGDEPLQRPVTPGGHRNGYPV

SEQ ID NO: 48005 - protein, 144 aa, Homo sapiens
VCTDSAAPMWSCIVWELHSGANLLTYRGGQAGPRGLALLNGEYLLAAQLGKNYISAWELQRKDQLQQKIMCPGPVTCLTASPNGLYVLAGVAESIHLWEVSTGNLLVILSRHYQDVSCLQFTGDSSHFISGGKDCLVLVWSLCR

SEQ ID NO: 48006 - protein, 1243 aa, Homo sapiens
MPTPGKHGWTVLQGRIGRPDNPFRVALEYISSGNRSLSAVDFFALKNCSEGTSPGSKMALQSSFTCWNGTVLQLGQACDFHQDCAQGEDESQMCRKLPVGFYCNFEDGFCGWTQGTLSPHTPQWQVRTLKDARFQDHQDHALLLSTTDVPASESATVTSATFPAPIKSSPCELRMSWLIRGVLRGNVSLVLVENKTGKEQGRMVWHVAAYEGLSLWQWMVLPLLDVSDRFWLQMVAWWGQGSRAIVAFDNISISLDCYLTISGEDKILQNTAPKSRNLFERNPNKELKPGENSPRQTPIFDPTVHWLFTTCGASGPHGPTQAQCNNAYQNSNLSVEVGSEGPLKGIQIWKVPATDTYSISGYGAAGGKGGKNTMMRSHGVSVLGIFNLEKDDMLYILVGQQGEDACPSTNQLIQKVCIGENNVIEEEIRVNRSVHEWAGGGGGGGGATYVFKMKDGVPVPLIIAAGGGGRAYGAKTDTFHPERLENNSSVLGLNGNSGAAGGGGGWNDNTSLLWAGKSLQEGATGGHSCPQAMKKWGWETRGGFGGGGGGCSSGGGGGGYIGGNAASNNDPEMDGEDGVSFISPLGILYTPALKVMEGHGEVNIKHYLNCSHCEVDECHMDPESHKVICFCDHGTVLAEDGVSCIVSPTPEPHLPLSLILSVVTSALVAALVLAFSGIMIVYRRKHQELQAMQMELQSPEYKLSKLRTSTIMTDYNPNYCFAGKTSSISDLKEVPRKNITLIRGLGHGAFGEVYEGQVSGMPNDPSPLQVAVKTLPEVCSEQDELDFLMEALIISKFNHQNIVRCIGVSLQSLPRFILLELMAGGDLKSFLRETRPRPSQPSSLAMLDLLHVARDIACGCQYLEENHFIHRDIAARNCLLTCPGPGRVAKIGDFGMARDIYRASYYRKGGCAMLPVKWMPPEAFMEGIFTSKTDTWSFGVLLWEIFSLGYMPYPSKSNQEVLEFVTSGGRMDPPKNCPGPVYRIMTQCWQHQPEDRPNFAIILERIEYCTQDPDVINTALPIEYGPLVEEEEKVPVRPKDPEGVPPLLVSQQAKREEERSPAAPPPLPTTSSGKAAKKPTAAEISVRVPRGPAVEGGHVNMAFSQSNPPSELHKVHGSRNKPTSLWNPTYGSWFTEKPTKKNNPIAKKEPHDRGNLGLEGSCTVPPNVATGRLPGASLLLEPSSLTANMKEVPLFRLRHFPCGNVNYGYQQQGLPLEAATAPGAGHYEDTILKSKNSMNQPGP

SEQ ID NO: 48007 - protein, 140 aa, Homo sapiens
  MOD_RES (1)..(1): Any amino acid
XPPGLEAARQKLALRRKKVLSTEEMELYELAQAAGGGIDPDVFKILVDLLKLNVAPLAVFQMLKSMCAGQRLASEPQDPAAVSLPTSSVPETRGLSDNLRTRRRLNKISHSSYGGQRSSTAWCGRRRRTCTSNWLKLQRH

SEQ ID NO: 48008 - protein, 94 aa, Homo sapiens
MLRQASYGTIKIGTYQSLKRLFIERPEDETLPINVICGILSGVISSTIANPTDVLKIRMQAQSNTIQGGMIGNFMNIYQQEGTRGLWKGVSLTA

SEQ ID NO: 48009 - protein, 615 aa, Homo sapiens
MAAVVQQNDLVFEFASNVMEDERQLGDPAIFPAVIVEHVPGADILNSYAGLACVEEPNDMITESSLDVAEEEIIDDDDDDITLTVEASCHDGDETIETIEAAEALLNMDSPGPMLDEKRINNNIFSSPEDDMVVAPVTHVSVTLDGIPEVMETQQVQEKYADSPGASSPEQPKRKKGRKTKPPRPDSPATTPNISVKKKNKDGKGNTIYLWEFLLALLQDKATCPKYIKWTQREKGIFKLVDSKAVSRLWGKHKNKPDMNYETMGRALRYYYQRGILAKVEGQRLVYQFKEMPKDLIYINDEDPSSSIESSDPSLSSSATSNRNQTSRSRVSSSPGVKGGATTVLKPGNSKAAKPKDPVEVAQPSEVLRTVQPTQSPYPTQLFRTVHVVQPVQAVPEGEAARTSTMQDETLNSSVQSIRTIQAPTQVPVVVSPRNQQLHTVTLQTVPLTTVIASTDPSAGTGSQKFILQAIPSSQPMTVLKENVMLQSQKAGSPPSIVLGPAQVQQVLTSNVQTICNGTVSVASSPSFSATAPVVTFSPRSSQLVAHPPGTVITSVIKTQETKTLTQEVEKKESEDHLKENTEKTEQQPQPYVMVVSSSNGFTSQVAMKQNELLE

SEQ ID NO: 48010 - protein, 128 aa, Homo sapiens
GVNCDKANCSTTCFNGGTCFYPGKCICPPGLEGEQCEISKCPQPCRNGGKCIGKSKSVCEPGCGAHGTCHEPNKCQCQEGWHGRHCNKRYEASLIHALRPAGAQLRQHTPSLKKAEERRDPPESNYIW

SEQ ID NO: 48011 - protein, 179 aa, Homo sapiens
VLHSQPIVSIRVWGVGRDNGRERDFAYVARDKDTRILKCHVFRCDTPAKAIATSLHEICSKIMAERKNAKALACSSLQERANVNLDVPLQVDFPTPKTELVQKFHVQYLGMLPVDKPVGMDILNSAIENLMTSSNKEDWLSVNMNVADATVTVISEKNEEEVLVECRVRFLSFMGVGKD

SEQ ID NO: 48012 - protein, 353 aa, Homo sapiens
MAEVLRTLAGKPKCHALRPMILFLIMLVLVLFGYGVLSPRSLMPGSLERGFCMAVREPDHLQRVSLPRMVYPQPKVLTPCRKDVLVTPWLAPIVWEGTFNIDILNEQFRLQNTTIGLTVFAIKKYVAFLKLFLETAEKHFMVGHRVHYYVFTDQPAAVPRVTLGTGRQLSVLEVRAYKRWQDVSMRRMEMISDFCERRFLSEVDYLVCVDVDMEFRDHVGVEILTPLFGTLHPGFYGSSREAFTYERRPQSQAYIPKDEGDFYYLGGFFGGSVQEVQRLTRACHQAMMVDQANGIEAVWHDESHLNKYLLRHKPTKVLSPEYLWDQQLLGWPAVLRKLRFTAVPKNHQAVRNP

SEQ ID NO: 48013 - protein, 74 aa, Homo sapiens
  MOD_RES (1)..(1): Any amino acid
XMKVDREERANLSSQALQMSLDYGFVTPLTSMSIRGMADQDGLKPTIDKPSEDSPPLEMLGPRRTPIPSGCQTE

SEQ ID NO: 48014 - protein, 119 aa, Homo sapiens
  MOD_RES (1)..(1): Any amino acid
XQSNTIQGGMIGNFMNIYQQEGTRGLWKGVSLTAQRAAIVVGVELPVYDITKKHLILSGLMGDTVYTHFLSSFTCGLAGALASNPVDVVRTRMMNQRVLRDGRCSGYTGTLDCLLQVLP

SEQ ID NO: 48015 - protein, 567 aa, Homo sapiens
MSLVPATNYIYTPLNQLKGGTIVNVYGVVKFFKPPYLSKGTDYCSVVTIVDQTNVKLTCLLFSGNYEALPIIYKNGDIVRFHRLKIQVYKKETQGITSSGFASLTFEGTLGAPIIPRTSSKYFNFTTEDHKMVEALRVWASTHMSPSWTLLKLCDVQPMQYFDLTCQLLGKAEVDGASFLLKVWDGTRTPFPSWRVLIQDLVLEGDLSHIHRLQNLTIDILVYDNHVHVARSLKVGSFLRIYSLHTKLQSMNSENQTMLSLEFHLHGGTSYGRGIRVLPESNSDVDQLKKDLESANLTANQHSDVICQSEPDDSFPSSGSVSLYEVERCQQLSATILTDHQYLERTPLCAILKQKAPQQYRIRAKLRSYKPRRLFQSVKLHCPKCHLLQEVPHEGDLDIIFQDGATKTPDVKLQNTSLYDSKIWTTKNQKGRKVAVHFVKNNGILPLSNECLLLIEGGTLSEICKLSNKFNSVIPVRSGHEDLELLDLSAPFLIQGTIHHYGCKQCSSLRSIQNLNSLVDKTSWIPSSVAEAISAEDLCDQMHRGFHPHTKQAIPQQTPAGCPPVQF

SEQ ID NO: 48016 - protein, 501 aa, Homo sapiens
MADTRSVHETRFEAAVKVIQSLPKNGSFQPTNEMMLKFYSFYKQATEGPCKLSRPGFWDPIGRYKWDAWSSLGDMTKEEAMIAYVEEMKKIIETMPMTEKVEELLRVIGPFYEIVEDKKSGRSSDITSDLGNVLTSTPNAKTVNGKAESSDSGAESEEEEAQEEVKGAEQSDNDKKMMKKSADHKNLEVIVTNGYDKDGFVQDIQNDIHASSSLNGRSTEEVKPIDENLGQTGKSAVCIHQDINDDHVEDVTGIQHLTSDSDSEVYCDSMEQFGQEESLDSFTSNNGPFQYYLGGHSSQPMENSGFREDIQVPPGNGNIGNMQVVAVEGKGEVKHGGEDGRNNSGAPHREKRGGETDEFSNVRRGRGHRMQHLSEGTKGRQVGSGGDGERWGSDRGSRGSLNEQIALVLMRLQEDMQNVLQRLQKLETLTALQAKSSTSTLQTAPQPTSQRPSWWPFEMSPGVLTFAIIWPFIAQWLVYLYYQRRRSCSQMSLNGETLSYF

SEQ ID NO: 48017 - protein, 84 aa, Homo sapiens
  MOD_RES (1)..(1): Any amino acid
XDAREPVVGARYIQTLKDHRPRMVWDSQASEHFFEYKKSRSGRHVVFYPTLKSLQVRLELARELGVGVSIWELGQGLDYFYDLL

SEQ ID NO: 48018 - protein, 104 aa, Homo sapiens
MKGASEEKLASVSNLVTVFENSRTPEAAPRGQRLEDVHHRPECRPPESPGPREKTNVGEAVGSEPRTVSRRYLNSLKNKLSSEAWRKSCQPVTLSGSGTQVPEG

SEQ ID NO: 48019 - protein, 96 aa, Homo sapiens
  MOD_RES (1)..(1): Any amino acid
XRVHEHYLVHKPEKVTWTEAAGSIRDGVRAYTALHYLSHLSPGKSVLIMDGASAFGTIAIQLAHHRGAKVISTACSLEDKQCLERFRPPIENSTIA

SEQ ID NO: 48020 - protein, 143 aa, Homo sapiens
MSWKRNYFSGGRGSVQGMFAPRSSTSIAPSKGLSNEPGQNSCFLNSALQVLWHLDIFRRSFRQLTTHKCMGDSCIFCALKGIFNQFQCSSEKVLPSDTLRSALAKTFQDEQRFQLGIMDDAAECFLFFRVTDDRAKQSELYLV

SEQ ID NO: 48021 - protein, 139 aa, Homo sapiens
  MOD_RES (1)..(1): Any amino acid
XDEAVNKIRLDTEEQLKEKFPEADPYEIIESFNVVAKEVFRSIVLNEYKRCDGRDLTSLRNVSCEVDMFKTLHGSALFQRGQTQVLCTVTFDSLESGIKSDQVITAINGIKDKNFMLHYEVLLLRKLCILLFPEIFLSP

SEQ ID NO: 48022 - protein, 279 aa, Homo sapiens
MNKLDPQTNSSQIKEEFRTLNMVTPTLRVEDCSIALLPRNHEKNRCMDILPPDRCLPFLITIDGESSNYINAALMDSYKQPSAFIVTQHPLPNTVKDFWRLVLDYHCTSVVMLNDVDPAQLCPQYWPENGVHRHGPIQVEFVSADLEEDIISRIFRIYNAARPQDGYRMVQQFQFLGWPMYRDTPVSKRSFLKLIRQVDKWQEEYNGGEGRTVVHCLNGGGRSGTFCAISIVCEMLRHQRTVDVFHAVKTLRNNKPNMVDLLDQYKFCYEVALEYLNSG

SEQ ID NO: 48023 - protein, 97 aa, Homo sapiens
MSQVQRVHSQAAKAEFEKAAEEVRHLKTKPSDEEMLFIYGHYKQATVGDINTERPGMLDFTGKAKWDAWNELKGTSKEDAMKAYINKVEELKKKYGI

SEQ ID NO: 48024 - protein, 106 aa, Homo sapiens
MNQEDLDPDSTTDVGDVTNTEEELIRECEEMWKDMEECQNKLSLIGTETLTDSNAQLSLLIMQVKCLTAELSQWQKKTPERSHRVVQAGVQWHNHGSLQPRSPGFK

SEQ ID NO: 48025 - protein, 92 aa, Homo sapiens
MGVQVETISPGDGMLEDGKKFDSSRDRNKPFKFMLGKQEVIRGWEEGVAQMSVGQRAKLTISPDYAYGATGHPGIIPPHATLVFDVELLKLE

SEQ ID NO: 48026 - protein, 136 aa, Homo sapiens
MPLLLYTCLLWLPTSGLWTVQAMDPNAAYVNMSNHHRGLASANVDFAFSLYKHLVALSPKKNIFISPVSISMALAMLSLGTCGHTRAQLLQGLGFNLTERSETEIHQGFQHLHQLFAKSDTSLEMTMGNALFLDGS

SEQ ID NO: 48027 - protein, 78 aa, Homo sapiens
MCNTNMSVPTDGAVTTSQIPASEQETLVRPKPLLLKLLKSVGAQKDTYTMKEENIYHDLQELGSSQSAGIIGLRYICE

SEQ ID NO: 48028 - protein, 116 aa, Homo sapiens
MTPQSLLQTTLFLLSLLFLVQGAHGRGHREDFRFCSQRNQTHRSSLHYKPTPDLRISIENSEEALTVHAPFPAAHPASRSFPDPRGLYHFCLYWNRHAGRLHLLYGKRDFLLSDKA

SEQ ID NO: 48029 - protein, 316 aa, Homo sapiens
MLQALTGLQFQLKEQLGEKERRLQISQEISAHRTEFHMQFSYKPVLHRLVPARPQIYSSQLPSFTRVPAHLESSARPQLQKAQRQKVNSFMTLDHQIINPTLKWSQPAVPSGGPLVQHAHTTLDSDAGLTENPLTKLLAIGKEDDNAQWHMEDVIEDIIGMESSFKEEGADSPLLMQRTLSGSILDVYSGEQGISPINMGLTSASCPSSLPMKREITETDTRALAKERQKKDNHNLIERRRRYNINYRIKELGTLIPKSNDPDMRWNKGTILKASVEYIKWLQKEQQRARELEHRQKKLEQANRRLLLRIQVFIRM

SEQ ID NO: 48030 - protein, 584 aa, Homo sapiens
MAEPQAESEPLLGGARGGGGDWPAGLTTYRSIQVGPGAAARWDLCIDQAVVFIEDAIQYRSINHRVDASSMWLYRRYYSNVCQRTLSFTIFLILFLAFIETPSSLTSTADVRYRAAPWEPPCGLTESVEVLCLLVFAADLSVKGYLFGWAHFQKNLWLLGYLVVLVVSLVDWTVSLSLVCHEPLRIRRLLRPFFLLQNSSMMKKTLKCIRWSLPEMASVGLLLAIHLCLFTMFGMLLFAGGKQDDGQDRERLTYFQNLPESLTSLLVLLTTANNPDVMIPAYSKNRAYAIFFIVFTVIGSLFLMNLLTAIIYSQFRGYLMKSLQTSLFRRRLGTRAAFEVLSSMVGEGGAFPQAVGVKPQNLLQVLQKVQLDSSHKQAMMEKVRSYGSVLLSAEEFQKLFNELDRSVVKEHPPRPEYQSPFLQSAQFLFGHYYFDYLGNLIALANLVSICVFLVLDADVLPAERDDFILGILNCVFIVYYLLEMLLKVFALGLRGYLSYPSNVFDGLLTVVLLEAGDGGPAVAVGHDPHAEHAHRVPLPAYHPQHEADGRGGQYRPGPGAEHACVWRDPGGGLLRICHHWDQLV

SEQ ID NO: 48031 - protein, 312 aa, Homo sapiens
MSKVARSSSESDVQLWETEEDDMTEGDLGYGLGRKPGGIYEIEFSHRSRKRSDGKNFSPPPFPRKGEERNEASFQYSKHKSQQDTFPQVSRISNYRRQSSTDSNSELSNEELRQCLNETLEEVEMLKTELEASQRQLRGKEEALKILQSMAILGKATSHTQAVLQKTMEQNRSLEKEINALQWEIEFDHNRFKNIEESWIQKYDRLNCENAVLKENLKVKTEEIKMLKSDNAVLNQRYLEALAMLDIKQQKMAQENMCCDKSGFAEASGLEDFHHQGVRRPSGRDCWVCSLQKTVLRGWKTRTVLKRSLRCS

SEQ ID NO: 48032 - protein, 395 aa, Homo sapiens
MPRVKAAQAGRQSSAKRHLAEQFAVGEIITDMAKKEWKVGLPIGQGGFGCIYLADMNSSESVGSDAPCVVKVEPSDNGPLFTELKFYQRAAKPEQIQKWIRTRKLKYLGVPKYWGSGLHDKNGKSYRFMIMDRFGSDLQKIYEANAKRFSRKTVLQLSLRILDILEYIHEHEYVHGDIKASNLLLNYKNPDQVYLVDYGLAYRYCPEGVHKEYKEDPKRCHDGTIEFTSIDAHNGVAPSRRGDLEILGYCMIQWLTGHLPWEDNLKDPKYVRDSKIRYRENIASLMDKCFPEKNKPGEIAKYMETVKLLDYTEKPLYENLRDILLQGLKAIGSKDDGKLDLSVVENGGLKAKTITKRKKEIEESKEPGVEDTEWSNTQTEEAIQTRSRTRKRVQK

SEQ ID NO: 48033 - protein, 166 aa, Homo sapiens
MRIPALNAYMKSLLSLPVWVLMDEDVRIFFYQSPYDSEQVPQALRRLRPRTRKVKSVSPQGNSVDRMAAPRAEALFDFTGNSKLELNFKAGDVIFLLSRINKDWLEGTVRGATGIFPLSFVKILKDFPEEDDPTNWLRCYYYEDTISTIKSVAWEGGACPAFLPSL

SEQ ID NO: 48034 - protein, 562 aa, Homo sapiens
MSWSPSLTTQTCGAWEMKERLGTGGFGNVIRWHNQETGEQIAIKQCRQELSPRNRERWCLEIQIMRRLTHPNVVAARDVPEGMQNLAPNDLPLLAMEYCQGGDLRKYLNQFENCCGLREGAILTLLSDIASALRYLHENRIIHRDLKPENIVLQQGEQRLIHKIIDLGYAKELDQGSLCTSFVGTLQYLAPELLEQQKYTVTVDYWSFGTLAFECITGFRPFLPNWQPVQWHSKVRQKSEVDIVVSEDLNGTVKFSSSLPYPNNLNSVLAERLEKWLQLMLMWHPRQRGTDPTYGPNGCFKALDDILNLKLVHILNMVTGTIHTYPVTEDESLQSLKARIQQDTGIPEEDQELLQEAGLALIPDKPATQCISDGKLNEGHTLDMDLVFLFDNSKITYETQISPRPQPESVSCILQEPKRNLAFFQLRKVWGQVWHSIQTLKEDCNRLQQGQRAAMMNLLRNNSCLSKMKNSMASMSQQLKAKLDFFKTSIQIDLEKYSEQTEFGIRERSETPGRTDDGSADRHCGLTEEPHGPEAGGNAGRPRGASKGAVQETKGKTSRPAN

SEQ ID NO: 48035 - protein, 146 aa, Homo sapiens
MLRWGCRGRRWAFARVDGGSCHRRGAPTGSTSNQIRGESSVAQQPLHTAQKTRKGEHKWAAVVGLEIHAQISSNSKLFSGSQVRFSAPPNSLVSFFDASLPGTLPVLNRRCVEAAVMTGLALNCHINKKSLFDRKHYFYADLPRAS

SEQ ID NO: 48036 - protein, 105 aa, Homo sapiens
MRDAEGGSPRIRVEAHRGEGANHGKGEWMGLRQGCCSSCGRRSCGCGDCARGAQCHGLHLSRNRRILHSSQDDVYSSHCQRGRSCCWQSGGYSAVSGGSWTLCDI

SEQ ID NO: 48037 - protein, 53 aa, Homo sapiens
MPAGVPMSTYLKMFAASLLAMCAGAEVVHRYYRPDLMRNRLRRVKLISQSHIA

SEQ ID NO: 48038 - protein, 252 aa, Homo sapiens
MFFTCGPNEAMVVSGFCRSPPVMVAGGRVFVLPCIQQIQRISLNTLTLNVKSEKVYTRHGVPISVTGIAQVKIQGQNKEMLAAACQMFLGKTEAEIAHIALETLEGHQRAIMAHMTVEEIYKDRQKFSEQVFKVASSDLVNMGISVVSYTLKDIHDDQDYLHSLGKARTAQVQKDARIGEAEAKRDAGIREAKAKQEKVSAQYLSEIEMAKAQRDYELKKAAYDIEVNTRRAQADLAYQLQVAKTKQQIEEQ

SEQ ID NO: 48039 - protein, 120 aa, Homo sapiens
MTSLAQQLQRLALPQSDASLLSRDEVASLLFDPKEAATIDRDTAFAIGCTGLEELLGIDPSFEQFEAPLFSQLAKTLERSVQTKAVNKQLDENISLFLIHLSPYFLLKPAQKCLEWLIHR

SEQ ID NO: 48040 - protein, 392 aa, Homo sapiens
MDNYSTGYDVKPPCLYQMPLSGQQSSIKVEDIQMHNYQQHSHLPPQSEEMMPHSGSVYYKPSSPPTPTTPGFQVQHSPMWDDPGSLHNFHQNYVATTHMIEQRKTPVSRLSLFSFKQSPPGTPVSSCQMRFDGPLHVPMNPEPAGSHHVVDGQTFAVPNPIRKPASMGFPGLQIGHASQLLDTQVPSPPSRGSPSNEGLCAVCGDNAACQHYGVRTCEGCKGFFKRTVQKNAKYVCLANKNCPVDKRRRNRCQYCRFQKCLAVGMVKEVVRTDSLKGRRGRLPSKPKSPQEPSPPSPPVSLISALVRAHVDSNPAMTSLDYSRFQANPDYQMSGDDTQHIQQFYDLLTGSMEIIRGWAEKIPGFADLPKADQDLLFESAFLELFVLRLAYRI

SEQ ID NO: 48041 - protein, 674 aa, Homo sapiens
MWHEARKHERKLRGMMVDYKKRAERRREYYEKIKKDPAQFLQVHGRACKVHLDSAVALAAESPVNMMPWQGDTNNMIDRFDVRAHLDHIPDYTPPLLTTISPEQESDERKCNYERYRGLVQNDFAGISEEQCLYQIYIDELYGGLQRPSEDEKKKLAEKKASIGYTYEDSTVAEVEKAAEKPEEEESAAEEESNSDEDEVIPDIDVEVDVDELNQEQVADLNKQATTYGMADGDFVRMLRKDKEEAEAIKHAKALEEEKAMYSGRRSRRQRREFREKRLRGRKISPPSYARRDSPTYDPYKRSPSESSSESRSRSRSPTPGREEKITFITSFGGSDEEAAAAAAAAAASGVTTGKPPAPPQPGGPAPGRNASARRRSSSSSSSSSASRTSSSRSSSRSSSRSRRGGGYYRSGRHARSRSRSWSRSRSRSRRYSRSRSRGRRHSGGGSRDGHRYSRSPARRGGYGPRRRSRSRSHSGDRYRRGGRGLRHHSSSRSRSSWSLSPSRSRSLTRSRSHSPSPSQSRSRSRSRSQSPSPSPAREKLTRPAASPAVGEKLKKTEPAAGKETGAAKPKLTPQEKLKLRMQKALNRQFKADKKAAQEKMIQQEHERQEREDELRAMARKIRMKERERREKEREEWERQYSRQSRSPSPRYSREYSSSRRRSRSRSRSPHYRH

SEQ ID NO: 48042 - protein, 132 aa, Homo sapiens
MLGLWGQRLPAAWVLLLLPFLPLLLLAAPAPHRASYKPVIVVHGLFDSSYSFRHLLEYINETHPGTVVTVLDLFDGRESLRPLWEQVQGFREAVVPIMAKAPQGVHLICYSQDGTVWRHGLLEVAVPHLHAV

SEQ ID NO: 48043 - protein, 700 aa, Homo sapiens
MDPSAPQPRAETSGKDIWHPGERCLAPSPDNGKLCEASIKSITVDENGKSFAVVLYADFQERKIPLKQLQEVKFVKDCPRNLIFDDEDLEKPYFPNRKFPSSSVAFKLSDNGDSIPYTINRYLRDYQREGTRFLYGHYIHGGGCILGDDMGLGKTVQVISFLAAVLHKKGTREDIENNMPEFLLRSMKKEPLSSTAKKMFLIVAPLSVLYNWKDELDTWGYFRVTVLHGNRKDNELIRVKQRKCEIALTTYETLRLCLDELNSLEWSAVIVDEAHRIKNPKARVTEVMKALKCNVRIGLTGTILQNNMKELWCVMDWAVPGLLGSGTYFKKQFSDPVEHGQRHTATKRELATGRKAMQRLAKKMSGWFLRRTKTLIKDQLPKKEDRMVYCSLTDFQKAVYQTVLETEDVTLILQSSEPCTCRSGQKRRNCCYKTNSHGETVKTLYLSYLTVLQKVANHVALLQAASTSKQQETLIKRICDQVFSRFPDFVQKSKDAAFETLSDPKYSGKMKVLQQLLNHCRKNRDKVLLFSFSTKLLDVLQQYCMASGLDYRRLDGSTKSEERLKIVKEFNSTQDVNICLVSTMAGGLGLNFVGANVVVLFDPTWNPANDLQAIDRAYRIGQCRDVKVLRLISLGTVEEIMYLRQIYKQQLHCVVVGSENAKRYFEAVQGSKEHQGELFGIHNLFKFRSQGSCLTKDILE

SEQ ID NO: 48044 - protein, 142 aa, Homo sapiens
MGKSEKIALPHGQLVHGIHLYEQPKINRQKSKYNLPLTKITSAKRNENNFWQDSVSSDRIQKQEKKPFKNTENIKNSHLKKSAFLTEVSQKENYAGAKFSDPPSPSVLPKPPSHWMGSTVENSNQNRELMAVHLKTLLKVQT

SEQ ID NO: 48045 - protein, 448 aa, Homo sapiens
MAHASSANIGPFLEKRGCISMPEQKSASGIVAVPFSEWLLGSKPASGYQAPYIPSTDPQDWLTQKQTLENSQTSSRACNFFNNVGGNLKGLENWLLKSEKSSYQKCNSHSTTSSFSIEMEKVGDQELPDQDEMDLSDWLVTPQESHKLRKPENGSRETSEKFKLLFQSYNVNDWLVKTDSCTNCQGNQPKGVEIENLGNLKCLNDHLEAKKPLSTPSMVTEDWLVQNHQDPCKVEEVCRANEPCTSFAECVCDENCEKEALYKWLLKKEGKDKNGMPVEPKPEPEKHKDSLNMWLCPRKEVIEQTKAPKAMTPSRIADSFQVIKNSPLSEWLIRPPYKEGSPKEVPGTEDRAGKQKFKSPMNTSWCSFNTADWVLPGKKMGNLSQLSSGEDKWLLRKKAQEVLLNSPLQEEHNFPPDHYGLPAVCDLFACMQLKVDKEKWLYRTPLQM

SEQ ID NO: 48046 - protein, 494 aa, Homo sapiens
MKTYRQREKQGSKVQESTKGPDEAKIKVFVGKIPRDLYEDELVPLFEKAGPIWDLRLMMDPLSGQNRGYAFITFCGKEAAQEAVKLCDSYEIRPGKHLGVCISVANNRLFVGSIPKNKTKENILEEFSKVTEGLVDVILYHQPDDKKKNRGFCFLEYEDHKSAAQARRRLMSGKVKVWGNVVTVEWADPVEEPDPEVMAKVKVLFVRNLATTVTEEILEKSFSEFGKLERVKKLKDYAFVHFEDRGAAVKAMDEMNGKEIEGEEIEIVLAKPPDKKRKERQAARQASRSTAYEDYYYHPPPRMPPPIRGRGRGGGRGGYGYPPDYYGYEDYYDDYYGYDYHDYRGGYEDPYYGYDDGYAVRGRGGGRGGRGAPPPPRGRGAPPPRGRAGYSQRGAPLGPPRGSRGGRGGPAQQQRGRGSRGSRGNRGGNVGGKRKADGYNQPDSKRRQTNNQQNWGSQPIAQQPLQQGGDYSGNYGYNNDNQEFYQDTYGQQWK

SEQ ID NO: 48047 - protein, 70 aa, Homo sapiens
MARMNRPAPVEVSYKHMRFLITHNPTNATLSTFIEDLKKYGATTVVRVCEVTYDKTPLEKDGITVVDWPF

SEQ ID NO: 48048 - protein, 283 aa, Homo sapiens
MAYEKSTDISDVSRSMFLYPWLEYPDKTKELRKAMAPVHLPLSCYQMPKEEFPPSPECWRQHPSKPNSVPYCYFKKPEIYTHWHDLYDQREEREAEKMLRKMRDDCRYIKEVHQTHIKMFHLPMSKLTIKSEMRSRPLEPTQDPLKWQRLRELTKSLESPREDEQFYAAQALGCLRISDKFVMEALQQVAQTGPEKVKYEAYRTLAILGCLNKHVIRALIKQLKEKNEGQRMETLTGLRMALNSWAAVSKDKVIGRTVFNWGQSWTRGLKSGMRASWCLYYRH

SEQ ID NO: 48049 - protein, 29 aa, Homo sapiens
MAHVCYPGIRPRNYLQKRTFMKSVYPKRV

SEQ ID NO: 48050 - protein, 377 aa, Homo sapiens
MSMSPTVIILACLGFFLDQSVWAHVGGQDKPFCSAWPSAVVPQGGHVTLRCHCRRGFNIFTLYKKDGVPVPELYNRIFWNSFLISPVTPAHAGTYRCRGFHPHSPTEWSAPSNPLVIMVTGLYEKPSLTARPGPTVRAGENVTLSCSSQSSFDIYHLSREGEAHELRLPAVPSINGTFQADFPLGPATHGETYRCFGSFHGSPYEWSDPSDPLPVSVTGNPSSSWPSPTEPSFKTGIARHLHAVIRYSVAIILFTILPFFLLHRWCSKKKNAAVMNQEPAGHRTVNREDSDEQDPQEVTYAQLDHCIFTQRKITGPSQRSKRPSTDTSVCIELPNAEPRALSPAHEHHSQALMGSSRETTALSQTQLASSNVPAAGI

SEQ ID NO: 48051 - protein, 1014 aa, Homo sapiens
METCAGPHPLRLFLCRMQLCLALLLGPWRPGTAEEVILLDSKASQAELGWTALPSNGWEEISGVDEHDRPIRTYQVCNVLEPNQDNWLQTGWISRGRGQRIFVELQFTLRDCSSIPGAAGTCKETFNVYYLETEADLGRGRPRLGGSRPRKIDTIAADESFTQGDLGERKMKLNTEVREIGPLSRRGFHLAFQDVGACVALVSVRVYYKQCRATVRGLATFPATAAESAFSTLVEVAGTCVAHSEGEPGSPPRMHCGADGEWLVPVGRCSCSAGFQERGDFCEACPPGFYKVSPRRPLCSPCPEHSRALENASTFCVCQDSYARSPTDPPSASCTRPPSAPRDLQYSLSRSPLVLRLRWLPPADSGGRSDVTYSLLCLRCGREGPAGACEPCGPRVAFLPRQAGLRERAATLLHLRPGARYTVRVAALNGVSGPAAAAGTTYAQVTVSTGPGAPWEEDEIRRDRVEPQSVSLSWREPIPAGAPGANDTEYEIRYYEKGQSEQTYSMVKTGAPTVTVTNLKPATRYVFQIRAASPGPSWEAQSFNPSIEVQTLGEAASGSRDQSPAIVVTVVTISALLVLGSVMSVLAIWRRPCSYGKGGGDAHDEEELYFHFKVPTRRTFLDPQSCGDLLQAVHLFAKELDAKSVTLERSLGGGRFGELCCGCLQLPGRQELLVAVHMLRDSASDSQRLGFLAEALTLGQFDHSHIVRLEGVVTRGSTLMIVTEYMSHGALDGFLRRHEGQLVAGQLMGLLPGLASAMKYLSEMGYVHRGLAARHVLVSSDLVCKISGFGRGPRDRSEAVYTTMSGRSPALWAAPETLQFGHFSSASDVWSFGIIMWEVMAFGERPYWDMSGQDVIKAVEDGFRLPPPRNCPNLLHRLMLDCWQKDPGERPRFSQIHSILSKMVQDPEPPKCALTTCPRPPTPLADRAFSTFPSFGSVGAWLEALDLCRYKDSFAAAGYGSLEAVAEMTAQDLVSLGISLAEHREALLSGISALQARVLQLQGQGVQVIIKTCL

SEQ ID NO: 48052 - protein, 609 aa, Homo sapiens
MPGGGPQGAPAAAGGGGVSHRAGSRDCLPPAACFRRRRLARRPGYMRSSTGPGIGFLSPAVGTLFRFPGGVSGEESHHSESRARQCGLDSRGLLVRSPVSKSAAAPTVTSVRGTSAHFGIQLRGGTRLPDRLSWPCGPGSAGWQQEFAAMDSSETLDASWEAACSDGARRVRAAGSLPSAELSSNSCSPGCGPEVPPTPPGSHSAFTSSFSFIRLSLGSAGERGEAEGCPPSREAESHCQSPQEMGAKAASLDGPHEDPRCLSRPFSLLATRVSADLAQAARNSSRPERDMHSLPDMDPGSSSSLDPSLAGCGGDGSSGSGDAHSWDTLLRKWEPVLRDCLLRNRRQMEVISLRLKLQKLQEDAVENDDYDKAETLQQRLEDLEQEKISLHFQLPSRQPALSSFLGHLAAQVQAALRRGATQQASGDDTHTPLRMEPRLLEPTAQDSLHVSITRRDWLLQEKQQLQKEIEALQARMFVLEAKDQQLRREIEEQEQQLQWQGCDLTPLVGQLSLGQLQEVSKALQDTLASAGQIPFHAEPPETIRREVRHQTAPCRNHQLEKPVINIWAFHLRRKICLFQADGLQHGSAEVKHLKETSVEPAGSTASRKE

SEQ ID NO: 48053 - protein, 631 aa, Homo sapiens
MELQPPEASIAVVSIPRQLPGSHSEAGVQGLSAGDDSETGSDCVTQAGLQLLASSDPPALASKNAEVTVETGFHHVSQADIEFLTSIDPTASASGSAGITGTMSQDTEVDMKEVELNELEPEKQPMNAASGAAMSLAGAEKNGLVKIKVAEDEAEAAAAAKFTGLSKEELLKVAGSPGWVRTRWALLLLFWLGWLGMLAGAVVIIVRAPRCRELPAQKWWHTGALYRIGDLQAFQGHGAGNLAGLKGRLDYLSSLKVKGLVLGPIHKNQKDDVAQTDLLQIDPNFGSKEDFDSLLQSAKKKSIRVILDLTPNYRGENSWFSTQVDTVATKVKDALEFWLQAGVDGFQVRDIENLKDASSFLAEWQNITKGFSEDRLLIAGTNSSDLQQILSLLESNKDLLLTSSYLSDSGSTGEHTKSLVTQYLNATGNRWCSWSLSQARLLTSFLPAQLLRLYQLMLFTLPGTPVFSYGDEIGLDAAALPGQPMEAPVMLWDESSFPDIPGAVSANMTVKGQSEDPGSLLSLFRRLSDQRSKERSLLHGDFHAFSAGPGLFSYIRHWDQNERFLVVLNFGDVGLSAGLQASDLPASASLPAKADLLLSTQPGREEGSPLELERLKLEPHEGLLLRFPYAA

SEQ ID NO: 48054 - protein, 122 aa, Homo sapiens
MGPLTFRDVAIEFSLKEWQCLDTAQRNLYRNVMLENYRNLVFLGITVSKPDLITCLEQGKEAWSMKRHEIMVAKPTGCLSKRMSYELLRKVYILMLLRSVLYASVRIMCSHFAQDLWPEQNI

SEQ ID NO: 48055 - protein, 154 aa, Homo sapiens
MAKNRRDRNSWGGFSEKTYEWSSEEEEPVKKAGPVQVLIVKDDHSFELDETALNRILLSEAVRDKEVVAVSVAGAFRKGKSFLMDFMLRYMYNQSFTLVTQAGMQWRNLGSLQPLPPGFKDSPASASQVAGITSMRHHIWIIFCIFSRDRVSLC

SEQ ID NO: 48056 - protein, 218 aa, Homo sapiens
MNIDVEFHIRHNYPWNKLPANVRQSLGNSQREYEKQVVLYSIRNQLRYRNNLVKHVKKDERRYYEELLKYSRDHLMLYPYHLSDIMVKGLRITPFSYYTGIMEDIMNSEKSYDSLPNFTAADCLRLLGIGRNQYIDLMNQCRSSKKFFRRKTARDLLPIKPVEIAIEAWWVVQAGYITEDDIKICTLPEKCAVDKIIDSGPQLSGSLDYNVVHSKWFV

SEQ ID NO: 48057 - protein, 186 aa, Homo sapiens
MKAVNEQGKEVTEFGNKYWLMLNEKEAQQVYGGKEARTEEMKWRQWADDWLVHLISPNVYRTPTEALASFDYIVREGKFGAVEGAVAKYMGAAAMYLISKRLKSRHRLQDNVREDLYEAADKWVAAVGKDRPFMGGQKPNLADLAVYGVLRVMEGLDAFDDLMQHTHIQPWYLRVERAITEASPAH

SEQ ID NO: 48058 - protein, 123 aa, Homo sapiens
  MOD_RES (1)..(1): Any amino acid
XRLLTSCYVGPTRQQFTVSSGESPPLSAGNIYQKRPVLGDIVSGPVLSCLLHIARLYGEPVLTYQYLPYISYLVPKWGPGSDHPVCENHQPHRPHLPAHWTGDGPAAPERARGHLFPGLLSAA

SEQ ID NO: 48059 - protein, 53 aa, Homo sapiens
MGVFGAYFNVLINLRDITDEAFKDQIHHRVSSLLQEAKTQAALVLDCLETRQE

SEQ ID NO: 48060 - protein, 257 aa, Homo sapiens
MVQASGHRRSTRGSKMVSWSVIAKIQEILQRKMVREFLAEFMSTYVMMVFGLGSVAHMVLNKKYGSYLGVNLGFGFGVTMGVHVAGRISGAHMNAAVTFANCALGRVPWRKFPVYVLGQFLGSFLAAATIYSLFYTAILHFSGGQLMVTGPVATAGIFATYLPDHMTLWRGFLNEAWLTGMLQLCLFAITDQENNPALPGTEALVIGILVVIIGVSLGMNTGYAINPSRDLPPRIFTFIAGWGKQVFRYCPCPGPFL

SEQ ID NO: 48061 - protein, 354 aa, Homo sapiens
MTRKEKDWVIKVQMVQLQSAKPRLDDYYYQEYYQKLEKKQADEELLGRRNRVESLKLVTPYIPKAEAYESVVRIEGSLGQVAVSTCFSPRRAIDAVPHGTQEQDIEAASSQRLRVLYRIEKMFLQLLEIEEGWKYRPPPPCFSEQQSNQVEKLFQTLKTQEQNNLEEAADGFLQVLSVRKGKALVARLLPFLPQDQAVTILLAITHHLPLLVRRDVADQALQMLFKPLGKCISHLTLHELLQGLQGLTLLPPGSSERPVTVVLQNQFGISLLYALLSHGEQLVSLHSSLEEPNSDHTAWTDMVVLIAWEIAQMPTASLAEPLAFPSNLLPLFCHHVDKQLVQQLEARMEFAWIY

SEQ ID NO: 48062 - protein, 150 aa, Homo sapiens
  MOD_RES (1)..(1): Any amino acid
XEVSLAQDPKRQQRKLKGNKISISGTKQEIFQVELNLQNASSDHQGNDKTYHCKGLLPPPEKLTAEVLGIICIVLMATVLKTIVLIPCIGVLEQNNFSLNRRMQKARHCGHCPEEWITYSNSCYYIGKERRTWEERVCWPVLRRTLICFL

SEQ ID NO: 48063 - protein, 279 aa, Homo sapiens
MSRPKNQNYKGHGLSKGKEREQRASIRFKTTLMNTLMDVLRHRPGWVEVKDEGEWDFYWCDVSWLRENFDHTYMDEHVRISHFRNHYELTRKNYMVKNLKRFRKQLEREAGKLEAAKCDFFPKTFEMPCEYHLFVEEFRKNPGITWIMKPVARSQGKGIFLFRRLKDIVDWRKDTRSSDDQKDDIPVENYVAQRYIENPYLIGGRKFDLRVYVLVMSMFTSPTWLCKKHLPTTTQRRAASGRCSASGSTWRPNTGPRQWRHSSGTSTTSLSKACRVCRR

SEQ ID NO: 48064 - protein, 561 aa, Homo sapiens
MMYSPICLTQDEFHPFIEALLPHVRAIAYTWFNLQARKRKYFKKHEKRMSKDEERAVKDELLSEKPEIKQKWASRLLAKLRKDIRQEYREDFVLTVTGKKHPCCVLSNPDQKGKIRRIDCLRQADKVWRLDLVMVILFKGIPLESTDGERLMKSPHCTNPALCVQPHHITVSVKELDLFLAYYVQEQDSGQSGSPSHNDPAKNPPGYLEDSFVKSGVFNVSELVRVSRTPITQGTGVNFPIGEIPSQPYYHDMNSGVNLQRSLSSPPSSKRPKTISIDENMEPSPTGDFYPSPSSPAAGSRTWHERDQDMSSPTTMKKPEKPLFSSASPQDSSPRLSTFPQHHHPGIPGVAHSVISTRTPPPPSPLPFPTQAILPPAPSSYFSHPTIRYPPHLNPQDTLKNYVPSYDPSSPQTSQPNGSGQVVGKVPGHFTPVLAPSPHPSAVRPVTLSMTDTKPITTSTEAYTASGTSQANRYVGLSPRDPSFLHQQQLRICDWTMNQNGRHLYPSTSEDTLGITWQSPGTWASLVPFQVSNRTPILPANVQNYGLNIIGEPFLQAETSN

SEQ ID NO: 48065 - protein, 352 aa, Homo sapiens
MAFPRVKPAPDETSFSEALLKRNQDLAPNSAEQASILSLVTKINNVIDNLIVAPGTFEVQIEEVRQVGSYKKGTMTTGHNVADLVVILKILPTLEAVAALGNKVVESLRAQDPSEVLTMLTNETGFEISSSDATVKILITTVPPNLRKLDPELHLDIKVLQSALAAIRHARWFEENASQSTVKVLIRLLKDLRIRFPGFEPLTPWILDLLGHYAVMNNPTRQPLALNVAYRRCLQILAAGLFLPGSVGITDPCESGNFRVHTVMTLEQQDMVCYTAQTLVRILSHGGFRKILGQEGDASYLASEISTWDGVIVTPSEKAYEKPPEKKEGEEEEENTEEPPQGEEEESMETQE

SEQ ID NO: 48066 - protein, 302 aa, Homo sapiens
MEIGRYHWMYPGSKNHQYHPVPTLGDRASPLSSPGCFECCIKCLGGVPYASLVATILCFSGVALFCGCGHVALAGTVAILEQHFSTNASDHALLSEVIQLMQYVIYGIASFFFLYGIILLAEGFYTTSAVKELHGEFKTTACGRCISGMFVFLTYVLGVAWLGVFGFSAVPVFMFYNIWSTCEVIKSPQTNGTTGVEQICVDIRQYGIIPWNAFPGKICGSALENICNTNEFYMSYHLFIVACAGAGATVIALIHFLMILSSNWAYLKDASKMQAYQDIKAKEEQELQDIQSRSKEQLNSYT

SEQ ID NO: 48067 - protein, 77 aa, Homo sapiens
  MOD_RES (1)..(1): Any amino acid
XIKHILANFKNYQFFIGENMNPDGMVALLDYREDGVTPYMIFFKDGLEMEKCDAKERNPCAFCLSLWRPRLNWGIHL

SEQ ID NO: 48068 - protein, 1011 aa, Homo sapiens
PELGVGTLPEHDSQDAGPIVPKISGLERSQEKSQDCCKEPIFEPVVLKDPCPQVAQPIPQPQTEPQLRAPSPDPDLVQRTEAPPQPPPLSTQPPQGPPEAQLQPAPQPQVQRPPRPQSPTQLLHQNLPPVQAHPSAQSLSQPLSAYNSSSLSLNSLSSSRSSTPAKTQPAPPHISHHPSASPFPLSLPNHSPLHSFTPTLQPPAHSHHPNMFAPPTALPPPPPLTSGSLQVAGHPAGSTYSEQDILRQELNTRFLASQSADRGASLGPPPYLRTEFHQHQHQHQHTHQHTHQHTFTPFPHAIPPTAIMPTPAPPMFDKYPTKVDPFYRHSLFHSYPPAVSGIPPMIPPTGPFGSLQGAFQPKTSNPIDVAARPGTVPHTLLQKDPRLTDPFRPMLRKPGKWCAMHVHIAWQIYHHQQKVKKQMQSDPHKLDFGLKPEFLSRPPGPSLFGAIHHPHDLARPSTLFSAAGAAHPTGTPFGPPPHHSNFLNPAAHLEPFNRPSTFTGLAAVGGNAFGGLGNPSVTPNSMFGHKDGPSVQNFSNPHEPWNRLHRTPPSFPTPPPWLKPGELERSASAAAHDRDRDVDKRDSSVSKDDKERESVEKRHSSHPSPAPVLPVNALGHTRSSTEQIRAHLNTEAREKDKPKERERDHSESRKDLAADEHKAKEGHLPEKDGHGHEGRAAGEEAKQLARVPSPYVRTPVVESARPNSTSSREAEPRKGEPAYENPKKSSEVKVKEERKEDHDLPPEAPQTHRASEPPPPNSSSSVHPGPLASMPMTVGVTGIHPMNSISSLDRTRMMTPFMGISPLPGGERFPYPSFHWDPIRDPLRDPYRELDIHRRDPLGRDFLLRNDPLHRLSTPRLYEADRSFRDREPHDYSHHHHHHHHPLSVDPRREHERGGHLDERERLHMLREDYEHTRLHSVHPASLDGHLPHPSLITPGLPSMHYPRISPTAGNQNGLLNKTPPTAALSAPPPLISTLGGRPVSPRRTTPLSAEIRERPPSHTLKDIEAR

SEQ ID NO: 48069 - protein, 75 aa, Homo sapiens
  MOD_RES (1)..(1): Any amino acid
XCWFGKRPGVYTDYIYQGPMILVLLINFIFLFNIVRILMTKLRASTTSETIQYRASLCLCSTVSSIVRSVLPSGR

SEQ ID NO: 48070 - protein, 127 aa, Homo sapiens
MEDSGKTFSSEEEEANYWKDLAMTYKQRAENTQEELREFQEGSREYEAELETQLQQIETRNRDLLSENNRLRMELETIKEKFEVQHSEGYRQISALEDDLAQTKAIKDQLQKYIRELEQANDDLERA

SEQ ID NO: 48071 - protein, 26 aa, Homo sapiens
MALVFVYGTLKRGQPNHRVLRDGAHG

SEQ ID NO: 48072 - protein, 135 aa, Homo sapiens
MFRPFVEVCILGPNLGDKKRKQGTKTKSNTWSPKYNETFQFILGKENRPGAYELHLSVKDYCFAREDRIIGMTVIQLQNIAEKGSYGAWYPLLKNISMDETGLTILRILSQRTSDDVAKEFVRLKSETRSTEESA

SEQ ID NO: 48073 - protein, 174 aa, Homo sapiens
  MOD_RES (1)..(1): Any amino acid
XLACSYECHGSHKLFELYTKRNFRCDCGNSKFKNLECKLLPDKAKVNSGNKYNDNFFGLYCICKRPYPDPEDEIPDEMIQCVVCEDWFHGRHLGAIPPESGDFQEMVCQACMKRCSFLWAYAAQLAEYNDLKTELKDYLKRFADEGTVVKREDIQQFFEEFQSKKRRRVDGMQY

SEQ ID NO: 48074 - protein, 622 aa, Homo sapiens
MPGGGPQGAPAAAGGGGVSHRAGSRDCLPPAACFRRRRLARRPGYMRSSTGPGIGFLSPAVGTLFRFPGGVSGEESHHSESRARQCGLDSRGLLVRSPVSKSAAAPTVTSVRGTSAHFGIQLRGGTRLPDRLSWPCGPGSAGWQQEFAAMDSSETLDASWEAACSDGARRVRAAGSLPSAELSSNSCSPGCGPEVPPTPPGSHSAFTSSFSFIRLSLGSAGERGEAEGCPPSREAESHCQSPQEMGAKAASLDGPHEDPRCLSRPFSLLATRVSADLAQAARNSSRPERDMHSLPDMDPGSSSSLDPSLAGCGGDGSSGSGDAHSWDTLLRKWEPVLRDCLLRNRRQMEVISLRLKLQKLQEDAVENDDYDKAETLQQRLEDLEQEKISLHFQLPSRQPALSSFLGHLAAQVQAALRRGATQQASGDDTHTPLRMEPRLLEPTAQDSLHVSITRRDWLLQEKQQLQKEIEALQARMFVLEAKDQQLRREIEEQEQQLQWQGCDLTPLVGQLSLGQLQEVSKALQDTLASAGQIPFHAEPPETIRSLQERIKSLNLSLKEITTKVCMSEKFCSTLRKKVNDIETQLPALLEAKMHAISGGHGTLWHILPDVSGGIVGAHPTFY

SEQ ID NO: 48075 - protein, 3565 aa, Homo sapiens
MTAWRRFQSLLLLLGLLVLCARLLTAAKGQNCGGLVQGPNGTIESPGFPHGYPNYANCTWIIITGERNRIQLSFHTFALEEDFDILSVYDGQPQQGNLKVRLSGFQLPSSIVSTGSILTLWFTTDFAVSAQGFKALYEVLPSHTCGNPGEILKGVLHGTRFNIGDKIRYSCLPGYILEGHAILTCIVSPGNGASWDFPAPFCRAEGACGGTLRGTSSSISSPHFPSEYENNADCTWTILAEPGDTIALVFTDFQLEEGYDFLEISGTEAPSIWLTGMNLPSPVISSKNWLRLHFTSDSNHRRKGFNAQFQVKKAIELKSRGVKMLPSKDGSHKNSVLSQGGVALVSDMCPDPGIPENGRRAGSDFSRVGANVQFSCEDNYVLQGSKSITCQRVTETLAAWSDHRPICRARTCGSNLRGPSGVITSPNYPVQYEDNAHCVWVITTTDPDKVIKLAFEEFELERGYDTLTVGDAGKVGDTRSVLYVLTGSSVPDLIVSMSNQMWLHLQSDDSIGSPGFKAVYQEIEKGGCGDPGIPAYGKRTGSSFLHGDTLTFECPAAFELVGERVITCQQNNQWSGNKPSCVFSCFFNFTASSGIILSPNYPEEYGNNMNCVWLIISEPGSRIHLIFNDFDVEPQFDFLAVKDDGISDITVLGTFSGNEVPSQLASSGHIVRLEFQSDHSTTGRGFNITYTTFGQNECHDPGIPINGRRFGDRFLLGSSVSFHCDDGFVKTQGSESITCILQDGNVVWSSTVPRCEAPCGGHLTASSGVILPPGWPGYYKDSLHCEWIIEAKPGHSIKITFDRFQTEVNYDTLEVRDGPASSSPLIGEYHGTQAPQFLISTGNFMYLLFTTDNSRSSIGFLIHYESVTLESDSCLDPGIPVNGHRHGGDFGIRSTVTFSCDPGYTLSDDEPLVCERNHQWNHALPSCDALCGGYIQGKSGTVLSPGFPDFYPNSLNCTWTIEVSHGKGVQMIFHTFHLESSHDYLLITEDGSFSEPVARLTGSVLPHTIKAGLFGNFTAQLRFISDFSISYEGFNITFSEYDLEPCDDPGVPAFSRRIGFHFGVGDSLTFSCFLGYRLEGATKLTCLGGGRRVWSAPLPRCVAECGASVKGNEGTLLSPNFPSNYDNNHECIYKIETEAGKGIHLRTRSFQLFEGDTLKVYDGKDSSSRPLGTFTKNELLGLILNSTSNHLWLEFNTNGSDTDQGFQLTYTSFDLVKCEDPGIPNYGYRIRDEGHFTDTVVLYSCNPGYAMHGSNTLTCLSGDRRVWDKPLPSCIAECGGQIHAATSGRILSPGYPAPYDNNLHCTWIIEADPGKTISLHFIVFDTEMAHDILKVWDGPVDSDILLKEWSGSALPEDIHSTFNSLTLQFDSDFFISKSGFSIQFSTSIAATCNDPGMPQNGTRYGDSREAGDTVTFQCDPGYQLQGQAKITCVQLNNRFFWQPDPPTCIAACGGNLTGPAGVILSPNYPQPYPPGKECDWRVKVNPDFVIALIFKSFNMEPSYDFLHIYEGEDSNSPLIGSYQGSQAPERIESSGNSLFLAFRSDASVGLSGFAIEFKEKPREACFDPGNIMNGTRVGTDFKLGSTITYQCDSGYKILDPSSITCVIGADGKPSWDQVLPSCNAPCGGQYTGSEGVVLSPNYPHNYTAGQICLYSITVPKEFVVFGQFAYFQTALNDLAELFDGTHAQARLLSSLSGSHSGETLPLATSNQILLRFSAKSGASARGFHFVYQAVPRTSDTQCSSVPEPRYGRRIGSEFSAGSIVRFECNPGYLLQGSTALHCQSVPNALAQWNDTIPSCVVPCSGNFTQRRGTILSPGYPEPYGNNLNCIWKIIVTEGSGIQIQVISFATEQNWDSLEIHDGGDVTAPRLGSFSGTTVPALLNSTSNQLYLHFQSDISVAAAGFHLEYKTVGLAACQEPALPSNSIKIGDRYMVNDVLSFQCEPGYTLQGRSHISCMPGTVRRWNYPSPLCIATCGGTLSTLGGVILSPGFPGSYPNNLDCTWRISLPIGYGAHIQFLNFSTEANHDFLEIQNGPYHTSPMIGQFSGTDLPAALLSTTHETLIHFYSDHSQNRQGFKLAYQAYELQNCPDPPPFQNGYMINSDYSVGQSVSFECYPGYILIGHPVLTCQHGINRNWNYPFPRCDAPCGYNVTSQNGTIYSPGFPDEYPILKDCIWLITVPPGHGVYINFTLLQTEAVNDYIAVWDGPDQNSPQLGVFSGNTALETAYSSTNQVLLKFHSDFSNGGFFVLNFHAFQLKKCQPPPAVPQAEMLTEDDDFEIGDFVKYQCHPGYTLVGTDILTCKLSSQLQFEGSLPTCEAQCPANEVRTGSSGVILSPGYPGNYFNSQTCSWSIKVEPNYNITIFVDTFQSEKQFDALEVFDGSSGQSPLLVVLSGNHTEQSNFTSRSNQLYLRWSTDHATSKKGFKIRYAAPYCSLTHPLKNGGILNRTAGAVGSKVHYFCKPGYRMVGHSNATCRRNPLGMYQWDSLTPLCQAVSCGIPESPGNGSFTGNEFTLDSKVVYECHEGFKLESSQQATAVCQEDGLWSNKGKPPTCKPVACPSIEAQLSEHVIWRLVSGSLNEYGAQVLLSCSPGYYLEGWRLLRCQANGTWNIGDERPSCRVISCGSLSFPPNGNKIGTLTVYGATAIFTCNTGYTLVGSHVRECLANGLWSGSETRCLAGHCGSPDPIVNGHISGDGFSYRDTVVYQCNPGFRLVGTSVRICLQDHKWSGQTPVCVPITCGHPGNPAHGFTNGSEFNLNDVVNFTCNTGYLLQGVSRAQCRSNGQWSSPLPTCRVVNCSDPGFVENAIRHGQQNFPESFEYGMSILYHCKKGFYLLGSSALTCMANGLWDRSLPKCLAISCGHPGVPANAVLTGELFTYGAVVHYSCRGSESLIGNDTRVCQEDSHWSGALPHCTGNNPGFCGDPGTPAHGSRLGDDFKTKSLLRFSCEMGHQLRGSPERTCLLNGSWSGLQPVCEAVSCGNPGTPTNGMIVSSDGILFSSSVIYACWEGYKTSGLMTRHCTANGTWTGTAPDCTIISCGDPGTLANGIQFGTDFTFNKTVSYQCNPGYVMEAVTSATIRCTKDGRWNPSKPVCKAVLCPQPPPVQNGTVEGSDFRWGSSISYSCMDGYQLSHSAILSCEGRGVWKGEIPQCLPVFCGDPGIPAEGRLSGKSFTYKSEVFFQCKSPFILVGSSRRVCQADGTWSGIQPTCIDPAHNTCPDPGTPHFGIQNSSRGYEVGSTVFFRCRKGYHIQGSTTRTCLANLTWSGIQTECIPHACRQPETPAHADVRAIDLPTFGYTLVYTCHPGFFLAGGSEHRTCKADMKWTGKSPVCKSKGVREVNETVTKTPVPSDVFFVNSLWKGYYEYLGKRQPATLTVDWFNATSSKVNATFSEASPVELKLTGIYKKEEAHLLLKAFQIKGQADIFVSKFENDNWGLDGYVSSGLERGGFTFQGDIHGKDFGKFKLERQDPLNPDQDSSSHYHGTSSGSVAAAILVPFFALILSGFAFYLYKHRTRPKVQYNGYAGHENSNGQASFENPMYDTNLKPTEAKAVRFDTTLNTVCTVV

SEQ ID NO: 48076 - protein, 169 aa, Homo sapiens
MAAACRSVKGLVAVITGGASGLGLATAERLVGQGASAVLLDLPNSGGEAQAKKLGNNCVFAPADVTSEKDVQTALALAKGKFGRVDVAVNCAGIAVASKTYNLKKGQTHTLEDFQRVLDVNLMGTFNVIRLVAGEMGQNEPDQGGQRGVIINTASVAAFEGQVCLAPHC

SEQ ID NO: 48077 - protein, 134 aa, Homo sapiens
MDMAQEPVTFRDVAIYFSREEWACLEPSQRALYRDVMLDNFSSVAALAPDQTSSLAWNSGRSRGLKTGRDLSSRQCRGDPGQGQGSLQTPRDLVIIQLGLTRKPTCGEKEPGKEAALGRASGWTRMTGSFPELL

SEQ ID NO: 48078 - protein, 247 aa, Homo sapiens
MSMSPTVIILACLGFFLDQSVWAHVGLYEKPSLTARPGPTVRAGENVTLSCSSQSSFDIYHLSREGEAHELRLPAVPSINGTFQADFPLGPATHGETYRCFGSFHGSPYEWSDPSDPLPVSVTGNPSSSWPSPTEPSFKTDAAVMNQEPAGHRTVNREDSDEQDPQEVTYAQLDHCIFTQRKITGPSQRSKRPSTDTSVCIELPNAEPRALSPAHEHHSQALMGSSRETTALSQTQLASSNVPAAGI

SEQ ID NO: 48079 - protein, 150 aa, Homo sapiens
  MOD_RES (1)..(1): Any amino acid
XRPDSPAAAPGSGGAPGRAGIKEEAPFSLLFLSRERGPSQSTPSLISSAAPTMIKMEVNGHGKAMALGEGPPLPAGVQVPAGPQTVMGPGLAPMLAPPPRRTPKQHNCQSCGKTFSSASALQIHERTHTGEKPFGCTICGRAFTTKGNLK

SEQ ID NO: 48080 - protein, 78 aa, Homo sapiens
MADHSFSDGVPSDSVEAAKNASNTEKLTDQVMQNPRVLAALQERLDNVPHTPSSYIETLPKAVKRRINALKQLQVRCA

SEQ ID NO: 48081 - protein, 122 aa, Homo sapiens
MATSAPLRSLEEEVTCSICLDYLRDPVTIDCGHVFCRSCTTDVRPISGSRPVCPLCKKPFKKENIRPVWQLASLVENIERLKVDKGRQPGEVTREQQDAKLCERHREKLHYYCEDDGKLLCV

SEQ ID NO: 48082 - protein, 57 aa, Homo sapiens
MTPKQILQVIEAEGLKEMRSGTSPLACLNAMLHSNSRGGEGLFYKLPGRISLFTLKR

SEQ ID NO: 48083 - protein, 1393 aa, Homo sapiens
MGCTTSVILFKGIRTVFERNCAYMCKQQGENNALEYTAYNWTKEDSELLISSWLAKPKLIEPLDYENVIVQKKTQILNDCLREMLLFPYDDFQTAILRRQGRYICSTVPAKAEEEAQSLFVTECIKTYNSDWHLVNYKYEDYSGEFRQLPNKVVKLDKLPVHVYEVDEEVDKDEDAASLGSQKGGITKHGWLYKGNMNSAISVTMRSFKRRFFHLIQLGDGSYNLNFYKDEKISKEPKGSIFLDSCMGVVQNNKVRRFAFELKMQDKSSYLLAADSEVEMEEWITILNKILQLNFEAAMQEKRNGDSHEDDEQSKLEGSGSGLDSYLPELAKSAREAEIKLKSESRVKLFYLDPDAQKLDFSSAEPEVKSFEEKFGKRILVKCNDLSFNLQCCVAENEEGPTTNVEPFFVTLSLFDIKYNRKISADFHVDLNHFSVRQMLATTSPALMNGSGQSPSVLKGILHEAAMQYPKQGIFSVTCPHPDIFLVARIEKVLQGSITHCAEPYMKSSDSSKVAQKVLKNAKQACQRLGQYRMPFAWAARTLFKDASGNLDKNARFSAIYRQDSNKLSNDDMLKLLADFRKPEKMAKLPVILGNLDITIDNVSSDFPNYVNSSYIPTKQFETCSKTPITFEVEEFVPCIPKHTQPYTIYTNHLYVYPKYLKYDSQKSFAKARNIAICIEFKDSDEEDSQPLKCIYGRPGGPVFTRSAFAAVLHHHQNPEFYDEIKIELPTQLHEKHHLLLTFFHVSCDNSSKGSTKKRDVVETQVGYSWLPLLKDGRVVTSEQHIPVSANLPSGYLGYQELGMGRHYGPEIKWVDGGKPLLKISTHLVSTVYTQDQHLHNFFQYCQKTESGAQALGNELVKYLKSLHAMEGHVMIAFLPTILNQLFRVLTRATQEEVAVNVTRVIIHVVAQCHEEGLESHLRSYVKYAYKAEPYVASEYKTVHEELTKSMTTILKPSADFLTSNKLLKYSWFFFDVLIKSMAQHLIENSKVKLLRNQRFPASYHHAVETVVNMLMPHITQKFRDNPEASKNANHSLAVFIKRCFTFMDRGFVFKQINNYISCFAPGDPKTLFEYKFEFLRVVCNHEHYIPLNLPMPFGKGRIQRYQDLQLDYSLTDEFCRNHFLVGLLLREVGTALQEFREVRLIAISVLKNLLIKHSFDDRYASRSHQARIATLYLPLFGLLIENVQRINVRDVSPFPVNAGMTVKDESLALPAVNPLVTPQKGSTLDNSLHKDLLGAISGIASPYTTSTPNINSVRNADSRGSLISTDSGNSLPERNSEKSNSLDKHQQSSTLGNSVVRCDKLDQSEIKSLLMCFLYILKSMSDDALFTYWNKASTSELMDFFTISEVCLHQFQYMGKRYIASLTKCVALLLPAWNRNDACQIAAAGQPG

SEQ ID NO: 48084 - protein, 386 aa, Homo sapiens
MSQLSTTMSRCAKDLFGFAIMFFIIFLAYAQLAYLVFGTQVDDFSTFQECIFTQFRIILGDINFAEIEEANRVLGPIYFTTFVFFMFFILLNMFLAIINDTYSEVKSDLAQQKAEMELSDLIRKGYHKALVKLKLKKNTVDDISESLRQGGGKLNFDELRQDLKGKGHTDAEIEAIFTKYDQDGDQELTEHEHQQMRDDLEKEREDLDLDHSSLPRPMSSRSFPRSLDDSEEDDDEDSGHSSRRRGSISSGVSYEEFQVLVRRVDRMEHSIGSIVSKIDAVIVKLEIMERAKLKRREVLGRLLDGVAEDERLGRDSEIHREQMERLVREELERWESDDAASQISHGLGTPVGLNGQPRPRSSRPSSSQSTEGMEGAGGNGSSNVHV

SEQ ID NO: 48085 - protein, 169 aa, Homo sapiens
MEGGAYGAGKAGGAFDPYTLVRQPHTILRVVSWLFSIVVFGSIVNEGYLNSASEGEEFCIYNRNPNACSYGVAVGVLAFLTCLLYLALDVYFPQISSVKDRKKAVLSDIGVSAFWAFLWFVGFCYLANQWQVSKPKDNPLNEGTDAARAAIAFSFFSIFTWRSGATSPP

SEQ ID NO: 48086 - protein, 298 aa, Homo sapiens
MSEYIRVTEDENDEPIEIPSEDDGTVLLSTVTAQFPGACGLRYRNPVSQCMRGVRLVEGILHAPDAGWGNLVYVVNYPKDNKRKMDETDASSAVKVKRAVQKTSDLIVLGLPWKTTEQDLKEYFSTFGEVLMVQVKKDLKTGHSKGFGFVRFTEYETQVKVMSQRHMIDGRWCDCKLPNSKQSQDEPLRSRKVFVGRCTEDMTEDELREFFSQYGDVMDVFIPKPFRAFAFVTFADDQIAQSLCGEDLIIKGISVHISNAEPKHNSNRQLERSGRFGGNPVHLISNVYGRSTSLKVVL

SEQ ID NO: 48087 - protein, 157 aa, Homo sapiens
IFGSGNDQWVCPNDRQLALRAKLQTGWSVHTYQTEKQRRKQHLSPAEVEAILQVIQRAERLDVLEQQRIGRLVERLETMRRNVMGNGLSQCLLCGEVLGFLGSSSVFCKDCRKKVCTKCGIEASPGQKRPLWLCKICSEQRELFYFTIYRVEPSVFL

SEQ ID NO: 48088 - protein, 104 aa, Homo sapiens
MVRMKSMFAIGFCFTALMGMFNSIFDGRVVAKLPFTPLSYIQGLSHRNLLGDDTTDCSFIFLYILCTMSIRQNIQKILGLAPSRAATKQAGGFLGPPPPSGKFS

SEQ ID NO: 48089 - protein, 88 aa, Homo sapiens
MRSRKLTGAVRSSARLKARSCSAARLASAQEVAGSTSAKTACLVSPVTVENAKILTRGSIFIQNCHSKMCCFRKISTVTYLPEGDYCR

SEQ ID NO: 48090 - protein, 262 aa, Homo sapiens
MMCQSEARQGPELRAAKWLHFPQLALRRRLGQLSCMSRPALKLRSWPLTVLYYLLPFGALRPLSRVGWRPVSRVALYKSVPTRLLSRAWGRLNQVELPHWLRRPVYSLYIWTFGVNMKEAAVEDLHHYRNLSEFFRRKLKPQARPVCGLHSVISPSDGRILNFGQVKNCEVEQVKGVTYSLESFLGPRMCTEDLPFPPAASCDSFKNQLVTREGNELYHCVIYLAPGDYHCFHSPTDWTVSHRRHFPGPAHKQPKAQQGLLQ

SEQ ID NO: 48091 - protein, 840 aa, Homo sapiens
MESGPRAELGAGAPPAVVARTPPEPRPSPEGDPSPPPPPMSALVPDTPPDTPPAMKNATSSKQLPLEPESPSGQVGPRPAPPQEESPSSEAKSRGPTPPAMGPRDARPPRRSSQPSPTAVPASDSPPTKQEVKKAGERHKLAKERREERAKYLAAKKAVWLEKEEKAKALREKQLQERRRRLEEQRLKAEQRRAALEERQRQKLEKNKERYEAAIQRSVKKTWAEIRQQRWSWAGALHHSSPGHKTSGSRCSVSAVNLPKHVDSIINKRLSKSSATLWNSPSRNRSLQLSAWESSIVDRLMTPTLSFLARSRSAVTLPRNGRDQGRGCDPGRGPTWGRAGASLARGPQPDRTHPSAAVPVCPRSASASPLTPCSVTRSVHRCAPAGERGERRKPNAGGSPAPVRRRPEASPVQKKEKKDKERENEKEKSALARERSLKKRQSLPASPRARLSASTASELSPKSKARPSSPSTSWHRPASPCPSPGPGHTLPPKPPSPRGTTASPKGRVRRKEEAKESPSAAGPEDKSQSKRRASNEKESAAPASPAPSPAPSPTPAPPQKEQPPAETPTDAAVLTSPPAPAPPVTPSKPMAGTTDREEATRLLAEKRRQAREQREREEQERRLQAERDKRMREEQLAREAEARAEREAEARRREEQEAREKAQAEQEEQERLQKQKEEAEARSREEAERQRLEREKHFQQQEQERQERRKRLEEIMKRTRKSEVSETKKQDSKEANANGSSPEPVKAVEARSPGLQKEAVQKEEPIPQEPQWSLPSKELPASLVNGLQPLPAHQENGFSTNGPSGDKSLSRTPETLLPFAEAEAFLKKAVVQSPQVTEVL

SEQ ID NO: 48092 - protein, 355 aa, Homo sapiens
MKTIQPKMHNSISWAIFTGLAALCLFQGVPVRSGDATFPKAMDNVTVRQGESATLRCTIDNRVTRVAWLNRSTILYAGNDKWCLDPRVVLLSNTQTQYSIEIQNVDVYDEGPYTCSVQTDNHPKTSRVHLIVQVSPKIVEISSDISINEGNNISLTCIATGRPEPTVTWRHISPKAVGFVSEDEYLEIQGITREQSGDYECSASNDVAAPVVRRVKVTVNYPPYISEAKGTGVPVGQKGTLQCEASAVPSAEFQWYKDDKRLIEGKKGVKVENRPFLSKLIFFNVSEHDYGNYTCVASNKLGHTNASIMLFEVKTTALTPWKGPGAVSEVSNGTSRRAGCVWLLPLLVLHLLLKF

SEQ ID NO: 48093 - protein, 37 aa, Homo sapiens
MTPDHFPSLFCKWQPQLSETNCNRMKAMTTESSPGSC

SEQ ID NO: 48094 - protein, 314 aa, Homo sapiens
MLGEGLGVKETPQQKYQRLLHEVQELTTEVEKIKTTVKESATEEKLTPVLLAKQLAALKQQLVASHLEKLLGPDAAINLTDPDGALAKRLLLQLEATKNSKGGSGGKTTGTPPDSSLVTYELHSRPEQDKFSQAAKVAELEKRLTELETAVRCDQDAQNPLSAGLQGACLMETVELLQAKVSALDLAVLDQVEARLQSVLGKVNEIAKHKASVEDADTQSKVHQLYETIQRWSPIASTLPELVQRLVTIKQLHEQAMQFGQLLTHLDTTQQMIANSLKDNTTLLTQVQTTMRENLATVEGNFASIDERMKKLGK

SEQ ID NO: 48095 - protein, 322 aa, Homo sapiens
KSRISKKPQVPKKPREWKNPESQRGLSGAQDPFPGPAPVPVEVVQKFCRIDKSRKLPHSKAKTRSRLEVAEAEEEETSIKAARSELLLAEEPGFLEGEDGEDTAKICQADIVEAVDIASAAKFGPYRLNYSRTGRHLAFGGRRGHVAALDWVTKKLMCEINVMEAVRDIRFLHSEALLAVAQNRWLHIYDNQGIELHCIRRCDRVTRLEFLPFHFLLATASETGFLTYLDVSVGKIVAALNARAGRLDVMSQNPYNAVIHLGHSNGTVSLWSPAMKEPLAKILCHRGGVRAVAVDSTGTYMATSGLDHQLKIFDLRGTYQPL

SEQ ID NO: 48096 - protein, 478 aa, Homo sapiens
MMSQTMTQAGVSFRHSVRAAQCHTRVPNTWPRATRPYASCRRSPRLRGRWPGSAGQGAGGRAPRAGWRAGDVTGSAIETQSSSSEEIVPSPPSPPPLPRIYKPCFVCQDKSSGYHYGVSACEGCKGFFRRSIQKNMVYTCHRDKNCIINKVTRNRCQYCRLQKCFEVGMSKESVRNDRNKKKKEVPKPECSESYTLTPEVGELIEKVRKAHQETFPALCQLGKYTTNNSSEQRVSLDIDLWDKFSELSTKCIIKTVEFAKQLPGFTTLTIADQITLLKAACLDILILRICTRYTPEQDTMTFSDGLTLNRTQMHNAGFGPLTDLVFAFANQLLPLEMDDAETGLLSAICLICGDRQDLEQPDRVDMLQEPLLEALKVYVRKRRPSRPHMFPKMLMKITDLRSISAKGAERVITLKMEIPGSMPPLIQEMLENSEGLDTLSGQPGGGGRDGGGLAPPPGSCSPSLSPSSNRSSPATHSP

SEQ ID NO: 48097 - protein, 284 aa, Homo sapiens
MLISILTERSNAQRQLIVKEYQAAYGKELKDDLKGDLSGHFEHLMVALVTPPAVFDAKQLKKSMKGAGTNEDALIEILTTRTSRQMKDISQAYYTVYKKSLGDDISSETSGDFRKALLTLADGRRDESLKVDEHLAKQDAQILYKAGENRWGTDEDKFTEILCLRSFPQLKLTFDEYRNISQKDIVDSIKGELSGHFEDLLLAIVNCVRNTPAFLAERLHRALKGIGTDEFTLNRIMVSRSEIDLLDIRTEFKKHYGYSLYSAIKSDTSGDYEITLLKICGGDD

SEQ ID NO: 48098 - protein, 737 aa, Homo sapiens
MALCSALMTIFTIKMGTAKQAIDQGRSPVIIDNTNIQAWEMKPYVEVAIGKGYRVEFHEPETWWKFDPEELEKRNKHGVSRKKIAQMLDRYEYQMSISIVMNSVEPSHKSTQRPPPPQGRQRERVLKKTGHRLSKTKQKRNRKRNKKQNSQNRIMEENSLEFLSDLTPGDQDPSQSEEEDIEKTRRESEYPFIDGLQNEVGDFVTGYKEKRWKNKDPKDSFQNVMSIVELDNTPKNYLSKEGDNLFVSLLLRPNEISVTCPILTQNLSCVTTDDCSGMKVEKHIRNRHTIALDTQDLSAETSCLFMKKREIVDKNLSHEPILCHQHGIRMSDKVLREEQVYTTKINHWAFFTTNLSDEDLQLGSDRQPYFGSWPAGPHKFICEQRPKKDRACKLAGPDSRGQWIQMIFTSVAASEPGNNPEILTDKLLIGNEDFSPPPETMDSFIETNLFRSCLPQPDIPKNALESTKNKKRRKKRIFNLVPNFDLLGQSRIGVKEREKCDLLTKNHGLKITLGEEKDRISERNSEEENKQKLMTFDHHPLWFYLDIIKATPLNIDGQRYSHCLSFNRLRCSASLYKNYIPSFVLHNLSSIWKPSFTNKKLFLTFESQTRVGNKLNDAGFISPEILHSHPDTSCSLGVTSDFHFLNERFDRKLKRWEEPKELPAEDSQDLTSTDYRSLELPLSQGFAFQLVKLFGSPGVPMESLLPDDYVVPLDWKTLKMIYLQWKMSVEKRQKKIG

SEQ ID NO: 48099 - protein, 238 aa, Homo sapiens
SSAEGAPPPGPAPPPATSHPRVIRISHQSVEPVVMMHMNIQGPLSLSPCPDSGTQPGGVPSAPTGPLGPPGHGQTLGQQVPGFPTAPTRVVIARPTPPQARPSHPGGPPVSGTLQGAGLGTNASLAQMVSGLVGQLLMQPVLVAQGTPGMAPPPAPATASASAGTTNTATTAGPAPGGPAQPPPTPQPSMADLQFSQLLGNLLGPAGPGAGGPGVASPTITVAMPGVPAFLQGMTDFL

SEQ ID NO: 48100 - protein, 363 aa, Homo sapiens
MEVPPRLSHVPPPLFPSAPATLASRSLSHWRPRPPRQLAPLLPSLAPSSARQGARRAQRHVTAQQPSRLAGGAAIKGGRRRRPDLFRRHFKSSSIQRSAAAAAATRTARQHPPADSSVTMEDMNEYSNIEEFAEGSKINASKNQQDDGKMFIGGLSWDTSKKDLTEYLSRFGEVVDCTIKTDPVTGRSRGFGFVLFKDAASVDKVLELKEHKLDGKLIDPKRAKALKGKEPPKKVFVGGLSPDTSEEQIKEYFGAFGEIENIELPMDTKTNERRGFCFITYTDEEPVKKLLESRYHQIGSGKCEIKVAQPKEVYRQQQQQQKGGRGAAAGGRGGTRGRGRGQQSTYGKASRGGGNHQNNYQPY

SEQ ID NO: 48101 - protein, 284 aa, Homo sapiens
MQEITKHFVVCHVDAPGQQVGASQFPQGYQFPSMEQLAAMLPSVVQHFGFKYVIGIGVGAGAYVLAKFALIFPDLVEGLVLVNIDPNGKGWIDWAATKLSGLTSTLPDTVLSHLFSQEELVNNTELVQSYRQQIGNVVNQANLQLFWNMYNSRRDLDINRPGTVPNAKTLRCPVMLVVGDNAPAEDGVVECNSKLDPTTTTFLKMADSGGLPQVTQPGKLTEAFKYFLQGMGYMPSASMTRLARSRTASLTSASSVDGSRPQACTHSESSEGLGQVNHTMEVSC

SEQ ID NO: 48102 - protein, 69 aa, Homo sapiens
MSFPKYKPSSLRTLPETLDPAEYNISPETRRAQAERLAIRAQLKREYLLQYNDPNRRGLIVSVGPPRRE

SEQ ID NO: 48103 - protein, 227 aa, Homo sapiens
MMEGLDDGPDFLSEEDRGLKAINVDLQSDAALQVDISDALSERDKVKFTVHTKIPPAPPRPDFDASREKLQKLGEGEGSMTKEEFTKMKQELEAEYLAIFKKTVAMHEVFLCRVAAHPILRRDLNFHVFLEYNQDLSVRGKNKKEKLEDFFKNMVKSADGVIVSGVKDVDDFFEHERTFLLEYHNRVKDASAKSDRMTRSHKSAADDYNRIGSSLYALGTQDSTDIC

SEQ ID NO: 48104 - protein, 182 aa, Homo sapiens
MRDNTSPISVILVSSGSRGNKLLFRYPFQRSQEHPASQTSKPRSRYAASNTGDHADEQDGDSSEPCPPTDEQLVAGFSDVILATILATKSEMCGQKFELKIDNVRFVGHPTLLQHALGQISKTDPSPKREAPTMILFNVVFALRANADPSVINCLHNLSRRIATVLQHEERRCQYLTREAKL

SEQ ID NO: 48105 - protein, 368 aa, Homo sapiens
MIVFVRFNSSHGFPVEVDSDTSIFQLKEVVAKRQGVPADQLRVIFAGKELRNDWTVQNCDLDQQSIVHIVQRPWRKGQEMNATGGDDPRNAAGGCEREPQSLTRVDLSSSVLPGDSVGLAVILHTDSRKDSPPAGSPAGRSIYNSFYVYCKGPCQRVQPGKLRVQCSTCRQATLTLTQGPSCWDDVLIPNRMSGECQSPHCPGTSAEFFFKCGAHPTSDKETSVALHLIATNSRNITCITCTDVRSPVLVFQCNSRHVICLDCFHLYCVTRLNDRQFVHDPQLGYSLPCVAGCPNSLIKELHHFRILGEEQYNRYQQYGAEECVLQMGGVLCPRPGCGAGLLPEPDQRKVTCEGGNGLGCGYGQRRTK

SEQ ID NO: 48106 - protein, 241 aa, Homo sapiens
MDPARPLGLSILLLFLTEAALGDAAQEPTGNNAEICLLPLDYGPCRALLLRYYYDRYTQSCRQFLYGGCEGNANNFYTWEACDDACWRIEKVPKVCRLQVSVDDQCEGSTEKYFFNLSSMTCEKFFSGGCHRNRIENRFPDEATCMGFCAPKKSKYDFYVPSFCYSPKDEGLCSANVTRYYFNPRYRTCDAFTYTGCGGNDNNFVSREDCKRACAKALKKKKKMPKLRFASRIRKIRKKQF

SEQ ID NO: 48107 - protein, 71 aa, Homo sapiens
MAPAADREGYWGPTTSTLDWCEENYSVTWYIAEFCSFLPSSLKSNLKLVSTHQASFLVLGLWAGRGDIPVI

SEQ ID NO: 48108 - protein, 147 aa, Homo sapiens
MASREDELRNCVVCGDQATGYHFNALTCEGCKGFFRRTVSKSIGPTCPFAGSCEVSKTQRRHCPACRLQKCLDAGMRKDIPCPLKTRSPFSREQLWKSVTSYSIPLSVSKHKTSSAGLFATQLKMEPVTDLELPREMRLISCKRRWH

SEQ ID NO: 48109 - protein, 570 aa, Homo sapiens
MMYSPICLTQDEFHPFIEALLPHVRAIAYTWFNLQARKRKYFKKHEKRMSKDEERAVKDELLSEKPEIKQKWASRLLAKLRKDIRQEYREDFVLTVTGKKHPCCVLSNPDQKGKIRRIDCLRQADKVWRLDLVMVILFKGIPLESTDGERLMKSPHCTNPALCVQPHHITVSVKELDLFLAYYVQEQDSGQSGSPSHNDPAKNPPGYLEDSFVKSGVFNVSELVRVSRTPITQGTGVNFPIGEIPSQPYYHDMNSGVNLQRSLSSPPSSKRPKTISIDENMEPSPTGDFYPSPSSPAAGSRTWHERDQDMSSPTTMKKPEKPLFSSASPQDSSPRLSTFPQHHHPGIPGVAHSVISTRTPPPPSPLPFPTQAILPPAPSSYFSHPTIRYPPHLNPQDTLKNYVPSYDPSSPQTSQPNGSGQVVGKVPGHFTPVLAPSPHPSAVRPVTLSMTDTKPITTSTEGEAASPTATTYTASGTSQANRYVGLSPRDPSFLHQQQLRICDWTMNQNGRHLYPSTSEDTLGITWQSPGTWASLVPFQVSNRTPILPANVQNYGLNIIGEPFLQAETSN

SEQ ID NO: 48110 - protein, 721 aa, Homo sapiens
MTTLLWVFVTLRVITAAVTVETSDHDNSLSVSIPQPSPLRVLLGTSLTIPCYFIDPMHPVTTAPSTAPLAPRIKWSRVSKEKEVVLLVATEGRVRVNSAYQDKVSLPNYPAIPSDATLEVQSLRSNDSGVYRCEVMHGIEDSEATLEVVVKGIVFHYRAISTRYTLDFDRAQRACLQNSAIIATPEQLQAAYEDGFHQCDAGWLADQTVRYPIHTPREGCYGDKDEFPGVRTYGIRDTNETYDVYCFAEEMEGEVFYATSPEKFTFQEAANECRRLGARLATTGQLYLAWQAGMDMCSAGWLADRSVRYPISKARPNCGGNLLGVRTVYVHANQTGYPDPSSRYDAICYTGEDFVDIPENFFGVGGEEDITVQTVTWPDMELPLPRNITEGEARGSVILTVKPIFEVSPSPLEPEEPFTFAPEIGATAFAEVENETGEATRPWGFPTPGLGPATAFTSEDLVVQVTAVPGQPHLPGGVVFHYRPGPTRYSLTFEEAQQACLRTGAVIASPEQLQAAYEAGYEQCDAGWLRDQTVRYPIVSPRTPCVGDKDSSPGVRTYGVRPSTETYDVYCFVDRLEGEVFFATRLEQFTFQEALEFCESHNATLATTGQLYAAWSRGLDKCYAGWLADGSLRYPIVTPRPACGGDKPGVRTVYLYPNQTGLPDPLSRHHAFCFRGMQPHFGSNSPFCLERTPLGSPDPATTQYPIHQSKKMSVPLGQSQL

SEQ ID NO: 48111 - protein, 42 aa, Homo sapiens
MPQTVILPGPAPWGFRLSGGIDFNQPLVITRGRNSLMVSTSI

SEQ ID NO: 48112 - protein, 92 aa, Homo sapiens
MLLRRVVEGGRAVAAAVRGSASTRTGLGSAEGHVREAAVRGPARTGRSPGPSTRMWGRSREDRALAAAEGPLAPLLHRLLPSPRPGICGGAA

SEQ ID NO: 48113 - protein, 38 aa, Homo sapiens
MAATSLMSALAARLLQPAHSCSLRLRPFHLAAVRGISP

SEQ ID NO: 48114 - protein, 316 aa, Homo sapiens
MGLGVSAEQPAGGAEGFHLHGVQENSPAQQAGLEPYFDFIITIGHSRLNKENDTLKALLKANVEKPVKLEVFNMKTMRVREVEVVPSNMWGGQGLLGASVRFCSFRRASEQVWHVLDVEPSSPAALAGLRPYTDYVVGSDQILQESEDFFTLIESHEGKPLKLMVYNSKSDSCREVTVTPNAAWGGEGSPPATTRSHLAPHHLLLYHLVPHHLMLYHLDPPPRTLLPWRQVPGRVTTWRPCCRHLAPPWRIPFLGLGVPATVLQTLMDFPISWRLLFSPHLQCSELWTQASWTCREFLSWTTAMPVCGPACPLPQN

SEQ ID NO: 48115 - protein, 299 aa, Homo sapiens
MVEKEEAGGGISEEEAAQYDRQIRLWGLEAQKRLRASRVLLVGLKGLGAEIAKNLILAGVKGLTMLDHEQVTPEDPGAQFLIRTGSVGRNRAEASLERAQNLNPMVDVKVDTEDIEKKPESFFTQFDAVCLTCCSRDVIVKVDQICHKNSIKFFTGDVFGYHGYTFANLGEHEFVEEKTKVAKVSQGVEDGPDTKRAKLDSSETTMVKKKVVFCPVKEALEVDWSSEKAKAALKRTTSDYFLLQELFPRIVERVYAQRHPRSTERTHAKMLIPFLTKEKPGFLGEMAVSRSGVGKLQCS

SEQ ID NO: 48116 - protein, 362 aa, Homo sapiens
MPTYRPPSHRWVFLIKKGYQDVDTSLQSAVITKVKGVAFTNTSDLGQRIWDVADYVIPAQNEGIPDGACSKDSDCHAGEAVTAGNGVKTGRCLRRENLARGTCEIFAWCPLETSSRPEEPFLKEAEDFTIFIKNHIRFPKFNFSKSNVMDVKDRSFLKSCHFGPKNHYCPIFRLGSVIRWAGSDFQDIALEGGVIGINIEWNCDLDKAASECHPHYSFSRLDNKLSKSVSSGYNFRFARYYRDAAGVEFRTLMKAYGIRFDVMVNGKGAFFCDLVLIYLIKKREFYRDKKYEEVRGLEDSSQEAEDEASGLGLSEQLTSGPGLLGMPEQQELQEPPEAKRGSSSQKGNGSVCPQLLEPHRST

SEQ ID NO: 48117 - protein, 186 aa, Homo sapiens
MLQQVNGHNPGSDGQAREYLREDLQEFLGGEVLLYKLDDLTRVNPVTLETVLRCLQARYMADTFYTNAGCTLVALNPFKPVPQLYSPELMREYHAAPQPQKLKPHVFTVGEQTYRNVKSLIEPVNQSIVVSGESGAGKTWTSRCLMKFYAVVATSPASWESHKIAERIEQRILNSNPVMEAFGLSK

SEQ ID NO: 48118 - protein, 115 aa, Homo sapiens
MENMHLRRVRTMPRHSQSLTMAPYSSVSLVEQLEDRILCHEKTTAALVEHAFRIKDDIVNSLQKMQNKGGGDRLARLFLEEHIRNITAIVKQLNRDIEVLQEQIRARDNISYGTN

SEQ ID NO: 48119 - protein, 570 aa, Homo sapiens
MKPRARGWRGLAALWMLLAQVAEQAPACAMGPAAAAPGSPSVPRPPPPAERPGWMEKGEYDLVSAYEVDHRGDYVSHEIMHHQRRRRAVPVSEVESLHLRLKGSRHDFHMDLRTSSSLVAPGFIVQTLGKTGTKSVQTLPPEDFCFYQGSLRSHRNSSVALSTCQGLSGMIRTEEADYFLRPLPSHLSWKLGRAAQGSSPSHVLYKRSTEPHAPGASEVLVTSRTWELAHQPLHSSDLRLGLPQKQHFCGRRKKYMPQPPKEDLFILPDEYKSCLRHKRSLLRSHRNEELNVETLVVVDKKMMQNHGHENITTYVLTILNMVSALFKDGTIGGNINIAIVGLILLEDEQPGLVISHHADHTLSSFCQWQSGLMGKDGTRHDHAILLTGLDICSWKNEPCDTLGFAPISGMCSKYRSCTINEDTGLGLAFTIAHESGHNFGMIHDGEGNMCKKSEGNIMSPTLAGRNGVFSWSPCSRQYLHKFLSTAQAICLADQPKPVKEYKYPEKLPGELYDANTQCKWQFGEKAKLCMLDFKKDICKALWCHRIGRKCETKFMPAAEGTICGHDMVRS

SEQ ID NO: 48120 - protein, 205 aa, Homo sapiens
MSLRDSSYSMAPGPCVVAQLPSEDMGHLTDPQSRDHGFLRTKMKVTLGDSPSGDLFTCRVCQKAFTYQRMLNRHMKCHNDVKRHLCTYCGKGFNDTFDLKRHVRTHTGVRPYKCSLCDKAFTQRCSLESHLKKIHGVQQKYAYKERRAKLYVCEECGCTSESQEGHVLHLKEHHPDSPLLRKTSKKVAVALQNTVTSLLQGSPHL

SEQ ID NO: 48121 - protein, 827 aa, Homo sapiens
MEGAGGANDKKNRISSERRKEKSRDAARSRRSKESEVFYELAHQLPLPHNVSSHLDKASVMRLTISYLRVRKLLDAGDLDIEDDMKAQMNCFYLKALDGFVMVLTDDGDMIYISDNVNKYMGLTQFELTGHSVFDFTHPCDHEEMREMLTHRNGLVKKGKEQNTQRSFFLRMKCTLTSRGRTMNIKSATWKVLHCTGHIHVYDTNSNQPQCGYKKPPMTCLVLICEPIPHPSNIEIPLDSKTFLSRHSLDMKFSYCDERITELMGYEPEELLGRSIYEYYHALDSDHLTKTHHDMFTKGQVTTGQYRMLAKRGGYVWVETQATVIYNTKNSQPQCIVCVNYVVSGIIQHDLIFSLQQTECVLKPVESSDMKMTQLFTKVESEDTSSLFDKLKKEPDALTLLAPAAGDTIISLDFGSNDTETDDQQLEEVPLYNDVMLPSPNEKLQNINLAMSPLPTAETPKPLRSSADPALNQEVALKLEPNPESLELSFTMPQIQDQTPSPSDGSTRQSSPEPNSPSEYCFYVDSDMVNEFKLELVEKLFAEDTEAKNPFSTQDTDLDLEMLAPYIPMDDDFQLRSFDQLSPLESSSASPESASPQSTVTVFQQTQIQEPTANATTTTATTDELKTVTKDRMEDIKILIASPSPTHIHKETTSATSSPYRDTQSRTASPNRAGKGVIEQTEKSHPRSPNVLSVALSQRTTVPEEELNPKILALQNAQRKRKMEHDGSLFQAVGIGTLLQQPDDHAATTSLSWKRVKGCKSSEQNGMEQKTIILIPSDLACRLLGQSMDESGLPQLTSYDCEVNAPIQGSRNLLQGEELLRALDQVN

SEQ ID NO: 48122 - protein, 57 aa, Homo sapiens
MWAFSELPMPLLINLIVSLLGFVATVTLIPAFRGHFIAARLCGQDLNKTSRQQILWP

SEQ ID NO: 48123 - protein, 69 aa, Homo sapiens
MALDVKSRAKRYEKLDFLGEGQFATVYKARDKNTNQIVAIKKIKLGHRSEAKDGGIGPPSYYLELGCMV

SEQ ID NO: 48124 - protein, 1274 aa, Homo sapiens
MWPSQLLIFMMLLAPIIHAFSRAPIPMAVVRRELSCESYPIELRCPGTDVIMIESANYGRTDDKICDSDPAQMENIRCYLPDAYKIMSQRCNNRTQCAVVAGPDVFPDPCPGTYKYLEVQYECVPYKVEQKVFLCPGLLKGVYQSEHLFESDHQSGAWCKDPLQASDKIYYMPWTPYRTDTLTEYSSKDDFIAGRPTTTYKLPHRVDGTGFVVYDGALFFNKERTRNIVKFDLRTRIKSGEAIIANANYHDTSPYRWGGKSDIDLAVDENGLWVIYATEQNNGKIVISQLNPYTLRIEGTWDTAYDKRSASNAFMICGILYVVKSVYEDDDNEATGNKIDYIYNTDQSKDSLVDVPFPNSYQYIAAVDYNPRDNLLYVWNNYHVVKYSLDFGPLDSRSGQAHHGQVSYISPPIHLDSELERPSVKDISTTGPLGMGSTTTSTTLRTTTLSPGRSTTPSVSGRRNRSTSTPSPAVEVLDDMTTHLPSASSQIPALEESCEAVEAREIMWFKTRQGQIAKQPCPAGTIGVSTYLCLAPDGIWDPQGPDLSNCSSPWVNHITQKLKSGETAANIARELAEQTRNHLNAGDITYSVRAMDQLVGLLDVQLRNLTPGGKDSAARSLNKLQKRERSCRAYVQAMVETVNNLLQPQALNAWRDLTTSDQLRAATMLLHTVEESAFVLADNLLKTDIVRENTDNIKLEVARLSTEGNLEDLKFPENMGHGSTIQLSANTLKQNGRNGEIRVAFVLYNNLGPYLSTENASMKLGTEALSTNHSVIVNSPVITAAINKEFSNKVYLADPVVFTVKHIKQSEENFNPNCSFWSYSKRTMTGYWSTQGCRLLTTNKTHTTCSCNHLTNFAVLMAHVEVKHSDAVHDLLLDVITWVGILLSLVCLLICIFTFCFFRGLQSDRNTIHKNLCISLFVAELLFLIGINRTDQPIACAVFAALLHFFFLAAFTWMFLEGVQLYIMLVEVFESEHSRRKYFYLVGYGMPALIVAVSAAVDYRSYGTDKVCWLRLDTYFIWSFIGPATLIIMLNVIFLGIALYKMFHHTAILKPESGCLDNIKSWVIGAIALLCLLGLTWAFGLMYINESTVIMAYLFTIFNSLQGMFIFIFHCVLQKKVRKEYGKCLRTHCCSGKSTESSIGSGKTSGSRTPGRYSTGSQSRIRRMWNDTVRKQSESSFITGDINSSASLNRGAMANHLISNALLRPHGTNNPYNTLLGEPAVCNNPSVSMYNAQEPYRETSMGVKLNIAYQIGASEQCQGYKCHGYSTTEW

SEQ ID NO: 48125 - protein, 51 aa, Homo sapiens
MVQASGHRRSTRGSKMVSWSVIAKIQEILQRKMVREFLAEFMSTYVMMEPT

SEQ ID NO: 48126 - protein, 54 aa, Homo sapiens
MNKPITPSTYVRCLNVGLIRKLSDFIDPQEGWKKLAVAIKKPSGDDRYNQFHIR

SEQ ID NO: 48127 - protein, 807 aa, Homo sapiens
MWALCSLLRSAAGRTMSQGRTISQAPARRERPRKDPLRHLRTREKRGPSGCSGGPNTVYLQVVAAGSRDSGVQRLMQEHKLKVARLDNIFLTRMHWSNVGGLSGMILTLKETGLPKCVLSGPPQLEKYLEAIKIFSGPLKGIELAVRPHSAPEYEDETMTVYQIPIHSEQRRGKHQPWQSPERPLSRLSPERSSDSESNENEPHLPHGVSQRRGVRDSSLVVAFICKLHLKRGNFLVLKAKEMGLPVGTAAIAPIIAAVKDGKSITHEGREILAEELCTPPDPGAAFVVVECPDESFIQPICENATFQRYQGKADAPVALVVHMAPASVLVDSRYQQWMERFGPDTQHLVLNENCASVHNLRSHKIQTQLNLIHPDIFPLLTSFRCKKEGPTLSVPMVQGECLLKYQLRPRREWQRDAIITCNPEEFIVEALQLPNFQQSVQEYRRSAQDGPAPAEKRSQYPEIIFLGTGSAIPMKIRNVSATLVNISPDTSLLLDCGEGTFGQLCRHYGDQVDRVLGTLAAVFVSHLHADHHTGLPSILLQRERALASLGKPLHPLLVVAPNQLKAWLQQYHNQCQEVLHHISMIPAKCLQEGAEISSPAVERLISSLLRTCDLEEFQTCLVRHCKHAFGCALVHTSGWKVVYSGDTMPCEALVRMGKDATLLIHEATLEDGLEEEAVEKTHSTTSQAISVGMRMNAEFIMLNHFSQRYAKVPLFSPNFSEKVGVAFDHMKVCFGDFPTMPKLIPPLKALFAGDIEEMEERREKRELRQVRAALLSRELAGGLEDGEPQQKRAHTEEPQAKKVRAQ

SEQ ID NO: 48128 - protein, 106 aa, Homo sapiens
  MOD_RES (1)..(1): Any amino acid
XRYQACRFGQVPDQPAGLRLFTVQIPHKRLRQPPPCYLTAWDGSNFLPLRTKSCGHEVVSCLDVSESGTFLGLGTVTGSVAIYIAFSLQGVFLCGSCSCCVSGLLL

SEQ ID NO: 48129 - protein, 266 aa, Homo sapiens
MVCLKLPGGSCMAALTVTLTVLSSPLALAGDTQPRFLEQAKCECHFLNGTERVWNLIRYIYNQEEYARYNSDLGEYQAVTELGRPDAEYWNSQKDLLERRRAEVDTYCRYNYGVVESFTVQRRVQPKVTVYPSKTQPLQHHNLLVCSVNGFYPGSIEVRWFRNSQEEKAGVVSTGLIQNGDWTFQTLVMLETVPRSGEVYTCQVEHPSMMSPLTVQWSARSESAQSKMLSGVGGFVLGLLFLGTGLFIYFRNQKGHSGLQPTGLLS

SEQ ID NO: 48130 - protein, 67 aa, Homo sapiens
MMQESATETISNSSMNQNGMSTLSSQLDAGSRDGRSSGDTSSEVSTVELLHLQQQQEDVVSYTQVIC

SEQ ID NO: 48131 - protein, 46 aa, Homo sapiens
MADPDPRYPRSSIEDDFNYGSSVASATVHIRMGSLNYSDFNSFFIL

SEQ ID NO: 48132 - protein, 198 aa, Homo sapiens
MALPVTALLLPLALLLHAARPSQFRVSPLDRTWNLGETVELKCQVLLSNPTSGCSWLFQPRGAAASPTFLLYLSQNKPKAAEGLDTQRFSGKRLGDTFVLTLSDFRRENEGYYFCSALSNSIMYFSHFVPVFLPVHTRGLDFACDIYIWAPLAGTCGVLLLSLVITLYCNHRNRRRVCKCPRPVVKSGDKPSLSARYV

SEQ ID NO: 48133 - protein, 61 aa, Homo sapiens
MELVLAAAGALLFCGFIIYDTHSLMHKLSPEEYVLAAISLYLDIINLFLHLLRFLEAVNKK

SEQ ID NO: 48134 - protein, 270 aa, Homo sapiens
MLPKRRRARVGSPSGDAASSTPPSTRFPGVAIYLVEPRMGRSRRAFLTGLARSKGFRVLDACSSEATHVVMEETSAEEAVSWQERRMAAAPPGCTPPALLDISWLTESLGAGQPVPVECRHRLEVAGPRKGPLSPAWMPAYACQRPTPLTHHNTGLSEALEILAEAAGFEGSEGRLLTFCRAASVLKALPSPVTTLSQLQGLPHFGEHSSRVVQELLEHGVCEEVERVRRSERYQTMKVRRAGLGPTPGMSCPGNDNTVHTMHGEANRGS

SEQ ID NO: 48135 - protein, 39 aa, Homo sapiens
MDRQCSERPYSCTPTGRVSSAVSQNSSHRLQDAAGHEQC

SEQ ID NO: 48136 - protein, 252 aa, Homo sapiens
MKESLQTGDLLSTFHTISPSFQLKAAALPPFPLGASAQNGLASSLPAEVHSLTLSPPEQAAQPMQPLPESLASLHPSVSPGSPPPPLPNHKYNTTSTSYSPLASLPLKADTKGFCNISLFEDLPLQEPQSPQKLNPGFDLAKGNAGKVNLPKELPADAVNLTIPASLDLSPLLGFWQLPPPATQNTFGNSTLALGPGESLPHRLSCLGQQQQEPPLAMGTVSLGQLPLPPIPHVFSAGTGSAILPHFHHAFR

SEQ ID NO: 48137 - protein, 818 aa, Homo sapiens
MWSWKCLLFWAVLVTATLCTARPSPTLPEQAQPWGAPVEVESFLVHPGDLLQLRCRLRDDVQSINWLRDGVQLAESNRTRITGEEVEVQDSVPADSGLYACVTSSPSGSDTTYFSVNVSDALPSSEDDDDDDDSSSEEKETDNTKPNPVAPYWTSPEKMEKKLHAVPAAKTVKFKCPSSGTPNPTLRWLKNGKEFKPDHRIGGYKVRYATWSIIMDSVVPSDKGNYTCIVENEYGSINHTYQLDVVERSPHRPILQAGLPANKTVALGSNVEFMCKVYSDPQPHIQWLKHIEVNGSKIGPDNLPYVQILKTAGVNTTDKEMEVLHLRNVSFEDAGEYTCLAGNSIGLSHHSAWLTVLEALEERPAVMTSPLYLEIIIYCTGAFLISCMVGSVIVYKMKSGTKKSDFHSQMAVHKLAKSIPLRRQVSADSSASMNSGVLLVRPSRLSSSGTPMLAGVSEYELPEDPRWELPRDRLVLGKPLGEGCFGQVVLAEAIGLDKDKPNRVTKVAVKMLKSDATEKDLSDLISEMEMMKMIGKHKNIINLLGACTQDGPLYVIVEYASKGNLREYLQARRPPGLEYCYNPSHNPEEQLSSKDLVSCAYQVARGMEYLASKKCIHRDLAARNVLVTEDNVMKIADFGLARDIHHIDYYKKTTNGRLPVKWMAPEALFDRIYTHQSDVWSFGVLLWEIFTLGGSPYPGVPVEELFKLLKEGHRMDKPSNCTNELYMMMRDCWHAVPSQRPTFKQLVEDLDRIVALTSNQEYLDLSMPLDQYSPSFPDTRSSTCSSGEDSVFSHEPLPEEPCLPRHPAQLANGGLKRR

SEQ ID NO: 48138 - protein, 66 aa, Homo sapiens
MSSSMWYIMQSIQSKYSLSERLIRTIAAIRSFPHDNVEDLIRGSMVAIESGLLVQLSCLMIRFPVL

SEQ ID NO: 48139 - protein, 90 aa, Homo sapiens
MLDVALFMSNAMRLKAVLEQGPSSHYYTTLVTLISLSLLLQVVIGVLLVVIGEEPSLQSDLLPRHPWLAERPHVSPGPPCIGTGSFATTR

SEQ ID NO: 48140 - protein, 158 aa, Homo sapiens
MAYPGHPGAGGGYYPGGYGGAPGGPAFPGQTQDPLYGYFAAVAGQDGQIDADELQRCLTQSGIAGGYKPFNLETCRLMVSMLDRDMSGTMGFNEFKELWAVNSIAKRYSTNGKITFDDYIACCVKLRALTDSFRRRDTAQQGVVNFPYDDFIQCVMSV

SEQ ID NO: 48141 - protein, 55 aa, Homo sapiens
MAAYSYRPGPGAGPGPAAGAALPDQSFLWNVFQRVDKDRSGVISDTELQQALSNG

SEQ ID NO: 48142 - protein, 176 aa, Homo sapiens
MAAVGAGGSTAAPGPGAVSAGALEPGTASAGETVCPSSRMGGGAHRRLKYISLAVLVVQNASLILSIRYARTLPGDRFFATTAVVMAEVLKGLTCLLLLFAQKRGNVKHLVLFLHEAVLVQYVDTLKLAVPSLIYTLQNNLQYVAISNLPAATFQVSPKPSMAPEELTGLGTGVWE

SEQ ID NO: 48143 - protein, 278 aa, Homo sapiens
MRLNLGEEVPVIIHRDNIISDYDQIIDYVERTFTGEHVVALMPEVGSLQHARVLQYRELLDALPMDAYTHGCILHPELTTDSMIPKYATAEIRRHLANATTDLMKLDHEEEPQLSEPYLSKQKKLMAKILEHDDVSYLKKILGELAMVLDQIEAELEKRKLENEGQKCELWLCGCAFTLADVLLGATLHRLKFLGLSKKYWEDGSRPNLQSFFERVQRRFAFRKVLGDIHTTLLSAVIPNAFRLVKRKPPSFFGASFLMGSLGGMGYFAYWYLKKKYI

SEQ ID NO: 48144 - protein, 55 aa, Homo sapiens
MQNQSSTNHPGASMLMHIHLDTSSLKTLHLGTLFFLFYLALTQNEENICDGKVTL

SEQ ID NO: 48145 - protein, 1197 aa, Homo sapiens
MPDLRRKKPLPLVSDLAMSLVQSRKAGITSAMATRTSLKDEELKSHVYKKTLQALIYPISCTTPHNFEVWTATTPTYCYECEGLLWGIARQGMRCSECGVKCHEKCQDLLNADCLQRAAEKSCKHGAEDRTQNIIMAMKDRMKIRERNKPEIFEVIRDVFTVNKAAHVQQMKTVKQSVLDGTSKWSAKITITVVCAQGLQAKDKTGSSDPYVTVQVSKTKKRTKTIFGNLNPVWEEKFHFECHNSSDRIKVRVWDEDDDIKSRVKQRLKRESDDFLGQTIIEVRTLSGEMDVWYNLEKRTDKSAVSGAIRLQISVEIKGEEKVAPYHVQYTCLHENLFHYLTDIQGSGGVRIPEARGDDAWKVYFDETAQEIVDEFAMRYGIESIYQAMTHFACLSSKYMCPGVPAVMSTLLANINAYYAHTTASTNVSASDRFAASNFGKERFVKLLDQLHNSLRIDLSTYRNNFPAGSPERLQDLKSTVDLLTSITFFRMKVQELQSPPRASQVVKDCVKACLNSTYEYIFNNCHDLYSRQYQLKQELPPEEQGPSIRNLDFWPKLITLIVSIIEEDKNSYTPVLNQFPQELNVGKVSAEVMWHLFAQDMKYALEEHEKDHLCKSADYMNLHFKVKWLHNEYVRDLPVLQGQVPEYPAWFEQFVLQWLDENEDVSLEFLRGALERDKKDGFQQTSEHALFSCSVVDVFTQLNQSFEIIRKLECPDPSILAHYMRRFAKTIGKVLMQYADILSKDFPAYCTKEKLPCILMNNVQQLRVQLEKMFEAMGGKELDLEAADSLKELQVKLNTVLDELSMVFGNSFQVRIDECVRQMADILGQVRGTGNASPDARASAAQDADSVLRPLMDFLDGNLTLFATVCEKTVLKRVLKELWRVVMNTMERMIVLPPLTDQTGTQLIFTAAKELSHLSKLKDHMVREETRNLTPKQCAVLDLALDTIKQYFHAGGNGLKKTFLEKSPDLQSLRYALSLYTQTTDTLIKTFVRSQTTQVHDGKGIRFTANEDIRPEKGSGVDDPVGEVSIQVDLFTHPGTGEHKVTVKVVAANDLKWQTAGMFRPFVEVTMVGPHQSDKKRKFTTKSKSNNWAPKYNETFHFLLGNEEGPESYELQICVKDYCFAREDRVLGLAVMPLRDVTAKGSCACWCPLGRKIHMDETGLTILRILSQRSNDEVAREFVKLKSESRSTEEGS

SEQ ID NO: 48146 - protein, 151 aa, Homo sapiens
MNRHLCVWLFRHPSLNGYLQCHIQLHSHQFRQIHLDTRLQVFRQNRNCILHLLSKNWSRRYCHQDTKMLWKHKALQKYMENLSKEYQTLEQCLQHIPVNEENRRSLNRRHAELAPLAAIYQEIQETEQAIEELESMCKKTESCSVAQAGMQ

SEQ ID NO: 48147 - protein, 140 aa, Homo sapiens
MLSRAVCGTSRQLAPVLGYLGSRQKHSLPDLPYDYGALEPHINAQIMQLHHSKHHAAYVNNLNVTEEKYQEALAKGRFQAERREAVPGRGDPREPGPIRTGLSVEENSLRICTGSEFSRHDSLSFKHMVYLIVEGVPRWV

SEQ ID NO: 48148 - protein, 327 aa, Homo sapiens
MSCNPSFGGIGKGHLMREVDALDGLCSRICDQSGVHYKVLNRRKGPAVWGLRAQIDRKLYKQNMQKEILNTPLLTVQEGAVEDLILTEPEPEHTGKCRVSGVVLVDGSTVYAESVILTTGTFLRGMIVIGLETHPAGRLGDQPSIGLAQTLEKLGFVVGRLKTGTPPRIAKESINFSILNKHIPDNPSIPFSFTNETVWIKPEDQLPCYLTHTNPRVDEIVLKNLHLNSHVKETTRGPRYCPSIESKVLRFPNRLHQVWLEPEGMDSDLIYPQGLSMTLPAELQEKMITCIRGLEKAKVIQPGWSAMVRSRLTTTSPCQATVFSMIT

SEQ ID NO: 48149 - protein, 129 aa, Homo sapiens
MPSKGPLQSVQVFGRKKTATAVAHCKRGNGLIKLLEPVLLLGKERFAGVDIRVRVKGGGHVAQIYAIRQSISKALVAYYQKYVDEASKKEIKDILIQYDRTLLVADPRRCESKKFGGPGARARYQKSYR

SEQ ID NO: 48150 - protein, 169 aa, Homo sapiens
MAASGKTSKSEPNHVIFKKISRDKSVTIYLGNRDYIDHVSQVQPVDGVVLVDPDLVKGKKVYVTLTCAFRYGQEDIDVIGLTFRRDLYFSRVQVYPPVGAASTPTKLQESLLKKLGSNTYPFLLTFPDYLPCSVMLQPAPQDSGKSCGVDFEVKAFATDSTDAEEDKIP

SEQ ID NO: 48151 - protein, 2865 aa, Homo sapiens
MASEVVCGLIFRLLLPICLAVACAFRYNGLSFVYLIYLLLIPLFSEPTKTTMQGHTGRLLKSLCFISLSFLLLHIIFHITLVSLEAQHRIAPGYNCSTWEKTFRQIGFESLKGADAGNGIRVFVPDIGMFIASLTIWLLCRNIVQKPVTDEAAQSNPEFENEELAEGEKIDSEEALIYEEDFNGGDGVEGELEESTKLKMFRRLASVASKLKEFIGNMITTAGKVVVTILLGSSGMMLPSLTSSVYFFVFLGLCTWWSWCRTFDPLLFSCLCVLLAIFTAGHLIGLYLYQFQFFQEAVPPNDYYARLFGIKSVIQTDCSSTWKIIVNPDLSWYHHANPILLLVMYYTLATLIRIWLQEPLVQDEGTKEEDKALACSPIQITAGRRRSLWYATHYPTDERKLLSMTQDDYKPSDGLLVTVNGNPVDYHTIHPSLPMENGPGKADLYSTPQYRWEPSDESSEKREEEEEEKEEFEEERSREEKRSIKVHAMVSVFQFIMKQSYICALIAMMAWSITYHSWLTFVLLIWSCTLWMIRNRRKYAMISSPFMVVYGNLLLILQYIWSFELPEIKKVPGFLEKKEPGELASKILFTITFWLLLRQHLTEQKALQEKEALLSEVKIGSQENEEKDEELQDIQVEGEPKEEEEEEAKEEKQERKKVEQEEAEEEDEQDIMKVLGNLVVAMFIKYWIYVCGGMFFFVSFEGKIVMYKIIYMVLFLFCVALYQVHYEWWRKILKYFWMSVVIYTMLVLIFIYTYQFENFPGLWQNMTGLKKEKLEDLGLKQFTVAELFTRIFIPTSFLLVCILHLHYFHDRFLELTDLKSIPSKEDNTIYSHAKVNGRVYLIINSIKKKLPIHQNELAHPEGSLPDLTMMHLTASLEKPEVRKLAEPGEEKLEGYSEKAQKGDLGKDSEESEEDGEEEEESEEEEETSDLRNKWHLVIDRLTVLFLKFLEYFHKLQVFMWWILELHIIKIVSSYIIWVSVKEVSLFNYVFLISWAFALPYAKLRRLASSVCTVWTCVIIVCKMLYQLQTIKPENFSVNCSLPNENQTNIPFNELNKSLLYSAPIDPTEWVGLRKSSPLLVYLRNNLLMLAILAFEVTIYRHQEYYRGRNNLTAPVSRTIFHDITRLHLDDGLINCAKYFINYFFYKFGLETCFLMSVNVIGQRMDFYAMIHACWLIAVLYRRRRKAIAEIWPKYCCFLACIITFQYFICIGIPPAPCRDYPWRFKGASFNDNIIKWLYFPDFIVRPNPVFLVYDFMLLLCASLQRQIFEDENKAAVRIMAGDNVEICMNLDAASFSQHNPVPDFIHCRSYLDMSKVIIFSYLFWFVLTIIFITGTTRISIFCMGYLVACFYFLLFGGDLLLKPIKSILRYWDWLIAYNVFVITMKNILSIGACGYIGTLVHNSCWLIQAFSLACTVKGYQMPAANSPCTLPSGEAGIIWDSICFAFLLLQRRVFMSYYFLHVVADIKASQILASRGAELFQATIVKAVKARIEEEKKSMDQLKRQMDRIKARQQKYKKGKERMLSLTQEPGEGQDMQKLSEEDDEREADKQKAKGKKKQWWRPWVDHASMVRSGDYYLFETDSEEEEEEELKKEDEEPPRRSAFQRAIGKFASAILALPKSVIKLPKTILQYLIRAAKFVYQAWITDPKTALRQRHKEKKRSAREERKRRRKGSKEGPVEWEDREDEPIKKKSDGPDNIIKRIFNILKFTWVLFLATVDSFTTWLNSISREHIDISTVLRIERCMLTREIKKGNVPTRESIHMYYQNHIMNLSRESGLDTIDEHPGAASGAQTAHRMDSLDSHDSISSCYTEATMLFSRQSTLDDLDGQEIPKTSERARPRLRKMLSMDMSSSSADSGSLASSEPTQCTMLYSRQGTTETIEEVEAEQEEEAGSTAPEPREAKEYEATGYDVGAMGAEEASLTPEEELTQFSTLDGDVEAPPSYSKAVSFEHLSFGSQDDSAGKNRMAVSPDDSRTDKLGSSILPPLTHELTASELLLKKMFHDDELEESEKFYVGQPRFLLLFYAMYNTLVARSEMVCYFVIILNHMVSASMITLLLPILIFLWAMLSVPRPSRRFWMMAIVYTEVAIVVKYFFQFGFFPWNKNVEVNKDKPYHPPNIIGVEKKEGYVLYDLIQLLALFFHRSILKCHGLWDEDDMTESGMAREESDDELSLGHGRRDSSDSLKSINLAASVESVHVTFPEQQTAVRRKRSGSSSEPSQRSSFSSNRSQRGSTSTRNSSQKGSSVLSIKQKGKRELYMEKLQEHLIKAKAFTIKKTLEIYVPIKQFFYNLIHPEYSAVTDVYVLMFLADTVDFIIIVFGFWAFGKHSAAADITSSLSEDQVPGPFLVMVLIQFGTMVVDRALYLRKTVLGKVIFQVILVFGIHFWMFFILPGVTERKFSQNLVAQLWYFVKCVYFGLSAYQIRCGYPTRVLGNFLTKSYNYVNLFLFQGFRLVPFLTELRAVMDWVWTDTTLSLSSWICVEDIYAHIFILKCWRESEKRYPQPRGQKKKKVVKYGMGGMIIVLLICIVWFPLLFMSLIKSVAGVINQPLDVSVTITLGGYQPIFTMSAQQSQLKVMDQQSFNKFIQAFSRDTGAMQFLENYEKEDITVAELEGNSNSLWTISPPSKQKMIHELLDPNSSFSVVFSWSIQRNLSLGAKSEIATDKLSFPLKNITRKNIAKMIAGNSTESSKTPVTIEKIYPYYVKAPSDSNSKPIKQLLSENNFMDITIILSRDNTTKYNSEWWVLNLTGNRIYNPNSQALELVVFNDKVSPPSLGFLAGYGIMGLYASVVLVIGKFVREFFSGISHSIMFEELPNVDRILKLCTDIFLVRETGELELEEDLYAKLIFLYRSPETMIKWTREKTN

SEQ ID NO: 48152 - protein, 246 aa, Homo sapiens
MKTVLMVAEKPSLAQSIAKILSRGSLSSHKGLNGACSVHEYTGTFAGQPVRFKMTSVCGHVMTLDFLGKYNKWDKVDPAELFSQAPTEKKEANPKLNMVKFLQVEGRGCDYIVLWLDCDKEGENICFEVLDAVLPVMNKAHGGEKTVFRARFSSITDTDICNAMACLGEPDHNEALSVDARQELDLRIGCAFTRFQTKYFQGKYGDLDSSLISFGPCQTPTLGFCVERHDKIQSFKPETYWVLQAK

SEQ ID NO: 48153 - protein, 149 aa, Homo sapiens
  MOD_RES (1)..(1): Any amino acid
XNSLHLTTFCLQYKPTVIACVCIHLACKWSNWEIPVSTDGKHWWEYVDPTVTLELLDELTHEFLQILEKTPNRLKKIRNWRANQAARKPKVDGQVGYGHLSTLVKLDKKPVETNGPDANHEYSTSSQHMDYKDTFDMLDSLLSAQGMNM

SEQ ID NO: 48154 - protein, 270 aa, Homo sapiens
MKVTVGPDPSLVYRPDVDPEVAKDKASFRNYTSGPLLDRVFTTYKLMHTHQTVDFVRSKHAQFGGFSYKKMTVMEAVDLLDGLVDESDPDVDFPNSFHAFQTAEGIRKAHPDKDWFHLVGLLHDLGKVLALFGEPQWAVVGDTFPVGCRPQASVVFCDSTFQDNPDLQDPRYSTELGMYQPHCGLDRVLMSWGHDEYMYQVMKFNKFSLPPEAFYMIRFHSFYPWHTGRDYQQLCSQQDLAMLPWQVRPLHQVPGPAGRGQAAALLPGAH

SEQ ID NO: 48155 - protein, 410 aa, Homo sapiens
MSLMVVSMACVGFFLLEGPWPHVGGQDKPFLSAWPGTVVSEGQHVTLQCRSHLGFNEFSLSKEDGMPVPELYNRIFRNSFLMGPVTPAHAGTYRCCSSHPHSPTGWSAPSNPVVIMVTGVHRKPSLLAHPGPLVKSGETVILQCWSDVRFERFLLHREGITEDPLRLVGQLHDAGSQVNYSMGPMTPALAGTYRCFGSVTHLPYELSAPSDPLDIVVVGLYGKPSLSAQPGPTVQAGENVTLSCSSRSLFDIYHLSREAEAGELRLTAVLRVNGTFQANFPLGPVTHGGNYRCFGSFRALPHAWSDPSDPLPVSVTGNSRHLHVLIGTSVVIIPFAILLFFLLHRWCANKKNAVVMDQEPAGNRTVNREDSDEQDPQEVTYAQLNHCVFTQRKITRPSQRPKTPPTDTSV

SEQ ID NO: 48156 - protein, 31 aa, Homo sapiens
  MOD_RES (1)..(1): Any amino acid
XWVIYNDHKVCASERPPKDLGYMYFYRRIPS

SEQ ID NO: 48157 - protein, 23 aa, Homo sapiens
MGFIIHIQQVKKQRKKLDQGLIL

SEQ ID NO: 48158 - protein, 159 aa, Homo sapiens
MMLVGFLGCCGAVQESQCMLGLFFGFLLVIFAIEIAAAIWGYSHKDEVIKEVQEFYKDTYNKLKTKDEPQRETLKAIHYALNCCGLAGGVEQFISDICPKKDVLETFTVKSCPDAIKEVFDNKFHIIGAVGIGIAVVMIFGMIFSMILCCAIRRNREMV

SEQ ID NO: 48159 - protein, 100 aa, Homo sapiens
SPQAVGSGIPEMKTILRGVVLKEYLTMKAFVAKVVALTAGLGSGIPVGKEGPFVHIASICAAVLSKFMSVFCGVYEPVPVLQMSTPLSPVAPHGDRAWAA

SEQ ID NO: 48160 - protein, 62 aa, Homo sapiens
MADEEAGGTERMEISAELPQTPQRLASMGSHCVAQAGVQWHDLRSLTSPSLTQAILPPQPPE

SEQ ID NO: 48161 - protein, 497 aa, Homo sapiens
MVPSFLSLSFSSLGLWASGLILVLGFLKLIHLLLRRQTLAKAMDKFPGPPTHWLFGHALEIQETGSLDKVVSWAHQFPYAHPLWFGQFIGFLNIYEPDYAKAVYSRGGRGLLVLEGPKWLQHRKLLTPGFHYDVLKPYVAVFTESTRIMLDKWEEKAREGKSFDIFCDVGHMALNTLMKCTFGRGDTGLGHSRDSSYYLAVSDLTLLMQQRLVSFQYHNDFIYWLTPHGRRFLRACQVAHDHTDQVIRERKAALQDEKVRKKIQNRRHLDFLDILLGARDEDDIKLSDADLRAEVDTFMFEGHDTTTSGISWFLYCMALYPEHQHRCREEVREILGDQDFFQWDDLGKMTYLTMCIKESFRLYPPVPQVYRQLSKPVTFVDGRSLPAGSLISMHIYALHRNSAVWPDPEVFDSLRFSTENASKRHPFAFMPFSAGPRNCIGQQFAMSEMKVVTAMCLLRFEFSLDPSRLPIKMPQLVLRSKNGFHLHLKPLGPGSGK

SEQ ID NO: 48162 - protein, 493 aa, Homo sapiens
MSLADELLADLEEAAEEEEGGSYGEEEEEPAIEDVQEETQLDLSGDSVKTIAKLWDSKMFAEIMMKIEEYISKQAKASEVMGPVEAAPEYRVIVDANNLTVEIENELNIIHKFIRDKYSKRFPELESLVPNALDYIRTVKELGNSLDKCKNNENLQQILTNATIMVVSVTASTTQGQQLSEEELERLEEACDMALELNASKHRIYEYVESRMSFIAPNLSIIIGASTAAKIMGVAGGLTNLSKMPACNIMLLGAQRKTLSGFSSTSVLPHTGYIYHSDIVQSLPPDLRRKAARLVAAKCTLAARVDSFHESTEGKDEIERKFDKWQEPPPVKQVKPLPAPLDGQRKKRGGRRYRKMKERLGLTEIRKQANRMSFGEIEEDAYQEDLGFSLGHLGKSGSGRVRQTQVNEATKARISKTLQRTLQKQSVVYGGKSTIRDRSSGTASSVAFTPLQGLEIVNPQAAEKKVAEANQKYFSSMAEFLKVKGEKSGLMST

SEQ ID NO: 48163 - protein, 738 aa, Homo sapiens
MRGVWPPPVSALLSALGMSTYKRATLDEEDLVDSLSEGDAYPNGLQVNFHSPRSGQRCWAARTQVEKRLVVLVVLLAAGLVACLAALGIQYQTRSPSVCLSEACVSVTSSILSSMDPTVDPCHDFFSYACGGWIKANPVPDGHSRWGTFSNLWEHNQAIIKHLLENSTASVSEAERKAQVYYRACMNETRIEELRAKPLMELIERLGGWNITGPWAKDNFQDTLQVVTAHYRTSPFFSVYVSADSKNSNSNVIQVDQSGLGLPSRDYYLNKTENEKVLTGYLNYMVQLGKLLGGGDEEAIRPQMQQILDFETALANITIPQEKRRDEELIYHKVTAAELQTLAPAINWLPFLNTIFYPVEINESEPIVVYDKEYLEQISTLINTTDRCLLNNYMIWNLVRKTSSFLDQRFQDADEKFMEVMYGTKKTCLPRWKFCVSDTENNLGFALGPMFVKATFAEDSKSIATEIILEIKKAFEESLSTLKWMDEETRKSAKEKADAIYNMIGYPNFIMDPKELDKVFNDYTAVPDLYFENAMRFFNFSWRVTADQLRKAPNRDQWSMTPPMVNAYYSPTKNEIVFPAGILQAPFYTRSSPKALNFGGIGVVVGHELTHAFDDQGREYDKDGNLRPWWKNSSVEAFKRQTECMVEQYSNYSVNGEPVNGRHTLGENIADNGGLKAAYRVWCSVRTPESSHEGLITDPHSPSRFRVIGSLSNSKEFSEHFRCPPGSPMNPPHKCEVW

SEQ ID NO: 48164 - protein, 91 aa, Homo sapiens
MDAQGCCADGSSPCRKQGSSGPPDCCWTCAEACNFPLPSPAHFLDACCPQPTRADWAPRCPRCCPLCDCACTCQLPDCQSLNCLCFEIKLR

SEQ ID NO: 48165 - protein, 228 aa, Homo sapiens
MSSSEEVSWISWFCGLRGNEFFCEVDEDYIQDKFNLTGLNEQVPHYRQALDMILDLEPDEELEDNPNQSDLIEQAAEMLYGLIHARYILTNRGIAQMLEKYQQGDFGYCPRVYCENQPMLPIGLSDIPGEAMVKLYCPKCMDVYTPKSSRHHHTDGAYFGTGFPHMLFMVHPEYRPKRPANQFVPSSCSRHPDVPLLPRRRPFCRMHFRLREVYHQQLIPVHGDHHLL

SEQ ID NO: 48166 - protein, 57 aa, Homo sapiens
MMDVSGVGFPSKVPWKKMSAEELENQYCPSRWVVRLGAEEALRTYSQIGIEGLRTPV

SEQ ID NO: 48167 - protein, 180 aa, Homo sapiens
MRSGKASCTLETVWEDKHKYEEAERRFYEHEATQAAASAQQLPAEGPAMNGPGQDDPEDADEAEAPDGGSRRDPRKSQDSRKPLQKKRKRSPKSGLGPADLALLGLSAERVWLDKSLFDQAESSYRQKLADVAAQAAWPPALAPWGLCTHGNQVACHHVTWGIWVNKSSFDQAERAFVEW

SEQ ID NO: 48168 - protein, 592 aa, Homo sapiens
MSRSRASIHRGSIPAMSYAPFRDVRGPSMHRTQYVHSPYDRPGWNPRFCIISGNQLLMLDEDEIHPLLIRDRRSESSRNKLLRRTVSVPVEGRPHGEHEYHLGRSRRKSVPGGKQYSMEGAPAAPFRPSQGFLSRRLKSSIKRTKSQPKLDRTSSFRQILPRFRSADHDRARLMQSFKESHSHESLLSPSSAAEALELNLDEDSIIKPVHSSILGQEFCFEVTTSSGTKCFACRSAAERDKWIENLQRAVKPNKDNSRRVDNVLKLWIIEARELPPKKRYYCELCLDDMLYARTTSKPRSASGDTVFWGEHFEFNNLPAVRALRLHLYRDSDKKRKKDKAGYVGLVTVPVATLAGRHFTEQWYPVTLPTGSGGSGGMGSGGGGGSGGGSGGKGKGGCPAVRLKARYQTMSILPMELYKEFAEYVTNHYRMLCAVLEPALNVKGKEEVASALVHILQSTGKAKDFLSDMAMSEVDRFMEREHLIFRENTLATKAIEEYMRLIGQKYLKDAIGEFIRALYESEENCEVDPIKCTASSLAEHQANLRMCCELALCKVVNSHCLPSCSCGPSFPVSLTPVSTPSPPTTPLSMFPGS

SEQ ID NO: 48169 - protein, 144 aa, Homo sapiens
MMPSPSDSSRSLTSRPSTRGLTHLRLHRPWLQALLTLGLVQVLLGILVVTFSMVASSVTTTESIKRSCPSWAGFSNLLFSVCGLTICAAIICTLSAIVCCIQIFSLDLVHTLTSGTFIPKCLRKKLLLFPLQIQGSALKPASSA

SEQ ID NO: 48170 - protein, 171 aa, Homo sapiens
MFPPSGQWDQTRGVVVVSAWETDHLCFCNSSGSTGLIPPSHFQARPLSTLPRMAPTWLSDIPLVQPPGHQDVSERRLDTQRPQVTMWERDVSSDRQEPGRRGRSWGLEGSQALSQQAEVIVRQLQELRRLEEEVRLLRETSLQQKMRLEAQAMELEALARAEKAGRAEAEG

SEQ ID NO: 48171 - protein, 1101 aa, Homo sapiens [sequence omitted]

SEQ ID NO: 48172 - protein, 152 aa, Homo sapiens
MERRRLWGSIQSRYISMSVWTSPRRLVELAGQSLLKDEALAIAALELLPRELFPPLFMAAFDGRHSQTLKAMVQAWPFTCLPLGVLMKGQHLHLETFKAVLDGLDVLLAQEVRPRRWKLQVLDLRKNSHQDFWTVWSGNRASLYSFPEPEAA

SEQ ID NO: 48173 - protein, 519 aa, Homo sapiens
MDIKGQFWNDDDSEGDNESEEFLYGVQGSCAADLYRHPQLDADIEAVKEIYSENSVSIREYGTIDDVDIDLHINISFLDEEVSTAWKVLRTEPIVLRLRFSLSQYLDGPEPSIEVFQPSNKEGFGLGLQLKKILGMFTSQQWKHLSNDFLKTQQEKRHSWFKASGTIKKFRAGLSIFSPIPKSPSFPIIQDSMLKGKLGVPELRVGRLMNRSISCTMKNPKVEVFGYPPSPQAGLLCPQHVGLPPPARTSPLVSGHCKNIPTLEYGFLVQIMKYAEQRIPTLNEYCVVCDEQHVFQNGSMLKPAVCTRELCVFSFYTLGVMSGAAEEVATGAEVVDLLVAMCRAALESPRKSIIFEPYPSVVDPTDPKTLAFNPKKKNYERLQKALDSVMSIREMTQGSYLEIKKQMDKLDPLAHPLLQWIISSNRSHIVKLPLSRQLKFMHTSHQFLLLSSPPAKEARFRTAKKLYGSTFAFHGSHIENWHSILRNGLVNASYTKLQEWEKDSTGCPPRMSWSRDTTG

SEQ ID NO: 48174 - protein, 564 aa, Homo sapiens
MGPFLLNAVRWLARGQTGKVGVNTNLKDLCPLLSEHGLQCSLEPHLNSDLCVYCCKAYSDKEAKQLQEFVAEGGGLLIGGQAWWWASQNPGHCPLAGFPGNIILNCFGLSILPQTLKAGCFPVPTPEMRSYHFRKALSQFQAILNHENGNLEKSCLAKLRVDGAAFLQIPAEGVPAYISLHRLLRKMLRGSGLPAVSRENPVASDSYEAAVLSLATGLAHSGTDCSQLAQGLGTWTCSSSLYPSKHPITVEINGINPGNNDCWVSTGLYLLEGQNAEVSLSEAAASAGLRVQIGCHTDDLTKARKLSRAPVVTHQCWMDRTERSVSCLWGGLLYVIVPKGSQLGPVPVTIRGAVPAPYYKLGKTSLEEWKRQMQENLAPWGELATDNIILTVPTTNLQALKDPEPVLRLWDEMMQAVARLAAEPFPFRRPERIVADVQISAGWMHSGYPIMCHLESVKEIINEMDMRSRGVWGPIHELGHNQQRHGWEFPPHTTEATCNLWSVYVHETVLGIPRAQAHEALSPPERERRIKAHLGKGAPLCDWNVWTALETYLQVLSRNSGRRG

SEQ ID NO: 48175 - protein, 609 aa, Homo sapiens
MMEGLKKRTRKAFGIRKKEKDTDSTGSPDRDGIKKSNGAPNGFYAEIDWERYNSPELDEEGYSIRPEEPGSTKGKHFYSSSESEEEEESHKKFNIKIKPLQSKDILKNAATVDELKASIGNIALSPSPVGAIKRNLSSEEVARPRRSTPTPELISKKPPDDTTALAPLFGPPLESAFDEQKTEVLLDQPEIWGSGQPINPSMESPKLTRPFPTGTPPPLPPKNVPATPPRTGSPLTIGPGASSPARPATPLVPCRSTTPPPPPPRPPSRPKLPPGKPGVGDVSRPFSPPIHSSSPPPIAPLARAESTSSISSTNSLSAATTPTVGSSRGPSPLTMGAQDTLPVAAAFTETVNAYFKGADPSKCIVKITGEMVLSFPAGITRHFANNPSPAALTFRVINFSRLEHVLPNPQLLCCDNTQNDANTKEFWVNMPNLMTHLKKVSEQKPQATYYNVDMLKYQVSAQGIQSTPLNLAVNWRCEPSSTDLRIDYKYNTDAMTTAVALNNVQFLVPIDGGVTKLQAVLPPAVWNAEQQRILWKIPDISQKSENGGVGSLLARFQLSEGPSKPSPLVVQFTSEGSTLSGCDIELVGAGYRFSLIKKRFAAGKYLADN

SEQ ID NO: 48176 - protein, 109 aa, Homo sapiens
MDKPCGCPPGVCDHGTGDRRDPWYSTVGLLPPVRAMSQRNLNAKTEQGPTGVTMTSNPITWGQIKKTTQEAEKLLERQGQAKTPDSMFLAMLAVVSCASIGSGEPPTGN

SEQ ID NO: 48177 - protein, 503 aa, Homo sapiens
MMHFKSGLELTELQNMTVPEDDNISNDSNDFTEVENGQINSKFISDRESRRSLTNSHLEKKKCDEYIPGTTSLGMSVFNLSNAIMGSGILGLAFALANTGILLFLVLLTSVTLLSIYSINLLLICSKETGCMVYEKLGEQVFGTTGKFVIFGATSLQNTGAMLSYLFIVKNELPSAIKFLMGKEETFSAWYVDGRVLVVIVTFGIILPLCLLKNLGYLGYTSGFSLSCMVFFLIVVIYKKFQIPCIVPELNSTISANSTNADTCTPKYVTFNSKTVYALPTIAFAFVCHPSVLPIYSELKDRSQKKMQMVSNISFFAMFVMYFLTAIFGYLTFYDNVQSDLLHKYQSKDDILILTVRLAVIVAVILTVPVLFFTVRSSLFELAKKTKFNLCRHTVVTCILLVVINLLVIFIPSMKDIFGVVGVTSANMLIFILPSSLYLKITDQDGDKGTQRIWLFLFLQFPVQPCWLSECIILLPAALSLNMLKRKELIILCSLDSGFSNLY

SEQ ID NO: 48178 - protein, 67 aa, Homo sapiens
MTSPSPRIQIISTDSAVASPQRIQIVTDQQTGQKIQIVTAVDASGSPKQQFILTSPDGAGTGKVILA

SEQ ID NO: 48179 - protein, 735 aa, Homo sapiens
MAADSREEKDGELNVLDDILTEVPEQDDELYNPESEQDKNEKKGSKRKSDRMESTDTKRQKPSVHSRQLVSKPLSSSVSNNKRIVSTKGKSATEYKNEEYQRSERNKRLDADRKIRLSSSASREPYKNQPEKTCVRKRDPERRAKSPTPDGSERIGLEVDRRASRSSQSSKEEVNSEEYGSDHETGSSGSSDEQGNNTENEEEGVEEDVEEDEEVEEDAEEDEEVDEDGEEEEEEEEEEEEEEEEEEEEYEQDERDQKEEGNDYDTRSEASDSGSESVSFTDGSVRSGSGTDGSDEKKKERKRARGISPIVFDRSGSSASESYAGSEKKHEKLSSSVRAVRKDQTSKLKYVLQDARFFLIKSNNHENVSLAKAKGVWSTLPVNEKKLNLAFRSARSVILIFSVRESGKFQGFARLSSESHHGGSPIHWVLPAGMSAKMLGGVFKIDWICRRELPFTKSAHLTNPWNEHKPVKIGRDGQEIELECGTQLCLLFPPDESIDLYQVIHKMRHKRRMHSQPRSRGRPSRREPVRDVGRRRPEDYDIHNSRKKPRIDYPPEFHQRPGYLKDPRYQEVDSFTNLIPNRRFSGVRRDVFLNGSYNDYVREFHNMGPPPPWQGMPPYPGMEQPPHHPYYQHHAPPPQAHPPYSGHHPVPHEARYRDKRVHDYDMRVDDFLRRTQAVVSGRRSRPRERDRERERDRPRDNRRDRERDRGRDRERERERLCDRDRDRGERGRYRR

SEQ ID NO: 48180 - protein, 31 aa, Homo sapiens
MRSGKASCTLETVWEDKHKYEEAERRFYEHE

SEQ ID NO: 48181 - protein, 162 aa, Homo sapiens
MTDDKDVLRDVWFGRIPTCFTLYQDEITEREAEPYYLLLPRVSYLTLVTDKVKKHFQKVMRQEDISEIWFEYEGTPLKWHYPIGLLFDLLASSSALPWNITVHFKSFPEKDLLHCPSKDAIEAHFMSCMKEADALKHKSQVINEMQKKDHKQLWMGLQNDND

SEQ ID NO: 48182 - protein, 498 aa, Homo sapiens
MTGKKKNNKRKRSKSKQHQGNKDAKDKVERPEAGPLQPQPPQIQNGPMNGCEKDSSSTDSANEKPALIPREKKISILEEPSKALRGVTEGNRLLQQKLSLDGNPKPIHGTTERSDGLQWSAEQPCNPSKPKAKTSPVKSNTPAAHLEIKPDELAKKRGPNIEKSVKDLQRCTVSLTRYRVMIKEEVDSSVKKIKAAFAELHNCIIDKEVSLMAEMDKVKEEAMEILTARQKKAEELKRLTDLASQMAEMQLAELRAEIKHFVSERKYDEELGKAARFSCDIEQLKAQIMLCGEITHPKNNYSSRTPCSSLLPLLNAHAATSGKQSNFSRKSSTHNKPSEGKAANPKMVSSLPSTADPSHQTMPANKQNGSSNQRRRFNPQYHNNRLNGPAKSQGSGNEAEPLGKGNSRHEHRRQPHNGFRPKNKGGAKNQEASLGMKTPEAPAHSEKPRRRQHAADTSEARPFRGSVGRVSQCNLCPTRIEVSTDAAVLSVPAVTLVA

SEQ ID NO: 48183 - protein, 59 aa, Homo sapiens
MTCGGCAEAVSRVLNKLGGVKYDIDLPNKKVCIESEHSMDTLLATLKKTGKTVSYLGLE

SEQ ID NO: 48184 - protein, 82 aa, Homo sapiens
MGLGQGWGWEASCFACLIRSCCQVVTFTFPFGFQGISQSLENVSGYYADARLEVGSTQLRTAGSCSHSFKRSFLGQKDPALV

SEQ ID NO: 48185 - protein, 272 aa, Homo sapiens
MAAMDTGQRADPSNPGDKEGDLQGLWQELYQLQAKQKKLKREVEKHKLFEDYLIKVLEKIPEGCTGWEEPEEVLVEATVKHYGKLFTASQDTQKRLEAFCQMIQAVHRSLESLEEDHRALMLSLKIRLCQLQKKCYRKQEQWWQLKHSITYQKDIDFDTHTSSSYNDQLLGYMQMTITNMARQCCPSAHGVPKSMDLFSKLDLIKEFMLDKMETVRLIALLTEPKVCWSWDSFGDQWLRRHPKPFRKCPRRRVSTPRTPFPSPHASECSGLY

SEQ ID NO: 48186 - protein, 381 aa, Homo sapiens
  MOD_RES (1)..(1): Any amino acid
XRGLAHLHAHKVIHRDIKGQNVLLTENAEVKLVDFGVSAQLDRTVGRRNTFIGTPYWMAPEVIACDENPDATYDYRSDIWSLGITAIEMAEGAPPLCDMHPMRALFLIPRNPPPRLKSKKWSKKFIDFIDTCLIKTYLSRPPTEQLLKFPFIRDQPTERQVRIQLKDHIDRSRKKRGEKEETEYEYSGSEEEDDSHGEEGEPSSIMNVPGESTLRREFLRLQQENKSNSEALKQQQQLQQQQQRDPEAHIKHLLHQRQRRIEEQKEERRRVEEQQRREREQRKLQEKEQQRRLEDMQALRREEERRQAEREQEYIRHRLEEEQRQLEILQQQLLQEQALLLVTGPSASSGKMLFRASLLERDGNTSREGIHPGHQGNTSPL

SEQ ID NO: 48187 - protein, 217 aa, Homo sapiens
MEKDAEDGAPSEGAEAPPSTEEAAPPRSEEEEAPRPPTVEAPAEDGFSPSAEDAVSSVVDYRDLIPSEEGIVLPDDHEADLNRVRQRLAPRPVQSVISEVLSLPSSRRSSRYRRSMSGLPNLQETLKERQARFREARESRRLKIDPSYKYIFEILAENLGLDIVTVEELILDCPSLEAFTNFFAKDGCKTLKFLYQEGDVPGIECGRTIAGATKGAK

SEQ ID NO: 48188 - protein, 457 aa, Homo sapiens
MLATRRLLGWSLPARVSTAPKKTSFGSLKDEDRIFTNLYGRHDWRLKGSLSRGDWYKTKEILLKGPDWILGEIKTSGLRGRGGAGFPTGLKWSFMNKPSDGRPKYLVVNADEGEPGTCKDREILRHDPHKLLEGCLVGGRAMGARAAYIYIRGEFYNEASNLQVAIREAYEAGLIGKNACGSGYDFDVFVVRGAGAYICGEETALIESIEGKQGKPRLKPPFPADVGVFGCPTTVANVETVAVSPTICRRGGTWFAGFGRERNSGTKLFNISGHVNHPCTVEEEMSVPLKELIEKHAGGVTGGWDNLLAVIPGGSSTPLIPKSVCETVLMDFDALVQAQTGLGTAAVIVMDRSTDIVKAIARLIEFYKHESCGQCTPCREGVDWMNKVMARFVRGDARPAEIDSLWEISKQIEGHTICALGDGAAWPVQGLIRHFRPELEERMQRFAQQHQARQAAS

SEQ ID NO: 48189 - protein, 55 aa, Homo sapiens
MFEIKKICCIGAGYVGGPTCSVIAHMCPEIRVTVVDVNESRINAWNSPTLPIYED

SEQ ID NO: 48190 - protein, 1150 aa, Homo sapiens
MEPRPTAPSSGAPGLAGVGETPSAAALAAARVELPGTAVPSVPEDAAPASRDGGGVRDEGPAAAGDGLGRPLGPTPSQSRFQVDLVSENAGRAAAAAAAAAAAAAAAGAGAGAKQTPADGEASGESEPAKGSEEAKGRFRVNFVDPAASSSAEDSLSDAAGVGVDGPNVSFQNGGDTVLSEGSSLHSGGGGGSGHHQHYYYDTHTNTYYLRTFGHNTMDAVPRIDHYRHTAAQLGEKLLRPSLAELHDELEKEPFEDGFANGEESTPTRDAVVTYTAESKGVVKFGWIKGVLVRCMLNIWGVMLFIRLSWIVGQAGIGLSVLVIMMATVVTTITGLSTSAIATNGFVRGGGAYYLISRSLGPEFGGAIGLIFAFANAVAVAMYVVGFAETVVELLKEHSILMIDEINDIRIIGAITVVILLGISVAGMEWEAKAQIVLLVILLLAIGDFVIGTFIPLESKKPKGFFGYKSEIFNENFGPDFREEETFFSVFAIFFPAATGILAGANISGDLADPQSAIPKGTLLAILITTLVYVGIAVSVGSCVVRDATGNVNDTIVTELTNCTSAACKLNFDFSSCESSPCSYGLMNNFQVMSMVSGFTPLISAGIFSATLSSALASLVSAPKIFQALCKDNIYPAFQMFAKGYGKNNEPLRGYILTFLIALGFILIAELNVIAPIISNFFLASYALINFSVFHASLAKSPGWRPAFKYYNMWISLLGAILCCIVMFVINWWAALLTYVIVLGLYIYVTYKKPDVNWGSSTQALTYLNALQHSIRLSGVEDHVKNFRPQCLVMTGAPNSRPALLHLVHDFTKNVGLMICGHVHMGPRRQAMKEMSIDQAKYQRWLIKNKMKAFYAPVHADDLREGAQYLMQAAGLGRMKPNTLVLGFKKDWLQADMRDVDMYINLFHDAFDIQYGVVVIRLKEGLDISHLQGQEELLSSQEKSPGTKDVVVSVEYSKKSDLDTSKPLSEKPITHKVEEEDGKTATQPLLKKESKGPIVPLNVADQKLLEASTQFQKKQGKNTIDVWWLFDDGGLTLLIPYLLTTKKKWKDCKIRVFIGGKINRIDHDRRAMATLLSKFRIDFSDIMVLGDINTKPKKENIIAFEEIIEPYRLHEDDKEQDIADKMKEDEPWRITDNELELYKTKFYEPC

SEQ ID NO: 48191 - protein, 199 aa, Homo sapiens
MQLRNPELHLGCALALRFLALVSWDIPGARALDNGLARTPTMGWLHWERFMCNLDCQEEPDSCISEKLFMEMAELMVSEGWKDAGYEYLCIDDCWMAPQRDSEGRLQADPQRFPHGIRQLANYVHSKGLKLGIYADVGNKTCAGFPGSFGYYDIDAQTFADWGVDLLKFDGCYCDSLENLADAQLYRNPTVLQSLAKFC

SEQ ID NO: 48192 - protein, 69 aa, Homo sapiens
MAVVSAVRWLGLRSRLGQPLTGRRAGLCEQARSCRFYSGSATLSKVEGTDVTGIEEVVIPKKKTCDLVT

SEQ ID NO: 48193 - protein, 80 aa, Homo sapiens
MDFLHRNGVLIIQHLQKDYRAYYTFLNFMSNVGDPRNIFFIYFPLCFQFNQTVGTKMIWVAVIGDWLNLIFKWHAGGRGL

SEQ ID NO: 48194 - protein, 654 aa, Homo sapiens
MFRQFYLWTCLASGIILGSLFEICLGQYDDDCKLARGGPPATIVAIDEESRNGTILVDNMLIKGTAGGPDPTIELSLKDNVDYWVLMDPVKQMLFLNSTGRVLDRDPPMNIHSIVVQVQCINKKVGTIIYHEVRIVVRDRNDNSPTFKHESYYATVNELTPVGTTIFTGFSGDNGATDIDDGPNGQIEYVIQYNPDDPTSNDTFEIPLMLTGNIVLRKRLNYEDKTRYFVIIQANDRAQNLNERRTTTTTLTVDVLDGDDLGPMFLPCVLVPNTRDCRPLTYQAAIPELRTPEELNPIIVTPPIQAIDQDRNIQPPSDRPGILYSILVGTPEDYPRFFHMHPRTAELSLLEPVNRDFHQKFDLVIKAEQDNGHPLPAFAGLHIEILDENNQSPYFTMPSYQGYILESAPVGATISDSLNLTSPLRIVALDKDIEDTKDPELHLFLNDYTSVFTVTQTGITRYLTLLQPVDREEQQTYTFSITAFDGVQESEPVIVNIQVMDANDNTPTFPEISYDVYVYTDMRPGDSVIQLTAVDADEGSNGEITYEILVGAQGDFIINKTTGLITIAPGVEMIVGRTYALTVQAADNAPPAERRNSICTVYIEVLPPNNQSPPRFPQLMYSLEISEAMRVGAVLLNLQHGDSNLRESTGQGKH

SEQ ID NO: 48195 - protein, 453 aa, Homo sapiens
MNASCLVLAARHASASSTNLKDILADLIPKEQARIKTFRQQHGKTVVGQITVDMMYGGMRGMKGLVYETSVLDPDEGIRFRGFSIPECQKLLPKAKGGEEPLPEGLFWLLVTGHIPTEEQVSWLSKEWAKRAALPSHVVTMLDNFPTNLHPMSQLSAAVTALNSESNFARAYAQGISRTKYWELIYEDSMDLIAKLPCVAAKIYRNLYREGSGIGAIDSNLDWSHNFTNMLGYTDHQFTELTRLYLTIHSDHEGGNVSAHTSHLVGSALSDPYLSFAAAMNGLAGPLHGLANQEVLVWLTQLQKEVGKDVSDEKLRDYIWNTLNSGRVVPGYGHAVLRKTDPRYTCQREFALKHLPNDPMFKLVAQLYKIVPNVLLEQGKAKNPWPNVDAHSGVLLQYYGMTEMNYYTVLFGVSRALGVLAQLIWSRALGFPLERPKSMSTEGLMKFVDSKSG

SEQ ID NO: 48196 - protein, 44 aa, Homo sapiens
MPVPWFLLSLALGRSPVVLSLERLVGPQDATHCSPNCPVWSVWC

SEQ ID NO: 48197 - protein, 45 aa, Homo sapiens
METESGNQEKVMEEESTEKKKEVEKKKRSRVKQMLIYHYLCLLTK

SEQ ID NO: 48198 - protein, 1838 aa, Homo sapiens
MGAMTQLLAGVFLAFLALATEGGVLKKVIRHKRQSGVNATLPEENQPVVFNHVYNIKLPVGSQCSVDLESASGEKDLAPPSEPSESFQEHTVDGENQIVFTHRINIPRRACGCAAAPDVKELLSRLEELENLVSSLREQCTAGAGCCLQPATGRLDTRPFCSGRGNFSTEGCGCVCEPGWKGPNCSEPECPGNCHLRGRCIDGQCICDDGFTGEDCSQLACPSDCNDQGKCVNGVCICFEGYAGADCSREICPVPCSEEHGTCVDGLCVCHDGFAGDDCNKPLCLNNCYNRGRCVENECVCDEGFTGEDCSELICPNDCFDRGRCINGTCYCEEGFTGEDCGKPTCPHACHTQGRCEEGQCVCDEGFAGVDCSEKRCPADCHNRGRCVDGRCECDDGFTGADCGELKCPNGCSGHGRCVNGQCVCDEGYTGEDCSQLRCPNDCHSRGRCVEGKCVCEQGFKGYDCSDMSCPNDCHQHGRCVNGMCVCDDGYTGEDCRDRQCPRDCSNRGLCVDGQCVCEDGFTGPDCAELSCPNDCHGQGRCVNGQCVCHEGFMGKDCKEQRCPSDCHGQGRCVDGQCICHEGFTGLDCGQHSCPSDCNNLGQCVSGRCICNEGYSGEDCSEVSPPKDLVVTEVTEETVNLAWDNEMRVTEYLVVYTPTHEGGLEMQFRVPGDQTSTIIQELEPGVEYFIRVFAILENKKSIPVSARVATYLPAPEGLKFKSIKETSVEVEWDPLDIAFETWEIIFRNMNKEDEGEITKSLRRPETSYRQTGLAPGQEYEISLHIVKNNTRGPGLKRVTTTRLDAPSQIEVKDVTDTTALITWFKPLAEIDGIELTYGIKDVPGDRTTIDLTEDENQYSIGNLKPDTEYEVSLISRRGDMSSNPAKETFTTGLDAPRNLRRVSQTDNSITLEWRNGKAAIDSYRIKYAPISGGDHAEVDVPKSQQATTKTTLTGLRPGTEYGIGVSAVKEDKESNPATINAATELDTPKDLQVSETAETSLTLLWKTPLAKFDRYRLNYSLPTGQWVGVQLPRNTTSYVLRGLEPGQEYNVLLTAEKGRHKSKPARVKASTAKEPEIGNLNVSDITPESFNLSWMATDGIFETFTIEIIDSNRLLETVEYNISGAERTAHISGLPPSTDFIVYLSGLAPSIRTKTISATATTEPKPQLGTLIFSNITPKSFNMSWTTQAGLFAKIVINVSDAHSLHESQQFTVSGDAKQAHITGLVENTGYDVSVAGTTLAGDPTRPLTAFVITEAEPEVDNLLVSDATPDGFRLSWTADEGVFDNFVLKIRDTKKQSEPLEITLLAPERTRDITGLREATEYEIELYGISKGRRSQTVSAIATTAMGSPKEVIFSDITENSATVSWRAPTAQVESFRITYVPITGGTPSMVTVDGTKTQTRLVKLIPGVEYLVSIIAMKGFEESEPVSGSFTTALDGPSGLVTANITDSEALARWQPAIATVDSYVISYTGEKVPEITRTVSGNTVEYALTDLEPATEYTLRIFAEKGPQKSSTITAKFTTDLDSPRDLTATEVQSETALLTWRPPRASVTGYLLVYESVDGTVKEVIVGPDTTSYSLADLSPSTHYTAKIQALNGPLRSNMIQTIFTTIGLLYPFPKDCSQAMLNGDTTSGLYTIYLNGDKAEALEVFCDMTSDGGGWIVFLRRKNGRENFYQNWKAYAAGFGDRREEFWLGLDNLNKITAQGQYELRVDLRDHGETAFAVYDKFSVGDAKTRYKLKVEGYSGTAGDSMAYHNGRSFSTFDKDTDSAITNCALSYKGAFWYRNCHRVNLMGRYGDNNHSQGVNWFHWKGHEHSIQFAEMKLRPSNFRNLEGRRKRA

SEQ ID NO: 48199 - protein, 27 aa, Homo sapiens
MAHRKLESVGSGMLDHRVRPGPVPHSQ

SEQ ID NO: 48200 - protein, 121 aa, Homo sapiens
MSDNDDIEVESDADKRAHHNALERKRRDHIKDSFHSLRDSVPSLQGEKASRAQILDKATEYIQYMRRKNHTHQQDIDDLKRQNALLEQQGALPAVGITPGIRCLKRALRSLEWNVLWESES

SEQ ID NO: 48201 - protein, 302 aa, Homo sapiens
  MOD_RES (1)..(1): Any amino acid
XWGQHSEHQVLGNVSITQLRRPSQLLYPLENKKTNAQYLFADRSCQFLVDLLSALGFRRVLCVGTPRLHELIKLTASGDKKSNIKSLLLDIDFRYSQFYMEDSFCHYNMFNHHFFDGKTALEVCRAFLQEDKGEGIIMVTDPPFGGLVEPLAITFKKLIAMWKEGQSQDDSHKELPIFWIFPYFFESRICQFFPSFQMLDYQVDYDNHALYKHGKTGRKQSPVRIFTNIPPNKIILPTEEGYRFCSPCQRYVSLENQHCELCNSCTSKDGRKWNHCFLCKKCVKPSWIHCSICNHCAVPDHS

SEQ ID NO: 48202 - protein, 398 aa, Homo sapiens
MAAGAGAGSAPRWLRALSEPLSAAQLRRLEEHRYSAAGVSLLEPPLQLYWTWLLQWIPLWMAPNSITLLGLAVNVVTTLVLISYCPTATEEAPYWTYLLCALGLFIYQSLDAIDGKQARRTNSCSPLGELFDHGCDSLSTVFMAVGASIAARLGTYPDWFFFCSFIGMFVFYCAHWQTYVSGMLRFGKVDVTEIQIALVIVFVLSAFGGATMWDYTIPILEIKLKILPVLGFLGGVIFSCSNYFHVILHGGVGKNGSTIAGTSVLSPGLHIGLIIILAIMIYKKSATDVFEKHPCLYILMFGCVFAKVSQKLVVAHMTKSELYLQDTVFLGPGLLFLDQYFNNFIDEYVVLWMAMVISSFDMVIYFSALCLQISRHLHLNIFKTACHQAPEQVHKHID

SEQ ID NO: 48203 - protein, 1320 aa, Homo sapiens
MANDSPAKSLVDIDLSSLRDPAGIFELVEVVGNGTYGQVYKGRHVKTGQLAAIKVMDVTEDEEEEIKLEINMLKKYSHHRNIATYYGAFIKKSPPGHDDQLWLVMEFCGAGSITDLVKNTKGNTLKEDWIAYISREILRGLAHLHIHHVIHRDIKGQNVLLTENAEVKLVDFGVSAQLDRTVGRRNTFIGTPYWMAPEVIACDENPDATYDYRSDLWSCGITAIEMAEGAPPLCDMHPMRALFLIPRNPPPRLKSKKWSKKFFSFIEGCLVKNYMQRPSTEQLLKHPFIRDQPNERQVRIQLKDHIDRTRKKRGEKDETEYEYSGSEEEEEEVPEQEGEPSSIVNVPGESTLRRDFLRLQQENKERSEALRRQQLLQEQQLREQEEYKRQLLAERQKRIEQQKEQRRRLEEQQRREREARRQQEREQRRREQEEKRRLEELERRRKEEEERRRAEEEKRRVEREQEYIRRQLEEEQRHLEVLQQQLLQEQAMLLECRWREMEEHRQAERLQRQLQQEQAYLLSLQHDHRRPHPQHSQQPPPPQQERSKPSFHAPEPKAHYEPADRAREVEDRFRKTNHSSPEAQSKQTGRVLEPPVPSRSESFSNGNSESVHPALQRPAEPQVQWSHLASLKNNVSPVSRSHSFSDPSPKFAHHHLRSQDPCPPSRSEVLSQSSDSKSEAPDPTQKAWSRSDSDEVPPRVPVRTTSRSPVLSRRDSPLQGSGQQNSQAGQRNSTSSIEPRLLWERVEKLVPRPGSGSSSGSSNSGSQPGSHPGSQSGSGERFRVRSSSKSEGSPSQRLENAVKKPEDKKEVFRPLKPAVRIDLTALAKELRAVEDVRPPHKVTDYSSSSEESGTTDEEDDDVEQEGADESTSGPEDTRAASSLNLSNGETESVKTMIVHDDVESEPAMTPSKEGTLIVRQTQSASSTLQKHKSSSSFTPFIDPRLLQISPSSGTTVTSVVGFSCDGMRPEAIRQDPTRKGSVVNVNPTNTRPQSDTPEIRKYKKRFNSEILCAALWGVNLLVGTESGLMLLDRSGQGKVYPLINRRRFQQMDVLEGLNVLVTISGKKDKLRVYYLSWLRNKILHNDPEVEKKQGWTTVGDLEGCVHYKVVKYERIKFLVIALKSSVEVYAWAPKPYHKFMAFKSFGELVHKPLLVDLTVEEGQRLKVIYGSCAGFHAVDVDSGSVYDIYLPTHIQCSIKPHAIIILPNTDGMELLVCYEDEGVYVNTYGRITKDVVLQWGEMPTSVAYIRSNQTMGWGEKAIEIRSVETGHLDGVFMHKRAQRLKFLCERNDKVFFASVRSGGSSQVYFMTLGRTSLLSW

SEQ ID NO: 48204 - protein, 383 aa, Homo sapiens
MSARATRPRSRRGRHAPPGELDPVAESSEEVEAASGSSKPSFAPPPVSSGLEQLGPMEEVSGQGLGSRTDKKMDGGSGRELASAPEVPHKPAVEAHQAPEAALQYKETVPPGNGAPDVFQTLQHTLSSLEAAAAAWRHQPPSHSGPMEFEGTSEGGAGSLGKQEGAGSCQREAARLAERNAWLRLALSSREDELVRTQASLEAIRAEKETLQKEVQELQDSLLRLEPCPHLSHNQAGGSGSGSSSSEADREPWETQDSFSLAHPLLRRLRSHSSTQILGSLPNQPLSPEMHIMEAQMEQLRGSIEKLKCFNRLLSAVLQGYKGRCEGLSMQLGQREAEATALHLALQYRVLLCHPGWSAVVPSWLTATSASPVQVILLPQPPE

SEQ ID NO: 48205 - protein, 684 aa, Homo sapiens
MDDSGELGGLETMETLTELGDELTLGDIDEMLQFVSNQVGEFPDLFSEQLCSSFPGSGGSGSSSGSSGSSSSSSNGRGSSSGAVDPSVQRSFTQVTLPSFSPSAASPQAPTLQVKVSPTSVPTTPRATPILQPRPQPQPQPQTQLQQQTVMITPTFSTTPQTRIIQQPLIYQNAATSFQVLQPQVQSLVTSSQVQPVTIQQQVQTVQAQRVLTQTANGTLQTLAPATVQTVAAPQVQQVPVLVQPQIIKTDSLVLTTLKTDGSPVMAAVQNPALTALTTPIQTAALQVPTLVGSSGTILTTMPVMMGQEKVPIKQVPGGVKQLEPPKEGERRTTHNIIEKRYRSSINDKIIELKDLVMGTDAKMHKSGVLRKAIDYIKYLQQVNHKLRQENMVLKLANQKNKLLKGIDLGSLVDNEVDLKIEDFNQNVLLMSPPASDSGSQAGFSPYSIDSEPGSPLLDDAKVKDEPDSPPVALGMVDRSRILLCVLTFLCLSFNPLTSLLQWGGAHDSDQHPHSGSGRSVLSFESGSGGWFDWMMPTLLLWLVNGVIVLSVFVKLLVHGEPVIRPHSRSSVTFWRHRKQADLDLARGVYGKKSGATHSIEEELNIHISRGTRTRTLLSSRRFCSCCRQPTNLPGSFGPGTAHLPPGPGLQPLLERDPLQPAEATPGALAAQESLPVPAGHASH

SEQ ID NO: 48206 - protein, 442 aa, Homo sapiens
MSSKSRKRIMPDPVTEPPVTDPVYEALLYCNIPSVAERSMEGHAPHHFKLVSVHVFIRHGDRYPLYVIPKTKRPEIDCTLVANRKPYHPKLEAFISHMSKGSGASFESPLNSLPLYPNHPLCEMGELTQTGVVQHLQNGQLLRDIYLKKHKLLPNDWSADQLYLETTGKSRTLQSGLALLYGFLPDFDWKKIYFRHQPSALFCSGSCYCPVRNQYLEKEQRRQYLLRLKNSQLEKTYGEMAKIVDVPTKQLRAANPIDSMLCHFCHNVSFPCTRNGCVDMEHFKVIKTHQIEDERERREKKLYFGYSLLGAHPILNQTIGRMQRATEGRKEELFALYSAHDVTLSPVLSALGLSEARFPRFAARLIFELWQDREKPSEHSVRILYNGVDVTFHTSFCQDHHKRSPKPMCPLENLVRFVKRDMFVALGGSGTNYYDACHREGF

SEQ ID NO: 48207 - protein, 276 aa, Homo sapiens
MGQVLPVFAHCKEAPSTASSTPDSTEGGNDDSDFRELHTAREFSEEDEEETTSQDWGTPRELTFSYIAFDGVVGSGGRRDSTARRPRPQGRSVSEPRDQHPQPSLGDSLESIPSLSQSPEPGRRGDPDTAPPSERPLEDLRLRLDHLGWVARGTGSGEDSSTSSSTPLEDEEPQEPNRLETGEAGEELDLRLRLAQPSSPEVLTPQLSPGSGTPQAGTPSPSRSRDSNSGPEEPLLEEEEKQWGPLEREPVRGQCLDSTDQLEFTVEPRLLGKQRV

SEQ ID NO: 48208 - protein, 206 aa, Homo sapiens
MECLYYFLGFLLLAARLPLDAAKRFHDVLGNERPSAYMREHNQLNGWSSDENDWNEKLYPVWKRGDMRWKNSWKGGRVQAVLTSDSPALVGSNITFAVNLIFPRCQKEDANGNIVYEKNCRNEAGLSADPYVYNWTAWSEDSDGENGTGQSHHNVFPDGKPFPHHPGWRRWNFIYVFHTLGWLLQTPKLLLYLSLKFQPSLFLLYN

SEQ ID NO: 48209 - protein, 1162 aa, Homo sapiens
MASLLPLLCLCVVAAHLAGARDATPTEEPMATALGLERRSVYTGQPSPALEDWEARAVPAEASEWTSWFNVDHPGGDGDFESLAAIRFYYGPARVCPRPLALEARTTDWALPSAVGERVHLNPTRGFWCLNREQPRGRRCSNYHVRFRCPLEASWGAWGPWGPCSGSCGPGRRLRRRHCPSPAGDACPGRPLEAQKCVRPRCPGCSLDTCECPDHILLGSVVTPSGQPLLGARVSLRDQPGTVATSDAHGTFRVPGVCADSRANIRAQMDGFSAGEAQAQANGSISVVTIILDKLEKPYLVKHPESRVREAGQNVTFCCKASGTPMPKKYSWFHNGTLLDRRAHGYGAHLELRGLRPDQAGIYHCKAWNEAGAVRSGTARLTVLAPGQPACDPRPREYLIKLPEDCGQPGSGPAYLDVGLCPDTRCPSLAGSSPRCGDASSRCCSVRRLERREIHCPGYVLPVKVVAECGCQKCLPPRGLVRGRVVAADSGEPLRFARILLGQEPIGFTAYQGDFTIEVPPSTQRLVVTFVDPSGEFMDAVRVLPFDPRGAGVYHEVKAMRKKAPVILHTSQSNTIPLGELEDEAPLGELVLPSGAFRRADGKPYSGPVEARVTFVDPRDLTSAASAPSDLRFVDSDGELAPLRTYGMFSVDLRAPGSAEQLQVGPVAVRVAASQIHMPGHVEALKLWSLNPETGLWEEESGFRREGSSGPRVRREERVFLVGNVEIRERRLFNLDVPERRRCFVKVRAYANDKFTPSEQVEGVVVTLVNLEPAPGFSANPRAWGRFDSAVTGPNGACLPAFCDADRPDAYTALVTATLGGEELEPAPSLPRPLPATVGVTQPYLDRLGYRRTDHDDPAFKRNGFRINLAKPRPGDPAEANGPVYPWRSLRECQGAPVTASHFRFARVEADKYEYNVVPFREGTPASWTGDLLAWWPNPQEFRACFLKVKIQGPQEYMVRSHNAGGSHPRTRGQLYGLRDARSVRDPERPGTSAACVEFKCSGMLFDQRQVDRTLVTIMPQGSCRRVAVNGLLRDYLTRHPPPVPAEDPAAFSMLAPLDPLGHNYGVYTVTDQSPRLAKEIAIGRCFDGSSDGFSREMKADAGTAVTFQCREPPAGRPSLFQRLLESPATALGDIRREMSEAAQAQARASGPLRTRRGRVRQ

SEQ ID NO: 48210 - protein, 373 aa, Homo sapiens
MHFEETTALGTTKESPPTSPLSGGSAPGAHLEPPYDPGTHHLPSGDFAQCTSPVPTLPQVGNSGDQAGATVLRMVRPQDTVAYEDLSVDYTQKKWKSLTLSQRALQWNMMPENHHSMASLGENMMKGSELTPKQEFFKGSESSNRTSGGLFGVVPGAAETGDVCEDTFKELEGQTSDEEGSRLENDFLEITDEDKKKSTKDRYDKYKEVGEHPPLSSSPVEHEGVLKGQKSYRCDECGKAFNRSSHLIGHQRIHTGEKPYECNECGKTFRQTSQLIVHLRTHTGEKPYECSECGKAYRHSSHLIQHQRLHNGEKPYKCNECAKAFTQSSRLTDHQRTHTGEKPYECNECGEAFIRSKSLARHQVLHTGWSTMA

SEQ ID NO: 48211 - protein, 432 aa, Homo sapiens
MFYFRGCGRWVAVSFTKQQFPLARLSSDSAAPRTPHFDVIVIGGGHAGTEAATAAARCGSRTLLLTHRVDTIGQMSCNPSFGGIGKGHLMREVDALDGLCSRICDQSGVHYKVLNRRKGPAVWGLRAQIDRKLYKQNMQKEILNTPLLTVQEGAVEDLILTEPEPEHTGKCRVSGVVLVDGSTVYAESVILTTGTFLRGMIVIGLETHPAGRLGDQPSIGLAQTLEKLGFVVGRLKTGTPPRIAKESINFSILNKHIPDNPSIPFSFTNETVWIKPEDQLPCYLTHTNPRVDEIVLKNLHLNSHVKETTRGPRYCPSIESKVLRFPNRLHQVWLEPEGMDSDLIYPQGLSMTLPAELQEKMITCIRGLEKAKVIQPGYGVQYDYLDPRQITPSLETHLVQRLFFAGQINGTTGYEEAAAQSVALLPGWSAVI

SEQ ID NO: 48212 - protein, 91 aa, Homo sapiens
MAAAAGRSLLLLLSSRGGGGGGAGGCGALTAGCFPGLGVSRHRQQQHHRTVFHYHSYSDWQDTVSTSLSMYHASDILAARVWSWPVGVKYW

SEQ ID NO: 48213 - protein, 86 aa, Homo sapiens
MPPPRTGRGLLWLGLVLSSVCVALGSETQANSTTDALNVLLIIVDDLRPSLGCYGDKLVRSPNIDQLASHSLLFQNAFAQQAVCAP

SEQ ID NO: 48214 - protein, 184 aa, Homo sapiens
MRPDSPTMAAPAESLRRRKTGYSDPEPESPPAPGRGPAGSPAHLHTGTFWLTRIVLLKALAFVYFVAFLVAFHQNKQLIGDRGLLPCRVFLKNFQQYFQDRTSWEVFSYMPTILWLMDWSDMNSNLDLLALLGLGISSFVLITGCANMLLMAALWGLYMSLVNVGHVWYSFASAISLPSMHGGQ

SEQ ID NO: 48215 - protein, 48 aa, Homo sapiens
MAERGYSFSLTTFSPSGKLVQIEYALAAVAGGAPSVGIKECLCTELEN

SEQ ID NO: 48216 - protein, 503 aa, Homo sapiens
MAETSLLEAGASAASTAAALENLQVEASCSVCLEYLKEPVIIECGHNFCKACITRWWEDLERDFPCPVCRKTSRYRSLRPNRQLGSMVEIAKQLQAVKRKIRDESLCPQHHEALSLFCYEDQEAVCLICAISHTHRAHTVVPLDDATQEYKEKLQKCLEPLEQKLQEITRCKSSEEKKPGELKRLVESRRQQILREFEELHRRLDEEQQVLLSRLEEEEQDILQRLRENAAHLGDKRRDLAHLAAEVEGKCLQSGFEMLKDVKSTLEKCEKVKTMEVTSVSIELEKNFSNFPRQYFALRKILKQLIADVTLDPETAHPNLVLSEDRKSVKFVETRLRDLPDTPRRFTFYPCVLATEGFTSGRHYWEVEAAHCVLAQDPENQALARFYCYTERTIAKRLVLRRDPSVKRTLCRGCSSLLVPGLTCTHRQRRCRGQRWTVQTCLTCQRSQRFLNDPGHLLWGDRPEAQLGSQADSKPLQPLPNTAHSISDRLPEEKMQTQGSSNQ

SEQ ID NO: 48217 - protein, 722 aa, Homo sapiens
MLTFRTMKSEPHCTPQLTLEMQKSLNFLFYLEAVQVLLKHSADVNARDKNWQTPLHIAAANKAVKCAEALVPLLSNVNVSDRAGRTALHHAAFSGHGEMVKLLLSRGANINAFDKKDRRAIHWAAYMGHIEVVKLLVSHGAEVTCKDKKSYTPLHAAASSGMISVVKYLLDLGVDMNEPNAYGNTPLHVACYNGQDVVVNELIDCGAIVNQKNEKGFTPLHFAAASTHGALCLELLVGNGADVNMKSKDGKTPLHMTALHGRFSRSQTIIQSGAVIDCEDKNGNTPLHIAARYGHELLINTLITSGADTAKRGIHGMFPLHLAALSGFSDCCRKLLSSGFDIDTPDDFGRTCLHAAAAGGNLECLNLLLNTGADFNKKDKFGRSPLHYAAANCNYQCLFALVGSGASVNDLDERGCTPLHYAATSDTDGKCLEYLLRNDANPGIRDKQGYNAVHYSAAYGHRLCLQLIASETPLDVLMETSGTDMLSDSDNRATISPLHLAAYHGHHQALEVLVQSLLDLDVRNSSGRTPLDLAAFKGHVECVDVLINQGASILVKDYILKRTPIHAAATNGHSECLRLLIGNAEPQNAVDIQDGNGQTPLMLSVLNGHTDCVYSLLNKGANVDAKDKWGRTALHRGAVTGHEECVDALLQHGAKCLLRDSRGRTPIHLSAACGHIGVLGALLQSAASMDANPATADNHGYTALHWACYNELLSMQPPSQTM

SEQ ID NO: 48218 - protein, 134 aa, Homo sapiens
MKIFDAAKAPIQWEERNVTAIQGPGGKWMIPSEAKESMDKNKMGLKGPLKTPIAAGHPSMNLLLRKTFDLYANVRPCVSIEGYKTPYTDVNIVTIRENTEGEYSGIEHVIVDGVVQSIKLITEGASKRIAEFAF

SEQ ID NO: 48219 - protein, 374 aa, Homo sapiens
  MOD_RES (1)..(1): Any amino acid
XRVRRGPLPADRPRALGPARRCSRHPHPAPFRVCSEGAAHRLRRPERLPLPSRALRPRPAHTPILGPAPRACPGAPRASDSPTCAAAAATAWPRTRAVERKGCQVAAAAGVRGTGCPSRADLEKDSWNDTKEDVFVHQTAIKKNNPRKYLRSVGDGETVEFDVVEGEKGAEAANVTGPGGVPVQGSKYAADRNHYRRYPRRRGPPRNYQQNYQNSESGEKNEGSESAPEGQAQQRRPYRRRRFPPYYMRRPYGRRPQYSNPPVQGEVMEGADNQGAGEQGRPVRQNMYRGYRPRFRRGPPRQRQPREDGNEEDKENQGDETQGQQPPQRRYRRNFNYRRRRPENPKPQDGKETKAADPPAENSSAPEAEQGGAE

SEQ ID NO: 48220 - protein, 281 aa, Homo sapiens
MNSSPAGTPSPQPSRANGNINLGPSANPNAQPTDFDFLKVIGKGNYGKVLLAKRKSDGAFYAVKVLQKKSILKKKESHIMAERSVLLKNVRHPFLVGLRYSFQTPEKLYFVLDYVNGGELFFHLQRERRFLEPRARFYAAEVASAIGYLHSLNIIYRDLKPENILLDCQGHVVLTDFGLCKEGVEPEDTTSTFCGTPEYLAPEVLRKEPYDRAVDWWCLGAVLYEMLHGLPPFYSQDVSQMYENILHQPLQIPGGRTVAACDLLQSLLHKDQRQRLGSKAD

SEQ ID NO: 48221 - protein, 565 aa, Homo sapiens
MTVLEITLAVILTLLGLAILAILLTRWARCKQSEMYISRYSSEQSARLLDYEDGRGSRHAYHKVTLHMITERISKRDYTPSTNSLALSRSSIALPQGSMSSIKCLQTTEEPPSRTAGAMMQFTAPIQPELQDLSSSLKKPLCKLQDLLYNWIQCQIASSHNHTVHLQHPGPPMAPIIISQRTASQLAAPIRIPQVHTMDSSGKITLTPVVILTGYMDEELAKKSCSKIQILKCGGTARSQNSREENKEALKNDIIFTNSVESLKSAHIKEPEREGKGTDLEKDKIGMEVKVDSDAGIPKRQETQLKISDEYTTRTGSPNKEKCVRCTKRTGQVKKSESGVPKGQEAQVTKSGLVVLKGQEAQVEKSEMGVPRRQESQVKKSQSGVSKGQEAQVKKRESVVLKGQEAQVEKSELKVPKGQEGQVEKTEADVPKEQEVQEKKSEAGVLKGPESQVKNTEVSVPETLESQVKKSESGVLKGQEAQEKKESFEDKGNNDKEKERDAEKDPNKKEKGDKNTKGDKGKDKVKGKRESEINGEKSKGSKRRQIQEGSTTKKWKSKDKFFKGP

SEQ ID NO: 48222 - protein, 19 aa, Homo sapiens
  MOD_RES (1)..(1): Any amino acid
XTEMEVHEESRQFTRFHRP

SEQ ID NO: 48223 - protein, 241 aa, Homo sapiens
MSRKESWKVKSEIPKVPKQPLVLHHPRMTTTKSPSKDMLEPEAELAEDLPTTKSTSVESEMPTENLEGHSPSCRTFVPLPPICSNSTVHSEETLSHLSDTTVRLSPERPSDEDSKSTESIFLTQVSELPSSVIHKDDLELKEKDQKKPPTAPREVKGTRRKLPTAFLPSKYHGYEELLTAKPDPAFIEPKGIQKNAQALQQMLKHPLLCHSSKPKLDTLQKPYVHKEKRVLSCTSGQNGGW

SEQ ID NO: 48224 - protein, 671 aa, Homo sapiens
MVLIASIAVLAAGSQGNVFATSALRSLRFLQILRMIRMDRRGGTWKLLGSVVYAHSKELVTAWYIGFLCLILASFLVYLAEKGENDHFDTYADALWWGLITLTTIGYGDKYPQTWNGRLLAATFTLIGVSFFALPAGILGSGFALKVQEQHRQKHFEKRRNPAAGLIQSAWRFYATNLSRTDLHSTWQYYERTVTVPMYRLIPPLNQLELLRNLKSKSGLAFRKDPPPEPSPSQKVSLKDRVFSSPRGVAAKGKGSPQAQTVRRSPSADQSLEDSPSKVPKSWSFGDRSRARQAFRIKGAASRQNSEEASLPGEDIVDDKSCPCEFVTEDLTPGLKVSIRAVCVMRFLVSKRKFKESLRPYDVMDVIEQYSAGHLDMLSRIKSLQSRVDQIVGRGPAITDKDRTKGPAEAELPEDPSMMGRLGKVEKQVLSMEKKLDFLVNIYMQRMGIPPTETEAYFGAKEPEPAPPYHSPEDSREHVDRHGCIVKIVRSSSSTGQKNFSAPPAAPPVQCPPSTSWQPQSHPRQGHGTSPVGDHGSLVRIPPPPAHERSLSAYGGGNRASMEFLRQEDTPGCRPPEGNLRDSDTSISIPSVDHEELERSFSGFSISQSKENLDALNSCYAAVAPCAKVRPYIAEGESDTDSDLCTPCGPPPRSATGEGPFGDVGWAGPRK

SEQ ID NO: 48225 - protein, 123 aa, Homo sapiens
MFRKKKKKRPEISAPQNFQHRVHTSFDPKEGKFVGLPPQWQNILDTLRRPKPVVDPSRITRVQLQPMKTVVRGSAMPVDGYISGLLNDIQKLSVISSNTLRGRSPTSRRRAQSLGLLGDEHWA

SEQ ID NO: 48226 - protein, 39 aa, Homo sapiens
MAEYLASIFGTEKDKSGSAGTGTGAPGFTTSRHSASPAL

SEQ ID NO: 48227 - protein, 38 aa, Homo sapiens
MRQSLLFLTSVVPFVLAPRPPDDPGFGPHQRLATLEIC

SEQ ID NO: 48228 - protein, 24 aa, Homo sapiens
MPFGTILKSNYQQLPLTSAVLLNF

SEQ ID NO: 48229 - protein, 84 aa, Homo sapiens
MKDKQKKKKERTWAEAARLVLENYSDAPMTPKQILQVIEAEGLKEMSGTSPLACLNAMLHSNSRGGEGLFYKLPGRISLFTLKR

SEQ ID NO: 48230 - protein, 148 aa, Homo sapiens
  MOD_RES (1)..(1): Any amino acid
XGLGLGLWLGAGLSAARRLEQVPSLLGRRRKLHLPDPDLASWGPGRSGSGGGRWDCMCECLLRTDPVPEEGEDVAATISATETLSEEEQEELRRELAKVEEEIQTLSQVLAAKEKHLAEIKRKLGINSLQELKQNIAKGWQDVTATSA

SEQ ID NO: 48231 - protein, 81 aa, Homo sapiens
MTSIKEQAAISRLLSFLQEWDNAGKVARSHILDKFIETNQGKTAPELEQEFSQGASLFLVRLTTSLRITYMTDSCLEKLLR

SEQ ID NO: 48232 - protein, 103 aa, Homo sapiens
MSREMQDVDLAEAFKYFVQGMGYMPSASMTRLMRSRTASGSSVTSLDGTRSRSHTSEGTRSRSHTSEGTRSRSHTSEGAHLDITPNSGAAGNSAGPKSMEVSC

SEQ ID NO: 48233 - protein, 321 aa, Homo sapiens
MATLRRLREAPRHLLVCEKSNFGNHKSRHRHLVQTHYYNYRVSFLIPECGILSEELKNLVMNTGPYYFVKNLPLHELITPEFISTFIKKGSCYALTYNTHIDEDNTVALLPNGKLILSLDKDTYEETGLQGHPSQFSGRKIMKFSSEESTMMSYFSKYQIQEHQPKVALSTLRDLQCPVLQSSELEGTPEVSCRALELFDWLGAVFSNVDLNNEPNNFISTYCCPEPSTVVAKAYLCTITGFILPEKICLLLEHLCHYFDEPKLAPWVTLSVQGFADSPVSWEKNEHGFRKGGEHLYNFVIFNNQDYWLQMAVGANDHCPP

SEQ ID NO: 48234 - protein, 325 aa, Homo sapiens
MRLDNMLLAEGVAGPEKGGGSAAAAAAAAASGGAGSDNSVEHSDYRAKLSQIRQIYHTELEKYEQACNEFTTHVMNLLREQSRTRPISPKEIERMVSIIHRKFSSIQMQLKQSTCEAVMILRSRFLDARRKRRNFNKQATEILNEYFYSHLSNPYPSEEAKEELAKKCGITVSQVSNWFGNKRIRYKKNIGKFQEEANIYAAKTAVTATNVSAHGSQANSPSTPNSAGSSSSFNMSNSGDLFMSVQSLNGDSYQGAQVGANVQSQVDTLRHVISQTGGYSDGLAASQMYSPQGISANGGWQDATTPSSVTSPTEGPGSVHSDTSN

SEQ ID NO: 48235 - protein, 223 aa, Homo sapiens
MMRTQCLLGLRTFVAFAAKLWSFFIYLLRRQIRTVIQYQTVRYDILPLSPVSRNRLAQVKRKILVLDLDETLIHSHHDGVLRPTVRPGTPPDFILKVVIDKHPVRFFVHKRPHVDFFLEVVSQWYELVVFTASMEIYGSAVADKLDNSRSILKRRYYRQHCTLELGSYIKDLSVVHSDLSSIVILDNSPGAYRSHPDNAIPIKSWFSDPSDTALLNLLPMLDA

SEQ ID NO: 48236 - protein, 144 aa, Homo sapiens
MMLPYPSALGDQYWEEILLPKNGENVETMKKLTQNHKAKGLPSNDTDCPQKKEGKAQIVVPVTFRDVTVIFTEAEWKRLSPEQRNLYKEVMLENYRNLLSLAEPKPEIYTCSSCLLAFSCQQFLSQHVLQIFLGLCAENHFHPG

SEQ ID NO: 48237 - protein, 104 aa, Homo sapiens
MLLLPPRPPHPRSSSPEAMDPPPPKAPPFPKAEGPSSTPSSAAGPRPPRLGRHLLIDANGVPYTYTVQLEEEPRGPPQREAPPGEPGPRKGYSCPECARVFASP

SEQ ID NO: 48238 - protein, 94 aa, Homo sapiens
  MOD_RES (1)..(1): Any amino acid
XARKLAGATGRRCLPLSMDVRAPPAVMAAVDQALKEFGRIDILINCAAGNFLCPAGALSFNAFKTVMDIDTSGTFNVSRVLYEKFFRVGASCAL

SEQ ID NO: 48239 - protein, 190 aa, Homo sapiens
MRSGKASCTLETVWEDKHKYEEAERRFYEHEATQAAASAQQLPAEGPAMNGPGQDDPEDADEAEAPDGGSRRDPRKSQDSRKPLQKKRKRSPKSGLGPADLALLGLSAERVWLDKSLFDQAESSYRQKLADVAAQAAWPPALAPWGLCTHGNQVACHHVTWGIWVNKSSFDQAERAFVEWSQALLLAPDG

SEQ ID NO: 48240 - protein, 345 aa, Homo sapiens
MQSPQKTTLILPTQQVRRSSRIKPPGPTAVPKRSSSVKNITPRKKGPNSGKKEKPLPVICSTSAASLKSLTRDRGMLYKDVASGPCKIVMSTVCVYVNKHGNFGPHLDPKRIQQLPDHFGPGPVNVVLRRIVQACVDCALETKTVFGYLKPDNRGGEVITASFDGETHSIQLPPVNSASFALRFLENFCHSLQCDNLLSSQPFSSSRGHTHSSAEHDKNQSAKEDVTERQSTKRSPQQTVPYVVPLSPKLPKTKEYASEGEPLFAGGSAIPKEENLSEDSKSSSLNSGNYLNPACRNPMYIHTSVSQDFSRSVPGTTSSPLVGDISPKSSPHEVKFQMQRKSEGN

SEQ ID NO: 48241 - protein, 250 aa, Homo sapiens
MGHLVCCLCGKWASYRNMGDLFGPFYPQDYAATLPKNPPPKRATEMQSKVKVRHKSASNGSKTDTEEEEEQQQQQKEQRSLAAHPRFKRRHRSEDCGGGPRSLSRGLPCKKAATEGSSEKTVLDSKPSVPTTSEGGPELELQIPELPLDSNEFWVHEGCILWANGIYLVCGRLYGLQEALEIAREMKCSHCQEAGATLGCYNKGCSFRYHYPCAIDADCLLHEENFSVRCPKHKNKTAKGSLSTEQSERG

SEQ ID NO: 48242 - protein, 144 aa, Homo sapiens
MAATGANAEKAESHNDCPVRLLNPNIAKMKEDILYHFNLTTSRHNFPALFGDVKFVCVGGSPSRMKAFIRCVGAELGLDCPGRDYPNICAGTDRYAMYKVGPVLSVSHGMGIPSISIMLHELIKLLYYARCSNVTIIRIGTSGG

SEQ ID NO: 48243 - protein, 231 aa, Homo sapiens
MALNKNHSEGGGVIVNNTESILMSYDHVELTFNDMKNVPEAFKGTKKGTVYLTPYRVIFLSKGKDAMQSFMMPFYLMKDCEIKQPVFGANYIKGTVKAEAGGGWEGSASYKLTFTAGGAIEFGQRMLQVASQASRGEVPSGAYGYSYMPSGAYVYPPPVANGMYPCPPGYPYPPPPPEFYPGPPMMDGAMGYVQPPPPPYPGPMEPPVSGPDVPSTPAEPAAATSLLPTGR

SEQ ID NO: 48244 - protein, 59 aa, Homo sapiens
MAEPRQEFEVMEDHAGTYGLGDRKDQGGYTMHQDQEGDTDAGLKEGSEFTELRAEEPLI

SEQ ID NO: 48245 - protein, 342 aa, Homo sapiens
MSMSPTVIILACLGFFLDQSVWAHVGGQDKPFCSAWPSAVVPQGGHVTLRCHCRRGFNIFTLYKKDGVPVPELYNRIFWNSFLISPVTPAHAGTYRCRGFHPHSPTEWSAPSNPLVIMVTGLYEKPSLTARPGPTVRAGENVTLSCSSQSSFDIYHLSREGEAHELRLPAVPSINGTFQADFPLGPATHGETYRCFGSFHGSPYEWSDPSDPLPVSVTGNPSSSWPSPTEPSFKTDAAVMNQEPAGHRTVNREDSDEQDPQEVTYAQLDHCIFTQRKITGPSQRSKRPSTDTSVCIELPNAEPRALSPAHEHHSQALMGSSRETTALSQTQLASSNVPAAGI

SEQ ID NO: 48246 - protein, 398 aa, Homo sapiens
MAMVVSSWRDPQDDVAGGNPGGPNPAAQTPGQPGAPATPGTAGDKGQGPPGSGQSQQHIECVVCGDKSSGKHYGQFTCEGCKSFFKRSVRRNLTYTCRANRNCPIDQHHRNQCQYCRLKKCLKVGMRREAVQRGRMPPTQPNPGQYALTNGDPLNGHCYLSGYISLLLRAEPYPTSRYGSQCMQPNNIMGIENICELAARLLFSAVEWARNIPFFPDLQITDQVSLLRLTWSELFVLNAAQCSMPLHVAPLLAAAGLHASPMSADRVVAFMDHIRIFQEQVEKLKALHVDSAEYSCLKAIVLFTSDACGLSDAAHIESLQEKSQCALEEYVRSQYPNQPSRFGKLLLRLPSLRTVSSSVIEQLFFVRLVGKTPIETLIRDMLLSGSSFNWPYMSIQCS

SEQ ID NO: 48247 - protein, 186 aa, Homo sapiens
MSNKEGSGGFRKRKHDNFPHNQRREGKDVNSSSPVMLAFKSFQQELDARHDKYERLVKLSRDITVESKRTIFLLHRITSAPDMEDILTESEIKLDGVRQKIFQVAQELSGEDMHQFHRAITTGLQEYVEAVSFQHFIKTRSLISMDEINKQLIFTTEDNGKENKTKFTGKILLTEALGIKADRSSI

SEQ ID NO: 48248 - protein, 64 aa, Homo sapiens
MSGTKPDILWAPHHVDRFVVCDSELSLYHVESTVNSELKAGSLRLSEDSAATLLSINSDTPYMK

SEQ ID NO: 48249 - protein, 726 aa, Homo sapiens
  MOD_RES (1)..(1): Any amino acid
XESMSYQAPPQQLPSAQPPQPSNPPHGAHTLNSGPQPGTAPATQHSQAGPATGQAYGPHTYTEPAKPKKGQQLWNRMKPAPGTGGLKFNIQKRPFAVTTQSFGSNAEGQHSGFGPQPNPEKVQNHSGSSARGNLSGKPDDWPQDMKEYVERCFTACESEEDKDRTEKLLKEVLQARLQDGSAYTIDWSREPLPGLTREPVAESPKKKRWEAASSLHPPRGAGSATRGGGAPSQRGTPGAGGAGRARGNSFTKFGNRNVFMKDNSSSSSTDSRSRSSSRSPTRHFRRSDSHSDSDSSYSGNECHPVGRRNPPPKGRGGRGAHMDRGRGRAQRGKRHDLAPTKRSRKKMAALECEDPERELKKQKRAARFQHGHSRRLRLEPLVLQMSSLESSGADPDWQELQIVGTCPDITKHYLRLTCAPDPSTVRPVAVLKKSLCMVKCHWKEKQDYAFACEQMKSIRQDLTVQGIRTEFTVEVYETHARIALEKGDHEEFNQCQTQLKSLYAENLPGNVGEFTAYRILYYIFTKNSGDITTELAYLTRELKADPCVAHALALRTAWALGNYHRFFRLYCHAPCMSGYLVDKFADRERKVALKAMIKTYVVPSSLLPLLFPSFRLAPPLRPAPGRRPPPAPNPCPGPCFPIIFLHSALPSPVPLALLVGHLCVPGHSSPSPHCSQLTASGASSPPHLCVSSSCSLLPGPPSSLLALGFLRTLRSLLSQLVAVLPP

SEQ ID NO: 48250 - protein, 182 aa, Homo sapiens
  MOD_RES (1)..(1): Any amino acid
XIIFSHMHAELHALFPGGKYCGHMYQLTKAPAHTFWRESCGARCVLPWAEFESLLGTCHPVEPGCTALALRTTIDLTCSGHVSIFEFDVFTRLFQPWPTLLKNWQLLAVNHPGYMAFLTYDEVQERLQACRDKPGSYIFRPSCTRLGQWAIGYVSSDGSILQTIPANKPLSQVLLEGQKDGL

SEQ ID NO: 48251 - protein, 95 aa, Homo sapiens
MIVFVRFNSSHGFPVEVDSDTSIFQLKEVVAKRQGVPADQLRVIFAGKELRNDWTVQQVDQSTTAFMCIAKAPVKECSRENSGYSAAPAGRQRSP

SEQ ID NO: 48252 - protein, 485 aa, Homo sapiens
MDNNKHCKQDNCLLTPNSGQEDADNDGVGDQCDDDADGDGIKNVEDNCRLFPNKDQQNSDTDSFGDACDNCPNVPNNDQKDTDGNGEGDACDNDVDGDGIPNGLDNCPKVPNPLQTDRDEDGVGDACDSCPEMSNPTQTDADSDLVGDVCDTNEDSDGDGHQDTKDNCPQLPNSSQLDSDNDGLGDECDGDDDNDGIPDYVPPGPDNCRLVPNPNQKDSDGNGVGDVCEDDFDNDAVVDPLDVCPESAEVTLTDFRAYQTVVLDPEGDAQIDPNWVVLNQGMEIVQTMNSDPGLAVGYTAFNGVDFEGTFHVNTVTDDDYAGFLFSYQDSGRFYVVMWKQTEQTYWQATPFRAVAQPGLQLKAVTSVSGPGEHLRNALWHTGHTPDQVRLLWTDPRNVGWRDKTSYRWQLLHRPQVGYIRVKLYEGPQLVADSGVIIDTSMRGGRLGVFCFSQENIIWSNLQYRCNDTVPEDFEPFRRQLLQGRV

SEQ ID NO: 48253 - protein, 71 aa, Homo sapiens
MEAGGLPLELWRMILAYLHLPDLGRCSLVCRAWYELILSLDSTRWRQLCLGCTECRHPNWPNQPDVEPESW

SEQ ID NO: 48254 - protein, 325 aa, Homo sapiens
MSSMVVTANGNDSKKFKGEDKMDGAPSRVLHIRKLPGEVTETEVIALGLPFGKVTNILMLKGKNQAFLELATEEAAITMVNYYSAVTPHLRNQPIYIQYSNHKELKTDNTLNQRAQAVLQAVTAVQTANTPLSGTTVSESAVTPAQSPVLRIIIDNMYYPVTLDVLHQIFSKFGAVLKIITFTKNNQFQALLQYGDPVNAQQAKLALDGQNIYNACCTLRIDFSKLVNLNVKYNNDKSRDYTRPDLPSGDGQPALDPAIAAAFAKETSLLAVPGALSPLAIPNAAAAAAAAAAGRVGMPGVSAGGNTVLLVSNLNEEVFMEMCSV

SEQ ID NO: 48255 - protein, 364 aa, Homo sapiens
MQKWFSAFDDAIIQRQWRANPSRGGGGVSFTKEVDTNVATGAPPRRQRVPGRACPWREPIRGRRGARPGGGDAGGTPGETVRHCSAPEDPIFRFSSLHSYPFPGTIKSRDMSWKRHHLIPETFGVKRRRKRGPVESDPLRGEPGSARAAVSELMQLFPRGLFEDALPPIVLRSQVYSLVPDRTVADRQLKELQEQGEIRIVQLGFDLDAHGIIFTEDYRTRVLKACDGRPYAGAVQKFLASVLPACGDLSFQQDQMTQTFGFRDSEITHLVNAGVLTVRDAGSWWLAVPGAGRFIKYFVKGRQAVLGMVRKAKYRELLLSELLGRRAPVVVRLGLTYHVHDLIGAQLVDCISTTSGTLLRLPET

SEQ ID NO: 48256 - protein, 155 aa, Homo sapiens
MHKAGLLGLCARAWNSVRMASSGMTRRDPLANKVALVTASTDGIGFAIARRLAQDGAHVVVSSRKQQNVDQAVATLQGEGLSVTGTVCHVGKAEDRERLVATAVKLHGGIDILVSNAAVNPFFGSIMDVTEEVWDKLWMDKEKEESMKETLRIRR

SEQ ID NO: 48257 - protein, 397 aa, Homo sapiens
MATVIPGPLSLGEDFYREAIEHCRSYNARLCAERSLRLPFLDSQTGVAQNNCYIWMEKTHRGPGLAPGQIYTYPARCWRKKRRLNILEDPRLRPCEYKIDCEAPLKKEGGLPEGPVLEALLCAETGEKKIELKEEETIMDCQKQQLLEFPHDLEVEDLEDDIPRRKNRAKGKAYGIGGLRKRQDTASLEDRDKPYVCDICGKRYKNRPGLSYHYTHTHLAEEEGEENAERHALPFHRKNNHKQFYKELAWVPEAQRKHTAKKAPDGTVIPNGYCDFCLGGSKKTGCPEDLISCADCGRSGHPSCLQFTVNMTAAVRTYRWQCIECKSCSLCGTSENDGASWAGLTPQDQLLFCDDCDRGYHMYCLSPPMAEPPEGSWSCHLCLRHLKEKASAYITLT

SEQ ID NO: 48258 - protein, 132 aa, Homo sapiens
MEAEGLDWLLVPLHQLVSWGAAAAMVFGGVVPYVPQYRDIRRTQNADGFSTYVCLVLLVANILRILFWFGRRFESPLLWQSAIMILTMLLMLKLCTEVRVANELNARRRSFTAADSKDEEVKVAPRRSFLVL

SEQ ID NO: 48259 - protein, 207 aa, Homo sapiens
MGTFCSVIKFENLQELKRLCHWGPIIALGVIAICSTMAMIDSVLWYWPLHTTGGSVNFIMLINWTVMILYNYFNAMFVGPGFVPLGWKPEISQDTMYLQYCKVCQAYKAPRSHHCRKCNSTTGLYPCCFHFCDDYVHTALSSALLWVEHSEDRHECSPERSSSNCSIWISCICYHLVCLGISFRNNHSCWDVVFYPDENNSQKQNFY

SEQ ID NO: 48260 - protein, 334 aa, Homo sapiens
MDEKLLSTVLTTSYSVIFIVGLVGNIIALYVFLGIHRKRNSIQIYLLNVAIADLLLIFCLPFRIMYHINQNKWTLGVILCKVVGTLFYMNMYISIILLGFISLDRYIKINRSIQQRKAITTKQSIYVCCIVWMLALGGFLTMIILTLKKGGHNSTMCFHYRDKHNAKGEAIFNFILVVMFWLIFLLIILSYIKIGKNLLRISKRRSKFPNSGKYATTARNSFIVLIIFTICFVPYHAFRFIYISSQLNVSSCYWKEIVHKTNEIMLVLSSFNSCLDPVMYFLMSSNIRKIMCQLLFRRFQGEPSRSESTSEFKPGYSLHDTSVAVKIQSSSKST

SEQ ID NO: 48261 - protein, 1181 aa, Homo sapiens
MAVAVAMAGALIGSEPGPAEELAKLEYLSLVSKVCTELDNHLGINDKDLAEFVISLAEKNTTFDTFKASLVKNGAEFTDSLISNLLRLIQTMRPPAKPSTSKDPVVKPKTEKEKLKELFPVLCQPDNPSVRTMLDEDDVKVAVDVLKELEALMPSAAGQEKQRDAEHRDRTKKKKRSRSRDRNRDRDRDRERNRDRDHKRRHRSRSRSRSRTRERNKVKSRYRSRSRSQSPPKDRKDRDKYGERNLDRWRDKHVDRPPPEEPTIGDIYNGKVTSIMQFGCFVQLEGLRKRWEGLVHISELRREGRVANVADVVSKGQRVKVKVLSFTGTKTSLSMKDVDQETGEDLNPNRRRNLVGETNEETSMRNPDRPTHLSLVSAPEVEDDSLERKRLTRISDPEKWEIKQMIAANVLSKEEFPDFDEETGILPKVDDEEDEDLEIELVEEEPPFLRGHTKQSMDMSPIKIVKNPDGSLSQAAMMQSALAKERRELKQAQREAEMDSIPMGLNKHWVDPLPDAEGRQIAANMRGIGMMPNDIPEWKKHAFGGNKASYGKKTQMSILEQRESLPIYKLKEQLVQAVHDNQILIVIGETGSGKTTQITQYLAEAGYTSRGKIGCTQPRRVAAMSVAKRVSEEFGCCLGQEVGYTIRFEDCTSPETVIKYMTDGMLLRECLIDPDLTQYAIIMLDEAHERTIHTDVLFGLLKKTVQKRQDMKLIVTSATLDAVKFSQYFYEAPIFTIPGRTYPVEILYTKEPETDYLDASLITVMQIHLTEPPGDILVFLTGQEEIDTACEILYERMKSLGPDVPELIILPVYSALPSEMQTRIFDPAPPGSRKVVIATNIAETSLTIDGIYYVVDPGFVKQKVYNSKTGIDQLVVTPISQAQAKQRAGRAGRTGPGKCYRLYTERAYRDEMLTTNVPEIQRTNLASTVLSLKAMGINDLLSFDFMDAPPMETLITAMEQLYTLGALDDEGLLTRLGRRMAEFPLEPMLCKMLIMSVHLGCSEEMLTIVSMLSVQNVFYRPKDKQALADQKKAKFHQTEGDHLTLLAVYNSWKNNKFSNPWCYENFIQARSLRRAQDIRKQMLGIMDRHKLDVVSCGKSTVRVQKAICSGFFRNAAKKDPQEGYRTLIDQQVVYIHPSSALFNRQPECPKHFLPVVAVAVSLEQCLSKFEDLNKELGLVTC

SEQ ID NO: 48262 - protein, 978 aa, Homo sapiens
MEPGEVKDRILENISLSVKKLQSYFAACEDEIPAIRNHDKVLQRLCEHLDHALLYGLQDLSSGYWVLVVHFTRREAIKQIEVLQHVATNLGRSRAWLYLALNENSLESYLRLFQENLGLLHKYYVKNALVCSHDHLTLFLTLVSGLEFIRFELDLDAPYLDLAPYMPDYYKPQYLLDFEDRLPSSVHGSDSLSLNSFNSVTSTNLEWDDSAIAPSSEDYDFGDVFPAVPSVPSTDWEDGDLTDTVSGPRSTASDLTSSKASTRSPTQRQNPFNEEPAETVSSSDTTPVHTTSQEKEEAQALDPPDACTELEVIRVTKKKKIGKKKKSRSDEEEEGEGPSSTTESSERSEPGLLIPEMKDTSMERLGQPLSKVIDQLNGQLDPSTWCSRAEPPDQSFRTGSPGDAPERPPLCDFSEGLSAPMDFYRFTVESPSTVTSGGGHHDPAGLGQPLHVPSSPEAAGQEEEGGGGEGQTPRPLEDTTREAQELEAQLSLVREGPVSEPEPGTQEVLCQLKRDQPSPCLSSAEDSGVDEGQGSPSEMVHSSEFRVDNNHLLLLMIHVFRENEEQLFKMIRMSTGHMEGNLQLLYVLLTDCYVYLLRKGATEKPYLVEEAVSYNELDYVSVGLDQQTVKLVCTNRRKQFLLDTADVALAEFFLASLKSAMIKGCREPPYPSILTDATMEKLALAKFVAQESKCEASAVTVRFYGLVHWEDPTDESLGPTPCHCSPPEGTITKEGMLHYKAGTSYLGKEHWKTCFVVLSNGILYQYPDRTDVIPLLSVNMGGEQCGGCRRANTTDRPHAFQVILSDRPCLELSAESEAEMAEWMQHLCQAVSKGVIPQGVAPSPCIPCCLVLTDDRLFTCHEDCQTSFFRSLGTAKLGDISAVSTEPGKEYCVLEFSQDSQQLLPPWVIYLSCTSELDRLLSALNSGWKTIYQVDLPHTAIQEASNKKKFEDALSLIHSAWQRSDSLCRGRASRDPWC

SEQ ID NO: 48263 - protein, 156 aa, Homo sapiens
MKALILVGGYGTRLRPLTLSTPKPLVDFCNKPILLHQVEALAAAGVDHVILAVSYMSQVLEKEMKAQEQRLGIRISMSHEEEPLGTAGPLALARDLLSETADPFFVLNSDVICDFPFQAMVQFHRHHGQEGSILASGWTLGSPRTSSLACASSCSH

SEQ ID NO: 48264 - protein, 74 aa, Homo sapiens
MKFQECHSEVMRHGQKIYPSHHRIEMAVEIASLKCQHSSINQSPTRKNSNSTTGWLLWDLLMGIGNSGSNVVLT

SEQ ID NO: 48265 - protein, 261 aa, Homo sapiens
NFMFILFPVCGSKFKSNSDREARERKRRRQLRASVFALALPLSLGPCWALWVAVPKASATIRGPQRRLLASLLQENTEILGYLLGSVAAFGSWASRIPPLSRISKMRQALGFAKEARESPDTQALLTCAEKEEENQENLDWVPLTTLSHCKSLRTMTAISRYMELTIEPVQQAGCSATRLPGDGQTSAGDASLQDPPSYPPVQVIRARVSSGSSSEVSSINSDLEWDPEDVNLEGSKENVELLGSQVHQDSVRTAHLSDDD

SEQ ID NO: 48266 - protein, 250 aa, Homo sapiens
MGRKLDPTKEKRGPGRKARKQKGAETELVRFLPAVSDENSKRLSSRARKRAAKRRLGSVEAPKTNKSPEAKPLPGKLPKGAVQTAGKKGPQSLFNAPRGKKRPAPGSDEEEEEEDSEEDGMVNHGDLWGSEDDADTVDDYGADSNSEDEEEGEALLPIERAARKQKAREAAAGIQWSEEETEDEEEEKEVTPESGPPKVEEADGGLQINVDEEPFVLPPAGEMEQDAQAPDLQRVHKRIQDIVGILRDFG

SEQ ID NO: 48267 - protein, 116 aa, Homo sapiens
MMPSCNRSCSCSRGPSVEDGKWYGVRSYLHLFYEDCAGTALSDDPEGPPVLCPRRPWPSLCWKISLSSGTLLLLLGVAALTTGYAVPPKLEGIGEGWLSQDTKAEPLDPEADSHVE

SEQ ID NO: 48268 - protein, 378 aa, Homo sapiens
MAREWRAAQGKDPGPSEKQKPVFTPLRRPGMLVPKQNVSPPDMSALSLKGDQALLGGIFYFLNIFSHGELPPHCEQRFLPCEIGCVKYSLQEGIMADFHSFINPGEIPRGFRFHCQAASDSSHKIPISNFERGHNQATVLQNLYRFIHPNPGNWPPIYCKSDDRTRVNWCLKHMAKASEIRQDLQLLTVEDLVVGIYQQKFLKEPSKTWIRSLLDVAMWDYSSNTRCKWHEENDILFCALAVCKKIAYCISNSLATLFGIQLTEAHVPLQDYEASNSVTPKMVVLDAGRYQKLRVGSSGFSHFNSSNEEQRSNTPIGDYPSRAKISGQNSSVRGRGITRLLESISNSSSNIHKFSNCDTSLSPYMSQKDGYKSFSSLS

SEQ ID NO: 48269 - protein, 80 aa, Homo sapiens
  MOD_RES (1)..(1): Any amino acid
XARELEETNQKLVADSKASQQKILSLTETIECLQTNIDHLQSQVEELKSSGQGRRSPGKCDQEKPAPSFACLKELYDLRQ

SEQ ID NO: 48270 - protein, 162 aa, Homo sapiens
MNSRQAWRLFLSQGRGDRWVSRPRGHFSPALRREFFTTTTKEGYDRRPVDITPLEQRKLTFDTHALVQDLETHGFDKTQAETIVSALTALSNVSLDTIYKEMVTQAQQEITVQQLMAHLDAIRKDMVILEKSEFANLRAENEKMKIELDQVKQQLMVSEFFF

SEQ ID NO: 48271 - protein, 363 aa, Homo sapiens
MSKLWRRGSTSGAMEAPEPGEALELSLAGAHGHGVHKKKHKKHKKKHKKKHHQEEDAGPTQPSPAKPQLKLKIKLGGQVLGTKSVPTFTVIPEGPRSPSPLMVVDNEEEPMEGVPLEQYRAWLDEDSNLSPSPLRDLSGGLGGQEEEEEQRWLDALEKGELDDNGDLKKEINERLLTARQRALLQKARSQPSPMLPLPVAEGCPPPALTEEMLLKREERARKRRLQAARRAEEHKNQTIERLTKTAATSGRGGRGGARGERRGGRAAAPAPMVRYCSGAQGSTLSFPPGVPAPTAVSQRPSPSGPPPRCSVPGCPHPRRYACSRTGQALCSLQCYRINLQMRLGGPEGPGSPLLATFESCAQE

SEQ ID NO: 48272 - protein, 241 aa, Homo sapiens
MAQQDRIQQEIAVQNPLVSERLELSVLYKEYAEDDNIYQQKIKDLHKKYSYIRKTRPDGNCFYRAFGFSHLEALLDDSKELQRFKAVSAKSKEDLVSQGFTEFTIEDFHNTFMDLIEQVEKQTSVADLLASFNDQSTSDYLVVYLRLLTSGYLQRESKFFEHFIEGGRTVKEFCQQEVEPMCKESDHIHIIALAQALSVSIQVEYMDRGEGGTTNPHIFPEGSEPKVYLLYRPGHYDILYK

SEQ ID NO: 48273 - protein, 188 aa, Homo sapiens
MSQSNRELVVDFLSYKLSQKGYSWSQFSDVEENRTEAPEGTESEMETPSAINGNPSWHLADSPAVNGATGHSSSLDAREVIPMAAVKQALREAGDEFELRYRRAFSDLTSQLHITPGTAYQSFEQVVNELFRDGVNWGRIVAFFSFGGALCVESVDKEMQVLVSRIAAWMATYLNDHLEPWIQENGGW

SEQ ID NO: 48274 - protein, 348 aa, Homo sapiens
MSLMVVSMACVGFFLLQGAWPHEGVHRKPSLLAHPGRLVKSEETVILQCWSDVRFEHFLLHREGKFKDTLHLIGEHHDGVSKANFSIGPMMQDLAGTYRCYGSVTHSPYQLSAPSDPLDIVITGLYEKPSLSAQPGPTVLAGESVTLSCSSRSSYDMYHLSREGEAHECRFSAGPKVNGTFQADFPLGPATHGGTYRCFGSFRDSPYEWSNSSDPLLVSVTGNPSNSWPSPTEPSSKTGNPRHLHILIGTSVVIILFILLFFLLHRWCSNKKNAAVMDQESAGNRTANSEDSDEQDPQEVTYTQLNHCVFTQRKITRPSQRPKTPPTDIIVYTELPNAESRSKVVSCP

SEQ ID NO: 48275 - protein, 134 aa, Homo sapiens
MEERGDSEPTPGCSGLGPGGVRGFGDGGGAPSWAPEDAWMGTHPKYLEMMELDIGDATQVYVAFLVYLDLMESKSWHEVNCVGLPELQLICLVGTEIEGEGLQTVVPTPITASLSHNRIREILKASRKLQEYFS

SEQ ID NO: 48276 - protein, 41 aa, Homo sapiens
MSSEMEPLLLAWSYFRRRKFQLCADLCTQMLEKSPYDQSCS

SEQ ID NO: 48277 - protein, 2620 aa, Homo sapiens
MPATEKDLAEDAPWKKIQQNTFTRWCNEHLKCVSKRIANLQTDLSDGLRLIALLEVLSQKKMHRKHNQRPTFRQMQLENVSVALEFLDRESIKLVSIDSKAIVDGNLKLILGLIWTLILHYSISMPMWDEEEDEEAKKQTPKQRLLGWIQNKLPQLPITNFSRDWQSGRALGALVDSCAPGLCPDWDSWDASKPVTNAREAMQQADDWLGIPQVITPEEIVDPNVDEHSVMTYLSQFPKAKLKPGAPLRPKLNPKKARAYGPGIEPTGNMVKKRAEFTVETRSAGQGEVLVYVEDPAGHQEEAKVTANNDKNRTFSVWYVPEVTGTHKVTVLFAGQHIAKSPFEVYVDKSQGDASKVTAQGPGLEPSGNIANKTTYFEIFTAGAGTGEVEVVIQDPMGQKGTVEPQLEARGDSTYRCSYQPTMEGVHTVHVTFAGVPIPRSPYTVTVGQACNPSACRAVGRGLQPKGVRVKETADFKVYTKGAGSGELKVTVKGPKGEERVKQKDLGDGVYGFEYYPMVPGTYIVTITWGGQNIGRSPFEVKVGTECGNQKVRAWGPGLEGGVVGKSADFVVEAIGDDVGTLGFSVEGPSQAKIECDDKGDGSCDVRYWPQEAGEYAVHVLCNSEDIRLSPFMADIRDAPQDFHPDRVKARGPGLEKTGVAVNKPAEFTVDAKHGGKAPLRVQVQDNEGCPVEALVKDNGNGTYSCSYVPRKPVKHTAMVSWGGVSIPNSPFRVNVGAGSHPNKVKVYGPGVAKTGLKAHEPTYFTVDCAEAGQGDVSIGIKCAPGVVGPAEADIDFDIIRNDNDTFTVKYTPRGAGSYTIMVLFADQATPTSPIRVKVEPSHDASKVKAEGPGLSRTGVELGKPTHFTVNAKAAGKGKLDVQFSGLTKGDAVRDVDIIDHHDNTYTVKYTPVQQGPVGVNVTYGGDPIPKSPFSVAVSPSLDLSKIKVSGLGEKVDVGKDQEFTVKSKGAGGQGKVASKIVGPSGAAVPCKVEPGLGADNSVVRFLPREEGPYEVEVTYDGVPVPGSPFPLEAVAPTKPSKVKAFGPGLQGGSAGSPARFTIDTKGAGTGGLGLTVEGPCEAQLECLDNGDGTCSVSYVPTEPGDYNINILFADTHIPGSPFKAHVVPCFDASKVKCSGPGLERATAGEVGQFQVDCSSAGSAELTIEICSEAGLPAEVYIQDHGDGTHTITYIPLCPGAYTVTIKYGGQPVPNFPSKLQVEPAVDTSGVQCYGPGIEGQGVFREATTEFSVDARALTQTGGPHVKARVANPSGNLTETYVQDRGDGMYKVEYTPYEEGLHSVDVTYDGSPVPSSPFQVPVTEGCDPSRVRVHGPGIQSGTTNKPNKFTVETRGAGTGGLGLAVEGPSEAKMSCMDNKDGSCSVEYIPYEAGTYSLNVTYGGHQVPGSPFKVPVHDVTDASKVKCSGPGLSPGMVRANLPQSFQVDTSKAGVAPLQVKVQGPKGLVEPVDVVDNADGTQTVNYVPSREGPYSISVLYGDEEVPRSPFKVKVLPTHDASKVKASGPGLNTTGVPASLPVEFTIDAKDAGEGLLAVQITDPEGKPKKTHIQDNHDGTYTVAYVPDVTGRYTILIKYGGDEIPFSPYRVRAVPTGDASKCTVTVSIGGHGLGAGIGPTIQIGEETVITVDTKAAGKGKVTCTVCTPDGSEVDVDVVENEDGTFDIFYTAPQPGKYVICVRFGGEHVPNSPFQVTALAGDQPSVQPPLRSQQLAPQYTYAQGGQQTWAPERPLVGVNGLDVTSLRPFDLVIPFTIKKGEITGEVRMPSGKVAQPTITDNKDGTVTVRYAPSEAGLHEMDIRYDNMHIPGSPLQFYVDYVNCGHVTAYGPGLTHGVVNKPATFTVNTKDAGEGGLSLAIEGPSKAEISCTDNQDGTCSVSYLPVLPGDYSILVKYNEQHVPGSPFTARVTGDDSMRMSHLKVGSAADIPINISETDLSLLTATVVPPSGREEPCLLKRLRNGHVGISFVPKETGEHLVHVKKNGQHVASSPIPVVISQSEIGDASRVRVSGQGLHEGHTFEPAEFIIDTRDAGYGGLSLSIEGPSKVDINTEDLEDGTCRVTYCPTEPGNYIINIKFADQHVPGSPFSVKVTGEGRVKESITRRRRAPSVANVGSHCDLSLKIPEISIQDMTAQVTSPSGKTHEAEIVEGENHTYCIRFVPAEMGTHTVSVKYKGQHVPGSPFQFTVGPLGEGGAHKVRAGGPGLERAEAGVPAEFSIWTREAGAGGLAIAVEGPSKAEISFEDRKDGSCGVAYVVQEPGDYEVSVKFNEEHIPDSPFVVPVASPSGDARRLTVSSLQESGLKVNQPASFAVSLNGAKGAIDAKVHSPSGALEECYVTEIDQDKYAVRFIPRENGVYLIDVKFNGTHIPGSPFKIRVGEPGHGGDPGLVSAYGAGLEGGVTGNPAEFVVNTSNAGAGALSVTIDGPSKVKMDCQECPEGYRVTYTPMAPGSYLISIKYGGPYHIGGSPFKAKVTGPRLVSNHSLHETSSVFVDSLTKATCAPQHGAPGPGPADASKVVAKGLGLSKAYVGQKSSFTVDCSKAGNNMLLVGVHGPRTPCEEILVKHVGSRLYSVSYLLKDKGEYTLVVKWGDEHIPGSPYRVVVP

SEQ ID NO: 48278 - protein, 186 aa, Homo sapiens
MAGAEWKSLEECLEKHLPLPDLQEVKRVLYGKELRKLDLPREAFEAASREDFELQGYAFEAAEEQLRRPRIVHVGLVQNRIPLPANAPVAEQVSALHRRIKAIVEVAAMCGVNIICFQEAWILRPHHQEPRPPCCYAPSCCLIPSVFPHRSESIRSSPSLYHHLVQAPGSSPLAFVIPSSWSPVPS

SEQ ID NO: 48279 - protein, 724 aa, Homo sapiens
MIKVEHLKEKLISQAQEVSRLRSELGGTDLEKHRDLLMVENERLRQEMRRCEAELQELRTKPAGPCPGCEHSQESAQLRDKLSQLQLEMAESKGMLSELNLEVQQKTDRLAEVELRLKDCLAEKAQEEERLSRRLRDSHETIASLRAQSPPVKYVIKTVEVESSKTKQALSESQARNQHLQEQVAMQRQVLKEMEQQLQSSHQLTARLRAQIAMYESELERAHGQMLEEMQSLEEDKNRAIEEAFARAQVEMKAVHENLAGVRTNLLTLQPALRTLTNDYNGLKRQVRGFPLLLQEALRSVKAEIGQAIEEVNSNNQELLRKYRRELQLRKKCHNELVRLKGNIRVIARVRPVTKEDGEGPEATNAVTFDADDDSIIHLLHKGKPVSFELDKVFSPQASQQDVFQEVQALVTSCIDGFNVCIFAYGQTGAGKTYTMEGTAENPGINQRALQLLFSEVQEKASDWEYTITVSAAEIYNEVLRDLLGKEPQEKLEIRLCPDGSGQLYVPGLTEFQVQSVDDINKVFEFGHTNRTTEFTNLNEHSSRSHALLIVTVRGVDCSTGLRTTGKLNLVDLAGSERVGKSGAEGSRLREAQHINKSLSALGDVIAALRSRQGHVPFRNSKLTYLLQDSLSGDSKTLMVVQVSPVEKNTSETLYSLKFAERVRSVELGPGLRRAELGSWSSQEHLEWEPACQTPQPSARAHSAPSSGTSSRPGSIRRKLQPSA

SEQ ID NO: 48280 - protein, 67 aa, Homo sapiens
MRTQVYEGLCKNYFSLAVLQRDRIKLLFFDILVFLSVFLLFLLFLVDIMANNTTSLGSPWPENFWGS

SEQ ID NO: 48281 - protein, 173 aa, Homo sapiens
MGAVSCRQGQHTQQGEHTRVAVPHKGGNIRGPWARGWKSLWTGLGTIRSDLEELWELRGHHYLHQESLKPAPVLVEKPLPEWPVPQFINLFLPEFPIRPIRGQQQLKILGLVAKGSFGTVLKVLDCTQKAVFAVKVVPKVKVLQRDTVRQCKEEVSIQLDCAAAISAHCNLPA

SEQ ID NO: 48282 - protein, 94 aa, Homo sapiens
MDDREDLVYQAKLAEQAERYDEMVESMKKVAGMDVELTVEERNLLSVAYKNVIGARRASWRIISSIEQKEENKGGEDKLKMIREYRQMVGKSSF

SEQ ID NO: 48283 - protein, 78 aa, Homo sapiens
MLLVLLSVVLLALSSAQSTDNDVNYEDFTFTIPATTTPTRTPSTLSTPISFCQPAGSIIILPEGQTSKTSPGATTLVI

SEQ ID NO: 48284 - protein, 37 aa, Homo sapiens
WGLSRTSAHRGRRIPEAPSQQTERGHKSQGRYAHPQV

SEQ ID NO: 48285 - protein, 488 aa, Homo sapiens
MRSDSLVPGTHTPPIRRRSKFANLGRIFKPWKWRKKKSEKFKHTSAALERKISMRQSREELIKRGVLKEIYDKDGELSISNEEDSLENGQSLSSSQLSLPALSEMEPVPMPRDPCSYEVLQPSDIMDGPDPGAPVKLPCLPVKLSPPLPPKKVMICMPVGGPDLSLVSYTAQKSGQQGVAQHHHTVLPSQIQHQLQYGSHGQHLPSTTGSLPMHPSGCRMIDELNKTLAMTMQRLESSEQRVPCSTSYHSSGLHSGDGVTKAGPMGLPEIRQVPTVVIECDDNKENVPHESDYEDSSCLYTREEEEEEEDEDDDSSLYTSSLAMKVCRKDSLAIKLSNRPSKRELEEKNILPRQTDEERLELRQQIGTKLTRRLSQRPTAEELEQRNILKPRNEQEEQEEKREIKRRLTRKLSQRPTVEELRERKILIRFSDYVEVADAQDYDRRADKPWTRLTAADKAAIRKELNEFKSTEMEVHELSRHLTRFHRP

SEQ ID NO: 48286 - protein, 53 aa, Homo sapiens
MTSPQLEWTLQTLLEQLNEDELKSFKSLLWAFPLEDVLQKTPWSEVEEADGKK

SEQ ID NO: 48287 - protein, 197 aa, Homo sapiens
MESGKTASPKSMPKDAQMMAQILKDMGITEYEPRVINQMLEFAFRYVTTILDDAKIYSSHAKKATVDADDVRLAIQCRADQSFTSPPPRDFLLDIARQRNQTPLPLIKPYSGPRLPPDRYCLTAPNYRLKSLQKKASTSAGRITVPRLSVGSVTSRPSTPTLGTPTPQTMSVSTKVGTPMSLTGQRFTVQMPTSQSP

SEQ ID NO: 48288 - protein, 249 aa, Homo sapiens
MGPQHPCFSASPWKEPHNRDTARTLQFPQSCHGATLRDRDGDRAARFARTCIAGPRLPFLLSHAKASLPSLRQSLAGDHDLRGPPGSCHGGCTPPHPPEETWAQSHAWCPQPQRWPWVSSLIFVAWQGSAPLRASKPWSEESVGRLGTAKEVRTHETGEAFQSLHLHRVKLPVEAAAQEVGIAISILEGSVDLRGHPSPVSGCGARDCLHAGCWGGNASSPCLGRSRSCSSRDPRPRQHGPGTSPGPAR

SEQ ID NO: 48289 - protein, 679 aa, Homo sapiens
MENEKEIPVSFQDLTVNFTQEEWQQLDPAQRLLYRDVMLENYSNLVSVGYHVSKPDVIFKLEQGEEPWIVEEFSNQNYPDIDDALEKNKEIQDKHLTQTVFFSNKTLITERENVFGKTLNLGMNSVPSRKMPYKCNPGGNSLKTNSEVIVAKKSKENRKIPDGYSGFGKHEKSHLGMKKYRYNPMRKASNQNENLILHQNIQILKQPFDYNKCGKTFFKRAILITQKGRQTERKPNECNECRKTFSKRSTLIVHQRIHTGEKPYVCSDCRKTFRVKTSLTRHRRIHTGERPYECSECRKTFIDKSALIVHQKIHGGEKSYECNECGKTFFRKSALAEHFRSHTGEKPYECKECGNAFSKKSYLVVHQRTHRGEKPNECKECGKTFFCQSALTAHQRIHTGEKPYECSECEKTFFCQSALNVHRRSHTGEKPYECSQCGKFLCTKSALIAHQITHRGKKSYECNECGKFFCHKSTLTIHQRTHTGEKHGVFNKCGRISIVKSNCSQCKRMNTKENLYECSEHGHAVSKNSHLIVHQRTIWERPYECNECGRTYCRKSALTHHQRTHTGQRPYECNECGKTFCQKFSFVEHQRTHTGEKPYECNECGKSFCHKSAFRVHRRIHTGEKPYECNQCGKTYRRLWTLTEHQKIHTGEKPYECNKCEKTFRHKSNFLLHQKSHKE

SEQ ID NO: 48290 - protein, 64 aa, Homo sapiens
MKLHCEVEVISRHLPALGLRNRGKGVRAVLSLCQQTSRSQPPVRAFLLISTLKDKRGTRYEHSG

SEQ ID NO: 48291 - protein, 166 aa, Homo sapiens
MESGKTASPKSMPKDAQMMAQILKDMGITEYEPRVINQMLEFAFRYVTTILDDAKIYSSHAKKATVDADDVRLAIQCRADQSFTSPPPRDFLLDIARQRNQTPLPLIKPYSGPRLPPDRYCLTAPNYRLKSLQKKASTSAGRITVPRLSVGSVTSRPSTPTLGTPT

SEQ ID NO: 48292 - protein, 711 aa, Homo sapiens
MDADKEKDLQKFLKNVDEISNLIQEMNSDDPVVQQKAVLETEKRLLLMEEDQEEDECRTTLNKTMISPPQTAMKSAEEINSEAFLASVEKDAKERAKRRRENKVLADALKEKGNEAFAEGNYETAILRYSEGLEKLKDMKVLYTNRAQAYMKLEDYEKALVDCEWALKSFSFMQCDEKCTKAYFHMGKANLALKNYSVSRECYKKILEINPKLQTQVKGYLNQVDLQEKADLQEKEAHELLDSGKNTAVTTKNLLETLSKPDQIPLFYAGGIEILTEMINECTEQTLFRMHNGFSIISDNEVIRRCFSTAGNDAVEEMVCVSVLKLWQAVCSRNEENQRVLVIHHDRARLLAALLSSKVLAIRQQSFALLLHLAQTESGRSLIINHLDLTRLLEALVSFLDFSDKEANTAMGLFTDLALEERFQVWFQANLPGVLPALTGVLKTDPKVSSSSALCQCIAIMGNLSAEPTTRRHMAACEEFGDGCLSLLARCEEDVDLFREVIYTLLGLMMNLCLQAPFVSEVWAVEVSRRCLSLLNSQDGGILTRAAGVLSRTLSSSLKIVEEALRAGVVKKMMKFLKTGGETASRYAIKILAICTNSYHEAREEVIRLDKKLSVMMKLLSSEDEVLVGNAALCLGNCMEVPNVASSLLKTDLLQVLLKLAGSDTQKTAVQVNAGIALGKLCTAEPRFAAQLRKLHGLEILNSTMKYISDS

SEQ ID NO: 48293 - protein, 119 aa, Homo sapiens
MKSKMRQALGFAKEARESPDTQALLTCAEKEEENQENLDWVPLTTLSHCKSLRTMTAISRYMELTIEPVQQAAVPPGCQVTGRRAPEMRPCRTPRRTLPFRSSGPGCLPAAPLSGTLKM

SEQ ID NO: 48294 - protein, 713 aa, Homo sapiens
MLQQVPENINFPAEEEKILEFWTEFNCFQECLKQSKHKPKFTFYDGPPFATGLPHYGHILAGTIKDIVTRYAHQSGFHVDRRFGWDCHGLPVEYEIDKTLGIRGPEDVAKMGITEYNNQCRAIVMRYSAEWKSTVSRLGRWIDFDNDYKTLYPQFMESVWWVFKQLYDKGLVYRGVKVMPFSTACNTPLSNFESHQNYKDVQDPSVFVTFPLEEDETVSLVAWTTTPWTLPSNLAVCVNPEMQYVKIKDVARGRLLILMEARLSALYKLESDYEILERFPGAYLKGKKYRPLFDYFLKCKENGAFTVLVDNYVKEEEGTGVVHQAPYFGAEDYRVCMDFNIIRKDSLPVCPVDASGCFTTEVTDFAGQYVKDADKSIIRTLKEQGRLLVATTFTHSYPFCWRSDTPLIYKAVPSWFVRVENMVDQLLRNNDLCYWVPELVREKRFGNWLKDARDWTISRNRYWGTPIPLWVSDDFEEVVCIGSVAELEELSGAKISDLHRESVDHLTIPSRCGKGSLHRISEVFDCWFESGSMPYAQVHYPFENKREFEDAFPADFIAEGIDQTRGWFYTLLVLATALFGQPPFKNVIVNGLVLASDGQKMSKRKKNYPDPVSIIQKYGADALRLYLINSPVVRAENLRFKEEGVRDVLKDVLLPWYNAYRFLIQNVLRLQKEEEIEFLYNENTVRESPNITDRWILSFMQSLIGFFETEMAG

SEQ ID NO: 48295 - protein, 59 aa, Homo sapiens
MLRHSPSLWELVEEHVPLRERREVKRILGEAAVDLSLELRAERSQRSQHHQGPTERVQH

SEQ ID NO: 48296 - protein, 125 aa, Homo sapiens
MAENDVDNELLDYEDDEVETAAGGDGAEAPAKKDVKGSYVSIHSSGFRDFLLKPELLRAIVDCGFEHPSEVQHECIPQAILGMDVLCQAKSGMGKTAVFVLATLQQLEPVTGQVSVLVMCHTREL

SEQ ID NO: 48297 - protein, 570 aa, Homo sapiens
MPLAFCGSENHSAAYRVDQGVLNNGCFVDALNVVPHVFLLFITFPILFIGWGSQSSKVHIHHSTWLHFPGHNLRWILTFMLLFVLVCEIAEGILSDGVTESHHLHLYMPAGMAFMAAVTSVVYYHNIETSNFPKLLIALLVYWTLAFITKTIKFVKFLDHAIGFSQLRFCLTGLLVILYGMLLLVEVNVIRVRRYIFFKTPREVKPPEDLQDLGVRFLQPFVNLLSKGTYWWMNAFIKTAHKKPIDLRAIGKLPIAMRALTNYQRLCEAFDAQRKDIQGTQGARAIWQALSHAFGRRLVLSSTFRILADLLGFAGPLCIFGIVDHLGKENDVFQPKTQFLGVYFVSSQEFLANAYVLAVLLFLALLLQRTFLQASYYVAIETGINLRGAIQTKIYNKIMHLSTSNLSMGEMTAGQICNLVAIDTNQLMWFFFLCPNLWAMPVQIIVGVILLYYILGVSALIGAAVIILLAPVQYFVATKLSQAQRSTLEYSNERLKQTNEMLRGIKLLKLYAWENIFRTRVETTRRKEMTSLRAFAIYTSISIFMNTAIPIAAVLIRAKAKRVPVQCRDP

SEQ ID NO: 48298 - protein, 63 aa, Homo sapiens
MNTILPCQDQYFVGGQSYNCPYSTTTSESSVDVSTETWVSFWAAGLLDNRELQQAPQAQVSTI

SEQ ID NO: 48299 - protein, 52 aa, Homo sapiens
MSQDGASQFQEVIRQELELSVKKELEKILTTASSHEFETPGFAILPRLVSNS

SEQ ID NO: 48300 - protein, 462 aa, Homo sapiens
MPMSTILPVTSPCLPATGVTVWELMTFGAEPYAGLRLAEVPDLLEKGERLAQPQICTIDVYMVMVKCWMIDENIRPTFKELANEFTRMARDPPRYLVIKRESGPGIAPGPEPHGLTNKKLEEVELEPELDLDLDLEAEEDNLATTTLGSALSLPVGTLNRPRGSQSLLSPSSGYMPMNQGNLGESCQESAVSGSSERCPRPVSLHPMPRGCLASESSEGHVTGSEAELQEKVSMCRSRSRSRSPRPRGDSAYHSQRHSLLTPVTPLSPPGLEEEDVNGYVMPDTHLKGTPSSREGTLSSVGLSSVLGTEEEDEDEEYEYMNRRRRHSPPHPPRPSSLEELGYEYMDVGSDLSASLGSTQSCPLHPVPIMPTAGTTPDEDYEYMNRQRDGGGPGGDYAAMGACPASEQGYEEMRAFQGPGHQAPHVHYARLKTLRSLEATDSAFDNPDYWHSRLFPKANAQRT

SEQ ID NO: 48301 - protein, 314 aa, Homo sapiens
GRMSANTSMVTEFLLLGFSHLADLQGLLFSVFLTIYLLTVAGNFLIVVLVSTDAALQSPMYFFLRTLSALEIGYTSVTVPLLLHHLLTGRRHISRSGCALQMFFFLFFGATECCLLAAMAYDRYAAICEPLRYPLLLSHRVCLQLAGSAWACGVLVGLGHTPFIFSLPFCGPNTIPQFFCEIQPVLQLVCGDTSLNELQIILATALLILCPFGLILGSYGRILVTIFRIPSVAGRRKAFSTCSSHLIVVSLFYGTALFIYIRPKASYDPATDPLVSLFYAVVTPILNPIIYSLRNTEVKAALKRTIQKTVPMEI

SEQ ID NO: 48302 - protein, 82 aa, Homo sapiens
MAQPPPDVEGDDCLPAYRHLFCPDLLRDKVAFITGGGSGIGFRIAEIFMRHGCHTVIASRSLPRVLTVIRPPQPPKVPGLQV

SEQ ID NO: 48303 - protein, 783 aa, Homo sapiens
MDQREILQKFLDEAQSKKITKEEFANEFLKLKRQSTKYKADKTYPTTVAEKPKNIKKNRYKDILPYDYSRVELSLITSDEDSSYINANFIKGVYGPKAYIATQGPLSTTLLDFWRMIWEYSVLIIVMACMEYEMGKEAEKRKSDYIIRTLKVKFNSETRTIYQFHYKNWPDHDVPSSIDPILELIWDVRCYQEDDSVPICIHCSAGCGRTGVICAIDYTWMLLKDGIIPENFSVFSLIREMRTQRPSLVQTQEQYELVYNAVLELFKRQMDVIRDKHSGTESQAKHCIPEKNHTLQADSYSPNLPKSTTKAAKMMNQQRTKMEIKESSSFDFRTSEISAKEELVLHPAKSSTSFDFLELNYSFDKNADTTMKWQTKAFPIVGEPLQKHQSLDLGSLLFEGCSNSKPVNAAGRYFNSKVPITRTKSTPFELIQQRETKEVDSKENFSYLESQPHDSCFVEMQAQKVMHVSSAELNYSLPYDSKHQIRNASNVKHHDSSALGVYSYIPLVENPYFSSWPPSGTSSKMSLDLPEKQDGTVFPSSLLPTSSTSLFSYYNSHDSLSLNSPTNISSLLNQESAVLATAPRIDDEIPPPLPVWTPESFIVVEEAGEFSPNVPKSLSSAVKVKIGTSLEWGGTSEPKKFDDSVILRPSKSVKLRSPKSELHQDRSSPPPPLPERTLESFFLADEDCMQAQSIETYSTSYPDTMENSTSSKQTLKTPGKSFTRSKSLKILRNMKKSICNSCPPNKPAESVQSNNSSSFLNFGFANRFSKPKGPRNPPPTWNI

SEQ ID NO: 48304 - protein, 37 aa, Homo sapiens
MADPKYADLPGIVRMSQMFMKLATYLRMIKRSSMRRS

SEQ ID NO: 48305 - protein, 410 aa, Homo sapiens
MSLMVVSMACVGFFLLEGPWPHVGGQDKPFLSAWPGTVVSEGQHVTLQCRSRLGFNEFSLSKEDGMPVPELYNRIFWNSFLMGPVTPAHAGTYRCCSSHPHSPTGWSAPSNPVVIMVTGVHRKPSLLAHPGPLVKSGETVILQCWSDVRFERFLLHREGITEDPLRLIGQLHDAGSQVNYSMGPMTPALAGTYRCFGSVTHLPYELSAPSDPLDIVVVGLYGKPSLSAQPGPTVQAGENVTLSCSSRSLFDIYHLSREAEAGELRLTAVLRVNGTFQANFPLGPVTHGGNYRCFGSFRALPHAWSDPSDPLPVSVTGNSRHLHVLIGTSVVIIPFAILLFFLLHRWCANKKNAVVMDQEPAGNRTVNREDSDEQDPQEVTYAQLNHCVFTQRKITRPSQRPKTPPTDTSV

SEQ ID NO: 48306 - protein, 324 aa, Homo sapiens
MSPHGDGRGQAQGRAVRVGLRRSGGIRGGVAVFAAVAAVFTFTLPPSVPGGDSGELITAAHELGVAHPPGYPLFTLVAKLAITLFPFGSIAYRVNLLCGLFGAVAASLLFFTVFRLSGSSAGGILAAGVFSFSRLTWQWSIAAEVFSLNNLFVGLLMALTVHFEEAATAKERSKVAKIGAFCCGLSLCNQHTIILYVLCIIPWILFQLLKKKELSLGSLLKLSLYFSAGLLPYVHLPISSYLNHARWTWGDQTTLQGFLTHFLREEYGTFSLAKSEIGSSMSEILLSQVTNMRTELSFNIQALAVCANICLATKWNDSGCRAMQ

SEQ ID NO: 48307 - protein, 144 aa, Homo sapiens
MAELQEVQITEEKPLLPGQTPEAAKTHSVETPYGSVTFTVYGTPKPKRPAILTYHDVGLNYKSCFQPLFQFEDMQEIIQNFVRVHVDAPGMEEGAPVFPLGYQYPSLDQLADMIPCVLQYLNFSTIIGVGVGAGAYILARYALN

SEQ ID NO: 48308 - protein, 113 aa, Homo sapiens
MEAPEYLDLDEIDFSDDISDNRSQGNRLQKLGLEDTDREDAMGFGSHRAKLTVVAALGACHCPENEYSVTSLKTIPELCRRCDTQNEDRSEWSVGVRTLDGERNRSHCRTELF

SEQ ID NO: 48309 - protein, 960 aa, Homo sapiens
MSRRKQAKPQHLKSDEELLPPDGAPEHAAPGEGAEDADSGPESRSGGEETSVCEKCCAEFFKWADFLEHQRSCTKLPPVLIVHEDAPPGLPSPLLPQTSASGVIFPNPLVSIAATANALDPLSALMKHRKGKPPNVSVFEPKASAEDPFFKHKCRFCAKVFGSDSALQIHLRSHTGERPFKCNICGNRFSTKGNLKVHFQRHKEKYPHIQMNPYPVPEYLDNVPTCSGIPYGMSLPPEKPVTTWLDSKPVLPTVPTSVGLQLPPTVPGAHGYADSPSATPASRSPQRPSPASSECASLSPGLNHVESGVSATAESPQSLLGGPPLTKAEPVSLPCTNARAGDAPVGAQASAAPTSVDGAPTSLGSPGLPAVSEQFKAQFPFGGLLDSMQTSETSKLQQLVENIDKKMTDPNQCVICHRVLSCQSALKMHYRTHTGERPFKCKICGRAFTTKGNLKTHFGVHRAKPPLRVQHSCPICQKKFTNAVVLQQHIRMHMGGQIPNTPLPEGFQDAMDSELAYDDKNAETLSSYDDDMDENSMEDDAELKDAATDPAKPLLSYAGSCPPSPPSVISSIAALENQMKMIDSVMSCQQLTGLKSVENGSGESDRLSNDSSSAVGDLESRSAGSPALSESSSSQALSPAPSNGESFRSKSPGLGAPEEPQEIPLKTERPDSPAAAPGSGGAPGRAGIKEEAPFSLLFLSRERGPSQSTPSLISSAAPTMIKMEVNGHGKAMALGEGPPLPAGVQVPAGPQTVMGPGLAPMLAPPPRRTPKQHNCQSCGKTFSSASALQIHERTHTGEKPFGCTICGRAFTTKGNLKVHMGTHMWNNAPARRGRRLSVENPMALLGGDALKFSEMFQKDLAARAMNVDPSFWNQYAAAITNGLAMKNNEISVIQNGGIPQLPVSLGGSALPPLGSMASGMDKARTGSSPPIVSLDKASSETAASRPFTRFIEDNKEIGIN

SEQ ID NO: 48310 - protein, 343 aa, Homo sapiens
MSPCPPQQSRNRVIQLSTSELGEMELTWQEIMSITELQGLNAPSEPSFEPQAPAPYLGPPPPTTYCPCSIHPDSGFPLPPPPYELPASTSHVPDPPYSYGNMAIPVSKPLSLSGLLSEPLQDPLALLDIGLPAGPPKPQEDPESDSGLSLNYSDAESLELEGTEAGRRRSEYVEMYPVEYPYSLMPNSLAHSNYTLPAAETPLALEPSSGPVRAKPTARGEAGSRDERRALAMKIPFPTDKIVNLPVDDFNELLARYPLTESQLALVRDIRRRGKNKVAAQNCRKRKLETIVQLERELERLTNERERLLRARGEADRTLEVMRQQLTELYRDIFQHLRDESGN

SEQ ID NO: 48311 - protein, 309 aa, Homo sapiens
MEEENATLLTEFVLTGFLHQPDCKIPLFLAFLVIYLITIMGNLGLIVLIWKDPHLHIPMYLFLGSLAFVDASLSSTVTPKMLINFLAKSKMISLSECMVQFFSLVTTVTTECFLLATMAYDRYVAICKALLYPVIMTNELCIQLLVLSFIGGLLHALIHEAFSFRLTFCNSNIIQHFYCDIIPLLKISCTDSSINFLMVFIFAGSVQVFTIGTILISYTIILFTILEKKSIKGIRKAVSTCGAHLLSVSLYYGPLTFKYLGSASPQADDQDMMESLFYTVIVPLLNPMIYSLRNKQVIASFTKMFKSNV

SEQ ID NO: 48312 - protein, 799 aa, Homo sapiens
MVKLANPLYTEWILEAIQKIKKQKQRPSEERICHAVSTSHGLDKKTVSEQLELSVQDGSVLKVTNKGLASYKDPDNPGRFSSVKPGTFPKSAKGSRGSCNDLRNVDWNKLLRRAIEGLEEPNGSSLKNIEKYLRSQSDLTSTTNNPAFQQRLRLGAKRAVNNGRLLKDGPQYRVNYGSLDGKGAPQYPSAFPSSLPPVSLLPHEKDQPRADPIPICSFCLGTKESNREKKPEELLSCADCGSSGHPSCLKFCPELTTNVKALRWQCIECKTCSACRVQGRNADNMLFCDSCDRGFHMECCDPPLSRMPKGMWICQVCRPKKKGRKLLHEKAAQIKRRYAKPIGRPKNKLKQRLLSVTSDEGSMNAFTGRGSPDTEIKINIKQESADVNVIGNKDVVTEEDLDVFKQAQELSWEKIECESGVEDCGRYPSVIEFGKYEIQTWYSSPYPQEYARLPKLYLCEFCLKYMKSKNILLRHSKKCGWFHPPANEIYRRKDLSVFEVDGNMSKIYCQNLCLLAKLFLDHKTLYYDVEPFLFYVLTKNDEKGCHLVGYFSKEKLCQQKYNVSCIMIMPQHQRQGFGRFLIDFSYLLSRREGQAGSPEKPLSDLGRLSYLAYWKSVILEYLYHHHERHISIKAISRATGMCPHDIATTLQHLHMIDKRDGRFVIIRREKLILSHMEKLKTCSRANELDPDSLRWTPILISNAAVSEEEREAEKEAERLMEQASCWEKEEQEILSTRANSRQSPAKVQSKNKYLHSPESRPVTGERGQLLELSKESSEEEEEEEDEEEEEEEEEEEEDE

SEQ ID NO: 48313 - protein, 1105 aa, Homo sapiens
MAAMAPALTDAAAEAHHIRFKLAPPSSTLSPGSAENNGNANILIAANGTKRKAIAAEDPSLDFRNNPTKEDLGKLQPLVASYLCSDVTSVPSKESLKLQGVFSKQTVLKSHPLLSQSYELRAELLGRQPVLEFSLENLRTMNTSGQTALPQAPVNGLAKKLTKSSTHSDHDNSTSLNGGKRALTSSALHGGEMGGSESGDLKGGMTNCTLPHRSLDVEHTTLYSNNSTANKSSVNSMEQPALQGSSRLSPGTDSSSNLGGVKLEGKKSPLSSILFSALDSDTRITALLRRQADIESRARRLQKRLQVVQAKQVERHIQHQLGGFLEKTLSKLPNLESLRPRSQLMLTRKAEAALRKAASETTTSEGLSNFLKSNSISEELERFTASGIANLRCSEQAFDSDVTDSSSGGESDIEEEELTRADPEQRHVPLRRRSEWKWAADRAAIVSRWNWLQAHVSDLEYRIRQQTDIYKQIRANKGLIVLGEVPPPEHTTDLFLPLSSEVKTDHGTDKLIESVSQPLENHGAPIIGHISESLSTKSCGALRPVNGVINTLQPVLADHIPGDSSDAEEQLHKKQRLNLVSSSSDGTCVAARTRPVLSCKKRRLVRPNSIVPLSKKVHRNSTIRPGCDVNPSCALCGSGSINTMPPEIHYEAPLLERLSQLDSCVHPVLAFPDDVPTSLHFQSMLKSQWQNKPFDKIKPPKKLSLKHRAPMPGSLPDSARKDRHKLVSSFLTTAKLSHHQTRPDRTHRQHLDDVGAVPMVERVTAPKAERLLNPPPPVHDPNHSKMRLRDHSSERSEVLKHHTDMSSSSYLAATHHPPHSPLVRQLSTSSDSPAPASSSSQVTASTSQQPVRRRRGESSFDINNIVIPMSVAATTRVEKLQYKEILTPSWREVDLQSLKGSPDEENEEIEDLSDAAFAALHAKCEEMERARWLWTTSVPPQRRGSRSYRSSDGRTTPQLGSANPSTPQPASPDVSSSHSLSEYSHGQSPRSPISPELHSAPLTPVARDTLRHLASEDTRCSTPELGLDEQSVQPWERRTFPLAHSPQAECEDQLDAQERAARCTRRTSGSKTGRETEAAPTSPPIVPLKSRHLVAAATAQRPTHR

SEQ ID NO: 48314 - protein, 891 aa, Homo sapiens
MSYFGEHFWGEKNHGFEVLYHSVKQGPISTKELADFIRERATIEETYSKAMAKLSKLASNGTPMGTFAPLWEVFRVSSDKLALCHLELTRKLQDLIKDVLRYGEEQLKTHKKCKEEVVSTLDAVQVLSGVSQLLPKSRENYLNRCMDQERLRRESTSQKEMDKAETKTKKAAESLRRSVEKYNSARADFEQKMLDSALRFQAMEETHLRHMKALLGSYAHSVEDTHVQIGQVHEEFKQNIENVSVEMLLRKFAESKGTGREKPGPLDFEAYSAAALQEAMKRLRGAKAFRLPGLSRREREPEPPAAVDFLEPDSGTCPEVDEEGFTVRPDVTQNSTAEPSRFSSSDSDFDDEEPRKFYVHIKPAPARAPACSPEAAAAQLRATAGSLILPPGPGGTMKRHSSRDAAGKPQRPRSAPRTSSCAERLQSEEQVSKNLFGPPLESAFDHEDFTGSSSLGFTSSPSPFSSSSPENVEDSGLDSPSHAAPGPSPDSWVPRPGTPQSPPSCRAPPPEARGIRAPPLPDSPQPLASSPGPWGLEALAGGDLMPAPADPTAREGLAAPPRRLRSRKVSCPLTRSNGDLSRSLSPSPLGSSAASTALERPSFLSQTGHGVSRGPSPVVLGSQDALPIATAFTEYVHAYFRGHSPSCLARVTGELTMTFPAGIVRVFSGTPPPPVLSFRLVHTTAIEHFQPNADLLFSDPSQSDPETKDFWLNMAALTEALQRQAEQNPTASYYNVVLLRYQFSRPGPQSVPLQLSAHWQCGATLTQVSVEYGYRPGATAVPTPLTNVQILLPVGEPVTNVRLQPAATWNLEEKRLTWRLPDVSEAGGSGRLSASWEPLSGPSTPSPVAAQFTSEGTTLSGVDLELVGSGYRMSLVKRRFATAAPPQGCTW

SEQ ID NO: 48315 - protein, 69 aa, Homo sapiens
MRPAAGAARRPRCCTSWLTRCPSPAASAPTWTRPLSCASPSATCACTASAPQGSGTRWEQGENHWMPAT

SEQ ID NO: 48316 - protein, 286 aa, Homo sapiens
  MOD_RES (1)..(1): Any amino acid
XRPGPRGCSAPAARRPGPRRRRSSFPPLYSSGLVECEDQDPLNPDRSFDVESVKKEIQRGRKLKCKFCHKRGATVGCDLKNCNKNYHFFCAKKDDAVPQSDGVRGIYKLLCQQHAQFPIIAQSAKFSGVKRKRGRKKPLSGNHVQPPETMKCNTFIRQVKEEHGRHTDATVKVPFLKKCKEAGLLNYLLEEILDKVHSIPEKLMDETTSESDYEEIGSALFDCRLFEDTFVNFQAAIEKKIHASQQRWQQLKEEIELLQDLKQTLCSFQENRDLMSSSTSISSLSY

SEQ ID NO: 48317 - protein, 347 aa, Homo sapiens
MDVIARQNFTEPTAIQAQGWPVALSGLDMVGVAQTGSGKTLSYLLPAIVHINHQPFLERGDGPICLVLAPTRELAQQVQQVAAEYCRACRLKSTCIYGGAPKGPQIRDLERGVEICIATPGRLIDFLECGKTNLRRTTYLVLDEADRMLDMGFEPQIRKIVDQIRPDRQTLMWSATWPKEVRQLAEDFLKDYIHINIGALELSANHNILQIVDVCHDVEKDEKLIRLMEEIMSEKENKTIVFVETKRRCDELTRKMRRDGWPAMGIHGDKSQQERDWVLNEFKHGKAPILIATDVASRGLARTFLGIQLSNFLFLVWLLWCAKLRTLLFCHTATPYRCGRCEICHQL

SEQ ID NO: 48318 - protein, 391 aa, Homo sapiens
MLELQYHNEDLEKDKTSQNCLGRGMEQVAKKLGVAHEEIQRLTDELQVKEKEQCKLDSALKKAQLEIDKLKENLVKLKENDAADLQKAKEQNQRLDEEILALRNRVRSLDSEKKVLGEMVERLKGEVCESQENKQLGNHSPGKTVGGEQREQHPSSGEKLKYNQQGEVQQLHQNLHRLQILCNSAENELRYERGQNLDLKQHNSLLQEENIKIKIELKHAQQKLLDSTKMCSSLTAEYKHCQQKIKELELEVLKHTQSIKSQNNLQEKLVQEKSKVADAEEKILDLQRKLEHAHKVCLTDTCISEKQQLEEKIKEATQNEAKVKQQYQEEQQKRKLLYQNVDELHRQVRTLQDKENLLEMTCSQQQSRIQQQEALLKQLENEKRKYDEVRK

SEQ ID NO: 48319 - protein, 156 aa, Homo sapiens
MLPSASRERPGYRAGVAAPDLLDPKSAAQNSKPRLSFSTKPTVLASRVESDTTINVMKWKTVSTIFLVVVLYLIIGATVFKALEQPHEISQRTTIVIQKQTFISQHSCVNSTELDELIQDLETSHHAQKAAKYSVSSMPYWEFPSLVFSWLELEIS

SEQ ID NO: 48320 - protein, 354 aa, Homo sapiens
MAALTIATGTGNWFSALALGVTLLKCLLIPTYHSTDFEVHRNWLAITHSLPISQWYYEATSEWTLDYPPFFAWFEYILSHVAKYFDQEMLNVHNLNYSSSRTLLFQRFSVIFMDVLFVYAVRECCKCIDGKKVGKELTEKPKFILSVLLLWNFGLLIVDHIHFQYNGFLFGLMLLSIARLFQKRHMEGAFLFAVLLHFKHIYLYVAPAYGVYLLRSYCFTANKPDGSIRWKSFSFVRVISLGLVVFLVSALSLGPFLALNQLPQVFSRLFPFKRGLCHAYWAPNFWALYNALDKVLSVIGLKLKFLDPNNIPKASMTSGLVQQFQHTVLPSVTPLATLICTLIAILGPEAFSDV

SEQ ID NO: 48321 - protein, 190 aa, Homo sapiens
MPLEVVVELQIRAISCPGVFLPGKQDVYLGVYLMNQYLETNSFPSAFPIMIQESMRFEKVFESAVDPGAVVDLLEMWDELAYYEENTRDFLFPEPKLTPSHPRRCREVLMKTALGFPGIAPKIEFSTRTAIRECVFLHRNRFLGWGNKGKMLVQQEHRSLKKKLNRNGTQTSGEGLLSWMLLQEFEGRKT

SEQ ID NO: 48322 - protein, 122 aa, Homo sapiens
MPRSSRSPGDPGALLEDVAHNPRPRRIAQRGRNTSRMAEDTSPNMNDNILLPVRNNDQALGLTQCMLGCVYASCCARSSWRRQAFCSSVLSVCPRALPSPRWRYPWALALIIGHWARHCTAT

SEQ ID NO: 48323 - protein, 25 aa, Homo sapiens
MIHTNLKKKFSCCVLVFLLFAVICV

SEQ ID NO: 48324 - protein, 75 aa, Homo sapiens
MGDPGSEIIESVPPAGPEASESTTDENEDDIQFVSEGPLRPVLEYIDLVSSDDEEPSTSYTDVPYTTGFFCSRTT

SEQ ID NO: 48325 - protein, 307 aa, Homo sapiens
MLNTTSVTEFLLLGVTDIQELQPFLFVVFLTIYFISVTGNGAVLMIFISDPRLHSPMYFFLGNLSYLDICYSTVTLPKMLQNFLSTHKAISFLGCISQLHFFHFLGSTESMLLAVMAFDRSVAICKPLRYTVIMNPQLCTQMAITIWVIGFFHALLHSIMTSRLNFCGSNRIHHFLCDIKPLLKLACGNTELNQWLLSTVTGTIAMGPFFLTLLSYFYIITYLFFKTRSCSMLCKALSTCASHFMVVILFYAPVLFTYIHPALESFMDQDRIVAIMYTVVTPVLNPLIYTLRNKEVKGALGRVIRRL

SEQ ID NO: 48326 - protein, 819 aa, Homo sapiens
GMLDGPSAMTRFCNLIASEPDIAKVPLCIDSSNFAVIEAGLKCCQGKCIVNSISLKEGEATETDTKIRVCTRAYHLLVKKLGFNPNDIIFDPNILTIGTGMEEHNLYAINFIHATKVIKETLPGARISGGLSNLSFSFRGMEAIREAMHGVFLYHAIKSGMDMGIVNAGNLPVYDDIHKELLQLCEDLIWNKDPEATEKLLRYAQTQGTGGKKVIQTDEWRNGPVEERLEYALVKGIEKHIIEDTEEARLNQKKYPRPLNIIEGPLMNGMKIVGDLFGAGKMFLPQVIKSARVMKKAVGHLIPFMEKEREETRVLNGTVEEEDPYQGTIVLATVKGDVHDIGKNIVGVVLGCNNFRVIDLGVMTPCDKILKAALDHKADIIGLSGLITPSLDEMIFVAKEMERLAIRIPLLIGGATTSKTHTAVKIAPRYSAPVIHVLDASKSVVVCSQLLDENLKDEYFEEIMEEYEDIRQDHYESLKERRYLPLSQARKSGFQMDWLSEPHPVKPTFIGTQVFEDYDLQKLVDYIDWKPFFDVWQLRGKYPNRGFPKIFNDKTVGGEARKVYDDAHNMLNTLISQKKLRARGVVGFWPAQSIQDDIHLYAEAAVPQAAEPIATFYGLRQQAEKDSASTEPYYCLSDFIAPLHSGIRDYLGLFAVACFGVEELSKAYEDDGDDYSSIMVKALGDRLAEAFAEELHERVRRELWAYCGSEQLDVADLRRLRYKGIRPAPGYPSQPDHTEKLTMWRLADIEQSTGIRLTESLAMAPASAVSGLYFSNLKSKYFAVGKISKDQVEDYALRKNISVAEVEKWLGPILGYDTD

SEQ ID NO: 48327 - protein, 916 aa, Homo sapiens
VLLEHRTIDVNLEGENGNTAVIIACTTNNSEALQILLKKGAKPCKSNKWGCFPIHQAAFSGSKECMEIILRFGEEHGYSRQLHINFMNNGKATPLHLAVQNGDLEMIKMCLDNGAQIDPVEKGRCTAIHFAATQGATEIVKLMISSYSGSVDIVNTTDGCHETMLHRASLFDHHELADYLISVGADINKIDSEGRSPLILATASASWNIVNLLLSKGAQVDIKDNFGRNFLHLTVQQPYGLKNLRPEFMQMQQIKELVMDEDNDGCTPLHYACRQGGPGSVNNLLGFNVSIHSKSKDKKSPLHFAASYGRINTCQRLLQDISDTRLLNEGDLHGMTPLHLAAKNGHDKVVQLLLKKGALFLSDHNGWTALHHASMGGYTQTMKVILDTNLKCTDRLDEDGNTALHFAAREGHAKAVALLLSHNADIVLNKQQASFLHLALHNKRKEVVLTIIRSKRWDECLKIFSHNSPGNKCPITEMIEYLPECMKVLLDFCMLHSTEDKSCRDYYIEYNFKYLQCPLEFTKKTPTQDVIYEPLTALNAMVQNNRIELLNHPVCKEYLLMKWLAYGFRAHMMNLGSYCLGLIPMTILVVNIKPGMAFNSTGIINETSDHSEILDTTNSYLIKTCMILVFLSSIFGYCKEAGQIFQQKRNYFMDISNVLEWIIYTTGIIFVLPLFVEIPAHLQWQCGAIAVYFYWMNFLLYLQRFENCGIFIVMLEVILKTLLRSTVVFIFLLLAFGLSFYILLNLQDPFSSPLLSIIQTFSMMLGDINYRESFLEPYLRNELAHPVLSFAQLVSFTIFVPIVLMNLLIGLAVGDIAEVQKHASLKRIAMQVELHTSLEKKLPLWFLRKVDQKSTIVYPNKPRSGGMLFHIFCFLFCTGEIRQEIPNADKSLEMEILKQKYRKTTCAFVLTLIPVG

SEQ ID NO: 48328 - protein, 312 aa, Homo sapiens
  MOD_RES (1)..(1): Any amino acid
XFLKKYCNPKKIQGLELQQIKTYGRQILEVLKFLHDKGFPYGHLHASNVMLDGDTCRLLDLENSLLGLPSFYRSYFSQFRKINTLESVDVHCFGHLLYEMTYGRPPDSVPVDSFPPAPSMAVVAVLESTLSCEACKNGMPTISRLLQMPLFSDVLLTTSEKPQFKIPTKLKEALRIAKECIEKRLIEEQKQIHQHRRLTRAQSHHGSEEERKKRKILARKKSKRSALENSEEHSAKYSNSNNSGISALPPPPPPPPPPAAPLPPASTEAPAQLSSQAVNGMSRGALLSSIQNFQKGTLRKAKTCDHSAPKIG

SEQ ID NO: 48329 - protein, 237 aa, Homo sapiens
MDGKCKEIAEELFTRSLAESELRSAPYEFPEESPIEQLEERRQRLERQISQDVKLEPDILLRAKQDFLKTDSDSDLQLYKEQGEGQGDRSLRERDVLEREFQRVTISGEEKCGVPFTDLLDAAKSVVRALFIREKYMALSLQSFCPTTRRYLQQLAEKPLETRTYEQGPDTPVSADAPVHPPALEQHPYEHCEPSTMPGDLGLGLRMVRGVVHVYTRREPDEHSPPCQLLRGGAAIP

SEQ ID NO: 48330 - protein, 260 aa, Homo sapiens
MSLADELLADLEEAAEEEEGGSYGEEEEEPAIEDVQEETQLDLSGDSVKTIAKLWDSKMFAEIMMKIEEYISKQAKASEVMGPVEAAPEYRVIVDANNLTVEIENELNIIHKFIRDKYSKRFPELESLVPNALDYIRTVKELGNSLDKCKNNENLQQILTNATIMVVSVTASTTQGQQLSEEELERLEEACDMALELNASKHRIYEYVESRMSFIAPNLSIIIGASTAAKIMGVAGGLTNLSKMPACNIMLLGAQRKTLS

SEQ ID NO: 48331 - protein, 39 aa, Homo sapiens
MALLCYNRGCGQRFDPETNSDDACTYHPGVPVFHDALKS

SEQ ID NO: 48332 - protein, 514 aa, Homo sapiens
MNRWTLFISLKRRHFNSRLSSSTRLGSLTLKPEDSTVLLFEADTITLRQTITTFGSLKTIQIPEHLMAHASSANIGPFLEKRGCISMPEQKSASGIVAVPFSEWLLGSKPASGYQAPYIPSTDPQDWLTQKQTLENSQTSSRACNFFNNVGGNLKGLENWLLKSEKSSYQKCNSHSTTSSFSIEMEKVGDQELPDQDEMDLSDWLVTPQESHKLRKPENGSRETSEKFKLLFQSYNVNDWLVKTDSCTNCQGNQPKGVEIENLGNLKCLNDHLEAKKPLSTPSMVTEDWLVQNHQDPCKVEEVCRANEPCTSFAECVCDENCEKEALYKWLLKKEGKDKNGMPVEPKPEPEKHKDSLNMWLCPRKEVIEQTKAPKAMTPSRIADSFQVIKNSPLSEWLIRPPYKEGSPKEVPGTEDRAGKQKFKSPMNTSWCSFNTADWVLPGKKMGNLSQLSSGEDKWLLRKKAQEVLLNSPLQEEHNFPPDHYGLPAVCDLFACMQLKVDKEKWLYRTPLQM

SEQ ID NO: 48333 - protein, 1076 aa, Homo sapiens
MGEIEQRPTPGSRLGAPENSGISTLERGQKPPPTPSGKLVSIKIQMLDDTQEAFEVPQRAPGKVLLDAVCNHLNLVEGDYFGLEFPDHKKITVWLDLLKPIVKQIRRPKHVVVKFVVKFFPPDHTQLQEELTRYLFALQVKQDLAQGRLTCNDTSAALLISHIVQSEIGDFDEALDREHLAKNKYIPQQDALEDKIVEFHHNHIGQTPAESDFQLLEIARRLEMYGIRLHPAKDREGTKINLAVANTGILVFQGFTKINAFNWAKVRKLSFKRKRFLIKLRPDANSAYQDTLEFLMASRDFCKSFWKICVEHHAFFRLFEEPKPKPKPVLFSRGSSFRFSGRTQKQVLDYVKEGGHKKVQFERKHSKIHSIRSLASQPTELNSEVLEQSQQSTSLTFGEGAESPGGQSCRRGKEPKVSAGEPGSHPSPAPRRSPAGNKQADGAASAPTEEEEEVVKDRTQQSKPQPPQPSTGSLTGSPHLSELSVNSQGGVAPANVTLSPNLSPDTKQASPLISPLLNDQACPRTDDEDEGRRKRFPTDKAYFIAKEVSTTERTYLKDLEVITSWFQSTVSKEDAMPEALKSLIFPNFEPLHKFHTNFLKEIEQRLALWEGRSNAQIRDYQRIGDVMLKNIQGMKHLAAHLWKHSEALEALENGIKSSRRLENFCRDFELQKVCYLPLNTFLLRPLHRLMHYKQVLERLCKHHPPSHADFRDCRAALAEITEMVAQLHGTMIKMENFQKLHELKKDLIGIDNLVVPGRPGSFSLIRTPHLGQARRIPCAPERRPLLLVKEFIRLGSLSKLSGKGLQQRMFFLFNDVLLYTSRGLTASNQFKVHGQLPLYGMTIEESEDEWGVPHCLTLRGQRQSIIVAASSRSEMEKWVEDIQMAIDLAEKSSSPAPEFLASSPPDNKSPDEATAADQESEDDLSASRTSLERQAPHRGNTMVHVCWHRNTSVSMVDFSIAVENQLSGNLLRKFKNSNGWQKLWVVFTNFCLFFYKSHQDNHPLASLPLLGYSLTIPSESENIQKDYVFKLHFKSHVYYFRAESEYTFERWMEVIRSATSSASRPHVLSHKESLVY

SEQ ID NO: 48334 - protein, 362 aa, Homo sapiens
MRMESRRQATVSWDSGGSDEAPPKPSRPGYPSPRSSEGFYPSPQHMVQTNHYQVSGYPGSHGITAMAGSIYPGQASLLDQTDSWNHRPQEIAMWQPNVEDSTVLDLRGIGQVLPTHLMEERLIRQQQEMEEDQRWLEKEERFLKPDVRLSRGSIDREDGSLQGPIGNQHIYQPVGKPDPAAPPKKPPRPGAPGHLGSLASLSSPADSYNEGVKLQPQEISPPPTANLDRSNDKVYENVTGLVKAVIEMSSKIQPAPPEEYVPMVKEVGLALRTLLATVDETIPLLPASTHREIEMAQKLLNSDLGELINKMKLAQQYVMTSLQQEYKKQMLTAAHALAVDAKNLLDVIDQARLKMLGQTRPH

SEQ ID NO: 48335 - protein, 155 aa, Homo sapiens
MKITRQKHAKKHLGFFRNNFGVREPYQILLDGTFCQAALRGRIQLREQLPRYLMGETQLCTTRCVLKELETLGKDLYGAKLIAQKCQVRNCPHFKNAVSGSECLLSMVEEGNPHHYFVATQWISASLLMLTVHHLMQSERCHLFSSAAKVSQVTH

SEQ ID NO: 48336 - protein, 211 aa, Homo sapiens
MATISSARCSLASSSPPTCLKGWHQDALITSATATSYSTSVQCWAPTSSWRQCWLIWDHAEPGWPHRNLPWAWQAQWPHWSWLQLGTYSLLLLSQPPCFGPPVHALCCRVAHWRGVPRPNNSEAPSLTLSWRGQRPGPSADEEPRFGPNQVGTHLSLEPTGAEERGHRREGREEEGCLGGLAECERDREGALDGSGRSAEGLRGEMHACPG

SEQ ID NO: 48337 - protein, 371 aa, Homo sapiens
MAKNTWPILKGFQEGPLNFAPTFKFDVGTNKYDTSAKKRKPAWTDRILWKVKAPGGGPSPSGRKSHRLQVTQHSYRSHMEYTVSDHKPVAAQFLLQFAFRDDMPLVRLEVADEWVRPEQAVVRYRMETVFARSSWDWIGLYRVGFRHCKDYVAYVWAKHEDVDGNTYQVTFSEESLPKGHGDFILGYYSHNHSILIGITEPFQISLPSSELASSSTDSSGTSSEGEDDSTLELLAPKSRSPSPGKSKRHRSRSPGLARFPGLALRPSSRERRGASRSPSPQSRRLSRVAPDRSSNGSSRGSSEEGPSGLPGPWAFPPAVPRSLGLLPALRLETVDPGGGGSWGPDREALAPNSLSPSPQGHRGLEEGGLGP

SEQ ID NO: 48338 - protein, 123 aa, Homo sapiens
MAGHLASDFAFSPPPGGGGDGPGGPEPGWVDPRTWLSFQGPPGGPGIGPGVGPGSEVWGIPPCPPPYEFCGGMAYCGPQVGVGLVPQGGLETSQPEGEAGVGVETPMGPPRSPAPSPLPLSGS

SEQ ID NO: 48339 - protein, 127 aa, Homo sapiens
MLRGSRLRKIRSRTWHKERLYRLQEDGLSVWFQRRIPRAPSQHIFFVQHIEAVREGHQSEGLRRFGGAFAPARCLTIAFKGRRKNLDLAAPTAEEAQRWVRGLTKLRARLDAMSQRERLDHWIHSYL

SEQ ID NO: 48340 - protein, 189 aa, Homo sapiens
MPITRMRMRPWLEMQINSNQIPGLIWINKEEMIFQIPWKHAAKHGWDINKDACLFRSWAIHTDIEEVKDQSRNKGSSAVRVYRMLPPLTKNQRKERKSKSSRDAKSKAKRKSCGDSSPDTFSDGLSSSTLPDDHSSYTVPGYMQDLEVEQALTPALSPCAVSSTLPDWHIPVEVVPDSTSDLYNFQVSP

SEQ ID NO: 48341 - protein, 888 aa, Homo sapiens
MGLPEPGPLRLLALLLLLLLLLLLQLQHLAAAAADPLLGGQGPAKDCEKDQFQCRNERCIPSVWRCDEDDDCLDHSDEDDCPKKTCADSDFTCDNGHCIHERWKCDGEEECPDGSDESEATCTKQVCPAEKLSCGPTSHKCVPASWRCDGEKDCEGGADEAGCATLCAPHEFQCGNRSCLAAVFVCDGDDDCGDGSDERGCADPACGPREFRCGGDGGGACIPERWVCDRQFDCEDRSDEAAELCGRPGPGATSAPAACATASQFACRSGECVHLGWRCDGDRDCKDKSDEADCPLGTCRGDEFQCGDGTCVLAIKHCNQEQDCPDGSDEAGCLQGLNECLHNNGGCSHICTDLKIGFECTCPAGFQLLDQKTCGDIDECKDPDACSQICVNYKGYFKCECYPGYEMDLLTKNCKAAAGKSPSLIFTNRHEVRRIDLVKRNYSRLIPMLKNVVALDVEVATNRIYWCDLSYRKIYSAYMDKASDPKEQEVLIDEQLHSPEGLAVDWVHKHIYWTDSGNKTISVATVDGGRRRTLFSRNLSEPRAIAVDPLRGFMYWSDWGDQAKIEKSGLNGVDRQTLVSDNIEWPNGITLDLLSQRLYWVDSKLHQLSSIDFSGGNRKTLISSTDFLSHPFGIAVFEDKVFWTDLENEAIFSANRLNGLEISILAENLNNPHDIVIFHELKQPRAPDACELSVQPNGGCEYLCLPAPQISSHSPKYTCACPDTMWLGPDMKRCYRDANEDSKMGSTVTAAVIGIIVPIVVIALLCMSGYLIWRNWKRKNTKSMNFDNPVYRKTTEEEDEDELHIGRTAQIGHVYPAAISSFDRPLWAEPCLGETREPEDPAPALKELFVLPGEPRSQLHQLPKNPLSELPVVKSKRVALSLEDDGLP

SEQ ID NO: 48342 - protein, 237 aa, Homo sapiens
MRSPAVPTPARGQLGVAFVLLPPHSEGARVFGALGPIGPSSPGLTLGGLAVSEHRLSNKLLAWSGVLEWQEKRRPYSDSTAKLKRTLPCQAYVNQGENLETDQWPQKLIMQLIPQQLLTTLGPLFRNSQLAQFHFTNRDCDSLKGLCRIMGNGFAGCMLFPHISPCEVRVLMLLYSSKKKIFMGLIPYDQSGFVSAIRQVITTRKQAVGPGGVNSGPVQIVNNKFLAWSGVMEWQEA

SEQ ID NO: 48343 - protein, 164 aa, Homo sapiens
MAATLANGGFCPITGERVLSPEAVRNTLSLMHSCGMYDFSGQFAFHVGLPAKSGVAGGILLVVPNVMGMMCWSPPLDKMGNSVKGIHFCHDLVSLCNFHNYDNLRHFAKKLDPRREGGDQRVKSVINLLFAAYTGDVSALRRFALSAMDMEQRDYDSRTALHVA

SEQ ID NO: 48344 - protein, 200 aa, Homo sapiens
  MOD_RES (1)..(1): Any amino acid
XTTVHRSTYQNHSTETPSLTAAVPSSVSVPRAPSISPSTLSPATSNHSQHYANEDSKMGSTVTAAVIGIIVPIVVIALLCMSGYLIWRNWKRKNTKSMNFDNPVYRKTTEEEDEDELHIGRTAQIGHVYPAAISSFDRPLWAEPCLGETREPEDPAPALKELFVLPGEPRSQLHQLPKNPLSELPVVKSKMRKLRLIEIE

SEQ ID NO: 48345 - protein, 863 aa, Homo sapiens [sequence omitted]

SEQ ID NO: 48346 - protein, 173 aa, Homo sapiens
MSDKSELKAELERKKQRLAQIREEKKRKEEERKKKETDQKKEAVAPVQEESDLEKKRREAEALLQSMGLTPESPIAEQPLRVVTADTCLFHYLVPPPMSPSSKSVSTPSEAGSQDSGDGAVGSRRGPIKLGMAKITQVDFPPREIVTYTKETQTPVMAQPKEDEEEDDDVVAP

SEQ ID NO: 48347 - protein, 172 aa, Homo sapiens
MEGPVLTLGLLAALAVCGSWGLNEEERLIRHLFQEKGYNKELRPVAHKEESVDVALALTLSNLISLGWTDNRLKWNAEEFGNISVLRLPPDMVWLPEIVLENNNDGSFQISYSCNVLVYHYGFVYWLPPAIFRSSCPISVTYFPFDWQNCSLKFSSLKYTAKEITLSLKQDA

SEQ ID NO: 48348 - protein, 237 aa, Homo sapiens
TKDGKTLRGSARCQLSHEGHRAQLLITGATLQDSGRYKCEAGGACSSSIVRVHARPVRFQEALKDLEVLEGGAATLRCVLSSVAAPVKWCYGNNVLRPGDKYSLRQEGAMLELVVRNLRPQDSGRYSCSFGDQTTSATLTVTALPAQFIGKLRNKEATEGATATLRCELSKAAPVEWRKGSETLRDGDRYCLRQDGAMCELQIRGLAMVDAAEYSCVCGEERTSASLTIRRKTVYPE

SEQ ID NO: 48349 - protein, 45 aa, Homo sapiens
MFRAAAPGQLRRARRGFPMLPRLVSNSCPQVIHLPRPPKVLELQA

SEQ ID NO: 48350 - protein, 255 aa, Homo sapiens
MHQKIAREMNLSETAFIRKLHPTDNFAQSSCFGLRWFTPASEVPLCGHATLASAAVLFHKIKNMNSTLTFVTLSGELRARRAEDGIVLDLPLYPAHPQDFHEVEDLIKTAIGNTLVQDICYSPDTQKLLVRLSDVYNRSFLENLKVNTENLLQVENTGKVKGLILTLKGEPGGQTQAFDFYSRYFAPWVGVAEDPVTGSAHAVLSSYWSQHLGKKEMHAFQCSHRGGELGISLRPDGRVDIRGGAAVVLEGTLTA

SEQ ID NO: 48351 - protein, 230 aa, Homo sapiens
MDVGFQGRCSRWSRALRGRYSSAERKRRARQPREPREQAPRVSAPPGRLPAFFPQFALLPQSGPRLILCTCEWAHTSSPGTILSSISLGESTFLTINLLATAGKVAGCEWGGEGRFTRSEAPKLAASAKRLCFLRFLTNKWGGMLAWPPAAPARALGSLSSLMPSFRRSPAALTPGLLRPLAKVCSPMDAGRGLSLSALTQLRLKPQSSHLLPPVYPPAPLPPPKDVPLQ

SEQ ID NO: 48352 - protein, 540 aa, Homo sapiens
MNSHSYNGSVGRPLGSGPGALGRDPPDPEAGHPPQPPHSPGLQVVVAKSEPARPSPGSPRGQPQDQDDDEDDEEDEAGRQRASGKPSNVGHRLGHRRALFEKRKRLSDYALIFGMFGIVVMVTETELSWGVYTKESLYSFALKCLISLSTAILLGLVVLYHAREIQLFMVDNGADDWRIAMTCERVFLISLELAVCAIHPVPGHYRFTWTARLAFTYAPSVAEADVDVLLSIPMFLRLYLLGRVMLLHSKIFTDASSRSIGALNKITFNTRFVMKTLMTICPGTVLLVFSISSWIIAAWTVRVCERYHDKQEVTSNFLGAMWLISITFLSIGYGDMVPHTYCGKGVCLLTGIMGAGCTALVVAVVARKLELTKAEKHVHNFMMDTQLTKRVKNAAANVLRETWLIYKHTRLVKKPDQARVRKHQRKFLQAIHQLRSVKIEQGKLNDQANTLTDLAKTQTVMYDLVSELHAQHEELEARLATLESRLDALGASLQALPGLIAQAIRPPPPPLPPRPGPGPQDQAARSSPCRWTPVAPSDCG

SEQ ID NO: 48353 - protein, 211 aa, Homo sapiens
MRTKQTMHGILERSKFCKDMTVKYDSRLRERKYGVVEGKALSELRAMAKAAREECPVFTPPGGETLDQVKMRGIDFFEFLCQLILKEADQKEQFSQGSPSNCLETSLAEIFPLGKNHSSKVNSDSGIPGLAASVLVVSHGAYMRSLFDYFLTDLKCSLPATLSRSELMSVTPNTGMSLFIINFEEGREVKPTVQCICMNLQDHLNGLTETR

SEQ ID NO: 48354 - protein, 184 aa, Homo sapiens
  MOD_RES (1)..(1): Any amino acid
XERVSISAPSSDKPLIKDLSLKISEGQSLLITGNTGTGKTSLLRVLGGLWTSTRGSVQMLTDFGPHGVLFLPQKPFFTDGTLREQVIYPLKEVYPDSGSADDERILRFLELAGLVSGERDPQDPSPPGSTSYSPTWWQGQRAWTSRWTGTGMMFCPRGRCNGSPLPDSSTCSRSTQCLMKPPVP

SEQ ID NO: 48355 - protein, 232 aa, Homo sapiens
  MOD_RES (1)..(1): Any amino acid
XFQVPWLESVLIVVSNNIDEEALARLAQEGSEVNVIGIGTSVVTCPQQPSLGGVYKLVAVGGQPRMKLTEDPEKQTLPGSKAAFRLLGSDGSPLMDMLQLAEEPVPQAGQELRVWPPGAQEPCTVRPAQLCEPLPSLAESRALAQLSLSRLSPEHRRLRSPAQYQVGGRPTLSFCPVRPRPHPAHRSCPLLPAGGAVREAAGPGEQSVCGAVPLRLGAGLTGNNTNHSLFPT

SEQ ID NO: 48356 - protein, 244 aa, Homo sapiens
  MOD_RES (1)..(1): Any amino acid
XSNCQMRTLDSGIGTFPLPDSGNRSTGRYLCQPDSPEDAEPLLPLQSALSAVSSMRAQTLEREVPSSTDGQRPADSAIVHSTSDPIMTARGMRPLQSRLPKPASSGKVSSQKQNEAEPRPQTCSSFGYAEDPMASQPLPDWGSEVAATGTQKLRQLEETKDDPENRLSKISLESFNKFNSNTVILLEKEKNSLNKVEGQKEEKEKNEETSLSSSDRPGVDNLESLSDSLYDSFSSCASQGSNDV

SEQ ID NO: 48357 - protein, 330 aa, Homo sapiens
MPVPWFLLSLALGRSPVVLSLERLVGPQDATHCSPGLSCRLWDSDILCLPGDIVPAPGPVLAPTHLQTELVLRCQKETDCDLCLRVAVHLAVHASLQAQVVLSFQAYPTARCVLLEVQVPAALVQFGQSVGSVVYDCFEAALGSEVRIWSYTQPRYEKELNHTQQLPALPWLNVSADGDNVHLVLNVSEEQHFGLSLYWNQVQGPPKPRWHKNLTGPQIITLNHTDLVPCLCIQVWPLEPDSVRTNICPFREDPRAHQNLWQAARLQLLTLQSWLLDAPCSLPAEAALCWRAPGGDPCQPLVPPLSWENVTVDKVLEFPLLKGHPNLCVQ

SEQ ID NO: 48358 - protein, 324 aa, Homo sapiens
MGTLSAPPCTQRIKWKGLLLTASLLNFWNLPTTAQVTIEAEPTKVSEGKDVLLLVHNLPQNLTGYIWYKGQMRDLYHYITSYVVDGEIIIYGPAYSGRETAYSNASLLIQNVTREDAGSYTLHIIKGDDGTRGVTGRFTFTLHPKLPKPYITINNLNPRENKDVLNFTCEPKSENYTYIWWLNGQSLPVSPRVKRPIENRILILPSVTRNETGPYQCEIRDRYGGIRSDPVTLNVLYGPDLPRIYPSFTYYRSGEVLYLSCSADSNPPAQYSWTINEKFQLPGQKLFIRHITTKHSGLYVCSVRNSATGKESSKSMTVEVSEAL

SEQ ID NO: 48359 - protein, 57 aa, Homo sapiens
MRQNPTETLRRVLPKVREALHVAGVEMQLTAAMSFLTILQDESVSIHAYTHSFLQVI

SEQ ID NO: 48360 - protein, 168 aa, Homo sapiens
MTKTSTCIYHFLVLSWYTFLNYYISQEGKDEVKPKILANGARWKYMTLLNLLLQTIFYGVTCLDDVLKRTKGGKDIKFLTAFRDLLFTTLAFPVSTFVFLAFWILFLYNRDLIYPKVLDTVIPVWLNHAMHTFIFPITLAEVVLRPHSYPSKKTGLTLLAAASIAYIS

SEQ ID NO: 48361 - protein, 50 aa, Homo sapiens
MARPGMERWRDRLALVTGASGGIGAAVARALVQQGLKVVGCARTVGNIEM

SEQ ID NO: 48362 - protein, 170 aa, Homo sapiens
MNCRELPLTLWVLISVSTAESCTSRPHITVVEGEPFYLKHCSCSLAHEIETTTKSWYKSSGSQEHVELNPRSSSRIALHDCVLEFWPVELNDTGSYFFQMKNYTQKWKLNVIRRNKHSCFTERQVTSKIVEVKKFFQITCENSYYQTLVNSTSLYKIGPPICRKTSSGLH

SEQ ID NO: 48363 - protein, 342 aa, Homo sapiens
METPSQRRATRSGAQASSTPLSPTRITRLQEKEDLQELNDRLAVYIDRVRSLETENAGLRLRITESEEVVSREVSGIKAAYEAELGDARKTLDSVAKERARLQLELSKVREEFKELKARNTKKEGDLIAAQARLKDLEALLNSKEAALSTALSEKRTLEGELHDLRGQVAKLEAALGEAKKQLQDEMLRRVDAENRLQTMKEELDFQKNIYSEELRETKRRHETRLVEIDNGKQREFESRLADALQELRAQHEDQVEQYKKELEKTYSAKLDNARQSAERNSNLVGAAHEELQQSRIRIDSLSAQLSQLQKQGPWELTKPSHPPSAGSQGGEASRPGGLTGP

SEQ ID NO: 48364 - protein, 98 aa, Homo sapiens
MEPPNPLGEQYFKRTMPRIPTLKNLEDLVTEYHGNFSAWSGVSKGLAESLQPDYSERLCLVSEIPPKGGALGEGPGASPCNQHSPYWAPPCYTLKPET

SEQ ID NO: 48365 - protein, 155 aa, Homo sapiens
MAICQFFLQGRCRFGDRCWNEHPGARGAGGGRQQPQQQPSGNNRRGWNTTSQRYSNVIQPSSFSKSTPWGGSRDQEKPYFSSFDSGASTNRKEGFGLSENPFASLSPDEQKDEKKLLEGIVKDMEVWESSGQWMFSVYSPVKKKPNISVPKPFLG

SEQ ID NO: 48366 - protein, 234 aa, Homo sapiens; identical to SEQ ID NO: 9374

SEQ ID NO: 48367 - protein, 922 aa, Homo sapiens
MDRQMILSRSSVMGVRGLQGFVGSTCPHICTVVNFKELAEHHRSKYPGCTPTIVVDAMCCLRYWYTPESWICGGQWREYFSALRDFVKTFTAAGIKLIFFFDGMVEQDKRDEWVKRRLKNNREISRIFHYIKSHKEQPGRNMFFIPSGLAVFTRFALKTLGQETLCSLQEADYEVASYGLQHNCLGILGEDTDYLIYDTCPYFSISELCLESLDTVMLCREKLCESLGLCVADLPLLACLLGNDIIPEGMFESFRYKCLSSYTSVKENFDKKGNIILAVSDHISKVLYLYQGEKKLEEILPLGPNKALFYKGMASYLLPGQKSPWFFQKPKGVITLDKQVISTSSDAESREEVPMCSDAESRQEVPMCTGPESRREVPVYTDSEPRQEVPMCSDPEPRQEVPTCTGPESRREVPMCSDPEPRQEVPMCTGPEARQEVPMYTDSEPRQEVPMYTDSEPRQEVPMYTGSEPRQEVPMYTGPESRQEVPMYTGPESRQEVLIRTDPESRQEIMCTGHESKQEVPICTDPISKQEDSMCTHAEINQKLPVATDFEFKLEALMCTNPEIKQEDPTNVGPEVKQQVTMVSDTEILKVARTHHVQAESYLVYNIMSSGEIECSNTLEDELDQALPSQAFIYRPIRQRVYSLLLEDCQDVTSTCLAVKEWFVYPGNPLRHPDLVRPLQMTIPGGTPSLKILWLNQEPEIQVRRLDTLLACFNLSSSREELQAVESPFQALCCLLIYLFVQVDTLCLEDLHAFIAQALCLQGKSTSQLVNLQPDYINPRAVQLGSLLVRGLTTLVLVNSACGFPWKTSDFMPWNVFDGKLFHQKYLQSEKGYAVEVLLEQNRSRLTKFHNLKAVVCKACMKENRRITGRAHWGSHHAGRWGRQGSSYHRTGSGYSRSSQGQPWRDQGPGSRQYEHDQWRRY

SEQ ID NO: 48368 - protein, 535 aa, Homo sapiens
MDSTLTASEIRQRFIDFFKRNEHTYVHSSATIPLDDPTLLFANAGMNQFKPIFLNTIDPSHPMAKLSRAANTQKCIRAGGKHNDLDDVGKDVYHHTFFEMLGSWSFGDYFKELACKMALELLTQEFGIPIERLYVTYFGGDEAAGLEADLECKQIWQNLGLDDTKILPGNMKDNFWEMGDTGPCGPCSEIHYDRIGGRDAAHLVNQDDPNVLEIWNLVFIQYNREADGILKPLPKKSIDTGMGLERLVSVLQNKMSNYDTDLFVPYFEAIQKGTGARPYTGKVGAEDADGIDMAYRVLADHARTITVALADGGRPDNTGRGYVLRRILRRAVRYAHEKLNASRGFFATLVDVVVQSLGDAFPELKKDPDMVKDIINEEEVQFLKTLSRGRRILDRKIQSLGDSKTIPGDTAWLLYDTYGFPVDLTGLIAEEKGLVVDMDGFEEERKLAQLKSQGKGAGGEDLIMLDIYAIEELRARGLEVTDDSPKYNYHLDSSGSYGRRCSWKRCPQARSVEWCWTRPVSMLSKEARSMTKATW

SEQ ID NO: 48369 - protein, 326 aa, Homo sapiens
MSENDNVFCAQLQCFHFPTLRHHDLHSWHAESCYEKSSFLCKRSQTCVDIKDNVVDEGFYFTPKGDDPCLSCTCHGGEPEMCVAALCERPQGCQQYRKDPKECCKFMCLDPDGNSLFDSMASGMRLVVSCISSFLILSLLLFMVHRLRQRRRERIESLIGANLHHFNLGRRIPGFDYGPDGFGTGLTPLHLSDDGEGGTFHFHDPPPPYTAYKYPDIGQPDDPPPPYEASIHPDSVFYDPADDDAFEPVEVSLPAPGDGGSEGALLRRLEQPLPTAGASLADLEDSADSSSALLVPPDPAQSGSTPAAEALPGGGRHSRSSLNTVV

SEQ ID NO: 48370 - protein, 202 aa, Homo sapiens
MGAGALAICQSKAAVRLKEDMKKIVAVPLNEQKDFTYQKLFGVSLQELERQGLTENGIPAVVWNIVEYLTQHGLTQEGLFRVNGNVKVVEQLRLKFESGVPVELGKDGDVCSAASLLKLFLRELPDSLITSALQPRFIQLFQDGRNDVQESSLRDLIKELPDTHYCLLKYLCQFLTKVAKHHVQNRMNVHNLATVFGPNCFQ

SEQ ID NO: 48371 - protein, 758 aa, Homo sapiens
MLENSLGPFPLFLQQVQSDTAQNYTIYYSIRGPGVDQEPRNLFYVERDTGNLYCTRPVDREQYESFEIIAFATTPDGYTPELPLPLIIKIEDENDNYPIFTEETYTFTIFENCRVGTTVGQVCATDKDEPDTMHTRLKYSIIGQVPPSPTLFSMHPTTGVITTTSSQLDRELIDKYQLKIKVQDMDGQYFGLQTTSTCIINIDDVNDHLPTFTRTSYVTSVEENTVDVEILRVTVEDKDLVNTANWRANYTILKGNENGNFKIVTDAKTNEGVLCVVKPLNYEEKQQMILQIGVVNEAPFSREASPRSAMSTATVTVNVEDQDEGPECNPPIQTVRMKENAEVGTTSNGYKAYDPETRSSSGIRYKKLTDPTGWVTIDENTGSIKVFRSLDREAETIKNGIYNITVLASDQGGRTCTGTLGIILQDVNDNSPFIPKKTVIICKPTMSSAEIVAVDPDEPIHGPPFDFSLESSTSEVQRMWRLKAINDTAARLSYQNDPPFGSYVVPITVRDRLGMSSVTSLDVTLCDCITENDCTHRVDPRIGGGGVQLGKWAILAILLGIALLFCILFTLVCGASGTSKQPKVIPDDLAQQNLIVSNTEAPGDDKVYSANGFTTQTVGASAQGVCGTVGSGIKNGGQETIEMVKGGHQTSESCRGAGHHHTLDSCRGGHTEVDNCRYTYSEWHSFTQPRLGEKVYLCNQDENHKHAQDYVLTYNYEGRGSVAGSVGCCSERQEEDGLEFLDNLEPKFRTLAEACMKR

SEQ ID NO: 48372 - protein, 122 aa, Homo sapiens
MTSPHFSSYDEGPLDVSMAATNLENQLHSAQKNLLFLQREHASTLKGLHSEIRRLQQHCTDLTYELTVKSSEQTGDGTSKSSELKKRCEELEAQLKVKENENAELLKELEQKNAMITVLENT

SEQ ID NO: 48373 - protein, 431 aa, Homo sapiens
MPLSTAGILSSSSAASNRSRNKARYRTKAVSSEVDESLFGDIKSPAQGQSDSPIVLLRDKHTLQKTLTALGLDRKPETIQLITRDMVRELIVPTEDPSGESLIISPEEFERIKWASHVLTREELEARDQAFKKEKEATMDAVMTRKKIMKQKEMVWNNNKKLSDLEEVAKERAQNLLQRANKLRMEQEEELKDMSKIILNAKCHAIRDAQILEKQQIQKELDTEEKRLDQMMEVERQKSIQRQEELERKRREERIRGRRQIVEQMEKNQEERSLLAEQREQEKEQMLEYMEQLQEEDLKDMERRQQQKLKMQAEIKRINDENQKQKAELLAQEKLADQMVMEFTKKKMAREAEFEAEQERIRREKEKEIARLRAMQEKAQDYQAEQLFCALTGPLPTFPGCLAGQAQPGGCRQRVAQKGKGKCAEEDGNRG

SEQ ID NO: 48374 - protein, 89 aa, Homo sapiens
MMVQRLGLISPPASQVSTACNQISPSLQRAMNAANLNIPPSDTRSLISRESLASTTLSLTESQSASSMKQEWSQGYRALPSLSNHGSQN

SEQ ID NO: 48375 - protein, 763 aa, Homo sapiens
MPIKESDIPRPKHTPISYVLGPVRLPLSVKYPHPEYFTAQFSRHRQELFLIEDQATFFPSSSRNRIVYYILSRCPFGIEDGKKRFGIERLLNSNTYSSAYPLHDGQYWKPSEPPNPTNERYTLHQNWARFSYFYKEQPLDLIKNYYGEKIGIYFVFLGFYTEMLFFAAVVGLACFIYGLLSMEHNTSSTEICDPEIGGQMIMCPLCDQVCDYWRLNSTCLASKFSHLFDNESTVFFAIFMGIWVTLFLEFWKQRQARLEYEWDLVDFEEEQQQLQLRPEFEAMCKHRKLNAVTKEMEPYMPLYTRIPWYFLSGATVTLWMSLVVTSMVAVIVYRLSVFATFASFMESDASLKQVKSFLTPQITTSLTGSCLNFIVILILNFFYEKISAWITKMEIPRTYQEYESSLTLKMFLFQFVNFYSSCFYVAFFKGKFVGYPGKYTYLFNEWRSEECDPGGCLIELTTQLTIIMTGKQIFGNIKEAIYPLALNWWRRRKARTNSEKLYSRWEQDHDLESFGPLGLFYEYLETVTQFGFVTLFVASFPLAPLLALINNIVEIRVDAWKLTTQYRRTVASKAHSIGVWQDILYGMAVLSVATNAFIVAFTSDIIPRLVYYYAYSTNATQPMTGYVNNSLSVFLIADFPNHTAPSEKRDFITCRYRDYRYPPDDENKYFHNMQFWHVLAAKMTFIIVMEHVVFLVKFLLAWMIPDVPKDVVERIKREKLMTIKILHDFELNKLKENLGINSNEFAKHVMIEENKAQLAKSTL

SEQ ID NO: 48376 - protein, 80 aa, Homo sapiens
MGKSESQMDITDINTPKPKKKQRWTPLEISLSVLVLLLTIIAVTMIALYATYDDGICKSSDCIKSGMVARAYNPRGRRIA

SEQ ID NO: 48377 - protein, 90 aa, Homo sapiens
MAGRHQNRSFPLPGVQSSGQVHAFGNCSDSDILEEDAEVYELRSRGKEKVRRSTSRDRLDDIIVLTKDIQEGDTLNAIALQYCCTCSISQ

SEQ ID NO: 48378 - protein, 333 aa, Homo sapiens
MGTRKKVHAFVRVKPTDDFAHEMIRYGDDKRSIDIHLKKDIRRGVVNNQQTDWSFKLDGVLHDASQDLVYETVAKDVVSQALDGYNGTIMCYGQTGAGKTYTMMGATENYKHRGILPRALQQVFRMIEERPTHAITVRVSYLEIYNESLFDLLSTLPYVGPSVTPMTIVENPQGVFIKGLSVHLTSQEEDAFSLLFEGETNRIIASHTMNKNSSRSHCIFTIYLEAHSRTLSEEKYITSKINLVDLAGSERLGKSGSEGQVLKEATYINKSLSFLEQAIIALGDQKRDHIPFRQCKLTHALKDSLGGNCNMVLVTNIYGEAAQLEETGSRLWL

SEQ ID NO: 48379 - protein, 110 aa, Homo sapiens
MAAAALRDPAQVPVAADLLTDHEEQGYVTFEDVAVYFSQEEWRLLDDAQRLLYRNVMLENFTLLASLGLASSKTHEITQLESWEEPFMPAWEVVTSAIPRGSWWVELREV

SEQ ID NO: 48380 - protein, 400 aa, Homo sapiens
MSLHAWEWEEDPASIEPISSITSFYQSTSECDVEEHLKAKARAQESDSDRPCSSIESSSEPASTFSSDVPHVVPCKFTISLAFPVNMGQKGKYASLIEKYKKHPKTDSSVTKMRRFYHIEYFLLPDDEEPKKVDILLFPMVAKVFLESGVKTVKPWHEGDKAWVSWEQTFNITVTKELLKKINFHKITLRLWNTKDKMSRKVRYYRLKTAGFTDDVGAFHKSEVRHLVLNQRKLSEQGIENTNIVREESNQEHPPGKQEKTEKHPKSLQGSHQAEPETSSKNSEEYEKSLKMDDSSTIQWSVSRTPTISLAGASMMEIKELIESESLSSLTNILDRQRSQIKGKDSEGRRKIQRRHKKPLAEEEADPTLTGPRKQSAFSIQLAVMPLLAVRKKKGNSPIS

SEQ ID NO: 48381 - protein, 46 aa, Homo sapiens
MEEVLKMICHWELKPTTSMKVMLKLKTAIISWPKREDYSFIRKGEV

SEQ ID NO: 48382 - protein, 1504 aa, Homo sapiens
MWVAKWLTGLLYHLSLFITRSWEVDFHPRQEALVRTLTSYEVVIPERVNEFGEVFPQSHHFSRQKRSSEALEPMPFRTHYRFTAYGQLFQLNLTADASFLAAGYTEVHLGTPERGAWESDAGPSDLRHCFYRGQVNSQEDYKAVVSLCGGLTGTFKGQNGEYFLEPIMKADGNEYEDGHNKPHLIYRQDLNNSFLQTLKYCSVSESQIKETSLPFHTYSNMNEDLNVMKERVLGHTSKNVPLKDERRHSRKKRLISYPRYIEIMVTADAKVVSAHGSNLQNYILTLMSIVATIYKDPSIGNLIHIVVVKLVMIHREEEGPVINFDGATTLKNFCSWQQTQNDLDDVHPSHHDTAVLITREDICSSKEKCNMLGLSYLGTICDPLQSCFINEEKGLISAFTIAHELGHTLGVQHDDNPRCKEMKVTKYHVMAPALSFHMSPWSWSNCSRKYVTEFLDTGYGECLLDKPDEEIYNLPSELPGSRYDGNKQCELAFGPGSQMCPHINICMHLWCTSTEKLHKGCFTQHVPPADGTDCGPGMHCRHGLCVNKETETRPVNGEWGPWEPYSSCSRTCGGGIESATRRCNRPEPRNGGNYCVGRRMKFRSCNTDSCPKGTQDFREKQCSDFNGKHLDISGIPSNVRWLPRYSGIGTKDRCKLYCQVAGTNYFYLLKDMVEDGTPCGTETHDICVQGQCMAAGCDHVLNSSAKIDKCGVCGGDNSSCKTITGVFNSSHYGYNVVVKIPAGATNVDIRQYSYSGQPDDSYLALSDAEGNFLFNGNFLLSTSKKEINVQGTRTVIEYSGSNNAVERINSTNRQEKELILQVLCVGNLYNPDVHYSFNIPLEERSDMFTWDPYGPWEGCTKMCQGLQRRNITCIHKSDHSVVSDKECDHLPLPSFVTQSCNTDCELRWHVIGKSECSSQCGQGYRTLDIHCMKYSIHEGQTVQVDDHYCGDQLKPPTQELCHGNCVFTRWHYSEWSQCSRSCGGGERSRESYCMNNFGHRLADNECQELSRVTRENCNEFSCPSWAASEWSECLVTCGKGTKQRQVWCQLNVDHLSDGFCNSSTKPESLSPCELHTCASWQVGPWGPCTTTCGHGYQMRDVKCVNELASAVLEDTECHEASRPSDRQSCVLTPCSFISKLETALLPTVLIKKMAQWRHGSWTPCSVSCGRGTQARYVSCRDALDRIADESYCAHLPRPAEIWDCFTPCGEWQAGDWSPCSASCGHGKTTRQVLCMNYHQPIDENYCDPEVRPLMEQECSLAACPPAHSHFPSSPVQPSYYLSTNLPLTQKLEDNENQVVHPSVRGNQWRTGPWGSCSSSCSGGLQHRAVVCQDENGQSASYCDAASKPPELQQCGPGPCPQWNYGNWGECSQTCGGGIKSRLVICQFPNGQILEDHNCEIVNKPPSVIQCHMHACPADVSWHQEPWTSEDLKVKLLPQRTIILWELMKNIFCHGKHSHMYLINVVTDHLLYPRHCDPETIETYFLSLWSLQFTWGDLKYYKNSL

SEQ ID NO: 48383 - protein, 267 aa, Homo sapiens
MKLEFLQRKFWAATRQDLDCFVIDNNGFILISKRSRETGRFLGEVDGAVLTQLLSMGVFSQVTMYDYQAMCKPSSHHHSAAQPLVSPISAFLTATRWLLQELVLFLLEWSVWGSWYDRGAEAKSVFHHSHKHKKQDPLQPCDTEYPVFVYQPAIREANGIVECGPCQKVFVVQQIPNSNLLLLVTDPTCDCSIFPPVLQEATEVKYNASVKCDRMRSQKLRRRPDSCHAFHPEENAQDCGGASDTSASPPLLLLPVCAWGLLPQLLR

SEQ ID NO: 48384 - protein, 265 aa, Homo sapiens
MVTLTYFGAHFAVIRRASLEKNPYQAVHQWAFSAGLSLVGLLTLGAVLSAAATVREAQGLMAGVEDAMLDTYDLVYEQAMKGTSHVRRQELAAIQDVFLCCGKKSPFSRLGSTEADLCQGEEAAREDCLQGIRSFLRTHQQVASSLTSIGLALTVSALLFSSFLWFAIRCGCSLDRKGKYTLTPRACGRQPQEPSLLRCSQGGPTHCLHSEAVAIGPRGCSGSLRWLQESDAAPLPLSCHLAAHRALQGRSRGGLSGCPERGLSD

SEQ ID NO: 48385 - protein, 169 aa, Homo sapiens
MAIVEAASCGLQVVSTRVGGIPEVLPENLIILCEPSVKSLCEGLEKAIFQLKSGTLPAPENIHNIVKTFYTWRNVAERTEKVYDRVSVEAVLPMDKRLDRLISHCGPVTGYIFALLAVFNFLFLIFLRWMTPDSIIDVAIDATGPRGAWTNNYSHSKRGGENNEISETR

SEQ ID NO: 48386 - protein, 422 aa, Homo sapiens
MTFLIVTVAWAAHTRLFQVVGKTDDTLALLNLACMMTITFLPYTFSLMVTFPDVPLGIFLFCVCVIAIGVVQALIVGYAFHFPHLLSPQIQRSAHRALYRRHVLGIVLQGPALCFAAAIFSLFFVPLSYLLMVTVILLPYVSKVTGWCRDRLLGHREPSAHPVEVFSFDLHEPLSKERVEAFSDGVYAIVATLLILDICEDNVPDPKDVKERFSGSLVAALSATGPRFLAYFGSFATVGLLWFAHHSLFLHVRKATRAMGLLNTLSLAFVGGLPLAYQQTSAFARQPRDELERVRVSCTIIFLASIFQLAMWTTALLHQAETLQPSVWFGGREHVLMFAKLALYPCASLLAFASTCLLSRFSVGIFHLMQIAVPCAFLLLRLLVGLALATLRVLRGLARPEHPPPAPTGQDDPQSQLLPAPC

SEQ ID NO: 48387 - protein, 46 aa, Homo sapiens
MAEQATKSVLFVCLGKIFYCCGNYSLCGKKVTFVDHPLQKQFSGNL

SEQ ID NO: 48388 - protein, 802 aa, Homo sapiens
MPILKNLGVSDPKVPRAGTLPLRSSRNPFEEVSGLEEEEAGELGSLPNGTSCRRRATLEKLAGLAPFRLGWAPGRRAGSPGDGQPRSFLGRVLVPGIRRSSADFGLLARLHGTRAHGDEEAAGEAARRLAFLRLGRGSKPQRASLAERVVPAGEAAPEPPPKVPEPPKMKEPLSVLEILSLIQQRELARADEHILELEAEELAPSRGGAPGPPKAEGAGGGRRARDVALLYEALQRELWALVRETLAGPGPGACAGAGAVAQLGQVLVQEEAADGRRGPGAARKLRARWAEAVARAARERLEAAAPGAPGGLAGQLEALRARLLEDMAVVRGRLAPAYPAGLGAFGVYLRGYHGALAEWLGASARRRLPLADRYALLHWHNQVYPREVLGLVDMAALENGELGPLLSPGTLRGLEDECVTDVKAQTRAALLRVLQEDEEHWGSLEDQPSSLAQDVCELLEEHTERAPRISQEFGERMAHCCLGGLAEFLQSFQQRVERFHENPAVREMLPDTYISKTIALVNCGPPLRALAERLARVGPPESEPAREASASALDHVTRLCHRVVANLLFQELQPHFNKLMRRKWLSSPEALDGIVGTLGAQALALRRMQDEPYQALVAELHRRALVEYVRPLLRGRLRCSSARTRSRVAGRLREDAAQLQRLFRRLESQASWLDAVVPHLAEVMQLEDTPSIQVEVGVLVRDYPDIRQKHVAALLDIRGLRNTAARQEILAVARDLELSEEGALSPPRDRAFFADIPVPRPSFCLSLPLFLGRLPLSRLARPSLACLPRPRPPSLARPRAQR

SEQ ID NO: 48389 - protein, 66 aa, Homo sapiens
MPHLENVVLCRESQVSILQSLFGERHHFSFPSIFIYGHTASGKTYVTQTLLKTLEGLRQALRICCL

SEQ ID NO: 48390 - protein, 210 aa, Homo sapiens
MNILAPVRRDRVLAELPQCLRKEAALHGHKDFHPRVTCACQEHRTGTVGFKISKVIVVGDLSVGKTCLINRFCKDTFDKNYKATIGVDFEMERFEVLGIPFSLQLWDTAGQERFKCIASTYYRGAQAIIIVFNLNDVASLEHTKQWLADALKENDPSSVLLFLVGSKKDLSTPAQYALMEKDALQVAQEMKAEYWAVSSLTGENVREFFF

SEQ ID NO: 48391 - protein, 144 aa, Homo sapiens
MAAPPQLRALLVVVNALLRKRRYHAALAVLKGFRNGAVYGAKIRAPHALVMTFLFRNGRGTCVCAASRRSCGPYCRPHISTPGTWHGLCSPTRVSVPCSPTYKARPTQHTHSWRPSSGVSWCLEKTITSTARSTCTCCHASCLP

SEQ ID NO: 48392 - protein, 326 aa, Homo sapiens
MAVMAPRTLLLLLLGALALTQTWAGSHSMRYFFTSVSRPGRGEPRFIAVGYVDDTQFVRFDSDAASQRMEPRAPWIEQEGPEYWDQETRNVKAHSQTDRESLRIALRYYNQSEAGSHTIQMMYGCDVGPDGRLLRGYQQDAYDGKDYIALNEDLRSWTAADMAAQITQRKWEAARVAEQLRAYLEGTCVEWLRRYLENGKETLQRTDAPKTHMTHHAVSDHEATLRCWALSFYPAEITLTWQRDGEDQTQDTELVETRPAGDGTFQKWASVVVPSGQEQRYTCHVQHEGLPKPLTLRWDRKGGSYSQAASSDSAQGSDMSLTACKV

SEQ ID NO: 48393 - protein, 96 aa, Homo sapiens
MRTDSGARLEEGHLRPPRALPPVPSQDDIPLSRPKKKKPRTKNTPASASLEGLAQTAGRRPSEGNEPSTKELKEHPEAPVQRRQKKTRLPLENGVS

SEQ ID NO: 48394 - protein, 935 aa, Homo sapiens
MELRVLLCWASLAAALEETLLNTKLETADLKWVTFPQVDGQWEELSGLDEEQHSVRTYEVCDVQRAPGQAHWLRTGWVPRRGAVHVYATLRFTMLECLSLPRAGRSCKETFTVFYYESDADTATALTPAWMENPYIKVDTVAAEHLTRKRPGAEATGKVNVKTLRLGPLSKAGFYLAFQDQGACMALLSLHLFYKKCAQLTVNLTRFPETVPRELVVPVAGSCVVDAVPAPGPSPSLYCREDGQWAEQPVTGCSCAPGFEAAEGNTKCRACAQGTFKPLSGEGSCQPCPANSHSNTIGSAVCQCRVGYFRARTDPRGAPCTTPPSAPRSVVSRLNGSSLHLEWSAPLESGGREDLTYALRCRECRPGGSCAPCGGDLTFDPGPRDLVEPWVVVRGLRPDFTYTFEVTALNGVSSLATGPVPFEPVNVTTDREVPPAVSDIRVTRSSPSSLSLAWAVPRAPSGAVLDYEVKYHEKGAEGPSSVRFLKTSENRAELRGLKRGASYLVQVRARSEAGYGPFGQEHHSQTQLDESEGWREQLALIAGTAVVGVVLVLVVIVVAVLCLRKQSNGREAEYSDKHGQYLIGHGTKVYIDPFTYEDPNEAVREFAKEIDVSYVKIEEVIGAGEFGEVCRGRLKAPGKKESCVAIKTLKGGYTERQRREFLSEASIMGQFEHPNIIRLEGVVTNSMPVMILTEFMENGALDSFLRLNDGQFTVIQLVGMLRGIASGMRYLAEMSYVHRDLAARNILVNSNLVCKVSDFGLSRFLEENSSDPTYTSSLGGKIPIRWTAPEAIAFRKFTSASDAWSYGIVMWEVMSFGERPYWDMSNQDVINAIEQDYRLPPPPDCPTSLHQLMLDCWQKDRNARPRFPQVVSALDKMIRNPASLKIVARENGGDLLRIGVTLAGHQKKILASVQHMKSQAKPGTPGGTGGPAPQY

SEQ ID NO: 48395 - protein, 229 aa, Homo sapiens
MAISGVPVLGFFIIAVLMSAQESWAIKEEHVIIQAEFYLNPDQSGEFMFDFDGDEIFHVDMAKKETVWRLEEFGRFASFEAQGALANIAVDKANLEIMTKRSNYTPITNDKFTPPVVNVTWLRNGKPVTTGVSETVFLPREDHLFRKFHYLPFLPSTEDVYDCRVEHWGLDEPLLKHWEFDAPSPLPETTENVVCALGLTVGLVGIIIGTIFIIKGLRKSNAAERRGPL

SEQ ID NO: 48396 - protein, 799 aa, Homo sapiens
MKMADRSGKIIPGQVYIEVEYDYEYEAKDRKIVIKQGERYILVKKTNDDWWQVKPDENSKAFYVPAQYVKEVTRKALMPPVKQVAGLPNNSTKIMQSLHLQRSTENVNKLPELSSFGKPSSSVQGTGLIRDANQNFGPSYNQGQTVNLSLDLTHNNGKFNNDSHSPKVSSQNRTRSFGHFPGPEFLDVEKTSFSQEQSCDSAGEGSERIHQDSESGDELSSSSTEQIRATTPPNQGRPDSPVYANLQELKISQSALPPLPGSPAIQINGEWETHKDSSGRCYYYNRGTQERTWKPPRWTRDASISKGDFQNPGDQEWLKHVDDQGRQYYYSADGSRSEWELPKYNASSQQQREIIKSRSLDRRLQEPIVLTKWRHSTIVLDTNDKESPTASKPCFPENESSPSSPKHQDTASSPKDQEKYGLLNVTKIAENGKKVRKNWLSSWAVLQGSSLLFTKTQGSSTSWFGSNQSKPEFTVDLKGATIEMASKDKSSKKNVFELKTRQGTELLIQSDNDTVINDWFKVLSSTINNQAVETDEGIEEEIPDSPGIEKHDKEKEQKDPKKLRSFKVSSIDSSEQKKTKKNLKKFLTRRPTLQAVREKGYIKDQVFGSNLANLCQRENGTVPKFVKLCIEHVEEHGLDIDGIYRVSGNLAVIQKLRFAVNHDEKLDLNDSKWEDIHVITGALKMFFRELPEPLFTFNHFNDFVNAIKQEPRQRVAAVKDLIRQLPKPNQDTMQILFRHLRRVIENGEKNRMTYQSIAIVFGPTLLKPEKETGNIAVHTVYQNQIVELILLELSSIFGR

SEQ ID NO: 48397 - protein, 580 aa, Homo sapiens
MDILPRISHEVLLPVLSFLTSLVTGFPSGAQARTILCVKTISLIALICLRIGQEMVQQHLSEPVATFFQVFSQLHELRQQDLKLDPAGRGEGQLPQVVFSDGQQRPVDPALLDELQKVFTLEMAYTIYVPFSCLLGDIIRKIIPNHELVGELAALYLESISPSSRNPASVEPTMPGTGPEWDPHGGGCPQDDGHSGTFGSVLVGNRIQIPNDSRPENPGPLGPISGVGGGGLGSGSDDNALKQELPRSVHGLSGNWLAYWQYEIGVSQQDAHFHFHQIRLQSFPGHSGAVKCVAPLSSEDFFLSGSKDRTVRLWPLYNYGDGTSETAPRLVYTQHRKSVFFVGQLEAPQHVVSCDGAVHVWDPFTGKTLRTVEPLDSRVPLTAVAVMPAPHTSITMASSDSTLRFVDCRKPGLQHEFRLGGGLNPGLVRALAISPSGRSVVAGFSSGFMVLLDTRTGLVLRGWPAHEGDILQIKAVEGSVLVSSSSDHSLTVWKELEQKPTHHYKSASDPIHTFDLYGSEVVTGTVSNKIGVCSLLEPPSQATTKLSSENFRGTLTSLALLPTKRHLLLGSDNGVIRLLA

SEQ ID NO: 48398 - protein, 410 aa, Homo sapiens
MVNHFIAEFKRKHKKDISENKRAVRRLRTACERAKRTLSSSTQASIEIDSLYEGIDFYTSITRARFEELNADLFRGTLDPVEKALRDAKLDKSQIHDIVLVGGSTRIPKIQKLLQDFFNGKELNKSINPDEAVAYGAAVQAAILSGDKSENVQDLLLLDVTPLSLGIETAGGVMTVLIKRNTTIPTKQTQTFTTYSDNQPGVLIQVYEGERAMTKDNNLLGKFELTGIPPAPRGVPQIEVTFDIDANGILNVSAVDKSTGKENKITITNDKGRLSKEDIERMVQEAEKYKAEDEKQRDKVSSKNSLESYAFNMKATVEDEKLQGKINDEDKQKILDKCNEIINWLDKNQTAEKEEFEHQQKELEKVCNPIITKLYQSAGGMPGGMPGGFPGGGAPPSGGASSGPTIEEVD

SEQ ID NO: 48399 - protein, 729 aa, Homo sapiens
MWSWKCLLFWAVLVTATLCTARPSPTLPEQDALPSSEDDDDDDDSSSEEKETDNTKPNPVAPYWTSPEKMEKKLHAVPAAKTVKFKCPSSGTPNPTLRWLKNGKEFKPDHRIGGYKVRYATWSIIMDSVVPSDKGNYTCIVENEYGSINHTYQLDVVERSPHRPILQAGLPANKTVALGSNVEFMCKVYSDPQPHIQWLKHIEVNGSKIGPDNLPYVQILKTAGVNTTDKEMEVLHLRNVSFEDAGEYTCLAGNSIGLSHHSAWLTVLEALEERPAVMTSPLYLEIIIYCTGAFLISCMVGSVIVYKMKSGTKKSDFHSQMAVHKLAKSIPLRRQVSADSSASMNSGVLLVRPSRLSSSGTPMLAGVSEYELPEDPRWELPRDRLVLGKPLGEGCFGQVVLAEAIGLDKDKPNRVTKVAVKMLKSDATEKDLSDLISEMEMMKMIGKHKNIINLLGACTQDGPLYVIVEYASKGNLREYLQARRPPGLEYCYNPSHNPEEQLSSKDLVSCAYQVARGMEYLASKKCIHRDLAARNVLVTEDNVMKIADFGLARDIHHIDYYKKTTNGRLPVKWMAPEALFDRIYTHQSDVWSFGVLLWEIFTLGGSPYPGVPVEELFKLLKEGHRMDKPSNCTNELYMMMRDCWHAVPSQRPTFKQLVEDLDRIVALTSNQEYLDLSMPLDQYSPSFPDTRSSTCSSGEDSVFSHEPLPEEPCLPRHPAQLANGGLKRR

SEQ ID NO: 48400 - protein, 403 aa, Homo sapiens
MEEPEEPADSGQSLVPVYIYSPEYVSMCDSLAKIPKRASMVHSLIEAYALHKQMRIVKPKVASMEEMATFHTDAYLQHLQKVSQEGDDDHPDSIEYGLGYDCPATEGIFDYAAAIGGATITAAQCLIDGMCKVAINWSGGWHHAKKDEASGFCYLNDAVLGILRLRRKFERILYVDLDLHHGDGVEDAFSFTSKVMTVSLHKFSPGFFPGTGDVSDVGLGKGRYYSVNVPIQDGIQDEKYYQICESVLKEVYQAFNPKAVVLQLGADTIAGDPMCSFNMTPVGIGKCLKYILQWQLATLILGGGGYNLANTARCWTYLTGVILGKTLSSEIPDHEFFTAYGPDYVLEITPSCRPDRNEPHRIQQILNYIKEKWPVGFGAQCFYLGKCGKAKTTEGQRNLKHVV

SEQ ID NO: 48401 - protein, 103 aa, Homo sapiens
MAELIQKKLQGEVEKYQQLQKDLSKSMSGRQKLEAQLTENNIVKEELALLDGSNVVFKLLGPVLVKQELGEARATVGKRLDYITAEIFLRTIPDPGDVPDSFF

SEQ ID NO: 48402 - protein, 144 aa, Homo sapiens
MVAMAEAEAGVAVEVRGLPPAVPDELLTLYFENRRRSGGGPVLSWQRLGCGGVLTFREPADAERVLAQADHELHGAQLSLRPAPPRAPARLLLQGLPPGTTPQRLEQHVQALLRASGLPVQPCCALASPRPDRALVQLPKPLSE

SEQ ID NO: 48403 - protein, 117 aa, Homo sapiens
MPSSVSWGILLLAGLCCLVPVSLAEDPQGDAAQKTDTSHHDQDHPTFNKITPNLAEFAFSLYRQLAHQSNSTNIFFSPVSIATAFAMLSLGTKADTHDEILEGLNFNLTEIPEAQIH

SEQ ID NO: 48404 - protein, 38 aa, Homo sapiens
MPVQLSEHPEWNESMHSLRISVGGLPVLASMTKAADPR

SEQ ID NO: 48405 - protein, 113 aa, Homo sapiens
MNKIFHPNIDEASGTVCLDVINQTWTALYDLTNIFESFLPQLLAYPNPIDPLNGDAAAMYLHRPEEYKQKIKEYIQKYATEEALKEQEEGTGDSSSESSMSDFSEDEAQDMEL

SEQ ID NO: 48406 - protein, 480 aa, Homo sapiens
MPYTTYLVEKGASHSFVAEAKPPTVTMPRIKALMTGSLPGFVDVIRNLNSPALLEDSVIRQAKAAGKRIVFYGDETWVKLFPKHFVEYDGTTSFFVSDYTEVDNNVTRHLDKVLKRGDWDILILHYLGLDHIGHISGPNSPLIGQKLSEMDSVLMKIHTSLQSKERETPLPNLLVLCGDHGMSETGSHGASSTEEVNTPLILISSAFERKPGDIRHPKHVQQTDVAATLAIALGLPIPKDSVGSLLFPVVEGRPMREQLRFLHLNTVQLSKLLQENVPSYEKDPGFEQFKMSERLHGNWIRLYLEEKHSEVLFNLGSKVLRQYLDALKTLSLSLSAQVAQYDIYSMMVGTVVVLEVLTLLLLSVPQALRRKAELEVPLSSPGFSLLFYLVILVLSAVHVIVCTSAESSCYFCGLSWLAAGGVMVLASALLCVIVSVLTNVLVGGNTPRKVRTAGSWECDVVLLLRLFLLFQAAFRLPDSG

SEQ ID NO: 48407 - protein, 61 aa, Homo sapiens
DDEEEAELVPSEVLMHQAIHTIEFCLGCVSNTASYLRLWALSLAHARWNSRTSSTQARATS

SEQ ID NO: 48408 - protein, 146 aa, Homo sapiens
MANSMNGRNPGGRGGNPRKGRILGIIDAIQDAVGPPKQAAADRRTVEKTWKLMDKVVRLCQNPKLQLKNSPPYILDILPDTYQHLRLILSKYDDNQKLAQLSENEYFKIYIDSLMKKSKRAIRLFKEGKERMYEEQSQDRRNLTKL

SEQ ID NO: 48409 - protein, 180 aa, Homo sapiens
LRRRFGDVFSLQLAWTPVVVLNGLAAVREALVTHGEDTADRPPVPITQILGFGPRSQGRPFRPNGLLDKAVSNVIASLTCGRRFEYDDPRFLRLLDLAQEGLKEESGFLREVLNAVPVLLHIPALAGKVLRFQKAFLTQLDELLTEHRMTWDPAQPPRDLTEAFLAEMEKWWLTCSLPGW

SEQ ID NO: 48410 - protein, 542 aa, Homo sapiens
MGDIFLCKKVESPKKNLRESKQREEDDEDPDLIYVGVEHVHRDAEVLFVGMISNSKPVVSNILNRVTPGSNSRRKKGHFRQYPAHVSQPANHVTSMAKAIMPVSLSEGRSTDSPVTMKSSSEPGYKMSSPQVVSPSSSDSLPPGTQCLVGAMVSGGGRNESSPDSKRLSTSDINSRDSKRVKLRDGIPGVPSLAVVPSDMSSTISTNTPSQGICNSSNHVQNGVTFPWPDANGKAHFNLTDPERASESALAMTDISSLASQNKTFDPKKENPIVLLSDFYYGQHKGDGQPEQKTHTTFKCLSCVKVLKNIKFMNHMKHHLEFEKQRNDSWEDHTTCQHCHRQFPTPFQLQCHIDSVHIAMGPSAVCKICELSFETDQVLLQHMKDHHKPGEMPYVCQVCHYRSSVFADVETHFRTCHENTKNLLCLFCLKLFKTAIPYMNHCWRHSRRRVLQCSKCRLQFLTLKEEIEHKTKDHQTFKKPEQLQGLPSETKVIIQTSVQPGSSGMASVIVSNTDPQSSPVKTKKKTAMNTRDSRLPCSKDSS

SEQ ID NO: 48411 - protein, 678 aa, Homo sapiens
MADKVRRQRPRRRVCWALVAVLLADLLALSDTLAVMSVDLGSESMKVAIVKPGVPMEIVLNKESRRKTPVIVTLKENERFFGDSAASMAIKNPKATLRYFQHLLGKQADNPHVALYQARFPEHELTFDPQRQTVHFQISSQLQFSPEEVLGMVLNYSRSLAEDFAEQPIKDAVITVPVFFNQAERRAVLQAARMAGLKVLQLINDNTATALSYGVFRRKDINTTAQNIMFYDMGSGSTVCTIVTYQMVKTKEAGMQPQLQIRGVGFDRTLGGLEMELRLRERLAGLFNEQRKGQRAKDVRENPRAMAKLLREANRLKTVLSANADHMAQIEGLMDDVDFKAKVTRVEFEELCADLFERVPGPVQQALQSAEMSLDEIEQVILVGGATRVPRVQEVLLKAVGKEELGKNINADEAAAMGAVYQAAALSKAFKVKPFVVRDAVVYPILVEFTREVEEEPGIHSLKHNKRVLFSRMGPYPQRKVITFNRYSHDFNFHINYGDLGFLGPEDLRVFGSQNLTTVKLKGVGDSFKKYPDYESKGIKAHFNLDESGVLSLDRVESVFETLVEDSAEEESTLTKLGNTISSLFGGGTTPDAKENGTDTVQEEEESPAEGSKDEPGEQVELKEEAEAPVEDGSQPPPPEPKGDATPEGEKATEKENGDKSEAQKPVVCRASVTRFGF

SEQ ID NO: 48412 - protein, 120 aa, Homo sapiens
MYFDWGPGEMLVCETSFNKKEKSEMVPSCPFIYIIRKDVDVYSQILRKLFNESHGIFLGLQRIDEELTGKSRKSQLVRVSKNYRSVIRACMEEMHQVAIAAKDPANGRQFSSQVSILSAM

SEQ ID NO: 48413 - protein, 68 aa, Homo sapiens
  MOD_RES (1)..(1): Any amino acid
XLLTYSDVVGADVLDEVVTVLSDTAWDAELAVVREQRNRLCDLLGVPRPQLVPQVTLSPSQHEVPVLP

SEQ ID NO: 48414 - protein, 140 aa, Homo sapiens
MAVLWRLSAVCGALGGRALLLRTPVVRPAHISAFLQDRPIPEWCGVQHIHLSPSHHSGSKAASLHWTSERVVSVLLLGLLPAAYLNPCSAMDYSLAAALTLHGHCLQCQIVHSCPLLENQIHLSLKFPDYFIKMKPWRKI

SEQ ID NO: 48415 - protein, 108 aa, Homo sapiens
MEATRRRQHLGATGGPGAQLGASFLQARHGSVSADEAARTAPFHLDLWFYFTLQNWVLDFGRPIAMLVFPLEWFPLNKPSVGDYFHMAYNVITPFLLLKWLPAPPVCP

SEQ ID NO: 48416 - protein, 216 aa, Homo sapiens
MFIWTSGRTSSSYRHDEKRNIYQKIRDHDLLGLAMMVCSIMMYFLLGITLLRSYMQSVWTEESQCTLLNASITETFNCSFSCGPDCWKLSQYPCLQVYVNLTSSGEKLLLYHTEETIKINQKCSYIPKCGKNFEESMSLVNVVMENFRKYQHFSCYSDPEGNQKSVILTKLYSSNVLFHSLFWPTCMMAGGVAIVAMVKLTQYLSLLCERIQRINR

SEQ ID NO: 48417 - protein, 171 aa, Homo sapiens
MHAGPCSSQPDTVVPRTQRALFPSGAQARTILCVKTISLIALICLRIGQEMVQQHLSEPVATFFQVFSQLHELRQQDLKLDPAGRGEGQLPQVVFSDGQQRPVDPALLDELQKVFTLEMAYTIYVPFSCLLGDIIRKIIPNHELVGELAALYLESISPSSRNPASVEPTMP

SEQ ID NO: 48418 - protein, 281 aa, Homo sapiens
MSRISQMTAARSPPRLHMAMWSTRFATSVRTNPVQRILGGHLDAKGSFPWQAKMVSHHNLTTGATLINEQWLLTTAKNLFLNHSENATAKDIAPTLTLYVGKKQLVEIEKVVLHPNYSQVDIGLIKLKQKVSVNERVMPICLPSKDYAEVGRVGYVSGWGRNANFKFTDHLKYVMLPVADQDQCIRHYEGSTVPEKKTPKSPVGVQPILNEHTFCAGMSKYQEDTCYGDAGSAFAVHDLEEDTWYATGILSFDKSCAVAEYGVYVKVTSIQDWVQKTIAEN

SEQ ID NO: 48419 - protein, 104 aa, Homo sapiens
MLSRSRCVSRAFSRSLSAFQKGNCPLGRRSLPGVSLCQGPGYPNSRKVVINNSVFSVRFFRTTAVCKDDLVTVKTPAFAESVTEGDVRWEKDICAGSITSKWRD

SEQ ID NO: 48420 - protein, 431 aa, Homo sapiens
MSSKYPRSVRRCLPLWALTLEAALILLFYFFTHYDASLEDQKGLVASYQVGQDLTVMAAIGLGFLTSSFRRHSWSSVAFNLFMLALGVQWAILLDGFLSQFPSGKVVITLFSIRLATMSALSVLISVDAVLGKVNLAQLVVMVLVEVTALGNLRMVISNIFNTDYHMNMMHIYVFAAYFGLSVAWCLPKPLPEGTEDKDQTATIPSLSAMLGALFLWMFWPSFNSALLRSPIERKNAVFNTYYAVAVSVVTAISGSSLAHPQGKISKTYVHSAVLAGGVAVGTSCHLIPSPWLAMVLGLVAGLISVGGAKYLPGCCNRVLGIPHSSIMGYNFSLLGLLGEIIYIVLLVLDTVGAGNGMSLGWNLAVKMAEAGDEELMRLDVSQRNHGGAAVPTGSWMPSTETTIAPNYRDHISVGLASRSSSALGNSAWPS

SEQ ID NO: 48421 - protein, 53 aa, Homo sapiens
MNGGNESSGADRAGGPVATSVPIGWQRCVREGAVLYISPSGTELSSLEQTRSY

SEQ ID NO: 48422 - protein, 36 aa, Homo sapiens
MASQPPPPPKPWETRRIPGAGPGPGPGPTFHVDFGL

SEQ ID NO: 48423 - protein, 399 aa, Homo sapiens
MDFSMVAGAAAYNEKSDLEIYKAFSSEMAKRSKMLSLNNYSVPQSTREEKRENGLEARSPAINLMGFNVEEMYEAHAWIQRILSLQNHHIIENNHILYLGRKEHDILSQLQKTSSVSITEIISPGRTELEIEGARADLIEVVMNIEDMLCKVQEEMARKKERGLWRSLGQWTIQQQKTQDEMKENIIFLKCPVPPTQELLDQKKQFEKCGLQVLKVEKIDNEVLMAAFQRKKKMMEEKLHRQPVSHRLFQQVPYQFCNVVCRVGFQRMYSTPCDPKYGAGIYFTKNLKNLAEKAKKISAADKLIYVFEAEVLTGFFCQGHPLNIVPPPLSPGAIDGHDSVVDNVSSPETFVIFSGMQAIPQYLWTCTQEYVQSQDYSSGPMRPFAQHPWRGFASGSPVD

SEQ ID NO: 48424 - protein, 307 aa, Homo sapiens
MLNTTSVTEFLLLGVTDIQELQPFLFVVFLTIYFISVTGNGAVLMIFISDPRLHSPMYFFLGNLSYLDICYSTVTLPKMLQNFLSTHKAISFLGCISQLHFFHFLGSTESMLLAVMAFDRCVAICKPLRYTVIMNPQLCTQMAITIWVIGFFHALLHSIMTSRLNFCGSNRIHHFLCDIKPLLKLACGNTELNQWLLSTVTGTIAMGPFFLTLLSYFYIITYLFFKTRSCSMLCKALSTCASHFMVVILFYAPVLFTYIHPALESFMDQDRIVAIMYTVVTPVLNPLIYTLRNKEVKGALGRVIRRL

SEQ ID NO: 48425 - protein, 112 aa, Homo sapiens
MAHRKLESVGSGMLDHRVRPGPVPHSQEPESEDMELPLEGYVPEGLELAALRPESPAPEEQECHNHSPDGDSSSDYVNNTSEEEDYDEGLPEEEEGITYYIRYCPEDDSYLE

SEQ ID NO: 48426 - protein, 90 aa, Homo sapiens
MDTKEEKKERKQSYFARLKKKKQAKQNAETASAVATRTHTGKEDNNTVVLEPDKCNIAVEEEYMTDEKKKRKSNQLKEIRRTELKRYYSI

SEQ ID NO: 48427 - protein, 217 aa, Homo sapiens
MAEFDTISELEEEEEEEAATSSSSPSSSSSVSGPDDDEEDEEEEEEEEEEEEEEEEEEEEEAPPPPRVVSEEHLRRYAPDPVLVRGAGHITVFGLSNKFDTEFPSVLTGKVAPEEFKTSIGRVNACLKKALPVNVKWLLCGCLCCCCTLGCSLWPVICLNKRTRRSIQKLIEWENNRLYHKLALHWKLTKRKCETSNMMEYVILIEFLPKYPIFRPD

SEQ ID NO: 48428 - protein, 200 aa, Homo sapiens
MDDWKPSPLIKPFGARKKRSWYLTWKYKLTNQRALRRFCQTGAVLFLLVTVIVNIKLILDTRRAISEANEDPEPEQDYDEALGRLEPPRRRGSGPRRVLDVEVYSSRSKVYVAVDGTTVLEDEAREQGRGIHVIVLNQATGHVMAKRVFDTYSPHEDEAMVLFLNMVAPGRVLICTVKVLSSGRNILNHLPSLPGGTQSC

SEQ ID NO: 48429 - protein, 258 aa, Homo sapiens
MNKLRQSFRRKKDVYVPEASRPHQWQTDEEGVRTGKCSFPVKYLGHVEVDESRGMHICEDAVKRLKAERKFFKGFFGKTGKKAVKAVLWVSADGLRVVDEKTKDLIVDQTIEKVSFCAPDRNFDRAFSYICRDGTTRRWICHCFMAVKDTGERLSHAVGCAFAACLERKQKREKECGVTATFDASRTTFTREGSFRVTTATEQAEREEIMKQMQDAKKAETDKIVVGSSVAPGNTAPSPSSPTSPTSDATTSLEMNNP

SEQ ID NO: 48430 - protein, 36 aa, Homo sapiens
MDPETRGQEIIKVTPLQQMLASCTGAILTSVIDTTR

SEQ ID NO: 48431 - protein, 16 aa, Homo sapiens
  MOD_RES (1)..(1): Any amino acid
XQPPGDTRRKAKDLRT

SEQ ID NO: 48432 - protein, 901 aa, Homo sapiens
MANVSKKVSWSGRDRDDEEAAPLLRRTARPGGGTPLLNGAGPGAARQDMDPPHPFPKEIPHNEKLLSLKYESLDYDNSENQLFLEEERRINHTAFRTVEIKRWVICALIGILTGLVACFIDIVVENLAGLKYRVIKGNIDKFTEKGGLSFSLLLWATLNAAFVLVGSVIVAFIEPVAAGSGIPQIKCFLNGVKIPHVVRLKTLVIKVSGVILSVVGGLAVGKEGPMIHSGSVIAAGISQGRSTSLKRDFKIFEYFRRDTEKRDFVSAGAAAGVSAAFGAPVGGVLFSLEEGASFWNQFLTWRIFFASMISTFTLNFVLSIYHGNMWDLSSPGLINFGRFDSEKMAYTIHEIPVFIAMGVVGGVLGAVFNALNYWLTMFRIRYIHRPCLQVIEAVLVAAVTATVAFVLIYSSRDCQPLQGGSMSYPLQLFCADGEYNSMAAAFFNTPEKSVVSLFHDPPGSYNPLTLGLFTLVYFFLACWTYGLTVSAGVFIPSLLIGAAWGRLFGISLSYLTGAAIWADPGKYALMGAAAQLGGIVRMTLSLTVIMMEATSNVTYGFPIMLVLMTAKIVGDVFIEGLYDMHIQLQSVPFLHWEAPVTSHSLTAREVMSTPVTCLRRREKVGVIVDVLSDTASNHNGFPVVEHADDTQPARLQGLILRSQLIVLLKHKVFVERSNLGLVQRRLRLKDFRDAYPRFPPIQSIHVSQDERECTMDLSEFMNPSPYTVPQACVAPTGVQAVPGPGPAAPGGGGQPQSGCRVGDQEGPRQVPPGKERLGGALAGPDVRPSPAHNGHWRWHPGPSAFPPGVTGFSAQTMLPSSGNGEHPAAGRAGGRRGTDPLAGLTLLWAVVSPLGASLRRPSLHSPRLGFFTSRDQLCVCDLPTGLSASWEPAAGPAPACLCPCA

SEQ ID NO: 48433 - protein, 486 aa, Homo sapiens
MSAANPETPNSTISREASTQSSSAAASQGWVLPEGKIVPNTVFVGGIDARMDETEIGSCFGRYGSVKEVKIITNRTGVSKGYGFVSFVNDVDVQKIVGSQIHFHGKKLKLGPAIRKQKLCARHVQPRPLVVNPPPPPQFQNVWRNPNTETYLQPQITPNPVTQHVQAYSAYPHSPGQVITGCQLLVYNYQEYPTYPDSAFQVTTGYQLPVYNYQPFPAYPRSPFQVTAGYQLPVYNYQAFPAYPNSPFQVATGYQFPVYNYQPFPAYPSSPFQVTAGYQLPVYNYQAFPAYPNSPFQVATGYQFPVYNYQPFPAYPSSPFQVTAGYQLPVYNYQAFPAYPNSPFQVATGYQFPVYNYQAFPAYPNSPVQVTTGYQLPVYNYQAFPAYPNSPFQVATGYQFPVYNYQAFPAYPNSPVQVTTGYQLPVYNYQAFPAYPNSAVQVTTGYQFHVYNYQMPPQCPVGEQRRNLWTEAYKWWYLVCLIQRRD

SEQ ID NO: 48434 - protein, 1068 aa, Homo sapiens
MPTAESEAKVKTKVRFEELLKTHSDLMREKKKLKKKLVRSEENISPDTIRSNLHYMKETTSDDPDTIRSNLPHIKETTSDDVSAANTNNLKKSTRVTKNKLRNTQLATENPNGDASVEEDKQGKPNKKVIKTVPQLTTQDLKPETPENKVDSTHQKTHTKPQPGVDHQKSEKANEGREETDLEEDEELMQAYQCHVTEEMAKEIKRKIRKKLKEQLTYFPSDTLFHDDKLSSEKRKKKKEVPVFSKAETSTLTISGDTVEGEQKKESSVRSVSSDSHQDDEISSMEQSTEDSMQDDTKPKPKKTKKKTKAVADNNEDVDGDGVHEITSRDSPVYPKCLLDDDLVLGVYIHRTDRLKSDFMISHPMVKIHVVDEHTGQYVKKDDSGRPVSSYYEKENVDYILPIMTQPYDFKQLKSRLPEWEEQIVFNENFPYLLRGSDESPKVILFFEILDFLSVDEIKNNSEVQNQECGFRKIAWAFLKLLGANGNANINSKLRLQLYYPPTKPRSPLSVVEAFEWWSKCPRNHYPSTLYVTVRGLKVPDCIKPSYRSMMALQEEKGKPVHCERHHESSSVDTEPGLEESKEVIKWKRLPGQACRIPNKHLFSLNAGERGCFCLDFSHNGRILAAACASRDGYPIILYEIPSGRFMRELCGHLNIIYDLSWSKDDHYILTSSSDGTARIWKNEINNTNTFRVLPHPSFVYTAKFHPAVRELVVTGCYDSMIRIWKVEMREDSAILVRQFDVHKSFINSLCFDTEGHHMYSGDCTGVIVVWNTYVKINDLEHSVHHWTINKEIKETEFKGIPISYLEIHPNGKRLLIHTKDSTLRIMDLRILVARKFVGAANYREKIHSTLTPCGTFLFAGSEDGIVYVWNPETGEQVAMYSDLPFKSPIRDISYHPFENMVAFCAFGQNEPILLYIYDFHVAQQEAEMFKRYNGTFPLPGIHQSQDALCTCPKLPHQGSFQIDEFVHTESSSTKMQLVKQRLETVTEVIRSCAAKVNKNLSFTSPPAVSSQQSKLKQSNMLTAQEILHQFGFTQTGIISIERKPCNHQVDTAPTWLFMTTQRIDQMN

SEQ ID NO: 48435 - protein, 347 aa, Homo sapiens
MSLVDLGKKLLEAARAGQDDEVRILMANGAPFTTDWLGTSPLHLAAQYGHYSTTEVLLRAGVSRDARTKVDRTPLHMAASEGHASIVEVLLKHGADVNAKDMLKMTALHWATEHNHQEVVELLIKYGADVHTQSKFCKTAFDISIDNGNEDLAEILQIAMQNQINTNPESPDTVTIHAATPQFIIGPGGVVNLTDETGVSAVQFGNSSTSVLATLAALAEASAPLSNSSETPVATEEVVTAESVDGAIQQVVSSGGQQVITIVTDGIQLGNLHSIPTSGIGQPIIVTMPDGQQVLTVPATDIAEETVISEEPPAKRQCIEIIENRVESAEIEVRSLLPGVLCRSHPK

SEQ ID NO: 48436 - protein, 44 aa, Homo sapiens
MKVKIKCWNGVATWLWVANDENCGICRMAFNGCCPDCECPLHAV

SEQ ID NO: 48437 - protein, 124 aa, Homo sapiens
MVSSAQMGFNLQALLEQLSQDELSKFKYLITTFSLAHELQKIPHKEVDKADGKQLVEILTTHCDSYWVEMASLQVFEKMHRMDLSERAKDEVREAALKSFNKRKPLSLGITRKERPPLDVDEML

SEQ ID NO: 48438 - protein, 117 aa, Homo sapiens
MALLCYNRGCGQRFDPETNSDGKRNAPPALPPLHLISRGGPLGRRVSADLLQPSSRGPRSMPLLGLPWLPAQPAGRPSVAPRSLGERPAPAPDCPLPLRRETLPWIHVFPPSSPHSF

SEQ ID NO: 48439 - protein, 49 aa, Homo sapiens
MRSGKASCTLETVWEDKHKYEEAERRFYEHEATQAAASAQQLPAEGPAM

SEQ ID NO: 48440 - protein, 537 aa, Homo sapiens
MKHYSPTDYVNWLEEYKVRQKAGLEARKIVASFSKRFFSEHVPCNGFSDIENLEGPEIFFEDELVCILNMEGRKALTWKYYAKKILYYLRQQKILNNLKAFLQQPDDYESYLEGAVYIDQYCNPLSDISLKDIQAQIDSIVELVCKTLRGINSRHPSLAFKAGESSMIMEIELQSQVLDAMNYVLYDQLKFKGNRMDYYNALNLYMHQVLIRRTGIPISMSLLYLTIARQLGVPLEPVNFPSHFLLRWCQGAEGATLDIFDYIYIDAFGKGKQLTVKECEYLIGQHVTAALYGVVNVKKVLQRMVGNLLSLGKREGIDQSYQLLRDSLDLYLAMYPDQVQLLLLQARLYFHLGIWPEKVLDILQHIQTLDPGQHGAVGYLVQHTLEHIERKKEEVGVEVKLRSDEKHRDVCYSIGLIMKHKRYGYNCVIYGWDPTCMMGHEWIRNMNVHSLPHGHHQPFYNVLVEDGSCRYAAQENLEYNVEPQEISHPDVGRYFSEFTGTHYIPNAELEIRYPEDLEFVYETVQNIYSAKKENIDE

SEQ ID NO: 48441 - protein, 149 aa, Homo sapiens
MGCGLNKLEKRDEKRPGNIYSTLKRPQVETKIDVSYEYRFLEFTTLSAAELPGSSAVRLASLRDLPAQLLELYQQGFSLAALHPFVQPTHEREKTPLEHIFRAILIKKTDRSQKTDLHNEGYILELDCCSSLDHPTDQKLIPEFIKKIQ

SEQ ID NO: 48442 - protein, 47 aa, Homo sapiens
MLLPNILLTGTPGVGKTTLGKELASKSGLKYINVGDLAREGVIMRRN

SEQ ID NO: 48443 - protein, 1155 aa, Homo sapiens
MAYTENGEVYFIDHNTKTTSWLDPRCLNKQQKPLEECEDDEGVHTEELDSELELPAGWEKIEDPVYGIYYVDHINRKTQYENPVLEAKRKKQLEQQQQQQQQQQQQQQQQQQQQTEEWTEDHSALVPPVIPNHPPSNPEPAREVPLQGKPFFTRNPSELKGKFIHTKLRKSSRGFGFTVVGGDEPDEFLQIKSLVLDGPAALDGKMETGDVIVSVNDTCVLGHTHAQVVKIFQSIPIGASVDLELCRGYPLPFDPDDPNTSLVTSVAILDKEPIIVNGQETYDSPASHSSKTGKVNGMKDARPSSPADVASNSSHGYPNDTVSLASSIATQPELITVHIVKGPMGFGFTIADSPGGGGQRVKQIVDSPRCRGLKEGDLIVEVNKKNVQALTHNQVVDMLVECPKGSEVTLLVQRGGLPVPKKSPKSQPLERKDSQNSSQHSVSSHRSLHTASPSHSTQVLPEFPPAEAQAPDQTDSSGQKKPDPFKIWAQSRSMYENRLPDYQEQDIFLWRKETGFGFRILGGNEPGEPIYIGHIVPLGAADTDGRLRSGDELICVDGTPVIGKSHQLVVQLMQQAAKQGHVNLTVRRKVVFAVPKTENEVPSPASSHHSSNQPASLTEEKRTPQGSQNSLNTVSSGSGSTSGIGSGGGGGSGVVSTVVQPYDVEIRRGENEGFGFVIVSSVSRPEAGTTFGNACVAMPHKIGRIIEGSPADRCGKLKVGDRILAVNGCSITNKSHSDIVNLIKEAGNTVTLRIIPGDESSNATLLTNAEKIATITTTHTPSQQGTQETRNTTKPKQESQFEFKAPQATQEQDFYTVELERGAKGFGFSLRGGREYNMDLYVLRLAEDGPAERCGKMRIGDEILEINGETTKNMKHSRAIELIKNGGRRVRLFLKRGDGSVPEYDPSSDRHGPATGPQGVPEVRAGPDRRQHPSLESSYPPDLHKSSPHGEKRAHARDPKGSREYSRQPNEHHTWNGTSRKPDSGACRPKDRAPEGRRDAQAERAAAANGPKRRSPEKRREGTRSADNTLERREKHEKRRDVSPERRRERSPTRRRDGSPSRRRRSLERLLEQRRSPERRRGGSPERRAKSTDRRRARSPERRRERSLDKRNREDRASHREREEANLKQDAGRSSRHPPEQRRRPYKECSTDLSI

SEQ ID NO: 48444 - protein, 56 aa, Homo sapiens
MLSLAAKLVAFFWRTADTPREEAGQLEPELAEGGSREAAGRRVPGPRVSATREPRP

SEQ ID NO: 48445 - protein, 132 aa, Homo sapiens
MDSPSLRELQQPLLEGTECETPAQKPGRHELGSPLREIAFAESLRGLQFLSPPLPSVSAGLGEPRPPDVEDMSSSDSDSDWDGGSRLSPFLPHDHLGLAVFSMLCCFWPVGIAAFCLAQKVSLCVGLGGDWA

SEQ ID NO: 48446 - protein, 172 aa, Homo sapiens
MTGRARARARGRARGQETAQLVGSTASQQPGYIQPRPQPPPAEGELFGRGRQRGTAGGTAKSQGLQISAGFQELSLAERGGRRRDFHDLGVNTRQNLDHVKESKTGSSGIIVRLSTNHFRLTSRPQWALYQYHIDYNPLMEARRLRSALLFQHEDLIGKCHAFDGTILFLPK

SEQ ID NO: 48447 - protein, 65 aa, Homo sapiens
MYTITKGPSKLVAQRRTGPTQQQVEGRLGELLKCRQPAPPTSQPPRAQPFAQPPGPWPLSSAPLS

SEQ ID NO: 48448 - protein, 182 aa, Homo sapiens
MSTAALITLVRSGGNQVRRRVLLSSRLLQDDRRVTPTCHSSTSEPRCSRFDPDGSGSPATWDNFGIWDNRIDEPILLPPSIKYGKPIPKISLENVGCASQIGKRKENEDRFDFAQLTDEVLYFAVYDGHGGPAAADFCHTHMEKCIMDLLPKEKNLETLLTLAFLEIDKAFSSHARLSADGM

SEQ ID NO: 48449 - protein, 420 aa, Homo sapiens
MNPIVVFHGYEAVKEALIDNGEEFSGRGNSPISQRITKGLGIISSNGKRWKEIRRFSLTTLRNFGMGKRSIEDRVQEEAHCLVEELRKTKASPCDPTFILGCAPCNVICSVVFQKRFDYKDQNFLTLMKRFNENFRILNSPWIQVCNNFPLLIDCFPGTHNKVLKNVALTRSYIREKVKEHQASLDVNNPRDFIDCFLIKMEQEKDNQKSEFNIENLVGTVADLFVAGTETTSTTLRYGLLLLLKHPEVTAKVQEEIDHVIGRHRSPCMQDRSHMPYTDAVVHEIQRYSDLVPTGVPHAVTTDTKFRNYLIPKGTTIMALLTSVLHDDKEFPNPNIFDPGHFLDKNGNFKKSDYFMPFSAGKRICAGEGLARMELFLFLTTILQNFNLKSVDDLKNLNTTAVTKGIVSLPPSYQICFIPV

SEQ ID NO: 48450 - protein, 44 aa, Homo sapiens
MLQQVNGHNPGSDGQAREYLREDLQEFLGGEVLLYKLDDLTRVN

SEQ ID NO: 48451 - protein, 87 aa, Homo sapiens
MASLALLQRQFDVDILISGHTHKFEAFEHENKFYINPGSATGAYNALETNIIPSFVLMDIQASTVVTYVYQLIGDDVKVERIEYKKP

SEQ ID NO: 48452 - protein, 209 aa, Homo sapiens
MMQNPQILAALQERLDGLVETPTGYIESLPRVVKRRVNALKNLQVKCAQIEAKFYEEVHDLERKYAVLYQPLFDKRFEIINAIYEPTEEECEWKPDEEDEISEELKEKAKIEDEKKDEEKEDPKGIPEFWLTVFKNVDLLSDMVQEHDEPILKHLKDIKVKFSDAGQPMSFVLEFHFEPNEYFTNEVLTKTYRMRSEPDDSDPFSFDGP

SEQ ID NO: 48453 - protein, 115 aa, Homo sapiens
MFHVSFRYIFGLPPLILVLLPVASSDCDIEGKDGKQYESVLMVSIDQLLDSMKEIGSNCLNNEFNFFKRHICDANKEENKSLKEQKKLNDLCFLKRLLQEIKTCWNKILMGTKEH

SEQ ID NO: 48454 - protein, 88 aa, Homo sapiens
MAESRGRLYLWMCLAAALASFLMGFMVGWFIKPLKETTTSVRYHQSIRWKLVSEMKAENIKSFLRSFTKLPHLAGTEQNFLLAKKIQT

SEQ ID NO: 48455 - protein, 361 aa, Homo sapiens
MNHKSKKRIREAKRSARPELKDSLDWTRHNYYESFSLSPAAVADNVERADALQLSVEEFVERYERPYKPVVLLNAQEGWSAQEKWTLERLKRKYRNQKFKCGEDNDGYSVKMKMKYYIEYMESTRDDSPLYIFDSSYGEHPKRRKLLEDYKVPKFFTDDLFQYAGEKRRPPYRWFVMGPPRSGTGIHIDPLGTSAWNALVQGHKRWCLFPTSTPRELIKVTRDEGGNQQDEAITWFNVIYPRTQLPTWPPEFKPLEILQKPGETVFVPGGWWHVVLNLDTTIAITQNFASSTNFPVVWHKTVRGRPKLSRKWYRTDTARAAAVQATHSHPVPLCPNPDLEGPALGDFEARAPRVGSPRRLG

SEQ ID NO: 48456 - protein, 189 aa, Homo sapiens
MTGTPGAVATRDGEAPERSPPCSPSYDLTGKVMLLGDTGVGKTCFLIQFKDGAFLSGTFIATVGIDFRNKVVTVDGVRVKLQIWDTAGQERFRSVTHAYYRDAQALLLLYDITNKSSFDNIRAWLTEIHEYAQRDVVIMLLGNKADMSSERVIRSEDGETLAREYGVPFLETSAKTGMNVELAFLAIAK

SEQ ID NO: 48457 - protein, 1736 aa, Homo sapiens
MERCSRCHRLLLLLPLVLGLSAAPGWAGAPPVDVLRALRFPSLPDGVRRAKGICPADVAYRVARPAQLSAPTRQLFPGGFPKDFSLLTVVRTRPGLQAPLLTLYSAQGVRQLGLELGRPVRFLYEDQTGRPQPPSQPVFRGLSLADGKWHRVAVAVKGQSVTLIVDCKKRVTRPLPRSARPVLDTHGVIIFGARILDEEVFEGDVQELAIVPGVQAAYESCEQKELECEGGQRERPQNQQPHRAQRSPQQQPSRLHRPQNQEPQSQPTESLYYDYEPPYYDVMTTGTTPDYQDPTPGEEEEILESSLLPPLEEEQTDLQVPPTADRFQAEEYGEGGTDPPEGPYDYTYGYGDDYREETELGPALSAETAHSGAAAHGPRGLKGEKGEPAVLEPGMLVEGPPGPEGPAGLIGPPGIQGNPGPVGDPGERGPPGRAGLPGSDGAPGPPGTSLMLPFRFGSGGGDKGPVVAAQEAQAQAILQQARLALRGPPGPMGYTGRPGPLGQPGSPGLKGESGDLGPQGPRGPQGLTGPPGKAGRRGRAGADGARGMPGDPGVKGDRGFDGLPGLPGEKGHRGDTGAQGLPGPPGEDGERGDDGEIGPRGLPGESGPRGLLGPKGPPGIPGPPGVRGMDGPQGPKGSLGPQGEPGPPGQQGTPGTQGLPGPQGAIGPHGEKGPQGKPGLPGMPGSDGPPGHPGKEGPPGTKGNQGPSGPQGPLGYPGPRGVKGVDGIRGLKGHKGEKGEDGFPGFKGDIGVKGDRGEVGVPGSRGEDGPEGPKGRTGPTGDPGPPGLMGEKGKLGVPGLPGYPGRQGPKGSLGFPGFPGASGEKGARGLSGKSGPRGERGPTGPRGQRGPRGATGKSGAKGTSGGDGPHGPPGERGLPGPQGPNGFPGPKGPPGPPGKDGLPGHPGQRGEVGFQGKTGPPGPPGVVGPQGAAGETGPMGERGHPGPPGPPGEQGLPGTAGKEGTKGDPGPPGAPGKDGPAGLRGFPGERGLPGTAGGPGLKGNEGPSGPPGPAGSPGERGAAGSGGPIGPPGRPGPQGPPGAAGEKGVPGEKGPIGPTGRDGVQGPVGLPGPAGPPGVAGEDGDKGEVGDPGQKGTKGNKGEHGPPGPPGPIGPVGQPGAAGADGEPGARGPQGHFGAKGDEGTRGFNGPPGPIGLQGLPGPSGEKGETGDVGPMGPPGPPGPRGPAGPNGADGPQGPPGGVGNLGPPGEKGEPGESGSPGIQGEPGVKGPRGERGEKGESGQPGEPGPPGPKGPTGDDGPKGNPGPVGFPGDPGPPGEGGPRGQDGAKGDRGEDGEPGQPGSPGPTGENGPPGPLGKRGPAGSPGSEGRQGGKGAKGDPGAIGAPGKTGPVGPAGPAGKPGPDGLRGLPGSVGQQGRPGATGQAGPPGPVGPPGLPGLRGDAGAKGEKGHPGLIGLIGPPGEQGEKGDRGLPGPQGSPGQKGEMGIPGASGPIGPGGPPGLPGPAGPKGAKGATGPGGPKGEKGVQGPPGHPGPPGEVIQPLPIQMPKKTRRSVDGSRLMQEDEAIPTGGAPGSPGGLEEIFGSLDSLREEIEQMRRPTGTQDSPARTCQDLKLCHPELPDGEYWVDPNQGCARDAFRVFCNFTAGGETCVTPRDDVTQFSYVDSEGSPVGVVQLTFLRLLSVSAHQDVSYPCSGAARDGPLRLRGANEDELSPETSPYVKEFRDGCQTQQGRTVLEVRTPVLEQLPVLDASFSDLGAPPRRGGVLLGPVCFMG

SEQ ID NO: 48458 - protein, 146 aa, Homo sapiens
MPLQVSDYSWQQTKTAVFLSLPLKGVCVRDTDVFCTENYLKVNFPPFLFEAFLYAPIDDESSKAKIGNDTIVFTLYKKEAAMWETLSVTGVDKEMMQRIREKSILQAQERAKEATEAKAAAKREDQKYALSVMMKGEIQKIYLLRS

SEQ ID NO: 48459 - protein, 152 aa, Homo sapiens
MLLWPLRGWAARALRCFGPGSRGSPASGPGPRRVQRRAWPPDKEQEKEKKSVVLTEPVSKWRNVRGHNPLGLMYHDASRWGLTLQTYVQLTMLDRHTRPQVSSVRLMERSIHSARYIFVENLYRRNTWKQFTISMRSGSSKAAFSPWQPLFW

SEQ ID NO: 48460 - protein, 175 aa, Homo sapiens
MGCVQCKDKEATKLTEERDGSLNQSSGYRYGTDPTPQHYPSFGVTSIPNYNNFHAAGGQGLTVFGGVNSSSHTGTLRTRGGTGVTLFVALYDYEARTEDDLSFHKGEKFQILNSSEGDWWEARSLTTGETGYIPSNYVAPVDSIQAEEWYFGKLGRKDAERQLLSFGNPRGTFLI

SEQ ID NO: 48461 - protein, 245 aa, Homo sapiens
MQAAWLLGALVVPQLLGFGHGARGAEREWEGGWGGAQEEEREREALMLKHLQEALGLPAGRGDENPAGTVEGKEDWEMEEDQGEEEEEEATPTPSSGPSPSPTPEDIVTYILGRLAGLDAGLHQLHVRLHALDTRVVELTQGLRQLRNAAGDTRDAVQALQEAQGRAEREHGRLEGCLKGLRLGHKCFLLSRDFEAQPSASPHPLSPDQPNGGTLENCVAQASDDGSWWDHDCQRRLYYVCEFPF

SEQ ID NO: 48462 - protein, 517 aa, Homo sapiens
MDSSGWRGVLSSSPPFRLRSAKFSGIALEDLRRALKTRLQMVCVFVMNRMNSQNSGFTQRRRMALGIVILLLVDVIWVASSELTSYVFTQYNKPFFSTFAKTSMFVLYLLGFIIWKPWRQQCTRGLRGKHAAFFADAEGYFAACTTDTTMNSSLSEPLYVPVKFHDLPSEKPESTNIDTEKTPKKSRVRFSNIMEIRQLPSSHALEAKLSRMSYPVKEQESILKTVGKLTATQVAKISFFFCFVWFLANLSYQEALSDTQVAIVNILSSTSGLFTLILAAVFPSNSGDRFTLSKLLAVILSIGGVVLVNLAGSEKPAGRDTVGSIWSLAGAMLYAVYIVMIKRKVDREDKLDIPMFFGFVGLFNLLLLWPGFFLLHYTGFEDFEFPNKVVLMCIIINGLIGTVLSEFLWLWGCFLTSSLIGTLALSLTIPLSIIADMCMQKVQFSWLFFAGAIPVFFSFFIVTLLCHYNNWDPVMVGIRRIFAFICRKHRIQRVPEDSEQCESLISMHSVSQEDGAS

SEQ ID NO: 48463 - protein, 460 aa, Homo sapiens
MAQWEMLQNLDSPFQDQLHQLYSHSLLPVDIRQYLAVWIEDQNWQEAALGSDDSKATMLFFHFLDQLNYECGRCSQDPESLLLQHNLRKFCRDIQDPTQLAEMIFNLLLEEKRILIQAQRAQLEQGEPVLETPVESQQHEIESRILDLRAMMEKLVKSISQLKDQQDVFCFRYKIQAKGKTPSLDPHQTKEQKILQETLNELDKRRKEVLDASKALLGRLTTLIELLLPKLEEWKAQQQKACIRAPIDHGLEQLETWFTAGAKLLFHLRQLLKELKGLSCLVSYQDDPLTKGVDLRNAQVTELLQRLLHRAFVVETQPCMPQTPHRPLILKTGSKFTVRTRLLVRLQEGNESLTVEVSIDRNPPQLQGFRKFNILTSNQKTLTPEKGQSQGLIWDFGYLTLVEQRSGGSGKGSNKGPLGVTEELHIISFTVKYTYQGLKQELKVSENGGQGERKQLWKKA

SEQ ID NO: 48464 - protein, 366 aa, Homo sapiens
MRVMAPRALLLLLSGGLALTETWACSHSMRYFDTAVSRPGRGEPRFISVGYVDDTQFVRFDSDAASPRGEPRAPWVEQEGPEYWDRETQNYKRQAQADRVSLRNLRGYYNQSEDGSHTLQRMYGCDLGPDGRLLRGYDQSAYDGKDYIALNEDLRSWTAADTAAQITQRKLEAARAAEQLRAYLEGTCVEWLRRYLENGKETLQRAEPPKTHVTHHPLSDHEATLRCWALGFYPAEITLTWQRDGEDQTQDTELVETRPAGDGTFQKWAAVVVPSGQEQRYTCHMQHEGLQEPLTLSWEPSSQPTIPIMGIVAGLAVLVVLAVLGAVVTAMMCRRKSSGGKGGSCSQAACSNSAQGSDESLITCKA

SEQ ID NO: 48465 - protein, 336 aa, Homo sapiens
MDEKTKKAEEMALSLTRAVAGGDEQVAMKCAIWLAEQRVPLSVQLKPEVSPTQDIRLWVSVEDAQMHTVTIWLTVRPDMTVASLKDMVFLDYGFPPVLQQWVIGQRLARDQETLHSHGVRQNGDSAYLYLLSARNTSLNPQELQRERQLRMLEDLGFKDLTLQPRGPLEPGPPKPGVPQEPGRGQPDAVPEPPPVGWQCPGCTFINKPTRPGCEMCCRARPEAYQVPASYQPDEEERARLAGEEEALRQYQQRKQQQQEGNYLQHVQLDQRSLVLNTEPAECPVCYSVLAPGEAVVLRSACRAPSATARRRRSPAPSLTTPTRARASCWRGRSRRS

SEQ ID NO: 48466 - protein, 798 aa, Homo sapiens
MAISSRLALWEQKIREEDKSPPPSSPPPLFSVIPGGFIKQLVRGTEKEAKEARQRKQLAVASPEREIPEISISQPNSKSSSGTRSGSQQISQDDQSSSPGSSDILGKESEGSRSPDPEQMTSINGEKAQELGSSATPTKKTVPFKRGVRRGDVLLMVAKLDPDSAKPEKTHPHDAPPCKTSPPATDTGKEKKGETSRTPCGSQASTEILAPKAEKTRTGGLGDPGQGTVALKKGEEGQSIVGKGLGTPKTTELKEAEPQGKDRQGTRPQAQGPGEGVRPGKAEKEGAEPTNTVEKGNVSKDVGSEGKHVRPQIPGRKWGGFLGRRSKWDGPQNKKDKEGVLLSKAEKTGEPQTQMEKTSQVQGELGDDLRMGEKAGELRSTTGKAGESWDKKEKMGQPQGKSGNAGEARSQTEKGCEAPKEVSTMVESPAAPGKGGWPGSRGQEAEEPCSRAGDGAGALETELEGPSQPALEKDAERPRIRKENQDGPAPQEEGKGGQSRDSDQAPEDRWYEAEKVWLAQKDGFTLATVLKPDEGTADLPAGRVRLWIDADKTITEVDEEHVHRANPPELDQVEDLASLISVNESSVLNTLLQRYKAQLLHTCTGPDLIVLQPRGPSVPSAGKVPKGRRDGLPAHIGSMAQRAYWALLNQRRDQSIVALGWSGAGKTTCCEQVLEHLVGMAGSVDGRVSVEKIRATFTVLRAFGSVSMAHSRSATRFSMVMSLDFNATGRITAAQLQTMLLEKSRVARQPEGESNFLVFSQMLAGLDLDLRTELNLHQMADSSSFGMGVWSKWVGSSS

SEQ ID NO: 48467 - protein, 101 aa, Homo sapiens
MRPADLPPRPMEESPASSSAPTETEEPGSSAVGAPEATDGSHTTGASDHEPLSCMGAEEWLCVPVLHLCAGPCHRASTDCVRQECCPPLLHLQSGCWMFME

SEQ ID NO: 48468 - protein, 439 aa, Homo sapiens
MDTMAFSLTVPTLALKMPNGLDGMSLSPPGARVPLHYLETELEDPFAFNEEDDDLKKGATVRKKLQSKLAQNRQRQRETEILKVRQEHFSPPPAPSQQQPPQQHSHLSPLSTSLKPPAPPQGSVCKSPQPQNTSLPMQGVAPTTHTIAQARQLSHKRPLPLLPSSRAPTVDPPRTDRILMKATAFSPHFSCISRLQRLVKLCTQKHQLDTDLFPHLGLDWSEESGEEPEDSEQASPYQVAWSIRETLRYQRHASDDDDAESRSSRVTQLCTYFQQKYKHLCRLERAESRQKKCRHTFRKALLQAASKEPECTGQLIQELRRAACSRTSISRTKLREVEPAACSGTVKGEQCANKALPFTRHCFQHILLNHSQQLFSSCTAKFADGQQCSVPVFDITHQTPLCEEHAKKMDNFLRGDNSRKVQHQQQRKPRKKTKPPALT

SEQ ID NO: 48469 - protein, 187 aa, Homo sapiens
MEWWASSPLRLWLLLFLLPSAQGRQKESGSKWKVFIDQINRSLENYEPCSSQNCSCYHGVIEEDLTPFRGGISRKMMAEVVRRKLGTHYQITKNRLYRENDCMFPSRCSGVEHFILEVIGRLPDMEMVINVRDYPQVPKWMEPAIPVFSFSKTCFISCVASGQRPHLCCISHGLASFLESVWFHCLS

SEQ ID NO: 48470 - protein, 112 aa, Homo sapiens
MKVLKKATLKVRDRVRTKMERDILADVNHPFVVKLHYAFQTEGKLYLILDFLRGGDLFTRLSKEVMFTEEDVKFYLAELALGLDHLHSLGIIYRDLKPENILLDEEGHIKLT

SEQ ID NO: 48471 - protein, 133 aa, Homo sapiens
MVDTESPLCPLSPLEAGDLESPLSEEFLQEMGNIQEISQSIGEDSSGSFGFTEYQYLGSCPGSDGSVITDTLSPASSPSSVTYPVVPGSVDESPSGALNIECRICGDKASGYHYGVHACEGCKVEGSWNRAWW

SEQ ID NO: 48472 - protein, 193 aa, Homo sapiens
MNLPVPDPILLTNSHDGLDGPTYKKRRLDECEEAFQGTKVFVMPNGMLKSNQQLVDIIEKVKPEIRLLIEKCNTVKMWVQLLIPRIEDGNNFGVSIQEETVAELRTVESEAASYLDQISRYYITRAKLVSKIAKYPHVEDYRRTVTEIDEKEYISLRLIISELRNQYVTLHDMILKNIEKIKRPRSSNAETLY

SEQ ID NO: 48473 - protein, 525 aa, Homo sapiens
MKLYCLSGHPTLPCNVLKFKSTTIMLDCGLDMTSTLNFLPLPLVQSPRLSNLPGWSLKDGNAFLDKELKECSGHVFVDSVPEFCLPETELIDLSTVDVILISNYHCMMALPYITEHTGFTGTVYATEPTVQIGRLLMEELVNFIERVPKAQSASLWKNKDIQRLLPSPLKDAVEVSTWRRCYTMQEVNSALSKIQLVGYSQKIELFGAVQVTPLSSGYALGSSNWIIQSHYEKVSYVSGSSLLTTHPQPMDQASLKNSDVLVLTGLTQIPTANPDGMVGEFCSNLALTVRNGGNVLVPCYPSGVIYDLLECLYQYIDSAGLSSVPLYFISPVANSSLEFSQIFAEWLCHNKQSKVYLPEPPFPHAELIQTNKLKHYPSIHGDFSNDFRQPCVVFTGHPSLRFGDVVHFMELWGKSSLNTVIFTEPDFSYLEALAPYQPLAMKCIYCPIDTRLNFIQVSKLLKEVQPLHVVCPEQYTQPPPAQSHRMDLMIDCQPPAMSYRRAEVLALPFKRRYEKIEIMPETAVM

SEQ ID NO: 48474 - protein, 897 aa, Homo sapiens
MDGAAGPGDGPAREALQSLSQRLRVQEQEMELVKAALAEALRLLRLQVPPSSLQGSGTPAPPGDSSLAAPPGLPPTCTPSLVSRGTQTETEVELKSSPGPPGLSNGPPAPQGASEEPSGTQSEGGGSSSSGAGSPGPPGILRPLQPPQRADTPRRNSSSSSSPSERPRQKLSRKAISSANLLVRSGSTESRGGKDPLSSPGGPGSRRSNYNLEGISVKMFLRGRPITMYIPSGIRSLEELPSGPPPETLSLDWVYGYRGRDSRSNLFVLRSGEVVYFIACVVVLYRPGGGPGGPGGGGQRHYRGHTDCVRCLAVHPDGVRVASGQTAGVDKDGKPLQPVVHIWDSETLLKLQEIGLGAFERGVGALAFSAADQGAFLCVVDDSNEHMLSVWDCSRGMKLAEIKSTNDSVLAVGFNPRDSSCIVTSGKSHVHFWNWSGGVGVPGNGTLTRKQGVFGKYKKPKFIPCFVFLPDGDILTGDSEGNILTWGRSPSDSKTPGRGGAKETYGIVAQAHAHEGSIFALCLRRDGTVLSGGGRDRRLVQWGPGLVALQEAEIPEHFGAVRAIAEGLGSELLVGTTKNALLRGDLAQGFSPVIQGHTDELWGLCTHPSQNRFLTCGHDRQLCLWDGESHALAWSIDLKETGLCADFHPSGAVVAVGLNTGRWLVLDTETREIVSDVIDGNEQLSVVRYSPDGLYLAIGSHDNVIYIYSVSSDGAKSSRFGRCMGHSSFITHLDWSKDGNFIMSNSGDYEILYWDVAGGCKQLKNRYESRDREWATYTCVLGFHVYGVWPDGSDGTDINSLCRSHNERVVAVADDFCKVHLFQYPCARAKAPSRMYGGHGSHVTSVRFTHDDSHLVSLGGKDASIFQWRVLGAGGAGPAPATPSRTPSLSPASSLDV

SEQ ID NO: 48475 - protein, 366 aa, Homo sapiens
MSAANPETPNSTISREASTQSSSAAASQGWVLPEGKIVPNTVFVGGIDARMDETEIGSCFGRYGSVKEVKIITNRTGVSKGYGFVSFVNDVDVQKIVGSQIHFHGKKLKLGPAIRKQKLCARHVQPRPLVVNPPPPPQFQNVWRNPNTETYLQPQITPNPVTQHVQAYSAYPHSPGQVITGCQLLVYNYQEYPTYPDSAFQVTTGYQLPVYNYQPFPAYPSSPFQVTAGYQLPVYNYQAFPAYPSSPFQVTTGYQLPVYNYQAFPAYPSSPFQVTTGYQLPVYNYQAFPAYPSSPFQVTTGYQLPVYNYQAFPAYPNSAVQVTTGYQFHVYNYQMPPQCPVGEQRRNLWTEAYKWWYLVCLIQRRD

SEQ ID NO: 48476 - protein, 96 aa, Homo sapiens
EFYQRLSTETLFFIFYYLEGTKAQYLAAKALKKQSWRFHTKYMMWFQRHEEPKTITDEFEQLAQSLSLTKYSSLWLSAQPGTPPSHPPLGQLLGLL

SEQ ID NO: 48477 - protein, 144 aa, Homo sapiens
MMEGLDDGPDFLSEEDRGLKAINVDLQSDAALQVDISDALSERDKVKFTVHTKSSLPNFKQNEFSVVRQHEEFIWLHDSFVENEDYAGYIIPPAPPRPDFDASREKLQKLGEGEGSMTKEEFTKMKQELEADQTSPIIGPAGLL

SEQ ID NO: 48478 - protein, 280 aa, Homo sapiens
  MOD_RES (1)..(1): Any amino acid
XGRRVLGRFWSGWRRGLGVRPVPEDAGFGTEARHQRQPRGSCQRSGPLGDQPFAGLLPKNLSREELVDALRAAVVDRKGPLVTLNKPQGLPVTGKPGELTLFSVLPELSQSLGLREQELQVVRASGKESSGLVLLSSCPQTASRLQKYFTHARRAQRPTATYCAVTDGIPAASEGKIQAALKLEHIDGVNLACSLLAGTTDSSSEGPIPKGHPGRCQEDSQSLSCGSHRLWLCPGPAAATDSVLQSTTGAHGTTALPCAWGPHVLCPCGHCPGPAISAAS

SEQ ID NO: 48479 - protein, 425 aa, Homo sapiens
DYGTKGDSPLHSIRWLRVILDEGHAIRNPNAQQTKAVLDLESERRWVLTGTPIQNSLKDLWSLLSFLKLKPFIDREWWHRTIQRPVTMGDEGGLRRLQSLIKNITLRRTKTSKIKGKPVLELPERKVFIQHITLSDEERKIYQSVKNEGRATIGRYFNEGTVLAHYADVLGLLLRLRQICCHTYLLTNAVSSNGPSAFSLGNDTPEELRKKLIRKMKLILSSGSDEECAICLDSLTVPVITHCAHVFCKPCICQVIQNEQPHAKCPLCRNDIHEDNLLECPPEELARDSEKKSDMEWTSSSKINALMHALTDLRKKNPNIKSLVVSQFTTFLSLIEIPLKASGFVFTRLDGSMAQKKRVESIQCFQNTEAGSPTIMLLSLKAGGVGLNLSAASRVFLMDPAWNPAAEDQCFDRCHRLGQKQEVII

SEQ ID NO: 48480 - protein, 184 aa, Homo sapiens
  MOD_RES (1)..(1): Any amino acid
XLEDTLHVVDMEARLRQRSEETTEAALLLPSSSEESFQLIPSCQEEISLSRCHPGLPPTPRSQHSTSQHSPPHLQPGTSFAGLAAAAYYLNWAPWIPPAHPQASLHQETANHWDWGRFNLDKLTWQLGPKRTNTASSATPRRSYLINEHRPYLESLGTRPGSGDTVGCSQVLLALTLGYLPSQC

SEQ ID NO: 48481 - protein, 21 aa, Homo sapiens
ILTGGGNKLTFGTGTQLKVEL

SEQ ID NO: 48482 - protein, 403 aa, Homo sapiens
MVGLDNAGKTATAKGIQGEYPEDVAPTVGFSKINLRQGKFEVTIFDLGGGIRIRGIWKNYYAESYGVIFVVDSSDEERMEETKEAMSEMLRHPRISGKPILVLANKQDKEGALGEADVIECLSLEKLVNEHKCLCQIEPCSAISGYGKKIDKSIKKGLYWLLHVIARDFDALNERIQKETTEQRALEEQEKQERAERVRKLREERKQNEQEQAELDGTSGLAELDPEPTNPFQPIASVIIENEGKLEREKKNQKMEKDSDGCHLKHKMEHEQIETQGQVNHNGQKNNEFGLVENYKEALTQQLKNEDETDRPSLESANGKKKTKKLRMKRNHRVEPLNIDDCAPESPTPPPPPPPVGWGTPKVTRLPKLEPLGETHHNDFYRKPLPPLAVPQRPNSDAHDVIS

SEQ ID NO: 48483 - protein, 124 aa, Homo sapiens
DCRLTSVCLPCVPGDFFKDPLPEADLYILARVLHDWADGKCSHLLERIYHTCKPGGGILVIESLLDEDRRGPLLTQLYSLNMLVQTEGQERTPTHYHMLLSSAGFRDFQFKKTGAIYDAILARK

SEQ ID NO: 48484 - protein, 473 aa, Homo sapiens
MAGSADSYTSRPSDSDVSLEEDREAIRQEREQQAAIQLERAKSKPVAFAVKTNVSYCGALDEDVPVPSTAISFDAKDFLHIKEKYNNDWWIGRLVKEGCEIGFIPSPLRLENIRIQQEQKRGRFHGGKSSGNSSSSLGEMVSGTFRATPTSTAKQKQKVTEHIPPYDVVPSMRPVVLVGPSLKGYEVTDMMQKALFDFLKHRFDGRISITRVTADISLAKRSVLNNPSKRAIIERSNTRSSLAEVQSEIERIFELARSLQLVVLDADTINHPAQLIKTSLAPIIVHVKVSSPKVLQRLIKSRGKSQSKHLNVQLVAADKLAQCPPEMFDVILDENQLEDACEHLGEYLEAYWRATHTTSSTPMTPLLGRNLGSTALSPYPTAISGLQSQRMRHSNHSTENSPIERRSLMTSDENYHNERARKSRNRLSSSSQHSRDHYPLVEEDYPDSYQDTYKPHRNRGSPGGYSHDSRHRL

SEQ ID NO: 48485 - protein, 53 aa, Homo sapiens
MEIKEEGASEEGQHFLPTAQANDPGDCQFTSIQKTPNEPQLEFILDLNQELRD

SEQ ID NO: 48486 - protein, 419 aa, Homo sapiens
MSRDVCIHTWPCTYYLEPKRRWVTGQLSLTSLSLRFMTDSTGEILVSFPLSSIVEIKKEASHFIFSSITILEKGHAKHWFSSLRPSRNVVFSIIEHFWRELLLSQPGAVADASVPRTRGEELTGLMAGSQKRLEDTARVLHHQGQQLDSVMRGLDKMESDLEVADRLLTELESPAWWPFSSKLWKTPPETKPREDVSMTSCEPFGKEGILIKIPAVISHRTESHVKPGRLTVLVSGLEIHDSSSLLMHRFEREDVDDIKVHSPYEISIRQRFIGKPDMAYRLISAKMPEVIPILEVQFSKKMELLEDALVLRSARTSSPAEKSCSVWHAASGLMGRTLHREPPAGDQEGTALHLQTSLPALSEADTQELTQILRRMKGLALEAESELERQDEALDGVAAAVDRATLTIDKHNRRMKRLT

SEQ ID NO: 48487 - protein, 147 aa, Homo sapiens
MKLFRSQRNLYISGFSLFFWLVLRRLVTLITQLAKELSNKGVLKTQAENTNKAAKKFMEENEKLKRILKSHGKDEECVLEAENKKLVEDQEKLKTELRKTSDALSKAQNDVMEMKMQSERLSKEYDQLLKEHSELQDRLERGNKKRL

SEQ ID NO: 48488 - protein, 110 aa, Homo sapiens
MAMFGYMTDTGTVEPLQTVEVETQGDDLQSLLFHFLDEWLYKFSADEFFIPREVKVLSIDQRNFKLRSIGWGEEFSLSKHPQGTEVKAITYSAMQVYNEENPEVFVIIDI

SEQ ID NO: 48489 - protein, 67 aa, Homo sapiens
MAATEGVGEAAQGGEPGQPAQPPPQPHPPPPQQQHKEEMAAEAGEAVASPMDDGFVSLDSPSYVLYS

SEQ ID NO: 48490 - protein, 77 aa, Homo sapiens
MKRLDVNAAGIWEPKKGDVLCSRHFKKTDFDRSAPNIKLKPGVIPSIFDSPYHLQKHRKRKQEQEEEQKPRREKCIS

SEQ ID NO: 48491 - protein, 215 aa, Homo sapiens
MSNPSAPPPYEDRNPLYPGPPPPGGYGQPSVLPGGYPAYPGYPQPGYGHPAGYPQPMPPTHPMPMNYGPGHGYDGEERAVSDSFGPGEWDDRKVRHTFIRKGTCQRLCEEKCGCLLRVLCCLRCHLPDPCLLPGTQTPFPMEHHSADPFYFCHGLHDGHHFQYVPNQSRHHCNDHHCGGIHFSHHLLLSDQGGLHLVHRPLLCPGNCAPGDWDCH

SEQ ID NO: 48492 - protein, 182 aa, Homo sapiens
MVSDLVSQNINVFLRNTVKVTGVVVFMFSLSWQLSLVTFMGFPIIMMVSNIYGKYYKRLSKEVQNALARASNTAEETISAMKTVRSFANEEEEAEVYLRKLQQVYKLNRKEAAAYMYYVWGSGLTLLVVQVSILYYGGHLVISGQMTSGNLIAFIIYEFVLGDCMESVGSVYSGLMQGVGAA

SEQ ID NO: 48493 - protein, 105 aa, Homo sapiens
MTLTRWTGMIIGPPRTIYENRIYSLKIECGPKYPEAPPFVRFVTKINMNGVNSSNGVVDPRAISVLAKWQNSYSIKVVLQELRRLMMSKENMKLPQPPEGQCYSN

SEQ ID NO: 48494 - protein, 218 aa, Homo sapiens
MAQQAADKYLYVDKNFINNPLAQADWAAKKLVWVPSDKSGFEPASLKEEVGEEAIVELVENGKKVKVNKDDIQKMNPPKFSKVEDMAELTCLNEASVLHNLKERYYSGLIYTYSGLFCVVINPYKNLPIYSEEIVEMYKGKKRHEMPPHIYAITDTAYRSMMQDREDQSILCTGESGAGKTENTKKVIQYLAYVASSHKSKKDQEAYFKNRAVRLGVL

SEQ ID NO: 48495 - protein, 366 aa, Homo sapiens
MELDFGHFDERDKTSRNMRGSRMNGLPSPTHSAHCSFYRTRTLQALSNEKKAKKVRFYRNGDRYFKGIVYAVSSDRFRSFDALLADLTRSLSDNINLPQGVRYIYTIDGSRKIGSMDELEEGESYVCSSDNFFKKVEYTKNVNPNWSVNVKTSANMKAPQSLASSNSAQARENKDFVRPKLVTIIRSGVKPRKAVRVLLNKKTAHSFEQVLTDITEAIKLETGVVKKLYTLDGKQVTCLHDFFGDDDVFIACGPEKFRYAQDDFSLDENECRVMKGNPSATAGPKASPTPQKTSAKSPGPMRRSKSPADSGNDQDANGTSSSQLSTPKSKQSPISTPTSPGSLRKHKVDLYLPLSLDDSDSLGDSM

SEQ ID NO: 48496 - protein, 292 aa, Homo sapiens
MVLLSTLGIVFQGEGPPISSCDTGTMANCERTFIAIKPDGVQRGLVGEIIKRFEQKGFRLVGLKFMQASEDLLKEHYVDLKDRPFFAGLVKYMHSGPVVAMVWEGLNVVKTGRVMLGETNPADSKPGTIRGDFCIQVGRTMANLERTFIAIKPDGVQRGLVGEIIKRFEQKGFRLVAMKFLRASEEHLKQHYIDLKDRPFFPGLVKYMNSGPVVAMVWEGLNVVKTGRVMLGETNPADSKPGTIRGDFCIQVGRNIIHGSDSVKSAEKEISLWFKPEELVDYKSCAHDWVYE

SEQ ID NO: 48497 - protein, 132 aa, Homo sapiens
MPEIVDTCSLASPASVCRTKHLHLRCSVDFTRRTLTGTAALTVQSQEDNLRSLVLDTKDLTIEKVVINGQEVKYALGERQSYKGSPMEISLPIALSNGSLLNRLLGRNTHISLVSARPSTAEQSFLVRTLLL

SEQ ID NO: 48498 - protein, 128 aa, Homo sapiens
MSMAVETFGFFMATVGLLMLGVTLPNSYWRVSTVHGNVITTNTIFENLWFSCATDSLGVYNCWEFPSMLALSGSTDSPASLSGGTGLLVRLMSIKGPCEGRRLASCRLSVRCKEAVCVQGIFRPAGHS

SEQ ID NO: 48499 - protein, 292 aa, Homo sapiens
VYWFCNNLIKELLKETRKEHTLRAVELLYSIFCLDMQQVTLVLLGHILPGLLTDSSKWHSLMDPPGTALAKLAVWCALSSYSSHKGQASTRQKKRHREDIEDYISLFPLDDVQPSKLMRLLSSNEDDANILSSPRSSLGSPCTSYLRWVKVGLGHPRGAPLLHSAGCFPALHLLRPTADRSMSSSLSASQLHTVNMRDPLNRVLANLFLLISSILGSRTAGPHTQFVQWFMEECVDCLEQGGRGSVLQFMPFTTVSELVKVSAMSSPKVVLAITDLSLPLGRQVAAKAIAAL

SEQ ID NO: 48500 - protein, 337 aa, Homo sapiens
MEEPEEPADSGQSLVPVYIYSPEYVSMCDSLAKIPKRASMVHSLIEAYALHKQMRIVKPKVASMEEMATFHTDAYLQHLQKVSQEGDDDHPDSIEYGLGYDCPATEGIFDYAAAIGGATITAAQCLIDGMCKVAINWSGGWHHAKKDEASGFCYLNDAVLGILRLRRKFERILYVDLDLHHGDGVEDAFSFTSKVMTVSLHKFSPGFFPGTGDVSDVGLGKGRYYSVNVPIQDGIQDEKYYQICESVLKEVYQAFNPKAVVLQLGADTIAGDPMCSFNMTPVGIGKCLKYILQWQLATLILGGGGYNLANTARCWTYLTGVILGKTLSSEIPDHEAL

SEQ ID NO: 48501 - protein, 93 aa, Homo sapiens
MSHPSWLPPKSTGEPLGHVPARMETTHSFGNPSISVSTQQPPKKFAPVVAPKPKYNPYKQPGGEGDFLPPPPPPLDDSSALPSISGNFPPPPP

SEQ ID NO: 48502 - protein, 151 aa, Homo sapiens
MRVSGVLRLLALIFAIVTTWMFIRSYMSFSMKTIRLPRWLASPTKEIQVKKYKCGLIKPCPANYFAFKICSGAANVVGPTMCFEDRMIMSPVKNNVGRGLNIALVNGTTGAVLGQKAFDMYSGDVMHLVKFLKEIPGGALVLVASYDDPGT

SEQ ID NO: 48503 - protein, 136 aa, Homo sapiens
MGLLECCARCLVGAPFASLVATGLCFFGVALFCGCGHEALTGTEKLIETYFSKNYQDYEYLINVIHAFQYVIYGTASFFFLYGALLLAEGFYTTGAVRQIFGDYKTTICGKGLSATVTGGQKGRGSRGQHQAHSLE

SEQ ID NO: 48504 - protein, 120 aa, Homo sapiens
MSGFLEELLGEKLVTGGGEEVDVHSLGARGISLLGLYFGCSLSAPCAQLSASLAAFYGRLRGDAAAGPGPGAGAGAAAEPEPRRRLEIVFVSSDQDQRQWQDFVRDMPWLALPYKEKHRK

SEQ ID NO: 48505 - protein, 407 aa, Homo sapiens
MATSWGTVFFMLVVSCVCSAVSHRNQQTWFEGIFLSSMCPINVSASTLYGIMFDAGSTGTRIHVYTFVQKMPGQLPILEGEVFDSVKPGLSAFVDQPKQGAETVQGLLEVAKDSIPRSHWKKTPVVLKATAGLRLLPEHKAKALLFEVKEIFRKSPFLVPKGSVSIMDGSDEGILAWVTVNFLTGQLHGHRQETVGTLDLGGASTQITFLPQFEKTLEQTPRGYLTSFEMFNSTYKLYTHSYLGFGLKAARLATLGALETEGTDGHTFRSACLPRWLEAEWIFGGVKYQYGGNQEGEVGFEPCYAEVLRVVRGKLHQPEEVQRGSFYAFSYYYDRAVDTDMIDYEKGGILKVEDFERKAREVCDNLENFTSGSPFLCMDLSYITALLKDGFGFADSTVLQHIISWVN

SEQ ID NO: 48506 - protein, 125 aa, Homo sapiens
MPCFIGSRVRPPLSSLCSPANSSSFHGAEDHGGKSVCSGLRQTRFRENVQDVLPALPNPDDYFLLRWLRARSFDLQKSEAMLRKHVEFRKQKDIDNIISWQPPEVIQQYLSGGMCGYDLDGCPVW

SEQ ID NO: 48507 - protein, 72 aa, Homo sapiens
MAALGTVLFSVRRLHCSVAAWAGGQWRLQQGLAANPSGYGPLTELPDWSYAETSCTAVTGNGRWITSMAAQA

SEQ ID NO: 48508 - protein, 70 aa, Homo sapiens
MVRPVRHKKPVNYSQFDHSDSDDDFVSATVPLNKKSRTAPKELKQDKPKPNLNNLRKEEIPVQEKTPKKR

SEQ ID NO: 48509 - protein, 230 aa, Homo sapiens
MNYEGSPIKVTLATLKMSVQPTVSLGGFEITPPVVLRLKCGSGPVHISGQHLVAVEEDAESEDEEEEDVKLLSISGKRSAPGGGSKVPQKKVKLAADEDDDDDDEEDDDEDDDDDDFDDEEAEEKAPVKKSIRDTPAKNAQKSNQNGKDSKPSSTPRSKGQESFKKQEKTPKTPKGPSSVEDIKAKMQASIEKGGSLPKVEAKFINYVKNCFRMTDQEAIQDLWQWRKSL

SEQ ID NO: 48510 - protein, 248 aa, Homo sapiens
  MOD_RES (1)..(1): Any amino acid
XLKQFTEKMQSDMEKIQESADSLEGGILDLGSVLSHILPVSELREAQLYSVDVTLDPDTAYPSLILSDNLRQVRYSYLQQDLPDNPERFNLFPCVLGSPCFIAGRHYWEVEVGDKAKWTIGVCEDSVCRKGGVTSAPQNGFWAVSLWYGKEYWALTSPMTALPLRTPLQRVGIFLDYDAGEVSFYNVTERCHTFTFSHATFCGPVRPYFSLSYSGGKSAAPLIICPMSGIDGFSGHVGNHGHSMETSP

SEQ ID NO: 48511 - protein, 297 aa, Homo sapiens
MGRKKIQISRILDQRNRQVTFTKRKFGLMKKAYELSVLCDCEIALIIFNSANRLFQYASTDMDRVLLKYTEYSEPHESRTNTDILEVPQTLKRRGIGLDGPELEPDEGPEEPGEKFRRLAGEGGDPALPRPRLYPAAPAMPSPDVVYGALPPPGCDPSGLGEALPAQSRPSPFRPAAPKAGPPGLVHPLFSPSHLTSKTPPPLYLPTEGRRSDLPGGLAGPRGGLNTSRSLYSGLQNPCSTATPGPPLGSFPFLPGGPPEYGLGDPPPPPGLLQPPTLAPWQPSRGDGPPAVSSQPR

SEQ ID NO: 48512 - protein, 133 aa, Homo sapiens
  MOD_RES (1)..(1): Any amino acid
XFVVYEEDMFSDQNFLAQATFPVKGLKTGYRAVPLKNNYSEDLELASLLIKIDIFPAKENGDLSPFSGTSLRERGSDASGQLFHGRAREGSFESRYQQPFEDFRISQEHLADHFDSRERRAPRRTRVNGDNRL

SEQ ID NO: 48513 - protein, 130 aa, Homo sapiens
  MOD_RES (1)..(1): Any amino acid
XLTPLHCAVIAHNAVVHELQRNQQPHSPEVQELLLKNKSLVDTIKCLIQMGAAVEAKAYNGNTALHVAASLQYRLTQLDAVRLLMRKGADPSTRNLENEQPVHLVPDGPVGEQIRRILKGKSIQQRAPPY

SEQ ID NO: 48514 - protein, 55 aa, Homo sapiens
MPAALVENSQVICEVWASNLEEEMRKIREIVLSYSYIAMDTEFPGVVVRPIGEFR

SEQ ID NO: 48515 - protein, 138 aa, Homo sapiens
MLVGQGAGPLGPAVVTAAVVLLLSGVGPAHGSEDIVVGCGGFVKSDVEINYSLIEIKLYTKHGTLKYQTDCAPNNGYFMIPLYDKGDFILKIEPPLGWSFEPTTVELHVDGVSDICTKGGDINFVFTGFSVNGKVCIF

SEQ ID NO: 48516 - protein, 476 aa, Homo sapiens
MVMEKPSPLLVGREFVRQYYTLLNQAPDMLHSLHIGYHMIIRFYGKNSSYVHGGLDSNGKPADAVYGQKEIHRKVMSQNFTNCHTKIRHVDAHATLNDGVVVQVMGLLSNNNQALRRFMQTFVLAPEGSVANKFYVHNDIFRYQDEVFGGFVTEPQEESEEEVEEPEERQQTPEVVPDDSGTFYDQAVVSNDMEEHLEEPVAEPEPDPEPEPEQEPVSEIQEEKPEPVLEETAPEDAQKSSSPAPADIAQTVQEDLRTFSWASVTSKNLPPSGAVPVTGIPPHVVKVPASQPRPESKPESQIPPQRPQRDQRVREQRINIPPQRGPRPIREAGEQGDIEPRRMVRHPDSHQLFIGNLPHEVDKSELKDFFQSYGNVVELRINSGGKLPNFGFVVFDDSEPVQKVLSNRPIMFRGEVRLNVEEKKTRAAREGDRRDNRLRGPGGPRGGLGGGMRGPPRGGMVQKPGFGVGRGLAPRQ

SEQ ID NO: 48517 - protein, 29 aa, Homo sapiens
MSGRPRTTSFAESCKPVQQPSAFGSMKVS

SEQ ID NO: 48518 - protein, 61 aa, Homo sapiens
  MOD_RES (1)..(1): Any amino acid
XAEAPVGAEPAAEAPVAAEPAAEAPVGVEPAAEEPSPAEPATAKPAAPEPHPSPSLEQANQ

SEQ ID NO: 48519 - protein, 48 aa, Homo sapiens
MGSAFERVVRRVVQELDHGGEFIPVTSLQSSTGFQPYCLVVRKPSSSW

SEQ ID NO: 48520 - protein, 129 aa, Homo sapiens
MKTVLMVAEKPSLAQSIAKILSRGSLSSHKGLNGACSVHEYTGTFAGQPVRFKMTSVCGHVMTLDFLGKYNKWDKVDPAELFSQAPTEKKEANPKLNMVKFLQVEGRGCDYIVLWLDCDKEGENICFEK

SEQ ID NO: 48521 - protein, 58 aa, Homo sapiens
  MOD_RES (1)..(1): Any amino acid
XLTTLKILIIGESGVGKSSLLLRFTDDTFDPELAATIGKSLNHEKVVSPELEALWPSA

SEQ ID NO: 48522 - protein, 37 aa, Homo sapiens
MTNAQIILLIDNARMAVDDFNLKKWRSIMCQVTSMSM

SEQ ID NO: 48523 - protein, 309 aa, Homo sapiens
MKRENFTLITDFVFQGFSSFHEQQITLFGVFLALYILTLAGNIIIVTIIRMDLHLHTPMYFFLSMLSTSETVYTLVILPRMLSSLVGMSQPISLAGCATQMFFFVTFGITNCFLLTAMGYDRYVAICNPLRYMVIMNKRLRIQLVLGACSIGLIVAITQVTSVFRLPFCARKVPHFFCDIRPVMKLSCIDTTVNEILTLIISVLVLVVPMGLVFISYVLIISTILKIASVEGRKKAFATCASHLTVVIVHYSCASIAYLKPKSENTREHDQLISVTYTVITPLLNPVVYTLRNKEVKDALCRAVGGKFS

SEQ ID NO: 48524 - protein, 893 aa, Homo sapiens
MIFWSFVAGVVTFYCSLGPDSLLPNIFFTIKYKPKLGLQELFPQGHSCAVCGKVKCKRHRPSLLLENYQPWLDLKISSKVDASLSEVLELVLENFVYPWYRDVTDDESFVDELRITLRFFASVLIRRIHKVDIPSIITKKLLKAAMKHIEVIVKARQKVKNTEFLQQAALEEYGPELHVALRSRRDELHYLRKLTELLFPYILPPKATDCRSLTLLIREILSGSVFLPSLDFLADPDTVNHLLIIFIDDSPPEKATEPASPLVPFLQKFAEPRNKKPSVLKLELKQIREQQDLLFRFMNFLKQEGAVHVLQFCLTVEEFNDRILRPELSNDEMLSLHEELQKIYKTYCLDESIDKIRFDPFIVEEIQRIAEGPYIDVVKLQTMRCLFEAYEHVLSLLENVFTPMFCHSDEYFRQLLRGAESPTRNSKLNRGSLSLDDFRNTQKRGESFGISRIGSKIKGVFKSTTMEGAMLPNYGVAEGEDDFIEEGIVVMEDDSPVEAVSTPNTPRNLAAWKISIPYVDFFEDPSSERKEKKERIPVFCIDVERNDRRAVGHEPEHWSVYRRYLEFYVLESKLTEFHGAFPDAQLPSKRIIGPKNYEFLKSKREEFQEYLQKLLQHPELSNSQLLADFLSPNGGETQFLDKILPDVNLGKIIKSVPGKLMKEKGQHLEPFIMNFINSCESPKPKPSRPELTILSPTSENNKKLFNDLFKNNANRAENTERKQNQNYFMEVMTVEGVYDYLMYVGRVVFQVPDWLHHLLMGTRILFKNTLEMYTDYYLQCKLEQLFQEHRLVSLITLLRDAIFCENTEPRSLQDKQKGAKQTFEEMMNYIPDLLVKCIGEETKYESIRLLFDGLQQPVLNKQLTYVLLDIVIQELFPELNKVQKEVTSVTSWM

SEQ ID NO: 48525 - protein, 147 aa, Homo sapiens
MPMTLGYWNIRGLAHSIRLLLEYTDSSYEEKKYTMGDAPDYDRSQWLNEKFKLGLDFPNLPYLIDGTHKITQSNAILRYIARKHNLCGESEKEQIREDILENQFMDSRMQLAKLCYDPDFALPEMLKLYSQFLGKQPWFLGDKITFV

SEQ ID NO: 48526 - protein, 95 aa, Homo sapiens
  MOD_RES (1)..(1): Any amino acid
XKISRVDAASLKGLNNLAKLGLSFNSISAVDNGSLANTPHLRELHLDNNKLTRVPGGLAEHKYIQVMQSHCLCEEYPKSKTPTLLMGCWEAGSSS

SEQ ID NO: 48527 - protein, 54 aa, Homo sapiens
MAALTLRGVRELLKRVDLATVPRRHRYKKKWPVLSLLGCHRAQIPCCSTGFAEF

SEQ ID NO: 48528 - protein, 241 aa, Homo sapiens
MKEVVYWSPKKVADWLLENAMPEYCEPLEHFTGQDLINLTQEDFKKPPLCRVSSDNGQRLLDMIETLKMEHHLEAHKNGHANGHLNIGVDIPTPDGSFSIKIKPNGMPNGYRKEMIKIPMPELERSQYPMEWGKTFLAFLYALSCFVLTTVMISVVHERVPPKEVQPPLPDTFFDHFNRVQWAFSICEINGMILVGLWLIQWLLLKYKDVGNESRVVMIFLSIVHPVLLLGSIAGFLSLSL

SEQ ID NO: 48529 - protein, 47 aa, Homo sapiens
MEDEVVRFAKKMDKMVQKKNAAGALDLLKELKNIPMTLELLQCAADP

SEQ ID NO: 48530 - protein, 129 aa, Homo sapiens
MVGSLNCIVAVSQNMGIGKNGDLPWPPLRNEFRYFQRMTTTSSVEGKQNLVIMGKKTWFSIPEKNRPLKGRINLVLSRELKEPPQGAHFLSRSLDDALKLTEQPELANKVDMVWIVGGSSVYKIPRCSL

SEQ ID NO: 48531 - protein, 122 aa, Homo sapiens
MAAKPGELMGICSSYQAVMPHFVCLADEFPQPVRPAKLPKGRGRLRRPRQSRFKTQPVTFDEIQEVEEEGVSPMEEEKAKKSFLQSLECLRRSTQSLSLQREQLSSCKLRNSLDSSDSDSAL

SEQ ID NO: 48532 - protein, 294 aa, Homo sapiens
MAMSSGGSGGGVPEQEDSVLFRRGTGQSDDSDIWDDTALIKAYDKAVASFKHALKNGDICETSGKPKTTPKRKPAKKNKSQKKNTAASLQQWKVGDKCSAIWSEDGCIYPATIASIDFKRETCVVVYTGYGNREEQNLSDLLSPICEVANNIEQNAQENENESQVSTDESENSRSPGNKSDNIKPKSAPWNSFLPPPPPMPGPRLGPGKPGLKFNGPPPPPPPPPPHLLSCWLPPFPSGPPIIPPPPPICPDSLDDADALGSMLISWYMSGYHTGYYMTGFHCVSQDGLNLLTP

SEQ ID NO: 48533 - protein, 111 aa, Homo sapiens
HRFFRLYCHAPCMSGYLVDKFADRERKVALKAMIKTVFSLSLSSLHSGTRPGALAHPMPGGQWKEDRPSSPCPPAAGAPSKPAHRPLPHLLRHRLLFPAPWGLRVWGGGAA

SEQ ID NO: 48534 - protein, 168 aa, Homo sapiens
MASNGIQKRRPLLLGSTSFIPIGRRTYASAAEPVGSKAVLVTGCDSGFGFSLAKHLHSKGFLVFAGCLMKDKGHDGVKELDSLNSDRLRTVQLNVCSSEEVEKVVEIVRSSLKDPEKGMWGLVNNAGISTFGEVEFTSLETYKQVAEVNLWGTVRMTKSFLPLIRRAK

SEQ ID NO: 48535 - protein, 133 aa, Homo sapiens
MDLAGLLKSQFLCHLVFCYVFIASGLIINTIQLFTLLLWPINKQLFRKINCRLSYCISSQLVMLLEWWSGTECTIFTDPRAYLKYGKENAIVVLNHKFEIDFLCGWSLSERFGLLGFDLLHVACMPLELGLFS

SEQ ID NO: 48536 - protein, 373 aa, Homo sapiens
MEEPEEPADSGQSLVPVYIYSPEYVSMCDSLAKIPKRASMVHSLIEAYALHKQMRIVKPKVASMEEMATFHTDAYLQHLQKVSQEGDDDHPDSIEYGLGYDCPATEGIFDYAAAIGGATITAAQCLIDGMCKVAINWSGGWHHAKKDEASGFCYLNDAVLGILRLRRKFERILYVDLDLHHGDGVEDAFSFTSKVMTVSLHKFSPGFFPGTGDVSDVGLGKGRYYSVNVPIQDGIQDEKYYQICESVLKEVYQAFNPKAVVLQLGADTIAGDPMCSFNMTPVGIGKCLKYILQWQLATLILGGGGYNLANTARCWTYLTGVILGKTLSSEIPDHEFFTAYGPDYVLEITPSCRPDRNEPHRIQQILNYIKAIY

SEQ ID NO: 48537 - protein, 610 aa, Homo sapiens
MELQYPPPPPSPRICRERSGGDNASMPVLSEDSGLHETLALLTSQLRPDSNHKEEMGFLRDVFSEKSLSYLMKIHEKLRYYERQSPTPVLHSAVALAEDVMEELQAASVHSDERELLQLLSTPHLRAVLMVHDTVAQKNFDPVLPPLPDNIDEDFDEESVKIVRLVKNKEPLGATIRRDEHSGAVVVARIMRGGAADRSGLVHVGDELREVNGIAVLHKRPDEISQILAQSQGSITLKIIPATQEEDRLKESKVFMRALFHYNPREDRAIPCQEAGLPFQRRQVLEVVSQDDPTWWQAKRVGDTNLRAGLIPSKGFQERRLSYRRAAGTLPSPQSLRKPPYDQPCDKETCDCEGYLKGHYVAGLRRSFRLGCRERLGGSQEGKMSSGAESPELLTYEEVARYQHQPGERPRLVVLIGSLGARLHELKQKVVAENPQHFGVAVPHTTRPRKSHEKEGVEYHFVSKQAFEADLHHNKFLEHGEYKENLYGTSLEAIQAVMAKNKVCLVDVEPEALKQLRTSEFKPYIIFVKPAIQEKRKTPPMSPACEDTAAPFDEQQQEMAASAAFIDRHYGHLVDAVLVKEDLQGAYSQLKVVLEKLSKDTHWVPVSWVR

SEQ ID NO: 48538 - protein, 498 aa, Homo sapiens
MTSSPRAPPGEQGRGGAEMIRAAPPPLFLLLLLLLLLVSWASRGEAAPDQDEIQRLPGLAKQPSFRQYSGYLKGSGSKHLHYWFVESQKDPENSPVVLWLNGGPGCSSLDGLLTEHGPFLVQPDGVTLEYNPYSWNLIANVLYLESPAGVGFSYSDDKFYATNDTEVAQSNFEALQDFFRLFPEYKNNKLFLTGESYAGIYIPTLAVLVMQDPSMNLQGLAVGNGLSSYEQNDNSLVYFAYYHGLLGNRLWSSLQTHCCSQNKCNFYDNKDLECVTNLQEVARIVGNSGLNIYNLYAPCAGGVPSHFRYEKDTVVVQDLGNIFTRLPLKRMWHQALLRSGDKVRMDPPCTNTTAASTYLNNPYVRKALNIPEQLPQWDMCNFLVNLQYRRLYRSMNSQYLKLLSSQKYQILLYNGDVDMACNFMGDEWFVDSLNQKMEVQRRPWLVKYGDSGEQIAGFVKEFSHIAFLTIKGAGHMVPTDKPLAAFTMFSRFLNKQPY

SEQ ID NO: 48539 - protein, 38 aa, Homo sapiens
MSFVAGVIRRLDETVVNRIAAGEVIQRPANAIKEMIEN

SEQ ID NO: 48540 - protein, 87 aa, Homo sapiens
MVHGSVTFRDVAIDFSQEEWECLQPDQRTLYRDVMLENYSHLISLAGSSISKPDVITLLEQEKEPWIVIWSQNMDLRKYLQKMIFLK

SEQ ID NO: 48541 - protein, 79 aa, Homo sapiens
LSPICEVANNIEQNAQENENESQVSTDESENSRSPGNKSDNIKPKSAPWNSFLPPPPPMPGPRLGPGKKGNEKNPEVVI

SEQ ID NO: 48542 - protein, 370 aa, Homo sapiens
MDASLEKIADPTLAEMGKNLKEAVKMLEDSQRRTEEENGKKLISGDIPGPLQGSGQDMVSILQLVQNLMHGDEDEEPQSPRIQNIGEQGHMALLGHSLGAYISTLDKEKLRKLTTRILSDTTLWLCRIFRYENGCAYFHEEEREGLAKICRLAIHSRYEDFVVDGFNVLYNKKPVIYLSAAARPGLGQYLCNQLGLPFPCLCRVPCNTVFGSQHQMDVAFLEKLIKDDIERGRLPLLLVANAGTAAVGHTDKIGRLKELCEQYGIWLHVEGVNLATLALGYVSSSVLAAAKCDSMTMTPGPWLGLPAVPAVTLYKHDDPALTLVAGLTSNKPTDKLRALPLWLSLQYLGLDGFVERIKHACQLSQRLQKV

SEQ ID NO: 48543 - protein, 60 aa, Homo sapiens
MAGPAWISKVSRLLGAFHNPKQVTRGFTGGVQTVTLIPGDGIGPEISAAVMKIFDAAKAL

SEQ ID NO: 48544 - protein, 411 aa, Homo sapiens
MTPEDPEETQPLLGPPGGSAPRGRRVFLAAFAAALGPLSFGFALGYSSPAIPSLQRAAPPAPRLDDAAASWFGAVVTLGAAAGGVLGGWLVDRAGRKLSLLLCSVPFVAGFAVITAAQDVWMLLGGRLLTGLACGVASLVAPVYISEIAYPAVRGLLGSCVQLMVVVGILLAYLAGWVLEWRWLAVLGCVPPSLMLLLMCFMPETPRFLLTQHRRQEAMAALRFLWGSEQGWEDPPIGAEQSFHLALLRQPGIYKPFIIGVSLMAFQQLSGVNAVMFYAETIFEEAKFKDSSLASVVVGVIQVLFTAVAALIMDRAGRRLLLVLSGVVMVFSTSAFGAYFKLTQGGPGNSSHVAISAPVSAQPVDASVGLAWLAVGSMCLFIAGGPQALWSLLACLRFLHLQCPFHFVLCP

SEQ ID NO: 48545 - protein, 257 aa, Homo sapiens
MENSNGSYLNDSISPNESIDDEHLLIQHYCQSLNQDSPLSQPRSPAQILISLESEERGELERILADLEEENRNLQAEYDRLKQQHEHKGLSPLPSPPEMMPTSPQSPRDAELIAEAKLLRQHKGRLEARMQILEDHNKQLESQLHRLRQLLEQPQAEAKVNGTTVSSPSTSLQRSDSSQPMLLRVVGSQTSDSMGEEDLLSPPQDTSTGLEEVMEQLNNSFPSSRGHNVGSLFHMADDLGRAMESLVSVMTDEEGAE

SEQ ID NO: 48546 - protein, 235 aa, Homo sapiens
  MOD_RES (1)..(1): Any amino acid
XAGPQQQPPYLHLAELTASQFLEIWKHFDADGNGYIEGKELENFFQELEKARKGSGMMSKSDNFGEKMKEFMQKYDKNSDGKIEMAELAQILPTEENFLLCFRQHVGSSAEFMEAWRKYDTDRSGYIEANELKGFLSDLLKKANRPYDEPKLQEYTQTILRMFDLNGDGKLGLSEMSRLLPVQENFLLKFQGMKLTSEEFNAIFTFYDKEMNIQQLTNYRKSVMSLAEAGKLYRK

SEQ ID NO: 48547 - protein, 68 aa, Homo sapiens
MRSGKASCTLETVWEDKHKYEEAERRFYEHEATQAAASAQQLPAEGPAMNGPGQDDPEDADEAEAPDG

SEQ ID NO: 48548 - protein, 240 aa, Homo sapiens
MLLKPHSRVQVFEGAEDNLPDRDALRAALAIQQLAEGLTADDLLLVLISGGGSALLPAPIPPVTLEEKQTLTRLLAARGATIQELNTIRKALSQLKGGGLAQAAYPAQVVSLILSDVVGDPVEVIASGPTVASSHNVQDCLHILNRYGLRAALPRSVKTVLSRADSDPHGPHTCGHVLNVIIGSNVLALAEAQRQAEALGYQAVVLSAAMQGWGTPAAHRDDRYQCHGHPPLVPAASVMA

SEQ ID NO: 48549 - protein, 325 aa, Homo sapiens
MMPSPSDSSRSLTSRPSTRGLTHLRLHRPWLQALLTLGLVQVLLGILVVTFSMVASSVTTTESIKRSCPSWAGFSNLLFSVCGLTICAAIICTLSAIVCCIQIFSLDLVHTLAPERSVSGPLGPLGCTSPPPAPLLHTMLDLEEFVPPVPPPPYYPPEYTCSSETDAQSITYNGSMDSPVPLYPTDCPPSYEAVMGLRGDSQATLFDPQLHDGSCICERVASIVDADFRDLYTKVLEEEAASVSSADTGLCSEACLFRLARCPSPKLLRARSAEKRRPVPTFQKVPLPSGPAPAHSLGDLKGSWPGRGLVTRFLQISRKAPDPSG

SEQ ID NO: 48550 - protein, 411 aa, Homo sapiens
MAAQVGAVRVVRAVAAQEEPDKEGKEKPHAGVSPRGVKRQRRSSSGGSQEKRGRPSQEPPLAPPHRRRRSRQHPGPLPPTNAAPTVPGPVEPLLLPPPPPPSLAPAGPAVAAPLPAPSTSALFTFSPLTVSAAGPKHKGHKERHKHHHHRGPDGDPSSCGTDLKHKDKQENGERTGGVPLIKAPKRETPDENGKTQRADDFVLKKIKKKKKKKHREDMRGRRLKMYNKEVQTVCAGLTRISKEILTQGQINSTSGLNKESFRYLKDEQLCRLNLGMQEYRVPQGVQTPFMTHQEHSIRRNFLKTGTKFSNFIHEEHQSNGGALVLHAYMDELSFLSPMEMERFSEEFLALTFSENEKNAAYYALAIVHGAAAYLPDFLDYFAFNFPNTPVKMEILGKKDIETTTISNFHTQ

SEQ ID NO: 48551 - protein, 156 aa, Homo sapiens
MQVVPLEVNIGILIAVTRVISQISADNYKIHGDPSAFKLTAKAVAVLLPILGTSWVFGVLAVNGCAVVFQYMFATLNSLQGLFIFLFHCLLNSEVRAAFKHKTKVWSLTSSSARTSNAKPFHSDLMNGTRPGMASTKLSPWDKSSHSAHRVDLSAV

SEQ ID NO: 48552 - protein, 114 aa, Homo sapiens
MSISLLCCAAFPLLWAGPVNAGVTQTPKFRILKIGQSMTLQCAQDMNHNYMYWYRQDPGMGLKLIYYSVGAGITDKGEVPNGYNVSRSTTEYFPLRLELAAPSQTSVYFCASSY

SEQ ID NO: 48553 - protein, 64 aa, Homo sapiens
MMDGPRSDVGRWGGNPLQPPTTPSPEPEPEPDGRSRRGGGRSFWARCCGCCSCRNAADDDWGPE

SEQ ID NO: 48554 - protein, 220 aa, Homo sapiens
MARRYDELPHYPGIVDGPAALASFPETVPAVPGPYGPHRPPQPLPPGLDSDGLKREKDEIYGHPLFPLLALVFEKCELATCSPRDGAGAGLGTPPGGDVCSSDSFNEDIAAFAKQVRSERPLFSSNPELDNLMIQAIQVLRFHLLELEKVSASHLPTPSLAPVIPPPLVASAPHLPALSPPELKQNAAPVPEHPRPAPVGGPPQYPGAPPGPRPVRQLLS

SEQ ID NO: 48555 - protein, 119 aa, Homo sapiens
MCGDCVEKEYPNRGNTCLENGSFLLNFTGCAVCSKRDFMLITNKSLKEEDGEEIVTYDHLCKNCHHVIARHEYTFSIMDEFQDKIKGTLRRRVCHFLGEKRSFQCLSSCQAEETKLCLS

SEQ ID NO: 48556 - protein, 823 aa, Homo sapiens
MWGSPALAWAVWLACVQPTVFPWSLSFRSDTDKPSSAAEVLTEASSCWTDTVECFSDYMTLWIPRSHVEGLRRWLARTLHLPGTWRSPDHLDSSLAKCGYFLHLASDGDFLFRVQYSACFVQKEKANYRLEIRIFQKGVMGLERSDRYIMKCPMLRSRLGQESVHCGPMFIQVSRPLPLWRDNRQTPWLLSLRGELVASLEDASLMGLYVDMNATTVTVQSPRQGLLQRWEVLNTSAELLPLWLVSGHHAYSLEAACPPVSFQPESEVLVHIPKQRLGLVKRGSYIEETLSLRFLRVHQSNIFMVTENKDFVVVSIPAAGVLQVQRCQEVGGTPGTQAFYRVDLSLEFAEMAAPVLWTVESFFQCVGSGTESPASTAALRTTPSPPSPGPETPPAGVPPAASSQVWAAGPAAQEWLSRDLLHRPSDALAKKGLGPFLQTAKPARRGQTSASILPRVVQAQRGPQPPPGEAGIPGHPTPPATLPSEPVEGVQASPWRPRPVLPTHPALTLPVSSDASSPSPPAPRPERPESLLVSGPSVTLTEGLGTVRPEQDPAKSPGSPLLLRGLSSGDVAAPEPIMGEPGQASEEFQPLARPWRATLAAEELVSHRSPGEPQETCSGTEVERPRQTGPGLPREGARGHMDLSSSEPSQDIEGPGLSILPARDATFSTPSVRQPDPSAWLSSGPELTGMPRVRLAAPLAVLPMEPLPPEPVRPAALLTPEASSVGGPDQARYLESAPGWPVGQEEWGVAHTSSPPSTQTLSLWAPTGVLLPSLVELEYPFQAGRGASLQQELTEPTLALSAESHRPPELQDSVEGLSERPSR

SEQ ID NO: 48557 - protein, 147 aa, Homo sapiens
MAEKFDCHYCRDPLQGKKYVQKDGHHCCLKCFDKFCANTCVECRKPIGADSKEVHYKNRFWHDTCFRCAKCLHPLANETFVAKDNKILCNKCTTREDSPKCKGCFKAIVAGDQNVEYKGTVWHKDCFTCSNCKQVIGTGSFFPKGED

SEQ ID NO: 48558 - protein, 173 aa, Homo sapiens
MVYTVLQHRDYHNTSMALEGVPELLQKILEAPDFYVQMKWEFTSWVPLVSRICPNDVCRIWKSGAKLRVDITLLGFENMSWIRGRRSFIFKGEDNWAELMEVNHDDKVVTTERFDLSQEMERLTLDLMKPKSREVERRLTSPVINTSLDTKNIAFERVFRVLKLTLLQLTVCS

SEQ ID NO: 48559 - protein, 46 aa, Homo sapiens
MAKNRRDRNSWGGFSEKTYEWSSEEEEPVKKAGPVQVLIVKDDHSF

SEQ ID NO: 48560 - protein, 415 aa, Homo sapiens
MLLSVPLTASRAPSSNPLPKADDLAQEMEDVDFEEEEEEEGNEEGWVLEPQEGVVGSMEGPDDSEVTFALHSASVFCVSLDPKTNTLAVTGGEDDKAFVWRLSDGELLFECAGHKDSVTCAGFSHDSTLVATGDMSGLLKVWQVDTKEEVWSFEAGDLEWMEWHPRAPVLLAGTADGNTWMWKVPNGDCKTFQGPNCPATCGRVLPDGKRAVVGYEDGTIRIWDLKQGSPIHVLKGTEGHQGPLTCVAANQDGSLILTGSVDCQAKLVSATTGKVVGVFRPETVASQPSLGEGEESESNSVESLGFCSVMPLAAVGYLDGTLAIYDLATQTLRHQCQHQSGIVQLLWEAGTAVVYTCSLDGIVRLWDARTGRLLTDYRGHTAEILDFALSKDASLVVTTSGDHKAKVFCVQRPDR

SEQ ID NO: 48561 - protein, 758 aa, Homo sapiens
MSAEAADREAATSSRPCTPPQTCWFEFLLEESLLEKHLRKPCPDPAPVQLIVQFLEQASKPSVNEQNQVQPPPDNKRNRILKLLALKVAAHLKWDLDILEKSLSVPVLNMLLNELLCISKVPPGTKHVDMDLATLPPTTAMAVLLYNRWAIRTIVQSSFPVKQAKPGPPQLSVMNQMQQEKELTENILKVLKEQAADSILVLEAALKLNKDLYVHTMRTLDLLAMEPGMVNGETESSTAGLKVKTEEMQCQVCYDLGAAYFQQGSTNSAVYENAREKFFRTKELIAEIGSLSLHCTIDEKRLAGYCQACDVLVPSSDSTSQQLTPYSQVHICLRSGNYQEVIQIFIEDNLTLSLPVQFRQSVLRELFKKAQQGNEALDEICFKVCACNTVRDILEGRTISVQFNQLFLRPNKEKIDFLLEVCSRSVNLEKASESLKGNMAAFLKNVCLGLEDLQYVFMISSHELFITLLKDEERKLLVDQMRKRSPRVNLCIKPVTSFYDIPASASVNIGQLEHQLILSVDPWRIRQILIELHGMTSERQFWTVSNKWEVPSVYSGVILGIKDNLTRDLVYILMAKGLHCSTVKDFSHAKQLFAACLELVTEFSPKLRQVMLNEMLLLDIHTHEAGTGQAGERPPSDLISRVRGYLEMRLPDIPLRQVIAEECVAFMLNWRENEYLTLQVPAFLLQSNPYVKLGQLLAATCKELPGPKESRRTAKDLWEVVVQICSVSSQHKRGNDGRVSLIKQRESTLGIMYRYVLE

SEQ ID NO: 48562 - protein, 180 aa, Homo sapiens
MRPGTGQGGLEAPGEPGPNLRQRWPLLLLGLAVVTHGLLRPTAASQSRALGPGAPGGSSRSSLRSRWGSRFLLQRGSWTGPRCWPRGFQSKHNSVTHVFGSGTQLTVLSQPKATPSVTLFPPSSEELQANKATLVCLMNDFYPGILTVTWKADGTPITQGVEMTTPSKQSNNKYAASSYL

SEQ ID NO: 48563 - protein, 93 aa, Homo sapiens
  MOD_RES (1)..(1): Any amino acid
XGSTAWSSEAEPQEGRSQMLQRAGLTDEKVKAYLSLHPQVLDEFVSESVSAETVEKWLKRKNNKSEDESAPKEVSRGCHAPSICKTCNIYKEQ

SEQ ID NO: 48564 - protein, 160 aa, Homo sapiens
MQFSFQQGGWGASLADRLVRKCDVLNRGFSGYNTRWAKIILPRLIRKGNSLDIPVAVTIFFGANDSALKDENPKQHIPLEEYAANLKSMVQYLKSVDIPENRVILITPTPLCETAWEEQCIIQGCKLNRLNSVVGEYANACLQVAQDCGTDVLDLWTLMQ

SEQ ID NO: 48565 - protein, 417 aa, Homo sapiens
MDVTKKNKRDGTEVTERIVTETVTTRLTSLPPKGGTSNGYAKTASLGGGSRLEKQSLTHGSSGYINSTGSTRGHASTSSYRRAHSPASTLPNSPGSTFERKTHVTRHAYEGSSSGNSSPEYPRKEFASSSTRGRSQTRESEIRVRLQSASPSTRWTELDDVKRLLKGSRSASVSPTRNSSNTLPIPKKGTVETKIVTASSQSVSGTYDATILDANLPSHVWSSTLPAGSSMGTYHNNMTTQSSSLLNTNAYSAGSVFGVPNNMASCSPTLHPGLSTSSSVFGMQNNLAPSLTTLSHGTTTTSTAYGVKKNMPQSPAAVNTGVSTSAACTTSVQSDDLLHKDCKFLILEKDNTPAKKEMELLIMTKDSGKVFTASPASIAATSFSEDTLKKEKQAAYNADSGLKAEANGKNKYDCCPP

SEQ ID NO: 48566 - protein, 105 aa, Homo sapiens
CGALLACLLLVLPVSEANFLSKQQASQVLVRKRRANSLLEETKQGNLERECIEELCNKEEAREVFENDPETDYFYPKYLAPCCVTQAGVLWPALSSLQLLSPWFK

SEQ ID NO: 48567 - protein, 118 aa, Homo sapiens
MNVLLGSVVIFATFVTLCNASCYFIPNEGVPGDSTRKCMDLKGNKHPINSEWQTDNCETCTCYETEISCCTLFVSMTVFLHLWVMTKTTAKESSRRRTASISWWRRRTQKRPVLSVNG

SEQ ID NO: 48568 - protein, 373 aa, Homo sapiens
MKICPFSSKSSIVLALKFRSLIHFEKYPQPKGQKKKKIVKYGMGGLIILFLIAIIWFPLLFMSLVRSVVGVVNQPIDVTVTLKLGGYEPLFTMSAQQPSIIPFTAQAYEELSRQFDPQPLAMQFISQYSPEDIVTAQIEGSSGALWRISPPSRAQMKRELYNGTADITLRFTWNFQRDLAKGGTVEYANEKHMLALAPNSTARRQLASLLEGTSDQSVVIPNLFPKYIRAPNGPEANPVKQLQPNEEADYLGVRIQLRREQGAGATGFLEWWVIELQECRTDCNLLPMVIFSDKHHGAVRVHRAGHRQVRARILQRDLALHYVRGAAVRGPHPQALPGHLPGAGDSGAGAGGGVVRQAHLPLPLTGDHDQVDS

SEQ ID NO: 48569 - protein, 62 aa, Homo sapiens
  MOD_RES (1)..(1): Any amino acid
XGPPAAGAFKERPTKPTAFRKFYERGDFPIALEHDSKGNKIAWKILGMKNYKTTSPWPLSNR

SEQ ID NO: 48570 - protein, 127 aa, Homo sapiens
MWVFEETVNGRKLTDIINNDHENVKYLPGHKLPENVVAMSNLSEAVQDADLLVFVIPHQFIHRICDEITGRVPKKALGITLIKGIDEGPEGLKLISDIIREKMGIDISVLMGANIANEVAAEKFCET

SEQ ID NO: 48571 - protein, 172 aa, Homo sapiens
TLTSDPRLYMKISGNAMLQLGPFLYWTFLAAFEGTVFFFGTYFLFQTASLEENGKVYGNWTFGTIVFTVLVFTVTLKLALDTRFWTWINHFVIWGSLAFYVFFSFFWGGIIWPFLKQQRMYFVFAQMLSSVSTWLAIILLIFISLFPEILLIVLKNVRRRSARVHHLISSSA

SEQ ID NO: 48572 - protein, 167 aa, Homo sapiens
MGDLLMEKCRVVLPCSVQEYQVGQLYSVAEASKNETGGGEGIEVLKNEPYEKDGEKGQYTHKIYHLKSKVPAFVRMIAPEGSLVFHEKAWNAYPYCRTIVTNEYMKDDFFIKIETWHKPDLGTLENVHGLDPNTWKTVEIVHIDIADRSQVEPADYKADEDPALFQS

SEQ ID NO: 48573 - protein, 97 aa, Homo sapiens
MTSAGGAPGALPAGTPESSLHEALDQCMTALDLFLTNQFSEALSYLKPRTKESMYHSLTYATILEMQAMMTFDPQDILLAGNMMKEAQMLCQRGNPR

SEQ ID NO: 48574 - protein, 417 aa, Homo sapiens
MSTEKVDQKEEAGEKEVCGDQIKGPDKEEEPPAAASHGQGWRPGGRAARNARPEPGARHPALPAMVNDPPVPALLWAQEVGQVLAGRARRLLLQFGVLFCTILLLLWVSVFLYGSFYYSYMPTVSHLSPVHFYYRTDCDSSTTSLCSFPVANVSLTKGGRDRVLMYGQPYRVTLELELPESPVNQDLGMFLVTISCYTRGGRIISTSSRSYVPTTGAIIEIHSKRIQLYGAYLRIHAHFTGLRYLLYNFPMTCAFIGVASNFTFLSVIVLFSYMQWVWGGIWPRHRFSLQVNIRKRDNSRKEVQRRISAHQPGPEGQEESTPQSDVTEDGESPEDPSGTEGQLSEEEKPDQQPLSGEEELEPEASDGSGSWEDAALLTEANLPAPAPASASAPVLETLGSSEPAGGALRQRPTCSSS

SEQ ID NO: 48575 - protein, 751 aa, Homo sapiens
MANGTADVRKLFIFTTTQNYFGLMSELWDQPLLCNCLEINNFLDDGNQMLLRVQRSDAGISFSNTIEFGDTKDKVLVFFKLRPEVITDENLHDNILVSSMLESPISSLYQAVRQVFAPMLLKDQEWSRNFDPKLQNLLSELEAGLGIVLRRSDTNLTKLKFKEDDTRGILTPSDEFQFWIEQAHRGNKQISKERANYFKELFETIAREFYNLDSLSLLEVVDLVETTQDVVDDVWRQTEHDHYPESRMLHLLDIIGGSFGRFVQKKLGTLNLWEDPYYLVKESLKAGISICEQWVIVCNHLTGQVWQRYVPHPWKNEKYFPETLDKLGKRLEEVLAIRTIHEKFLYFLPASEEKIICLTRVFEPFTGLNPVQYNPYTEPLWKAAVSQYEKIIAPAEQKIAGKLKNYISEIQDSPQQLLQAFLKYKELVKRPTISKELMLERETLLARLVDSIKDFRLDFENRCRGIPGDASGPLSGKNLSEVVNSIVWVRQLELKVDDTIKIAEALLSDLPGFRCFHQSAKDLLDQLKLYEQEQFDDWSRDIQSGLSDSRSGLCIEASSRIMELDSNDGLLKVHYSDRLVILLREVRQLSALGFVIPAKIQQVANIAQKFCKQAIILKQVAHFYNSIDQQMIQSQRPMMLQSALAFEQIIKNSKAGSGGKSQITWDNPKELEGYIQKLQNAAERLATENRKLRKWHTTFCEKVVVLMNIDLLRQQQRWKDGLQELRTGLATVEAQKCKWIFDDFQQSRRSV

SEQ ID NO: 48576 - protein, 195 aa, Homo sapiens
  MOD_RES (1)..(1): Any amino acid
XKQQLPPKKKRRVGTTVHCDYLNRPHKSIHRRRTDPMVTLSSILESIINDMRDLPNTYPFHTPVNAKVVKDYYKIITRPMDLQTLRENVRKRLYPSREEFREHLELIVKNSATYNGPKHSLTQISQSMLDLCDEKLKEKEDKLARLEKAINPLLDDDDQVAFSFILDNIVTQKMMAVPDVSCLCAKYFLAISSPS

SEQ ID NO: 48577 - protein, 443 aa, Homo sapiens
MQRMIQQFAAEYTSKNSSTQDPSQPNSTKNQSLPKASPVTTSPTAATTQNPVLSKLLMADQDSPLDLTVRKSQSEPSEQAGNKMSSDTSYGVLDLSTKKSPCAGSTSLSHSPGCSSTQGNGRPGRPSQYRPDGLRSGDGVPPRSLQDGTREGFGHSTSLKVPLARSLQISEELLSRNQLSTAASLGPSGLQNHGQHLILSREASWAKPHYEFNLSRMKFRGNGALSNISDLPFLAENSAFPKMALQAKQDGKKDVSHSSPVDLKIPQVRGMDLSWESRTGDQYSYSSLVMGSQTESALSKKLRAILPKQSRKSMLDAGPDSWGSDAEQSTSGQPYPTSDQEGDPGSKQPRKKRGRYRQYNSEILEEAISVVMSGKMSVSKAQSIYGIPHSTLEYKVKERLGTLKNPPKKKMKLMRSEGPDVSVKIELDPQGEAAQSANESKNE

SEQ ID NO: 48578 - protein, 171 aa, Homo sapiens
  MOD_RES (1)..(1): Any amino acid
XGLFSCPNFQIAKSAAEELKNETWEYSSSVISFVNGQFLGDALDLQKWAHEVWDIVDIKPSALYDALTEDFSAKFLRDTKHDFVFLDICIDSSPIGRLIFELYCDVCPKTCKNFQVLCTGKAGFSQRGIRLHYKNSIFHRIVQNGWIQGGDIVYGKGDNGESIYGPTFEGN

SEQ ID NO: 48579 - protein, 475 aa, Homo sapiens
  MOD_RES (1)..(1): Any amino acid
XRLLKNQSQYEKQLKKLQQDVMEMKKTKVRLMKQMKEEQEKARLTESRRNREIAQLKKDQRKRDHQLRLLEAQKRNQEVVLRRKTEEVTALRRQVRPMSDKVAGKVTRKLSSSDAPAQDTGSSAAAVETDASRTGAQQKMRIPVARVQALPTPATNGNRKKYQRKGLTGRVFISKTARMKWQLLERRVTDIIMQKMTISNMEADMNRLLKQREELTKRREKLSKRREKIVKENGEGDKNVANINEEMESLTANIDYINDSISDCQANIMQMEEAKEEGETLDVTAVINACTLTEARYLLDHFLSMGINKGLQAAQKEAQIKVLEGRLKQTEITSATQNQLLFHMLKEKAELNPELDALLGHALQENVEDSTDEDAPLNSPGSEGSTLSSDLMKLCGEVKPKNKARRRTTTQMELLYADSSELASDTSTGDASLPGPLTPVAEGQEIGMNTETSGTSAREKELSPPPGLPSKIGSM

SEQ ID NO: 48580 - protein, 129 aa, Homo sapiens
GSRLLAGSTTGALAVAVAQPTDVVKVRFQAQARAGGGRRYQSTVNAYKTIAREEGFRGLWKGTSPNVARNAIVNCAELVTYDLIKDALLKANLMTGFCTTVIASPVDVVKTRYMNSALGQYSSAGHCAL

SEQ ID NO: 48581 - protein, 569 aa, Homo sapiens
MLVPLAKLSCLAYQCFHALKIKKNYLPLCATRWSSTSTVPRITTHYTIYPRDKDKRWEGVNMERFAEEADVVIVGAGPAGLSAAVRLKQLAVAHEKDIRVCLVEKAAQIGAHTLSGACLDPGAFKELFPDWKEKGAPLNTPVTEDRFGILTEKYRIPVPILPGLPMNNHGNYIVRLGHLVSWMGEQAEALGVEVYPGYAAAEVLFHDDGSVKGIATNDVGIQKDGAPKATFERGLELHAKVTIFAEGCHGHLAKQLYKKFDLRANCEPQTYGIGLKELWVIDEKNWKPGRVDHTVGWPLDRHTYGGSFLYHLNEGEPLVALGLVSIPKLTFPGGLLIGCSPGFMNVPKIKGTHTAMKSGILAAESIFNQLTSENLQSKTIGLHVTEYEDNLKNSWVWKELYSVRNIRPSCHGVLGVYGGMIYTGIFYWILRGMEPWTLKHKGSDFERLKPAKDCTPIEYPKPDGQISFDLLSSVALSGTNHEHDQPAHLTLRDDSIPVNRNLSIYDGPEQRFCPAGVYEFVPVEQGDGFRLQINAQNCVHCKTCDIKDPSQNINWVVPEGGGGPAYNGM

SEQ ID NO: 48582 - protein, 2881 aa, Homo sapiens
MSEPGGGGGEDGSAGLEVSAVQNVADVSVLQKHLRKLVPLLLEDGGEAPAALEAALEEKSALEQMRKFLSDPQVHTVLVERSTLKEDVGDEGEEEKEFISYNINIDIHYGVKSNSLAFIKRTPVIDADKPVSSQLRVLTLSEDSPYETLHSFISNAVAPFFKSYIRESGKADRDGDKMAPSVEKKIAELEMGLLHLQQNIEIPEISLPIHPMITNVAKQCYERGEKPKVTDFGDKVEDPTFLNQLQSGVNRWIREIQKVTKLDRDPASGTALQEISFWLNLERALYRIQEKRESPEVLLTLDILKHGKRFHATVSFDTDTGLKQALETVNDYNPLMKDFPLNDLLSATELDKIRQALVAIFTHLRKIRNTKYPIQRALRLVEAISRDLSSQLLKVLGTRKLMHVAYEEFEKVMVACFEVFQTWDDEYEKLQVLLRDIVKRKREENLKMVWRINPAHRKLQARLDQMRKFRRQHEQLRAVIVRVLRPQVTAVAQQNQGEVPEPQDMKVAEVLFDAADANAIEEVNLAYENVKEVDGLDVSKEGTEAWEAAMKRYDERIDRVETRITARLRDQLGTAKNANEMFRIFSRFNALFVRPHIRGAIREYQTQLIQRVKDDIESLHDKFKVQYPQSQACKMSHVRDLPPVSGSIIWAKQIDRQLTAYMKRVEDVLGKGWENHVEGQKLKQDGDSFRMKLNTQEIFDDWARKVQQRNLGVSGRIFTIESTRVRGRTGNVLKLKVNFLPEIITLSKEVRNLKWLGFRVPLAIVNKAHQANQLYPFAISLIESVRTYERTCEKVEERNTISLLVAGLKKEVQALIAEGIALVWESYKLDPYVQRLAETVFNFQEKVDDLLIIEEKIDLEVRSLETCMYDHKTFSEILNRVQKAVDDLNLHSYSNLPIWVNKLDMEIERILGVRLQAGLRAWTQVLLGQAEDKAEVDMDTDAPQVSHKPGGEPKIKNVVHELRITNQVIYLNPPIEECRYKLYQEMFAWKMVVLSLPRIQSQRYQVGVHYELTEEEKFYRNALTRMPDGPVALEESYSAVMGIVSEVEQYVKVWLQYQCLWDMQAENIYNRLGEDLNKWQALLVQIRKARGTFDNAETKKEFGPVVIDYGKVQSKVNLKYDSWHKEVLSKFGQMLGSNMTEFHSQISKSRQELEQHSVDTASTSDAVTFITYVQSLKRKIKQFEKQVELYRNGQRLLEKQRFQFPPSWLYIDNIEGEWGAFNDIMRRKDSAIQQQVANLQMKIVQEDRAVESRTTDLLTDWEKTKPVTGNLRPEEALQALTIYEGKFGRLKDDREKCAKAKEALELTDTGLLSGSEERVQVALEELQDLKGVWSELSKVWEQIDQMKEQPWVSVQPRKLRQNLDALLNQLKSFPARLRQYASYEFVQRLLKGYMKINMLVIELKSEALKDRHWKQLMKRLHVNWVVSELTLGQIWDVDLQKNEAIVKDVLLVAQGEMALEEFLKQIREVWNTYELDLVNYQNKCRLIRGWDDLFNKVKEHINSVSAMKLSPYYKVFEEDALSWEDKLNRIMALFDVWIDVQRRWVYLEGIFTGSADIKHLLPVETQRFQSISTEFLALMKKVSKSPLVMDVLNIQGVQRSLERLADLLGKIQKALGEYLERERSSFPRFYFVGDEDLLEIIGNSKNVAKLQKHFKKMFAGVSSIILNEDNSVVLGISSREGEEVMFKTPVSITEHPKINEWLTLVEKEMRVTLAKLLAESVTEVEIFGKATSIDPNTYITWIDKYQAQLVVLSAQIAWSENVETALSSMGGGGDAAPLHSVLSNVEVTLNVLADSVLMEQPPLRRRKLEHLITELVHQRDVTRSLIKSKIDNAKSFEWLSQMRFYFDPKQTDVLQQLSIQMANAKFNYGFEYLGVQDKLVQTPLTDRCYLTMTQALEARLGGSPFGPAGTGKTESVKALGHQLGRFVLVFNCDETFDFQAMGRIFVGLCQVGAWGCFDEFNRLEERMLSAVSQQVQCIQEALREHSNPNYDKTSAPITCELLNKQVKVSPDMAIFITMNPGYAGRSNLPDNLKKLFRSLAMTKPDRQLIAQVMLYSQGFRTAEVLANKIVPFFKLCDEQLSSQSHYDFGLRALKSVLVSAGNVKRERIQKIKREKEERGEAVDEGEIAENLPEQEILIQSVCETMVPKLVAEDIPLLFSLLSDVFPGVQYHRGEMTALREELKKVCQEMYLTYGDGEEVGGMWVEKVLQLYQITQINHGLMMVGPSGSGKSMAWRVLLKALERLEGVEGVAHIIDPKAISKDHLYGTLDPNTREWTDGLFTHVLRKIIDSVRGELQKRQWIVFDGDVDPEWVENLNSVLDDNKLLTLPNGERLSLPPNVRIMFEVQDLKYATLATVSRCGMVWFSEDVLSTDMIFNNFLARLRSIPLDEGEDEAQRRRKGKEDEGEEAASPMLQIQRDAATIMQPYFTSNGLVTKALEHAFQLEHIMDLTRLRCLGSLFSMLHQACRNVAQYNANHPDFPMQIEQLERYIQRYLVYAILWSLSGDSRLKMRAELGEYIRRITTVPLPTAPNIPIIDYEVSISGEWSPWQAKVPQIEVETHKVAAPDVVVPTLDTVRHEALLYTWLAEHKPLVLCGPPGSGKTMTLFSALRALPDMEVVGLNFSSATTPELLLKTFDHYCEYRRTPNGVVLAPVQLGKWLVLFCDEINLPDMDKYGTQRVISFIRQMVEHGGFYRTSDQTWVKLERIQFVGACNPPTDPGRKPLSHRFLRHVPVVYVDYPGPASLTQIYGTFNRAMLRLIPSLRTYAEPLTAAMVEFYTMSQERFTQDTQPHYIYSPREMTRWVRGIFEALRPLETLPVEGLIRIWAHEALRLFQDRLVEDEERRWTDENIDTVALKHFPNIDREKAMSRPILYSNWLSKVF

SEQ ID NO: 48583 - protein, 159 aa, Homo sapiens
MKIFVGNVDGADTTPEELAALFAPYGTVMSCAVMKQFAFVHMRENAGALRAIEALHGHELRPGRALVVEMSRPRPLNTWKIFVGNVSAACTSQELRSLFERRGRVIECDVVKGDVKIFILCCSSSLLLLLSPGSWTTRLFTWRRKQMPKPQSRSSTAKK

SEQ ID NO: 48584 - protein, 60 aa, Homo sapiens
MASELCKTISVARLEKHKNLFLNYRNLHHFPLELLKDEGLQYLERLYMKRNSLTSLRLAI

SEQ ID NO: 48585 - protein, 280 aa, Homo sapiens
MTSYILISFVLLIGVGCIEKDQSCPVFGGRKRLHLLFVGGQLRQVRMLRGSPEASTDCCWLHQATGSGSVTQAGVQWYDLGSLQPLPPRFKRFSCLSLPSSWDYRSSWELPDLQEGKIQAISDSDGVNYPWYGNTTETCTIVGPTKRDSKFIISMNDNFYPSVTWAVPVSESNVAKLTNIYRDQSFTTWLVATNTSTNDMIILQTLHWRMQLSIEVNPNRPLGQRARLREPIAQDQPKILSKNEPIPPSALVKPNANDAQVLMWRPKYGQPLVVIPPKHR

SEQ ID NO: 48586 - protein, 96 aa, Homo sapiens
MQGQKVLLEKTGSQLGEQELPDFQPQTPRRDLRESSPAEPSQAGAYDRLSPHHWEKSPLLQEPTPKLAGTAYRKAVPGGRKCGASLSWEKSSRECE

SEQ ID NO: 48587 - protein, 145 aa, Homo sapiens
MRAKLFRFASENDLPEWKERGTGDVKLLKHKEKGAIRLLMRRDKTLKICANHYITPMMELKPNAGSDRAWVWNTHADFADECPKPELLAIRFLNAENAQKFKTKFEECRKEIEEREKKGSGKNDHAEKVAEKLEALSVKEETKED

SEQ ID NO: 48588 - protein, 48 aa, Homo sapiens
MGKKVAIIGAGVSGLASIRSCLEEGLEPTCFEKSNDIGGLWKFSRSHE

SEQ ID NO: 48589 - protein, 149 aa, Homo sapiens
  MOD_RES (1)..(1): Any amino acid
XQGFGWLVSWLHGAVLPAGTWTSKSHVRFIDYEYAGYNYQAFDIGNHFNEFAGVNEVDYCLYPARETQLQWLHYYLQAQKGMAVTPREVQRLYVQVNKFALASHFFWALWALIQNQYSTIDFDFLRYAVIRFNQYFKVKPQASALEMPK

SEQ ID NO: 48590 - protein, 3671 aa, Homo sapiens
MLESYVTPILMSYVNRYIKNLKPSDLQLSLWGGDVVLSKLELKLDVLEQELKLPFTFLSGHIHELRIHVPWTKLGSEPVVITINTMECILKLKDGIQDDHESCGSNSTNRSTAESTKSSIKPRRMQQAAPTDPDLPPGYVQSLIRRVVNNVNIVINNLILKYVEDDIVLSVNITSAECYTVGELWDRAFMDISATDLVLRKVINFSDCTVCLDKRNASGKIEFYQDPLLYKCSFRTRLHFTYENLNSKMPSVIKIHTLVESLKLSITDQQLPMFIRIMQLGIALYYGEIGNFKEGEIEDLTCHNKDMLGNITGSEDETRIDMQYPAQHKGQELYSQQDEEQPQGWVSWAWSFVPAIVSYDDGEEDFVGNDPASTMHQQKAQTLKDPIVSIGFYCTKATVTFKLTEMQVESSYYSPQKVKSKEVLCWEQEGTTVEALMMGEPFFDCQIGFVGCRAMCLKGIMGVKDFEENMNRSETEACFFICGDNLSTKGFTYLTNSLFDYRSPENNGTRAEFILDSTHHKETYTEIAGMQRFGAFYMDYLYTMENTSGKGSTNQQDFSSGKSEDLGTVQEKSTKSLVIGPLDFRLDSSAVHRILKMIVCALEHEYEPYSRLKSDIKDENETILNPEEVALLEEYIPTRHTSVTLLKCTCTISMAEFNLLDHLLPVIMGEKNSSNFMNTTNFQSLRPLPSIRILVDKINLEHSVPMYAEQLVHVVSSLTQPSDNLLHYCYVHCYLKIFGFQAGLTSLDCSGSYCLPVPVIPSFSTALYGKLLKLPTCWTKRSQIAITEGIFELPNLTIQATRAQTLLLQAIYQSWSHLGNVSSSAVIEALINEIFLSIGVKSKNPLPTLEGSIQNVELKYCSTSLVKCASGTMGSIKICAKAPVDSGKEKLIPLLQGPSDTKDLHSTKWLNESRKPESLLAPDLMAFTIQVPQYIDYCHNSGAVLLCSIQGLAVNIDPILYTWLIYQPQKRTSRHMQQQPVVAVPLVMPVCRRKEDEVSIGSAPLAKQQSYQASEYASSPVKTKTVTESRPLSVPVKAMLNISESCRSPEERMKEFIGIVWNAVKHLTLQLEVQSCCVFIPNDSLPSPSTIVSGDIPGTVRSWYHGQTSMPGTLVLCLPQIKIISAGHKYMEPLQEIPFVIPRPILEEGDAFPWTISLHNFSIYTLLGKQVTLCLVEPMGCTSTLAVTSQKLLATGPDTRHSFVVCLHVDLESLEIKCSNPQVQLFYELTDIMNKVWNKIQKRGNLNLSPTSPETMAGPVPTSPVRSSIGTAPPDTSTCSPSADIGTTTEGDSIQAGEESPFSDSVTLEQTTSNIGGTSGRVSLWMQWVLPKITIKLFAPDPENKGTEVCMVSELEDLSASIDVQDVYTKVKCKIESFNIDHYRSSLGEECWSLGQCGGVFLSCTDKLNRRTLLVRPISKQDPFSNCSGFFPSTTTKLLDGTHQQHGFLSLTYTKAVTKNVRHKLTSRNERRSFHKLSEGLMDGSPHFLHEILLSAQAFDIVLYFPLLNAIASIFQAKLPKTQKEKRKSPGQPMRTHTLTSRNLPLIYVNTSVIRIFIPKTEEMQPTVEANQAAKEDTVVLKIGSVAMAPQADNPLGRSVLRKDIYQRALNLGILRDPGSEIEDRQYQIDLQSINIGTAQWHQLKPEKESVSGGVVTETERNSQNPALEWNMASSIRRHQERRAILTPVLTDFSVRITGAPAVIFTKVVSPENLHTEEILVCGHSLEVNITTNLDFFLSVAQVQLLHQLIVANMTGLEPSNKAAEISKQEQKKVDIFDGGMAETSSRYSGAQDSGIGSDSVKIRIVQIEQHSGASQHRIARPSRQSSIVKNLNFIPFDIFITASRISLMTYSCMALSKSKSQEQKNNEKTDKSSLNLPEVDSDVAKPNQACISTVTAEDLLRSSISFPSGKKIGVLSLESLHASTRSSARQALGITIVRQPGRRGTGDLQLEPFLYFIVSQPSLLLSCHHRKQRVEVSIFDAVLKGVASDYKCIDPGKTLPEALDYCTVWLQTVPGEIDSKSGIPPSFITLQIKDFLNGPADVNLDISKPLKANLSFTKLDQINLFLKKIKNAHSLAHSEETSAMSNTMVNKDDLPVSKYYRGKLSKPKIHGDGVQKISAQENMWRAVSCFQKISVQTTQIVISMETVPHTSKPCLLASLSNLNGSLSVKATQKVPGIILGSSFLLSINDFLLKTSLKERSRILIGPCCATANLEAKWCKHSGNPGPEQSIPKISIDLRGGLLQVFWGQEHLNCLVLLHELLNGYLNEEGNFEVQVSEPVPQMSSPVEKNQTFKSEQSSDDLRTGLFQYVQDAESLKLPGVYEVLFYNETEDCPGMMLWRYPEPRVLTLVRITPVPFNTTEDPDISTADLGDVLQVPCSLEYWDELQKVFVAFREFNLSESKVCELQLPDINLVNDQKKLVSSDLWRIVLNSSQNGADDQSSASESGSQSTCDPLVTPTALAACTRVDSCFTPWFVPSLCVSFQFAHLEFHLCHHLDQLGTAAPQYLQPFVSDRNMPSELEYMIVSFREPHMYLRQWNNGSVCQEIQFLAQADCKLLECRNVTMQSVVKPFSIFGQMAVSSDVVEKLLDCTVIVDSVFVNLGQHVVHSLNTAIQAWQQNKCPEVEELVFSHFVICNDTQETLRFGQVDTDENILLASLHSHQYSWRSHKSPQLLHICIEGWGNWRWSEPFSVDHAGTFIRTIQYRGRTASLIIKVQQLNGVQKQIIICGRQIICSYLSQSIELKVVQHYIGQDGQAVVREHFDCLTAKQKLPSYILENNELTELCVKAKGDEDWSRDVCLESKAPEYSIVIQVPSSNSSIIYVWCTVLTLEPNSQVQQRMIVFSPLFIMRSHLPDPIIIHLEKRSLGLSETQIIPGKGQEKPLQNIEPDLVHHLTFQAREEYDPSDCAVPISTSLIKQIATKVHPGGTVNQILDEFYGPEKSLQPIWPYNKKDSDRNEQLSQWDSPMRVKLSIWKPYVRTLLIELLPWALLINESKWDLWLFEGEKIVLQVPAGKIIIPPNFQEAFQIGIYWANTNTVHKSVAIKLVHNLTSPKWKDGGNGEVVTLDEEAFVDTEIRLGAFPGHQKLCQFCISSMVQQGIQIIQIEDKTTIINNTPYQIFYKPQLSVCNPHSGKEYFRVPDSATFSICPGGEQPAMKSSSLPCWDLMPDISQSVLDASLLQKQIMLGFSPAPGADSSQCWSLPAIVRPEFPRQSVAVPLGNFRENGFCTRAIVLTYQEHLGVTYLTLSEDPSPRVIIHNRCPVKMLIKENIKDIPKFEVYCKKIPSECSIHHELYHQISSYPDCKTKDLLPSLLLRVEPLDEVTTEWSDAIDINSQGTQVVFLTGFGYVYVDVVHQCGTVFITVAPEGKAGPILTNTNRAPEKIVTFKMFITQLSLAVFDDLTHHKASAELLRLTLDNIFLCVAPGAGPLPGEEPVAALFELYCVEICCGDLQLDNQLYNKSNFHFAVLVCQGEKAEPIQCSKMQSLLISNKELEEYKEKCFIKLCITLNEGKSILCDINEFSFELKPARLYVEDTFVYYIKTLFDTYLPNSRLAGHSTHLSGGKQVLPMQVTQHARALVNPVKLRKLVIQPVNLLVSIHASLKLYIASDHTPLSFSVFERGPIFTTARQLVHALAMHYAAGALFRAEPATVSCKTLGKLLNLPESPFPHR

SEQ ID NO: 48591 - protein, 99 aa, Homo sapiens
MSGIGNKRAAGEPGTSMPPEKKAAVEDSGTTVETIKLGGVSSTEELDIRTLQTKNRKLAEMLDQRQAIEDELREHIEKLERRQATDDASLLIVNRYWSQ

SEQ ID NO: 48592 - protein, 166 aa, Homo sapiens
MGHEQNQGAALLQMLPLLWLLPHSWAVPEGFPIAEVFTLKPLEFGKPNTLVCFVSNLFPPMLTVNWQHHSIPVEGFGPTFVSAVDGLSFQAFSYLNFTPEPSDIFSCIVTHEIDRYTAIAYWVPRNALPSDLLENVLCGVAFGLGVLGIIVGIVLIIYFRKPCSGD

SEQ ID NO: 48593 - protein, 324 aa, Homo sapiens
MSPRAGSAATGSPGRPSPTDFMQTSQTCEGLYDLSNKAASSALGRLYPPEQSLTAFRPVKKSTECLPAQAAETTAESPVSLNVVNGDPPAPTGSASLVSEAAPSSPDDSSGMGPLNLSKKSEINLAATHEPTYQGSPQAETASFSELQDLPLNLSVKDPCNTQAPRPAFPGRPRAAEPAAAVPQKTGTEGSEDGPSHPETKPGSLDGDGAPPTGPGEEAPDACAVDSSEEQKQTAAVALCQLAAYSPRNIRVGDGDAAAPEPACRQDTPTLSSMESQEAQCDLRPKGQKRTSLRDAGKSQQGAKKAKLQDTARVFTLRRRARVS

SEQ ID NO: 48594 - protein, 177 aa, Homo sapiens
  MOD_RES (1)..(1): Any amino acid
XKELSEKIQLLEALGDIEIAIKLVKTELQSPEHPLDQHYRNLHCALRPLDHESYEFKVISQYLQSTHAPTHSDYTMTLLDLFEVEKDGEKEAFREDLHNRMLLWHGSRMSNWVGILSHGLRIAPPEAPITGYMFGKGIYFADMSSKSANYCFASRLKNTGLLLLSEEWEYSAIRTSK

SEQ ID NO: 48595 - protein, 197 aa, Homo sapiens
MTEQMTLRGTLKGHNGWVTQIATTPQFPDMILSASRVWPGAYGPGGAVMTPTCHLSVGAEIQRLFLSCRPAQGSWGDKTIIMWKLTRDETNYGIPQRALRGHSHFVSDVVISSDGQFALSGSWDGTLRLWDLTTGTTTRRFVGHTKDVLSVAFSSDNRQIVSGSRDKTIKLWNTLGVCKYTVQDESHSEWVSCVRFS

SEQ ID NO: 48596 - protein, 332 aa, Homo sapiens
MPKRIVNAKIACLDFSLQKTKMKLGVQVVITDPEKLDQIRQRESDITKERIQKILATGANVILTTGGIDDMCLKYFVEAGAMAVRRVLKRDLKRIAKASGATILSTLANLEGEETFEAAMLGQAEEVVQERICDDELILIKNTKARTSASIILRGANDFMCDEMERSLHDALCVVKRVLESKSVVPGGGAVEAALSIYLENYATSMGSREQLAIAEFARSLLVIPNTLAVNAAQDSTDLVAKLRAFHNEAQVNPERKNLKWIGLDLSNGKPRDNKQAGVFEPTIVKVKSLKFATEAAITILRIDDLIKLHPESKDDKHGSYEDAVHSGALND

SEQ ID NO: 48597 - protein, 36 aa, Homo sapiens
MRIFSVPPTEETLSEPNFYDTISKIRLRQQLEMYSI

SEQ ID NO: 48598 - protein, 460 aa, Homo sapiens
MAALTIATGTGNWFSALALGVTLLKCLLIPTYHSTDFEVHRNWLAITHSLPISQWYYEATSEWTLDYPPFFAWFEYILSHVAKYFDQEMLNVHNLNYSSSRTLLFQRFSVIFMDVLFVYAVRECCKCIDGKKVGKELTEKPKFILSVLLLWNFGLLIVDHIHFQYNGFLFGLMLLSIARLFQKRHMEGAFLFAVLLHFKHIYLYVAPAYGVYLLRSYCFTANKPDGSIRWKSFSFVRVISLGLVVFLVSALSLGPFLALNQLPQVFSRLFPFKRGLCHAYWAPNFWALYNALDKVLSVIGLKLKFLDPNNIPKASMTSGLVQQFQHTVLPSVTPLATLICTLIAILPSIFCLWFKPQGPRGFLRCLTLCALSSFMFGWHVHEKAILLAILPMSLLSVGKAGDASIFLILTTTGHYSLFPLLFTAPEKKNLFLIGWKLSTCLAWGLWKSAVNLYSLSPPGR

SEQ ID NO: 48599 - protein, 178 aa, Homo sapiens
MISLASVQDKSELDMISTRVMDIKLREAAEGLGEDSTGKKKSKFKTFKKFFGKKKRKESPSSTGSSTWKQSQTRNEVIAIESGPVGYDSEDELEESRGTLGSRALSHDSIFIPESGQDATRPVRVFSQENVCDRIKALQLKIQCNVKMGPPPPPGGLPAKRGEDAGMSSEDDGLPRSP

SEQ ID NO: 48600 - protein, 120 aa, Homo sapiens
MGCVFQSTEDKCIFKIDWTLSPGEHAKDEYVLYYYSNLSVPIGRFQNRVHLMGDILCNDGSLLLQDVQEADQGTYICEIRLKGESQVFKKAVVLHVLPEEPKELMVHVGGLIQMGCVFQS

SEQ ID NO: 48601 - protein, 31 aa, Homo sapiens
MCNILKTEGVTVRRPDPIDWSLKYKTPDFES

SEQ ID NO: 48602 - protein, 93 aa, Homo sapiens
MLGLRPPLLALVGLLSLGCVLSQECTKFKVSSCRECIESGPGCTWCQKLGAALGPPAHATAASSPRRRSRVAPVCPRTEQGGQAPELHRAGGS

SEQ ID NO: 48603 - protein, 103 aa, Homo sapiens
MASTEEQYDLKIVKVEEDPIWDQETHLRGNNFSGQEASRQLFRQFCYQETPGPREALSRLRELCHQWLRPEIHTKEQILELLVLEQFLTILPEELQAWVREHH

SEQ ID NO: 48604 - protein, 146 aa, Homo sapiens
MCSQEAFQAQRSQLVELLVSGSLEGFESVLDWLLSWEVLSWEDYEGFHLLGQPLSHLARRLLDTVWNKGTWACQKLIAAAQEAQADSQSPKLHGCWDPHSLHPARDLQSHRPAIVRRLHSHVENMLDLAWERGFVSQYECDEIRLP

SEQ ID NO: 48605 - protein, 110 aa, Homo sapiens
MERLQKQPLTSPGSVSPSRDSSVPGSPSSIVAKMDNQVLGYKDLAAIPKDKAILDIERPDLMIYEPHFTYSLLEHVELPRSRERSLSPKSTSPPPSPEVWADSRSPGIIS

SEQ ID NO: 48606 - protein, 611 aa, Homo sapiens
MDSCSLEIANWRNHQETLKYQFDAFYGERSTQQDIYAGSVQPILRHLLEGQNASVLAYGPTGAGKTHTMLGSPEQPGVIPRALMDLLQLTREEGAEGRPWALSVTMSYLEIYQEKVLDLLDPASGDLVIREDCRGNILIPGLSQKPISSFADFERHFLPASRNRTVGATRLNQRSSRSHAVLLVKVDQRERLAPFRQREGKLYLIDLAGSEDNRRTGNKGLRLKESGAINTSLFVLGKVVDALNQGLPRVPYRDSKLTRLLQDSLGGSAHSILIANIAPERRFYLDTVSALNFAARSKEVINRPFTNESLQPHALGPVKLSQKELLGPPEAKRARGPEEEEIGSPEPMAAPASASQKLSPLQKLSSMDPAMLERLLSLDRLLASQGSQGAPLLSTPKRERMVLMKTVEEKDLEIERLKTKQKELEAKMLAQKAEEKENHCPTMLRPLSHRTVTGAKPLKKAVVMPLQLIQEQAASPNAEIHILKNKGRKRKVKVAGGLGYTWSPELESLDALEPEEKAEDCWELQISPELLAHGRQKILDLLNEGSARDLRSLQRIGPKKAQLIVGWRELHGPFSQVEDLERVEGITGKQMESFLKANILGLAAGQRCGAS

SEQ ID NO: 48607 - protein, 307 aa, Homo sapiens
MMDFFNAQMRLGGLTQAPGNPVLAVQINQDKNFAFLEFRSVDETTQAMAFDGIIFQGQSLKIRRPHDYQPLPGMSENPSVYVPGVVSTVVPDSAHKLFIGGLPNYLNDDQVKELLTSFGPLKAFNLVKDSATGLSKGYAFCEYVDINVTDQAIAGLNGMQLGDKKLLVQRASVGAKNATLSTINQTPVTLQVPGLMSSQVQMGGHPTEVLCLMNMVLPEELLDDEEYEEIVEDVRDECSKYGLVKSIEIPRPVDGVEVPGCGKIFVEFTSVFDCQKAMQGLTGRKFANRVVVTKYCDPDSYHRRDFW

SEQ ID NO: 48608 - protein, 675 aa, Homo sapiens
MTTEKSLVTEAENSQHQQKEEGEEAINSGQQEPQQEESCQTAAEGDNWCEQKLKASNGDTPTHEDLTKNKERTSESRGLSRLFSSFLKRPKSQVSEEEGKEVESDKEKGEGGQKEIEFGTSLDEEIILKAPIAAPEPELKTDPSLDLHSLSSAETQPAQEELREDPDFEIKEGEGLEECSKIEVKEESPQSKAETELKASQKPIRKHRNMHCKVSLLDDTVYECVVEKHAKGQDLLKRVCEHLNLLEEDYFGLAIWDNATSKTWLDSAKEIKKQVRGVPWNFTFNVKFYPPDPAQLTEDITRYYLCLQLRQDIVAGRLPCSFATLALLGSYTIQSELGDYDPELHGVDYVSDFKLAPNQTKELEEKVMELHKSYRSMTPAQADLEFLENAKKLSMYGVDLHKAKDLEGVDIILGVCSSGLLVYKDKLRINRFPWPKVLKISYKRSSFFIKIRPGEQEQYESTIGFKLPSYRAAKKLWKVCVEHHTFFRLTSTDTIPKSKFLALGSKFRYSGRTQAQTRQASALIDRPAPHFERTASKRASRSLDGAAAVDSADRSPRPTSAPAITQGQVAEGGVLDASAKKTVVPKAQKETVKAEVKKEDEPPEQAEPEPTEAWKDLDKSQEEIKKHHASISELKKNFMESVPEPRPSEWDKRLSTHSPFRTLNINGQIPTGEGV

SEQ ID NO: 48609 - protein, 316 aa, Homo sapiens
MILRPPRPCGTISALQKGYSKVLCQTLSERNSEITSLKNEGENLKRDNAITSGMVSSLQKDILAKDEQVQQLKEEVSHLKSQNKDKDHQLEALGSRCSVLKEELKQEDAHRELREAQEKELKLCKTQIQDMEKEMKKLRAELRKSCTEQSVISRTLREKSKLEHFRSQVIKATYGRAKPFRDKPVTDQQLIEKITQVTEDNINFQQKKWTLQKETQLSNSKQEETTENIEKLRTSLDSCQACMKISCCSHDLKKEVDLLQHLQVSPPVSGLQKVVLDVLRHALSWLEEVEQLLRDLGILPSSPNKGYWDFFSHMVA

SEQ ID NO: 48610 - protein, 102 aa, Homo sapiens
MASRERLFELWMLYCTKKDPDYLKLWLDTFVSSYEQFLDVDFEKLPTRVDDMPPGISLLPDNILQVLRIQLLQCVQKMADGLEEQQQALSILLVKFFIILCS

SEQ ID NO: 48611 - protein, 168 aa, Homo sapiens
MAGKKNVLSSLAVYAEDSEPESDGEAGIEAVGSAAEEKGGLVSDAYGEDDFSRLGGDEDGYEEEEDENSRQSEDDDSETEKPEADDPKDNTEAEKRDPQELVASFSERVRNMSPDEIKIPPEPPGRCSNHLQDKIQKLYERKIKEGMDMNYIIQRKKEFRNPSQGPEN

SEQ ID NO: 48612 - protein, 770 aa, Homo sapiens
LSLLPLMEPIIGVNFAHFLPYGSGQFNSGNRLLGTFGSATLEGVSDYYSQLIYKMANGFATTEELAGKAGVLVSHEVTKTLGPKPFQLPFRPQDDLLARALAQGPKTVDVPASLPTPPHNNQEELRIQDHCGDRDTPDSFVPSSSPESVVGVEVSRYPDLSLVKEEPPEPVPSPIIPILPSTAGKSSESRRNDIKTEPGTLYFASPFGPSPNGPRSGLISVAITLHPTAAENISSVVAAFSDLLHVRIPNSYEVSSAPDVPSMGLVSSHRINPGLEYRQHLLLRGPPPGSANPPRLVSSYRLKQPNVPFPPTSNGLSGYKDSSHGIAESAALRPQWCCHCKVVILGSGVRKSFKDLTLLNKDSRESTKRVEKDIVFCSNNCFILYSSTAQAKNSENKESIPSLPQSPMRETPSKAFHQYSNNISTLDVHCLPQLPEKASPPASPPIAFPPAFEAAQVEAKPDELKVTVKLKPRLRAVHGGFEDCRPLNKKWRGMKWKKWSIHIVIPKGTFKPPCEDEIDEFLKKLGTSLKPDPVPKDYRKCCFCHEEGDGLTDGPARLLNLDLDLWVHLNCALWSTEVYETQAGALINVELALRRGLQMKCVFCHKTGATSGCHRFRCTNIYHFTCAIKAQCMFFKDKTMLCPMHKPKGIHEQELSYFAVFRRVYVQRDEVRQIASIVQRGERDHTFRVGSLIFHTIGQLLPQQMQAFHSPKALFPVGYEASRLYWSTRYANRRCRYLCSIEEKDGRPVFVIRIVEQGHEDLVLSDISPK

SEQ ID NO: 48613 - protein, 441 aa, Homo sapiens
  MOD_RES (1)..(1): Any amino acid
XRIPKREGLGEEDTAVAGHELLLPNERSFQNAAKSNNLDLMEKLFEKKVNINVVNNMNRTALHFAVGRNHLSAVDFLLKHKARVDVADKHGLTVIHLAAWSGSLEVMLMLVKAGADQRAKNQDGMSALHFATQSNHVRIVEYLIQDLHLKDLNQPDEKGRKPFLLAAERGHVEMIEKLTFLNLHTSEKDKGGNTALHLAAKHGHSPAVQVLLAQWQDINEMNELNISSLQIATRNGHASLVNFLLSENVDLHQKVEPKESPLHLVVINNHITVVNSLLSAQHDIDILNQKQQTPLHVAADRGNVELVETLLKAGCDLKAVDKQGKTALAVASRSNHSLVVGMLIKAERYYAWREEHHESIRDPSTGFTLTFKQDHSLETRHIRTLLWDLAYHQLKANEWQRLARSWNFTDDQIRAIEEQWSEKTRHFKSKTDSNSKKCVVS

SEQ ID NO: 48614 - protein, 123 aa, Homo sapiens
MSSPSPGKRRMDTDVVKLIESKHEVTILGGLNEFVVKFYGPQGTPYEGGVWKVRVDLPDKYPFKSPSIGFMNKIFHPNIDEASGTVCLDVINQTWTALYDPLNGDAAAMYLHRPEEYKQKIKG

SEQ ID NO: 48615 - protein, 93 aa, Homo sapiens
MIPMFTVTLEDSGTLWKSLHSSSESEMTTLPPLPMTRPKLTALARQKLPCSSRKIPRSQLIKEKDDIDHYLEVNFKGLSKEEVAAYRNSYKKN

SEQ ID NO: 48616 - protein, 669 aa, Homo sapiens
MGFQPPAALLLRLFLLQGILRLLWGDLAFIPPFIRMSGPAVSASLVGDTEGVTVSLAVLQDEAGILPIPTCGVLNNETEDWSVTVIPGAVLEVTVRWKRGLDWCSSNETDSFSESPCILQTLLVSASHNSSCSAHLLIQVEIYANSSLTHNASENVTVIPNQVYQPLGPCPCNLTAGACDVRCCCDQECSSNLTTLFRRSCFTGVFGGDVNPPFDQLCSAGTTTRGVPDWFPFLCVQSPLANTPFLGYFYHGAVSPKQDSSFEVYVDTDAKDFADFGYKQGDPIMTVKKAYFTIPQVSLAGQCMQNAPVAFLHNFDVKCVTNLELYQERDGIINAKIKNVALGGIVTPKVIYEEATDLDKFITNTETPLNNGSTPRIVNVEEHYIFKWNNNTISEINVKIFRAEINAHQKGIMTQRFVVKFLSYNSGNEEELSGNPGYQLGKPVRALNINRMNNVTTLHLWQSAGRGLCTSATFKPILFGENVLSGCLLEVGINENCTQLRENAVERLDSLIQATHVAMRGNSDYADLSDGWLEIIRVDAPDPGADPLASSVNGMCLDIPAHLSIRILISDAGAVEGITQQEILGVETRFSSVNWQYQCGLTCEHKADLLPISASVQFIKIPAQLPHPLTRFQINYTEYDCNRNEVCWPQLLYPWTQYYQGWSVTPELR

SEQ ID NO: 48617 - protein, 1486 aa, Homo sapiens
MDNQQDKAIVASANGENTLINGVKENDSEDQDVAMKSFAALEAAAPIQPTPVAQKETLMYPRGLLPLPSKKPCMQSPPSPLGLIEAPEHAANSASVNAISLTSGIAKGLNTWSLPNECEKAPFAIMEPAGMSALNGDCLMQPSRTCLGCFMESKDAVDPEPGISLKVGDLNRDYETCAVSDIGIQCINAGENMKYGEQLLSDQLLGFPLHKSRAGDRRETEKPDIDLEDPAQKSYYEALLLDKCNTEEALLANSNQDWGYFETFISESKIELLDLCSKNELSVNLFSEEDVDNYMFDDDESTLGSDVCSLKIRYESFQDNVRDKTTLLMQEDAQFNFFPSVFTTCPKRESKSGALKQSSDFSQFKVPDVSIIWGEEDKNLDKKKGKEEGQEDKGVEKKDGKDNGEKPALNKPCSGTEVEQLKNPKQGHLANSLETSGSFSDDSSFIEISYDAMGEIKDCSRYMARDTNSGSSSSQQNYGLRAKRKVRYSEDYLYDVDSLEGEKVNERKEWLPVGSKEEDDDEWCPKKRRKVTRKEPPVIIKYIIINRFKGEKNMLVKLGKVDASETTVNLSENQLNKYAKLAPLKGFWQKKKKQRNTNTDSIKTPFSQKQSFEPGSFEVSFLPPARKRKSKLGNRHRIQRIPSIEISASSKQISLCNDQRHASNHKEDGGLKGTLKSAPLGAPSCANGSHLNDITGPDSVKVKAQDTEFKGPERKVLNKIKFKSEARLKSKKVKAAGQESKPIVQMSPLLENQSSKANLKNEVIPGTSNSSRLSEFHEAKAAKSSTFLPTTCSSEMPLSSANVTTNIPVIPGGYLQTLLDASDLSNNTSISYFSHHSPEQNEGSLTQTEKSFVPLQPTQDCVLTSSSDSELQQSSHNFKMESSNYRNVWPNKATSGTQEFMAEVSREIAPTQSSEFGASQVVSMENNLTPTTYNPICLNSGGSNCNKVLYDSMQDTQLPSDDSYQLCHFNNGEICFPFQQGPVNMDDGRLFSFDSMAPLSVSSSNYCSLSLKSCEKDGDDDITDDFLAHCSPKLVIQQSIDEIAPLKESTDLLDISNFTPDKFRHSSLSEMSPPDTPSLSPQITRCESMKTLGTLKGFQEGVPGPLDSVEKIKWDCSTLSRQVQMEDGFTLNNHQFQFHMFNDEDSVSLLQKNPCLSTFNDPSGQISTNNKVSKSRKKSSPSKSGAMNQSSSQKNTRKKSLKGNNKGIEKPPGKNSRQVPKSTKKGKYMAAINGEKMQIGIGRGGSQTNTISSTGKTLAECIQHGGPMASMKMPSQKGLSGDWALGKESSPGWSDMSMGTNTNSLLDDDQREFQEPSYILSNIASGMADVQRFMMASIEPLWEPMEHHGDPNIFYSPESNSLKLKTLKILAGTPQESKKKINSGSQGATKNHRSIKGVSKSNGKTAIGDPGRANMPGYNEDSRSTFFDKKYSNMSTLGNNGPTHKKLYRHKSSSKALRDEKCKGKHMEREQVHKDESGTASFEKLR

SEQ ID NO: 48618 - protein, 559 aa, Homo sapiens
MRIQRETDFLKCAHCLAPRPSDPFARFCQECGSPVPPIFGCRLPPPEGAQMGLCAECRSLVPMNTPICVVCEAPLALQLQPQASLHLKEKVICRACGTGNPAHLRYCVTCEGALPSSQESMCSGDKAPPPPTQKGGTISCYRCGRWNLWEASFCGWCGAMLGIPAGCSVCPKCGASNHLSARFCGSCGICVKSLVKLSLDRSLALAAEEPRPFSEPRCAWQSLNIPLPRSDVGTKRDIGTQTVGLFYPSGKLLAKKEQELASQKQRQEKMSDHKPLLTAISPGRGYWRRQLDHISAHLRCYAQNNPEFRALIAEPRMGKLISATVHEDGCEVSIRLNYSQVSNKNLYLNKAVNFSDHLLSSAAEGDGGLCGSRSSWVSDYSQSTSDTIEKIKRIKNFKTKTFQEKKEQLIPENRLLLKEVGPTGEGRVSVIEQLLDEGADPNCCDEDNRPVITVAVMNKHHEAIPVLVQRGADIDQQWGPLRNTALHEATLLGLAGRESTATLLGCNASIQKKNAGGQTAYDLALNTGDDLVTSLFAAKFGQGLEDQLAQTRSLSLDDC

SEQ ID NO: 48619 - protein, 156 aa, Homo sapiens
MNPTETKAVKTEPEKKSQSTKLSVVHEKKSQEGKPKEHTEPKSLPKQASDTGSNDAHNKKAVSRSAEQQPSEKSTEPKKKEKKSLTPAVPVESKPDKPSGKSGMDAALDDLIDTLGGPEETEEENTTYTGPEVSDPMSSTYIEELGKREVTIPPKY

SEQ ID NO: 48620 - protein, 322 aa, Homo sapiens
MEDKRNIQIIEWEHLDKKKFYVFGVAMTMMIRVSVYPFTLIRTRLQVQKGKSLYHGTFDAFIKILRADGITGLYRGFLVNTFTLISGQCYVTTYELTRKFVADYSQSNTVKSLVAGGSASLVAQSITVPIDVVSQHLMMQRKGEKMGRFQVRGNPEGQGVVAFGQTKDIIRQILQADGLRGFYRGYVASLLTYIPNSAVWWPFYHFYAAIVFPWIPEQLSYLCPKECPHIVFQAVSGPLAAATASILTNPMDVIRTRVQVEGKNSIILTFRQLMAEEGPWGLMKGLSARIISATPSTIVIVVGYESLKKLSLRPELVDSRHW

SEQ ID NO: 48621 - protein, 280 aa, Homo sapiens
  MOD_RES (1)..(1): Any amino acid
XRPTCSCALGFTGPNCGKTVCEDFCQNGGTCIVTAGNQPYCHCQPEYTGDRCQYYVCHHYCVNSESCTIGDDGSVECVCPTRYEGPKCEVDKCVRCHGGHCIINKDSEDIFCNCTNGKIASSCQLCDGYCYNGGTCQLDPETNVPVCLCSVGFKSQRCDQKENPCDHYCQNEGICTLTAFNEPRCKCSTNWSGTQCERPAPKSSKSDHISTRSIAIIVPLVLLVTLITTLVIGLVLCKRKRRTKTIRRQPIINGGINVEIGNPSYNMYEVDHDHNDGGLL

SEQ ID NO: 48622 - protein, 93 aa, Homo sapiens
MEASVILPILKKKLAFLSGGKDRRSGLILTIPLCLEQTNMDELSVTLDYLLSIPSEKCKARGFTVIVDGRKSQWNVVKTVVVMLQMSCLGLAV

SEQ ID NO: 48623 - protein, 92 aa, Homo sapiens
MKEQEKGEGSDSKESPKTKSDESGEEKNGDEDCQRGGQKKKGNKHKWVPLQIDMKPEVPREKLASRPTRPPEPRHIPANRGEIKGSESATYV

SEQ ID NO: 48624 - protein, 525 aa, Homo sapiens
MSGNWVHPGQILIWAIWVLAAPTKGPSAEGPQRNTRLGWIQGKQVTVLGSPVPVNVFLGVPFAAPPLGSLRFTNPQPASPWDNLREATSYPNLCLQNSEWLLLDQHMLKVHYPKFGVSEDCLYLNIYAPAHADTGSKLPVLVWFPGGAFKTGSASIFDGSALAAYEDVLVVVVQYRLGIFGFFTTWDQHAPGNWAFKDQVAALSWVQKNIEFFGGDPSSVTIFGESAGAISVSSLILSPMAKGLFHKAIMESGVAIIPYLEAHDYEKSEDLQVVAHFCGNNASDSEALLRCLRTKPSKELLTLSQKTKSFTRVVDGAFFPNEPLDLLSQKAFKAIPSIIGVNNHECGFLLPMKEAPEILSGSNKSLALHLIQNILHIPPQYLHLVANEYFHDKHSLTEIRDSLLDLLGDVFFVVPALITARYHREGATEEEKLLSRKMMKYWATFARTGNPNGNDLSLWPAYNLTEQYLQLDLNMSLGQRLKEPRVEFWTSTIPLILSASDMLHSPLSSLTFLSLLQPFFFFCAP

SEQ ID NO: 48625 - protein, 135 aa, Homo sapiens
MSGSMATAEASGSDGKGQEVETSVTYYRLEEVAKRNSLKELWLVIHGRVYDVTRFLNEHPGGEEVLLEQAGVDASESFEDVGHSSDAREMLKQYYIGDIHPLLGILDFTHHRRCSLRFPVPLLHIGKQILLRRPC

SEQ ID NO: 48626 - protein, 149 aa, Homo sapiens
MNGEADCPTDLEMAAPKGQDRWSQEDMLTLLECMKNNLPSNDSSKFKTTESHMDWEKVAFKDFSGDMCKLKWVEISNEKHPDFPKKPLTPYFRFFMEKRAKYAKLHPEMSNLDLTKILSKKYKELPEKKKMKYIQDFQREKQEFERNLA

SEQ ID NO: 48627 - protein, 261 aa, Homo sapiens
MFVNLGWQGMGQGWTQGSQLKGARGRHMQDRERKTGGFVLEVTQLPLAEALKVEGEADPQRTVECELEGVGLAHVSVLFQIRGSRARALPDRALVNCQYSSATFSTGERKRRPHGDRKSCEMGLQLRQTFEAAILTQLHPRSQIDIYVQVLQADGGTYAACVNAATLAVLDAGIPMRDFVCACSAGFVDGTALADLSHVEEAAGGPQLALALLPASGQIALLEMDARLHEDHLERVLEAAAQAARDVHTLLDRVVRQHVRE

SEQ ID NO: 48628 - protein, 217 aa, Homo sapiens
MSDTLTADVIGRRVEVNGEHATVRFAGVVPPVAGPWLGVEWDNPERGKHDGSHEGTVYFKCRHPTGGSFIRPNKVNFGTDFLTAIKNRYVLEDGPEEDRKEQIVTIGNKPVETIGFDSIMKQQSQLSKLQEVSLRNCAVSCAGEKGGVAEACPNIRKVDLSKNLLSSWDEVIHIADQLRHLEVLNVRCCGVSRGAQAWRNSTLSLTTFSFPKVVVFQ

SEQ ID NO: 48629 - protein, 185 aa, Homo sapiens
  MOD_RES (1)..(1): Any amino acid
XAESGGSSGGAGGGGAFGAGPGPERPNSTADKNGALKCTFSAPSHSTSLLQGLATLRAQGQLLDVVLTINREAFPAHKVVLAACSDYFRLLFPRPDHSWLAKTPLSHCQPHVVFLPFRAMFTGGMREASQDVIELKGVSARGLRHIIDFAYSAEVTLDLDCVQDVLGAAVFLQMLPVVELCEEFL

SEQ ID NO: 48630 - protein, 959 aa, Homo sapiens
MPSESFCLAAQARLDSKWLKTDIQLAFTRDGLCGLWNEMVKDGEIVYTGTESTQNGELPPRKDDSVEPSGTKKEDLNDKEKKDEEETPAPIYRAKSILDSWVWGKQPDVNELKECLSVLVKEQQALAVQSATTTLSALRLKQRLVILERYFIALNRTVFQENVKVKWKSSGISLPPVDKKSSRPAGKGVEGLARVGSRAALSFAFAFLRRAWRSGEDADLCSELLQESLDALRALPEASLFDESTVSSVWLEVVERATRFLRSVVTGDVHGTPATKGPGSIPLQDQHLALAILLELAVQRGTLSQMLSAILLLLQLWDSGAQETDNERSAQGTSAPLLPLLQRFQSIICRKDAPHSEGDMHLLSGPLSPNESFLRYLTLPQDNELAIDLRQTAVVVMAHLDRLATPCMPPLCSSPTSHKGSLQEVIGWGLIGWKYYANVIGPIQCEGLANLGVTQIACAEKRFLILSRNGRVYTQAYNSDTLAPQLVQGLASRNIVKIAAHSDGHHYLALAATGEVYSWGCGDGGRLGHGDTVPLEEPKVISAFSGKQAGKHVVHIACGSTYSAAITAEGELYTWGRGNYGRLGHGSSEDEAIPMLVAGLKGLKVIDVACGSGDAQTLAVTENGQVWSWGDGDYGKLGRGGSDGCKTPKLIEKLQDLDVVKVRCGSQFSIALTKDGQVYSWGKGDNQRLGHGTEEHVRYPKLLEGLQGKKVIDVAAGSTHCLALTEDSEVHSWGSNDQCQHFDTLRVTKPEPAALPGLDTKHIVGIACGPAQSFAWSSCSEWSIGLRVPFVVDICSMTFEQLDLLLRQVSEGMDGSADWPPPQEKECVAVATLNLLRLQLHAAISHQVDPEFLGLGLGSILLNSLKQTVVTLASSAGVLSTVQSAAQAVLQSGWSVLLPTAEERARALSALLPCAVSGNEVNISPGRRFMIDLLVGSLMADGGLESALHAAITAEIQVW

SEQ ID NO: 48631 - protein, 10 aa, Homo sapiens
MALPRCTWPN

SEQ ID NO: 48632 - protein, 173 aa, Homo sapiens
MSKQQPTQFINPETPGYVGFANLPNQVHRKSVKKGFEFTLMVVGESGLGKSTLINSLFLTDLYPERVIPGAAEKIERTVQIEASTVEIEERGVKLRLTVVDTPGYGDAINCRDCFKTIISYIDEQFERYLHDESGLNRRHIIDNRVHCCFYFISPFGHGLKPLDVAFMKAIHN

SEQ ID NO: 48633 - protein, 158 aa, Homo sapiens
  MOD_RES (1)..(1): Any amino acid
XVLFAIFGIRMLREGLKMSPDEGQEELEEVQAELKKKDEEFQRTKLLNGPGDVETGTSITVPQKKWLHFISPIFVQALTLTFLAEWGDRSQLTTIVLAAREDPYGVAVGGTVGHCLCTGLAVIGGRMIAQKISVRTGSFSPWLILHACSDGKGHLERN

SEQ ID NO: 48634 - protein, 194 aa, Homo sapiens
  MOD_RES (1)..(1): Any amino acid
XNKDASGRSTNSHQSSTENELKYSEPRPWSSTDSDSSLRNLKPAVTKASSFSGISVLTRGDSSGSSKSIGRLSKTGQPFINPDGSPVVYNPPMTQQPVRSQVPGPPQPPLPAPPQQPAANHIFSQDNLGSQFSHMSLARQPSADGSDPHAAMFQSTVVLQSPQQSGYIMTAAPPPHPPPPPPPPPPPPPLPPGQ

SEQ ID NO: 48635 - protein, 141 aa, Homo sapiens
VLGTPTREQIREMNPNYTEFKFPQIKAHPWTKNCQVIHLWLPSLFLLMLGFKQLLQPPQMPQQRQMLILETVDRPIMLLLHQLPTPPEQSRAASCTGKTTSYLSVTQQHWSRLERILKREKNPVHFSVQFFYYYCCSYLTL

SEQ ID NO: 48636 - protein, 293 aa, Homo sapiens
  MOD_RES (1)..(1): Any amino acid
XHTKMKTATNIYIFNLALADTLVLLTLPFQGTDILLGFWPFGNALCKTVIAIDYYNMFTSTFTLTAMSVDRYVAICHPIRALDVRTSSKAQAVNVAIWALASVVGVPVAIMGSAQVEDEEIECLVEIPTPQDYWGPVFAICIFLFSFIVPVLVISVCYSLMIRRLRGVRLLSGSREKDRNLRRITRLVLVVVAVFVGCWTPVQVFVLAQGLGVQPSSETAVAILRFCTALGYVNSCLNPILYAFLDENFKACFRKFCCASALRRDVQVSDRVRSIAKDVALACKTSETVPRPA

SEQ ID NO: 48637 - protein, 163 aa, Homo sapiens
MEVEAAEARSPAPGYKRSGRRYKCLSCTKTFPNAPRAARHAATHGPADCSEEVAEVKPKPETEAKAEEASGEKVSGSAAKPRPYACPLCPKAYKTAPELRSHGRSHTGEKPFPCPECGRRFMQPVCLRVHLASHAGELPFRCAHCPKAYGALSKLKIHQRGHT

SEQ ID NO: 48638 - protein, 335 aa, Homo sapiens
MSPTISHKDSSRQRRPGNFSHSLDMKSGPLPPGGWDDSHLDSAGREGDREALLGDTGTGDFLKAPQSFRAELSSILLLLFLYVLQGIPLGLAGSIPLILQSKNVSYTDQAFFSFVFWPFSLKLLWAPLVDAVYVKNFGRRKSWLVPTQYILGLFMIYLSTQVDRLLGNTDDRTPDVIALTVAFFLFEFLAATQDIAVDGWALTMLSRENVGYASTCNSVGQTAGYFLGNVLFLALESADFCNKYLRFQPQPRGIVTLSDWFFSSRCCNRTEIGRRGSTQRTFSLIGSSNGSFADNTASDYQQIHCRSPAIKHILQSHALQIIAWVRICPTGLVDS

SEQ ID NO: 48639 - protein, 255 aa, Homo sapiens
MSLLFSRCNSIVTVKKNKRHMAEVNASPLKHFVTAKKKINGIFEQLGAYIQESATFLEDTYRNAELDPVTTEEQVLDVKGYLSKVRGISEVLARRHMKVAFFGRTSNGKSTVINAMLWDKVLPSGIGHTTNCFLRVEGTDGHEAFLLTEGSEEKRSAKTVNQLAHALHQDKQLHAGSLVSVMWPNSKCPLLKDDLVLMDRCGGSTWSVVPASWWMSWAWWIDPRPGTASSLCLLRRCSTPGFRKPRACLKEKAFK

SEQ ID NO: 48640 - protein, 71 aa, Homo sapiens
  MOD_RES (1)..(1): Any amino acid
XSLKHGLTPIDRGNCRSGCFSFAATLRQRSLLTSCAGLPDRHGSPIPARGRLVMLPKVETEALGLARSHGE

SEQ ID NO: 48641 - protein, 74 aa, Homo sapiens
  MOD_RES (1)..(1): Any amino acid
XRFSESIGRLDWETLVHENLPGLMEMDQDDRVWPRDSLFRYFELLEKLQYNLEERKKLQEFAGKKKAGHGGSHL

SEQ ID NO: 48642 - protein, 303 aa, Homo sapiens
MNTGPYYFVKNLPLHELITPEFISTFIKKGSCYALTYNTHIDEDNTVALLPNGKLILSLDKDTYEETGLQGHPSQFSGRKIMKFIVSIDLMELSLNLDSKKYERISWSFKEKKPLKFDFLLAWHKTGSEESTMMSYFSKYQIQEHQPKVALSTLRDLQCPVLQSSELEGTPEVSCRALELFDWLGAVFSNVDLNNEPNNFISTYCCPEPSTVVAKAYLCTITGFILPEKICLLLEHLCHYFDEPKLAPWVTLSVQGFADSPVSWEKNEHGFRKGGEHLYNFVIFNNQDYWLQMAVGANDHCPP

SEQ ID NO: 48643 - protein, 47 aa, Homo sapiens
MVNLAAMVWRRLLRKRWVLALVFGLSLVYFLSSTFKQATFARGRICW

SEQ ID NO: 48644 - protein, 155 aa, Homo sapiens
  MOD_RES (1)..(1): Any amino acid
XRKPIYWIVAGKALDYEQMLLLMANVKWDVKEIMSQHNIYVDALLKEFEQFNRRLNEVSKRVRIPLPVSNILWEHCIRLANRTIVEGYANVKKCSNEGRALMQLDFQQFLMKLEKLTDIRPIPDKEFVETYIKAYYLTENDMERWIKEHRVRAGK

SEQ ID NO: 48645 - protein, 632 aa, Homo sapiens
MQLFAFADCLSKRLPDDCLGACALWKLGFGADHNAEQEAAAAGPVTGSSVTSSPVTGSQVLTWVLSVKPGWPPQQTVLQSQLLTEDDVDLEALVNDMNASLESLYSACSMQSDTVPLLQNGQHARSQPRASGPPRSIQPQVSPRQRVQRSQPVHILAVRRLQEEDQQFRTSSLPAIPNPFPELCGPGSPPVLTPGSLPPSQAAAKQDVKVFSEDGTSKVVEILADMTARDLCQLLVYKSHCVDDNSWTLVEHHPHLGLERCLEDHELVVQVESTMASESKFLFRKNYAKYEFFKNPMNFFPEQMVTWCQQSNGSQTQLLQNFLNSSSCPEIQGFLHVKELGKKSWKKLYVCLRRSGLYCSTKGTSKEPRHLQLLADLEDSNIFSLIAGRKQYNAPTDHGLCIKPNKVRNETKELRLLCAEDEQTRTCWMTAFRLLKYGMLLYQNYRIPQQRKALLSPFSTPVRSVSENSLVAMDFSGQTGRVIENPAEAQSAALEEGHAWRKRSTRMNILGSQSPLHPSTLSTVIHRTQHWFHGRISREESHRIIKQQGLVDGLFLLRDSQSNPKAFVLTLCHHQKIKNFQILPCEDDGQTFFSLDDGNTKFSDLIQLVDFYQLNKGVLPCKLKHHCIRVAL

SEQ ID NO: 48646 - protein, 68 aa, Homo sapiens
MNSAAGFSHLDRRERVLKLGESFEKQPRCAFHTVRYDFKPASIDTSSEGYLEVGEGEQVTITLPNIES

SEQ ID NO: 48647 - protein, 59 aa, Homo sapiens
MGQICQRESRQGLAMLPRLFLNPWRQVILLPQPPKVLGLQATAAEKPKLHLLAESEIDK

SEQ ID NO: 48648 - protein, 99 aa, Homo sapiens
MQTQEILRILRLPELGDLGQFFRSLSATTLDSGGARRSVIGSGPQLLTHYYDDARTMYQVFRRGLSISGNGPCLGFRKPKQPYQWLSYQEVADRAEFLG

SEQ ID NO: 48649 - protein, 42 aa, Homo sapiens
MDSFGQPRPEDNQSVVRRMQKKYWKTKQVFIKATGKKEDEHL

SEQ ID NO: 48650 - protein, 118 aa, Homo sapiens
MKGKKGIVAASGSETEDEDSMDIPLDLSSSAGSGKRRRRGNLPKESVQILRDWLYEHRYNAYPSEQEKALLSQQTHLSTLQVCNWFINARRRLLPDMLRKDGKDPNQFTISRRGAKIS

SEQ ID NO: 48651 - protein, 21 aa, Homo sapiens
MVDGVMILPVLIMIALPSPSM

SEQ ID NO: 48652 - protein, 79 aa, Homo sapiens
MGELASESQGSKELGDVLFQMAEVHRQIQNQLEEMLKSFHNELLTQLEQKVELDSRYLSAALKKYQTEQRSKGDALDKC

SEQ ID NO: 48653 - protein, 81 aa, Homo sapiens
MDASLEKIADPTLAEMGKNLKEAVKMLEDSQRRTEEENGKKLISGDIPGPLQGSGQDMVSILQLVQNLMHGDEDEEPQSPR

SEQ ID NO: 48654 - protein, 60 aa, Homo sapiens
MPLPVQVFNLQVPGPCCRGPWSPCRSTWTPRKTRRMHLTSTTWWRTPAWIWNSTRPATAA

SEQ ID NO: 48655 - protein, 1332 aa, Homo sapiens
MAEAGLRGWLLWALLLRLAQSEPYTTIHQPGYCAFYDECGKNPELSGSLMTLSNVSCLSNTPARKITGDHLILLQKICPRLYTGPNTQACCSAKQLVSLEASLSITKALLTRCPACSDNFVNLHCHNTCSPNQSLFINVTRVAQLGAGQLPAVVAYEAFYQHSFAEQSYDSCSRVRVPAAATLAVGTMCGVYGSALCNAQRWLNFQGDTGNGLAPLDITFHLLEPGQAVGSGIQPLNEGVARCNESQGDDVATCSCQDCAASCPAIARPQALDSTFYLGQMPGSLVLIIILCSVFAVVTILLVGFRVAPARDKSKMVDPKKGTSLSDKLSFSTHTLLGQFFQGWGTWVASWPLTILVLSVIPVVALAAGLVFTELTTDPVELWSAPNSQARSEKAFHDQHFGPFFRTNQVILTAPNRSSYRYDSLLLGPKNFSGILDLDLLLELLELQERLRHLQVWSPEAQRNISLQDICYAPLNPDNTSLYDCCINSLLQYFQNNRTLLLLTANQTLMGQTSQVDWKDHFLYCANAPLTFKDGTALALSCMADYGAPVFPFLAIGGYKGKDYSEAEALIMTFSLNNYPAGDPRLAQAKLWEEAFLEEMRAFQRRMAGMFQVTFMAERSLEDEINRTTAEDLPIFATSYIVIFLYISLALGSYSSWSRVMVDSKATLGLGGVAVVLGAVMAAMGFFSYLGIRSSLVILQVVPFLVLSVGADNIFIFVLEYQRLPRRPGEPREVHIGRALGRVAPSMLLCSLSEAICFFLGALTPMPAVRTFALTSGLAVILDFLLQMSAFVALLSLDSKRQEASRLDVCCCVKPQELPPPGQGEGLLLGFFQKAYAPFLLHWITRGVVLLLFLALFGVSLYSMCHISVGLDQELALPKDSYLLDYFLFLNRYFEVGAPVYFVTTLGYNFSSEAGMNAICSSAGCNNFSFTQKIQYATEFPEQSYLAIPASSWVDDFIDWLTPSSCCRLYISGPNKDKFCPSTVNSLNCLKNCMSITMGSVRPSVEQFHKYLPWFLNDRPNIKCPKGGLAAYSTSVNLTSDGQVLASRFMAYHKPLKNSQDYTEALRAARELAANITADLRKVPGTDPAFEVFPYTITNVFYEQYLTILPEGLFMLSLCLVPTFAVSCLLLGLDLRSGLLNLLSIVMILVDTVGFMALWGISYNAVSLINLVSAVGMSVEFVSHITRSFAISTKPTWLERAKEATISMGSAVFAGVAMTNLPGILVLGLAKAQLIQIFFFRLNLLITLLGLLHGLVFLPVILSYVGPDVNPALALEQKRAEEAVAAVMVASCPNHPSRVSTADNIYVNHSFEGSIKGAGAISNFLPNNGRQF

SEQ ID NO: 48656 - protein, 241 aa, Homo sapiens
MFRSDRMWSCHWKWKPSPLLFLFALYIMCVPHSVWGCANCRVVLSNPSGTFTSPCYPNDYPNSQACMWTLRAPTGYIIQITFNDFDIEEAPNCIYDSLSLDNGESQTKFCGATAKGLSFNSSANEMHVSFSSDFSIQKKGFNASYIRVAVSLRNQKVILPQTSDAYQVSVAKSISIPELSAFTLCFEATKVGHEDSDWTAFSYSNASFTQLLSFGKAKSGYFLSISDSKCLLNNALPVKEK

SEQ ID NO: 48657 - protein, 266 aa, Homo sapiens
  MOD_RES (1)..(1): Any amino acid
XDFSLGVPSWWCLICFNIGPSVGPSQPDPNRFDRDRLFNAVSRGVPEDLAGLPEYLSKTSKYLTDSEYTEGSTGKTCLMKAVLNLKDGVNACILPLLQIDRDSGNPQPLVNAQCTDDYYRGHSALHIAIEKRSLQCVKLLVENGANVHARACGRFFQKGQGTCFYFGELPLSLAACTKQWDVVSYLLENPHQPASLQATDSQGNTVLHALVMISDNSAENIALVTSMYDGLLQAGARLCPTVQLEDIRNLQDLTPLKLAAKEGKIE

SEQ ID NO: 48658 - protein, 533 aa, Homo sapiens
MEEQVFKGDPDTPHSISFSGSGFLSFYQAGAVDALRDLAPRMLETAHRFAGTSAGAVIAALAICGIEMDEYLRVLNVGVAEVKKSFLGPLSPSCKMVQMMRQFLYRVLPEDSYKVTTGKLHVSLTRLTDGENVVVSEFTSKEELIEAALYCSCFVPVYCGLIPPTYRGVRYIDGGFTGMQPCAFWTDAITISTFSGQQDICPRDCPAIFHDFRMFNCSFQFSLENIARMTHALFPPDLVILHDYYYRGYEDAVLYLRRLNAVYLNSSSKRVIFPRVEVYCQIELALGNECPERSQPSLRARQASLEGATQPHKEWVPKGDGRGSHGPPVSQPVQTLEFTCESPVSAPVSPLEQPPAQPLASSTPLSLSGMPPVSFPAVHKPPSSTPGSSLPTPPPGLSPLSPQQQVQPSGSPARSLHSQAPTSPRPSLGPSTVGAPQTLPRSSLSAFPAQPPVEELGQEQPQAVALLVSSKPKSAVPLVHVKETVSKPYVTESPAEDSNWVNKVFKKNKQKTSGTRKGFPRHSGSKKPSSKVQ

SEQ ID NO: 48659 - protein, 208 aa, Homo sapiens
DVRILLLGEAQVGKTSLILSLVGEEFPEEVPPRAEEITIPADVTPEKVPTHIVDYSEAEQTDEELREEIHKIRTKWIPLVNGGTTQGPRVPIILVGNKSDLRSGSSMEAVLPIMSQFPEIETCVECSAKNLRNISELFYYAQKAVLHPTAPLYDPEAKQLRPACAQALTRIFRLSDQDLDQALSDEELNAFQKSCFGHPLAPQALEDV

SEQ ID NO: 48660 - protein, 17 aa, Homo sapiens
MEEKIAYQSYERARDIQ

SEQ ID NO: 48661 - protein, 1380 aa, Homo sapiens
MGRHVATSCHVAWLLVLISGCWGQVNRLPFFTNHFFDTYLLISEDTPVGSSVTQLLAQDMDNDPLVFGVSGEEASRFFAVEPDTGVVWLRQPLDRETKSEFTVEFSVSDHQGVITRKVNIQVGDVNDNAPTFHNQPYSVRIPENTPVGTPIFIVNATDPDLGAGGSVLYSFQPPSQFFAIDSARGIVTVIRELDYETTQAYQLTVNATDQDKTRPLSTLANLAIIITDVQDMDPIFINLPYSTNIYEHSPPGTTVRIITAIDQDKGRPRGIGYTIVSGNTNSIFALDYISGVLTLNGLLDRENPLYSHGFILTVKGTELNDDRTPSDATVTTTFNILVIDINDNAPEFNSSEYSVAITELAQVGFALPLFIQVVDKDENLGLNSMFEVYLVGNNSHHFIISPTSVQGKADIRIRVAIPLDYETVDRYDFDLFANESVPDHVGYAKVKITLINENDNRPIFSQPLYNISLYENVTVGTSVLTVLATDNDAGTFGEVSYFFSDDPDRFSLDKDTGLIMLIARLDYELIQRFTLTIIARDGGGEETTGRVRINVLDVNDNVPTFQKDAYVGALRENEPSVTQLVRLRATDEDSPPNNQITYSIVSASAFGSYFDISLYEGYGVISVSRPLDYEQISNGLIYLTVMAMDAGNPPLNSTVPVTIEVFDENDNPPTFSKPAYFVSVVENIMAGATVLFLNATDLDRSREYGQESIIYSLEGSTQFRINARSGEITTTSLLDRETKSEYILIVRAVDGGVGHNQKTGIATVNITLLDINDNHPTWKDAPYYINLVEMTPPDSDVTTVVAVDPDLGENGTLVYSIQPPNKFYSLNSTTGKIRTTHAMLDRENPDPHEAELMRKIVVSVTDCGRPPLKATSSATVFVNLLDLNDNDPTFQNLPFVAEVLEGIPAGVSIYQVVAIDLDEGLNGLVSYRMPVGMPRMDFLINSSSGVVVTTTELDRERIAEYQLRVVASDAGTPTKSSTSTLTIHVLDVNDETPTFFPAVYNVSVSEDVPREFRVVWLNCTDNDVGLNAELSYFITGGNVDGKFSVGYRDAVVRTVVGLDRETTAAYMLILEAIDNGPVGKRHTGTATVFVTVLDVNDNRPIFLQSSYEASVPEDIPEGHSILQAATDADEGEFGRVWYRILHGNHGNNFRIHVSNGLLMRGPRPLDRERNSSHVLIVEAYNHDLGPMRSSVRVIVYVEDINDEAPVFTQQQYSRLGLRETAGIGTSVIVVQATDRDSGDGGLVNYRILSGAEGKFEIDESTGLIITVNYLDYETKTSYMMNVSATDQAPPFNQGFCSVYITLLNELDEAVQFSNASYEAAILENLALGTEIVRVQAYSIDNLNQITYRFNAYTSTQAKALFKIDAITVRGWGQGAPFLPI

SEQ ID NO: 48662 - protein, 803 aa, Homo sapiens
MSEADRAQKMDGESEEEQESVDTGEEEEGGDESDLSSESSIKKKFLKRKGKTDSPWIKPARKRRRRSRKKPSGALGSESYKSSAGSAEQTAPGDSTGYMEVSLDSLDLRVKGILSSQAEGLANGPDVLETDGLQEVPLCSCRMETPKSREITTLANNQCMATESVDHELGRCTNSVVKYELMRPSNKAPLLVLCEDHRGRMVKHQCCPGCGYFCTAGNFMECQPESSISHRFHKDCASRVNNASYCPHCGEESSKAKEVTIAKADTTSTVTPVPGQEKGSALEGRADTTTGSAAGPPLSEDDKLQGAASHVPEGFDPTGPAGLGRPTPGLSQGPGKETLESALIALDSEKPKKLRFHPKQLYFSARQGELQKVLLMLVDGIDPNFKMEHQNKRSPLHAAAEAGHVDICHMLVQAGANIDTCSEDQRTPLMEAAENNHLEAVKYLIKAGALVDPKDAEGSTCLHLAAKKGHYEVVQYLLSNGQMDVNCQDDGGWTPMIWATEYKHVDLVKLLLSKGSDINIRDNEENICLHWAAFSGCVDIAEILLAAKCDLHAVNIHGDSPLHIAARENRYDCVVLFLSRDSDVTLKNKEGETPLQCASLNSQVWSALQMSKALQDSAPDRPSPVERIVSRDIARGYERIPIPCVNAVDSEPCPSNYKYVSQNCVTSPMNIDRNITHLQYCVCIDDCSSSNCMCGQLSMRCWYDKDGRLLPEFNMAEPPLIFECNHACSCWRNCRNRVVQNGLRARLQLYRTRDMGWGVRSLQDIPPGTFVCEYVGELISDSEADVREEDSYLFDLDNKISSA

SEQ ID NO: 48663 - protein, 312 aa, Homo sapiens
  MOD_RES (1)..(1): Any amino acid
XHSKWWVWNEVIKNVQMVNKYMQTYLERIKAELLSRLGEFEQFCPVSLAESQELFDCSATDSLEFAAEFRGHYYKMSSQEKLNKFLENPELYVPPLAPHPLPSADMIPKRLTLSELKSRFPKCAELQGYCPVTYKDGNQRYEALVPGSINYALEYHNRIYICENKEKLQKFLRSPLKYWEQKLPHKLPPLREPILLTSLPLPGYLEQGIATSLIKAMNAAGCLKPKFPFLSIRRSALLYIALHLKAFNPKGSEYTRKKYKKKMEQFMESCELITYLGAKMTRKYKEPQFRAIDFDHKLKTFLSLRNIDPING

SEQ ID NO: 48664 - protein, 151 aa, Homo sapiens
MAAQYGSMSFNPSTPGASYGERAFSAPQTRLQGGPGRQEPRNSQLRIVLVGKTGAGKSATGNSILGRKVFHSGTAAKSITKKCEKRSSSWKETELVVVDTPGIFDTEVPNAETSKEIIRCILLTSPGPHALLLVVPLGRYTEEEHKATEKI

SEQ ID NO: 48665 - protein, 175 aa, Homo sapiens
MSPHLTALLGLVLCLAQTIHTQEGALPRPSISAEPGTVISPGSHVTFMCRGPVGVQTFRLEREDRAKYKDSYNVFRLGPSESEARFHIDSVSEGNAGLYRCLYYKPPGWSEHSDFLELLVKGTVPGTEASGFDAPRMRRNGLPSCELQWGEIIRMSNRNAQMPIHTYTNKKIRFA

SEQ ID NO: 48666 - protein, 149 aa, Homo sapiens
MFHKRGKKNGKFSIVTALGKQEAERKFETLLKHLSHPPSFTTVRVNTHLASVQHVKNLLLDELQKQFNGLSVPILQHPDLQDVLLIPVIGPRKNIKKQQCEAIVGAQCGNAVLRGAHVYAPGIVSASQFMKAGDVISVYSDIKGKCKKG

SEQ ID NO: 48667 - protein, 79 aa, Homo sapiens
  MOD_RES (1)..(1): Any amino acid
XPLAQEEILEINRADSKLNGEVAKAALANEDCPHIDQALTPDEGLPFTRSGTRERYGPCFLLSTGEYACPPGGGMRKGM

SEQ ID NO: 48668 - protein, 40 aa, Homo sapiens
MKDQSLRKLQQEMDSLTFRNLQLAKRVELLQDELALSEPR

SEQ ID NO: 48669 - protein, 288 aa, Homo sapiens
MRLLPRLLLLLLLVFPATVLFRGGPRGLLAVAQDLTEDEETVEDSIIEDEDDEAEVEEDEPTDLVEDKEEEDVSGEPEASPSADTTILFVKGEDFPANNIVKFLVGFTNKGTEDFIVESLDASFRYPQDYQFYIQNFTALPLNTVVPPQRQATFEYSFIPAEPMGGRPFGLVINLNYKDLNGNVFQDAVFNQTVTVIEREDGLDGETIFMYMFLAGLGLLVIVGLHQLLESRKRKRPIQKVEMGTSSQNDVDMSWIPQETLNQINKASPRRLPRKRAQKRSVGSDDID

SEQ ID NO: 48670 - protein, 149 aa, Homo sapiens
MEADIITNLRCRLKEAEEERLKAAQYGLQLVESQNELQNQLDKCRNEMMTMTESYEQEKYTLQREVELKSRMLESLSCECEAIKQQQKMHLEKLEEQLSRSHGQEVNELKTKIEKLKVELDEARLSEKQLKHQVDHQKELLSCKSEELR

SEQ ID NO: 48671 - protein, 74 aa, Homo sapiens
MRPWLRHLVLQALRNSRAFCGSHGKPAPLPVPQKIVATWEAISLGRQLVPEYFNFAHDVLDVWSRLEEVKPVLS

SEQ ID NO: 48672 - protein, 222 aa, Homo sapiens
DENLKELVLQNELKIDQLTKDWTQKWNDWQALMEHYSVDINRRRAGVVIDSSLPHLMALEDDVLSTGVVLYHLKNLVSVKLHLRTKKEGTTKIGRIDSDQEQDIGAVITLGKAQKFRFNHPAEAAVLRQRRQVGEAAAGRGSLEWLDLDGDLAASRLGLSPLLWKERRALEEQCDEDHQTPRDGETSHRAQIQQQQSYVEDLRHQILAEEIRAAKELEFDQA

SEQ ID NO: 48673 - protein, 173 aa, Homo sapiens
  MOD_RES (1)..(1): Any amino acid
XNGIFHRDVKPENILIKQDVLKLGDFGSCRSVYSKQPYTEYISTRWYRAPECLLTDGFYTYKMDLWSAGCVFYEIASLQPLFPGVNELDQISKIHDVIGTPAQKILTKFKQSRAMNFDFPFKKGSGIPLLTTNLSPQCLSLLHAMVAYDPDERIAAHQALQHPYFQEQRRLTP

SEQ ID NO: 48674 - protein, 326 aa, Homo sapiens
MVLSQEEPDSARGTSEAQPLGPAPTGAAPPPGPGPSDSPEAAVEKVEVELAGPATAEPHEPPEPPEGGWGWLVMLAAMWCNGSVFGIQNACGVLFVSMLETFGSKDDDKMVFKTAWVGSLSMGMIFFCCPIVSVFTDLFGCRKTAVVGAAVGFVGLMSSSFVSSIEPLYLTYGIIFACGCSFAYQPSLVILGHYFKKRLGLVNGIVTAGSSVFTILLPLLLRVLIDSVGLFYTLRVLCIFMFVLFLAGFTYRPLATSTKDKESGGSGSSLFSRKKFSPPKNFQFCHLQGDSLCSVGSWNTTCTFWILCALCSLGEYAPSLIMNITI

SEQ ID NO: 48675 - protein, 408 aa, Homo sapiens
MKETIFELEDQVEQHRAVKLHNNQLISELESSVIKLEEQKSDLERQLKTLTKQMKEETEEWRRFQADLQTAVVVANDIKCEAQQELRTVKRKLLEEEEKNARLQKELGDVQGHGRVVTSRAAPPPVDEEPESSEVDAAGRWPGVCVSRTSPTPPESATTVKSLIKSFDLGRPGGAGQNISVHKTPRSPLSGIPVRTAPAAAVSPMQRHSTYSSVRPASRGVTQRLDLPDLPLSDILKGRTETLKPDPHLRKSPSLESLSRPPSLGFGDTRLLSASTRAWKPQSKLSVERKDPLAALAREYGGSKRNALLKWCQKKTQGYANIDITNFSSSWSDGLAFCALLHTYLPAHIPYQELNSQEKKRNLLLAFEAAESVGIKPSLELSEMLYTDRPDWQSVMQYVAQIYKYFET

SEQ ID NO: 48676 - protein, 242 aa, Homo sapiens
MQEHKLKVARLDNIFLTRMHWSNVGGLSGMILTLKETGLPKCVLSGPPQLEKYLEAIKIFSGPLKGIELAVRPHSAPEYEDETMTVYQIPIHSEQRRGKHQPWQSPERPLSRLSPERSSDSESNENEPHLPHGVSQRRGVRDSSLVVAFICKLHLKRGNFLVLKAKEMGLPVGTAAIAPIIAAVKDGKSITHEGREILAEELCTPPDPGAAFVVVECPDESFIQPICENATFQRYQGKADAP

SEQ ID NO: 48677 - protein, 98 aa, Homo sapiens
MKKVLLEMEDQKNSYEQKAKESLQKVLEEKMNAEQQLQSTQRSLALAEQKCEEWRSQYEALKEDWRTLGTQHRELESQLHVLQSKLQGADSRDLQMNQ

SEQ ID NO: 48678 - protein, 206 aa, Homo sapiens
MLGSGFKAERLRVNLRLVINRLKLLEKKKTELAQKARKEIADYLAAGKDERARIRVEHIIREDYLVEAMEILELYCDLLLARFGLIQSMKELDSGLAESVSTLIWAAPRLQSEVAELKIVADQLCAKYSKEYGKLCRTNQIGTVNDRLMHKLSVEAPPKILVERYLIEIAKNYNVPYEPDSVVMAEAPPGVETDLIDVGFTDDVKK

SEQ ID NO: 48679 - protein, 49 aa, Homo sapiens
MTASGSPDYGQPHKINPLPPQQEWINQPVRVNVKREYDHMNGSRFTAGL

SEQ ID NO: 48680 - protein, 122 aa, Homo sapiens
MKEESAAQLGCCHRPMALGGTGGSLSPSLDFQLFRGDQSTSHQGCRPAPPMTRNSQSSTHRTRTSWENSQKELARGPPAQPSPLITALPHHRCRTERAPAPWLSAPVPLSTPSPRSSHFSST

SEQ ID NO: 48681 - protein, 75 aa, Homo sapiens
MARGERRRRAVPAEGVRTAERAARGGPGRRDGRGGGPRSTAGGVALAVVVLSLALAPPWPRTSSGEPTALTSTSA

SEQ ID NO: 48682 - protein, 409 aa, Homo sapiens
MNRTWPRRIWGSSQDEVGFASSVRRPHLTSDAVALLRDNVTPRENELWTSLGDSWTRPGLELSPEEGPPYRPEFFSGWEPPVTDPQSRAWEDPVEKQLQHERRRRQVTQATQQGRGWEVRGRGRSAWPRLTRLSYFLQQSAPQVAVNGHRDLEPESEPQLESETAGKWVLCNYDFQARNSSELSVKQRDVLEVLDDSRKWWKVRDPAGQEGYVPYNILTPYPGPRLHHSQSPARSLNSTPPPPPAPAPAPPPALARPRWDRPRWDSCDSLNGLDPSEKEKFSQMLIVNEELQARLAQGRSGPSRAVPGPRAPEPQLSPGSDASEVRAWLQAKGFSSGTVDALGVLTGAQLFSLQKEELRAVSPEEGARVYSQVTVQRSLLEDKEKVSELEAVMEKQKKKVEGEVEMEVI

SEQ ID NO: 48683 - protein, 239 aa, Homo sapiens
MSGVVPTAPEQPAGEMENQTKPPDPRPDAPPEYNSHFLPGPPGTAVPPPTGYPGGLPMGYYSPQQPSTFPLYQPVGGIHPVRYQPGKYPMPNQSVPITWMPGPTPMANCPPGLEYLVQLEVQCPPGVTIGFVAEHWNLCRAVYSIQNEKKENVMRVRGPCSTYGCGSDSVFEVKSLDGISNIGSIIRKWNGLLSAMADADHFDIHFPLDLDVKMKAMIFGACFLIDFMYFERSPPQRSR

SEQ ID NO: 48684 - protein, 150 aa, Homo sapiens
MERPYTFKDFLLRPRSHKSRVKGFLRLKMAYMPKNGGQDEENSDQRDDMEHGWEVVDSNDSASQHQEELPPPPLPPGWEEKVDNLGRTYYVNHNNRTTQWHRPSLMDVSSESDNNIRQINQEAAHRRFRSRRHISEDLEPEPSEGGDVPE

SEQ ID NO: 48685 - protein, 440 aa, Homo sapiens
MDIKGQFWNDDDSEGDNESEEFLYGVQGSCAADLYRHPQLDADIEAVKEIYSENSVSIREYGTIDDVDIDLHINISFLDEEVSTAWKVLRTEPIVLRLRFSLSQYLDGPEPSIEVFQPSNKEGFGLGLQLKKILGMFTSQQWKHLSNDFLKTQQEKRHSWFKASGTIKKFRAGLSIFSPIPKSPSFPIIQDSMLKGKLGVPELRVGRLMNRSISCTMKNPKVEVFGYPPSPQAGLLCPQHVGLPPPARTSPLVSGHCKNIPTLEYGFLVQIMKYAEQRIPTLNEYCVVCDEQHVFQNGSMLKPAVCTRELCVFSFYTLGVMSGAAEEVATGAEVVDLLVAMCRAALESPRKSIIFEPYPSVVDPTDPKTLAFNPKKKNYERLQKALDSVMSIREMTQGSYLEIKKQMDKLDPLAHPLLQWIISSNRSHIVKLPLSRWVPH

SEQ ID NO: 48686 - protein, 1724 aa, Homo sapiens
MQSFRERCGFHGKQQNYQQTSQETSRLENYRQPSQAGLSCDRQRLLAKDYYNPQPYPSYEGGAGTPSGTAAAVAADKYHRGSKALPTQQGLQGRPAFPGYGVQDSSPYPGRYAGEESLQAWGAPQPPPPQPQPLPAGVAKYDENLMKKTAVPPSRQYAEQGAQVPFRTHSLHVQQPPPPQQPLAYPKLQRQKLQNDIASPLPFPQGWWAGGHSYKSCTAPTAQPHDRPLTASSSLAPGQRVQNLHAYQSGRLSYDQQQQQQQQQQQQQQALQSRHHAQETLHYQNLAKYQHYGQQGQGYCQPDAAVRTPEQYYQTFSPSSSHSPARSVGRSPSYSSTPSPLMPNLENFPYSQQPLSTGAFPAGITDHSHFMPLLNPSPTDATSSPAELTALTSQVENISNTVQQLLLSKAAVPQKKGVKNLVSRTPEQHKSQHCSPEGSGYSAEPAGTPLSEPPSSTPQSTHAEPQEADYLSGSEDPLERSFLYCNQARGSPARVNSNSKAKPESVSTCSVTSPDDMSTKSDDSFQSLHGSLPLDSFSKFVAGERDCPRLLLSALAQEDLASEILGLQEAIGEKADKAWAEAPSLVKDSSKPPFSLENHSACLDSVAKSAWPRPGEPEALPDSLQLDKGGNAKDFSPGLFEDPSVAFATPDPKKTTGPLSFGTKPTLGVPAPDPTTAAFDCFPDTTAASSADSANPFAWPEENLGDACPRWGLHPGELTKGLEQGGKASDGISKGDTHEASACLGFQEEDPPGEKVASLPGDFKQEEVGGVKEEAGGLLQCPEVAKADRWLEDSRHCCSTADFGDLPLLPPTSRKEDLEAEEEYSSLCELLGSPEQRPGMQDPLSPKAPLICTKEEVEEVLDSKAGWGSPCHLSGESVILLGPTVGTESKVQSWFESSLSHMKPGEEGPDGERAPGDSTTSDASLAQKPNKPAVPEAPIAKKEPVPRGKSLRSRRVHRGLPEAEDSPCRAPVLPKDLLLPESCTGPPQGQMEGAGAPGRGASEGLPRMCTRSLTALSEPRTPGPPGLTTTPAPPDKLGGKQRAAFKSGKRVGKPSPKAASSPSNPAALPVASDSSPMGSKTKETDSPSTPGKDQRSMILRSRTKTQEIFHSKRRRPSEGRLPNCRATKKLLDNSHLPATFKVSSSPQKEGRVSQRARVPKPGAGSKLSDRPLHALKRKSAFMAPVPTKKRNLVLRSRSSSSSNASGNGGDGKEERPEGSPTLFKRMSSPKKAKPTKGNGEPATKLPPPETPDACLKLASRAAFQGAMKTKVLPPRKGRGLKLEAIVQKITSPSLKKFACKAPGASPGNPLSPSLSDKDRGLKGAGGSPVGVEEGLVNVGTGQKLPTSGADPLCRNPTNRSLKGKLMNRASGTQGASEDNSGGGGKKPKMEELGLASQPPEGRPCQPQTRAQKQPGHTNYSSYSKRKRLTRGRAKNTTSSPCKGRAKRRRQQQVLPLDPAEPEIRLKYISSCKRLRSDSRTPAFSPFVRVEKRDAFTTICTVVNSPGDAPKPHRKPSSSASSSSSSSSFSLDAAGASLATLPGGSILQPRPSLPLSSTMHLGPVVSKALSTSCLVCCLCQNPANFKDLGDLCGPYYPEHCLPKKKPKLKEKVRPEGTCEEASLPLERTLKGPECAAAATAGKPPRPDGPADPAKQGPLRTSARGLSRRLQSCYCCDGREDGGEEAAPADKGHWVHEACAVWTGGVYLVAGKLFGLQEAMKVAVDM

SEQ ID NO: 48687 - protein, 54 aa, Homo sapiens
MSCQQSQQQCQPPPNVSSGGCCGSSSGGSCGSSSGGCCSSGGGGCCLSHHRRRR

SEQ ID NO: 48688 - protein, 173 aa, Homo sapiens
MGTLSLHPGIDVRDAPLKEIKVTSSRRFIASFNVVNTTKRDAGKYRCMIRTEGGVGISNYAELVVKEPPVPIAPPQLASVGATYLWIQLNANSINGDGPIVAREVEYCTASGSWNDRQPVDSTSYKIGHLDPDTEYEISVLLTRPGEGGTGSPGPALRTRTKCADPMRGPRKL

SEQ ID NO: 48689 - protein, 157 aa, Homo sapiens
MPDENIFLFVPNLIGYARIVFAIISFYFMPCCPLTASSFYLLSGLLDAFDGHAARALNQGTRFGAMLDMLTDRCSTMCLLVNLALLYPGATLFFQISMSLDVASHWLHLHSSVVRGSESHKMIDLSGNPVLRIYYTSRLALWDCSGWASGSLPPSPC

SEQ ID NO: 48690 - protein, 1297 aa, Homo sapiens
MAWMTYISNWFEQDDWYEGLQRANMSQVRQVGLLAAGCQPWNKDVCAASGDRFAYCATLAIYIYQLDHRYNEFKLHAIMSEHKKTITAISWCPHNPDLFASGSTDNLVIIWNVAEQKVIAKLDSTKGIPASLSWCWNAEDVVAFVSHRGPLFIWTISGPDSGVIVHKDAHSFLSDICMFRWHTHQKGKVVFGHIDGSLSIFHPDEEDPVTALEWDPLSTDYLLVVNLHYGIRLVDSESLSCITTFNLPSAAASVQCLAWVPSAPGMFITGDSQVGVLRIWNVSRTTPIDNLKLKKTGFHCLHVLNSPPRKKFSVQSPTKNHYTSSTSEAVPPPTLTQNQAFSLPPGHAVCCFLDGGVGLYDMGAKKWDFLRDLGHVETIFDCKFKPDDPNLLATASFDGTIKVWDINTLTAVYTSPGNEGVIYSLSWAPGGLNCIAGGTSRNGAFIWNVQKGKIIQRFNEHGTNGIFCIAWSHKDSKRIATCSSDGFCIIRTIDGKVLHKYKHPAAVFGCDWSQNNKDMIATGCEDTNVRVYYVATSSDQPLKVFSGHTAKVFHVKWSPLREGILCSGSDDGTVRIWDYTQDACINILNGHTAPVRGLMWNTEIPYLLISGSWDYTIKVWDTREGTCVDTVYDHGADVYGLTCHPSRPFTMASCSRDSTVRLWSLTALVTPVQINILADRSWEEIIGNTDYAIEPGTPPLLCGKVSRDIRQEIEKLTANSQVKKLRWFSECLSPPGGSDNLWNLVAVIKGQDDSLLPQNYCKGIMHLKHLIKFRTSEAQELTTVKMSKFGGGIGVPAKEERLKEAAEIHLRLGQIQRYCELMVELGEWDKALSIAPGVSVKYWKKLMQRRADQLIQEDKDDVIPYCIAIGDVKKLVHFFMSRGQLKEALLVAQAACEGNMQPLHVSVPKGASYSDDIYKEDFNELLHKVSKELAEWYFQDGRAVLAACCHLAIDNIELAMAYLIRGNELELAVCVGTVLGESAAPATHYALELLARKCMMISVCFPCVGYRNLAADLLLMIPDNELHLIKLCAFYPGCTEEINDLHDKCKLPTVEECMQLAETARADDNIFETVKYYLLSQEPEKALPIGISFVKEYISSSDWTLDTIYPVLDLLSYIRTEKLLLHTCTEARNELLILCGYIGALLAIRRQYQSIVPALYEYTSQLLKRREVSVPLKIEYLSEELDAWRACTQSTNRSLEDSPYTPPSDSQRMIYATLLKRLKEESLKGIIGPDYVTGSNLPSHSDIHISCLTGLKIQGPVFFLEDGKSAISLNDALMWAKVNPFSPLGTGIRLNPF

SEQ ID NO: 48691 - protein, 156 aa, Homo sapiens
MEEPEEPADSGQSLVPVYIYSPEYVSMCDSLAKIPKRASMVHSLIEAYALHKQMRIVKPKVASMEEMATFHTDAYLQHLQKVSQEGDDDHPDSIEYGLGYDCPATEGIFDYAAAIGGATITAAQCLIDGMCKVAINWSGGWHHAKKYEPPAPNPGL

SEQ ID NO: 48692 - protein, 216 aa, Homo sapiens
DKCMNTTLTECDFSSLSKYGDHTLRVRAEFADEHSDWVNITFCPVDDTIIGPPGMQVEVLADSLHMRFLAPKIENEYETWTMKNVYNSWTYNVQYWKNGTDEKFQITPQYDFEVLRNLEPWTTYCVQVRGFLPDRNKAGEWSEPVCEQTTHDETVPSWMVAVILMASVFMVCLALLGCFALLWCVYKKTKYAFSPRNSLPQHLKERNWSDRKEQTE

SEQ ID NO: 48693 - protein, 86 aa, Homo sapiens
MALPPAAAPPAGAREPPGSRAAAAAAAPEPPLGLQQLSALQPEPGGVPLHSSWTFWLDRSLPGATAAECASNLKKIYTVQTVQMMK

SEQ ID NO: 48694 - protein, 143 aa, Homo sapiens
MDFRTACEETKTGICLLQDGNQEPFKVRLHLAKDILMIQEQDVICVSGEPFYSGAVLWRYKFSQLKGSSDDGKSKIKFLFQNPDTKQIEAKELEFSNLFAVLHCIHSFFAAKVACLDPLFLGNQATASTAASSATTSKAKYTT

SEQ ID NO: 48695 - protein, 306 aa, Homo sapiens
MKSDSSTSAAPLRGLGGPLRSSEPVRAVPARAPAVDLLEEAADLLVVHLDFRAALETCERAWQSLANHAVAEEPAGTSLEVKCSLCVVGIQALAEMDRWQEVLSWVLQYYQVPEKLPPKVLELCILLYSKMQEPGAVLDVVGAWLQDPANQNLPEYGALAEFHVQRVLLPLGCLSEAEELVVGSAAFGEERRLDVLQAIHTARQQQKQEHSGSEEAQKPNLEGSVSHKFLSLPMLVRQLWDSAVSHFFSLPFKKSLLAALILCLLVVRFDPAGMHISPRGPSGSSDWQCLLGALLPGTRHPGRRHF

SEQ ID NO: 48696 - protein, 59 aa, Homo sapiens
  MOD_RES (1)..(1): Any amino acid
XLQRNEWDPIIEWAEKRSRSGATLSGPMTMSCRSCGPAPPPAPSSSISAPRAPQSSTSS

SEQ ID NO: 48697 - protein, 176 aa, Homo sapiens
QSATEQMAATVAGSVRAEVQHQLHVAVGSLQESILAQVQRIVKGEAQQAHILQLLQQGHLNQAFQQALTAADLNLVLYVCETVDPAQVFGQPPCPLSQPVLLSLIQQLASDLGTRTDLKLSYLEEAVMHLDHSDPITRDHMGSVMAQVRQKLFQFLQAEPHNSLGKAARRLSLMLH

SEQ ID NO: 48698 - protein, 62 aa, Homo sapiens
MQLPRWWELGDPCAWTGQGRGTRRMSPATTGTFLLTGPEVRTGRVQWPTPVIPALWQAELFY

SEQ ID NO: 48699 - protein, 426 aa, Homo sapiens
MTSAGGAPGALPAGTPESSLHEALDQCMTALDLFLTNQFSEALSYLKPRTKESMYHSLTYATILEMQAMMTFDPQDILLAGNMMKEAQMLCQRHRRKSSVTDSFSSLVNRPTLGQFTEEEIHAEVCYAECLLQRAALTFLQGSSHGGAVRPRALHDPSHACSCPPGPGRQHLFLLQDENMVSFIKGGIKVRNSYQTYKELDSLVQSSQYCKGENHPHFEGGVKLGVGAFNLTLSMLPTRILRLLEFVGFSGNKDYGLLQLEEGASGHSFRSVLCVMLLLCYHTFLTFVLGTGNVNIEEAEKLLKPYLNRYPKGAIFLFFAGRIEVIKGNIDAAIRRFEECCEAQQHWKQFHHMCYWELMWCFTYKGQWKMSYFYADLLSKENCWSKATYIYMKAAYLSMFGKEDHKPFGDDEVELFRWVPHRAPTV

SEQ ID NO: 48700 - protein, 271 aa, Homo sapiens
  MOD_RES (1)..(1): Any amino acid
XKSTVTPLILPKRRRGSGVFCANCLTTKTSLWRKNANGGYVCNACGLYQKLHSTPRPLNIIKQNNGEQIIRRRTRKRLNPEALQAEQLNKQQRGSNEEQVNGSPLERRSEDHLTESHQREIPLPSLSKYEAQGSLTKSHSAQQPVLVSQTLDIHKRMQPLHIQIKSPQESTGDPGNSSSVSEGKGSSERGSPIEKYMRPAKHPNYSPPGSPIEKYQYPLFGLPFVHNDFQSEADWLRFWSKYKLSVPGNPHYLSHVPGLPNPCQNYVPYPT

SEQ ID NO: 48701 - protein, 1263 aa, Homo sapiens
MPRKGTQPSTARRREEGPPPPSPDGASSDAEPEPPSGRTESPATAAAMTNEAGAPRLMITHIVNQNFKSYAGEKILGPFHKRFSCIIGPNGSGKSNVIDSMLFVFGYRAQKIRSKKLSVLIHNSDEHKDIQSCTVEVHFQKIIDKEGDDYEVIPNSNFYVSRTACRDNTSVYHISGKKKTFKDVGNLLRSHGIDLDHNRFLILQGEVEQIAMMKPKGQTEHDEGMLEYLEDIIGCGRLNEPIKVLCRRVEILNEHRGEKLNRVKMVEKEKDALEGEKNIAIEFLTLENEIFRKKNHVCQYYIYELQKRIAEMETQKEKIHEDTKEINEKSNILSNEMKAKNKDVKDTEKKLNKITKFIEENKEKFTQLDLEDVQVREKLKHATSKAKKLEKQLQKDKEKVEEFKSIPAKSNNIINETTTRNNALEKEKEKEEKKLKEVMDSLKQETQGLQKEKESREKELMGFSKSVNEARSKMDVAQSELDIYLSRHNTAVSQLTKAKEALIAASETLKERKAAIRDIEGKLPQTEQELKEKEKELQKLTQEETNFKSLVHDLFQKVEEAKSSLAMNRSRGKVLDAIIQEKKSGRIPGIYGRLGDLGAIDEKYDVAISSCCHALDYIVVDSIDIAQECVNFLKRQNIGVATFIGLDKMAVWAKKMTEIQTPENTPRLFDLVKVKDEKIRQAFYFALRDTLVADNLDQATRVAYQKDRRWRVVTLQGQIIEQSGTMTGGGSKVMKGRMGSSLVIEISEEEVNKMESQLQNDSKKAMQIQEQKVQLEERVVKLRHSEREMRNTLEKFTASIQRLIEQEEYLNVQVKELEANVLATAPDKKKQKLLEENVSAFKTEYDAVAEKAGKVEAEVKRLHNTIVEINNHKLKAQQDKLDKINKQLDECASAITKAQVAIKTADRNLQKAQDSVLRTEKEIKDTEKEVDDLTAELKSLEDKAAEVVKNTNAAEESLPEIQKEHRNLLQELKVIQENEHALQKDALSIKLKLEQIDGHIAEHNSKIKYWHKEISKISLHPIEDNPIEEISVLSPEDLEAIKNPDSITNQIALLEARCHEMKPNLGAIAEYKKKEELYLQRVAELDKITYERDSFRQAYEDLRKQRLNEFMAGFYIITNKLKENYQMLTLGGDAELELVDSLDPFSEGIMFSVRPPKKSWKKIFNLSGGEKTLSSLALVFALHHYKPTPLYFMDEIDAALDFKNVSIVAFYIYEQTKNAQFIIISLRNNMFEISDRLIGIYKTYNITKSVAVNPKEIASKGLC

SEQ ID NO: 48702 - protein, 244 aa, Homo sapiens
LAHIHYMPDHWQGNAHRSQTRDEFAQLFQYKAVFILEELLSPIVTPLILIFCLRPRALEIIDFFRNFTVEVVGVGDTCSFAQMDVRQHGHPQWLSAGQTEASVYQQAEDGKTELSLMHFAITNPGWQPPRESTAFLGFLKEQVQRDGAAASLAQGGLLPENALFTSIQSLQSESEPLSLIANVVAGSSCRGPPLPRDLQGSRHRAEVASALRSFSPLQPGQAPTGRAHSTMTGSGSTSSRPRLN

SEQ ID NO: 48703 - protein, 1071 aa, Homo sapiens
MLFPLQVAAVTSSVRDDPLEHCVSPRTRARSPEICKMADNLDEFIEEQKARLAEDKAELESDPPYMEMKGKLSAKLSENSKILISMAKENIPPNSQQTRGSLGIDYGLSLPLGEDYERKKHKLKEELRQDYRRYLTQKNFLSTSETDPSTLGVSLPIGERLSAKERLKLERNKEYNQFLRGKEESSEKFRQVEKSTEPKSQRNKKPIGQVKPDLTSQIQTSCENSEGPRKDVLTPSEAYEELLNQRRLEEDRYRQLDDEIELRNRRIIKKANEEVGISNLKHQRFASKAGIPDRRFHRFNEDRVFDRRYHRPDQDPEVSEEMDERFRYESDFDRRLSRVYTNDRIAPLPPPPLLPPLATNYRTPYDDAYYFYGSRNTFDPSLAYYGSGMMGVQPAAYVSAPVTHQLAQPVVNTVGQNELKITSDQVINSGLIFEDKPKPSKQSLQSYQEALQQQIREREERRKKEREEKEEYEAKLEAEMRTYNPWGKGGGGAPLRDAKGNLITDLNRMHRQNIDAYHNPDARTYEDKRAVVSLDPNLATSNAENLEDAANKSSGHMQTQSSPFARGNVFGEPPTELQIKQQELYKNFLRFQIEEKKQREEAERERLRIAEEKEERRLAEQRARIQQEYEEEQEKKREKEEEQRLKNEEHIRLAEERQKEAERKKKEEEEKYNLQLQHYCERDNLIGEETKHMRQPSPIVPALQNKIASKLQRPPSVDSIIRSFIHESSMSRAQSPPVPARKNQLRAEEEKKNVIMELSEMRKQLRSEERRLQERLLHMDSDDEIPIRKKERNPMDIFDMARHRLQAPVRRQSPKGLDAATFQNVHDFNELKDRDSETRVDLKFMYLDPPRDHHTLEIQQQALLREQQKRLNRIKMQEGAKVDLDAIPSAKVREQRMPRDDTSDFLKNSLLESDSAFIGAYGETYPAIEDDVLPPPSQLPSARERRRNKWKGLDIDSSRPNVAPDGLSLKSISSVNVDELRVRNEERMRRLNEFHNKPINTDDESSLVDPDDIMKHIGDDGSNSVATEPWLRPGTSETLKRFMAEQLNQEQQQIPGKPGTFTWQGLSTAHG

SEQ ID NO: 48704 - protein, 144 aa, Homo sapiens
MVWIRFILIQNRAGKTRLAKWYMQFDDDEKQKLIEEVHAVVTVRDAKHTNFVEFRNFKIIYRRYAGLYFCICVDVNDNNLAYLEAIHNFVEVLNEYFHNVCELDLVFNFYKVYTVVDEMFLAGEIRETSQTKVLKQLLMLQSLE

SEQ ID NO: 48705 - protein, 191 aa, Homo sapiens
  MOD_RES (1)..(1): Any amino acid
XRPPRIPEPVHLPVVPDGRLSAASSAFSLASAGSAEGVGGAPTPKGQAAPPAPPLPSSLDPPPPPAAVEVFQRPPTLEELSPPPPAFLLFPQDEELPLPLDLPPPPPLDGDELGLPPPPPGFGPDEPSWVPASYLEKVVTLYPYTSQKDNELSFSEGTVICVTRRYSDGWCEGVSSEGTGFFPGNYVEPSC

SEQ ID NO: 48706 - protein, 213 aa, Homo sapiens
MSGVSEPLSRVKLGTLRRPEGPAEPMVVVPVDVEKEDVRILKVCFYSNSFNPGKNFKLVKCTVQTEIREIITSILLSGRIGPNIRLAECYGLRLKHMKSDEIHWLHPQMTVGEVQDKYECLHVEAEWRYDLQIRYLPEDFMESLKEDRTTLLYFYQQLRNDYMQRYASKVSEGMALQLGCLELRRFFKDMPHNALDKKSNFELLEKEVGLDLF

SEQ ID NO: 48707 - protein, 132 aa, Homo sapiens
  MOD_RES (1)..(1): Any amino acid
XVSAACQRRNTGTVGLKLSKVVVVGDLYVGKTSLIHRFCKNVFDRDYKATIGVDFEIERFEIAGIPYSLQIWDTAGQEKFKCIASAYYRGAQGEQHATSGLNCMQQRGPCRAPQWESRVLCTGTSFLSSKTH

SEQ ID NO: 48708 - protein, 614 aa, Homo sapiens
MKQPNRKRKLNMDSKERLDQDGRLEQAEEEKKPKDSTTPLSHVPSAAAQGAWSWEWYLKEQKAVAAPVELFSKDQSFPEHENGFQIGMRLEGIDPRHPSVFCVLSVAEVCGYRLRLHFDGYLSCYDFWTNAGSPDIHPVGWCEKTKHELHIPKGYRKDKFVWMDYLKACKLQNAPKKLFRNRSPNGPMSKEFQVGMKLEAVDRKNPSLVCVATIADIVEDRLLVHFDNWDDSYDYWCDVNSPYVQPVGWCQENGRTLIAPQGYPNPENFSWTEYLEATQTNAVPAKVFKMRLPHGFLPNMKLEVVDKRNPRLIRVATIVDVDDQRVKVHFDGWDHKYDYWVEADSPDIHPIGWCDVTGHPLEVPQRTNDLKILPGQAVCPTPGCRGIGHIRGPRYSGHHSAFGCPYSDMNLKKEATLHDRLREQTQANLESDSSHSKSKSLCSLNFNGKHEKVNSQPRLVQQAKCLKIKGKEDIDLDNLFREYSVEQAQQVLHQSVSMSTVSAHPFRDLPLGREQHCKLLPGVADIRASQVARWTVDEVAEFVQSLLGCEEHAKCFKKEQIDGKAFLLLTQTDIVKVMKIKLGPALKIYNSILMFRHSQELPEEDIASGQEVRG

SEQ ID NO: 48709 - protein, 182 aa, Homo sapiens
  MOD_RES (1)..(1): Any amino acid
XARLRELRQQNEILWREVVTLRQSHGQQHRVIGKLIQCLFGPLQAGPSNAGGKRKLTPTSSSRLSQRQIWALALTGPGAPSSLTSQKTLHPLRGPGFLPPVMAGAPPPLPVAVVQAILEGKGSFSPEGPRNAQQPEPGDPREIPDRGPLGLESGDRSPESLLPPMLLQPPQESVEPAGPLDV

SEQ ID NO: 48710 - protein, 95 aa, Homo sapiens
MTTASTSQVRQNYHQDSEAAINRQINLELYASYVYLSMSYYFDRDDVALKNFAKYFLHQSHEEREHAEKLMKLQNQRGGRIFLQDIKTVMTGRAG

SEQ ID NO: 48711 - protein, 79 aa, Homo sapiens
MQFFGRLVNTFSGVTNLFSNPFRVKEVAVADYTSSDRVREEGQLILFQNTPNRTWDCVLVNPRNSQSGFRLFQLELEAD

SEQ ID NO: 48712 - protein, 281 aa, Homo sapiens
  MOD_RES (1)..(1): Any amino acid
XRKATEPPQGLSRAMSSRDGLLQDEEEEEEEAAESEEDDNLSSMLHQRAEIPWRACAKYLSSAGILLLSLLVFSQLLKHMVLVAIDYWLAKWTDSALTLTPAARNCSLSQECTLDQTVYAMVFTVLCSLGIVLCLVTSVTVEWTGLKVAKRLHRSLLNRIILAPMRFFETTPLGSILNRFSSDCNTIDQHIPSTLECLSRSTLLCVSALAVISYVTPVFLVALLPLAIVCYFIQKYFRVASRDLQQLDDTTQLPLLSHFAETVEGLTTIRAFRSFSSSLQV

SEQ ID NO: 48713 - protein, 505 aa, Homo sapiens
LDFLLLQDPASTCVPEPASQHTLRSGPGCLQQPEQQGVRDPGGIWAKLGAAEASAERLQGRRSRGASGSEPQQMGSDVRDLNALLPAVPSLGGGGGCALPVSGAAQWAPVLDFAPPGASAYGSLGGPAPPPAPPPPPPPPPHSFIKQEPSWGGAEPHEEQCLSAFTVHFSGQFTGTAGACRYGPFGPPPPSQASSGQARMFPNAPYLPSCLESQPAIRNQGYSTVTFDGTPSYGHTPSHHAAQFPNHSFKHEDPMGQQGSLGEQQYSVPPPVYGCHTPTDSCTGSQALLLRTPYSSDNLYQMTSQLECMTWNQMNLGATLKGHSTGYESDNHTTPILCGAQYRIHTHGVFRGIQDVRRVPGVAPTLVRSASETSEKRPFMCAYPGCNKRYFKLSHLQMHSRKHTGEKPYQCDFKDCERRFSRSDQLKRHQRRHTGVKPFQCKTCQRKFSRSDHLKTHTRTHTGKTSEKPFSCRWPSCQKKFARSDELVRHHNMHQRNMTKLQLAL

SEQ ID NO: 48714 - protein, 406 aa, Homo sapiens
MGLLVFVRNLLLALCLFLVLGFLYYSAWKLHLLQWEEDSNSVVLSFDSAGQTLGSEYDRLGFLLNLDSKLPAELATKYANFSEGACKPGYASALMTAIFPRFSKPAPMFLDDSFRKWARIREFVPPFGIKGQETGFNHVAQAGLKLLSSSNPPSLASQSAGITDNLIKAILSVTKEYRLTPALDSLRCRRCIIVGNGGVLANKSLGSRIDDYDIVVRLNSAPVKGFEKDVGSKTTLRITYPEGAMQRPEQYERDSLFVLAGFKWQDFKWLKYIVYKERVSASDGFWKSVATRVPKEPPEIRILNPYFIQEAAFTLIGLPFNNGLMGRGNIPTLGSVAVTMALHGCDEVAVAGFGYDMSTPNAPLHYYETVRMAAIKESWTHNIQREKEFLRKLVKARVITDLSSGI

SEQ ID NO: 48715 - protein, 73 aa, Homo sapiens
  MOD_RES (1)..(1): Any amino acid
XTKGMEVKQIKMLKRESKKTESSKIPTLLNVDQNQEKQEFIPLSLLSACCPIFTNICSQLTIRVEMAIARGRI

SEQ ID NO: 48716 - protein, 225 aa, Homo sapiens
MRPRGLPPLLVVLLGCWASVSAQTDATPAVTTEGLNSTEAALATFGTFPSTRPPGTPRAPGPSSGPRPTPVTDGGYHVPAPGVHSDPTSRGQPRGDSQFCSQKAVIYSLNFTANPPQRVFELVDQINPSIFCIHITNYKPALSFINPEVPDENNFDTLMKTSDGFTLNAESYVSFTTKLDIPTAAKYEVSLNLIDSFHPITNIFPCKLIFKVTRKTGFLETELIL

SEQ ID NO: 48717 - protein, 45 aa, Homo sapiens
ESCIQYYLENNWLQHEKAPTEEGKKELLFLSNANPSLLERHCAYL

SEQ ID NO: 48718 - protein, 368 aa, Homo sapiens
MGCLGNSKTEDQRNEEKAQREANKKIEKQLQKDKQVYRATHRLLLLGAGESGKSTIVKQMRILHVNGFNGEGGEEDPQAARSNSDGEKATKVQDIKNNLKEAIETIVAAMSNLVPPVELANPENQFRVDYILSVMNVPDFDFPPEFYEHAKALWEDEGVRACYERSNEYQLIDCAQYFLDKIDVIKQADYVPSDQDLLRCRVLTSGIFETKFQVDKVNFHMFDVGGQRDERRKWIQCFNDVTAIIFVVASSSYNMVIREDNQTNRLQEALNLFKSIWNNRWLRTISVILFLNKQDLLAEKVLAGKSKIEDYFPEFARYTTPEDATPEPGEDPRVTRAKYFIRDEFLDQHCQWRWASLLLPSFHLRCGH

SEQ ID NO: 48719 - protein, 63 aa, Homo sapiens
MLQINQMFSVQLSLGEQTWESEGSSIKKAQQAVANKALTESTLPKPVQKPPKSNVNNNPGSIT

SEQ ID NO: 48720 - protein, 90 aa, Homo sapiens
MILSIIFCVIALLVFVFQLFTMEKGNRFFLSGATTLVCWLCILVGVSIYTSHYANRDGTQYHHGYSYILGWICFCFSFIIGVLYLVLRKK

SEQ ID NO: 48721 - protein, 924 aa, Homo sapiens
MKSKDIEASGFNGTAAFMEVRVQSIVVEFILTHVDQLFGGAALSGGEVESGWRSLPGTRASGSPEDLMPRPLPYHLPSILQAGDGPPQMRPYHTIIEIAEHKRKGSLKVRKWRSIFNLGRSGHETKRKLPRGAEDREDKSNKGTLRPAKSMDSLSAAAGASDEPEGLVGPSSPRPSPLLPESLENDSIEAAEGEQEPEAEALGGTNSEPGTPRAGRSAIRAGGSSRAERCAGVHISDPYNVNLPLHITSILSVPPNIISNVSLARLTRGLECPALQHRPSPASGPGPGPGLGPGPPDEKLEASPASSPLADSGPDDLAPALEDSLSQEVQDSFSFLEDSSSSEPEWVGAEDGEVAQAEAAGAAFSPGEDDPGMGYLEELLGVGPQVEEFSVEPPLDDLSLDEAQFVLAPSCCSLDSAGPRPEVEEENGEEVFLSAYDDLSPLLGPKPPIWKGSGSLEGEAAGCGRQALGQGGEEQACWEVGEDKQAEPGGRLDIREEAEGSPETKVEAGKASEDRGEAGGSQETKVRLREGSREETEAKEEKSKGQKKADSMEAKGVEEPGGDEYTDEKEKEIEREEDEQREEAQVEAGRDLEQGAQEDQVAEEKWEVVQKQEAEGVREDEDKGQREKGYHEARKDQGDGEDSRSPEAATEGGAGEVSKERESGDGEAEGDQRAGGYYLEEDTLSEGSGVASLEVDCAKEGNPHSSEMEEVAPQPPQPEEMEPEGQPSPDGCLCPCSLGLGGVGMRLASTLVQVQQVRSVPVVPPKPQFAKMPSAMCSKIHVAPANPCPRPGRLDGTPGERAWGSRASRSSWRNGGSLSFDAAVALARDRQRTEAQGVRRTQTCTEGGDYCLIPRTSPCSMISAHSPRPLSCLELPSEGAEGSGSRSRLSLPPREPQVPDPLLSSQRRSYAFETQANPGKGEGL

SEQ ID NO: 48722 - protein, 538 aa, Homo sapiens
MRPRGLPPLLVVLLGCWASVSAQTDATPAVTTEGLNSTEAALATFGTFPSTRPPGTPRAPGPSSGPRPTPVTDVAVLCVCDLSPAQCDINCCCDPDCSSVDFSVFSACSVPVVTGDSQFCSQKAVIYSLNFTANPPQRVFELVDQINPSIFCIHITNYKPALSFINPEVPDENNFDTLMKTSDGFTLNAESYVSFTTKLDIPTAAKYEYGVPLQTSDSFLRFPSSLTSSLCTDNNPAAFLVNQAVKCTRKINLEQCEEIEALSMAFYSSPEILRVPDSRKKVPITVQSIVIQSLNKTLTRREDTDVLQPTLVNAGHFSLCVNVVLEVKYSLTYTDAGEVTKADLSFVLGTVSSVVVPLQQKFEIHFLQENTQPVPLSGNPGYVVGLPLAAGFQPHKGGALPCQLVAQKVKSLLWGQGFPDYVAPFGNSQAQDMLDWVPIHFITQSFNRKDSCQLPGALVIEVKWTKYGSLLNPQAKIVNVTANLISSSFPEANSGNERTILISTAVTFVDVSAPAEAGFRAPPAINARLPFNFFFPFV

SEQ ID NO: 48723 - protein, 210 aa, Homo sapiens
GLTALHQACIDDNVDMVKFLVENGANINQPDNEGWIPLHAAASCGYLDIAEFLIGQGAHVGAVNSEGDTPLDIAEEEAMEELLQNEVNRQGVDIEAARKEEERIMLRDARQWLNSGHINDVRHAKSGGTALHVAAAKGYTEVLKLLIQAGYDVNIKDYDGWTPLHAAAHWGKEEACRILVDNLCDMEMVNKVLHSEKRDKKSPLIESTAN

SEQ ID NO: 48724 - protein, 51 aa, Homo sapiens
MSGEATVLAYHAPEEQEGLLVVKVEEENYVLDQDFGLQENPWSQEKCSGRK

SEQ ID NO: 48725 - protein, 292 aa, Homo sapiens
MGDWGFLEKLLDQVQEHSTVVGKIWLTVLFIFRILILGLAGESVWGDEQSDFECNTAQPGCTNVCYDQAFPISHIRYWVLQFLFVSTPTLVYLGHVIYLSRREERLRQKEGELRALPAKDPQVERALAAVERQMAKISVAEDGRLRIRGALMGTYVASVLCKSVLEAGFLYGQWRLYGWTMEPVFVCQRAPCPYLVDCFVSRPTEKTIFIIFMLVVGLISLVLNLLELVHLLCRCLSRGMRARQGQDAPPTQGTSSDPYTDQVFFYLPVGQGPSSPPCPTYNGLSSSEQNWA

SEQ ID NO: 48726 - protein, 180 aa, Homo sapiens
MYDNLYLHGIEDSEAGSADSYTSRPSDSDVSLEEDREAIRQEREQQAAIQLERAKSKPVAFAVKTNVSYCGALDEDVPVPSTAISFDAKDFLHIKEKYNNDWWIGRLVKEGCEIGFIPSPLRLENIRIQQEQKRGRFHGGKSSGNSSSSLGEMVSGTFRATPTSTAKQKQKVDFNNESDS

SEQ ID NO: 48727 - protein, 23 aa, Homo sapiens
  MOD_RES (1)..(1): Any amino acid
XIGNKPVETIGFDSIMKQQRASG

SEQ ID NO: 48728 - protein, 441 aa, Homo sapiens
MAAAMPLALLVLLLLGPGGWCLAEPPRDSLREELVITPLPSGDVAATFQFRTRWDSELQREGGLSVLLKADRLFHTSYHSQAVHIRPVCRNARCTSISWELRQTLSVVFDAFITGQGKKDWSLFRMFSRTLTEPCPLASESRVYVDITTYNQDNETLEVHPPPTTTYQDVILGTRKTYAIYDLLDTAMINNSRNLNIQLKWKRPPENEAPPVPFLHAQRYVSGYGLQKGELSTLLYNTHPYRAFPVLLLDTVPWYLRLYVHTLTITSKGKENKPSYIHYQPAQDRLQPHLLEMLIQLPANSVTKVSIQFERALLKWTEYTPDPNHGFYVSPSVLSALVPSMVAAKPVDWEESPLFNSLFPVSDGSNYFVRLYTEPLLVNLPTPDFSMPYNVICLTCTVVAVCYGSFYNLLTRTFHIEEPRTGGLAKRLANLIRRARGVPPL

SEQ ID NO: 48729 - protein, 297 aa, Homo sapiens
MANVPWAEVCEKFQAALALSRVELHKNPEKEPYKSKYSARALLEEVKALLGPAPEDEDERPEAEDGPGAGDHALGLPAEVVEPEGPVAQRAVRLAVIEFHLGVNHIDTEELSAGEEHLVKCLRLLRRYRLSHDCISLCIQAQNNLGILWSEREEIETAQAYLESSEALYNQYMKEVGSPPLDPTERFLPEEEKLTEQERSKRFEKVYTHNLYYLAQVYQHLEMFEKAAHYCHSTLKRQLEHNAYHPIEWAINAATLSQFYINKLCFMEARHCLSAANVIFGQTGKISATEDRQHRRA

SEQ ID NO: 48730 - protein, 93 aa, Homo sapiens
MATAAQGPLSLLWGWLWSERFWLPENVSWADLEGPADGYGYPRGRHILSVFPLAAGIFFVRLLFERWCFALVAQAGVQWCSHSSLQPLPPRFK

SEQ ID NO: 48731 - protein, 180 aa, Homo sapiens
TSAPTADMATLTVVQPLTLDRDVARAIELLEKLQESGEVPVHKLQSLKKVLQSEFCTAIREVYQYMHETITVNGCPEFRARATAKATVAAFAASEGHSHPRVVELPKTDEGLGFNVMGGKEQNSPIYISRIIPGGVAERHGGLKRGDQLLSVNGVLLRSQKQMETHVSSAIIGRENFFYP

SEQ ID NO: 48732 - protein, 203 aa, Homo sapiens
MRKMLAAVSRVLSGASQKPASRVLVASRNFANDATFEIKKCDLHRLEEGPPVTTVLTREDGLKYYRMMQTVRRMELKADQLYKQKIIRGFCHLCDGQFLLPLTQEACCVGLEAGINPTDHLITAYRAHGFTFTRGLSVREILAELTGRKGGCAKGKGGSMHMYAKNFYGGNGIVGAQVPLGAGIALACKYNGKDEVCLTLYGD

SEQ ID NO: 48733 - protein, 1172 aa, Homo sapiens
MSNKTGGKRPATTNSDIPNHNMVSEVPPERPSVRATRTARKAVAFGKRSHSMKRNPNAPVTKAGWLFKQASSGVKQWNKRWFVLVDRCLFYYKDEKEESILGSIPLLSFRVAAVQPSDNISRKHTFKAEHAGVRTYFFSAESPEEQEAWIQAMGEAARVQIPPAQKSVPQAVRHSHEKPDSENVPPSKHHQQPPHNSLPKPEPEAKTRGEGDGRGCEKAERRPERPEVKKEPPVKANGLPAGPEPASEPGSPYPEGPRVPGGGEQPAQPNGWQYHSPSRPGSTAFPSQDGETGGHRRSFPPRTNPDKIAQRKSSMNQLQQWVNLRRGVPPPEDLRSPSRFYPVSRRVPEYYGPYSSQYPDDYQYYPPGVRPESICSMPAYDRISPPWALEDKRHAFRNGGGPAYQLREWKEPASYGRQDATVWIPSPSRQPVYYDELDAASSSLRRLSLQPRSHSVPRSPSQGSYSRARIYSPVRSPSARFERLPPRSEDIYADPAAYVMRRSISSPKYDYLGDRRPVPAGLFPYNYPPSPTVHDKMDELLDLQLQRNLEYLDQQMSESETLISMVNRMVENSSPRSQLFMQVPPYPEVFRDSLHTYKLNEQDTDKLLGKLCEQNKVVREQDRLVQQLRAEKESLESALMGTHQELEMFGSQPAYPEKLRHKKDSLQNQLINIRVELSQATTALTNSTIEYEHLESEVSALHDDLWEQLNLDTQNEVLNRQIQKEIWRIQDVMEGLRKNNPSRGTDTAKHRGGLGPSATYSSNSPASPLSSASLTSPLSPFSLVSGSQGSPTKPGSNEEPGPPRPPLPKAYVPLESPPAVPPLPSESRFWPYPSSPSWHRSGETARGQPKANYEQSKKDPHQTLPLDTPRDISLVPTRQEVEAEKQAALNKVGVVPPRTKSPTDDEVTPSAVVRRNASGLTNGLSSQERPKSAVFPGEGKVKMSVEEQIDRMRRHQSGSMREKRRSLQLPASPAPDPSPRPAYKVVRRHRSIHEVDISNLEAALRAEEPGGHAYETPREEIARLRKMELEPQHYDVDINKELSTPDKVLIPERYIDLEPDTPLSPEELKEKQKKVERIKTLIAKSSMQNVVPIGEGDSVDVPQDSESQLQEQEKRIEISCALATEASRRGRMLSVQCATPSPPTSPASPAPPANPLSSESPRGADSSYTMRV

SEQ ID NO: 48734 - protein, 61 aa, Homo sapiens
MSHVAVENALGLDQQFAGLDLNSSDNQSGGSTASKGRYIPPHLRNREATKGIPDCHQAYSR

SEQ ID NO: 48735 - protein, 72 aa, Homo sapiens
KKIEDLEKEVVRERQENLRLVRLMQDKEEMIGKLKEEIDLLNRDLDDIEDENEQLKQENKTLLKVVGQLTSS

SEQ ID NO: 48736 - protein, 89 aa, Homo sapiens
MELLIMAYALKTACARNIIGVIPYFPYSKQSKMRKRGSIVCKLLASMLAKAGLTHIITMDLHQKEIQGFFSFPVDNLRASPFLLQYIQE

SEQ ID NO: 48737 - protein, 50 aa, Homo sapiens
MGALSSQDSPHFQEKSTEEGEVAALRLTARSQGFQFPNLRATTWRMEKNH

SEQ ID NO: 48738 - protein, 12 aa, Homo sapiens
  MOD_RES (1)..(1): Any amino acid
XQSLLGTQTREA

SEQ ID NO: 48739 - protein, 937 aa, Homo sapiens
IMLLTDPEIESSLLISSDEGATYQKYRLNFYIQSLLFHPKQEDWILAYSQDQKLYSSAEFGRRWQLIQEGVVPNRFYWSVMGSNKEPDLVHLEARTVDGHSHYLTCRMQNCTEANRNQPFPGYIDPDSLIVQDHYVFVQLTSGGRPHYYVSYRRNAFAQMKLPKYALPKDMHVISTDENQVFAAVQEWNQNDTYNLYISDTRGVYFTLALENVQSSRGPEGNIMIDLYEVAGIKGMFLANKKIDNQVKTFITYNKGRDWRLLQAPDTDLRGDPVHCLLPYCSLHLHLKVSENPYTSGIIASKDTAPSIIVASGNIGSELSDTDISMFVSSDAGNTWRQIFEEEHSVLYLDQGGVLVAMKHTSLPIRHLWLSFDEGRSWSKYSFTSIPLFVDGVLGEPGEETLIMTVFGHFSHRSEWQLVKVDYKSIFDRRCAEEDYRPWQLHSQGEACIMGAKRIYKKRKSERKCMQGKYAGAMESEPCVCTEADFDCDYGYERHSNGQCLPAFWFNPSSLSKDCSLGQSYLNSTGYRKVVSNNCTDGVREQYTAKPQKCPGKAPRGLRIVTADGKLTAEQGHNVTLMVQLEEGDVQRTLIQVDFGDGIAVSYVNLSSMEDGIKHVYQNVGIFRVTVQVDNSLGSDSAVLYLHVTCPLEHVHLSLPFVTTKNKEVNATAVLWPSQVGTLTYVWWYGNNTEPLITLEGSISFRFTSEGMNTITVQVSAGNAILQDTKTIAVYEEFRSLRLSFSPNLDDYNPDIPEWRRDIGRVIKKSLVEATGVPGQHILVAVLPGLPTTAELFVLPYQDPAGENKRSTDDLEQISELLIHTLNQNSVHFELKPGVRVLVHAAHLTAAPLVDLTPTHSGSAMLMLLSVVFVGLAVFVIYKFKRKIPGINVYAQMQNEKEQEMISPVSHSESRPNVPQTELRRPGQLIDEKVESQLIGE

SEQ ID NO: 48740 - protein, 49 aa, Homo sapiens
  MOD_RES (1)..(1): Any amino acid
XCRYMNNFDSEAHAKYKNQVVYSTMLVFFKNAFQYVNSIQPSLFQEFRR

SEQ ID NO: 48741 - protein, 82 aa, Homo sapiens
MGGCAGSRRRFSDSEGEETVPEPRLPLLDHQGAHWKNAVGFWLLGLCNNFSYVVMLSAAHDILSHKRTSGNQSHLFLVAHIS

SEQ ID NO: 48742 - protein, 436 aa, Homo sapiens
MGKRLDQPQMYPQYTYYYPHYLQTKSYAPAPHPMAPPSPSTNSSSNNSSNNSSGEQLSKTNLYIRGLPPGTTDQDLIKLCQPYGKIVSTKAILDKNTNQCKGYGFVDFDSPAAAQKAVASLKANGVQAQMAKQQEQDPTNLYISNLPISMDEQELENMLKPFGHVISTRILRDANGVSRGVGFARMESTEKCEVVIQHFNGKYLKTPPGIPAPSEPLLCKFADGGQKKRQNQSKYTQNGRPWPREGEAGMALTYDPTAAIQNGFYSSPYSIATNRMIPQTSITPFIAASPVSTYQVQSTSWMPHPPYVMQPTGAVITPTMDHPMSMQPANMMGPLTQQMNHLSLGTTGTIQSQDRIMILHQLLCQYMTAAAPMQGTYIPQYTPVPPTAVSIEGVVADTSPQTVAPSSQDTSGQQQQIAVDTSNEHAPAYSYQQSKP

SEQ ID NO: 48743 - protein, 206 aa, Homo sapiens
MLRCLYHWHRPVLNRRWSRLCLPKQYLFTMKLQSPEFQSLFTEGLKSLTELFVKENHELRIAGGAVRDLLNGVKPQDIDFATTATPTQMKEMFQSAGIRMINNRGEKHGTITARLHEENFEITTLRIDVTTDGRHAEVEFTTDWQKDAERRDLTINSMFLGFDGTLFDYFNGYEDLKNKKVRFVGHAKQRIQEDYLRILRYFRFTC

SEQ ID NO: 48744 - protein, 133 aa, Homo sapiens
AGVGKTVLIMELINNVAKAHGGYSVFAGVGERTREGNDLYHEMIESGVINLKDATSKAGSEVSALLGRIPSAVGYQPTLATDMGTMQERITTTKKGSITSVQAIYVPADDLTDPAPATTFAHLDATTVLSRAI

SEQ ID NO: 48745 - protein, 259 aa, Homo sapiens
MALTSDLGKQIKLKEVEGTLLQPATVDNWSQIQSFEAKPDDLLICTYPKAGTTWIQEIVDMIEQNGDVEKCQRAIIQHRHPFIEWARPPQPSARNAKDCMVSYYHFQRMNHMLPDPGTWEEYFETFINGKVVWGSWFDHVKGWWEMKDRHQILFLFYEDIKRDPKHEIRKVMQFMGKKVDETVLDKIVQETSFEKMKENPMTNRSTVSKSILDQSISSFMRKGTVGDWKNHFTVAQNERFDEIYRRKMEGTSINFCMEL

SEQ ID NO: 48746 - protein, 64 aa, Homo sapiens
MFYHISLEHEILLHPRYFGPNLLNTVKQKLFTEVEGTCTGKIKTVWGRPENLHFKKMILRHPED

SEQ ID NO: 48747 - protein, 205 aa, Homo sapiens
MESVALYSFQATESDELAFNKGDTLKILNMEDDQNWYKAELRGVEGFIPKNYIRVKPHPWYSGRISRQLAEEILMKRNHLGAFLIRESESSPGEFSVSVNHLGPALPRPSLTSQPRTPRSSASAVATSLRSWSAQTPTGGGAGPAGALASSHGVTCSPCTCEQPGGRSGQRAFLQELRSREDMDTPSSVRVTRGSVDGLGLNVGS

SEQ ID NO: 48748 - protein, 459 aa, Homo sapiens
MVEADHPGKLFIGGLNRETNEKMLKAVFGKHGPISEVLLIKDRTSKSRGFAFITFENPADAKNAAKDMNGKSLHGKAIKVEQAKKPSFQSGGRRRPPASSRNRSPSGSLRSARGSRGGTRGWLPSQEGHLDDGGYTPDLKMSYSRGLIPVKRGPSSRSGGPPPKKSAPSAVARSNSWMGSQGPMSQRRENYGVPPRRATISSWRNDRMSTRHDGYATNDGNHPSCQETRDYAPPSRGYAYRDNGHSNRDEHSSRGYRNHRSSRETRDYAPPSRGHAYRDYGHSRRDESYSRGYRNRRSSRETREYAPPSRGHGYRDYGHSRRHESYSRGYSYHDGYGEALGRDHSEHLSGSSYRDALQRYGTAHGAPPARGPRMSYGGSTCHAYSNTRDRYGRSWESYSSCGDFHYCDREHVCRKDQRNPPSLGRVLPDPREACGSSSYVASIVDGGESRSEKGDSSRY

SEQ ID NO: 48749 - protein, 89 aa, Homo sapiens
  MOD_RES (1)..(1): Any amino acid
XVLQKPFICHRKTKGGDLMLVHYEGYLEKDGSLFHSTHKHNNGQPIWFTLGILEALKGWDQGLKGMCVGEKRKLIIPPALGYGKEGKVF

SEQ ID NO: 48750 - protein, 103 aa, Homo sapiens
MDKLLRKENLDLKLTPYKVLATSTKHGFMQFIQSVPVAEVLDTEGSIQNFFRKYAPSENGPNGISAEVMDTYVKSCAGYCVITYILGVGDRHLDNLLLTKTGG

SEQ ID NO: 48751 - protein, 538 aa, Homo sapiens
METRSPGLNNMKPQSLQLVLEEQVLALQQQMAENQAASWRKLKNSQEAQQRQATLVRKLQAKVLQYRSWCQELEKRLEATGGPIPQRWENVEEPNLDELLVRLEEEQQRCESLAEVNTQLRLHMEKADVVNKALREDVEKLTVDWSRARDELMRKESQWQMEQEFFKGYLKGEHGRLLSLWREVVTFRRHFLEMKSATDRDLMELKAEHVRLSGSLLTCCLRLTVGAQSREPNGSGRMDGREPAQLLLLLAKTQELEKEAHERSQELIQLKSQGDLEKAELQDRVTELSALLTQSQKQNEDYEKMIKALRETVEILETNHTELMEHEASLSRNAQEEKLSLQQVIKDITQVMVEEGDNIAQGSGHENSLELDSSIFSQFDYQDADKALTLVRSVLTRRRQAVQDLRQQLAGCQEAVNLLQQQHDQWEEEGKALRQRLQKLTGERDTLAGQTVDLQGEVDSLSKERELLQKAREELRQQLEVLEQEAWRLRRVNVELQLQGDSAQGQKEEQQEELHLAVRERERLQSSQLQSCRVLKTP

SEQ ID NO: 48752 - protein, 247 aa, Homo sapiens
  MOD_RES (1)..(1): Any amino acid
XIRTLALMGPPGLPGQIGPPGAPGIPGQKGEIGLPGPPGHDGEKGPRGKPGDMGPPGPQGPPGKDGPPGVKGENGHPGSPGEKGEKGETGQAGSPVPGLPGPEGPPGPPGLQGVPGPKGEAGLDGAKGEKGFQGEKGDRGPLGLPGASGLDGRPGPPGTPGPIGVPGPAGPKGERGSKGDPGMTGPTGAAGLPGLHGPPGDKGNRGERGKKGSRGPKGDKGDQGAPGLDAPCPLGEDGLPVQGCWNK

SEQ ID NO: 48753 - protein, 1382 aa, Homo sapiens
MSTDSNSLAREFLTDVNRLCNAVVQRVEAREEEEEETHMATLGQYLVHGRGFLLLTKLNSIIDQALTCREELLTLLLSLLPLVWKIPVQEEKATDFNLPLSADIILTKEKNSSSQRSTQEKLHLEGSALSSQVSAKVNVFRKSRRQRKITHRYSVRDARKTQLSTSDSEANSDEKGIAMNKHRRPHLLHHFLTSFPKQDHPKAKLDRLATKEQTPPDAMALENSREIIPRQGSNTDILSEPAALSVISNMNNSPFDLCHVLLSLLEKVCKFDVTLNHNSPLAASVVPTLTEFLAGFGDCCSLSDNLESRVVSAGWTEEPVALIQRMLFRTVLHLLSVDVSTAEMMPENLRKNLTELLRAALKIRICLEKQPDPFAPRQKKTLQEVQEDFVFSKYRHRALLLPELLEGVLQILICCLQSAASNPFYFSQAMDLVQEFIQHHGFNLFETAVLQMEWLVLRDGVPPEASEHLKALINSVMKIMSTVKKVKSEQLHHSMCTRKRHRRCEYSHFMHHHRDLSGLLVSAFKNQVSKNPFEETADGDVYYPERCCCIAVCAHQCLRLLQQASLSSTCVQILSGVHNIGICCCMDPKSVIIPLLHAFKLPALKNFQQHILNILNKLILDQLGGAEISPKIKKAACNICTVDSDQLAQLEETLQGNLCDAELSSSLSSPSYRFQGILPSSGSEDLLWKWDALKAYQNFVFEEDRLHSIQIANHICNLIQKGNIVVQWKLYNYIFNPVLQRGVELAHHCQHLSVTSAQSHVCSHHNQCLPQDVLQIYVKTLPILLKSRVIRDLFLSCNGVSQIIELNCLNGIRSHSLKAFETLIISLGEQQKDASVPDIDGIDIEQKELSSVHVGTSFHHQQAYSDSPQSLSKFYAGLKEAYPKRRKTVNQDVHINTINLFLCVAFLCVSKEAESDRESANDSEDTSGYDSTASEPLSHMLPCISLESLVLPSPEHMHQAADIWSMCRWIYMLSSVFQKQFYRLGGFRVCHKLIFMIIQKLFRSHKEEQGKKEGDTSVNENQDLNRISQPKRTMKEDLLSLAIKSDPIPSELGSLKKSADSLGKLELQHISSINVEEVSATEAAPEEAKLFTSQESETSLQSIRLLEALLAICLHGARTSQQKMELELPNQNLSVESILFEMRDHLSQSKVIETQLAKPLFDALLRVALGNYSADFEHNDAMTEKSHQSAEELSSQPGDFSEEAEDSQCCSFKLLVEEEGYEADSESNPEDGETQDDGVDLKSETEGFSASSSPNDLLENLTQGEIIYPEICMLELNLLSASKAKLDVLAHVFESFLKIIRQKEKNVFLLMQQGTVKNLLGGFLSILTQDDSDFQACQRVLVDLLVSLMSSRTCSEELTLLLRIFLEKSPCTRATDQKVQST

SEQ ID NO: 48754 - protein, 260 aa, Homo sapiens
MNTQRNPRNGQPRRLSTSSVSSTGSSSLLEDSEDDLLSDSESRSRGNVQLEAGEDVGQKNHWQKIRTMVNLPVISPFKKRYAWVQLAGHTGSFKAAGTSGLILKRCSEPERYCLARLMADALRGCVPAFHGVVERDGESYLQLQDLLDGFDGPCVLDCKMGVRTYLEEELTKARERPKLRKDMYKKMLAVDPEAPTEEEHAQRAVTKPRYMQWREGISSSTTLGFRIEGIKKADGSCSTDFKTTRSREQVLRVFEEFVQG

SEQ ID NO: 48755 - protein, 77 aa, Homo sapiens
MVMNLADLKKYMEEAIMQPLDHKNLDMDVPYFADVVSTTENVAVYIWDNLQKVLPVGVLYKVKVYETDNNIVVYKGE

SEQ ID NO: 48756 - protein, 245 aa, Homo sapiens
MAFVTRQFMRSVSSSSTASASAKKIIVKHVTVIGGGLMGAGIAQVAAATGHTVVLVDQTEDILAKSKKGIEESLRKVAKKKFAENLKAGDEFVEKTLSTIATSTDAASVVHSTDLVVEAIVENLKVKNELFKRLDKFAAEHTIFASNTSSLQITSIANATTRQDRFAGLHFFNPVPVMKLVEVIKTPMTSQKTFESLVDFSKALGKHPVSCKGLLASLWASEKGFWNSHHPHYSPSQSNCMAGPD

SEQ ID NO: 48757 - protein, 161 aa, Homo sapiens
MKLLHVFLLFLCFHLRFCKVTYTSQEDLVEKKCLAKKYTHLSCDKVFCQPWQRCIEGTCVCKLPYQCPKNGTAVCATNRRSFPTYCQQKSLECLHPGTKFLNNGTCTAEGKFSVSLKHGNTDSEGIVEVKLVDQDKTMFICKSSWSMREANVACLDLGFQQ

SEQ ID NO: 48758 - protein, 361 aa, Homo sapiens
MAQFPTPFGGSLDIWAITVEERAKHDQQFHSLKPISGFITGDQARNFFFQSGLPQPVLAQIWALADMNNDGRMDQVEFSIAMKLIKLKLQGYQLPSALPPVMKQQPVAISSAPAFAATLPKSSSFSRSGPGSQLNTKLQKAQSFDVASVPPVAEWAVPQSSRLKYRQLFNSHDKTMSGHLTGPQARTILMQSSLPQAQLASIWNLSDIDQDGKLTAEEFILAMHLIDVAMSGQPLPPVLPPEYIPPSFRRVRSGSGISVISSTSVDQRLPEEPVLEDEQQQLEKKLPVTFEDKKRENFERGNLELEKRRQALLEQQRKEQERLAQLERAEQERKERERQEQERKRQLELEKQLEKQRELER

SEQ ID NO: 48759 - protein, 65 aa, Homo sapiens
  MOD_RES (1)..(1): Any amino acid
XKNVKPDQWVKLNLGTVGFYRTQYSSAMLESLLPGIRDLSLPPVDRLGLQNDLFSLTSMRKSRSL

SEQ ID NO: 48760 - protein, 41 aa, Homo sapiens
MASASSGPSSSVGFSSFDPAVPSCTLSSGFNFLCCGVSGKR

SEQ ID NO: 48761 - protein, 90 aa, Homo sapiens
  MOD_RES (1)..(1): Any amino acid
XVGVKIPTCKITLKETFLTSPEELYRVFTTQELVQAFTHAPATLEADRGGKFHMVDGNVSGEFTDLVPEKHIVMKWRFKSWPEGSHCHSG

SEQ ID NO: 48762 - protein, 136 aa, Homo sapiens
MEDSFLQSFGRLSLQPQQQQQRQRPPRPPPRGTPPRRHSFRKHLYLLRGLPGSGKTTLARCSEWSSGQRRQKSLPSWNMYSIREKKFSRKKGNFSICSALFSQKISKGFHSVLGTWESSVNKTKILPLWTLCARGS

SEQ ID NO: 48763 - protein, 170 aa, Homo sapiens
  MOD_RES (1)..(1): Any amino acid
XNVVALDTEVASNRIYWSDLSQRMICSTQLDRAHGVSSYDTVISRDIQAPDGLAVDWIHSNIYWTDSVLGTVSVADTKGVKRKTLFRENGSKPRAIVVDPVHGFMYWTDWGTPAKIKKGGLNGVDIYSLVTENIQWPNGITLGQSILDRYHQRSHFQCQPPHRFRCQLVG

SEQ ID NO: 48764 - protein, 3933 aa, Homo sapiens
MSEPGGGGGEDGSAGLEVSAVQNVADVSVLQKHLRKLVPLLLEDGGEAPAALEAALEEKSALEQMRKFLSDPQVHTVLVERSTLKEDVGDEGEEEKEFISYNINIDIHYGVKSNSLAFIKRTPVIDADKPVSSQLRVLTLSEDSPYETLHSFISNAVAPFFKSYIRESGKADRDGDKMAPSVEKKIAELEMGLLHLQQNIEIPEISLPIHPMITNVAKQCYERGEKPKVTDFGDKVEDPTFLNQLQSGVNRWIREIQKVTKLDRDPASGTALQEISFWLNLERALYRIQEKRESPEVLLTLDILKHGKRFHATVSFDTDTGLKQALETVNDYNPLMKDFPLNDLLSATELDKIRQALVAIFTHLRKIRNTKYPIQRALRLVEAISRDLSSQLLKVLGTRKLMHVAYEEFEKVMVACFEVFQTWDDEYEKLQVLLRDIVKRKREENLKMVWRINPAHRKLQARLDQMRKFRRQHEQLRAVIVRVLRPQVTAVAQQNQGEVPEPQDMKVAEVLFDAADANAIEEVNLAYENVKEVDGLDVSKEGTEAWEAAMKRYDERIDRVETRITARLRDQLGTAKNANEMFRIFSRFNALFVRPHIRGAIREYQTQLIQRVKDDIESLHDKFKVQYPQSQACKMSHVRDLPPVSGSIIWAKQIDRQLTAYMKRVEDVLGKGWENHVEGQKLKQDGDSFRMKLNTQEIFDDWARKVQQRNLGVSGRIFTIESTRVRGRTGNVLKLKVNFLPEIITLSKEVRNLKWLGFRVPLAIVNKAHQANQLYPFAISLIESVRTYERTCEKVEERNTISLLVAGLKKEVQALIAEGIALVWESYKLDPYVQRLAETVFNFQEKVDDLLIIEEKIDLEVRSLETCMYDHKTFSEILNRVQKAVDDLNLHSYSNLPIWVNKLDMEIERILGVRLQAGLRAWTQVLLGQAEDKAEVDMDTDAPQVSHKPGGEPKIKNVVHELRITNQVIYLNPPIEECRYKLYQEMFAWKMVVLSLPRIQSQRYQVGVHYELTEEEKFYRNALTRMPDGPVALEESYSAVMGIVSEVEQYVKVWLQYQCLWDMQAENIYNRLGEDLNKWQALLVQIRKARGTFDNAETKKEFGPVVIDYGKVQSKVNLKYDSWHKEVLSKFGQMLGSNMTEFHSQISKSRQELEQHSVDTASTSDAVTFITYVQSLKRKIKQFEKQVELYRNGQRLLEKQRFQFPPSWLYIDNIEGEWGAFNDIMRRKDSAIQQQVANLQMKIVQEDRAVESRTTDLLTDWEKTKPVTGNLRPEEALQALTIYEGKFGRLKDDREKCAKAKEALELTDTGLLSGSEERVQVALEELQDLKGVWSELSKVWEQIDQMKEQPWVSVQPRKLRQNLDALLNQLKSFPARLRQYASYEFVQRLLKGYMKINMLVIELKSEALKDRHWKQLMKRLHVNWVVSELTLGQIWDVDLQKNEAIVKDVLLVAQGEMALEEFLKQIREVWNTYELDLVNYQNKCRLIRGWDDLFNKVKEHINSVSAMKLSPYYKVFEEDALSWEDKLNRIMALFDVWIDVQRRWVYLEGIFTGSADIKHLLPVETQRFQSISTEFLALMKKVSKSPLVMDVLNIQGVQRSLERLADLLGKIQKALGEYLERERSSFPRFYFVGDEDLLEIIGNSKNVAKLQKHFKKMFAGVSSIILNEDNSVVLGISSREGEEVMFKTPVSITEHPKINEWLTLVEKEMRVTLAKLLAESVTEVEIFGKATSIDPNTYITWIDKYQAQLVVLSAQIAWSENVETALSSMGGGGDAAPLHSVLSNVEVTLNVLADSVLMEQPPLRRRKLEHLITELVHQRDVTRSLIKSKIDNAKSFEWLSQMRFYFDPKQTDVLQQLSIQMANAKFNYGFEYLGVQDKLVQTPLTDRCYLTMTQALEARLGGSPFGPAGTGKTESVKALGHQLGRFVLVFNCDETFDFQAMGRIFVGLCQVGAWGCFDEFNRLEERMLSAVSQQVQCIQEALREHSNPNYDKTSAPITCELLNKQVKVSPDMAIFITMNPGYAGRSNLPDNLKKLFRSLAMTKPDRQLIAQVMLYSQGFRTAEVLANKIVPFFKLCDEQLSSQSHYDFGLRALKSVLVSAGNVKRERIQKIKREKEERGEAVDEGEIAENLPEQEILIQSVCETMVPKLVAEDIPLLFSLLSDVFPGVQYHRGEMTALREELKKVCQEMYLTYGDGEEVGGMWVEKVLQLYQITQINHGLMMVGPSGSGKSMAWRVLLKALERLEGVEGVAHIIDPKAISKDHLYGTLDPNTREWTDGLFTHVLRKIIDSVRGELQKRQWIVFDGDVDPEWVENLNSVLDDNKLLTLPNGERLSLPPNVRIMFEVQDLKYATLATVSRCGMVWFSEDVLSTDMIFNNFLARLRSIPLDEGEDEAQRRRKGKEDEGEEAASPMLQIQRDAATIMQPYFTSNGLVTKALEHAFQLEHIMDLTRLRCLGSLFSMLHQACRNVAQYNANHPDFPMQIEQLERYIQRYLVYAILWSLSGDSRLKMRAELGEYIRRITTVPLPTAPNIPIIDYEVSISGEWSPWQAKVPQIEVETHKVAAPDVVVPTLDTVRHEALLYTWLAEHKPLVLCGPPGSGKTMTLFSALRALPDMEVVGLNFSSATTPELLLKTFDHYCEYRRTPNGVVLAPVQLGKWLVLFCDEINLPDMDKYGTQRVISFIRQMVEHGGFYRTSDQTWVKLERIQFVGACNPPTDPGRKPLSHRFLRHVPVVYVDYPGPASLTQIYGTFNRAMLRLIPSLRTYAEPLTAAMVEFYTMSQERFTQDTQPHYIYSPREMTRWVRGIFEALRPLETLPVEGLIRIWAHEALRLFQDRLVEDEERRWTDENIDTVALKHFPNIDREKAMSRPILYSNWLSKDYIPVDQEELRDYVKARLKVFYEEELDVPLVLFNEVLDHVLRIDRIFRQPQGHLLLIGVSGAGKTTLSRFVAWMNGLSVYQIKVHRKYTGEDFDEDLRTVLRRSGCKNEKIAFIMDESNVLDSGFLERMNTLLANGEVPGLFEGDEYATLMTQCKEGAQKEGLMLDSHEELYKWFTSQVIRNLHVVFTMNPSSEGLKDRAATSPALFNRCVLNWFGDWSTEALYQVGKEFTSKMDLEKPNYIVPDYMPVVYDKLPQPPSHREAIVNSCVFVHQTLHQANARLAKRGGRTMAITPRHYLDFINHYANLFHEKRSELEEQQMHLNVGLRKIKETVDQVEELRRDLRIKSQELEVKNAAANDKLKKMVKDQQEAEKKKVMSQEIQEQLHKQQEVIADKQMSVKEDLDKVEPAVIEAQNAVKSIKKQHLVEVRSMANPPAAVKLALESICLLLGESTTDWKQIRSIIMRENFIPTIVNFSAEEISDAIREKMKKNYMSNPSYNYEIVNRASLACGPMVKWAIAQLNYADMLKRVEPLRNELQKLEDDAKDNQQKANEVEQMIRDLEASIARYKEEYAVLISEAQAIKADLAAVEAKVNRSTALLKSLSAERERWEKTSETFKNQMSTIAGDCLLSAAFIAYAGYFDQQMRQNLFTTWSHHLQQANIQFRTDIARTEYLSNADERLRWQASSLPADDLCTENAIMLKRFNRYPLIIDPSGQATEFIMNEYKDRKITRTSFLDDAFRKNLESALRFGNPLLVQDVESYDPVLNPVLNREVRRTGGRVLITLGDQDIDLSPSFVIFLSTRDPTVEFPPDLCSRVTFVNFTVTRSSLQSQCLNEVLKAERPDVDEKRSDLLKLQGEFQLRLRQLEKSLLQALNEVKGRILDDDTIITTLENLKREAAEVTRKVEETDIVMQEVETVSQQYLPLSTACSSIYFTMESLKQIHFLYQYSLQFFLDIYHNVLYENPNLKGVTDHTQRLSIITKDLFQVAFNRVARGMLHQDHITFAMLLARIKLKGTVGNLASGWTAAPRSRLCPTSGVKKHLQHPLARPSTACS

SEQ ID NO: 48765 - protein, 460 aa, Homo sapiens
MAPWLQLLSLLGLLPGAVAAPAQPRAASFQAWGPPSPELLAPTRFALEMFNRGRAAGTRAVLGLVRGRVRRAGQGSLYSLEATLEEPPCNDPMVCRLPVSKKTLLCSFQVLDELGRHVLLRKDCGPVDTKVPDNRNETFSSVISLLNEDPLSQDLPVKMASIFKNFVITYNRTYESKEEARWRLSVFVNNMVRAQKIQALDRGTAQYGVTKFSDLTEEEFRTIYLNTLLRKEPGNKMKQAKSVGDLAPPEWDWRSKGAVTKVKDQGMCGSCWAFSVTGNVEGQWFLNQGTLLSLSEQELLDCDKMDKACMGGLPSNAYSAIKNLGGLETEDDYSYQGHMQSCNFSAEKAKVYINDSVELSQNEQKLAAWLAKRGPISVAINAFGMQFYRHGISRPLRPLCSPWLIDHAVLLVGYGNRSDVPFWAIKNSWGTDWGEKGYYYLHRGSGACGVNTMASSAVVD

SEQ ID NO: 48766 - protein, 149 aa, Homo sapiens
  MOD_RES (1)..(1): Any amino acid
XATRAKPGPQDTVERPFYDLWASDNPLDRPLVGQDEFFLEQTKKKGVKRPARLHTKPSQAPAVEARREAEADKPRRLGRLKYQAPDIDVQLSSELTDSLRTLKPEGNILRDRFKSFQRRNMIEPRERAKFKRKYKVKLVEKRAFREIQL

SEQ ID NO: 48767 - protein, 173 aa, Homo sapiens
VFNLTNNVDLDNTKKKMEIYQKENKDVIQKNKLKLTREQEELEEALEVERQENEQRRLFIQKEEQLQQILKRKNKQAFLDELESSDLPVALLLAQHKDRSTQLEMQLEKPKPVKPVTFSTGIKMGQHISLAPIHKLEEALYEYQPLQIETYGPHVPELEMLGRLGGFDTISLI

SEQ ID NO: 48768 - protein, 263 aa, Homo sapiens
MDSYLLMWGLLTFIMVPGCQAELCDDDPPEIPHATFKAMAYKEGTMLNCECKRGFRRIKSGSLYMLCTGNSSHSSWDNQCQCTSSATRNTTKQVTPQPEEQKERKTTEMQSPMQPVDQASLPGHCREPPPWENEATERIYHFVVGQMVYYQCVQGYRALHRGPAESVCKMTHGKTRWTQPQLICTGEEKPQASPEGRPESETSCLVTTTDFQIQTEMAATMETSIFTTEYQVAVAGCVFLLISVLLLSGLTWQRRQRKSRRTI

SEQ ID NO: 48769 - protein, 977 aa, Homo sapiens
MGPPLPLLLLLLLLLPPRVLPAAPSSVPRGRQLPGRLGCLLEEGLCGASEACVNGFTWQDDYTQYVMDQELADLPKTYLRRPEASSPARPSKHSVGSERRYSREGGAALANALRRHLPFLEALSQAPASDVLARTHTAQDRPPAEGDDRFSESILTYVAHTSALTYPPGSRTQLREDLLPRTLGQLQPDELSPKVDSGVDRHHLMAALSAYAAQRPPAPPGEGSLEPQYLLRAPSRMPRPLLAPAAPQKWPSPLGDSEDPSSTGDGARIHTLLKDLQRQPAEVRGLSGLELDGMAELMAGLMQGVDHGVARGSPGRAALGESGEQADGPKATLRGDSFPDDGVQDDDDRLYQEVHRLSATLGGLLQDHGSRLLPGALPFARPLDMERKKSEHPESSLSSEEETAGVENVKSQTYSKDLLGQQPHSEPGAAAFGELQNQMPGPSKEEQSLPAGAQEALSDGLQLEVQPSEEEARGYIVTDRDPLRPEEGRRLVEDVARLLQVPSSAFADVEVLGPAVTFKVSANVQNVTTEDVEKATVDNKDKLEETSGLKILQTGVGSKSKLKFLPPQAEQEDSTKFIALTLVSLACILGVLLASGLIYCLRHSSQHRLKEKLSGLGGDPGADATAAYQELCRQRMATRPPDRPEGPHTSRISSVSSQFSDGPIPSPSARSSASSWSEEPVQSNMDISTGHMILSYMEDHLKNKNRLEKEWEALCAYQAEPNSSFVAQREENVPKNRSLAVLTYDHSRVLLKAENSHSHSDYINASPIMDHDPRNPAYIATQGPLPATVADFWQMVWESGCVVIVMLTPLAENGVRQCYHYWPDEGSNLYHIYEVNLVSEHIWCEDFLVRSFYLKNLQTNETRTVTQFHFLSWYDRGVPSSSRSLLDFRRKVNKCYRGRSCPIIVHCSDGAGRSGTYVLIDMVLNKMAKGAKEIDIAATLEHLRDQRPGMVQTKEQFEFALTAVAEEVNAILKALPQ

SEQ ID NO: 48770 - protein, 147 aa, Homo sapiens
MWTPRPALHVHVILYSPIHRCYARADPTMGRIWVDAAVPCLEECGFLLHFRDGCYHLETSTHHFLSHVDRLFSQPSSQTAFHMQVRPGGLVALCDGEGGMLYPQGTHLLLGMGCNPMRGEEWFILQHCPTWVSLRSKTGRFISVIYD

SEQ ID NO: 48771 - protein, 705 aa, Homo sapiens
MQADKCRTSSRSVKKELVIESPLQYKDAAQGEVEAESPGPVPAKPKLIEPLDYENVIVQKKTQILNDCLREMLLFPYDDFQTAILRRQGRYICSTVPAKAEEEAQSLFVTECIKTYNSDWHLVNYKYEDYSGEFRQLPNKVVKLDKLPVHVYEVDEEVDKDEDAASLGSQKGGITKHGWLYKGNMNSAISVTMRSFKRRFFHLIQLGDGSYNLNFYKDEKISKEPKGSIFLDSCMGVVQNNKVRRFAFELKMQDKSSYLLAADSEVEMEEWITILNKILQLNFEAAMQEKRNGDSHEDDEQSKLEGSGSGLDSYLPELAKSAREAEIKLKSESRVKLFYLDPDAQKLDFSSAEPEVKSFEEKFGKRILVKCNDLSFNLQCCVAENEEGPTTNVEPFFVTLSLFDIKYNRKISADFHVDLNHFSVRQMLATTSPALMNGSGQSPSVLKGILHEAAMQYPKQGIFSVTCPHPDIFLVARIEKVLQGSITHCAEPYMKSSDSSKVAQKVLKNAKQACQRLGQYRMPFAWAARTLFKDASGNLDKNARFSAIYRQDSNKLSNDDMLKLLADFRKPEKMAKLPVILGNLDITIDNVSSDFPNYVNSSYIPTKQFETCSKTPITFEVEEFVPCIPKHTQPYTIYTNHLYVYPKYLKYDSQKSFAKARNIAICIEFKDSDEEDSQPLKTWWASFHKKRLCCSFTPSPKPRIL

SEQ ID NO: 48772 - protein, 120 aa, Homo sapiens
  MOD_RES (1)..(1): Any amino acid
XSKGFPKNITNNRGKKRYPDSKDLTMVLKTYDTSFLDFLRRCLVWEPSLRMTPDQALKHAWIHQSRNLKPQPRPQTLRKSNSFFPSETRKDKVQGCHHSSRKGTACQITSPSPTVRELIF

SEQ ID NO: 48773 - protein, 139 aa, Homo sapiens
MAVPAALILRESPSMKKAVSLINAIDTGRFPRLLTRILQKLHLKAESSFSEEEEEKLQAAFSLEKQDLHLVLETISFILEQAVYHNVKPAALQQQLENIHLRQDKAEAFVNTWSSMGQETVEKFRQRILAPSRDRWMAA

SEQ ID NO: 48774 - protein, 110 aa, Homo sapiens
MGCFKGVVAVGYINEAIDEGNPLRTLETLLLPTANISDVDPAHAQHYQDVLYHAKSQKLGDSESVSKVLWLDEIQQAVDDANVDKDRAKQYGLFNLGSICEKHLGFISLA

SEQ ID NO: 48775 - protein, 63 aa, Homo sapiens
  MOD_RES (1)..(1): Any amino acid
XGAFGEAAGDRGPYGTDIGPGGGYGAAAEGGMYAGNGGLLGADFAGDLDYNELAVRVSESMQP

SEQ ID NO: 48776 - protein, 110 aa, Homo sapiens
MIVDKLLDDSRGGEGLRDAAGGCGLMTSPLNLSYFYGASPPAAAPGACDASCSVLGPSAPGSPGSDSSDFSSASSVSSCGAVESRSRGGARAERQPVEPHMGVGRQQRGP

SEQ ID NO: 48777 - protein, 274 aa, Homo sapiens
GPLQFRDVAIEFSLEEWHCLDTAQRNLYRDVMLENYRNLVFLGIVVSKPDLVTCLEQGKKPLTMERHEMIAKPPVMSSHFAQDLWPENIQNSFQIGMLRRYEECRHDNLQLKKGCKSVGEHKVHKGGYNGLNQCLTTTQKEIFQCDKYGKVFHKFSNSNTYKTRHTGINLFKCIICGKAFKRSSTLTTHKKIHTGEKPYRCEECGKAFNQSANLTTHKRIHTGEKPYKCEECGKAFNWSSDLNKHKKIHIERKPYIVKNVTDLLNVPPLLISIR

SEQ ID NO: 48778 - protein, 161 aa, Homo sapiens
  MOD_RES (1)..(1): Any amino acid
XSPWYLWRTYLCREAVDSEVTCRKNVSFPLHMLLIFPIKFVSFLEKIERTVQIEASTVEIEERGVKLRLTVVDTPGYGDAINCRDCFKTIISYIDEQFERYLHDESGLNRRHIIDNRVHCCFYFISPFGHGLKPLDVAFMKAIHNKVNIVPVIAKADTLTL

SEQ ID NO: 48779 - protein, 302 aa, Homo sapiens
  MOD_RES (1)..(1): Any amino acid
XHEECERYLQDSTFATSPHLESLLKSSLDLFLGGESSPEPLDNILLAAFEFDIHQVIKECSIALSNWWFVAHLTDLLDHCKLLQSHNLYFGSNMREFLLLEYASGLFAHPSLWQLGVDYFDYCPELGRVSLELHIERIPLNTEQKALKVLRICEQRQMTEQVRSICKILAMKAVRNNRLGSALSWSIRAKDAAFATLVSDRFLRDYCERGCFSDLDLIDNLGPAMMLSDRLTFLGKYREFHRMYGEKRFADAASLLLSLMTSRIAPRSFWMTLLTDALPLLEQKQVIFSAEQTYELMRCLED

SEQ ID NO: 48780 - protein, 195 aa, Homo sapiens
MGEPQQVSALPPPPMQYIKEYTDENIQEGLAPKPPPPIKDSYMMFGNQFQCDDLIIRPLESQGIERLHPMQFDHKKELRKLNMSILINFLDLLDILIRSPGSIKREEKLEDLKLLFVHVHHLINEYRPHQARETLRVMMEVQKRQRLETAERFQKHLERVIEMIQNCLASLPDDLPHSEAGMRVKTEPMDADDSN

SEQ ID NO: 48781 - protein, 105 aa, Homo sapiens
MKRRKNGNKQYFTRMGTRKKVHAFVRVKPTDDFAHEMIRYGDDKRSIDIHLKKDIRRGVVNNQQTDWSFKLDGVLHDASQDLVYETVAKDVVSQALDGYNGNLIN

SEQ ID NO: 48782 - protein, 53 aa, Homo sapiens
MPAPIRLRELIRTIRTARTQAEEREMIQKECAAIRSSFREEDNTYRCRNVAKL

SEQ ID NO: 48783 - protein, 202 aa, Homo sapiens
MDADKEKDLQKFLKNVDEISNLIQEMNSDDPVVQQKAVLETEKRLLLMEEDQEEDECRTTLNKTMISPPQTAMKSAEEINSEAFLASVEKDAKERAKRRRENKVLADALKEKGNEAFAEGNYETAILRYSEGLEKLKDMKVLYTNRAQAYMKLEDYEKALVDCEWALKCDEKCTKAYFHMGKANLALKNYSVSRECYKKILE

SEQ ID NO: 48784 - protein, 322 aa, Homo sapiens
MSELEQLRQEAEQLRNQIQDARKACNDATLVQITSNMDSVGRIQMRTRRTLRGHLAKIYAMHWGYDSRLLVSASQDGKLIIWDSYTTNKMHAIPLRSSWVMTCAYAPSGNYVACGGLDNICSIYNLKTREGNVRVSRELPGHTGYLSCCRFLDDSQIVTSSGDTTCALWDIETAQQTTTFTGHSGDVMSLSLSPDMRTFVSGACDASSKLWDIRDGMCRQSFTGHVSDINAVSFFPNGYAFATGSDDATCRLFDLRADQELLLYSHDNIICGITSVAFSKSGRLLLAGYDDFNCNVWDTLKGDRAGSLYVAKVGFFPPQPLE

SEQ ID NO: 48785 - protein, 940 aa, Homo sapiens
MPMWAGGVGSPRRGMAPASTDDLFARKLRQPARPPLTPHTFEPRPVRGPLLRSGSDAGEARPPTPASPRARAHSHEEASRPAATSTRLFTDPLALLGLPAEEPEPAFPPVLEPRWFAHYDVQSLLFDWAPRSQGMGSHSEASSGTLASAEDQAASSDLLHGAPGFVCELGGEGELGLGGPASPPVPPALPNAAVSILEEPQNRTSAYSLEHADLGAGYYRKYFYGKEHQNFFGMDESLGPVAVSLRREEKEGSGGGTLHSYRVIVRTTQLRTLRGTISEDALPPGPPRGLSPRKLLEHVAPQLSPSCLRLGSASPKVPRTLLTLDEQVLSFQRKVGILYCRAGQGSEEEMYNNQEAGPAFMQFLTLLGDVVRLKGFESYRAQLDTKTDSTGTHSLYTTYQDHEIMFHVSTMLPYTPNNQQQLLRKRHIGNDIVTIVFQEPGSKPFCPTTIRSHFQHVFLVVRAHTPCTPHTTYRVAVSRTQDTPAFGPALPAGGGPFAANADFRAFLLAKALNGEQAAGHARQFHAMATRTRQQYLQDLATNEQLDLYHGRGEAITLRFDGSPGQAVGEVVARLQLVSRGCETRELALPRDGQGRLGFEVDAEGFVTHVERFTFAETAGLRPGARLLRVCGQTLPSLRPEAAAQLLRSAPKVCVTVLPPDESGRPRRSFSELYTLSLQEPSRRGAPDPVQDEVQGVTLLPTTKQLLHLCLQDGGSPPGPGDLAEERTEFLHSQNSLSPRSSLSDEAPVLPNTTPDLLLATTAKPSVPSADSETPLTQDRPGSPSGSEDKGNPAPELRASFLPRTLSLRNSISRIMSEAGSGTLEDEWQAISEIASTCNTILESLSREGQPIPESGDPKGTPKSDAEPEPGNLSEKVSHLESMLRKLQEDLQKEKADRAALEEEVRSLRHNNRRLQAESESAATRLLLASKQLGSPTADLA

SEQ ID NO: 48786 - protein, 98 aa, Homo sapiens
MAAQRGMPSSAVRVLEEALGMGLTAAGDARDTADAVAAEGAYYLEQVTITEASEDDYEYEEIKAVAHKLILNLLEVTFIDIYKEVRRKQLFIFHGSSE

SEQ ID NO: 48787 - protein, 158 aa, Homo sapiens
AASASAAAGEEDWVLPSEVEVLESIYLDELQVIKGNGRTSPWEIYITLHPATAEDQDSHIPMRCHRSLSEIPEDFQMNRSTRSYRCWATWPRLGWALPCCMNSLRKGRKFSQITTSLMASVSSASMVSRRRRPLPKHPVTTTSTATALLGTSSTWSKS

SEQ ID NO: 48788 - protein, 177 aa, Homo sapiens
  MOD_RES (1)..(1): Any amino acid
XIQSCGPVPVDKKARLARIRAAKSGSANAYMQSKRNGLLSNQLQSSEDEQAFVSKSGSSFETQHHHLLHCLEKTTNHEFVDEQVFEESCMEVATVNRPSSHSPSLSSQQGVTSTCCSRRHKKTFRIPNANVSGSHQGSIQELSTIQIRCVERTPLSNSRSSLNAKMEECVKLNCEQP

SEQ ID NO: 48789 - protein, 97 aa, Homo sapiens
MFQRKYLYQKVERTLCQPPTKNESEIQFFYVDVSTLSPVNTTYQLRVSRMDDFVLRTGEQFSFNTTAAQPQYFKYEFPEGVDSVIVKVTSNKAFPCS

SEQ ID NO: 48790 - protein, 369 aa, Homo sapiens
MIIVCIDQWKNKIWPEIKVPRPDALDNESWGFVHPRLLSVPELCHHVAEVWVSGTIFIRNVLLFKKQNPGKFCLLSCGILTFLAVLGRYVPGLLLSYLMLVTVMMWPLAVYHRLWDRAYVRLKPALQRLDFSVRGYMMSKQRERQLRRRALHPERAMDNHSDSEEELAAFCPQLDDSTVARELAITDSEHSDAEVSCTDNGTFNLSRGQTPLTEGSEDLDGHSDPEESFARDLPDFPSINMDPAGLDDEDDTSIGMPSLMYRSPPGAEEPQAPPASRDEAALPELLLGALPVGSNLTSNLASLVSQGMIQLALSGASQPGPSGAPAQRATRGFLRSPSSDLDTDAEGDDFELLDQSELSQLDPASSRSH

SEQ ID NO: 48791 - protein, 70 aa, Homo sapiens
  MOD_RES (1)..(1): Any amino acid
XFTIKPKEKIGIVGRTGSEHWGTQPSTKEEQHPQLCYPERSTGNILGSPRWGWPSSVWWSYLEAASRLME

SEQ ID NO: 48792 - protein, 203 aa, Homo sapiens
MGMLFFVGIRKVILFLLTPNSAGALNKWYKYNHDLPARIIVYRAGVGDGQLKTLIEYEVPQLLSSVAESSSNTSSRLSVIVVRKKCMPRFFTEMNRTVQNPPLGTVVDSEATRNEWYDFYLISQVACRGTVSPTYYNVIYDDNGLKPDHMQRLTFKLCHLYYNWPGIVSVPAPCQYAHKLTFLVAQSIHKEPSLELANHLFYL

SEQ ID NO: 48793 - protein, 66 aa, Homo sapiens
  MOD_RES (1)..(1): Any amino acid
XTASLEGQPPKSHFNSARHRQRLVDPAASKKELSLPRRGSLCRSSDCDWVIDKRSERNCFLGKMLL

SEQ ID NO: 48794 - protein, 103 aa, Homo sapiens
SVLELRVQPVMGISLTLSRGTAHPGEVTATCWAQSALPAPKQEVALSLWLSFSDHTVAPAELYDRRDLGLSVSAEEPGAILPAEEQGAQLGVVPLQPSHLRSL

SEQ ID NO: 48795 - protein, 122 aa, Homo sapiens
  MOD_RES (1)..(1): Any amino acid
XFETLFSQVQLFISTCNGEHIRYATDTFAGLCHQLTNALVERKQPLRGIGILKQAIDKMQMNTNQLTSIHADLCQAITTPAMAVSHIMLESYKKYILVSLILLGKVQQLPKYTSQIVGRFIK

SEQ ID NO: 48796 - protein, 381 aa, Homo sapiens
MSNIYIQEPPTNGKVLLKTTAGDIDIELWSKEAPKACRNFIQLCLEAYYDNTIFHRVVPGFIVQGGDPTGTGSGGESIYGAPFKDEFHSRLRFNRRGLVAMANAGSHDNGSQFFFTLGRADELNNKHTIFGKVTGDTVYNMLRLSEVDIDDDERPHNPHKIKSCEVLFNPFDDIIPREIKRLKKEKPEEEVKKLKPKGTKNFSLLSFGEEAEEEEEEVNRVSQSMKGKSKSSHDLLKDDPHLSSVPVVESEKGDAPDLVDDGEDESAEHDEYIDGDEKNLMRERIAKKLKKDTSANVKSAGEGEVEKKSVSRSPPSLCLYLDYWIQLSRITQAYTSWYYYGFLDSSLSCVSSASLLLTRHNVYFTLQTHSTDHLAACFFMK

SEQ ID NO: 48797 - protein, 44 aa, Homo sapiens
MRPWTGSWRWIMLILFAWGTLLFYIGGHLVRDNDHPDHSSRELS

SEQ ID NO: 48798 - protein, 145 aa, Homo sapiens
MSGEATVLAYHAPEEQEGLLVVKVEEENYVLDQDFGLQENPWSQEVFRQKFRQFSYSDSTGPREALSRLRELCCQWLRPEVHSKEQILELLMLEQFLAILPEELQAWLREHRPENGEEAVTMLEELEKELEEPRQQEFSACVSSE

SEQ ID NO: 48799 - protein, 205 aa, Homo sapiens
MLSVRVAAAVVRALPRRAGLVSRNALGSSFIAARNFHASNTHLQKTGTAEMSSILEERILGADTSVDLEETGRVLSIGDGIARVHGLRNVQAEEMVEFSSGLKGMSLNLEPDNVGVVVFGNDKLIKEGDIVKRTGAIVDVPVGEELLGRVVDALGNAIDGKGPIGSKTRRRVGLKAPGIIPRISVREPMQTGIKAVDSLVPIGRG

SEQ ID NO: 48800 - protein, 43 aa, Homo sapiens
MSIYFPIHCPDYLRSAKMTEVMMNTQPMEEIGLSPRKDGLSYQ

SEQ ID NO: 48801 - protein, 162 aa, Homo sapiens
MPYQYPALTPEQKKELSDIAHRIVAPGSIAKRLQSIGTENTEENRRFYRQLLLTADDRVNPCIGGVILFHETLYQKADDGRPFPQVIKSKGGVVGIKVDKGVVPLAGTNGETTTQGLDGLSERCAQYKKDGADFAKWRCVLKIGEHTPSALAIMENANVLAR

SEQ ID NO: 48802 - protein, 350 aa, Homo sapiens
MASTGSQASDIDEIFGFFNDGEPPTKKPRKLLPSLKTKKPRELVLVIGTGISAAVAPQVPALKSWKGLIQALLDAAIDFDLLEDEESKKFQKCLHEDKNLVHVAHDLIQKLSPRTSNVRSTFFKDCLYEVFDDLESKMEDSGKQLLQSVLHLMENGALVLTTNFDNLLELYAADQGKQLESLDLTDEKKVLEWAQEKRKLSVLHIHGVYTNPSGIVLHPAGYQNVLRNTEVMREIQKLYENKSFLFLGCGWTVDDTTFQALFLEAVKHKSDLEHFMLVRRGDVDEFKKLRENMLDKGIKVISYGDDYADLPEYFKRLTCEISTRGTSGMVREGQLNGSSAAHSEIRGCST

SEQ ID NO: 48803 - protein, 79 aa, Homo sapiens
MLVFLQEMDKPCGCPPGVCDHGTGDRRDPWYSTVGLLPPVRAMSQRNLNAKTEQGPTGVTMTSNPITWGQIKKTTQEAE

SEQ ID NO: 48804 - protein, 202 aa, Homo sapiens
EDMKKIRHLSLIELTAFFDAFGIQLKRNKTEKVKGRDNGIFGVPLTVLLDGDRKKDPGVKVPLVLQKQYREELDAKFNADKFKWDKMCHREAAVMLKAFFRELPTSLFPVEYIPAFISLMERGPHVKVQFQALHLMVMALPDANRDAAQALMTFFNKVIANESKNRMSLWNISTVMAPNLFFSRSKHSDYEELLLANTAAHI

SEQ ID NO: 48805 - protein, 943 aa, Homo sapiens
MAETNNECSIKVLCRFRPLNQAEILRGDKFIPIFQGDDSVVIGVSYFEIYLDKIRDLLDVTKTNLSVHEDKNRVPFVKGCTERFVSSPEEILDVIDEGKSNRHVAVTNMNEHSSRSHSIFLINIKQENMETEQKLSGKLYLVDLAGSEKVSKTGAEGAVLDEAKNINKSLSALGNVISALAEGTKSYVPYRDSKMTRILQDSLGGNCRTTMFICCSPSSYNDAETKSTLMFGQRAKTIKNTASVNLELTAEQWKKKYEKEKEKTKAQKETIAKLEAELSRWRNGENVPETERLAGEEAALGAELCEETPVNDNSSIVVRIAPEERQKYEEEIRRLYKQLDDKDDEINQQSQLIEKLKQQMLDQEELLVSTRGDNEKVQRELSHLQSENDAAKDEVKEVLQALEELAVNYDQKSQEVEEKSQQNQLLVDELSQKVATMLSLESELQRLQEVSGHQRKRIAEVLNGLMKDLSEFSVIVGNGEIKLPVEISGAIEEEFTVARLYISKIKSEVKSVVKRCRQLENLQVECHRKMEVTGRELSSCQLLISQHEAKIRSLTEYMQSVELKKRHLEESYDSLSDELAKLQAQETVHEVALKDKEPDTQDADEVKKALELQMESHREAHHRQLARLRDEINEKQKTIDELKDLNQKLQLELEKLQADYEKLKSEEHEKSTKLQELTFLYERHEQSKQDLKGLEETVARELQTLHNLRKLFVQDVTTRVKKSAEMEPEDSGGIHSQKQKISFLENNLEQLTKVHKQLVRDNADLRCELPKLEKRLRATAERVKALEGALKEAKEGAMKDKRRYQQEVDRIKEAVRYKSSGKRGHSAQIAKPVRPGHYPASSPTNPYGTRSPECISYTNSLFQNYQNLYLQATPSSTSDMYFANSCTSSGATSSGGPLASYQKANMDNGNATDINDNRSDLPCGYEAEDQAKLFPLHQETAAS

SEQ ID NO: 48806 - protein, 49 aa, Homo sapiens
  MOD_RES (1)..(1): Any amino acid
XNSSNGVEEKETWVEEDELFQVQEVDCRRKRVGQGWSAEIWGRKLGCHF

SEQ ID NO: 48807 - protein, 688 aa, Homo sapiens
MMSIRQRREIRATEVSEDFPAQEENVKLENKLPSGCTSRRLWKILSLTIGGTIALCIGLLTSVYLATLHENDLWFSNIKEVEREISFRTECGLYYSYYKQMLQAPTLVQGFHGLIYDNKTESMKTINLLQRMNIYQEVFLSILYRVLPIQKYLEPVYFYIYTLFGLQAIYVTALYITSWLLSGTWLSGLLAAFWYVTNRIDTTRVEFTIPLRENWALPFFAIQIAAITYFLRPNLQPLSERLTLLAIFISTFLFSLTWQFNQFMMLMQALVLFTLDSLDMLPAVKATWLYGIQITSLLLVCILQFFNSMILGSLLISFNLSVFIARKLQKNLKTGSFLNRLGKLLLHLFMVLCLTLFLNNIIKKILNLKSDEHIFKFLKAKFGLGATRDFDANLYLCEEAFGLLPFNTFGRLSDTLLFYAYIFVLSITVIVAFVVAFHNLSDSTNQQSVGKMEKGTVDLKPETAYNLIHTILFGFLALSTMRMKYLWTSHMCVFASFGLCSPEIWELLLKSVHLYNPKRICIMRYSVPILILLYLCYKFWPGMMDELSELREFYDPDTVELMNWINSNTPRKAVFAGSMQLLAGVKLCTGRTLTNHPHYEDSSLRERTRAVYQIYAKRAPEEVHALLRSFGTDYVILEDSICYERRHRRGCRLRDLLDIANGHKPSLGTLVTATGAGQGRDDGWPRRE

SEQ ID NO: 48808 - protein, 154 aa, Homo sapiens
MLALSRHSLLSPLLSVTSFRRFYRGDSPTDSQKDMIEIPLPPWQERTDESIETKRARLLYESRKRGMLENCILLSLFAKEHLQHMTEKQLNLYDRLINEPSNDWDIYYWATEAKPAPEIFENEVMALLRDFAKNKNKEQRLRAPDLEYLFEKPR

SEQ ID NO: 48809 - protein, 209 aa, Homo sapiens
EGDTGGPAVWKTRLRCALNKSSEFKEVPERGRMDVAEPYKVYQLLPPGIVSGQPGTQKVPSKRQHSSVSSERKEEEDAMQNCTLSPSVLQDSLNNEEEGASGGAVHSDIGSSSSSSSPEPQEVTDTTEAPFQGDQRSLEFLLPPEPDLVRYFQGLGPPPKFQVTLNFWEESHGSSHTPQNLITVKMEQAFARYLLEQTPEQQAAILSLV

SEQ ID NO: 48810 - protein, 199 aa, Homo sapiens
MATPPKRSCPSFSASSEGTRIKKISIEGNIAAGKSTFVNILKQLCEDWEVVPEPVARWCNVQSTQDEFEELTMSQKNGGNVLQMMYEKPERWSFTFQTYACLSRIRAQLASLNGKLKDAEKPVLFFERSVYSDRYIFASNLYESECMNETEWTIYQDWHDWMNNQFGQSLELDGIIYLQATPENQLRLSSRGAYLNTGC

SEQ ID NO: 48811 - protein, 69 aa, Homo sapiens
  MOD_RES (1)..(1): Any amino acid
XAIEDSRQARTETVVDDWDEEFDRGKEKKIKKFKREKRRNFNAFQKLQTRRNFWSVTHPAKAASLSYRR

SEQ ID NO: 48812 - protein, 114 aa, Homo sapiens
MAVLDTDLDHILPSSVLPPFWAKLVVGSVAIVCFARSYDGDFVFDDSEAIVNNKHTLLWRLHLIKYLEPRWCSFPVQREEKILCRSPSQLTGYFCKSVEEGPPSRNAPGGPVAS

SEQ ID NO: 48813 - protein, 167 aa, Homo sapiens
MALPPGPAALRHTLLLLPALLSSGWGELEPQIDGQTWAERALRENERHAFTCRVAGGPGTPRLAWYLDGQLQEASTSRLLSVGGEAFSGGTSTFTVTAHRAQHELNCSLQDPRSGRSANASVILNVQWLLATRVEVPLLGIVVAAGLALGTLVGFSTLVACLVCRKE

SEQ ID NO: 48814 - protein, 61 aa, Homo sapiens
MADNSSDECEEENNKEKKKTSQLTPQRGFSENEDDDDDDDDSSETDSDSDDDDEEHGAPLE

SEQ ID NO: 48815 - protein, 86 aa, Homo sapiens
  MOD_RES (1)..(1): Any amino acid
XENVPPSLLLLSRTFYLIDVKPKPIEIPLSGEDEDFIQPPPVTSSPITPSTPISLPKGPITSSEEPTLQAKSQMTAQNSKASSKGA

SEQ ID NO: 48816 - protein, 110 aa, Homo sapiens
MAWGSKGIQGWENLAESSHLATTRESSPPESGTGSGSSRGSRLQEPQFHGPKTEENPGPAPFHPYFPAQAEKDINDIFLFQGLLETEVPEAGASEECVFHLGRKSSGPQC

SEQ ID NO: 48817 - protein, 156 aa, Homo sapiens
  MOD_RES (1)..(1): Any amino acid
XQFSTAPEIKAPEPLSSLKSMAERAAISSGIEDPVPTLHLTERDIILSSTSAPPASAQPPLQLSEVNIPLSLGVCPLGPVPLTKEQLYQQAMEEAAWHHMPHPSDSERIRQYLPRNPCPTPPYHHQMPPPHSDTVEFYQRLSTETLFFIFYYLELL

SEQ ID NO: 48818 - protein, 244 aa, Homo sapiens
  MOD_RES (1)..(1): Any amino acid
XLQHAMEHGSFDGADQGLLNSFFRNWSTTDIHKHLPFIYNLSSNTMYTYSPAFKQFGSSAKVVHFLGSMKPWNYKYNPQSGSVLEQGSASSSQHQAAFLHLWWTVYQNNVLPLYKSVQAGEARASPGHTLCHSDVGGPCADSASGVGEPCENSTPSAGVPCANSPLGSNQPAQGLPEPTQIVDETLSLPEGRRSEDMIACPETETPAVITCDPLSQPSPQPADFTETETILVDLAVSVSQISIE

SEQ ID NO: 48819 - protein, 159 aa, Homo sapiens
  MOD_RES (1)..(1): Any amino acid
XRRFNFFIQQKCGFRKAPRKVEPRRSDPGTSGEAYKRSALIPPVEETVFYPSPYPIRSLIKPLFFTVGINKWWNNLSDGQRTVTGIIAANVLVFCLWRVPSLQRTMIRYFTSNPASSVISNFVSYVGKVATGRYGPSLGASGAIMTVLAAVCTKIPEGR

SEQ ID NO: 48820 - protein, 1319 aa, Homo sapiens
MAATWSLLCLSHRTKSSGWPPPSGTWGLSQVPPYGWEMTANRDGRDYFINHMTQAIPFDDPRLESCQIIPPAPRKVEMRRDPVLGFGFVAGSEKPVVVRSVTPGGPSEGKLIPGDQIVMINDEPVSAAPRERVIDLVRSCKESILLTVIQPYPSPKSAFISAAKKARLKSNPVKVRFSEEVIINGQVSETVKDNSLLFMPNVLKVYLENGQTKSFRFDCSTSIKDVILTLQEKLSIKGIEHFSLMLEQRTEGAGTKLLLLHEQETLTQVTQRPSSHKMRCLFRISFVPKDPIDLLRRDPVAFEYLYVQSCNDVVQERFGPELKYDIALRLAALQMYIATVTTKQTQKISLKYIEKEWGLETFLPSAVLQSMKEKNIKKALSHLVKANQNLVPPGKKLSALQAKVHYLKFLSDLRLYGGRVFKATLVQAEKRSEVTLLVGPRYGISHVINTKTNLVALLADFSHVNRIEMFSEEESLVRVELHVLDVKPITLLMESSDAMNLACLTAGYYRLLVDSRRSIFNMANKKNTATQETGPENKGKHNLLGPDWNCIPQMTTFIGEGEQEAQITYIDSKQKTVEITDSTMCPKEHRHLYIDNAYSSDGLNQQLSQPGEAPCEADYRSLAQRSLLTLSGPETLKKAQESPRGAKVSFIFGDFALDDGISPPTLGYETLLDEGPEMLEKQRNLYIGSANDMKGLDLTPEAEGIQFVENSVYANIGDVKSFQAAEGIEEPLLHDICYAENTDDAEDEDEVSCEEDLVVGEMNQPAILNLSGSSDDIIDLTSLPPPEGDDNEDDFLLRSLNMAIAAPPPGFRDSSDEEDSQSQAASFPEDKEKGSSLQNDEIPVSLIDAVPTSAEGKCEKGLDNAVVSTLGALEALSVSEEQQTSDNSGVAILRAYSPESSSDSGNETNSSEMTESSELATAQKQSENLSRMFLATHEGYHPLAEEQTEFPASKTPAGGLPPKSSHALAARPATDLPPKVVPSKQLLHSDHMEMEPETMETKSVTDYFSKLHMGSVAYSCTSKRKSKLADGEGKAPPNGNTTGKKQQGTKTAEMEEEASGKFGTVSSRDSQHLSTFNLERTAFRKDSQRWYVATEGGMAEKSGLEAATGKTFPRASGLGAREAEGKEEGAPDGETSDGSGLGQGDRFLTDVTCASSAKDLDNPEDADSSTCDHPSKLPEADESVARLCDYHLAKRMSSLQSEGHFSLQSSQGSSVDAGCGTGSSGSACATPVESPLCPSLGKHLIPDASGKGVNYIPSEERAPGLPNHGATFKELHPQTEGMCPRMTVPALHTAINTEPLFGTLRDGCHRLPKIKETTV

SEQ ID NO: 48821 - protein, 968 aa, Homo sapiens
MSLKPQQQQQQQQQQQQQQQQQQQQQQQPPPAAANVRKPGGSGLLASPAAAPSPSSSSVSSSSATAPSSVVAATSGGGRPGLGRGRNSNKGLPQSTISFDGIYANMRMVHILTSVVGSKCEVQVKNGGIYEGVFKTYSPKCDLVLDAAHEKSTESSSGPKREEIMESILFKCSDFVVVQFKDMDSSYAKRDAFTDSAISAKVNGEHKEKDLEPWDAGELTANEELEALENDVSNGWDPNDMFRYNEENYGVVSTYDSSLSSYTVPLERDNSEEFLKREARANQLAEEIESSAQYKARVALENDDRSEEEKYTAVQRNSSEREGHSINTRENKYIPPGQRNREVISWGSGRQNSPRMGQPGSGSMPSRSTSHTSDFNPNSGSDQRVVNGGVPWPSPCPSPSSRPPSRYQSGPNSLPPRAATPTRPPSRPPSRPSRPPSHPSAHGSPAPVSTMPKRMSSEGPPRMSPKAQRHPRNHRVSAGRGSISSGLEFVSHNPPSEAATPPVARTSPSGGTWSSVVSGVPRLSPKTHRPRSPRQNSIGNTPSGPVLASPQAGIIPTEAVAMPIPAASPTPASPASNRAVTPSSEAKDSRLQDQRQNSPAGNKENIKPNETSPSFSKAENKGISPVVSEHRKQIDDLKKFKNDFRLQPSSTSESMDQLLNKNREGEKSRDLIKDKIEPSAKDSFIENSSSNCTSGSSKPNSPSISPSILSNTEHKRGPEVTSQGVQTSSPACKQEKDDKEEKKDAAEQVRKSTLNPNAKEFNPRSFSQPKPSTTPTSPRPQAQPSPSMVGHQQPTPVYTQPVCFAPNMMYPVPVSPGVQPLYPIPMTPMPVNQAKTYRAVKYLELELLRYVPNMPQQRQDQHHQSAMMHPASAAGPPIAATPPAYSTQYVAYSPQQFPNQPLVQHVPHYQSQHPHVYSPVIQGNARMMAPPTHAQPGLVSSSATQYGAHEQTHAMYGRKHFVCLFQCV

SEQ ID NO: 48822 - protein, 356 aa, Homo sapiens
MSARWLFSSGLLLVGLVNIFFAWSSTVPVFAALWFLNGLAQGLGWPPCGKVLRKWFEPSQFGTWWAILSTSMNLAGGLGPILATILAQSYSWRSTLALSGALWVVVSFLCLLLIHNEPADVGLRNLDPMPSEGKKGSLKEESTLQELLLSPYLWVLSTGYLVVFGVKTCCTDWGQFFLIQEKGQSALVGSSYMSALEVGGLVGSIAAGYLSDRAMAKAGLSNYGNPRHGLLLFMMAGMTVSMYLFRVTVTSDSPKLWILVLGAVFGFSSYGPIALFGVIANESAPPNLCGTSHAIVGLMANVGGFLAGLPFSTIAKHYSWSTAFWVAEVICAASTAAFFLLRNIRTKMGRVSKKAE

SEQ ID NO: 48823 - protein, 134 aa, Homo sapiens
MIARRNPEPLRFLPDEARSLPPPKLTDPRLLYIGFLGYCSGLIDNLIRRRPIATAGLHRQLLYITAFFFAGYYLVKREDYLYAVRDREMFGYMKLHPEDFPEEGGDIGLCCLSPGSLSDTPAVFAVGSSAATTH

SEQ ID NO: 48824 - protein, 115 aa, Homo sapiens
MAELNTHVNVKEKIYAVRSVVPNKSNNEIVLVLQQFDFNVDKAVQAFVDGSAIQVLKEWNMTGKKKNNKRKRSKSKQHQGNKDAKDKVERPEAGPLQPQPPQIQNGPMNGCEKDS

SEQ ID NO: 48825 - protein, 208 aa, Homo sapiens
  MOD_RES (1)..(1): Any amino acid
XKPHLEKLTLGITRILESSPGVTEVTIIEKPPAERHMISSWEQKNNCVMPEDVKNFYLMTNGFHMTWSVKLDEHIIPLGSMAINSISKLTQLTQSSMYSLPNAPTLADLEDDTHEASDDQPEKPHFDSRSVIFELDSCNGSGKVCLVYKSGKPALAEDTEIWFLDRALYWHFLTDTFTAYYRLLITHLGLPQWQYAFTSYGISPQAKV

SEQ ID NO: 48826 - protein, 61 aa, Homo sapiens
MDLEAAKNGTAWRPTSAEGDFELGISSKQKRKKTKTVKMIGVLTLFRYSDWQDKLFMSLGT

SEQ ID NO: 48827 - protein, 129 aa, Homo sapiens
MARQPPPPWVHAAFLLCLLSLGGAIEIPMDPSIQNELTQPPTITKQSAKDHIVDPRDNILIECEAKGNPAPSFHWTRNSRFFNIAKDPRVSMRRRSGTLVIDFRSGGRPEEYEGEYQCFARNKFGTALS

SEQ ID NO: 48828 - protein, 850 aa, Homo sapiens
  MOD_RES (1)..(1): Any amino acid
XLMHLAKDLNSQERSIPPSENQNSQESNGEGNCLSSSASSALAISSLADAATDSSCTSGAEQNDGQSIRKKRRATGDGSSPELPSLERKNKRRKIKGKKERSQVDQLLNISLREEELSKSLQCMDNNLLQARAALQTAYVEVQRLLMLKQQITMEMSALRTHRIQILQGLQETYEPSEHPDQVPCSLTRERRNSRSQTSIDAALLPTPFFPLFLEPPSSHVSPSPTGASLQITTSPTFQTHGSVPAPDSSVQIKQEPMSPEQDENVNAVPPSSACNVSKELLEANKTPLEKEPHSPADQPEQQAESTLTSAETRGSKKKKKLRKKKSLRAAHVPENSDTEQDVLTVKPVRKVKAGKLIKGGKVTTSTWEDSRTGREQESVRDEPDSDSSLEVLEIPNPQLEVVAIDSSESGEEKPDSPSKKDIWNSTEQNPLETSRSGCDEVSSTSEIGTRYKDGIPVSVAETQTVISSIKGSKNSSEISSEPGDDDEPTEGSFEGHQAAVNAIQIFGNLLYTCSADKTVRVYNLVSRKCIGVFEGHTSKVNCLLVTQTSGKNAALYTGSSDHTIRCYNVKSRECVEQLQLEDRVLCLHSRWRILYAGLANGTVVTFNIKNNKRLEIFECHGPRAVSCLATAQEGARKLLVVGSYDCTISVRDARNGLLLRTLEGHSKTILCMKVVNDLVFSGSSDQSVHAHNIHTGELVRIYKGHNHAVTVVNILGKVMVTACLDKFVRVYELQSHDRLQVYGGHKDMIMCMTIHKSMIYTGCYDGSIQAVRLNLMQNYRCWWHGCSLIFGVVDHLKQHLLTDHTNPNFQTLKCRWKNCDAFFTARKGSKQDAAGHIERHAEDDSKIDS

SEQ ID NO: 48829 - protein, 624 aa, Homo sapiens
MGSCARLLLLWGCTVVAAGLSGVAGVSSRCEKACNPRMGNLALGRKLWADTTCGQNATELYCFYSENTDLTCRQPKCDKCNAAYPHLAHLPSAMADSSFRFPRTWWQSAEDVHREKIQLDLEAEFYFTHLIVMFKSPRPAAMVLDRSQDFGKTWKPYKYFATNCSATFGLEDDVVKKGAICTSKYSSPFPCTGGEVIFKALSPPYDTENPYSAKVQEQLKITNLRVQLLKRQSCPCQRNDLNEEPQHFTHYAIYDFIVKGSCFCNGHADQCIPVHGFRPVKAPGTFHMVHGKCMCKHNTAGSHCQHCAPLYNDRPWEAADGKTGAPNECRTCKCNGHADTCHFDVNVWEASGNRSGGVCDDCQHNTEGQYCQRCKPGFYRDLRRPFSAPDACKPCSCHPVGSAVLPANSVTFCDPSNGDCPCKPGVAGRRCDRCMVGYWGFGDYGCRPCDCAGSCDPITGDCISSHTDIDWYHEVPDFRPVHNKSEPAWEWEDAQGFSALLHSGKCECKEQTLGNAKAFCGMKYSYVLKIKILSAHDKGTHVEVNVKIKKVLKSTKLKIFRGKRTLYPESWTDRGCTCPILNPVQQPRPKKADKKTETLHANLLPWLLWKRNNPIGYPCIFIHS

SEQ ID NO: 48830 - protein, 88 aa, Homo sapiens
MGWNLTLGMTVAPDHEHGHSEVLLEDVEHLKVKQEPTDIQLQPMVTQLRYESFCLHQFQEQDGESIPENQELASKQEILKEMEHLGDS

SEQ ID NO: 48831 - protein, 161 aa, Homo sapiens
MQLPRWWELGDPCAWTGQGRGTRRMSPATTGTFLLTVYSIFSKVHSDRNVYPSAGVLFVHVLEREYFKGEFPPYPKPGEISNDPITFNTNLMGYPDRPGWLRYIQRTPYSDGVLYGSPTAENVGKPTIIEITAYNRRTFETARHNLIINIMSAEGVYRYQL

SEQ ID NO: 48832 - protein, 133 aa, Homo sapiens
MAAAAGGGGPGTAVGATGSGIAAAAAGLAVYRRKDGGPATKFWESPETVSQLDSVRVWLGKHYKKYVHADAPTNKTLAGLVVQLLQFQEDAFGKHVTNPAFTKLPAKCFMDFKAGGALCHILGAAYKYKNEQG

SEQ ID NO: 48833 - protein, 265 aa, Homo sapiens
MAAVATCGSVAASTGSAVATASKSNVTSFQRRGPRASVTNDSGPRLVSIAGTRPSVRNGQLLVSTGLPALDQLLGGGLAVGTVLLIEEDKYNIYSPLLFKYFLAEGIVNGHTLLVASAKEDPANILQELPAPLLDDKCKKEFDEDVYNHKTPESNIKMKIAWRYQLLPKMEIGPVSSSRFGHYYDASKRMPQELIEASNWHGFFLPEKISSTLKVEPCSLTPGYTKLLQFIQNIIYEEGFDGSNPQCLSGEVNWSLTDTYPHLLW

SEQ ID NO: 48834 - protein, 192 aa, Homo sapiens
  MOD_RES (1)..(1): Any amino acid
XVEKGRKARKLRGPKEPGFEAGPEASDDDLWTRRRSERIFLHDASAAAPAPVSTAPATKTSRCAKGGPLSPRKDAGRAKDRKDPRKVPATVSKGRHWKKKGKEAGPGAGLPPPRAPALPSEARAPHASSLTAAKRSKAKAKGKEVKKENRGKGGAVSKLMESMAAEEDFEPNQDSSFSEDEHLPRGGAVERP

SEQ ID NO: 48835 - protein, 208 aa, Homo sapiens
  MOD_RES (1)..(1): Any amino acid
XFLGRELNPRICFFDFKYFCELRPGLIGWVLINLALLMKEAELRGSPSLAMWLVNGFQLLYVGDALWHEEAVLTTMDITHDGFGFMLAFGDMAWVPFTYSLQAQFLLHHPQPLGLPMASVICLINATGYYIFRGANSQKNTFRKNPSDPRVAGLETISTATGRKLLVSGWWGMVRHPNYLGDLIMALAWSLPCDPGAFAAEPRCPHEP

SEQ ID NO: 48836 - protein, 58 aa, Homo sapiens
  MOD_RES (1)..(1): Any amino acid
XCTTSQGKVALGSLFHGLDVVFLQPTSLTLLYPLASPSNSTDVYLEPMEIATFRLRLG

SEQ ID NO: 48837 - protein, 184 aa, Homo sapiens
MLVAAAAERNKDPILHVLRQYLDPAQRGVRVLEVASGSGQHAAHFARAFPLAEWQPSDVDQRCLDSIAATTQAQGLTNVKAPLHLDVTWGWEHWGGILPQSLDLLLCINMAHVSPLRCTEPYAINGKISPQSNVDFDLMLRCRNPEWGLRDTALLEDLGKASGLLLERMVDMPANNKCLIFRKN

SEQ ID NO: 48838 - protein, 168 aa, Homo sapiens
MEEIDRFQVPTAHSEMQPLDPAAASISDGDCDAREGESVAMNYKPSPLQVKLEKQRELARKGSLKNGSMGSPVNQQPKKNNVMARTRLVVPNKGYSSLDQSPDEKPLVALDTDSDDDFDMSRYSSSGYSSAEQINQDLNIQLLKDGYRLDEIPDDEDLDLIPPKSVNP

SEQ ID NO: 48839 - protein, 68 aa, Homo sapiens
MDDLRYGVYPVKGASGYPGAERNLLEYSYFEKTEFRSCCPGWSAMARSQLTSTSASRVQAILLPQPSE

SEQ ID NO: 48840 - protein, 112 aa, Homo sapiens
MEPPGRSSSLPFSPPALTLTFLPPSPTLPLPSLPVSLSVSLCLLLSLRSTASHTLHQYCCPTQVLDSMKLTPSGRLAESREEEEEEETEEEEEEDAHQFCCPASECSSPSSR

SEQ ID NO: 48841 - protein, 205 aa, Homo sapiens
MRAWMFVSMQAEIWMEKQYLSQREVDLEAYFTRNHTVLQGTRFKRAIFQGQYCRNFGCCEDRDDGCVTEFYAANALCYCDKFCDRENSDCCPDYKSFCREEKEWPPHTQPWYPEGCFKDGQHYEEGSVIKENCNSCTCSGQQWKCSQHVCLVRSELIEQVNKGDYGWTAQNYSQFWGMTLEDGFKFRLGTLPPSPMLLSMNEMTE

SEQ ID NO: 48842 - protein, 53 aa, Homo sapiens
  MOD_RES (1)..(1): Any amino acid
XLVREKATGRYYAMKILRKEVIIAKLENLMLDKDGHIKITDFGLCKEGISDGA

SEQ ID NO: 48843 - protein, 1659 aa, Homo sapiens
MLSATPLYGNVHSWMNSERVRMCGASEDRKILVNDGDASKARLELREENPLNHNVVDASTAHRIDGLAALSMDRTGLIREGLRVPGNIVYSSLCGLGSEKGREAATSTLGGLGFSSERNPEMQFKPNTPETVEASAVSGKPPNGFSAIYKTPPGIQKSAVATAEALGLDRPASDKQSPLNINGASYLRLPWVNPYMEGATPAIYPFLDSPNKYSLNMYKALLPQQSYSLAQPLYSPVCTNGERFLYLPPPHYVGPHIPSSLASPMRLSTPSASPAIPPLVHCADKSLPWKMGVSPGNPVDSHAYPHIQNSKQPRVPSAKAVTSGLPGDTALLLPPSPRPSPRVHLPTQPAADTYSEFHKHYARISTSPSVALSKPYMTVSSEFPAARLSNGKYPKAPEGGEGAQPVPGHARKTAVQDRKDGSSPPLLEKQTVTKDVTDKPLDLSSKVVDVDASKADHMKKMAPTVLVHSRAGSGLVLSGSEIPKETLSPPGNGCAIYRSEIISTAPSSWVVPGPSPNEENNGKSMSLKNKALDWAIPQQRSSSCPRMGGTDAVITNVSGSVSSAGRPASASPAPNANADGTKTSRSSVETTPSVIQHVGQPPATPAKHSSSTSSKGAKASNPEPSFKANENGLPPSSIFLSPNEAFRSPPIPYPRSYLPYPAPEGIAVSPLSLHGKGPVYPHPVLLPNGSLFPGHLAPKPGLPYGLPTGRPEFVTYQDALGLGMVHPMLIPHTPIEITKEEKPERRSRSHERARYEDPTLRNRFSEILETSSTKLHPDVPTDKNLKPNPNWNQGKTVVKSDKLVYVDLLREEPDAKTDTNVSKPSFAAESVGQSAEPPKPSVEPALQQHRDFIALREELGRISDFHETYTFKQPVFTVSKDSVLAGTNKENLGLPVSTPFLEPPLGSDGPAVTFGKTQEDPKPFCVGSAPPSVDVTPTYTKDGADEAESNDGKVLKPKPSKLAKRIANSAGYVGDRFKCVTTELYADSSQLSREQRALQMEGLQEDSILCLPAAYCERAMMRFSELEMKEREGGHPATKDSEMCKFSPADWERLKGNQDKKPKSVTLEEAIAEQNESERCEYSVGNKHRDPFEAPEDKDLPVEKYFVERQPVSEPPADQVASDMPHSPTLRVDRKRKVSGDSSHTETTAEEVPEDPLLKAKRRRVSKDDWPEREMTNSSSNHLEDPHYSELTNLKVCIELTGLHPKKQRHLLHLRERWEQQVSAADGKPGRQSRKEVTQATQPEAIPQGTNITEEKPGRKRAEAKGNRSWSEESLKPSDNEQGLPVFSGSPPMKSLSSTSAGGKKQAQPSCAPASRPPAKQQKIKENQKTDVLCADEEEDCQAASLLQKYTDNSEKPSGKRLCKTKHLIPQESRRGLPLTGEYYVENADGKVTVRRFRKRPEPSSDYDLSPAKQEPKPFDRLQQLLPASQSTQLPCSSSPQETTQSRPMPPEARRLIVNKNAGETLLQRAARLGYEEVVLYCLENKICDVNHRDNAGYCALHEACARGWLNIVRHLLEYGADVNCSAQDGTRPLHDAVENDHLEIVRLLLSYGADPTLATYSGRTIMKMTHSELMEKFLTDYLNDLQGRNDDDASGTWDFYGSSVCEPDDESGYDVLANPPGPEDQDDDDDAYSDVFEFEFSETPLLPCYNIQVSVAQG

SEQ ID NO: 48844 - protein, 60 aa, Homo sapiens
MNFQQRLQSLWTLASKLRITSRVPGCCSRRFCRTSRKKMRCFPSETVHTGGFCYSGEHSN

SEQ ID NO: 48845 - protein, 336 aa, Homo sapiens
  MOD_RES (1)..(1): Any amino acid
XSPFRKDKSPVREPIDNLTPEERDARTVFCMQLAARIRPRDLEEFFSTVGKVRDVRMISDRNSRRSKGIAYVEFVDVSSVPLAIGLTGQRVLGVPIIVQASQAEKNRAAAMANNLQKGSAGPMRLYVGSLHFNITEDMLRGIFEPFGRFSDSECAKKALEQLNGFELAGRPMKVGHVTERTDASSASSFLDSDELERTGIDLGTTGRLQLMARLAEGTGLQIPPAAQQALQMSGSLAFGAVAEFSFVIDLQTRLSQQTEASALAAAASVQPLATQCFQLSNMFNPQTEEEVGWDTEIKDDVIEECNKHGGVIHIYVDKNSAQGNVYVKCPSIAAAI

SEQ ID NO: 48846 - protein, 406 aa, Homo sapiens
MNNSGADEIGKLFVGGLDWSTTQETLRSYFSQYGEVVDCVIMKDKTTNQSRGFGFVKFKDPNCVGTVLASRPHTLDGRNIDPKPCTPRGMQPERTRPKEGWKGPRSDNSKSNKIFVGGIPHNCGETELREYFKKFGVVTEVVMIYDAEKQRPRGFGFITFEDEQSVDQAVNMHFHDIMGKKVEVKRAEPRDSKSQAPGQPGASQWGSRVVPNAANGWAGQPPPTWQQGYGPQGMWVPAGQAIGGYGPPPAGRGAPPPPPPFTSYIVSTPPGGFPPPQGFPQGYGAPPQFSFGYGPPPPPPDQFAPPGVPPPPATPGAAPLAFPPPPSQAAPDMSKPPTAQPDFPYGQYAGYGQDLSGFGQGFSDPSQQPPSYGGPSVPGSGGPPAGGSGFGRGQNHNVQGFHPYRR

SEQ ID NO: 48847 - protein, 81 aa, Homo sapiens
MDGKVAVQECGPPAVSWVPEEGEKLDQEDEDQEPSSSPTSSSSLSAASRCSSWRWRWANTPAKGVSQPGGRSAPSSRALVW

SEQ ID NO: 48848 - protein, 109 aa, Homo sapiens
MNPASAPPPLPPPGQQVIHVTQDLDTDLEALFNSVMNPKPSSWRKKILPESFFKEPDSGSHSRQSSTDSSGGHPGPRLAGGAQHVRSHSSPASLQLGTGAGAAGSPAQQ

SEQ ID NO: 48849 - protein, 17 aa, Homo sapiens
  MOD_RES (1)..(1): Any amino acid
XNYCGHIYTPISCKIRS

SEQ ID NO: 48850 - protein, 144 aa, Homo sapiens
MMATPNQTACNAESPVALEEAKTSGAPGSPQTPPERHDSGGSLPLTPRMESHSEDEDLAGAVGGLGWNSRSPRTQSPGGCSAEAVLARKKHRRRPSKRKRHWRPYLELSWAEKQQRDERQSQRASRVREEMFAKGQPVAPYNTT

SEQ ID NO: 48851 - protein, 599 aa, Homo sapiens
MLVLVIRGPYPSAQCQGKLMENRALDPGTRDSYGATSHLPNKGALAKVKNNFKDLMSKLTEGQYVLCRWTDGLYYLGKIKRVSSSKQSCLVTFEDNSKYWVLWKDIQHAGVPGEEPKCNICLGKTSGPLNEILICGKCGLGYHQQCHIPIAGSADQPLLTPWFCRRCIFALAVRKGGALKKGAIARTLQAVKMVLSYQPEELEWDSPHRTNQQQCYCYCGGPGEWYLRMLQCYRCRQWFHEACTQCLNEPMMFGDRFYLFFCSVCNQGPEYIERLPLRWVDVVHLALYNLGVQSKKKYFDFEEILAFVNHHWELLQLGKLTSTPVTDRGPHLLNALNSYKSRFLCGKEIKKKKCIFRLRIRVPPNPPGKLLPDKGLLPNENSASSELRKRGKSKPGLLPHEFQQQKRRVYRRKRSKFLLEDAIPSSDFTSAWSTNHHLASIFDFTLDEIQSLKSASSGQTFFSDVDSTDAASTSGSASTSLSYDSRWTVGSRKRKLAAKAYMPLRAKRWAAELDGRCPSDSSAEGASVPERPDEGIDSHTFESISEDDSSLSHLKSSITNYFGAAGRLACGEKYQVLARRVTPEGKVQYLVEWEGTTPY

SEQ ID NO: 48852 - protein, 183 aa, Homo sapiens
IRPAAPRPPFSTMRPASSQVPRVMSTQRVANTSTQTMGPRPAAAAAAATPAVRTVPQYKYAAGVRNPQQHLNAQPQVTMQQPAVHVQGQEPLTASMLASAPPQEQKQMLGERLFPLIQAMHPTLAGKITGMLLEIDNSELLHMLESPESLRSKVDEAVAVLQAHQAKEAAQKAVNSATGVPTV

SEQ ID NO: 48853 - protein, 282 aa, Homo sapiens
  MOD_RES (1)..(1): Any amino acid
XKLARMVMLQYVTESMAYMVSANMDQGATDFQIEAAISKIFGSEAAWKVTDECIQIMGGMGFMKEPGVERVLRDLRIFRIFEGTNDILRLFVALQGCMDKGKELSGLGSALKNPFGNAGLLLGEAGKQLRRRAGLGSGLSLSGLVHPELSRSGELAVRALEQFATVVEAKLIKHKKGIVSEEAGRECLSRRGPGPGSQPAQIYFHLLLPARASRSLSEGHPTAQHEKMLCDTWCIEAAARIREGMAALQSDPWQQELYRNFKSISKALVERGGVVTSNPLGF

SEQ ID NO: 48854 - protein, 64 aa, Homo sapiens
MAEAATGFLEQLKSCIVWSWTYLWTVWFFIVLFLVYILRVPLKINDNLSTVNEGVPPSEYVQYP

SEQ ID NO: 48855 - protein, 499 aa, Homo sapiens
MDTSPLCFSILLVLCIFIQSSALGQSLKPEPFGRRAQAVETNKTLHEMKTRFLLFGETNQGCQIRINHPDTLQECGFNSSLPLVMIIHGWSVDGVLENWIWQMVAALKSQPAQPVNVGLVDWITLAHDHYTIAVRNTRLVGKEVAALLRWLEESVQLSRSHVHLIGYSLGAHVSGFAGSSIGGTHKIGRITGLDAAGPLFEGSAPSNRLSPDDANFVDAIHTFTREHMGLSVGIKQPIGHYDFYPNGGSFQPGCHFLELYRHIAQHGFNAITQTIKCSHERSVHLFIDSLLHAGTQSMAYPCGDMNSFSQGLCLSCKKGRCNTLGYHVRQEPRSKSKRLFLVTRAQSPFKVYHYQFKIQFINQTETPIQTTFTMSLLGTKEKMQKIPITLGKGIASNKTYSFLITLDVDIGELIMIKFKWENSAVWANVWDTVQTIIPWSTGPRHSGLVLKTIRVKAGETQQRSPNRINLGRLNCSLLFCTELFSHDSLAHWSSAASEL

SEQ ID NO: 48856 - protein, 1122 aa, Homo sapiens
  MOD_RES (1)..(1): Any amino acid
XGANAQVVYSLPDSAEGHFSIDATTGVIRLEKPLQVRPQAPLELTVRASDLGTPIPLSTLGTVTVSVVGLEDYLPVFLNTEHSVQVPEDAPPGTEVLQLATLTRPGAEKTGYRVVSGNEQGRFRLDARTGILYVNASLDFETSPKYFLSIECSRKSSSSLSDVTTVMVNITDVNEHRPQFPQDPYSTRVLENALVGDVILTVSATDEDGPLNSDITYSLIGGNQLGHFTIHPKKGELQVAKALDREQASSYSLKLRATDSGQPPLHEDTDIAIQVADVNDNPPRFFQLNYSTTVQENSPIGSKVLQLILSDPDSPENGPPYSFRITKGNNGSAFRVTPDGWLVTAEGLSRRAQEWYQLQIQASDSGIPPLSSLTSVRVHVTEQSHYAPSALPLEIFITVGEDEFQGGMVGKIHATDRDPQDTLTYSLAEEETLGRHFSVGAPDGKIIAAQGLPRGHYSFNVTVSDGTFTTTAGVHVYVWHVGQEALQQAMWMGFYQLTPEELVSDHWRNLQRFLSHKLDIKRANIHLASLQPAEAVAGVDVLLVFEGHSGTFYEFQELASIITHSAKEMEHSVGVQMRSAMPMVPCQGPTCQGQICHNTVHLDPKVGPTYSTARLSILTPRHHLQRSCSCNGTATRFSGQSYVRYRAPAARNWHIHFYLKTLQPQAILLFTNETASVSLKGFEGCLDAVVVNEEALDLLAPGKTVAGLLETQALTQCCLHSDYCSQNTCLNGGKCSWTHGAGYVCKCPPQFSGKHCEQGRENCTFAPCLEGGTCILSPKGASCNCPHPYTGDRCEMEARGCSEGHCLVTPEIQRGDWGQQELLIITVAVAFIIISTVGLLFYCRRCKSHKPVAMEDPDLLARSVGVDTQAMPAIELNPLSASSCNNLNQPEPSKASVPNELVTFGPNSKQRPVVCSVPPRLPPAAVPSHSDNEPVIKRTWSSEEMVYPGGAMVWPPTYSRNERWEYPHSEVTQGPLPPSAHRHSTPVVMPEPNGLYGGFPFPLEMENKRAPLPPRYSNQNLEDLMPSRPPSPRERLVAPCLNEYTAISYYHSQFRQGGGGPCLADGGYKGVGMRLSRAGPSYAVCEVEGAPLAGQGQPRVPPNYEGSDMVESDYGSCEEVMF

SEQ ID NO: 48857 - protein, 48 aa, Homo sapiens
  MOD_RES (1)..(1): Any amino acid
XEHPRDLKFSIDYILSSPDPFPGLKPPCLAQEGRYPRLENVGLHFWTM

SEQ ID NO: 48858 - protein, 456 aa, Homo sapiens
MASTIKEALSVVSEDQSLFECAYGTPHLAKTEMTASSSSDYGQTSKMSPRVPQQDWLSQPPARVTIKMECNPSQVNGSRNSPDECSVAKGGKMVGSPDTVGMNYGSYMEEKHMPPPNMTTNERRVIVPADPTLWSTDHVRQWLEWAVKEYGLPDVNILLFQNIDGKELCKMTKDDFQRLTPSYNADILLSHLHYLRETPLPHLTSDDVDKALQNSPRLMHARNTGGAAFIFPNTSVYPEATQRITTRPAAQPSPSTVPKTEDQRPQLDPYQILGPTSSRLANPGSGQIQLWQFLLELLSDSSNSSCITWEGTNGEFKMTDPDEVARRWGERKSKPNMNYDKLSRALRYYYDKNIMTKVHGKRYAYKFDFHGIAQALQPHPPESSLYKYPSDLPYMGSYHAHPQKMNFVAPHPPALPVTSSSFFAAPNPYWNSPTGGIYPNTRLPTSHMPSHLGTYY

SEQ ID NO: 48859 - protein, 153 aa, Homo sapiens
RAKKDNVAGVTLPVFEHYHEGTDSYELTGLARGGEQLAKLKRNYAKAVELLVELASLQTSFVTLDEAIKITNRRVNAIEHVIIPRIERTLAYIITELDEREREEFYRLKKIQEKKKILKEKSEKDLEQRRAAGEVLEPANLLAEEKDEDLLFE

SEQ ID NO: 48860 - protein, 264 aa, Homo sapiens
MCDLCIRYTIMVDKYIPNISMCLKDSDPFIRKQTLILLTNLLQEEFVKWKGSLFFRFVSTLIDSHPDIASFGEFCLAHLLLKRNPVMFFQHFIECIFHFNNYEKHEKYNKFPQSEREKRLFSLKGKSNKERRMKIYKFLLEHFTDEQRFNITSKICLSILACFADGILPLDLDASELLSDTFEVLSSKEIKLLAMRSKPDKDLLMEEDDMALANVVMQEAQKKLISQVQKRNFIENIIPIIISLKTVLEKNKIPALRELMHYLR

SEQ ID NO: 48861 - protein, 79 aa, Homo sapiens
RRDSAADFFSHYEYLCALQNSVPLPAVRACLREGVLDFNADRLRGVDWAPLLSTLKINKDLPLVSIKSFFQPWLGDTGL

SEQ ID NO: 48862 - protein, 172 aa, Homo sapiens
MAEYDLTTRIAHFLDRHLVFPLLEFLSVKEIYNEKELLQGKLDLLSDTNMVDFAMDVYKNLYSDDIPHALREKRTTVVAQLKQLQAETEPIVKMFEDPETTRQMQSTRDGRMLFDYLADKHGFRQEYLDTLYRYAKFQYECGNYSGAAEYLYFFRVLVSISTCFFFFFFCLL

SEQ ID NO: 48863 - protein, 126 aa, Homo sapiens
MLATRVFSLVGKRAISTSVCVRAHESVVKSEDFSLPAYMDRRDHPLPEVAHVKHLSASQKALKEKEKASWSSLSMDEKVELYRIKFKESFAEMNRGSNEWKTVVGGAMFFIGFTALVIMWQKHYGE

SEQ ID NO: 48864 - protein, 40 aa, Homo sapiens
  MOD_RES (1)..(1): Any amino acid
XHHSELETSILYFRRSLSWNMTFQKNSSLRQETSWRNFWF

SEQ ID NO: 48865 - protein, 162 aa, Homo sapiens
MDFFSSHLLADSSSPATNSSHTDAHEILVSDFLVSDENLQKMENVLDLWSSGLKTNIISELSKWRLNFIDWHRMEMRKEKEKHAAHLKQLCNQINELKELQKTFEISIGRKDEVISSLSHAIGKQKEKIELMRTFFHWRIGHVRARQDVYEGKLADQYYQRT

SEQ ID NO: 48866 - protein, 188 aa, Homo sapiens
MDRSKENCISGPVKATAPVGGPKRVLVTQQFPCQNPLPVNSGQAQRVLCPSNSSQRIPLQAQKLVSSHKPVQNQKQKQLQATSVPHPVSRPLNNTQKSKQPLPSAPENNPEEELASKQKNEESKKRQWALEDFEIGRPLGKGKFGNVYLAREKQSKFILALKVLFKAQLEKAGVEHQLRREVEIQSHL

SEQ ID NO: 48867 - protein, 101 aa, Homo sapiens
MGCCTGRCSLICLCALQLVSALERQIFDFLGFQWAPILGNFLHIIVVILGLFGTIQYRPRYIMVDTDLMTFNISVHRSWWREHGPGCVRRVLPPSAHGMMD

SEQ ID NO: 48868 - protein, 824 aa, Homo sapiens
SEVKKDSSQLGTDATKEKPKEVAENQQNQSSDPEEEKGSQPPPAAESQSSLRRQKREKETSESRGISRFIPPWLKKQKSYTLVVAKDGGDKKEPTQAVVEEQVLDKEEPLPEEQRQAKGDAEEMAQKKQEIKVEVKEEKPSVSKEEKPSVSKVEMQPTELVSKEREEKVKETQEDKLEGGAAKRETKEVQTNELKAEKASQKVTKKTKTVQCKVTLLDGTEYSCDLEKHAKGQVLFDKVCEHLNLLEKDYFGLLFQESPEQKNWLDPAKEIKRQLRNLPWLFTFNVKFYPPDPSQLTEDITRYFLCLQLRQDIASGRLPCSFVTHALLGSYTLQAELGDYDPEEHGSIDLSEFQFAPTQTKELEEKVAELHKTHRGLSPAQADSQFLENAKRLSMYGVDLHHAKDSEGVDIKLGVCANGLLIYKDRLRINRFAWPKILKISYKRSNFYIKVRPAELEQFESTIGFKLPNHRAAKRLWKVCVEHHTFYRLVSPEQPPKAKFLTLGSKFRYSGRTQAQTRQASTLIDRPAPHFERTSSKRVSRSLDGAPIGVMDQSLMKDFPGAAGEISAYGPGLVSIAVVQDGDGRREVRSPTKAPHLQLIEGKTVSMCPPSPLIHRTSSFSPNLLPVPEMDLLSDISEEDPFGEADQITLDSLEHLSTGEISEQGDSEVAMPDLVLDSAIAPSQPDCPSPIHGKTLKAADDSDSEFGYFSFSFSKCFPSGFPSLLDEDGYLAFPSLPKVWVSFLPAGVQHYVPITSPSFIPSLILIFGLLLSASQSVPFSLAFSLPLALSLCYLEAKAASFNVSYDCDLNDKLEEEEVVAGMPT

SEQ ID NO: 48869 - protein, 6824 aa, Homo sapiens
MASSPELPTEDEQGSWGIDDLHISLQAEQEDTQKKAFTCWINSQLARHTSPSVISDLFTDIKKGHVLLDLLEVLSGQQLPRDKGSNTFQCRINIEHALTFLRNRSIKLINIHVTDIIDGNPSIILGLIWTIILHFHIEKLAQTLSCNYNQPSLDDVSVVDSSPASSPPAKKCSKVQARWQMSARKALLLWAQEQCATYESVNVTDFKSSWRNGMAFLAIIHALRPDLIDMKSVKHRSNKDNLREAFRIAEQELKIPRLLEPEDVDVVDPDEKSIMTYVAQFLQYSKDAPGTGEEAQGKVKDAMGWLTLQKEKLQKLLKDSENDTYFKKYNSLLSFMESFNEEKKSFLDVLSIKRDLDELDKDHLQLREAWDGLDHQINAWKIKLNYALPPPLHQTEAWLQEVEELMDEDLSASQDHSQAVTLIQEKMTLFKSLMDRFEHHSNILLTFENKDENHLPLVPPNKLEEMKRRINNILEKKFILLLEFHYYKCLVLGLVDEVKSKLDIWNIKYGSRESVELLLEDWHKFIEEKEFLARLDTSFQKCGEIYKNLAGECQNINKQYMMVKSDVCMYRKNIYNVKSTLQKVLACWATYVENLRLLRACFEETKKEEIKEVPFETLAQWNLEHATLNEAGNFLVEVSNDVVGSSISKELRRLNKRWRKLVSKTQLEMNLPLMIKKQDQPTFDNSGNILSKEEKATVEFSTDMSVELPENYNQNIKAGEKHEKENEEFTGQLKVAKDVEKLIGQVEIWEAEAKSVLDQDDVDTSMEESLKHLIAKGSMFDELMARSEDMLQMDIQNISSQESFQHVLTTGLQAKIQEAKEKVQINVVKLIAALKNLTDVSPDLDIRLKMEESQKELESYMMRAQQLLGQRESPGELISKHKEALIISNTKSLAKYLKAVEELKNNVTEDIKMSLEEKSRDVCAKWESLHHELSLYVQQLKIDIEKGKLSDNILKLEKQINKEKKLIRRGRTKGLIKEHEACFSEEGCLYQLNHHMEVLRELCEELPSQKSQQEVKRLLKDYEQKIERLLKCASEIHMTLQPTAGGTSKNEGTITTSENRGGDPHSEAPFAKSDNQPSTEKAMEPTMKFSLASVLRPLQEESIMEKDYSASINSLLERYDTYRDILEHHLQNNKFRITSDFSSEEDRSSSCLQAKLTDLQVIKNETDARWKEFEIISLKLENHVNDIKKPFVIKERDTLKERERELQMTLNTRMESLETALRLVLPVEKASLLLCGSDLPLHKMAIQGFHLIDADRIYQHLRNIQDSIAKQIEICNRLEEPGNFVLKELHPFDLHAMQNIILKYKTQFEGMNHRVQRSEDTLKALEDFLASLRTAKLSAEPVTDLSASDTQVAQENTLTVKNKEGEIHLMKDKAKHLDKCLKMLDMSFKDAERGDDTSCENLLDAFSIKLSETHGYGVQEEFTEENKLLEACIFKNNELLKNIQDVQSQISKIGLKDPTVPAVKHRKKSLIRLDKVLDEYEEEKRHLQEMANSLPHFKDGREKTVNQQCQNTVVLWENTKALVTECLEQCGRVLELLKQYQNFKSILTTLIQKEESVISLQASYMGKENLKKRIAEIEIVKEEFNEHLEVVDKINQVCKNLQFYLNKMKTFEEPPFEKEANIIVDRWLDINEKTEDYYENLGRALALWDKLFNLKNVIDEWTEKALQKMELHQLTEEDRERLKEELQVHEQKTSEFSRRVAEIQFLLQSSEIPLELQVMESSILNKMEHVQKCLTGESNCHALSGSTAELREDLDQAKTQIGMTESLLKALSPSDSLEIFTKLEEIQQQILQQKHSMILLENQIGCLTPELSELKKQYESVSDLFNTKKSVLQDHFSKLLNDQCKNFNDWFSNIKVNLKECFESSETKKSVEQKLQKLSDFLTLEGRNSKIKQVDSVLKHVKKHLPKAHVKELISWLVGQEFELEKMESICQARAKELEDSLQQLLRLQDDHRNLRKWLTNQEEKWKGMEEPGEKTELFCQALARKREQFESVAQLNNSLKEYGFTEEEEIIMEATCLMDRYQTLLRQLSEIEEEDKLLPTEDQSFNDLAHDVIHWIKEIKESLMVLNSSEGKMPLEERIQKIKEIILLKPEGDARIETIMKQAESSEAPLVQKTLTDISNQWDNTLHLASTYLSHQEKLLLEGEKYLQSKEDLRLMLIELKKKQEAGFALQHGLQEKKAQLKIYKKFLKKAQDLTSLLKELKSQGNYLLECTKNPSFSEEPWLEIKHLHESLLQQLQDSVQNLDGHVREHDSYQVCVTDLNTTLDNFSKEFVSFSDKPVDQIAVEEKLQKLQELENRLSLQDGTLKKILALAKSVKQNTSSVGQKIIKDDIKSLQCKQKDLENRLASAKQEMECCLNSILKSKRSTEKKGKFTLPGREKQATSDVQESTQESAAVEKLEEDWEINKNFVENVMAVSKNCHHSMYIFESIVKNFISDEMQDSAVEMAMSKQLSLNAQESMKNTEDERKVNELQNQPLELDTMLRNEQLEEIEKLYTQLEAKKAAIKPLEQTECLNKTETGALVLHNIGYSAQHLDNLLQALITLKKNKESQYCVLRDFQEYLAAVESSMKALLTDKESLKVGPLDSVTYLDKIKKFIASIEKEKDSLGNLKIKWENLSNHVTDMDKKLLESQIKQLEHGWEQVEQQIQKKYSQQVVEYDEFTTLMNKVQDTEISLQQQQQHLQLRLKSPEERAGNQSMIALTTDLQATKHGFSVLKGQAELQMKRIWGEKEKKNLEDGINNLKKQWETLEPLHLEAENQIKKCDIRNKMKETILWAKNLLGELNPSIPLLPDDILSQIRKCKVTHDGILARQQSVESLAEEVKDKVPSLTTYEGSDLNNTLEDLRNQYQMLVLKSTQRSQQLEFKLEERSNFFAIIRKFQLMVQESETLIIPRVETAATEAELKHHHVTLEASQKELQEIDSGISTHLQELTNIYEELNVFERLFLEDQLKNLKIRTNRIQRFIQNTCNEVEHKIKFCRQFHEKTSALQEEADSIQRNELLLNQEVNKGVKEEIYNLKDRLTAIKCCILQVLKLKKVFDYIGLNWDFSQLDQLQTQVFEKEKELEEKIKQLDTFEEEHGKYQALLSKMRAIDLQIKKMTEVVLKAPDSSPESRRLNAQILSQRIEKAKCLCDEIIKKLNENKTFDDSFKEKEILQIKLNAEENDKLYKVLQNMVLELSPKELDEKNCQDKLETSLHVLNQIKSQLQQPLLINLEIKHIQNEKDNCEAFQEQVWAEMCSIKAVTAIEKQREENSSEASDVETKLREFEDLQMQLNTSIDLRTNVLNDAYENLTRYKEAVTRAVESITSLEAIIIPYRVDVGNPEESLEMPLRKQEELESTVAHIQDLTEKLGMISSPEAKLQLQYTLQELVSKNSAMKEAFKAQETEAERYLENYKCYRKMEEDIYTNLSKMETVLGQSMSSLPLSYREALERLEQSKALVSNLISTKEELMKLRQILRLLRLRCTENDGICLLKIVSALWEKWLSLLEAAKEWEMWCEELKQEWKFVSEEIEREAIILDNLQEELPEISKTKEAATTEELSELLDCLCQYGENVEKQQLLLTLLLQRIRSIQNVPESSGAVETVPAFQEITSMKERCNKLLQKVQKNKELVQTEIQERHSFTKEIIALKNFFQQTTTSFQNMAFQDHPEKSEQFEELQSILKKGKLTFENIMEKLRIKYSEMYTIVPAEIESQVEECRKALEDIDEKISNEVLKSSPSYAMRRKIEEINNGLHNVEKMLQQKSKNIEKAQEIQKKMWDELDLWHSKLNELDSEVQDIVEQDPGQAQEWMDNLMIPFQQYQQVSQRAECRTSQLNKATVKMEEYSDLLKSTEAWIENTSHLLANPADYDSLRTLSHHASTVQMALEDSEQKHNLLHSIFMDLEDLSIIFETDELTQSIQELSNQVTALQQKIMESLPQIQRMADDVVAIESEVKSMEKRVSKIKTILLSKEIFDFSPEEHLKHGEVILENIRPMKKTIAEIVSYQVELRLPQTGMKPLPVFQRTNQLLQDIKLLENVTQEQNELLKVVIKQTNEWDEEIENLKQILNNYSAQFSLEHMSPDQADKLPQLQGEIERMEKQILSLNQRKEDLLVDLKATVLNLHQHLKQEQEGVERDRLPAVTSEEGGVAERDASERKLNRRGSMSYLAAVEEEVEESSVKSDHDKDMEEDRASSSSGTIVQEAYGKISTSDNSMAQILTPDSLNTEQGPECSLRPNQTEEGTTPPIEADTLDSSDAQGGLEPRVEKTRPEPTEVLHACKTQVAELELWLQQANVAVEPETLNADMQQVLEQQLVGCQAMLTEIEHKVAFLLETCKDQGLGDNGATQHEAEALSLKLKTVKCNLEKVQMMLQEKHSEDQHPTILKKSSEPEHQEALQPVNLSELESIVTERPQFSRQKDFQQQQVLELKPMEQKDFIKFIEFNAKKMWPQYCQHDNDTTQESSARYPTTEELKTYTTQLEDLRQEASNLQTQENMTEEAYINLDKKLFELFLTLSQCLSSVEEMLEMPRLYREDGSGQQVHYETLALELKKLYLALSDKKGDLLKAMTWPGENTNLLLECFDNLQVCLEHTQAAAVCRSKSLKAGLDYNRSYQKADAYTVELENAESRVAKLRDEGERLHLPYALLQEVYKLEDVLDSMWGMLRARYTELSSPFVTESQQDALLQGMVELVKIGKEKLAHGHLKQTKSKVALQAQIENHKVFFQKLVADMLLIQAYSAKILPSLLQNRETFWAEQVTEVKILEEKSRQCGMKLQSLLQKWEEFDENYASLEKDLEILISTLPSVSLVEETEERLVERISFYQQIKRNIGGKHARLYQTLNEGKQLVASVSCPELEGQIAKLEEQWLSLNKKIDHELHRLQALLKHLLRSAFLGVYNRDSDQLTKWLESSQHTLNYWKEQSLNVSQDLDTIRSNINNFFEFSKEVDEKSSLKTAVISIGNQLLHLKETDTATLRASLAQFEQKWTMLITQLPDIQEKLHQLQMEKLPSRKAITEMISWMNNVEHQTSDEDSVHSPSSASQVKHLLQKHKEFRMEMDYKQWIVDFVNQSLLQLSTCDVESKRYERTEFAEHLGEMNRQWHRVHGMLNRKIQHLEQLLESITESENKIQILNNWLEAQEERLKTLQKPESVISVQKLLLDCQDIENQLAIKSKALDELKQSYLTLESGAVPLLEDTASRIDELFQKRSSVLTQVNQLKTSMQSVLQEWKIYDQLYDEVNMMTIRFWYCMEHSKPVVLSLETLRCQVENLQSLQDEAESSEGSWEKLQEVIGKLKGLCPSVAEIIEEKCQNTHKRWTQVNQAIADQLQKAQSLLQLWKAYSNAHGEAAARLKQQEAKFQQLANISMSGNNLAEILPPALQDIKELQHDVQKTKEAFLQNSSVLDRLPQPAESSTHMLLPGPLHSLQRAAYLEKMLLVKANEFENHVLALTAQSPDIEHLNEVSLKLPLSDVAVKTLQNMNRQWIRATATALERCSELQGIGLNEKFLYCCEKWIQLLEKIEEALKVDVANSLPELLEQQKTYKMLEAEVSINQTIADSYVTQSLQLLDTTEIENRPEFITEFSKLTDRWQNAVQGVRQRKGDVDGLNAHVARCGGASLKKQDLRYSLHTACGAALLCRSSHGANKEIHFQRRRTTCALTLEAGEKLLLTTDLKTKESVGRRISQLQDSWKDMEPQLAEMIKQFQSTVETWDQCEKKIKELKSRLQVLKAQSEDPLPELHEDLHNEKELIKVAIRKQEIEDRLNTWVVFNEKNKELCAWLVQMENKVLQTADISIEEMIEKLQKRTVGREEVPERWECETIVSGHGTEESCFLSIRKFHQGRGLHILTCQLIPQDCMEEINLFSENKLQLKQMGDQLIKASNKSRAAEIDDKLNKINDRWQHLFDVIGSSMADQTNSRWMFFQWPRGIQRTVTWPWDHLCSCASTGHTGPFHSSVLRCFEQHIEFGIYRRTYKVNKELGGDKNGQRCPIIYPHGLVQCIRLGEPLILKRVKKLKETFAFIQQLDKNMSNLRTWLARIESELSKPVVYDVCDDQEIQKRLAEQQDLQRDIEQHSAGVESVFNICDVLLHDSDACANETECDSIQQTTRSLDRRWRNICAMSMERRMKIEETWRLWQKFLDDYSRFEDWLKSAERTAACPNSSEVLYTSAKEELKRFERQIHERLTQLELINKQYRRLARENRTDTASRLKQMVHEGNQRWDNLQRRVTAVLRRLRHFTNQREEFEGTRESILVWLTEMDLQLTNVEHFSESDADDKMRQLNGFQQEITLNTNKIDQLIVFGEQLIQKSEPLDAVLIEDELEELHRYCQEGLEDEKEASENETDMEDPREIQTDSWRKRGESEEPSSPQSLCHLVAPGHERSGCETPVSVDSIPLEWDHTGDVGGSSSHEEDEEGPYYSALSGKSISDGHSWHVPDSPSCPEHHYKQMEGDRNVPPVPPASSTPYKPPYVSLNFTGSTAYVCAFDRWEMIQAQELHNKLKIKQNLQQLNSDISAITTWLKKTEAELEMLKMAKPPSDIQEIELRVKRLQEILKAFDTYKALVVSVNVSSKEFLQTESPESTELQSRLRQLSLLWEAAQGAVDSWRGGLRQSLMQCQDFHQLSQNLLLWLASAKNRRQKAHVTDPKADPRALLECRRELMQLEKELVERQPQVDMLQEISNSLLIKGHGEDCIEAEEKVHVIEKKLKQLREQVSQDLMALQGTQNPASPLPSFDEVDSGDQPPATSVPAPRAKFLYPAVQSSENYRRRGGDREQGPRQHTATALLPLKGGPGSPTPAAAPPAAAAPGLPAALLRRRLQLHSGQQLCPVLLPHAEVHQWATPHIEGIAGHSATPPA

SEQ ID NO: 48870 - protein, 44 aa, Homo sapiens
MMESRSVSQAGVQWRDLGSPQPPPPGFKQFSHFSLLSSWDYRTT

SEQ ID NO: 48871 - protein, 723 aa, Homo sapiens
MSAANPETPNSTISREASTQSSSAAASQGWVLPEGKIVPNTVFVGGIDARMDETEIGSCFGRYGSVKEVKIITNRTGVSKGYGFVSFVNDVDVQKIVGSQIHFHGKKLKLGPAIRKQKLCARHVQPRPLVVNPPPPPQFQNVWRNPNTETYLQPQITPNPVTQHVQSAANPETPNSTISREASTQSSSAAASQGWVLPEGKIVPNTVFVGGIDARMDETEIGSCFGRYGSVKEVKIITNRTGVSKGYGFVSFVNDVDVQKIVGSQIHFHGKKLKLGPAIRKQKLCARHVQPRPLVVNPPPPPQFQNVWRNPNTETYLQPQITPNPVTQHVQAYSAYPHSPGQVITGCQLLVYNYQEYPTYPDSAFQVTTGYQLPVYNYQPFPAYPRSPFQVTAGYQLPVYNYQAFPAYPNSPFQVATGYQFPVYNYQPFPAYPSSPFQVTAGYQLPVYNYQAFPAYPNSPFQVATGYQFPVYNYQAFPAYPNSPVQVTTGYQLPVYNYQAFPAYPNSPFQVATGYQFPVYNYQAFPAYPNSPVQVTTGYQLPVYNYQAFPAYPSSPFQVTTGYQLPVYNYQAFPAYPSSPFQVTTGYQLPVYNYQAFPAYPSSPFQVTTGYQLPVYNYQAFPAYPSSPFQVTTGYQLPVYNYQAFPAYPSSPFQVTTGYQLPVYNYQAFPAYPNSAVQVTTGYQFHVYNYQMPPQCPVGEQRRNLWTEAYKWWYLVCLIQRRD

SEQ ID NO: 48872 - protein, 149 aa, Homo sapiens
PPRNQVQGTCSTTLIAIAGMTCASCVHSIEGMISQLEGVQQISVSLAEGTATVLYNPSVISPEELRAAIEDMGFEASVVSETECCCVSQAGLELLASSNPPASASQSAGIAGVSHYAQPPSWVLIRGSTKSDYILEDWCGVTVQCPWRQ

SEQ ID NO: 48873 - protein, 146 aa, Homo sapiens
MGSSRLAALLLPLLLIVIDLSDSAGIGFRHLPHWNTRCPLASHTVFNGASSTSWCRNPKSLPHSSSIGDTRCQHLLRGSCCLVVTCLRRAITFPSPPQTSPTRDFALKGPNLRIQRHGKVFPDWTHKGMEDPSSPLICCLRPGLFG

SEQ ID NO: 48874 - protein, 129 aa, Homo sapiens
  MOD_RES (1)..(1): Any amino acid
XARRTRTKVGDAVKLAEEVPPPPEGLIPAPPVPETTPTPPTKTGTWEAPVDSSTSGLEQDVAQLNIAEQNWSPGQPSFLQPRELRGMPNHIHMGAGPPPQFNRMEEMLTLQISIKYLPCTKCFSTPKGR

SEQ ID NO: 48875 - protein, 455 aa, Homo sapiens
MKRTPTAEEREREAKKLRLLEELEDTWLPYLTPKDDEFYQQWQLKYPKLILREASSVSEELHKEVQEAFLTLHKHGCLFRDLVRIQGKDLLTPVSRILIGNPGCTYKYLNTRLFTVPWPVKGSNIKHTEAEIAAACETFLKLNDYLQIETIQALEELAAKEKANEDAVPLCMSADFPRVGMGSSYNGQDEVDIKSRAAYNVTLLNFMDPQKMPYLKEEPYFGMGKMAVSWHHDENLVDRSAVAVYSYSCEGPEEESEDDSHLEGRDPDIWHVGFKISWDIETPGLAIPLHQGDCYFMLDDLNATHQHCVLAGSQPRFSSTHRVAECSTGTLDYILQRCQLALQNVCDDVDNDDVSLKSFEPAVLKQGEEIHNEVEFEWLRQFWFQGNRYRKCTDWWCQPMAQLEALWKKMEGVTNAVLHEVKREGLPVEQRNEILTAILASLTARQNLRREWHAS

SEQ ID NO: 48876 - protein, 91 aa, Homo sapiens
MDLKEQPGNTISAGQEDFPSVLLETAASLPSLSPLSAASFKEHEYLGNLSTVLPTEGTLQENVSEASKEVSEKAKTLLIDRDLTEFSELEY

SEQ ID NO: 48877 - protein, 29 aa, Homo sapiens
MNGRADFREPNAEVPRPIPHIGPDYIPTE

SEQ ID NO: 48878 - protein, 98 aa, Homo sapiens
RKTLLSTDHAFPYIKTRIRVCHREEELLEQSKFPKGRPLSPQGPKLYLEEPAPGPQLSVLRGESALVPTGLWGDHTVLGAGPSAPVSPSVCTDASSLF

SEQ ID NO: 48879 - protein, 54 aa, Homo sapiens
MSQQDAVAALSERLLVAAYKGQTENVVQLINKGARVAVTKGDQTALHRATVVGN

SEQ ID NO: 48880 - protein, 155 aa, Homo sapiens
MNEAKVKETLRRCGASGDECGRLQYALTCLRKVTGLGGEHKEDSSWSSLDARRESGSGPSTDTLSAASLPWPPGSSQLGRAGNSAQGPRSISVSALPASDSPTPSFSEGLSDTCIPLHASGRLTPRALHSFITPPTTPQLRRHTKLKPPRTPPPP

SEQ ID NO: 48881 - protein, 61 aa, Homo sapiens
  MOD_RES (1)..(1): Any amino acid
XKEQEKEKKSVVWLCCPGWRTVAQSQLTAALTSWSQICVEGNIASGKTTCLEFFSNATDVE

SEQ ID NO: 48882 - protein, 39 aa, Homo sapiens
  MOD_RES (1)..(1): Any amino acid
XQEEEARRAAAASAAEAGIATTGTEGERGGIRSPGTAGC

SEQ ID NO: 48883 - protein, 1257 aa, Homo sapiens
MFSLHLPSGGSYEYHLGRSRRKSVPGGKQYSMEGAPAAPFRPSQGFLSRRLKSSIKRTKSQPKLDRTSSFRQILPRFRSADHDRARLMQSFKESHSHESLLSPSSAAEALELNLDEDSIIKPVHSSILGQEFCFEVTTSSGTKCFACRSAAERDKWIENLQRAVKPNKDNSRRVDNVLKLWIIEARELPPKKRYYCELCLDDMLYARTTSKPRSASGDTVFWGEHFEFNNLPAVRALRLHLYRDSDKKRKKDKAGYVGLVTVPVATLAGRHFTEQWYPVTLPTGSGGSGGMGSGGGGGSGGGSGGKGKGGCPAVRLKARYQTMSILPMELYKEFAEYVTNHYRMLCAVLEPALNVKGKEEVASALVHILQSTGKAKDFLSDMAMSEVDRFMEREHLIFRENTLATKAIEEYMRLIGQKYLKDAIGEFIRALYESEENCEVDPIKCTASSLAEHQANLRMCCELALCKVVNSHCVFPRELKEVFASWRLRCAERGREDIADRLISASLFLRFLCPAIMSPSLFGLMQEYPDEQTSRTLTLIAKVIQNLANFSKFTSKEDFLGFMNEFLELEWGSMQQFLYEISNLDTLTNSSSFEGYIDLGRELSTLHALLWEVLPQLSKEALLKLGPLPRLLNDISTALRNPNIQRQPSRQSERPRPQPVVLRGPSAEMQGYMMRDLNSSIDLQSFMARGLNSSMDMARLPSPTKEKPPPPPPGGGKDLFYVSRPPLARSSPAYCTSSSDITEPEQKMLSVNKSVSMLDLQGDGPGGRLNSSSVSNLAAVGDLLHSSQASLTAALGLRPAPAGRLSQGSGSSITAAGMRLSQMGVTTDGVPAQQLRIPLSFQNPLFHMAADGPGPPGGHGGGGGHGPPSSHHHHHHHHHHRGGEPPGDTFAPFHGYSKSEDLSSGVPKPPAASILHSHSYSDEFGPSGTDFTRRQLSLQDNLQHMLSPPQITIGPQRPAPSGPGGGSGGGSGGGGGGQPPPLQRGKSQQLTVSAAQKPRPSSGNLLQSPEPSYGPARPRQQSLSKEGSIGGSGGSGGGGGGGLKPSITKQHSQTPSTLNPTMPASERTVAWVSNMPHLSADIESAHIEREEYKLKEYSKSMDESRLDRVKEYEEEIHSLKERLHMSNRKLEEYERRLLSQEEQTSKILMQYQARLEQSEKRLRQQQAEKDSQIKSIIGRLMLVEEELRRDHPAMAEPLPEPKKRLLDAQERQLPPLGPTNPRVTLAPPWNGLAPPAPPPPPRLQITENGEFRNTADH

SEQ ID NO: 48884 - protein, 143 aa, Homo sapiens
MEINTKLLISVTCISFFTFQLLFYFVSYWFSAKVSPGFNSLSFKKKIEWNSRVVSTCHSLVVGIFGLYIFLFDEATKADPLWGGPSLANVNIAIASGYLISDLSIIILYWKVIGDKFFIMHHCASLYAYYLVLKNGVLAYIGN

SEQ ID NO: 48885 - protein, 275 aa, Homo sapiens
MAAAMPLALLVLLLLGPGGWCLAEPPRDSLREELVITPLPSGDVAATFQFRTRWDSELQREGDTDHYFLRYAVLPREVVCTENLTPWKKLLPCSSKAGLSVLLKADRLFHTSYHSQAVHIRPVCRNARCTSISWELRQTLSVVFDAFITGQGKKDWSLFRMFSRTLTEPCPLASESRVYVDITTYNQDNETLEVHPPPTTTYQDVILGTRKTYAIYDLLDTAMINNSRNLNIQLKWKRPPENGYIHYQPAQDRLQPHLLEMLIQLPANSVTKVSI

SEQ ID NO: 48886 - protein, 315 aa, Homo sapiens
MFQFHAGSWESWCCCCLIPADRPWDRGQHWQLEMADTRSVHETRFEAAVKVIQSLPKNGSFQPTNEMMLKFYSFYKQATEGPCKLSRPGFWDPIGRYKWDAWSSLGDMTKEEAMIAYVEEMKKIIETMPMTEKVEELLRVIGPFYEIVEDKKSGRSSDITSVRLEKISKCLEDLGNVLTSTPNAKTVNGKAESSDSGAESEEEEAQEEVKGAEQSDNDKKMMKKSADHKNLEVIVTNGYDKDGFVQDIQNDIHASSSLNGRSTEEVKPIDENLGQTGKSAVCIHQVFRQLYVQQWTISVLLGWSFQSTHGKFWIS

SEQ ID NO: 48887 - protein, 147 aa, Homo sapiens
MPNIVLFSGSSHQDLSQRVADRLGLELGKVVTKKFSNQETSVEIGESVRGEDVYIIQSGCGEINDNLMELLIMINACKIASSSRVTAVIPCFPYARQDKKDKSRAPISAKLVANMLSVAGADHIITMDLHASQIQGKHCRVEELYHC

SEQ ID NO: 48888 - protein, 117 aa, Homo sapiens
  MOD_RES (1)..(1): Any amino acid
XLLSPDLKFIEACLRCLRTIFTSPVTPEELLYTDATVIPHLMALLSRSRYTQEYICQIFSHCCKGPDHQTILFNHGAVQNIAHLLTSLSYKVRMQALKCFSVLAFENPQVSMTLVNV

SEQ ID NO: 48889 - protein, 463 aa, Homo sapiens
  MOD_RES (1)..(1): Any amino acid
XAVILWFQLALCFGPAQLTGGFDDLQVCADPGIPENGFRTPSGGVFFEGSVARFHCQDGFKLKGATKRLCLKHFNGTLGWIPSDNSICVQEDCRIPQIEDAEIHNKTYRHGEKLIITCHEGFKIRYPDLHNMVSLCRDDGTWNNLPICQGCLRPLASSNGYVNISELQTSFPVGTVISYRCFPGFKLDGSAYLECLQNLIWSSSPPRCLALEAQVCPLPPMVSHGDFVCHPRPCERYNHGTVVEFYCDPGYSLTSDYKYITCQYGEWFPSYQVYCIKSEQTWPSTHETLLTTWKIVAFTATSVLLVLLLVILARMFQTKFKAHFPPRGPPRSSSSDPDFVVVDGVPVMLPSYDEAVSGGLSALGPGYMASVGQGCPLPVDDQSPPAYPGSGDTDTGPGESETCDSVSGSSELLQSLYSPPRCQESTHPASDNPDIIASTAEEVASTSPGIDIADEIPLMEEDP

SEQ ID NO: 48890 - protein, 75 aa, Homo sapiens
MTRWSSYLLGWTTFLLYSYESSGGISALVPGFPCHFPFNYKNKNYFNCTNEGSKENLVWCATSYNYDQDHTWVYC

SEQ ID NO: 48891 - protein, 49 aa, Homo sapiens
MALLVRVLRNQTSISQWVPVCSRLIPVSPTQGQGDRALSRTSQTGSCSC

SEQ ID NO: 48892 - protein, 177 aa, Homo sapiens
MAEAEEQEEESEEEPKLKYERLSNGVTEILQKDAASCMTVHDKFLALGTHYGKVYLLDVQGNITQKFDVSPVKINQISLDESGEHMGVCSEDGKVQVFGLYSGEEFHETFDCPIKIIAVHPHFVRSSCKQFVTGGKKLLLFERSWMNRWKSAVLHEGEGNIRSVKWRGHLIAWANNM

SEQ ID NO: 48893 - protein, 47 aa, Homo sapiens
MSPVDDTFISGSLDKTIRLWDLRSPNCQGLMHLQGKPVCSFDPEGLI

SEQ ID NO: 48894 - protein, 433 aa, Homo sapiens
MRFTFPLMAIVLEIAMIVLFGLFVEYETDQTVLEQLNITKPTDMGIFFELYPLFQDVHVMIFVGFGFLMTFLKKYGFSSVGINLLVAALGLQWGTIVQGILQSQGQKFNIGIKNMINADFSAATVLISFGAVLGKTSPTQMLIMTILEIVFFAHNEYLVSEIFKASDIGASMTIHAFGAYFGLAVAGILYRSGLRKGHENEESAYYSDLFAMIGTLFLWMFWPSFNSAIAEPGDKQCRAIVNTYFSLAACVLTAFAFSSLVEHRGKLNMVHIQNATLAGGVAVGTCADMAIHPFGSMIIGSIAGMVSVLGYKFLTPLFTTKLRIHDTCGVHNLHGLPGVVGGLAGIVAVAMGASNTSMAMQAAALGSSIGTAVVGGLMTGLILKLPLWGQPSDQNCYDDSVYWKVLYSILNKNVNDDSISESFTHFKPRYLCA

SEQ ID NO: 48895 - protein, 127 aa, Homo sapiens
MSFPPHLNRPPMGIPALPPGIPPPQFPGFPPPVPPGTPMIPVPMSIMAPAPTVLVPTVSMVGKHLGARKDHPGLKAKENDENCGPTTTVFVGNISEKASDMLIRQLLAKCGLVLSWKRVQGASGKLQ

SEQ ID NO: 48896 - protein, 417 aa, Homo sapiens
MGGAVVDEGPTGVKAPDGGWGWAVLFGCFVITGFSYAFPKAVSVFFKELIQEFGIGYSDTAWISSILLAMLYGTGLGLALNFQPSLIMLNRYFSKRRPMANGLAAAGSPVFLCALSPLGQLLQDRYGWRGGFLILGGLLLNCCVCAALMRPLVVTAQPGSGPPRPSRRLLDLSVFRDRGFVLYAVAASVMVLGLFVPPVFVVSYAKDLGVPDTKAAFLLTILGFIDIFARPAAGFVAGLGKVRPYSVYLFSFSMFFNGLADLAGSTAGDYGGLVVFCIFFGISYGMVGALQFEVLMAIVGTHKFSSAIGLVLLMEAVAVLVGPPSGGKLLDATHVYMYVFILAGAEVLTSSLILLLGNFFCIRKKPKEPQPEVAAAEEEKLHKPPADSGVDLREVEHFLKAEPEKNGEVVHTPETSV

SEQ ID NO: 48897 - protein, 775 aa, Homo sapiens
MAPYSLLVTRLQKALGVRQYHVASVLCQRAKVAMSHFEPNEYIHYDLLEKNINIVRKRLNRPLTLSEKIVYGHLDDPASQEIERGKSYLRLRPDRVAMQDATAQMAMLQFISSGLSKVAVPSTIHCDHLIEAQVGGEKDLRRAKDINQEVYNFLATAGAKYGVGFWKPGSGIIHQIILENYAYPGVLLIGTDSHTPNGGGLGGICIGVGGADAVDVMAGIPWELKCPKVIGVKLTGSLSGWSSPKDVILKVAGILTVKGGTGAIVEYHGPGVDSISCTGMATICNMGAEIGATTSVFPYNHRMKKYLSKTGREADEFKDHLVPDPGCHYDQLIEINLSELKPHINGPFTPDLAHPVAEVGKVAEKEGWPLDIRVGLIGSCTNSSYEDMGRSAAVAKQALAHGLKCKSQFTITPGSEQIRATIERDGYAQILRDLGGIVLANACGPCIGQWDRKDIKKGEKNTIVTSYNRNFTGRNDANPETHAFVTSPEIVTALAIAGTLKFNPETDYLTGTDGKKFRLEAPDADELPKGEFDPGQDTYQHPPKDSSGQHVDVSPTSQRLQLLEPFDKWDGKDLEDLQILIKVKGKCTTDHISAAGPWLKFRGHLDNISNNLLIGAINIENGKANSVRNAVTQEFGPVPDTARYYKKHGIRWVVIGDENYGEGSSREHAALEPRHLGGRAIITKSFARIHETNLKKQGLLPLTFADPADYNKIHPVDKLTIQGLKDFTPGKPLKCIIKHPNGTQETILLNHTFNETQIEWFRAGSALNRMKELQQ

SEQ ID NO: 48898 - protein, 176 aa, Homo sapiens
MADMQNLVERLERAVGRLEAVSHTSDMHRGYADSPSKAGAAPYVQAFDSLLAGPVAEYLKISKEIGGDVQKHAEMVHTGLKLERALLVTASQCQQPAENKLSDLLAPISEQIKEVITFREKNRGSKLFNHLSAVSESIQALGWVAMAPKPGPYVKEMNDAAMFYTNRVLKEYKDVD

SEQ ID NO: 48899 - protein, 129 aa, Homo sapiens
MSKAHKPWPYRRRSQFSSRKYLKKEMNSFQQQPPPFGTVPPQMMFPPNWQGAEKDAAFLAKDFNFLTLNNQPPPGNRSQPRAMGPENNLYSQYEQKVRPCIDLIDSLRALGVEQDLALPAIAVIGDQSS

SEQ ID NO: 48900 - protein, 298 aa, Homo sapiens
  MOD_RES (1)..(1): Any amino acid
XNFLNEAVDYVIRHLIQENNRVKTRIFLHVLSELKEVEPKLAAWIQKLNSFGLDATGTFFSRYGASLKLLDFSIMTFLWNEKYGHKLDSIEGKQLDYFSEPASLKEARCLIWLLEEHRDKFPALHSALDEFFDIMDIFTASWERLHVTLTESINSRCTVLRKQDSGEAPFSSTKVKNKSKKKKPKDSKPMLVGSGTTSVTSNNEIITSSEDHSNRNSDSAGPFAVPDHLRQDVEEFEALYDQHSNEYVVRNKKLWDMNPKQKCSTLYDYFSQFLEEHGPLDMSNKMFSAEYEFFPEET

SEQ ID NO: 48901 - protein, 2190 aa, Homo sapiens
EEALKVSPVSIPAEQKTGIPIGLSSSYSHSHKEKLKISTVHIPDDQKTEFPAATLSSYSQIEKPKISTVIGPNDQKTPSQTAFHSSYSQTVKPNILFQQQLPDRDQSKGILKISAVPELTDVNTGKPVSLSSSYFHREKSNIFSPQELPGSHVTEDVLKVSTIPGPAGQKTVLPTALPSSFSHREKPDIFYQKDLPDRHLTEDALKISSALGQADQITGLQTVPSGTYSHGENHKLVSEHVQRLIDNLNSSDSSVSSNNVLLNSQADDRVVINKPESAGFRDVGSEEIQDAENSAKTLKEIRTLLMEAENMALKRCNFPAPLARFRDISDISFIQSKKVVCFKEPSSTGVSNGDLLHRQPFTEESPSSRCIQKDIGTQTNLKCRRGIENWEFISSTTVRSPLQEAESKVSMALEETLRQYQAAKSVMRSEPEGCSGTIGNKIIIPMMTVIKSDSSSDASDGNGSCSWDSNLPESLESVSDVLLNFFPYVSPKTSITDSREEEGVSESEDGGGSSVDSLAAHVKNLLQCESSLNHAKEILRNAEEEESRVRAHELNEDDRRKVEEIKAELFGHGRTTDLSKGLQSPRGMGCKPEAVCSHIIIESHEKGCFRTLTSEHPQLDRHPCAFRSAGPSEMTRGRQNPSSCRAKHVNLSASLDQNNSHFKVWNSLQLKSHSPFQNFIPDEFKISKGLRMPFDEKMDPWLSELVEPAFVPPKEVDFHSSSQMPSPEPMKKFTTSITFSSHRHSKCISNSSVVKVGVTEGSQCTGASVGVFNSHFTEEQNPPRDLKQKTSSPSSFKMHSNSQDKEVTILAEGRRQSQKLPVDFERSFQEEKPLERSDFTGSHSEPSTRANCSNFKEIQISDNHTLISMGRPSSTLGVNRSSSRLGVKEKNVTITPDLPSCIFLEQRELFEQSKAPRADDHVRKHHSPSPQHQDYVAPDLPSCIFLEQRELFEQCKAPYVDHQMRENHSPLPQGQDSIASDLPSPISLEQCQSKAPGVDDQMNKHHFPLPQGQDCVVEKNNQHKPKSHISNINVEAKFNTVVSQSAPNHCTLAASASTPPSNRKALSCVHITLCPKTSSKLDSGTLDERFHSLDAASKARMNSEFNFDLHTVSSRSLEPTSKLLTSKPVAQDQESLGFLGPKSSLDFQVVQPSLPDSNTITQDLKTIPSQNSQIVTSRQIQVNISDFEGHSNPEGTPVFADRLPEKMKTPLSAFSEKLSSDAVTQITTESPEKTLFSSEIFINAEDRGHEIIEPGNQKLRKAPVKFASSSSVQQVTFSRGTDGQPLLLPYKPSGSTKMYYVPQLRQIPPSPDSKSDTTVESSHSGSNDAIAPDFPAQVLGTRDDDLSATVNIKHKEGIYSKRVVTKASLPVGEKPLQNENADASVQVLITGDENLSDKKQQEIHSTRAVTEAAQAKEKESLQKDTADSSAAAAAEHSAQVGDPEMKNLPDTKAITQKEEIHRKKTVPEEAWPNNKESLQINIEESECHSEFENTTRSVFRSAKFYIHHPVHLPSDQDICHESLGKSVFMRHSWKDFFQHHPDKHREHMCLPLPYQNMDKTKTDYTRIKSLSINVNLGNKEVMDTTKSQVRDYPKHNGQISDPQRDQKVTPEQTTQHTVSLNELWNKYRERQRQQRQPELGDRKELSLVDRLDRLAKILQNPITHSLQVSESTHDDSRGERSVKEWSGRQQQRNKLQKKKRFKSLEKSHKNTGELKKSKVLSHHRAGRSNQIKIEQIKFDKYILSKQPGFNYISNTSSDCRPSEESELLTDTTTNILSGTTSTVESDILTQTDREVALHERSSSVSTIDTARLIQAFGHERVCLSPRRIKLYSSITNQQRRYLEKRSKHSKKVLNTGHPLVTSEHTRRRHIQVANHVISSDSISSSASSFLSSNSTFCNKQNVHMLNKGIQAGNLEIVNGAKKHTRDVGITFPTPSSSEAKLEENSDVTSWSEEKREEKMLFTGYPEDRKLKKNKKNSHEGVSWFVPVENVESRSKKENVPNTCGPGISWFEPITKTRPWREPLREQNCQGQHLDGRGYLAGPGREAGRDLLRPFVRATLQESLQFHRPDFISRSGERIKRLKLIVQERKLQSMLQTERDALFNIDRERQGHQNRMCPLPKRVFLAIQKNKPISKKEMIQRSKRIYEQLPEVQKKREEEKRKSEYKSYRLRAQLYKKRVTNQLLGRKVPWD

SEQ ID NO: 48902 - protein, 105 aa, Homo sapiens
MRKAGVAHSKSSKDMESHVFLKAKTRDEYLSLVARLIIHFRDIHNKKSQASVSDPMNALQSLTGGPAAGAAGIGMPPRGPGQSLGGMGSLGAMGQPMSLSGQPPP

SEQ ID NO: 48903 - protein, 109 aa, Homo sapiens
MILSLLFSLGGPLGWGLLGAWAQASSTSLSDLQSSRTPGVWKAEAEDTGKDPVGRIMDSRIPALLRQEARTGGSALAPPVDLGVAQQPSPLACFPVTGAPTQCPSWSPY

SEQ ID NO: 48904 - protein, 127 aa, Homo sapiens
CPTTVANVETVAVSPTICRRGGTWFAGFGRERNSGTKLFNISGHVNHPCTVEEEMSVPLKELIEKHAGGVTGGWDNLLAVIPGGSSTPLIPKSVCETVLMDFDALVQAQTGLGTAAVIVMDRSVWTG

SEQ ID NO: 48905 - protein, 146 aa, Homo sapiens
MASNHKSSAARPVSRGGVGLTGRPPSGIRPLSGNIRVATAMPPGTARPGSRGCPIGTGGVLSSQIKVAHRPVTQQGLTGMKTGTKGPQRQILDKSYYLGLLRRSFACHPSWSAMMGSHVTATSTAWIQVILLPQPRACNLSKISEL

SEQ ID NO: 48906 - protein, 1508 aa, Homo sapiens
  MOD_RES (1)..(1): Any amino acid
XFEFCAAGVRWFSELCPRLPRAGARERVRGFLTQTRVRSAQSPGGSLPSDDLGEMESSSSDYYNKDNEEESLLANVASLRHELKITEWSLQSLGEELSSVSPSENSDYAPNPSRSEKLILDVQPSHPGLLNYSPYENVCKISGSSTDFQKKPRDKMFSSSAPVDQEIKSLREKLNKLRQQNACLVTQNHSLMTKFESIHFELTQSRAKVSMLESAQQQAASVPILEEQIINLEAEVSAQDKVLREAENKLEQSQKMVIEKEQSLQESKEECIKLKVDLLEQTKQGKRAERQRNEALYNAEELSKAFQQYKKKVAEKLEKVQAEEEILERNLTNCEKENKRLQERCGLYKSELEILKEKLRQLKEENNNGKEKLRIMAVKNSEVMAQLTESRQSILKLESELENKDEILRDKFSLMNENRELKVRVAAQNERLDLCQQEIESSRVELRSLEKIISQLPLKRELFGFKSYLSKYQMSSFSNKEDRCIGCCEANKLVISELRIKLAIKEAEIQKLHANLTANQLSQSLITCNDSQESSKLSSLETEPVKLGGHQVESVKDQNQHTMNKQYEKERQRLVTGIEELRTKLIQIEAENSDLKVNMAHRTSQFQLIQEELLEKASNSSKLESEMTKKCSQLLTLEKQLEEKIVAYSSIAAKNAELEQELMEKNEKIRSLETNINTEHEKICLAFEKAKKIHLEQHKEMEKQIERLEAQLEKKDQQFKEQEKTMSMLQQDIICKQHHLESLDRLLTESKGEMKKENMKKDEALKALQNQVSEETIKVRQLDSALEICKEELVLHLNQLEGNKEKFEKQLKKKSEEVYCLQKELKIKNHSLQETSEQNVILQHTLQQQQQMLQQETIRNGELEDTQTKLEKQVSKLEQELQKQRESSAEKLRKMEEKCESAAHEADLKRQKVIELTGTARQVKIEMDQYKEELSKMEKEIMHLKRDGENKAMHLSQLDMILDQTKTELEKKTNAVKELEKLQHSTETELTEALQKREVLETELQNAHGELKSTLRQLQELRDVLQKAQLSLEEKYTTIKDLTAELRECKMEIEDKKQELLEMDQALKERNWELKQRAAQVTHLDMTIREHRGEMEQKIIKLEGTLEKSELELKECNKQIESLNDKLQNAKEQLREKEFIMLQNEQEISQLKKEIERTQQRMKEMESVMKEQEQYIATQYKEAIDLGQELRLTREQVQNSHTELAEARHQQVQAQREIERLSSELEDMKQLSKEKDAHGNHLAEELGASKVREAHLEARMQAEIKKLSAEVESLKEAYHMEMISHQENHAKWKISADSQKSSVQQLNEQLEKAKLELEEAQDTVSNLHQQVQDRNEVIEAANEALLTKESELTRLQAKISGHEKAEDIKFLPAPFTSPTEIMPDVQDPKFAKCFHTSFSKCTKLRRSISASDLTFKIHGDEDLSEELLQDLKKMQLEQPSTLEESHKNLTYTQPDSFKPLTYNLEADSSENNDFNTLSGMLRYINKEVRLLKKSSMQTGAGLNQGENV

SEQ ID NO: 48907 - protein, 818 aa, Homo sapiens
  MOD_RES (1)..(1): Any amino acid
XCTEILNLPSAARRLYNEKGKEIFALKDLQRDELVYVSCGELWINPDLSIAQQKKQIFLRNLESDIAKIQIFCSTHKIEALVLEVQSDIVSGSKLAVHKPVAIFGEEKQVTEPEEKQMQEDPLTTENASSEILDSHVRAHLRMKACHTLPRYAWQETSHDFDEDDSLPKKTEKGLFENVEPQKKHSCSPKHSKLHKHCHQQFEYRDGQIISHAAPQLVLGVQGPNLRSGMEVVLVEKKSDGSHQRWIHQEDSRTFHLVSNPDLVLAVSMTKTRNEVCGYPVIVQKYKPYNNGAANQKWHYMKNIKALVAFHSTALDKEITSANYAGVCTSSVIKEENIDQPGYCYLSPDGKRKTMLCLACGQSMRTEKGLKQLLPGVPFLCISGTKTQKPFLQGPFKVISVAEVDLSCDKAEKTLSYYQARLLSLRMKTCTQAASHSGMAATHQKAVKIIAYKNGDGYRNGKLIVAGTFPMLLTECTEQLGLARAASKVYTKDGTPIFTLRDLVLWALDESFLQRDSEKQKQDAAPVGKEQIIVEKNPRMKVKNRLFAKSVTSDSLDGIDKSLLTLILRNPIAIWVSCGEPFLPPNALQKAEKLEKQNWLKKDRILADLDTMRHKMRQLKGRRVAACQPATMVPTKSPVQPVVVEGGWTEQTQQEIKLMELIRHTEAHLSEIQEMESKINFPIATKRIAVKPSNLYKQPNTKRVWIYLNGGRPEDGTYAWGKTISELLQDCSSRLKMTHPARALYTPSGEPIQSWDDIERDMVICVSMGHGFKTPKELKQLMEIRANYARIRRQQGPQATDIVVSPSTKLLSLAHLHN

SEQ ID NO: 48908 - protein, 1588 aa, Homo sapiens
MVQKKKFCPRLLDYLVIVGARHPSSDSVAQTPELLRRYPLEDHTEFPLPPDVVFFCQPEGCLSVRQRRMSLRDDTSFVFTLTDKDTGVTRYGICVNFYRSFQKRISKEKGEGGAGSRGKEGTHATCASEEGGTESSESGSSLQPLSADSTPDVNQSPRGKRRAKAGSRSRNSTLTSLCVLSHYPFFSTFRECLYTLKRLVDCCSERLLGKKLGIPRGVQRDTMWRIFTGSLLVEEKSSALLHDLREIEAWIYRLLRSPVPVSGQKRVDIEVLPQELQPALTFALPDPSRFTLVDFPLHLPLELLGVDACLQVLTCILLEHKVVLQSRDYNALSMSVMAFVAMIYPLEYMFPVIPLLPTCMASAEQLLLAPTPYIIGVPASFFLYKLDFKMPDDVWLVDLDSNRVIAPTNAEVLPILPEPESLELKKHLKQALASMSLNTQPILNLEKFHEGQEIPLLLGRPSNDLQSTPSTEFNPLIYGNDVDSVDVATRVAMVRFFNSANVLQGFQMHTRTLRLFPRPVVAFQAGSFLASRPRQTPFAEKLARTQAVEYFGEWILNPTNYAFQRIHNNMFDPALIGDKPKWYAHQLQPIHYRVYDSNSQLAEALSVPPERDSDSEPTDDSGSDSMDYDDSSSSYSSLGDFVSEMMKCDINGDTPNVDPLTHAALGDASEVEIDELQNQKEAEEPGPDSENSQENPPLRSSSSTTASSSPSTVIHGANSEPADSTEMDDKAAVGVSKPLPSVPPSIGKSNVDRRQAEIGEGSVRRRIYDNPYFEPQYGFPPEEDEDEQGESYTPRFSQHVSGNRAQKLLRPNSLRLASDSDAESDSRASSPNSTVSNTSTEGFGGIMSFASSLYRNHSTSFSLSNLTLPTKGAREKATPFPSLKGNRRALVDQKSSVIKHSPTVKREPPSPQGRSSNSSENQQFLKEVVHSVLDGQGVGWLNMKKVRRLLESEQLRVFVLSKLNRMVQSEDDARQDIIPDVEISRKVYKGMLDLLKCTVLSLEQSYAHAGLGGMASIFGLLEIAQTHYYSKEPDKRKRSPTESVNTPVGKDPGLAGRGDPKAMAQLRVPQLGPRAPSATGKGPKELDTRSLKEENFIASIGPEVIKPVFDLGETEEKKSQISADSGVSLTSSSQRTDQDSVIGVSPAVMIRSSSQDSEVSTVVSNSSGETLGADSDLSSNAGDGPGGEGSVHLASSRGTLSDSEIETNSATSTIFGKAHSLKPSIKEKLAGSPIRTSEDVSQRVYLYEGLLGKERSTLWDQMQFWEDAFLDAVMLEREGMGMDQGPQEMIDRYLSLGEHDRKRLEDDEDRLLATLLHNLISYMLLMKVNKNDIRKKVRRLMGKSHIGLVYSQQINEVLDQLANLNGRDLSIWSSGSRHMKKQTFVVHAGTDTNGDIFFMEVCDDCVVLRSNIGTVYERWWYEKLINMTYCPKTKVLCLWRRNGSETQLNKFYTKKCRELYYCVKDSMERAAARQQSIKPGPELGGEFPVQDLKTGEGGLLQVTLEGINLKFMHNQVFIELNHIKKCNTVRGVFVLEEFVPEIKEVVSHKYKTPMAHEICYSVLCLFSYVAAVHSSEEDLRTPPRPVSS

SEQ ID NO: 48909 - protein, 143 aa, Homo sapiens
MKHRLGFLLQKSDSCEHNSSHNKKDKVVICQRVSQEEVKKWAESLENLISHECGLAAFKAFLKSEYSEENIDFWISCEEYKKIKSPSKLSPKAKKIYNEFISVQATKEVNLDSCTREETSRNMLEPTITCFDEAQKKIFNLME

SEQ ID NO: 48910 - protein, 20 aa, Homo sapiens
MAWQGLVLAACLLMFPSTTA

SEQ ID NO: 48911 - protein, 196 aa, Homo sapiens
MAPKKPEPKKEAAKPAPAPAPAPAPAPAPAPEAPKEPAFDPKSVKIDFTADQIEEFKEAFSLFDRTPTGEMKITYGQCGDVLRALGQNPTNAEVLRVLGKPKPEEMNVKMLDFETFLPILQHISRNKEQGTYEDFVEGLRVFDKESNGTVMGAELRHVLATLGEKMTEAEVEQLLAGQEDANGCINYEAFVKHIMS

SEQ ID NO: 48912 - protein, 78 aa, Homo sapiens
MIRHAGAPARGDPTGPEILDAGFFLSKATSAKTNTIRWEELGIRWGRAPQPSHPLASICHTQDGRVKPERSFSGRKGR

SEQ ID NO: 48913 - protein, 93 aa, Homo sapiens
MPPAWSGESMDRGVVGLGSTKTQRGARAPPPQTAEGREGAPGAVVAMAPGSGARGAGDAGRGWSLLPLCASLFLSLFFFFWSVSVRGEAARRK

SEQ ID NO: 48914 - protein, 59 aa, Homo sapiens
  MOD_RES (1)..(1): Any amino acid
XEPQSVLQLPTSIAAGGEGLTDVSPETTTPEPPSSAAVSPGTEEPAGDTKKKIGCEFTP

SEQ ID NO: 48915 - protein, 293 aa, Homo sapiens
MDAQCSAKVNARKRRKEAPGPNGATEEDGVPSKVQRCAVGLRQPAPFSDEIEVDFSKPYVRVTMEEASRGTPCERPVRVYADGIFDLFHSGHARALMQAKNLFPNTYLIVGVCSDELTHNFKGFTVMNENERYDAVQHCRYVDEVVRNAPWTLTPEFLAEHRIDFVAHDDIPYSSAGSDDVYKHIKEAGMFAPTQRTEGISTSDIITRIVRDYDVYARRNLQRGYTAKELNVSFINEKKYHLQERVDKVKKKVKDVEEKSKEFVQKVEEKSIDLIQKWEEKSREFIGSFLEMF

SEQ ID NO: 48916 - protein, 181 aa, Homo sapiens
MLHTTQLYQHVPETRWPIVYSPRYNITFMGLEKLHPFDAGKWGKVINFLKEAIRRKVELEWGTEDDEYLDKVERNIKKSLQEHLPDVVVYNAGTDILEGDRLGGLSISPAGIVKRDELVFRMVRGRRVPILMVTSGGYQKRTARIIADSILNLFGLGLIGPESPSVSAQNSDTPLLPPAVP

SEQ ID NO: 48917 - protein, 145 aa, Homo sapiens
MCDFTEDQTAEFKEAFQLFDRTGDGKILYSQCGDVMRALGQNPTNAEVLKVLGNPKSDEMNVKVLDFEHFLPMLQTVAKNKDQGTYEDYVEGLRVFDKEGNGTVMGAEIRHVLVTLGEKMTEEEVEMLVAGHEDSNGCINYEGKR

SEQ ID NO: 48918 - protein, 120 aa, Homo sapiens
MMRALGYPRHISMENFRTPNFGLVSEVLLWLVKRYEPQTDIPPDVDTEQDRVFFIKAIAQFMATKAHIKLNTKKLYQADGYAVKELLKITSVLYNAMKTKGMEGSEIVEEDVNKFKFDLG

SEQ ID NO: 48919 - protein, 186 aa, Homo sapiens
  MOD_RES (1)..(1): Any amino acid
XQAAFREGLEQAVRYAKALGCPRIHLMAGRVPQGADRIAVKAEMEAVFLENLRHAAGVLAQEDLVGLLEPINTRITDPQYFLDTPQQAAAILQKDIFHWQIMDGNLTGNIREFLPIVGHVQVAQVPGRGEPSSPGELNFPYLFQLLEDEGYKGFVGCEYQPRGDTVEGLSWLRSYWDRRGHPEAGQ

SEQ ID NO: 48920 - protein, 114 aa, Homo sapiens
  MOD_RES (1)..(1): Any amino acid
XDCSISSDKFEYLFNFDNTFEIHDDIEVLKRMGMSFGLESGKCSLEDLKLAKSLVPKALEGYITDISTGPSWLNQGLLLNSTQSVSNLDLTTGATLPQSRYVFFSGLERQTPEP

SEQ ID NO: 48921 - protein, 96 aa, Homo sapiens
MATLLRPVLRRLCGLPGLQRPAAEMPLRARSDGAGPLYSHHLPTSPLQKGLLAAGSAAMALYNPYRHDSWIPPKRTESESESAVEGEMGVKPKVCL

SEQ ID NO: 48922 - protein, 306 aa, Homo sapiens
MAVLAALLRSGARSRSPLLRRLVQDVMVAGGMESMSNVPYVMNRGSTPYGGVKLEDLIVKDGLTDVYNKIHMGSCAENTAKKLNIARNEQDAYAINSYTRSKAAWEAGKFGNEVIPVTVTVKGQPDVVVKEDEEYKRVDFSKVPKLKTVFQKENGTVTAANASTLNDGAAALVLMTADAAKRLNVTPLARIVAFADAAVEPIDFPIAPVYAASMVLKDVGLKKEDIAMWEVNEAFSLVVLANIKMLEIDPQKVNINGGAVSLGHPIGMSGARIVGHLTHALKQGEYGLASICNGGGGASAMLIQKL

SEQ ID NO: 48923 - protein, 86 aa, Homo sapiens
MALAVRVVYCGAGYKSKYLQLKKKLEDEFPGRLDICGEGTPQATGFFEVMVAGKLIHSKKKGDGYVDTESKFLKLVAAIKAALAQG

SEQ ID NO: 48924 - protein, 166 aa, Homo sapiens
MIRPKTENLDVIVNVSDTESWDQHVQKLNKFLEPYNDSIQAQKNDVCRPGRYYEQPDNGVLNYPKRACQFNRTQLGNCSGIGDSTHYGYSTGQPCVFIKMNRVINFYAGANQSMNVTCAGKRDEDAENLGNFVMFPANGNIDLMYFPYYGKKFHVNYTQPLVAVKF

SEQ ID NO: 48925 - protein, 449 aa, Homo sapiens
MSLTSAYQHKLAEKLTILNDRGQGVLIRMYNIKKTCSDPKSKPPFLLEKSMEPSLKYINKKFPNIDVRNSTQHLGPVHREKAEIIRFLTNYYQSFVDVMEFRDHVYELLNTIDACQCHFDINLNFDFTRSYLDLIVTYTSVILLLSRIEDRRILIGMYNCAHEMLHGHGDPSFARLGQMVLEYDHPLKKLTEEFGPHTKAVSGALLSLHFLFVRRNQGAEQWRSAQLLSLISNPPAMINPANSDTMACEYLSVEVMERWIIIGFLLCHGCLNSNSQCQKLWKLCLQGSLYITLIREDVLQVHKVTEDLFSSLKGYGKRVADIKESKEHVIANSGQFHCQRRQFLRMAVKELETVLADEPGLLGPKALFAFMALSFIRDEVTWLVRHTENVTKTKTPEDYADSSIAELLFLLEGIRSLVRRHIKVIQQYHLQYLARFDALVLSDIIQFLS

SEQ ID NO: 48926 - protein, 160 aa, Homo sapiens
MASRLTLLTLLLLLLAGDRASSNPNATSSSSQDPESLQDRGEGKVATTVISKMLFVEPILEVSSLPTTNSTTNSATKITANTTDEPTTQPTTEPTTQPTIQPTQPTTQLPTDSPTQPTTGSFCPGPVTLCSDLESHSTEAVLGDALVDFSLKLYHAFSAM

SEQ ID NO: 48927 - protein, 301 aa, Homo sapiens
DEAEVGTGRAGGPGTGARRETPLTRGKEVAGGQDGIGEEVLKMSTEEIIQRTRLLDSEIKIMKSEVLRVTHELQAMKDKIKENSEKIKVNKTLPYLVSNVIELLDVDPNDQEEDGANIDLDSQRKGKCAVIKTSTRQTYFLPVIGLVDAEKLKPGDLVGVNKDSYLILETLPTEYDSRVKAMEVDERPTEQYSDIGGLDKQIQELVEAIVLPMNHKEKFENLGIQPPKGVLMYGPPGTGKTLLARACAAQTKATFLKLAGPQLVQMFIGDGAKLVRDAFALAKEKAPSIIFIDELDAIGTK

SEQ ID NO: 48928 - protein, 243 aa, Homo sapiens
MPVIPALWEAEVRGSLEPKSSRPAWATWVFSPCSIMLEFPETMGFSKNQTGALPRLCDVLQVLWEEQDQCLQELSREQTGDLGTEQPVPGCEGMWDNISCWPSSVPGRMVEVECPRFLRMLTSRNGSLFRNCTQDGWSETFPRPNLACGVNVNDSSNEKRHSYLLKLKVMYTVGYSSSLVMLLVALGILCAFRRLHCTRNYIHMHLFVSFILRALSNFIKDAVLFSSDDVTYCDAHRAGCKLV

SEQ ID NO: 48929 - protein, 145 aa, Homo sapiens
MSSAPRRPAKGADSFCTPEPESLGPGTPGFPEQEEDELHRTLGVERFEEILQEAGSRGGEEPGRSYGEEDFEYHRQSSHHIHHPLSTHLPPDARRRKTPQGPGRKPRRRPGASPTGETPTIEEGEEDEDEASEAEGARALTQPSP

SEQ ID NO: 48930 - protein, 360 aa, Homo sapiens
  MOD_RES (1)..(1): Any amino acid
XTNKLEQPRGQEFWADLNAMNVYETTEFDQLRRLSTPPSSNVNSIYHTVWKFFCRDHFGWREYPESVIRLIEEANSRGLKEVRFMMWNNHYILHNSFFRREIKRRPLFRSCFILLPYLQTLGGVPTQAPPPLEATSSSQIICPDGVTSANFYPETWVYMHPSQDFIQVPVSAEDKSYRIIYNLFHKTVPEFKYRILQILRVQNQFLWEKYKRKKEYMNRKMFGRDRIINERHLFHGTSQDVVDGICKHNFDPRVCGKHATMFGQGSYFAKKASYSHNFSKKSSKGVHFMFLAKVLTGRYTMGSHGMRRPPPVNPGSVTSDLYDSCVDNFFEPQIFVIFNDDQSYPYFVIQYEEVSNTVSI

SEQ ID NO: 48931 - protein, 113 aa, Homo sapiens
  MOD_RES (1)..(1): Any amino acid
XAAGSSIAAPASTCRSCPTAACRAPGRTTASSEKLTSECIFREQFEENWYNTYSSNIYKHGDTGRRYFVALNKDGTPRDGARSKRHQKFTHFLPRPVDPERVPELYKDLLMYT

SEQ ID NO: 48932 - protein, 567 aa, Homo sapiens
MLGFLSRGPSMKLCMGLACVLSLWNTVSGIKGEAKKEKGMTFLPTTGKWVIRAPFQLTCLEIKMLRRKKMGHSRAALNPDLLLSGLREEERKEKGVAFLATTELPARSIDLSALNLTELVNGMLSRALKDSKKFFSLLSVTSYSSFAFHKFSVAVYNISNLKTVDPAKFPTRYCYCLNNRTNDLSDFTALLVDIIGNSTSYLTEIFKSTSILSVNQSNESDCIFICVMTGKSGRNLSDFWEIEEKYPIINYTFTSGLSGVLGAATRGTARTSKPTTKSQKTLPSTSPGHWTQSTPWASALRSSPWTETAAPSETEETLNTGRPPELPARATATWFSASHTLPALATRRVARTQWLTADRQTWASISSVPWAQTISEKKPGGSLWETRSSPPTTAGTEEAMNTTSLLAPAAEIMATPGSPSQASPTLGAFTHGTQTPSPTKATAPRYPQTGDLSAEWPFTAGEEPVLVPRPHQVSRCPQPLFKVGAMAAAPLTLAIQRLNPCLMELCQFFQQCLCMSQRSPRTEDMRYCLEYYSWFLKNATYICQRVKRVSHSHTLKQKCLENICKSV

SEQ ID NO: 48933 - protein, 551 aa, Homo sapiens
MLAFAARTVVKPLGFLKPFSLMKASSRFKAHQDALPRLPVPPLQQSLDHYLKALQPIVSEEEWAHTKQLVDEFQASGGVGERLQKGLERRARKTENWLSEWWLKTAYLQYRQPVVIYSSPGVMLPKQDFVDLQGQLRFAAKLIEGVLDFKVMIDNETLPVEYLGGKPLCMNQYYQILSSCRVPGPKQDTVSNFSKTKKPPTHITVVHNYQFFELDVYHSDGTPLTADQIFVQLEKIWNSSLQTNKEPVGILTSNHRNSWAKAYNTLIKDKVNRDSVRSIQKSIFTVCLDATMPRVSEDVYRSHVAGQMLHGGGSRLNSGNRWFDKTLQFIVAEDGSCGLVYEHAAAEGPPIVTLLDYVIEYTKKPELVRSPLVPLPMPKKLRFNITPEIKSDIEKAKQNLSIMIQDLDITVMVFHHFGKDFPKSEKLSPDAFIQMALQLAFDRHLLGLKLQAIEDLVSMPDIFMDTSYAIAMHFHLSTSQVPAKTDCVMFFGPVVPDGYGVCYNPMEAHINFSLSAYNSCAETNAARLAHYLEKALLDMRALLQSHPRAKL

SEQ ID NO: 48934 - protein, 753 aa, Homo sapiens
  MOD_RES (1)..(1): Any amino acid
XLEESMPEDQEPVSASTHIASSLGINPHVLQIMKASLLTDEEDVDMALDQRFSRLPSKADTSQEICSPRLPISASHSSKTRSLVGGLLQSKFTSGAFLSPSVSVQECRTPRAASLMNIPSTSSCLTESPFKVHLEKLSLRQRKPDEDMKLYQTPLELKLKHSTVHVDELCPLIVPNLGVAVIHDYADWVKEASGDLPEAQIVKHWSLTWTLCEALWGHLKELDSQLNEPREYIQILERRRAFSRWLSCTATPQIEEEVSLTQKNSPVEAVFSYLTGKRISEACSLAQQSGDHRLALLLSQFVGSQSVRELLTMQLVDWHQLQADSFIQDERLRIFALLAGKPVWQLSEKKQINVCSQLDWKRSLAIHLWYLLPPTASISRALSMYEEAFQNTSDSDRYACSPLPSYLEGSGCVIAEEQNSQTPLRDVCFHLLKLYSDRHYDLNQLLEPRSITADPLDYRLSWHLWEVLRALNYTHLSAQCEGVLQASYAGQLESEGLWEWAIFVLLHIDNSGIREKAVRELLTRHCQLLETPESWAKETFLTQKLRVPAKWIHEAKAVRAHMESDKHLEALCLFKAEHWNRCHKLIIRHLASDAIINENYDYLKGFLEDLAPPERSSLIQDWETSGLVYLDYIRVIEMLRHIQQVDCSGNDLEQLHIKVTSLCSRIEQIQCYSAKDRLAQSDMAKRVANLLRVVLSLHHPPDRTSDSTPDPQRVPLRLLAPHIGRLPMPEDYAMDELRSLTQSYLRELAVGSL

SEQ ID NO: 48935 - protein, 77 aa, Homo sapiens
MCVPGFRSSSNQDRFITNDGTVCIENVNANCHLDNVCIAANINKTLTKIRSIKEPVALLQEVYRNSVTDLSPTDIIT

SEQ ID NO: 48936 - protein, 111 aa, Homo sapiens
MVLPWLLLETARRAVLGSAEAALCGLTSIKGNCHNFYTAISKDVTYKELKNLLNSKNIMLIDVREIWEILEYQKIPESINVPLDEVGEALQMNPRDFKEKYNEVKPSKSDS

SEQ ID NO: 48937 - protein, 490 aa, Homo sapiens
  MOD_RES (1)..(1): Any amino acid
XLEQIDMLFFGGSAVSGITSAVYSVARSVLAAALLHAVCFSAVKEPWSMQHIPALFSAFCGLLVALSYHLSRQSSDPSVLMSFIQCRLFPKFLHQNLAESAADPLPKKMKDSVTDVLKWDLIVCAVVAVLSFAVSASTVFLSLRPFLSIVLFALAGAVGFVTHYVLPQLRKHHPWMWISHPILKNKEYHQREVRDVAHLMWFERLYVWLQCFEKYILYPALILNALTIDAFLISNHRRLGTHWDIFLMIIAGMKLLRTSFCNPVYQFINLSFTVIFFHFDYKDISESFLLDFFMVSILFSKLGDLLHKLQFVLTYVAPWQMAWGSSFHVFAQLFAIPHSAMLFFQTIATSIFSTPLSPFLGSVIFITSYVRPVKFWEKNYNTRRVDNSNTRLAVQIERDPGNDDNNLNSIFYEHLTRTLQESLCGDLVLGRWGNYSSGDCFILASDDLNAFVHLIEIGNGLVTFQLRGLEFREYNILYGNVSQTPLLDQK

SEQ ID NO: 48938 - protein, 292 aa, Homo sapiens
DNLREGAEQKVVFITGRVHPGETPSSFVCQGIIDFLVSQHPIACVLREYLVFKIAPMLNPDGVYLGNYRCSLMGFDLNRHWLDPSPWVHPTLHGVKQLIVQMYNDPKTSLEFYIDIHAHSTMMNGFMYGNIFEDEERFQRQAIFPKLLCQNAEDFSYSSTSFNRDAVKAGTGRRFLGGLLDHTSYCYTLEVSFYSYIISGTTAAVPYTEEAYMKLGRNVARTFLDYYRLNPVVEKVAIPMPRLRNKEIEVQRRKEKSPPYKHPLLRGPASNYPNSKGDKKSSVNHKDPSTPF

SEQ ID NO: 48939 - protein, 436 aa, Homo sapiens
MTDLHSSYTEEMGEEANDDKKPTTKFELERETELRFEVEASQSVQLELLTGMAEIFGTELTRNKKFTFDAGAKVAVFTWHGCSVQLSGRTEVAYVSKDTPMLLYLNTHTALEQMRRQAEKEEERGPRVMVVGPTDVGKSTVCRLLLNYAVRLGRRPTYVELDVGQGSVSIPGTMGALYIERPADVEEGFSIQAPLVYHFGSTTPGTNIKLYNKITSRLADVFNQRCEVNRRASVSGCVINTCGWVKGSGYQALVHAASAFEVDVVVVLDQERLYNELKRDLPHFVRTVLLPKSGGVVERSKDFRRECRDERIREYFYGFRGCFYPHAFNVKFSDVKIYKVGAPTIPDSCLPLGMSQEDNQLKLVPVTPGRDMVHHLLSVSTAEGTEENLSETSVAGFIVVTSVDLEHQVFTVLSPAPRPLPKNFLLIMDIRFMDLK

SEQ ID NO: 48940 - protein, 1170 aa, Homo sapiens
MRNWMFLQIVIVGENVSFKSQMRTENLKSEEHLKSSNIRQAEVLKADMTDSKLGPAEVWTSRQALQDLYQKMLVTDLEYALDKKVEQDLWNHAFKNQITTLQGQAKNRANPNRSEVQANLSLFLEAASGFYTQLLQELCTVFNVDLPCRVKSSQLGIISNKQTHTSAIVKPQSSSCSYICQHCLVHLGDIARYRNQTSQAESYYRHAAQLVPSNGQPYNQLAILASSKGDHLTTIFYYCRSIAVKFPFPAASTNLQKALSKALESRDEVKTKWGVSDFIKAFIKFHGHVYLSKSLEKLSPLREKLEEQFKRLLFQKAFNSQQLVHVTVINLFQLHHLRDFSNETEQHTYSQDEQLCWTQLLALFMSFLGILCKCPLQNESQEESYNAYPLPAVKVSMDWLRLRPRVFQEAVVDERQYIWPWLISLLNSFHPHEEDLSSISATPLPEEFELQGFLALRPSFRNLDFSKGHQGITGDKEGQQRRIRQQRLISIGKWIADNQPRLIQCENEVGKLLFITEIPELILEDPSEAKENLILQETSVIESLAADGSPGLKSVLSTSRNLSNNCDTGEKPVVTFKENIKTREVNRDQGRSFPPKEVKSQTELRKTPVSEARKTPVTQTPTQASNSQFIPIHHPGAFPPLPSRPGFPPPTYVIPPPVAFSMGSGYTFPAGVSVPGTFLQPTAHSPAGNQVQAGKQSHIPYSQQRPSGPGPMNQGPQQSQPPSQQPLTSLPAQPTAQSTSQLQVQALTQQQQSPTKAVPALGKSPPHHSGFQQYQQADASKQLWNPPQVQGPLGKIMPVKQPYYLQTQDPIKLFEPSLQPPVMQQQPLEKKMKPFPMEPYNHNPSEVKVPEFYWDSSYSMADNRSVMAQQANIDRRGKRSPGVFRPEQDPVPRMPFEDPKSSPLLPPDLLKSLAALEEEEELIFSNPPDLYPALLGPLASLPGRSLFKSLLEKPSELMSHSSSFLSLTGFSLNQERYPNNSMFNEVYGKNLTSSSKAELSPSMAPQETSLYSLFEGTPWSPSLPASSDHSTPASQSPHSSNPSSLPSSPPTHNHNSVPFSNFGPIGTPDNRDRRTADRWKTDKPAMGGFGIDYLSATSSSESSWHQASTPSGTWTGHGPSMEDSSAVLMESLKSIWSSSMMHPGPSALEQLLMQQKQKQQRGQGTMNPPH

SEQ ID NO: 48941 - protein, 139 aa, Homo sapiens
MENEKENLFCEPHKRGLMKTPLKESTTANIVLAEIQPDFGPLTTPTKPKEGSQGEPWTPTANLKMLISAVSPEIRNRDQKRGLFDNRSGLPEAKDCIHEHLSGDEFEKSQPSRKEKSLGLLCHKFLARYPNYPNPAVNN

SEQ ID NO: 48942 - protein, 137 aa, Homo sapiens
MNEYPKKRKRKTLHPSRYSDSSGISRIADGFNGIFSDHCYSVCSMRQPDLKYFDNKDDDSDTETSNDLPKFADGIKARNRNQNYLVPSPVLRILDHTAFSTEKSADIVICDEECDSPESVNQQTQEESPIEVHTAED

SEQ ID NO: 48943 - protein, 56 aa, Homo sapiens
MTSRDLGSHDNLSPPFVNSRIQSKTERGSYSSYGRESNLQGCHQQSLLGGDMDMGN

SEQ ID NO: 48944 - protein, 828 aa, Homo sapiens
MRFLEARSLAVAMGDTVVEPAPLKPTSEPTSGPPGNNGGSLLSVITEGVGELSVIDPEVAQKACQEVLEKVKLLHGGVAVSSRGTPLELVNGDGVDSEIRCLDDPPAQIREEEDEMGAAVASGTAKGARRRRQNNSAKQSWLLRLFESKLFDISMAISYLYNSKEPGVQAYIGNRLFCFRNEDVDFYLPQLLNMYIHMDEDVGDAIKPYIVHRCRQSINFSLQCALLLGAYSSDMHISTQRHSRGTKLRKLILSDELKPAHRKRELPSLSPAPDTGLSPSKRTHQRSKSDATASISLSSNLKRTASNPKVENEDEELSSSTESIDNSFSSPVRLAPEREFIKSLMAIGKRLATLPTKEQKTQRLISELSLLNHKLPARVWLPTAGFDHHVVRVPHTQAVVLNSKDKAPYLIYVEVLECENFDTTSVPARIPENRIRSTRSVENLPECGITHEQRAGSFSTVPNYDNDDEAWSVDDIGELQVELPEVHTNSCDNISQFSVDSITSQESKEPVFIAAGDIRRRLSEQLAHTPTAFKRDPEDPSAVALKEPWQEKVRRIREGSPYGHLPNWRLLSVIVKCGDDLRQELLAFQVLKQLQSIWEQERVPLWIKPYKILVISADSGMIEPVVNAVSIHQVKKQSQLSLLDYFLQEHGSYTTEAFLSAQRNFVQSCAGYCLVCYLLQVKDRHNGNILLDAEGHIIHIDFGFILSSSPRNLGFETSAFKLTTEFVDVMGGLDGDMFNYYKMLMLQGLIAARKHMDKVVQIVEIMQQGSQLPCFHGSSTIRNLKERFHMSMTEEQLQLLVEQMVDGSMRSITTKLYDGFQYLTNGIM

SEQ ID NO: 48945 - protein, 187 aa, Homo sapiens
LNVYLQWKNNNYSTIWCNDHFIHAKAMRKVREVRAQLKDIMVQQRMSLASCGTDWDIVRKCICAAYFHQAAKLKGIGEYVNIRTGMPCHLHPTSSLFGMGYTPDYIVYHELVMTTKEYMQCVTAVDGEWLAELGPMFYSVKQAGKSRQEQEKRSPLGSVRSTKIYTPGRKEQGEPMTPRRTPARFGL

SEQ ID NO: 48946 - protein, 283 aa, Homo sapiens
MSNVTLRKMSPTGNEMKSTTQGTTRKQQDFHEVNKRRTFLQDNSWIKKRPEEEKDENYGRVVLNRHNSHDALDRKVNERDVPKATISRYSSDDTLDRSMSMFRSLEVTKLQPGGSLNANTSNTIASTSATTPVKKKRQSWFPPPPPGYNASSSTGTRRREPGVHPPIPPKPSSPVSSPNQLRQDNRQIHPPKPGVYTETNRSAERNISEELDNLIKMNKSLNRNQGLDSLFRANPKVEEREKRAKSLESLIYMSTRTDKDGKGIQSLGSPIKVNQRTDKNEKG

SEQ ID NO: 48947 - protein, 430 aa, Homo sapiens
MAATDLERFSNAEPEPRSLSLGGHVGFDSLPDQLVSKSVTQGFSFNILCVGETGIGKSTLMNTLFNTTFETEEASHHEACVRLRPQTYDLQESNVQLKLTIVDAVGFGDQINKDESYRPIVDYIDAQFENYLQEELKIRRSLFDYHDTRIHVCLYFITPTGHSLKSLDLVTMKKLDSKVNIIPIIAKADTISKSELHKFKIKIMGELVSNGVQIYQFPTDDEAVAEINAVMNAHLPFAVVGSTEEVKVGNKLVRARQYPWGVVQVENENHCDFVKLREMLIRVNMEDLREQTHSRHYELYRRCKLEEMGFQDSDGDSQPFSLQETYEAKRKEFLSELQRKEEEMRQMFVNKVKETELELKEKERELHEKFEHLKRVHQEEKRKVEEKRRELEEETNAFNRRKAAVEALQSQALHATSQQPLRKDKDKKKS

SEQ ID NO: 48948 - protein, 137 aa, Homo sapiens
MPEVERKPKITASRKLLLKSLMLAKAKECWEQEHEEREAEKVRYLAERIPTLQTRGLSLSALQDLCRELHAKVEVVDEERYDIEAKCLHNTREIKDLKLKVMDLRGKFKRPPLRRVRVSADAMLRALLGSKHKVSMD

SEQ ID NO: 48949 - protein, 457 aa, Homo sapiens
DGKIEAEDFTSRLYRELNSSPQPYLVPFLKRSLPALRQLTPDSAAFIQQSQQQPPPPTSQATTALTAVVLSSSVQRTAGKTAATVTSALQPPVLSLTQPTQVGVGKQGQPTPLVIQQPPKPGALIRPPQVTLTQTPMVALRQPHNRIMLTTPQQIQLNPLQPVPVVKPAVLPGTKALSAVSAQAAAAQKNKLKEPGGGSFRDDDDINDVASMAGVNLSEESARILATNSELVGTLTRSCKDETFLLQAPLQRRILEIGKKHGITELHPDVVSYVSHATQQRLQNLVEKISETAQQKNFSYKDDDRYEQASDVRAQLKFFEQLDQIEKQRKDEQEREILMRAAKSRSRQEDPEQLRLKQKAKEMQQQELAQMRQRDANLTALAAIGPRKKRKVDCPGPGSGAEGSGPGSVVPGSSGVGTPRQFTRQRITRVNLRDLIFCLENERETSHSLLLYKAFLK

SEQ ID NO: 48950 - protein, 383 aa, Homo sapiens
MFCPLKLILLPVLLDYSLGLNDLNVSPPELTVHVGDSALMGCVFQSTEDKCIFKIDWTLSPGEHAKDEYVLYYYSNLSVPIGRFQNRVHLMGDILCNDGSLLLQDVQEADQGTYICEIRLKGESQVFKKAVVLHVLPEEPKELMVHVGGLIQMGCVFQSTEVKHVTKEEIVFRYYHKLRMSVEYSQSWGHFQNRVNLVGDIFRNDGSIMLQGVRESDGGNYTCSIHLGNLVFKKTIVLHVSPEEPRTLVTPAALRPLVLGGNQLVIIVGIVCATILLLPVLILIVKKTCGNKSSVNSTVLVKNTKKTNPEIKEKPCHFERCEGEKHIYSPIIVREVIEEEEPSEKSEATYMTMHPVWPSLRSDRNNSLEKKSGGGMPKTQQAF

SEQ ID NO: 48951 - protein, 1796 aa, Homo sapiens
MELMFAEWEDGERFSFEDSDRFEEDSLCSFISEAESLCQNWRGWRKQSAGPNSPTGGGGGGGSGGTRMRDGLVIPLVELSAKQVAFHIPFEVVEKVYPPVPEQLQLRIAFWSFPENEEDIRLYSCLANGSADEFQRGDQLFRMRAVKDPLQIGFHLSATVVPPQMVPPKGAYNVAVMFDRCRVTSCSCTCGAGAKWCTHVVALCLFRIHNASAVCLRAPVSESLSRLQRDQLQKFAQYLISELPQQILPTAQRLLDELLSSQSTAINTVCGAPDPTAGPSASDQSTWYLDESTLTDNIKKTLHKFCGPSPVVFSDVNSMYLSSTEPPAAAEWACLLRPLRGREPEGVWNLLSIVREMFKRRDSNAAPLLEILTDQCLTYEQITGWWYSVRTSASHSSASGHTGRSNGQSEVAAHACASMCDEMVTLWRLAVLDPALSPQRRRELCTQLRQWQLKVIENVKRGQHKKTLERLFPGFRPAVEACYFNWEEAYPLPGVTYSGTDRKLALCWARALPSRPGASRSGGLEESRDRPRPLPTEPAVRPKEPGTKRKGLGEGVPSSQRGPRRLSAEGGDKALHKMGPGGGKAKALGGAGSGSKGSAGGGSKRRLSSEDSSLEPDLAEMSLDDSSLALGAEASTFGGFPESPPPCPLHASVGPPGLLPGDVCTQDDLPSTDESGNGLPKTKEAAPAVGEEDDDYQAYYLNAQDGAGGEEEKAEGGAGEEHDLFAGLKPLEQESRMEVLFACAEALHAHGYSSEASRLTVELAQDLLANPPDLKVEPPPAKGKKNKVSTSRQTWVATNTLSKAAFLLTVLSERPEHHNLAFRVGMFALELQRPPASTKALEVKLAYQESEVAALLKKIPLGPSEMSTMRCRAEELREGTLCDYRPVLPLMLASFIFDVLCAPGSRPPSRNWNSETPGDEELGFEAAVAALGMKTTVSEAEHPLLCEGTRREKGDLALALMITYKDDQAKLKKILDKLLDRESQTHKPQTLSSFYSSSRPTTASQRSPSKHGGPSAPGALQPLTSGSAGPAQPGSVAGAGPGPTEGFTEKNVPESSPHSPCEGLPSEAALTPRPEGKVPSRLALGSRGGYNGRGWGSPGRPKKKHTGMASIDSSAPETTSDSSPTLSRRPLRGGWAPTSWGRGQDSDSISSSSSDSLGSSSSSGSRRASASGGARAKTVEVGRYKGRRPESHAPHVPNQPSEAAAHFYFELAKTVLIKAGGNSSTSIFTHPSSSGGHQGPHRNLHLCAFEIGLYALGLHNFVSPNWLSRTYSSHVSWITGQAMEIGSAALTILVECWDGHLTPPEVASLADRASRARDSNMVRAAAELALSCLPHAHALNPNEIQRALVQCKEQDNLMLEKACMAVEEAAKGGGVYPEVLFEVAHQWFWLYEQTAGGSSTAREGATSCSASGIRAGGEAGRGMPEGRGGPGTEPVTVAAAAVTAAATVVPVISVGSSLYPGPGLGHGHSPGLHPYTALQPHLPCSPQYLTHPAHPAHPMPHMPRPAVFPVPSSAYPQGVHPAFLGAQYPYSVTPPSLAATAVSFPVPSMAPITVHPYHTEPGLPLPTSVALSSVHPASTFPAIQGASLPALTTQPSPLVSGGFPPPEEETHSQPVNPHSLHHLHAAYRVGMLALEMLGRRAHNDHPNNFSRSPPYTDDVKWLLGLAAKLGVNYVHQFCVGAAKGVLSPFVLQEIVMETLQRLSPAHAHNHLRAPAFHQLVQRCQQAYMQYIHHRLIHLTPADYDDFVNAIRSARSAFCLTPMGMMQFNDILQNLKRSKQTKELWQRVSLEMATFSP

SEQ ID NO: 48952 - protein, 138 aa, Homo sapiens
VQIRVPGFGKTYSVEYLDSSKLAGYLHTLVQNLVNNGYVRDETVRAAPYDWRLEPGQQEEYYRKLAGLVEEMHAAYGKPVFLIGHSLGCLHLLYFLLRQPQAWKDRFIDGFISLGAPWGGSIKPMLVLASETGSHCIA

SEQ ID NO: 48953 - protein, 290 aa, Homo sapiens
  MOD_RES (1)..(1): Any amino acid
XLGDINAEQLPGREHLNEPGTREGQTRLIRDGEKVEAYQWSVSEGRWIKIGDVVGSSGANQQTSGKVLYEGKEFDYVFSIDVNEGGPSYKLPYNTSDDPWLTAYNFLQKNDLNPMFLDQVAKFIIDNTKGQMLGLGNPSFSDPFTGGGRYVPGSSGSSNTLPTADPFTGAGRYVPGSASMGTTMAGVDPFTGNSAYRSAASKTMNIYFPKKEAVTFDQANPTQILDIVFPALDILRLSIKHPSVNENFCNEKEGAQFSSHLINLLNPKGKPANQLLALRTFCNCFVGQAG

SEQ ID NO: 48954 - protein, 124 aa, Homo sapiens
MSFSGKYQLQSQENFEAFMKAIGLPEELIQKGKDIKGVSEIVQNGKHFKFTITAGSKVIQNEFTVGEECELETMTGEKVKTVVQLEGDNKLVTTFKNIKSVTELNGDIITNVSWWCSERVAPSA

SEQ ID NO: 48955 - protein, 876 aa, Homo sapiens
MKKEGTTLGLTVSGGIDKDGKPRVSNLRQGGIAARSDQLDVGDYIKAVNGINLAKFRHDEIISLLKNVGERVVLEVEYELPPVSVQGSSVIFRTVEVTLHKEGNTFGFVIRGGAHDDRNKSRPVVITCVRPGGPADREGTIKPGDRLLSVDGIRLLGTTHAEAMSILKQCGQEAALLIEYDVSVMDSVATASGPLLVEVAKTPGASLGVALTTSMCCNKQVIVIDKIKSASIADRCGALHVGDHILSIDGTSMEYCTLAEATQFLANTTDQVKLEILPHHQTRLALKGPDHAALVSSSFSPTSMSAYSLSSLNMGTLPRSLYSTSPRGTMMRRRLKKKDFKSSLSLASSTVGLAGQVVHTETTEVVLTADPVTGFGIQLQGSVFATETLSSPPLISYIEADSPAERCGVLQIGDRVMAINGIPTEDSTFEEASQLLRDSSITSKVTLEIEFDVAESVIPSSGTFHVKLPKKHNVELGITISSPSSRKPGDPLVISDIKKGSVAHRTGTLELGDKLLAIDNIRLDNCSMEDAVQILQQCEDLVKLKIRKDEDNSDEQESSGAIIYTVELKRYGGPLGITISGTEEPFDPIIISSLTKGGLAERTGAIHIGDRILAINSSSLKGKPLSEAIHLLQMAGETVTLKIKKQTDAQSASSPKKFPISSHLSDLGDVEEDSSPAQKPGKLSDMYPSTVPSVDSAVDSWDGSAIDTSYGTQGTSFQASGYNFNTYDWRSPKQRGSLSPVTKPRSQTYPDVGLSYEDWDRSTASGFAGAADSAETEQEENFWSQALEDLETCGQSGILRELEEKADRRVSLRNMTLLATIMSGSTMSLNHEAPTPRSQLGRQASFQERSSSRPHYSQTTRSNTLPSDVGRKSVTL

SEQ ID NO: 48956 - protein, 143 aa, Homo sapiens
  MOD_RES (1)..(1): Any amino acid
XAFLLGSIHEPAGALMEPQPCPGSLAESFLEEELRLNAELSQLQFSEPVGIIYNPVEYAWEPHRNYVTRYCQGPKEVLFLGMNPGPFGMAQTGVPFGEVSMVRDWLGIVGPVLTPPQEHPKRPVLGLECPQSEKILAAVLRTD

SEQ ID NO: 48957 - protein, 84 aa, Homo sapiens
MFRKGKKRHSSSSSQSSEISTKSKSVDSSLGGLSRSSTVASLDTDSTKSSGQSNNNSDTCAEFRIKYVGAIEKLKLSEGKGLEG

SEQ ID NO: 48958 - protein, 138 aa, Homo sapiens
MLLFFTLGLLIHFVFFASIFDIYFTSPLVHGMTPQFTPLPPPARRLVLFVADGLRADALYELDENGNSRAPFIRNIIMHEGSWGISHTRVPTESRPGHVALIAGFYEDVSAVAKGWKENPVEFDSLFNESKYTWSWGS

SEQ ID NO: 48959 - protein, 167 aa, Homo sapiens
ERLAQFPAAGRGSPGPPGARLGVGLEKGRGREVWRPGVWGCEARASEVNWSCPFDPVCALPQAKFELITSEASYIHSLSVAVGHFLGSAELSECLGAQDKQWLFSKLPEVKSTSERFLQDLEQRLEADVLRFSVCDVVLDHCPAFRRVYLPYVTNQAYQERTYQRLL

SEQ ID NO: 48960 - protein, 120 aa, Homo sapiens
MSAGSERGAAATPGGLPAPCASKVELRLSCRHLLDRDPLTKSDPSVALLQQAQGQWVQVGRTEVVRSSLHPVFSKVFTVDYYFEEVQRLRFEVYDTHGPSGFSCQEDDFLGGMECTLGQV

SEQ ID NO: 48961 - protein, 139 aa, Homo sapiens
  MOD_RES (1)..(1): Any amino acid
XQRQSILPPPQGPAPIPFQHRGGDSPEAKNRVGPQVPLSEPGFRRRESQEEPRAVLAQKIEKETQILNCALDDIEWFVARLQKAAEAFKQLNQRKKGKKKGKKAPADRQHLQWPRHRTLRLLPTALPRCRGLPARPPGP

SEQ ID NO: 48962 - protein, 2267 aa, Homo sapiens
MPPNINWKEIMKVDPDDLPRQEELADNLLISLSKVEVNELKSEKQENVIHLFRITQSLMKMKAQEVELALEEVEKAGEEQAKFENQLKTKVMKLENELEMAQQSAGGRDTRFLRNEICQLEKQLEQKDRELEDMEKELEKEKKVNEQLALRNEEAENENSKLRRENKRLKKKNEQLCQDIIDYQKQIDSQKETLLSRRGEDSDYRSQLSKKNYELIQYLDEIQTLTEANEKIEVQNQEMRKNLEESVQEMEKMTDEYNRMKAIVHQTDNVIDQLKKENDHYQLQVQELTDLLKSKNEEDDPIMVAVNAKVEEWKLILSSKDDEIIEYQQMLHNLREKLKNAQLDADKSNVMALQQGIQERDSQIKMLTEQVEQYTKEMEKNTCIIEDLKNELQRNKGASTLSQQTHMKIQSTLDILKEKTKEAERTAELAEADAREKDKELVEALKRLKDYESGVYGLEDAVVEIKNCKNQIKIRDREIEILTKEINKLELKISDFLDENEALRERVGLEPKTMIDLTEFRNSKHLKQQQYRAENQILLKEIESLEEERLDLKKKIRQMAQERGKRSATSGLTTEDLNLTENISQGDRISERKLDLLSLKNMSEAQSKNEFLSRELIEKERDLERSRTVIAKFQNKLKELVEENKQLEEGMKEILQAIKEMQKDPDVKGGETSLIIPSLERLVNAIESKNAEGIFDASLHLKAQVDQLTGRNEELRQELRESRKEAINYSQQLAKANLKIDHLEKETSLLRQSEGSNVVFKGIDLPDGIAPSSASIINSQNEYLIHLLQELENKEKKLKNLEDSLEDYNRKFAVIRHQQSLLYKEYLSEKETWKTESKTIKEEKRKLEDQVQQDAIKVKEYNNLLNALQMDSDEMKKILAENSRKITVLQVNEKSLIRQYTTLVELERQLRKENEKQKNELLSMEAEVCEKIGCLQRFKEMAIFKIAALQKVVDNSVSLSELELANKQYNELTAKYRDILQKDNMLVQRTSNLEHLECENISLKEQVESINKELEITKEKLHTIEQAWEQETKLGNESSMDKAKKSITNSDIVSISKKITMLEMKELNERQRAEHCQKMYEHLRTSLKQMEERNFELETKFAELTKINLDAQKVEQMLRDELADSVSKAVSDADRQRILELEKNEMELKVEVSKLREISDIARRQVEILNAQQQSRDKEVESLRMQLLDYQAQSDEKSLIAKLHQHNVSLQLSEATALGKLESITSKLQKMEAYNLRLEQKLDEKEQALYYARLEGRNRAKHLRQTIQSLRRQFSGALPLAQQEKFSKTMIQLQNDKLKIMQEMKNSQQEHRNMENKTLEMELKLKGLEELISTLKDTKGAQKVINWHMKIEELRLQELKLNRELVKDKEEIKYLNNIISEYERTISSLEEEIVQQNKFHEERQMAWDQREVDLERQLDIFDRQQNEILNAAQKFEEATGSIPDPSLPLPNQLEIALRKIKENIRIILETRATCKSLEEKLKEKESALRLAEQNILSRDKVINELRLRLPATAEREKLIAELGRKEMEPKSHHTLKIAHQTIANMQARLNQKEEVLKKYQRLLEKAREEQREIVKKHEEDLHILHHRLELQADSSLNKFKQTAWDLMKQSPTPVPTNKHFIRLAEMEQTVAEQDDSLSSLLVKLKKVSQDLERQREITELKVKEFENIKLQLQENHEDEVKKVKAEVEDLKYLLDQSQKESQCLKSELQAQKEANSRAPTTTMRNLVERLKSQLALKEKQQKALSRALLELRAEMTAAAEERIISATSQKEAHLNVQQIVDRHTRELKTQVEDLNENLLKLKEALKTSKNRENSLTDNLNDLNNELQKKQKAYNKILREKEEIDQENDELKRQIKRLTSGLQGKPLTDNKQSLIEELQRKVKKLENQLEGKVEEVDLKPMKEKNAKEELIRWEEGKKWQAKIEGIRNKLKEKEGEVFTLTKQLNTLKDLFAKADKEKLTLQRKLKTTGMTVDQVLGIRALESEKELEELKKRNLDLENDILYMRAHQALPRDSVVEDLHLQNRYLQEKLHALEKQFSKDTYSKPSISGIESDDHCQREQELQKENLKLSSENIELKFQLEQANKDLPRLKNQVRDLKEMCEFLKKEKAEVQRKLGHVRGAELEKLKAHLGHQLSMHYESKTKGTEKIIAENERLRKELKKETDAAEKLRIAKNNLEILNEKMTVQLEETGKRLQFAESRGPQLEGADSKSWKSIVVTRMYETKLKELETDIAKKNQSITDLKQLVKEATEREQKVNKYNEDLEQQIS

SEQ ID NO: 48963 - protein, 150 aa, Homo sapiens
MAELQEVQITEEKPLLPGQTPEAAKTHSVETPYGSVTFTVYGTPKPKRPAILTYHDVGLNYKSCFQPLFQFEDMQEIIQNFVRVHVDAPGMEEGAPVFPLGYQYPSLDQLADMIPCVLQYLNFSTIIGVGVGAGAYILARYALNHPDTVE

SEQ ID NO: 48964 - protein, 330 aa, Homo sapiens
MRYVLSWCVTVTFKDQTAKDKALQHMAAMSSAQIVSATAIHNKLGLPGIPRPTFPGAPGFWPGMIQTGQPGSSQDVKPFVQQAYPIQPAVTAPIPGFEPASAPAPSVPAWQGRSIGTTKLRLVEFSAFLEQQRDPDSYNKHLFVHIGHANHSYSDPLLESVDIRQIYDKFPEKKGGLKELFGKGPQNAFFLVKFWADLNCNIQDDAGAFYGVTSQYESSENMTVTCSTKVCSFGKQVVEKVETEYARFENGRFVYRINRSPMCEYMINFIHKLKHLPEKYMMNSVLENFTILLVVTNRDTQETLLCMACVFEVSNSEHGAQHHIYRLVKD

SEQ ID NO: 48965 - protein, 136 aa, Homo sapiens
  MOD_RES (1)..(1): Any amino acid
XEGVKKTILHGGTGELPNFITGSRVIFHFRTMKCDEERTVIDDSRQVGQPMHIIIGNMFKLEVWEILLTSMRVHEVAEFWCDTIPEPTPSWFSPLNAKTAPLLSPHVQPAGMSSPSLEVFKEQPDAFLCFMLWVGG

SEQ ID NO: 48966 - protein, 339 aa, Homo sapiens
MTVRNIASICNMFGNTCYCNSVLQALYFCRPFRENVLAYKAQQKKKENLLTCLADLFHSIATQKKKVGVIPPKKFISRLRKENDLFDNYMQQDAHEFLNYLLNTIADILQEEKKQEKQNGKLKNGNMNEPAENNKPELTWVHEIFQGTLTNETRCLNCETVSSKDEDFLDLSVDVEQNTSITHCLRDFSNTETLCSEQKYYCETCCSKQEAQKRMRVKKLPMILALHLKRFKYMEQLHRYTKLSYRVVFPLELRLFNTSSDAVNLDRMYDLVAVVVHCGSGPNRGHYITIVKSHGFWLLFDDDIVEKIDAQAIEEFYGLTSDISKNSESGYILFYQSRE

SEQ ID NO: 48967 - protein, 128 aa, Homo sapiens
MALDIFSSYTGRDIPELPEREEGEGEESELQNTAYSNWNQPRRVELWREPSKSLGISIVGGRGMGSRLSNGEVMRGIFIKHVLEDSPAGKNGTLKPGDRIVEKSPLPSLLHNLYPKYNFSSTNPFADS

SEQ ID NO: 48968 - protein, 39 aa, Homo sapiens
MHSEAEESKEGLGLNTGIYGENSCHSTQRLSRHPKNCSS

SEQ ID NO: 48969 - protein, 204 aa, Homo sapiens
MAACRALKAVLVDLSGTLHIEDAAVPGAQEALKRLRGASVIIRFVTNTTKESKQDLLERLRKLEFDISEDEIFTSLTAARSLLERKQVRPMLLVDDRALPDFKGIQTSDPNAVVMGLAPEHFHYQILNQAFRLLLDGAPLIAIHKARYYKRKDGLALGPGPFVTALEYATDTKATVVGKPEKTFFLEALRGTGCEPEEAVMIGD

SEQ ID NO: 48970 - protein, 221 aa, Homo sapiens
MAELQEVQITEEKPLLPGQTPEAAKTHSVETPYGSVTFTVYGTPKPKRPAILTYHDVGLNYKSCFQPLFQFEDMQEIIQNFVRVHVDAPGMEEGAPVFPLGYQYPSLDQLADMIPCVLQYLNFSTIIGVGVGAGAYILARYALNHPDTVEGLVLINIDPNAKGWMDWAAHKLTGLTSSIPEMILGHLFSQEELSGNSELIQKYRNIITHAPNLDNIELYWN

SEQ ID NO: 48971 - protein, 88 aa, Homo sapiens
GFCDHKLHDVLIAPGTADLTADVDFSYLRRMAQGKVASLGPIKQHTFLKNMGIDVRLKRLQGGRYQRNARQSKPFASVVAGFSELAWQ

SEQ ID NO: 48972 - protein, 45 aa, Homo sapiens
  MOD_RES (1)..(1): Any amino acid
XIIYHCDLTKEELEPRVFREVTVKGIDASDYQTVQLPKGTESSRN

SEQ ID NO: 48973 - protein, 694 aa, Homo sapiens
MASGADSKGDDLSTAILKQKNRPNRLIVDEAINEDNSVVSLSQPKMDELQLFRGDTVLLKGKKRREAVCIVLSDDTCSDEKIRMNRVVRNNLRVRLGDVISIQPCPDVKYGKRIHVLPIDDTVEGITGNLFEVYLKPYFLEAYRPIRKGDIFLVRGGMRAVEFKVVETDPSPYCIVAPDTVIHCEGEPIKREDEEESLNEVGYDDIGGCRKQLAQIKEMVELPLRHPALFKAIGVKPPRGILLYGPPGTGKTLIARAVANETGAFFFLINGPEIMSKLAGESESNLRKAFEEAEKNAPAIIFIDELDAIAPKREKTHGEVERRIVSQLLTLMDGLKQRAHVIVMAATNRPNSIDPALRRFGRFDREVDIGIPDATGRLEILQIHTKNMKLADDVDLEQVANETHGHVGADLAALCSEAALQAIRKKMDLIDLEDETIDAEVMNSLAVTMDDFRWALSQSNPSALRETVVEVPQVTWEDIGGLEDVKRELQELVQYPVEHPDKFLKFGMTPSKGVLFYGPPGCGKTLLAKAIANECQANFISIKGPELLTMWFGESEANVREIFDKARQAAPCVLFFDELDSIAKARGGNIGDGGGAADRVINQILTEMDGMSTKKNVFIIGATNRPDIIDPAILRPGRLDQLIYIPLPDEKSRVAILKANLRKSPVAKAGARSWAVGDLHESSGWMWTWSSWLK

SEQ ID NO: 48974 - protein, 300 aa, Homo sapiens
MSSKLLEPAGAHLSSGSSEPLVEPGRGRVGARVKGERGLQASGSAPGRSKMAEGERQPPPDSSEEAPPATQNFIIPKKEIHTVPDMGKWKRSQAYADYIGFILTLNEGVKGKKLTFEYRVSEMWNEVHEEKEQAAKQSVSCDECIPLPRAGHCAPSEAIEKLVALLNTLDRWIDETPPVDQPSRFGNKAYRTWYAKLDEEAENLVATVVPTHLAAAVPEVAVYLKESVGNSTRIDYGTGHEAAFAAFLCCLCKIGVLRVDDQIAIVFKVFNRYLEVMRKLQKTYRMEPAGSQGVWGLDDF

SEQ ID NO: 48975 - protein, 17 aa, Homo sapiens
MASKPEKRVASSVFITL

SEQ ID NO: 48976 - protein, 67 aa, Homo sapiens
MSVCSRVNMQLLHECFDLGPFHGLCFPHPDDVLESPQDLSVRRSQETRSHFVAQAGVQWCKYGSLQP

SEQ ID NO: 48977 - protein, 329 aa, Homo sapiens
MAAVQMDPELAKRLFFEGATVVILNMPKGTEFGIDYNSWEVGPKFRGVKMIPPGIHFLHYSSVDKANPKEVGPRMGFFLSLHQRGLTVLRWSTLREEVDLSPAPESEVEAMRANLQELDQFLGPYPYATLKKWISLTNFISEATVEKLQPENRQICAFSDVLPVLSMKHTKDRVGQNLPRCGIECKSYQEGLARLPEMKPRAGTEIRFSELPTQMFPEGATPAEITKHSMDLSYALETVLNKQFPSSPQDVLGELQFAFVCFLLGNVYEAFEHWKRLLNLLCRSEAAMMKHHTLYINLISILYHQLGEIPADFFVDIVSQDNFLTSTLQ

SEQ ID NO: 48978 - protein, 256 aa, Homo sapiens
  MOD_RES (1)..(1): Any amino acid
XPLGSRALGLKRAGVRRALHDPLEKDALVLYEPPPLSAHDQLKLDKEKLPVHVVVDPILSKVLRPHQREGVKFLWECVTSRRIPGSHGCIMADEMGLGKTLQCITLMWTLLRQSPECKPEIDKAVVVSPSSLVKNWYNEVGKWLGGRIQPLAIDGGSKDEIDQKLGFMNQRGARVSSPILIISYETFRLHVGVLQKGSVGLVICDEGHRLKNSENQTYQALDSLNTSRRVLISGTPIQNDLLEYFSLVHFVNSGIL

SEQ ID NO: 48979 - protein, 95 aa, Homo sapiens
KAEVIYRVQIVDPSQILEGINLSKRKELQWPDEGIRLKAGRNSWKDWSPQEGMEGHVIHRWVPCSRDPGIGKREEQAEDACRYHFDPMWERLKIE

SEQ ID NO: 48980 - protein, 58 aa, Homo sapiens
  MOD_RES (1)..(1): Any amino acid
XFLHELAQIPNFAERAQCIIFRSVFSEGITSLHRKVEIITRASKQLLILLVPSLPTAY

SEQ ID NO: 48981 - protein, 522 aa, Homo sapiens
MLVPLAKLSCLAYQCFHALKIKKNYLPLCATRWSSTSTVPRITTHYTIYPRDKDKRWEGVNMERFAEEADVVIVGAGPAGLSAAVRLKQLAVAHEKDIRVCLVEKAAQIGAHTLSGACLDPGAFKELFPDWKEKGAPLNTPVTEDRFGILTEKYRIPVPILPGLPMNNHGNYIVRLGHLVSWMGEQAEALGVEVYPGYAAAEVLFHDDGSVKGIATNDVGIQKDGAPKATFERGLELHAKVTIFAEGCHGHLAKQLYKKFDLRANCEPQTYGIGLKESIPKLTFPGGLLIGCSPGFMNVPKIKGTHTAMKSGILAAESIFNQLTSENLQSKTIGLHVTEYEDNLKNSWVWKELYSVRNIRPSCHGVLGVYGGMIYTGIFYWILRGMEPWTLKHKGSDFERLKPAKDCTPIEYPKPDGQISFDLLSSVALSGTNHEHDQPAHLTLRDDSIPVNRNLSIYDGPEQRFCPAGVYEFVPVEQGDGFRLQINAQNCVHCKTCDIKDPSQNINWVVPEGGGGPAYNGM

SEQ ID NO: 48982 - protein, 433 aa, Homo sapiens
  MOD_RES (1)..(1): Any amino acid
XRPHSPLPGHLGSSPLDSPRNFSPNTPAHFSFASSRRADGRRWSLASLPSSGYGTNTPSSTVSSSCSSQERLHQLPYQPTVDELHFLSKHFGSTESITDEDGGRRSPAVRPRSRSLSPGRSPSSYDNEIVMMNHVYKERFPKATAQMEEKLRDFTRAYEPDSVLPLADGVLSFIHHQIIELARDCLTKSRDGLITTVYFYELQENLEKLLQDAYERSESLEVAFVTQLVKKLLIIISRPARLLECLEFNPEEFYHLLEAAEGHAKEGHLVKTDIPRYIIRQLGLTRDPFPDVVHLEEQDSGGSNTPEQDDLSEGRSSKAKKPPGENDFDTIKLISNGAYGAVYLVRHRDTRQRFAMKKINKQNLILRNQIQQAFVERDILTFAENPFVVGMFCSFETRRHLCMVMEYVEGVAACGAAGKMGPCSLVRAAGWPA

SEQ ID NO: 48983 - protein, 62 aa, Homo sapiens
  MOD_RES (1)..(1): Any amino acid
XGYHCLPAPNRAQGEVGGDGGSVQFGGSVKTSSALREEQEAQWENWPKSGVLTTAPGFFLGR

SEQ ID NO: 48984 - protein, 399 aa, Homo sapiens
MIPTFTALLCLGLSLGPRTHMQAGPLPKPTLWAEPGSVISWGNSVTIWCQGTLEAREYRLDKEESPAPWDRQNPLEPKNKARFSIPSMTEDYAGRYRCYYRSPVGWSQPSDPLELVMTGAYSKPTLSALPSPLVTSGKSVTLLCQSRSPMDTFLLIKERAAHPLLHLRSEHGAQQHQAEFPMSPVTSVHGGTYRCFSSHGFSHYLLSHPSDPLELIVSGSLEDPRPSPTRSVSTAGPEDQPLMPTGSVPHSGLRRHWEVLIGVLVVSILLLSLLLFLLLQHWRQGKHRTLAQRQADFQRPPGAAEPEPKDGGLQRRSSPAADVQGENFCAAVKNTQPEDGVEMDTRQSPHDEDPQAVTYAKVKHSRPRREMASPPSPLSGEFLDTKDRQAEEDRQMDTE

SEQ ID NO: 48985 - protein, 74 aa, Homo sapiens
  MOD_RES (1)..(1): Any amino acid
XHLRGRGRTVYNTFRAAAPPPPIPAYGGVVMLHTATPSLPLPLPLPTVTVTDEFMLPTPTTTHLLQPPPTALVP

SEQ ID NO: 48986 - protein, 138 aa, Homo sapiens
MAFLASGPYLTHQQKVLRLYKRALRHLESWCVQRDKYRYFACLMRARFEEHKNEKDMAKATQLLKEAEEEFWYRQHPQPYIFPDSPGGTSYERYDCYKVPEWCLDDWHPSEKAMYPDYFAKREQWKKLRRESWEREVY

SEQ ID NO: 48987 - protein, 394 aa, Homo sapiens
MPRVKAAQAGRQSSAKRHLAEQFAVGEIITDMAKKEWKVGLPIGQGGFGCIYLADMNSSESVGSDAPCVVKVEPSDNGPLFTELKFYQRAAKPEQIQKWIRTRKLKYLGVPKYWGSGLHDKNGKSYRFMIMDRFGSDLQKIYEANAKRFSRKTVLQLSLRILDILEYIHEHEYVHGDIKASNLLLNYKNPDQVYLVDYGLAYRYCPEGVHKEYKEDPKRCHDGTIEFTSIDAHNGVAPSRRGDLEILGYCMIQWLTGHLPWEDNLKDPKYVRDSKIRYRENIASLMDKCFPEKNKPGEIAKYMETVKLLDYTEKPLYENLRDILLQGLKAIGSKDDGKLDLSVVENGGLKAKTITKVNFVIKLFFGLLVFIIAINTKRKYSSSSMKNNNRLHGN

SEQ ID NO: 48988 - protein, 942 aa, Homo sapiens [sequence omitted]

SEQ ID NO: 48989 - protein, 8 aa, Homo sapiens
MEREGIWH

SEQ ID NO: 48990 - protein, 145 aa, Homo sapiens
  MOD_RES (1)..(1): Any amino acid
XWMDRGTRDEHLPSCPGCPAVASNTRCCPPAACLPGISLSRAGTVSSPSCLLHGMDSGALNRCSEINDSESRSQPENVLLRGPWNLPLVHLGFSLLNKTDSAACSSEKVLVEDSPQVPLPGSPTAPEGWPSDAWVAGLLDPSMDK

SEQ ID NO: 48991 - protein, 453 aa, Homo sapiens
MPGSSGAGMEAAVAPGRDAPAPAASQPSGCGKHNSPERKVYMDYNATTPLEPEVIQAMTKAMWEAWGNPSSPYSAGRKAKDIINAARESLAKMIGGKPQDIIFTSGGTESNNLVIHSVVKHFHANQTSKGHTGGHHSPVKGAKPHFITSSVEHDSIRLPLEHLVEEQVAAVTFVPVSKVSGQAEVDDILAAVRPTTRLVTIMLANNETGIVMPVPEISQRIKALNQERVAAGLPPILVHTDAAQALGKQRVDVEDLGVDFLTIVGHKFYGPRIGALYIRGLGEFTPLYPMLFGGGQERNFRPGTENTPMIAGLGKAAELVTQNCEAYEAHMRDVRDYLEERLEAEFGQKRIHLNSQFPGTQRLPNTCNFSIRGPRLQGHVVLAQCRVLMASVGAACHSDHGDQPSPVLLSYGVPFDVARNALRLSVGRSTTRAEVDLVVQDLKQAVAQLEDQA

SEQ ID NO: 48992 - protein, 310 aa, Homo sapiens
MSSWHSRLDWQWRNHFNFDHFEILRAIGKGSFGKVCIVQKNDTKKMYAMKYMNKQKCVERNEVRNVFKELQIMQGLEHPFLVNLWYSFQDEEDMFMVVDLLLGGDLRYHLQQNVHFKEETVKLFICELVMALDYLQNQRIIHRDMKPDNILLDEHGHVHITDFNIAAMLPRETQITTMAGTKPYMAPEMFSSRKGAGYSFAVDWWSLGVTAYELLRGRRPYHIRSSTSSKEIVHTFETTVVTYPSAWSQEMVSLLKKLLEPNPDQRFSQLSDVQNFPYMNDINWDAVFQKRLIPGFIPNVCCVFQNDTVI

SEQ ID NO: 48993 - protein, 93 aa, Homo sapiens
MEREMVLCLAQTIHTQEEDLPRPSISAEPGTVIPLGSHVTFVCRGPVGVQTFRLERDSRSTYNDTEDVSQASPSESEARFRIDSVREGNAGLY

SEQ ID NO: 48994 - protein, 81 aa, Homo sapiens
MKGKRGREELGNTQSAFFSTFGDGGSCTCADSCKCEGCKCTSCKKSCCSCCPAECEKCAKDCVCKGGEAAEAEAEKCSCCQ

SEQ ID NO: 48995 - protein, 72 aa, Homo sapiens
MQSTSNHLWLLSDILGQGATANVFRGRHKTTTRHKVLIMEFCPCGSLYTVLEEPSNAYGLPESEFLIVLRDV

SEQ ID NO: 48996 - protein, 26 aa, Homo sapiens
MKNLDSKVNIIPVIAKADTVSKTELQ

SEQ ID NO: 48997 - protein, 333 aa, Homo sapiens
MGEEDYYLELCERPVQFEKANPVNCVFFDEANKQVFAVRSGGATGVVVKGPDDRNPISFRMDDKGEVKCIKFSLENKILAVQRTSKTVDFCNFIPDNSQLEYTQECKTKNANILGFCWTSSTEIVFITDQGIEFYQVLPEKRSLKLLKSHNLNVNWYMYCPESAVILLSTTVLENVLQPFHFRAGTMSKLPKFEIELPAAPKSTKPSLSERDIAMATIYGQLYVLFLRHHSRTSNSTGAEVVLYHLPREGACKKMHILKLNRTGKFALNVVDNLVVVHHQDTETSVIFDIKLRGEFDGSVTFHHPVLPARSIQPYQIPITGPAAVTSQSPNFL

SEQ ID NO: 48998 - protein, 325 aa, Homo sapiens
MKQRFSALQLLKLLLLLQPPLPRALREALCPEPCNCVPDGALRCPGPTAGLTRLSLAYLPVKVIPSQAFRGLNEVIKIEISQIDSLERIEANAFDNLLNLSEILIQNTKNLRYIEPGAFINLPRLKYLSICNTGIRKFPDVTKVFSSESNFILEICDNLHITTIPGNAFQGMNNESVTLKLYGNGFEEVQSHAFNGTTLTSLELKENVHLEKMHNGAFRGATGPKTLDISSTKLQALPSYGLESIQRLIATSSYSLKKLPSRETFVNLLEATLTYPSHCCAFRNLPTKEQNFSHSISENFSKQCESTVRKVNNKTLSKPRINGYQ

SEQ ID NO: 48999 - protein, 204 aa, Homo sapiens
AEKRSSGERARETGGAEGTGDAVLGEKVLEEALLSREHVLELENSKGPSLASLEGEEDKGKSSSSQVVGPVQEEEYVAEKLPSRFIESAHTELAKDDAAPAPPVADAKAQDRGVEGELGNEESLDRNEEDLGAEDGWTMDAEADHSGGSDRNSMDSVDSCCSLKKTESFQNAQAGSNPKKVDLIIWEIEVPKHLVGRLIGKQGR

SEQ ID NO: 49000 - protein, 22 aa, Homo sapiens
  MOD_RES (1)..(1): Any amino acid
XSKDGIEMTEGSRPMPQASGLH

SEQ ID NO: 49001 - protein, 232 aa, Homo sapiens
  MOD_RES (1)..(1): Any amino acid
XGGPQIAYERGFRWKLAHFRYLCQSNALPSHVKINVSRQTLFEDSFQQIMALKPYDLRRRLYVIFRGEEGLDYGGLARNILRSSLMSGKFSSIMSLNIFSVPFVPFFFRNISHGEWFFLLSHEVLNPMYCLFEYAGKNNYCLQINPASTINPDHLSYFCFIGRFIAMALFHGKFIDTGFSLPFYKRMLSKKLTIKDLESIDTEFYNSLIWIRDNNIEECGLEMYFSVDMEIL

SEQ ID NO: 49002 - protein, 146 aa, Homo sapiens
MDLGAITKYSALHAKPNGLILQYGTAGFRTKAEHLDHVMFRMGLLAVLRSKQTKSTIGVMVTASHNPEEDNGVKLVDPLGEMLAPSWEEHATCLANAEEQDMQRVLIDISEKEAVNLQQDAFVVIGRDTRPSSEKLSQSVIDGVTV

SEQ ID NO: 49003 - protein, 44 aa, Homo sapiens
MGVKLEIFRRELWPPEKLQEIEEFKERLRKRREEKLLRDAQQNS

SEQ ID NO: 49004 - protein, 396 aa, Homo sapiens
  MOD_RES (1)..(1): Any amino acid
XIRDMLLSCHFRGEVCSAEDFKVKPMQVAKELRRCTLPGTVFQGTQRARKGEKQVFTRYGKCYTFNSGRDGRPRLKTMKGGTGNGLEIMLDIQQDEYLPVWGETDETSFEAGIKVQIHSQDEPPFIDQLGFGVAPGFQTFVACQEQRLIYLPPPWGTCKAVTMDSDLDFFDSYSITACRIDCETRYLVENCNCRMVHMPGDAPYCTPEQYKECADPALDFLVEKDQEYCVCEMPCNLTRYGKELSMVKIPSKASAKYLAKKFNKSEQYIGENILVLDIFFEVLNYETIEQKKAYEIAGLLGDIGGQMGLFIGASILTVLELFDYAYEVIKHKLCRRGKCQKEAKRSSADKGVALSLDDVKRHNPCESLRGHPAGMTYAANILPHHPARGTFEDFTC

SEQ ID NO: 49005 - protein, 95 aa, Homo sapiens
MPGSLPLNAEACWPKDVGIVALEIYFPSQYVDQAELEKYDGVDAGKYTIGLGQAKMGFCTDREDINSLCMTVVQNLMERNNLSYDCIGRLEVGTE

SEQ ID NO: 49006 - protein, 250 aa, Homo sapiens
MPGARSGGSGGDGSNSGSYSGDASGAVTVWEVVSLLGKLLGTVVALKVVLYLLRVCLAMAWKSGGASHSELIHNLRKNGIIKTDKVFEVMLATDRSHYAKCNPYMDSPQSIGFQATISAPHMVGCTGKVIGIDHIKELVDDSVNNVRKDDPTLLSSGRVQLVVGDGRMGYAEEAPYDAIHVGAAAPVVPQALIDQLKPGGRLILPVGPAGGNQMLEQYDKLQDGSIKMKPLMGVIYVPLTDKEKQWSRWK

SEQ ID NO: 49007 - protein, 214 aa, Homo sapiens
MEEEIAALVIDNGSGMCKAGFAGDDAPRAVFPSIVGRPRHQGVMVGMGQKDSYVGDEAQSKRGILTLKYPIEHGIVTNWDDMEKIWHHTFYNELRVAPEEHPVLLTEAPLNPKANREKMTQIMFETFNTPAMYVAIQAVLSLYASGRTTGIVMDSGDGVTHTVPIYEGYALPHAILRLDLAGRDLTDYLMKILTERGYSFTTTAEREIVRDIKE

SEQ ID NO: 49008 - protein, 230 aa, Homo sapiens
MAVAMAIYVAGGVSGGHINPAVSLAMCLFGRMKWFKLPFYVGAQFLGAFVGAATVFGIYYDGLMSFAGGKLLIVGENATAHIFATYPAPYLSLANAFADQVVATMILLIIVFAIFDSRNLGAPRGLEPIAIGLLIIVIASSLGLNSGCAMNPARDLSPRLFTALAGWGFEVFRAGNNFWWIPVVGPLVGAVIGGLIYVLVIEIHHPEPDSVFKTEQSEDKPEKYELSVIM

SEQ ID NO: 49009 - protein, 150 aa, Homo sapiens
CRMECCDVPAETLYDVLHDIEYRKKWDSNVIETFDIARLTVNADVGYYSWRCPKPLKNRDVITLRSWLPMGADYIIMNYSVKHPKYPPRKDLVRAVSIQTGYLIQSTGPKSCVITYLAQVDPKGHEEDVQGVPQVPRVETEAPASLQAVA

SEQ ID NO: 49010 - protein, 54 aa, Homo sapiens
MENSTTTISREELEELQEAFNKIDIDNSGYVSDYELQDLFKEASLPLPGYKVRE

SEQ ID NO: 49011 - protein, 52 aa, Homo sapiens [sequence omitted]

SEQ ID NO: 49012 - protein, 157 aa, Homo sapiens
MGRWALDVAFLWKAVLTLGLVLLYYCFSIGITFYNKWLTKSFHFPLFMTMLHLAVIFLFSALSRALVQCSSHRARVVLSWADYLRRVAPTALATALDVGLSNWSFLYVTVSLARHWSWWSSSSPGVSSCSPTSPHSSTWRASPWCWGPRSSVAFAGP

SEQ ID NO: 49013 - protein, 390 aa, Homo sapiens
MTLDDFRIKFEMEQNLRQGVDADINGLRQVLDNLTMEKSDLEMQYETLQEELMALKKNHKEEMSQLTGQNSGDVNVEINVAPGKDLTKTLNDMRQEYEQLIAKNRKDIENQYETQITQIEHEVSSSGQEVQSSAKEVTQLRHGVQELEIELQSQLSKKAALEKSLEDTKNRYCGQLQMIQEQISNLEAQITDVRQEIECQNQEYSLLLSIKMRLEKEIETYHNLLEGGQEDFESSGAGKIGLGGRGGSGGSYGRGSRGGSGGSYGGGGSGGGYGGGSGSRGGSGGSYGGGSGSGGGSGGGYGGGSGGGHSGGSGGGHSGGSGGNYGGGSGSGGGSGGGYGGGSGSRGGSGGSHGGGSGFGGESGGSYGGGEEASGSGGGYGGGSGKSSHS

SEQ ID NO: 49014 - protein, 71 aa, Homo sapiens
  MOD_RES (1)..(1): Any amino acid
XDSGFYWCGIYNASENIITVLRNISLVVSPAPTTSPMWTLPWLPTSTVLITSPEGTSGHPSINGSETRNGS

SEQ ID NO: 49015 - protein, 64 aa, Homo sapiens
MGTAIYKLSGKINFQVKKTHIPEGKYICHAHCRDLVHLDYPQNGNVSSCMPTSEVRYSIKKNSQ

SEQ ID NO: 49016 - protein, 155 aa, Homo sapiens
MREIVHLQAGQCGNQIGAKFWEVISDEHGIDPTGTYHGDSDLQLERINVYYNEEFPDRIMNTFSVVPSPKVSDTVVEPYNATLSVHQLVENTDETYCIDNEALYDICFRTLKLTTPTYGDLNHLVSATMSGVTTCLRFPGQLNADLRKLAVNMVP

SEQ ID NO: 49017 - protein, 87 aa, Homo sapiens
MGKQNSKLRPEVMQDLLESTDFTEHEIQEWYKGFLRDCPSGHLSMEEFKKIYGNFFPYGDASKFAEHVFRTFDANGDGTIDFREFII

SEQ ID NO: 49018 - protein, 93 aa, Homo sapiens
MFYIIGGVATLLLILVIIVFKEKPKYPPSRAQSLSYALTSPDASYLGSIARLFKNLNFVLLVITYETPRGGGGEQHQQSAHCCVRGSSLRGRW

SEQ ID NO: 49019 - protein, 30 aa, Homo sapiens
MTTCGHNFCRACIQLSWEKARGKKGRRKRK

SEQ ID NO: 49020 - protein, 161 aa, Homo sapiens
MAGRGGAARPNGPAAGNKICQFKLVLLGESAVGKSSLVLRFVKGQFHEYQESTIGAAFLTQTVCLDDTTVKFEIWDTAGQERYHSLAPMYYRGAQAAIVVYDITNTDTFARAKNWVKELQRQASPNIVIALAGNKADLASKRAVEFQLTTYPTWRMCQRMR

SEQ ID NO: 49021 - protein, 108 aa, Homo sapiens
MVKECKHCNIVAYFGSYLSREKLWICMEYCGGGSLQDIYHVTGPLSELQIAYVCRETLQGLAYLHTKGKMHRDIKGANILLTDHGDVKLADFGVAAKITATIAKRKSF

SEQ ID NO: 49022 - protein, 21 aa, Homo sapiens
  MOD_RES (1)..(1): Any amino acid
XYYYYYYMDVWGKGTTVTVSS

SEQ ID NO: 49023 - protein, 34 aa, Homo sapiens
MSRKQNQKDSSGFIFDLQSNTVLAQGGAFENMKE

SEQ ID NO: 49024 - protein, 73 aa, Homo sapiens
MIAAVSLGFFGSIFALFGMKCTKVGGSDKAKAKIACLAGIVFILSGLCSMTGCSLYANKITTEFFDPLFVEQK

SEQ ID NO: 49025 - protein, 198 aa, Homo sapiens
MASLLKVDQEVKLKVDSFRERITSEPTYKKRRLDECEEAFQGTKVFVMPNGMLKSNQQLVDIIEKVKPEIRLLIEKCNTVKMWVQLLIPRIEDGNNFGVSIQEETVAELRTVESEAASYLDQISRYYITRAKLVSKIAKYPHVEDYRRTVTEIDEKEYISLRLIISELRNQYVTLHDMILKNIEKIKRPRSSNAETLY

SEQ ID NO: 49026 - protein, 173 aa, Homo sapiens
  MOD_RES (1)..(1): Any amino acid
XSSGPRKHLRTDAFSQHHLEPLECPFERQHYPEAYASPSHTKGEQGLYPLPLLNSTLDDGKATLTPSNTPLGRNLSTHQTYPVVAGREMVGPTLPGYPPHIPTSGQGSYASSAIAGMVAGSEYSGNAYGHTPYSSYSEAWRFPNSSLLSSPYYYSSTSRPSAPPTTATAFDHL

SEQ ID NO: 49027 - protein, 215 aa, Homo sapiens
WQHRKVRLHQRLQLCVFQQDVQQVLDWIENHGEAFLSKHTGVGKSLHRARALQKRHDDFEEVAQNTYTNADKLLEAAEQLAQTGECDPEEIYKAARHLEVRIQDFVRRVEQRKLLLDMSVSFHTHTKELWTWMEDLQKEMLEDVCADSVDAVQELIKQFQQQQTATLDATLNVIKEGEDLIQQLRSAPPSLGEPSEARSAWAELSSGKCLGLDVR

SEQ ID NO: 49028 - protein, 2676 aa, Homo sapiens
MGKPLSRPDCLRQNPPCVGKGEEEEDLNIEDCYVPQRSIYDTVRLNEQIDSGSKGSLSSRHFTDRTLPYSHRTLDVSSLCSNGALTSSSVFELRGREANKLDEKMIFDALKLNSDIIRTTGLPKAKSHAEKKEHRRSWRMFVPANFMDYANKSESSFVEPADMSDAVTKASKCRWGTNSLTSEEDDSGLCSPPAEREEKQGILTGDQSRIKSLSSTEDILVTDQYRPFFSVNSISEQKIPLLSCQSAHPDENFKMILHDVSPLEEAKHVNGQREIHDENCCLQNNLKESPVKCDPLIMPRNRENEHIFNLGEEDETYGPGESQITAQSRELLKDSPQDLDLSHTDLGESDVDCGSTSLVENVTLLTQYDSGECNIASKEEVEAPLSAQESEMLYKKFSLKFVSARKKAAPRKTGAQAGILDTVCNGFQLVQVFQKEEIEPLQGKQQDVNWLGQGLIQSAAKSTSTQGLEHDLDDVNARWKTLNKKVAQRAAQLQEALLHCGRFQDALESLLSWMVDTEELVANQKPPSAEFKVVKAQIQEQKLLQRLLDDRKSTVEVIKREGEKIATTAEPADKVKILKQLSLLDSRWEALLNKAETRNRQLEGISVVAQQFHETLEPLNEWLTTIEKRLVNCEPIGTQASKLEEQIAQHKALEDDIINHNKHLHQAVSIGQSLKVLSSREDKDMVQSKLDFSQVWYIEIQEKSHSRSELLQQALCNAKIFGEDEVELMNWLNEVHDKLSKLSVQDYSTEGLWKQQSELRVLQEDILLRKQNVDQALLNGLELLKQTTGDEVLIIQDKLEAIKARYKDITKLSTDVAKTLEQALQLARRLHSTHEELCTWLDKVEVELLSYETQVLKGEEASQAQMRPKELKKEAKNNKALLDSLNEVSSALLELVPWRAREGLEKMVAEDNERYRLVSDTITQKVEEIDAAILRSQQFDQAADAELSWITETEKKLMSLGDIRLEQDQTSAQLQVQKTFTMEILRHKDIIDDLVKSGHKIMTACSEEEKQSMKKKLDKVLKNYDTICQINSERYLQLERAQSLVNQFWETYEELWPWLTETQSIISQLPAPALEYETLRQQQEEHRQLRELIAEHKPHIDKMNKTGPQLLELSPGEGFSIQEKYVAADTLYSQIKEDVKKRAVALDEAISQSTQFHDKIDQILESLERIVERLRQPPSISAEVEKIKEQISENKNVSVDMEKLQPLYETLKQRGEEMIARSGGTDKDISAKAVQDKLDQMVFIWENIHTLVEEREAKLLDVMELAEKFWCDHMSLIVTIKDTQDFIRDLEDPGIDPSVVKQQQEAAETIREEIDGLQEELDIVINLGSELIAACGEPDKPIVKKSIDELNSAWDSLNKAWKDRIDKLEEAMQAAVQYQDGLQAVFDWVDIAGGKLASMSPIGTDLETVKQQIEELKQFKSEAYQQQIEMERLNHQAELLLKKVTEESDKHTVQDPLMELKLIWDSLEERIINRQHKLEGALLALGQFQHALDELLAWLTHTEGLLSEQKPVGGDPKAIEIELAKHHVLQNDVLAHQSTVEAVNKAGNDLIESSAGEEASNLQNKLEVLNQRWQNVLEKTEQRKQQLDGALRQAKGFHGEIEDLQQWLTDTERHLLASKPLGGLPETAKEQLNVHMEVCAAFEAKEETYKSLMQKGQQMLARCPKSAETNIDQDINNLKEKWESVETKLNERKTKLEEALNLAMEFHNSLQDFINWLTQAEQTLNVASRPSLILDTVLFQIDEHKVFANEVNSHREQIIELDKTGTHLKYFSQKQDVVLIKNLLISVQSRWEKVVQRLVERGRSLDDARKRAKQFHEAWSKLMEWLEESEKSLDSELEIANDPDKIKTQLAQHKEFQKSLGAKHSVYDTTNRTGRSLKEKTSLADDNLKLDDMLSELRDKWDTICGKSVERQNKLEEALLFSGQFTDALQALIDWLYRVEPQLAEDQPVHGDIDLVMNLIDNHKAFQKELGKRTSSVQALKRSARELIEGSRDDSSWVKVQMQELSTRWETVCALSISKQTRLEAALRQAEEFHSVVHALLEWLAEAEQTLRFHGVLPDDEDALRTLIDQHKEFMKKLEEKRAELNKATTMGDTVLAICHPDSITTIKHWITIIRARFEEVLAWAKQHQQRLASALAGLIAKQELLEALLAWLQWAETTLTDKDKEVIPQEIEEVKALIAEHQTFMEEMTRKQPDVDKVTKTYKRRAADPSSLQSHIPVLDKGRAGRKRFPASSLYPSGSQTQIETKNPRVNLLVSKWQQVWLLALERRRKLNDALDRLEELREFANFDFDIWRKKYMRWMNHKKSRVMDFFRRIDKDQDGKITRQEFIDGILSSKFPTSRLEMSAVADIFDRDGDGYIDYYEFVAALHPNKDAYKPITDADKIEDEVTRQVAKCKCAKRFQVEQIGDNKYRFFLGNQFGDSQQLRLVRILRSTVMVRVGGGWMALDEFLVKNDPCRVHHHGSKMLRSESNSSITTTQPTIAKGRTNMELREKFILADGASQGMAAFRPRGRRSRPSSRGASPNRSTSVSSQAAQAASPQVPATTTPKGTPIQGSKLRLPGYLSGKGFHSGEDSGLITTAAARVRTQFADSKKTPSRPGSRAGSKAGSRASSRRGSDASDFDISEIQSVCSDVETVPQTHRPTPRAGSRPSTAKPSKIPTPQRKSPASKLDKSSKR

SEQ ID NO: 49029 - protein, 35 aa, Homo sapiens
  MOD_RES (1)..(1): Any amino acid
XISSLRGIQRIAATSKILSAPGSQREGRNPQLNQQ

SEQ ID NO: 49030 - protein, 409 aa, Homo sapiens
MVGKCALAYQLYSLGLIDKPNLQFDTDAVRLFEELYEDHGDTLSLQYGGSQLVHRVKTYRKIAPWTQHSKDIMQTLSRYYSNAFSDADRQDSINLFLGVFHPTEGKPHLWELPTDFYLHHKNTMRLLPTRRSYTYWWTPEVIKHLPLPYDEVICAVNLKKLIVKKFHKYEEEIDIHNEFFRPYELSSFDDTFCLAMTSSARDFMPKTVGIDPSPFTVRKPDETGKSVLGNKSNREEAVLQRKTAASAPPPPSEEAVSSSSEDDSGTDREEEGSVSQRSTPVKMTDAGDSAKVTENVVQPMKELYGINLSDGLSEEDFSIYSRFVQLGQSQHKQDKNSQQPCSRCSDGVIKLTPISAFSQDNIYEVQPPRVDRKSTEIFQAHIQASQGIMQPLGKEDSSMYREYIRNRYL

SEQ ID NO: 49031 - protein, 227 aa, Homo sapiens
  MOD_RES (1)..(1): Any amino acid
XPISLLQEYGTRIGKTPVYDLLKAEGQAHQPNFTFRVTVGDTSCTGQGPSKKAAKHKAAEVALKHLKGGSMLEPALEDSSSFSPLDSSLPEDIPVFTAAAAATPVPSVVLTRSPPMELQPPVSPQQSECNPVGALQELVVQKGWRLPEYTVTQESGPAHRKEFTMTCRVERFIEIGCGLPPGWSSKPGPRLHLGFSTKFSRREDPVPPQLLPGLPGCPGPCLLPCPQ

SEQ ID NO: 49032 - protein, 306 aa, Homo sapiens
MCRVCLEDKPIKPLPCCKKAVCEECLKVYLSAQVQLGQVEIKCPITECFEFLEETTVVYNLTHEDSIKYKYFLELGRIDSSTKPCPQCKHFTTFKKKGHIPTPSRSESKYKIQCPTCQFVWCFKCHSPWHEGVNCKEYKKGDKLLRHWASEIEHGQRNAQKCPKCKIHIQRTEGCDHMTCSQCNTNFCYRCGERYRQLRFFGDHTSNLSIFGCKYRYLPERPHLRRLVRGSVCAGKLFIAPLIMVLGLALGAIAVVIVEEIKTYWNLISGRTRNQTQHLAPQPVLLSDMLYCLKQVFICISYLLPL

SEQ ID NO: 49033 - protein, 167 aa, Homo sapiens
  MOD_RES (1)..(1): Any amino acid
XRGASLDGERASPEAAAREPCPLRGLLSCLPDGPTSQPHLATTPTDSSCSSGPTGDGVQGSPLPISESDTAGTGRTSISKALIVASEDLDPVPSSFFSRTQFPCCAVLLLTKYAREQDNIFSLWCNHQRGGMMLSPWGACHPAPITEHFVHRKSPAVSNMQAHGQQH

SEQ ID NO: 49034 - protein, 148 aa, Homo sapiens
  MOD_RES (1)..(1): Any amino acid
XRHLPVGCVSFQNISSNVLEESAISDDILSPDEEGFCSGKHFTELGLVGLLEQAAGYFTMPQRVFGTYFRVGFYGAHFGDLDEQEFVYKEPSITKLAEISHRLEEFYTERFGDDVVEIIKDSNPVDKSKLDSQKAYIQITYVEPYFDT

SEQ ID NO: 49035 - protein, 109 aa, Homo sapiens
MKSARAKTPRKPTVKKGSQTNLKDPVGVYCRVRPLGFPDQECCIEVINNTTVQLHTPEGYRLNRNGDYKETQYSFKQVFGTHTTQKELFDVVANPLVNDLIHGKNGFQI

SEQ ID NO: 49036 - protein, 186 aa, Homo sapiens
METMASPGKDNYRMKSYKNNALNPEEMRRRREEEGIQLRKQKREQQLFKRRNVELINEEAAMFDSLLMDSYESVITREMVEMLFSDDSDLQLATTQKFRKLLSKEPSPPIDEVINTPRVVDRFVEFLKRNENCTLQFEAAWALTNIASGTSQQTKIVIEAGAVPIFIELLNSDFEDVQEQSGHWET

SEQ ID NO: 49037 - protein, 138 aa, Homo sapiens
EEEPQDREKGLWWFQLKVWSMAVVSILLLSVCFTVSSVDWSCCPTPWTSFQSSCYFISTGMQSWTKSQKNCSVMGADLVVINTREEQDFIIQNLKRNSSYFLGLSDPGGRRHWQWVDQTPYNENVTFWHSGEPNNLDE

SEQ ID NO: 49038 - protein, 748 aa, Homo sapiens
MAEEEALRGNSDPWPNSMVVEHPEFLKAGKEPGLQIWRVEKFDLVPVPTNLYGDFFTGDAYVILKTVQLRNGNLQYDLHYWLGNECSQDESGAAAIFTVQLDDYLNGRAVQHREVQGFESATFLGYFKSGLKYKKGGVASGFKHVVPNEVVVQRLFQVKGRRVVRATEVPVSWESFNNGDCFILDLGNNIHQWCGSNSNRYERLKATQVSKGIRDNERSGRARVHVSEEGTEPEAMLQVLGPKPALPAGTEDTAKEDAANRKLAKLYKVSNGAGTMSVSLVADENPFAQGALKSEDCFILDHGKDGKIFVWKGKQANTEERKAALKTASDFITKMDYPKQTQVSVLPEGGETPLFKQFFKNWRDPDQTDGLGLSYLSSHIANVERVPFDAATLHTSTAMAAQHGMDDDGTGQKQIWRIEGSNKVPVDPATYGQFYGGDSYIILYNYRHGGRQGQIIYNWQGAQSTQDEVAASAILTAQLDEELGGTPVQSRVVQGKEPAHLMSLFGGKPMIIYKGGTSREGGQTAPASTRLFQVRANSAGATRAVEVLPKAGALNSNDAFVLKTPSAAYLWVGTGASEAEKTGAQELLRVLRAQPVQVAEGSEPDGFWEALGGKAAYRTSPRLKDKKMDAHPPRLFACSNKIGRFVIEEVPGELMQEDLATDDVMLLDTWDQVFVWVGKDSQEEEKTEALTSAKRYIETDPANRDRRTPITVVKQGFEPPSFVGWFLGWDDDYWSVDPLDRAMAELAA

SEQ ID NO: 49039 - protein, 103 aa, Homo sapiens
MNPPEGAAEEGGAADSDVDAFFRTGSFRNDGLKASDVLPILKEKVAFVSGGRDKRGGPILTFPARSNHDRIRQEDLRKLVTYLASVPSEDVCKRGFTVIIDMR

SEQ ID NO: 49040 - protein, 257 aa, Homo sapiens
  MOD_RES (1)..(1): Any amino acid
XHKVNTLALKYGLRGHVPITKSTASLQKQILGFTQRLHAAEVERRSLRLEVTEFKRSVNEMKKELDKAQGLQMQLNEFKQSKLITHEKFESACEELNNALLREEQAQMLLNEQAQQLQELNYKLELHSSEEADKNQTLGEAVKSLSEAKMELRRKDQSLRQLNRHLTQLEQDKRRLEENIHDAESALRMAAKDKECVANHMRAVENTLHKVRDQISLSWSAASRNDFTLQLPKLHLETFAMEGLKGGPEVVACQVRV

SEQ ID NO: 49041 - protein, 104 aa, Homo sapiens
  MOD_RES (1)..(1): Any amino acid
XRCPFLALSATISNPEHLTEWLQSVKWYWKQEDKIIENNTASKRHVGRQAGFPKDYLQVKQSYKVRLVLYGERYNDLEKHVCSIKHGDIHFDHFHPCAALTTDH

SEQ ID NO: 49042 - protein, 315 aa, Homo sapiens
MFANLKYVSLGILVFQTTSLVLTMRYSRTLKEEGPRYLSSTAVVVAELLKIMACILLVYKDSKCSLRALNRVLHDEILNKPMETLKLAIPSGIYTLQNNLLYVALSNLDAATYQVTYQLKILTTALFSVSMLSKKLGVYQWLSLVILMTGVAFVQWPSDSQLDSKELSAGSQFVGLMAVLTACFSSGFAGVYFEKILKETKQSVWIRNIQLGFFGSIFGLMGVYIYDGELVSKNGFFQGYNRLTWIVVVLQSLTLSPGWSAVARSRLTATSHSLVQGILLPQPLSSWDCRREPLRPAYTVYIFKDCSNRYKNCKK

SEQ ID NO: 49043 - protein, 201 aa, Homo sapiens
MQKFFGLPQTGDLDQNTIETMRKPRCGNPDVANYNFFPRKPKWDKNQITYRIIGYTPDLDPETVDDAFARAFQVWSDVTPLRFSRIHDGEADIMINFGRWEHGDGYPFDGKDGLLAHAFAPGTGVGGDSHFDDDELWTLGEGQVVRVKYGNADGEYCKFPFLFNGKEYNSCTDTGRSDGFLWCSTTYNFEKDGKYGFCPHE

SEQ ID NO: 49044 - protein, 532 aa, Homo sapiens
  MOD_RES (1)..(1): Any amino acid
XQLISKYSLRELHLSFTQGFWRTRYWGPPFLQAPSGAELWVWFQDTVTDVDKSWKELSNVLSGIFCASLNFIDSTNTVTPTASFKPLGLANDTDHYFLRYAVLPREVVCTENLTPWKKLLPCSSKAGLSVLLKADRLFHTSYHSQAVHIRPVCRNARCTSISWELRQTLSVVFDAFITGQGKKDWSLFRMFSRTLTEPCPLASESRVYVDITTYNQDNETLEVHPPPTTTYQDVILGTRKTYAIYDLLDTAMINNSRNLNIQLKWKRPPENEAPPVPFLHAQRYVSGYGLQKGELSTLLYNTHPYRAFPVLLLDTVPWYLRLYVHTLTITSKGKENKPSEDLSPEPGPQPALSCPLQVPQTLISQGYIHYQPAQDRLQPHLLEMLIQLPANSVTKVSIQFERALLKWTEYTPDPNHGFYVSPSVLSALVPSMVAAKPVDWEESPLFNSLFPVSDGSNYFVRLYTEPLLVNLPTPDFSMPYNVICLTCTVVAVCYGSFYNLLTRTFHIEEPRTGGLAKRLANLIRRARGVPPL

SEQ ID NO: 49045 - protein, 172 aa, Homo sapiens
  MOD_RES (1)..(1): Any amino acid
XPEDYEGKNCSHLKDHCRTTPCEVIDSCTVAMASNDTPEGVRYISSNVCGPHGKCKSQSGGKFTCDCNKGFTGTYCHENINDCESNPCRNGGTCIDGVNSYKCICSDGWEGAYCETSESATLWGALGCMGHVGGIPLQRGKTFFVLEISGSKTAVISALGQYHLCLICIYES

SEQ ID NO: 49046 - protein, 46 aa, Homo sapiens
  MOD_RES (1)..(1): Any amino acid
XEEAPRRIRDVINVFHRLRQLRDKKPCALSLAGSPCLYYWIKIMLI

SEQ ID NO: 49047 - protein, 63 aa, Homo sapiens
  MOD_RES (1)..(1): Any amino acid
XLYYEYYPHVYPGRRGSMVPFSMRILHAELQQYLGNPQESLDRLHKVKTVCSKQHGYSWRPLS

SEQ ID NO: 49048 - protein, 145 aa, Homo sapiens
MHRLAPHCSFARWLLCNGSLFRYKHPSEEELRALAGKPRPRGRKERWANGLSEEKPLSVPRDAPFQLETCPLTTVDALVLRFFLEYQWFVDFAVYSGGVYLFTEAYYYMLGPAKETNIAVFWCLLTVTFSIKMFLTVTRLYFSAE

SEQ ID NO: 49049 - protein, 144 aa, Homo sapiens
AQRYEAASTIYGPHTLSAYIQLFRNLAKAIATGEVAEVIFVGANPKNSVQNQTHQTFLTVEKYEATSTSWQIVCNDASWETRFYWHKGLLGLSNATVEWHIPDTAQPGIYRIRYFGHNRKQDILKPAVILSFEGTSPAFEVVTI

SEQ ID NO: 49050 - protein, 496 aa, Homo sapiens
MLAMDTCKHVGQLQLAQDHSSLNPQKWHCVDCNTTESIWACLSCSHVACGRYIEEHALKHFQESSHPVALEVNEMYVFCYLCDDYVLNDNTTGDLKLLRRTLSAIKSQNYHCTTRSGRFLRSMGTGDDSYFLHDGAQSLLQSEDQLYTALWHRRRILMGKIFRTWFEQSPIGRKKQEEPFQEKIVVKREVKKRRQELEYQVKAELESMPPRKSLRLQGLAQSTIIEIVSVQVPAQTPASPAKDKVLSTSENEISQKVSDSSVKRRPIVTPGVTGLRNLGNTCYMNSVLQVLSHLLIFRQCFLKLDLNQWLAMTASEKTRSCKHPPVTDTVVYQMNECQEKDTGFVCSRQSSLSSGLSGGASKGRKMELIQPKEPTSQYISLCHELHTLFQVMWSGKWALVSPFAMLHSVWRLIPAFRGYAQQDAQEFLCELLDKIQRELETTGTSLPALIPTSQRKLIKQVLNVVNNIFHGQLLSQQSVEGFPPNQLYSQKPRNNL

SEQ ID NO: 49051 - protein, 57 aa, Homo sapiens
MGINECQYQFRFGRWNCSALGEKTVFGQELRVGSREAAFTYAITAAGVAHAVTAACS

SEQ ID NO: 49052 - protein, 193 aa, Homo sapiens
  MOD_RES (1)..(1): Any amino acid
XLLGAHGVGRRHIKNTLITKHPDRFAYPIPHTTRPPKKDEENGKNYYFVSHDQMMQDISNNEYLEYGSHEDAMYGTKLETIRKIHEQGLIAILDVEPQALKVLRTAEFAPFVVFIAAPTITPGLNELPKWCRKLPDESLQRLQKESDILQRTYAHYFDLTIINNEIDETIRHLEEAVELVCTAPQWVPVSWVY

SEQ ID NO: 49053 - protein, 125 aa, Homo sapiens
MTVLEITLAVILTLLGLAILAILLTRWARCKQSEMYISRYSSEQSARLLDYEDGRGSRHAYSTQSDTSYDNRERSKRDYTPSTNSLVSMASKFSLGQTELILLLMCFILALSRSSIALPQGSMMQ

SEQ ID NO: 49054 - protein, 85 aa, Homo sapiens
MSTAREQPIFSTRAHVFQIDPATKRNWIPAGKHALTVSYFYDATRNVYRIISIGGAKAIINSTVTPNMTFTKTSQKFGQWADSRA

SEQ ID NO: 49055 - protein, 37 aa, Homo sapiens
MAAGIVASRRLRDLLTRRESPLALWGTDRLQLPGTQY

SEQ ID NO: 49056 - protein, 117 aa, Homo sapiens
FPPNDPKAGTQGKCMPFFRAGFVCPTPPYKSLAREQINALTSFLDASFVYSSEPSLASRLRNLSSPLGLMAVNQEVSDHGLPYLPYDSKKPSPCEFINTTARVPCFLAGKETEAQKC

SEQ ID NO: 49057 - protein, 93 aa, Homo sapiens
GRSRWSNLEKVCTSVNLNKACRKQEELDSSMEALTLNLTEVVKRQNSKSKKGFNQISTSQIKVDKVQIIGSNSCPFAVCLDQDERKILQSVVR

SEQ ID NO: 49058 - protein, 70 aa, Homo sapiens
  MOD_RES (1)..(1): Any amino acid
XSNVIQNGLRHTFGNSGGEKQYLTTVIPYEKKNGPPSVEDLQILTKILRAMKEDSEKVPSLLTDYILKGL

SEQ ID NO: 49059 - protein, 448 aa, Homo sapiens
MIPTFTALLCLGLSLGPRTHMQAGPLPKPTLWAEPGSVISWGNSVTIWCQGTLEAREYRLDKEESPAPWDRQNPLEPKNKARFSIPSMTEDYAGRYRCYYRSPVGWSQPSDPLELVMTGAYSKPTLSALPSPLVTSGKSVTLLCQSRSPMDTFLLIKERAAHPLLHLRSEHGAQQHQAEFPMSPVTSVHGGTYRCFSSHGFSHYLLSHPSDPLELIVSGSLEGPRPSPTRSVSTAAGPEDQPLMPTGSVPHSGLRRHWEVLIGVLVVSILLLSLLLFLLLQHWRQGKHRTLAQRQADFQRPPGAAEPEPKDGGLQRRSSPAADVQGENFCAAVKDTQPEDGVEMDTRQSPHDEDPQAVTYAKVKHSRPRREMASPPSPLSGEFLDTKDRQAEEDRQMDTEAAASEAPQDVTYARLHSFTLRQKATEPPPSQEGASPAEPSVYATLAIH

SEQ ID NO: 49060 - protein, 131 aa, Homo sapiens
MQYLNIKEDCNAMAFCAKMRSSKKTEVNLEAPEPGVEVIFYLSDREPLRLGSGEYTAEELCIRAAQACRISPLCHNLFALYDENTKLWYAPNRTITVDDKMSLRLHYRMRFYFTNWHGTNDNEQSVWRHSP

SEQ ID NO: 49061 - protein, 430 aa, Homo sapiens
MAAMETETAPLTLESLPTDPLLLILSFLDYRDLINCCYVSRRLSQLSSHDPLWRRHCKKYWLISEEEKTQKNQCWKSLFIDTYSDVGRYIDHYAAIKKAWDDLKKYLEPRCPRMVLSLKEGAREEDLDAVEAQIGCKLPDDYRCSYRIHNGQKLVVPGLLGSMALSNHYRSEDLLDVDTAAGGFQQRQGLKYCLPLTFCIHTGLSQYIAVEAAEGRNKNEVFYQCPDQMARNPAAIDMFIIGATFTDWFTSYVKNVVSGGFPIIRDQIFRYVHDPECVATTGDITVSVSTSFLPELSSVHPPHYFFTYRIRIEMSKDALPEKACQLDSRYWRITNAKGDVEEVQGPGVVGEFPIISPGRVYEYTSCTTFSTTSGYMEGYYTFHFLYFKDKIFNVAIPRFHMACPTFRVSIARLGYLMTSVTVTPTLETIT

SEQ ID NO: 49062 - protein, 89 aa, Homo sapiens
MLLVDADQPEPMRSGARELALFLTPEPGAEAKEVEETIEGMLLRLEEFCSLADLIRSDTSQILEENIPVLKAKLTEMRGIYAKVDRLES

SEQ ID NO: 49063 - protein, 324 aa, Homo sapiens
MHVKCSERNEAVVISGRKLAQQIKQEVRQEVEEWVASGNKRPHLSVILVGENPASHSYVLNKTRAAAVVGINSETIMKPASISEEELLNLINKLNNDDNVDGLLVQLPLPEHIDERRICNAVSPDKDVDGFHVINVGRMCLDQYSMLPATPWGVWEIIKRTGIPTLGKNVVVAGRSKNVGMPIAMLLHTDGAHERPGGDATVTISHRYTPKEQLKKHTILADIVISAAGIPNLITADMIKEGAAVIDVGINRVHDPVTAKPKLVGDVDFEGVRQKAGYITPVPGGVGPMTVAMLMKNTIIAAKKVLRLEEREVLKSKELGVATN

SEQ ID NO: 49064 - protein, 68 aa, Homo sapiens
MAMIELGFGRQNFHPLKRKSSLLLKLIAVVFAVLLFCEFLIYYLAIFQCNWPEVKTTASDGEQTTREP

SEQ ID NO: 49065 - protein, 890 aa, Homo sapiens
MEGKSYVFRVLSANRHGLSEPSEITSPIQAQDVTVVPSAPGRVLASRNTKTSVVVQWDRPKHEEDLLGYYVDCCVAGTNLWEPCNHKPIGYNRFVVHGLTTGEQYIFRVKAVNAVGMSENSQESDVIKVQAALTVPSHPYGITLLNCDGHSMTLGWKVPKFSGGSPILGYYLDKREVHHKNWHEVNSSPSKPTILTVDGLTEGSLYEFKIAAVNLAGIGEPSDPSEHFKCEAWTMPEPGPAYDLTFCEVRDTSLVMLWKAPVYSGSSPVSGYFVDFREEDAGEWITVNQTTTANRYLKVSDLQQGKTYVFRVRAVNANGVGKPSDTSEPVLVEARPGTKEISAGVDEQGNIYLGFDCQEMTDASQFTWCKSYEEISDDERFKIETVGDHSKLYLKNPDKEDLGTYSVSVSDTDGVSSSFVLDPEELERLMALSNEIKNPTIPLKSELAYEIFDKGRVRFWLQAEHLSPDASYRFIINDREVSDSEIHRIKCDKATGIIEMVMDRFSIENEGTYTVQIHDGKAKSQSSLVLIGDAFKTVLEEAEFQRKEFLRKQGPHFAEYLHWDVTEECEVRLVCKVANTKKETVFKWLKDDVLYETETLPNLERGICELLIPKLSKKDHGEYKATLKDDRGQDVSILEIAGKVYDDMILAMSRVCGKSASPLKVLCTPEGIRLQCFMKYFTDEMKVNWCHKDAKISSSEHMRIGGSEEMAWLQICEPTEKDKGKYTFEIFDGKDNHQRSLDLSGQAFDEAFAEFQQFKAAAFAEKNRGRLIGGLPDVVTIMEGKTLNLTCTVFGNPDPEVIWFKNDQDIQLSEHFSVKVEQAKYVSMTIKGVTSEDSGKYSINIKNKYGGEKIDVTVSVYKHGEKIPDMAPPQQAKPKLIPASASAAGQ

SEQ ID NO: 49066 - protein, 161 aa, Homo sapiens
MVLGPEQKMSDDSVSGDHGESASLGNINPAYSNPSLSQSPGDSEEYFATYFNEKISIPEEEYSCFSFRKLWAFTGPGFLMSIAYLDPGNIESDLQSGAVAGFKLLWILLLATLVGLLLQRLAARLGVVTGLHLAEVCHRQYPKVLPRGSTLFLLQVRATVQ

SEQ ID NO: 49067 - protein, 295 aa, Homo sapiens
  MOD_RES (1)..(1): Any amino acid
XPPSGPRGTLLLLPLLLLLLLRAVLAVPLERGAPNKEETPATESPDTGLYYHRYLQEVIDVLETDGHFREKLQAANAEDIKSGKLSRELDFVSHHVRTKLDELKRQEFEHLDPQNQHTFEARDLELLIQTATRDLAQYDAAHHEEFKRYEMLKEHERRRYLESLGEEQRKEAERKLEEQQRRHREHPKVNVPGSQAQLKEVWEELDGLDPNRFNPKTFFILHDINSDGVLDEQELEALFTKELEKVYDPKNEEDDMREMEEERLRMREHVMKNVDTNQDRLVTLEEFLASTQRKE

SEQ ID NO: 49068 - protein, 134 aa, Homo sapiens
MYNPIKTLKTNTIGTLNMLGLAKRVGARLLLASTSEVYGDPEVHPQSEDYWGHVNPIGPRACYDEGKRVAETMCYAYMKQEGVEVRVARIFNTFGPRMHMNDGRVVSNFILQALQGEPLTVYGSGSQTRAFQYV

SEQ ID NO: 49069 - protein, 569 aa, Homo sapiens
MDALEDYVWPRATSELILLPVTGLECVGDRLLAGRDGAYYQLFVRDGQLQPVLRQKSCRGMNWLAGLRIVPDGSMVILGFHANEFVVWNPRSHEKLHIVNCGGGHRSWAFSDTEAAMAFAYLKDGDVMLYRALGGCTRPHVILREGLHGREITCVKRVGTITLGPEYGVPSFMQPDDLEPGSEGPDLTDIVITCSEDTTVCVLALPTTTGSAHALTAVCNHISSVRAVAVWGIGTPGGPQDPQPGLTAHVVSAGGRAEMHCFSIMVTPDPSTPSRLACHVMHLSSHRLDEYWDRQRNRHRMVKVDPETRYMSLAVCELDQPGLGPLVAAACSDGAVRLFLLQDSGRILQLLAETFHHKRCVLKVHSFTHEAPNQRRRLLLCSAATDGSLAFWDLTTMLDHDSTVLEPPVDPGLPYRLGTPSLTLQAHSCGINSLHTLPTREGHHLVASGSEDGSLHVFVLAVEMLQLEEAVGEAGLVPQLRVLEEYSVPCAHAAHVTGLKILSPSIMVSASIDQRLTFWRLGHGEPTFMNSTVFHVPDVADMDCWPVSPEFGHRCALGGQGLEVYNWYD

SEQ ID NO: 49070 - protein, 157 aa, Homo sapiens
MAAALPRTLGELQLYRILQKANLLSYFDAFIQQGGDDVQQLCEAGEEEFLEIMALVGMASKPLHVRRLQKALRDWVTNPGLFNQPLTSLPVSSIPIYKLPEGSPTWLGISCSSYERSSNAREPHLKIPKCAATTCVQSLGQGKSDVVGSLALQSVGE

SEQ ID NO: 49071 - protein, 180 aa, Homo sapiens
MKTVAGALLSLVMGQPSEGRPELTPIAIMAGRLLVQRLFGGSSDLMDYDNVPTTVFTPLEYGCVGLSEEEAVARHGQEHVEVYHAHYKPLEFTVAGRDASQCYVKMVCLREPPQLVLGLHFLGPNAGEVTQGFALGIKCGASYAQVMRTVGIHPTCSEEVVKLRISKRSGLDPTVTGCCG

SEQ ID NO: 49072 - protein, 116 aa, Homo sapiens
MPFPPMPPPPAPAPGAQAARQLPRRPCAAGDKKKRPPQRPEGLLSSSWPSATLKRPPARRGPGLDRTQPPAPPGVSPQALPSRARAPATCAPPRPAGSGHSPARTTYAATSAGTGT

SEQ ID NO: 49073 - protein, 40 aa, Homo sapiens
  MOD_RES (1)..(1): Any amino acid
XNYEMPRGDTSSLRAPAEDLRWVEKTLSLLYSPQVAGSSR

SEQ ID NO: 49074 - protein, 201 aa, Homo sapiens
MMQGNTCHRMSFHPGRGCPRGRGGHGARPSAPSFRPQNLRLLHPQQPPVQYQYEPPSAPSTTFSNSPAPNFLPPRPDFVPFPPPMPPSAQGPLPPCPIRPPFPNHQMRHPFPVPPCFPPMPPPMPCPNNPPVPGAPPGQGTFPFMMPPPSMPHPPPPPVMPQQVNYQYPPGYSHHNFPPPSFNSFQNNPSSFLPSANNSSS

SEQ ID NO: 49075 - protein, 521 aa, Homo sapiens
MRVASVQQVGWSLLCKLIEVCPGTMQSLMGPQDVGNDWEVLGVHQLILKMLTVHNASVNLSVIGLKTLDLLLTSGKITLLILDEESDIFMLIFDAMHSFPANDEVQKLGCKALHVLFERGNNVEVLMSGNVRCYNIVVEAMKAFPMSERIQEVSCCLLHRLTLGNFFNILVLNEVHEFVVKAVQQYPENAALQISALSCLALLRSFPGICECIVNSLRTKCNTSLDIMAAVVPKILTVMKRHETSLPVQLEALRAILHFIVPGMPEESREDTEFHHKLNMVKKQCFKNDIHKLVLAALNRFIGNPGIQKCGLKVISSIVHFPDALEMLSLEGAMDSVLHTLQMYPDDQEIQCLGLSLIGYLITKKNVFIGTGHLLAKILVSSLYRFKDVAEIQTKGFQTILAILKLSASFSKLLVHHSFDLVIFHQMSSNIMEQKDQQFLNLCCKCFAKVAMDDYLKNVMLERACDQNNSIMVECLLLLGADANQAKEGSSLICQVCEKESSPKLVELLLNSGSREQDVRK

SEQ ID NO: 49076 - protein, 338 aa, Homo sapiens
MGNITADNSSMSCTIDHTIHQTLAPVVYVTVLVVGFPANCLSLYFGYLQIKARNELGVYLCNLTVADLFYICSLPFWLQYVLQHDNWSHGDLSCQVCGILLYENIYISVGFLCCISVDRYLAVAHPFRFHQFRTLKAAVGVSVVIWAKELLTSIYFLMHEEVIEDENQHRVCFEHYPIQAWQRAINYYRFLVGFLFPICLLLASYQGILRAVRRSHGTQKSRKDQIQRLVLSTVVIFLACFLPYHVLLLVRSVWEASCDFAKGVFNAYHFSLLLTSFNCVADPVLYCFVSETTHRDLARLRGACLAFLTCSRTGRAREAYPLGAPEASGKSGAQGEEP

SEQ ID NO: 49077 - protein, 200 aa, Homo sapiens
MWATLPLLCAGAWLLGVPVCGAAELCVNSLEKFHFKSWMSKHRKTYSTEEYHHRLQTFASNWRKINAHNNGNHTFKMALNQFSDMSFAEIKHKYLWSEPQNCSATKSNYLRGTGPYPPSVDWRKKGNFVSPVKNQGACGSCWTFSTTGALESAIAIATGKMLSLAEQQLVDCAQDFNNHGCQGMVIASSNLERPSALSRM

SEQ ID NO: 49078 - protein, 109 aa, Homo sapiens
MDGDGLTFRDVAIEFSQDEWKCLNSTQRTLYRDVMLENYRNLVSLEYYPMWEHRKEPWTIESQVRVARKPKGWEWIKGVKTGWSAMVQSRLTATFASRIQMILLPQPPE

SEQ ID NO: 49079 - protein, 189 aa, Homo sapiens
  MOD_RES (1)..(1): Any amino acid
XSVFCSDPTPTAVTCVPPACGPGSPRPARLPHPALRTPGCPGFAEVLQTFSTCKGMLGEILSAFEFMDAVCMQLVGRHLHLASPVQESPFYVLIETSGSNAGHDAEKLGHFLEHALGSGLVTDGTMATDQRKVKMLWALRERITEALSRDGYVYKYDLSLPVERLYDIVTDLRARLGPHAKHVVGYGHL

SEQ ID NO: 49080 - protein, 58 aa, Homo sapiens
MISVKRNTWRALSLVIGDCRKKGNFEYCQGARAQHPASGDAAPAPLMALLSAATHSRT

SEQ ID NO: 49081 - protein, 165 aa, Homo sapiens
MLANSASVRILIKGGKVVNDDCTHEADVYIENGIIQQVGRELMIPGGAKVIDATGKLVIPGGIDTSTHFHQTFMNATCVDDFYHGTKAALVGGTTMIIGHVLPDKETSLVDAYEKCRGLADPKVCCDYALHVGITWWAPKVKAEMETLVREKGVNSFQMFMTYKD

SEQ ID NO: 49082 - protein, 200 aa, Homo sapiens
MTDSATANGDDRDPEIELFVKAGIDGESIGNCPFSQRLFMILWLKGVVFNVTTVDLKRKPADLHNLAPGTHPPFLTFNGDVKTDVNKIEEFLEETLTPEKYPKLAAKHRESNTAGIDIFSKFSAYIKNTKQQNNAALERGLTKALKKLDDYLNTPLPEEIDANTCGEDKGSRRKFLDGDELTLADCNLLPKLHVVKLSFC

SEQ ID NO: 49083 - protein, 76 aa, Homo sapiens
  MOD_RES (1)..(1): Any amino acid
XTKRLFGATRTWAGWGAWELLNPATSGRLLARDYAKKPVHPLESAFGTLTLTQGLTLGLSEDWPPCSPNNSCPAWL

SEQ ID NO: 49084 - protein, 121 aa, Homo sapiens
MVLTLGESWPVLVGRRFLSLSAADGSDGSHDSWDVERVAEWPWLSGTIRAVSHTDVTKKDLKVCVEFDGESWRKRRWIEVYSLLRRAFLVEHNLVLAERKSPEISERIVQWPAITYKPLLD

SEQ ID NO: 49085 - protein, 702 aa, Homo sapiens
  MOD_RES (1)..(1): Any amino acid
XPASLEWILSLLSPFAFMLGMAQLLHLDYDLNSNAFPHPSDGSNLIVATNFMLAFDTCLYLALAIYFEKILPNEYGHRRPPLFFLKSSFWSQTQKTDHVALEDEMDADPSFHDSFEQAPPEFQGKEAIRIRNVTKEYKGKPDKIEALKDLVFDIYEGQITAILGHSGAGKSTLLNILSGLSVPTKGSVTIYNNKLSEMADLENLSKLTGVCPQSNVQFDFLTVRENLRLFAKIKGILPQEVDKEIQRVLLELEMKNIQDVLAQNLSGGQKRKLTFGIAILGDPQIFLLDEPTAGLDPFSRHQVWNLLKERKTDRVILFSTQFMDEADILADRKVFLSQGKLKCAGSSLFLKKKWGIGYHLSLQLNEICVEENITSLVKQHIPDAKLSAKSEGKLIYTLPLERTNKFPELYKDLDSYPDLGIENYGVSMTTLNEVFLKLEGKSTINESDIAILGEVQAEKADDTERLVEMEQVLSSLNKMRKTIGGVALWRQQICAIARVRLLKLKHERKALLALLLILMAGFCPLLVEYTMVKIYQNSYTWELSPHLYFLAPGQQPHDPLTQLLIINKTGASIDDFIQSVEHQNIALEVDAFGTRNGTDDPSYNGAITVCCNEKNYSFSLACNAKRLNCFPVLMDIVSNGLLGMVKPSVHIRTERSTFLEVNIYNLTIPDSPLSGISQITLLSAGILFLLSKPLHNKLTFGL

SEQ ID NO: 49086 - protein, 216 aa, Homo sapiens
  MOD_RES (1)..(1): Any amino acid
XSKTGVPDGIMQFIKLCTVSYGKVKLVLKHNRYFVESCHPDVIQHLLQDPVIRECRLRNSEGEATELITETFTSKSAISKTAESSGGPSTSRVTDPQGKSDIPMDLFDFYEQMDKDEEEEEETQTVSFEVKQEMMLRQGTSFKTGAWHPCWKGIFSITFSFHLFDLPSSVGQIVLRKMHQGLGCAFIGHLGFYKGGGDNIFSNFLGSGVISVYKKC

SEQ ID NO: 49087 - protein, 40 aa, Homo sapiens
MLYSPGPQESSTPSVLGAARVEAAWSDCTVQGHGVVCLIV

SEQ ID NO: 49088 - protein, 253 aa, Homo sapiens
MEQRPRGCAAVAAALLLVLLGARAQGGTRSPRCDCAGDFHKKIGLFCCRGCPAGHYLKAPCTEPCGNSTCLVCPQDTFLAWENHHNSECARCQACDEQASQVALENCSAVADTRCGCKPGWFVECQVSQCVSSSPFYCQPCLDCGALHRHTRLLCSRRDTDCGTCLPGFYEHGDGCVSCPTSTLGSCPERCAAVCGWRQSRWCAGNASGRTGMDRGEAGEEGGNHPTPTSCFQCSGSRCSWLALWSPSCLGPP

SEQ ID NO: 49089 - protein, 127 aa, Homo sapiens
  MOD_RES (1)..(1): Any amino acid
XKVLLRKELEEIQSEKEALQSDLLEMKNANEKTRLENQNLLIQVEEVSQTCSKSEIHNEKEKCFIKEHENLKPLLEQKELRDRRAELILLKDSLAKSPSVKNDPLSSVKELEEKIGNYGFADVVTIN

SEQ ID NO: 49090 - protein, 65 aa, Homo sapiens
  MOD_RES (1)..(1): Any amino acid
XVFPHEPWLRLCRERGGTFWSCEATHRQAPTAPGAPECSSSGPCPSSGANSPRANSSGTGWSTSR

SEQ ID NO: 49091 - protein, 87 aa, Homo sapiens
MTTRKLSAHSAATPGYKAVTHKHHTGWARMAKTGLPEKGQSQAGGESGSGQLLDQENGAGESALVSVYVHLDFPDKTWPPELSRTLT

SEQ ID NO: 49092 - protein, 378 aa, Homo sapiens
  MOD_RES (1)..(1): Any amino acid
XGLGPPVAGGAAAGAGMPGGGGGPSAALREQERVYEWFGLVLGSAQRLEFMCGLLDLCNPLELRFLGSCLEDLARKDYHYLRDSEAKANGLSDPGPLADFREPAVRSRLIVYLALLGSENREAAGRLHRLLPQVDSVLKSLRAARGEGSRGGAEDERGEDGDGEQDAEKDGSGPEGGIVEPRVGGGLGSRAQEELLLLFTMASLHPAFSFHQRVTLREHLERLRAALRGGPEDAEVEVEPCKFAGPRAQVRRTEPPWTRGAIAAPAASPASLSDAPCPSPSPAQVARNPHPAAPSARGLSFVSLGRSVPLPHPTPHPGRHSHPPSQNALEVPSVPRCCHGRRGAPRPGPLSEEKCRDVFGSEHLSARCGSRRALEEPV

SEQ ID NO: 49093 - protein, 174 aa, Homo sapiens
MFSTYDFIPSAKLKLSQGMPVNDDLCFSRKRVSRNLFQNSRDFNPDCLPLCAAGTTGTHQTNLSGKCAQLGFSQICGKTGSVGSDLQFLGTTSSHQEKVYASLNFGSKTQQTFGSQTECTSSNGQNPSPGAYILPSYPVSSPRTSPKHTSPLIISPKKSQDNSVNFSNSWPLKS

SEQ ID NO: 49094 - protein, 191 aa, Homo sapiens
MEHVTEGSWESLPVPLHPQVLGALRELGFPYMTPVQSATIPLFMRNKDVAAEAVTGSGKTLAFVIPILEILLRREEKLKKSQVGAIIITPTRELAIQIDEVLSHFTKHFPEFSQILWIGGRNPGEDVERFKQQGGNIIVATPGRLEDMFRRKAEGLDLASCVRSLDVLVLDEADRLLDMGFEARRRKWRTW

SEQ ID NO: 49095 - protein, 201 aa, Homo sapiens
MCIIFFKFDPRPVSKNAYRLILAANRDEFYSRPSKLADFWGNNNEILSGLDMEEGKEGGTWLGISTRGKLAALTNYLQPQLDWQARGRGELVTHFLTTDVDSLSYLKKVSMEGHLYNGFNLIAADLRQLPDPAIEDQGGEYVQPMLSKYAAVCVRCPGYGTRTNTIILVDADGHVTFTERSMMDKDLSHWETRTYEFTLQS

SEQ ID NO: 49096 - protein, 49 aa, Homo sapiens
MVGEECVGAIVCKLDMHKKMFRRGYIAMLAVDSKYRRNGIGCFGNRNNK

SEQ ID NO: 49097 - protein, 121 aa, Homo sapiens
MYNPIKTLKTNTIGTLNMLGLAKRVGARLLLASTSEVYGDPEVHPQSEDYWGHVNPIGPRACYDEGKRVAETMCYAYMKQEGVEVRVARIFNTFGPRMHMNDGRVVSNFILQALQGEPLTV

SEQ ID NO: 49098 - protein, 1002 aa, Homo sapiens
MAFLHLCHLALRHGIPLEEVAKKTSFKDCIPRSFRRHIRQHSALTRLRLRNVFRRFLRDFQPGRLSQQMVMVKYLATLERLAPRFGTERVPVCHLRLLAQAEGEPCYIRDSGVAPTDPGPESAAGPPTHEVLVTGTGGIQWWPVEEEVNKEEGSSGSSGRNPQASLFGKKAKAHKAVGQPADRPREPLWAYFCDFRDITHVVLKEHCVSIHRQDNKCLELSLPSRAAALSFVSLVDGYFRLTADSSHYLCHEVAPPRLVMSIRDGIHGPLLEPFVQAKLRPEDGLYLIHWSTSHPYRLILTVAQRSQAPDGMQSLRLRKFPIEQQDGAFVLEGWGRSFPSVRELGAALQGCLLRAGDDCFSLRRCCLPQPGETSNLIIMRGARASPRTLNLSQLSFHRVDQKEITQLSHLGQGTRTNVYEGRLRVEGSGDPEEGKMDDEDPLVPGRDRGQELRVVLKVLDPSHHDIALAFYETASLMSQVSHTHLAFVHGVCVRGPENIMVTEYVEHGPLDVWLRRERGHVPMAWKMVVAQQLASALSYLENKNLVHGNVCGRNILLARLGLAEGTSPFIKLSDPGVGLGALSREERVERIPWLAPECLPGGANSLSTAMDKWGFGATLLEICFDGEAPLQSRSPSEKEHFYQRQHRLPEPSCPQLATLTSQCLTYEPTQRPSFRTILRDLTRLQPHNLADVLTVNPDSPASDPTVFHKRYLKKIRDLGEGHFGKVSLYCYDPTNDGTGEMVAVKALKADCGPQHRSGWKQEIDILRTLYHEHIIKYKGCCEDQGEKSLQLVMEYVPLGSLRDYLPRHSIGLAQLLLFAQQICEGMAYLHAQHYIHRDLAARNVLLDNDRLVKIGDFGLAKAVPEGHEYYRVREDGDSPVFWYAPECLKEYKFYYASDVWSFGVTLYELLTHCDSSQSPPTKFLELIGIAQGQMTVLRLTELLERGERLPRPDKCPCEVYHLMKNCWETEASFRPTFENLIPILKTVHEKYQGQAPSVFSVC

SEQ ID NO: 49099 - protein, 26 aa, Homo sapiens
MLFHGISGGHIQGIMEEMERRSKTEA

SEQ ID NO: 49100 - protein, 59 aa, Homo sapiens
MPPKRNEKYKLPIPFPEGKVLDDMEGNQWVLGKKIGSGGFGLIYLETLAIFLSPMLSVE

SEQ ID NO: 49101 - protein, 79 aa, Homo sapiens
RIVKKTPASPLSAPPFPLSLPSWRARRLSLSRYHCPCKGRMKFAEVTTPFQGAEPDLLCGLRRGCPRAWEWGDVCCESL

SEQ ID NO: 49102 - protein, 183 aa, Homo sapiens
MSRRYDSRTTIFSPEGRLYQVEYAMEAIGHAGTCLGILANDGVLLAAERRNIHKLLDEVFFSEKIYKLNEYLLQYQEPIPCEQLVTALCDIKQAYTQFGGKRPFGVSLLYIGWDKHYGFQLYQSDPSGNYGGWKATCIGNNSAAAVSMLKQDYKEGEMTLKSALALAIKVLNKTMDVSKLSAE

SEQ ID NO: 49103 - protein, 19 aa, Homo sapiens
  MOD_RES (1)..(1): Any amino acid
XEVLRRRLATPNTCPNTAC

SEQ ID NO: 49104 - protein, 150 aa, Homo sapiens
MESIFHEKQEGSLCAQHCLNNLLQGEYFSPVELSSIAHQLDEEERMRMAEGGVTSEDYRTFLQQPSGNMDDSGFFSIQVISNALKVWGLELILFNSPEYQRLRIDPINERSFICNYKEHWFTVRKLGKQVILYLSLRVICQIAKLTNSCR

SEQ ID NO: 49105 - protein, 634 aa, Homo sapiens
MEDGKPVWAPHPTDGFQMGNIVDIGPDSLTIEPLNQKGKTFLALINQVFPAEEDSKKDVEDNCSLMYLNEATLLHNIKVRYSKDRIYTYVANILIAVNPYFDIPKIYSSEAIKSYQGKSLGTRPPHVFAIADKAFRDMKVLKMSQSIIVSGESGAGKTENTKFVLRYLTESYGTGQDIDDRIVEANPLLEAFGNAKTVRNNNSSRFGKFVEIHFNEKSSVVGGFVSHYLLEKSRICVQGKEERNYHIFYRLCAGASEDIREKLHLSSPDNFRYLKAGSMKDPLLDDHGDFIRMCTAMKKIGLDDEEKLDLFRVVAGVLHLGNIDFEEAGSTSGGCNLKNKSAQSLEYCAELLGLDQDDLRVSLTTRVMLTTAGGTKGTVIKVPLKVEQANNARDALAKTVYSHLFDHVVNRVNQCFPFETSSYFIGVLDIAGFEYFEHNSFEQFCINYCNEKLQQFFNERILKEEQELYQKEGLGVNEVHYVDNQDCIDLIEAKLVGILDILDEENRLPQPSDQHFTSAVHQKHKDHFRLTIPRKSKLAVHRNIRDDEGFIIRHFAGAVCYETTQFVEKNNDALHMSLESLICESRDKFIRELFESSTNNNKDTKQKAGKLSFISVGNKFKRFCFSWSSPARDG

SEQ ID NO: 49106 - protein, 359 aa, Homo sapiens
MSEVSDTSEETQILRDTFAIESFRTFQSHFTKYRTPVYQTPYTDERALLTLMKPTTSPSSLTTLLRTSQISPLEWYQKSRFPPIDKPWILSSVSDTKKPKVMVPPSSPQELEEKRYFVDVEAQKKNLILLNQAIKTCGLPSQLHTMARTLIIEILHMDTVQLGYLFRKYIAYRLIQHARNNIMKRLKAIQNTGKGYEARNLHMMLSRLDDYGKKVMQVWTEKQKSLGQKRNQCLKKMIHVFNQLKKIHELNLSQPIPLIIEEKQIPASTTFVQKPFLKLLMEEDRTSDICKKFRQQEDQTEAIWNVDLSTSSYPIAEKTSMHSLWAQLGGYPDIPRLLQLEVQSTFRKSLASLQSRSSG

SEQ ID NO: 49107 - protein, 113 aa, Homo sapiens
SFDSRSEAEAAKNALNGIRFDPEIPQTLRLEFAKANTKMAKNKLVGTPNPSTPLPNTVPQFIAREPYELTVPALYPSSPEVWAPYPLYPAELAPALPPPAFTYPASLHAQETL

SEQ ID NO: 49108 - protein, 158 aa, Homo sapiens
MGGPVREPALSVALWLSWGAALGAVACAMALLTQQTELQSLRREVSRLQGTGGPSQNGEGYPWQSLPEQSSDALEAWENGERSRKRRAVLTQKQKKQHSVLHLVPINATSKDDSDVTEVMWQPALRRGRGLQAQGYGVRIQDAGVYLLYSQVLFQDVT

SEQ ID NO: 49109 - protein, 27 aa, Homo sapiens
MREPVLTWACAGKDEMGKMVSVINTVD

SEQ ID NO: 49110 - protein, 146 aa, Homo sapiens
MFTLQNFILMEYTEPSKSQTRKPKCGKGTHCSRNAYMLVYRLQTQEKPNTTVQVPAFLQELVDRDNSKFEEWCIEMAEMRKQSVDKGKAKHEEVKELYQRLPAGAEPYEFVSLEWLQKWLDESTPTKPIDNHACLCSHDKLHPDKI

SEQ ID NO: 49111 - protein, 176 aa, Homo sapiens
PFQNILPRVHVKEGERLDAKMKRLESKYAPLHLVPLIERLGTPQQIAIAREGDLLTKERLCCGLSMFEVILTRIRSFLDDPIWRGPLPSNGVMHVDECVEFHRLWSAMQFVYCIPVGTHEFTVEQCFGDGLHWAGCMIIVLLGQQRRFAVLDFCYHLLKVQKHDGKDEIIKNVVCG

SEQ ID NO: 49112 - protein, 636 aa, Homo sapiens
MMMAKKWAKFLRDFENFKAACVPWENKIKAIESQFGSSVASYFLFLRWMYGVNMVLFILTFSLIMLPEYLWGLPYGSLPRKTVPRAEEASAANFGVLYDFNGLAQYSVLFYGYYDNKRTIGWMNFRLPLSYFLVGIMCIGYSFLVVLKAMTKNIGDDGGGDDNTFNFSWKVFTSWDYLIGNPETADNKFNSITMNFKEAITEEKAAQVEENVHLIRFLRFLANFFVFLTLGGSGYLIFWAVKRSQEFAQQDPDTLGWWEKNEMNMVMSLLGMFCPTLFDLFAELEDYHPLIALKWLLGRIFALLLGNLYVFILALMDEINNKIEEEKLVKANITLWEANMIKAYNASFSENSTGPPFFVHPADVPRGPCWETMVGQEFVRLTVSDVLTTYVTILIGDFLRACFVRFCNYCWCWDLEYGYPSYTEFDISGNVLALIFNQGMIWMGSFFAPSLPGINILRLHTSMYFQCWAVMCCNVPEARVFKASRSNNFYLGMLLLILFLSTMPVLYMIVSLPPSFDCGPFSGKNRMFEVIGETLEHDFPSWMAKILRQLSNPGLVIAVILVMVLAIYYLNATAKGQKAANLDLKKKMKMLQLLVASNKYPESPEKVHFALLFKSNAICERPENKHCGTAIFLFYP

SEQ ID NO: 49113 - protein, 1025 aa, Homo sapiens
MSAAPAYSEDKGGSAGPGEPEYGHDPASGGIFSSDYKRHDDLKEMLDTNKDSLKLEAMKRIVADPNQLIRASALRVLSSIRVPIIVPIMMLAIKEAASDMSPYVRKTAAHAIPKLYSLDSDQKDQLIEVIEKLLADKTTLVAGSVVMAFEEVCPERIDLIHKNYRKLCNLLIDVEEWGQVVIISMLTRYARTQFLSPTQNESLLEENAEKAFYGSEEDEAKGAGSEETAAAAAPSRKPYVMDPDHRLLLRNTKPLLQSRSAAVVMAVAQLYFHLAPKAEVGVIAKALVRLLRSHSEVQYVVLQNVATMSIKRRGMFEPYLKSFYIRSTDPTQIKILKLEVLTNLANETNIPTVLREFQTYIRSMDKDFVAATIQAIGRCATNIGRVRDTCLNGLVQLLSNRDELVVAESVVVIKKLLQMQPAQHGEIIKHLAKLTDNIQVPMARASILWLIGEYCEHVPRIAPDVLRKMAKSFTAEEDIVKLQVINLAAKLYLTNSKQTKLLTQYVLSLAKYDQNYDIRDRARFTRQLIVPSEQGGALSRHAKKLFLAPKPAPVLESSFKDRDHFQLGSLSHLLNAKATGYQELPDWPEEAPDPSVRNVEVPEWTKCSNREKRKEKEKPFYSDSEGESGPTESADSDPESESESDSKSSSESGSGESSSESDNEDQDEDEEKGRGSESEQSEEDGKRKTKKKVPERKGEASSSDEGSDSSSSSSESEMTSESEEEQLEPASWSRKTPPSSKSAPATKEISLLDLEDFTPPSVQPVSPPAIVSTSLAADLEGLTLTDSTLVPSLLSPVSGVGRQELLHRVAGEGLAVDYTFSRQPFSGDPHMVSVHIHFSNSSDTPIKGLHVGTPKLPAGISIQEFPEIESLAPGESATAVMGINFCDSTQAANFQLCTQTRQFYVSIQPPVGELMAPVFMSENEFKKEQGKLMGMNEITEKLMLPDTCRSDHIVVQKVTATANLGRVPCGTSDEYRFAGRTLTGGSLVLLTLDARPAGAAQLTVNSEKMVIGTMLVKDVIQALTQ

SEQ ID NO: 49114 - protein, 296 aa, Homo sapiens
MHVKKYLLKGLHRLQKGPGYTYKELLVWYCDNTNTHGPKRIICEGPKKKAMWFLLTLLFAALVCWQWGIFIRTYLSWEVSVSLSVGFKTMDFPAVTICNASPFKYSKIKHLLKDLDELMEAVLERILAPELSHANATRNLNFSIWNHTPLVLIDERNPHHPMVLDLFGDNHNGLTSSSASEKICNAHGCKMAMRLCSLNRTQCTFRNFTSATQALTEWYILQATNIFAQVPQQELVEMSYPGEQMILACLFGAEPCNYRPEVDPGHRPGRLRPLPCVHGRGQADASRAEVIPLHQR

SEQ ID NO: 49115 - protein, 733 aa, Homo sapiens
MPAETDECRLNQNICGHGECVPGPPDYSCHCNPGYRSHPQHRYCVDVNECEAEPCGPGRGICMNTGGSYNCHCNRGYRLHVGAGGRSCVDLNECAKPHLCGDGGFCINFPGHYKCNCYPGYRLKASRPPVCEDIDECRDPSSCPDGKCENKPGSFKCIACQPGYRSQGGGACRDVNECAEGSPCSPGWCENLPGSFRCTCAQGYAPAPDGRSCLDVDECEAGDVCDNGICSNTPGSFQCQCLSGYHLSRDRSHCEDIDECDFPAACIGGDCINTNGSYRCLCPQGHRLVGGRKCQDIDECSQDPSLCLPHGACKNLQGSYVCVCDEGFTPTQDQHGCEEVEQPHHKKECYLNFDDTVFCDSVLATNVTQQECCCSLGAGWGDHCEIYPCPVYSSAEFHSLCPDGKGYTQDNNIVNYGIPAHRDIDECMLFGSEICKEGKCVNTQPGYECYCKQGFYYDGNLLECVDVDECLDESNCRNGVCENTRGGYRCACTPPAEYSPAQRQCLSPEEMDVDECQDPAACRPGRCVNLPGSYRCECRPPWVPGPSGRDCQLPESPAERAPERRDVCWSQRGEDGMCAGPLAGPALTFDDCCCRQGRGWGAQCRPCPPRGAGSHCPTSQSESNSFWDTSPLLLGKPPRDEDSSEEDSDECRCVSGRCVPRPGGAVCECPGGFQLDASRARCVDIDECRELNQRGLLCKSERCVNTSGSFRCVCKAGFARSRPHGACVPQRRR

SEQ ID NO: 49116 - protein, 287 aa, Homo sapiens
MDNKKRLAYAIIQFLHDQLRHGGLSSDAQESLEVAIQCLETAFGVTVEDSDLALPQTLPEIFEAAATGKEMPQDLRSPARTPPSEEDSAEAERLKTEGNEQMKVENFEAAVHFYGKAIELNPANAVYFCNRAAAYSKLGNYAGAVQDCERAICIDPAYSKAYGRMGLALSSLNKHVEAVAYYKKALELDPDNETYKSNLKIAELKLREAPSPTGGVGSFDIAGLLNNPGFMSMASNLMNNPQIQQLMSGMISGGNNPLGTPGTSPSQNDLASLIQALPSRCSSRTQS

SEQ ID NO: 49117 - protein, 563 aa, Homo sapiens
MTVLEITLAVILTLLGLAILAILLTRWARRKQSEMYISRYSSEQSARLLDYEDGRGSRHAYSTQSDTSYDNRERSKRDYTPSTNSLVSMASKFSLGQTELILLLMCFILALSRSSIGSIKCLQTTEEPPSRTAGAMMQFTAPIPGATGPIKLSQKTIVQTLGPIVQYPGSNAGPPSAPRGPPMAPIIISQRTARIPQVHTMDSSGKITLTPVVILTGYMDEELAKKSCSKIQILKCGGTARSQNSREENKEALKNDIIFTNSVESLKSAHIKEPEREGKGTDLEKDKIGMEVKVDSDAGIPKRQETQLKISEMSIPQGQGAQIKKSVSDVPRGQESQVKKSESGVPKGQEAQVTKSGLVVLKGQEAQVEKSEMGVPRRQESQVKKSQSGVSKGQEAQVKKRESVVLKGQEAQVEKSELKVPKGQEGQVEKTEADVPKEQEVQEKKSEAGVLKGPESQVKNTEVSVPETLESQVKKSESGVLKGQEAQEKKESFEDKGNNDKEKERDAEKDPNKKEKGDKNTKGDKGKDKVKGKRESEINGEKSKGSKRAKANTGRKYNKKVEE

SEQ ID NO: 49118 - protein, 634 aa, Homo sapiens
MLEYALKQERAKYHKLKFGTDLNQGEKKADVSEQVSNGPVESVTLENSPLVWKEGRQLLRQYLEEVGYTDTILDMRSKRVRSLLGRSLELNGAVEPSEGAPRAPPGPAGLSGGESLLVKQIEEQIKRNAAGKDGKERLGGSVLGQIPFLQNCEDEDSDEDDELDSVQHKKQRVKLPSKALVPEMEDEDEEDDSEDAINEFDFLGSGEDGEGAPDPRRCTVDGSPHELESRRVKLQGILADLRDVDGLPPKVTGPPPGTPQPRPHEDVFIMDTIGGGEVSLGDLADLTVTNDNDLSCDLSDSKDAFKKTWNPKFTLRSHYDGIRSLAFHHSQSALLTASEDGTLKLWNLQKAVTAKKNAALDVEPIHAFRAHRGPVLAVAMGSNSEYCYSGGADACIHSWKIPDLSMDPYDGYDPSVLSHVLEGHGDAVWGLAFSPTSQRLASCSADGTVRIWDPSSSSPACLCTFPTASEHGVPTSVAFTSTEPAHIVASFRSGDTVLYDMEVGSALLTLESRGSSGPTQINQVVSHPNQPLTITAHDDRGIRFLDNRTGKPVHSMVAHLDAVTCLAVDPNGAFLMSGSHDCSLRLWSLDNKTCVQEITAHRKKHEEAIHAVACHPSKALIASAGADALAKVFV

SEQ ID NO: 49119 - protein, 355 aa, Homo sapiens
MSGNGNAAATAEENSPKMRVIRVGTRKSQLARIQTDSVVATLKASYPGLQFEIRDKILDTALSKIGEKSLFTKELEHALEKNEVDLVVHSLKDLPTVLPPGFTIGAICKRENPHDAVVFHPKFVGKTLETLPEKSVVGTSSLRRAAQLQRKFPHLEFRSIRGNLNTRLRKLDEQQEFSAIILATAGLQRMGWHNRVGQILHPEECMYAVGQGALGVEVRAKDQDILDLVGVLHDPETLLRCIAERAFLRHLEGGCSVPVAVHTAMKDGQLYLTGGVWSLDGSDSIQETMQATIHVPAQHEDGPEDDPQLVGITARNIPRGPQLAAQNLGISLANLLLSKGAKNILDVARQLNDAH

SEQ ID NO: 49120 - protein, 157 aa, Homo sapiens
MNPVPQMEMQKSPVFCVAHAGSCRPELFLFGHLGSSWGLDLKEEEPRSFEVTRREGLSSHNELLASCGKKFCSRGSRCVLSRKTGEPECQCLEACRPSYVPVCGSDGRFYENHCKLHRAACLLGKRITVIHSKDCFLKGDTCTMAGYARLKNVLLAL

SEQ ID NO: 49121 - protein, 40 aa, Homo sapiens
MESKDEVSDTDSGIILQSGPDSPVSPMKELTHAVHKQQRA

SEQ ID NO: 49122 - protein, 293 aa, Homo sapiens
  MOD_RES (1)..(1): Any amino acid
XGVHRKPSLLAHPGLLVKSGETVILQCWSDVRFERFLLHREGITEDPLRLIGQLHDAGSQVNYSMGPMTPALAGTYRCFGSVTHLPYELSAPSDPLDIVVVGLYGKPSLSAQPGPTVQAGENVTLSCSSRSLFDIYHLSREAEAGELRLTAVLRVNGTFQANFPLGPVTHGGNYRCFGSFRALPHAWSDPSDPLPVSVTGNSRHLHVLIGTSVVIIPFAILLFFLLHRWCPNKKNAVVMDQEPAGNRTVNREDSDDQDPQEVTYAQLNHCVFTQRKITRPSQRPKTPPTDTSV

SEQ ID NO: 49123 - protein, 188 aa, Homo sapiens
LLDFKTKTTPPLGVLADTERGLSVFPPVSLSATAEMADLFRITDWGMFMSLDRITNGGLSKSLGLIEGYGGRGKGGLPATLSPAEEEKAKGPHEKYGYNSYLSEKISLDRSIPDYRPTKCKELKYSKDLPQISIIFIFVNEALSVILRSVHSAVNHTPTHLLKEIILVDDNSDEEELKVPLEEYVHKR

SEQ ID NO: 49124 - protein, 150 aa, Homo sapiens
  MOD_RES (1)..(1): Any amino acid
XSYHSSGEYSSDFLTPEFVKFSMDLTNTEITATTSLPSFSTFMDNYSTGYDVKPPCLYQMPLSGQQSSIKRTVQKNAKYVCLANKNCPVDKRRRNRCQYCRFQKCLAVGMVKEVVRTDSLKGRRGRLPSKPKSPQEPSPPSPPVSLISAL

SEQ ID NO: 49125 - protein, 115 aa, Homo sapiens
MQESQETHISNHLDEVVAAVSITHRKKFQNKLLQTALFQPPREKLHLCEEKAKSYSNSHEYKQAVHELVRCVALTRICYGDSHWKLAEAHVNLAQGYLQLKGLSLQAKQHAEKAR

SEQ ID NO: 49126 - protein, 206 aa, Homo sapiens
MGTANIQLHGPPRVKAVKSSEHINEGETAMLVCKSESVPPVTDWAWYKITDSEDKALMNGSESRFFVSSSQGRSELHIENLNMEADPGQYRCNGTSSKGSDQAIITLRVRSHLAALWPFLGIVAEVLVLVTIIFIYEKRRKPEDVLDDDDAGSAPLAAGSTRMTKARTSARGTLPEAGGPRTLPAPRLRRRRSPLPVLARFQVLTS

SEQ ID NO: 49127 - protein, 142 aa, Homo sapiens
MTEGRHCQVHLLDDRRLELLVQPKLLARELLDLVASHFNLKEKEYFGITFIDDTGQQNWLQLDHRVLDHDLPKKPGPTILHFAVRFYIESISFLKDKTTVELFFLNAKACVHKGQIEVESETIFKLAAFILQEAKGDYTSDE

SEQ ID NO: 49128 - protein, 1351 aa, Homo sapiens
MWPSQLLIFMMLLAPIIHGGKHSERHPALAAPLRHAERSPGGALPPRHLLQQPAAERTAAHRGQGPRGATRGVRGPGAQGAQIAAQAFSRAPIPMAVVRRELSCESYPIELRCPGTDVIMIESANYGRTDDKICDSDPAQMENIRCYLPDAYKIMSQRCNNRTQCAVVAGPDVFPDPCPGTYKYLEVQYECVPYKVEQKVFLCPGLLKGVYQSEHLFESDHQSGAWCKDPLQASDKIYYMPWTPYRTDTLTEYSSKDDFIAGRPTTTYKLPHRVDGTGFVVYDGALFFNKERTRNIVKFDLRTRIKSGEAIIANANYHDTSPYRWGGKSDIDLAVDENGLWVIYATEQNNGKIVISQLNPYTLRIEGTWDTAYDKRSASNAFMICGILYVVKSVYEDDDNEATGNKIDYIYNTDQSKDSLVDVPFPNSYQYIAAVDYNPRDNLLYVWNNYHVVKYSLDFGPLDSRSGQAHHGQVSYISPPIHLDSELERPSVKDISTTGPLGMGSTTTSTTLRTTTLSPGRSTTPSVSGRRNRSTSTPSPAVEVLDDMTTHLPSASSQIPALEESCEAVEAREIMWFKTRQGQIAKQPCPAGTIGVSTYLCLAPDGIWDPQGPDLSNCSSPWVNHITQKLKSGETAANIARELAEQTRNHLNAGDITYSVRAMDQLVGLLDVQLRNLTPGGKDSAARSLNKLQKRERSCRAYVQAMVETVNNLLQPQALNAWRDLTTSDQLRAATMLLHTVEESAFVLADNLLKTDIVRENTDNIKLEVARLSTEGNLEDLKFPENMGHGSTIQLSANTLKQNGRNGEIRVAFVLYNNLGPYLSTENASMKLGTEALSTNHSVIVNSPVITAAINKEFSNKVYLADPVVFTVKHIKQSEENFNPNCSFWSYSKRTMTGYWSTQGCRLLTTNKTHTTCSCNHLTNFAVLMAHVEVKHSDAVHDLLLDVITWVGILLSLVCLLICIFTFCFFRGLQSDRNTIHKNLCISLFVAELLFLIGINRTDQPIACAVFAALLHFFFLAAFTWMFLEGVQLYIMLVEVFESEHSRRKYFYLVGYGMPALIVAVSAAVDYRSYGTDKVCWLRLDTYFIWSFIGPATLIIMLNVIFLGIALYKMFHHTAILKPESGCLDNINYEDNRPFIKSWVIGAIALLCLLGLTWAFGLMYINESTVIMAYLFTIFNSLQGMFIFIFHCVLQKKVRKEYGKCLRTHCCSGKSTESSIGSGKTSGSRTPGRYSTGSQSRIRRMWNDTVRKQSESSFITGDINSSASLNRGAMANHLISNALLRPHGTNNPYNTLLGEPAVCNNPSVSMYNAQEPYRETSMGVKLNIAYQIGASEQCQGYKCHGYSTTEW

SEQ ID NO: 49129 - protein, 111 aa, Homo sapiens
  MOD_RES (1)..(1): Any amino acid
XGCSASERLPPPFPGLEPESEGAAGGSEPEAGDSDTEGEDIFTGAAVVSKHQSPKITTSLLPINNGSKENGIHEEQDQEPQDLFAGSHSVAQAGVQWCGHGSLQPRPPRLK

SEQ ID NO: 49130 - protein, 107 aa, Homo sapiens
MWSEGRYEYERIPRERAPPRSHPSDGYNRLVNIVPKKPPLLDRPGEGSYNRYYSHVDYRDYDEGRSFSHDRRSGPPHRGDESGYRWTRDDHSASRQPEYSRDGVSPC

SEQ ID NO: 49131 - protein, 116 aa, Homo sapiens
MDFSRNLYDIGEQLDSEDLASLKFLSLDYIPQRKQEPIKDALMLFQRLQEKRMLEESNLSFLKELLFRINRLDLLITYLNTRKEEMERELQTPGRAQISAYRVMLYQISEEVSRSE

SEQ ID NO: 49132 - protein, 50 aa, Homo sapiens
MAEERVATDCSPSWGALDGEGRLFTSNGSYRSAIFFCLGGLEENSISCIY

SEQ ID NO: 49133 - protein, 89 aa, Homo sapiens
  MOD_RES (1)..(1): Any amino acid
XQKKLEVAMEEEGLADEEKKLRRSQHARKETEFLRLKRTRLGLDDFESLKVIGRGAFGEVRLVQKKDTGHIYAMKILRKSDMLEKEQVT

SEQ ID NO: 49134 - protein, 157 aa, Homo sapiens
  MOD_RES (1)..(1): Any amino acid
XTAEVLYPSTGQETAPEVNFTFEGETGKNPDEEDNTFYQRLKSMKEPLEAQNIPDNFGNVSPEMTLVLHLAWVACGYIIWQNSTEDTWYKMVKIQTVKQVQRNDDFIELDYTILLHNIASQFHGIHDSTNSIFTFHLNTSTAIQTFSVPAFQEGKKS

SEQ ID NO: 49135 - protein, 618 aa, Homo sapiens
MASTDYSTYSQAAAQQGYSAYTAQPTQGYAQTTQAYGQQSYGTYGQPTDVSYTQAQTTATYGQTAYATSYGQPPTGYTTPTAPQAYSQPVQGYGTGAYDTTTATVTTTQASYAAQSAYGTQPAYPAYGQQPAATAPTRPQDGNKPTETSQPQSSTGGYNQPSLGYGQSNYSYPQVPGSYPMQPVTAPPSYPPTSYSSTQPTSYDQSSYSQQNTYGQPSSYGQQSSYGQQSSYGQQPPTSYPPQTGSYSQAPSQYSQQSSSYGQQSSFRQDHPSSMGVYGQESGGFSGPGENRSMSGPDNRGRGRGGFDRGGMSRDPDEDSDNSAIYVQGLNDSVTLDDLADFFKQCGVVKMNKRTGQPMIHIYLDKETGKPKGDATVSYEDPPTAKAAVEWFDGKDFQGSKLKVSLARKKPPMNSMRGGLPPREGRGMPPPLRGGPGGPGGPGGPMGRMGGRGGDRGGFPPRGPRGSRGNPSGGGNVQHRAGDWQCPNPGCGNQNFAWRTECNQCKAPKPEGFLPPPFPPPGGDRGRGGPGGMRGGRGGLMDRGGPGGMFRGGRGGDRGGFRGGRGMDRGGFGGGRRGGPGGPPGPLMEQMGGRRGGRGGPGKMDKGEHRQERRDRPY

SEQ ID NO: 49136 - protein, 331 aa, Homo sapiens
  MOD_RES (1)..(1): Any amino acid
XQTREKAKFSDGEKCRREAFRRLGNGVSDDLSSEEDGEARTQMILLRRSVEGASSDNGCEVKNRKSILSRHLNSQVKKTTTRWCHIVRDSDSLAESEFESAAFSQGSRSGVSGGSRSLNMSRRDSESTRHDSETEDMLWDDLLHGPECRSSVTSDSEGAHVNTLHSGTKRDPKEDVFQQNHLFWLQNSSPSSDRVSAIIWEGNECKKMDMSVLEISGIIMSRVNAYQQGVGYQMLGNVVTIGLAFFPFLHRLFREKSLDQLKSISAEEILTLFCGAPPVTPIIVLSIINFFERLCLTWMFFFMMCVAERTYKQVSGEIRKIFYLFLYMIFH

SEQ ID NO: 49137 - protein, 150 aa, Homo sapiens
LISTGLTTLILGIVMARAISLGPHIPKTEDAWVFAKPNAIQAVGVMSFGDLFENYCRNDDLVTFGRFCYGVTVILTYPMECFVTREVIANVFFGGNLSSVFHIVVTVMVITVATLVSLLIDCLGIVLELNGVLCATPLIFIIPSACYLKL

SEQ ID NO: 49138 - protein, 75 aa, Homo sapiens
FDFIHDVNKKHKEFVGNWNKNAVHVNLFETPVEAQYVRLYPTSCHTACTLRFELLGCELNARKADLRRGADDREQ

SEQ ID NO: 49139 - protein, 75 aa, Homo sapiens
  MOD_RES (1)..(1): Any amino acid
XAIGFRSTLTGKNYTMEWYELFQLGNCTFPHLRPEMDAPFWCNQGAACFFEGIDDVHWKENGTLVQVATISVYVR

SEQ ID NO: 49140 - protein, 581 aa, Homo sapiens
MTEGSMGVTLEASAEADLKAGNSCPELVPSRRSKLRKPKPVPLRKKAIGGEFSDTNAAVEGTPLPKASYHFSPEELDENTSPLLGDARFQKSPPDLKETPGTLSSDTNDSGVELGEESRSSPLKLEFDFTEDTGNIEARKALPRKLGRKLGSTLTPKIQKDGISKSAGLEQPTDPVARDGPLSQTSSKPDPSQWESPSFNPFGSHSVLQNSPPLSSEGSYHFDPDNFDESMDPFKPTTTLTSSDFCSPTGNHVNEILESPKKAKSRLITSGCKVKKHETQSLALDACSRDEGAVISQISDISNRDGHATDEEKLASTSCGQKSAGAEVKGIEKETCQKMEEDGSTVLGLLESSAEKAPVSVSCGGESPLDGICLSESDKTAVLTLIREEIITKEIEANEWKKKYEETRQEVLEMRKIVAEYEKTIAQMIEDEQRTSMTSQKSFQQLTMEKEQALADLNSVERSLSDLFRRYENLKGVLEGFKKNEEALKKCAQDYLARVKQEEQRYQALKIHAEEKLDKANEEIAQVRTKAKAESAALHAGLRKEQMKVESLERALQQKNQEIEELTKICDELIAKLGKTD

SEQ ID NO: 49141 - protein, 110 aa, Homo sapiens
MAALVRPARFVVRPLLQVVQAWDLDARRWVRALRRSPVKVVFPSGEVVEQKRAPGKQPRKAPSEASAQEQREKQPLEESASRAPSTWEESGLRYDKAYPGDRRLRDFCQA

SEQ ID NO: 49142 - protein, 55 aa, Homo sapiens
  MOD_RES (1)..(1): Any amino acid
XRMQNSDFLRELVITIAREGLEDKYNLQLNPEHPLGAASSDPGAGGPVHARPRES

SEQ ID NO: 49143 - protein, 63 aa, Homo sapiens
MSDVEENNFEGRVNVREEIEEFFPRMWKINQDKRRLMKRVSLSVKISNGNSCSCKIGEQVRIS

SEQ ID NO: 49144 - protein, 235 aa, Homo sapiens
MLSLLLLALPVLASPAYVAPAPGQALQQTGIVGGQEAPRSKWPWQVSLRVRGPYWMHFCGGSLIHPQWVLTAAHCVEPDIKDLAALRVQLREQHLYYQDQLLPVSRIIVHPQFYIIQTGADIALLELEEPVNISSHIHTVTLPPASETFPPGMPCWVTGWGDVDNNVHLPPPYPLKEVEVPVVENHLCNAEYHTGLHTGHSFQIVRDDMLCAGSENHDSCQGDSGGPLVCKVNGT

SEQ ID NO: 49145 - protein, 56 aa, Homo sapiens
MAEISDLDRQIEQLRRCELIKESEVKALCAKARSGIGLGWPGCGDPGLLLSPERSW

SEQ ID NO: 49146 - protein, 89 aa, Homo sapiens
MGEPAGVAGTMESPFSPGLFHRLDEDWDSALFAELGYFTDTDELQLEAANETYENNFDNLDFDLDLMPWESDIWDINNQICTGGVGFVF

SEQ ID NO: 49147 - protein, 82 aa, Homo sapiens
MLRSNLHSIHKHLAVALFLSQLVFVIGINQTENPFLCTVVAILLHYIYMSTFAWTLVESLHVYRMLTEVRNIDTGPMRFYYV

SEQ ID NO: 49148 - protein, 152 aa, Homo sapiens
MPKLQGFEFWSRTLRGARHVVAPMVDQSELAWRLLSRRHGAQLCYTPMLHAQVFVRDANYRKENLYCEVCPEDRPLIVQAALLAQDYCDAIDLNLGCPQMIAKRGHYGAFLQDEWDLLQRMILLAHEKLSVPVTCKIRVFPEIDKTVRYAQM

SEQ ID NO: 49149 - protein, 145 aa, Homo sapiens
GHASFSMYTMLYLVLYLQARFTWRGARLLRPLLQFTLIMMAFYTGLSRVSDHKHHPSDVLAGFAQGALVACCIVFFVSDLFKTKTTLSLPAPAIRKEILSPVDIIDRNNHHNMILIHGMLSGVHLYWQRSFMTMMLCLLSWKTPT

SEQ ID NO: 49150 - protein, 255 aa, Homo sapiens
ITSRNGPDKIIPAHVIAKAKGLAILSVIKAGFLVTARGGSGIVVARLPDGKWSAPSAIGIAGLGGGFEIGIEVSDLVIILNYDRAVEAFAKGGNLTLGGNLTVAVGPLGRFYCQDIRAYDILFGDTPRPAQAEDLYEILDSFTEKYENEGQRINARKAAREQRKSSAKELPPKPLSRPQQSSAPVQLNSGSQSNLNQPIEVTALYSFEGQQPGDLNFQAGDRITVISKTDSHFDWWEGKLRGQTGIFPANYVTMN

SEQ ID NO: 49151 - protein, 794 aa, Homo sapiens
MNFIKDNSRALIQRMGMTVIKQITDDLFVWNVLNREEVNIICCEKVEQDAARGIIHMILKKGSESCNLFLKSLKEWNYPLFQDLNGQSLFHQTSEGDLDDLAQDLKDLYHTPSFLNFYPLGEDIDIIFNLKSTFTEPVLWRKDQHHHRVEQLTLNGLLQALQSPCIIEGESGKGKSTLLQRIAMLWGSGKCKALTKFKFVFFLRLSRAQGGLFETLCDQLLDIPGTIRKQTFMAMLLKLRQRVLFLLDGYNEFKPQNCPEIEALIKENHRFKNMVIVTTTTECLRHIRQFGALTAEVGDMTEDSAQALIREVLIKELAEGLLLQIQKSRCLRNLMKTPLFVVITCAIQMGESEFHSHTQTTLFHTFYDLLIQKNKHKHKGVAASDFIRSLDHCGDLALEGVFSHKFDFELQDVSSVNEDVLLTTGLLCKYTAQRFKPKYKFFHKSFQEYTAGRRLSSLLTSHEPEEVTKGNGYLQKMVSISDITSTYSSLLRYTCGSSVEATRAVMKHLAAVYQHGCLLGLSIAKRPLWRQESLQSVKNTTEQEILKAININSFVECGIHLYQESTSKSALSQEFEAFFQGKSLYINSGNIPDYLFDFFEHLPNCASALDFIKLDFYGGAMASWEKAAEDTGGIHMEEAPETYIPSRAVSLFFNWKQEFRTLEVTLRDFSKLNKQDIRYLGKIFSSATSLRLQIKRCAGVAGSLSLVLSTCKNIYSLMVEASPLTIEDERHITSVTNLKTLSIHDLQNQRLPGGLTDSLGNLKNLTKLIMDNIKMNEEDAIKLGQISVLIFVSM

SEQ ID NO: 49152 - protein, 106 aa, Homo sapiens
MTASGSPDYGQPHKINPLPPQQEWINQPVRVNVKREYDHMNGSRESPVDCSVSKCSKLVGGGESNPMNYNSYMDEKNGPPPPNMTTNERRVIVPADPTLWTQEHVR

SEQ ID NO: 49153 - protein, 411 aa, Homo sapiens
MGLLVFVRNLLLALCLFLVLGFLYYSAWKLHLLQWEEDSNSVVLSFDSAGQTLGSEYDRLGFLLNLDSKLPAELATKYANFSEGACKPGYASALMTAIFPRFSKPAPMFLDDSFRKWARIREFVPPFGIKGQDNLIKAILSVTKEYRLTPALDSLRCRRCIIVGNGGVLANKSLGSRIDDYDIVVRLNSAPVKGFEKDVGSKTTLRITYPEGAMQRPEQYERDSLFVLAGFKWQDFKWLKYIVYKERVSASDGFWKSVATRVPKEPPEIRILNPYFIQEAAFTLIGLPFNNGLMGRGNIPTLGSVAVTMALHGCDEVAVAGFGYDMSTPNAPLHYYETVRMAAIKEPSTDPSLKPGNLGPVLQQLLCCYIWVMGGCWREPPICADSCFFLDAQYPARERVSAEAGESSRHH

SEQ ID NO: 49154 - protein, 321 aa, Homo sapiens
MRILHVNGFNGDSEKATKVQDIKNNLKEAIETIVAAMSNLVPPVELANPENQFRVDYILSVMNVPDFDFPPEFYEHAKALWEDEGVRACYERSNEYQLIDCAQYFLDKIDVIKQADYVPSDQDLLRCRVLTSGIFETKFQVDKVNFHMFDVGGQRDERRKWIQCFNDVTAIIFVVASSSYNMVIREDNQTNRLQEALNLFKSIWNNRWLRTISVILFLNKQDLLAEKVLAGKSKIEDYFPEFARYTTPEDATPEPGEDPRVTRAKYFIRDEFLRISTASGDGRHYCYPHFTCAVDTENIRRVFNDCRDIIQRMHLRQYELL

SEQ ID NO: 49155 - protein, 143 aa, Homo sapiens
MPCSEETPAISPSKRARPAEVGGMQLRFARLSEHATAPTRGSARAAGYDLYSAYDYTIPPMEKAVVKTDIQIALPSGCYGRVAPRSGLAAKHFIDVGAGVIDEDYRGNVGVVLFNFGKEKFEGMLNIYIHIILVNFQSHVCVN

SEQ ID NO: 49156 - protein, 237 aa, Homo sapiens
MDELFPLIFPAEPAQASGPYVEIIEQPKQRGMRFRYKCEGRSAGSIPGERSTDTTKTHPTIKINGYTGPGTVRISLVTKDPPHRPHPHELVGKDCRDGFYEAELCPDRCIHSFQNLGIQCVKKRDLEQAISQRIQTNNNPFQVPIEEQRGDYDLNAVRLCFQVTVRDPSGRPLRLPPVLSHPIFDNRAPNTAELKICRVNRNSGSCLGGDEIFLLCDKVQKAHGIPVPARYRRSSPD

SEQ ID NO: 49157 - protein, 61 aa, Homo sapiens
MFPALETHLKQTIPDPYEDFMYRHLQYYGYFKGSRSVTQAGGQWPPHPRLKQPSQPLAIIF

SEQ ID NO: 49158 - protein, 110 aa, Homo sapiens
  MOD_RES (1)..(1): Any amino acid
XDAKDFLHIKEKYNNDWWIGRLVKEGCEIGFIPSPLRLENIRIQQEQKRGRFHGGKSSGNSSSSLGEMVSGTFRATPTSTDGAHSSLRCCTVNASGGVSGAVTERLRGNV

SEQ ID NO: 49159 - protein, 109 aa, Homo sapiens
MAGQGLPLHVATLLTGLLECLGFAGVLFGWPSLVFVFKNEDYFKDLCGPDAGPIGNATGQADCKAQDERFSLIFTLGSFMNNFMTFPTGYIFDRFKTTVARLIAIFFYT

SEQ ID NO: 49160 - protein, 310 aa, Homo sapiens
  MOD_RES (1)..(1): Any amino acid
XEVGFLAEDRRINVAVTRARRHVAVICDSRTVNNHAFLKTLVEYFTQHGEVRTAFEYLDDIVPENYSHENSQGSSHAATKPQGPATSTRTGSQRQEGGQEAAAPARQGRKKPAGKSLASEAPSQPSLNGGSPEGVESQDGVDHFRAMIVEFMASKKMQLEFPPSLNSHDRLRVHQIAEEHGLRHDSSGEGKRRFITTEQPPREQRGPDQPDLRTLHLERLQRVRSAQGQPASKEQQASGQQKLPEKKKKKAKGHPATDLPTEEDFEALVSAAVKADNTCGFAKCTAGVTTLGQFCQLCSRRYCLSHHLPE

SEQ ID NO: 49161 - protein, 91 aa, Homo sapiens
  MOD_RES (1)..(1): Any amino acid
XRAPEPEDTWVVETLCGLKMKLKRKRASSVLPEHHEAFNRLLGDPVVQKFLAWDKDLRVSDKYLLAMVIAYFSRAGLFSWQYQRIHFFLAL

SEQ ID NO: 49162 - protein, 104 aa, Homo sapiens
MNWNKGGPGTKRGFGFGGFAISAGKKEEPKLPQQSHSAFGATSSSSGFGKSAPPQLPSFYKIGSKRANFDEENAYFEDEEEDSSNVDLPYIPAENSPTRQQFHS

SEQ ID NO: 49163 - protein, 46 aa, Homo sapiens
AAAYIHLCARGFVPLAPPPQCDTIPTRWIHLPPVIQSNTNLGVAVQ

SEQ ID NO: 49164 - protein, 134 aa, Homo sapiens
MPRCRWLSLILLTIPLALVARKDPKKNETGVLRKLKPVNASNANVKQCLWFAMQEYNKESEDKYVFLVVKTLQAQLQVTNLLEYLIDVEIARSDCRKPLSTNEICAIQENSKLKRKLSCSFLVGALPWNGEFTV

SEQ ID NO: 49165 - protein, 132 aa, Homo sapiens
MPAPALPTSAMAVQVPLWHHYLQAIRSREAPRAQDFQRAENVLLTVLERVHALDPRFIVDYSRGLEAFQFALRSSEDPMDMEVPLWVDAEALLIEEPEATQPEDGLELCHLGVPREGAGLERWTTEDTFTAS

SEQ ID NO: 49166 - protein, 502 aa, Homo sapiens
MVKEKVAHPQDPHHPSEKPVIHCHKCGEPCKGEVLRVQTKHFHIKCFTCKVCGCDLAQGGFFIKNGEYLCTLDYQRMYGTRCHGCGEFVEGEVVTALGKTYHPNCFACTICKRPFPPGDRVTFNGRDCLCQLCAQPMSSSPKETTFSSNCAGCGRDIKNGQALLALDKQWHLGCFKCKSCGKVLTGEYISKDGAPYCEKDYQGLFGVKCEACHQFITGKVLEAGDKHYHPSCARCSRCNQMFTEGEEMYLQGSTVWHPDCKQSTKTEEKLRPTRTSSESIYSRPGSSIPGSPGHTIYAKVDNEILDYKDLAAIPKVKAIYDIERPDLITYEPFYTSGYDDKQERQSLGESPRTLSPTPSAEGYQDVRDRMIHRSTSQGSINSPVYSRHSYTPTTSRSPQHFHRPGNEPSSGRNSPLPYRPDSRPLTPTYAQAPKHFHVPDQGINIYRKPPIYKQHGPDMKRRSSGREEDDEELLRRRQLQEEQLMKLNSGLGQLILKEEMEK

SEQ ID NO: 49167 - protein, 219 aa, Homo sapiens
  MOD_RES (1)..(1): Any amino acid
XASLLSQLLRPPCASCTGAVRCQSQVAEAVLTSQLKAHQEKPNFIIKTPKGTRDLSPQHMVVREKILDLVISCFKRHGAKGMDTPAFELKETLTEKYGEDSGLMYDLKDQGGELLSLRYDLTVPFARYLAMNKVKKMKRYHVGKVWRRESPTIVQGRYREFCQCDFDIAGQFDPMIPDAECLKIMCEILSGLQLGDFLIKESRYCHCFEWKGIDKHLGH

SEQ ID NO: 49168 - protein, 187 aa, Homo sapiens
MDCSAPKEMNKLPANSPEAAAAQGHPDGPCAPRTSPEQELPAAAAPPPPRVPRSASTGAQTFQSADARACEAERPGVGSCKLSSPRAQAASAALRDLREAQGAQASPPPGSSGPGNALHCKIPFLRGPEGDANVSVGKGTLERNNTPVVGWVNMSQSTVVLATDGITSVLPGSVATVATQVLSSSLT

SEQ ID NO: 49169 - protein, 93 aa, Homo sapiens
MQQGTVAFEDVAVNFSQEEWSLLSEVQRCLYHDVMLENWVLISSLGCWCGSEDEEAPSKKSISIQRVSQVSTPGAGVSPKKAHSCEMCGAILG

SEQ ID NO: 49170 - protein, 245 aa, Homo sapiens
METMKAVAEVSESTKAEAVAAVQRQCQEEVASLQAILKDSISSYEAQITALKQERQQQQQDCEEKERELGRLKQLLSRAYPLDSLEKQMEKAHEDSEKLREIVLPMEKEIEELKAKLLRAEELIQEIQRRPRHAPSLHGSTELLPLSRDPSPPLEPLEELSGDGGPAAEAFAHNCDDSASISSFSLGGGVGSSSSLPQSRQGLSPEQEETASLVSTGTLVPEGIYLPPPGYQLVPDTQWEQLQTE

SEQ ID NO: 49171 - protein, 161 aa, Homo sapiens
MDEDVLTTLKILIIGESGVGKSSLLLRFTDDTFDPELAATIVYDVTRRDTFVKLDNWLNELETYCTRNDIVNMLVGNKIDKENREVDRNEGLKFARKHSMLFIEASAKTCDGVQCAFEELVEKIIQTPGLWESENQNKGVKLSHREEGQGGGACGGYCSVL

SEQ ID NO: 49172 - protein, 213 aa, Homo sapiens
MYENFVEEVDAVDNGISQWAEGEPRYALTTTLSARVARLNPTWNHPDQDTEAGFKRAMDLVQEEFLQRLDFYQHSWLPARALVEEALAQRFQVDPSGEIVELAKGACPWKEHLYHLESGLSPPVAIFFVIYTDQAGQWRIQCVPKEPHSFQSRLPLPEPWRGLRDEALDQVSGIPGCIFVHASGFTGGHHTREGALSMARATLAQRSYLPQIS

SEQ ID NO: 49173 - protein, 111 aa, Homo sapiens
MDRGEQGLLRTDPVPEEGEDVAATISATETLSEEEQEELRRELAKVEEEIQTLSQVLAAKEKHLAEIKRKLGINSLQELKQNIAKGWQDVTATSARSKLLAAETELLCLLY

SEQ ID NO: 49174 - protein, 26 aa, Homo sapiens
MFKPVKEEDDGLSGKHSMRTRRSRGS

SEQ ID NO: 49175 - protein, 124 aa, Homo sapiens
MGDPFMLQQSTNPAPGILGPPPPSFHLGGPAVGPRGNLGAGNGNLQGPRHMQKGRVETSRVVHIMDFQRGKNLRYQLLQLVEPFGVISNHLILNKINEAFIEMATTEDAQAAVDYYTTTPALVF

SEQ ID NO: 49176 - protein, 255 aa, Homo sapiens
MSLFDLFRGFFGFPGPRSHRDPFFGGMTRDEDDDEEEEEEGGSWGRGNPRFHSPQHPPEEFGFGFSFSPGGGIRFHDNFGFDDLNFQVLSQRHLVRDYGRDRHFGTQCLSIQIVTSPGSLGGSWRVMQEVNPPNQHQTGAPRGHFIGLMMYGLWTPILEPERTMFLPVHLSPFFLWTLSLLLLHLSALPDLDSQVSQEGLGPVLQPQPKSYFKSISVTKITKPDGIVEERRTVVDSEGRTETTVTRHEADSSPRG

SEQ ID NO: 49177 - protein, 91 aa, Homo sapiens
MSDSGSQLGSMGSLTMKSQLQITVISAKLKENKKNWFGPSPYVEVTVDGQSKKTEKCNNTNSPKWKQPLTVIVTPVSKLHFRVWSHQTLKS

SEQ ID NO: 49178 - protein, 185 aa, Homo sapiens
RSALTEMCVLYDVLSIVRDKKFMTLDPVSQDALPPKQNPQTLQLISKKKSLAGAAQILLKGAERLTKSVTENQENKLQRDFNSELLRLRQHWKLRKVGDKILGDLSYRSAGSLFPHHGTFEVIKNTDLDLDKKIPEDYCPLDVQIPSDLEGSAYIKVSIQKQAPDIGDLGTVNLFKRPLPKSKPG

SEQ ID NO: 49179 - protein, 367 aa, Homo sapiens
MLLPVFTLKLRHKISPRMVAIGRYDGTHPCLAAATQTGKVFIHNPHTRNQHVSASRVFQSPLESDVSLLSINQAVSCLTAGVLNPELGYDALLVGTQTNLLAYDVYNNSDLFYREVADGANAIVLGTLGDISSPLAIIGGNCALQGFNHEGSDLFWTVTGDNVNSLALCDFDGDGKKELLVGSEDFDIRVFKEDEIVAEMTETEIVTSLCPMYGSRFGYALSNGTVGVYDKTSRYWRIKSKNHAMSIHAFDLNSDGVNELITGWSNGKVDARSDRTGEVIFKDNFSSAIAGVVEGDYRMDGHIQLICCSVDGEIRGYLPGTAEMRGNLMDTSAEQDLIRELSQKKQNLLLELRNYEENAKTPSSEQY

SEQ ID NO: 49180 - protein, 149 aa, Homo sapiens
MSSFLPEGGCYELLTVIGKGFEDLMTVNLARYKPTGEYVTVRRINLEACSNEMVTFLQGELHVSKLFNHPNIVPYRATFIADNELWVVTSFMAYGSAKDLICTHFMDGMNELAIAYILQGVLKALDYIHHMGYVHRSVKASHILISVDG

SEQ ID NO: 49181 - protein, 338 aa, Homo sapiens
MRVIRVGTRKSQLARIQTDSVVATLKASYPGLQFEIRDKILDTALSKIGEKSLFTKELEHALEKNEVDLVVHSLKDLPTVLPPGFTIGAICKRENPHDAVVFHPKFVGKTLETLPEKSVVGTSSLRRAAQLQRKFPHLEFRSIRGNLNTRLRKLDEQQEFSAIILATAGLQRMGWHNRVGQILHPEECMYAVGQGALGVEVRAKDQDILDLVGVLHDPETLLRCIAERAFLRHLEGGCSVPVAVHTAMKDGQLYLTGGVWSLDGSDSIQETMQATIHVPAQHEDGPEDDPQLVGITARNIPRGPQLAAQNLGISLANLLLSKGAKNILDVARQLNDAH

SEQ ID NO: 49182 - protein, 43 aa, Homo sapiens
MSSYQKELEKYRDIDEDEILRTLSPEELEQLDCELQEMDPELD

SEQ ID NO: 49183 - protein, 50 aa, Homo sapiens
MNGEQQLDADAGSGMEEVELSWEDYLEETGSTAVPYGSFKHVDTRLQNGF

SEQ ID NO: 49184 - protein, 91 aa, Homo sapiens
MTLHATRGAALLSWVNSLHVADPVEAVLQLQDCSIFIKIIDRIHGTEEGQQILKQPVSERLDFVCSFLQKNRKHPSSPECLVSAQKVLEGS

SEQ ID NO: 49185 - protein, 200 aa, Homo sapiens
  MOD_RES (1)..(1): Any amino acid
XNNKTVFKASSFAGYVGMLTGFKPGLFSLTLNERFSINGGYLEWILGKKDVMWIGFLTRTVLENSTSYEEAKNLLTKTKILAPAYFILGGNQSGEGCVITRDRKESLDVYELDAKQGRWYVVQTNYDRWKHPFFLDDRRTPAKMCLNRTSQENISFETMYDVLSTKPVLNKLTVYTTLIDVTKGQFETYLRDCPDPCIGW

SEQ ID NO: 49186 - protein, 260 aa, Homo sapiens
MEPEPEPAAVEVPAGRVLSARELFAARSRSQKLPQRSHGPKDFLPDGSAAQAERLRRCREELWQLLAEQRVERLGSLVAAEWRPEEGFVELKSPAGKFWQTMGFSEQGRQRLHPEEALYLLECGSIHLFHQDLPLSIQEAYQLLLTDHTVTFLQYQVFSHLKRLGYVVRRFQPSSVLSPYERQLNLDASVQHLEDGDGKRKRSSSSPRCAAFPPRPSGPLIRRPRPWTTPCNPRVWQPPAHLPAASPANAQRRNPRSQAP

SEQ ID NO: 49187 - protein, 181 aa, Homo sapiens
MPGKRGLGWWWARLPLCLLLSLYGPWMPSSLGKPKGHPHMNSIRIDGDITLGGLFPVHGRGSEGKPCGELKKEKGIHRLEAMLFALDRINNDPDLLPNITLGARILDTCSRDTHALEQSLTFVQALIEKDGTEVRCGSGGPPIITKPERVVGVIGASGSSVSIMVANILRLFKGACASPSR

SEQ ID NO: 49188 - protein, 2546 aa, Homo sapiens
IKAPIEDLDLEGQKLLQRIQSSESFPKKNSGSGNADLQNLLPKVSTMLDRLHSTRQHLHQMWHVRKLKLDQCFQLRLFEQDAEKMFDWITHNKGLFLNSYTEIGTSHPHAMELQTQHNHFAMNCMNVYVNINRIMSVANRLVESGHYASQQIRQIASQLEQEWKAFAAALDERSTLLDMSSIFHQKAEKYMSNVDSWCKACGEVDLPSELQDLEDAIHHHQGIYEHITLAYSEVSQDGKSLLDKLQRPLTPGSSDSLTASANYSKAVHHVLDVIHEVLHHQRQLENIWQHRKVRLHQRLQLCVFQQDVQQVLDWIENHGEAFLSKHTGVGKSLHRARALQKRHEDFEEVAQNTYTNADKLLEAAEQLAQTGECDPEEIYQAAHQLEDRIQDFVRRVEQRKILLDMSVSFHTHVKELWTWLEELQKELLDDVYAESVEAVQDLIKRFGQQQQTTLQVTVNVIKEGEDLIQQLRDSAISSNKTPHNSSINHIETVLQQLDEAQSQMEELFQERKIKLELFLQLRIFERDAIDIISDLESWNDELSQQMNDFDTEDLTIAEQRLQHHADKALTMNNLTFDVIHQGQDLLQYVNEVQASGVELLCDRDVDMATRVQDLLEFLHEKQQELDLAAEQHRKHLEQCVQLRHLQAEVKQVLGWIRNGESMLNAGLITASSLQEAEQLQREHEQFQHAIEKTHQSALQVQQKAEAMLQANHYDMDMIRDCAEKVASHWQQLMLKMEDRLKLVNASVAFYKTSEQVCSVLESLEQEYKREEDWCGGADKLGPNSETDHVTPMISKHLEQKEAFLKACTLARRNADVFLKYLHRNSVNMPGMVTHIKAPEQQVKNILNELFQRENRVLHYWTMRKRRLDQCQQYVVFERSAKQALEWIHDNGEFYLSTHTSTGSSIQHTQELLKEHEEFQITAKQTKERVKLLIQLADGFCEKGHAHAAEIKKCVTAVDKRYRDFSLRMEKYRTSLEKALGISSDSNKSSKSLQLDIIPASIPGSEVKLRDAAHELNEEKRKSARRKEFIMAELIQTEKAYVRDLRECMDTYLWEMTSGVEEIPPGIVNKELIIFGNMQEIYEFHNNIFLKELEKYEQLPEDVGHCFVTWADKFQMYVTYCKNKPDSTQLILEHAGSYFDEIQQRHGLANSISSYLIKPVQRITKYQLLLKELLTCCEEGKGEIKDGLEVMLSVPKRANDAMHLSMLEGFDENIESQGELILQESFQVWDPKTLIRKGRERHLFLFEMSLVFSKEVKDSSGRSKYLYKSKLFTSELGVTEHVEGDPCKFALWVGRTPTSDNKIVLKASSIENKQDWIKHIREVIQERTIHLKGALKEPIHIPKTAPATRQKGRRDGEDLDSQGDGSSQPDTISIASRTSQNTLDSDKLSGGCELTVVIHDFTACNSNELTIRRGQTVEVLERPHDKPDWCLVRTTDRSPAAEGLVPCGSLCIAHSRSSMEMEGIFNHKDSLSVSSNDASPPASVASLQPHMIGAQSSPGPKRPGNTLRKWLTSPVRRLSSGKADGHVKKLAHKHKKSREVRKSADAGSQKDSDDSAATPQDETVEERGRNEGLSSGTLSKSSSSGMQSCGEEEGEEGADAVPLPPPMAIQQHSLLQPDSQDDKASSRLLVRPTSSETPSAAELVSAIEELVKSKMALEDRPSSLLVDQGDSSSPSFNPSDNSLLSSSSPIDEMEERKSSSLKRRHYVLQELVETERDYVRDLGYVVEGYMALMKEDGVPDDMKGKDKIVFGNIHQIYDWHRDFFLGELEKCLEDPEKLGSLFVKHERRLHMYIAYCQNKPKSEHIVSEYIDTFFEDLKQRLGHRLQLTDLLIKPVQRIMKYQLLLKDFLKYSKKASLDTSELERAVEVMCIVPRRCNDMMNVGRLQGFDGKIVAQGKLLLQDTFLVTDQDAGLLPRCRERRIFLFEQIVIFSEPLDKKKGFSMPGFLFKNSIKVSCLCLEENVENDPCKFALTSRTGDVVETFILHSSSPSVRQTWIHEINQILENQRNFLNALTSPIEYQRNHSGGGGGGGSGGSGGGGGSGGGGAPSGGSGHSGGPSSCGGAPSTSRSRPSRIPQPVRHHPPVLVSSAASSQAEADKMSGTSTPGPSLPPPGAAPEAGPSAPSRRPPGADAEGSEREAEPIPKMKVLESPRKGAANASGSSPDAPAKDARASLGTLPLGKPRAGAASPLNSPLSSAVPSLGKEPFPPSSPLQKGGSFWSSIPASPASRPGSFTFPGDSDSLQRQTPRHAAPGKDTDRMSTCSSASEQSVQSTQSNGSESSSSSNISTMLVTHDYTAVKEDEINVYQGEVVQILASNQQNMFLVFRAATDQCPAAEGWIPGFVLGHTSAVIVENPDGTLKKSTSWHTALRLRKKSEKKDKDGKREGKLENGYRKSREGLSNKVSVKLLNPNYIYDVPPEFVIPLSEVTCETGETVVLRCRVCGRPKASITWKGPEHNTLNNDGHYSISYSDLGEATLKIVGVTTEDDGIYTCIAVNDMGSASSSASLRVLGPGMDGIMVTWKDNFDSFYSEVAELGRANWNNWSPY

SEQ ID NO: 49189 - protein, 69 aa, Homo sapiens
MAAHLLPICALFLTLLDMAQGFRGPLLPNRPFTTVWNANTQWCLERHGVDVDVSVFDVVANPGQTFRGP

SEQ ID NO: 49190 - protein, 136 aa, Homo sapiens
MHRKHLQEIPDLSSNVATSFTWGWDSSKTSELLSGMGVSALEKEEPDSENIPQELLSNLGHPESPPRKRLKSKGSDKDFVIVRRPKLNRENFPGVSWDSLPDELLLGIFSCLCLPELLKVSGVCKRWYRLACGLFA

SEQ ID NO: 49191 - protein, 194 aa, Homo sapiens
MANMQGLVERLERAVSRLESLSAESHRPPGNCGEVNGVIAGVAPSVEAFDKLMDSMVAEFLKNSRILAGDVETHNDVAALLKPISEKIQEIQTFRERNRGSNMFNHLSAVSESIPALGWIAVSPKPGPYVKEMNDAATFYTNRVLKDYKHSDLRHVDWVKSYLNIWSELQAYIKEHHTTGLTWSKTNEKRRRQR

SEQ ID NO: 49192 - protein, 524 aa, Homo sapiens
MPRRKRNAGSSSDGTEDSDFSTDLEHTDSSESDGTSRRSARVTRSSARLSQSSQDSSPVRNLQSFGTEEPAYSTRRVTRSQQQPTPVTPKKYPLRQTRSSGSETEQVVDFSDRETKNTADHDESPPRTPTGNAPSSESDIDISSPNVSHDESIAKDMSLKDSGSDLSHRPKRRRFHESYNFNMKCPTPGCNSLGHLTGKHERHFSISGCPLYHNLSADECKVRAQSRDKQIEERMLSHRQDDNNRHATRHQAPTERQLRYKEKVAELRKKRNSGLSKEQKEKYMEHRQTYGNTREPLLENLTSEYDLDLFRRAQARASEDLEKLRLQGQITEGSNMIKTIAFGRYELDTWYHSPYPEEYARLGRLYMCEFCLKYMKSQTILRRHMAKCVWKHPPGDEIYRKGSISVFEVDGKKNKIYCQNLCLLAKLFLDHKTLYYDVEPFLFYVMTEADNTGCHLIGYFSKEKNSFLNYNVSFSITCSQLRSKNRLFAFQSRRKSWLPRTSTLRSGAYKLSQLLERSTSPLPA

SEQ ID NO: 49193 - protein, 36 aa, Homo sapiens
MAASRSTRVTRSTVGLNGLDESFCGRTLRNRSIAHP

SEQ ID NO: 49194 - protein, 120 aa, Homo sapiens
MKQPIMADGPRCKRRKQANPRRKNVVNYDNVVDTGSETDEEDKLHIAEDDGIANPLDQETSPASVPNHESSPHVSQALLPREEEEDEIREGGVEHPWHNNEILQASVDGPVKNANCTSDF

SEQ ID NO: 49195 - protein, 347 aa, Homo sapiens
MPYMRYSRKVWDQVKASNPDLKLWEIGKIIGGMWRDLTDEEKQEYLNEYEAEKIEYNESMKAYHNSPAYLAYINAKSRAEAALEEESRQRQSRMEKGEPYMSIQPAEDPDDYDDGFSMKHTATARFQRNHRLISEILSESVVPDVRSVVTTARMQVLKRQVQSLMVHQPDPVLQRKLEAELLQIEERHQEKKRKFLESTDSFNNELKRLCGLKVEVDMEKIAAEIAQAEEQARKRQEEREKEAAEQAERSQSSIVPEEEQAANKGEEKKDDENIPMETEETHLEETTESQQNGEEGTSTPEDKESGQEGVDSMAEEGTSDSNTGSESNSATVEEPPTDPIPEDEKKE

SEQ ID NO: 49196 - protein, 165 aa, Homo sapiens
MLCDEKAQKRRKRKAKESGMALPQGHLTFRDVAIEFSQAEWKCLDPAQRALYKDVMLENYRNLVSLGISLPDLNINSMLEQRREPWSGESEVKIAKNSDGRECIKGVNTGWSAMVQSRLTATSTSWVQAVLLPQPPEQLGLQGAAMHWEAMQKTNQLKNNLEYPF

SEQ ID NO: 49197 - protein, 85 aa, Homo sapiens
MVGPTLPGYPPHIPTSGQGSYASSAIAGMVAGSEYSGNAYGHTPYSSYSEAWRFPNSSLLSSPYYYSSTSRPSAPPTTATAFDHL

SEQ ID NO: 49198 - protein, 342 aa, Homo sapiens
MGRRSSDTEEESRSKRKKKHRRRSSSSSSSDSRTYSRKKGGRKSRSKSRSWSRDLQPRSHSYDRRRRHRSSSSSSYGSRRKRSRSRSRGRGKSYRVQRSRSKSRTRRSRSRPRLRSHSRSSERSSHRRTRSRSRDRERRKGRDKEKREKEKDKGKDKELHNIKRGESGNIKAGLEHLPPAEQAKARLQLVLEAAAKADEALKAKERNEEEAKRRKEEDQATLVEQVKRVKEIEAIESDSFVQQTFRSSKEVKKSVEPSEVKQATSTSGPASAVADPPSTEKEIDPTSIPTAIKYQDDNSLAHPNVISLNFTNLFIEKADAEEKWFKRLIALRQERLMGSPVA

SEQ ID NO: 49199 - protein, 1590 aa, Homo sapiens [sequence omitted]

SEQ ID NO: 49200 - protein, 104 aa, Homo sapiens
MGKSLSHLPLHSSKEDAYDGVTSENMRNGLVNSEVHNEDGRNGDVSQFPYVEFTGRDSVTCPTCQGTGRIPRGWSFPMFPRMMSNSWAQAIIQPWPPKVLELQL

SEQ ID NO: 49201 - protein, 15 aa, Homo sapiens
MVASAGSLFGGMVLK

SEQ ID NO: 49202 - protein, 69 aa, Homo sapiens
MEAIKKKMQMLKLDKENAIDRAEQAEADKKAAEDKCKQVEEELTHLQKKLKGTEDELDKYSEDLKDAQE

SEQ ID NO: 49203 - protein, 79 aa, Homo sapiens
MTFEDVAVYFSQEEWGLLDTAQRALYRHVMLENFTLVTSLGLSTSRPRVVIQLERGEEPWVPSGKDMTLARNTYGRLNS

SEQ ID NO: 49204 - protein, 187 aa, Homo sapiens
MATASPSVFLLMVNGQVESAQFPEYDDLYCKYCFVYGQDWAPTAGLEEGISQITSKSQDVRQALVWNFPIDVTFKSTNPYGCCAAGLLEVQSASGLVATPVKGPQIVLSVYGPDVFGNDVVRGYGAVHVPFSPGRHKRTIPMFVPESTSKLQKFTSWFMGRRPEYTDPKVVAQGEGREATFRAVCQR

SEQ ID NO: 49205 - protein, 111 aa, Homo sapiens
  MOD_RES (1)..(1): Any amino acid
XPSMQEQHSIDDEYAPAVFQSPIVRAFFGSQNNFCAFNLTFGASTGPGYWDQHYLSWSMLLGVGFPPVDGLSPLVLGIMAVALGAPGLMLLGGGLVLLLHHKKYSEYQSIN

SEQ ID NO: 49206 - protein, 67 aa, Homo sapiens
MKDLHSDDNEEESDEVEDNDNDSEMERPVNRGGSRSRRVSLSDGSDSESSSASSPLHHEPPPPLLKT

SEQ ID NO: 49207 - protein, 1427 aa, Homo sapiens
  MOD_RES (1)..(1): Any amino acid
XAKQERLEIASLSNQDHTSKKDPGGHRTAAILHGGSPDFVGNGKHRANSSGRSRRERQYSVCNSEDSPGSCEILYFNMGSPDQLMVHKGKCIGSDEQLGKLVYNALETATGGFVLLYEWVLQWQKKMGPFLTSQEKEKIDKCKKQIQGTETEFNSLVKLSHPNVVRYLAMNLKEQDDSIVVDILVEHISGVSLAAHLSHSGPIPVHQLRRYTAQLLSGLDYLHSNSVVHKVLSASNVLVDAEGTVKITDYSISKRLADICKEDVFEQTRVRFSDNALPYKTGKKGDVWRLGLLLLSLSQGQECGEYPVTIPSDLPADFQDFLKKCVCLDDKERWSPQQLLKHSFINPQPKMPLVEQSPEDSEGQDYVETVIPSNRLPSAAFFSETQRQFSRYFIEFEELQLLGKGAFGAVIKVQNKLDGCCYAVKRIPINPASRQFRRIKGEVTLLSRLHHENIVRYYNAWIERHERPAGPGTPPPDSGPLAKDDRAARGQPASDTDGLDSVEAAAPPPILSSSVEWSTSGERSASARFPATGPGSSDDEDDDEDEHGGVFSQSFLPASDSESDIIFDNEDENSKSQNQMEYCEKSTLRDTIDQGLYRDTVRLWRLFREILDGLAYIHEKGMIHRDLKPVNIFLDSDDHVKIGDFGLATDHLAFSADSKQDDQTGDLIKSDPSGHLTGMVGTALYVSPEVQGSTKSAYNQKVDLFSLGIIFFEMSYHPMVTASERIFVLNQLRDPTSPKFPEDFDDGEHAKQKSVISWLLNHDPAKRPTATELLKSELLPPPQMEESELHEVLHHTLTNVDGKAYRTMMAQIFSQRISPAIDYTYDSDILKGNFSIRTAKMQQHVCETIIRIFKRHGAVQLCTPLLLPRNRQIYEHNEAALFMDHSGMLVMLPFDLRIPFARYVARNNILNLKRYCIERVFRPRKLDRFHPKELLECAFDIVTSTTNSFLPTAEIIYTIYEIIQEFPALQERNYSIYLNHTMLLKAILLHCGIPEDKLSQVYIILYDAVTEKLTRREVEAKFCNLSLSSNSLCRLYKFIEQKGDLQDLMPTINSLIKQKTGIAQLVKYGLKDLEEVVGLLKKLGIKLQVLINLGLVYKVQQHNGIIFQFVAFIKRRQRAVPEILAAGGRYDLLIPQFRGPQALGPVPTAIGVSIAIDKISAAVLNMEESVTISSCDLLVVSVGQMSMSRAINLTQKLWTAGITAEIMYDWSQSQEELQEYCRHHEITYVALVSDKEGSHVKVKSFEKERQTEKRVLETELVDHVLQKLRTKVTDERNGREASDNLAVQNLKGSFSNASGLFEIHGATVVPIVSVLAPEKLSASTRRRYETQVQTRLQTSLANLHQKSSEIEILAVDLPKETILQFLSLEWDADEQAFNTTVKQLLSRLPKQRYLKLVCDEIYNIKVEKKVSVLFLYSYRDDYYRILF

SEQ ID NO: 49208 - protein, 47 aa, Homo sapiens
MLKAVILIGGPQKGTRFRPLSFEVLILNSIVLPHKELSRSFTNQIIL

SEQ ID NO: 49209 - protein, 79 aa, Homo sapiens
MQLNDKWQGLCWPMMDFLRCVTAALIYFAISITAIAKYSDGASKAAGGSVPDTRAVCPSRSEMGREAGAAASRSRESAL

SEQ ID NO: 49210 - protein, 74 aa, Homo sapiens
MASETHNVKKRNFCNKIEDHFIDLPRKKISNFTNKNMKEVKKSPKQLAAYINRTVGQTVKSPDKLRKVIYRRKK

SEQ ID NO: 49211 - protein, 711 aa, Homo sapiens [sequence omitted]

SEQ ID NO: 49212 - protein, 791 aa, Homo sapiens
MIGPSPNPLILSYLKYAISSQMVSYSSVLTAISKFDDFSRDLCVQALLDIMDMFCDRLSCHGKAEECIGLCRALLSALHWLLRCTAASAERLREGLEAGTPAAGEKQLAMCLQRLEKTLSSTKNRALLHIAKLEEASSWTAIEHSLLKLGEILANLSNPQLRSQAEQCGTLIRSIPTMLSVHAEQMHKTGFPTVHAVILLEGTMNLTGETQSLVEQLTMVKRMQHIPTPLFVLEIWKACFVGLIESPEGTEELKWTAFTFLKIPQVLVKLKKYSHGDKDFTEDVNCAFEFLLKLTPLLDKADQRCNCDCTNFLLQECGKQGLLSEASVNNLMAKRKADREHAPQQKSGENANIQPNIQLILRAEPTVTNILKTMDADHSKSPEGLLGVLGHMLSGKSLDLLLAAAAATGKLKSFARKFINLNEFTTYGSEESTKPASVRALLFDISFLMLCHVAQTYGSEVILSESRTGAEVPFFETWMQTCMPEEGKILNPDHPCFRPDSTKVESLVALLNNSSEMKLVQMKWHEACLSISAAILEILNAWENGVLAFESIQKITDNIKGKVCSLAVCAVAWLVAHVRMLGLDEREKSLQMIRQLAGPLFSENTLQFYNERVVIMNSILERMCADVLQQTATQIKFPSTGVDTMPYWNLLPPKRPIKEVLTDIFAKVLEKGWVDSRSIHIFDTLLHMGGVYWFCNNLIKELLKETRKEHTLRAVELLYSIFCLDMQQVTLVLLGHILPGLLTDSSKWHSLMDPPGTALAKLAVWCALSSYSSHKGQASTRQKKRHREDIE

SEQ ID NO: 49213 - protein, 198 aa, Homo sapiens
  MOD_RES (1)..(1): Any amino acid
XGSDPRLVLQPAPEGETHQPLQCGPHAAQPREAGQLQPPYGHTPRGRGDLTVVPSFQQSEHNRSTMVGLSSGLSPALMSNNPLATIQALASGGTLPLTSLDGSGNLVLGAAGAAPGSPGLVTSPLFLNHAGLPLLSTPPGVGLVSAAAAAVAASISSKSPGLSSSSSSSSSSSSSTCSETAAQTPGGPGGPEAGSKPE

SEQ ID NO: 49214 - protein, 389 aa, Homo sapiens
MSDEAEDSDSDSEGGAAGGEADMDFLRNLFSQTLSLGSQKERLLDELTLEGVARYMQSERCRRVICLVGAGISTSAGIPDFRSPSTGLYDNLEKYHLPYPEAIFEISYFKKHPEPFFALAKELYPGQFKPTICHYFMRLLKDKGLLLRCYTQNIDTLERIAGLEQEDLVEAHGTFYTSHCVSASCRHEYPLSWMKEKIFSEVTPKCEDCQSLVKPDIVFFGESLPARFFSCMQSDFLKVDLLLVMGTSLQVQPFASLISKAPLSTPRLLINKEKAGQSDPFLGMIMGLGGGMDFDSKKAYRDVAWLGECDQGCLALAELLGWKKELEDLVRREHASIDAQGGGGPQPQHFSFPQEVPATCQGRGQDNREGETPVTAASPRRDAELLRDS

SEQ ID NO: 49215 - protein, 137 aa, Homo sapiens
  MOD_RES (1)..(1): Any amino acid
XEEKEEDLKREEEIAKLNNSSPNSSGGVKEDCTASMEPSAIELPDYLIKYIAIVSYEQRQNYKDDFNAEYDEYRALHARMETVARRFIKLDAQRKRLSPGSKEYQVNGFVTRWADFHILPSFFPCPAQPQPSQWPLE

SEQ ID NO: 49216 - protein, 1526 aa, Homo sapiens
MAFSKGFRIYHKLDPPPFSLIVETRHKEECLMFESGAVAVLSSAEKEAIKGTYSKVLDAYGLLGVLRLNLGDTMLHYLVLVTGCMSVGKIQESEVFRVTSTEFISLRIDSSDEDRISEVRKVLNSGNFYFAWSASGISLDLSLNAHRSMQEQTTDNRFFWNQSLHLHLKHYGVNCDDWLLRLMCGGVEIRTIYAAHKQAKACLISRLSCERAGTRFNVRGTNDDGHVANFVETEQVVYLDDSVSSFIQIRGSVPLFWEQPGLQVGSHRVRMSRGFEANAPAFDRHFRTLKNLYGKQIIVNLLGSKEGEHMLSKAFQSHLKASEHAADIQMVNFDYHQMVKGGKAEKLHSVLKPQVQKFLDYGFFYFNGSEVQRCQSGTVRTNCLDCLDRTNSVQAFLGLEMLAKQLEALGLAEKPQLVTRFQEVFRSMWSVNGDSISKIYAGTGALEGKAKAGKLKDGARSVTRTIQNNFFDSSKQEAIDVLLLGNTLNSDLADKARALLTTGSLRASSKVLKSMCENFYKYSKPKKIRVCVGTWNVNGGKQFRSIAFKNQTLTDWLLDAPKLAGIQEFQDKRSKPTDIFAIGFEEMVELNAGNIVSASTTNQKLWAVELQKTISRDNKYVLLASEQLVGVCLFVFIRPQHAPFIRDVAVDTVKTGMGGATGNKGAVAIRMLFHTTSLCFVCSHFAAGQSQVKERNEDFIEIARKLSFPMGRMLFSHDYVFWCGDFNYRIDLPNEEVKELIRQQNWDSLIAGDQLINQKNAGQVFRGFLEGKVTFAPTYKYDLFSDDYDTSEKCRTPAWTDRVLWRRRKWPFDRSAEDLDLLNASFQDESKILYTWTPGTLLHYGRAELKTSDHRPVVALIDIDIFEVEAEERQNIYKEVIAVQGPPDGTVLVSIKSSLPENNFFDDALIDELLQQFASFGEVILIRFVEDKMWVTFLEGSSALNVLSLNGKELLNRTITIALKSPDWIKNLEEEMSLEKISIALPSSTSSTLLGEDAEVAADFDMEGDVDDYSAEVEELLPQHLQPSSSSGLGTSPSSSPRTSPCQSPTISEGPVPSLPIRPSRAPSRTPGPPSAQSSPIDAQPATPLPQKDPAQPLEPKRPPPPRPVAPPTRPAPPQRPPPPSGRSQPSPQAGLAGPGPAGYSTARPTIPPRAGVISAPQSHARASAGRLTPESQSKTSETSKGSTFLPEPLKPQAAFPPQSSLPPPAQRLQEPLVPVAAPMPQSGPQPNLETPPQPPPRSRSSHSLPSEASSQPQVKTNGISDGKRESPLKIDPFEDLSFNLLAVSKAQLSVQTSPVPTPDPKRLIQLPSATQSNVLSSVSCMPTMPPIPARSQSQENMRSSPNPFITGLTRTNPFSDRTAAPGNPFRAKSEESEATSWFSKEEPVTISPFPSLQPLGHNKSRASSSLDGFKDSFDLQGQSTLKISNPKGWVTFEEEEDFGVKGKSKSACSDLLGNQPSSFSGSNLTLNDDWNKGTNVSFCVLPSRRPPPPPVPLLPPGTSPPVDPFTTLASKASPTLDFTER

SEQ ID NO: 49217 - protein, 140 aa, Homo sapiens
MVQAHGGRSRAQPLTLSLGAAMTQPPPEKTPAKKHVRLQERRGSNVALMLDVRSLGAVEPICSVNTPREVTLHFLRTAGHPLTRWALQRQPPSPKQLEEEFLKIPSNFVSPEDLDIPGHASKDRYKTILPNPQSRVCLGR

SEQ ID NO: 49218 - protein, 42 aa, Homo sapiens
MGKSCKVVVCGQASVGKTSILEQLLYGNHVVDSFLILYQVRR

SEQ ID NO: 49219 - protein, 196 aa, Homo sapiens
  MOD_RES (1)..(1): Any amino acid
XFKAENASLAKLRIERESALEKLRKEIADFEQQKAKELARIEEFKKEEMRKLQKERKVFEKYTTAARTFPDKKEREEIQTLKQQIADLREDLKRKETKWSSTHSRLRSQIQMLVRENTDLREEIKVMERFRLDAWKRAEAIESSLEVEKKDKLANTSVRFQNSQISSGTQVEKYKKNYLPMQGKRLHDLFIKHFRM

SEQ ID NO: 49220 - protein, 297 aa, Homo sapiens
MEVMNLMEQPIKVTEWQQTYTYDSGIHSGANTCVPSVSSKGIMEEDEACGRQYTLKKTTTYTQGVPPSQGDLEYQMSTTARAKRVREAMCPGVSGEDSSLLLATQVEGQATNLQRLAEPSQLLKSAIVHLINYQDDAELATRALPELTKLLNDEDPVVVTKAAMIVNQLSKKEASRRALMGSPQLVAAVVRTMQNTSDLDTARCTTSILHNLSHHREGLLAIFKSGGIPALVRMLSSPVESVLFYAITTLHNLLLYQEGAKMAVRLADGLQKMVPLLNKNNPKFLAITTDCLQLLAY

SEQ ID NO: 49221 - protein, 251 aa, Homo sapiens
MASALWTVLPSRMSLRSLKWSLLLLSLLSFFVMWYLSLPHYNVIERVNWMYFYEYEPIYRQDFHFTLREHSNCSHQNPFLVILVTSHPSDVKARQAIRVTWGEKKSWWGYEVLTFFLLGQEAEKEDKMLALSLEDEHLLYGDIIRQDFLDTYNNLTLKTIMAFRWVTEFCPNAKYVMKTDTDVFINTGNLVKYLLNLNHSEKFFTGYPLIDNYSYRGFYQKTHISYQEYPFKVFPPYCSGLGYIMSRDLVP

SEQ ID NO: 49222 - protein, 181 aa, Homo sapiens
PIYDFFLGRELNPRICFFDFKYFCELRPGLIGWVLINLALLMKEAELRGSPSLAMWLVNGFQLLYVGDALWHEEAVLTTMDITHDGFGFMLAFGDMAWVPFTYSLQAQFLLHHPQPLGLPMASVICLINATGYYIFRGANSQKNTFRKNPSDPRVAGVSHLLPYFYLLYFTALLVHREARD

SEQ ID NO: 49223 - protein, 112 aa, Homo sapiens
MHTTSHSASTAVSEAKPGGSLVPWEIFLITLVSVVAAVGLFAGLFFCVRNSLSLRNTFNTAVYHPHGLNHGLGPGPGGNHGAPHRPRWSPNWFWRRPVSSIAMEMSGRNSGP

SEQ ID NO: 49224 - protein, 128 aa, Homo sapiens
MTTEQARGQQGPNLAIGRQKPPAGVVTPKSDAEEPPLTRKRSKKERGLRGSRKRTGSSGEQTGPEAPGSSNNPPSTGEGPAGAPPASPGPASSRQSHRHRPDSLHDAAQRTYGPLLNRVFGKGMKEEG

SEQ ID NO: 49225 - protein, 89 aa, Homo sapiens
MASKRKSTTPCMIPVKTVVLQDASMEAQPAETLPEGPQQDLPPEASAASSEAAQNPSSTDGSTLANGHRSTLDGYLYSCKYCDFRSHDM

SEQ ID NO: 49226 - protein, 111 aa, Homo sapiens
MELGGPGAPRLLPPLLLLLGTGLLRASSHVETRAHAEERLLKKLFSGYNKWSRPVANISDVVLVRFGLSIAQLIDVDEKNQMMTTNVWVKQPPPAPPHPGVARLQAALGPS

SEQ ID NO: 49227 - protein, 627 aa, Homo sapiens
MMMAKKWAKFLRDFENFKAACVPWENKIKAIESQFGSSVASYFLFLRWMYGVNMVLFILTFSLIMLPEYLWGLPYGSLPRKTVPRAEEASAANFGVLYDFNGLAQYSVLFYGYYDNKRTIGWMNFRLPLSYFLVGIMCIGYSFLVVLKAMTKNIGDDGGGDDNTFNFSWKVFTSWDYLIGNPETADNKFNSITMNFKEAITEEKAAQVEENVHLIRFLRFLANFFVFLTLGGSGYLIFWAVKRSQEFAQQDPDTLGWWEKNEMNMVMSLLGMFCPTLFDLFAELEDYHPLIALKWLLGRIFALLLGNLYVFILALMDEINNKIEEEKLVKANITLWEANMIKAYNASFSENSTGPPFFVHPADVPRGPCWETMVGQEFVRLTVSDVLTTYVTILIGDFLRACFVRFCNYCWCWDLEYGYPSYTEFDISGNVLALIFNQGMIWMGSFFAPSLPGINILRLHTSMYFQCWAVMCCNVPEARVFKASRSNNFYLGMLLLILFLSTMPVLYMIVSLPPSFDCGPFSGKNRMFEVIGETLEHDFPSWMAKILRQLSNPGLVIAVILVMVLAIYYLNATAKGQKAANLDLKKKMKMLQLLVASNKYPESPEKVHFALLFKSNAICERPENKHC

SEQ ID NO: 49228 - protein, 107 aa, Homo sapiens
MAPPWVPAMGFTLAPSLGCFVGSRFVHGEGLRWYAGLQKPSWHPPHWVLGPVWGTLYSAMGYGSYLVWKELGGFTEKAVVPLGLYTGQLALNWAWPPIFFGARQMGW

SEQ ID NO: 49229 - protein, 333 aa, Homo sapiens
MANLGTLQLLPPRFKRFSCLSLPNIWITGMPVPATSVPCPSAGPHRTMKVLLLTGLGALFFAYYWDDNFDPASLQGARVLLTGANAGVGEELAYHYARLGSHLVLTAHTEALLQKVVGNCRKLGAPKVFYIAADMASPEAPESVVQFALDKLGGLDYLVLNHIGGAPAGTRARSPQATRWLMQVNFVSYVQLTSRALPSLTDSKGSLVVVSSLLGRVPTSFSTPYSAAKFALDGFFGSLRRELDVQDVNVAITMCVLGLRDRASAAEAVRGVTRVKAAPGPKAALAVIRGGATRAAGVFYPWRFRLLCLLRRWLPRPRAWFIRQELNVTAAAA

SEQ ID NO: 49230 - protein, 115 aa, Homo sapiens
  MOD_RES (1)..(1): Any amino acid
XKNQQNISSVKYKEEIKHATAISDPPELKRVKENQKNISNLQYKEQNYKATPVSMTPEIERVRRNQEQLSAVKYKGELQRGTAISDPPELKRAKENQKNISNVFITEVSWEELPL

SEQ ID NO: 49231 - protein, 201 aa, Homo sapiens
MANERMNLMNMAKLSIKGLIESALNLGRTLDSDYAPLQQFFVVMEHCLKHGLKAKKTFLGQNKSFWGPLELVEKLVPEAAEITASVKDLPGLKTPVGRGRAWLRLALMQKKLSEYMKALINKKELLSEFYEPNALMMEEEGAIIAGLLVGLNVIDANFCMKGEDLDSQVGVIDFSMYLKDGNSSKGTEGDGQITAILDQKN

SEQ ID NO: 49232 - protein, 863 aa, Homo sapiens
MDASIWSNELIELFIVIGNKRANDFWAGNLQKDEELHMDSPVEKRKNFITQKYKEGKFRKTLLASLTKEELNKALCAAVVKPDVLETMALLFSGADVMCATGDPVHSTPYLLAKKAGQSLQMEFLYHNKFSDFPQHDIHSEGVLSQESSQSTFLCDFLYQAPSAASKLSSEKKLLEETNKKWCVLEGGFLSYYENDKSTTPNGTININEVICLAIHKEDFYLNTGPIFIFEIYLPSERVFLFGAETSQAQRKWTEAIAKHFVPLFAENLTEADYDLIGQLFYKDCHALDQWRKGWFAMDKSSLHFCLQMQEVQGDRMHLRRLQELTISTMVQNGEKLDVLLLVEKGRTLYIHGHTKLDFTVWHTAIEKAAGTDGNALQDQQLSKNDVPIIVNSCIAFVTQYGLGCKYIYQKNGDPLHISELLESFKKDARSFKLRAGKHQLEDVTAVLKSFLSDIDDALLTKELYPYWISALDTQDDKERIKKYGAFIRSLPGVNRATLAAIIEHLYRVQKCSEINHMNAHNLALVFSSCLFQTKGQTSEEVNVIEDLINNYVEIFEVKEDQVKQMDIENSFITKWKDTQVSQAGDLLIEVYVERKEPDCSIIIRISPVMEAEELTNDILAIKNIIPTKGDIWATFEVIENEELERPLHYKENVLEQVLRWSSLAEPGSAYLVVKRFLTADTIKHCSDRSTLGSIKEGILKIKEEPSKILSGNKFQDRYFVLRDGFLFLYKDVKSSKHDKMFSLSSMKFYRGVKKKMKPPTSWGLTAYSEKHHWHLCCDSSRTQTEWMTSIFIAQHEYDIWPPAGKERKRSITKNPKIGGLPLIPIQHEGNATLARKILRVQEQNLKGCGSVKSVIKSPWTLA

SEQ ID NO: 49233 - protein, 473 aa, Homo sapiens
  MOD_RES (1)..(1): Any amino acid
XTAFLGPKDLFPYDKCKDKYGKPNKRKGFNEGLWEIQNNPHASYSAPPPVSSSDSEAPEANPADGSDADEDDEDRGVMAVTAVTATAASDRMESDSDSDKSSDNSGLKRKTPALKMSVSKRARKASSDLDQASVSPSEEENSESSSESEKTSDQDFTPEKKAAVRAPRRGPLGGRKKKKAPSASDSDSKADSDGAKPEPVAMARSASSSSSSSSSSDSDVSVKKPPRGRKPAEKPLPKPRGRKPKPERPPSSSSSDSDSDEVDRISEWKRRDEARRRELEARRRREQEEELRRLREQEKEEKERRRERADRGEAERGSGGSSGDELREDDEPVKKRGRKGRGRGPPSSSDSEPEAELEREAKKSAKKPQSSSTEPARKPGQKEKRVRPEEKQQAKLECNGVISAHCNLRLPGSSDSPASALPSSWDYRHPPPRLANFCCFSRHGVSSCWPGWSRSPDPVICPPQPPKVLGLQV

SEQ ID NO: 49234 - protein, 101 aa, Homo sapiens
NFTLVNCSKKCDVHQVYTPSPSDYGCCGTCKNVSCKFHMENGTSVVYAVGSTWHYNCTTYECVKTDEGAIILNYTMVCPPFNETECKMVCTLLYLRKFIII

SEQ ID NO: 49235 - protein, 177 aa, Homo sapiens
MASETHNVKKRNFCNKIEDHFIDLPRKKISNFTNKNMKEVKKSPKQLAAYINRTVGQTVKSPDKLRKVIYRRKKVHHPFPNPCYRKKQSPGSGGCDMANKENELACAGHLPEKLHHDSRTYLVNSSDSGSSQTESPSSKYSGFFSEVSQDHETMAQVLFSRNMRLNVALTFWRKRSI

SEQ ID NO: 49236 - protein, 246 aa, Homo sapiens
MGFNLTFHLSYKFRLLLLLTLCLTVVGWATSNYFVGAIQEIPKAKEFMANFHKTLILGKGKTLTNEASTKKVELDNCPSVSPYLRGQSKLIFKPDLTLEEVQAENPKVSRGRYRPQECKALQRVAILVPHRNREKHLMYLLEHLHPFLQRQQLDYGIYVIHQAEGKKFNRAKLLNVGYLEALKEENWDCFIFHDVDLVPENDFNLYKCEEHPKHLVVGRNSTGYRLRYSGYFGGVTALSREQFFKG

SEQ ID NO: 49237 - protein, 115 aa, Homo sapiens
  MOD_RES (1)..(1): Any amino acid
XVDSKGYSTWLKLNKKVTQQDVKKENPLQFKFRAKFFPEDVSEELIQEITQRLFFLQVKEAILNDEIYCPPETAVLLASYAVQAKYGDYNKEIHKPGYLANDRLLPQRVSNKWRQ

SEQ ID NO: 49238 - protein, 40 aa, Homo sapiens
MGNSMKSTPAPAERPLPNPEGLDSDFLAVLSDYPSPDISP

SEQ ID NO: 49239 - protein, 77 aa, Homo sapiens
MVFISRKCCPPTLRRIRQCSMVQNHRQLRSQTRLHMSNMSDQGPYNEYEPTHEGPFIIINGYGQCKCQQLPYKECEV

SEQ ID NO: 49240 - protein, 153 aa, Homo sapiens
MEPLCPLLLVGFSLPLARALRGNETTADSNETTTTSGPPDPGASQPLLAWLLLPLLLLLLVLLLAAYFFRFRKQRKAVVSTSDKKMPNGILEEQEQQRVMLLSRSPSGPKKYFPIPVEHLEEEIRIRSADDCKQFREEFNSLPSGHIQGTFEL

SEQ ID NO: 49241 - protein, 241 aa, Homo sapiens
MRIRRGARRCEVTARPAEPLEAILTDDEPDHGPLGAPEGDHDLLTCGQCQMNFPLGDILIFIEHKRKQCNGSLCLEKAVDKPPSPSPIEMKKASNPVEVGIQVTPEDDDCLSTSSRGICPKQEHIADKLLHWRGLSSPRSAHGALIPTPGMSAEYAPQGICKDEPSSYTCTTCKQPFTSAWFLLQHAQNTHGLRIYLESEHGSPLTPRVLHTPPFGVVPRELKMCGSFRMEAREPLSSEKI

SEQ ID NO: 49242 - protein, 307 aa, Homo sapiens
  MOD_RES (1)..(1): Any amino acid
XNMLMLPSVRPQDAGTYVCTATNRQGKVKAFAHLQVPERVVPYFTQTPYSFLPLPTIKDAYRKFEIKITFRPDSADGLLLYSGMLLYNGQKRVPGSPTNLANRQPDFISFGLVGGRPEFRFDAGSGMATIRHPTPLALGHFHTVTLLRSLTQGSLIVGDLAPVNGTSQGKFQGLDLNEELYLGGYPDYGAIPKAGLSSGFIGCVRELRIQGEEIVFHDLNLTAHGISHCPTCRDRPCQNGGQCHDSESSSYVCVCPAGFTGSRCEHSQALHCHPEACGPDATCVNRPDGRGYTCRCHLGRSGLRCEE

SEQ ID NO: 49243 - protein, 108 aa, Homo sapiens
MAGVKALVALSFSGAIGLTFLMLGCALEDYGVTYDSDATSSACRELAYFFTTGIVVSAFGFPVILARVAVIKWGACGLVLAGNAVIFLTIQGFFLIFGRGDDFSWEQW

SEQ ID NO: 49244 - protein, 404 aa, Homo sapiens
  MOD_RES (1)..(1): Any amino acid
XTLKLSHNVAGVTFLAFGNGAPDIFSALVAFSDPHTAGLALGALFGAGVLVTTVVAGGITILHPFMAASRPFFRDIVFYMVAVFLTFLMLFRGRVTLAWALGYLGLYVFYVVTVILCTWIYQRQRRGSLFCPMPVTPEILSDSEEDRVSSNTNSYDYGDEYRPLFFYQETTAQILVRALNPLDYMKWRRKSAYWKALKVFKLPVEFLLLLTVPVVDPDKDDQNWKRPLNCLHLVISPLVVVLTLQSGTYGVYEIGGLVPVWVVVVIAGTALASVTFFATSDSQPPRLHWLFAFLGFLTSALWINAAATEVVNILRSLGVVFRLSNTVLGLTLLAWGNSIGDAFSDFTLARQGYPRMAFSACFGGIIFNILVGVGLGCLLQISRSHTEVKTRRMQVAGKTKRHGA

SEQ ID NO: 49245 - protein, 222 aa, Homo sapiens
VLSPRHEEATHLLQRARMKARTRPLRASHDIVPTITQGSRRTPGLSWLSRCCHHQLHGHHPLPVLRGVRVQQGIRGKPAEDRVRIWRTCAVKSISRSWHRTRLPLGCPFGPEQEKEQQHSLHPGAEKALLSPGPEFPAQAGQVPQLQCGAVAARPAWPDVTVQGPIVTIPAPGVTLSPASESCLFSEPPFSAEQQGEPVQPLPGSRARGPQCSWQAGQDFTT

SEQ ID NO: 49246 - protein, 813 aa, Homo sapiens
MDEGVVKESGNDTIDEEELILPNRNLRDKVEENSVRSPRKSPRLMAQEQVRSLRQSTIAKRSNAAPLSNTKKASGKTVSTAKAGVKQPERSQVKEEVCMSLKPEYHKENRRCSRNSGQIEVVPEVSVSSSHSSVSSCLEMKDEDGLDSKHKCNNPGEIDVPSHELNCSLLSETCVTIGEKKNEALMECKAKPVGSPLFKFSDKEEHEQNDSISGKTGETVVEEMIATRKVEQDSKETVKLSHEDDHILEDAGSSDISSDAACTNPNKTENSLVGLPSCVDEVTECNLELKDTMGIADKTENTLERNKIEPLGYCEDAESNRQLESTEFNKSNLEVVDTSTFGPESNILENAICDVPDQNSKQLNAIESTKIESHETANLQDDRNSQSSSVSYLESKSVKSKHTKPVIHSKQNMTTDAPKKIVAAKYEVIHSKTKVNVKSVKRNTDVPESQQNFHRPVKVRKKQIDKEPKIQSCNSGVKSVKNQAHSVLKKTLQDQTLVQIFKPLTHSLSDKSHAHPGCLKEPHHPAQTGHVSHSSQKQCHKPQQQAPAMKTNSHVKEELEHPGVEHFKEEDKLKLKKPEKNLQPRQRRSSKSFSLDEPPLFIPDNIATIRREGSDHSSSFESKYMWTPSKQCGFCKKPHGNRFMVGCGRCDDWFHGDCVGLSLSQAQQMGEEDKEYVCVKCCAEEDKKTEILDPDTLENQATVEFHSGDKTMECEKLGLSKHTTNDRTKYIDDTVKHKVKILKRESGEGRNSSDCRDNEIKKWQLAPLRKMGQPVLPRRSSEEKSEKIPKESTTVTCTGEKASKPGTHEKQEM

SEQ ID NO: 49247 - protein, 42 aa, Homo sapiens
MAALYRPGLRYLPRTSNGLSASAPGYFERQQGPGDKGLTGMG

SEQ ID NO: 49248 - protein, 187 aa, Homo sapiens
MTENKTVSSSSTRDDQTNIGLTCQEVKALREKAWSRTNEGNAMSQSLVLYGASKENSEGFHESKMTNTEGVNKGIYFSYPCRRHSCAVVNIPAPCVNKMISHIQDVESKIQEHLKRLCQLQRRMHTLWQEHFKLVVLFSQMRLANFQTDSQESIQKILAVQEESSNLMQHILGFFQTLTDGTCENDG

SEQ ID NO: 49249 - protein, 347 aa, Homo sapiens
MENEPGIVSPFKRVFLKGEKSRDKKAHEKVTERRPLHTVVLSLPERVEPDRLLSDYIEKEVKYLGQLTSIPGYLNPSSRTEILHFIDNAKRAHQLPGHLTQEHDAVLSLSAYNVKLAWRDGEDIILRVPIHDIAAVSYVRDDAAHLVVLKTDDSSTKVDIKETYEVEASTFCFPESVDVGGASPHSKTISESELSASATELLQDYMLTLRTKLSSQEIQQFAALLHEYRNGASIHEFCINLRQLYGDSRKFLLLGLRPFIPEKDSQHFENFLETIGVKDGRGIITDSFGRHRRALSTTSSSTTNGNRATGSSDDRSAPSEGDEWDRMISDISSDIEALGCSMDQDSA

SEQ ID NO: 49250 - protein, 156 aa, Homo sapiens
MGKADVWLIRNSWNFQFPYPLLPNVDFVGGLHCKPAKPLPKEMEDFVQSSGENGVVVFSLGSMVSNMTEERANVIASALAQIPQKVLWRFDGNKPDTLGLNTRLYKWIPQNDLLGHPKTRAFITHGGANGIYEAIYHGIPMVGIPLFADQPDNIAH

SEQ ID NO: 49251 - protein, 61 aa, Homo sapiens
MKDKRKKKDRTWAEAARLALEKHPNSPMTAKQILEVIQKEGLKETSLVSDPGMAWRQRWCV

SEQ ID NO: 49252 - protein, 47 aa, Homo sapiens
MSFLVSKPERIRESHQKVESNRRRRRIGFTCIECLLYTRPMMRAQSQ

SEQ ID NO: 49253 - protein, 134 aa, Homo sapiens
MARRLLPAHVQESVTFRDVAVFFSQDEWLHLDSAQRALYREVMLENYSILVSLGILFSKPKVISQLEQGEDPWMVESGVPQGAHLGWESLFGTIVSKEENQEVMKKLIIDGTFDFKLEKTYINEDKLEKQQGKK

SEQ ID NO: 49254 - protein, 246 aa, Homo sapiens
MGDAPSPEEKLHLITRNLQEVLGEEKLKEILKERELKIYWGTATTGKPHVAYFVPMSKIADFLKAGCEVTILFADLHAYLDNMKAPWELLELRVSYYENVIKAMLESIGVPLEKLKFIKGTDYQLSKEYTLDVYRLSSVVTQHDSKKAGAEVVKQVEHPLLSGLLYPGLQALDEEYLKVDAQFGGIDQRKIFTFAEKVSVCFPVFFHLHLRGMQLCLLNYDVSVPLVIVYGKYSPCFADENTEDRR

SEQ ID NO: 49255 - protein, 45 aa, Homo sapiens
MRKEHGTESFFQHLLPQHFQLELAQRDEDENVNIYRARHREPRPA

SEQ ID NO: 49256 - protein, 364 aa, Homo sapiens
MAFLMHLLVCVFGMGSWVTINGLWVELPLLVMELPEGWYLPSYLTVVIQLANIGPLLVTLLHHFRPSCLSEVPIIFTLLGVGTVTCIIFAFLWNMTSWVLDGHHSIAFLVLTFFLALVDCTSSVTFLPFMSRLPTYYLTTFFVGEGLSGLLPALVALAQGSGLTTCVNVTEISDSVPSPVPTRETDIAQGVPRALVSALPGMEAPLSHLESRYLPAHFSPLVFFLLLSIMMACCLVAFFVLQRQPRCWEASVEDLLNDQVTLHSIRPREENDLGPAGTVDSSQGQGYLEEKAAPCCPAHLAFIYTLVAFVNALTNGMLPSVQTYSCLSYGPVAYHLAATLSIVANPLASLVSMFLPNRCALIWS

SEQ ID NO: 49257 - protein, 164 aa, Homo sapiens
MEDKDREQHPQAHVDIYEKQPVPFGLVRFGVAPDHPEVKNVINTFTQTAHSGRCAFWGNVEVGRDVTVPELQEAYHAVVLSYGAEDHRALEIPGEELPGVCSARAFVGWYNGLPENQELEPDLSCDTAVILGQGNVALDVARILLTPPEHLERTDITKAALGVL

SEQ ID NO: 49258 - protein, 298 aa, Homo sapiens
SGRGHPSEPPASDGPAGCCSGSKDVVIKAQVLAGGRGKGTFESGLKGGVKIVFSPEEAKAVSSQMIGKKLFTKQTGEKGRICNQVLVCERKYPRREYYFAITMERSFQGPVLIGSSHGGVNIEDVAAESPEAIIKEPIDIEEGIKKEQALQLAQKMGFPPNIVESAAENMVKLYSLFLKYDATMIEINPMVEDSDGAVLCMDAKINFDSNSAYRQKKIFDLQDWTQEDERDKDAAKANLNYIGLDGNIGCLVNGAGLAMATMDIIKLHGGTPANFLDVGGGATVHQVTEAFKLITSDK

SEQ ID NO: 49259 - protein, 207 aa, Homo sapiens
  MOD_RES (1)..(1): Any amino acid
XENGLPAVVSCVPGQVFSPDGPSRFRKAYKPEQDRVSLQQPLVRLRGGAYIGEGRVEVLKNGEWGTVCDDKWDLVSASVVCRELGFGSAKEAVTGSRLGQGIGPIHLNEIQCTGNEKSIIDCKFNAESQGCNHEEDAGVRCNTPAMGLQKKLRLNGGRNPYEGRVEVLVERNGSLVWGMVCGQNWGIVEAMVVCRQLGLGFASNAFQ

SEQ ID NO: 49260 - protein, 42 aa, Homo sapiens
  MOD_RES (1)..(1): Any amino acid
XSNFGGGGSYNDFGNYNNQSSNFGPMKGGNFGGQYFAKPRNQ

SEQ ID NO: 49261 - protein, 125 aa, Homo sapiens
MSKAHKPWPYRRRSQFSSRKYLKKEMNSFQQQPPPFGTVPPQMMFPPNWQGAEKDAAFLAKDFNFLTLNNQPPPGNRSQPRAMGPENNLYSQYEQKVRPCIDLIDSLRALGVEQDLALPAIAVIG

SEQ ID NO: 49262 - protein, 1062 aa, Homo sapiens
MTEVLDVSDEEGDDTMTGDGGEYLRPEDLKELGDDSLPSSQFLDGMNYLRYSLEGGRSDSLRSFSSDRSHTLSHASYLRDSAVMDDSVVIPSHQVSTLAKEAERNSYRLSWGTENLDNVALSSSPIHSGFLVSFMVDARGGAMRGCRHNGLRIIIPPRKCTAPTRVTCRLVKRHRLATMPPMVEGEGLASRLIEVGPSGAQFLGPVIVEIPHFAALRGKERELVVLRSENGDSWKEHFCDYTEDELNEILNGMDEVLDSPEDLEKKRICRIITRDFPQYFAVVSRIKQDSNLIGPEGGVLSSTVVPQVQAVFPEGALTKRIRVGLQAQPMHSELVKKILGNKATFSPIVTLEPRRRKFHKPITMTIPVPKASSDVMLNGFGGDAPTLRLLCSITGGTTPAQWEDITGTTPLTFVNECVSFTTNVSARFWLIDCRQIQESVTFASQVYREIICVPYMAKFVVFAKSHDPIEARLRCFCMTDDKVDKTLEQQENFAEVARSRDVEVLEGKPIYVDCFGNLVPLTKSGQHHIFSFFAFKENRLPLFVKVRDTTQEPCGRLSFMKEPKSTRGLVHQAICNLNITLPIYTKESESDQEQEEEIDMTSEKNPQDEQERIEERLAYIADHLGFSWTELARELDFTEEQIHQIRIENPNSLQDQSHALLKYWLERDGKHATDTNLVECLTKINRMDIVHLMETNTEPLQERISHSYAEIEQTITLDHSEGFSVLQEELCTAQHKQKEEQAVSKESETCDHPPIVSEEDISVGYSTFQDGVPKTEGDSSATALFPQTHKEQVQQDFSGKMQDLPEESSLEYQQEYFVTTPGTETSETQKAMIVPSSPSKTPEEVSTPAEEEKLYLQTPTSSERGGSPIIQEPEEPSEHREESSPRKTSLVIVESADNQPETCERLDEDAAFEKGDDMPEIPPETVTEEEYIDEHGHTVVKKVTRKIIRRYVSSEGTEKEEIMVQGMPQEPVNIEEGDGYSKVIKRVVLKSDTEQSEVTLCEPSILSSTSQFQAEPVEGRRVSKVVKTTVVLGERMEKHLGDSSLATDLPSAKDDFEEDNNE

SEQ ID NO: 49263 - protein, 62 aa, Homo sapiens
MNLDSLSLALSQISYLVDNLTKKNYRASQQEIQHIVNRHGPEADRHLLRCLFSHVDFSGDGK

SEQ ID NO: 49264 - protein, 42 aa, Homo sapiens
MPLVRYRKVVILGYRCVGKTSLAHQFVEGEFSEGYDPTVENR

SEQ ID NO: 49265 - protein, 81 aa, Homo sapiens
EARLLVAKAYRHTEKVLQDNLDKLQAVWAVPSPAEAGLPVDPCSSRLTKQLCRARAHHSGSHNGSKAAAGKRPSGKGSDKL

SEQ ID NO: 49266 - protein, 175 aa, Homo sapiens
  MOD_RES (1)..(1): Any amino acid
XGVAVYAAAVLLGAGCATILVTSLAMTADLIGPHTNSGAFVYGSMSFLDKVANGLAVMAIQSLHPCPSELCCRACVSFYHWAMVAVTGGVGVAAALCLCSLLLWPTRLRRSFLAWRRGRGEDKGPGYSWIPTVLVQPPRPTSPFLWEAPLAWRCTRKKWSGAGTKPWPREDWGTH

SEQ ID NO: 49267 - protein, 211 aa, Homo sapiens
MFKRMAEFGPDSGGRVKGVTIVKPIVYGNVARYFGKKREEDGHTHQWTVYVKPYRNEAKWLIPVISALWEAQAGGSLEPRSLRPDWQHSKTPSLQKKKDMSAYVKKIQFKLHESYGNPLRVVTKPPYEITETGWGEFEIIIKIFFIDPNERPVTLYHLLKLFQSDTNAMLGKKTVVSEFYDEMIFQDPTAMMQQLLTTSRQLTLGAYKHET

SEQ ID NO: 49268 - protein, 336 aa, Homo sapiens
MSNVNLSVSDFWRVMMRVCWLVRQDSRHQRIRLPHLEAVVIGRGPETKITDKKCSRQQVQLKAECNKGYVKVKQVGVNPTSIDSVVIGKDQEVKLQPGQVLHMVNELYPYIVEFEEEAKNPGLETHRKRKRSGNSDSIERDAAQEAEAGTGLEPGSNSGQCSVPLKKGKDAPIKKVYKDEQVVVIKDKYPKARYHWLVLPWTSISSLKAVAREHLELLKHMHTVGEKVIVDFAGSSKLRFRLGYHAIPSMSHVHLHVISQDFDSPCLKNKKHWNSFNTEYFLESQAVIEMVQEAGRVTVRDGMPELLKLPLRCHECQQLLPSIPQLKEHLRKHWTQ

SEQ ID NO: 49269 - protein, 108 aa, Homo sapiens
  MOD_RES (1)..(1): Any amino acid
XIQSILPGISAKLTWTSEEGSYSQDMTGVTPFQMIFEVDEKPRTLMTDCLVIKHFLRKIIMVHPKVRFHFSVKVNGILSTEIFGVENEPTLNLGNGIALLVDSQHYVR

SEQ ID NO: 49270 - protein, 579 aa, Homo sapiens
MVGKGAKGMLNGAVPSEATKRDQNLKRGNWGNQIEFVLTSVGYAVGLGNVWRFPYLCYRNGGGAFMFPYFIMLIFCGIPLFFMELSFGQFASQGCLGVWRISPMFKGVGYGMMVVSTYIGIYYNVVICIAFYYFFSSMTHVLPWAYCNNPWNTHDCAGVLDASNLTNGSRPAALPSNLSHLLNHSLQRTSPSEEYWRLYVLKLSDDIGNFGEVRLPLLGCLGVSWLVVFLCLIRGVKSSGKVVYFTATFPYVVLTILFVRGVTLEGAFDGIMYYLTPQWDKILEAKVWGDAASQIFYSLGCAWGGLITMASYNKFHNNCYRDSVIISITNCATSVYAGFVIFSILGFMANHLGVDVSRVADHGPGLAFVAYPEALTLLPISPLWSLLFFFMLILLGLGTQFCLLETLVTAIVDEVGNEWILQKKTYVTLGVAVAGFLLGIPLTSQAGIYWLLLMDNYAASFSLVVISCIMCVAIMYIYGEHSSLRPPATRPLARPLCPAGLLTPHLSRAPELLPGHPDDAGIPTTPLLSDLLALRLSRHHLPPGSGPPPPPPESSSLRVAPGAERAPPPAPTARGSAGA

SEQ ID NO: 49271 - protein, 96 aa, Homo sapiens
MASKRKSTTPCMIPVKTVVLQDASMEAQPAETLPEGPQQDLPPEASAASSEAAQNPSSTDGSTLANGHRSTLDGYLYSCKYCDFRSHDMTQFVGHM

SEQ ID NO: 49272 - protein, 37 aa, Homo sapiens
MSDPITLNVGGKLYTTSLATLTSFPDSMLGAMFSGKM

SEQ ID NO: 49273 - protein, 524 aa, Homo sapiens
ILTARSRWRLRNSISAFLFTVTFAWCPPGLSNLTILSCPDWESHINTKWSAPQQNFLQGKTSSVVEMERNHFGEELFDFNQCEKALSEHSCLKTHRRTYFRKKTCECNQCEKAFRKPSIFTLHKKTDIGEELPNCNQCETAFSQHLHLVCKKTSQNLHLVCKKTHTQEKPYKCSDCEKGLPSSSHLRECVRIYGGERPYTHKEYVETFSHSTALFVHMQTQDGEKFYECKACGKPFTESSYLTQHLRTHSRVLPIEHKKFGKAFAFSPDLAKHIRLRTRGKHYVCNECGKEFTCFSKLNIHIRVHTGEKPYECNKCGKAFTDSSGLIKHRRTHTGEKPYECKECGKAFANSSHLTVHMRTHTGEKPYQCKECGKAFINSSSFKSHMQTHPGVKPYDCQQCGKAFIRSSFLIRHLRSHSAERPFECEECGKAFRYSSHLSQHKRIHTGERPYKCQKCGQAFSISSGLTVHMRTHTGERPFECQECGKAFTRSTYLIRHLRSHSVEKPYKECGQTFSNSSCLTECV

SEQ ID NO: 49274 - protein, 340 aa, Homo sapiens
  MOD_RES (1)..(1): Any amino acid
XLNRHKLSHSDEKPFECPICNQRFKRKDRMTYHVRSHEGGITKPYTCSVCGKGFSRPDHLSCHVKHVHSTERPFKCQFSSLMQTCTAAFATKDRLRTHMVRHEGKVSCNICGKLLSAAYITSHLKTHGQSQSINCNTCKQGISKTCMSEETSNQKQQQQQQQQQQQQQQQQQQHVTSWPGKQVETLRLWEEAVKARKKEAANLCQTSTAATTPVTLTTPFSITSSVSSGTMSNPVTVAAAMSMRSPVNVSSAVNITSPMNIGHPVTITSPLSMTSPLTLTTPVNLPTPVTAPVNIAHPVTITSPMNLPTPMTLAAPLNIAMRPVESMPFLPQALPTSPPW

SEQ ID NO: 49275 - protein, 679 aa, Homo sapiens
  MOD_RES (1)..(1): Any amino acid
XMHVFAYRVHTHHLGKVVSGYRVRNGQWTLIGRQSPQLPQAFYPVGHPVDVSFGDLLAARCVFTGEGRTEATHIGGTSSDEMCNLYIMYYMEAKHAVSFMTCTQNVAPDMFRTIPPEANIPIPVKSDMVMMHEHHKETEYKDKIPLLQQPKREEEEVLDQGDFYSLLSKLLGEREDVVHVHKYNPTEKAESESDLVAEIANVVQKKDLGRSDAREGAEHERGNAILVRDRIHKFHRLVSTLRPPESRVFSLQQPPPGEGTWEPEHTGDFHMEEALDWPGVYLLPGQVSGVALDPKNNLVIFHRGDHVWDGNSFDSKFVYQQIGLGPIEEDTILVIDPNNAAVLQSSGKNLFYLPHGLSIDKDGNYWVTDVALHQVFKLDPNNKEGPVLILGRSMQPGSDQNHFCQPTDVAVDPGTGAIYVSDGYCNSRIVQFSPSGKFITQWGEESSGSSPLPGQFTVPHSLALVPLLGQLCVADRENGRIQCFKTDTKEFVREIKHSSFGRNVFAISYIPGLLFAVNGKPHFGDQEPVQGFVMNFSNGEIIDIFKPVRKHFDMPHDIVASEDGTVYIGDAHTNTVWKFTLTEKLEHRSVKKAGIEVQEIKADSEHKLETSSGRVLGRFRGKGSGGLNLGNFFASRKGYSRKGFDRLSTEGSDQEKEDDGSESEEEYSAPLPALAPSSS

SEQ ID NO: 49276 - protein, 76 aa, Homo sapiens
MELLTFRDVTIEFSLEEWEFLNPAQQSLYRKVMLENYRNLVSLGLTVSKPELISRLEQRQEPWNVKRHETIAKPPG

SEQ ID NO: 49277 - protein, 194 aa, Homo sapiens
PRGSSQLRVNAAFAARYNRYREREELQRLKDRYGDRDSSSDSSSESDSSDERVEFDPQQERDFYKTLSLLKKKDPRIYQKDATFYNRTASSSDSEEDPEALEKQKKVRPMYLKDYERKVILEKAGKYVDEENSDGETSNHRLQEKPVFEPGDKTFEEYLDEYYRLDYEDIIDDLPCRFKYRTVVPCDFGLSTEE

SEQ ID NO: 49278 - protein, 150 aa, Homo sapiens
MTSRKKVLLKVIILGDSGVGKTSLMNQYVNKKFSNQYKATIGADFLTKEVMVDDRLVTMQIWDTAGQERFQSLGVAFYRGADCCVLVFDVTAPNTFKTLDSWRDEFLIQASPRDPENFPFVVLGNKIDLENRQVATKRAQAWCYSKNNIP

SEQ ID NO: 49279 - protein, 509 aa, Homo sapiens
MSGVRAVRISIESACEKQVHEVGLDGTETYLPPLSMSQNLARLAQRIDFSQGSGSEEEEAAGTEGDAQEWPGAGSSADQDDEEGVVKFQPSLWPWDSVRNNLRSALTEMCVLYDVLSIVRDKKFMTLDPVSQDALPPKQNPQTLQLISKKKSLAGAAQILLKGAERLTKSVTENQENKLQRDFNSELLRLRQHWKLRKVGDKILGDLSYRSAGSLFPHHGTFEVIKNTDLDLDKKIPEDYCPLDVQIPSDLEGSAYIKVSIQKQAPDIGDLGTVNLFKRPLPKSKPGSPHWQTKLEAAQNVLLCKEIFAQLSREAVQIKSQVPHIVVKNQIISQPFPSLQLSISLCHSSNDKKSQKFATEKQCPEDHLYVLEHNLHLLIREFHKQTLSSIMMPHPASAPFGHKRMRLSGPQAFDKNEINSLQSSEGLLEKIIKQAKHIFLRSRAAATIDSLASRIEDPQIQAHWSNINDVYESSVKVLITSQGYEQICKCHSTRYMQFSNSPRLWAGKY

SEQ ID NO: 49280 - protein, 175 aa, Homo sapiens
  MOD_RES (1)..(1): Any amino acid
XSELESCKELQELEPENKWCLLTIILLMRALDPLLYEKETLQYFQTLKAVDPMRATYLDDLRSKFLLENSVLKMEYAEVRVLHLAHKDLTVLCHLEQLLLVTHLDLSHNRLRTLPPALAALRCLEVLQASDNAIESLDGVTNLPRLQELLLCNNPACSAPASCLLPQAGPPQPAG

SEQ ID NO: 49281 - protein, 114 aa, Homo sapiens
MGRRKSKRKPPPKKKMTGTLETQFTCPFCNHEKSCDVKMDRARNTGVISCTVCLEEFQTPITSSAHPLLSVMSWVLRLPGHQKKERGPEALTFGRWPGGPCDQPFKPPSVLFSQ

SEQ ID NO: 49282 - protein, 1123 aa, Homo sapiens
  MOD_RES (1)..(1): Any amino acid
XGDGGKMAAAGALERSFVELSGAERERPRHFREFTVCSIGTANAVAGAVKYSESAGGFYYVESGKLFSVTRNRFIHWKTSGDTLELMEESLDINLLNNAIRLKFQNCSVLPGGVYVSETQNRVIILMLTNQTVHRLLLPHPSRMYRSELVVDSQMQSIFTDIGKVDFTDPCNYQLIPAVPGISPNSTASTAWLSSDGEALFALPCASGGIFVLKLPPYDIPGMVSVVELKQSSVMQRLLTGWMPTAIRGDQSPSDRPLSLAVHCVEHDAFIFALCQDHKLRMWSYKEQMCLMVADMLEYVPVKKDLRLTAGTGHKLRLAYSPTMGLYLGIYMHAPKRGQFCIFQLVSTESNRYSLDHISSLFTSQETLIDFALTSTDIWALWHDAENQTVVKYINFEHNVAGQWNPVFMQPLPEEEIVIRDDQDPREMYLQSLFTPGQFTNEALCKALQIFCRGTERNLDLSWSELKKEVTLAVENELQGSVTEYEFSQEEFRNLQQEFWCKFYACCLQYQEALSHPLALHLNPHTNMVCLLKKGYLSFLIPSSLVDHLYLLPYENLLTEDETTISDDVDIARDVICLIKCLRLIEESVTVDMSVIMEMSCYNLQSPEKAAEQILEDMITIDVENVMEDICSKLQEIRNPIHAIGLLIREMDYETEVEMEKGFNPAQPLNIRMNLTQLYGSNTAGYIVCRGVHKIASTRFLICRDLLILQQLLMRLGDAVIWGTGQLFQAQQDLLHRTAPLLLSYYLIKWGSECLATDVPLDTLESNLQHLSVLELTDSGALMANRFVSSPQTIVELFFQEVARKHIISHLFSQPKAPLSQTGLNWPEMITAITSYLLQLLWPSNPGCLFLECLMGNCQYVQLQDYIQLLHPWCQVNVGSCRFMLGRCYLVTGEGQKALECFCQAASEVGKEEFLDRLIRSEDGEIVSTPRLQYYDKVLRLLDVIGLPELVIQLATSAITEAGDDWKSQATLRTCIFKHHLDLGHNSQAYEALTQIPDSSRQLDCLRQLVVVLCERSQLQDLVEFPYVNLHNEVVGIIESRARAVDLMTHNYYELLYAFHIYRHNYRKAGTVMFEYGMRLGREVRTLRGLEKQGNCYLAALNCLRLIRPEYAWIVQPVSGAVV

SEQ ID NO: 49283 - protein, 48 aa, Homo sapiens
MNILAPVRRDRVLAELPQCLRKEAALHGHKDFHPRVTCACQEHRTGTV

SEQ ID NO: 49284 - protein, 202 aa, Homo sapiens
MLRCGQMMLAQALICRHLGRDWSWEKQKEQPKEYQRILQCFLDRKDCCYSIHQMAQMGVGEGKSIGEWFGPNTVAQVLKKLALFDEWNSLAVYVSMDNTVVIEDIKKMCRVLPLSADTAGDRPPDSLTASNQSKGTSAYCSAWKPLLLIVPLRLGINQINPVYVDAFKECFKMPQSLGALGGKPNNAYYFIGFLGDELIFLD

SEQ ID NO: 49285 - protein, 96 aa, Homo sapiens
MTPAQIQALLRKGEKFGRGVIAGLVDIGETLQCPEDLTPDEVVELENQAVLTNLKQKYLTVISNPRWLLEPIPRKGGKDVFQVDIPEHLIPLGHEV

SEQ ID NO: 49286 - protein, 79 aa, Homo sapiens
MWRISTVRMKLSSDASLRSDSRRRSMFMSSWRIRSSFCRRLAKNEAARMAALVEAEKECNLELSEKLKGVTKNWEDVPG

SEQ ID NO: 49287 - protein, 55 aa, Homo sapiens
  MOD_RES (1)..(1): Any amino acid
XGSKAASLHWTSERVVSVLLLGLLPAAYLNPCSAMDYSLAAALTLHGHWKIKNNE

SEQ ID NO: 49288 - protein, 146 aa, Homo sapiens
MPVTVTRTTITTTTTSSSGLGSPMIVGSPRALTQPLGLLRLLQLVSTCVAFSLVASVGAWTGSMGNWSMFTWCFCFSVTLIILIVELCGLQARFPLSWRNFPITFACYAALFCLSASIIYPTTYVQFLSHGRSRDHAIAATFFSCI

SEQ ID NO: 49289 - protein, 172 aa, Homo sapiens
AQLVNRKQKLESVELSSQSEIQHLSSKLERANDTICANELEIERLTMRVNDLVGTSMTVLQEQQQKEEKLRESEKLLEALQEEKRELKAALQSQENLIHEARIQKEKLQEKVKATNTQHAVEAIRPREESLAEKKYTSQGQGDLDSVLSQLNFTHTSEDLLQAEFGICECNV

SEQ ID NO: 49290 - protein, 82 aa, Homo sapiens
MDPLQKRNPASPSKSSPMTAAETSQEGPAPSQPSYSEQPMMGLSNLSPGPGPSQAVPLPEGLLRQRYREEKTLEERRWERLE

SEQ ID NO: 49291 - protein, 283 aa, Homo sapiens
MRSPAVPTPARGQLGVAFVLLPPHSVGAPVPATPPEVVARASSQDSPAPERPAGPPSPHSAPARAPLPRAALEGARVFGALGPIGPSSPGLTLGGLAVSEHRLSNKLLAWSGVLEWQEKRRPYSDSTAKLKRTLPCQAYVNQGENLETDQWPQKLIMQLIPQQLLTTLGPLFRNSQLAQFHFTNRDCDSLKGLCRIMGNGFAGCMLFPHISPCEVRVLMLLYSSKKKIFMGLIPYDQSGFVSAIRQVITTRKQAVGPGGVNSGPVQIVNNKFLAWSGVMEWQE

SEQ ID NO: 49292 - protein, 124 aa, Homo sapiens
MVHQVLYRALVSTKWLAESIRTGKLGPGLRVLDASWYSPGTREARKEYLERHVPGASFFDIEECRDTASPYEMMLPSEAGFAEYVGRLGISNHTHVVVYDGEHLGSFYAPRVWWMFRVFGHRTV

SEQ ID NO: 49293 - protein, 209 aa, Homo sapiens
MWSPEREAEAPAGGDPAGLLPPEWEEDEERMSFLFSAFKRSREVNSTDWDSKMGFWAPLVLSHSRRQGVVRLRLRDLQEAFQRKGSVPLGLATVLQDLLRTFPLDWTLILPRMVSNSCTQAILPPQPPKVLRLQALSHCTWPTRLSEMAYSGNRFRSCLKQGTGETVVEEEKAEEVYRLYQNSPLSSHPVVALSELSTLCANSCPDERT

SEQ ID NO: 49294 - protein, 167 aa, Homo sapiens
  MOD_RES (1)..(1): Any amino acid
XQHIPYREDKNLTGTARYASINAHLGIEQSRRDDMESLGYVLMYFNRTSLPWQGLKAATKKQKYEKISEKKMSTPVEVLCKGFPAEFAMYLNYCRGLRFEEAPDYMYLRQLFRILFRTLNHQYDYTFDWTMLKQKAAQQAASSSGQGQQAQTPTGKQTDKTKSNMKG

SEQ ID NO: 49295 - protein, 229 aa, Homo sapiens
  MOD_RES (1)..(1): Any amino acid
XHSQSQPSSQYRIKEYPLYIEGGATPVVVRSLESDQEGHYSVKAQFKTSNSYTAGGLFKESWRGGGGDEGDTGRLTPSRSQILRTPSLGREGAHDKGAGRAAVSDELRQWYQRSTASHKEHSRLSHTSSTSSDSGSQYSTSSQSTFVAHSRVTRMPQMCKATSAALPQSQRSSTPSSEIGATPPSSPHHILTWQTGSYNDSCFLDSSLYPELADVQWYGQEKAKPGTLV

SEQ ID NO: 49296 - protein, 832 aa, Homo sapiens
MAMLPPPGPQSFVHFTKQSLALIEQRIAERKSKEPKEEKKDDDEEAPKPSSDLEAGKQLPFIYGDIPPGMVSEPLEDLDPYYADKKTFIVLNKGKTIFRFNATPALYMLSPFSPLRRISIKILVHSLFSMLIMCTILTNCIFMTMNNPPDWTKNVEYTFTGIYTFESLVKILARGFCVGEFTFLRDPWNWLDFVVIVFAYLTEFVNLGNVSALRTFRVLRALKTISVIPGLKTIVGALIQSVKKLSDVMILTVFCLSVFALIGLQLFMGNLKHKCFRNSLENNETLESIMNTLESEEDFRKYFYYLEGSKDALLCGFSTDSGQCPEGYTCVKIGRNPDYGYTSFDTFSWAFLALFRLMTQDYWENLYQQTLRAAGKTYMIFFVVVIFLGSFYLINLILAVVAMAYEEQNQANIEEAKQKELEFQQMLDRLKKEQEEAEAIAAAAAEYTSIRRSRIMGLSESSSETSKLSSKSAKERRNRRKKKNQKKLSSGEEKGDAEKLSKSESEDSIRRKSFHLGVEGHRRAHEKRLSTPNQSPLSIRGSLFSARRSSRTSLFSFKGRGRDIGSETEFADDEHSIFGDNESRRGSLFVPHRPQERRSSNISQASRSPPMLPVNGKMHSAVDCNGVVSLVDGRSALMLPNGQLLPEGTTNQIHKKRRCSSYLLSEDMLNDPNLRQRAMSRASILTNTVEELEESRQKCPPWWYRFAHKFLIWNCSPYWIKFKKCIYFIVMDPFVDLAITICIVLNTLFMAMEHHPMTEEFKNVLAIGNLVFTGIFAAEMVLKLIAMDPYEYFQVGWNIFDSLIVTLSLVELFLADVEGLSVLRSFRLVNIN

SEQ ID NO: 49297 - protein, 194 aa, Homo sapiens
ARSGDNPVYIWGHSLGTGVATNLVRRLCERETPPDALILESPFTNIREEAKSHPFSVIYRYFPGFDWFFLDPITSSGIKFANDENVKHISCPLLILHAEDDPVVPFQLGRKVGPGLCLWCSWHLAHSASVGGPGWEWAGGKAAPACCITGCAPATSGSGGHLILPASPPGCFGRTWEVWCKGWGRGPLMLSPRI

SEQ ID NO: 49298 - protein, 103 aa, Homo sapiens
MGMMCWSPPLDKMGNSVKGIHFCHDLVSLCNFHNYDNLRHFAKKLDPRREGGDQRHSFGPLDYESLQQELALKETVWKKVSPESNEDISTTVVYRMESLGEKS

SEQ ID NO: 49299 - protein, 325 aa, Homo sapiens
  MOD_RES (1)..(1): Any amino acid
XEPESDGEAGIEAVGSAAEEKGGLVSDAYGEDDFSRLGGDEDGYEEEEDENSRQSEDDDSETEKPEADDPKEKLGTVTEAPRAQQAHGPACWTQRAEESHSKHDKDNTEAEKRDPQELVASFSERVRNMSPDEIKIPPEPPGRCSNHLQDKIQKLYERKIKEGMDMNYIIQRKKEFRNPSIYEKLIQFCAIDELGTNYPKDMFDPHGWSEDSYYEALAKAQKIEMDKLEKAKKERTKIEFVTGTKKGTTTNATSTTTTTASTAVADAQKRKSKWDSAIPVTTIAQPTILTTTATLPAVVTVTTSASGSKTTVISAVGTIVKKAKQ

SEQ ID NO: 49300 - protein, 159 aa, Homo sapiens
MPALACLRRLCRHVSPQAVLFLLFIFCLFSVFISAYYLYGWKRGLEPSADAPEPDCGDPPPVAPSRLLPLKPVQAATPSRTDPLVLVFVESLYSQLGQEVVAILESSRFKYRTEIAPGKGDMPTLTDKGRGRFALIIYENILKYVNLDAWNRELLDKYC

SEQ ID NO: 49301 - protein, 1081 aa, Homo sapiens
MEPSRALLGCLASAAAAAPPGEDGAGAGAEEEEEEEEEAAAAVGPGELGCDAPLPYWTAVFEYEAAGEDELTLRLGDVVEVLSKDSQVSGDEGWWTGQLNQRVGIFPSNYVTPRSAFSSRCQPGGEDPSCYPPIQLLEIDFAELTLEEIIGIGGFGKVYRAFWIGDEVAVKAARHDPDEDISQTIENVRQEAKLFAMLKHPNIIALRGVCLKEPNLCLVMEFARGGPLNRVLSGKRIPPDILVNWAVQIARGMNYLHDEAIVPIIHRDLKSSNILILQKVENGDLSNKILKITDFGLAREWHRTTKMSAAGTYAWMAPEVIRASMFSKGSDVWSYGVLLWELLTGEVPFRGIDGLAVAYGVAMNKLALPIPSTCPEPFAKLMEDCWNPDPHSRPSFTNILDQLTTIEESGFFEMPKDSFHCLQDNWKHEIQEMFDQLRAKEKELRTWEEELTRAALQQKNQEELLRRREQELAEREIDILERELNIIIHQLCQEKPRVKKRKGKFRKSRLKLKDGNRISLPSDFQHKFTVQASPTMDKRKSLINSRSSPPASPTIIPRLRAIQLTPGESSKTWGRSSVVPKEEGEEEEKRAPKKKGRTWGPGTLGQKELASGDEGLKSLVDGYKQWSSSAPNLVKGPRSSPALPGFTSLMEMEDEDSEGPGSGESRLQHSPSQSYLCIPFPRGEDGDGPSSDGIHEEPTPVNSATSTPQLTPTNSLKRGGAHHRRCEVALLGCGAVLAATGLGFDLLEAGKCQLLPLEEPEPPAREEKKRREGLFQRSSRPRRSTSPPSRKLFKKEEPMLLLGDPSASLTLLSLSSISECNSTRSLLRSDSDEIVVYEMPVSPVEAPPLSPCTHNPLVNVRVERFKRDPNQSLTPTHVTLTTPSQPSSHRRTPSDGALKPETLLASRSPSSNGLSPSPGAGMLKTPSPSRDPGEFPRLPDPNVVFPPTPRRWNTQQDSTLERPKTLEFLPRPRPSANRQRLDPWWFVSPSHARSTSPANSSSTETPSNLDSCFASSSSTVEERPGLPALLPFQAGPLPPTERTLLDLDAEGQSQDSTVPLCRAELNTHRPAPYEIQQEFWS

SEQ ID NO: 49302 - protein, 22 aa, Homo sapiens
MMTKEELEEEQRIELTSDLTSL

SEQ ID NO: 49303 - protein, 151 aa, Homo sapiens
MTDSKYFTTNKKGEIFELKAELNNEKKEKRKEAVKKVIAAMTVGKDVSSLFPDVVNCMQTDNLELKKLVYLYLMNYAKSQPDMAIMAVNSFVKDCEDPNPLIRALAVRTMGCIRVDKITEYLCEPLRKCLKDEDPYVRKTAAVCVAKLHDI

SEQ ID NO: 49304 - protein, 25 aa, Homo sapiens
  MOD_RES (1)..(1): Any amino acid
XLLLAINGVTECFTFAAMSKEEVDR

SEQ ID NO: 49305 - protein, 138 aa, Homo sapiens
MAVESGVISTLIPQDPPEQELILVKVEDNFSWDEKFKQNGSTQSCQELFRQQFRKFCYQETPGPREALSRLQELCYQWLMPELHTKEQILELLVLEQFLSILPEELQIWVQQHNPESGEEAVTLLEDLEREFDDPGQQ

SEQ ID NO: 49306 - protein, 29 aa, Homo sapiens
MRNHLLLLFKYRGLVRKGKKSKRRKWLNS

SEQ ID NO: 49307 - protein, 184 aa, Homo sapiens
MGEKTGMTRNPHFSHDNWIPTFFSTQYFWFVLKVRWQRLEDTTELGGLAPNCPVVRLSGQRCNIWEFMQGNRPLVLNFGSCTCPSFMFKFDQFKRLIEDFSSIADFLVIYIEEAHASDGWAFKNNMDIRNHQNLQDRLQAAHLLLARSPQCPVVVDTMQNQSSQLYAALPERLYIIQEGRILYK

SEQ ID NO: 49308 - protein, 143 aa, Homo sapiens
  MOD_RES (1)..(1): Any amino acid
XIHMTVGGFLPFSAISVELYYIFATVWGREQYTLYGILFFVFAILLSVGACISIALTYFQLSGEDYRWWWRSVLSVGSTGLFIFLYSVFYYARRSNMSGAVQTVEFFGYSLLTGYVFFLMLGTISFFSSLKFIRYIYVNLKMD

SEQ ID NO: 49309 - protein, 485 aa, Homo sapiens
MTAAENVCYTLINVPMDSEPPSEISLKNDLEKGDVKSKTEALKKVIIMILNGEKLPGLLMTIIRFVLPLQDHTIKKLLLVFWEIVPKTTPDGRLLHEMILVCDAYRKDLQHPNEFIRGSTLRFLCKLKEAELLEPLMPAIRACLEHRHSYVRRNAVLAIYTIYRNFEHLIPDAPELIHDFLVNEKDASCKRNAFMMLIHADQDRALDYLSTCIDQVQTFGDILQLVIVELIYKVCHANPSERARFIRCIYNLLQSSSPAVKYEAAGTLVTLSSAPTAIKAAAQCYIDLIIKESDNNVKLIVLDRLIELKEHPAHERVLQDLVMDILRVLSTPDLEVRKKTLQLALDLVSSRNVEELVIVLKKEVIKTNNVSEHEDTDKYRQLLVRTLHSCSVRFPDMAANVIPVLMEFLSDNNEAAAADVLEFVREAIQRFDNLRMLIVEKMLEVFHAIKSVKIYRGALWILGEYCSTKEDIQSVMTEIRRSLGE

SEQ ID NO: 49310 - protein, 77 aa, Homo sapiens
MALSQGLFTFKDVAIEFSQEEWECLDPAQRALYRDVMLENYRNLLSLDEDNIPPEDGDGQLLVDSPMEEVSLVTEHS

SEQ ID NO: 49311 - protein, 149 aa, Homo sapiens
MPGMVLFGRRWAIASDDLVFPGFFELVVRVLWWIGILTLYLMHRGKLDCAGGALLSSYLIVLMILLAVVICTVSAIMCVSMRGTICNPGPRKSMSKLLYIRLALFFPEMVWASLGAAWVADGVQCDRTVVNGIIATVVVSCRSRTTDYD

SEQ ID NO: 49312 - protein, 22 aa, Homo sapiens
  MOD_RES (1)..(1): Any amino acid
XQKKKLCFKENERASMCVFLSV

SEQ ID NO: 49313 - protein, 189 aa, Homo sapiens
MTNQYGILFKQEQAHDDAIWSVAWGTNKKENSETVVTGSLDDLVKVWKWRDERLDLQWSLEGHQLGVVSVDISHTLPIAASSSLDAHIRLWDLENGKQIKSIDAGPVDAWTLAFSPDSQYLATGTHVGKVNIFGVESGKKEYSLDTRGKFILSIAYSPDGKYLASGAIDGIINIFDIATGKLLHTLEGG

SEQ ID NO: 49314 - protein, 179 aa, Homo sapiens
MTKTALLKLFVAIVITFILILPEYFKTPKERTLELSCLEVCLQSNFTYSLSSLNFSFVTFLQPVRETQIIMRIFLNPSNFRNFTRTCQDITVLIRRGSMEVKANDFHSPCQHFNFSVAPLVDHLEEYNTTCHLKNHTGRSTIMEDEPSKEKSINYTCRIMEYPNDCIHISLHLEMDIKS

SEQ ID NO: 49315 - protein, 126 aa, Homo sapiens
MDNMSITNTPTSNDACLSIVHSLMCHRQGGESETFAKRAIESLVKKLKEKKDELDSLITAITTNGAHPSKCVTIQRTLDGRLQVAGRKGFPHVIYARLWRWPDLHKNELKHVKYCQYAFDLKCDSV

SEQ ID NO: 49316 - protein, 68 aa, Homo sapiens
MVTCAHLGRRARLPAAQPSACPGTCFSQEERMAAGYLPRWSQAGLPWHNLRSLQPLPPGSSDSPASAS

SEQ ID NO: 49317 - protein, 437 aa, Homo sapiens
SPSPGSSSPLGAESSSTSLHPSDPVEASTNKESRKSLASFPTYVEVPGPCDPEDLIDGIIFAANYLGSTQLLSDKTPSKNVRMMQAQEAVSRIKMAQKLAKSRKKAPEGESQPMTEVDLFISTQRIKVLNADTQETMMDHPLRTISYIADIGNIVVLMARRRMPRSNSQENVEASHPSQDGKRQYKMICHVFESEDAQLIAQSIGQAFSVAYQEFLRANGINPEDLSQKEYSDLLNTQDMYNDDLIHFSKSENCKDVFIEKQKGEILGVVIVESGWGSILPTVIIANMMHGGPAEKSGKLNIGDQIMSINGTSLVGLPLSTCQSIIKGLKNQSRVKLNIVRCPPVTTVLIRRPDLRYQLGFSVQNGIICSLMRGGIAERGGVRVGHRIIEINGQSVVATPHEKIVHILSNAVGEIHMKTMPAAMYRLLTAQEQPVYI

SEQ ID NO: 49318 - protein, 185 aa, Homo sapiens
MEDSEALGFEHMGLDPRLLQAVTDLGWSRPTLIQEKAIPLALEGKDLLARARTGSGKTAAYAIPMLQLLLHRKATGPVVEQAVRGLVLVPTKELARQAQSMIQQLATYCARDVRVANVSAAEDSVSQRAVLMEKPDVVVGTPSRILSHLQQDSLKLRDSLELLVVDEADLLFSFGFEEELKSLLW

SEQ ID NO: 49319 - protein, 168 aa, Homo sapiens
  MOD_RES (1)..(1): Any amino acid
XSGFHYRQFLLKSLISQTVIDSSVMEQNPLRSEPALVPPKDEEAAVSTEEPRINLPHLLEEEVEFSTDLIDSYPGHETLWCHRRHIFYLQHHLNGSQLSQAMEVDGLNDSSKQGYSQETKRLKRTPVPDSLGLEMEHRFIDQVLSTCRNVEQARFASAYRKWLVTLSQ

SEQ ID NO: 49320 - protein, 70 aa, Homo sapiens
MQPQNVQGLSKVSEEPSTSSDERASLIKKEIHGSLPHVAEPSVPYRGTVFAMDPRNGYMEPHYHLLWRIQ

SEQ ID NO: 49321 - protein, 169 aa, Homo sapiens
MDKCQKHDVECEKPDANEDSLCNSVHVQWPGEGSTGFAFIRPKMPFFGNTFSPKKTPPRKSASLSNLHSLDRSTREVELGLEYGSPTMNLAGQSLKFENGQWIAETGVSGGVDRREVQRLRRRNQQLEEENNLLRLKVDILLDMLSESTAESHLMEKELDELRISRKRK

SEQ ID NO: 49322 - protein, 125 aa, Homo sapiens
MALTSPLQDDSINQAPLEIVSKLLSENTNLTTQEHENIIVAIAPLLENNHPPPDLCEFFCKHCRERPRSMVVIEVFTPVVQRILKHNMVSHPAPTPRPQRPEHEAPRASLAFCVGTDLGNVVGPA

SEQ ID NO: 49323 - protein, 15 aa, Homo sapiens
MASRGATRPNGPNTG

SEQ ID NO: 49324 - protein, 146 aa, Homo sapiens
  MOD_RES (1)..(1): Any amino acid
XEGDLYNWEVAIFGPPNTYYEGGYFKARLKFPIDYPYSPPAFRFLTKMWHPNIYETGDVCISILHPPVDDPQSGELPSERWNPTQNVRTILLSVISLLNEPNTFSPANVDASVMYRKWKESKGKDREYTDIIRRSWGPRWTRSVTA

SEQ ID NO: 49325 - protein, 213 aa, Homo sapiens [sequence omitted]

SEQ ID NO: 49326 - protein, 301 aa, Homo sapiens
MAEAQSGTGQLQEQKKGLLIAVSVSVDKIISHFGAARNLVQKAQLGDSRLSPDVGHLVLTTLCPALHALVADGLKPFRKDLITGQRRSSPWSVVEASVKPGSSTRSLGTLYSQVSRLAPLSSSRSRFHAFILGLLNTKQLELWFSSLQEDAGLLSLLYLPTGFFSLARGGCPSLSTELLLLLQPLSVLTFHLDLLFEHHHHLPLGPPQAPAPPGPPPALQQTMQAMLHFGGRLAQSLRGTSKEAASDPSDSPNLPTPGSWWEQLTQASRVYASGGTEGFPLSRWAPGRHGTAAEEGAQERP

SEQ ID NO: 49327 - protein, 541 aa, Homo sapiens
MAASAKRKQEEKHLKMLRDMTGLPHNRKCFDCDQRGPTYVNMTVGSFVCTSCSGSLRGLNPPHRVKSISMTTFTQQEIEFLQKHGNEVCKQIWLGLFDDRSSAIPDFRDPQKVKEFLQEKYEKKRWYVPPEQAKVVASVHASISGSSASSTSSTPEVKPLKSLLGDSAPTLHLNKGTPSQSPVVGRSQGQQQEKKQFDLLSDLGSDIFAAPAPQSTATANFANFAHFNSHAAQNSANADFANFDAFGQSSGSSNFGGFPTASHSPFQPQTTGGSAASVNANFAHFDNFPKSSSADFGTFNTSQSHQTASAVSKVSTNKAGLQTADKYAALANLDNIFSAGQVPSQSSASSDKYAALAELDSVFSSAATSSNAYTSTSNASSNVFGTVPVVASAQTQPASSSVPAPFGATPSTNPFVAAAGPSVASSTNPFQTNARGATAATFGTASMSMPTGFGTPAPYSLPTSFSGSFQQPAFPAQAAFPQQTAFSQQPNGAGFAAFGQTKPVVTPFGQVAAAGVSSNPFMTGAPTGQFPTGSSSTNPFL

SEQ ID NO: 49328 - protein, 548 aa, Homo sapiens
MEDGRALEGTLSELAAETDLPVVFVKQRKIGGHGPTLKAYQEGRLQKLLKMNGPEDLPKSYDYDLIIIGGGSGGLAAAKEAAQYGKKVMVLDFVTPTPLGTRWGLGGTCVNVGCIPKKLMHQAALLGQALQDSRNYGWKVEETVKHDWDRMIEAVQNHIGSLNWGYRVALREKKVVYENAYGQFIGPHRIKATNNKGKEKIYSAERFLIATGERPRYLGIPGDKEYCISSDDLFSLPYCPGKTLVVGASYVALECAGFLAGIGLDVTVMVRSILLRGFDQDMANKIGEHMEEHGIKFIRQFVPIKVEQIEAGTPGRLRVVAQSTNSEEIIEGEYNTVMLAIGRDACTRKIGLETVGVKINEKTGKIPVTDEEQTNVPYIYAIGDILEDKVELTPVAIQAGRLLAQRLYAGSTVKCDYENVPTTVFTPLEYGACGLSEEKAVEKFGEENIEVYHSYFWPLEWTIPSRDNNKCYAKIICNTKDNERVVGFHVLGPNAGEVTQGFAAALKCGLTKKQLDSTIGIHPVCAEVFTTLSVTKRSGASILQAGCG

SEQ ID NO: 49329 - protein, 1135 aa, Homo sapiens; identical to SEQ ID NO: 36106

SEQ ID NO: 49330 - protein, 110 aa, Homo sapiens
DMDMADYSAALDPAYTTLEFENVQTRPHQKAPTSTRPTAWVSAPCVPSAGTGPRANTTVPRAVTAARASSGGACGRTTCTPADLAGSAWWTKTRGTSAATAGSRNASGLA

SEQ ID NO: 49331 - protein, 135 aa, Homo sapiens
MHPPETTTKMASVRFMVTPTKIDDIPGLSDTSPDLSSRSSSRVRFSSRESVPETSRSEPMSEMSGATTSLATVALDPPSDRTSHPQDVIEDLSQNSITGEHSQLLDDGHKKARNAYLNNSNYEEGDEYFDKNLAL

SEQ ID NO: 49332 - protein, 137 aa, Homo sapiens
MLLLLLLAPLFLRPPGAGGAQTPNATSEGCQIIHPPWEGGIRYRGLTRDQVKAINFLPVDYEIEYVCRGEREVVGPKVRKCLANGSWTDMDTPSRCVRICSKSYLTLENGKVFLTGGDLPALDGARVDFRCDPDFHL

SEQ ID NO: 49333 - protein, 255 aa, Homo sapiens
MALLWGLLVLSWSCLQGPCSVFSPVSAMEPLGWQLTSGPNQEQVSPLTLLKLGNQEPGGQTALKSPPGVCSRDPTPEQTHRLARAMMAFTADLFSLVAQTSTCPNLILSPLSVALALSHLALGAQNHTLQRLQQVLHAGSGPCLPHLLSRLCQDLGPGAFRLAARMYLQKGFPIKEDFLEQSEQLFGAKPVSLTGKQEDDLANINQWVKEATEGKIQEFLSGLPEDTVLLLLNAIHFQGFWRNKFDPSLTQRDSF

SEQ ID NO: 49334 - protein, 726 aa, Homo sapiens [sequence omitted]

SEQ ID NO: 49335 - protein, 84 aa, Homo sapiens
  MOD_RES (1)..(1): Any amino acid
XFEKPRGTLASSEKPWIVPTAKISEDSKVLQPQTATSDRILDSIPPKTSRTLEQPRATLAPSETPFVPQKLEIFTSPEMQPTTP

SEQ ID NO: 49336 - protein, 155 aa, Homo sapiens
ESEIIDFFLGASLKDEVLKIMPVQKQTRAGQRTRFKAFVAIGDYNGHVGLGVKCSKEVATAIRGAIILAKLSIVPVRRGYWGNKIGKPHTVPCKVTGRCGSVLVRLIPAPRGTGIVSAPVPKKLLMMAGIDDCYTSARGCTATLGNFGRWSTHGA

SEQ ID NO: 49337 - protein, 31 aa, Homo sapiens
MTEVQAMVEFSVELNKFYNVDLFQRGFYQIR

SEQ ID NO: 49338 - protein, 270 aa, Homo sapiens
MQLRNPELHLGCALALRFLALVSWDIPGARALDNGLARTPTMGWLHWERFMCNLDCQEEPDSCISEKLFMEMAELMVSEGWKDAGYEYLCIDDCWMAPQRDSEGRLQADPQRFPHGIRQLANYVHSKGLKLGIYADVGNKTCAGFPGSFGYYDIDAQTFADWGVDLLKFDGCYCDSLENLADGYKHMSLALNRTGRSIVYSCEWPLYMWPFQKPNYTEIRQYCNHWRNFADIDDSWKSIKSILDWTSFNQERIVDVAGPGGWNDPDMVKT

SEQ ID NO: 49339 - protein, 126 aa, Homo sapiens
EHHLQRAISAQQVFREKKESMVIPVPEAESNVNYYNRLYKGEFKQPKQFIHIQRIWGHYQPETTLKFLLVCFVHLFLDHSISFNLGCRSAQGSVLRKIFCFSFLPKGKLRNTKFFAFPFCMANLFL

SEQ ID NO: 49340 - protein, 253 aa, Homo sapiens
QWEYGRLNLHYAVVSKRKILQLVATGAVRDWDDPRLFTLTALRRRGFPPEAINNFCARVGVTVAQTTMEPHLLEACVRDVLNDTAPRAMAVLESLRVIITNFPAAKSLDIQVPNFPADETKGFHQVPFAPIVFIERTDFKEEPEPGFKRLAWGQPVGLRHTGYVIELQHVVKGPSGCVESLEVTCRRADAGEKPKAFIHWVSQPLMCEVRLYERLFQHKNPEDPTEVPGGFLSDLNLLVFNRTVTLKEDPGKV

SEQ ID NO: 49341 - protein, 166 aa, Homo sapiens
  MOD_RES (1)..(1): Any amino acid
XMLDKDQMCPVVSFVSVPEKENSSDENINSLNSHTKNKTSQMSESSLVNNRGISPGDCTCKGENGEKDNILSRKQMTEPEPGGLVPPGGKTFIVVICDGKNPGRCKELLLLCFSDFLIGRYLEVNVISGEESLIAAREPFSWKKLKSSQALTSAKTTVVVTAQKSF

SEQ ID NO: 49342 - protein, 41 aa, Homo sapiens
MLKTESSGERTTLRSASPHRNAYRTEFQALKSTFDKPKSDG

SEQ ID NO: 49343 - protein, 163 aa, Homo sapiens
MGIQRRSGPLLTGLSVGLLLLFSWVTLVQPTSLSALVHHPHLCQTTRDVHGRHYPGFFCPRLSDSPEEAYCCHLQAAGGSCCTRAEFEALYQVNLSALPPPPILRGPGPLLVLGLYNLLVVTLMTVDLVHFCCGRGRSLGWSHRRPPSGSSAASSLQVSAGTA

SEQ ID NO: 49344 - protein, 75 aa, Homo sapiens
MLPPQKKPWESMAKGLVLGALFTSFLLLVYSYAVPPLHAGLASTTPEAAASCSPPALEPEAVIRANGSAGECQPR

SEQ ID NO: 49345 - protein, 203 aa, Homo sapiens
  MOD_RES (1)..(1): Any amino acid
XADMDVVNQLVAGGQFRVVKEPLGFVKVLQWDFLATAVFAFMWLVSSSAWAKGLSDVKMATDPENIIKEMPVCRQTGNTCKELRDPVTSGLNTSVVFGFLNLVLWVGNLWFVFKETGWAAPFLRAPPGAPEKQPAPGDAYGDAGYGQGPGGYGPQDSYGPQGGYQPDYGQPAGSGGSGYGPQGDYGQQGYGPQGAPTSFSNQM

SEQ ID NO: 49346 - protein, 54 aa, Homo sapiens
EEHGRQSHSSSSFASGTLQDMWRLLDLGSSPSGVTSQGDSTPELHSVLKEAVAA

SEQ ID NO: 49347 - protein, 120 aa, Homo sapiens
MMEGLDDGPDFLSEEDRGLKAINVDLQSDAALQVDISDALSERDKVKFTVHTKIPPAPPRPDFDASREKLQKLGEGEGSMTKEEFTKMKQELEAGWITENLGFILLLPPSSASFFFVFTE

SEQ ID NO: 49348 - protein, 336 aa, Homo sapiens
  MOD_RES (1)..(1): Any amino acid
XTATIALVNGQQGGGSEPAAAAAVVAAGDKWKPPQGTDSIKMENGQSTAAKLGLPPLTPEQQEALQKAKKYAMEQSIKSVLVKQTIAHQQQQLTNLQMAAVTMGFGDPLSPLQSMAAQRQRALAIMCRVYVGSIYYELGEDTIRQAFAPFGPIKSIDMSWDSVTMKHKGFAFVEYEVPEAAQLALEQMNSVMLGGRNIKVGRPSNIGQAQPIIDQLAEEARAFNRIYVASVHQDLSDDDIKSVFEAFGKIKSCTLARDPTTGKHKGYGFIEYEKAQSSQDAVSSMNLFDLGGQYLRVGKAVTPPMPLLTPATPGGLPPAAAVAAAAATAKITAQVR

SEQ ID NO: 49349 - protein, 681 aa, Homo sapiens
MMEELHSLDPRRQELLEARFTGVGVSKGPLNSESSNQSLCSVGSLSDKEVETPEKKQNDQRNRKRKAEPYETSQGKGTPRGHKISDYFERRVEQPLYGLDGSAAKEATEEQSALPTLMSVMLAKPRLDTEQLAQRGAGLCFTFVSAQQNSPSSTGSGNTEHSCSSQKQISIQHRQTQSDLTIEKISALENSKNSDLEKKEGRIDDLLRSKQEKMACRDKSMQDRLRLGHFTTVRHGASFTEQWTDGYAFQNLIKQQERINSQREEIERQRKMLAKRKPPAMGQAPPATNEQKQRKSKTNGAENETLTLAEYHEQEEIFKLRLGHLKKEEAEIQAELERLERVRNLHIRELKRIHNEDNSQFKDHPTLNDRYLLLHLLGRGGFSEVYKAFDLTEQRYVAVKIHQLNKNWRDEKKENYHKHACREYRIHKELDHPRIVKLYDYFSLDTDSFCTVLEYCEGNDLDFYLKQHKLMSEKEARSIIMQIVNALKYLNEIKPPIIHYDLKPGNILLVNGTACGEIKITDFGLSKIMDDDSYNSVDGMELTSQGAGTYWYLPPECFVVGKEPPKISNKVDVWSVGVIFYQCLYGRKPFGHNQSQQDILQENTILKATEVQFPPKPVVTPEAKAFIRRCLAYRKEDRIDVQQLACDPYLLPHIRKSVSTSSPAGAAIASTSGASNNSSSN

SEQ ID NO: 49350 - protein, 88 aa, Homo sapiens
MKATIILLLLAQVSWAGPFQQRGLFDFMLEDEASGIGPEVPDDRDFEPSLGPVCPFRCQCHLRVVQCSDLVETGFHRVSQDGLDLLIS

SEQ ID NO: 49351 - protein, 65 aa, Homo sapiens
MASMLLAQRLACSFQHSYRLLVPGSRHISQAAAKVDVEFDYDGPLMKTEVPGPRSQELMKQLNII

SEQ ID NO: 49352 - protein, 314 aa, Homo sapiens
MWGLVRLLLAWLGGWGCMGRLAAPARAWAGSREHPGPALLRTRRSWVWNQFFVIEEYAGPEPVLIGKLHSDVDRGEGRTKYLLTGEGAGTVFVIDEATGNIHVTKSLDREEKAQYVLLAQAVDRASNRPLEPPSEFIIKIITCVGALLALVVLFVALRRQKQEALMVLEEEDVRENIITYDDEGGGEEDTEAFDITALQNPDGAAPPAPGPPARRDVLPRARVSRQPRPPGPADVAQLLALRLREADEDPGVPPYDSVQVYGYEGRGSSCGSLSSLGSGSEAGGAPGPAEPLDDWGPLFRTLAELYGAKEPPAP

SEQ ID NO: 49353 - protein, 1440 aa, Homo sapiens
MASLAALALSLLLRLQLPPLPGARAQSAAGGCSFDEHYSNCGYSVALGTNGFTWEQINTWEKPMLDQAVPTGSFMMVNSSGRASGQKAHLLLPTLKENDTHCIDFHYYFSSRDRSSPGALNVYVKVNGGPQGNPVWNVSGVVTEGWVKAELAISTFWPHFYQVIFESVSLKGHPGYIAVDEVRVLAHPCRKAPHFLRLQNVEVNVGQNATFQCIAGGKWSQHDKLWLQQWNGRDTALMVTRVVNHRRFSATVSVADTAQRSVSKYRCVIRSDGGSGVSNYAELIVKEPPTPIAPPELLAVGATYLWIKPNANSIIGDGPIILKEVEYRTTTGTWAETHIVDSPNYKLWHLDPDVEYEIRVLLTRPGEGGTGPPGPPLTTRTKCADPVHGPQNVEIVDIRARQLTLQWEPFGYAVTRCHSYNLTVQYQYVFNQQQYEAEEVIQTSSHYTLRGLRPFMTIRLRLLLSNPEGRMESEELVVQTEEDVPGAVPLESIQGGPFEEKIYIQWKPPNETNGVITLYEINYKAVGSLDPSADLSSQRGKVFKLRNETHHLFVGLYPGTTYSFTIKASTAKGFGPPVTTRIATKISAPSMPEYDTDTPLNETDTTITVMLKPAQSRGAPVSVYQLVVKEERLQKSRRAADIIECFSVPVSYRNASSLDSLHYFAAELKPANLPVTQPFTVGDNKTYNGYWNPPLSPLKSYSIYFQALSKANGETKINCVRLATKGASTQNSNTVEPEKQVDNTVKMAGVIAGLLMFIIILLGVMLTIKRRRNAYSYSYYLKLAKKQKETQSGAQREMGPVASADKPTTKLSASRNDEGFSSSSQDVNGFNGSRGELSQPTLTIQTHPYRTCDPVEMSYPRDQFQPAIRVADLLQHITQMKRGQGYGFKEEYEALPEGQTASWDTAKEDENRNKNRYGNIISYDHSRVRLLVLDGDPHSDYINANYIDGYHRPRHYIATQGPMQETVKDFWRMIWQENSASIVMVTNLVEVGRVKCVRYWPDDTEVYGDIKVTLIETEPLAEYVIRTFTVQKKGYHEIRELRLFHFTSWPDHGVPCYATGLLGFVRQVKFLNPPEAGPIVVHCSAGAGRTGCFIAIDTMLDMAENEGVVDIFNCVRELRAQRVNLVQTEEQYVFVHDAILEACLCGNTAIPVCEFRSLYYNISRLDPQTNSSQIKDEFQTLNIVTPRVRPEDCSIGLLPRNHDKNRSMDVLPLDRCLPFLISVDGESSNYINAALMDSHKQPAAFVVTQHPLPNTVADFWRLVFDYNCSSVVMLNEMDTAQFCMQYWPEKTSGCYGPIQVEFVSADIDEDIIHRIFRICNMARPQDGYRIVQHLQYIGWPAYRDTPPSKRSLLKVVRRLEKWQEQYDGREGRTVVHCLNGGGRSGTFCAICSVCEMIQQQNIIDVFHIVKTLRNNKSNMVETLEQYKFVYEVALEYLSSF

SEQ ID NO: 49354 - protein, 131 aa, Homo sapiens
MDIPLDLSSSAGSGKRRRRGNLPKESVQILRDWLYEHRYNAYPSEQEKALLSQQTHLSTLQVCNWFINARRRLLPDMLRKDGKDPNQFTISRRGAKISETSSVESVMGIKNFMPALEETPFHSCTAGPNPT

SEQ ID NO: 49355 - protein, 14 aa, Homo sapiens
MQEQEIGFISKYNE

SEQ ID NO: 49356 - protein, 90 aa, Homo sapiens
MSTVEEDSDTVTVETVNSVTLTQDTEGNLILHCPQNEADEIDSEDSIEPPHKRLCLSSEDDQSIDDSTPCISVVALPLSENDQSFEVTMT

SEQ ID NO: 49357 - protein, 50 aa, Homo sapiens
MRTPPALGSQHQPEVPQPVCARSRTEPNLPKSLSLHIFKPRSLKPAQETW

SEQ ID NO: 49358 - protein, 38 aa, Homo sapiens
MVVNALGDRCVRCEPTFVNTSRSCACSEPNILTGGLCF

SEQ ID NO: 49359 - protein, 494 aa, Homo sapiens
  MOD_RES (1)..(1): Any amino acid
XFLRTCYGGSFLVHESFLYKREKAVGDKVYWTCRDHALHGCRSRAITQGQRVTVMRGHCHQPDMEGLEARRQQEKAVETLQAGQDGPGSQVDTLLRGVDSLLYRRGPGPLTLTRPRPRKRAKVEDQELPTQPEAPDEHQDMDADPGGPEFLKTPLGGSFLVYESFLYRREKAAGEKVYWTCRDQARMGCRSRAITQGRRVTVMRGHCHPPDLGGLEALRQREKRPNTAQRGSPGAGLSFQWLFRILQLLGHAPVLLCPSGSSCLPSLPAPHGPCPALSIPLEGGPEFLKTPLGGSFLVYESFLYRREKAAGEKVYWTCRDQARMGCRSRAITQGRRVMVMRRHCHPPDLGGLEALRQREHFPNLAQWDSPDPLRPLEFLRTSLGGRFLVHESFLYRKEKAAGEKVYWMCRDQARLGCRSRAITQGHRIMVMRSHCHQPDLAGLEALRQRERLPTTAQQEDPEKIQVQLCFKTCSPESQQIYGDIKDVRLDGESQ

SEQ ID NO: 49360 - protein, 176 aa, Homo sapiens
MPVERMRMRPWLEEQINSNTIPGLKWLNKEKKIFQIPWMHAARHGWDVEKDAPLFRNWAIHTGKHQPGVDKPDPKTWKANFRCAMNSLPDIEEVKDKSIKKGNNAFRVYRMLPLSERPSKKGKKPKTEKEDKVKHIKQEPVESSLGLSNGVSDLSPEYAVLTSTIKNEVDSTVNII

SEQ ID NO: 49361 - protein, 420 aa, Homo sapiens
MWWRDLTRLRLWLKREAIPGEGRKAAKVNAGVGEKGIYTASSRGGPPSARSKAVTVVAEGAASRSWLSMDAPELGPGLVERLEQLATCPLCGGSFEDPVLLACEHSFCRACLARRWGTPPATGTEASPTACPCCGLPCPRRSLRSNVRLAVEVRISRELREKLAEPGARAGRRRGGRIPTMGCLDLPGEDMRKTWRRFEVPTSKSSNSEDDLPEDYPVVKKMLHRLTADLTLDPGTAHRRLLISADRRSVQLAPPGTPAPPDGPKRFDQLPAVLGAQGFGAGRHCWEVETADAASCRDSSGEDADDEESHYAVGAAGESVQRKGCVRLCPAGAVWAVGGRGGRLWALTAPEPTLLGGVEPPPRRIRVDLDWERGRVAFYDGRSLDLLYAFQAPGPLGERIFPLFCTCDPRAPLRIVPAES

SEQ ID NO: 49362 - protein, 109 aa, Homo sapiens
DELIFARKDTFFKDVDYVCISDNYWLGKKKPCITYGLRGICYFFIEVECSNKDLHSGVYGGSVHEAMTDLILLMGSLFPFPLVRSSMTLENRHKCIQLSTGGATRWAYE

SEQ ID NO: 49363 - protein, 201 aa, Homo sapiens
MFQVGRSSIPKPAPRSLEDLDSVQRVLLHSDLEPEWLDSVQKNGELFYLELSEDEEESLLPETPTVNHVRFSENEIIIEDDYKERKKYEPKLKQFTKILRRKRLLPKRCNKKNSNDNGPVSILKHQSNQKTGVIVQQRYKDVNVYVNPKKLTVIKAKEQLKLLEVLVGIIHQTKWSWRRTGKQGDGERLVVHGLLPGGSAM

SEQ ID NO: 49364 - protein, 958 aa, Homo sapiens
RFPSCEELETTKVTMQKSDDVLHDLGQKEKETNSMVQPKESLSMLKLPDLPQNSVKLQTTNTTRSVLKDAEKILRGVQNNKKVLEENLEAIIRAKDGAAMYSLINALSTNREMSEKIRIRKTVDEWIKTISAEIQDELSRTDYEQKRFDQKNQRTKKGQNMTKDIRTNTQDKTVNKSVIPRKHSQKQIEEHFRNLPMRGMPASSLQKERKEGLLKATTVIQDEDYMLQVYGKPVYQGHRSTLKKGPYLRFNSPSPKSRPQRPKVIERVKGTKVKSIRTQTDFYATKPKKMDSKMKHSVPVLPHGDQQYLFSPSREMPTFSGTLEGHLIPMAILLGQTQSNSDTMPPAGVIVSKPHPVTVTTSIPPSSRKVETGVKKPNIAIVEMKSEKKDPPQLTVQVLPSVDIDSISNSSADVLSPLSSPKEASLPPVQTWIKEEEKCDEIPDSEPILEFNRSVKADSTKYNGPPFPPVASTFQPTADILDKVIERKETLENSLIQWVEQEIMSRIISGLFPVQQQIAPSISVSVSETSEPLTSDIVEGTSSGALQLFVDAGVPVNSNVIKHFVNEALAETIAVMLGDREAKKQGPVATGVSGDASTNETYLPARVCTPLPTPQPTPPCSPSSPAKECVLVKTPDSSPCDSDHDMAFPVKEICAEKGDDMPAIMLVNTPTVTPTTTPPPAAAVFTPTLSDISIDKLKVSSPELPKPWGDGDLPLEEENPNSPQEELHPRAIVMSVAKDEEPESMDFPAQPPPPEPVPFMPFPAGTKAPSPSQMPGSDSSTLESTLSVTVTETETLDKPISEGEILFSCGQKLAPKILEDIGLYLTNLNDSLSSTLHDAVEMEDDPPSEGQVIRMSHKKFHADAILSFAKQNQESAVSQQAVYHSEDLENSVGELSEGQRPQLTAAAENILMGHSLYMQPPVTNTQSLDQQCDPKPLSRQFDTVSETESCSVTQAGVQ

SEQ ID NO: 49365 - protein, 153 aa, Homo sapiens
QPPPCNRPGFVTVTRPRAENPCCPETVCVCNTTTCPQSLPVCPPGQESICTQEEGDCCPTFRCRPQLCSYNGTFYGVGATFPGALPCHMCTCLSGDTQDPTVQCQEDACNNTTCPQGFEYKRVAGQCCGECVQTACLTPDGQPVQEAATGKAA

SEQ ID NO: 49366 - protein, 88 aa, Homo sapiens
MSCQQSQQQCQPPPNVSSGGCCGSSSGGSCGSSSGGCCSSGGGGCCLSHHRHHRSHRHRPQSSDCCSQPSGGSSCCGGGSGQHSGGCC

SEQ ID NO: 49367 - protein, 96 aa, Homo sapiens
MEFPDLGAHCSEPSCQRLDFLPLKCDACSGIFCADHVAYAQHHCGSAYQKDIQVPVCPLCNVPVPVARGEPPDRAVGEHIDRDCRSDPAQQKHLHQ

SEQ ID NO: 49368 - protein, 2969 aa, Homo sapiens
MSEPGGGGGEDGSAGLEVSAVQNVADVSVLQKHLRKLVPLLLEDGGEAPAALEAALEEKSALEQMRKFLSDPQVHTVLVERSTLKEDVGDEGEEEKEFISYNINIDIHYGVKSNSLAFIKRTPVIDADKPVSSQLRVLTLSEDSPYETLHSFISNAVAPFFKSYIRESGKADRDGDKMAPSVEKKIAELEMGLLHLQQNIEIPEISLPIHPMITNVAKQCYERGEKPKVTDFGDKVEDPTFLNQLQSGVNRWIREIQKVTKLDRDPASGTALQEISFWLNLERALYRIQEKRESPEVLLTLDILKHGKRFHATVSFDTDTGLKQALETVNDYNPLMKDFPLNDLLSATELDKIRQALVAIFTHLRKIRNTKYPIQRALRLVEAISRDLSSQLLKVLGTRKLMHVAYEEFEKVMVACFEVFQTWDDEYEKLQVLLRDIVKRKREENLKMVWRINPAHRKLQARLDQMRKFRRQHEQLRAVIVRVLRPQVTAVAQQNQGEVPEPQDMKVAEVLFDAADANAIEEVNLAYENVKEVDGLDVSKEGTEAWEAAMKRYDERIDRVETRITARLRDQLGTAKNANEMFRIFSRFNALFVRPHIRGAIREYQTQLIQRVKDDIESLHDKFKVQYPQSQACKMSHVRDLPPVSGSIIWAKQIDRQLTAYMKRVEDVLGKGWENHVEGQKLKQDGDSFRMKLNTQEIFDDWARKVQQRNLGVSGRIFTIESTRVRGRTGNVLKLKVNFLPEIITLSKEVRNLKWLGFRVPLAIVNKAHQANQLYPFAISLIESVRTYERTCEKVEERNTISLLVAGLKKEVQALIAEGIALVWESYKLDPYVQRLAETVFNFQEKVDDLLIIEEKIDLEVRSLETCMYDHKTFSEILNRVQKAVDDLNLHSYSNLPIWVNKLDMEIERILGVRLQAGLRAWTQVLLGQAEDKAEVDMDTDAPQVSHKPGGEPKIKNVVHELRITNQVIYLNPPIEECRYKLYQEMFAWKMVVLSLPRIQSQRYQVGVHYELTEEEKFYRNALTRMPDGPVALEESYSAVMGIVSEVEQYVKVWLQYQCLWDMQAENIYNRLGEDLNKWQALLVQIRKARGTFDNAETKKEFGPVVIDYGKVQSKVNLKYDSWHKEVLSKFGQMLGSNMTEFHSQISKSRQELEQHSVDTASTSDAVTFITYVQSLKRKIKQFEKQVELYRNGQRLLEKQRFQFPPSWLYIDNIEGEWGAFNDIMRRKDSAIQQQVANLQMKIVQEDRAVESRTTDLLTDWEKTKPVTGNLRPEEALQALTIYEGKFGRLKDDREKCAKAKEALELTDTGLLSGSEERVQVALEELQDLKGVWSELSKVWEQIDQMKEQPWVSVQPRKLRQNLDALLNQLKSFPARLRQYASYEFVQRLLKGYMKINMLVIELKSEALKDRHWKQLMKRLHVNWVVSELTLGQIWDVDLQKNEAIVKDVLLVAQGEMALEEFLKQIREVWNTYELDLVNYQNKCRLIRGWDDLFNKVKEHINSVSAMKLSPYYKVFEEDALSWEDKLNRIMALFDVWIDVQRRWVYLEGIFTGSADIKHLLPVETQRFQSISTEFLALMKKVSKSPLVMDVLNIQGVQRSLERLADLLGKIQKALGEYLERERSSFPRFYFVGDEDLLEIIGNSKNVAKLQKHFKKMFAGVSSIILNEDNSVVLGISSREGEEVMFKTPVSITEHPKINEWLTLVEKEMRVTLAKLLAESVTEVEIFGKATSIDPNTYITWIDKYQAQLVVLSAQIAWSENVETALSSMGGGGDAAPLHSVLSNVEVTLNVLADSVLMEQPPLRRRKLEHLITELVHQRDVTRSLIKSKIDNAKSFEWLSQMRFYFDPKQTDVLQQLSIQMANAKFNYGFEYLGVQDKLVQTPLTDRCYLTMTQALEARLGGSPFGPAGTGKTESVKALGHQLGRFVLVFNCDETFDFQAMGRIFVGLCQVGAWGCFDEFNRLEERMLSAVSQQVQCIQEALREHSNPNYDKTSAPITCELLNKQVKVSPDMAIFITMNPGYAGRSNLPDNLKKLFRSLAMTKPDRQLIAQVMLYSQGFRTAEVLANKIVPFFKLCDEQLSSQSHYDFGLRALKSVLVSAGNVKRERIQKIKREKEERGEAVDEGEIAENLPEQEILIQSVCETMVPKLVAEDIPLLFSLLSDVFPGVQYHRGEMTALREELKKVCQEMYLTYGDGEEVGGMWVEKVLQLYQITQINHGLMMVGPSGSGKSMAWRVLLKALERLEGVEGVAHIIDPKAISKDHLYGTLDPNTREWTDGLFTHVLRKIIDSVRGELQKRQWIVFDGDVDPEWVENLNSVLDDNKLLTLPNGERLSLPPNVRIMFEVQDLKYATLATVSRCGMVWFSEDVLSTDMIFNNFLARLRSIPLDEGEDEAQRRRKGKEDEGEEAASPMLQIQRDAATIMQPYFTSNGLVTKALEHAFQLEHIMDLTRLRCLGSLFSMLHQACRNVAQYNANHPDFPMQIEQLERYIQRYLVYAILWSLSGDSRLKMRAELGEYIRRITTVPLPTAPNIPIIDYEVSISGEWSPWQAKVPQIEVETHKVAAPDVVVPTLDTVRHEALLYTWLAEHKPLVLCGPPGSGKTMTLFSALRALPDMEVVGLNFSSATTPELLLKTFDHYCEYRRTPNGVVLAPVQLGKWLVLFCDEINLPDMDKYGTQRVISFIRQMVEHGGFYRTSDQTWVKLERIQFVGACNPPTDPGRKPLSHRFLRHVPVVYVDYPGPASLTQIYGTFNRAMLRLIPSLRTYAEPLTAAMVEFYTMSQERFTQDTQPHYIYSPREMTRWVRGIFEALRPLETLPVEGLIRIWAHEALRLFQDRLVEDEERRWTDENIDTVALKHFPNIDREKAMSRPILYSNWLSKDYIPVDQEELRDYVKARLKVFYEEELDVPLVLFNEVLDHVLRIDRIFRQPQGHLLLIGVSGAGKTTLSRFVAWMNGLSVYQIKEVHRGRL

SEQ ID NO: 49369 - protein, 149 aa, Homo sapiens
MQRSIMSFFHPKKEGKAKKPEKEASNSSRETEPPPKAALKEWNGVVSESDSPVKRPGRKAARVLGSEGEEEDEALSPAKGQKPALDCSQVSPPRPATSPENNASLSDTSPMDSSPSGIPKRRTEAETPTESVSEPEVATKQELQEEEEQ

SEQ ID NO: 49370 - protein, 766 aa, Homo sapiens
MREHEDVQERTTLRYEERITELHSVIAELNKKIDRLQGTTIREEDEYSELRSELSQSQHEVNEDSRSMDQDQTSVSIPENQSTMVTADMDNCSDLNSELQRVLTGLENVVCGRKKSSCSLSVAEVDKHIEQLTTASEHCDLAIKTVEEIEGVLGRDLYPNLAEERSRWEKELAGLREENESLTAMLCSKEEELNRTKATMNAIREERDRLRRRVRELQTRLQSVQATGPSSPGRLTSTNRPINPSTGELSTSSSSNDIPIAKIAERVKLSKTRSESSSSDRPVLGSEISSIGVSSSVAEHLAHSLQDCSNIQEIFQTLYSHGSAISESKIREFEVETERLNSRIEHLKSQNDLLTITLEECKSNAERMSMLVGKYESNATALRLALQYSEQCIEAYELLLALAESEQSLILGQFRAAGVGSSPGDQSGDENITQMLKRAHDCRKTAENAAKALLMKLDGSCGGAFAVAGCSVQPWESLSSNSHTSTTSSTASSCDTEFTKEDEQRLKDYIQQLKNDRAAVKLTMLELESIHIDPLSYDVKPRGDSQRLDLENAVLMQELMAMKEEMAELKAQLYLLEKEKKALELKLSTREAQEQAYLVHIEHLKSEVEEQKEQRMRSLSSTSSGSKDKPGKECADAASPALSLAELRTTCSENELAAEFTNAIRREKKLKARVQELVSALERLTKSSEIRHQQSAEFVNDLKRANSNLVAAYEKAKKKHQNKLKKLESQMMAMVERHETQVRMLKQRIALLEEENSRPHTNETSL

SEQ ID NO: 49371 - protein, 174 aa, Homo sapiens
MDADEGQDMSQVSGKESPPVSDTPDEGDEPMPIPEDLSTTSGGQQSSKSDRVVVTYGADDFRDFHAIIPKSFSRKYMPCFWKTKACLHLLSCKYRTCMFLHQPPRYIKYSLFYSLDTYHIIFGYLYHKVQNEGLGSCAVSWEHGSGVTVRVGVTVALMGLLLRRCCWTALRLLL

SEQ ID NO: 49372 - protein, 112 aa, Homo sapiens
MDLDLLDLNPRIIAAIKKAKLKSVKEVLHFSGPDLKRLTNLSSPEVWHLLRTASLHLRGSSILTALQLHQQKERFPTQHQRLSLGCPVLDALLRGGLPLDGITELAGRSSAG

SEQ ID NO: 49373 - protein, 124 aa, Homo sapiens
MQAMDPAAADLYEEDGKDLDFYDFEPLPTLPEDEENVSLADILSLRDRGLSEQEAWAVCLECSLSMRSVAHAAIFQSLCITPDTLAFNTSGNVCFMEQLSDDPEGAFVPPEFDVTGNTFESPGQ

SEQ ID NO: 49374 - protein, 49 aa, Homo sapiens
MAPVKISHVVSFSSQDPKYPVENLLNPDSPRRPWLGCPQDKSGQLKVEL

SEQ ID NO: 49375 - protein, 311 aa, Homo sapiens
TVWDEAEQDGIGEEVLKMSTEEIIQRTRLLDSEIKIMKSEVLRVTHELQAMKDKIKENSEKIKVNKTLPYLVSNVIELLDVDPNDQEEDGANIDLDSQRKGKCAVIKTSTRQTYFLPVIGLVDAEKLKPGDLVGVNKDSYLILETLPTEYDSRVKAMELVEAIVLPMNHKEKFENLGIQPPKGVLMYGPPGTGKTLLARACAAQTKATFLKLAGPQLVQMFIGDGAKLVRDAFALAKEKAPSIIFIDELDAIGTKRFDSEKAGDREVQRTMLELLNQLDGFQPNTQVKVIAATNRVDILDPALLRSGRLDR

SEQ ID NO: 49376 - protein, 130 aa, Homo sapiens
MNEVSVIKEGWLHKRGEYIKTWRPRYFLLKSDGSFIGYKERPEAPDQTLPPLNNFSVAECQLMKTERPRPNTFVIRCLQWTTVIERTFHVDSPDEREEWMRAIQMVANSLKQRAPGEDPMDYKCGSPSDS

SEQ ID NO: 49377 - protein, 89 aa, Homo sapiens
MADAFGDELFSVFEGDSTTAAGTKKDKEKDKGKWKGPPGSADKAGLHFLQKRIIYHLNHELEKLLRNTRSFLMLFKERPFSVLTIISLF

SEQ ID NO: 49378 - protein, 256 aa, Homo sapiens
MTPEDPEETQPLLGPPGGSAPRGRRVFLAAFAAALGPLSFGFALGYSSPAIPSLQRAAPPAPRLDDAAASWFGVYISEIAYPAVRGLLGSCVQLMVVVGILLAYLAGWVLEWRWLAVLGCVPPSLMLLLMCFMPETPRFLLTQHRRQEAMAALRFLWGSEQGWEDPPIGAEQSFHLALLRQPGIYKPFIIGVSLMAFQQLSGVNAVMFYAETIFEEAKFKDSSLASVVVGVIQVLFTAVAALIMDRAGRRLLLVLS

SEQ ID NO: 49379 - protein, 264 aa, Homo sapiens
  MOD_RES (1)..(1): Any amino acid
XESTAPAQVSTLPQSPAALSSSNRAAVWGAQGQNCTQVPVSSASELTRKTTGSAQYSLSDVTSTTSSRVDDHDSEEICLDHLCKGCPLNGSCSKVHFHLPYRWQMLIGKTWTDFEHMETIEKGYCNPGIHLCSVGSYTINFRVMSCDSFPIRRLSTPSSVTKPANSVFTTKWIWYWKNESGTWIQYGEEKDKRKNSNVDSSYLESLYQSCPRGVVPFQAGSRNYELSFQGMIQTNIASKTQKDVIRRPTFVPQWYVQQMKRGPE

SEQ ID NO: 49380 - protein, 166 aa, Homo sapiens
MVAPDVQIEDGKGTILISSEEGETEANNHKKLSEFGIRNGSRLQADDFLQDYTLLINILHSEDLGKDVEFEVVGDAPEKVGPKQAEDAAKSITNGSDDGAQPSTSTAQEQDDVLIVDSDEEDSSNNADVSEEERSRKRKLDEKENLSAKRSRIEQKEELDDVIALD

SEQ ID NO: 49381 - protein, 96 aa, Homo sapiens
METNESTEGSRSRSRSLDIQPSSEGLGPTSEPFPSSDDSPRSALAAATAAAAAAASAAAATAAFTTAKAAALSTKTPAPCSEFMEPSSDPSLLGEP

SEQ ID NO: 49382 - protein, 455 aa, Homo sapiens
MANMNSDSRHLGTSEVDHERDPGPMNIQFEPSDLRSKRPFCIEPTNIVNVNHVIQRVSDHASAMNKRIHYYSRLTTPADKALIAPDHVVPAPEECYVYSPLGSAYKLQSYTEGYGKNTSLVTIFMIWNTMMGTSILSIPWGIKQAGFTTGMCVIILMGLLTLYCCYRVVKSRTMMFSLDTTSWEYPDVCRHYFGSFGQWSSLLFSLVSLIGAMIVYWVLMSNFLFNTGKFIFSTVSVLYLIFLVTFKAVRLGFHLEFHWFIPTEFFVPEIRFQFPQLTGVLTLAFFIHNCIITLLKNNKKQENNVRDLCIAYMLVTLTYLYIGVLVFASFPSPPLSKDCIEQNFLDNFPSSDTLSFIARIFLLFQMMTVYPLLGYLARVQLLGHIFGDIYPSIFHVLILNLIIVGAGVIMACFYPNIGGIIRYSGAACGLAFVFIYPSLIYIISLHQEERLTWPK

SEQ ID NO: 49383 - protein, 78 aa, Homo sapiens
GNTGMVGGSVPVFDEIILSTARMNRVLSFHSVSESPFYVLIETSGSNAGHDAEKLGHFLEHALGSGLVTDGTMATDQR

SEQ ID NO: 49384 - protein, 566 aa, Homo sapiens
MQRLLYRDVMLENFAVMASLGCWCGAVDEGTPSAESVSVEELSQGRTPKADTSTDKSHPCEICTPVLRDILQMIELHASPCGQKLYLGGASRDFWMSSNLHQLQKLDNGEKLFKVDGDQASFMMNCRFHVSGKPFTFGEVGRDFSATSGLLQHQVTPTIERPHSRIRHLRVPTGRKPLKYTESRKSFREKSVFIQHQRADSGERPYKCSECGKSFSQSSGFLRHRKAHGRTRTHECSECGKSFSRKTHLTQHQRVHTGERPYDCSECGKSFRQVSVLIQHQRVHTGERPYECSECGKSFSHSTNLYRHRSAHTSTRPYECSECGKSFSHSTNLFRHWRVHTGVRPYECSECGKAFSCNIYLIHHQRFHTGERPYVCSECGKSFGQKSVLIQHQRVHTGERPYECSECGKVFSQSSGLFRHRRAHTKTKPYECSECEKSFSCKTDLIRHQTVHTGERPYECSVCGKSFIRKTHLIRHQTVHTNERPYECDECGKSYSQSSALLQHRRVHTGERPYECRECGKSFTRKNHLIQHKTVHTGERPYECSECGKSFSQSSGLLRHRRVHVQ

SEQ ID NO: 49385 - protein, 121 aa, Homo sapiens
MLGGSLGSRLLRGVGGSHGRFGARGVREGGAAMAAGESMAQRMVWVDLEMTGLDIEKDQIIEMACLITDSDLNILAEGPNLIIKQPDELLDSMSDWCKEHHGKEIQFMKIRSFLTNTCPSS

SEQ ID NO: 49386 - protein, 590 aa, Homo sapiens
MPPNINWKEIMKVDPDDLPRQEELADNLLISLSKVEVNELKSEKQENVIHLFRITQSLMKMKAQEVELALEEVEKAGEEQAKFENQLKTKVMKLENELEMAQQSAGGRDTRFLRNEICQLEKQLEQKDRELEDMEKELEKEKKVNEQNKRLKKKNEQLCQDIIDYQKQIDSQKETLLSRRGEDSDYRSQLSKKNYELIQYLDEIQTLTEANEKIEVQNQEMRKNLEESVQEMEKMTDEYNRMKAIVHQTDNVIDQLKKENDHYQLQVQELTDLLKSKNEEDDPIMVAVNAKVEEWKLILSSKDDEIIEYQQMLHNLREKLKNAQLDADKSNVMALQQGIQERDSQIKMLTEQVEQYTKEMEKNTCIIEDLKNELQRNKGASTLSQQTHMKIQSTLDILKEKTKEAERTAELAEADAREKDKELVEALKRLKDYESGVYGLEDAVVEIKNCKNQIKIRDREIEILTKEINKLELKISDFLDENEALRERVGLEPKTMIDLTEFRNSKHLKQQQYRAENQILLKEIESLEEERLDLKKKIRQMAQERGKRSATSGLTTEDLNLTENISQGDRISERKLDLLSLKNMSEAQSK

SEQ ID NO: 49387 - protein, 137 aa, Homo sapiens
ILYWDVAGGCKQLKNRYESRDREWATYTCVLGFHVYVPVRSCQGEAAGIAGVGPVGPRAQPPPQLFPPAQAPSRMYGGHGSHVTSVRFTHDDSHLVSLGGKDASIFQWRVLGAGGAGPAPATPSRTPSLSPASSLDV

SEQ ID NO: 49388 - protein, 40 aa, Homo sapiens
MHRLPLLGEKQEAKENGTNLTFIGDKTIQMPFLKKHFLDC

SEQ ID NO: 49389 - protein, 113 aa, Homo sapiens
MTAEDSTAAMSSDSAAGSSAKVPEGVAGAPNEAALLALMERTGYSMVQENGQRKYGGPPPGWEGPHPQRGCEVFVGKIPRDVYEDELVPVFEAVGRIYELRLMMDFDGKNRGY

SEQ ID NO: 49390 - protein, 61 aa, Homo sapiens
  MOD_RES (1)..(1): Any amino acid
XNGQSPPEHSAPAKVVRAAVPKQRKGSKVGDFGDAINWPTPGEIAHKSVQMKLLRLAEVNY

SEQ ID NO: 49391 - protein, 124 aa, Homo sapiens
MNLDSIHRLIEETQIFQMQQSSIKSRGDMVAPASPPRDTCNTCFPLHGLQSHAAHNFCAHSYNTNKWDICEELRLRELEEVKARAAQMEKTMRWWSDCTANWREKWSKVRAERNSAREEGRQLR

SEQ ID NO: 49392 - protein, 45 aa, Homo sapiens
MIWEYNVVIIVMACREFEMGRKKCERYWPLYGEDPITFAPFKISC

SEQ ID NO: 49393 - protein, 153 aa, Homo sapiens
MRTTKVYKLVIHKKGFGGSDDELVVNPKVFPHIKLGDIVEIAHPNDEYSPLLLQVKSLKEDLQKETISVDQTVTQVFRLRPYQDVYVNVVDPKDVTLDLVELTFKDQYIGRGDMWRLKKSLVSTCAYITQKVEFAGIRWCFVLRRLWFTYLFR

SEQ ID NO: 49394 - protein, 50 aa, Homo sapiens
  MOD_RES (1)..(1): Any amino acid
XEEQRKQKKRQSVSGLHRNRLMLPEPRSFLTGYKESILFPKETLWNQSVI

SEQ ID NO: 49395 - protein, 122 aa, Homo sapiens
FKPSLLAQKIEVRIPTPLNTSGVQVICMKGKAKYKASENAIVWKIKRMAGMKESQISAEIELLPTNDKKKWARPPISMNFEVWQRRGLESCQGMLEDLLEIIPINCCTLEVRKLRPRKKNWL

SEQ ID NO: 49396 - protein, 140 aa, Homo sapiens
MLRCLYHWHRPVLNRRWSRLCLPKQYLFTMKLQSPEFQSLFTEGLKSLTELFVKENHELRIAGGAVRDLLNGVKPQDIDFATTATPTQMKEMFQSAGIRMINNRGEKHGTITARLHEENFEITTLRIDVTTDGRHAEVEF

SEQ ID NO: 49397 - protein, 485 aa, Homo sapiens
MDVKAAPNGVATIEDRILRITGYYGYYPGYSSQKSTSRSSVTRCKPGANCPSSHSGISRQLSPLSVTEDSSAPILELQNQGSSGVCGHRVERQNRSADDGTQTHSENSSQENRIKARCLSCTSMVLKGIWGLLIILSVSSSWVGTTQIVKITYKNFYCPFFMTWFSTNWNIMFFPVYYSGHLATAQEKQSPMKKFRECSRIFGEDGLTLKLFLKRTAPFSILWTLTNYLYLLALKKLTATDVSALFCCNKAFVFLLSWIVLKDRFMGVRIVAAIMAITGIVMMAYADNFHADSIIGVAFAVGSASTSALYKVLFKMFLGSANFGEAAHFVSTLGFFNLIFISFTPVILYFTKVEHWSSFAALPWGCLCGMAGLWLAFNILVNVGVVLTYPILISIGTVLSVPGNAAVDLLKQEVIFNVVRLAATIIICIGFLLMLLPEEWDEITLRFINSLKEKKSEEHVDDVTDPSIHLRGRGRANGTVSIPLA

SEQ ID NO: 49398 - protein, 973 aa, Homo sapiens
MVFSMAQPMASSSTEPYLCLAAAGENPSGKSLASAISGKIPSPLSSSYKPMLNNNSFMWPNSTPVPLLQTTQGLKPVSPPKIQPVSWHHSGGTGDCAPQPVDHKVPKSIGTVPADASAHIALSTASSHDTSTTSVASSWYNRNNLAMRAEPLSCALDDSSDSQDPTKEIRFTEAVRKLTARGFEKMPRQGCQLEQSSFLNPSFQWNVLNRSRRWKPPAVNQQFPQEDAGSVRRVLPGASDTLGLDNTVFCTKRISIHLLASHASGLNHNPACESVIDSSAFGEGKAPGPPFPQTLGIANVATRLSSIQLGQSEKERPEEARELDSSDRDISSATDLQPDQAETEDTEEELVDGLEDCCSRDENEEEEGDSECSSLSAVSPSESVAMISRSCMEILTKPLSNHEKVVRPALIYSLFPNVPPTIYFGTRDERVEKLPWEQRKLLRWKMSTVTPNIVKQTIGRSHFKISKRNDDWLGCWGHHMKSPSFRSIREHQKLNHFPGSFQIGRKDRLWRNLSRMQSRFGKKEFSFFPQSFILPQDAKLLRKAWESSSRQKWIVKPPASARGIGIQVIHKWSQLPKRRPLLVQRYLHKPYLISGSKFDLRIYVYVTSYDPLRIYLFSDGLVRFASCKYSPSMKSLGNKFMHLTNYSVNKKNAEYQANADEMACQGHKWALKALWNYLSQKGVNSDAIWEKIKDVVVKTIISSEPYVTSLLKMYVRRPYSCHELFGFDIMLDENLKPWVLEVNISPSLHSSSPLDISIKGQMIRDLLNLAGFVLPNAEDIISSPSSCSSSTTSLPTSPGDKCRMAPEHVTAQKMKKAYYLTQKIPDQDFYASVLDVLTPDDVRILVEMEDEFSRRGQFERIFPSHISSRYLRFFEQPRYFNILTTQWEQKYHGNKLKGVDLLRSWCYKGFHMGVVSDSAPVWSLPTSLLTISKDDVILNAFSKSETSKLGNPVPQRTVRTPAKSPAFLPRRYL

SEQ ID NO: 49399 - protein, 119 aa, Homo sapiens
MAGSRCQEAIVVSGGEREELGSVAPLRGTLAPHHRLLVSVSSFFHARPCEETTKQALWSHSVTQAEVQWRDCGSLQPPPPGLKRSSHVSLPSSWDHSEDAMRKAGVAHSKSSKDMESHV

SEQ ID NO: 49400 - protein, 181 aa, Homo sapiens
MRVVRGLSEPGRARRRGARARGAMEAALLGLCNWSTLGVCAALKLPQISAVLAARSARGLSLPSLLLELAGFLVFLRYQCYYGYPPLTYLEYPILIAQDVILLLCIFHFNGNVKQATPYIAVLVSSWFILALQKWIIDLAMNLCTFISAASKFAQLQCLWKTRDSGTVSALTWSLSSYTCA

SEQ ID NO: 49401 - protein, 203 aa, Homo sapiens
MEPPMEPSGGEQEPGAVRFLDLPWEDVLLPHVLNRVPLRQLLRLQRVSRAFRSLVQLHLAGLRRFDAAQVGPQIPRAALARLLRDAEGLQELALAPCHEWLSDEDLVPVLARNPQLRSVALGGCGQLSRRALGALAEGCPRLQRLSLAHCDWVDGLALRGLADRCPALEELDLTACRQLKDEAIVYLAQRRGAGLRSLSLAVN

SEQ ID NO: 49402 - protein, 9 aa, Homo sapiens
MELQTLQEA

SEQ ID NO: 49403 - protein, 16 aa, Homo sapiens
MLQKSVSRRKCAACKI

SEQ ID NO: 49404 - protein, 115 aa, Homo sapiens
MDTRVLCCAVICLLGAGLSNAGVMQNPRHLVRRRGQEARLRCSPMKGHSHVYWYRQLPEEGLKFMVYLQKENIIDESGMPKERFSAEFPKEGPSILRIQQVVRGDSAAYFCASSP

SEQ ID NO: 49405 - protein, 170 aa, Homo sapiens
MESTSQDRRATHVITIKPNETVLTAFPYRPHSSLLDFLKGEPRVLGATQILLALIIVGFGTIFALNYIGFSQRLPLVVLTGYPFWGALIFILTGYLTVTDKKSKLLGQGVTGMNVISSLVAITGITFTILSYRHQDKYCQMPSFEEICVFSRTLFIDFILLTPPHSSHFL

SEQ ID NO: 49406 - protein, 151 aa, Homo sapiens
MILLVNLFVLLSVVCVLLNLAGFILGCQGAQFVSSVPRCDLVDLGEGKICFCCEEFQPAKCTDKENALKLFPVQPCSAVHLLLKKVLFALCALNALTTTVCLVAAALRYLQIFATRRSCIVSLCKGIMATFPLSQPMDPFVSSTASLPVPL

SEQ ID NO: 49407 - protein, 320 aa, Homo sapiens
  MOD_RES (1)..(1): Any amino acid
XFYTLPNAVLAGIILSNVIPYLETISNLPSLWRQDQYDCALWMMTFSSSIFLGLDIGLIISVVSAFFITTVRSHRAKILLLGQIPNTNIYRSINDYREIITIPGVKIFQCCSSITFVNVYYLKHKLLKEVDMVKVPLKEEEIFSLFNSSDTNLQGGKICRCFCNCDDLEPLPRILYTERFENKLDPEASSINLIHCSHFESMNTSQTASEDQVPYTVSSVSQKNQGQQYEEVEEVWLPNNSSRNSSPGLPDVAESQGRRSLIPYSDASLLPSVHTIILDFSMVHYVDSRGLVVLRQVSTEEALAGALIPLLPSQPHPDPD

SEQ ID NO: 49408 - protein, 571 aa, Homo sapiens
MGKCLSCCKEDQSFQRCSPEDQVSTDAQHRGASSISQPSISLGHKTSYSPVTHKVNAAKASRRLLSVSSPSFSERRYSLFVGFQKRNASPYWQQSRANFDSEEDTGFTDIKSSSDHCGSFISRRRRFSSRKLSIVSYYKSAIFFDPQASGQNVFNLNEIEIFSKTSSNTDAKKHITISAPEYNTKNFKNFETNTTSPAFGNTIDTASYQQSTSSFFSLASDISSPDQQNGIANDIQQRGQLCKDLKDFLHPRPESYSTDHSPIMIPQHPSQSGTFPFLHKAGFSSSYKNSGCFIPPQSELTSGLFEDEDFAVLFQDEDRSSPIEIPKIRYITANTDTEEQSFPVPKAFNTRVEELNLDVLLQKVDHLRMSESGKSESFELLRDHKEKFRDEIEFMWRFARAYGDMYELSTNTQEKKHYANIGKTLSERAINRAPMNGHCHLWYAVLCGYVSEFEGLQNKINYGHLFKEHLDIAIKLLPEEPFLYYLKGRYCYTVSKLSWIEKKMAATLFGKIPSSTVQEALHNFLKAEELCPGYSNPNYMYLAKCYTDLEENQNALKFCNLALLLPTVTKE

SEQ ID NO: 49409 - protein, 34 aa, Homo sapiens
  MOD_RES (1)..(1): Any amino acid
XFAAQPAQLSSKENALVWIAVNEDGVSILDHNTM

SEQ ID NO: 49410 - protein, 454 aa, Homo sapiens
MWDQGGQPWQQWPLNQQQWMQSFQHQQDPSQIDWAALAQAWIAQREASGQQSMVEQPPGMMPNGQDMSTMESGPNNHGNFQGDSNFNRMWQPEWGMHQQPPHPPPDQPWMPPTPGPMDIVPPSEDSNSQDSGEFAPDNRHIFNQNNHNFGGPPDNFAVGPVNQFDYQHGAAFGPPQGGFHPPYWQPGPPGPPAPPQNRRERPSSFRDRQRSPIALPVKQEPPQIDAVKRRTLPAWIREGLEKMEREKQKKLEKERMEQQRSQLSKKEKKATEDAEGGDGPRLPQRSKFDSDEEEEDTENVEAASSGKVTRSPSPVPQEEHSDPEMTEEEKEYQMMLLTKMLLTEILLDVTDEEIYYVAKDAHRKATKAPAKQLAQSSALASLTGLGGLGGYGSGDSEDERSDRGSESSDTDDEELRHRIRQKQEAFWRKEKEQQLLHDKQMEDQQPLPVVNAEE

SEQ ID NO: 49411 - protein, 155 aa, Homo sapiens
  MOD_RES (1)..(1): Any amino acid
XQKLQAQEDEISENLVNIQKMQKTQVKCRKILTKMKQQGHETAACPETEEIPQGASGCWKDDLQKELSDIWSAVHVLQNSIDSLTLCSGACPKASSLRGHKGHQCLSPPLPSWDSDSDCDQDLSQPPFSKSGRSFPPGADPPQSPPPPISLLTCP

SEQ ID NO: 49412 - protein, 514 aa, Homo sapiens
MAAAESGNSGTPARSPVLPRVCDPGGLTQSADSWGLRAPGTSSPARLRETVPTQVDKGDLVALSLPAGHGDTDGPISLDVPDGAPDPQRTKAAIDHLHQKILKITEQIKIEQEARDDNVAEYLKLANNADKQQVSRIKQVFEKKNQKSAQTIAQLHKKLEHYRRRLKEIEQNGPSRQPKDVLRDMQQGLKDVGANVRAGISGFGGGVVEGVKGSLSGLSQATHTAVVSKPREFASLIRNKFGSADNIAHLKDPLEDGPPEEAARALSGSATLVSSPKYGSDDECSSASASSAGAGSNSGAGPGGALGSPKSNALYGAPGNLDALLEELREIKEGQSHLEDSMEDLKTQLQRDYTYMTQCLQEERYRYERLEEQLNDLTELHQNEMTNLKQELASMEEKVAYQSYERARDIQEAVESCLTRVTKLELQQQQQQVVQLEGVENANARALLGKFINVILALMAVLLVFVSTIANFITPLMKTRLRITSTTLLVLVLFLLWKHWDSLTYLLEHVLLPS

SEQ ID NO: 49413 - protein, 108 aa, Homo sapiens
  MOD_RES (1)..(1): Any amino acid
XDMDAYCRKENSSEICSNNGECVCGQCVCRKRDNTNEIYSGKFCECDNFNCDRSNGLICGGNGVCKCRVCECNPNYTGSACDCSLDTSTCEASNGQICNGRGICECGV

SEQ ID NO: 49414 - protein, 367 aa, Homo sapiens
  MOD_RES (1)..(1): Any amino acid
XTYTYEKLLWTTSRVLKVLSVCSSNKPAIVEAGGMQALGLHLTDPSQRLVQNCLWTLRNLSDAATKQEGMEGLLGTLVQLLGSDDINVVTCAAGILSNLTCNNYKNKMMVCQVGGIEALVRTVLRAGDREDITEPAICALRHLTSRHQEAEMAQNAVRLHYGLPVVVKLLHPPSHWPLIKATVGLIRNLALCPANHAPLREQGAIPRLVQLLVRAHQDTQRRTSMGGTQQQFVEGVRMEEIVEGCTGALHILARDVHNRIVIRGLNTIPLFVQLLYSPIENIQRVAAGVLCELAQDKEAAEAIEAEGATAPLTELLHSRNEGVGPFSPCLLATYAAAVLFRMSEDKPQDYKKRLSVELTSSLFRTEP

SEQ ID NO: 49415 - protein, 326 aa, Homo sapiens
QAEAQAKVDKKRDKIERKILDSQERAFWDVHRPVPGCVNTTEVDIKKSSRMRNPHKTRKSVYGLQNDIRSHSPTHTPTPETKPPTEDELQQQIKYWQIQLDRHRLKMSKVADSLLSYTEQYLEYDPFLLPPDPSNPWLSDDTTFWELEASKEPSQQRVKRWGFGMDEALKDPVGREQFLKFLESEFSSENLRFWLAVEDLKKRPIKEVPSRVQEIWQEFLAPGAPSAINLDSKSYDKTTQNVKEPGRYTFEDAQEHIYKLMKSDSYPRFIRSSAYQELLQAKKKSGNSMDRRTSFEKFAQNVGRNIPIFPCHKNCTPTLRASTNLL

SEQ ID NO: 49416 - protein, 168 aa, Homo sapiens
MRLNIAIFFGALFGALGVLLFLVAFGSDYWLLATEVGRCSGEKNIENVTFHHEGFFWRCWFNGIVEENDSNIWKFWYTNQPPSKNCTHAYLSPYPFMRGEHNSTSYDSAVIYRGFWAVLMLLGVVAVVIASFLIICAAPFASHFLYKAGGGSYIAAAEHEDNDELREF

SEQ ID NO: 49417 - protein, 76 aa, Homo sapiens
MAHRGGERDFQTSARRMGTSLLFQLSVHERELDLVFLDHSYAKPWSAHPDASSARPTRMLFVTPRRQHESTMLCTK

SEQ ID NO: 49418 - protein, 222 aa, Homo sapiens
MFNVMVDAKAQSTKLCSMEMGQEFAKMWHQYHSKIDELIEETVKEMITLLVAKFVTILEGVLAKLSRYDEGTLFSSFLSFTVKAASKYVDVPKPGMDVADAYVTFVRHSQDVLRDKVNEEMYIERLFDQWYNSSMNVICTWLTDRMDLQLHIYQLKTLIRMVKKTYRDFRLQGVLDSTLNSKTYETIRNRLTVEEATASVSEGGGLQGISMKDSDEEDEEDD

SEQ ID NO: 49419 - protein, 131 aa, Homo sapiens
MAATVNLELDPIFLKALGFLHSKSKDSAEKLKALLDESLARGIDSSYRPSQKDVEPPKISSTKNISIKQEPKISSSLPSGNNNGKVLTTEKVKKEAEKRPADKMKSDITEGVDIPKKPRLEKPETQSSPIT

SEQ ID NO: 49420 - protein, 135 aa, Homo sapiens
MAHLMMFRDVAVDFSQEEWECLDLEQRDLYRDVMLENYSNMVSLGFCIYQPEAFSLLEKGKEPWKILRDETRGPCPDMQSRCQTKKLLPKNGIFEREIAQLEIMRICKNHSLDCLCFRGDWEGNTQFQTLQDNQE

SEQ ID NO: 49421 - protein, 144 aa, Homo sapiens
MSASSEGPRLALASPRPILAPLCTPEGQKTATAHRSSSLAPTSVGQLVMSASAGPKPPPATTGSVLAPTSLGLVMPASAGPRSPPVTLGPNLAPTSRDQKQEPPASVGPKPTLAASGLSLALASEEQPPELPSTPSPVPSPVLS

SEQ ID NO: 49422 - protein, 1248 aa, Homo sapiens
MSHLVDPTSGDLPVRDIDAIPLVLPASKGKNMKTQPPLSRMNREELEDSFFRLREDHMLVKELSWKQQDEIKRLRTTLLRLTAAGRDLRVAEEAAPLSETARRGQKAGWRQRLSMHQRPQMHRLQGHFHCVGPASPRRAQPRVQVGHRQLHTAGAPVPEKPKRGPRDRLSYTAPPSFKEHATNENRGEVASKPSELAHIMASNTMQVEEPPKSPEKMWPKDENFEQRSSLECAQKAAELRASIKEKVELIRLKKLLHERNASLVMTKAQLTEVQEAYETLLQKNQGILSAAHEALLKQVNELRAELKEESKKAVSLKSQLEDVSILQMTLKEFQERVEDLEKERKLLNDNYDKLLESMLDSSDSSSQPHWSNELIAEQLQQQVSQLQDQLDAELEDKRKVLLELSREKAQNEDLKLEVTNILQKHKQEVELLQNAATISQPPDRQSEPATHPAVLQENTQIEPSEPKNQEEKKLSQVLNELQVSHAETTLELEKTRDMLILQRKINVCYQEELEAMMTKADNDNRDHKEKLERLTRLLDLKNNRIKQLEEQLKDVAYGTRPLSLCLETLPAHGDEDKVDISLLHQGENLFELHIHQAFLTSAALAQAGDTQPTTFCTYSFYDFETHCTPLSVGPQPLYDFTSQYVMETDSLFLHYLQEASARLDIHQAMASEHSTLAAGWICFDRVLETVEKVHGLATLIGAGGEEFGVLEYWMRLRFPIKPSLQACNKRKKAQVYLSTDVLGGRKAQEEEFRSESWEPQNELWIEITKCCGLRSRWLGTQPSPYAVYRFFTFSDHDTAIIPASNNPYFRDQARFPVLVTSDLDHYLRREALSIHVFDDEDLEPGSYLGRARVPLLPLAKNESIKGDFNLTDPAEKPNGSIQVQLDWKFPYIPPESFLKPEAQTKGKDTKDSSKISSEEEKASFPSQDQMASPEVPIEAGQYRSKRKPPHGGERKEKEHQVVSYSRRKHGKRIGVQGKNRMEYLSLNILNGNTPEQVNYTEWKFSETNSFIGDGFKNQHEEEEMTLSHSALKQKEPLHPVNDKESSEQGSEVSEAQTTDSDDVIVPPMSQKYPKADSEKMCIEIVSLAFYPEAEVMSDENIKQVYVEYKFYDLPLSETETPVSLRKPRAGEEIHFHFSKVIDLDPQEQQGRRRFLFDMLNGQDPDQGHLKFTVVSDPLDEEKKECEEVGYAYLQLWQILESGRDILEQELDIVSPEDLATPIGRLKVSLQAAAVLHAIYKEMTEDLFS

SEQ ID NO: 49423 - protein, 913 aa, Homo sapiens
MIRHAGAPARGDPTGPVPVVGKGEEEEEEDGMRLCLPANPKNCLPHRRGISILEKLIKTCPVWLQLSLGQAEVARILHRVVAGMFLVRRDSSSKQLVLCVHFPSLNESSAEVLEYTIKEEKSILYLEGSALVFEDIFRLIAFYCVSRDLLPFTLRLPQAILEASSFTDLETIANLGLGFWDSSLNPPQERGKPAEPPRDRAPGFPLVSSLRPTAHDANCACEIELSVGNDRLWFVNPIFIEDCSSALPTDQPPLGNCPARPLPPTSDATSPTSRWAPRRPPPPPPVLPLQPCSPAQPPVPAPPLPAKKNLPTAPPRRRVSERVSLEDQSPGMAAEGDQLSLPPQGTSDGPEDTPRESTEQGQDTEVKASDPHSMPELPRTAKQPPVPPPRKKRISRQLASTLPAPLENAELCTQAMALETPTPGPPREGQSPASQAGTQHPPAQATAHSQSSPEFKGSLASLSDSLGVSVMATDQDSYSTSSTEEELEQFSSPSVKKKPSMILGKARHRLSFASFSSMFHAFLSNNRKLYKKVVELAQDKGSYFGSLVQDYKVYSLEMMARQTSSTEMLQEIRTMMTQLKSYLLQSTELKALVDPALHSEEELEAIVESALYKCVLKPLKEAINSCLHQIHSKDGSLQQLKENQLVILATTTTDLGVTTSVPEVPMMEKILQKFTSMHKAYSPEKKISILLKTCKLIYDSMALGNPGKPYGADDFLPVLMYVLARSNLTEMLLNVEYMMELMDPALQLGEGSYYLTTTYGALEHIKSYDKITVTRQLSVEVQDSIHRWERRRTLNKARASRSSVQDFICVSYLEPEQQARTLASRADTQAQALCAQCAEKFAVERPQAHRLFVLVDGRCFQLADDALPHCIKGYLLRSEPKRDFHFVYRPLDGGGGGGGGSPPCLVVREPNFL

SEQ ID NO: 49424 - protein, 133 aa, Homo sapiens
MGAKESRIGFLSYEEALRRVTDVELKRLKDAFKRTCGLSYYMGQHCFIREVLGDGVPPKVAEVCHIVLGLRPATPEEEGQIIRGWLERESRYGLQAGHNWFIISMQWWQQWKEYVKYDANPVVIEPSSVLNGG

SEQ ID NO: 49425 - protein, 675 aa, Homo sapiens
KVKGEETEEHQRGRLGYLTVGEQSEELVTRETGDGDPVSNISQTHFKCRGILNHAEKQQSPEVLDYMLQKEEKYIRQQKAHTISQQCISSSLLLDDAQNQNQPKADKDESTMINEITLAKLAKDSIVAQTQKLEDQKEERLHHPLRKDTESCTSPCLLGAPRKAQDPSSAGCDQIHGAFAKKGVLPLKKQPHRTCKKVSYQEQIIVGRKIGKIRSSAFLKSSSNPIPTKAHRLLSLCTLSAPTRLEPETAPTKSLVSHIPKQMSTPCHPLRSLNFRKTTKESALLNKLSILASKLAPAMKTQKLRYRRCSSELLPMAKSYKRLRYKRLLDGFSSSTEQLNPYLAASGWDKRPNSKPMALYSLESIKMTFIDLSNKMPSLLFGSEIFPVSFHVKSSSSDCTTESSRTFPEHCAPARLALGEALQCPSQPPKWTFSFFLSHGCPGMATFREDTGVHSQTHTQAPPQPPAPLQDYGGTAIVQTRADCSVLGLHTLLALCSPGCYRIWTKKRSFSSHMPTMQRLFMTQFTQGLKGLRSPASIADKVFCSLPYSVGRVLSIWSQHGPSVCSFEISSLHSPHCKRQPSLGTTSSHTMLPYVPLPGMEATYNTSGSQTRLEPPFPALVPKSCLVAESAVSKLLLSASEFQVRGLDELDGVKAACPCPQSSPPEQKEVKEEGV

SEQ ID NO: 49426 - protein, 940 aa, Homo sapiens
MTMAGGRRGLVAPQNTFLENIVRRSNDTNFVLGNAQIVDWPIVYSNDGFCKLSGYHRAEVMQKSSTCSFMYGELTDKDTIEKVRQTFENYEMNSFEILMYKKNRTPVWFFVKIAPIRNEQDKVVLFLCTFSDITAFKQPIEDDSCKGWGKFARLTRALTSSRGVLQQLAPSVQKGENVHKHSRLAEVLQLGSDILPQYKQEAPKTPPHIILHYCVFKTTWDWIILILTFYTAILVPYNVSFKTRQNNVAWLVVDSIVDVIFLVDIVLNFHTTFVGPAGEVISDPKLIRMNYLKTWFVIDLLSCLPYDVINAFENVDEVSAFMGDPGKIGFADQIPPPLEGRESQGISSLFSSLKVVRLLRLGRVARKLDHYIEYGAAVLVLLVCVFGLAAHWMACIWYSIGDYEIFDEDTKTIRNNSWLYQLAMDIGTPYQFNGSGSGKWEGGPSKNSVYISSLYFTMTSLTSVGFGNIAPSTDIEKIFAVAIMMIGSLLYATIFGNVTTIFQQMYANTNRYHEMLNSVRDFLKLYQVPKGLSERVMDYIVSTWSMSRGIDTEKVLQICPKDMRADICVHLNRKVFKEHPAFRLASDGCLRALAMEFQTVHCAPGDLIYHAGESVDSLCFVVSGSLEVIQDDEVVAILGKGDVFGDVFWKEATLAQSCANVRALTYCDLHVIKRDALQKVLEFYTAFSHSFSRNLILTYNLRKRIVFRKISDVKREEEERMKRKNEAPLILPPDHPVRRLFQRFRQQKEARLAAERGGRDLDDLDVEKGNVLTEHASANHSLVKASVVTVRESPATPVSFQAASTSGVPDHAKLQAPGSECLGPKGGGGDCAKRKSWARFKDACGKSEDWNKVSKAESMETLPERTKASGEATLKKTDSCDSGITKSDLRLDNVGEARSPQDRSPILAEVKHSFYPIPEQTLQATVLEGLTLLPRLVSNS

SEQ ID NO: 49427 - protein, 18 aa, Homo sapiens
MEEVVIAGMSGKLPESEN

SEQ ID NO: 49428 - protein, 139 aa, Homo sapiens
MGERLFESAEGSQCGETFTQVPEDMLNKKTLPGVKSCESGTCGEIFMGYSSFNRNIRTDTGHQPHKCQKFLEKPYKHKQRRKALSHSHCFRTHERPHTREKPFDCKECEKSFISPASIRRYMVTHSGDGPYKCKFCGKA

SEQ ID NO: 49429 - protein, 101 aa, Homo sapiens
MVVLEEEFQNISPEELKMELPERQPRFVVYSYKYVHDDGRVSYPLCFIFSSPVGCKPEQQMMYAGSKNRLVQTAELTKVFEIRTTDDLTEAWLQEKLSFFR

SEQ ID NO: 49430 - protein, 136 aa, Homo sapiens
PRPAAAAAAATPAVRTVPQYKYAAGVRNPQQHLNAQPQVTMQQPAVHVQGQEPLTASMLASAPPQEQKQMLAMHPTLAGKITGMLLEIDNSELLHMLESPESLRSKVDEAVAVLQAHQAKEAAQKAVNSATGVPTV

SEQ ID NO: 49431 - protein, 71 aa, Homo sapiens
RRTLYYGLNLLIPCVLISALALLVFLLPADSGEKISLGITVLLSLTVFMLLVAEIMPATSDSVPLIAHCFQ

SEQ ID NO: 49432 - protein, 199 aa, Homo sapiens
  MOD_RES (1)..(1): Any amino acid
XGAAPELPVPTGGPAVGAREQALAVSRNYLSQPRLTYKTVSGVNGPLVILDHVKFPRYAEIVHLTLPDGTKRSGQVLEVSGSKAVVQVFEGTSGIDAKKTSCEFTGDILRTPVSEDMLGRVFNGSGKPIDRGPVVLAEDFLDIMGQPINPQCRIYPEEMIQTGISAIDGMNSIARGQKIPIFSAAGLPHNEVRTGIGLL

SEQ ID NO: 49433 - protein, 226 aa, Homo sapiens
ASDYVGNRFPARNRRVSTPSSLLPTPCLSIAIFLEPEASQIKGEFVALIGALLAICCMIFLGFADDVLNLRWRHKLLLPTAASLPLLMVYFTNFGNTTIVVPKPFRPILGLHLDLGILYYVYMGLLAVFCTNAINILAGINGLEAGQSLVISASIIVFNLVELEGDCRDDHVFSLYFMIPFFFTTLGLLYHNWCSTSSTHCLSSCISSPALATAYPDSISRQANWR

SEQ ID NO: 49434 - protein, 223 aa, Homo sapiens
  MOD_RES (1)..(1): Any amino acid
XPTLPCNVLKFKSTTIMLDCGLDMTSTLNFLPLPLVQSPRLSNLPGWSLKDGNAFLDKELKECSGHVFVDSVPEFCLPETELIDLSTVDVILISNYHCMMALPYITEHTGFTGTVYATEPTVQIGRLLPSPLKDAVEVSTWRRCYTMQEVNSALSKIQLVGYSQKIELFGAVQVTPLSSGYALGSSNWIIQSHYEKVSYVSGSSLLTTHPQPMDQASLKNSDV

SEQ ID NO: 49435 - protein, 10 aa, Homo sapiens
MNQKLLKLEN

SEQ ID NO: 49436 - protein, 149 aa, Homo sapiens
MACAEFSFHVPSLEELAGVMQKGLKDNFADVQVSVVDCPDLTKEPFTFPVKGICGKTRIAEVGGVPYLLPLVNQKKVYDLNKIAKEIKLPGAFILGAGAGPFQTLGFNSEFMPVIQTESEHKPPVNGSYFAHVNPADGGCLLEKYSEKC

SEQ ID NO: 49437 - protein, 437 aa, Homo sapiens
MAALRALCGFRGVAAQVLRPGAGVRLPIQPSRGVRQWQPDVEWAQQFGGAVMYPSKETAHWKPPPWNDVDPPKDTIVKNITLNFGPQHPAAHGVLRLVMELSGEMVRKCDPHIGLLHRGTEKLIEYKTYLQALPYFDRLDYVSMMCNEQAYSLAVEKLLNIRPPPRAQWIRVLFGEITRLLNHIMAVTTHALDLGAMTPFFWLFEEREKMFEFYERVSGARMHAAYIRPGGVHQLLTNNRIWRNRTIDIGVVTAEEALNYGFSGVMLRGSGIQWDLRKTQPYDVYDQVEFDVPVGSRGDCYDRYLCRVEEMRQSLRIIAQCLNKMPPGEIKVDDAKVSPPKRAEMKTSMESLIHHFKLYTEGYQVPPGATYTAIEAPKGEFGVYLVSDGSSRPYRCKIKAPGFAHLAGLDKMSKGHMLADVVAIIGTQDIVFGEVDR

SEQ ID NO: 49438 - protein, 74 aa, Homo sapiens
MEAREPGRPTPTYHLVPNTSQSQVEEDVSSPPQRSSETMQLKKEISLLNGVSLVVGNMIGSGIFVSPKGVLVHT

SEQ ID NO: 49439 - protein, 57 aa, Homo sapiens
MALLKANKDLISAGLKEFSVLLNQQVFNDPLVSEEDMVTVVEDWMNFYINYYRQQVT

SEQ ID NO: 49440 - protein, 811 aa, Homo sapiens
IPFLSNLPSERGAARLSPHCLLSFPRKPSHGCRAASKARLEAKPANSPFPSHPSLAHITQFRMMVSLGHLAKGASLDDLIDSCIQSFDADGNLCRSNQLLQVMLTMHRIVISSAELLQKVITLYKDALAKNSPGLCLKICYFVRYWITEFWVMFKMDASLTDTMEEFQELVKAKGEELHCRLIDTTQINARDWSRKLTQRIKSNTSKKRKVSLLFDHLEPEELSEHLTYLEFKSFRRISFSDYQNYLVNSCVKENPTMERSIALCNGISQWVQLMVLSRPTPQLRAEVFIKFIQVAQKLHQLQNFNTLMAVIGGLCHSSISRLKETSSHVPHEINKVLGEMTELLSSSRNYDNYRRAYGECTDFKIPILGVHLKDLISLYEAMPDYLEDGKVNVHKLLALYNHISELVQLQEVAPPLEANKDLVHLLTLSLDLYYTEDEIYELSYAREPRNHRAPPLTPSKPPVVVDWASGVSPKPDPKTISKHVQRMVDSVFKNYDHDQDGYISQEEFEKIAASFPFSFCVMDKDREGLISRDEITAYFMRASSIYSKLGLGFPHNFQETTYLKPTFCDNCAGFLWGVIKQGYRCKDCGMNCHKQCKDLVVFECKKRAKNPVAPTENNTSVGPVSNLCSLGAKDLLHAPEEGPFTFPNGEAVEHGEESKDRTIMLMGVSSQKISLRLKRAVAHKATQTESQPWIGSEGPSGPFVLSSPRKTAQDTLYVLPSPTSPCPSPVLVRKRAFVKWENKDSLIKSKEELRHLRLPTYQELEQEINTLKADNDALKIQLKYAQKKIESLQLEKSNHVLAQMEQGDCS

SEQ ID NO: 49441 - protein, 241 aa, Homo sapiens
MELEEGKAGSGLRQYYLSKIEELQLIVNDKSQNLRRLQAQRNELNAKVRLLREELQLLQEQGSYVGEVVRAMDKKKVLVKVHPEGKFVVDVDKNIDINDVTPNCRVALRNDSYTLHKILPNKVDPLVSLMMVEKVPDSTYEMIGGLDKQIKEIKEVIELPVKHPELFEALGIAQPKGVLLYGPPGTGKTLLARAVAHHTDCTFIRVSGSELVQKFIGEGARMVRELFVMAREHAPSIIFMD

SEQ ID NO: 49442 - protein, 50 aa, Homo sapiens
MMDGPRSDVGRWGGNPLQPPTTPSPEPEPEPDGRSRRGGGRSFWARCCGC

SEQ ID NO: 49443 - protein, 863 aa, Homo sapiens
  MOD_RES (1)..(1): Any amino acid
XHDVIQQLPPPHYRTLEYLLRHLARMARHSANTSMHARNLAIVWAPNLLRSMELESVGMGGAAAFREVRVQSVVVEFLLTHVDVLFSDTFTSAGLDPAGRCLLPRPKSLAGSCPSTRLLTLEEAQARTQGRLGTPTEPTTPKAPASPAERRKGERGEKQRKPGGSSWKTFFALGRGPSVPRKKPLPWLGGTRAPPQPSGSRPDTVTLRSAKSEESLSSQASGAGLQRLHRLRRPHSSSDAFPVGPAPAGSCESLSSSSSSESSSSESSSSSSESSAAGLGALSGSPSHRTSAWLDDGDELDFSPPRCLEGLRGLDFDPLTFRCSSPTPGDPAPPASPAPPAPASAFPPRVTPQAISPRGPTSPASPAALDISEPLAVSVPPAVLELLGAGGAPASATPTPALSPGRSLRPHLIPLLLRGAEAPLTDACQQEMCSKLRGAQGPLGPDMESPLPPPPLSLLRPGGAPPPPPKNPARLMALALAERAQQVAEQQSQQECGGTPPASQSPFHRSLSLEVGGEPLGTSGSGPPPNSLAHPGAWVPGPPPYLPRQQSDGSLLRSQRPMGTSRRGLRGPAQVSAQLRAGGGGRDAPEAAAQSPCSVPSQVPTPGFFSPAPRECLPPFLGVPKPGLYPLGPPSFQPSSPAPVWRSSLGPPAPLDRGENLYYEIGASEGSPYSGPTRSWSPFRSMPPDRLNASYGMLGQSPPLHRSPDFLLSYPPAPSCFPPDHLGYSAPQHPARRPTPPEPLYVNLALGPRGPSPASSSSSSPPAHPRSRSDPGPPVPRLPQKQRAPWGPRTPHRVPGPWGPPEPLLLYRAAPPAYGRGGELHRGSLYRNGGQRGEGAGPPPPYPTPSWSLHSEGQTRSYC

SEQ ID NO: 49444 - protein, 150 aa, Homo sapiens
MSGQTLTDRIAAAQYSVTGSAVARAVCKATTHEVMGPKKKHLDYLIQATNETNVNIPQMADTLFERATNSSWVVVFKALVTTHHLMVHGNERFIQYLASRNTLFNLSNFLDKSGSHGYDMSTFIRRYSRYLNEKAFSYRQMAFDFARVKK

SEQ ID NO: 49445 - protein, 548 aa, Homo sapiens
  MOD_RES (1)..(1): Any amino acid
XVSTGADGTVCFWQWDLESLKFSPRPLKFTEKPRPGVQMLCSSFSVGGMFLATGSTDHVIRMYFLGFEAPEKIAELESHTDKVDSIQFCNNGDRFLSGSRDGTARIWRFEQLEWRSILLDMATRISGDLSSEEERFMKPKVTMIAWNQNDSIVVTAVNDHVLKVWNSYTGQLLHNLMGHADEVFVLETHPFDSRIMLSAGHDGSIFIWDITKGTKMKHYFNMIEGQGHGAVFDCKFSQDGQHFACTDSHGHLLIFGFGCSKPYEKIPDQMFFHTDYRPLIRDSNNYVLDEQTQQAPHLMPPPFLVDVDGNPHPTKYQRLVPGRENSADEHLIPQLGYVATSDGEVIEQIISLQTNDNDERSPESSILDGMIRQLQQQQDQRMGADQDTIPRGLSNGEETPRRGFRRLSLDIQSPPNIGLRRSGQVEGVRQMHQNAPRSQIATERDLQAWKRRVVVPEVPLGIFRKLEDFRLEKGEEERNLYIIGRKRKTLQLSHKETSCDQSEGSGSSEEDEWRSDRKSESYSESSSDSSSRYSDWTADAGINLQPPL

SEQ ID NO: 49446 - protein, 96 aa, Homo sapiens
AQRVAEAHDPDSVAEVLVGQARGALEEKDFQKAEGLLLRAQRPGLALNYYKGCGGICGTSSTLGAGWRVQPCRGLLPQSARLWKQRPGGEVLDEGS

SEQ ID NO: 49447 - protein, 109 aa, Homo sapiens
MIKDCMKKVVAVHLHQTVQVDDELEIKAYYAGHVLGAAMFQIKVGSESVVYTGDYNMTPDRHLGAAWIDKCRPNLLITESTYATTIRDSKRCRERDFLKKVHETVERGG

SEQ ID NO: 49448 - protein, 32 aa, Homo sapiens
MAPLALHLLVLVPILLSLVASQDWKAERSQDP

SEQ ID NO: 49449 - protein, 49 aa, Homo sapiens
  MOD_RES (1)..(1): Any amino acid
XSDIDESSVMQLAEMGFPLEACRKAVYFTGNMGAEVAFNWIIVHMEEPE

SEQ ID NO: 49450 - protein, 75 aa, Homo sapiens
  MOD_RES (1)..(1): Any amino acid
XWIPYVCMLAAFGVCSPELWMTLFKWLRLRTVHPILLALILSMAVPTIIGLSLWKEKASSSCSCVCRESTVNGCD

SEQ ID NO: 49451 - protein, 53 aa, Homo sapiens
MAVSSWNWNLVPCLCRGQLSDSNASFLRAARAGNLDKVVEYLKGGIDINTCNQ

SEQ ID NO: 49452 - protein, 71 aa, Homo sapiens
GEFLTVDLNSTHFCCPQYYCVCEPNLCPMPLLNCAEDMNLVKENVSGQCCPTWHCECNCENLIMPTCEVIS

SEQ ID NO: 49453 - protein, 708 aa, Homo sapiens
MAEVEDQAARDMKRLEEKDKERKNVKGIRDDIEEEDDQEAYFRYMAENPTAGVVQEEEEDNLEYDSDGNPIAPTKKIIDPLPPIDHSEIDYPPFEKNFYNEHEEITNLTPQQLIDLRHKLNLRVSGAAPPRPGSSFAHFGFDEQLMHQIRKSEYTQPTPIQCQGVPVALSGRDMIGIAKTGSGKTAAFIWPMLIHIMDQKELEPGDGPIAVIVCPTRELCQQIHAECKRFGKAYNLRSVAVYGGGSMWEQAKALQEGAEIVVCTPGRLIDHVKKKATNLQRVSYLVFDEADRMFDMGFEYQVRSIASHVRPDRQTLLFSATFRKKIEKLARDILIDPIRVVQGDIGEANEDVTQIVEILHSGPSKWNWLTRRLVEFTSSGSVLLFVTKKANAEELANNLKQEGHNLGLLHGDMDQSERNKVISDFKKKDIPVLVATDVAARGLDIPSIKTVINYDVARDIDTHTHRIGRTGRAGEKGVAYTLLTPKDSNFAGDLVRNLEGANQHVSKELLDLAMQNAWFRKSRFKGGKGKKLNIGGGGLGYRERPGLGSENMDRGNNNVMSNYEAYKPSTGAMGDRLTAMKAAFQSQYKSHFVAASLSNQKAGSSAAGASGWTSAGSLNSVPTNSAQQGHNSPDSPVTSAAKGIPGFGNTGNISGAPVTYPSAGAQGVNNTASGNNSREGTGGSNGKRERYTENRGSPSQSRRDWQSA

SEQ ID NO: 49454 - protein, 45 aa, Homo sapiens
MISTAPLYSGVHNWTSSDRIRMCGINEESHFQQWSPPTSASPTAF

SEQ ID NO: 49455 - protein, 157 aa, Homo sapiens
MESGSTAASEEARSLRECELYVQKHNIQALLKDSIVQLCTARPERPMAFLREYFERLEKEEAKQIQNLQKAGTRTDSREDEISPPPPNPVVKGRRRRGAISAEVYTEEDAASYVRKVIPKDYKTMAALAKAIEKNVLFSHLDDNERSDIFDAMFSVS

SEQ ID NO: 49456 - protein, 299 aa, Homo sapiens
  MOD_RES (1)..(1): Any amino acid
XEVPPSPESCCHMLHKEKVVCIAAGLRHAVAATASGIVFQWGTGLASCGRRLCPGQTLPLFFTAKEPSRVTGLENSKAMCVLAGSDHSASLTDAGEVYVWGSNKHGQLANEAAFLPVPQKIEAHCFQNEKVTAIWSGWTHLVAQTETGKMFTWGRADYGQLGRKLETYEGWKLEKQDSFLPCSRPPNSMPSSPHCLTGATEVSCGSEHNLAIIGGVCYSWGWNEHGMCGDGTEANVWAPKPVQALLSSSGLLVGCGAGHSLALCQLPAHPALVQDPKVTYLSPDAIEDTESQKAMDKER

SEQ ID NO: 49457 - protein, 94 aa, Homo sapiens
MSDPKDFSQWWNPGGVRTSYQPSSPGRFTKETTQKNFNNLYGTKGNYTSRVWEYSSSIQNSDNDLPVVQGSSSFSLKGYPSLMRSQSPKAQPQT

SEQ ID NO: 49458 - protein, 158 aa, Homo sapiens
MAATGTAAAAATGRLLLLLLVGLTAPALALAGYIESSQICCSPRSFLISTLKCLIVDEINALAANAGTGFAVAEPQIAMFCGKLNMHVNIQTGKWEPDPTGTKSCFETKEEVLQYCQEMYPELQITNVMEANQRVSIDNWCRRDKKQCKSRFVTPFKC

SEQ ID NO: 49459 - protein, 50 aa, Homo sapiens
MSKQQPTQFINPETPGYVGFANLPNQVHRKSVKKGFEFTLMVVGESGLGK

SEQ ID NO: 49460 - protein, 58 aa, Homo sapiens
MAGPFSRLLSARPGLRLLALAGAGSLAAGFLLRPEPVRAASERRRLYPPRYLLTCLTL

SEQ ID NO: 49461 - protein, 84 aa, Homo sapiens
MPLSSPNAAATASDMDKNSGSNSSSASSGSSKGQQPPRSASAGPAGESKPKSELLISAGFNLLSVDSVVRPYVAPLEVLVNYSG

SEQ ID NO: 49462 - protein, 69 aa, Homo sapiens
  MOD_RES (1)..(1): Any amino acid
XALSSQVATRARRRCPGLADDSPSAYGAGAKLLWVDCTGPHARHQPHLLDPLYTGPGSFLVHQPSLQVV

SEQ ID NO: 49463 - protein, 1915 aa, Homo sapiens
MVVSKGGCLALMLPRLGTQNSRRQRNIDVCTDPGHADTGASNFVSPEHLTSGPQHRKAAWSGGVKLRLKHRRSEPAGRPHSWHTTKSGEKQPDASMMQISQGMIGPPWHQSYHSSSSTSDLSNYDHAYLRRSPDQCSSQGSMESLEPSGAYPPCHLSPAKSTGSIDQLSHFHNKRDSAYSSFSTSSSILEYPHPGISGRERSGSMDNTSARGGLLEGMRQADIRYVKTVYDTRRGVSAEYEVNSSALLLQGREARASANGQGYDKWSNIPRGKGVPPPSWSQQCPSSLETATDNLPPKVGAPLPPARSDSYAAFRHRERPSSWSSLDQKRLCRPQANSLGSLKSPFIEEQLHTVLEKSPENSPPVKPKHNYTQKAQPGQPLLPTSIYPVPSLEPHFAQVPQPSVSSNGMLYPALAKESGYIAPQGACNKMATIDENGNQNGSGRPGFAFCQPLEHDLLSPVEKKPEATAKYVPSKVHFCSVPENEEDASLKRHLTPPQGNSPHSNERKSTHSNKPSSHPHSLKCPQAQAWQAGEDKRSSRLSEPWEGDFQEDHNANLWRRLEREGLGQSLSGNFGKTKSAFSSLQNIPESLRRHSSLELGRGTQEGYPGGRPTCAVNTKAEDPGRKAAPDLGSHLDRQVSYPRPEGRTGASASFNSTDPSPEEPPAPSHPHTSSLGRRGPGPGSASALQGFQYGKPHCSVLEKVSKFEQREQGSQRPSVGGSGFGHNYRPHRTVSTSSTSGNDFEETKAHIRFSESAEPLGNGEQHFKNGELKLEEASRQPCGQQLSGGASDSGRGPQRPDARLLRSQSTFQLSSEPEREPEWRDRPGSPESPLLDAPFSRAYRNSIKDAQSRVLGATSFRRRDLELGAPVASRSWRPRPSSAHVGLRSPEASASASPHTPRERHSVTPAEGDLARPVPPAARRGARRRLTPEQKKRSYSEPEKMNEVGIVEEAEPAPLGPQRNGMRFPESSVADRRRLFERDGKACSTLSLSGPELKQFQQSALADYIQRKTGKRPTSAAGCSLQEPGPLRERAQSAYLQPGPAALEGSGLASASSLSSLREPSLQPRREATLLPATVAETQQAPRDRSSSFAGGRRLGERRRGDLLSGANGGTRGTQRGDETPREPSSWGARAGKSMSAEDLLERSDVLAGPVHVRSRSSPATADKRQDVLLGQDSGFGLVKDPCYLAGPGSRSLSCSERGQEEMLPLFHHLTPRWGGSGCKAIGDSSVPSECPGTLDHQRQASRTPCPRPPLAGTQGLVTDTRAAPLTPIGTPLPSAIPSGYCSQDGQTGRQPLPPYTPAMMHRSNGHTLTQPPGPRGCEGDGPEHGVEEGTRKRVSLPQWPPPSRAKWAHAAREDSLPEESSAPDFANLKHYQKQQSLPSLCSTSDPDTPLGAPSTPGRISLRISESVLRDSPPPHEDYEDEVFVRDPHPKATSSPTFEPLPPPPPPPPSQETPVYSMDDFPPPPPHTVCEAQLDSEDPEGPRPSFNKLSKVTIARERHMPGAAHVVGSQTLASRLQTSIKGSEAESTPPSFMSVHAQLAGSLGGQPAPIQTQSLSHDPVSGTQGLEKKVSPDPQKSSEDIRTEALAKEIVHQDKSLADILDPDSRLKTTMDLMEGLFPRDVNLLKENSVKRKAIQRTVSSSGCEGKRNEDKEAVSMLVNCPAYYSVSAPKAELLNKIKEMPAEVNEEEEQADVNEKKAELIGSLTHKLETLQEAKGSLLTDIKLNNALGEEVEALISELCKPNEFDKYRMFIGDLDKVVNLLLSLSGRLARVENVLSGLGEDASNEERSSLYEKRKILAGQHEDARELKENLDRRERVVLGILANYLSEEQLQDYQHFVKMKSTLLIEQRKLDDKIKLGQEQVKCLLESLPSDFIPKAGALALPPNLTSEPIPAGGCTFSGIFPTLTSPL

SEQ ID NO: 49464 - protein, 51 aa, Homo sapiens
RLQPSSCHQVFMSGLWYNSTWLQLHGTSLRDAKQGLTLPPRLECSGTIITH

SEQ ID NO: 49465 - protein, 59 aa, Homo sapiens
MGNLQSEPSAGGGSRKVQPSDRAPDSRRTSLVEPEMTSQAMRLTRGLGVWFPGSATPPG

SEQ ID NO: 49466 - protein, 441 aa, Homo sapiens
MAPWPPKGLVPAMLWGLSLFLNLPGPIWLQPSPPPQSSPPPQPHPCHTCRGLVDSFNKGLERTIRDNFGGGNTAWEEENLSKYKDSETRLVEVLEGVCSKSDFECHRLLELSEELVESWWFHKQQEAPDLFQWLCSDSLKLCCPAGTFGPSCLPCPGGTERPCGGYGQCEGEGTRGGSGHCDCQAGYGGEACGQCGLGYFEAERNASHLVCSACFGPCARCSGPEESNCLQCKKGWALHHLKCVDIDECGTEGANCGADQFCVNTEGSYECRDCAKACLGCMGAGPGRCKKCSPGYQQVGSKCLGESPADGTQAPGSASPSMNDVDECETEVCPGENKQCENTEGGYRCICAEGYKQMEGICVKEQIPGAFPILTDLTPETTRRWKLGSHPHSTYVKMKMQRDEATFPGLYGKQVAKLGSQSRQSDRGTRLIHSQQASSQR

SEQ ID NO: 49467 - protein, 2988 aa, Homo sapiens
MVVSAGPWSSEKAEMNILEINETLRPQLAEKKQQFRNLKEKCFLTQLAGFLANQQKKYKYEECKDLIKFMLRNERQFKEEKLAEQLKQAEELRQYKVLVHSQERELTQLREKLREGRDASRSLYEHLQALLTPYEPDKSQGQDLQEQLAEGCRLAQHLVQKLSPENDEDEDEDVQVEEAEKVLESSAPREVQKAEESKVPEDSLEECAITCSNSHGPCDSNQPHKNIKITFEEDEVNSTLVVDRESSHDECQDALNILPVPGPTSSATNVSMVVSAGPLSSEKAEMNILEINEKLRPQLAEKKQQFRNLKEKCFLTQLSGFLANQQKKYKYEECKDLIKFMLRNERQFKEEKLAEQLKQAEELRQYKVLVHAQERELTQLREKLREGRDASRSLNEHLQALLTPDEPDKSQGQDLQEQLAEGCRLAQHLVQKLSPENDNDDDEDVQVEVAEKVQKSSAPREMQKAEEKEVPEDSLEECAITYSNSHGSYDSNQPHRKTKITFEEDKVDSTLIGSSSHVEWEDAVHIIPENESDDEEEEEKGPVSPRNLQESEEEEVPQESWDEGYSTLSIPPEMLASYQSYSSTFHSLEEQQVCMAVDIGRHRWDQVKKEDQEATGPRLSRELLDEKGPEVLQDSLDRCYSTPSGCLELTDSCQPYRSAFYVLEQQRVGLAVDMDEIEKYQEVEEDQDPSCPRLSRELLDEKEPEVLQDSLDRCYSTPSGYLELPDLGQPYSSAVYSLEEQYLGLALDVDRIKKDEEEEEDQDPPCPRLSRELLEVVEPEVLQDSLDRCYSTPSSCLEQPDSCQPYGSSFYALEEKHVGFSLDVGEIEKKGKGKKRRGRRSKKERRRGRKEGEEDQNPPCPRLSRELLDEKEPEVLQDSLDRCYSTPSGYLELPDLGQPYSSAVYSLEEQYLGLALDVDRIKKDEEEEEDQDPPCPRLSRELLEVVEPEVLQDSLDRCYSTPSSCLEQPDSCQPYGSSFYALEEKHVGFSLDVGEIEKKGKGKKRRGRRSKKERRRGRKEGEEDQNPPCPRLSRELLDEKGPEVLQDSLDRCYSTPSGCLELTDSCQPYRSAFYVLEQQRVGLAVDMDEIEKYQEVEEDQDPSCPRLSRELLDEKEPEVLQDSLDRCYSTPSGYLELPDLGQPYSSAVYSLEEQYLGLALDVDRIKKDEEEEEDQDPPCPRLSRELLEVVEPEVLQDSLDRCYSTPSSCLEQPDSCQPYGSSFYALEEKHVGFSLDVGEIEKKGKGKKRRGRRSKKERRRGRKEGEEDQNPPCPRLSRELLDEKGPEVLQDSLDRCYSTPSGCLELTDSCQPYRSAFYVLEQQRVGLAVDMDEIEKYQEVEEDQDPSCPRLSRELLDEKEPEVLQDSLDRCYSTPSGYLELPDLGQPYSSAVYSLEEQYLGLALDVDRIKKDEEEEEDQDPPCPRLSRELLEVVEPEVLQDSLDRCYSTPSSCLEQPDSCQPYGSSFYALEEKHVGFSLDVGEIEKKGKGKKRRGRRSKKERRRGRKEGEEDQNPPCPRLSRELLHEKGPEVLQDSLDRCYSTPSGCLELTDSCQPYRSAFYILEQQRVGLAVDMDEIEKYKEVEEDQDPSCPRLSRELLDEKEPEVLQDSLDRCYSTPSGYLELPDLGQPYSSAVYSLEEQYLGLALDVDRFKKDEEEEEDQDPPCPRLSRELLEVVEPEVLQDSLDRCYSTPSSCLEQPDSCQPYGSSFYALEEKHVGFSLDVGEIEKKGKGKKRRGRRSKKERRRGRKEGEEDQNPPCPRLSRELLDEKGPEVLQDSLDRCYSTPSGCLELTDSCQPYRSAFYVLEQQRVGLAVDMDEIEKYKEVEEDQDPSCPRLSRELLDEKEPEVLQDSLDRCYSTPSGYLELPDLGQPYSSAVYSLEEQYLGLALDVDRIKKDQEEEEDQGPPCPRLSRELLEVVEPEVLQDSLDRCYSTPSSCLEQPDSCQPYGSSFYALEEKHVGFSLDVGEIEKKGKGKKRRGRRSKKERRRGRKEGEEDQNPPCPRLSRELLDEKGPEVLQDSLDRCYSTPSGCLELTDSCQPYRSAFYVLEQQRVGLAVDMDEIEKYKEVEEDQDPSCPRLSRELLDEKEPEVLQDSLDRCYSTPSGYLELPDLGQPYSSAVYSLEEQYLGLALDVDRIKKDQEEEEDQGPPCPRLSRELLEVVEPEVLQDSLDRCYSTPSSCLEQPDSCQPYGSSFYALEEKHVGFSLDVGEIEKKGKGKKRRGRRSKKERRRGRKEGEEDQNPPCPRLSRELLDEKGPEVLQDSLDRCYSTPSGCLELTDSCQPYRSAFYVLEQQRVGLAVDMDEIEKYKEVEEDQDPSCPRLSRELLDEKEPEVLQDSLDRCYSTPSGYLELPDLGQPYSSAVYSLEEQYLGLALDVDRIKKDQEEEEDQGPPCPRLSRELLEVVEPEVLQDSLDRCYSTPSSCLEQPDSCQPYGSSFYALEEKHVGFSLDVGEIEKKGKGKKRRGRRSKKERRRGRKEGEEDQNPPCPRLSRELLDEKGPEVLQDSLDRCYSTPSGCLELTDSCQPYRSAFYVLEQQRVGLAVDMDEIEKYKEVEEDQDPSCPRLSRELLDEKEPEVLQDSLDRCYSTPSGYLELPDLGQPYSSAVYSLEEQYLGLALDVDRIKKDQEEEEDQGPPCPRLSRELLEVVEPEVLQDSLDRCYSTPSSCLEQPDSCQPYGSSFYALEEKHVGFSLDVGEIEKKGKGKKRRGRRSKKERRRGRKEGEEDQNPPCPRLSRELLDEKGPEVLQDSLDRCYSTPSGCLELTDSCQPYRSAFYVLEQQRVGLAVDMDEIEKYQEVEEDQDPSCPRLSRELLDEKDPEVLQDSLDRCYSTPSGYLELPDLGQPYSSAVYSLEEQYLGLALDVDKIEKKGKGKKRRGRRSKKERRRGRKEGEEDQNPPCPRLNGVLMEVEEREVLQDSLDRCYSTPSMYFELPDSFQHYRSVFYSFEEQHISFALYVDNRFFTLTVTSLHLVFQMGVIFPQ

SEQ ID NO: 49468 - protein, 85 aa, Homo sapiens
MEDGFSSYSSLYDTSSLLQFCNDDSASAASSMEVTDRIASLEQRVQMQEDDIQLLKSALADVVRRLNITEEQQAVLNRKGPTKDH

SEQ ID NO: 49469 - protein, 446 aa, Homo sapiens
MARRPRHSIYSSDEDDEDFEMCDHDYDGLLPKSGKRHLGKTRWTREEDEKLKKLVEQNGTDDWKVIANYLPNRTDVQCQHRWQKVLNPELIKGPWTKEEDQRVIELVQKYGPKRWSVIAKHLKGRIGKQCRERWHNHLNPEVKKTSWTEEEDRIIYQAHKRLGNRWAEIAKLLPGRTDNAIKNHWNSTMRRKVEQEGYLQESSKASQPAVATSFQKNSHLMGFAQAPPTAQLPATGQPTVNNDYSYYHISEAQNVSSHVPYPVALHVNIVNVPQPAAAAIQRHYNDEDPEKEKRIKELELLLMSTENELKGQQTQNHTCSYPGWHSTTIADHTRPHGDSAPVSCLGEHHSTPSLPADPGSLPEESASPARCMIVHQGTILDNVKNLLEFAETLQFIDSFLNTSSNHENSDLEMPSLTSTPLIGHKLTVTTPFHRDQTVKTQKENTV

SEQ ID NO: 49470 - protein, 122 aa, Homo sapiens
MGMVVLLMGLVFASVYIYRYFFLAQLARDNFFRCGVLYEDSLSSQVRTQMELEEDVKIYLDENYERINVPVPQFGGGDPADIIHDFQRGLTAYHDISLDKCYVIELNTTIVLPPRNFWELLM

SEQ ID NO: 49471 - protein, 116 aa, Homo sapiens
MSGQTLTDRIAAAQYSVTGSAVARAVCKATTHEVMGPKKKHLDYLIQATNETNVNIPQMADTLFERATNSSWVVVFKALVTTHHLMVHGNERFIQYLASRNTLFNLSNFLDKSGSH

SEQ ID NO: 49472 - protein, 217 aa, Homo sapiens
MDTTRYSKWGGSSEEVPGGPWGRWVHWSRRPLFLALAVLVTTVLWAVILSILLSKASTERAALLDGHDLLRTNASKQTAALGALKEEVGDCHSCCSGTQAQLQTTRAELGEAQAKLMEQESALRELRERVTQGLAEAGRGREDVRTELFRALEAVRLQNNSCEPCPTSWLSFEGSCYFFSVPKTTWAAAQDHCADASAHLVIVGGLDEQPLEPGRAQ

SEQ ID NO: 49473 - protein, 278 aa, Homo sapiens
MLMKRLAARCFAGLLILSPLTVISDSRPADSGKAIEDGNLEEMEEEVRLKKRKRRRNVDKDPAKEDVEKAKKRRGRPPAEKLSPNPPKLTKQMNAIIDTVINYKDSSGRQLSEVFIQLPSRKELPEYYELIRKPVDFKKIKERIRNHKYRSLGDLEKDVMLLCHNAQTFNLEGSQIYEDSIVLQSVFKSARQKIAKEEESEDESNEEEEEEDEEESESEAKSVKVKIKLNKKDDKGRDKGKGKKRPNRGKAKPVVSDFDSDEEQDEREQSEGSGTDDE

SEQ ID NO: 49474 - protein, 1567 aa, Homo sapiens
ILGAAGGFSHALGYLQGNTLLIETENLRKSAKAAVPTVSDQAAAMQLSQCAKNLATSLAELRTASQKAHEACGPMEIDSALNTVQTLKNELQDAKMAAVESQLKPLPGETLEKCAQDLGSTSKAVGSSMAQLLTCAAQGNEHYTGVAARETAQALKTLAQAARGVAASTTDPAAAHAMLDSARDVMEGSAMLIQEAKQALIAPGDAERQQRLAQVAKAVSHSLNNCVNCLPGQKDVDVALKSIGESSKKLLVDSLPPSTKPFQEAQSELNQAAADLNQSAGEVVHATRGQSGELAAASGKFSDDFDEFLDAGIEMAGQAQTKEDQIQVIGNLKNISMASSKLLLAAKSLSVDPGAPNAKNLLAAAARAVTESINQLITLCTQQAPGQKECDNALRELETVKGMLDNPNEPVSDLSYFDCIESVMENSKVLGESMAGISQNAKTGDLPAFGECVGIASKALCGLTEAAAQAAYLVGISDPNSQAGHQGLVDPIQFARANQAIQMACQNLVDPGSSPSQVLSAATIVAKHTSALCNACRIASSKTANPVAKRHFVQSAKEVANSTANLVKTIKALDGDFSEDNRNKCRIATAPLIEAVENLTAFASNPEFVSIPAQISSEGSQAQEPILVSAKTMLESSSYLIRTARSLAINPKDPPTWSVLAGHSHTVSDSIKSLITSIRDKAPGQRECDYSIDGINRCIRDIEQASLAAVSQSLATRDDISVEALQEQLTSVVQEIGHLIDPIATAARGEAAQLGHKVTQLASYFEPLILAAVGVASKILDHQQQMTVLDQTKTLAESALQMLYAAKEGGGNPKAQHTHDAITEAAQLMKEAVDDIMVTLNEAASEVGLVGGMVDAIAEAMSKLDEGTPPEPKGTFVDYQTTVVKYSKAIAVTAQEMMTKSVTNPEELGGLASQMTSDYGHLAFQGQMAAATAEPEEIGFQIRTRVQDLGHGCIFLVQKAGALQVCPTDSYTKRELIECARAVTEKVSLVLSALQAGNKGTQACITAATAVSGIIADLDTTIMFATAGTLNAENSETFADHRENILKTAKALVEDTKLLVSGAASTPDKLAQAAQSSAATITQLAEVVKLGAASLGSDDPETQVVLINAIKDVAKALSDLISATKGAASKPVDDPSMYQLKGAAKVMVTNVTSLLKTVKAVEDEATRGTRALEATIECIKQELTVFQSKDVPEKTSSPEESIRMTKGITMATAKAVAAGNSCRQEDVIATANLSRKAVSDMLTACKQASFHPDVSDEVRTRALRFGTECTLGYLDLLEHVLVILQKPTPEFKQQLAAFSKRVAGAVTELIQAAEAMKGTEWVDPEDPTVIAETELLGAAASIEAAAKKLEQLKPRAKPKQADETLDFEEQILEAAKSIAAATSALVKSASAAQRELVAQGKVGSIPANAADDGQWSQGLISAARMVAAATSSLCEAANASVQGHASEEKLISSAKQVAASTAQLLVACKVKADQDSEAMRRLQAAGNAVKRASDNLVRAAQKAAFGKADDDDVVVKTKFVGGIAQIIAAQEEMLKKERELEEARKKLAQIRQQQYKFLPTELREDEG

SEQ ID NO: 49475 - protein, 191 aa, Homo sapiens
SRSTAVMPKVSLATEATRSKDDSDKENVCLLPDESIQKGQFVGDGTSNTIESHPKDSLHSCDHPLAEKTQNFLQDPVWNYSVHLFTVSTLDDVKNSGSIRDNYVRTSEISAVHIDTECVSVMLQAGTPPLQVNEEKFPAEKARIENEMDPSDISNSMAEVLAKKEELADRLEKANEEAIASAIAEEEQLTR

SEQ ID NO: 49476 - protein, 971 aa, Homo sapiens
MDSKKRSSTEAEGSKERGLVHIWQAGSFPITPERLPGWGGKTVLQAALGVKHGVLLTEDGEVYSFGTLPWRSGPVEICPSSPILENALVGQYVITVATGSFHSGAVTDNGVAYMWGENSAGQCAVANQQYVPEPNPVSIADSEASPLLAVRILQLACGEEHTLALSISREIWAWGTGCQLGLITTAFPVTKPQKVEHLAGRVVLQVACGAFHSLALVQCLPSQDLKPVPERCNQCSQLLITMTDKEDHVIISDSHCCPLGVTLTESQAENHASTALSPSTETLDRQEEVFENTLVANDQSVATELNAVSAQITSSDAMSSQQNVMGTTEISSARNIPSYPDTQAVNEYLRKLSDHSVREDSEHGEKPVPSQPLLEEAIPNLHSPPTTSTSALNSLVVSCASAVGVRVAATYEAGALSLKKVMNFYSTTPCETGAQAGSSAIGPEGLKDSREEQVKQESMQGKKSSSLVDIREEETEGGSRRLSLPGLLSQVSPRLLRKAARVKTRTVVLTPTYSGEADALLPSLRTEVWTWGKGKEGQLGHGDVLPRLQPLCVKCLDGKEVIHLEAGGYHSLALTAKSQVYSWGSNTFGQLGHSDFPTTVPRLAKISSENGVWSIAAGRDYSLFLVDTEDFQPGLYYSGRQDPTEGDNLPENHSGSKTPVLLSCSKLGYISRVTAGKDSYLALVDKNIMGYIASLHELATTERRFYSKLSDIKSQILRPLLSLENLGTTTTVQLLQEVASRFSKLCYLIGQHGASLSSFLHGVKEARSLVILKHSSLFLDSYTEYCTSITNFLVMGGFQLLAKPAIDFLNKNQELLQDLSEVNDENTQLMEILNTLFFLPIRRLHNYAKVLLKLATCFEVASPEYQKLQDSSSCYECLALHLGRKRKEAEYTLGFWKTFPGKMTDSLRKPERRLLCESSNRALSLQHAGRFSVNWFILFNDALVHAQFSTHHVFPLATLWAEPLSEEAGGV

SEQ ID NO: 49477 - protein, 215 aa, Homo sapiens
MVMVANKKSQDQMTEDLSLFLGNNTIRFTVWLHGVLDKLRSVTTEPSSLKSSDTNIFDSNVPSNKSNFSRGDERRHEAAVPPLAIPSARPEKRDSRVSTSSQESKTTNVRQTYDDGAATRLMSTVKPLREPAPSEDVIDIKPEPDDLIDEDLNFVQENPLSQKKPTVTLTYGSSRPSIEIYRPPASRNADSGVHLNRLQFQQQQNSIHAAKQLDM

SEQ ID NO: 49478 - protein, 129 aa, Homo sapiens
MTDCLVIKHFLRKIIMVHPKVRFHFSVKVNGILSTEIFGVENEPTLNLGNGIALLVDSQHYVSRPNFGTIESHCSRIHPVLGHPVMLFIPEDVAGMDLLGELILTPAAALCPSPKVSSNQLNRISSVSI

SEQ ID NO: 49479 - protein, 188 aa, Homo sapiens
  MOD_RES (1)..(1): Any amino acid
XGNKQHLQKDFFLYNASKARSKTYINMREVSQRFRLPPSEYVIVPSTYEPHQEGEFILRVFSEKRNLSEEVENTISVDRPVKKKKTKPIIFVSDRANSNKELGVDQESEEGKGKTSPDKQKQSPQFSFVPPQPQPGSSDQESEEQQQFRNIFKQIAGDDMEICADELKKVLNTVVNKHKDLKTHGFTL

SEQ ID NO: 49480 - protein, 641 aa, Homo sapiens
MYGFVNHALELLVIRNYGPEVWEDIKKEAQLDEEGQFLVRIIYDDSKTYDLVAAASKVLNLNAGEILQMFGKMFFVFCQESGYDTILRVLGSNVREFLQKNESKHISDLHHCFLGIYLCCNNLDALHDHLATIYPGMRAPSFRCTDAEKGKGLILHYYSEREGLQDIVIGIIKTVAQQIHGTEIDMKVIQQRNEECDHTQFLIEEKESKEEDFYEDLDRFEENGTQESRISPYTFCKAFPFHIIFDRDLVVTQCGNAIYRVLPQLQPGNCSLLSVFSLVRPHIDISFHGILSHINTVFVLRSKEGLLDVEKLECEDELTGTEISCLRLKGQMIYLPEADSILFLCSPSVMNLDDLTRRGLYLSDIPLHDATRDLVLLGEQFREEYKLTQELEILTDRLQLTLRALEDEKKKTDTLLYSVLPPSVANELRHKRPVPAKRYDNVTILFSGIVGFNAFCSKHASGEGAMKIVNLLNDLYTRFDTLTDSRKNPFVYKVETVGDKYMTVSGLPEPCIHHARSICHLALDMMEIAGQVQVDGESVQITIGIHTGEVVTGVIGQRMPRYCLFGNTVNLTSRTETTGEKGKINVSEYTYRCLMSPENSDPQFHLEHRGPVSMKGKKEPMQVWFLSRKNTGTEETKQDDD

SEQ ID NO: 49481 - protein, 50 aa, Homo sapiens
DVAADSQEELQDWVKKIREVAQTADARRLAQNVLATGTCHPSRKPRLRNT

SEQ ID NO: 49482 - protein, 117 aa, Homo sapiens
MAFSGRARPCIIPENEEIPRAALNTVHEANGTEDERAVSKLQRRHSDVKVYKEFCDFYAKFNMANALASATCERCKGGFAPAEKIVNSNGELYHEQCFVCAQCFQQFPEGLFYEERT

SEQ ID NO: 49483 - protein, 137 aa, Homo sapiens
MHKEEHEVAVLGPPPSTILPRSTVINIHSETSVPDHVVWSLFNTLFLNWCCLGFIAFAYSVKVRMALAEIQGVPSRDRKMVGDVTGAQAYASTAKCLNIWALILGILMTIGFILLLVFGSVTVYHIMLQIIQEKRGY

SEQ ID NO: 49484 - protein, 70 aa, Homo sapiens
MLKEHPEMAEAPQQQLGIPVVKLEKELPWGRGREDPSPETFRLRFRQFRYQEAAGPQEALRELQELCRRW

SEQ ID NO: 49485 - protein, 148 aa, Homo sapiens
  MOD_RES (1)..(1): Any amino acid
XGRLSHVVLDQKGDQHRESPRGHWTLQLSVYCSQAVLVDRTIYISGQIGMDPSSGQLVSGGVAEEAKQALKNMGEILKAAGCDFTNVVKTTVLLADINDFNTVNEIYKQYFKSNFPARAAYQVAALPKGSRIEIEAVAIQGPLTTASL

SEQ ID NO: 49486 - protein, 393 aa, Homo sapiens
MAQPPRLSRSGASSLWDPASPAPTSGPRPRLWEGQDVLARWTDGLLYLGTIKKVDSAREVCLVQFEDDSQFLVLWKDISPAALPGEELLCCVCRSETVVPGNRLVSCEKCRHAYHQDCHVPRAPAPGEGEGTSWVCRQCVFAIATKRGGALKKGPYARAMLGMKLSLPYGLKGLDWDAGHLSNRQQSYCYCGGPGEWNLKMLQCRSCLQWFHEACTQCLSKPLLYGDRFYEFECCVCRGGPEKVRRLQLRWVDVAHLVLYHLSVCCKKKYFDFDREILPFTSENWDSLLLGELSDTPKGERSSKLLSALNSHKDRFISGREIKKRKCLFGLHARMPPPVEPPTGDGALTSFPSGQGPGGGVSRPLGKRRRPEPEPLRRRQKGKVEELGPPSAP

SEQ ID NO: 49487 - protein, 124 aa, Homo sapiens
MNESHKSEFIELRKWLKARKFQDSNLAPACFPGTGRGLMSQTSLQEGQMIISLPESCLLTTDTVIRSYLGAYITKWKPPPSPLLALCTFLVSEKHAGHRSLWKPYLEILPKAYTCPVCLEPEVV

SEQ ID NO: 49488 - protein, 138 aa, Homo sapiens
ADCDGFKIPILGVHLKDLIAVHVIFPDWTEENKVNIVKMHQLSVTLSELVSLQNASHHLEPNMDLINLLTLSLDLYHTEDDIYKLSLVLEPRNSKSQPTSPTTPNKPVVPLEWALGVMPKPDPTVINKHIRKLVEVSG

SEQ ID NO: 49489 - protein, 549 aa, Homo sapiens
MKRKFYSWDECMNLREVKSLKKLNHANVIKLKEVIRENDHLYFIFEYMKENLYQLMKDRNKLFPESVIRNIMYQILQGLAFIHKHGFFHRDMKPENLLCMGPELVKIADFGLARELRSQPPYTDYVSTRWYRAPEVLLRSSVYSSPIDVWAVGSIMAELYMLRPLFPGTSEVDEIFKICQVLGTPKKSDWPEGYQLASSMNFRFPQCVPINLKTLIPNASNEAIQLMTEMLNWDPKKRPTASQALKHPYFQVGQVLGPSSNHLESKQSLNKQLQPLESKPSLVEVEPKPLPDIIDQVVGQPQPKTSQQPLQPIQPPQNLSVQQPPKQQSQEKPPQTLFPSIVKNMPTKPNGTLSHKSGRRRWGQTIFKSGDSWEELEDYDFGASHSKKPSMGVFKEKRKKDSPFRLPEPVPSGSNHSTGENKSLPAVTSLKSDSELSTAPTSKQYYLKQSRYLPGVNPKKVSLIASGKEINPHTWSNQLFPKSLGPVGAELAFKRSNAEYTWNTKTGRGQFSGRTYNPTAKNLNIVNRAQPIPSVHGRTDWVAKYGGHR

SEQ ID NO: 49490 - protein, 571 aa, Homo sapiens
MTLLHYTCKSGAHGIGDVETAVKFATQLIDLGADISLRSRWTNMNALHYAAYFDVPELIRVILKTSKPKDVDATCSDFNFGTALHIAAYNLCAGAVKCLLEQGANPAFRNDKGQIPADVVPDPVDMPLEMADAAATAKEIKQMLLDAVPLSCNISKAMLPNYDHVTGKAMLTSLGLKLGDRVVIAGQKVGTLRFCGTTEFASGQWAGIELDEPEGKNNGSVGKVQYFKCAPKYGIFAPLSKISKAKGRRKNITHTPSTKAAVPLIRSQKIDVAHVTSKVNTGLMTSKKDSASESTLSLPPGEELKTVTEKDVALLGSVSSCSSTSSLEHRQSYPKKQNAISSNKKTMSKSPSLSSRASAGLNSSATSTANNSRCEGELRLGERVLVVGQRLGTIRFFGTTNFAPGYWYGIELEKPHGKNDGSVGGVQYFSCSPRYGIFAPPSRVQRVTDSLDTLSEISSNKQNHSYPGFRRSFSTTSASSQKEINRRNAFSKSKAALRRSWSSTPTAGGIEGSVKLHEGSQVLLTSSNEMGTVSMFRITGMLVLLFHATTQEPSAAMKLAKSNCVFFRDSF

SEQ ID NO: 49491 - protein, 284 aa, Homo sapiens
MYFLTPILVAILCILVVWIFKNADRSMEKKKGEPRTRAEARPWVDEDLKDSSDLHQAEEDADEWQESEENVEHIPFSHNHYPEKEMVKRSQEFYELLNKRRSVRFISNEQVPMEVIDNVIRTAGTAPSGAHTEPWTFVVVKDPDVKHKIRKIIEEEEEINYMKRMGHRWVTDLKKLRTNWIKEYLDTAPILILIFKQVHGFAANGKKKVHYYNEISVSIACGILLAALQVNNGITMRHQTARHRHLIEGPGRSSEACSKLSSQGCPGASAAGSLFHFAIEFAAP

SEQ ID NO: 49492 - protein, 228 aa, Homo sapiens
MADQPKPISPLKNLLAGGFGGVCLVFVGHPLDTVKVRLQTQPPSLPGQPPMYSGTFDCFRKTLFREIQASSGESKYTGTLDCAKKLYQEFGIRGIYKGTVLTLMRDVPASGMYFMTYEWLKNIFTPEGKRVSELSAPRILVAGGIAGIFNWAVAIPPDVLKSRFQTAPPGKYPNGFRDVLRELIRDEGVTSLYKGFNAVMIRAFPANAACFLGFEVAMKFLNWATPNL

SEQ ID NO: 49493 - protein, 55 aa, Homo sapiens
MSQQRPARKLPSLLLDPTEETVRRRCRDPINVEGLLPSKIRINLEDNVQYVSMRM

SEQ ID NO: 49494 - protein, 17 aa, Homo sapiens
AVAGHELQAANPSACSC

SEQ ID NO: 49495 - protein, 72 aa, Homo sapiens
  MOD_RES (1)..(1): Any amino acid
XTFFAIIFFLMLITLGLDSTFAGLEGVITAVLDEFPHVWAKRRERFVLAVVITCFFGSLVTLTFASLSSAGT

SEQ ID NO: 49496 - protein, 179 aa, Homo sapiens
MKTLRLRKNTVKFSLYRHFKNTLIFAVLASIVFMGWTTKTFRIAKCQSDWMERWVDDAFWSFLFSLILIVIMFLWRPSANNQRYAFMPLIDDSDDEIEEFMVTSENLTEGIKLRASKSVSNGTAKPATSENFDEDLKWVEENIPSSFTDVALPVLVDSDEEIMTRSEMAEKMFSSEKIM

SEQ ID NO: 49497 - protein, 1810 aa, Homo sapiens
MARLEAPQCPGFLARLLGGTWCLLCIAGQVCGDQSQGAVFLREFTLIRRESLHEDFLSDLLNSHKTEDSSSRTARSEEDRDGLWDAWGPWSECSRTCGGGASYSLRRCLSSKSCEGRNIRYRTCSNVDCPPEAGDFRAQQCSAHNDVKHHGQFYEWLPVSNDPDNPCSLKCQAKGTTLVVELAPKVLDGTRCYTESLDMCISGLCQIVGCDHQLGSTVKEDNCGVCNGDGSTCRLVRGQYKSQLSATKSDDTVVAIPYGSRHIRLVLKGPDHLYLETKTLQGTKGENSLSSTGTFLVDNSSVDFQKFPDKEILRMAGPLTADFIVKIRNSGSADSTVQFIFYQPIIHRWRETDFFPCSATCGGGYQLTSAECYDLRSNRVVADQYCHYYPENIKPKPKLQECNLDPCPASDGYKQIMPYDLYHPLPRWEATPWTACSSSCGGGIQSRAVSCVEEDIQGHVTSVEEWKCMYTPKMPIAQPCNIFDCPKWLAQEWSPCTVTCGQGLRYRVVLCIDHRGMHTGGCSPKTKPHIKEECIVPTPCYKPKEKLPVEAKLPWFKQAQELEEGAAVSEEPSFIPEAWSACTVTCGVGTQVRIVRCQVLLSFSQSVADLPIDECEGPKPASQRACYAGPCSGEIPEFNPDETDGLFGGLQDFDELYDWEYEGFTKCSESCGGGVQEAVVSCLNKQTREPAEENLCVTSRRPPQLLKSCNLDPCPARWEIGKWSPCSLTCGVGLQTRDVFCSHLLSREMNETVILADELCRQPKPSTVQACNRFNCPPAWYPAQWQPCSRTCGGGVQKREVLCKQRMADGSFLELPETFCSASKPACQQACKKDDCPSEWLLSDWTECSTSCGEGTQTRSAICRKMLKTGLSTVVNSTLCPPLPFSSSIRPCMLATCARPGRPSTKHSPHIAAARKVYIQTRRQRKLHFVVGGFAYLLPKTAVVLRCPARRVRKPLITWEKDGQHLISSTHVTVAPFGYLKIHRLKPSDAGVYTCSAGPAREHFVIKLIGGNRKLVARPLSPRSEEEVLAGRKGGPKEALQTHKHQNGIFSNGSKAEKRGLAANPGSRYDDLVSRLLEQGGWPGELLASWEAQDSAERNTTSEEDPGAEQVLLHLPFTMVTEQRRLDDILGNLSQQPEELRDLYSKHLVAQLAQEIFRSHLEHQDTLLKPSERRTSPVTLSPHKHVSGFSSSLRTSSTGDAGGGSRRPHRKPTILRKISAAQQLSASEVVTHLGQTVALASGTLSVLLHCEAIGHPRPTISWARNGEEVQFSDRILLQPDDSLQILAPVEADVGFYTCNATNALGYDSVSIAVTLAGKPLVKTSRMTVINTEKPAVTVDIGSTIKTVQGVNVTINCQVAGVPEAEVTWFRNKSKLGSPHHLHEGSLLLTNVSSSDQGLYSCRAANLHGELTESTQLLILDPPQVPTQLEDIRALLAATGPNLPSVLTSPLGTQLVLDPGNSALLGCPIKGHPVPNITWFHGGQPIVTATGLTHHILAAGQILQVANLSGGSQGEFSCLAQNEAGVLMQKASLVIQDYWWSVDRLATCSASCGNRGVQQPRLRCLLNSTEVNPAHCAGKVRPAVQPIACNRRDCPSRWMVTSWSACTRSCGGGVQTRRVTCQKLKASGISTPVSNDMCTQVAKRPVDTQACNQQLCVEWAFSSWGQCNGPCIGPHLAVQHRQVFCQTRDGITLPSEQCSALPRPVSTQNCWSEACSVHWRVSLWTLCTATCGNYGFQSRRVECVHARTNKAVPEHLCSWGPRPANWQRCNITPCENMECRDTTRYCEKVKQLKLCQLSQFKSRCCGTCGKA

SEQ ID NO: 49498 - protein, 141 aa, Homo sapiens
  MOD_RES (1)..(1): Any amino acid
XKRVNLAQVDRPRVDIECAGKGVQSSLIHNYKKNPNFNTLVKWFEVDLPENELLHPPLNIRVVDCRAFGRYTLVGSHAVSSLRRFIYRPPDRSAPSWNTTGEVVVTMEPEVPIKKLETMVKLDAVRRVGSAPCWLGTCNFV

SEQ ID NO: 49499 - protein, 43 aa, Homo sapiens
MQTCPLAFPGHVSQALGTLLFLAASLSAQNEAACPRAGERHLQ

SEQ ID NO: 49500 - protein, 77 aa, Homo sapiens
GRPAGEEPPAQPPSPRGHKWEKNLALSRELDVSIALTGKPSKTSPAVTALAVSSSQGRASGNHSSAAQPSPWPMGLL

SEQ ID NO: 49501 - protein, 179 aa, Homo sapiens
  MOD_RES (1)..(1): Any amino acid
XPKKTGSSSTVDSKDEDHYSKCQDCIHRLGQVVRRKLGEDGIFLVLLGLLMALVSWSMDYVSAKSLQAYKWSYAQMQPSLPLQFLVWVTFPLVLILFSALFCHLISPQAVGSGIPEMKTILRGVVLKEYLTMKAFVAKVVALTAGLGSGIPVGKEPVPVLQMSTPLSPVAPHGDRAWAA

SEQ ID NO: 49502 - protein, 101 aa, Homo sapiens
MAGQGLPLHVATLLTGLLECLGFAGVLFGWPSLVFVFKNEDYFKDLCGPDAGPIGNATGQADCKAQDERFSLIFTLGSFMNNFMTFPTGYIFDRFKTTVAR

SEQ ID NO: 49503 - protein, 181 aa, Homo sapiens
MAAGIVASRRLRDLLTRRLTGSNYPGLSISLRLTGSSAQEEASGVALGEAPDHSYESLRVTSAQKHVLHVQLNRPNKRNAMNKVFWREMVECFNKISRDADCRAVVISGAGKMFTAGIDLMDMASDILQPKGDDVARISWYLRDIITRYQETFNVIERCPKPVIAAVHGGCIGGGESAAIL

SEQ ID NO: 49504 - protein, 96 aa, Homo sapiens
METLSSEESCDSFDSLESGKQQDVRFHSKYFTEELRRIFIEDTDSETEDFAGFTQSDLNGKTNPEVMVVESDLSDDGKASLVSEEEEDEEEDKATP

SEQ ID NO: 49505 - protein, 255 aa, Homo sapiens
MSFICGLQSAARNHVFFRFNSLSNWRKCNTLASTSRGCHQVQVNHIVNKYQGLGVNQCDRWSFLPGNFHFYSTFNNKRTGGLSSTKSKEIWRITSKCTVWNDAFSRQLLIKEVTAVPSLSVLHPLSPASIRAIRNFHTSPRFQAAPVPLLLMILKPVQKLFAIIVGRGIRKWWQALPPNKKEVVKENIRKNKWKLFLGLSSFGLLFVVFYFTHLEVSPITGRSKLLLLGKEQFRLLSELEYEAWMEEFKNDMLTE

SEQ ID NO: 49506 - protein, 561 aa, Homo sapiens
MATEHVNGNGTEEPMDTTSAVIHSENFQTLLDAGLPQKVAEKLDEIYVAGLVAHSDLDERAIEALKEFNEDGALAVLQQFKDSDLSHVQNKSAFLCGVMKTYRQREKQGTKVADSSKGPDEAKIKALLERTGYTLDVTTGQRKYGGPPPDSVYSGQQPSVGTEIFVGKIPRDLFEDELVPLFEKAGPIWDLRLMMDPLTGLNRGYAFVTFCTKEAAQEAVKLYNNHEIRSGKHIGVCISVANNRLFVGSIPKSKTKEQILEEFSKVTEGLTDVILYHQPDDKKKNRGFCFLEYEDHKTAAQARRRLMSGKVKVWGNVGTVEWADPIEDPDPEVMAKVKVLFVRNLANTVTEEILEKAFSQFGKLERVKKLKDYAFIHFDERDGAVKAMEEMNGKDLEGENIEIVFAKPPDQKRKERKAQRQAAKNQMYDDYYYYGPPHMPPPTRGRGRGGRGGYGYPPDYYGYEDYYDYYGYDYHNYRGGYEDPYYGYEDFQVGARGRGGRGARGAAPSRGRGAAPPRGRAGYSQRGGPGSARGVRGARGGAQQQRGRGGKGVEAGPDLLQ

SEQ ID NO: 49507 - protein, 1014 aa, Homo sapiens
KQSTPKRTKSYNDMQNAGIVHAENEEEDDVPEMNSSFTADSGEQEEHTLQETALPPVNSSIIAAPITDPSQKFPQYLPLSAEDNLGPLPENWEMAYTENGEVYFIDHNTKTTSWLDPRCLNKQQKPLEECEDDEGVHTEELDSELELPAGWEKIEDPVYGIYYVDHINRKTQYENPVLEAKRKKQLEQQQQQQQQQQQQQQQQQQQQTEEWTEDHSALVPPVIPNHPPSNPEPAREVPLQGKPFFTRNPSELKGKFIHTKLRKSSRGFGFTVVGGDEPDEFLQIKSLVLDGPAALDGKMETGDVIVSVNDTCVLGHTHAQVVKIFQSIPIGASVDLELCRGYPLPFDPDDPNTSLVTSVAILDKEPIIVNGQETYDSPASHSSKTGKVNGMKDARPSSPADVASNSSHGYPNDTVSLASSIATQPELITVHIVKGPMGFGFTIADSPGGGGQRVKQIVDSPRCRGLKEGDLIVEVNKKNVQALTHNQVVDMLVECPKGSEVTLLVQRGGLPVPKKSPKSQPLERKDSQNSSQHSVSSHRSLHTASPSHSTQVLPEFPPAEAQAPDQTDSSGQKKPDPFKIWAQSRSMYENRLPDYQEQDIFLWRKETGFGFRILGGNEPGEPIYIGHIVPLGAADTDGRLRSGDELICVDGTPVIGKSHQLVVQLMQQAAKQGHVNLTVRRKVVFAVPKTENEVPSPASSHHSSNQPASLTEEKRTPQGSQNSLNTVSSGSGSTSGIGSGGGGGSGVVSTVVQPYDVEIRRGENEGFGFVIVSSVSRPEAGTTFAGNACVAMPHKIGRIIEGSPADRCGKLKVGDRILAVNGCSITNKSHSDIVNLIKEAGNTVTLRIIPGDESSNATLLTNAEKIATITTTHTPSQQGTQETRNTTKPKQESQFEFKAPQATQEQDFYTVELERGAKGFGFSLRGGREYNMDLYVLRLAEDGPAERCGKMRIGDEILEINGETTKNMKHSRAIELIKNGGRRVRLFLKRGDGSVPEYGGSNYENIPSFPGMTP

SEQ ID NO: 49508 - protein, 208 aa, Homo sapiens
MNLMDGDSSTTDASQLGISADYIGGSHYVIQPHDDTEDSMNDHEDTNGSKESFREQDIYLPIANVARIMKNAIPQTGKIAKDAKECVQECVSEFISFITSEASERCHQEKRKTINGEDILFAMSTLGFDSYVEPLKLYLQKFREAMKGEKGIGGAVTATDGLSEELTEEAFTNQLPAGLITTDGQQQNVMVYTTSYQQISGVQQIQFS

SEQ ID NO: 49509 - protein, 178 aa, Homo sapiens
MLLILLSVALLALSSAESSSEDVSQEESLFLISGKPEGRRPQGGNQPQRPPPPPGKPQGPPPQGGNQSQGPPPPPGKPEGRPPQGGNQSQGPPPHPGKPERPPPQGGNQSQGKPQGPPQQEGNKPQGPPPPGKPQGPPPAGGNPQQPQAPPAGKPQGPPPPPQGGRPPRPAQGQQPPQ

SEQ ID NO: 49510 - protein, 255 aa, Homo sapiens
MDPTCSSECIYNLIPSDLKEPPQPPRYISIFKATVKDDMQKAKTAMKTMGPAKVEVPSPKDFLKKHSKEKTLPPKKNFDRNVPKKPAVPLKTDHPVMGIQSGKNFINTNAADIIMGVAKKPKPIYVDKRTGDKHDLEPSGLVPKYINKKDYGVTPEYICKRNEEIKKAQEDYDRYIQENLKKAAMKRLSDEEREAVLQGLKKNWEEVHKEFQSLSVFIDSIPKKIRKQRLEEEMKQLEHDIGIIEKHKIIYIANK

SEQ ID NO: 49511 - protein, 519 aa, Homo sapiens
MPGFHLITQLKGMSVVLVLLPTLLLVMLTGAQRACPKNCRCDGKIVYCESHAFADIPENISGGSQGLSLRFNSIQKLKSNQFAGLNQLIWLYLDHNYISSVDEDAFQGIRRLKELILSSNKITYLHNKTFHPVPNLRNLDLSYNKLQTLQSEQFKGLRKLIILHLRSNSLKTVPIRVFQDCRNLDFLDLGYNRLRSLSRNAFAGLLKLKELHLEHNQFSKINFAHFPRLFNLRSIYLQWNRIRSISQGLTWTWSSLHNLDLSGNDIQGIEPGTFKCLPNLQKLNLDSNKLTNISQETVNAWISLISITLSGNMWECSRSICPLFYWLKNFKGNKESTMICAGPKHIQGEKVSDAVETYNICSEVQVVNTERSHLVPQTPQKPLIIPRPTIFKPDVTQSTFETPSPSPGFQIPGAEQEYEHVSFHKIIAGSVALFLSVAMILLVIYVSWKRYPASMKQLQQHSLMKRRRKKARESERQMNSPLQEYYVDYKPTNSETMDISVNGSGPCTYTISGSRECEV

SEQ ID NO: 49512 - protein, 186 aa, Homo sapiens
MKRMLSLRDQRLKEKDRLKPKKKEKKDPSALKEREVPQHPSCLFFQYNTQLGPPYHILVDTNFINFSIKAKLDLVQSMMDCLYAKCIPCITDCVMAEIEKLGQKYRVALRIAKDPRFERLPCTHKGTYADDCLVQRVTQHKCYIVATVDRDLKRRIRKIPGVPIMYISNHRYNIERMPDDYGAPRF

SEQ ID NO: 49513 - protein, 117 aa, Homo sapiens
MSEGDSVGESVHGKPSVVYRFFTRLGQIYQSWLDKSTPYTAVRWVVTLGLSFVYMIRVYLLQMTVLRYPPNRTRNSAPSFEGSQSLNFGMRLPRASLWLWSVLSSTLSTSRCSGRFW

SEQ ID NO: 49514 - protein, 79 aa, Homo sapiens
MAPLLLQLAVLGAALAAAALVLISIVAFTTATKMPALHRHEEEKFFLNAKGQKETLPSIWDSPTKQLSVVVPSYNEEKR

SEQ ID NO: 49515 - protein, 179 aa, Homo sapiens
MAESSSESDHFRCRDRLSPWAARSTHRGTRSLPTVEVTEKVNTITSTLQDTSRNLRQVDQMLGRYREYSNGQAGAIEHLKESLEQSIDQLRSQRLLRNSGGRSISVTSLSASDLDGGTGSELHHFPPTSPLKDYGDPQGIKRMRSRTGVRFVQETDDMTQLHGFHQSLRDLSSEQIRLG

SEQ ID NO: 49516 - protein, 218 aa, Homo sapiens
MCDLRRPAAGGMMDLAYVCEWEKWSKSTHCPSVPLACAWSCRNLIAFTMDLRSDDQDLTRMIHILDTEHPWDLHSIPSEHHEAITCLEWDQSGSRLLSADADGQIKCWSMADHLANSWESSVGSLVEGDPIVALSWLHNGVKLALHVEKSGASSFGEKFSRVKFSPSPTEECKACTRCGCVTMLKSPNRTTAVKQWEQRWIKNCLCGGLWWRVPLSYP

SEQ ID NO: 49517 - protein, 425 aa, Homo sapiens
METGQRTHASGTYSFLDRTQHSDIKADCNTCVEIEDRKVSRQQMNCEREQLRGNQEAAAAPDTMAQPYASAQFAPPQNGIPAEYTAPHPHPAPEYTGQTTVPEHTLNLYPPAQTHSEQSPADTSAQTVSGTATQTDDAAPTDGQPQTQPSENTENKSQPKRLHVSNIPFRFRDPDLRQMFGQFGKILDVEIIFNERGSKGFGFVTFENSADADRAREKLHGTVVEGRKIEVNNATARVMTNKKTVNPYTNGWKLNPVVGAVYSPEFYAGTVLLCQANQEGSSMYSAPSSLVYTSAMPGFPYPAATAAAAYRGAHLRGRGRTVYNTFRAAAPPPPIPAYGGVVYQDGFYGADIYGGYAAYRYAQPTPATAAAYSDSYGRVYAADPYHHALAPAPTYGVGAMPQGSSPSTDFRGAKLHTSRPLLSGS

SEQ ID NO: 49518 - protein, 193 aa, Homo sapiens
MSQWYELQQLDSKFLEQVHQLYDDSFPMEIRQYLAQWLEKQDWEHAANDVSFATIRFHDLLSQLDDQYSRFSLENNFLLQHNIRKSKRNLQDNFQEDPIQMSMIIYSCLKEERKILENAQRFNQAQSGNIQSTVMLDKQKELDSKVRNVKDKVMCIEHEIKSLEDLQDEYDFKCKTLQNRGSSSQNNRVAECH

SEQ ID NO: 49519 - protein, 49 aa, Homo sapiens
MWDLVLSIALSVGCTGIARSGWVGTTCLSLKTQARGSLSATASHTRSTI

SEQ ID NO: 49520 - protein, 85 aa, Homo sapiens
MPYNEAENKRSYHLCDLCDRIIIGDREWAAHIKSKSHLNQLKKRRRLDSDAVNTIESQSVSPDHNKEPKEKGSPGQNDQELKCSV

SEQ ID NO: 49521 - protein, 256 aa, Homo sapiens
MGTRRKVLVLGSGYISEPVLEYLSRDGNIEITVGSDMKNQIEQLGKKYNINPVSMDICKQEEKLGFLVAKQDLVISLLPYVLHPLVAKACITNKVNMVTASYITPALKELEKSVEDAGITIIGELGLDPGLDHMLAMETIDKAKEVGATIESYISYCGGLPAPEHSNNPLRYKFSWSPVGVLMNVMQSATYLLDGKVVNVAGGISFLDAVTSMDFFPGLNLEGYPNRDSTKYAEIYGISSAHTLLRGTLRYKGLEC

SEQ ID NO: 49522 - protein, 107 aa, Homo sapiens
MSRPLLITFTPATDPSDLWKDGQQQPQPEKPESTLDGAAALAFYEALIGDESSAPDSQRSQTEPARERKRKKRRIMKAPAAEAVAEGASGRHGQGRSLEAEDKMTHR

SEQ ID NO: 49523 - protein, 152 aa, Homo sapiens
MPFTLHLRSRLPSAIRSLILQKKPNIRNTSSMAGELRPASLVVLPRSLAPAFERFCQVNTGPLPLLGQSEPEKWMLPPQGAISETRMGHPQFWKYEFGACTGSLASLEQYSEQLKDMVAFFLGCSFSLEEALEKAGLPRRDPAGHSQAGAYK

SEQ ID NO: 49524 - protein, 1608 aa, Homo sapiens
MEKKLLIKSKELQDSQDKCHKMEQEMTRLHRRVSEVEAVLSQKEVELKASETQRSLLEQDLATYITECSSLKRSLEQARMEVSQEDDKALQLLHDIREQSRKLQEIKEQEYQAQVEEMRLMMNQLEEDLVSARRRSDLYESELRESRLAAEEFKRKATECQHKLLKAKDQGKPEVGEYAKLEKINAEQQLKIQELQEKLEKAVKASTEATELLQNIRQAKERAERELEKLQNREDSSEGIRKKLVEAEERRHSLENKVKRLETMERRENRLKDDIQTKSQQIQQMADKILELEEKHREAQVSAQHLEVHLKQKEQHYEEKIKVLDNQIKKDLADKETLENMMQRHEEEAHEKGKILSEQKAMINAMDSKIRSLEQRIVELSEANKLAANSSLFTQRNMKAQEEMISELRQQKFYLETQAGKLEAQNRKLEEQLEKISHQDHSDKNRLLELETRLREVSLEHEEQKLELKRQLTELQLSLQERESQLTALQAARAALESQLRQAKTELEETTAEAEEEIQALTAHRDEIQRKFDALRNSCTVITDLEEQLNQLTEDNAELNNQNFYLSKQLDEASGANDEIVQLRSEVDHLRREITEREMQLTSQKQTMEALKTTCTMLEEQVMDLEALNDELLEKERQWEAWRSVLGDEKSQFECRVRELQRMLDTEKQSRARADQRITESRQVVELAVKEHKAEILALQQALKEQKLKAESLSDKLNDLEKKHAMLEMNARSLQQKLETERELKQRLLEEQAKLQQQMDLQKNHIFRLTQGLQEALDRADLLKTERSDLEYQLENIQVLYSHEKVKMEGTISQQTKLIDFLQAKMDQPAKKKKVPLQYNELKLALEKEKARCAELEEALQKTRIELRSAREEAAHRKATDHPHPSTPATARQQIAMSAIVRSPEHQPSAMSLLAPPSSRRKESSTPEEFSRRLKERMHHNIPHRFNVGLNMRATKCAVCLDTVHFGRQASKCLECQVMCHPKCSTCLPATCGLPAEYATHFTEAFCRDKMNSPGLQTKEPSSSLHLEGWMKVPRNNKRGQQGWDRKYIVLEGSKVLIYDNEAREAGQRPVEEFELCLPDGDVSIHGAVGASELANTAKADVPYILKMESHPHTTCWPGRTLYLLAPSFPDKQRWVTALESVVAGGRVSREKAEADAKLLGNSLLKLEGDDRLDMNCTLPFSDQVVLVGTEEGLYALNVLKNSLTHVPGIGAVFQIYIIKDLEKLLMIAGEERALCLVDVKKVKQSLAQSHLPAQPDISPNIFEAVKGCHLFGAGKIENGLCICAAMPSKVVILRYNENLSKYCIRKEIETSEPCSCIHFTNYSILIGTNKFYEIDMKQYTLEEFLDKNDHSLAPAVFAASSNSFPVSIVQVNSAGQREEYLLCFHEFGVFVDSYGRRSRTDDLKWSRLPLAFAYREPYLFVTHFNSLEVIEIQARSSAGTPARAYLDIPNPRYLGPAISSGAIYLASSYQDKLRVICCKGNLVKESGTEHHRGPSTSRSSPNKRGPPTYNEHITKRVASSPAPPEGPSHPREPSTPHRYREGRTELRRDKSPGRPLEREKSPGRMLSTRRERSPGRLFEDSSRGRLPAGAVRTPLSQVNKVWDQSSV

SEQ ID NO: 49525 - protein, 508 aa, Homo sapiens
MWPVLLFVFLSQTVYSALGLRDACRSLPQSIQLFRDIAQEFSDDLHHIASLIGKVVDFEGSLAENRFTVLPNIDPEIDEKKRRLMGLPSFLTEVARKELENLDSRIPSCSVIYIPLIGFLLSIPRLPSMVEASDFEINGLDFMFLSEEKLHYRSARTKELDALLGDLHCEIRDQETLLMYQLQCQVLARAAVLTRVLDLASRLDVLLALASAARDYGYSRPRYSPQVLGVRIQNGRHPLMELCARTFVPNSTECGGDKGRVKVITGPNSSGKSIYLKQVGLITFMALVGSFVPAEEAEIGAVDAIFTRIHSCESISLGLSTFMIDLNQVAKAVNNATAQSLVLIDEFGKGTNTVDGLALLAAVLRHWLARGPTCPHIFVATNFLSLVQLQLLPQGPLVQYLTMETCEDGNDLVFFYQVCEGVAKASHASHTAAQAGLPDKLVARGKEVSDLIRSGKPIKPVKDLLKKNQMENCQTLVDKFMKLDLEDPNLDLNVFMSQEVLPAATSIL

SEQ ID NO: 49526 - protein, 42 aa, Homo sapiens
MKWMFKEDHSLEHRCVESAKIRAKYPDRVPPNYGTALREGKR

SEQ ID NO: 49527 - protein, 576 aa, Homo sapiens
MLRSGPASGPSVPTGRAMPSRRVARPPAAPELGALGSPDLSSLSLAVSRSTEIIDEYIKENGFGLDGGQPGPGEGLPRLVSRGAASLSTVTLGPVAPPATPPPWGCPLGRLVSPAPGPGPQPHLVITEQPKQRGMRFRYECEGRSAGSILGESSTEASKTLPAIELRDCGGLREVEVTACLVWKDWPHRVHPHSLVGKDCTDGICRVRLRPHVSPRHSFNNLGIQCVRKKEIEAAIERKIQLGIDPYNAGSLKNHQEVDMNVVRICFQASYRDQQGQMRRMDPVLSEPVYDKKSTNTSELRICRINKESGPCTGGEELYLLCDKVQKEDISVVFSRASWEGRADFSQADVHRQIAIVFKTPPYEDLEIVEPVTVNVFLQRLTDGVCSEPLPFTYLPRDHDSYGVDKKRKRGMPDVLGELNSSDPHGIESKRRKKKPAILDHFLPNHGSGPFLPPSALLPDPDFFSGTVSLPGLEPPGGPDLLDDGFAYDPTAPTLFTMLDLLPPAPPHASAVVCSGGAGAVVGETPGPEPLTLDSYQAPGPGDGGTASLVGSNMFPNHYREAAFGGGLLSPGPEAT

SEQ ID NO: 49528 - protein, 121 aa, Homo sapiens
MSPTPPLFSLPEARTRFTKSTREALNNKNIKPLLSTFSQVPGSENEKKCTLDQAFRGILEEEIVFVPHLHLLYCWEMFWIVFLWISVTQYSLLWKKMLLLGNQIHSILLGKITYYVCAMIS

SEQ ID NO: 49529 - protein, 52 aa, Homo sapiens
MPQYQTWEEFSRAAEKLYLADPMKARVVLKYRHSDGNLCVKVTDDLVTKLKM

SEQ ID NO: 49530 - protein, 66 aa, Homo sapiens
MAVARAALGPLVTGLYDVQAFKFGDFVLKSGLSSPIYIDLRGIVSRPRLLSQMGSLLRHPGWSAAL

SEQ ID NO: 49531 - protein, 44 aa, Homo sapiens
MGLELYLDLLSQPCRAVYIFAKKNDIPFELRIVDLIKVWPSCST

SEQ ID NO: 49532 - protein, 159 aa, Homo sapiens
MDLAGLLKSQFLCHLVFCYVFIASGLIINTIQLFTLLLWPINKQLFRKINCRLSYCISSQLVMLLEWWSGTECTIFTDPRAYLKYGKENAIVVLNHKFEIDFLCGWSLSERFGLLGVSQKCIPPCLTHFSGSAPPLVFLLLVIQNLQKNQQSFYLMKWS

SEQ ID NO: 49533 - protein, 712 aa, Homo sapiens
MCVDSRSVLPDHFSPENANDTAKETCLNWFFKIASIRELIPRFYVEASILKCNKFLSKTGISECLPRLTCMIRGIGDPLVSVYARAYLCRVGMEVAPHLKETLNKNFFDFLLTFKQIHGDTVQNQLVVQGVELPSYLPLYPPAMDWIFQCISYHAPEALLTEMMERCKKLGNNALLLNSVMSAFRAEFIATRSMDFIGMIKECDESGFPKHLLFRSLGLNLALADPPESDRLQILNEAWKVITKLKNPQDYINCAEVWVEYTCKHFTKREVNTVLADVIKHMTPDRAFEDSYPQLQLIIKKVIAHFHDFSVLFSVEKFLPFLDMFQKESVRVEVCKCIMDAFIKHQQEPTKDPVILNALLHVCKTMHDSVNALTLEDEKRMLSYLINGFIKMVSFGRDFEQQLSFYVESRSMFCNLEPVLVQLIHSVNRLAMETRKVMKGNHSRKTAAFVRACVAYCFITIPSLAGIFTRLNLYLHSGQVALANQCLSQADAFFKAAISLVPEVPKMINIDGKMRPSESFLLEFLCNFFSTLLIVPDHPEHGVLFLVRELLNVIQDYTWEDNSDEKIRIYTCVLHLLSAMSQETYLYHIDKVDSNDSLYGGDSKFLAENNKLCETVMAQILEHLKTLAKDEALKRQSSLGLSFFNSILAHGDLRNNKLNQLSVNLWHLAQRHGCADTRTMVKTLEYIKKQSKQPDMTHLTELALRLPLQTRT

SEQ ID NO: 49534 - protein, 151 aa, Homo sapiens
MAAAAELSLLEKSLGLSKGNKYSAQGERQIPVLQTNNGPSLTGLTTIAAHLVKQANKEYLLGSTAEEKAIVQQWLEYRVTQVDGHSSKNDIHTLLKDLNSYLEDKVYLTGYNFTLADILLYYGLHRFIILEKFIQGFWITDQLFKVKLVIL

SEQ ID NO: 49535 - protein, 396 aa, Homo sapiens
MSRINKNVVLALLTLTSSAFLLFQLYYYKHYLSTKNGAGLSKSKGSRIGFDSTQWRAVKKFIMLTSNQNVPVFLIDPLILELINKNFEQVKNTSHGSTSQCKFFCVPRDFTAFALQYHLWKNEEGWFRIAENMGFQCLKIESKDPRLDGIDSLSGTEIPLHYICKLATHAIHLVVFHERSGNYLWHGHLRLKEHIDRKFVPFRKLQFGRYPGAFDRPELQQVTVDGLEVLIPKDPMHFVEEVPHSRFIECRYKEARAFFQQYLDDNTVEAVAFRKSAKELLQLAAKTLNKLGVPFWLSSGTCLGWYRQCNIIPYSKDVDLGIFIQDYKSDIILAFQDAGLPLKHKFGKVEDSLELSFQGKDDVKLDVFFFYEETDHMWNGGTQAKTGKKFNIQICQ

SEQ ID NO: 49536 - protein, 296 aa, Homo sapiens
MPPAVGGPVGYTPPDGGWGWAVVIGAFISIGFSYAFPKSITVFFKEIEGIFHATTSEVSWISSIMLAVMYGGGPISSILVNKYGSRIVMIVGGCLSGCGLIAASFCNTVQQLYVCIGVIGGLGLAFNLNPALTMIGKYFYKRRPLANGLAMAGSPVFLCTLAPLNQVFFGIFGWRGSFLILGGLLLNCCVAGALMRPIGPKPTKAGKDKSKASLEKAGKSGVKKDLHDANTDLIGRHPKQEKRSVFQTINQFLDLTLFTHRGFLLYLSGNVIMFFGLFAPLVFLSSYGKSQHYSSE

SEQ ID NO: 49537 - protein, 138 aa, Homo sapiens
MLVQFFQRTLDSLLLLGKSKEAEIKRINKELANIRSKFKGDKALDGYSKKKYVCKLLFIFLLGHDIDFGHMEAVNLLSSNRYTEKQIGYLFISVLVNSNSELIRLINNAIKNDLASRNPTFMGLALHCIASVGSREMA

SEQ ID NO: 49538 - protein, 177 aa, Homo sapiens
MENPQDIFSSNGGCLSDIVIEKYLVESKESVSHVQLACSMQDCAFPLDGTELCIWNTKDPSHQLLILRGHHQPITAMAFGNKVNPLLICSASLDYVIMWNLDECREKVLQGLVPRGTVMGSLLGKVLCLQLSLDDHVVAVCAGNKIFMLDIEMECCKIQEQCPALRAWSSLGIFSGR

SEQ ID NO: 49539 - protein, 46 aa, Homo sapiens
MHSDAAAVNFQLNSHLSTLANIHKIYHTLNKLEVCGLAVLQTALIK

SEQ ID NO: 49540 - protein, 543 aa, Homo sapiens
MARQHARTLWYDRPRYVFMEFCVEDSTDVHVLIEDHRIVFSCKNADGVELYNEIEFYAKVNSKDSQDKRSSRSITCFVRKWKEKVAWPRLTKEDIKPVWLSVDFDNWRDWEGDEEMELAHVEHYAELLKKVSTKRPPPAMDDLDFTTTVVSCCPAELQTEGSNGKKEVLSGFQVVLEDTVLFPEGGGQPDDRGTINDISVLRVTRRGEQADHFTQTPLDPGSQVLVRVDWERRFDHMQQHSGQHLITAVADHLFKLKTTSWELGRFRSAIELDTPSMTAEQVAAIEQSVNEKIRDRLPVNVRELSLDDPEVEQVSGRGLPDDHAGPIRVVNIEGVDSNMCCGTHVSNLSDLQVIKILGTEKGKKNRTNLIFLSGNRVLKWMERSHGTEKALTALLKCGAEDHVEAVKKLQNSTKILQKNNLNLLRDLAVHIAHSLRNSPDWGGVVILHRKEGDSEFMNIIANEIGSEETLLFLTVGDEKGGGLFLLAGPPASVETLGPRVAEVLEGKGAGKKGRFQGKATKMSRRMEAQALLQDYISTQSAKE

SEQ ID NO: 49541 - protein, 22 aa, Homo sapiens
MPSSVSWGILLLAGLCCLVPVS

SEQ ID NO: 49542 - protein, 74 aa, Homo sapiens
MESPLIYVSVLLLNIFEFSSGIVYNKDDTEKRFACSNKGFPQENEIIKLYLFLENLKIQCFFQTENEIASKAML

SEQ ID NO: 49543 - protein, 561 aa, Homo sapiens
MTVLEITLAVILTLLGLAILAILLTRWARRKQSEMHISRYSSEQSARLLDYEDGRGSRHAYSTQSDTSCDNRERSKRDYTPSTNSLALSRSSIALPQGSMSSIKCLQTTEELPSRTAGAMMQFTAPIPGATGPIKLSQKTIVQTPGPIVQYPGPNAGPPSAPRGPPMAPIIISQRTASQLAAPIIISQRTARIPQVHTMDSSGKITLTPVVILTGYMDEELAKKPCSKIQILKCGGTARSQNSREENKEALKNDIIFTNSVESLKSAHIKEPEREGKGTDLEKDKIGMEVKVDSDAGIPKRQETQLKISEMSIPQGQGAQIKKSVSDVPRGQESQVKKSESGVPKGQEAQVTKSGLVVLKGQEAQVEKSEMGVPRRQESQVKKSQSGVSKGQEAQVKKRESVVLKGQEAQVEKSELKVPKGQEGQVEKTEADVPKEQEVQEKKSEAGVLKGPESQVKNTEVSVPETLESQVKKSESGVLKGQEAQEKKESFEDKGNNDKEKERDAEKDPNKKEKGDKNTKGDKGKDKVKGKRESEINGEKSKGSKRAKANTGRKYNKKVEE

SEQ ID NO: 49544 - protein, 585 aa, Homo sapiens
MVIFTSLHRYVIFISCIIVINWYMSRVHGMHPKETTRQLSLAVKDGLIVETLTVGCKGSKAGIEQEGYWLPGDEIDWETENHDWYCFECHLPGEVLICDLCFRVYHSKCLSDEFRLRDSSSPWQCPVCRSIKKKNTNKQEMGTYLRFIVSRMKERAIDLNKKGKDNKHPMYRRLVHSAVDVPTIQEKVNEGKYRSYEEFKADAQLLLHNTVIFYGADSEQADIARMLYKDTCHELDELQLCKNCFYLSNARPDNWFCYPCIPNHELVWAKMKGFGFWPAKVMQKEDNQVDVRFFGHHHQRAWIPSENIQDITVNIHRLHVKRSMGWKKACDELELHQRFLREGRFWKSKNEDRGEEEAESSISSTSNEQLKVTQEPRAKKGRRNQSVEPKKEEPEPETEAVSSSQEIPTMPQPIEKVSVSTQTKKLSASSPRMLHRSTQTTNDGVCQSMCHDKYTKIFNDFKDRMKSDHKRETERVVREALEKLRSEMEEEKRQAVNKAVANMQGEMDRKCKQVKEKCKEEFVEEIKKLATQHKQLISQTKKKQWCYNCEEEAMYHCCWNTSYCSIKCQQEHWHAEHKRTCRRKR

SEQ ID NO: 49545 - protein, 112 aa, Homo sapiens
MSFFNFAMPLFITITSYSLMEQKLGKSGHLQVNTTLPARTLLLGWGPYAILYLYAVIADVTSISPKLQMVPALIAKMVPTINAINYALGNEMVCRGIWQCLSPQKREKDRTK

SEQ ID NO: 49546 - protein, 125 aa, Homo sapiens
MDDDIAALVVDNGSGMCKAGFAGDDAPRAVFPSIVGRPRHQGVMVGMGQKDSYVGDEAQSKRGILTLKYPIEHGIVTNWDDMEKIWHHTFYNELRVAPEEHPVLLTEAPLNPKANREKMTQDSLL

SEQ ID NO: 49547 - protein, 152 aa, Homo sapiens
MQNSHMDEYRNSSNGSTGNSSEVVVEHPTDFSTEIMNVTEMEQSPDDSPNVNASTEETEMASAVDLPVTLTETEANFPPEYEKFWKTVENNPQDFTGWVYLLQYVEQENHLMAARKAFDRFFIHYPYCYGYWKKYADLEKRHDNIKPSDEVR

SEQ ID NO: 49548 - protein, 316 aa, Homo sapiens
MVWQQKTKAVVMLNRIVEKESVKCAQYWPTDDQEMLFKETGFSVKLLSEDVKSYYTVHLLQLENINSGETRTISHFHYTTWPDFGVPESPASFLNFLFKVRESGSLNPDHGPAVIHCSAGIGRSGTFSLVDTCLVLMEKGDDINIKQVLLNMRKYRMGLIQTPDQLRFSYMAIIEGAKCIKGDSSIQKRWKELSKEDLSPAFDHSPNKIMTEKYNGNRIGLEEEKLTGDRCTGLSSKMQDTMEENSESALRKRIREDRKATTAQKVQQMKQRLNENERKRKRWLYWQPILTKMGFMSVILVGAFVGWTLFFQQNAL

SEQ ID NO: 49549 - protein, 62 aa, Homo sapiens
MSAEVKVTGQNQEQFLLLAKSAKGAALATLIHQVLEAPGVYVFGELLDMPNVRELKPGIFLH

SEQ ID NO: 49550 - protein, 282 aa, Homo sapiens
MSVYLVRQLTSAMLLQRLKMKGIRNPDHSRALIKEKLTADPDSEIATTSLRVSLMCPLGKMRLTIPCRAVTCTHLQCFDAALYLQMNEKKPTWICPVCDKKAAYESLILDGLFMEILNDCSDVDEIKFQEDGSWCPMRPKKEAMKVSSQPCTKIESSSVLSKPCSVTVASEASKKKVDVIDLTIESSSDEEEDPPAKRKCIFMSETQSSPTKGVLMYQPSSVRVPSVTSVDPAAIPPSLTDYSVPFHHTPISSMSSDLPGEQRRNDINNELKLGTSSDTVQQ

SEQ ID NO: 49551 - protein, 424 aa, Homo sapiens
MTVELWLRLRGKGLAMLHVTRGVWGSRVRVWPLLPALLGPPRALSSLAAKMGEYRKMWNPREPRDWAQQYRERFIPFSKEQLLRLLIQALYDPINPDRETLDQPSLTDPQRLSNEQEVLRALEPLLAQANFSPLSEDTLAYALVVHHPQDEVQVTVNLDQYVYIHFWALGQRVGQMPLKSSVGSRRGFFTKLPPAERRYFKRVVLAARTKRGHLVLKSFKDTPLEGLEQLLPELKVRTPTLQRALLNLMLVVSGVAIFVNVGMVVLTDLKVATSLLLLLFAIFMGLRASKMFGQRRSAQALELAHMLYYRSTSNNSELLSALALRAQDEHTKEALLAHSFLARRPGGTQGSPEETSRWLRSEVENWLLAKSGCEVTFNGTRALAHLQALTPSMGLYPPPGFPKLDPVAPITSEPPQATPSSNIS

SEQ ID NO: 49552 - protein, 597 aa, Homo sapiens
MTPIVTVLICLGLSLGPRTHVQTGTIPKPTLWAEPDSVITQGSPVTLSCQGSLEAQEYRLYREKKSASWITRIRPELVKNGQFHIPSITWEHTGRYGCQYYSRARWSELSDPLVLVMTGAYPKPTLSAQPSPVVTSGGRVTLQCESQVAFGGFILCKEGEDEHPQCLNSQPHARGSSRAIFSVGPVSPNRRWSHRCYGYDLNSPYVWSSPSDLLELLVPGVSKKPSLSVQPGPVVAPGESLTLQCVSDVGYDRFVLYKEGERDLRQLPGRQPQAGLSQANFTLGPVSRSYGGQYRCYGAYNLSSEWSAPSDPLDILITGQIHGTPFISVQPGPTVASGENVTLLCQSWRQFHTFLLTKAGAADAPLRLRSIHEYPKYQAEFPMSPVTSAHAGTYRCYGSLNSDPYLLSHPSEPLELVVSGPSMGSSPPPTGPISTPGPEDQPLTPTGSDPQSGLGRHLGVVIGILVAVVLLLLLLLLLFLILRHRRQGKHWTSTQRKADFQHPAGAVGPEPTDRGLQWRSSPAADAQEENLYAAVKDTQPEDGVEMDTRAAASEAPQDVTYAQLHSLTLRRKATEPPPSQEGEPPAEPSIYATLAIH

SEQ ID NO: 49553 - protein, 423 aa, Homo sapiens
MKQDVLNCTEGPIHSNGTSMISLIIPPKDQISRVAKMLADEFGTASNIKSRVNRLSVLGAITSVQQRLKLYNKVPPNGLVVYCGTIVTEEGKEKKVNIDFEPFKPINTSLYLCDNKFHTEALTALLSDDSKFGFIVIDGSGALFGTLQGNTREVLHKFTVDLPKKHGRGGQSALRFARLRMEKRHNYVRKVAETAVQLFISGDKVNVAGLVLAGSADFKTELSQSDMFDQRLQSKVLKLVDISYGGENGFNQAIELSTEVLSNVKFIQEKKLIGRYFDEISQDTGKYCFGVEDTLKALEMGAVEILIVYENLDIMRYVLHCQGTEEEKILYLTPEQEKDKSHFTDKETGQEHELIESMPLLEWFANNYKKFGATLEIVTDKSQEGSQFVKGFGGIGGILRYRVDFQGMEYQGGDDEFFDLDDY

SEQ ID NO: 49554 - protein, 494 aa, Homo sapiens
MADLANEEKPAIAPPVFVFQKDKGQKRSAGGSSPEGGEDSDREDGNYCPPVKRERTSSLTQFPPSQSEERSSGFRLKPPTLIHGQAPSAGLPSQKPKEQQRSVLRPAVLQAPQPKALSQTVPSSGTNGVSLPADCTGAVPAASPDTAAWRSPSEAADEEKEPQKNESSNASEEEACEKKDPATQQAFVFGQNLRDRVKLINESVDEADMENAGHPSADTPTATNYFLQYISSSLENSTNSADASSNKFVFGQNMSERVLSPPKLNEVSSDANRENAAAESGSESSSQEATPEKESLAESAAAYTKATARKCLLEKVEVITGEEAESNVLQMQCKLFVFDKTSQSWVERGRGLLRLNDMASTDDGTLQSRLVMRTQGSLRLILNTKLWAQMQIDKASEKSIRITAMDTEDQGVKVFLISASSKDTGQLYAALHHRILALRSRVEQEQEAKMPAPEPGAAPSNEEDDSDDDDVLAPSGATAAGAGDEGDGQTTGST

SEQ ID NO: 49555 - protein, 188 aa, Homo sapiens
MAASVEQREGTIQVQGQALFFREALPGSGQARFSVLLLHGIRFSSETWQNLGTLHRLAQAGYRAVAIDLPGLGHSKEAAAPAPIGELAPGSFLAAVVDALELGPPVVISPSLSGMYSLPFLTAPGSQLPGFVPVAPICTDKINAANYASVKVPLCGKLRCPCQEQGRVHPWAFLIWGLDNQGVSSGRS

SEQ ID NO: 49556 - protein, 188 aa, Homo sapiens
MNNKFDALKDDDSGDHDQNEENSTQKDGEKEKTERDKNQSSSKRKVEQFWRFYSHMVRPGDLTGHSDFHLFKEGIKPMWEDDANKNGGKWIIRLRKGLASRCWENLILAMLGEQFMVGEEICGAVVSVRFQEDIISIWNKTASDQATTARIRDTLRRVLNLPPNTIMEYKTHTDSIKYVLGGYGRTCP

SEQ ID NO: 49557 - protein, 33 aa, Homo sapiens
MVGGLFRNIKYNLDFWRKNVHMNDNVLHSAFEV

SEQ ID NO: 49558 - protein, 89 aa, Homo sapiens
MAAWKSWTALRLCATVVVLDMVVCKGFVEDLDESFKENRNDDIWLVDFYAPWCGHCKKLEPIWNEVGLEMKSIGSPVKVGKMDATSYSN

SEQ ID NO: 49559 - protein, 423 aa, Homo sapiens
MATATRLLGWRVASWRLRPPLAGFVSQRAHSLLPVDDAINGLSEEQRQLRQTMAKFLQEHLAPKAQEIDRSNEFKNLREFWKQLGNLGVLGITAPVQYGGSGLGYLEHVLVMEEISRASGAVGLSYGAHSNLCINQLVRNGNEAQKEKYLPKLISGEYIGALAMSEPNAGSDVVSMKLKAEKKGNHYILNGNKFWITNGPDADVLIVYAKTDLAAVPASRGITAFIVEKGMPGFSTSKKLDKLGMRGSNTCELIFEDCKIPAANILGHENKGVYVLMSGLDLERLVLAGGPLGLMQAVLDHTIPYLHVREAFGQKIGHFQLMQGKMADMYTRLMACRQYVYNVAKACDEGHCTAKDCAGVILYSAECATQVALDGIQCFGGNGYINDFPMGRFLRDAKLYEIGAGTSEVRRLVIGRAFNADFH

SEQ ID NO: 49560 - protein, 58 aa, Homo sapiens
MDVLVSECSARLLQQSLALSSRLECSGTISTHRNLSLWDSGNSPASASQVARITGRRD

SEQ ID NO: 49561 - protein, 501 aa, Homo sapiens
MGTRAARPAGLPCGAENPARRRLALGARQQIHSWSPRTPSTRLTAPAGPARGVARPAMAPDPVAAETAAQGPTPRYFTWDEVAQRSGCEERWLVIDRKVYNISEFTRRHPGGSRVISHYAGQDATDPFVAFHINKGLVKKYMNSLLIGELSPEQPSFEPTKNKELTDEFRELRATVERMGLMKANHVFFLLYLLHILLLDGAAWLTLWVFGTSFLPFLLCAVLLSAVQAQAGWLQHDFGHLSVFSTSKWNHLLHHFVIGHLKGAPASWWNHMHFQHHAKPNCFRKDPDINMHPFFFALGKILSVELGKQKKKYMPYNHQHKYFFLIGPPALLPLYFQWYIFYFVIQRKKWVDLAWMITFYVRFFLTYVPLLGLKAFLGLFFIVRFLESNWFVWVTQMNHIPMHIDHDRNMDWVSTQLQATCNVHKSAFNDWFSGHLNFQIEHHLFPTMPRHNYHKVAPLVQSLCAKHGIEYQSKPLLSAFADIIHSLKESGQLWLDAYLHQ

SEQ ID NO: 49562 - protein, 135 aa, Homo sapiens
MAIGFNVETVTYKNLKFQVWDLGGQTSIRPYWRCYYSNTDAVIYVVDSCDRDRIGISKSELVAMLEEEELRKAILVVFANKQDMEQAMTSSEMANSLGLPALKDRKWQIFKTSATKGTGLDEAMEWLVETLKSRQ

SEQ ID NO: 49563 - protein, 739 aa, Homo sapiens
MEPTSGPFRTDLGYHLVGCSSGKGRRVQPQWSPPAGTQPCRLHLYNSLTRNKEVFIPQDGKKVTWYCCGPTVYDASHMGHARSYISFDILRRVLKDYFKFDVFYCMNITDIDDKIIKRARQNHLFEQYREKRPEAAQLLEDVQAALKPFSVKLNETTDPDKKQMLERIQHAVQLATEPLEKAVQSRLTGEEVNSCVEVLLEEAKDLLSDWLDSTLGCDVTDNSIFSKLPKFWEGDFHRDMEALNVLPPDVLTRVSEYVPEIVNFVQKIVDNGYGYVSNGSVYFDTAKFASSEKHSYGKLVPEAVGDQKALQEGEGDLSISADRLSEKRSPNDFALWKASKPGEPSWPCPWGKGRPGWHIECSAMAGTLLGASMDIHGGGFDLRFPHHDNELAQSEAYFENDCWVRYFLHTGHLTIAGCKMSKSLKNFITIKDALKKHSARQLRLAFLMHSWKDTLDYSSNTMESALQYEKFLNEFFLNVKDILRAPVDITGQFEKWGEEEAELNKNFYDKKTAIHKALCDNVDTRTVMEEMRALVSQCNLYMAARKAVRKRPNQALLENIALYLTHMLKIFGAVEEDSSLGFPVGGPGTSLSLEATVMPYLQVLSEFREGVRKIAREQKVPEILQLSDALRDNILPELGVRFEDHEGLPTVVKLVDRNTLLKEREEKRRVEEEKRKKKEEAARRKQEQEAAKLAKMKIPPSEMFLSETDKYSKFDENVSMVCPHMTWRAKSSAKGKPRS

SEQ ID NO: 49564 - protein, 160 aa, Homo sapiens
MNTNSKEVLSLGVQVPEAWEELLTMKVEAKSHLQWQESRLKRSNPLAREIFRRHFRQLCYQETPGPREALTRLQELCYQWLRPHVSTKEQILDLLVLEQFLSILPKELQGWVREHCPESGEEAVILLEDLERELDEPQHESNLVFLSPDGGPQTQTRSPL

SEQ ID NO: 49565 - protein, 495 aa, Homo sapiens
MVADRVEVYSRSAAPGSLGYQWLSDGSGVFEIAEASGVRTGTKIIIHLKSDCKEFSSEARVRDVVTKYSNFVSFPLYLNGRRMNTLQAIWMMDPKDVREWQHEEFYRYVAQAHDKPRYTLHYKTDAPLNIRSIFYVPDMKPSMFDVSRELGSSVALYSRKVLIQTKATDILPKWLRFIRGVVDSEDIPLNLSRELLQESALIRKLRDVLQQRLIKFFIDQSKKDAEKYAKFFEDYGLFMREGIVTATEQEVKEDIAKLLRYESSALPSGQLTSLSEYASRMRAGTRNIYYLCAPNRHLAEHSPYYEAMKKKDTEVLFCFEQFDELTLLHLREFDKKKLISVETDIVVDHYKEEKFEDRSPAAECLSEKETEELMAWMRNVLGSRVTNVKVTLRLDTHPAMVTVLEMGAARHFLRMQQLAKTQEERAQLLQPTLEINPRHALIKKLNQLRASEPGLAQLLVDQIYENAMIAAGLVDDPRAMVGRLNELLVKALERH

SEQ ID NO: 49566 - protein, 362 aa, Homo sapiens
MHGGRIYPVLGTYWDNCNRCTCQENRQWQCDQEPCLVDPDMIKAINQGNYGWQAGNHSAFWGMTLDEGIRYRLGTIRPSSSVMNMHEIYTVLNPGEVLPTAFEASEKWPNLIHEPLDQGNCAGSWAFSTAAVASDRVSIHSLGHMTPVLSPQNLLSCDTHQQQGCRGGRLDGAWWFLRRRGVVSDHCYPFSGRERDEAGPAPPCMMHSRAMGRGKRQATAHCPNSYVNNNDIYQVTPVYRLGSNDKEIMKELMENGPVQALMEVHEDFFLYKGGIYSHTPVSLGRPERYRRHGTHSVKITGWGEETLPDGRTLKYWTAANSWGPAWGERGHFRIVRGVNECDIESFVLGVWGRVGMEDMGHH

SEQ ID NO: 49567 - protein, 155 aa, Homo sapiens
MAPRTWCPAGIFGLFCPLTLACSSLTIALTDCQPIILVSPTLSLWMVVRSVWIMQASLLGEPEEVALGPMGVVAATLEVVGTRAMGVAGIMTVDLEGMDMDMDVPETIMAETRVVMTATQEEITETIMTTEMRHAHNIGETWISALSEPVCHTLS

SEQ ID NO: 49568 - protein, 316 aa, Homo sapiens
MSSNSSTSQWPRPGGQAPSSPSYENSLHSLQSRMEDRLDRLDDAIHVLRNHAVGPSTSLPAGHSDIHSLLGPSHNAPIGSLNSNYGGSSLVASSRSASMVGTHREDSVSLNGNHSVLSSTVTTSSTDLNHKTQENYRGGLQSQSGTVVTTEIKTENKEKDENLHEPPSSDDMKSDDESSQKDIKVSSRGRTSSTNEDEDLNPEQKIEREKERRMANNARERLRVRDINEAFKELGRMCQLHLKSEKPQTKLLILHQAVAVILSLEQQVRERNLNPKAACLKRREEEKVSAVSAEPPTTLPGTHPGLSETTNPMGHM

SEQ ID NO: 49569 - protein, 66 aa, Homo sapiens
MCAQYCISFADVEKAHINIRDSIHLTPVLTSSILNQLTGRNLFFKCELFQKTGSFKIRGALNAVRS

SEQ ID NO: 49570 - protein, 71 aa, Homo sapiens
MGKRDRADRGETLRGHAQPRLPLPALPPALPRSCSGPLRRPTLLALPRAPRWDRPLGGRDAGPGRSPANSA

SEQ ID NO: 49571 - protein, 428 aa, Homo sapiens
MSHPSWLPPKSTGEPLGHVPARMETTHSFGNPSISVSTQQPPKKFAPVVAPKPKYNPYKQPGGEGDFLPPPPPPLDDSSALPSISGNFPPPPPLDEEAFKVQGNPGGKTLEERRSSLDAEIDSLTSILADLECSSPYKPRPPQSSTGSTASPPVSTPVTGHKRMVIPNQPPLTATKKSTLKPQPAPQAGPIPVAPIGTLKPQPQPVPASYTTASTSSRPTFNVQVKSAQPSPHYMAAPSSGQIYGSGPQGYNTQPVPVSGQCPPPSTRGGMDYAYIPPPGLQPEPGYGYAPNQGRYYEGYYAAGPGYGGRNDSDPTYGQQGHPNTWKREPGYTPPGAGNQNPPGMYPVTGPKKTYITDPVSAPCAPPLQPKGGHSGQLGPSSVAPSFRPEDELEHLTKKMLYDMENPPADEYFGEWGLELTSEVTILL

SEQ ID NO: 49572 - protein, 216 aa, Homo sapiens
SGLLFWLASGWTPAFAYSPRTPDRVSEADIQRLLHGVMEQLGIARPRVEYPAHQAMNLVGPQSIEGGAHEGLQHLGPFGNIPNIVAELTGDNIPKDFSEDQGYPDPPNPCPVGKTADDGCLENTPDTAEFSREFQLHQHLFDPEHDYPGLGKWNKKLLYEKMKGGERRKRRVTRAWLDCCGDAWSFLSGAVNRLKPSLVGKSQNPPLCSPEKHWSM

SEQ ID NO: 49573 - protein, 384 aa, Homo sapiens
MSKSKVDNQFYSVEVGDSTFTVLKRYQNLKPIGSGAQGIVCAAYDAVLDRNVAIKKLSRPFQNQTHAKRAYRELVLMKCVNHKNIISLLNVFTPQKTLEEFQDVYLVMELMDANLCQVIQMELDHERMSYLLYQMLCGIKHLHSAGIIHRDLKPSNIVVKSDCTLKILDFGLARTAGTSFMMTPYVVTRYYRAPEVILGMGYKENVDMWSVGCIMGEMIKGAVLFPGTDHIDQWNKVIEQLGTPCPEFMKKLQPTVRNYVENRPKYAGLTFPKLFPDSLFPADSEHNKLKASQARDLLSKMLVIDPAKRISVDDALQHPYINVWYDPAEVEAPPPQIYDKQLDEREHTIEEWKELIYKEVMNSEEKTKNGVVKGQPSPSAQVQQ

SEQ ID NO: 49574 - protein, 522 aa, Homo sapiens
MCNTNMSVPTDGAVTTSQIPASEQETLVRPKPLLLKLLKSVGAQKDTYTMKERWSFTMLPRLVWNSWAQGICLPRPPKVLDLQVLFYLGQYIMTKRLYDEKQQHIVYCSNDLLGDLFGVPSFSVKEHRKIYTMIYRNLVVVNQQESSDSGTSVSENRCHLEGGSDQKDLVQELQEEKPSSSHLVSRPSTSSRRRAISETEENSDELSGERQRKRHKSDSISLSFDESLALCVIREICCERSSSSESTGTPSNPDLDAGVSEHSGDWLDQDSVSDQFSVEFEVESLDSEDYSLSEEGQELSDEDDEVYQVTVYQAGESDTDSFEEDPEISLADYWKCTSCNEMNPPLPSHCNRCWALRENWLPEDKGKDKGEISEKAKLENSTQAEEGFDVPDCKKTIVNDSRESCVEENDDKITQASQSQESEDYSQPSTSSSIIYSSQEDVKEFEREETQDKEESVESSLPLNAIEPCVICQGRPKNGCIVHGKTGHLMACFTCAKKLKKRNKPCPVCRQPIQMIVLTYFP

SEQ ID NO: 49575 - protein, 229 aa, Homo sapiens
VMVEPHRHEGVFICRGKEDALVTKNLVPGESVYGEKRVSISEGDDKIEYRAWNPFRSKLAAAILGGVDQIHIKPGAKVLYLGAASGTTVSHVSDIVGPDGLVYAVEFSHRSGRDLINLAKKRTNIIPVIEDARHPHKYRMLIAMVDVIFADVAQPDQTRIVALNAHTFLRNGGHFVISIKANCIDSTASAEAVFASEVKKMQQENMKPQEQLTLEPYERDHAVVVGVYR

SEQ ID NO: 49576 - protein, 380 aa, Homo sapiens
MLRNSTFKNMQRRHTTLREKGRRQAIRGPAYMFNEKGTSLTPEEERFLDSAEYGNIPVVRKMLEESKTLNFNCVDYMGQNALQLAVGNEHLEVTELLLKKENLARVGDALLLAISKGYVRIVEAILNHPAFAQGQRLTLSPLEQELRDDDFYAYDEDGTRFSHDITPIILAAHCQEYEIVHILLLKGARIERPHDYFCKCNECTEKQRKDSFSHSRSRMNAYKGLASAAYLSLSSEDPVLTALELSNELARLANIETEFKNDYRKLSMQCKDFVVGVLDLCRDTEEVEAILNGDVNFQVWSDHHRPSLSRIKLAIKYEVKKFVAHPNCQQQLLTMWYENLSGLRQQSIAVKFLAVFGVSIGLPFLAIAYWIAPCSKVQTA

SEQ ID NO: 49577 - protein, 63 aa, Homo sapiens
MSLRNLWRDYKVLVVMVPLVGLIHLGWYRIKSSPVFQIPKNDDIPEQDSLGLSNLQKSQIQGK

SEQ ID NO: 49578 - protein, 194 aa, Homo sapiens
MCDLRRPAAGGMMDLAYVCEWEKWSKSTHCPSVPLACAWSCRNLIAFTMDLRSDDQDLTRMIHILDTEHPWDLHSIPSEHHEAITCLEWDQSGSRLLSADADGQIKCWSMADHLANSWESSVGSLVEGDPIVALSWLHNGVKLALHVEKSLLRPHFLNTPDKSPGDRLTEICTKITDVDIDKVMINLKTEEFVL

SEQ ID NO: 49579 - protein, 109 aa, Homo sapiens
MAPTLATAHRRRWWMACTAVLENLLFSAVLLGWGSLLIMLKSEGFYSYLCTEPENVTNGTVGGTAEPGHEECHHPAPGYRHGQVWPEEAQAAGQRLLRGFLLADCVRSK

SEQ ID NO: 49580 - protein, 188 aa, Homo sapiens
MSASAATGVFVLSLSAIPVTYVFNHLAAQHDSWTIVGVAALILFLVALLARVLVKRKPPRDPLFYVYAVFGFTSVVNLIIGLEQDGIIDGFMTHYLREGEPYLNTAYGHMICYWDGSAHYLMYLVMVAAIAWEETYRTIGLYWVGSIIMSVVVFVPGNIVDAGIYVLFCSLLCDCTVWLSGSWMFLDA

SEQ ID NO: 49581 - protein, 46 aa, Homo sapiens
MASRCWRWWGWSAWPRTRLPPAGSTPSRSRAPLGLDGSAGRPASAE

SEQ ID NO: 49582 - protein, 62 aa, Homo sapiens
MAGEQKPSSNLLEQFILLAKGTSGSALTALISQVLEAPGVYVFGELLELANVQEDGLDLLTS

SEQ ID NO: 49583 - protein, 61 aa, Homo sapiens
MAKYLAQIIVMGVQVVGRAFARALRQEFAGVSHQLGRPRVKCGLLRTERSPTCPHSQPGRS

SEQ ID NO: 49584 - protein, 369 aa, Homo sapiens
MVPKPEEINLLTGESDTQQIEAEKKPTSALDEPVSHWRPRLALNVMADNFVFDGSSLPADVHRYMKMIQLGKTVHYLPILFIDQLSNRVKDLMVINRSTTELPLTVSYDKVSLGRLRFWIHMQDAVYSLQQFGFSEKDADEVKGIFVDTNLYFLALTFFVAAFHLLFDFLAFKNDISFWKKKKSMIGMSTKLWKVKKALKMTIFWRGLMPEFQFGTYSESERKTEEYDTQAMKYLSYLLYPLCVGGAVYSLLNIKYKSWYSWLINSFVNGVYAFGFLFMLPQLFVNYKLKSVAHLPWKAFTYKAFNTFIDDVFAFIITMPTSHRLACFRDDVVFLVYLYQRWLYPVDKRRVNEFGESYEEKATRAPHTD

SEQ ID NO: 49585 - protein, 4403 aa, Homo sapiens
  MOD_RES (1)..(1): Any amino acid
XTTEDTLITGSKTAAPVTSTGSTTATLEGQSTAASSRTSNQDISASSQNHQTKSTETTSKAQTDTLTQMMTSTLFSSPSVHNVMETAPPDEMTTSFPSSVTNTLMMTSKTITMTTSTDSTLGNTEETSTAGTESSTPVTSAVSITAGQEGQSRTTSWRTSIQDTSASSQNHWTRSTQTTRESQTSTLTHRTTSTPSFSPSVHNVTGTVSQKTSPSGETATSSLCSVTNTSMMTSEKITVTTSTGSTLGNPGETSSVPVTGSLMPVTSAALVTFDPEGQSPATFSRTSTQDTTAFSKNHQTQSVETTRVSQINTLNTLTPVTTSTVLSSPSGFNPSGTVSQETFPSGETTTSSPSSVSNTFLVTSKVFRMPTSRDSTLGNTEETSLSVSGTISAITSKVSTIWWSDTLSTALSPSSLPPKISTAFHTQQSEGAETTGRPHERSSFSPGVSQEIFTLHETTTWPSSFSSKGHTTWSQTELPSTSTGAATRLVTGNPSTGTAGTIPRVPSKVSAIGEPGEPTTYSSHSTTLPKTTGAGAQTQWTQETGTTGEALLSSPSYSVTQMIKTATSPSSSPMLDRHTSQQITTAPSTNHSTIHSTSTSPQESPAVSQRGHTQAPQTTQESQTTRSVSPMTDTKTVTTPGSSFTASGHSPSEIVPQDAPTISAATTFAPAPTGDGHTTQAPTTALQAAPSSHDATLGPSGGTSLSKTGALTLANSVVSTPGGPEGQWTSASASTSPDTAAAMTHTHQAESTEASGQTQTSEPASSGSRTTSAGTATPSSSGASGTTPSGSEGISTSGETTRFSSNPSRDSHTTQSTTELLSASASHGAIPVSTGMASSIVPGTFHPTLSEASTAGRPTGQSSPTSPSASPQETAAISRMAQTQRTRTSRGSDTISLASQATDTFSTVPPTPPSITSTGLTSPQTETHTLSPSGSGKTFTTALISNATPLPVTYASSASTGHTTPLHVTDASSVSTGHATPLPVTSPSSVSTGHTTPLPVTDTSSESTGHVTPLPVTSFSSASTGDSTPLPVTDTSSASTGHVTPLPVTSLSSASTGDTTPLPVTDTSSASTGHATSLPVTDTSSVSTGHTTPLPVTDTSSASTGHATSLPVTDTSSVSTGHTTPLHVTDASSASTGQATPLPVTSLSSVSTGDTTPLPVTSPSSASTGHATPLLVTDTSSASTGHATPLPVTDASSVSTDHATSLPVTIPSAASTGHTTPLPVTDTSSASTGQATSLLVTDTSSVSTGDTTPLPVTSTSSASTGHVTPLHVTSPSSASTGHATPLPVTSLSSASTGDTMPLPVTSPSSASTGDTTPLPVTDASSVSTGHTTPLHVTDASSASTGQATPLPVTSLSSVSTGDTTPLPVTSPSSASTGHATPLLVTDTSSASTGHATPLPVTDASSVSTDHATSLPVTIPSAASTGHTTPLPVTDTSSASTGQATSLLVTDTSSVSTGDTTPLPVTSTSSASTGHVTPLHVTSPSSASTGHATPLPVTSLSSASTGDTMPLPVTSPSSASTGDTTPLPVTDASSVSTGHTTPLPVTSPSSASTGHTTPLPVTDTSSASKGDTTPLPVTSPSSASTGHTTPLPVTDTSSASTGDTTPLPVTNASSLSTGHATPLHVTSPSSASTGHATPLPVTSTSSASTGHATPLPVTGLSSATTDDTTRLPVTDVSSASTGQATPLPVTSLSSVSTGDTTPLPVTSPSSASTGHASPLLVTDASSASTGQATPLPVTDTSSVSTAHATPLPVTGLSSASTDDTTRLPVTDVSSASTGQAIPLPVTSPSSASTGDTTPLPVTDASSASTGDTTSLPVTIPSSASSGHTTSLPVTDASSVSTGHATSLLVTDASSVSTGDTTPLPVTDTNSASTGDTTPLHVTDASSVSTGHATSLPVTSLSSASTGDTTPLPVTSPSSASSGHTTPLPVTDASSVPTGHATSLPVTDASSVSTGHATPLPVTDASSVSTGHATPLPVTDTSSVSTGQATPLPVTSLSSASTGDTTPLPVTDTSSASTGQDTPLPVTSLSSVSTGDTTPLPVTNPSSASTGHATPLLVTDASSISTGHATSLLVTDASSVSTGHATALHDTDASSLSTGDTTPLPVTSPSSTSTGDTTPLPVTETSSVSTGHATSLPVTDTSSASTGHATSLPVTDTSSASTGHATPLPVTDTSSASTGQATPLPVTSPSSASTGHAIPLLVTDTSSASTGQATPLPVTSLSSASTGDTTPLPVTDASSVSTGHATSLPVTSLSSVSTGDTTPLPVTSPSSASTGHATPLHVTDASSASTGHATPLPVTSLSSASTGDTTPLPVTSPSSASTGHATPLHVTDASSVSTGDTTPLPVTSSSSASSGHTTPLPVTDASSASTGDTTPLPVTDTSSASTGHATHLPVTGLSSASTGDTTRLPVTNVSSASTGHATPLPVTSTSSASTGDTTPLPGTDTSSVSTGHTTPLLVTDASSVSTGDTTRLPVTSPSSASTGHTTPLPVTDTPSASTGDTTPLPVTNASSLSTRHATSLHVTSPSSASTGHATSLPVTDTSAASTGHATPLPVTSTSSASTGDTTPLPVTDTYSASTGQATPLPVTSLSSVSTGDTTPLPVTSPSSASTGHATPLLVTDASSASTGQATPLPVTSLSSVSTGDTTPLPVTSPSSASTGHATSLPVTDTSSASTGDTTSLPVTDTSSAYTGDTTSLPVTDTSSSSTGDTTPLLVTETSSVSTGDTTPLPVTDTSSASTGHATPLPVTNTSSVSTGHATPLHVTSPSSASTGHTTPLPVTDASSVSTGHATSLPVTDASSVFTGHATSLPVTIPSSASSGHTTPLPVTDASSVSTGHATSLPVTDASSVSTGHATPLPVTDASSVSTGHATPLPLTSLSSVSTGDTTPLPVTDTSSASTGQATPLPVTSLSSVSTGDTTPLPVTDTSSASTGHATSLPVTDTSSASTGHATPLPDTDTSSASTGHATLLPVTDTSSASIGHATSLPVTDTSSISTGHATPLHVTSPSSASTGHATPLPVTDTSSASTGHANPLHVTSPSSASTGHATPLPVTDTSSASTGHATPLPVTSLSSVSTGDTTPLPVTSPSSASTGHTTPLPVTDTSSASTGQATALPVTSTSSASTGDTTPLPVTDTSSASTGQATPLPVTSLSSVSTGDTTPLPVTSPSSASTGHATPLLVTDASSASTGQATPLPVTSLSSVSTGDTTPLPVTSPSSASTGHATSLPVTDTSSASTGDTTSLPVTDTSSAYTGDTTSLPVTDTSSSSTGDTTPLLVTETSSVSTGHATPLLVTDASSASTGHATPLHVTSPSSASTGDTTPVPVTDTSSVSTGHATPLPVTGLSSASTGDTTRLPVTDISSASTGQATPLPVTNTSSVSTGDTMPLPVTSPSSASTGHATPLPVTSTSSASTGHATPVPVTSTSSASTGHTTPLPVTDTSSASTGDTTPLPVTSPSSASTGHTTPLHVTIPSSASTGDTSTLPVTGASSASTGHATPLPVTDTSSVSTGHATPLPVTSLSSVSTGDTTPLPVTDASSASTGQATPLPVTSLSSVSTGDTTPLLVTDASSVSTGHATPLPVTDTSSASTGDTTRLPVTDTSSASTGQATPLPVTSLSSVSTGDTTPLLVTDASSVSTGHATPLPVTDTSSASTGDTTRLPVTDTSSASTGQATPLPVTIPSSSSSGHTTPLPVTSTSSVSTGHVTPLHVTSPSSASTGHVTPLPVTSTSSASTGHATPLLVTDASSVSTGHATPLPVTDASSASTGDTTPLPVTDTSSASTGQATPLPVTSLSSVSTGDTTPLPVTDASSASTGHATPLPVTIPSSVSTGDTMPLPVTSPSSASTGHATPLPVTGLSSASTGDTTPLPVTDTSSASTRHATPLPVTDTSSASTDDTTRLPVTDVSSASTGHATPLPVTSTSSASTGDTTPLPVTDTSSVSTGHATSLPVTSRSSASTGHATPLPVTDTSSVSTGHATPLPVTSTSSVSTGHATPLPVTSPSSASTGHATPVPVTSTSSASTGDTTPLPVTNASSLSTGHATPLHVTSPSSASRGDTSTLPVTDASSASTGHATPLPLTSLSSVSTGDTTPLPVTDTSSASTGQATPLPVTSLSSVSTGDTTPLPVTIPSSASSGHTTSLPVTDASSVSTGHGTPLPVTSTSSASTGDTTPLPVTDTSSASTGHATPLPVTDTSSASTGHATPLPVTSLSSVSTGHATPLAVSSATSASTVSSDSPLKMETPGMTTPSLKTDGGRRTATSPPPTTSQTIISTIPSTAMHTRSTAAPIPILPERGEAIQEFPSSPMGQAPGTWSSSGGPWTSPPHSSSRRLASPLAPLSVIPSTSQTMARSSSQSQTTRFSPTPTHSQQASQAGTLWPWWLRSGTMLTSPLVGGPHFIRNTRRSMVNTAC

SEQ ID NO: 49586 - protein, 95 aa, Homo sapiens
MIFPVARYALRWLRRPEDRAFSRAAMEMALRGVRKVLCVAEKNDAAKGIADLLSNGRMRRREGLSKFNKIYEFDYHLYGQNVTMAGVQWHNLDSL

SEQ ID NO: 49587 - protein, 91 aa, Homo sapiens
MKKLGQAMEEDLIVGLQGMDLNLEAEALAGTGLVLDEQLNEFHCLWDDSFPEGPERLHAIKEQLIQEGLLDRCVSFQARFAEKEELMLVHR

SEQ ID NO: 49588 - protein, 349 aa, Homo sapiens
MSLMVVSMACVGLFLVQRAGPHMGNHRKPSLLAHPGPLVKSGERVILQCWSDIMFEHFFLHKEGISKDPSRLVGQIHDGVSKANFSIGPMMLALAGTYRCYGSVTHTSYQLSAPSDPLDIVVTGPYEKPSLSAQPGPKVQAGESVTLSCSSRSSYDMYHLSREGGAHERRLPAVRKVNRTFQADFPLGPATHGGTYRCFGSFRHSPYELSDPSDPLLVSVTGNPSSSWPSPTEPSSKSGNPRHLHILIGTSVVIILFILLLFFLLHLWCSNKKNAAVMDQEPAGNRTANSEDSDEQDPEEVTYAQLDHCVFTQRKITRPSQRPKTPPTDTILYTELPNAKPRSKVVSCP

SEQ ID NO: 49589 - protein, 180 aa, Homo sapiens
MEALIPVINKLQDVFNTVGADIIQLPQIVVVGTQSSGKSSVLESLVGRDLLPRGTGIVTRRPLILQLVHVSQEDKRKTTGEENGVEAEEWGKFLHTKNKLYTDFDEIRQEIENETERISGNNKVPVGDQPKDIELQIRELILRFISNPNSIILAVTAANTDMATSEALKISREVDPDGAS

SEQ ID NO: 49590 - protein, 970 aa, Homo sapiens
MLLFFTLGLLIHFVFFASIFDIYFTSPLVHGMTPQFTPLPPPARRLVLFVADGLRADALYELDENGNSRAPFIRNIIMHEGSWGISHTRVPTESRPGHVALIAGFYEDVSAVAKGWKENPVEFDSLFNESKYTWSWGSPDILPMFAKGASGDHVYTYSYDAKREDFGAQDATKLDTWVFDNVKDFFHHARNNQSLFSKINEEKIVFFLHLLGIDTNGHAHRPSSRDYKHNIKKVDDGVKEIVSMFNHFYGNDGKTTFIFTSDHGMTDWGSHGAGHPSETLTPLVTWGAGIKYPQRVSAQQFDDAFLKEWRLENWKRLDVNQADIAPLMTSLIGVPFPLNSVGILPVDYLNNTDLFKAESMFTNAVQILEQFKVKMTQKKEVTLPFLFTPFKLLSDSKQFNILRKARSYIKHRKFDEVVSLCKELIHLALKGLSYYHTYDRFFLGVNVVIGFVGWISYASLLIIKSHSNLIKGVSKEVKKPSHLLPCSFVAIGILVAFFLLIQACPWTYYVYGLLPLPIWYAVLREFQVIQDLVVSVLTYPLSHFVGYLLAFTLGIEVLVLSFFYRYMLTAGLTAFAAWPFLTRLWTRAKMTSLSWTFFSLLLAVFPLMPVVGRKPDISLVMGAGLLVLLLSLCVVTSLMKRKDSFIKEELLVHLLQVLSTVLSMYVVYSTQSSLLRKQGLPLMNQIISWATLASSLVVPLLSSPVLFQRLFSILLSLMSTYLLLSTGYEALFPLVLSCLMFVWINIEQETLQQSGVCCKQKLTSIQFSYNTDITQFRQLYLDDIRRAFFLVFFLVTAFFGTGNIASINSFDLASVYCFLTVFSPFMMGALMMWKILIPFVLVMCAFEAVQLTTQLSSKSLFLIVLVISDIMALHFFFLVKDYGSWLDIGTRQLLACTAWLFMYISASPNRLWMLSDPGLDLNLLHAIRACISHYVIVMSMTIFLVFLNGLAQLLTTKKLRLCGKPKSHFM

SEQ ID NO: 49591 - protein, 401 aa, Homo sapiens
MHPQVVILSLILHLADSVAGSVKVGGEAGPSVTLPCHYSGAVTSMCWNRGSCSLFTCQNGIVWTNGTHVTYRKDTRYKLLGDLSRRDVSLTIENTAVSDSGVYCCRVEHRGWFNDMKITVSLEIVPPKVTTTPIVTTVPTVTTVRTSTTVPTTTTVPMTTVPTTTVPTTMSIPTTTTVLTTMTVSTTTSVPTTTSIPTTTSVPVTTTVSTFVPPMPLPRQNHEPVATSPSSPQPAETHPTTLQGAIRREPTSSPLYSYTTDGNDTVTESSDGLWNNNQTQLFLEHSLLTANTTKGIYAGVCISVLVLLALLGVIIAKMFHLAAFKLKLCKMQLKRKSKQKTISTLRIVFMPRTKTQWCSLRVYAHECRRLNRHQHIRRLLDPKTIFLFQFHLAFQHVSDTG

SEQ ID NO: 49592 - protein, 75 aa, Homo sapiens
MAVCIAVIAKENYPLYIRSTPTENELKFHYMVHTSLDVVDEKISAMGKALVDQRELYLGLLYPTEDYKLTFRARH

SEQ ID NO: 49593 - protein, 82 aa, Homo sapiens
MTFAFVSYWHGGYDYLWCWAALNWLGVTVENGVRRLVETPCIQDSLVSRILAAVLGDSGTRQIRFIRDGAIRFPAPTMGPFY

SEQ ID NO: 49594 - protein, 35 aa, Homo sapiens
MAAERQEALREFVAVTGAEEDRARFFLESAGWDLQ

SEQ ID NO: 49595 - protein, 52 aa, Homo sapiens
MANWVFCNRCFQPPHRTSCFSLTNCGHVYCDACLGKDRRRYPGILHEHRQSV

SEQ ID NO: 49596 - protein, 724 aa, Homo sapiens
MLQQVPENINFPAEEEKILEFWTEFNCFQECLKQSKHKPKFTFYDGPPFATGLPHYGHILAGTIKDIVTRYAHQSGFHVDRRFGWDCHGLPVEYEIDKTLGIRGPEDVAKMGITEYNNQCRAIVMRYSAEWKSTVSRLGRWIDFDNDYKTLYPQFMESVWWVFKQLYDKGLVYRGVKVMPFSTACNTPLSNFESHQNYKDVQDPSVFVTFPLEEDETVSLVAWTTTPWTLPSNLAVCVNPEMQYVKIKDVARGRLLILMEARLSALYKLESDYEILERFPGAYLKGKKYRPLFDYFLKCKENGAFTVLVDNYVKEEEGTGVVHQAPYFGAEDYRVCMDFNIIRKDSLPVCPVDASGCFTTEVTDFAGQYVKDADKSIIRTLKEQGRLLVATTFTHSYPFCWRSDTPLIYKAVPSWFVRVENMVDQLLRNNDLCYWVPELVREKRFGNWLKDARDWTISRNRYWGTPIPLWVSDDFEEVVCIGSVAELEELSGAKISDLHRESVDHLTIPSRCGKGSLHRISEVFDCWFESGSMPYAQVHYPFENKREFEDAFPADFIAEGIDQTRGWFYTLLVLATALFGQPPFKNVIVNGLVLASDGQKMSKRKKNYPDPVSIIQKYGADALRLYLINSPVVRAENLRFKEEGVRDVLKDVLLPWYNAYRFLIQNVLRLQKEEEIEFLYNENTVRESPNITDRWILSFMQSLIGFFETEMAGFILWCLAWSSL

SEQ ID NO: 49597 - protein, 301 aa, Homo sapiens
MLLAASKVLDRLKPVIGVNTDPERSEGHLCLPVRYTHSFPEALQKFYRGEFRWLWRQRIRLYLEGTGINPVPVDLHEQQLSLNQHNRALNIERAHDERSEASGPQLLPVRALNEVFIGESLSSRMSYSWAVAVDNLRRSIPTLKGLASYYEISVDDGPWEKQKSSGLNLCTGTGSKAWSFNINRVATQAVEDVLNIAKRQGNLSLPLNRELVEKVTNEYNESLLYSPEEPKILFSIREPIANRVFSSSRQRCFSSKVCVRSRCWDACMVVDGGTSFEFNDGAIASMMINKEDELRTVLLEQ

SEQ ID NO: 49598 - protein, 143 aa, Homo sapiens
MLCLLLTLGVALVCGVPAMDIPQTKQDLELPKLAGTWHSMAMATNNISLMATLKAPLRVHITSLLPTPEDNLEIVLHRWENNSCVEKKVLGEKTENPKKFKINSRVLVEDDEIMQGFIRAFRPLPRHLWYLLDLKQMEEPCRF

SEQ ID NO: 49599 - protein, 44 aa, Homo sapiens
MAKERGLISPSDFAQLQKYMEYSTKKVSDVLKLFEDGEMAKYVQ

SEQ ID NO: 49600 - protein, 115 aa, Homo sapiens
MSTRTPLPTVNERDTENHTSHGDGRQEVTSRTSRSGARCRNSIASCADEQPHIGNYRLLKTIGKGNFAKVKLARHILTGREVAIKIIDKTQLNPTSLQKSFALVAQAGVQWRDLG

SEQ ID NO: 49601 - protein, 194 aa, Homo sapiens
MSLDIQSLDIQCEELSDARWAELLPLLQQCQVVRLDDCGLTEARCKDISSALRVNPALAELNLRSNELGDVGVHCVLQGLQTPSCKIQKLSLQNCCLTGAGCGVLSSTLRTLPTLQELHLSDNLLGDAGLQLLCEGLLDPQCRLEKLQLEYCSLSAASCEPLASVLRAKPDFKELTVSNNDINEAGVRVLCQGL

SEQ ID NO: 49602 - protein, 266 aa, Homo sapiens
CRLNQLSSQGEGSVARQRSVEWRGEASRWNSQMTACRHQESGRTYRRQPCTELGTCNNNSTLGVFALNCFTKGQKNSTLIFTRENTIRNCSCSADIRDCDYSLANLMCNCKTVLPLAVERTSYNGHLTIWFTDTSALGHLLNFTLVQDLKLSLCSTNTLPTEYLAICGLKRLRINMEAKHPFPEQSLLIHSGGDSDSREKPMWLHKGWQPCMYISFLDMALFNRDSALKSYSIENVTSIANNFPDFSYFRTFPMPSNKSYVVTFIY

SEQ ID NO: 49603 - protein, 61 aa, Homo sapiens
MSDTLTADVIGRRVEVNGEHATVRFAGVVPPVAGPWLGVEWDNPERGKHDGSHEGTVYFKC

SEQ ID NO: 49604 - protein, 380 aa, Homo sapiens
MATEGMILTNHDHQIRVGVLTVSDSCFRNLAEDRSGINLKDLVQDPSLLGGTISAYKIVPDEIEEIKKFPTFPFCGLQKGATKEVIEREAPGMALAMLMGSLNVTPLGMLSRPVCGIRGKTLIINLPGSKKGSQECFQFILPALPHAIDLLRDAIVKVKEVHDELEDLPSPPPPLSPPPTTSPHKQTEDKGVQCEEEEEEKKDSGVASTEDSSSSHITAAAIAAKKHPFYTSPAVVMAHGEQPIPGLINYSHHSTDERIPDSIISRGVQVLPRDTASLSTTPSESPRAQATSRLSTASCPTPKVQSRCSSKENILRASHSAVDITKVARRHRMSPFPLTSMDKAFITVLEMTPVLGTEIINYRGTIIFDHCPFFSSFFSK

SEQ ID NO: 49605 - protein, 145 aa, Homo sapiens
MGVEGTGRGGCRLGGPDGKGKGWAPVDATARLPHPQRLSLPLLQLQPEPCFSLVAQMRPWWSPDYLHSLGKARTAQVQKDARIGEAEAKRDAGIREAKAKQEKVSAQYLSEIEMAKAQRDYELKKAAYDIEVNTRRAQADLAYQL

SEQ ID NO: 49606 - protein, 369 aa, Homo sapiens
MIDSSKKQQQGFPEILTAGDFEPLKEKECLEGSNQKSLKEVLQLRLQQRRTREQLVDQGIMPPLKSPAAFHEQIKSLERARTENFLKHKIRSRPDRSELVRMHILEETFAEPSLQATQMKLKRARLADDLNEKIAQRPGPMELVEKNILPVDSSVKEAIIGVGKEDYPHTQGDFSFDEDSSDALSPDQPASQESQGSAASPSEPKVSESPSPVTTNTPAQFASVSPTVPEFLKTPPTADQPPPRPAAPVLPTNTVSSAKPGPALVKQSHPKNPNDKHRSKKCKDPKPRVKKLKYHQYIPPDQKGEKNEPQMDSNYARLLQQQQLFLQLQILSQQKQHYNYQTILPAPFKYGGAHAILNAGFSVVFYEEL

SEQ ID NO: 49607 - protein, 100 aa, Homo sapiens
MSLRCGDAARTLGPRVFGRYFCSPVRPLSSLPDKKKELLQNGPDLQDFVSGDLADRSTWDEYKGNLKRQKGERYVRKLDVPILESVGEVENMPPPQPRSW

SEQ ID NO: 49608 - protein, 56 aa, Homo sapiens
MRSSPRHGRGLSSGPPSSSCAAQLAGSSQVSMSTAPSGAPHTRPLQPCGPVSTARS

SEQ ID NO: 49609 - protein, 66 aa, Homo sapiens
MAAIRKKLVIVGDGACGKTCLLIVFSKDQFPEVYVPTVFENYIADIEVDGKQTGSVTWAESLCLWV

SEQ ID NO: 49610 - protein, 66 aa, Homo sapiens
MEAPEYLDLDEIDFSDDISYSVTSLKTIPELCRRCDTQNEDRSEWSVGVRTLDGERNRSHCRTELF

SEQ ID NO: 49611 - protein, 197 aa, Homo sapiens
MAVLAALLRSGARSRSPLLRRLVQEIRYVERSYVSKPTLKEVVIVSATRTPIGSFLGSLSLLPATKLGSIAIQGAIEKAGIPKEEVKEAYMGNVLQGGEGQAPTRQAVLGAGLPISTPCTTINKVCASGMKAIMMASQSLMCGHQDVMVAGGMESMSNVPYVMNRGSTPYGGVKLEDLIVKDGLTDVYNKIHMVNQM

SEQ ID NO: 49612 - protein, 1098 aa, Homo sapiens
  MOD_RES (1)..(1): Any amino acid
XVSLFPYGAGAGDLEFVRRTVDFTSPLFKPATGFPLGSSLRDSLYFTDNGQIIFPESDYQIFSYPNPLPTGFTGRDPVALVAPFWDDADFSTGRGTTFYQEYETFYGEHSLLVQQAESWIRKMTNNGGYKARWALKVTWVNAHAYPAQWTLGSNTYQAILSTDGSRSYALFLYQSGGMQWDVAQRSGNPVLMGFSSGDGYFENSPLMSQPVWERYRPDRFLNSNSGLQGLQFYRLHREERPNYRLECLQWLKSQPRWPSWGWNQVSCPCSWQQGRRDLRFQPVSIGRWGLGSRQLCSFTSWRGGVCCSYGPWGEFREGWHVQRPWQLAQELEPQSWCCRWNDKPYLCALYQQRRPHVGCATYRPPQPAWMFGDPHITTLDGVSYTFNGLGDFLLVGAQDGNSSFLLQGRTAQTGSAQATNFIAFAAQYRSSSLGPVTVQWLLEPHDAIRVLLDNQTVTFQPDHEDGGGQETFNATGVLLSRNGSEVSASFDGWATVSVIALSNILHASASLPPEYQNRTEGLLGVWNNNPEDDFRMPNGSTIPPGSPEEMLFHFGMTWQINGTGLLGKRNDQLPSNFTPVFYSQLQKNSSWAEHLISNCDGDSSCIYDTLALRNASIGLHTREVSKNYEQANATLNQYPPSINGGRVIEAYKGQTTLIQYTSNAEDANFTLRDSCTDLELFENGTLLWTPKSLEPFTLEILARSAKIGLASALQPRTVVCHCNAESQCLYNQTSRVGNSSLEVAGCKCDGGTFGRYCEGSEDACEEPCFPSVHCVPGKGCEACPPNLTGDGRHCAALGSSFLCQNQSCPVNYCYNQGHCYISQTLGCQPMCTCPPAFTDSRCFLAGNNFSPTVNLELPLRVIQLLLSEEENASMAEVNASVAYRLGTLDMRAFLRNSQVERIDSAAPASGSPIQHWMVISEFQYRPRGPVIDFLNNQLLAAVVEAFLYHVPRRSEEPRNDVVFQPISGEDVRDVTALNVSTLKAYFRCDGYKGYDLVYSPQSGFTCVSPCSRGYCDHGGQCQHLPSGPRCSCVSFSIYTAWGEHCEHLSMKLDAFFGIFFGALGGLLLLGVGTFVVLRFWGCSGARFSYFLNSAEALP

SEQ ID NO: 49613 - protein, 141 aa, Homo sapiens
QLRRRFGDVFSLQLAWTPVVAQWAGGRARGDGDPRRGHGRPPACAHLPGPGLRAAFPRTPLSPQRSLGQSREQRDRLPHLRAPLRVRRPSLPQAAGPSSGGIEGGVGLPARGAECCPRPPAHPSAGWQGPTLPKGFPDPAG

SEQ ID NO: 49614 - protein, 246 aa, Homo sapiens
MDELFPLIFPAEPAQASGPYVEIIEQPKQRGMRFRYKCEGRSAGSIPGERSTDTTKTHPTIKINGYTGPGTVRISLVTKDPPHRPHPHELVGKDCRDGFYEAELCPDRCIHSFQNLGIQCVKKRDLEQAISQRIQTNNNPFQVPIEEQRGDYDLNAVRLCFQVTVRDPSGRPLRLPPVLSHPIFDNRAPNTAELKICRVNRNSGSCLGGDEIFLLCDKVQKEDIEFCPQASTPALSLYVIPEHHQL

SEQ ID NO: 49615 - protein, 98 aa, Homo sapiens
MSDNEDNFDGDDFDDVEEDEGLDDLENAEEEGQENVEILPSGERPQANQKRITTPYMTKYERARVLGTRALQIAMCAPVMVELEGETDPLLIAMKELK

SEQ ID NO: 49616 - protein, 288 aa, Homo sapiens
MDEHSCPLIFSSYGYPKEEMIYRWRKNSVEAADQKSWRLYQFDFMGLRNTTEIVTTSAGDYVVMTIYFELSRRMGYFTIQTYIPCILTVVLSWVSFWIKKDATPARTALGITTVLTMTTLSTIARKSLPRVSYVTAMDLFVTVCFLFVFAALMEYATLNYYSSCRKPTTTKKTTSLLHPDSSRWIPERISLQAPSNYSLLDMRPPPTAMITLNNSVYWQEFEDTCVYECLDGKDCQSFFCCYEECKSGSWRKGRIHIDILELDSYSRVFFPTSFLLFNLVYWVGYLYL

SEQ ID NO: 49617 - protein, 207 aa, Homo sapiens
  MOD_RES (1)..(1): Any amino acid
XAPILRRKKKKKKLDRRPHEVFVELNELMLDRSQEPHWRETARWIKFEEDVEEETERWGKPHVASLSFRSLLELRRTIAHGAALLDLEQTTLPGIAHLVVETMIVSDQIRPEDRASVLRTLLLKHSHPNDDKDSGFFPRNPSSSSMNSVLGNHHPTPSHGPDGAVPTMADDLGEPAPLWPHDPDAKEFCVLRSPSTCLGEMVTGGKA

SEQ ID NO: 49618 - protein, 168 aa, Homo sapiens
MMSYLKQPPYAVNGLSLTTSGMDLLHPSVGYPATPRKQRRERTTFTRAQLDVLEALFAKTRYPDIFMREEVALKINLPESRVQVWFKNRRAKCRQQQQQQQNGGQNKVRPAKKKTSPAREGYGASSLGFNSTTDCLDYKDQTASWKLNFNADCLDYKDQTSSWKFQVL

SEQ ID NO: 49619 - protein, 135 aa, Homo sapiens
MAGASELGTGPGAAGGDGDDSLYPIAVLIDELRNEDVQLRLNSIKKLSTIALALGVERTRSELLPFLTDTIYDEDEVLLALAEQLGNFTGLVGGPDFAHCLLTPSGNCHLGHEILAFLQKSCLWVGRTICYHCVS

SEQ ID NO: 49620 - protein, 102 aa, Homo sapiens
MPKNSKVVKRELDDDVTESVKDLLSNEDAADDAFKTSELIVDGQEEKDTDVEEGSEVEDERPAWNSKLQYILAQVGFSVGLGNVWRFPYLCQKNGGEIQRRS

SEQ ID NO: 49621 - protein, 454 aa, Homo sapiens
MSLMVVSMACVGFFLLEGPWPHVGGQDKPFLSAWPGTVVSEGQHVTLQCRSRLGFNEFSLSKEDGMPVPELYNRIFRNSFLMGPVTPAHAGTYRCCSSHPHSPTGWSAPSNPVVIMVTGVHRKPSLLAHPGPLVKSGETVILQCWSDVRFERFLLHREGITEDPLRLIGQLHDAGSQVNYSMGPMTPALAGTYRCFGSVTHLPYQLSAPSDPLDIVITGLYEKPSLSAQPGPTVLAGESVTLSCSSRSSYDMYHLSREGEAHERRFSAGPKVNGTFQADFPLGPATHGGTYRCFGSFRDSPYEWSNSSDPLLVSVTGNPSNSWPSPTEPSSKTGNPRHLHVLIGTSVVIILFILLLFFLLHRWCSNKKNAAVMDQEPAGNRTANSEDSDEQDPQEVTYVQLDHCVFTQRKITRPSQRPKTPPTDTRVYTELPNAESRSKVVSCPAPQSGLEGIF

SEQ ID NO: 49622 - protein, 154 aa, Homo sapiens
MDDTLFQLKFTAKQLEKLAKKAEKDSKAEQAKVKKALLQKNVECARVYAENAIRKKNEGVNWLRMASRVDAVASKVQTAVTMKGVTKNMAQVTKALDKALSTMDLQKVSSVMDRFEQQVQNLDVHTSADVLSLHTCGCSLTSPSILCAGSLPGP

SEQ ID NO: 49623 - protein, 176 aa, Homo sapiens
  MOD_RES (1)..(1): Any amino acid
XSSTKPAAGGTAPLPPWKSPSSSQPLPQVPAPAQSQTQFHVQPQPQPKPQVQLHVQSQTQPVSLANTQPRGPPASSPAPAPKFSPVTPKFTPVASKFSPGAPGGSGSQPNQKLGHPEALSAGTGSPQPPSFTYAQQREKPRVQEKQHPVPPPAQNQNQGLLSSRQAGCAPLGPQGP

SEQ ID NO: 49624 - protein, 149 aa, Homo sapiens
MVTEMNPNVVVISVLAILSTLLIGLLLVTLIILRKKHLQMARECGAGTFVNFASLERDGKLPYNWRRSIFAFLTLLPSCLWTDYLLAFYINPWSKNGLKKRKLTNPVQLDDFDAYIKDMAKDSDYKFSLQFEDTYFFGSKTICQKRWKS

SEQ ID NO: 49625 - protein, 19 aa, Homo sapiens
MDPVGLQLGNKNLWSCLVR

SEQ ID NO: 49626 - protein, 95 aa, Homo sapiens
MAREDSVKCLRCLLYALNLLFWLMSISVLAVSAWMRDYLNNVLTLTAETRVEEAVILTYFPVVHPVMIAVCCFLIIVGMLGYCGTVKRNLLLLAW

SEQ ID NO: 49627 - protein, 131 aa, Homo sapiens
MPPRKKRRQPSQKAPLLFHQQPLEGPKHSCASTQLPITHTRQVPSKPIDHSTITSWVSPDFDTAAGSLFPAYQKHQNRARHSSRKPTTSKFPHLTFESPQSSSSETLGIPLIRECPSESEKDVSRRPLVPV

SEQ ID NO: 49628 - protein, 218 aa, Homo sapiens
MFPDQPEKPLNLAHIVPPRPVTSMNDTLFSHSVPSSGSPFITRSSPPKDSEVEQNKLLARAAPAFLKGKGMLESSNRLDEEHRLIARYAARLAAESSSSQPPQQRSAPDISFTIDANKQQRQLIAELENKNREILQEIQRLRLEHEQASQPTPEKAQQNPTLLAELRLLRQRKDELEQRMSALQESRRELMVQLEGLMKLLKEEELKQGVSYVPYCRS

SEQ ID NO: 49629 - protein, 484 aa, Homo sapiens
MTCGSGFGGRAFSCISACGPRPGRCCITAAPYRGISCYRGLTGGFGSHSVCGGFRAGSCGRSFGYRSGGVCGPSPPCITTVSVNESLLTPLNLEIDPNAQCVKQEEKEQIKSLNSRFAAFIDKVRFLEQQNKLLETKLQFYQNRECCQSNLEPLFEGYIETLRREAECVEADSGRLASELNHVQEVLEGYKKKYEEEVSLRATAENEFVALKKDVDCAYLRKSDLEANVEALIQEIDFLRRLYEEEILILQSHISDTSVVVKLDNSRDLNMDCIIAEIKAQYDDIVTRSRAEAESWYRSKCEEMKATVIRHGETLRRTKEEINELNRMIQRLTAEVENAKCQNSKLEAAVAQSEQQGEAALSDARCKLAELEGALQKAKQDMACLIREYQEVMNSKLGLDIEIATYRRLLEGEEQRLCEGIGAVNVCVSSSRGGVVCGDLCVSGSRPVTGSVCSAPCNGNVAVSTGLCAPCGQVGSCGSSCRKC

SEQ ID NO: 49630 - protein, 146 aa, Homo sapiens
MSQEPPQEMAKAQDGTFSSVLTLTNLTGLDTGEYFCTHNDSRGLETDERKRLYIFVPDPTVGFLPNDAEELFIFLTEITEITIPCRVTDPQLVVTLHEKKGDVALPVPYDHQRGFSGIFEDRSYICKTTIGDREVDSDAYYVYRLQ

SEQ ID NO: 49631 - protein, 200 aa, Homo sapiens
MSASSLLEQRPKGQGNKVQNGSVHQKDGLNDDDFEPYLSPQARPNNAYTAMSDSYLPSYYSPSIGFSYSLGEAAWSTGGDTAMPYLTSYGQLSNGEPHFLPDAMFGQPGALGSTPFLGQHGFNFFPSGIDFSAWGNNSSQGQSTQSSGYSSNYAYAPSSLGGAMIDGQSAFANETLNKAPGMNTIDQGMAALKLGSTEVA

SEQ ID NO: 49632 - protein, 130 aa, Homo sapiens
  MOD_RES (1)..(1): Any amino acid
XNKESSSSKPVVFPVPPPDDLTQPSSQSLTPVTPQKSSMATQNLPEQHVSERSQALQQTSATDISSAGSISGDIIDELMSSDGGKLKDTTGHQKQVGQGLITCLIFLLPLNCLYFCMSFYPNRRSLPLVK

SEQ ID NO: 49633 - protein, 233 aa, Homo sapiens
MNNKFDALKDDDSGDHDQNEENSTQKDGEKEKTERDKNQSSSKRKAVVPGPAEHPLQYNYTFWYSRRTPGRPTSSQSYEQNIKQIGTFASVEQFWRFYSHMVRPGDLTGHSDFHLFKEGIKPMWEDDANKNGGKWIIRLRKGLASRCWENLILAMLGEQFMVGEEICGAVVSVRFQEDIISIWNKTASDQATTARIRDTLRRVLNLPPNTIMEYKTHTDSIKYVLGGYGRTCP

SEQ ID NO: 49634 - protein, 185 aa, Homo sapiens
MPGFLVRILPLLLVLLLLGPTRGLRVENEYGSYFACDFDYLRFLQKRFRHHLGDDVVLFTTDGAHKTFLKCGALQGLYTTVDFGTGSNITDAFLSQRKCEPKGPLINSEFYTGWLDHWGQPHSTIKTEAVASSLYDILARGASVNLYMFIGGTNFAYWNGANSPYAAQPTSYDYDAPLSEAGDLT

SEQ ID NO: 49635 - protein, 144 aa, Homo sapiens
MRTHTRGAPSVFFIYLLCFVSAYITDENPEVMIPFTNANYDSHPMLYFSRAEVAELQLRAASSHEHIAARLTEAVHTMLSSPLEYLPPWDPKDYSARWNEIFGNNLGALAMFCVLYPENIEARDMAKDYMERMAAQPSWLVKDA

SEQ ID NO: 49636 - protein, 406 aa, Homo sapiens
MKARAPPPPGKAATLHVHSDQKPPHDGALGSQQNLVRMKEALRASTMDVTVVLPSGLEKRSVLNGSHAMMDLLVELCLQNHLNPSHHALEIRSSETQQPLSFKPNTLIGTLNVHTVFLKEKVPEEKVKPGPPKVPEKSVRLVVNYLRTQKAVVRVSPEVPLQNILPVICAKCEVSPEHVVLLRDNIAGEELELSKSLNELGIKELYAWDNRRETFRKSSLGNDETDKEKKKFLGFFKVNKRSNSKGCLTTPNSPSMHSRSLTLGPSLSLGSISGVSVKSEMKKRRAPPPPGSGPPVQDKASEKVSLGSQIDLQKKKRRAPAPPPPQPPPPSPLIPNRTEDKEENRKSTMGGGRQVPQKPPRGTARGPPQLVLPPPPPYPPPDTDVVEPLSFPGEGAGSEASDPIPK

SEQ ID NO: 49637 - protein, 763 aa, Homo sapiens
METKENRWVPVTVLPGCVGCRTVAALASWTVRDVKERIFAETGFPVSEQRLWRGGRELSDWIKIGDLTSKNCHLFVNLQSKGLKGGGRFGQTTPPLVDFLKDILRRYPEGGQILKELIQNAEDAGATEVKFLYDETQYGTETLWSKDMAPYQGPALYVYNNAVFTPEDWHGIQEIARSRKKDDPLKVGRFGIGFNSVYHITDVPCIFSGDQIGMLDPHQTLFGPHESGQCWNLKDDSKEISELSDQFAPFVGIFGSTKETFINGNFPGTFFRFPLRLQPSQLSSNLYNKQKVLELFESFRADADTVLLFLKSVQDVSLYVREADGTEKLVFRVTSSESKALKHERPNSIKILGTAISNYCKKTPSNNITCVTYHVNIVLEEESTKDAQKTSWLVCNSVGGRGISSKLDSLADELKFVPIIGIAMPLSSRDDEAKGATSDFSGKAFCFLPLPPGEESSTGLPVHISGFFGLTDNRRSIKWRELDQWRDPAALWNEFLVMNVVPKAYATLILDSIKRLEMEKSSDFPLSVDVIYKLWPEASKVKVHWQPVLEPLFSELLQNAVIYSISCDWVRLEQVYFSELDENLEYTKTVLNYLQSSGKQIAKVPGNVDAAVQLTAASGTTPVRKVTPAWVRQVLRKCAHLGCAEEKLHLLEFVLSDQAYSELLGLELLPLQNGNFVPFSSSVSDQDVIYITSAEYPRSLFPSLEGRFILDNLKPHLVAALKEAAQTRGRPCTQLQLLNPERFARLIKEVMNTFWPGRELIVQ

SEQ ID NO: 49638 - protein, 1237 aa, Homo sapiens
MDRPLSSSAEAEEELEWQVASRRRKAWAKCRSSWQASETEDLSTEATTQDEEEDEEEDLPGAQLPAAGGRGNVPNEKIAIWLKDCRTPLGASLDEQSSSTLKGVLVRNGGSFEDDLSLGAEANHLHESDAQIENCNNILAKERRLQFHQKGRSMNSTGSGKSSGTVSSVSELLELYEEDPEEILYNLGFGRDEPDIASKIPSRFFNSSSFAKGIDIKVFLSAQMQRMEVENPNYALTSRFRQIEVLTTVANAFSSLYSQVSGTPLQRIGSMSSVTSNKETDPPPPLTRSNTANRLMKTLSKLNLCVDKTEKGESSSPSPSAEKGKILNVSVIEESGNKNDQKSQKIMKKKESSSMLATVKEEVSGSSAAVTENADSDRISDEANSNFNQGTENEQSKETQSHESKLGEESGIVESKLDSDFNISSHSELENSSELKSVHISTPEKEPCAPLTIPSIRNIMTQQKDSFEMEEVQSTEGEAPHVPATYQLGLTKSKRDHLLRTASQHSDSSGFAEDSTDCLSLNHLQVQESLQAMGSSADSCDSETTVTSLGEDLATPTAQDQPYFNESEEESLVPLQKGLEKAAAVADKRKSGSQDFPQCNTIENTGTKQSTCSPGDHIIEITEVEEDLFPAETVELLREASAESDVGKSSESEFTQYTTHHILKSLASIEAKCSDMSSENTTGPPSSMDRVNTALQRAQMKVCSLSNQRMGRSLLKSKDLLKQRYLFAKAGYPLRRSQSLPTTLLSPVRVVSSVNVRLSPGKETRCSPPSFTYKYTPEEEQELEKRVMEHDGQSLVKSTIFISPSSVKKEEAPQSEAPRVEECHHGRTPTCSRLAPPPMSQSTCSLHSIHSEWQERPLCEHTRTLSTHSVPNISGATCSAFASPFGCPYSHRHATYPYRVCSVNPPSAIEMQLRRVLHDIRNSLQNLSQYPMMRGPDPAAAPYSTQKSSVLPLYENTFQELQVMRRSLNLFRTQMMDLELAMLRQQTMVYHHMTEEERFEVDQLQGLRNSVRMELQDLELQLEERLLGLEEQLRAVRMPSPFRSSALMVTELMQEQSYLKSELGLGLGEMGFEIPPGESSESVFSQATSESSSVCSGPSHANRRTGVPSTASVGKSKTPLVARKKVFRASVALTPTAPSRTGSVQTPPDLESSEEVDAAEGAPEVVGPKSEVEEGHGKLPSMPAAEEMHKNVEQDELQQVIREIKESIVGEIRREIVSGLLAAVSSSKASNSKQDYH

SEQ ID NO: 49639 - protein, 271 aa, Homo sapiens
MENKSLESSQTDLKLVAHPRAKSKVWKYFGFDTNAEGCILQWKKIYCRICMAQIAYSGNTSNLSYHLEKNHPEEFCEFVKSNTEQMREAFATAFSKLKPESSQQPGQDALAVKAGHGYDSKKQQELTAAVLGLICEGLYPASIVDEPTFKVLLKTADPRYELPSRKYISTKAIPEKYGAVREVILKELAEATWCGISTDMWRSENQNRAYVTLAAHFLGLGAPNCLSMGSRCLKTFEVPEENTAETITRVLYEVFIEWGISAKVFGATTNY

SEQ ID NO: 49640 - protein, 84 aa, Homo sapiens
MDYLAALAKAPFAAHGYGAFLTLSILDRYYTPTISRERAVELLRKCLEELQKRFILNLPTFSVRIIDKNGIHDLDNISFPKQGS

SEQ ID NO: 49641 - protein, 85 aa, Homo sapiens
MGPRQGRWWLLLWLPPLATLPVRGEAAAAALSVRRCKALKEKDLIRTSESDCYCYNQNSQVEWKYIWSTMQGDCVLLCGACQEDI

SEQ ID NO: 49642 - protein, 212 aa, Homo sapiens
DCIICMEKLSTASGYSDVTDSKAIGSLAVGHLTKCSHAFHLLCLLAMYCNGNKDGSLQCPSCKTIYGEKTGTQPQGKMEVLRFQMSLPGHEDCGTILIVYSIPHGIQGPEHPNPGKPFTARGFPRQCYLPDNAQGRKVLELLKVAWKRRLIFTVGTSSTTGETDTVVWNEIHHKTEMDRNITGHGYPDPNYLQNVLAELAAQGVTEDCLEQQ

SEQ ID NO: 49643 - protein, 85 aa, Homo sapiens
KKEHVFIHERPRKINGICISPKKVACQNLSAIFCFQSETKFKMTVCQLIEGTRYPACRYHYSPTEGFVLVTCDDLRPDSFLGYVK

SEQ ID NO: 49644 - protein, 144 aa, Homo sapiens
MSECEIFINNEWHESKSGKKFATCNPSTREQICEVEEGDKPDVDKAVEAAQVAFQRGSPWRRLDALSRGRLLHQLADLVERDRATLAALETMDTGKPFLHAFFIDLEGCIRTLRYFAGWADKIQGKTIPTDDNVVCFTRHEPIG

SEQ ID NO: 49645 - protein, 442 aa, Homo sapiens
MPRVKAAQAGRQSSAKRHLAEQFAVGEIITDMAKKEWKVGLPIGQGGFGCIYLADMNSSESVGSDAPCVVKVEPSDNGPLFTELKFYQRAAKPEQIQKWIRTRKLKYLGVPKYWGSGLHDKNGKRFMIMDRFGSDLQKIYEANAKRFSRKTVLQLSLRILDILEYIHEHEYVHGDIKASNLLLNYKNPDQVYLVDYGLAYRYCPEGVHKEYKEDPKRCHDGTIEFTSIDAHNGVAPSRRGDLEILGYCMIQWLTGHLPWEDNLKDPKYVRDSKIRYRENIASLMDKCFPEKNKPGEIAKYMETVKLLDYTEKPLYENLRDILLQGLKAIGSKDDGKLDLSVVENGGLKAKTITKRKKEIEESKEPGVEDTEWSNTQTEEAIQTRGPHERCGVLITGLPGDYGISSGLTDTQRPGAPGHHIPDMSTCAKCIHSSILDEFTEHL

SEQ ID NO: 49646 - protein, 337 aa, Homo sapiens
MATEHVNGNGTEEPMDTTSAVIHSENFQTLLDAGLPQKVAEKLDEIYVAGLVAHSDLDERAIEALKEFNEDGALAVLQQFKDSDLSHVQNKSAFLCGVMKTYRQREKQGTKVADSSKGPDEAKIKALLERTGYTLDVTTGQRKYGGPPPDSVYSGQQPSVGTEIFVGKIPRDLFEDELVPLFEKAGPIWDLRLMMDPLTGLNRGYAFVTFCTKEAAQEAVKLYNNHEIRSGKHIGVCISVANNRLFVGSIPKSKTKEQILEEFSKVTEGLTDVILYHQPDDKKKNRGFCFLEYEDHKTAAQARRRLMSGKVKVWGNVGTVEWADPIEDPDPEVMAKV

SEQ ID NO: 49647 - protein, 115 aa, Homo sapiens
MFSLLVRRCTCLLKESAKAQLSSPEDQDDQDDIKVSSFVPDLKELLPSVKVWSDWMLGYPDTWNPPPTSLDLPSHVAVDVWSTLADFCNILTAVNQSEVPLYKDPDDDLTLLILE

SEQ ID NO: 49648 - protein, 541 aa, Homo sapiens
MNCYLLLRFMLGIPLLWPCLGATENSQTKKVKQPVRSHLRVKRGWVWNQFFVPEEMNTTSHHIGQLRSDLDNGNNSFQYKLLGAGAGSTFIIDERTGDIYAIQKLDREERSLYILRAQVIDIATGRAVEPESEFVIKVSDINDNEPKFLDEPYEAIVPEMSPEGTLVIQVTASDADDPSSGNNARLLYSLLQGQPYFSVEPTTGVIRISSKMDRELQDEYWVIIQAKDMIGQPGALSGTTSVLIKLSDVNDNKPIFKESLYRLTVSESAPTGTSIGTIMAYDNDIGENAEMDYSIEEDDSQTFDIITNHETQEGIVILKKKVDFEHQNHYGIRAKVKNHHVPEQLMKYHTEASTTFIKIQVEDVDEPPLFLLPYYVFEVFEETPQGSFVGVVSATDPDNRKSPIRYSITRSKVFNINDNGTITTSNSLDREISAWYNLSITATEKYNIEQISSIPLYVQVLNINDHAPEFSQYYETYVCENAGSGQVIQTISAVDRDESIEEHHFYFNLSVEDTNNSSFTIIDNQELVLTFKKNLSSTSPS

SEQ ID NO: 49649 - protein, 72 aa, Homo sapiens
MTGERPSTALPDRRWGPRILGFWGGCRVWVFAAIFLLLSLAASWSKAENDFGLAAHGLLQRSLSMMGMSPMG

SEQ ID NO: 49650 - protein, 9 aa, Homo sapiens
MTTNVWLKQ

SEQ ID NO: 49651 - protein, 339 aa, Homo sapiens
  MOD_RES (1)..(1): Any amino acid
XDRAQVHTREPTTYPPVLSERAFLRGSLTLESSTSSDSRLGRARDEEGLLEMQKGKVTPETDLHKETHLGKVSLEGEGLGTDDGLHSRALQEWLSADVLHECDSQQPGKDALIHAGTNPYKCKQCGKGFNRKWYLVRHQRVHTGMKPYECNACGKAFSQSSTLIRHYLIHTGEKPYKCLECGKAFKRRSYLMQHHPIHTGEKPYECSQCRKAFTHRSTFIRHNRTHTGEKPFECKECEKAFSNRAHLIQHYIIHTGEKPYDCMACGKAFRCSSELIQHQRIHTGEKPYECTQCGKAFHRSTYLIQHSVIHTGEMPYKCIECGKAFKRRSHLLQHQRVHT

SEQ ID NO: 49652 - protein, 460 aa, Homo sapiens
MSQDGASQFQEVIRQELELSVKKELEKILTTASSHEFEHTKKDLDGFRKLFHRFLQEKGPSVDWGKIQRPPEDSIQPYEKIKARGLPDNISSVLNKLVVVKLNGGLGTSMGCKGPKSLIGVRNENTFLDLTVQQIEHLNKTYNTDVPLVLMNSFNTDEDTKKILQKYNHCRVKIYTFNQSRYPRINKESLLPVAKDVSYSGENTEAWYPPVDLYILNHLMNPPNGKRCEFVMEVTNKTRADVKGGTLTQYEGKLRLVEIAQVPKAHVDEFKSVSKFKIFNTNNLWISLAAVKRLQEQNAIDMEIIVNAKTLDGGLNVIQLETAVGAAIKSFENSLGINVPRSRFLPVKTTSDLLLVMSNLYSLNAGSLTMSEKREFPTVPLVKLGSSFTKVQDYLRRFESIPDMLELDHLTVSGDVTFGKNVSLKGTVIIIANHGDRIDIPPGAVLENKIVSGNLRILDH

SEQ ID NO: 49653 - protein, 478 aa, Homo sapiens
MDEFHPFIEALLPHVRAIAYTWFNLQARKRKYFKKHEKRMSKDEERAVKDELLSEKPEIKQKWASRLLAKLRKDIRQEYREDFVLTVTGKKHPCCVLSNPDQKGKIRRIDCLRQADKVWRLDLVMVILFKGIPLESTDGERLMKSPHCTNPALCVQPHHITVSVKELDLFLAYYVQEQDSGQSGSPSHNDPAKNPPGYLEDSFVKSGVFNVSELVRVSRTPITQGTGVNFPIGEIPSQPYYHDMNSGVNLQRSLSSPPSSKRPKTISIDENMEPSPTGDFYPSPSSPAAGSRTWHERDQDMSSPTTMKKPEKPLFSSASPQDSSPRLSTFPQHHHPGIPGVAHSVISTRTPPPPSPLPFPTQAILPPAPSSYFSHPTIRYPPHLNPQDTLKNYVPSYDPSSPQTSQLRICDWTMNQNGRHLYPSTSEDTLGITWQSPGTWASLVPFQVSNRTPILPANVQNYGLNIIGEPFLQAETSN

SEQ ID NO: 49654 - protein, 98 aa, Homo sapiens
MVKNQTMVTEFLLLGFLLGPRIQMLLFGLFSLFYVFTLLGNGTILGLISLDSRLHTPMYFFLSHLAVVNIAYACNTVPQMLVNLLHPAKPISFAGCMT

SEQ ID NO: 49655 - protein, 290 aa, Homo sapiens
MRLRTNATSSKLHLSPKADVKNLMSYVVTKTKAINGKYHRFLGRHFPRFYVLYTIFMKGLQMLWADAKKARRIKTNMWKHNIKFHQLPYREMEHLRQFRQDVTKCLFLGIISIPPFANYLVFLLMYLFPRQLLIRHFWTPKQQTDFLDIYHAFRKQSHPEIISYLEKVIPLISDAGLRWRLTDLCTKIQRGTHPAIHDILALRECFSNHPLGMNQLQALHVKALSRAMLLTSYLPPPLLRHRLKTHTTVIHQLDKALAKLGIGQLTAQEVKSACYLRGLNSTHIGEDRCR

SEQ ID NO: 49656 - protein, 79 aa, Homo sapiens
MEMGRRIHLELRNRTPSDVKELVLDNSRSNEGKLEGLTDEFEELEFLSTINVGLTSIANLPKLNKLKKYWQKSVRTSRI

SEQ ID NO: 49657 - protein, 40 aa, Homo sapiens
MEEIKPASASCVSKEKPSKVSDLISRFEGGRRLMSKNFTK

SEQ ID NO: 49658 - protein, 498 aa, Homo sapiens
MLLRSKPALPPPLMLLLLGPLGPLSPGALPRPAQAQDVVDLDFFTQEPLHLVSPSFLSVTIDANLATDPRFLILLGSPKLRTLARGLSPAYLRFGGTKTDFLIFDPKKESTFEERSYWQSQVNQDICKYGSIPPDVEEKLRLEWPYQEQLLLREHYQKKFKNSTYSRSSVDVLYTFANCSGLDLIFGLNALLRTADLQWNSSNAQLLLDYCSSKGYNISWELGNEPNSFLKKADIFINGSQLGEDFIQLHKLLRKSTFKNAKLYGPDVGQPRRKTAKMLKSFLKAGGEVIDSVTWHHYYLNGRTATKEDFLNPDVLDIFISSVQKVFQVVESTRPGKKVWLGETSSAYGGGAPLLSDTFAAGFMWLDKLGLSARMGIEVVMRQVFFGAGNYHLVDENFDPLPDYWLSLLFKKLVGTKVLMASVQGSKRRKLRVYLHCTNTDNPRYKEGDLTLYAINLHNVTKYLRLPYPFSNKQVDKYLLRPLGPHGLLSNWEAFGCK

SEQ ID NO: 49659 - protein, 213 aa, Homo sapiens
  MOD_RES (1)..(1): Any amino acid
XSRERGSRSEEPGAGNRESGSREPGLAAAAMSTVDLARVGACILKHAVTGEAVELRSLWREHACVVAGLRRFGCVVCRWIAQDLSSLAGLLDQHGVRLVGVGPEALGLQEFLDGDYFAGELYLDESKQLYKELGFKRYNSLSILPAALGKPVRDVAAKAKAVGIQGNLSGDLLQSGGLLVVSKEVPRRLRPQGAHPAGPGHLCGGLCQRPASV

SEQ ID NO: 49660 - protein, 115 aa, Homo sapiens
MSSDHLNNSTLKEAQFKDLFLKKAELEFAQIIIIVVVVTVMVVVIVCLLNHYKVSTRSFINRPNQSRRREDGLPQEGCLWPSDSAAPRLGASEVLSSRAGRDLRKQAALSCPRKL

SEQ ID NO: 49661 - protein, 262 aa, Homo sapiens
  MOD_RES (1)..(1): Any amino acid
XAVSTNLLKQNVLVPKEESSSDSDMGFHESQQNQKSNLKTKVKTAFGRMLSYKYRSKPACASQEGSTDHKEALLSNTQSLLPRIVKEFSSPKLFTAKMRKLSENATIQLDVVEAETEEITQGNTLLRARRTTKRLSVTSLPSGLQKGPYSPKKRPHFPALKKKKRGMENILRKSDLTVGKLQMQVDDLIETVTDKSMKLLAQRHAELQQCWPWWLTPVISALWEAERVDHLMSGVQNQPGQHGETLSLLKIQKLSRSGGGRL

SEQ ID NO: 49662 - protein, 126 aa, Homo sapiens
  MOD_RES (1)..(1): Any amino acid
XGEAEGSVKEIKHSPGPTRTVSTGTALSKYRSRSADGAKNYFEHEELTVSQLLLCLREGNQKVERLEVALKEAKERVSDFEKKTSNRSEIETQTEGSTEKENDEEKGPETTGFHHVGQDGLDLLTS

SEQ ID NO: 49663 - protein, 332 aa, Homo sapiens
MDRSLGWQGNSVPEDRTEAGDDKEYVGFATLPNQVHRKSVKKGFDFTLMVAGESGLGKSTLVNSLFLTDLYRDRKLLGAEERIMQTVEITKHAVDIEEKGVRLRLTIVDTPGFGDAVNNTECWKPVAEYIDQQFEQYFRDESGLNRKNIQDNRVHCCLYFISPFGHGLRPLDVEFMKALHQRVNIVPILAKADTLTPPEVDHKKRKIREEIEHFGIKIYQFPDCDSDEDEDFKLQDQALKESIPFAVIGSNTVVEARGRRVRGRLYPWGIVEVENPGHCDFVKLRTMLVRTHMQDLKDVTRETHYENYRAQCIQSMTRLVVKERNRKDRSRN

SEQ ID NO: 49664 - protein, 53 aa, Homo sapiens
MKDQSLRKLQQEMDSLTFRNLQLAKRVELLQDELALSEPRGKKNKDCLRMVNT

SEQ ID NO: 49665 - protein, 446 aa, Homo sapiens
MWATLPLLCAGAWLLGVPVCGAAELCVNSLEKFHFKSWMSKHRKTYSTEEYHHRLQTFASNWRKINAHNNGNHTFKMALNQFSDMSFAEIKHKYLWSEPQNCSATKSNYLRGTGPYPPSVDWRKKGNFVSPVKNQVCLAISILSLQNGHTPRQYTRKNNSKGPQNHHKHIPASVSSRHLSSPLPLRGQGGCLRQLLDFLHHWGPGVCDRHRNRKDAVLASVVFMREEPGPMHPSPRPQETDDAPEGTILAPASVEKGGTVHSRPGDAMRTLGCGQAEQQLVDCAQDFNNHGCQGGLPSQAFEYILYNKGIMGEDTYPYQGKDGYCKFQPGKAIGFVKDVANITIYDEEAMVEAVALYNPVSFAFEVTQDFMMYRTGIYSSTSCHKTPDKVNHAVLAVGYGEKNGIPYWIVKNSWGPQWGMNGYFLIERGKNMCGLAACASYPIPLV

SEQ ID NO: 49666 - protein, 408 aa, Homo sapiens
MELSERYGPVFTVHLGRQKTVVLTGFEAVKEALAGPGQELADRPPIAIFQLIQRGGGIFFSSGARWRAARQFTVRALHSLGVGREPVADKILQELKCLSGQLDGYRGRPFPLALLGWAPSNITFALLFGRRFDYRDPVFVSLLGLIDEVMVLLGSPGLQLFNVYPWLGALLQLHRPVLRKIEEVRAILRTLLEARRPHVCPGDPVCSYVDALIQQGQGDDPEGLFAEANAVACTLDMVMAGTETTSATLQWAALLMGRHPDVQGRVQEELDRVLGPGRTPRLEDQQALPYTSAVLHEVQRFITLLPHVPRCTAADTQLGGFLLPKGTPVIPLLTSVLLDETQWQTPGQFNPGHFLDANGHFVKREAFLPFSAGQQPSGPGWGGTSRAPGVGRPQLRLPPLHPPPDLRF

SEQ ID NO: 49667 - protein, 597 aa, Homo sapiens
QLEVKLVLLWKHNMRIEYVAMAPWPLEPEGPRVTRVEVTMEGGYDILHDVSCALRQPIRSLYRTHVIRRFWNTLQSINQTDQMLAHLQSFSSVPEHFTLPDSTKSGVPLFYIPPGSTTPVLSLQPSGSDSSHAQFAAYWKPVLSMDANSWQRWLHMHRLVLILEHDTPIPKHLHTPGSNGRYSTIQCRISHSSLTSLLRDWSSFVLVEGYSYVKLLSSAPDQPPNSFYMVRIISKAPCMVLRLGFPIGTPAPARHKIVSGLREEILRLRFPHRVQSKEPTPKVKRKGLGGAGGGSSPSKSPPVLGPQQALSDRPCLVVLHKPLDKLLIRYEKLPLDYRAPFLLTLEPPGPLPLVSGRSASSSLASLSRYLYHQRWLWSVPSGLAPALPLSAIAQLLSILTEVRLSEGFHFACSGEGIINMVLELPIQNEPPGQAAAEEKHTCVVQYILFPPHSTSTKDSFSTDDDNDVEVEALEGDSELNLVTEVWVEPQYGRVGPGPGIWKHLQDLTYSEIPQALHPRDAACIGSMLSFEYLIQLCQSKEWGPLPPEPRVSDGLDQGGDTCVHEIPFHFDLMGLLPQCQQLQMFFLLLARAAWGRS

SEQ ID NO: 49668 - protein, 99 aa, Homo sapiens
MHGAPRLTFPCASEYLWHAREKAYQDHRRKVQSAQPLVDTRAPLTFRHLHLKLKRLKLEEERLSVIERDNRLLLEKVASVMRTRGQTDSKNNSKHRSRK

SEQ ID NO: 49669 - protein, 26 aa, Homo sapiens
MRTLFNLLWLALACSPVHTTLSKSDA

SEQ ID NO: 49670 - protein, 191 aa, Homo sapiens
  MOD_RES (1)..(1): Any amino acid
XSQGSPMDPMVMKRPQLYGMGSNPHSQPQQSSPYPGGSYGPPGPQRYPIGIQGRTPGAMAGMQYPQQQMPPQYGQQGVSGYCQQGQQPYYSQQPQPPHLPPQAQYLPSQSQQRYQPQQDMSQEGYGTRSQPPLAPGKPNHEDLNLIQQERPSSLPRGSRSFAQAGMQWCSHGTLQPQPPWAQVILPPQPHE

SEQ ID NO: 49671 - protein, 204 aa, Homo sapiens
  MOD_RES (1)..(1): Any amino acid
XEPELPGSALRSLWSSLCLGPAPAPPGPVSPEGRLAAAWDALIVRPVRRWRRVAVGVNACVDVVLSGVKLLQALGLSPGNGKDHSILHSRNDLEEAFIHFMGKGAAAERFFSDKETFHDIAQVASEFPGAQHYVGGNAALIGQKFAANSDLKVLLCGPVGPKLHELLDDNVFVPPESLQEVDEFHLILEYQAAGLSRGDFPWAE

SEQ ID NO: 49672 - protein, 247 aa, Homo sapiens
LQETHRIYKQKLEELAALQTLCSSSISKQKKHLKDLKLTLQRCKRHASREEAELVQQMAANIKERQDVFFDMEAYLPKKNGLYLNLVLGNVNVTLLSNQAKFAYKDEYEKFKLYLTIILLLGAVACRFVLHYRVTDEVFNFLLVWYYCTLTIRESILISNGSRIKGWWVSHHYVSTFLSGVMLTWPNGPIYQKFRNQFLAFSIFQSCVQFLQYYYQRGCLYRLRALGERNHLDLTVVLAALQCRHAV

SEQ ID NO: 49673 - protein, 419 aa, Homo sapiens
MSVVHQLSAGWLLDHLSFINKINYQLHQHHEPCCRKKEFTTSVHFESLQMDSVSSSGVCAAFIASDSSTKPENDDGGNYEMFTRKFVFRPELFDVTKPYITPAVHKECQQSNEKEDLMNGVKKEISISIIGKKRKRCVVFNQGELDAMEYHTKIRELILDGSLQLIQEGLKSGFLYPLFEKQDKGSKPITLPLDACSLSELCEMAKHLPSLNEMEHQTLQLVEEDTSVTEQDLFLRVVENNSSFTKVITLMGQKYLLPPKSSFLLSDISCMQPLLNYRKTFDVIVIDPPWQNKSVKRSNRYSYLSPLQIQQIPIPKLAAPNCLLVTWVTNRQKHLRFIKEELYPSWSVEVVAEWHWVKITNSGEFVFPLDSPHKKPYEGLILGRVQEKTALPLRGFKRLHQARWGIFGVVCSKFTARLD

SEQ ID NO: 49674 - protein, 64 aa, Homo sapiens
MQKEMKMIKDEDVHFDLAVKKTPSFPHCLQPVASRGKAPQRHPFPEALRGPFSQFRYEPPPGDL

SEQ ID NO: 49675 - protein, 106 aa, Homo sapiens
FSEGACKPGYASALMTAIFPRFSKPAPMFLDDSFRKWARIREFVPPFGIKGQDNLIKAILSVTKEYRLTPALDSLRCRRCIIVGNGGVLANKSLGSRIDDYDIVVR

SEQ ID NO: 49676 - protein, 129 aa, Homo sapiens
MLLLLLSIIVLHVAVLVLLFVSTIVSQWIVGNGHATDLWQNCSTSSSGNVHHCFSSSPNEWLQSVQATMILSIIFSILSLFLFFCQLFTLTKGGRFYITGIFQILAALPSLDKSDRAQETTSVFLKDKS

SEQ ID NO: 49677 - protein, 618 aa, Homo sapiens
METTPLNSQKQLSACEDGEDCQENGVLQKVVPTPGDKVESGQISNGYSAVPSPGAGDDTRHSIPATTTTLVAELHQGERETWGKKVDFLLSVIGYAVDLGNVWRFPYICYQNGGGAFLLPYTIMAIFGGIPLFYMELALGQYHRNGCISIWRKICPIFKGIGYAICIIAFYIASYYNTIMAWALYYLISSFTDQLPWTSCKNSWNTGNCTNYFSEDNITWTLHSTSPAEEFYTRHVLQIHRSKGLQDLGGISWQLALCIMLIFTVIYFSIWKGVKTSGKVVWVTATFPYIILSVLLVRGATLPGAWRGVLFYLKPNWQKLLETGVWIDAAAQIFFSLGPGFGVLLAFASYNKFNNNCYQDALVTSVVNCMTSFVSGFVIFTVLGYMAEMRNEDVSEVAKDAGPSLLFITYAEAIANMPASTFFAIIFFLMLITLGLDSTFAGLEGVITAVLDEFPHVWAKRRERFVLAVVITCFFGSLVTLTFGGAYVVKLLEEYATGPAVLTVALIEAVAVSWFYGITQFCRDVKEMLGFSPGWFWRICWVAISPLFLLFIICSFLMSPPQLRLFQYNYPYWSIILGYCIGTSSFICIPTYIAYRLIITPGTFKERIIKSITPETPT

SEQ ID NO: 49678 - protein, 142 aa, Homo sapiens
MAAGGDHGSPDSYRSPLASRYASPEMCFVFSDRYKFRTWRQLWLWLAEAEQVLRLGLALSPRLECSGTILARYNLCILGSSCPLTSASQAGTRGARHHARQIFVLFCRDGSHCVFQCGLELLDSSDPPTLASQRYIGFAYHR

SEQ ID NO: 49679 - protein, 422 aa, Homo sapiens
MFPDQPEKPLNLAHIVPPRPVTSMNDTLFSHSVPSSGSPFITRSSPPKDSEVEQNKLLARAAPAFLKGKGIQYSLNVADRLADEHVLIGLYVNMLRNNPSCMLESSNRLDEEHRLIARYAARLAAESSSSQPPQQRSAPDISFTIDANKQQRQLIAELENKNREILQEIQRLRLEHEQASQPTPEKAQQNPTLLAELRLLRQRKDELEQRMSALQESRRELMVQLEGLMKLLKTQGAGSPRSSPSHTISRPIPMPIRSASACSTPTHTPQDSLTGVGGDVQEAFAQSSRRNLRNDLLVAADSITNTMSSLVKELNSEVGSETESNVDSEFARTQFEDLVPSPTSEKAFLAQIHARKPGYIHSGATTSTMRGDMVTEDADPYVQPEDENYENDSVRQLENELQMEEYLKQKLQDEAYQVSLQG

SEQ ID NO: 49680 - protein, 398 aa, Homo sapiens
LALLCLDGVFLSSAENDFVHRIQEELDRFLLQKQLSKVLLFPPLSSRLRYLIHRTAENFDLLSSFSVGEGWKRRTVICHQDIRVPSSDGLSGPCRAPASCPSRQEEWGLTSTSVLKREAPAGRDPEEPGDVGAGDPNSDQGLPVLMTQGTEDLKGPGQRCENEPLLDPVGPEPLGPESQSGKGDMVEMATRFGSTLQLDLEKGKESLLEKRLVAEEEEDEEEVEEDGPSSCSEDDYSELLQEITDNLTKKEIQIEKIHLDTSSFVEELPGEKDLAHVVEIYDFEPALKTEDLLATFSEFQEKGFRIQWVDDTHALGIFPCLASAAEALTREFSVLKIRPLTQGTKQSKLKALQRPKLLRLVKERPQTNATVARRLVARALGLQHKKKERPAVRGPLPP

SEQ ID NO: 49681 - protein, 110 aa, Homo sapiens
MESRMWPALLLSHLLPLWPLLLLPLPPPAQGSSSSPRTPPAPARPPCARGGPSAPRHVCVWERAPPPSRSPRVPRSRRQVLPGTAPPATPSGFEEGPPSSQYPWAIVWGP

SEQ ID NO: 49682 - protein, 63 aa, Homo sapiens
  MOD_RES (1)..(1): Any amino acid
XSEERLARGGKENNSVLDRVSHCHPGWSAVVQPHLPGSSNSHASASQVAGITEIPSRRLLHWV

SEQ ID NO: 49683 - protein, 215 aa, Homo sapiens
MAETSALPTGFGELEVLAVGMVLLVEALSGLSLNTLTIFSFCKTPELRTPCHLLVLSLALADSGISLNALVAATSSLLRRWPYGSDGCQAHGFQGFVTALASICSSAAIAWGRYHHYCTRSQLAWNSAVSLVLFVWLSSAFWAALPLLGWGHYDYEPLGTCCTLDYSKGDRNFTSFLFTMSFFNFAMPLFITITSYSLMEQKLGKSGHLQGHQGI

SEQ ID NO: 49684 - protein, 77 aa, Homo sapiens
  MOD_RES (1)..(1): Any amino acid
XDIFLVRGGMRAVEFKVVETDPSPYCIVAPDTVIHCEGEPIKREELLDSSIPPTSASQSAGITDVSHHAGLRIFLYG

SEQ ID NO: 49685 - protein, 592 aa, Homo sapiens
MDVMLENYCHLISVGCHMTKPDVILKLERGEEPWTSFAGHTCLEENWKAEDFLVKFKEHQEKYSRSVVSINHKKLVKEKSKIYEKTFTLGKNPVNSKNLPPEYDTHGRILKNVSELIISNLNPARKRLSEYNGYGKSLLSTKQETTHPEVKSHNQSARAFSHNEVLMQYQKTETPAQSFGYNDCEKSFLQRGGLITHSRPYKGENPSVYNKKRRATNIEKKHTCNECGKSFCRKSVLILHQGIHSEEKPYQCHQCGNAFRRKSYLIDHQRTHTGEKPFVCNECGKSFRLKTALTDHQRTHTGEKSYECLQCRNAFRLKSHLIRHQRTHTGEKPYECNDCGKSFRQKTTLSLHQRIHTGEKPYICKECGKSFHQKANLTVHQRTHTGEKPYICNECGKSFSQKTTLALHEKTHNEEKPYICSECGKSFRQKTTLVAHQRTHTGEKSYECPHCGKAFRMKSYLIDHHRTHTGEKPYECNECGKSFSQKTNLNLHQRIHTGEKPYVCNECGKSFRQKATLTVHQKIHTGQKSYECPQCGKAFSRKSYLIHHQRTHTGEKPYKCSECGKCFRQKTNLIVHQRTHTGGEDGLTGCLS

SEQ ID NO: 49686 - protein, 166 aa, Homo sapiens
MQPCSPQRCQPPASCSPHENILPYKYTSWRPPFPKRSDRKDVQHNEWYIGEYSRQAVEEAFMKENKDGSFLVRDCSTKSKEEPYVLAVFYENKVYNVKIRFLERNQQFALGTGLRGDEKFDSVEDIIEHYKNFPIILIDGKDKTGVHRKQCHLTQPLPLTRHLLPL

SEQ ID NO: 49687 - protein, 35 aa, Homo sapiens
MDAPARLLAPLLLLCAQQLRGTRRTGMTITTNWTA

SEQ ID NO: 49688 - protein, 19 aa, Homo sapiens
  MOD_RES (1)..(1): Any amino acid
XILENVEVKGEKPAKNVEN

SEQ ID NO: 49689 - protein, 154 aa, Homo sapiens
MAETVWSTDTGEAVYRSRDPVRNLRLRVHLQRITSSNFLHYQPAAELGKDLIDLATFRPQPTASGHRPEEDEEEEIVIGWQEKLFSQFEVDLYQNETACQSPLDYQYRQEILKLENSGGKKNRRIFTYTDSDRYTNLEEVLFFLGSHSFHLCFL

SEQ ID NO: 49690 - protein, 669 aa, Homo sapiens
MWTPVRRGAAWLGTLLGPGEGPPEPRGGAAHAHKPPAGSRKSTDQAVRFGPSQGMCSEARLARRLRDALREEEPWAVEELLRCGADPNLVLEDGAAAVHLAAGARHPRGLRCLGALLRQGGDPNARSVEALTPLHVAAAWGCRRGLELLLSQGADPALRDQDGLRPLDLALQQGHLECARVLQDLDTRTRTRTRIGAETQEPEPAPGTPGLSGPTDETLDSIALQKQPCRGDNRDIGLEADPGPPSLPVPLETVDKHGSSASPPGHWDYSSDASFVTAVEVSGAEDPASDTPPWAGSLPPTRQGLLHVVHANQRVPRSQGTEAELNARLQALTLTPPNAAGFQSSPSSMPLLDRSPAHSPPRTPTPGASDCHCLWEHQTSIDSDMATLWLTEDEASSTGGREPVGPCRHLPVSTVSDLELLKGLRALGENPHPITPFTRQLYHQQLEEAQIAPGPEFSGHSLELAAALRTGCIPDVQADEDALAQQFEQPDPARRWREGVVKSSFTYLLLDPRETQDLPARAFSLTPAERLQTFIRAIFYVGKGTRARPYVHLWEALGHHGRSRKQPHQACPKVRQILDIWASGCGVVSLHCFQHVVAVEAYTREACIVEALGIQTLTNQKQGHCYGVVAGWPPARRRRLGVHLLHRALLVFLAEGERQLHPQDIQARG

SEQ ID NO: 49691 - protein, 168 aa, Homo sapiens
MARRPRNSRAWHFVLSAARRDADARAVALAGSTNWGYDSDGQHSDSDSDPEYSTLPPSIPSAVPVTGESFCDCAGQSEASFCSSLHSAHRGRDCRCGEEDEYFDWVWDDLNKSSATLLSCDNRKVSFHMEYSCGTAAIRGTKELGEGQHFWEIKMTSPVYGTDMMVGI

SEQ ID NO: 49692 - protein, 92 aa, Homo sapiens
MDGTETRQRRLDSCGKPGELGLPHPLSTGGLPVASEDGALRAPESQSVTPKPLETEPSRETTWSIGLQVTVPFMFAGLGLSWAGMLLDYFQF

SEQ ID NO: 49693 - protein, 47 aa, Homo sapiens
MEPGGDHRSRSSGGRGGPGPAVASARGRRLPPAGSSGSAEPEEDEGD

SEQ ID NO: 49694 - protein, 114 aa, Homo sapiens
MPGIDKLPIEETLEDSPQTRSLLGVFEEDATAISNYMNQLYQAMHRIYDAQNELSAATHLTSKLLKEYEKQLSSCHAVLSTQLADAMMFPITQFKERDLKEILTLKEVFQIASN

SEQ ID NO: 49695 - protein, 690 aa, Homo sapiens
MLPRGRPRALGAAALLLLLLLLGFLLFDGRLRRAAALDGDPGAGPGDHNRSDCGPQPPPPPKCELLHVAIVCAGHNSSRDVITLVKSMLFYRKNPLHLHLVTDAVARNILETLFHTWMVPAVRVSFYHADQLKPQVSWIPNKHYSGLYGLMKLVLPSALPAELARVIVLDTDVTFASDISELWALFAHFSDTQAIGLVENQSDWYLGNLWKNHRPWPALGRGFNTGVILLRLDRLRQAGWEQMWRLTARRELLSLPATSLADQDIFNAVIKEHPGLVQRLPCVWNVQLSDHTLAERCYSEASDLKVIHWNSPKKLRVKNKHVEFFRNFYLTFLEYDGNLLRRELFVCPSQPPPGAEQLQQALAQLDEEDPCFEFRQQQLTVHRVHVTFLPHEPPPPRPHDVTLVAQLSMDRLQMLEALCRHWPGPMSLALYLTDAEAQQFLHFVEASPVLAARQDVAYHVVYREGPLYPVNQLRNVALAQALTPYVFLSDIDFLPAYSLYDYLRASIEQLGLGSRRKAALVVPAFETLRYRFSFPHSKVELLALLDAGTLYTFRYHEWPRGHAPTDYARWREAQAPYRVQWAANYEPYVVVPRDCPRYDPRFVGFGWNKVAHIVELDAQEYELLVLPEAFTIHLPHAPSLDISRFRSSPTYRDCLQALKDEFHQDLSRHHGAAALKYLPALQQPQSPARG

SEQ ID NO: 49696 - protein, 393 aa, Homo sapiens
MAWRHLKKRAQDAVIILGGGGLLFASYLMATGDERFYAEHLMPTLQGLLDPESAHRLAVRFTSLGLLPRARFQDSDMLEVRVLGHKFRNPVGIAAGFDKHGEAVDGLYKMGFGFVEIGSVTPKPQEGNPRPRVFRLPEDQAVINRYGFNSHGLSVVEHRLRARQQKQAKLTEDGLPLGVNLGKNKTSVDAAEDYAEGVRVLGPLADYLVVNVSSPNTAGLRSLQGKAELRRLLTKVLQERDGLRRVHRPAVLVKIAPDLTSQDKEDIASVVKELGIDGLIVTNTTVSRPAGLQGALRSETGGLSGKPLRDLSTQTIREMYALTQVPIIGVGGVSSGQDALEKIRAGASLVQLYTALTFWGPPVVGKVKRELEALLKEQGFGGVTDAIGADHRR

SEQ ID NO: 49697 - protein, 109 aa, Homo sapiens
MVESIKHCIVLLQIAKSTINPVDAIYQPSPLEPVISTMPSQTVLPPEPVQLCKSEQRPSSLPVGPVLATLGHHQTPTPNSTGSGHSPPSSSLTSPSHVNLSPNTVPEFS

SEQ ID NO: 49698 - protein, 1372 aa, Homo sapiens
MSAPDEGRRDPPKPKGKTLGSFFGSLPGFSSARNLVANAHSSARARPAADPTGAPAAEAAQPQAQVAAHPEQTAPWTEKELQPSEKQMVSGAKDLVCSKMSRAKDAVSSGVASVVDVAKGVVQGGLDTTRSALTGTKEVVSSGVTGAMDMAKGAVQGGLDTSKAVLTGTKDTVSTGLTGAVNVAKGTVQAGVDTTKTVLTGTKDTVTTGVMGAVNLAKGTVQTGVETSKAVLTGTKDAVSTGLTGAVNVARGSIQTGVDTSKTVLTGTKDTVCSGVTGAMNVAKGTIQTGVDTSKTVLTGTKDTVCSGVTGAMNVAKGTIQTGVDTSKTVLTGTKDTVCSGVTGAMNVAKGTIQTGVDTTKTVLTGTKNTVCSGVTGAVNLAKEAIQGGLDTTKSMVMGTKDTMSTGLTGAANVAKGAMQTGLNTTQNIATGTKDTVCSGVTGAMNLARGTIQTGVDTTKIVLTGTKDTVCSGVTGAANVAKGAVQGGLDTTKSVLTGTKDAVSTGLTGAVNVAKGTVQTGVDTTKTVLTGTKDTVCSGVTSAVNVAKGAVQGGLDTTKSVVIGTKDTMSTGLTGAANVAKGAVQTGVDTAKTVLTGTKDTVTTGLVGAVNVAKGTVQTGMDTTKTVLTGTKDTIYSGVTSAVNVAKGAVQTGLKTTQNIATGTKNTFGSGVTSAVNVAKGAAQTGVDTAKTVLTGTKDTVTTGLMGAVNVAKGTVQTSVDTTKTVLTGTKDTVCSGVTGAANVAKGAIQGGLDTTKSVLTGTKDAVSTGLTGAVKLAKGTVQTGMDTTKTVLTGTKDAVCSGVTGAANVAKGAVQMGVDTAKTVLTGTKDTVCSGVTGAANVAKGAVQTGLKTTQNIATGTKNTLGSGVTGAAKVAKGAVQGGLDTTKSVLTGTKDAVSTGLTGAVNLAKGTVQTGVDTSKTVLTGTKDTVCSGVTGAVNVAKGTVQTGVDTAKTVLSGAKDAVTTGVTGAVNVAKGTVQTGVDASKAVLMGTKDTVFSGVTGAMSMAKGAVQGGLDTTKTVLTGTKDAVSAGLMGSGNVATGATHTGLSTFQNWLPSTPATSWGGLTSSRTTDNGGEQTALSPQEAPFSGISTPPDVLSVGPEPAWEAAATTKGLATDVATFTQGAAPGREDTGLLATTHGPEEAPRLAMLQNELEGLGDIFHPMNAEEQAQLAASQPGPKVLSAEQGSYFVRLGDLGPSFRQRAFEHAVSHLQHGQFQARDTLAQLQDCFRLIEKAQQAPEGQPRLDQGSGASAEDAAVQEERDAGVLSRVCGLLRQLHTAYSGLVSSLQGLPAELQQPVGRARHSLCELYGIVASAGSVEELPAERLVQSREGVHQAWQGLEQLLEGLQHNPPLSWLVGPFALPAGGQ

SEQ ID NO: 49699 - protein, 202 aa, Homo sapiens
MSILKVKKAFFALVTNGVRAAPLWDSKKQSFVGMLTITDFINILHRYYKSALVQIYELEEHKIETWREVYLQDSFKPLVCISPNARSLSSPSQSSCPSLWKSYRLAPMPILLWFALPPPSMWLWGFLYSIESQPCQWWMRRNLAAEKTYNNLDVSVTKALQHRSHYFEGVLKCYLHETLETIINRLVEAEVHRLVVVDENDV

SEQ ID NO: 49700 - protein, 802 aa, Homo sapiens
MKHFCSSSVSEDLGCRRGDFSRKHYGSVELLISSDADGAIQRAGRFRVENGSSDENATALPGTWRRTDVHLENPEYHTRWYFKYFLGQVHQNYIGNDAEKSPFFLSVTLSDQNNQRVPQYRAILWRKTGTQKICLPYSPTKTLSVKSILSAMNLDKFEKGPREIFHPEIQKDLLVLEEQEGSVNFKFGVLFAKDGQLTDDEMFSNEIGSEPFQKFLNLLGDTITLKGWTGYRGGLDTKNDTTGIHSVYTVYQGHEIMFHVSTMLPYSKENKQQVERKRHIGNDIVTIVFQEGEESSPAFKPSMIRSHFTHIFALVRYNQQNDNYRLKIFSEESVPLFGPPLPTPPVFTDHQEFRDFLLVKLINGEKATLETPTFAQKRRRTLDMLIRSLHQDLMPDLHKNMLNRRSFSDVLPESPKSARKKEEARQAEFVRIGQALKLKSIVRGDAPSSLAASGICKKEPWEPQCFCSNFPHEAVCADPWGQALLVSTDAGVLLVDDDLPSVPVFDRTLPVKQMHVLETLDLLVLRADKGKDARLFVFRLSALQKGLEGKQAGKSRSDCRENKLEKTKGCHLYAINTHHSRELRIVVAIRNKLLLITRKHNKPSGVTSTSLLSPLSESPVEEFQYIREICLSDSPMVMTLVDGPAEESDNLICVAYRHQFDVVNESTGEAFRLHHVEANRVNFVAAIDVYEDGEAGLLLCYNYSCIYKKVCPFNGGSFLVQPSASDFQFCWNQAPYAIVCAFPYLLAFTTDSMEIRLVVNGNLVHTAVVPQLQLVASRVKFNQKICTRFHLETSWAEASNDL

SEQ ID NO: 49701 - protein, 223 aa, Homo sapiens
MVPRLLLRAWPRGPAVGPGAPSRPLSAGSGPGQYLQRSIVPTMHYQDSLPRLPIPKLEDTIRRYLSAQKPLLNDGQFRKTEQFCKSFENGIGKELHEQLVALDKQNKHTSYISGQGFDRHLFALRHLAAAKGIILPELYLDPAYGQINHNVLSTSTLSSPAVNLGGFAPVVSDGFGVGYAVHDNWIGCNVSSYPGRNAREFLQCVEKALEDMFDALEGKSIKS

SEQ ID NO: 49702 - protein, 137 aa, Homo sapiens
MRLSRAFAWPLLCSIATTVKAPFATAPSDCGGHYTDEYGRIFNYAGPKTECVWIIELNPGEIVTVAIPDLKGFACGKEYVEVLDGPPGSESLDRICKAFSTFYYSSSNIITIKYSREPSHPPTFFEIYYFVDAWSTH

SEQ ID NO: 49703 - protein, 1400 aa, Homo sapiens
MPEQERQITAREGASRKILSKLSLPTRAWEPAMKKSFAFDNVGYEGGLDGLGPSSQVATSTVRILGMTCQSCVKSIEDRISNLKGIISMKVSLEQGSATVKYVPSVVCLQQVCHQIGDMGFEASIAEGKAASWPSRSLPAQEAVVKLRVEGMTCQSCVSSIEGKVRKLQGVVRVKVSLSNQEAVITYQPYLIQPEDLRDHVNDMGFEAAIKSKVAPLSLGPIDIERLQSTNPKRPLSSANQNFNNSETLGHQGSHVVTLQLRIDGMHCKSCVLNIEENIGQLLGVQSIQVSLENKTAQVKYDPSCTSPVALQRAIEALPPGNFKVSLPDGAEGSGTDHRSSSSHSPGSPPRNQVQGTCSTTLIAIAGMTCASCVHSIEGMISQLEGVQQISVSLAEGTATVLYNPSVISPEELRAAIEDMGFEASVVSESCSTNPLGNHSAGNSMVQTTDGTPTSVQEVAPHTGRLPANHAPDILAKSPQSTRAVAPQKCFLQIKGMTCASCVSNIERNLQKEAGVLSVLVALMAGKAEIKYDPEVIQPLEIAQFIQDLGFEAAVMEDYAGSDGNIELTITGMTCASCVHNIESKLTRTNGITYASVALATSKALVKFDPEIIGPRDIIKIIEEIGFHASLAQRNPNAHHLDHKMEIKQWKKSFLCSLVFGIPVMALMIYMLIPSNEPHQSMVLDHNIIPGLSILNLIFFILCTFVQLLGGWYFYVQAYKSLRHRSANMDVLIVLATSIAYVYSLVILVVAVAEKAERSPVTFFDTPPMLFVFIALGRWLEHLAKSKTSEALAKLMSLQATEATVVTLGEDNLIIREEQVPMELVQRGDIVKVVPGGKFPVDGKVLEGNTMADESLITGEAMPVTKKPGSTVIAGSINAHGSVLIKATHVGNDTTLAQIVKLVEEAQMSKAPIQQLADRFSGYFVPFIIIMSTLTLVVWIVIGFIDFGVVQRYFPIKTVMFDKTGTITHGVPRVMRVLLLGDVATLPLRKVLAVVGTAEASSEHPLGVAVTKYCKEELGTETLGYCTDFQAVPGCGIGCKVSNVEGILAHSERPLSAPASHLNEAGSLPAEKDAVPQTFSVLIGNREWLRRNGLTISSDVSDAMTDHEMKGQTAILVAIDGVLCGMIAIADAVKQEAALAVHTLQSMGVDVVLITGDNRKTARAIATQVGINKVFAEVLPSHKVAKVQELQNKGKKVAMVGDGVNDSPALAQADMGVAIGTGTDVAIEAADVVLIRNDLLDVVASIHLSKRTVRRIRINLVLALIYNLVGIPIAAGVFMPIGIVLQPWMGSAAMAASSVSVVLSSLQLKCYKKPDLERYEAQAHGHMKPLTASQVSVHIGMDDRWRDSPRATPWDQVSYVSQVSLSSLTSDKPSRHSAAADDDGDKWSLLLNGRDEEQYI

SEQ ID NO: 49704 - protein, 136 aa, Homo sapiens
AASMFYGRLVAVATLRNHRPRTAQRAAAQVLGSSGLFNNHGLQVQQQQQRNLSLHEYMSMELLQEAGVSVPKGYVAKSPDEAYAIAKKLGTEERNNMCRINCNYEYFWQVLWDQNSQVIRSRFKRCRDKGTGFSWW

SEQ ID NO: 49705 - protein, 25 aa, Homo sapiens
MYLLEHLHPFLQRQQLDYGIYVIHQ

SEQ ID NO: 49706 - protein, 1797 aa, Homo sapiens
MENEIFTPLLEQFMTSPLVTWVKTFGPLAAGNGTNLDEYVALVDGVFLNQVMLQINPKLESQRVNKKVNNDASLRMHNLSILVRQIKFYYQETLQQLIMMSLPNVLIIGKNPFSEQGTEEVKKLLLLLLGCAVQCQKKEEFIERIQGLDFDTKAAVAAHIQEVTHNQENVFDLQWMEVTDMSQEDIEPLLKNMALHLKRLIDERDEHSETIIELSEERDGLHFLPHASSSAQSPCGSPGMKRTESRQHLSVELADAKAKIRRLRQELEEKTEQLLDCKQELEQMEIELKRLQQENMNLLSDARSARMYRDELDALREKAVRVDKLESEVSRYKERLHDIEFYKARVEELKEDNQVLLETKTMLEDQLEGTRARSDKLHELEKENLQLKAKLHDMEMERDMDRKKIEELMEENMTLEMAQKQSMDESLHLGWELEQISRTSELSEAPQKSLGHEVNELTSSRLLKLEMENQSLTKTVEELRTTVDSVEGNASKILKMEKENQRLSKKVEILENEIVQEKQSLQNCQNLSKDLMKEKAQLEKTIETLRENSERQIKILEQENEHLNQTVSSLRQRSQISAEARVKDIEKENKILHESIKETSSKLSKIEFEKRQIKKELEHYKEKGERAEELENELHHLEKENELLQKKITNLKITCEKIEALEQENSELERENRKLKKTLDSFKNLTFQLESLEKENSQLDEENLELRRNVESLKCASMKMAQLQLENKELESEKEQLKKGLELLKASFKKTERLEVSYQGLDIENQRLQKTLENSNKKIQQLESELQDLEMENQTLQKNLEELKISSKRLEQLEKENKSLEQETSQLEKDKKQLEKENKRLRQQAEIKDTTLEENNVKIGNLEKENKTLSKEIGIYKESCVRLKELEKENKELVKRATIDIKTLVTLREDLVSEKLKTQQMNNDLEKLTHELEKIGLNKERLLHDEQSTDDSRYKLLESKLESTLKKSLEIKEEKIAALEARLEESTNYNQQLRQELKTVKKNYEALKQRQDEERMVQSSPPISGEDNKWERESQETTRELLKVKDRLIEVERNNATLQAEKQALKTQLKQLETQNNNLQAQILALQRQTVSLQEQNTTLQTQNAKLQVENSTLNSQSTSLMNQNAQLLIQQSSLENENESVIKEREDLKSLYDSLIKDHEKLELLHERQASEYESLISKHGTLKSAHKNLEVEHRDLEDRYNQLLKQKGQLEDLEKMLKVEQEKMLLENKNHETVAAEYKKLCGENDRLNHTYSQLLKETEVLQTDHKNLKSLLNNSKLEQTRLEAEFSKLKEQYQQLDITSTKLNNQCELLSQLKGNLEEENRHLLDQIQTLMLQNRTLLEQNMESKDLFHVEQRQYIDKLNELRRQKEKLEEKIMDQYKFYDPSPPRRRGNWITLKMRKLIKSKKDINRERQKSLTLTPTRSDSSEGFLQLPHQDSQDSSSVGSNSLEDGQTLGTKKSSMVALKRLPFLRNRPKDKDKMKACYRRSMSMNDLVQSMVLAGQWTGSTENLEVPDDISTGKRRKELGAMAFSTTAINFSTVNSSAGFRSKQLVNNKDTTSFEDISPQGVSDDSSTGSRVHASRPASLDSGRTSTSNSNNNASLHEVKAGAVNNQSRPQSHSSGEFSLLHDHEAWSSSGSSPIQYLKRQTRSSPVLQHKISETLESRHHKIKTGSPGSEVVTLQQFLEESNKLTSVQIKSSSQENLLDEVMKSLSVSSDFLGKDKPVSCGLASVISTAEGTTRRTSIHDFLTKDSRLPISVDSPPAAADSNTTAASNVDKVQESRNSKSRSREQQSS

SEQ ID NO: 49707 - protein, 601 aa, Homo sapiens
  MOD_RES (1)..(1): Any amino acid
XTARGEPSRGSPRAEEKLRTNPGDGDVLLGPSLGAGLSPCLGVRWPRDWYCLQVWGHGSDASQRSLPNSCRGEIKSASLKDLCLEDKRRIANLIKELARVSEEKEVTEERLKAEQESFEKKIRQLEEQNELIIKEREALQLQYRECQELLSLYQKYLSEQQEKLTMSLSELGAARMQEQQVSSRKSTLQCSSVELDGSYLSIARPQTYYQTKQRPKSAVQDSASESLIAFRNNSLKPVTLHHPKDDLDKIPSETTTCNCESPGRKPAVPTEKMPQEELHMKECPHLKPTPSQCCGHRLAADRVHDSHPTNMTPQHPKTHPESCSYCRLSWASLVHGGGALQPIETLKKQISEDRKQQLMLQKMELEIEKERLQHLLAQQETKLLLKQQQLHQSRLDYNWLKAQALFKSRELVAEKQLTKPQELKLDMNGSDSGPSLLKSNCDGWLLGTSSSIKKHQDPPNSGENRKERKTVGFHSHMKDDAQWSCQKKDTCRPQRGTVTGVRKDASTSPMPTGSLKDFVTTASPSLQHTTSRYETSLLDLVQSLSPNSAPKPQRYPSREAGAWNHGTFRLSPLKSTRKKMGMHRTPEELEENQILEDIFFI

SEQ ID NO: 49708 - protein, 159 aa, Homo sapiens
MSSKQATSPFACAADGEDAMTQDLTSREKEEGSDQHVASHLPLHPIMHNKPHSEELPTLVSTIQQDADWDSVLSSQQRMESENNKLCSLYSFRNTSTSPHKPDEGSRDREIMTSVTFGTPERRKGSLADVVDTLKQKKLEEMTRTEQEDSSCMEKLLSK

SEQ ID NO: 49709 - protein, 103 aa, Homo sapiens
MLDHKDLEAEIHPLKNEERKSQENLGNPSKNEDNVKSAPPQSRLSRCRAAAFFLSLFLCLFVVFVVSFVIPCPDRPASQRMWRIDYSAAGFSSPCTFAAAVSG

SEQ ID NO: 49710 - protein, 133 aa, Homo sapiens
  MOD_RES (1)..(1): Any amino acid
XHFKPQIFGDRKPVYDGKKNIYTVTALPIGNERVDFEVTIPGEGKDRIFKVSIKWLAIVSWRMLHEALVSGQIPVPLESVQALDVAMRHLASMRPGLLRAQDASQGGGLCPRDQFSACPCQVHPCGPLLLLTA

SEQ ID NO: 49711 - protein, 170 aa, Homo sapiens
MASDASHALEAALEQMDGIIAGTKTGADLSDGTCEPGLASPASYMNPFPVLHLIEDLRLALEMLELPQERAALLSQIPGPTAAYIKEWFEESLSQVNHHSAASNETYQERLARLEGDKESLILQVSVLTDQVEAQGEKIRDLEVCLEGHQVKLNAAEEMLQQELLSRTSL

SEQ ID NO: 49712 - protein, 175 aa, Homo sapiens
MDSWFILVLLGSGLICVSANNATTVAPSVGITRLINSSTAEPVKEEAKTSNPTSSLTSLSVAPTFSPNITLGPTYLTTVNSSDSDNGTTRTASTNSIGITISPNGTWLPDNQFTDARTEPWEGNSSTAATTPETFPPSGNSDSKDRRDETPIIAVMVALSSLLVIVFIIIVLYML

SEQ ID NO: 49713 - protein, 543 aa, Homo sapiens
  MOD_RES (1)..(1): Any amino acid
XRFEEVLTWAKQHQQRLETALSELVANAELLEELLAWIQWAETTLIQRDQEPIPQNIDRVKALIAEHQTFMEEMTRKQPDVDRVTKTYKRKNIEPTHAPFIEKSRSGGRKSLSQPTPPPMPILSQSEAKNPRINQLSARWQQVWLLALERQRKLNDALDRLEEQLCLELKEFANFDFDVWRKKYMRWMNHKKSRVMDFFRRIDKDQDGKITRQEFIDGILASKFPTTKLEMTAVADIFDRDGDGYIDYYEFVAALHPNKDAYRPTTDADKIEDEVTRQVAQCKCAKRFQVEQIGENKYRFFLGNQFGDSQQLRLVRILRSTVMVRVGGGWMALDEFLVKNDPCRARGRTNIELREKFILPEGASQGMTPFRSRGRRSKPSSRAASPTRSSSSASQSNHSCTSMPSSPATPASGTKVIPSSGSKLKRPTPTFHSSRTSLAGDTSNSSSPASTGAKTNRADPKKSASRPGSRAGSRAGSRASSRRGSDASDFDLLETQSACSDTSESSAAGGQGNSRRGLNKPSKIPTMSKKTTTASPRTPGPKR

SEQ ID NO: 49714 - protein, 92 aa, Homo sapiens
MKIELFADVVPKTAENFRQFCTGEFRKDGVPIGYKGSTFHRVIKDFMIQGGDFVNMESRSVAQAGVQWCDLGLLQPPPPGWVQAILVPQPPE

SEQ ID NO: 49715 - protein, 116 aa, Homo sapiens
MEFGLNWVFLVAIIKGAQCEVQLVESGGGLVQPGGSLRLSCPASGFTFSNHYMSWVRQAPGKGLEWVSYISGDSGYTNYADSVKGRFTISRDNANNSPYLQMNSLRAEDTAVYYCV

SEQ ID NO: 49716 - protein, 480 aa, Homo sapiens
ERRSSWAAAPPCSRRCSSTSPGVKKIRSSTQQDPRRRDPQDDVYLDITDRLCFAILYSRPKSASNVHYFSIDNELEYENFYADFGPLNLAMVYRYCCKINKKLKSITMLRKKIVHFTGSDQRKQANAAFLVGCYMVIYLGRTPEEAYRILIFGETSYIPFRDAAYGSCNFYITLLDCFHAVKKAMQYGFLNFNSFNLDEYEHYEKAENGDLNWIIPDRFIAFCGPHSRARLESGYHQHSPETYIQYFKNHNVTTIIRLNKRMYDAKRFTDAGFDHHDLFFADGSTPTDAIVKEFLDICENAEGAIAVHCKAGLGRTGTLIACYIMKHYRMTAAETIAWVRICRPGSVIGPQQQFLVMKQTNLWLEGDYFRQKLKGQENGQHRAAFSKLLSGVDDISINGVENQDQQEPEPYSDDDEINGVTQGDRLRALKSRRQSKTNAIPLTCPLAVLTSALCSVVIWWIVCDYILPILLFCLDGFRTQ

SEQ ID NO: 49717 - protein, 40 aa, Homo sapiens
MNPEKDFAPLTPNIVRALNDKLYEKRKVAALEIEKTQGST

SEQ ID NO: 49718 - protein, 472 aa, Homo sapiens
MERRRITSAARRSYVSSGEMMVGGLAPGRRLGPGTRLSLARMPPPLPTRVDFSLAGALNAGFKETRASERAEMMELNDRFASYIEKVRFLEQQNKALAAELNQLRAKEPTKLADVYQAELRELRLRLDQLTANSARLEVERDNLAQDLATVRQKLQDETNLRLEAENNLAAYRQEADEATLARLDLERKIESLEEEIRFLRKIHEEEVRELQEQLARQQVHVELDVAKPDLTAALKEIRTQYEAMASSNMHEAEEWYRSKFADLTDAAARNAELLRQAKHEANDYRRQLQSLTCDLESLRGTNESLERQMREQEERHVREAASYQEALARLEEEGQSLKDEMARHLQEYQDLLNVKLALDIEIATYRKLLEGEENRITIPVQTFSNLQIRGGKSTKDGENHKVTRYLKSLTIRVIPIQAHQIVNGTPPARETSLDTKSVSEGHLKRNIVVKTVEMRDGEVIKESKQEHKDVM

SEQ ID NO: 49719 - protein, 280 aa, Homo sapiens
MEGTAENPGINQRALQLLFSEVQEKASDWEYTITVSAAEIYNEVLRDLLGKEPQEKLEIRLCPDGSGQLYVPGLTEFQVQSVDDINKVFEFGHTNRTTEFTNLNEHSSRSHALLIVTVRGVDCSTGLRTTGKLNLVDLAGSERVGKSGAEGSRLREAQHINKSLSALGDVIAALRSRQGHVPFRNSKLTYLLQDSLSGDSKTLMVVQVSPVEKNTSETLYSLKFAERVRSVELGPGLRRAELGSWSSQEHLEWEPACQTPQPSARAHSAPSSGTSSRPGS

SEQ ID NO: 49720 - protein, 233 aa, Homo sapiens
  MOD_RES (1)..(1): Any amino acid
XQDVMARACLQKLKGTTELLPKRPQHLPGHPGWYRKLCPRLDDPAWTPGPSLLSLQMRVTPKLMALTWDGFPLHYSERHGWGYLVPGRRDNLAKLPTGTTLESAGVVCPYRAIESLYRKHCLEQGKQQLMPQEAGLAEEFLLTDNSAIWQTVEELDYLEVEAEAKMENLRAAVPGQPLALDGNSCNVGSPFAKDFLPKMEDGTLQAGPGGASGPRALEINKMISFWRNAHKRI

SEQ ID NO: 49721 - protein, 53 aa, Homo sapiens
MASPGKPGADEAQEEEGELEGGSAGPRAAILEQAEELFLLCDKEAKGFITKHD

SEQ ID NO: 49722 - protein, 204 aa, Homo sapiens
MPRIPGICHCKICKSQEKTLKIAKMLLSQNAFIFRSLNLVLMVYISLVFGISYDSPDYTDESCTFKISLRNFRSILSWELKNHSIVPTHYTLLYTIMSKPEDLKVVKNCANTTRSFCDLTDEWRSTHEAYVTVLEGFSGNTTLFSCSHNFWLAIDMSFEPPEFEIVGFTNHINVMVKFPSIVEEELQFDLSLVIEEQSEGIVKK

SEQ ID NO: 49723 - protein, 58 aa, Homo sapiens
MLREEATKKSKEKEPGMALPQGCGYRVLFGGVEMPEPCTEGFIQGCDVGELQEPGVCG

SEQ ID NO: 49724 - protein, 852 aa, Homo sapiens
MVPWVRTMGQKLKQRLRLDVGREICRQYPLFCFLLLCLSAASLLLNRYIHILMIFWSFVAGVVTFYCSLGPDSLLPNIFFTIKYKPKQLGLQELFPQGHSCAVCGKVKCKRHRPSLLLENYQPWLDLKISSKVDASLSEVDIPSIITKKLLKAAMKHIEVIVKARQKVKNTEFLQQAALEEYGPELHVALRSRRDELHYLRKLTELLFPYILPPKATDCRSLTLLIREILSGSVFLPSLDFLADPDTVNHLLIIFIDDSPPEKATEPASPLVPFLQKFAEPRNKKPSVLKLELKQIREQQDLLFRFMNFLKQEGAVHVLQFCLTVEEFNDRILRPELSNDEMLSLHEELQKIYKTYCLDESIDKIRFDPFIVEEIQRIAEGPYIDVVKLQTMRCLFEAYEHVLSLLENVFTPMFCHSDEYFRQLLRGAESPTRNSKLNRGSLSLDDFRNTQKRGESFGISRIGSKIKGVFKSTTMEGAMLPNYGVAEGEDDFIEEGIVVMEDDSPVEAVSTPNTPRNLAAWKISIPYVDFFEDPSSERKEKKERIPVFCIDVERNDRRAVGHEPEHWSVYRRYLEFYVLESKLTEFHGAFPDAQLPSKRIIGPKNYEFLKSKREEFQEYLQKLLQHPELSNSQLLADFLSPNGGETQFLDKILPDVNLGKIIKSVPGKLMKEKGQHLEPFIMNFINSCESPKPKPSRPELTILSPTSENNKKLFNDLFKNNANRAENTERKQNQNYFMEVMTVEGVYDYLMYVGRVVFQVPDWLHHLLMGTRILFKNTLEMYTDYYLQCKLEQLFQEHRLVSLITLLRDAIFCENTEPRSLQDKQKGAKQTFEEMMNYIPAFLRVCIMPCAL

SEQ ID NO: 49725 - protein, 88 aa, Homo sapiens
MLIKEYHILLPMSLDEYQVAQLYMIQKKSREESSGEGSGVEILANRPYTDGPGGSGQYTHKVYHVGSHIPGWFRALLPKAALQVEEES

SEQ ID NO: 49726 - protein, 90 aa, Homo sapiens
  MOD_RES (1)..(1): Any amino acid
XYNPKYVKMYDNHQLGKLEPHIYAVADVAYHAMLQRKKNQCIVISGESGSGKTQSTNFLIHHLTALSQKGFASGVEQIILGAGPVLECLC

SEQ ID NO: 49727 - protein, 142 aa, Homo sapiens
MAFRDVAVDFTQDEWRLLSPAQRTLYREVMLENYSNLVSLGISFSKPELITQLEQGKETWREEKKCSPATCPADPEPELYLDPFCPPGFSSQKFPMQHVLCNHPPWIFTCLCAEGNIQPGDPGPGDQEKQQQASEGRPWSDQ

SEQ ID NO: 49728 - protein, 144 aa, Homo sapiens
  MOD_RES (1)..(1): Any amino acid
XPYGSMRKAPGSDPFMSSGQGPNGGMGDPYSRAAGPGLGNVAMGPRQHYPYGGPYDRVRTEPGIGPEGNMSTGAPQPNLMPSNPDSGMYSPSRYPPQQQQQQQQRHDSYGNQFSTQGTPSGSPFPSQQTTMYQQQQQEPRRHGG

SEQ ID NO: 49729 - protein, 104 aa, Homo sapiens
  MOD_RES (1)..(1): Any amino acid
XSRWPHGLGLLLLLQLLPPSTLSQDRLDAPPPPAAPLPRWSGPIGVSWGLRAAAAGGAFPRGGRWRRSAPGEDEECGRVRDFVAKLANNTHQLSKSLEHRFSSV

SEQ ID NO: 49730 - protein, 72 aa, Homo sapiens
  MOD_RES (1)..(1): Any amino acid
XLAGLTPLGVAAVASAGTGGICWCSQRGAEGWGPTPQRRPVNLTLQMKIIEQEKEIAELKKQLNLLSQDKGA

SEQ ID NO: 49731 - protein, 321 aa, Homo sapiens; identical to SEQ ID NO: 49154

SEQ ID NO: 49732 - protein, 85 aa, Homo sapiens
RARGWAAAARAAQRRRRVENAGGSPSPEPAGRRAALYVHWPYCEKRCSYCNFNKYIPRRLEEAAMQKCLVTEAQTLLRLSGVQRP

SEQ ID NO: 49733 - protein, 223 aa, Homo sapiens
MTPSSRELREPGVRGRAGIKHTDVSSFQTMDQMVSNMRNYMQKLERNFGQLSVDPNGHSFCSSSVMTYSKIGDEPPKVFQASTQTRRAPGGIKETRKAMRDSDSGLEKMAIGHHIHDRAHVIKKSKNKKTGDEEVNQEFINMNESDAHAFDEEWQSEVLKYKPGRHNLGNTRMRSVGHENPGSRELKRREKPQQSPAIEHGRRSNVLGDKLHIKGSSVKSNKK

SEQ ID NO: 49734 - protein, 240 aa, Homo sapiens
MKLVLIGHSIGSYFTLQMLKRVPELPVIRAFLLFPTIERMSESPNGRIATPLLCWFRYVLYVTGYLLLKPCPETIKSLLIRRGLQVMNLENEFSPLNILEPFCLANAAYLGGQEMMEVVKRDDETIKEHLCKLTFYYGTIDPWCPKEYYEDIKKDFPEGDIRLCEKNIPHAFITHFNQEMADMIADSLKDDLSKIGNPSWHYHSLRTMRCPSAQILKPPDERFGSDLLPTYWWKNQISRD

SEQ ID NO: 49735 - protein, 58 aa, Homo sapiens
MADMQNLVERLERAVGRLEAVSHTSDMHRGYADSPSKAGAAPYVQAFDSLLAGPVAEY

SEQ ID NO: 49736 - protein, 190 aa, Homo sapiens
  MOD_RES (1)..(1): Any amino acid
XPNVVGQLAKQMIGYNLATKQTPKEGVKVNKVMVAEALDISRETYLAILMDRSCNGPVLVGSPQGGVDIEEVAASNPELIFKEQIDIFEGIKDSQAQRMAENLGFVGPLKSQVEAILVNIFGGIVNCAIIANGITKACRELELKVPLVVRLEGTNVQEAQKILNNSGLPITSAIDLEDAAKKAVASVAKK

SEQ ID NO: 49737 - protein, 525 aa, Homo sapiens
MARLSGTVGVAAVTAGPGLTNTVTAVKNAQMAQSPILLLGGAASTLLQNRGALQAVDQLSLFRPLCKFCVSVRRVRDIVPTLRAAMAAAQSGTPGPVFVELPVDVLYPYFMVQKEMVPAKPPKGLVGRVVSWYLENYLANLFAGAWEPQPEGPLPLDIPQASPQQVQRCVEILSRAKRPLMVLGSQALLTPTSADKLRAAVETLGVPCFLGGMARGLLGRNHPLHIRENRSAALKKADVIVLAGTVCDFRLSYGRVLSHSSKIIIVNRNREEMLLNSDIFWKPQEAVQGDVGSFVLKLVEGLQGQTWAPDWVEELREADRQKEQTFREKAAMPVAQHLNPVQVLQLVEETLPDNSILVVDGGDFVGTAAHLVQPRGPLRWLDPGAFGTLGVGAGFALGAKLCRPDAEVWCLFGDGAFGYSLIEFDTFVRHKIPVMALVGNDAGWTQISREQVPSLGSNVACGLAYTDYHKAAMGLGARGLLLSRENEDQVVKVLHDAQQQCRDGHPVVVNILIGRTDFRDGSIAV

SEQ ID NO: 49738 - protein, 141 aa, Homo sapiens
MGKLRPGRVEWLASGHTERPHLFQNLLLFLWALLNCGLGVSAQGPGEWTPWVSWTRCSSSCGRGVSVRSRRCLRLPGEEPCWGDSHEYRLCQLPDCPPGAVPFRDLQCALYNGRPVLGTQKTYQWVPFHGAPNQCDLNCLA

SEQ ID NO: 49739 - protein, 90 aa, Homo sapiens
MGEFNEKKTTCGTVCLKYLLFTYNCCFWLAGLAVMAVGIWTLALKSDYISLLASGTYLATAYILVVAGTVVMVTGVLGCCATFKERRNLL

SEQ ID NO: 49740 - protein, 167 aa, Homo sapiens
QAFNPKAVVLQLGADTIAGDPMCSFNMTPVGIGKCLKYILQWQLATLILGGGGYNLANTARCWTYLTGVILGKTLSSEIPDHEISDDSPQLCSEVRRRQSYWSLCIQWRGSAQSNWTRKIKEPSPIHFAGFSQHMVLIMCWKSRQAAGQTAMSPTESNKSSTTSKGI

SEQ ID NO: 49741 - protein, 124 aa, Homo sapiens
METLSFPRYNVAEIVIHIRNKILTGADGKNLTKNDLYPNPKPEVLHMIYMRALQIVYGIRLEHFYMMPVNSEVMYPHLMEGFLPFSNLVTHLDSFLPICRVNDFETADILCPKAKRTSRFLSGI

SEQ ID NO: 49742 - protein, 105 aa, Homo sapiens
MESTLATSNSATGPVTFSHVFGQQCQLMQAAVQSLHTLNDQISHFIVTKSKALEEDKDPFLPTEKETLKSSMILMRHLLMDAQKSSINTWTMNSFQCISNDPAGF

SEQ ID NO: 49743 - protein, 114 aa, Homo sapiens
MTTASTSQVRQNYHQDSEAAINRQINLELYASYVYLSMSYYFDRDDVALKNFAKYFLHQSHEEREHAEKLMKLQNQRGGRIFLQDIKPTGTPGHQGQKKSHRKIIPGRTLYVPD

SEQ ID NO: 49744 - protein, 331 aa, Homo sapiens
MFPALETHLKQTIPDPYEDFMYRHLQYYGYFKAQRGSLPNSATHQHVRKNNPQCLLNGSLGEKDDLIPDTLQKEKLLYSHMLSLPHLRSRQLLYDELDEVNPRLREPQELFSILSTKRPLQAPRWPIECEVIKENIHHIEWAPPQPEYFYQPKGNEKVPEIVGEKKGTVVYQLDSVPIEGSYFTSSRVGGKRGIVKELAVTLQGPEDNTLLFESRFESGNLQKAVRVDTYEYELTLRTDLYTNKHTQWFYFRVQNTRKDATYRFTIVNLLKPKSLYTVGMKPLLYSQLDANTRNIGWRREGNEIKYYKNNTDDGQQPFYCLTWTIQFPYDQ

SEQ ID NO: 49745 - protein, 8 aa, Homo sapiens
MDHLNEAT

SEQ ID NO: 49746 - protein, 110 aa, Homo sapiens
MSSTPHDPFYSSPFGPFYRRHTPYMVQPEYRIYEMNKRLQSRTEDSDNLWWDAFATEFFEDDATLTLSFCLEDGPKRYIVHSAADARGNCNQLGDSEPDACDGLLQFPIM

SEQ ID NO: 49747 - protein, 547 aa, Homo sapiens
MTVLEITLAVILTLLGLAILAILLTRWARRKQSEMYISRYSSEQSARLLDYEDGRGSRHAYSTQSERSKRDYTPSTNSLALSRSSIALPQGSMSSIKCLQTTEEPPSRTAGAMMQFTAPIPGATGPIKLSQKTIVQTLGPIVQYPGSNAGPPSAPRGPPMAPIIISQRTASQLAAPIRIPQVHTMDSSGKITLTPVVILTGYMDEELAKKSCSKIQILKCGGTARSQNSREENKEALKNDIIFTNSVESLKSAHIKEPEREGKGTDLEKDKIGMEVKVDSDAGIPKRQETQLKISEMSVPQGQGAQIKKSVSDVPRGQESQVKKSESGVPKGQEAQVTKSGLVVLKGQEAQVEKSEMGVPRRQESQVKKSQSGVSKGQEAQVKKRESVVLKGQEAQVEKSELKVPKGQEGQVEKTEADVPKEQEVQEKKSEAGVLKGPESQVKNTEVSVPETLESQVKKSESGVLKGQEAQEKKESFEDKGNNDKEKERDAEKDPNKKEKGDKNTKGDKGKDKVKGKRESEINGEKSKGSKRAKANTGRKYNKKVEE

SEQ ID NO: 49748 - protein, 142 aa, Homo sapiens
MRLSVAAAISHGRVFRRMGLGPESRIHLLRNLLTGLVRHERIEAPWARVDEMRGYAEKEKDLIPKLFQVLAPRYKDQTGGYTRMLQIPNRSLDRAKMAVIEYKGNCLPPLPLPRRDSHLTLLNQLLQGLRQDLRQSQEASNH

SEQ ID NO: 49749 - protein, 419 aa, Homo sapiens
  MOD_RES (1)..(1): Any amino acid
XGLTTQQQKEELVAQKRRKRRRMLRERSPSPPTIQSKRQTPSPRLALSTRYSPDEMNNSPNFEEKKKFLTIFNLTHISAEKRKDKERLVEMLRAMKQKALSAAVADSLTNSPRDSPAVSLSEPATQQASLDVEKPVGVAASLSDIPKAAEPGKLEQVRPQELSRVQELAPASGEKARLSEAPGGKKSLSMLHYIRGAAPKDIPVPLSHSTNGKSKPWEPFVAEEFAHQFHESVLQSTQKALQKHKGSVAVLSAEQNHKVDTSVHYNIPELQSSSRAPPPQHNGQQEPPTARKGPPTQELDRDSEEEEEEDDEDGEDEEEVPKRKWQGIEAVFEAYQEHIEEQNLERQVLQTQCRRLEARHYSLSLTAEQLSHSVAMGFPHVGQAGLELLTTGDLPASTSKSAGITGVSHHARPGHFQMS

SEQ ID NO: 49750 - protein, 103 aa, Homo sapiens
MATNFSDIVKQGYVKMKSRKLGIYRRCWLVFRKSSSKGPQRLEKYPDEKSVCLRGCPKVTEISNVKCVTRLPKETKRQAVAIIFTDDSARTFTCDSELEAEEW

SEQ ID NO: 49751 - protein, 188 aa, Homo sapiens
MIRYFTSNPASKVLCSPMLLSTFSHFSLFHMAANMYVLWSFSSSIVNILGQEQFMAVYLSAGVISNFVSYVGKVATGRYGPSLGASGAIMTVLAAVCTKIPEGRLAIIFLPMFTFTAGNALKAIIAMDTAGMILGWKFFDHAAHLGGALFGIWYVTYGHELIWKNREPLVKIWHEIRTNGPKKGGGSK

SEQ ID NO: 49752 - protein, 109 aa, Homo sapiens
MSKGILQVHPPICDCPGCRISSPVNRGRLADKRTVALPAARNLKKERTPSFSASDGDSDGSGPTCGRRPGLKQEDGPHIRIMKRRVHTHWDVNISFREASCSQDGNLPT

SEQ ID NO: 49753 - protein, 51 aa, Homo sapiens
MPITRMRMRPWLEMQINSNQIPGLIWINKADTKQGKRSQIPRRGRPTFAVP

SEQ ID NO: 49754 - protein, 855 aa, Homo sapiens
MMEGLKKRTRKAFGIRKKEKDTDSTGSPDRDGIQGKKKTQKTQLLLTSCFWLRALSLTLSQPSPHEPPYNSKAECAREGGKKVSKKSNGAPNGFYAEIDWERYNSPELDEEGYSIRPEEPGSTKGKHFYSSSESEEEEESHKKFNIKIKPLQSKDILKNAATVDELKASIGNIALSPSPVRKSPRRSPGAIKRNLSSEEVARPRRSTPTPELISKKPPDDTTALAPLFGPPLESAFDEQKTEVLLDQPEIWGSGQPINPSMESPKLTRPFPTGTPPPLPPKNVPATPPRTGSPLTIGPGNDQSATEVKIEKLPSINDLDSIFGPVLSPKSVAVNAEEKWVHFSDTSPEHVTPELTPREKVVSPPATPDNPADSPAPGPLGPPGPTGPPGPPGPPRNVLSPLNLEEVQKKVAEQTFIKDDYLETISSPKDFGLGQRATPPPPPPPTYRTVVSSPGPGSGPGPGTTSGASSPARPATPLVPCRSTTPPPPPPRPPSRPKLPPGKPGVGDVSRPFSPPIHSSSPPPIAPLARAESTSSISSTNSLSAATTPTVENEQPSLVWFDRGKFYLTFEGSSRGPSPLTMGAQDTLPVAAAFTETVNAYFKGADPSKCIVKITGEMVLSFPAGITRHFANNPSPAALTFRVINFSRLEHVLPNPQLLCCDNTQNDANTKEFWVNMPNLMTHLKKVSEQKPQATYYNVDMLKYQVSAQGIQSTPLNLAVNWRCEPSSTDLRIDYKYNTDAMTTAVALNNVQFLVPIDGGVTKLQAVLPPAVWNAEQQRILWKIPDISQKSENGGVGSLLARFQLSEGPSKPSPLVVQFTSEGSTLSGCDIELVGAGYRFSLIKKRFAAGKYLADN

SEQ ID NO: 49755 - protein, 87 aa, Homo sapiens
MEDDAPVIYGLEFQARALTPQTAETDAIRFLVGTQSLKYDNQNKDWKEIGQKGLKIEPRVIFRCFSQGMCSKTTQRMPGNLDPYHRF

SEQ ID NO: 49756 - protein, 228 aa, Homo sapiens
  MOD_RES (1)..(1): Any amino acid
XSLGVHFSKVRSLTLDTWEPELLKLMCELGNDVINRVYEANVEKMGIKKPQPGQRQEKEAYIRAKYVERKFVDKYSISLSPPEQQKKFVSKSSEEKRLSISKFGPGDQVRASAQSSVIAVNSDEARRESLFCPDELDSLFSYFDTSSKLRSIRSNDSGIQQSSDDGRESLPSTVSANSLYEPEGERQDSSMFLDSKHLNPGLQLYRASYEKNLPKMAEALAHGADVNW

SEQ ID NO: 49757 - protein, 762 aa, Homo sapiens
MQQRAGSKTAGPPCQWSRMASEGTNIPSPVVRQIDKQFLICSICLERYKNPKVLPCLHTFCERCLQNYIPAHSLTLSCPVCRQTSILPEKGVAALQNNFFITNLMDVLQRTPGSNAEESSILETVTAVAAGKPLSCPNHDGNVMEFYCQSCETAMCRECTEGEHAEHPTVPLKDVVEQHKASLQVQLDAVNKRLPEIDSALQFISEIIHQLTNQKASIVDDIHSTFDELQKTLNVRKSVLLMELEVNYGLKHKVLQSQLDTLLQGQESIKSCSNFTAQALNHGTETEVLLVKKQMSEKLNELADQDFPLHPRENDQLDFIVETEGLKKSIHNLGTILTTNAVASETVATGEGLRQTIIGQPMSVTITTKDKDGELCKTGNAYLTAELSTPDGSVADGEILDNKNGTYEFLYTVQKEGDFTLSLRLYDQHIRGSPFKLKVIRSADVSPTTEGVKRRVKSPGSGHVKQKAVKRPASMYSTGKRKENPIEDDLIFRVGTKGRNKGEFTNLQGVAASTNGKILIADSNNQCVQIFSNDGQFKSRFGIRGRSPGQLQRPTGVAVHPSGDIIIADYDNKWVSIFSSDGKFKTKIGSGKLMGPKGVSVDRNGHIIVVDNKACCVFIFQPNGKIVTRFGSRGNGDRQFAGPHFAAVNSNNEIIITDFHNHSVKVFNQEGEFMLKFGSNGEGNGQFNAPTGVAVDSNGNIIVADWGNSRIQVFDGSGSFLSYINTSADPLYGPQGLALTSDGHVVVADSGNHCFKVYRYLQ

SEQ ID NO: 49758 - protein, 53 aa, Homo sapiens
VKNKKTQDKREKSNFRNEIKLLRKELKEREEAAMLESLTSANVVLATNTAPKG

SEQ ID NO: 49759 - protein, 108 aa, Homo sapiens
MGSACIKVTKYFLFLFNLIFFILGAVILGFGVWILADKSSFISVLQTSSSSLRMGAYVFIGVGAVTMLMGFLGCIGAVNEVRCLLGLYFAFLLLILIAQVTAGALFYF

SEQ ID NO: 49760 - protein, 91 aa, Homo sapiens
MKELVERFALYGAIEQYNALDEYPAEDFTEVYLIKFMNLQSARTAKRKMDEQSFFGGLLHVCYAPEFETVEETRKKLQMRKAYVVKTTENK

SEQ ID NO: 49761 - protein, 530 aa, Homo sapiens
MKPAQRNLYRDVMLENYSNLVTVGCQVTKPDVIFKLEQEEEPWVMEEEMFGRHCPEVWEVDEQIKKQQETLVRKVTSISKKILIKEKVIECKKVAKIFPLSSDIVTSRQSFYDCDSLDKGLEHNLDLLRYEKGCVREKQSNEFGKPFYHCASYVVTPFKCNQCGQDFSHKFDLIRHERIHAGEKPYECKECGKAFSRKENLITHQKIHTGEKPYKCNECGKAFIQMSNLIRHHRIHTGEKPYACKDCWKAFSQKSNLIEHERIHTGEKPYECKECGKSFSQKQNLIEHEKIHTGEKPYACNECGRAFSRMSSVTLHMRSHTGEKPYKCNKCGKAFSQCSVFIIHMRSHTGEKPYVCSECGKAFSQSSSLTVHMRNHTAEKPYECKECGKAFSRKENLITHQKIHTGEKPYECSECGKAFIQMSNLIRHQRIHTGEKPYACTVCGKAFSQKSNLTEHEKIHTGEKPYHCNQCGKAFSQRQNLLEHEKIHTGEKPFKCNECGKAFSRISSLTLHVRSHTGEKPYECNKCGKA

SEQ ID NO: 49762 - protein, 562 aa, Homo sapiens
MFLLFLFQVPLPSLSPTMQAGTIARWEKKEGDKINEGDLIAEVETDKATVGFESLEECYMAKILVAEGTRDVPIGAIICITVGKPEDIEAFKNYTLDSSAAPTPQAAPAPTPAATASPPTPSAQAPGSSYPPHMQVLLPALSPTMTMGTVQRWEKKVGEKLSEGDLLAEIETDKATIGFEVQEEGYLAKILVPEGTRDVPLGTPLCIIVEKEADISAFADYRPTEVTDLKPQVPPPTPPPVAAVPPTPQPLAPTPSAPCPATPAGPKGRVFVSPLAKKLAVEKGIDLTQVKGTGPDGRITKKDIDSFVPSKVAPAPAAVVPPTGPGMAPVPTGVFTDIPISNIRRVIAQRLMQSKQTIPHYYLSIDVNMGEVLLVRKELNKILEGRSKISVNDFIIKASALACLKVPEANSSWMDTVIRQNHVVDVSVAVSTPAGLITPIVFNAHIKGVETIANDVVSLATKAREGKLQPHEFQGGTFTISNLGMFGIKNFSAIINPPQACILAIGASEDKLVPADNEKGFDVASMMSVTLSCDHRVVDGAVGAQWLAEFRKYLEKPITMLL

SEQ ID NO: 49763 - protein, 120 aa, Homo sapiens
MSTKQITCRYFMHGVCREGSQCLFSHDLANSKPSTICKYYQKGYCAYGTRCRYDHTRPSAAAGGAVGTMAHSVPSPAFHSPHPPSEVTASIVKTNSHEPGKREKRTLVLRDRTSSCQEDS

SEQ ID NO: 49764 - protein, 207 aa, Homo sapiens
  MOD_RES (1)..(1): Any amino acid
XIFWVSCEAGTYIRTLCVHLGLLLGVGGQMQELRRVRSGVMSEKDHMVTMHDVLDAQWLYDNHKDESYLRRVVYPLEKLLTSHKRLVMKDSAVNAICYGAKIMLPGVLRYEDGIEVNQEIVVITTKGEAICMAIALMTTAVISTCDHGIVAKIKRVIMERDTYPRKWGLGPKASQKKLMIKQGLLDKHGKPTDSTPATWKQEYVDYR

SEQ ID NO: 49765 - protein, 906 aa, Homo sapiens
MDMEYMGSGKLGQILKQIWRQNQMLKQALLGDDLCEGAGGATWMATVVFLGQELSSALHQLLEHTSGTLRSTCQQLHVLLDKENQCVSRKEIITFIDCLIKITEHLGSTAALLKKEEKEICNLCGMHDECTPQQTMSSIQDTKAADIAARGELNVIETATVSPTNGEESHYTNQVQLEKNKTHMSSALVEKENNTSLNGRVLGQEESQNKMFPDNAENEDDKQIEHMTVENINGNREETHGIIQTTETEIQETSESPREEMTTSSIICDISKKYINSTLPNDSENIKHKNNIMEKEYLDVLSDVTGPQVSCYITAPSYVLQQLECRIINHMSSLIVGDNEELVSNVITIECSDKEKRVPFPIGIAIPFTARYRGNYRDIMVKVCDINLQSSYLNPNSLEGMKGGYKGTCASVKVYKLGIFSVVSCLKKESFTVTKKGLALKSSMDSRISLNYPPGVFTSPVLVQLKIQPVDPALVAHLKAQQDTFYSVQSTSPLIHIQHPSTYPFQKPVTLFLPCSPYLDKNNLGSEIDHKRRASATINRITPSYFNRTKIASIRKPRKNASECLKLLGFRSQDSGWCGLDDVVKTIQSGLVSVELYEHLERFIVLHLSSTMDNSHLVTFVKSLEEAMLSTTACIVLSHQKDNPHRIAVLVVPSKDLSQVLKDLHLEGFGGPPEPSRHFQVREGEQLLLRFTGNIFASSNGKDYGKDYTLIFHLQRKPRLELQIKEVDEFGNYSCPHYKGTIVVYKVPKGKIVPNLNQSLVINENHSQLPICKLPLKLPKHKKLINRPQSTKRVSKDPVEALWDNLLHWLAEELSEENAESLSSTLPLRRSTIQLIKLKNPDDLTEQIHEFLCFWKKSLPTFTDKLRLLARHLRKIGRSDLAEELKFKWENKVFTEPQQCFDVAPE

SEQ ID NO: 49766 - protein, 79 aa, Homo sapiens
MAQSQGWVKRYIKAFCKGFFVAVPVAVTFLDRVACVARVEGASMQPSLNPGGSQSSDVVLLNHWKVRNFEVHRGDIVSL

SEQ ID NO: 49767 - protein, 233 aa, Homo sapiens
MGGPRGAGWVAAGLLLGAGACYCIYRLTRGRRRGDRELGIRSSKSAGALEEGTSEGQLCGRSARPQTGGTWESQWSKTSQPEDLTDGSYDDVLNAEQLQKLLYLLESTEDPVIIERALITLGNNAAFSVNQIPMKLVTGITFAIIRELGGIPIVANKINHSNQSIKEKALNALNNLSVNVENQIKIKVDSSFLSLYDSHVAKEILLRVLTLFQNIKNCLKIEGHLAVQPTFTE

SEQ ID NO: 49768 - protein, 494 aa, Homo sapiens
MAGDLSAGFFMEELNTYRQKQGVVLKYQELPNSGPPHDRRFTFQVIIDGREFPEGEGRSKKEAKNAAAKLAVEILNKEKKAVSPLLLTTTNSSEGLSMGNYIGLINRIAQKKRLTVNYEQCASGVHGPEGFHYKCKMGQKEYSIGTGSTKQEAKQLAAKLAYLQILSEETSVNGLRNNQRKAKRSLAPRFDLPDMKETKYTVDKRFGMDFKEIELIGSGGFGQVFKAKHRIDGKTYVIKRVKYNNEKAEREVKALAKLDHVNIVHYNGCWDGFDYDPETSDDSLESSDYDPENSKNSSRSKTKCLFIQMEFCDKGTLEQWIEKRRGEKLDKVLALELFEQITKGVDYIHSKKLIHRDLKPSNIFLVDTKQVKIGDFGLVTSLKNDGKRTRSKGTLRYMSPEQISSQDYGKEVDLYALGLILAELLHVCDTAFETSKFFTDLRDGIISDIFDKKEKTLLQKLLSKKPEDRPNTSEILRTLTVWKKSPEKNERHTC

SEQ ID NO: 49769 - protein, 67 aa, Homo sapiens
MAEERVATRTQFPVSTESQKPRQKKGGVGVSNDLEYQKFNLYIYSSRVSYFGEAELVDSSSLYPERL

SEQ ID NO: 49770 - protein, 123 aa, Homo sapiens
MSTEKVDQKEEAGEKEVCGDQIKGPDKEEEPPAAASHGQGWRPGGRAARNARPEPGARHPALPAMVNDPPVPALLWAQEVGQVLAGRARRLLLQFGVLFCTILLLLWVSVFLYGSFYYSYMPT

SEQ ID NO: 49771 - protein, 286 aa, Homo sapiens
  MOD_RES (1)..(1): Any amino acid
XGRGDIQPQLDSALQDVNDKYLLLEETEKQAVRKALIEERGRFCTFISMLRPVIEEEISMLGEITHLQTISEDLKSLTMDPHKLPSSSEQVILDLKGSDYSWSYQTPPSSPSTTMSRKSSVCSSLNSVNSSDSRSSGSHSHSPSSHYRYRSSNLAQQAPVRLSSVSSHDSGFISQDAFQSKSPSPMPPEAPNQDWAKPGPYDQPLVNTLQRRKEKREPDPNGGGPTTASGPPAAAEEAQRPRSMTVSAATRPGEEMEACEELALALSRGLQLDTQRSSRDSLQCSS

SEQ ID NO: 49772 - protein, 117 aa, Homo sapiens
MDPKQTTLLCLGDFPMPFISAKSSPVIPLDGSVKIQCQAIREAYLTQLMIIKNSTYREIGRRLKFWNETDPEFVIDHMDANKAGRYQCQYRIGHYRFRYSDTLELVVTDSIHQDYTT

SEQ ID NO: 49773 - protein, 268 aa, Homo sapiens
MELEKREKRSLLNKNLEEKLTSKSNDYLTLNAGSQQERDQAKLTCPSEVSGTILQEREFEANKLQGMQQSDLFKAEYVLIVDSEGEDEAASRKVEQGPPGGIGTAAVRPKSLAISSSLVSDVVRPKTQGTDLKTSSHPEMLHGMAPQQKHGQALDEPAKTESVSKDNTLEPPVEHSSDSPSRSPKTLLGSDTVKTPTTLPRAAGRETKYANLSSPSSTVSESQLTKPGVIRPVPVKSRILLKKEEEVYEPNPFSKYLEDNSDLFSEQQ

SEQ ID NO: 49774 - protein, 88 aa, Homo sapiens
MDSVEKGAATSVSNPRGRPSRGRPPKLQRNSRGGQGRGVEKPPHLAALILARGGSKGIPLKNIKHLAGVPLIGWVLRAALDSGAFQRG

SEQ ID NO: 49775 - protein, 412 aa, Homo sapiens
MTLRRRGEKATISIQEHMAIDVCPGPTRPIKQISDYFPRFPRGLPPDAGPRAAAPPDAPARPAVAGAGRRSPSDGAREDDEDVDQLFGAYGSSPGPSPGPSPARPPAKPPEDEPDADGYESDDCTALGTLDFSLLYDQENNALHCTITKAKGLKPMDHNGLADPYVKLHLLPGASKANKLRTKTLRNTLNPTWNETLTYYGITDEDMIRKTLRISVCDEDKFRHNEFIGETRVPLKKLKPNHTKTFSICLEKQLPVDKTEDKSLEERGRILISLKYSSQKQGLLVGIVRCAHLAAMDANGYSDPYVKTYLRPDVDKKSKHKTAVKKKTLNPEFNEEFCYEIKHGDLAKKSLEVTVWDYDIGKSNDFIGGVVLGIHAKGERLKHWFDCLKNKDKRIERWHTLTSELPGAVLSD

SEQ ID NO: 49776 - protein, 726 aa, Homo sapiens
MSAITVALLSLLFITSGTIENHKDLGGHFFSTTQSPPATQGSTAAQRSTATQHSTATQSSTATQTSPVPLTPESPLFQNFSGYHIGVGRADCTGQVADINLMGYGKSGQNAQGILTRLYSRAFIMAEPDGSNRTVFVSIDIGMVSQRLRLEVLNRLQSKYGSLYRRDNVILSGTHTHSGPAGYFQYTVFVIASEGFSNQTFQHMVTGILKSIDIAHTNMKPGKIFINKGNVDGVQINRSPYSYLQNPQSERARYSSNTDKEMIVLKMVDLNGDDLGLISWFAIHPVSMNNSNHLVNSDNVGYASYLLEQEKNKGYLPGQGPFVAAFASSNLGDVSPNILGPRCINTGESCDNANSTCPIGGPSMCIAKGPGQDMFDSTQIIGRAMYQRAKSKTCKPALGYSFAAGTIDGVGGLNFTQGKTEGDPFWDTIRDQILGKPSEEIKECHKPKPILLHTGELSKPHPWHPDIVDVQIITLGSLAITAIPGEFTTMSGRRLREAVQAEFASHGMQNMTVVISGLCNVYTHYITTYEEYQAQRYEAASTIYGPHTLSAYIQLFRNLAKAIATDTVANLSRGPEPPFFKQLIVPLIPSIVDRAPKGRTFGDVLQPAKPEYRVGEVAEVIFVGANPKNSVQNQTHQTFLTVEKYEATSTSWQIVCNDASWETRFYWHKGLLGLSNATVEWHIPDTAQPGIYRIRYFGHNRKQDILKPAVILSFEGTSPAFEVVTI

SEQ ID NO: 49777 - protein, 133 aa, Homo sapiens
  MOD_RES (1)..(1): Any amino acid
XLWPALQELARCGNLACRSDLQVAAKALEMGVFGAYFNVLINLRDITDEAFKDQPPAGSQDPGCTGAGLLGDPAGVTVREASPGSVAPPSPIPRGQSCDLGGDTACSCGARRVGGQAAGHRLGMEALAGTEGP

SEQ ID NO: 49778 - protein, 37 aa, Homo sapiens
MASNSLFSTVTPCQQNFFWGGSPRRGTRWDCGYCHGG

SEQ ID NO: 49779 - protein, 112 aa, Homo sapiens
MASRGLSLFPESCPDFCCGTCDDQYCCSDVLKKFVWSEERCAVPEASVPASVEPVEQLGSALRFRPGYNDPMSGFGATLAVGLTIFVLSVVTIIICFTCSCCCLYKTCRRPR

SEQ ID NO: 49780 - protein, 187 aa, Homo sapiens
MAQRTGLEDPERYLFVDRAVIYNPATQADWTAKKLVWIPSERHGFEAASIKEERGDEVMVELAENGKKAMVNKDDIQKMNPPKFSKVEDMAELTCLNEASVLHNLKDRYYSGLIYTYSGLFCVVINPYKNLPIYSENIIEMYRGKKRHEMPPHIYAISESAYRCMLQDREDQSILCTGESGAGKTEN

SEQ ID NO: 49781 - protein, 99 aa, Homo sapiens
MEPGSDDFLPPPECPVFEPSWAEFRDPLGYIAKIRPIAEKSGICKIRPPADWQPPFAVEVDNFRFTPRIQRLNELEFQLLRRLRQEDHLSPGGQVYSQP

SEQ ID NO: 49782 - protein, 208 aa, Homo sapiens
MTYAYLFKYIIIGDTGVGKSCLLLQFTDKRFQPVHDLTIGVEFGARMVNIDGKQIKLQIWDTAGQESFRSITRSYYRGAAGALLVYDITRRETFNHLTSWLEDARQHSSSNMVIMLIGNKSDLESRRDVKREEGEAFAREHGLIFMETSAKTACNVEEAFINTAKEIYRKIQQGLFDVHNEANGIKIGPQQSISTSVGPSASHAGLQV

SEQ ID NO: 49783 - protein, 109 aa, Homo sapiens
MRGLGLWLLGAMMLPGPAPREGELRPWGHRAQLHPPPAEEQGPAGLRLHRDLYGCQWLRGDGAASRAGPLLLPGPRRGVPGLSRQPQHLCRPQGFLPGGVRPAPDRAPG

SEQ ID NO: 49784 - protein, 279 aa, Homo sapiens
MRPDDANVAGNVHGGTILKMIEEAGAIISTRHCNSQNGERCVAALARVERTDFLSPMCIGEVAHVSAEITYTSKHSVEVQVNVMSENILTGAKKLTNKATLWYVPLSLKNVDKVLEVPPVVYSRQEQEEEGRKRYEAQKLERMETKWRNGDIVQPVLNPEPNTVSYSQSSLIHLVGPSDCTLHGFVHGGVTMKLMDEVAGIVAARHCKTNIVTASVDAINFHDKIRKGCVITISGRMTFTSNKSMEIEVLVDADPVVDSSQKRYRAASAFFTYVSLSQE

SEQ ID NO: 49785 - protein, 723 aa, Homo sapiens
EVPEHLFYSQDITYLNLRHNFMQLERPGGLDTLYKFSQLKGLNLSHNKLGLFPILLCEISTLTELNLSCNGFHDLPSQIGNLLNLQTLCLDGNFLTTLPEELGNLQQLSSLGISFNNFSQIPEVYEKLTMLDRVVMAGNCLEVLNLGVLNRMNHIKHVDLRMNHLKTMVIENLEGNKHITHVDLRDNRLTDLDLSSLCSLEQLHCGRNQLRELTLSGFSLRTLYASSNRLTAVNVYPVPSLLTFLDLSRNLLECVPDWACEAKKIEVLDVSYNLLTEVPVRILSSLSLRKLMLGHNHVQNLPTLVEHIPLEVLDLQHNALTRLPDTLFSKALNLRYLNASANSLESLPSACTGEESLSMLQLLYLTNNLLTDQCIPVLVGHLHLRILHLANNQLQTFPASKLNKLEQLEELNLSGNKLKTIPTTIANCKRLHTLVAHSNNISIFPEILQLPQIQFVDLSCNDLTEILIPEALPATLQDLDLTGNTNLVLEHKTLDIFSHITTLKIDQKPLPTTDSTVTSTFWSHGLAEMAGQRNKLCVSALAMDSFAEGVGAVYGMFDGDRNEELPRLLQCTMADVLLEEVQQSTNDTVFMANTFLVSHRKLGMAGQKLGSSALLCYIRPDTADPASSFSLTVANVGTCQAVLCRGGKPVPLSKVFSLEQDPEEAQRVKDQKAIITEVPEDLKEFQTTDIPVHHCNFRAVLGCLCSASVLGSYAGPAPRWRRT

SEQ ID NO: 49786 - protein, 168 aa, Homo sapiens
MLPKRRRARVGSPSGDAASSTPPSTRFPGVAIYLVEPRMGRSRRAFLTGLARSKGFRVLDACSSEATHVVMEETSAEEAVSWQERRMAAAPPGCTPPALLDISWLTESLGAGQPVPVECRHRLEAFLPHQVDDTATPSGMTHGLAGACPLDAIRLPASDRWLGQGRGL

SEQ ID NO: 49787 - protein, 370 aa, Homo sapiens
MVTHKVHQYLMKRIPQNPRYQHIKSRLDTGNSMTKYTEKLEEIKKNYRYKKDELFKRLKVTTFAQLIIQVASLSDQTLEVTAEEIQRLEDNDSAASDPDAETTARTNGKGNPGEQSPSPEQFINNAGAGDSSRSTLQSVISGVGELDLDKGPVKKAEPHTKDKPYPDCPFLLLDVRDRDSYQQCHIVGAYSYPIATLSRTMNPYSNDILEYKNAHGKIIILYDDDERLASQAATTMCERGFENLFMLSGGLKVLAQKFPEGLITGSLPASCQQALPPGSARKRSSPKGPPLPAENKWRFTPEDLKKIEYYLEEEQGPADHPSRLNQANSSGRESKVPGARSAQNLPGGGPASHSNPRSLSSGHLQGKPWK

SEQ ID NO: 49788 - protein, 383 aa, Homo sapiens
KRAEDVKGDRELRPGPRDEPRSNGRREEKTEKPRFMFNIADGGFTELHTLWQNEERAAISSGKLNEIWHRRHDYWLLAGIVLHGYARWQDIQNDAQFAIINEPFKTEANKGNFLEMKNKFLARRFKLLEQALVIEEQLRRAAYLNLSQEPAHPAMALHARFAEAECLAESHQHLSKESLAGNKPANAVLHKGKGRGGPARGRAHNAASEPAGGVAERHEGGRDPPASHAVPNTPHRSPPSDVRAQHPQPAGQQGHGASPHTGLPAGSLRYTSGVRGGLQRRTRRGPGRRRRQLQPDACRVLHHSRHQRPSSACEEGEGNGGGIGVRRAGSEGAPSRGGDLYRRLTGSQACPSPRPRPRGRPPAQALGPAASPPPSPPLGPSLG

SEQ ID NO: 49789 - protein, 39 aa, Homo sapiens
MELREEAWSPGPLDSEDQQMASHENPVDILIMDDDDVPS

SEQ ID NO: 49790 - protein, 108 aa, Homo sapiens
MAEYGTLLQDLTNNITLEDLEQLKSACKEDIPSEKNNLSYIEHIFEISRRPDLLTMVVDYRTRVLKISEEDELDTKLTRIPSAKKYKDIIRQPSEEEIIKLAPPPKKA

SEQ ID NO: 49791 - protein, 1105 aa, Homo sapiens
MTQAAVRPWAPCLENMTTAPNGLGPGPAAPCAGSDLKDAKMVTSLACGNGVCGCSPGGDTDTQEAKLSPAKLVRLFSTSRKRTGAHPERPHSMVLVGNSSTWNTLASFRKMGSFKKLKSSVLKGIQSREGSNACSKGEASEHGLGKSIPNGAVPGAQASRGSPLAPGPACGALRPAEWGTLDGSDLEDTDDAFQRSTHRSRSLRRAYGLGRICLLDAPQNHATPTIATGQVPAVCEILVRDPENNSMGYRRSKSTDNLAFLKKSSFKRKSTSNLADLRTAHDARVPQRTLSSSSTDSQKLGSGRTKRWRSPIRAKDFDRVFKLVSNVTEAAWRRESPRSGAPSPGEASLRLQAHSRLHDDYSRRVSRSTEQDSRRGGAVMHGTTATCTVAPGFGSATSKGPHLDADTAVFPLETKSSWAVESDSSCTCSSLPSPIVQDVLSKDSCDPNAGSQLTFDPEQPPTPLRPTTPKPQSPQSPQSPGAGSASCHSNHSALSANSEESEGRAEEPAQREPGPVSLQDPLEATHGDEGSKDLLVNIGVAAGPEEKEKEEPASRPPMPAHQVPPYKAVSARFRPFTFSQSTPIGLDRVGRRRQMRASNVSSDGGTEPSALVDDNGSEEDFSYEDLCQASPRYLQPGGEQLAINELISDGNVVCAEALWDHVTMDDQELGFKAGDVIQVLEASNKDWWWGRSEDKEAWFPASFVRLRVNQEELSENSSSTPSEEQDEEASQSRHRHCENKQQMRTNVIREIMDTERVYIKHLRDICEGYIRQCRKHTGMFTVAQLATIFGNIEDIYKFQRKFLKDLEKQYNKEEPHLSEIGSCFLQNQEGFAIYSEYCNNHPGACLELANLMKQGKYRHFFEACRLLQQMIDIAIDGFLLTPVQKICKYPLQLAELLKYTTQEHGDYSNIKAAYEAMKNVACLINERKRKLESIDKIARWQVSIVGWEGLDILDRSSELIHSGELTKITKQGKSQQRTFFLFDHQLVSCKKDLLRRDMLYYKGRLDMDEMELVDLGDGRDKDCNLSVKNAFKLVSRTTDEVYLFCAKKQEDKARWLQACADERRRVQEDKEMGMEISENQKKLAMLNAQKAGHGKSKVQSLSSEP

SEQ ID NO: 49792 - protein, 117 aa, Homo sapiens
MGWTWRILFLVVIAAGAQSQVQLMQSGAEVKKPGASVRISCKASGYTFTSYCMHWVCQAHAQGLEWMGLVCPSDGSTSYAQKFQGRVTITRDTSMGTAYMELSSLRSEDTAMYYCVR

SEQ ID NO: 49793 - protein, 1198 aa, Homo sapiens
MTDRFWDQWYLWYLRLLRLLDRGSFRNDGLKASDVLPILKEKVAFVSGGRDKRGGPILTFPARSNHDRIRQEDLRKLVTYLASVPSEDVCKRGFTVIIDMRGSKWDLIKPLLKTLQEAFPAEIHVALIIKPDNFWQKQKTNFGSSKFIFETSMVSVEGLTKLVDPSQLTEEFDGSLDYNHEEWIELRLSLEEFFNSAVHLLSRLEDLQEMLARKEFPVDVEGSRRLIDEHTQLKKKVLKAPVEELDREGQRLLQCIRCSDGFSGRNCIPGSADFQSLVPKITSLLDKLHSTRQHLHQMWHVRKLKLDQCFQLRLFEQDAEKMFDWISHNKELFLQSHTEIGVSYQYALDLQTQHNHFAMNSMNAYVNINRIMSVASRLSEAGHYASQQIKQISTQLDQEWKSFAAALDERSTILAMSAVFHQKAEQFLSGVDAWCKMCSEGGLPSEMQDLELAIHHHQTLYEQVTQAYTEVSQDGKALLDVLQRPLSPGNSESLTATANYSKAVHQVLDVVHEVLHHQRRLESIWQHRKVRLHQRLQLCVFQQDVQQVLDWIENHGEAFLSKHTGVGKSLHRARALQKRHDDFEEVAQNTYTNADKLLEAAEQLAQTGECDPEEIYKAARHLEVRIQDFVRRVEQRKLLLDMSVSFHTHTKELWTWMEDLQKEMLEDVCADSVDAVQELIKQFQQQQTATLDATLNVIKEGEDLIQQLRSAPPSLGEPSEARDSAVSNNKTPHSSSISHIESVLQQLDDAQVQMEELFHERKIKLDIFLQLRIFEQYTIEVTAELDAWNEDLLRQMNDFNTEDLTLAEQRLQRHTERKLAMNNMTFEVIQQGQDLHQYITEVQASGIELICEKDIDLAAQVQELLEFLHEKQHELELNAEQTHKRLEQCLQLRHLQAEVKQVLGWIRNGESMLNASLVNASSLSEAEQLQREHEQFQLAIESLFHATSLQKTHQSALQVQQKAEVLLQAGHYDADAIRECAEKVALHWQQLMLKMEDRLKLVNASVAFYKTSEQVCSVLESLEQEYRRDEDWCGGRDKLGPAAEIDHVIPLISKHLEQKEAFLKACTLARRNAEVFLKYIHRNNVSMPSVASHTRGPEQQVKAILSELLQRENRVLHFWTLKKRRLDQCQQYVVFERSAKQALDWIQETGEFYLSTHTSTGETTEETQELLKEYGEFRVPAKITRIQNGEARHKLGDT

SEQ ID NO: 49794 - protein, 216 aa, Homo sapiens
MKVLWAALLVTFLAGCQAKVEQAVETEPEPELRQQTEWQSGQRWELALGRFWDYLRWVQTLSEQVQEELLSSQVTQELRALMDETMKELKAYKSELEEQLTPVAEETRARLSKELQAAQARLGADMEDVCGRLVQYRGEVQAMLGQSTEELRVRLASHLRKLRKRLLRDADDLQKRLAVYQAGAREGAERGLSAIRERLGPLVEQGRVRAATVGSL

SEQ ID NO: 49795 - protein, 89 aa, Homo sapiens
MMSDEKNLGVSQKLVSPSRSTSSCSSKQGSRQDSWEVVEGLRGEMNYTQEPPVQKGFLLKKRKWPLKGWHKRFFYLDKGILKYAKSQTD

SEQ ID NO: 49796 - protein, 2388 aa, Homo sapiens
MAENVVEPGPPSAKRPKLSSPALSASASDGTDFGSLFDLEHDLPDELINSTELGLTNGGDINQLQTSLGMVQDAASKHKQLSELLRSGSSPNLNMGVGGPGQVMASQAQQSSPGLGLINSMVKSPMTQAGLTSPNMGMGTSGPNQGPTQSTGMMNSPVNQPAMGMNTGMNAGMNPGMLAAGNGQGIMPNQVMNGSIGAGRGRQNMQYPNPGMGSAGNLLTEPLQQGSPQMGGQTGLRGPQPLKMGMMNNPNPYGSPYTQNPGQQIGASGLGLQIQTKTVLSNNLSPFAMDKKAVPGGGMPNMGQQPAPQVQQPGLVTPVAQGMGSGAHTADPEKRKLIQQQLVLLLHAHKCQRREQANGEVRQCNLPHCRTMKNVLNHMTHCQSGKSCQVAHCASSRQIISHWKNCTRHDCPVCLPLKNAGDKRNQQPILTGAPVGLGNPSSLGVGQQSAPNLSTVSQIDPSSIERAYAALGLPYQVNQMPTQPQVQAKNQQNQQPGQSPQGMRPMSNMSASPMGVNGGVGVQTPSLLSDSMLHSAINSQNPMMSENASVPSLGPMPTAAQPSTTGIRKQWHEDITQDLRNHLVHKLVQAIFPTPDPAALKDRRMENLVAYARKVEGDMYESANNRAEYYHLLAEKIYKIQKELEEKRRTRLQKQNMLPNAAGMVPVSMNPGPNMGQPQPGMTSSLNQFGQMSMAQPPIVPRQTPPLQHHGQLAQPGALNPPMGYGPRMQQPSNQGQFLPQTQFPSQGMNVTNIPLAPSSGQAPVSQAQMSSSSCPVNSPIMPPGSQGSHIHCPQLPQPALHQNSPSPVPSRTPTPHHTPPSIGAQQPPATTIPAPVPTPPAMPPGPQSQALHPPPRQTPTPPTTQLPQQVQPSLPAAPSADQPQQQPRSQQSTAASVPTPTAPLLPPQPATPLSQPAVSIEGQVSNPPSTSSTEVNSQAIAEKQPSQEVKMEAKMEVDQPEPADTQPEDISESKVEDCKMESTETEERSTELKTEIKEEEDQPSTSATQSSPAPGQSKKKIFKPEELRQALMPTLEALYRQDPESLPFRQPVDPQLLGIPDYFDIVKSPMDLSTIKRKLDTGQYQEPWQYVDDIWLMFNNAWLYNRKTSRVYKYCSKLSEVFEQEIDPVMQSLGYCCGRKLEFSPQTLCCYGKQLCTIPRDATYYSYQNRYHFCEKCFNEIQGESVSLGDDPSQPQTTINKEQFSKRKNDTLDPELFVECTECGRKMHQICVLHHEIIWPAGFVCDGCLKKSARTRKENKFSAKRLPSTRLGTFLENRVNDFLRRQNHPESGEVTVRVVHASDKTVEVKPGMKARFVDSGEMAESFPYRTKALFAFEEIDGVDLCFFGMHVQEYGSDCPPPNQRRVYISYLDSVHFFRPKCLRTAVYHEILIGYLEYVKKLGYTTGHIWACPPSEGDDYIFHCHPPDQKIPKPKRLQEWYKKMLDKAVSERIVHDYKDIFKQATEDRLTSAKELPYFEGDFWPNVLEESIKELEQEEEERKREENTSNESTDVTKGDSKNAKKKNNKKTSKNKSSLSRGNKKKPGMPNVSNDLSQKLYATMEKHKEVFFVIRLIAGPAANSLPPIVDPDPLIPCDLMDGRDAFLTLARDKHLEFSSLRRAQWSTMCMLVELHTQSQDRFVYTCNECKHHVETRWHCTVCEDYDLCITCYNTKNHDHKMEKLGLGLDDESNNQQAAATQSPGDSRRLSIQRCIQSLVHACQCRNANCSLPSCQKMKRVVQHTKGCKRKTNGGCPICKQLIALCCYHAKHCQENKCPVPFCLNIKQKLRQQQLQHRLQQAQMLRRRMASMQRTGVVGQQQGLPSPTPATPTTPTGQQPTTPQTPQPTSQPQPTPPNSMPPYLPRTQAAGPVSQGKAAGQVTPPTPPQTAQPPLPGPPPAAVEMAMQIQRAAETQRQMAHVQIFQRPIQHQMPPMTPMAPMGMNPPPMTRGPSGHLEPGMGPTGMQQQPPWSQGGLPQPQQLQSGMPRPAMMSVAQHGQPLNMAPQPGLGQVGISPLKPGTVSQQALQNLLRTLRSPSSPLQQQQVLSILHANPQLLAAFIKQRAAKYANSNPQPIPGQPGMPQGQPGLQPPTMPGQQGVHSNPAMQNMNPMQAGVQRAGLPQQQPQQQLQPPMGGMSPQAQQMNMNHNTMPSQFRDILRRQQMMQQQQQQGAGPGIGPGMANHNQFQQPQGVGYPPQQQQRMQHHMQQMQQGNMGQIGQLPQALGAEAGASLQAYQQRLLQQQMGSPVQPNPMSPQQHMLPNQAQSPHLQGQQIPNSLSNQVRSPQPVPSPRPQSQPPHSSPSPRMQPQPSPHHVSPQTSSPHPGLVAAQANPMEQGHFASPDQNSMLSQLASNPGMANLHGASATDLGLSTDNSDLNSNLSQSTLDIH

SEQ ID NO: 49797 - protein, 201 aa, Homo sapiens
MANLLKTVVTGCSCPLLSNLGSCKGLRVKKDFLRTFYTHQELWCKAPVKPGIPYKQLTVGVPKEIFQNEKRVALSPAGVQNLVKQGFNVVVESGAGEASKFSDDHYRVAGAQIQGAKEVLASDLVVKVRAPMVNPTLGVHEADLLKTSGTLISFIYPAQNPELLNKLSQRKTTVLAMDQVPRVTIAQGYDALSSMANIAGF

SEQ ID NO: 49798 - protein, 453 aa, Homo sapiens
AAAVPTRSYSQVRGRREGPGARSLPGRVHAPPRPSVPPCAPRGHARGSATLAAHPPPSTLCSYWALEQGKLSQASGLLLVLFSPRVSGRLGSESKTTYLEDLPPPPEYELAPSKLEEEVDDVFLIRAQGLPWSCTMEDVLNFFSDCRIRNGENGIHFLLNRDGKRRGDALIEMESEQDVQKALEKHRMYMGQRYVEVYEINNEDVDALMKSLQVKSSPVVNDGVVRLRGLPYSCNEKDIVDFFAGLNIVDITFVMDYRGRRKTGEAYVQFEEPEMANQALLKHREEIGNRYIEIFPSRRNEVRTHVGSYKGKKIASFPTAKYITEPEMVFEEHEVNEDIQPMTAFESEKEIELPKEVPEKLPEAADFGTTSSLHFVHMRGLPFQANAQDIINFFAPLKPVRITMEYSSSGKATGEADVHFETHEDAVAAMLKDRSHVHHRYIELFLNSCPKGK

SEQ ID NO: 49799 - protein, 142 aa, Homo sapiens
MAEPEQDIGEKPAGEYKQEGTNPHLPTTDPSDNKKPSDTCLVRIQNPKENDFIEIELKRQELSYQNLLNVSCCELGIKPERVEKIRKLPNTLLRKDKDIRRLRDFQEVELILMKNGSSRLTEYVPSLTERPCYDSKAAKMTY

SEQ ID NO: 49800 - protein, 152 aa, Homo sapiens
YKEAPYQNVTEFDGQDACGSNSWTVVDIDPPLRSNDPKSQNHPGWLMRGLKPWTQYAIFVKTLVTFSDERRTYGAKSDIIYVQTDATNPSVPLDPISVSNSSSQIILKWKPPSDPNGNITHYLVFWERQAEDSELFELDYCLKGRVQSSAPL

SEQ ID NO: 49801 - protein, 136 aa, Homo sapiens
DLVVCVALGCDMFDCVFPTRTARFGSALVPTGNLQLRKKVFEKDFGPIDPECTCPTCQKHSRAFLHALLHSDNTAALHHLTVHNIAYQLMSAVRTSIVEKRFPDFVRDFMGAMYGDPTLCPTWATDALASVGITLG

SEQ ID NO: 49802 - protein, 113 aa, Homo sapiens
MMPSCNRSCSCSRGPSVEDGKWYGVRSYLHLFYEDCAGTALSDDPEGPPVLCPRRPWPSLCWKISLSSGTLLLLLGVAALTTGYAVPPKLEGIGEGWLSQDTKAEPLDPEADS

SEQ ID NO: 49803 - protein, 218 aa, Homo sapiens
MSMILSASVIRVRDGLPLSASTDYEQSTGMQECRKYFKMLSRKLAQLPDRCTLKTGHYNINFISSLGVSYMMLCTENYPNVLAFSFLDELQKEFITTYNMMKTNTAVRPYCFIEFDNFIQRTKQRYNNPRSLSTKINLSDMQTEIKLRPPYQISMCELGSANGVTSAFSVDCKGAGKISSAHQRLEPATLSGIVGFILSLLCGALNLIRGFHAIESLL

SEQ ID NO: 49804 - protein, 22 aa, Homo sapiens
  MOD_RES (1)..(1): Any amino acid
XYSGAGSYQLTFGKGTKLSVIP

SEQ ID NO: 49805 - protein, 151 aa, Homo sapiens
MAGNKGRGRAAYTFNIEAVGFSKGEKLPDVVLKPPPLFPDTDYKPVPLKTGEGEEYMLALKQELRETMKRMPYFIETPEERQDIERYSKRYMKVYKEEWIPDWRRLPREMMPRNKCKKGTLTNIIVIQQAQNPKRQKTQAKAHHSLILKMC

SEQ ID NO: 49806 - protein, 380 aa, Homo sapiens
MQLVSGGELFDRILERGVYTEKDASLVIQQVLSAVKYLHENGIVHRDLKPENLLYLTPEENSKIMITDFGLSKMEQNGIMSTACGTPGYVAPEVLAQKPYSKAVDCWSIGVITYILLCGYPPFYEETESKLFEKIKEGYYEFESPFWDDISESAKDFICHLLEKDPNERYTCEKALSHPWIDGNTALHRDIYPSVSLQIQKNFAKSKWRQAFNAAAVVHHMRKLHMNLHSPGVRPEVENRPPETQASETSRPSSPEITITEAPVLDHSVALPALTQLPCQHGRRPTAPGGRSLNCLVNGSLHISSSLVPMHQGSLAAGPCGCCSSCLNIGSKGKSSYCSEPTLLKKANKKQNFKSEVMVPVKASGSSHCRAGQTGVCLIM

SEQ ID NO: 49807 - protein, 60 aa, Homo sapiens
MFSRKKRELMKTPSISKKNRAGSPSPQPSGTSLRPAARGPTSAWVRLCVSCIRSSPSTRC

SEQ ID NO: 49808 - protein, 55 aa, Homo sapiens
MDDDDFGGFEAAETFDGGSGETQTTSPAIPWAAFPAGKHAIFIVSCLPEFMVELH

SEQ ID NO: 49809 - protein, 584 aa, Homo sapiens
MGNFQLVKEIADEDPSHVNLVNGDGATPLMLAAVTGQLALVQLLVERHADVDKQDSVHGWTALMQATYHGNKEIVKYLLNQGADVTLRAKNGYTAFDLVMLLNDPDTELVRLLASVCMQVNKDKGRPSHQPPLPHSKVRQPWSIPVLPDDKGGLKSWWNRMSNRFRKLKLMQTLPRGLSSNQPLPFSDEPEPALDSTMRAAPQDKTSRSALPDAAPVTKDNGPGSTRGEKEDTLLTTMLRNGAPLTRLPSDKLKAVIPPFLPPSSFELWSSDRSRTRHNGKADPMKTALPQRASRGHPVGGGGTDTTPVRPVKFPSLPRSPASSANSGNFNHSPHSSGGSSGVGVSRHGGELLNRSGGSIDNVLSQIAAQRKKAAGLLEQKPSHRSSPVGPAPGSSPSELPASPAGGSAPVGKKLETSKRPPSGTSTTSKSTSPTLTPSPSPKGHTAESSVSSSSSHRQSKSSGGSSSGTITDEDELTGILKKLSLEKYQPIFEEQEVDMEAFLTLTDGDLKELGIKTDGSRQQILAAISELNAGKGRERQILQETIHNFHSSFESSASNTRAPGNSPSMVGWVRPEETASGKR

SEQ ID NO: 49810 - protein, 441 aa, Homo sapiens
MFPNSILGRPPFTPNHQQHNNFFTLSPTVYSHQQLIDAQFNFQNADLSRAVSLQQLTYGNVSPIQTSASPLFRGRKRLSDEKNLPLDGKRQRFHSPHQEPTVVNQIVPLSGERRYSMPPLFHTHYVPDIVRCVPPFREIAFLEPREITLPEAKDKLSQQILELFETCQQQISDLKKKELCRTQLQREIQLLFPQSRLFLVGSSLNGFGTRSSDGDLCLVVKEEPCFFQVNQKTEARHILTLVHKHFCTRLSGYIERPQLIRAKVPIVKFRDKVSCVEFDLNVNNIVGIRNTFLLRTYAYPLPEPILPSLQKIYPESFSPAIQLHLVHQAPCNVPPYLSKNESNLGDLLLGFLKYYATEFDWNSQMISVREAKAIPRPDGIEWRNKYICVEEPFDGTNTARAVHEKQKFDMIKDQFLKSWHRLKNKRDLNSILPVRAAVLKR

SEQ ID NO: 49811 - protein, 870 aa, Homo sapiens
MSSMWSEYTIGGVKIYFPYKAYPSQLAMMNSILRGLNSKQHCLLESPTGSGKSLALLCSALAWQQSLSGKPADEGVSEKAEVQLSCCCACHSKDFTNNDMNQGTSRHFNYPSTPPSERNGTSSTCQDSPEKTTLAAKLSAKKQASIYRDENDDFQVEKKRIRPLETTQQIRKRHCFGTEVHNLDAKVDSGKTVKLNSPLEKINSFSPQKPPGHCSRCCCSTKQGNSQESSNTIKKDHTGKSKIPKIYFGTRTHKQIAQITRELRRTAYSGVPMTILSSRDHTCVHPEVVGNFNRNEKCMELLDGKNGKSCYFYHGVHKISDQHTLQTFQGMCKAWDIEELVSLGKKLKACPYYTARELIQDADIIFCPYNYLLDAQIRESMDLNLKEQVVILDEAHNIEDCARESASYSVTEVQLRFARDELDSMVNNNIRKKDHEPLRAVCCSLINWLEANAEYLVERDYESACKIWSGNEMLLTLHKMGITTATFPILQGHFSAVLQKEEKISPIYGKEEAREVPVISASTQIMLKGLFMVLDYLFRQNSRFADDYKIAIQQTYSWTNQIDISDKNGLLVLPKNKKRSRQKTAVHVLNFWCLNPAVAFSDINGKVQTIVLTSGTLSPMKSFSSELGVTFTIQLEANHIIKNSQVWVGTIGSGPKGRNLCATFQNTETFEFQDEVGALLLSVCQTVSQGILCFLPSYKLLEKLKERWLSTGLWHNLELVKTVIVEPQGGEKTNFDELLQVYYDAIKYKGEKDGALLVAVCRGKVSEGLDFSDDNARAVITIGIPFPNVKDLQVELKRQYNDHHSKLRGLLPGRQWYEIQAYRALNQALGRSHSVAHVGVQWYNLSSLQPRLPGFKGFSHLSLPSNWDHR

SEQ ID NO: 49812 - protein, 55 aa, Homo sapiens
PTQEELEAVQNMVSHTERALKAVSDWIDEQEKGRNALLPWRPSDTPSGSRPEPTG

SEQ ID NO: 49813 - protein, 143 aa, Homo sapiens
MADQDPAGISPLQQMVASGTGAVVTSLFMTPLDVVKVRLQSQRPSMASVPSSLQSTGKCLLYCNGVLEPLYLCPNGARCATWFQDPTRFTGTMDAFVKIVRHEGTRTLWSGLPATLVMTVPATAIYFTAYDQLKAFLCGRALT

SEQ ID NO: 49814 - protein, 217 aa, Homo sapiens
  MOD_RES (1)..(1): Any amino acid
XLNESEKDCGQDRRAPGVQPCRLVTMTSVVKTVYSLQPPSALSGGQPADTQTRATSKSLLPVRSKEVDVSKQLHSGGPENDVTKITKLRRENGQMKATDTATRRNVRKGRSFALVATQAGVQWRNLSSPQPPPPGFKRLSCLSLPNTWDYSYKPLSKQKSEEELKDKNQLLEAVNKQLHQKLTETQGELKDLTQKVELLEKFRDNCLAILESKGLDP

SEQ ID NO: 49815 - protein, 124 aa, Homo sapiens
MLRGVLGKTFRLVGYTIQYGCIAHCAFEYVGGVVMCSGPSMEPTIQNSDIVFAENLSRHFYGIQRGDIVIAKSPSDPKSNICKRVIGLEGDKILTTSPSDFFKSHSYTIVIKTCATHPFLSNGS

SEQ ID NO: 49816 - protein, 275 aa, Homo sapiens
MNWHLPLFLLASVTLPSICSHFNPLSLEELGSNTGIQVFNQIVKSRPHDNIVISPHGIASVLGMLQLGADGRTKKQLAMVMRYGVNGVGKILKKINKAIVSKKNKDIVTVANAVFVKNASEIEVPFVTRNKDVFQCEVRNVNFEDPASACDSINAWVKNETRDMIDNLLSPDLIDGVLTRLVLVNAVYFKGLWKSRFQPENTKKRTFVAADGKSYQVPMLAQLSVFRCGSTSAPNDLWYNFIELPYHGESISMLIALPTESSTPLSAIIPHISTK

SEQ ID NO: 49817 - protein, 138 aa, Homo sapiens
MVRYSLDPENPTKSCKSRGSNLRVHFKNTRETAQAIKGMHIRKATKYLKDVTLQKQCVPFRRYNGGVGRCAQAKQWGWTQGRWPKKSAEFLLHMLKNAESNAELKGLDVDSLVIEHIQVNKAPKMRRRTYRAHGRINP

SEQ ID NO: 49818 - protein, 39 aa, Homo sapiens
MSEPHLHLADTQCFVYYLLFAESVHLSDVRGGITTSFYL

SEQ ID NO: 49819 - protein, 387 aa, Homo sapiens
MAPMADSVLNHSWPAFSKLWLKRWAFKRGSEPKSCVQPFDSGAVASATKSSSGSWKPENPDFFSAMGDDQEDDFPRRLSESMEDLSLDLGALQGSEYLQDLGLGAPSHSQPGETPDSRPTGEEPGRDSLFSSLAGSQDLSRRRSWERSRSCSESWRRLSLDASAVDEEPCLPRTLASLALNLPGGGLKTWTQGCLSGGGTPAESPGKECDSPKKRGRSRSVPVSFYEIRSPEISPGLEVPTPPVQGLEPPVLECMEKDHVEPDHVLIVQQVLQELRQYHGARQRACMSASPGGAHSNLTWFEFLSESEDGAGKNEKSDKSTSVKRRLSCLRSRVTRQKEKGKSPAHLKDKGQDARERRECVNGHQLLQGTFSGPSSCPLCGKPFLSS

SEQ ID NO: 49820 - protein, 190 aa, Homo sapiens
MMPEFSPQQVWEKFLSSETPRINVFMAVPTIYTKLMEYYDRHFTQPHAQDFLRAVCEEKIRLMVSGSAALPLPVLEKWKNITGHTLLERYGMTEIGMALSGPLTTAVRLPGSVGTPLPGVQVRIVSENPQREACSYTIHAEGDERGTKVTPGFEEKEGELLVRGPSVFREYWNKPEETKSAFTLDGWFKT

SEQ ID NO: 49821 - protein, 293 aa, Homo sapiens
MRSLPFALTVESVSARAPTCCSTGRFTQGRQPCKCKACGRGFTQSASLLQHWRVHSDWRETLSLSPVRQDLLWPLQPHQAPASPLGRSHSSAGVRQGFSGQLCCWLTKEHTLAEALRLSPVPAGFWGPVEADRPPANSHRRVCPFCCCSCGDSVNEKTSLSQRVLPHPGEKTCRGGSVESVSLAPSSVAPDSTSGLRPCGSPGSFLQHLPPSTLLPRPPFLYPGPPLTGITGAHHHAQLIFVFLVERGFDHAGQAGLELLTSGDPPTSASQSGGIIGMSHRTQPLLCFLDKYF

SEQ ID NO: 49822 - protein, 244 aa, Homo sapiens
CGAAAGRRGRRGRRPRLEVIDLTHDNKDDLQAAIALSLLESPKIQADGRDLNRMHEATSAETKRSKRKRCEVWGENPNPNDWRRVDGWPVGLKNVGNTCWFSAVIQEKRNIMFMQELQYLFALMMGSNRKFVDPSAALDLLKGAFRSSEEQQQDVSEFTHKLLDWLEDAFQLAVNVNSPRNKSENPMVQLFYGTFLTEGVREGKPFCNNETFGQYPLQVNGYRNLDECLEGAMVEGDVELLPSD

SEQ ID NO: 49823 - protein, 236 aa, Homo sapiens
MAFVKSGWLLRQSTILKRWKKNWFDLWSDGHLIYYDDQTRQNIEDKVHMPMDCINIRTGQECRDTQPPDGKSKDCMLQIVCRDGKTISLCAESTDDCLAWKFTLQDSRTNTAYVGSAVMTDETSVVSSPPPYTAYAAPAPEQAYGYGPYGGAYPPGTQVVYAANGQAYAVPYQYPYAETILMTRHCTAVSRGLYGQQPANQVIIRERYRDNDSDLALGMLAGAATGMALGSLFWVF

SEQ ID NO: 49824 - protein, 260 aa, Homo sapiens
MNNFQAILTQVRMLLSSHQPSLVQALLDNLLKEDLLSREYHCTLLHEPDSEALARKISLTLLEKGDLDLALLGWARSGLQPPAAERGPGHSDHGGSSQCATMELGPLEGGYLELLNSDADPLCLYHFYDQMDLAGEEEIELYSEPDTDTINCDQFSRLLCDMEGDEETREAYANIAELDQYVFQDSQLEGLSKDIFIEHIGPDEVIGESMEMPAEVGQKSQKRPFPEELPADLKHWKPAEPPTVVTGSLLVGPVSDCSTL

SEQ ID NO: 49825 - protein, 1281 aa, Homo sapiens
MPIVMARDLEETASSSEDEEVISQEDHPCIMWTGGCRRIPVLVFHADAILTKDNNIRVIGERYHLSYKIVRTDSRLVRSILTAHGFHEVHPSSTDYNLMWTGSHLKPFLLRTLSEAQKVNHFPRSYELTRKDRLYKNIIRMQHTHGFKAFHILPQTFLLPAEYAEFCNSYSKDRGPWIVKPVASSRGRGVYLINNPNQISLEENILVSRYINNPLLIDDFKFDVRLYVLVTSYDPLVIYLYEEGLARFATVRYDQGAKNIRNQFMHLTNYSVNKKSGDYVSCDDPEVEDYGNKWSMSAMLRYLKQEGRDTTALMAHVEDLIIKTIISAELAIATACKTFVPHRSSCFELYGFDVLIDSTLKPWLLEVNLSPSLACDAPLDLKIKASMISDMFTVVGFVCQDPAQRASTRPIYPTFESSRRNPFQKPQRPVSAQFQSSKAKQRCRPLSASDAEMKNLVGSAREKGPGKLGGSVLGLSMEEIKVLRRVKEENDRRGGFIRIFPTSETWEIYGSYLEHKTSMNYMLATRLFQDRMTADGAPELKIESLNSKAKLHAALYERKLLSLEVRKRRRRSSRLRAMRPKYPVITQPAEMNVKTETESEEEEEVALDNEDEEQEASQEESAGFLRENQAKYTPSLTALVENTPKENSMKVREWNNKGGHCCKLETQELEPKFNLMQILQDNGNLSKMQARIAFSAYLQHVQIRLMKDSGGQTFSASWAAKEDEQMELVVRFLKRASNNLQHSLRMVLPSRRLALLERRRILAHQLGDFIIVYNKETEQMAEKKSKKKVEEEEEDGVNMENFQEFIRQASEAELEEVLTFYTQKNKSASVFLGTHSKISKNNNNYSDSGAKGDHPETIMEEVKIKPPKQQQTTEIHSDKLSRFTTSAEKEAKLVYSNSSSGPTATLQKIPNTHLSSVTTSDLSPGPCHHSSLSQIPSAIPSMPHQPTILLNTVSASASPCLHPGAQNIPSPTGLPRCRSGSHTIGPFSSFQSAAHIYSQKLSRPSSAKAAGSCYLNKHHSGIAKTQKEGEDASLYSKRYNQSMVTAELQRLAEKQAARQYSPSSHINLLTQQVTNLNLATGIINRSSASAPPTLRPIISPSGPTWSTQSDPQAPENHSSSPGSRSLQTGGFAWEGEVENNVYSQATGVVPQHKYHPTAGSYQLQFALQQLEQQKLQSRQLLDQSRARHQAIFGSQTLPNSNLWTMNNGAGCRISSATASGQKPTTLPQKVVPPPSSCASLVPKPPPNHEQVLRRATSQKASNTRFRSSFQNYLWYFFQAVS

SEQ ID NO: 49826 - protein, 131 aa, Homo sapiens
MSQGLALLPRLDCSGRIIAYCNLHLPGSGNPPSSASRVAETTGTRPHSRDSVTFADVAVNFTKEEWTLLDPAQRNLYRDVMLENSRNLAFIDWATPCKTKDATPQPDILPKRTFPEANRVCLTSISSQHST

SEQ ID NO: 49827 - protein, 59 aa, Homo sapiens
  MOD_RES (1)..(1): Any amino acid
XAGQVNIYSCNYRCDAMNSLLSPQRLCQVPGCIAQGKRLILSNVRGCTPTFATHLQNWG

SEQ ID NO: 49828 - protein, 45 aa, Homo sapiens
MASRRMETKPVITCLKTLLIIYSFVFWPCLLKRIRSWVSPHLHNK

SEQ ID NO: 49829 - protein, 123 aa, Homo sapiens
CCQPTCCRTTCCRPSCCVPSCCQPCCHPTCCQNTCCRTTCCQPTCVASCCQPSCCSTPCCQPTCCGSSCCGQTSCGSSCCQPICGSSCCQPCCHPTTCCQPTCCQPTCCRNTSCQPTCCGSSC

SEQ ID NO: 49830 - protein, 158 aa, Homo sapiens
  MOD_RES (1)..(1): Any amino acid
XKGNRKKRAVDTKKTKLESLSQVGPVNENVMEEDLKTMIERHLTAKTPTKRVRIGKTLPSEKAVVTEPAKGEEAFQMSEVDEESGLKDSEPERKRKKTEDSSSGKSVASDVPEELDFLVPKAGFFCPICSLFYSGEKAMTNHCKSTRHKQNTEQHLPE

SEQ ID NO: 49831 - protein, 504 aa, Homo sapiens
  MOD_RES (1)..(1): Any amino acid
XKKERRQSSSRFNLSKNRELQKLPALKDSPTQEREELFIQKLRQCCVLFDFVSDPLSDLKFKEVKRAGLNEMVEYITHSRDVVTEAIYPEAVTMFSVNLFRTLPPSSNPTGAEFDPEEDEPTLEAAWPHLQLVYEFFLRFLESPDFQPNIAKKYIDQKFVLALLDLFDSEDPRERDFLKTILHRIYGKFLGLRAYIRRQINHIFYRFIYETEHHNGIAELLEILGSIINGFALPLKEEHKMFLIRVLLPLHKVKSLSVYHPQVIVGLLKFWPKTHSPKEVMFLNELEEILDVIEPSEFSKVMEPLFRQLAKCVSSPHFQVAERALYYWNNEYIMSLISDNAARVLPIMFPALYRNSKSHWNKTIHGLIYNALKLFMEMNQKLFDDCTQQYKAEKQKGRFRMKEREEMWQKIEELARLNPQYPMFRAPPPLPPVYSMETETPTAEDIQLLKRTVETEAVQMLKDIKKEKVLLRRKSELPQDVYTIKALEAHKRAEEFLTASQEAL

SEQ ID NO: 49832 - protein, 842 aa, Homo sapiens
MPSALAIFTCRPNSHPFQERHVYLDEPIKIGRSVARCRPAQNNATFDCKVLSRNHALVWFDHKTGKFYLQDTKSSNGTFINSQRLSRGSEESPPCEILSGDIIQFGVDVTENTRKVTHGCIVSTIKLFLPDGMEARLRSDVIHAPLPSPVDKVAANTPSMYSQELFQLSQYLQEALHREQMLEQKLATLQRLLAITQEASDTSWQALIDEDRLLSRLEVMGNQLQACSKNQTEDSLRKELIALQEDKHNYETTAKESLRRVLQEKIEVVRKLSEVERSLSNTEDECTHLKEMNERTQEELRELANKYNGAVNEIKDLSDKLKVAEGKQEEIQQKGQAEKKELQHKIDEMEEKEQELQAKIEALQADNDFTNERLTALQVRLEHLQEKTLKECSSLGIQVDDFLPKINGSTEKEHLLSKSGGDCTFIHQFIECQKKLIVEGHLTKAVEETKLSKENQTRAKESDFSDTLSPSKEKSSDDTTDAQMDEQDLNEPLAKVSLLKDDLQGAQSEIEAKQEIQHLRKELIEAQELARTSKQKCFELQALLEEERKAYRNQVEESTKQIQVLQAQLQRLHIDTENLREEKDSEITSTRDELLSARDEILLLHQAAAKVASERDTDIASLQEELKKVRAELERWRKAASEYEKEITSLQNSFQLRCQQCEDQQREEATRLQGELEKLRKEWNALETECHSLKRENVLLSSELQRQEKELHNSQKQSLELTSDLSILQMSRKELENQVGSLKEQHLRDSADLKTLLSKAENQAKDVQKEYEKTQTVLSELKLKFEMTEQEKQSITDELKQCKNNLKLLREKGNNPSILQPVPAVFIGLFLAFLFWCFGPLW

SEQ ID NO: 49833 - protein, 1035 aa, Homo sapiens
MENWTGRPWLYLLLLLSLPQLCLDQEVLSGHSLQTPTEEGQGPEGVWGPWVQWASCSQPCGVGVQRRSRTCQLPTVQLHPSLPLPPRPPRHPEALLPRGQGPRPQTSPETLPLYRTQSRGRGGPLRGPASHLGREETQEIRAARRSRLRDPIKPGMFGYGRVPFALPLHRNRRHPRSPPRSELSLISSRGEEAIPSPTPRAEPFSANGSPQTELPPTELSVHTPSPQAEPLSPETAQTEVAPRTRPAPLRHHPRAQASGTEPPSPTHSLGEGGFFRASPQPRRPSSQGWASPQVAGRRPDPFPSVPRGRGQQGQGPWGTGGTPHGPRLEPDPQHPGAWLPLLSNGPHASSLWSLFAPSSPIPRCSGESEQLRACSQAPCPPEQPDPRALQCAAFNSQEFMGQLYQWEPFTEAPLLPLRHAFFLLPGAGSGDSTGVQGSQRCELNCRPRGFRFYVRHTEKVQDGTLCQPGAPDICVAGRCLSPGCDGILGSGRRPDGCGVCGGDDSTCRLVSGNLTDRGGPLGYQKILWIPAGALRLQIAQLRPSSNYLALRGPGGRSIINGNWAVDPPGSYRAGGTVFRYNRPPREEGKGESLSAEGPTTQPVDVYMIFQEENPGVFYQTPLGSPAAYWKRVGHSACSASCGKGVWRPIFLCISRESGEELDERSCAAGARPPASPEPCHGTPCPPYWEAGEWTSCSRSCGPGTQHRQLQCRQEFGGGGSSVPPERCGHLPRPNITQSCQLRLCGHWEVGSPWSQCSVRCGRGQRSRQVRCVGNNGDEVSEQECASGPPQPPSREACDMGPCTTAWFHSDWSSKCSAECGTGIQRRSVVCLGSGAALGPGQGEAGAGTGQSCPTGSRPPDMRACSLGPCERTWRWYTGPWGECSSECGSGTQRRDIICVSKLGTEFNVTSPSNCSHLPRPPALQPCQGQACQDRWFSTPWSPCSRSCQGGTQTREVQCLSTNQTLSTRCPPQLRPSRKRPCNSQPCSQRPDDQCKDSSPHCPLVVQARLCVYPYYTATCCRSCAHVLERSPQDPS

SEQ ID NO: 49834 - protein, 167 aa, Homo sapiens
MTTLTRQDLNFGQVVADVLCEFLEVAVHLILYVREVYPVGIFQKRKKYNVPVQMSCHPELNQYIQDTLHCVKPLLEKNDVEKVVVVILDKEHRPVEKFVFEITQPPLLSISSDSLLSHVEQLLRAFILKISVCDAVLDHNPPGCTFTVLVHTREAATRNMEKIQVIK

SEQ ID NO: 49835 - protein, 223 aa, Homo sapiens
MAAWGCVAALGAARGLCWRAARAAAGLQGRPARRCYAVGPAQPLPRNDFPRIEGVLLLGEPVRWETSLQLIMDVLLSNGSPGAGLATPPYPHLPVLASNMDLLWMAEAKMPSDNPMSDVYGANLFHQYLQKATHDGAPELGAGGTRQQQPSASQSCISILVCTGVYNPRNPQSTEPVLGGGEPPFHGHRDLCFSPGLMEASHVVNDVNEAVQLVFRKEGWALE

SEQ ID NO: 49836 - protein, 291 aa, Homo sapiens
MSHQTGIQDTPQGKLICMVACNACRQFNMQLYLTSIISWFEIGQPAASEDVKEIFARARNGKYRLLKISIENEQLVIGSYSQPSDSWDKDYDSFVLPLLEDKQPCYILFRLDSQNAQGYEWIFIAWSPDHSHVRQKMLYAATRATLKKEFGGGHIKDEVFGTVKEDVSLHGYKKYLLSQSSPAPLTAAEEELRQIKINEVQTDVGVDTKHQTLQGVAFPISREAFQALEKLNNRQLNYVQLEIDIKNEIIILANTTNTELKDLPKRIPKDSARYHFFLYKHSHEGDYLESI

SEQ ID NO: 49837 - protein, 37 aa, Homo sapiens
MSLHFLYYCSEPTLDVKIAFCQGFDKQVDVSYIAKHY

SEQ ID NO: 49838 - protein, 115 aa, Homo sapiens
MADTPRDAGLKQAPASRNEKAPVDFGYVGIDSILEQMRRKAMKQGFEFNIMVVGQSGLGKSTLINTLFKSKISRKSVQPTSEERIPKTIEIKSITHDIEEKGVRMKLTVIDTPGF

SEQ ID NO: 49839 - protein, 167 aa, Homo sapiens
MPGIVVFRRRWSVGSDDLVLPAIFLFLLHTTWFVILSVVLFGLVYNPHEACSLNLVDHGRGYLGILLSCMIAEMAIIWLSMRGGILYTEPRDSMHHPGDRVHLRHRGHRLAHSVLHLLQRPHCQECHPRNGCLQLGSHPQCVHHCPLRLRPHGPHLCQAESHQEEAA

SEQ ID NO: 49840 - protein, 349 aa, Homo sapiens
MSLMVVSMACVGFFLLQGAWPHEGVHRKPSLRAHPGPLVKSEETVILQCWSDVRFEHFLLHREGKFKDTLRLIGEHHDGVSKANFSIGPMMQDLAGTYRCYGSVTHSPYQLSAPSDPLDIVITGLYEKPSLSAQPGPTVLAGESVTLSCSSRSSYDMYHLSREGEAHERRFSAGPKVNGTFQADFPLGPATHGGTYRCFGSFRDSPYEWSNSSDPLLVSVTGNPSNSWPSPTEPSSKTGNPRHLHVLIGTSVVIILFVLLLFFLLHRWCSNKKNAVVMDQEPAGNRTVNREDSDEQDPQEVTYAQLNHCVFTQRKITRPSQRPKTPPTDIIVYTELPNAEPRSKVVSCP

SEQ ID NO: 49841 - protein, 238 aa, Homo sapiens
MGKCLRYITANTDTEEQSFPVPKAFNTRVEELNLDVLLQKVDHLRMSESGKSESFELLRDHKEKFRDEIEFMWRFARAYGDMYELSTNTQEKKHYANIGKTLSERAINRAPMNGHCHLWYAVLCGYVSEFEGLQNKINYGHLFKEHLDIAIKLLPEEPFLYYLKGRYCYTVSKLSWIEKKMAATLFGKIPSSTVQEALHNFLKAEELCPGYSNPNYMYLAKCYTDLEENQNALKFCNL

SEQ ID NO: 49842 - protein, 412 aa, Homo sapiens
MADEDLIFRLEGVDGGQSPRAGHDGDSDGDSDDEEGYFICPITDDPSSNQNVNSKVNKYYSNLTKSERYSSSGSPANSFHFKEAWKHAIQKAKHMPDPWAEFHLEDIATERATRHRYNAVTGEWLDDEVLIKMASQPFGRGAMRECFRTKKLSNFLHAQQWKGASNYVAKRYIEPVDRDVYFEDVRLQMEAKLWGEEYNRHKPPKQVDIMQMCIIELKDRPGKPLFHLEHYIEGKYIKYNSNSGFVRDDNIRLTPQAFSHFTFERSGHQLIVVDIQGVGDLYTDPQIHTETGTDFGDGNLGVRGMALFFYSHACNRICESMGLAPFDLSPRERDAVNQNTKLLQSAKTILRGTEEKCGSPQVRTLSGSRPPLLRPLSENSGDENMSDVTFDSLPSSPSSATPHSQKLDHLRE

SEQ ID NO: 49843 - protein, 123 aa, Homo sapiens
EMTRKQPDVDKVTKTYKRRAADPSSLQSHIPVLDKGRAGRKRFPASSLYPSGSQTQIETKNPRVNLLVSKWQQVWLLALERRRKLNDALDRLEEVWKFIPSTPHCHLPSFLITHCHCQNLGIF

SEQ ID NO: 49844 - protein, 84 aa, Homo sapiens
MGNVLQSSSDAIYLARHVGLRVGIPKETPALTINRLCGSGFQSIVNGCQEICVKEAEVVLCGGTESMSQAPYCVRNVRFGTKLG

SEQ ID NO: 49845 - protein, 76 aa, Homo sapiens
MAAVQAAEVKVDGSEPKLSKNELKRRLKAEKKVAEKEAKQKELSEKQLSQATAAATNHTTDNGVGPEEESVDPNKL

SEQ ID NO: 49846 - protein, 106 aa, Homo sapiens
MDWKEVLRRRLATPNTCPNKKKSEQELKDEEMDLFTKYYSEWKGGRKNTNEFYKTIPRFYYRLPAEDEVLLQKLREESRAVFLQRKSRELLDNEELQAIFHSKSLC

SEQ ID NO: 49847 - protein, 497 aa, Homo sapiens
MPQRGHPSQEGLWALPSLPMAHGPKPETEGLLDLSFLTEEEQEAIAGVLQRDARLRQLEEGRVSKLRASVADPGQLKILTGDWFQEARSQRHHNAHFGSDLVRASMRRKKSTRGDQAPGHDREAEAAVKEKEEGPEPRLTIDEAPQERLRETEASDPEEASQAQEDPGQGDQQVCAEEADPELEPASGGEQEPRPQQAQTKAASQILENGEEAPGPDPSLDRMLSSSSSVSSLNSSTLSGSQMSLSGDAEAVQVRGSVHFALHYEPGAAELRVHVIQCQGLAAARRRRSDPYVKSYLLPDKQSKRKTAVKKRNLNPVFNETLRVPPSPDDLPSRGLLALSLKYVPAGSEGAGLPPSGELHFWVKEARDLLPLRAGSLDTYVQCFVLPDDSQASRQRTRVVRRSLSPVFNHTMVYDGFGPADLRQACAELSLWDHGALANRQLGGTRLSLGTGSSYGLQVPWMDSTPEEKQLWQALLEQPCEWVDGLLPLRTNLAPRT

SEQ ID NO: 49848 - protein, 262 aa, Homo sapiens
  MOD_RES (1)..(1): Any amino acid
XAPEIRMSKPLEAEKQGLDSPSEHTDTERNGPDTNHQNPQNKTSPFSVSPTGPSTKIKAEDPSGDSAPAAPLPPQPAQPHLPQAQLMLTGSQLAGDIQQLLQLQQLVLVPGHHLQPPAQFLLPQAQQSQPGLLPTPNLFQLPQQTQGALLTSQPRAGLPTQAVTRPTLPDPHLSHPQPPKCLEPPSHPEEPSDLEELEQFARTFKQRRIKLGFTQGDVGLAMGKLYGNDFSQTTISRFEALNLSFKNMCKLKPLLEKWLNDA

SEQ ID NO: 49849 - protein, 138 aa, Homo sapiens
SQLEVQFIITGTNHHSEKEFCSYLQYLEYLSQNRPPPNAYELFAKGYEDYLQSPLQPLMDNLESQTYEVFEKDPIKYSQYQQAIYKCLLDRVPEEEKDTNVQVLMVLGAGRGPLVNASLRAAKQADRRIKLLENWQFE

SEQ ID NO: 49850 - protein, 253 aa, Homo sapiens
  MOD_RES (1)..(1): Any amino acid
XFAKKLALHSGMDYAIMTGGDVAPMGREGVTAMHKLFDWANTSRRGLLLFVDEADAFLRKRATEKISEDLRATLNAFLYRTGQHSNNPSHVSHGGSSPAGRPWLTPQARWAPRFMLVLASNQPEQFDWAINDRINEMVHFDLPGQEERERLVRMYFDKYVLKPATEGKQRLKLAQFDYGRKCSEVARLTEGMSGREIAQLAVSWQATAYASEDGVLTEAMMDTRVQDAVQQHQQKMCWLKAEGPGRGDEPSPS

SEQ ID NO: 49851 - protein, 1129 aa, Homo sapiens
MKKFNFRKVLDGLTASSPGSGSSSGSNSGGGAGSGSVHPAGTAGVLREEIQETLTSEYFQICKTVRHGFPHQPTALAFDPVQKILAIGTRTGAIRILGRPGVDCYCQHESGAAVLQLQFLINEGALVSASSDDTLHLWNLRQKRPAILHSLKFNRERITYCHLPFQSKWLYVGTERGNTHIVNIESFILSGYVIMWNKAIELSTKTHPGPVVHLSDSPRDEGKLLIGYENGTVVFWDLKSKRAELRVYYDEAIHSIDWHHEGKQFMCSHSDGSLTLWNLKSPSRPFQTTIPHGKSQREGRKSESCKPILKVEYKTCKNSEPFIIFSGGLSYDKACRRPSLTIMHGKAITVLEMDHPIVEFLTLCETPYPNEFQEPYAVVVLLEKDLIVVDLTQSNFPIFENPYPMDIHESPVTCTAYFADCPPDLILVLYSIGVKHKKQGYSNKEWPISGGAWNLGAQTYPEIIITGHADGSIKFWDASAITLQMLYKLKTSKVFEKQKVGEGKQTCEIVEEDPFAIQMIYWCPESRIFCVSGVSAYVIIYKFSRHEITTEIVSLEVRLQYDVEDIITPEPETSPPFPDLSAQLPSSRSLSGSTNTVASEGVTKDSIPCLNVKTRPVRMPPGYQAELVIQLVWVDGEPPQQITSLAVSSAYGIVAFGNCNGLAVVDFIQKTVLLSMGTIDLYRSSDLYQRQPRSPRKNKQFIADNFCMRGLSNFYPDLTKRIRTSYQSLTELNDSPVPLELERCKSPTSENRENSYNRSRSSSISSIDKDSKEAITALYFMDSFARKNDSTISPCLFVGTSLGMVLIISLNLPLADEQRFTEPVMVLPSGTFLSLKGAVLTFSCMDRMGGLMQPPYEVWRDPNNIDENEKSWRRKVVMNSSSASQEIGDHQYTIICSEKQAKVFSLPSQTCLYVHNITETSFILQANVVVMCSSACLACFCANGHIMIMSLPSLRPMLDVNYLPLTDMRIARTFCFTNEGQALYLVSPTEIQRLTYSQEMCDNLQDMLGDLFTPIETPEAQNRGFLKGLFGGSGQTFDREELFGEASAGKASRSLAQHIPGPGSIEGMKGAAGGVMGELTRARIALDERGQRLGELEEKTAGMMTSAEAFSKHAHELMLKYKDKKWYQF

SEQ ID NO: 49852 - protein, 108 aa, Homo sapiens
  MOD_RES (1)..(1): Any amino acid
XEGSTSWKAALEASKGCIKCEAPCPEDWLLYGRKCYFFSEEPRDWNTGRQYCHTHEAVLAVIQSQKELEFMFKFTRREPWIGLRRVGDEFHWVNGDPFDPDTFTIAGP

SEQ ID NO: 49853 - protein, 267 aa, Homo sapiens
MTTCGHNFCRACIQLSWEKARGKKGRRKRKGSFPCPECREMSPQRNLLPNRLLTKVAEMAQQHPGLQKQDLCQEHHEPLKLFCQKDQSPICVVCRESREHRLHRVLPAEEAVQGYKLKLEEDMEYLREQITRTGNLQAREEQSLAEWQGKVKERRERIVLEFEKMNLYLVEEEQRLLQALETEEEETASRLRESVACLDRQGHSLELLLLQLEERSTQGPLQMLQDMKEPLSRKNNVSVQCPEVAPPTRPRTVCRVPGQIEVLRGFL

SEQ ID NO: 49854 - protein, 1254 aa, Homo sapiens
MALSDEPAAGGPEEEAEDETLAFGAALEAFGESAETRALLGRLREVHGGGAEREVALERFRVIMDKYQEQPHLLDPHLEWMMNLLLDIVQDQTSPASLVHLAFKFLYIITKVRGYKTFLRLFPHEVADVEPVLDLVTIQNPKDHEAWETRYMLLLWLSVTCLIPFDFSRLDGNLLTQPGQARMSIMDRILQIAESYLIVSDKARDAAAVLVSRFITRPDVKQSKMAEFLDWSLCNLARSSFQTMQGVITMDGTLQALAQIFKHGKREDCLPYAATVLRCLDGCRLPESNQTLLRKLGVKLVQRLGLTFLKPKVAAWRYQRGCRSLAANLQLLTQGQSEQKPLILTEDDDEDDDVPEGVERVIEQLLVGLKDKDTVVRWSAAKGIGRMAGRLPRALADDVVGSVLDCFSFQETDKAWHGGCLALAELGRRGLLLPSRLVDVVAVILKALTYDEKRGACSVGTNVRDAACYVCWAFARAYEPQELKPFVTAISSALVIAAVFDRDINCRRAASAAFQENVGRQGTFPHGIDILTTADYFAVGNRSNCFLVIRWRAQLRATVSLSARRLGPQLARAGLRGSISRADMEMFPLQIGVSDTQTGIELTGTPGRLWGETRRMGGPAVAPLSCSSSQPRWGVNDPQVIRELAARALHNLAQQAPEFSATQVFPRLLSMTLSPDLHMRHGSILACAEVAYALYKLAAQENRPVTDHLDEQAVQGLKQIHQQLYDRQLYRGLGGQLMRQAVCVLIEKLSLSKMPFRGDTVIDGWQWLINDTLRHLHLISSHSRQQMKDAAVSALAALCSEYYMKEPGEADPAIQEELITQYLAELRNPEEMTRCGFSLALGALPGFLLKGRLQQVLTGLRAVTHTSPEDVSFAESRRDGLKAIARICQTVGVKAGAPDEAVCGENVSQIYCALLGCMDDYTTDSRGDVGTWVRKAAMTSLMDLTLLLARSQPELIEAHTCERIMCCVAQQASEKIDRFRAHAASVFLTLLHFDSPPIPHVPHRGELEKLFPRSDVASVNWSAPSQAFPRITQLLGLPTYRYHVLLGLVVSLGGLTESTIRHSTQSLFEYMKGIQSDPQALGSFSGTLLQIFEDNLLNERVSVPLLKTLDHVLTHGCFDIFTTEEDHPFAVKLLALCKKEIKNSKDIQKLLSGIAVFCEMVQFPGDVRRQALLQLCLLLCHRFPLIRKTTASQVYETLLTYSDVVGADVLDEVVTVLSDTAWDAELAVVREQRNRLCDLLGVPRPQLVPQPGAC

SEQ ID NO: 49855 - protein, 524 aa, Homo sapiens
  MOD_RES (1)..(1): Any amino acid
XLSKAVITPHDFDECRFDISVNDSVWYLRAQDPDHRQQWIDAIEQHKTESGYGSESSLRRHGSMVSLVSGASGYSATSTSSFKKGHSLREKLAEMETFRDILCRQVDTLQKYFDACADAVSKDELQRDKVVEDDEDDFPTTRSDGDFLHSTNGNKEKLFPHVTPKGINGIDFKGEAITFKATTAGILATLSHCIELMVKREDSWQKRLDKEGPNSLINEEEFFDAVEAALDRQDKIEEQSQSEKVRLHWPTSLPSGDAFSSVGTHRFVQKPYSRSSSMSSIDLVSASDDVHRFSSQVEEMVQNHMTYSLQDVGGDANWQLVVEEGEMKVYRREVEENGIVLDPLKATHAVKGVTGHEVCNYFWNVDVRNDWETTIENFHVVETLADNAIIIYQTHKRVWPASQRDVLYLSVIRKIPALTENDPETWIVCNFSVDHDSAPLNNRCVRAKINVAMICQTLVSPPEGNQEISRDNILCKITYVANVNPGGWAPASVLRAVAKREYPKFLKRFTSYVQEKTAGKPILF

SEQ ID NO: 49856 - protein, 51 aa, Homo sapiens
MGPISAPSCRWRIPWQGLLLTDALVQGSSPGLSARATVSIMIGVLARVALI

SEQ ID NO: 49857 - protein, 190 aa, Homo sapiens
MQALNITPEQFSRLLRDHNLTREQFIALYRLRPLVYTPELPGRAKLALVLTGVLIFALALFGNALVFYVVTRSKAMRTVTNIFICSLALSDLLITFFCIPVTMLQNISDNWLGGAFICKMVPFVQSTAVVTEILTMTCIAVERHQGLVHPFKMKWQYTNRRAFTMLGVVWLVAVIVGSPMWHVQQLEALP

SEQ ID NO: 49858 - protein, 214 aa, Homo sapiens
MSSFGYRTLTVALFTLICCPGSDEKVFEVHVRPKKLAVEPKGSLEVNCSTTCNQPEVGGLETSLDKILLDEQAQWKHYLVSNISHDTVLQCHFTCSGKQESMNSNVSVYQPPRQVILTLQPTLVAVGKSFTIECRVPTVEPLDSLTLFLFRGNETLHYETFGKAAPAPQEATATFNSTADREDGHRNFSCLAVLDLMSRGGNIFHKHSAPKMLE

SEQ ID NO: 49859 - protein, 124 aa, Homo sapiens
KLIPRHQSIFKSNGFFHGISIPEPEDMETLEEKFSDVHPVALNFMKGCLKMNPDDRLTCSQLLESSYFDSFQEAQIKRKARNEGRNRRRQQNQLLPLIPGSHISPTPDGRKQVLQLKFDHLPNI

SEQ ID NO: 49860 - protein, 104 aa, Homo sapiens
  MOD_RES (1)..(1): Any amino acid
XLPLELGLEQLFQELAGEEEELNASQLQALLSIALEPGFHLNNQLTQTLTSRYRDSRLRVDFERFVSCVAHLTCIFCHCSQHLDGGEGVICLTHRQWMEVATFS

SEQ ID NO: 49861 - protein, 31 aa, Homo sapiens
MELTDTELILYTRKRDSVKWHYLCLRRYGYD

SEQ ID NO: 49862 - protein, 348 aa, Homo sapiens
MDFRTACEETKTGICLLQDGNQEPFKVRLHLAKDILMIQEQDVICVSGEPFYSGERTVTIRRQTVGGFGLSIKGGAEHNIPVVVSKISKEQRAELSGLLFIGDAILQINGINVRKCRHEEVVQVLRNAGEEVTLTVSFLKRAPAFLKLPLNEDCACAPSDQSSGTSSPLCDSGLHLNYHPNNTDTLSCSSWPTSPGLRWEKRWCDLRLIPLLHSRFSQYVPGTDLSRQNAFQVIAVDGVCTGIIQCLSAEDCVDWLQAIATNISNLTKHNIKKINRNFPVNQQIVYMGWCEAREQDPLQDRVYSPTFLALRGSCLYKFLAPPVTTWDWTRAEKTFSVYEIMCKILKPV

SEQ ID NO: 49863 - protein, 107 aa, Homo sapiens
MLSEQTAALGTGWESMNVQLDGAEPQVERGSQEERPWRTVPGPLEHLCCDLEEEPQSLQEKAQSAPWVPAIPQEGNTGDWEMAAALLAAGSQGLVTIKDVSLCFSQE

SEQ ID NO: 49864 - protein, 182 aa, Homo sapiens
MKASGHTSGDGQNLFTKDVTVIEGEVATISCQVNKSDDSVIQLLNPNRQTIYFRDFRPLKDSRFQLLNFSSSELKVSLTNVSISDEGRYFCQLYTDPPQESYTTITVLVPPRNLMIDIQKDTAVEGEEIEVNCTAMASKPATTIRWFKGNTELKGKSEVEEWSDMYTVTSQLMLKVHKEDDG

SEQ ID NO: 49865 - protein, 76 aa, Homo sapiens
MDTLDRVVKPKTKRAKRFLEKREPKLNENIKNAMLIKGGNANATVTKVLKDVNVFCFESYKFCFTVCTEKTIRCTI

SEQ ID NO: 49866 - protein, 91 aa, Homo sapiens
MLRNLLALRQIGQRTISTASRRHFKNKVPEKQKLFQEDDEIPLYLKGGVADALLYRATMILTVGGKAFGMFEGTAYAIYELAVASFPKKQE

SEQ ID NO: 49867 - protein, 2012 aa, Homo sapiens
EGQKEDRDVLSYYRYQLNLFARMCLDRQYLAINEISGQLDVDLILRCMSDENLPYDLRASFCRLMLHMHVDRDPQEQVTPVKYARLWSEIPSEIAIDDYDSSGASKDEIKERFAQTMEFVEEYLRDVVCQRFPFSDKEKNKLTFEVVNLARNLIYFGFYNFSDLLRLTKILLAILDCVHVTTIFPISKMAKGEENKGSNVMRSIHGVGELMTQVVLRGGGFLPMTPMAAAPEGNVKQAEPEKEDIMVMDTKLKIIEILQFILNVRLDYRISCLLCIFKREFDESNSQTSETSSGNSSQEGPSNVPGALDFEHIEEQAEGIFGGSEENTPLDLDDHGGRTFLRVLLHLTMHDYPPLVSGALQLLFRHFSQRQEVLQAFKQVQLLVTSQDVDNYKQIKQDLDQLRSIVEKSELWVYKGQGPDETMDGASGENEHKKTEEGNNKPQKHESTSSYNYRVVKEILIRLSKLCVQESASVRKSRKQQQRLLRNMGAHAVVLELLQIPYEKAEDTKMQEIMRLAHEFLQNFCAGNQQNQALLHKHINLFLNPGILEAVTMQHIFMNNFQLCSEINERVVQHFVHCIETHGRNVQYIKFLQTIVKAEGKFIKKCQDMVMAELVNSGEDVLVFYNDRASFQTLIQMMRSERDRMDENSPLMYHIHLVELLAVCTEGKNVYTEIKCNSLLPLDDIVRVVTHEDCIPEVKIAYINFLNHCYVDTEVEMKEIYTSNHMWKLFENFLVDICRACNNTSDRKHADSILEKYVTEIVMSIVTTFFSSPFSDQSTTLQTRQPVFVQLLQGVFRVYHCNWLMPSQKASVESCIRVLSDVAKSRAIAIPVDLDSQVNNLFLKSHSIVQKTAMNWRLSARNAARRDSVLAASRDYRNIIERLQDIVSALEDRLRPLVQAELSVLVDVLHRPELLFPENTDARRKCESGGFICKLIKHTKQLLEENEEKLCIKVLQTLREMMTKDRGYGEKLISIDELDNAELPPAPDSENATEGEALRQVLVNRYYGNVRPSGRRESLTSFGNGPLSAGGPGKPGGGGGGSGSSSMSRGEMSLAEVQCHLDKEGASNLVIDLIMNASSDRVFHESILLAIALLEGGNTTIQHSFFCRLTEDKKSEKFFKVFYDRMKVAQQEIKATVTVNTSDLGNKKKDDEVDRDAPSRKKAKEPTTQITEEVRDQLLEASAATRKAFTTFRREADPDDHYQPGEGTQATADKAKDDLEMSAVITIMQPILRFLQLLCENHNRDLQNFLRCQNNKTNYNLVCETLQFLDCICGSTTGGLGLLGLYINEKNVALINQTLESLTEYCQGPCHENQNCIATHESNGIDIITALILNDINPLGKKRMDLVLELKNNASKLLLAIMESRHDSENAERILYNMRPKELVEVIKKAYMQGEVEFEDGENGEDGAASPRNVGHNIYILAHQLARHNKELQSMLKPGGQVDGDEALEFYAKHTAQIEIVRLDRTMEQIVFPVPSICEFLTKESKLRIYYTTERDEQGSKINDFFLRSEDLFNEMNWQKKLRAQPVLYWCARNMSFWSSISFNLAVLMNLLVAFFYPFKGVRGGTLEPHWSGLLWTAMLISLAIVIALPKPHGIRALIASTILRLIFSVGLQPTLFLLGAFNVCNKIIFLMSFVGNCGTFTRGYRAMVLDVEFLYHLLYLVICAMGLFVHEFFYSLLLFDLVYREETLLNVIKSVTRNGRSIILTAVLALILVYLFSIVGYLFFKDDFILEVDRLPNETAVPETGESLASEFLFSDVCRVESGENCSSPAPREELVPAEETEQDKEHTCETLLMCIVTVLSHGLRSGGGVGDVLRKPSKEEPLFAARVIYDLLFFFMVIIIVLNLIFGVIIDTFADLRSEKQKKEEILKTTCFICGLERDKFDNKTVTFEEHIKEEHNMWHYLCFIVLVKVKDSTEYTGPESYVAEMIKERNLDWFPRMRAMSLVSSDSEGEQNELRNLQEKLESTMKLVTNLSGQLSELKDQMTEQRKQKQRIGLLGHPPHMNVNPQQPA

SEQ ID NO: 49868 - protein, 66 aa, Homo sapiens
MSRKQNQKDSSGFIFDLQSNTVLAQGGAFENMKEKINAVRAIVPNKSNNEIILVLQHFDNCVDKTV

SEQ ID NO: 49869 - protein, 119 aa, Homo sapiens
MGRPSSPRAAWGTFSPPQRTQVPDCHSARSKTYGNVLVLDGVIQCTERDEFSYQEMIANLPLCSHPNPRKVLIIGGGDGGVLREVVKHPSVESVVQCEIDEDVIQVSKKFLPGMAIGYS

SEQ ID NO: 49870 - protein, 59 aa, Homo sapiens
MSLRCGDAARTLGPRVSGGANGFGRGVGGSYPFRAPMPNNKGIWEIFLQPSQTVKLLAR

SEQ ID NO: 49871 - protein, 10 aa, Homo sapiens
  MOD_RES (1)..(1): Any amino acid
XPGPPQAAGQ

SEQ ID NO: 49872 - protein, 538 aa, Homo sapiens
KMLCSKDSLGLKEELTDEDREKVAVHEGINSGTAMSRGLYQPATIFMGRQMSAILSMRDFSTEHKSPQPTKNFSIPDPHSHRQTAQSSNVTDSCVVQTSNDTQCLNKSDNIDGKASLQIGEKMPVTASVLSEEEQTHCLEIGSNTRHGKSNLSEGKKSAELNSPLRERLSPENRTTDLKCDSSSGSEGEILTREHIEVEEKRASPPVSPIPVSEYCESENKWSQEKHSPWEGVSDHLAHREPKSQKPFRKMQEEEEESWSTSSDLTISISEDDLILESPEPQPNPGGKMEGEDGIEALKLIHAEQERVALSTEKNCILQTLSSPDSEKESSTNAPTREPGQTPDSDVPRAQVGQHVATLKEHDNSVKEEATALLRKALTEECGRRSAIHSSESSCSLPSILNDNSGIKEAKPAVWLNSVPTREQETEAYQLLKKATLQDNTNQTENRFQKTDASVSHLSGLNIGSGAFETKTANKIASEASFSSSEGSPLSRHENKKKPVINLKSNALWDESDDSNSEIEAALRPRNHNTDDSDDFYD

SEQ ID NO: 49873 - protein, 19 aa, Homo sapiens
MKAFHTFCVVLLVFGSVSE

SEQ ID NO: 49874 - protein, 194 aa, Homo sapiens
ILLVGYPPFWDEDQHRLYQQIKAGAYDFPSPEWDTVTPEAKDLINKMLTINPAKRITASEALKHPWICQRSTVASMMHRQETVDCLKKFNARRKLKGAILTTMLATRNFSAKSLLKKPDGVKSTESSNTTIEDEDVKARKQEIIKVTEQLIEAINNGDFEAYTKICDPGLTAFEPEALGNLVEGMDFHRFYFEN

SEQ ID NO: 49875 - protein, 212 aa, Homo sapiens; identical to SEQ ID NO: 43344

SEQ ID NO: 49876 - protein, 275 aa, Homo sapiens
MDPKQTTLLCLGDFPMPFISAKSSPVIPLDGSVKIQCQAIREAYLTQLMIIKNSTYREIGRRLKFWNETDPEFVIDHMDANKAGRYQCQYRIGHYRFRYSNTLELVVTGLYGKPFLSADRGLVLMPGENISLTCSSAHIPFDRFSLAKEGELSLPQHQSGEHPANFSLGPVDLNVSGIYRCYGWYNRSPYLWSFPSNALELVVTDSIHQDYTTQNLIRMAVAGLVLVALLAILVENWHSHTALNKEASADVAEPSWSQQMCQPGLTFARTPSVCK

SEQ ID NO: 49877 - protein, 87 aa, Homo sapiens
MALSSAWRSVLPLWLLWSAACSRAASGDDNAFPFDIEGSSAVGRQDPPETSEPRVALGRLPPAAEKCNAGFFHTLSGECVPCDCNGN

SEQ ID NO: 49878 - protein, 70 aa, Homo sapiens
MKSCGKRFHDEVGKFRFLNELIKVVSPKYLGSRTSEKVKNKILELLYSWTVGLPEEVKIAEAYQMLKKQG

SEQ ID NO: 49879 - protein, 97 aa, Homo sapiens
MDFLLGNPFSSPVGQRIEKATDGSLQSEDWALNMEICDIINETEEGCSTAPLGPPGLRNLCQELRAPLPRAGGQPGLRGECAGEDHPAQEQPTHHRA

SEQ ID NO: 49880 - protein, 69 aa, Homo sapiens
MRQMIRSFSEPFGRDLLSISDGRGRAHNRRGHNDGEDSLTHTDVSSFQTMDQMVSNMRNYMQKLERNFL

SEQ ID NO: 49881 - protein, 77 aa, Homo sapiens
KQKLPKKKKKHIPRPPQLGSPNYCKSVVNSPHHSTQSDTCPLAQEEILEINRAGISKEQMTQRRMTALSKKECQIPN

SEQ ID NO: 49882 - protein, 162 aa, Homo sapiens
FEEKLRAAEDELNIEAKDRIPVSYKRTGFFGNALYSVGMTAVGLAILWYVFRLAGMTGREGGFSAFNQLKMARFTIVDGKMGKGVSFKDVAGMHEAKLEVREFVDYLKASALPVCGASLRKPEPGPPASSTSMRSTRWARSAPPPCPASPTRRRSRRSTSFW

SEQ ID NO: 49883 - protein, 1581 aa, Homo sapiens
MRGQAAAPGPVWILAPLLLLLLLLGRRARAAAGADAGPGPEPCATLVQGKFFGYFSAAAVFPANASRCSWTLRNPDPRRYTLYMKVAKAPVPCSGPGRVRTYQFDSFLESTRTYLGVESFDEVLRLCDPSAPLAFLQASKQFLQMRRQQPPQHDGLRPRAGPPGPTDDFSVEYLVVGNRNPSRAACQMLCRWLDACLAGSRSSHPCGIMQTPCACLGGEAGGPAAGPLAPRGDVCLRDAVAGGPENCLTSLTQDRGGHGATGGWKLWSLWGECTRDCGGGLQTRTRTCLPAPGVEGGGCEGVLEEGRQCNREACGPAGRTSSRSQSLRSTDARRREELGDELQQFGFPAPQTGDPAAEEWSPWSVCSSTCGEGWQTRTRFCVSSSYSTQCSGPLREQRLCNNSAVCPVHGAWDEWSPWSLCSSTCGRGFRDRTRTCRPPQFGGNPCEGPEKQTKFCNIALCPVDGNWNEWSSWSACSASCSQGRQQRTRECNGPSYGGAECQGHWVETRDCFLQQCPVDGKWQAWASWGSCSVTCGAGSQRRERVCSGPFFGGAACQGPQDEYRQCGTQRCPEPHEICDEDNFGAVIWKETPAGEVAAVRCPRNATGLILRRCELDEEGIAYWEPPTYIRCVSIDYRNIQMMTREHLAKAQRGLPGEGVSEVIQTLVEISQDGTSYSGDLLSTIDVLRNMTEIFRRAYYSPTPGDVQNFVQILSNLLAEENRDKWEEAQLAGPNAKELFRLVEDFVDVIGFRMKDLRDAYQVTDNLVLSIHKLPASGATDISFPMKGWRATGDWAKVPEDRVTVSKSVFSTGLTEADEASVFVVGTVLYRNLGSFLALQRNTTVLNSKVISVTVKPPPRSLRTPLEIEFAHMYNGTTNQTCILWDETDVPSSSAPPQLGPWSWRGCRTVPLDALRTRCLCDRLSTFAILAQLSADANMEKATLPSVTLIVGCGVSSLTLLMLVIIYVSVWRYIRSERSVILINFCLSIISSNALILIGQTQTRNKVVCTLVAAFLHFFFLSSFCWVLTEAWQSYMAVTGHLRNRLIRKRFLCLGWGLPALVVAISVGFTKAKGYSTMNYCWLSLEGGLLYAFVGPAAAVVLVNMVIGILVFNKLVSKDGITDKKLKERAGASLWSSCVVLPLLALTWMSAVLAVTDRRSALFQILFAVFDSLEGFVIVMVHCILRREVQDAVKCRVVDRQEEGNGDSGGSFQNGHAQLMTDFEKDVDLACRSVLNKDIAACRTATITGTLKRPSLPEEEKLKLAHAKGPPTNFNSLPANVSKLHLHGSPRYPGGPLPDFPNHSLTLKRDKAPKSSFVGDGDIFKKLDSELSRAQEKALDTSYVILPTATATLRPKPKEEPKYSIHIDQMPQTRLIHLSTAPEASLPARSPPSRQPPSGGPPEAPPAQPPPPPPPPPPPPQQPLPPPPNLEPAPPSLGDPGEPAAHPGPSTGPSTKNENVATLSVSSLERRKSRYAELDFEKIMHTRKRHQDMFQDLNRKLQHAAEKDKEVLGPDSKPEKQQTPNKRPWESLRKAHGTPTWVKKELEPLQPSPLELRSVEWERSGATIPLVGQDIIDLQTEV

SEQ ID NO: 49884 - protein, 102 aa, Homo sapiens
MFGLKPPLYYLPGSSLSSESSPVSSPATNHSSPASTPKRVPMGPIIVPPGGHSVPSTPPVVTIAPTKTVNGVWRSESRQDAGSRSSSGGRERLIVEPPLPQE

SEQ ID NO: 49885 - protein, 967 aa, Homo sapiens
MVPWVRTMGQKLKQRLRLDVGREICRQYPLFCFLLLCLSAASLLLNRLTEVPPWWCWIKSGRILWITRYIHILMIFWSFVAGVVTFYCSLGPDSLLPNIFFTIKYKPKQLGLQELFPQGHSCAVCGKVKCKRHRPSLLLENYQPWLDLKISSKVDASLSEVLELVLENFVYPWYRDVTDDESFVDELRITLRFFASVLIRRIHKVDIPSIITKKLLKAAMKHIEVIVKARQKVKNTEFLQQAALEEYGPELHVALRSRRDELHYLRKLTELLFPYILPPKATDCRSLTLLIREILSGSVFLPSLDFLADPDTVNHLLIIFIDDSPPEKATEPASPLVPFLQKFAEPRNKKPSVLKLELKQIREQQDLLFRFMNFLKQEGAVHVLQFCLTVEEFNDRILRPELSNDEMLSLHEELQKIYKTYCLDESIDKIRFDPFIVEEIQRIAEGPYIDVVKLQTMRCLFEAYEHVLSLLENVFTPMFCHSDEYFRQLLRGAESPTRNSKLNRGSLSLDDFRNTQKRGESFGISRIGSKIKGVFKSTTMEGAMLPNYGVAEGEDDFIEEGIVVMEDDSPVEAVSTPNTPRNLAAWKISIPYVDFFEDPSSERKEKKERIPVFCIDVERNDRRAVGHEPEHWSVYRRYLEFYVLESKLTEFHGAFPDAQLPSKRIIGPKNYEFLKSKREEFQEYLQKLLQHPELSNSQLLADFLSPNGGETQFLDKILPDVNLGKIIKSVPGKLMKEKGQHLEPFIMNFINSCESPKPKPSRPELTILSPTSENNKKLFNDLFKNNANRAENTERKQNQNYFMEVMTVEGVYDYLMYVGRVVFQVPDWLHHLLMGTRILFKNTLEMYTDYYLQCKLEQLFQEHRLVSLITLLRDAIFCENTEPRSLQDKQKGAKQTFEEMMNYIPDLLVKCIGEETKYESIRLLFDGLQQPVLNKQLTYVLLDIVIQELFPELNKVQKEVTSVTSWM

SEQ ID NO: 49886 - protein, 126 aa, Homo sapiens
MASNHKSSAARPVSRGGVGLTGRPPSGIRPLSGNIRVATAMPPGTARPGSRGCPIGTGGVLSSQIKVAHRPVTQQGLTGMKTGTKGPQRQILDKSYYLGLLRSKISELTTEVNKLQKGIEMYNQEN

SEQ ID NO: 49887 - protein, 18 aa, Homo sapiens
MRKGVLKDPEIADLFYKD

SEQ ID NO: 49888 - protein, 46 aa, Homo sapiens
IGGLLAGQTYHVAVVCYLRSQVRATYHGSFSTKISAPTSTASKVSF

SEQ ID NO: 49889 - protein, 90 aa, Homo sapiens
MSKCRKTPVQQLASPASFSPDILADIFELFAKNFSYGKPLNNEWQLPDPSEIFTCDHTELNAFLDLKNSLNEVKNLLSDKKLDEWHEHTA

SEQ ID NO: 49890 - protein, 247 aa, Homo sapiens
MNPGACWYIYILQKGLTQQGGEAVGCISCPALKRIYLFMFVKTVGIWQMGYNGSSRTLHSRTETTPSPSNDTGNGHPEYIAYALVPVFFIMGLFGVLICHLLKKKGYRCTTEAEQDIEEEKVEKIELNDSVNENSDTVGQIVHYIMKNEANADVLKAMVADNSLYDPESPVTPSTPGSPPVSPGPLSPGGTPGKHVCGHHLHTVGGVVERDVCHRCRHKRWHFIKPTNKSRESRPRRQGEVTVLSVG

SEQ ID NO: 49891 - protein, 152 aa, Homo sapiens
  MOD_RES (1)..(1): Any amino acid
XPVIALQNGLSEDEALQRALEMSLAETKPQVPRPRAAARSRPTAACARALGLGREVHLRRTVALTPLGYTGRGGPEHPGGQRQAGVMWRSPWEPLEGLASAPAAWKRAASNCSLVGPSVDAGQALLLAPSSCHLPYAGAAPMWSGQEGAWKK

SEQ ID NO: 49892 - protein, 84 aa, Homo sapiens
MNHSMDAGSPNLSPNPMSPAHNNLDLQPVTYCEPAFWCSISYYELNQRVGETFHASQPSMTVDGFTDPSNSERFCLGLLSNVNR

SEQ ID NO: 49893 - protein, 389 aa, Homo sapiens
  MOD_RES (1)..(1): Any amino acid
XADVSDGEDDRDTLLSSVDLLSPSGQADAHTLAMMLQEQLDAINKEIRLIQEEKENTEQRAEEIESRVGSGSLDNLGRFRSMSSIPPYPASSLASSSPPGSGRSTPRRIPHSPAREVDRLGVMTLPSPDSFLIQTSGPHQSVVYSSTSPPSSTPCYSDSSQHAQLPPSREEVRDDKTTIKCETSPPSSPRALRLDRLHKGALHTVSHEDIRDIRNSTGSQDGPVSNPSSSNSSQDSLHKAPKKKGIKSSIGRLFGKKEKGRPGQTGKEALGQAGVSETDNSSQDALGLSKLGGQAEKNRKLQKKHELLEEARRQGLPFAQWDGPTVVVWLELWVGMPAWYVAACRANVKSGAIMSALSDTEIQREIGISNPLHRLKLRLAIQEIMSLTS

SEQ ID NO: 49894 - protein, 127 aa, Homo sapiens
MFLSSVGFSVVMMSIWPYLQKIDPTADTSFLGWVIASYSLGQMVASPIFGLWSNYRPRKEPLIVSILISVAANCLYAYLHIPASHNKYYMLVARGLLGIGAAVVRSYTAGATSLQERTSSMANISMC

SEQ ID NO: 49895 - protein, 137 aa, Homo sapiens
  MOD_RES (1)..(1): Any amino acid
XGAAPVRLQQRRGADPAAARRPRLRGLQRAGRPGAPTSHHPCGSELNRVVAQLRCHRVSLISCVSSEPFAHRTDHMHAGWFLGCCERLRAERVSLPHPSALDRDLAELWAFIRLTSHFGFCTEPHHPLHREPITVAG

SEQ ID NO: 49896 - protein, 244 aa, Homo sapiens
LAPRVATGTPEPNGGGGGKIDNTVEITPTSNGQVGTLGDAVPTEQLQGEREREREGEGDAGGDGLGSSLSLAVPPGPLSFEALLAQVGALGGGQQLQLGLCCLPVLFVALGMASDPIFTLAPPLHCHYGAFPPNASGWEQPPNASGVSVASAALAASAASRVATSTDPSCSGFAPPDFNHCLKDWDYNGLPVLTTNAIGQIWPSRDCAADLGAGGPLWSRRGCCRLLHRRHGPPIPLGLSACRC

SEQ ID NO: 49897 - protein, 71 aa, Homo sapiens
MEPQEERETQVAAWLKKIFGDHPIPQYEVNPRTTEILHHLSERNRVRDRDVYLVIEDLKQKASEYESEVFF

SEQ ID NO: 49898 - protein, 100 aa, Homo sapiens
MDPLGAAKPQWPWRRCLAALLFQLLVAVCFFSYLRVSRDDATGSPRAPSGSSRQDTTPTRPTLLILLRTWPFHIPVALSRCSEMVPGTADCHITADRKVY

SEQ ID NO: 49899 - protein, 182 aa, Homo sapiens
MGSESTYSECETFTDEDTSTLVHPELQPEGDADSAGGSAVPSECLDAMEEPDHGALLLLPGRPHPHGQSVITVIGGEEHFEDYGEGSEAELSPETLCNGQLGCSDPAFLTPSPTKRLSSKKVARYLHQSGALTMEALEDPSPELMEGPEEDIADKVVFLERRVLELEKDTAATGEQHSRLRQ

SEQ ID NO: 49900 - protein, 153 aa, Homo sapiens
MVQAHGGRSRAQPLTLSLGAAMTQPPPEKTPAKKHVRLQESGGLCLQAGLQCGSDAGRSVPGGRRTHLLCEHTPGGHPTLSAHCWTPPYPLGPSAPATQPQATGRRILEDPFKLCQPRRPGHPWPRLQGPIQDHLAKSPEPCLSRPGTEPGGR

SEQ ID NO: 49901 - protein, 135 aa, Homo sapiens
MTMTANKNSSITHGAGGTKAPRGTLSRKSFEFEDASSLQSLYPSSPTENGTENQPKFGSKSTLEENAYEDIVGDLPKENPYEDVDLKSRRAGRKSQQLSENSLDSLHRMWSPQDRKYNSPPTQLSLKPNSQSLRS

SEQ ID NO: 49902 - protein, 150 aa, Homo sapiens
QWHHPRSGWGRRRDFSGRSSAKKKGGNHIPERWKDYLPVGQRMPGTRFIAFKVPLQKSFEKKLAPEECFSPLDLFNKIREQNEELGLIIDLTYTQRYYKPEDLPETVPYLKIFTVGHQVPDDETIFKFKHAVNGFLKENKDNEVRSRRKD

SEQ ID NO: 49903 - protein, 280 aa, Homo sapiens [sequence omitted]

SEQ ID NO: 49904 - protein, 814 aa, Homo sapiens
  MOD_RES (1)..(1): Any amino acid
XELGEVWQRRGSLEGAAAAAESPPQEEGSAGEAQGTCEGATAQEEGATGGSQANGHQPLRSLPSVRQDVSRYQRVDEALPPNWEARIDSHGRIFYVDHVNRTTTWQRPTAPPAPQVLQRSNSIQQMEQLNRRYQSIRRTMTNERPEENTNAIDGAGEEADFHQASADFRRENILPHSTSRSRITLLLQSPPVKFLISPEFFTVLHSNPSAYRMFTNNTCLKHMITKVRRDTHHFERYQHNRDLVGFLNMFANKQLELPRGWEMKHDHQGKAFFVDHNSRTTTFIDPRLPLQSSRPTSALVHRQHLTRQRSHSAGEVGEDSRHAGPPVLPRPSSTFNTVSRPQYQDMVPVAYNDKIVAFLRQPNIFEILQERQPDLTRNHSLSLFEEEIMSYVPPHALLHPSYCQSPRGSPVSSPQNSPGTQRANARAPAPYKRDFEAKLRNFYRKLETKGYGQGPGKLKLIIRRDHLLEDAFNQIMGYSRKDLQRNKLYVTFVGEEGLDYSGPSREFFFLVSRELFNPYYGLFEYSANDTYTVQISPMSAFVDNHHEWFRFSGRILGLALIHQYLLDAFFTRPFYKALLRILCDLSDLEYLDEEFHQSLQWMKDNDIHDILDLTFTVNEEVFGQITERELKPGGANIPVTEKNKKEYIERMVKWRIERGVVQQTESLVRGFYEVVDARLVSVFDARELELVIAGTAEIDLSDWRNNTEYRGGYHDNHIVIRWFWAAVERFNNEQRLRLLQFVTGTSSIPYEGFASLRGSNGPRRFCVEKWGKITALPRAHTCFNRLDLPPYPSFSMLYEKLLTAVEETSTFGLE

SEQ ID NO: 49905 - protein, 119 aa, Homo sapiens
MMGVLDGVLMELQDCALPLLKDVIATDKEDVAFKDLDVAILVGSMPRREGMERKDLLKANVKIFKSQGAALDKYAKKSVKVIVVGNPANTNCLTASKSAPSIPKENFSCLTRLDHNRAK

SEQ ID NO: 49906 - protein, 116 aa, Homo sapiens
MDSDSSPSSSSTYCNQMMRRRNMTQGRCKPVNTFVHEPLVDVQNVCFQEKVTCKNGQGNCYKSNSSMHITDCRLTNGSRYPNCAYRTSPKERHIIVACEGSPYVPVHFDASVEDST

SEQ ID NO: 49907 - protein, 60 aa, Homo sapiens
MYRWLVRILGTIFRFCDRSVPPARALLKRRRSDSTLFSTVDTDEIPAKRPRLGIFELFIL

SEQ ID NO: 49908 - protein, 325 aa, Homo sapiens
MSFRAARLSMRNRRNDTLDSTRTLYSSASRSTDLSYSESDLVNFIQANFKKRECVFFTKDSKATENVCKCGYAQSQHMEGTQINQSEKWNYKKHTKEFPTDAFGDIQFETLGKKGKYIRLSCDTDAEILYELLTQHWHLKTPNLVISVTGGAKNFALKPRMRKIFSRLIYIAQSKGAWILTGGTHYGLMKYIGEVVRDNTISRSSEENIVAIGIAAWGMVSNRDTLIRNCDAEGYFLAQYLMDDFTRDPLYILDNNHTHLLLVDNGCHGHPTVEAKLRNQLEKYISERTIQDSNYGGKIPIVCFAQGGGKETLKSRRFGRRISVT

SEQ ID NO: 49909 - protein, 44 aa, Homo sapiens
  MOD_RES (1)..(1): Any amino acid
XDWLNMLSPPIVPPSQQPAEQRPDSCESLSVQDISHTPDQAVTR

SEQ ID NO: 49910 - protein, 215 aa, Homo sapiens
MIRAAPPPLFLLLLLLLLLVSWASRGEAAPDQDEIQRLPGLAKQPSFRQYSGYLKGSGSKHLHYWFVESQKDPENSPVVLWLNGGPGCSSLDGLLTEHGPFLVQPDGVTLEYNPYSWNLIANVLYLESPAGVGFSYSDDKFYATNDTEVAQSNFEALQDFFRLFPEYKNNKLFLTGESYAGIYIPTLAVLVMQDPSMNLQALVFSPDPLLLSKQV

SEQ ID NO: 49911 - protein, 80 aa, Homo sapiens
SKPKDSDKEGTSNSTSEDGPGDGFTILSSKSLVLGQKGECRMLRGEERASPGLPCRSFSEDASLKTKATRVGNQRHELCP

SEQ ID NO: 49912 - protein, 990 aa, Homo sapiens
MSEETRQSKLAAAKKKLREYQQRNSPGVPTGAKKKKKIKNGSNPETTTSGGCHSPEDTPKDNAATLQPSDDTVLPGGVPSPGASLTSMAASQNHDADNVPNLMDETKTFSSTESLRQLSQQLNGLVCESATCVNGEGPASSANLKDLESRYQQLAVALDSSYVTNKQLNITIEKLKQQNQEITDQLEEEKKECHQKQGALREQLQVHIQTIGILVSEKAELQTALAHTQHAARQKEGESEDLASRLQYSRRRVGELERALSAVSTQQKKADRYNKELTKERDALRLELYKNTQSNEDLKQEKSELEEKLRVLVTEKAGMQLNLEELQKKLEMTELLLQQFSSRCEAPDANQQLQQAMEERAQLEAHLGQVMESVRQLQMERDKYAENLKGESAMWRQRMQQMSEQVHTLREEKECSMSRVQELETSLAELRNQMAEPPPPEPPAGPSEVEQQLQAEAEHLRKELEGLAGQLQAQVQDNEGLSRLNREQEERLLELERAAELWGEQAEARRQILETMQNDRTTISRALSQNRELKEQLAELQSGFVKLTNENMEITSALQSEQHVKRELGKKLGELQEKLSELKETVELKSQEAQSLQQQRDQYLGHLQQYVAAYQQLTSEKEVLHNQLLLQTQLVDQLQQQEAQGKAVAEMARQELQETQERLEAATQQNQQLRAQLSLMAHPGEGDGLDREEEEDEEEEEEEAVAVPQPMPSIPEDLESREAMVAFFNSAVASAEEEQARLRGQLKEQRVRCRRLAHLLASAQKEPEAAAPAPGTGGDSVCGETHRALQGAMEKLQSRFMELMQEKADLKERVEELEHRCIQLSGETDTIGEYIALYQSQRAVLKERHREKEEYISRLAQDKEEMKVKLLELQELVLRLVGDRNEWHGRFLAAAQNPADEPTSGAPAPQELGAANQQGDLCEVSLAGSVEPAQGEAREGSPRDNPTAQQIMQLLREMQNPRERPGLGSNPCIPFFYRADENDEVKITVI

SEQ ID NO: 49913 - protein, 228 aa, Homo sapiens
DHKNGHYIIPQMADSLDLSELAKAAKKKLQALSNRLFEELAMDVYDEVDRRENDAVWLATQNHSTLVTERSAVPFLPVNPEYSATRNQGRQKLARFNAREFATLIIDILNNLELSLRSQSDLDDQHDYDSVASDEDTDQEPLRSTGATRSNRARSMDSSDLSDGAVTLQEYLELKKALATSEAKVQQLMKVNSSLSDELRRLQREIHKLQAENLQLRQPPGPVPTPPL

SEQ ID NO: 49914 - protein, 215 aa, Homo sapiens
MSHGPKQPGAAAAPAGGKAPGQHGGFVVTVKQERGEGPRAGEKGSHEEEPVKKRGWPKGKKRKKILPNGPKAPVTGYVRFLNERREQIRTRHPDLPFPEITKMLGAEWSKLQPTEKQRYLDEAEREKQQYMKELRAYQQSEAYKMCTEKIQEKKIKKEDSSSGLMNTLLNGHKGGDCDGFSTFDVPIFTEEFLDQNKAREAELRRLRKMNVAFEE

SEQ ID NO: 49915 - protein, 13 aa, Homo sapiens
MASSKLREPVDEV

SEQ ID NO: 49916 - protein, 203 aa, Homo sapiens
MFYIIGGVATLLLILVIIGLNAGAFYALSTLLNRMVIWHYPGEEVNAGRIGLTIVIAGMLGAVISGIWLDRSKTYKETTLVVYIMTLVGMVVYTFTLNLGHLWVVFITAGTMGFFMTGYLPLGFEFAVELTYPESEGISSGLLNISAQVFGIIFTISQGQIIDNYGTKPGNIFLCVFLTLGAALTAFIKADLRRQKANKETLE

SEQ ID NO: 49917 - protein, 88 aa, Homo sapiens
MSGLRVYSTSVTGSREIKSQQSEVTRILDGKRIQYQLVDISQDNALRDEMRALAGNPKATPPQIVNGDQYCGVWAGGRGGGGSVGRGL

SEQ ID NO: 49918 - protein, 125 aa, Homo sapiens
MEGSTIRKRRRNGNEEDNHLPPQTKRSSRNPVFQDSWDTETVPVMRNSKENRLRGNKAFCASSGSDSGGSSSSSSSSINSPDRASGPEGSLSQTMAGSSPNTPQPVPEQSALCQGLYFHINQTLR

SEQ ID NO: 49919 - protein, 128 aa, Homo sapiens
  MOD_RES (1)..(1): Any amino acid
XGAIYYFKIAVALAVAAIPEGLPAVITTCLALGTRRMAKKNAIVRSLPSVETLGCTSVICSDKTGTLTTNQMSVCKMFIIDKVDGDICLLNEFSITGSTYAPEGEVPKVSMRRSARPPRQHSPPWWRR

SEQ ID NO: 49920 - protein, 123 aa, Homo sapiens
DIAVKWRRIADPDQPVLWLDQMPARSLSRGFNNHINLIRGQVINMRYLEYFEKILHFIKDRILVYHGANNPKGLLEVREALEKVHKVEDLLPIMKVTLASEWQSMFLEEKKTNSTFLKRTQNY

SEQ ID NO: 49921 - protein, 428 aa, Homo sapiens [sequence omitted]

SEQ ID NO: 49922 - protein, 142 aa, Homo sapiens
MGAPTLPPAWQPFLKDHRISTFKNWPFLEGCACTPERMAEAGFIHCPTENEPDLAQCFFCFKELEGWEPDDDPIEEHKKHSSGCAFLSVKKQFEELTLGEFLKLDRERAKNKIAKETNNKKKEFEETAEKVRRAIEQLAAMD

SEQ ID NO: 49923 - protein, 96 aa, Homo sapiens
MTCHKRYKIQKKVREHHRKLRKEAKKRGHKKPRKDPGVPNSAPFKEALLREAELRKQRLEELKQQQKLDRQKELEKKRKLETNPDIKPSNVEPMEK

SEQ ID NO: 49924 - protein, 241 aa, Homo sapiens
MKRGGRDSDRNSSEEGTAEKSKKLRTTNEHSQTCDWGNLLQDIILQVFKYLPLLDRAHASQVCRNWNQVDSSKESAEAACDILSQLVNCSLKTLGLISTARPSFMDLPKSHFISALTVVFVNSKSLSSLKIDDTPVDDPSLKVLVANNSDTLKLLKMSSCPHVSPAGILCVADQCHGLRELALNYHLLSDELLLALSSEKHVRLEHLRIDVVSENPGQTHFHTIQKSSWDAFIRHSPKVNL

SEQ ID NO: 49925 - protein, 96 aa, Homo sapiens
MDNVQSKRRRYMEEEYEAEFQVKITAKGDINQKLQKVIQWLLEEKLCALQCAVFDKTLAELKTRVEKIECNKRHKTVLTELQAKIARLTKRFEAAK

SEQ ID NO: 49926 - protein, 108 aa, Homo sapiens
MESCSCHPGSGVQWRDHGSLQLPPPGFKMKMRRYKLFLMFCMAGLCLISFLHFFKTLSYVTFPRELASLSPNLVSSFFWNNAPVTPQASPEPGGPDLLRTPLYSHSPL

SEQ ID NO: 49927 - protein, 1489 aa, Homo sapiens
MVDKNIYIIQGEINIVVGAIKRNARWSTHTPLDEERDPLLHSFGHLKEVLNSITELSEIEPNVFLRPFLEVIRSEDTTGPITGLALTSVNKFLSYALIDPTHEGTAEGMENMADAVTHARFVGTDPASDEVVLMKILQVLRTLLLTPVGAHLTNESVCEIMQSCFRICFEMRLSELLRKSAEHTLVDMVQLLFTRLPQFKEEPKNYVGTNMKKLKMRAGGMSDSSKWKKQKRSPRPPRHMTKVTPGSELPTPNGTTLSSNLTGGMPFIDVPTPISSASSEAASAVVSPSTDSGLEFSSQTTSKEDLTDLEQPGSPGYSTATEPGSSELGVPEQPDLQEGTHVEKSQSASVESIPEVLEECTSPADHSDSASVHDMDYVNPRGVRFTQSSQKEGTALVPYGLPCIRELFRFLISLTNPHDRHNSEVMIHMGLHLLTVALESAPVAQCQTLLGLIKDEMCRHLFQLLSIERLNLYAASLRVCFLLFESMREHLKFQMEMYIKKLMEIITVENPKMPYEMKEMALEAIVQLWRIPSFVTELYINYDCDYYCSNLFEELTKLLSKNAFPVSGQLYTTHLLSLDALLTVIDSTEAHCQAKVLNSLTQQEKKETARPSCEIVDGTREASNTERTASDGKAVGMASDIPGLHLPGGGRLPPEHGKSGCSDLEEAVDSGADKKFARKPPRFSCLLPDPRELIEIKNKKKLLITGTEQFNQKPKKGIQFLQEKGLLTIPMDNTEVAQWLRENPRLDKKMIGEFVSDRKNIDLLESFVSTFSFQGLRLDEALRLYLEAFRLPGEAPVIQRLLEAFTERWMNCNGSPFANSDACFSLAYAVIMLNTDQHNHNVRKQNAPMTLEEFRKNLKGVNGGKDFEQDILEDMYHAIKNEEIVMPEEQTGLVRENYVWNVLLHRGATPEGIFLRVPTASYDLDLFTMTWGPTIAALSYVFDKSLEETIIQKAISGFRKCAMISAHYGLSDVFDNLIISLCKFTALSSESIENLPSVFGSNPKAHIAAKTVFHLAHRHGDILREGWKNIMEAMLQLFRAQLLPKAMIEVEDFVDPNGKISLQREETPSNRGESTVLSFVSWLTLSGPEQSSVRGPSTENQEAKRVALECIKQCDPEKMITESKFLQLESLQELMKALVSVTPDEETYDEEDAAFCLEMLLRIVLENRDRVGCVWQTVRDHLYHLCVQAQDFCFLVERAVVGLLRLAIRLLRREEISAQVLLSLRILLLMKPSVLSRVSHQVAYGLHELLKTNAANIHSGDDWATLFTLLECIGSGVKPPAALQATARADAPDAGAQSDSELPSYHQNDVSLDRGYTSDSEVYTDHGRPGKIHRSATDADVVNSGWLVVGKDDVDNSKPGPSRPGPSPLINQYSLTVGLDLGPHDTKSLLKCVESLSFIVRDAAHITPDNFELCVKTLRIFVEDASPRRNVARVTNMTAKGTASRRNPKRDQCFAGLEPPANMPLGAGRVMMMRTKACLPATIRCLYSC

SEQ ID NO: 49928 - protein, 58 aa, Homo sapiens
MEPGRTQIKLDPRYTADLLEVLKTNYGIPSACFSQPPTAAQLLRDRVWLCGPGWSAVV

SEQ ID NO: 49929 - protein, 471 aa, Homo sapiens
MPLMMSEEGFENEESDYHTLPRARIMQRKRGLEWFVCDGWKFLCTSCCGWLINICRRKKELKARTVWLGCPEKCEEKHPRNSIKNQKYNVFTFIPGVLYEQFKFFLNLYFLVISCSQFVPALKIGYLYTYWAPLGFVLAVTMTREAIDEFRRFQRDKEVNSQLYSKLTVRGKVQVKSSDIQVGDLIIVEKNQRIPSDMVFLRTSEKAGSCFIRTDQLDGETDWKLKVAVSCTQQLPALGDLFSISAYVYAQKPQMDIHSFEGTFTREDSDPPIHESLSIENTLWASTIVASGTVIGVVIYTGKETRSVMNTSNPKNKVGLLDLELNRLTKALFLALVALSIVMVTLQGFVGPWYRNLFRFLLLFSYIIPISLRVNLDMGKAVYGWMMMKDENIPGTVVRTSTIPEELGRLVYLLTDKTGASPLLFFLFLYCQNCISILKQLEFLLKMSPNYFTITVKGSSYSGILRIRLKV

SEQ ID NO: 49930 - protein, 44 aa, Homo sapiens
MKMLLLLHCLGVFLSCSGHIQDEHPQYHSPPDVVIPVRITGTTR

SEQ ID NO: 49931 - protein, 241 aa, Homo sapiens
MEKDDPPQLVTPTSVKAIILRIEAAQLTRAQEDISTQLSDILDNVNCVINRFQEELGYDLKENAKSQQRDPKGKKRFILLEKIASFSKDAMMKEKHLYDILRWLGDWGDTLTYEIGPRKSEEEAAALDEWIEVTEKVLPLSLIATKRGIESLTALCSTLIEGQKKRSQVSKRTFWQGWQGRSPQTSPSHPQPLSPEQMLQDQHTMNTKASERTKGRNARNLQMNPLSLFKKSQASHSLEPK

SEQ ID NO: 49932 - protein, 51 aa, Homo sapiens
MIDTGKAFCVANKQFMNGIRDLAQYSSNDAVVETSLTKFSDSLQEMINFHT

SEQ ID NO: 49933 - protein, 107 aa, Homo sapiens
MYGGIYCFLCQDYIYDKDMEIIAKEEQRKAWKMQGVGEKFSTWEPTKRELELLKHNPKRRKITSNCTIGLRGLINLGNTCFMNCIVQALTHTPLLRDFFLSDRHRCE

SEQ ID NO: 49934 - protein, 46 aa, Homo sapiens
  MOD_RES (1)..(1): Any amino acid
XVKLEIFRMIIYLTFPVAMFWVSNQAEWFEDDVIQRKRELWPPEKP

SEQ ID NO: 49935 - protein, 59 aa, Homo sapiens
MALLHSGRVLPGIAAAFHPGLAAAASARARQRPRLPQKIWTRNTCPLGDWLNFARHLQN

SEQ ID NO: 49936 - protein, 313 aa, Homo sapiens
MCNGLLNLPHFPWANEMALSKYDATKQKRKFSSFFKSLVIELDKDLYGPDNHLVEWHRTATTQETDGFQVKRPGDVNVRCTVLLMLDYQPPQFKLDPRLARLLGIHTQTRPVIIQALWQYIKTHKLQDPHEREFVICDKYLQQIFESQRMKFSEIPQRLHALLMPPEPIIINHVISVDPNDQKKTACYDIDVEVDDTLKTQMNSFLLSTASQQEIATLDNKIHETIETINQLKTQREFMLSFARDPQGFINDWLQSQCRDLKTMTDVVGNPEEERRAEFYFQPWAQEAVCRYFYSKVQQRRQELEQALGIRNT

SEQ ID NO: 49937 - protein, 170 aa, Homo sapiens
  MOD_RES (1)..(1): Any amino acid
XVSSLQGEDCREAVQRLGVSANLPEEQLGALLAGMHTLLQQALRLPPTSLKPDTFRDQLQELCIPQDLVGDLASVVFGSQRPLLDSVAQQQGAWLPHVADFRWRVDVAISTSALARSLQPSVLMQLKLSDGSAYRFEVPTAKFQELRYSVALVLKEMADLEKRCERRLQD

SEQ ID NO: 49938 - protein, 356 aa, Homo sapiens
  MOD_RES (1)..(1): Any amino acid
XRGSGIVTRRPLVLQLVNATTEYAEFLHCKGKKFTDFEEVRLEIEAETDRVTGTNKGISPVPINLRVYSPHVLNLTLVDLPGMTKVPVGDQPPDIEFQIRDMLMQFVTKENCLILAVSPANSDLANSDALKVAKEVDPQGQRTIGVITKLDLMDEGTDARDVLENKLLPLRRGYIGVVNRSQKDIDGKKDITAALAAERKFFLSHPSYRHLADRMGTPYLQKVLNQQLTNHIRDTLPGLRNKLQSQLLSIEKEVEEYKNFRPDDPARKTKALLQMVQQFAVDFEKRIEGSGDQIDTYELSGGARINRIFHERFPFELVKMEFDEKELRREISYAIKNIHGISSSSTRGYGRRWSAS

SEQ ID NO: 49939 - protein, 335 aa, Homo sapiens
MNTHIPENCGGLGLGTFDACLISEELAYGCTGVQTAIEGNSLGQMPIIIAGNDQQKKKYLGRMTEEPLMCAYCVTEPGAGSDVAGIKTKAEKKGDEYIINGQKMWITNGGKANWYFLLARSDPDPKAPANKAFTGFIVEADTPGIQIGRKELNMGQRCSDTRGIVFEDVKVPKENVLIGDGAGFKVAMGAFDKTRPVVAAGAVGLAQRALDEATKYALERKTFGKLLVEHQAISFMLAEMAMKVELARMSYQRAAWEVDSGRRNTYYASIAKAFAGDIANQLATDAVQILGGNGFNTEYPVEKLMRDAKIYQIYEGTSQIQRLIVAREHIDKYKN

SEQ ID NO: 49940 - protein, 425 aa, Homo sapiens
MLPDDTTNHSNSSKEVPSSAVLRSLRVNVGPDGEETRAQTVQKSPEFLSTSESSSLLQDLQPSDSTSFILLNLTRAGLGSSAEHLVFVQDEAEDSGNDFLSSESTDSSIPWFLRVQELAHDSLIAATRAQLAKNAKTSSNGENVHLGSGDGQSKDSGPLPQVEKKLKCTVEGCDRTFVWPAHFKYHLKTHRNDRSFICPAEGCGKSFYVLQRLKVHMRTHNGEKPFMCHESGCGKQFTTAGNLKNHRRIHTGEKPFLCEAQGCGRSFAEYSSLRKHLVVHSGEKPHQCQVCGKTFSQSGSRNVHMRKHHLQLGAAGSQEQEQTAEPLMGSSLLEEASVPSKNLVSMNSQPSLGGESLNLPNTNSILGVDDEVLAEGSPRSLSSVPDVTHHLVTMQSGRQSYEVSVLTAVNPQELLNQGDLTERRT

SEQ ID NO: 49941 - protein, 209 aa, Homo sapiens
  MOD_RES (1)..(1): Any amino acid
XFKSAFKSTSTALPPREDDSSQSPNACRIHGHLYVNKVAGNFHITVGKIDHLSFGELVPAIINPLDGTEKIAIDHNQMFQYFITVVPTKLHTYKISADTHQFSVTERERIINHAAGSHGVSGIFMKYDLSSLMVTVTEEHMPFWQFFVRLCGIVGGIFSTTGMLHGIGKFIVEIICCRFRLGSYKPVNSVPFEDGHTDNHLPLLENNTH

SEQ ID NO: 49942 - protein, 167 aa, Homo sapiens
MGIWQRLLLFGGVSLRAGGGATAPLGGSRAMVCGRQLSGAGSETLKQRRTQIMSRGLPKQKPIEGVKQVIVVASGKGGVGKSTTAVNLALALAANDSVLGLVQNMSVFQCPKCKHKTHIFGADGARKLAQTLGLEVLGDIPLHLNIREASDTGQPIVFSQPESDEAK

SEQ ID NO: 49943 - protein, 11 aa, Homo sapiens
MEASSSGITNG

SEQ ID NO: 49944 - protein, 103 aa, Homo sapiens
MIGPIIDKLEKVAVRGGDKKLKPEYDIMCKVKSWVIDQKKPVRFYHDWNDKEIEVLNKHLFLTSKPMVYLVNLSEKDYIRKKNKWLIKIKEWVDKYDPGALVI

SEQ ID NO: 49945 - protein, 596 aa, Homo sapiens
MKMQKGNVLLMFGLLLHLEAATNSNETSTSANTGSSVISSGASTATNSGSSVTSSGVSTATISGSSVTSNGVSIVTNSEFHTTSSGISTATNSEFSTASSGISIATNSESSTTSSGASTATNSESSTPSSGASTVTNSGSSVTSSGASTATNSESSTVSSRASTATNSESSTLSSGASTATNSDSSTTSSGASTATNSESSTTSSGASTATNSESSTVSSRASTATNSESSTTSSGASTATNSESRTTSNGAGTATNSESSTTSSGASTATNSDSSTVSSGASTATNSESSTTSSGASTATNSESSTTSSGASTATNSDSSTTSSGAGTATNSESSTVSSGISTVTNSESSTPSSGANTATNSESSTTSSGANTATNSESSTVSSGASTATNSESSTTSSGVSTATNSESSTTSSGASTATNSDSSTTSSEASTATNSESSTVSSGISTVTNSESSTTSSGANTATNSGSSVTSAGSGTAALTGMHTTSHSASTAVSEAKPGGSLVPWEIFLITLVSVVAAVGLFAGLFFCVRNSLSLRNTFNTAVYHPHGLNHGLGPGPGGNHGAPHRPRWSPNWFWRRPVSSIAMEMSGRNSGP

SEQ ID NO: 49946 - protein, 54 aa, Homo sapiens
MDEDALSRDDVIGKVCLTRDTIASHPKGIWPQRTAMAHLTPSSECATRAGHGRP

SEQ ID NO: 49947 - protein, 172 aa, Homo sapiens
MTATPESLFPTGDELDSSQLQMESDEVDTLKEGEDPADRMHPFLAIYELQSLKVHPLVFAPGVPVTAQVVGTERYTSGSKVGTCTLYSVRLTHGDFSWTTKKKYRHFQELHRDLLRHKVLMSLLPLARFAVAYSPARDAGNREMPSLPRAGPEGSTRHAASKQKYLENYLNR

SEQ ID NO: 49948 - protein, 303 aa, Homo sapiens
  MOD_RES (1)..(1): Any amino acid
XRSREEAQAKAQEAEALYQACVREANARQQDLEIAKQRIVSHVRKLVFQGDEVLRRVTLSLFGLRGAQAERGPRAFAALAECCAPFEPGQRYQEFVRALRPEAPPPPPPAFSFQEFLPSLNSSPLDIRKKLSGPLPPRLDENSAEPGPWEDPGTGWRWQGPTPGSDVDSVGGGSESRSLDSPTSSPGAGTRQLVKASSTGTESSDDFEERDPDLGDGLENGLGSPFGKWTLSSAAQTHQLRRLRGPAKCRECEAFMVSGTECEECFLTCHKRCLETLLILCGHRRLPARTPLFGVDFLQLPRD

SEQ ID NO: 49949 - protein, 73 aa, Homo sapiens
MTHEEHHAAKTLGIGKAIAVLTSGGDAQEMGRDRPGAVAHTCNPRTLGGRGGQITRGWEFETSLTNMEKPRLY

SEQ ID NO: 49950 - protein, 172 aa, Homo sapiens
MRLDSEAASHAHSQAKTEEQIAAEEAWNETEKVWLVHRDGFSLASQLKSEELNLPEGKVRVKLDHDGAILDVDEDDVEKANAPSCDRLEDLASLVYLNESSVLHTLRQRYGASLLHTYAGPSLLVLGPRGAPAVYSEKVMHMFKGCRREDMAPHIYAVAQTAYRAMLMSRQD

SEQ ID NO: 49951 - protein, 226 aa, Homo sapiens
MGEAGAAEEACRHMGTKEEFVKVRKKDLERLTTEVMQIRDFLPRILNGEVLESFQKLKIVEKNLERKEQELEQLKMDCEHFKARLETVQADNIREKKEKLALRQQLNEAKQQLLQQAEYCTEMGAAACTLLWGVSSSEEVVKAILGGVSMDKALKFFSITGQTMESFVKSLDGDVQELDSDESQFVFALAGIVTNVAAIACGREFLVNSSRVLLDTILQLLGDLKP

SEQ ID NO: 49952 - protein, 1225 aa, Homo sapiens
MRGPVGTEEELPRLFAEEMENEDEMSEEEDGGLEAFDDFFPVEPVSLPKKKKPKKLKENKCKGKRKKKEGSNDELSENEEDLEEKSESEGSDYSPNKKKKKKLKDKKEKKAKRKKKDEDEDDNDDGCLKEPKSSGQLMAEWGLDDVDYLFSEEDYHTLTNYKAFSQFLRPLIAKKNPKIPMSKMMTVLGAKWREFSANNPFKGSSAAAAAAAVAAAVETVTISPPLAVSPPQVPQPVPIRKAKTKEGKGPGVRKKIKGSKDGKKKGKGKKTAGLKFRFGGISNKRKKGSSSEEDEREESDFDSASIHSASVRSECSAALGKKSKRRRKKKRIDDGDGYETDHQDYCEVCQQGGEIILCDTCPRAYHLVCLDPELEKAPEGKWSCPHCEKEGIQWEPKDDDDEEEEGGCEEEEDDHMEFCRVCKDGGELLCCDACPSSYHLHCLNPPLPEIPNGEWLCPRCTCPPLKGKVQRILHWRWTEPPAPFMVGLPGPDVEPSLPPPKPLEGIPEREFFVKWAGLSYWHCSWVKELQLELYHTVMYRNYQRKNDMDEPPPFDYGSGDEDGKSEKRKNKDPLYAKMEERFYRYGIKPEWMMIHRILNHSFDKKGDVHYLIKWKDLPYDQCTWEIDDIDIPYYDNLKQAYWGHRELMLGEDTRLPKRLLKKGKKLRDDKQEKPPDTPIVDPTVKFDKQPWYIDSTGGTLHPYQLEGLNWLRFSWAQGTDTILADEMGLGKTVQTIVFLYSLYKEGHSKGPYLVSAPLSTIINWEREFEMWAPDFYVVTYTGDKESRSVIRENEFSFEDNAIRSGKKVFRMKKEVQIKFHVLLTSYELITIDQAILGSIEWACLVVDEAHRLKNNQSKFFRVLNSYKIDYKLLLTGTPLQNNLEELFHLLNFLTPERFNNLEGFLEEFADISKEDQIKKLHDLLGPHMLRRLKADVFKNMPAKTELIVRVELSQMQKKYYKFILTRNFEALNSKGGGNQVSLLNIMMDLKKCCNHPYLFPVAAVEAPVLPNGSYDGSSLVKSSGKLMLLQKMLKKLRDEGHRVLIFSQMTKMLDLLEDFLEYEGYKYERIDGGITGGLRQEAIDRFNAPGAQQFCFLLSTRAGGLGINLATADTVIIYDSDWNPHNDIQAFSRAHRIGQTKWKPSWATWMRKTPGHRSQGSPWKSRPFQPPWIEWRVRTSTRAQPARREPERSGQRRRRRPRPPRSSCRERRCFLRRRRSWTSWS

SEQ ID NO: 49953 - protein, 155 aa, Homo sapiens
  MOD_RES (1)..(1): Any amino acid
XRLNPWADKVKVPDMAEIQSRLAYVSCVRQLEVVKSSSYCEYLRPPIDCFKTMDFGKFDQIYVLAFPSSGFTDLAEIVSRIEPPTSYVSDGCADGEESDCLTEYEEDAGPDCSRDEGGSPEGASPSTASEMEEEKSILRQRRCLPQEPPGSATDA

SEQ ID NO: 49954 - protein, 68 aa, Homo sapiens
MAVEALHCGLNPRGIDHPAHAEGIKLQIEGEGVESQSIKNKNFQKVPDQKGTPKRLQAEAETAKGEPC

SEQ ID NO: 49955 - protein, 110 aa, Homo sapiens
MRKVLETVFDEVIMVDVLDSGDSAHLTLMKRPELGVTLTKLHCWSLTQYSKCVFMDADTLVLANIDDLFDREELSAAPDPGWPDCFNSGVFVYQPSVETYNQLLHLASEQ

SEQ ID NO: 49956 - protein, 70 aa, Homo sapiens
MSWSFLTRLLEEIHNHSTFVGKIWLTVLIVFRIVLTAVGGESIYYDEQSKFVCNTEQPGCENVCYDAFAP

SEQ ID NO: 49957 - protein, 118 aa, Homo sapiens
MAELQEVQITEEKPLLPGQTPEAAKEAELAARILLDQGQTHSVETPYGSVTFTVYGTPKPKRPAILTYHDVGLNYKSCFQPLFQFEDMQEIIQNFVRVHVDAPGMEEGAPVFPLGYQY

SEQ ID NO: 49958 - protein, 206 aa, Homo sapiens
MIEDNKENKDHSLERGRASLIFSLKNEVGGLIKALKIFQEKHVNLLHIESRKSKRRNSEFEIFVDCDINREQLNDIFHLLKSHTNVLSVNLPDNFTLKEDGMETVPWFPKKISDLDHCANRVLMYGSELDADHPGFKDNVYRKRRKYFADLAMNYKQAYRFFHPSCGWLLITKRFLIRFSLSSFSLHSICETQFRSLLYPRARYLP

SEQ ID NO: 49959 - protein, 70 aa, Homo sapiens
MTSEVIEDEKQFYSKAKTYWKQIPPTVDGMLGGKARTRQERPVPWTVELALGGSPSGCSCRCSERWIWST

SEQ ID NO: 49960 - protein, 192 aa, Homo sapiens
MAAVTHYLYLCQFSWMLIQSVNFWYVLVMNDEHTERRYLLFFLLSWGLPAFVVILLIVILKGIYHQSMSQIYGLIHGDLCFIPNVYAALFTAALVPLTCLVVVFVVFIHAYQVKPQWKAYDDVFRGRTNAAEIPLILYLFALISVTWLWGGLHMAYRHFWMLVLFVIFNSLQVLVSVSVIMNLVKAARRGAP

SEQ ID NO: 49961 - protein, 473 aa, Homo sapiens
  MOD_RES (1)..(1): Any amino acid
XIKWRKVDGSLSPQWTTAEPTLQIPSVSFEDEGTYECEAENSKGRDTVQGRIIVQAQPEWLKVISDTEADIGSNLRWGCAAAGKPRPTVRWLRNGEPLASQNRVEVLAGDLRFSKLSLEDSGMYQCVAENKHGTIYASAELAVQALAPDFRLNPVRRLIPAARGGEILIPCQPRAAPKAVVLWSKGTEILVNSSRVTVTPDGTLIIRNISRSDEGKYTCFAENFMGKANSTGILSVRDATKITLAPSSADINLGDNLTLQCHASHDPTMDLTFTWTLDDFPIDFDKPGGHYRRTNVKETIGDLTILNAQLRHGGKYTCMAQTVVDSASKEATVLVRGPPGPPGGVVVRDIGDTTIQLSWSRGFDNHSPIAKYTLQARTPPAGKWKQVRTNPANIEGNAETAQVLGLTPWMDYEFRVIASNILGTGEPSGPSSKIRTREAAPSVAPSGLSGGGGAPGELIVNWTQRERPALHAL

SEQ ID NO: 49962 - protein, 85 aa, Homo sapiens
  MOD_RES (1)..(1): Any amino acid
XEQMAHAVREKADIEAKSKLSLFQSRISLQKASVKLKARRSECNSKATHARNDYLLTLAAANAHQDRYYQTDLVNIMKVRQTFVI

SEQ ID NO: 49963 - protein, 218 aa, Homo sapiens
MERLQKAKMDNQVLGYKDLAAIPKDKAILDIERPDLMIYEPHFTYSLLEHVELPRSRERSLSPKSTSPPPSPEVWADSRSPGIISQASAPRTTGTPRTSLPHFHHPETSRPDSNIYKKPPIYKQRESVGGSPQTKHLIEDLIIESSKFPAAQPPDPNQPAKIETDYWPCPPSLAVVETEWRKRKASRRGAEEEEEEEDDDSGEEMKALRERQREELSK

SEQ ID NO: 49964 - protein, 1484 aa, Homo sapiens
  MOD_RES (1)..(1): Any amino acid
XEGEEILEEVGGDLEEEDDHHMEFCRVCKDGGELLCCDTCPSSYHIHCLNPPLPEIPNGEWLCPRCTCPALKGKVQKILIWKWGQPPSPTPVPRPPDADPNTPSPKPLEGRPERQFFVKWQGMSYWHCSWVSELQLELHCQVMFRNYQRKNDMDEPPSGDFGGDEEKSRKRKNKDPKFAEMEERFYRYGIKPEWMMIHRILNHSVDKKGHVHYLIKWRDLPYDQASWESEDVEIQDYDLFKQSYWNHRELMRGEEGRPGKKLKKVKLRKLERPPETPTVDPTVKYERQPEYLDATGGTLHPYQMEGLNWLRFSWAQGTDTILADEMGLGKTVQTAVFLYSLYKEGHSKGPFLVSAPLSTIINWEREFEMWAPDMYVVTYVGDKDSRAIIRENEFSFEDNAIRGGKKASRMKKEASVKFHVLLTSYELITIDMAILGSIDWACLIVDEAHRLKNNQSKFFRVLNGYSLQHKLLLTGTPLQNNLEELFHLLNFLTPERFHNLEGFLEEFADIAKEDQIKKLHDMLGPHMLRRLKADVFKNMPSKTELIVRVELSPMQKKYYKYILTRNFEALNARGGGNQVSLLNVVMDLKKCCNHPYLFPVAAMEAPKMPNGMYDGSALIRASGKLLLLQKMLKNLKEGGHRVLIFSQMTKMLDLLEDFLEHEGYKYERIDGGITGNMRQEAIDRFNAPGAQQFCFLLSTRAGGLGINLATADTVIIYDSDWNPHNDIQAFSRAHRIGQNKKVMIYRFVTRASVEERITQVAKKKMMLTHLVVRPGLGSKTGSMSKQELDDILKFGTEELFKDEATDGGGDNKEGEDSSVIHYDDKAIERLLDRNQDETEDTELQGMNEYLSSFKVAQYVVREEEMGEEEVEREIIKQEESVDPDYWEKLLRHHYEQQQEDLARNLGKGKRIRKQVNYNDGSQEDRDWQDDQSDNQSDYSVASEEGDEDFDERSEAPRRPSRKGLRNDKDKPLPPLLARVGGNIEVLGFNARQRKAFLNAIMRYGMPPQDAFTTQWLVRDLRGKSEKEFKAYVSLFMRHLCEPGADGAETFADGVPREGLSRQHVLTRIGVMSLIRKKVQEFEHVNGRWSMPELAEVEENKKMSQPGSPSPKTPTPSTPGDTQPNTPAPVPPAEDGIKIEENSLKEEESIEGEKEVKSTAPETAIECTQAPAPASEDEKVVVEPPEGEEKVEKAEVKERTEEPMETEPKGAADVEKVEEKSAIDLTPIVVEDKEEKKEEEEKKEVMLQNGETPKDLNDEKQKKNIKQRFMFNIADGGFTELHSLWQNEERAATVTKKTYEIWHRRHDYWLLAGIINHGYARWQDIQNDPRYAILNEPFKGEMNRGNFLEIKNKFLARRFKLLEQALVIEEQLRRAAYLNMSEDPSHPSMALNTRFAEVECLAESHQHLSKESMAGNKPANAVLHKVLKQLEELLSDMKADVTRLPATIARIPPVAVRLQMSERNILSRLANRAPEPTPQQVAQQQ

SEQ ID NO: 49965 - protein, 116 aa, Homo sapiens
MGYVRMIRSGGLHCSSNAIRFVPDLEDIVNFEELVKEEGLAEETLKAARHLDSVLSDHTRNSAEGTEYFKMLVDVFAPEFRRPKNIHLRNFYIIVPPLTLNFVEHSISCKEKLNKK

SEQ ID NO: 49966 - protein, 91 aa, Homo sapiens
MRLTLLSRLECSGTISAHCNLRLLRSSDSPASASRVAGTTGLSGFRGCGCELHPRRVGFAGSLSEESLQRCDAGNHQEPGLCRNEMERPEH

SEQ ID NO: 49967 - protein, 449 aa, Homo sapiens
MLGPQVWSSVRQGLSRSLSRNVGVWASGEGKKVDIAGIYPPVTTPFTATAEVDYGKLEENLHKLGTFPFRGAVGGVCALANVLGAQVCQLERLCCTGQWEDAQKLQHRLIEPNAARIIAVFKPKNEEPYGHLNPKWTKWLQKLCCPCCFGRDCLVLNQGYLSEAGASLVDQKLELNIVPRTKVVYLASETFNYSAIDRVKSRGKRLALEKVPKVGQRFNRIGLPPKVGSFQLFVEGYKDADYWLRRFEAEPLPENTNRQLLLQFERLVVLDYIIRNTDRGNDNWLIKYDCPMDSSSSRDTDWVVVKEPVIKVAAIDNGLAFPLKHPDSWRAYPFYWAWLPQAKVPFSQEIKDLILPKISDPNFVKDLEEDLYELFKKDPGFDRGQFHKQIAVMRGQILNLTQALKDNKSPLHLVQMPPVIVETARSHQRSSSESYTQSFQSRKPFFSWW

SEQ ID NO: 49968 - protein, 208 aa, Homo sapiens
MGQGWATAGLPSLLFLLLCYGHPLLVPSQEASQQVTVTHGTSSQATTSSQTTTHQATAHQTSAQSPNLVTDEAEASKFVEEYDRTSQVVWNEYAEANWNYNTNITTETSKILLQKNMQIANHTLKYGTQARKFDVNQLQNTTIKRIIKKVQDLERAALPAQELEEYNKILLDMETTYSVATVCHPNGSCLQLEPALKFSELPLQAEVS

SEQ ID NO: 49969 - protein, 784 aa, Homo sapiens
MRQVCCSALPPPPLEKGRCSSYSDSSSSSSERSSSSSSSSSESGSSSRSSSNNSSISRPAAPPEPRPQQQPQPRSPAARRAAARSRAAAAGGMRRDPAPGFSMLLFGVSLACYSPSLKSVQDQAYKAPVVVEGKVQGLVPAGGSSSNSTREPPASGRVALVKVLDKWPLRSGGLQREQVISVGSCVPLERNQRYIFFLEPTEQPLVFKTAFAPLDTNGKNLKKEVGKILCTDCATRPKLKKMKSQTGQVGEKQSLKCEAAAGNPQPSYRWFKDGKELNRSRDIRIKYGNGRKNSRLQFNKVKVEDAGEYVCEAENILGKDTVRGRLYVNSEAEELYQKRVLTITGICVALLVVGIVCVVAYCKTKKQRKQMHNHLRQNMCPAHQNRSLANGPSHPRLDPEEIQMADYISKNVPATDHVIRRETETTFSGSHSCSPSHHCSTATPTSSHRHESHTWSLERSESLTSDSQSGIMLSSVGTSKCNSPACVEARARRAAAYNLEERRRATAPPYHDSVDSLRDSPHSERYVSALTTPARLSPVDFHYSLATQVPTFEITSPNSAHAVSLPPAAPISYRLAEQQPLLRHPAPPGPGPGPGPGPGPGADMQRSYDSYYYPAAGPGPRRGTCALGGSLGSLPASPFRIPEDDEYETTQECAPPPPPRPRARGASRRTSAGPRRWRRSRLNGLAAQRARAARDSLSLSSGSGGGSASASDDDADDADGALAAESTPFLGLRGAHDALRSDSPPLCPAADSRTYYSLDSHSTRASSRHSRGPPPRAKQDSAPL

SEQ ID NO: 49970 - protein, 156 aa, Homo sapiens
MSESGHSQPGLYGIERRRRWKEPGSGGPQNLSGPGGRERDYIAPWERERRDASEETSTSVMQKTPIILSKPPAERSKQPPPPTAPAAPPAPAPLEKPIVLMKPREEGKGPVAVTGASTPEGTAPPPPAAPAPPKGEKEGQRPTQPVYQIQNRGMGT

SEQ ID NO: 49971 - protein, 1201 aa, Homo sapiens
MPNSERHGGKKDGSGGASGTLQPSSGGGSSNSRERHRLVSKHKRHKSKHSKDMGLVTPEAASLGTVIKPLVEYDDISSDSDTFSDDMAFKLDRRENDERRGSDRSDRLHKHRHHQHRRSRDLLKAKQTEKEKSQEVSSKSGSMKDRISGSSKRSNEETDDYGKAQVAKSSSKESRSSKLHKEKTRKERELKSGHKDRSKSHRKRETPKSYKTVDSPKRRSRSPHRKWSDSSKQDDSPSGASYGQDYDLSPSRSHTSSNYDSYKKSPGSTSRRQSVSPPYKEPSAYQSSTRSPSPYSRRQRSVSPYSRRRSSSYERSGSYSGRSPSPYGRRRSSSPFLSKRSLSRSPLPRKSMKSRSRSPAYSRHSSSHSKKKRSSSRSRHSSISPVRLPLNSSLGAELSRKKKERAAAAAAAKMDGKESKGSPVFLPRKENSSVEAKDSGLESKKLPRSVKLEKSAPDTELVNVTHLNTEVKNSSDTGKVKLDENSEKHLVKDLKAQGTRDSKPIALKEEIVTPKETETSEKETPPPLPTIASPPPPLPTTTPPPQTPPLPPLPPIPALPQQPPLPPSQPAFSQVPASSTSTLPPSTHSKTSAVSSQANSQPPVQVSVKTQVSVTAAIPHLKTSTLPPLPLPPLLPGDDDMDSPKETLPSKPVKKEKEQRTRHLLTDLPLPPELPGGDLSPPDSPEPKAITPPQQPYKKRPKICCPRYGERRQTESDWGKRCVDKFDIIGIIGEGTYGQVYKAKDKDTGELVALKKVRLDNEKEGFPITAIREIKILRQLIHRSVVNMKEIVTDKQDALDFKKDKGAFYLVFEYMDHDLMGLLESGLVHFSEDHIKSFMKQLMEGLEYCHKKNFLHRDIKCSNILLNNSGQIKLADFGLARLYNSEESRPYTNKVITLWYRPPELLLGEERYTPAIDVWSCGCILGELFTKKPIFQANLELAQLELISRLCGSPCPAVWPDVIKLPYFNTMKPKKQYRRRLREEFSFIPSAALDLLDHMLTLDPSKRCTAEQTLQSDFLKDVELSKMAPPDLPHWQDCHELWSKKRRRQRQSGVVVEEPPPSKTSRKETTSGTSTEPVKNSSPAPPQPAPGKVESGAGDAIGLADITQQLNQSELAVLLNLLQSQTDLSIPQMAQLLNIHSNPEMQQQLEALNQSISALTEATSQQQDSETMAPEESLKEAPSAPVILPSAEQTTLEASST

SEQ ID NO: 49972 - protein, 1642 aa, Homo sapiens
MSSFKRGSLKSSTSGSQKGQKSWIEKTFCKRECIFVIPSTKDSNRCCCGQFTNQHIPPLPSATPSKNEEENKQVETQPEKWSVAKHTQSYPTDSYGVLEFQGGGYSNKAMYIRVSYDTKPDSLLHLMVKDWQLELPKLLISVHGGLQNFEMQPKLKQVFGKGLIKAAMTTGAWIFTGGVSTGVISHVGDALKDHSSKSRGRVCAIGIAPWGIVENKEDLVGKDVTRVYQTMSNPLSKLSVLNNSHTHFILADNGTLGKYGAEVKLRRLLEKHISLQKINTRLGQGVPLVGLVVEGGPNVVSIVLEYLQEEPPIPVVICDGSGRASDILSFAHKYCEEGGIINESLREQLLVTIQKTFNYNKAQSHQLFAIIMECMKKKELVTVFRMGSEGQQDIEMAILTALLKGTNVSAPDQLSLALAWNRVDIARSQIFVFGPHWPPLGSLAPPTDSKATEKEKKPPMATTKGGRGKGKGKKKGKVKEEVEEETDPRKIELLNWVNALEQAMLDALVLDRVDFVKLLIENGVNMQHFLTIPRLEELYNTRLGPPNTLHLLVRDVKKSNLPPDYHISLIDIGLVLEYLMGGAYRCNYTRKNFRTLYNNLFGPKRPKALKLLGMEDDEPPAKGKKKKKKKKEEEIDIDVDDPAVSRFQYPFHELMVWAVLMKRQKMAVFLWQRGEESMAKALVACKLYKAMAHESSESDLVDDISQDLDNNSKDFGQLALELLDQSYKHDEQIAMKLLTYELKNWSNSTCLKLAVAAKHRDFIAHTCSQMLLTDMWMGRLRMRKNPGLKVIMGILLPPTILFLEFRTYDDFSYQTSKENEDGKEKEEENTDANADAGSRKGDEENEHKKQRSIPIGTKICEFYNAPIVKFWFYTISYLGYLLLFNYVILVRMDGWPSLQEWIVISYIVSLALEKIREILMSEPGKLSQKIKVWLQEYWNITDLVAISTFMIGAILRLQNQPYMGYGRVIYCVDIIFWYIRVLDIFGVNKYLGPYVMMIGKMMIDMLYFVVIMLVVLMSFGVARQAILHPEEKPSWKLARNIFYMPYWMIYGEVFADQIDLYAMEINPPCGENLYDEEGKRLPPCIPGAWLTPALMACYLLVANILLVNLLIAVFNNTFFEVKSISNQVWKFQRYQLIMTFHDRPVLPPPMIILSHIYIIIMRLSGRCRKKREGDQEERDRGLKLFLSDEELKRLHEFEEQCVQEHFREKEDEQQSSSDERIRVTSERVENMSMRLEEINERETFMKTSLQTVDLRLAQLEELSNRMVNALENLAGIDRSDLIQARSRASSECEATYLLRQSSINSADGYSLYRYHFNGEELLFEDTSLSTSPGTGVRKKTCSFRIKEEKDVKTHLVPECQNSLHLSLGTSTSATPDGSHLAVDDLKNAEESKLGPDIGISKEDDERQTDSKKEETISPSLNKTDVIHGQDKSDVQNTQLTVETTNIEGTISYPLEETKITRYFPDETINACKTMKSRSFVYSRGRKLVGGVNQDVEYSSITDQQLTTEWQCQVQKITRSHSTDIPYIVSEAAVQAEHKEQFADMQDEHHVAEAIPRIPRLSLTITDRNGMENLLSVKPDQTLGFPSLRSKSLHGHPRNVKSIQGKLDRSGHASSVSSLVIVSGMTAEEKKVKKEKASTETEC

SEQ ID NO: 49973 - protein, 143 aa, Homo sapiens
MDSMPEPASRCLLLLPLLLLLLLLLPAPELGPSQAGAEENDWVRLPSKCEVCKYVAVELKSAFEETGKTKEVIGTGYGILDQKASGVKYTKSDLRLIEVTETICKRLLIIACTRRGPAAIDLPRACQRPLRHYTTWYTKGSRW

SEQ ID NO: 49974 - protein, 87 aa, Homo sapiens
MLKALFLTMLTLALVKSQDTEETITYTQCTDGYEWDPVRQQCKDIDECDIVPDACKGGMKCVNHYGGYLCLPKTAQIIVNNEQPQQE

SEQ ID NO: 49975 - protein, 85 aa, Homo sapiens
MQGSSLWLSLTFRSARVLSRARFFEWQSPGLPNTAAMENGTGPYGEERPREVQETTVTEGAAKIAFPSANEVFYNPVQEFNRDLT

SEQ ID NO: 49976 - protein, 469 aa, Homo sapiens
MLKVHYPKFGVSEDCLYLNIYAPAHADTGSKLPVLVWFPGGAFKTGSASIFDGSALAAYEDVLVVVVQYRLGIFGFFTTWDQHAPGNWAFKDQVAALSWVQKNIEFFGGDPSSVTIFGESAGAISVSSLILSPMAKGLFHKAIMESGVAIIPYLEAHDYEKSEDLQVVAHFCGNNASDSEALLRCLRTKPSKELLTLSQKTKSFTRVVDGAFFPNEPLDLLSQKAFKAIPSIIGVNNHECGFLLPMKEAPEILSGSNKSLALHLIQNILHIPPQYLHLVANEYFHDKHSLTEIRDSLLDLLGDVFFVVPALITARYHRDAGAPVYFYEFRHRPQCFEDTKPAFVKADHADEVRFVFGGAFLKGDIVMFEGATEEEKLLSRKMMKYWATFARTGNPNGNDLSLWPAYNLTEQYLQLDLNMSLGQRLKEPRVEFWTSTIPLILSASDMLHSPLSSLTFLSLLQPFFFFCAP

SEQ ID NO: 49977 - protein, 97 aa, Homo sapiens
MESQEPTESSQNGKQYIISEELISEGKWVKLEKTTYMDPTGKTRTWESVKRTTRKEQTADGRSANLFQPFRKEVSTCDRVAVIPVLQRTLHYECIVL

SEQ ID NO: 49978 - protein, 71 aa, Homo sapiens
MFLTKNCKQEQERVESAKMFLLAITCAFVSKTLSGSYMNSMLTQIERQFNIPTSLVGFINGSFEIGNLLLI

SEQ ID NO: 49979 - protein, 104 aa, Homo sapiens
NREHESWPPPPATPGAGGLAVRTFVSHFRDRAVAGHLTRAVEPLRTFSVLEPGGPGGCAARRRATVEETARAADCRVAQNGGFFRMNSGECLGNVVSDERRVPV

SEQ ID NO: 49980 - protein, 74 aa, Homo sapiens
MASELCKTISVARLEKHKNLFLNYRNLHHFPLELLKDEGLQYLERLYMKRNSLTSLPENLAQKLPNLVELWNLN

SEQ ID NO: 49981 - protein, 30 aa, Homo sapiens
  MOD_RES (1)..(1): Any amino acid
XPASSAAGAARPAAFSAAAEGTPRRSIRCW

SEQ ID NO: 49982 - protein, 125 aa, Homo sapiens
MVDYYEVLGVQRHASPEDIKKAYRKLALKWHPDKNPENKEEAERKFKQVAEAYEVLSDAKKRDIYDKYGKEGLNGGGGGGSHFDSPFEFGFTFRNPDDVFREFFGGRDPFSFDFFEDPFEDFFGN

SEQ ID NO: 49983 - protein, 235 aa, Homo sapiens
AIQISQQTPYWHCRLLFQLAQLHTLEKDLVSACDLLGVGAEYARVVGSEYTRALFLLSKGMLLLMERKLQEVHPLLTLCGQIVENWQGNPIQKESLRVFFLVLQVTHYLDAGQVKSVKPCLKQLQQCIQTISTLHDDEILPSNPADLFHWLPKEHMCVLVYLVTVMHSMQAGYLEKAQKYTDKALMQLEKLKSKSVLDCSPILSSFQVILLEHIIMCRLVTGHKATALQEISQVC

SEQ ID NO: 49984 - protein, 77 aa, Homo sapiens
MSVSARSAAAEERSVNSSTMVAQQKNLEGYVGFANLPNQVYRKSVKRGFEFTLMVVGESGLGKSTLINSLFLTDLYS

SEQ ID NO: 49985 - protein, 285 aa, Homo sapiens
MDLGAITKYSALHAKPNGLILQYGTAGFRTKAEHLDHVMFRMGLLAVLRSKQTKSTIGVMVTASHNPEEDNGVKLVDPLGEMLAPSWEEHATCLANAEEQDMQRVLIDISEKEAVNLQQDAFVVIGRDTRPSSEKLSQSVIDGVTVLGGQFHDYGLLTTPQLHYMVYCRNTGGRYGKATIEGYYQKLSKAFVELTKQASCSGDEYRSLKVDCANGIGALKLREMEHYFSQGLSVQLFNDGSKGKLNHLCGADFVKSHQKPPQDWRKFEYWCCTNCICKWKFNTVS

SEQ ID NO: 49986 - protein, 71 aa, Homo sapiens
MSDGDYDYLIKFLALGDSGVGKTSVLYQYTDGKFNSKFITTVGIDFREKRVVYRASGPDGATGRGQRIHLQ

SEQ ID NO: 49987 - protein, 86 aa, Homo sapiens
MIWEYNVVIIVMACREFEMGRKKCERYWPLYGEDPITFAPFKISCEDEQARTDYFIRTLLLEFQNESRRLYQFHYVNWPDHDVPSS

SEQ ID NO: 49988 - protein, 134 aa, Homo sapiens
  MOD_RES (1)..(1): Any amino acid
XVAGMLVLSIQGNLQLDYPIFYVMFVCMVATAVYQAAFSKTDSSPANENNSPYLRESHEALMRMSLGKCPVFESSLTDVRLLFDCQCGLHSVHNHCYHSRCNILPGLHRGGRAAHLHVCTGVPHCILGRLLNHA

SEQ ID NO: 49989 - protein, 17 aa, Homo sapiens
MMQESGTETKSNGSAIQ

SEQ ID NO: 49990 - protein, 53 aa, Homo sapiens
  MOD_RES (1)..(1): Any amino acid
XPGPPPAGSALGGAPPVPSRPGASPDPFGPPPQVPSRPNRAPPGVPRITISDP

SEQ ID NO: 49991 - protein, 91 aa, Homo sapiens
MTTLKEAVTFKDVAVVFTEEELRLLDLAQRKLYREVMLENFRNLLSVGHQSLHRDTFHFLKEEKFWMMETATQREGNLGPAFQIPIKTEGF

SEQ ID NO: 49992 - protein, 51 aa, Homo sapiens
  MOD_RES (1)..(1): Any amino acid
XFGNKYYYIPQYKNWRGQTIREKRIVEAANKKEVDYEAGDIPTEWEGNTKE

SEQ ID NO: 49993 - protein, 370 aa, Homo sapiens
MVNTRKSSLRLLGSKSPGPGPGPGAGAEPGATGGSSHFISSRTRSSKTRAASCPAAKAGGSGGAGVTLDEARKVEVDGSLSDSHVSPPAKRTLKQPDSVCKDKSKSRSTGQREEWNLSTGQARLTSQPGATLPNGHSGLSLRSHPLRGEKKGDGDLSCINGDMEVRKSCRSRKNRFESVNQSLLFDQLVNSTAEAVLQEMDNINIRRNRRSGEVERLRMWTDTEFENMDMYSRVKRRRKSLRRNSYGIQNHHEVSTEGEEEARTSKLLPLEKISIESQEEDGDIEVEEAEGEENDRPYNLRQRKTVDRYQAPPIVPAHQKKRENTLFDIHRSPARRSHIRRKKHAIHSSDTTSSDEERFERRKSKSMARA

SEQ ID NO: 49994 - protein, 123 aa, Homo sapiens
MAASTSMVPVAVTAAVAPVLSINSDFSDLREIKKQLLLIAGLTRERGLLHSSKWSAELAFSLPALPLAELQPPPPITEMPRIWMPIPWPRPTLTLKSMIGQHISCMAAIARKPIFCICIPDIW

SEQ ID NO: 49995 - protein, 157 aa, Homo sapiens
MLQQELLSRTSLETQKLDLMTEVSELKLKLVGMEKEQREQEEKQRKAESVLNVISELQEQMCRLQLDIHRQIQERLLLSRDHPEEVAASDGVAEPQPCSQDCACWEGSPELLQELRHLKIKVEELENERNQYEWKLKATKAEVAQLQEQVALKDAEI

SEQ ID NO: 49996 - protein, 32 aa, Homo sapiens
MAGMSQRPPSMYWCVGPEESAVCPERAMETLN

SEQ ID NO: 49997 - protein, 91 aa, Homo sapiens
MNPNCARCGKIVYPTEKVNCLDKFWHKACFHCETCKMTLNMKNYKGYEKKPYCNAHYPKQSFTMVADTPENLRLKQQSELQSQMKKPRPGA

SEQ ID NO: 49998 - protein, 71 aa, Homo sapiens
MDLSELERDNTGRCRLSSPVPAVCRKEPCVLGVDEAGRGPVLGPMVYAICYCPLPRLADLEALKVAGSNTT

SEQ ID NO: 49999 - protein, 189 aa, Homo sapiens
MAALEEEFTLSSVVLSAGPEGLLGVEQSDKTDQFLVTDSGRTVILYKRFGRTRWFTPVIPELREAQVSDQKPLGSWSVKQGQIITCPAVCNFQTGEYVVVHDNKVLRIWNNEDVNLDKVFKATLSAEVYRILSVQGTEPLVLFKEGAVRGLEALLADPQQKIETVISDEEVIKWTKFFVVFRHPVLIFI

SEQ ID NO: 50000 - protein, 183 aa, Homo sapiens
MTSRKNGGGAHSWQETPWEQRRALGLQRAEMTMTANKNSSITHGAGGTKAPRGTLSRSQSVSPPPVLSPPRSPIYPLSDSETSACRYPSHSSSRVLLKDRHPPAPSPQNPQDPSPDTSPPTCPFKTASFGYLDRSPSACKRDAQKESVQGAAQDVAGVAACLPLAQSTPFPGPAAGPRGVLLT

SEQ ID NO: 50001 - protein, 227 aa, Homo sapiens
MAPEATKNFLPLLDAVSRDFVSVLHRRIKKAGSGNYSGDISDDLFRFAFESITNVIFGERQGMLEEVVNPEAQRFIDAIYQMFHTSVPMLNLPPDLFRLFRTKTWKDHVAAWDVIFSKADIYTQNFYWELRQKGSVHHDYRGILYRLLGDSKMSFEDIKANVTEMLAGGVDTTSMTLQWHLYEMARNLKVQDMLRAEVLAARHQAQGDMATMLQLVPLLKASIKETL

SEQ ID NO: 50002 - protein, 176 aa, Homo sapiens
MDLRTMTQSLVTLAEDNIAFFSSQGPGETAQRLSGVFAGVREQALGLEPALGRLLGVAHLFDLDPETPANGYRSLVHTARCCLAHLLHKSRYVASNRRSIFFRTSHNLAELEAYLAALTQLRALVYYAQRLLVTNRPGVLFFEGDEGLTADFLREYVTLHKGCFYGRCLGFQFTPA

SEQ ID NO: 50003 - protein, 134 aa, Homo sapiens
MELQTLQEALKVEIQVHQKLVAQMKQDPQIFFLSNQNADLKKQLHELQAKITALSEKQKRVVEQLRKNLIVKQEQPDKFQIQPLPQSENKLQTAQQQPLQQLQQQQQYHHHHAQQSAAASPNLTASQKTVTTAS

SEQ ID NO: 50004 - protein, 60 aa, Homo sapiens
MADQRMDISSTISDFMSPGPTDLLSSSLGTSGVDCNRKRKGSSTDYQLEYTEHQGRIKNA

SEQ ID NO: 50005 - protein, 174 aa, Homo sapiens
  MOD_RES (1)..(1): Any amino acid
XRISKKQEIGTLERHTKKTGFEKTSAIANVAKIQTLDALNDALEKEQVQLGVRNERQVQPFHHGCSWKETSGFDTSSEDPERLFLSMCLVTVLGNLLIILAVTPDSHLHIPMYFFLSNLSLPDIGFTSTTVPKMIVDIQSHSRVISYAGCLTQMSLFAIFGGMEERHAPECDGL

SEQ ID NO: 50006 - protein, 48 aa, Homo sapiens
MSLVPSVANGLSKGTARGGPGLKSLMSFLQNKTWSLGPQTTPTRRTAP

SEQ ID NO: 50007 - protein, 626 aa, Homo sapiens
MKMQKGNVLLMFGLLLHLEAATNSNETSTSANTGSSVISSGASTATNSGSSVTSSGVSTATISGSSVTSNGVSIVTNSEFHTTSSGISTATNSEFSTASSGISIATNSESSTTSSGASTATNSESSTPSSGASTVTNSGSSVTSSGASTATNSESSTVSSRASTATNSESSTLSSGASTATNSDSSTTSSGASTATNSESSTTSSGASTATNSESSTVSSRASTATNSESSTTSSGASTATNSESRTTSNGAGTATNSESSTTSSGASTATNSDSSTVSSGASTATNSESSTTSSGASTATNSDSSTTSSGAGTATNSESSTTSSGASTATNSESSTTSSGASTATNSDSSTTSSGAGTATNSESSTVSSGISTVTNSESSTPSSGANTATNSESSTTSSGANTATNSESSTVSSGASTATNSESSTTSSGVSTATNSESSTTSSGASTATNSDSSTTSSEASTATNSESSTVSSGISTVTNSESSTTSSGANTATNSGSSVTSAGSGTAALTGMHTTSHSASTAVSEAKPGGSLVPWEIFLITLVSVVAAVGLFAGLFFCVRNSLSLRNTFNTAVYHPHGLNHGLGPGPGGNHGAPHRPRWSPNWFWRRPVSSIAMEMSGRNSGP

SEQ ID NO: 50008 - protein, 168 aa, Homo sapiens
MEIVYVYVKKRSEFGKQCNFSDRQAELNIDIMPNPELAEQFVERNPVDTGIQCSISMSEHEANSERFEMETRGVNHVEGGWPKDVNPLELEQTIRFRKKVEKDENYVNAIMQLGSGPPGNQEGCHTPLLAPRWQQEVGSGILLLGFSAGTCGHEQRFIHLGPGKPQQA

SEQ ID NO: 50009 - protein, 44 aa, Homo sapiens
MSITSDEVNFLVYRYLQESGFSHSAFTFGIESHISQSNINGTLV

SEQ ID NO: 50010 - protein, 91 aa, Homo sapiens
MKDLYHYITSYVVDGQIIIYGPAYSGRETVYSNASLLIQNVTREDAGSYTLHIVKRGDGTRGETGHFTFTLYRHSLDSALSLEVTGSSQPL

SEQ ID NO: 50011 - protein, 121 aa, Homo sapiens
GILGSPSQEDLNCIINMKARNYLQSLPSKTKVAWAKLFPKSDSKALDLLDRMLTFNPNKRITVEEALAHPYLEQYYDPTDEPVAEEPFTFAMELDDLPKERLKELIFQETARFQPGVLEAP

SEQ ID NO: 50012 - protein, 74 aa, Homo sapiens
MTQNVERILARGENLEHLRNKTEDLEATSEHFKTTSQKVARKFWWKNVKMIVLICVIVFIIILFIVLFATGAFS

SEQ ID NO: 50013 - protein, 178 aa, Homo sapiens
  MOD_RES (1)..(1): Any amino acid
XDFDLEPSQDCAGDSVTISFVGSDPSQFCGQQGSPLGRPPGQREFVSSGRSLRLTFRTQPSSENKTAHLHKGFLALYQTVAVNYSQPISEASRGSEAINAPGDNPAKVQNHCQEPYYQAAAAGALTCATPGTWKDRQDGEEVLQCMPAAAPSYISPAIHEGSSPPFLRSTLLNESIAF

SEQ ID NO: 50014 - protein, 91 aa, Homo sapiens
  MOD_RES (1)..(1): Any amino acid
XKTGHAEVVRVVYQPEHMSFEELLKVFWENHDPTQGMRQGNDHGTQYRSAIYPTSAKQMEAALSSKENYQKVPKHVHWKKRTQTGLQTEGR

SEQ ID NO: 50015 - protein, 175 aa, Homo sapiens
ALITCPVPACGNPTIHPGQCCPSCADDFVVQKPELSTPSICHAPGGEYFVEGETWNIDSCTQCTCHSGRVLCETEVCPPLLCQNPSRTQDSCCPQCTDQPFRPSLSRNNSVPNYCKNDEGDIFLAAESWKPDVCTSCICIDSVISCFSESCPSVSCERPVLRKGQCCPYCIGGQT

SEQ ID NO: 50016 - protein, 221 aa, Homo sapiens
MADRFSRFNEDRDFQDNIGHRLLQKHGWKLGQGLGKSLQGRTDPIPIVVKYDVMGMGRMEMELDYAEDATERRRVLEVEKEDTEELRQKYKDYVDKEKAIAKALEDLRANFYCELCDKQYQKHQEFDNHINSYDHAHKQRLKDLKQREFARNVSSRSRKDEKKQEKALRRLHELAEQRKQAECAPGSGPMFKPTTVAVDEEGGEDDKDESATNSGTGATAS

SEQ ID NO: 50017 - protein, 45 aa, Homo sapiens
IIQKLQDKATVLTTERKKRGKTVPEELVKPEELSKYRQEGLCRVL

SEQ ID NO: 50018 - protein, 85 aa, Homo sapiens
  MOD_RES (1)..(1): Any amino acid
XLRRSTRHSANCDRLSESSASPQPKRRQQDTSASMPKLFLHLEKTSPAVLTPSGVLLSIILLELPKVIPVPFCVQLSVGGIVPGA

SEQ ID NO: 50019 - protein, 147 aa, Homo sapiens
MGFSSELCSPQGHGVLQQMQEAELRLLEGMRKWMAQRVKSDREYAGLLHHMSLQDSGGQSRAISPDSPISQSWAEITSQTEGLSRLLRQHAEDLNSGPLSKLSLLIRERQQLRKTYSEQWQQLQQELTKTHSQDIEKLKSQYRALAR

SEQ ID NO: 50020 - protein, 67 aa, Homo sapiens
RRDFPPLPGGCLTSDCGWGCMLRSGQMMLAQGLLLHFLPRGTPALRAVPGHHGWETATLTVLHWLPR

SEQ ID NO: 50021 - protein, 236 aa, Homo sapiens
MMLEVKVTIQGVTSHVDDEYRWAGVEDPKVMITTSRDPSSRLKMFAKELKLVFPGAQRMNRGRHEVGALVRACKANGVTDLLVVHEHRGTPVGLIVSHLPFGPTAYFTLCNVVMRHDIPDLGTMSEAKPHLITHGFSSRLGKRVSDILRYLFPVPKDDSHRVITFANQDDYISFRHHVYKKTDHRNVELTEVGPRFELKLYMIRLGTLEQEATADVEWRWHPYTNTARKRVFLSTE

SEQ ID NO: 50022 - protein, 9 aa, Homo sapiens
MRQHDTRNG

SEQ ID NO: 50023 - protein, 113 aa, Homo sapiens
MESGAYGAAKAGGSFDLRRFLTQPQVVARAVCLEAEDAVSRDRTIALQPGQQEQDSISNNNKNPKGDSSSGRGQHLYTPSGSPLCVPLRRPPALPGPPLPAGLRLDRVLLHLW

SEQ ID NO: 50024 - protein, 87 aa, Homo sapiens
MPGPLGSLEMGVLTFRDVALEFSLEEWQCLDTAQQNLYRNVMLENYRNLVFVGIAASKPDLITCLEQGKEPWNVKRHEMVTEPPGLQ

SEQ ID NO: 50025 - protein, 84 aa, Homo sapiens
MRIISRQIVLLFSGFWGLAMGAFPSSVQIGGLFIRNTDQEYTAFRLAIFLHNTSPNASEAPFNLVPHVDNIETANSFAVTNACK

SEQ ID NO: 50026 - protein, 353 aa, Homo sapiens
MVVQAKKRELKEAQRRKKQLEERCRVEESIGNAVLTWNNEILPNWETMWCSRKVRDLWWQGIPPSVRGKVWSLAIGNELNITHELFDICLARAKERWRSLSTGGSEVENEDAGFSAADREASLELIKLDISRTFPNLCIFQQGGPYHDMLHSILGAYTCYRPDVGYVQGMSFIAAVLILNLDTADAFIAFSNLLNKPCQMAFFRVDHGLMLTYFAAFEVFFEENLPKLFAHFKKNNLTPDIYLIDWIFTLYSKSLPLDLACRIWDVFCRDGEEFLFRTALGILKLFEDILTKMDFIHMAQFLTRLPEDLPAEELFASIATIQMQSRNKKWAQVLTALQKDSREMEKGSPSLRH

SEQ ID NO: 50027 - protein, 214 aa, Homo sapiens
  MOD_RES (1)..(1): Any amino acid
XADWAAVAGSAYHCTGFTEKNRLAAMANNLQKGNGGPMRLYVGSLHFNITEDMLRGIFEPFGKIDNIVLMKDSDTGRSKGYGFITFSDSECARRALEQLNGFELAGRPMRVGHVTERLDGGTDITFPDGDQELDLGSAGGRFQLMAKLAEGAGIQLPSTAAAAAAAAAQAAALQLNGAVPLGALNPAALTALSPALNLASQCFQLSSLFTPQTM

SEQ ID NO: 50028 - protein, 1174 aa, Homo sapiens
  MOD_RES (1)..(1): Any amino acid
XLTCDLEDDSDKLQEKSWKSSCNEGESSSTSYMHQRSPGGPTKLIEIISDCNWEEDRNKILSILSQHINSNMPQSLKVNGKSYPQAKLLLGQMGALHPANRLAAYITGRLRPSVLDLSTLSTVISKVASNAKVAASRKPRTLLPSTSNSKMASSSGTATNRPGKNLKAFVPAKRPIAARPSPGGVFTQFVMSKVGALQQKIPGVSTPQTLAGTQKFSIRPSPVMVVTPVVSSEPVQVCSPVTAAVTTTTPQVFLENTTAVTPMTAISDVETKETTYSSGATTTGVVEVSETNTSTSVTSTQSTATVNLTKTTGITTPVASVAFPKSLVASPSTITLPVASTASTSLVVVTAAASSSMVTTPTSSLGSVPIILSGINGSPPVSQRPENAAQIPVATPQVSPNTVKRAGPRLLLIPVQQGSPTLRPVSNTQLQGHRMVLQPVRSPSGMNLFRHPNGQIVQLLPLHQLRGSNTQPNLQPVMFRNPGSVMGIRLPAPSKPSETPPSSTSSSAFSVMNPVIQAVGSSSAVNVITQAPSLLSSGASFVSQAGTLTLRISPPEPQSFASKTGSETKITYSSGGQPVGTASLIPLQSGSFALLQLPGQKPVPSSILQHVASLQMKRESQNPDQKDETNSIKREQETKKVLQSEGEAVDPEANVIKQNSGAATSEETLNDSLEDRGDHLDEECLPEEGCATVKPSEHSCITGSHTDQDYKDVNEEYGARNRKSSKEKVAVLEVRTISEKASNKTVQNLSKVQHQKLGDVKVEQQKGFDNPEENSSEFPVTFKEESKFELSGSKVMEQQSNLQPEAKEKECGDSLEKDRERWRKHLKGPLTRKCVGASQECKKEADEQLIKETKTCQENSDVFQQEQGISDLLGKSGITEDARVLKTECDSWSRISNPSAFSIVPRRAAKSSRGNGHFQGHLLLPGEQIQPKQEKKGGRSSADFTVLDLEEDDEDDNEKTDDSIDEIVDVVSDYQSEEVDDVEKNNCVEYIEDDEEHVDIETVEELSEEINVAHLKTTAAHTQSFKQPSCTHISADEKAAERSRKAPPIPLKLKPDYWSDKLQKEAEAFAYYRRTHTANERRRRGEMRDLFEKLKITLGLLHSSKVSKSLILTRAFSEIQGLTDQADKLIGQKNLLTRKRNILIRKVSSLSGKTEEVVLKKLEYIYAKQQALEA

SEQ ID NO: 50029 - protein, 1283 aa, Homo sapiens
MWPSQLLIFMMLLAPIIHAFSRAPIPMAVVRRELSCESYPIELRCPGTDVIMIESANYGRTDDKICDSDPAQMENIRCYLPDAYKIMSQRCNNRTQCAVVAGPDVFPDPCPGTYKYLEVQYECVPYKVEQKVFLCPGLLKGVYQSEHLFESDHQSGAWCKDPLQASDKIYYMPWTPYRTDTLTEYSSKDDFIAGRPTTTYKLPHRVDGTGFVVYDGALFFNKERTRNIVKFDLRTRIKSGEAIIANANYHDTSPYRWGGKSDIDLAVDENGLWVIYATEQNNGKIVISQLNPYTLRIEGTWDTAYDKRSASNAFMICGILYVVKSVYEDDDNEATGNKIDYIYNTDQSKDSLVDVPFPNSYQYIAAVDYNPRDNLLYVWNNYHVVKYSLDFGPLDSRSGQAHHGQVSYISPPIHLDSELERPSVKDISTTGPLGMGSTTTSTTLRTTTLSPGRSTTPSVSGRRNRSTSTPSPAVEVLDDMTTHLPSASSQIPALEESCEAVEAREIMWFKTRQGQIAKQPCPAGTIGVSTYLCLAPDGIWDPQGPDLSNCSSPWVNHITQKLKSGETAANIARELAEQTRNHLNAGDITYSVRAMDQLVGLLDVQLRNLTPGGKDSAARSLNKLQKRERSCRAYVQAMVETVNNLLQPQALNAWRDLTTSDQLRAATMLLHTVEESAFVLADNLLKTDIVRENTDNIKLEVARLSTEGNLEDLKFPENMGHGSTIQLSANTLKQNGRNGEIRVAFVLYNNLGPYLSTENASMKLGTEALSTNHSVIVNSPVITAAINKEFSNKVYLADPVVFTVKHIKQSEENFNPNCSFWSYSKRTMTGYWSTQGCRLLTTNKTHTTCSCNHLTNFAVLMAHVEVKHSDAVHDLLLDVITWVGILLSLVCLLICIFTFCFFRGLQSDRNTIHKNLCISLFVAELLFLIGINRTDQPIACAVFAALLHFFFLAAFTWMFLEGVQLYIMLVEVFESEHSRRKYFYLVGYGMPALIVAVSAAVDYRSYGTDKVCWLRLDTYFIWSFIGPATLIIMLNVIFLGIALYKMFHHTAILKPESGCLDNINYEDNRPFIKSWVIGAIALLCLLGLTWAFGLMYINESTVIMAYLFTIFNSLQGMFIFIFHCVLQKKVRKEYGKCLRTHCCSGKSTESSIGSGKTSGSRTPGRYSTGSQSRIRRMWNDTVRKQSESSFITGDINSSASLNRGAMANHLISNALLRPHGTNNPYNTLLGEPAVCNNPSVSMYNAQEPYRETSMGVKLNIAYQIGASEQCQGYKCHGYSTTEW

SEQ ID NO: 50030 - protein, 48 aa, Homo sapiens
  MOD_RES (1)..(1): Any amino acid
XNLLLDAEANIKIADFGFSNEFTLGSKLDTFCGSPPYAAPELFQGKKL

SEQ ID NO: 50031 - protein, 71 aa, Homo sapiens
MVPFGPFAFMPGKLVHTNEVTVLLGDNWFAKCSAKQAVGLVEHRKEHVRKTIDDLKKVMKNFESRVEFTED

SEQ ID NO: 50032 - protein, 275 aa, Homo sapiens
MKPILLQGHERSITQIKYNREGDLLFTVAKDPIVNVWYSVNGERLGTYMGHTGAVWCVDADWDTKHVLTGSADNSCRLWDCETDNNEPYMKIPCNDSKITSAVWGPLGECIIAGHESGELNQYSAKSGEVLVNVKEHSRQINDIQLSRDMTMFVTASKDNTAKLFDSTTLEHQKTFRTERPVNSAALSPNYDHVVLGGGQEAMDVTTTSTRIGKFEARFFHLAFEEEFGRVKGHFGPINSVAFHPDGKSYSSGGEDGYVRIHYFDPQYFEFEFEA

SEQ ID NO: 50033 - protein, 847 aa, Homo sapiens
MSEQGDLNQAIAEEGGTEQETATPENGIVKSESLDEEEKLELQRRLEAQNQERRKSKSGAGKGKLTRSLAVCEESSARPGGESLQDQESIHLQLSSFSSLQEEDKSRKDDSEREKEKDKNKDKTSEKPKIRMLSKDCSQEYTDSTGIDLHEFLINTLKNNSRDRMILLKMEQEIIDFIADNNNHYKKFPQMSSYQRMLVHRVAAYFGLDHNVDQTGKSVIINKTSSTRIPEQRFCEHLKDEKGEESQKRFILKRDNSSIDKEDNQQNRMHPFRDDRRSKSIEEREEEYQRVRERIFAHDSVCSQESLFVENSRLLEDSNICNETYKKRQLFRGNRDGSGRTSGSRQSSSENELKWSDHQRAWSSTDSDSSNRNLKPAMTKTASFGGITVLTRGDSTSSTRSTGKLSKAGSESSSSAGSSGSLSRTHPPLQSTPLVSGVAAGSPGCVPYPENGIGGQVAPSSTSYILLPLEAATGIPPGSILLNPHTGQPFVNPDGTPAIYNPPTSQQPLRSAMVGQSQQQPPQQQPSPQPQQQVQPPQPQMAGPLVTQSVQGLQASSQSVQYPAVSFPPQHLLPVSPTQHFPMRDDVATQFGQMTLSRQSSGETPEPPSGPVYPSSLMPQPAQQPSYVIASTGQQLPTGGFSGSGPPISQQVLQPPPSPQGFVQQPPPAQMPVYYYPSGQYPTSTTQQYRPMAPVQYNAQRSQQMPQAAQQAGYQPVLSGQQGFQGLIGVQQPPQSQNVINNQQGTPVQSVMVSYPTMSSYQVPMTQGSQGLPQQSYQQPIMLPNQAGQGSLPATGMPVYCNVTPPTPQNNLRLIGPHCPSSTVPVMSASCRTNCASMSNAGWQVKF

SEQ ID NO: 50034 - protein, 94 aa, Homo sapiens
MSFDPNLLHNNGHNGYPNGTSAALRETGVIEKLLTSYGFIQCSERQARLFFHCSQYNGNLQDLKVGDDVEFEVSSDRRTGKPIAVKLVKIKQEI

SEQ ID NO: 50035 - protein, 174 aa, Homo sapiens
  MOD_RES (1)..(1): Any amino acid
XDDGLQGQPGLPGPTGEKGSKGEPGLPGPPGPMDPNLLGSKGEKGEPGLPGIPGVSGPKGYQGLPGDPGQPGLSGQPGLPGPPGPKGNPGLPGQPGLIGPPGLKGTIGDMGFPGPQGVEGPPGPSGVPGQPGSPGLPGQKGDKGDPGISSIGLPGLPGPKMIRRYVLGFVASPK

SEQ ID NO: 50036 - protein, 43 aa, Homo sapiens
MFSLKTLPFLLLLHVQISKAFPVSSKEKNTKTVQRQKYLKSDK

SEQ ID NO: 50037 - protein, 291 aa, Homo sapiens
MDQHQHLNKTAESASSEKKKTRRCNGFKMFLAALSFSYIAKALGGIIMKISITQIERRFDISSSLAGLIDGSFEIGNLLVIVFVSYFGSKLHRPKLIGIGCLLMGTGSILTSLPHFFMGYYRYSKETHINPSENSTSSLSTCLINQTLSFNGTSPEIVEKDCVKESGSHMWIYVFMGNMLRGIGETPIVPLGISYIDDFAKEGHSSLYLGSLNAIGMIGPVIGFALGSLFAKMYVDIGYVDLSTIRITPKDSRWVGAWWLGFLVSGLFSIISSIPFFFLPKNPNKPQKERK

SEQ ID NO: 50038 - protein, 51 aa, Homo sapiens
MPADVNLSQKPQVLGPEKQDGSCEVNRGSPGDSSPEREGRHRMQQVWAPCS

SEQ ID NO: 50039 - protein, 454 aa, Homo sapiens
  MOD_RES (1)..(1): Any amino acid
XNLLTSSVVIVFHNEGWSTLMRTVHSVIKRTPRKYLAEIVLIDDFSNKEHLKEKLDEYIKLWNGLVKVFRNERREGLIQARSIGAQKAKLGQVLIYLDAHCEVAVNWYAPLVAPISKDRTTCTVPLIDYIDGNDYSIEPQQGGDEDGFARGAWDWSLLWKRIPLSHKEKAKRKHKTEPYRSPAMAGGLFAIEREFFFELGLYDPGLQIWGGENFEISYKIWQCGGKLLFVPCSRVGHIYRLEGWQGNPPPIYVGSSPTLKNYVRVVEVWWDEYKDYFYASRPESQALPYGDISELKKFREDHNCKSFKWFMEEIAYDITSHYPLPPKNVDWGEIRGFETAYCIDSMGKTNGGFVELGPCHRMGGNQLFRINEANQLMQYDQCLTKGADGSKVMITHCNLNEFKEWQYFKNLHRFTHIPSGKCLDRSEVLHQVFISNCDSSKTTQKWEMNNIHSV

SEQ ID NO: 50040 - protein, 162 aa, Homo sapiens
MATNGSKVADGQISTEVSEAPVANDKPKTLVVKVQKKAADLPDRDTWKGRFDFLMSCVGYAIGLGNVWRFPYLCGKNGGGAFLIPYFLTLIFAGVPLFLLECSLGQYTSIGGLGVWKLAPMFKGVGLAAAVLSFWLNIYYIVIISWAIYYLYNSFTTQHYSQ

SEQ ID NO: 50041 - protein, 505 aa, Homo sapiens
MAAAMPLALLVLLLLGPGGWCLAEPPRDSLREELVITPLPSGDVAATFQFRTRWDSELQREGVSHYRLFPKALGQLISKYSLRELHLSFTQGFWRTRYWGPPFLQAPSGAELWVWFQDTVTDVDKSWKELSNVLSGIFCASLNFIDSTNTVTPTASFKPLGLANDTDHYFLRYAVLPREVVCTENLTPWKKLLPCSSKAGLSVLLKADRLFHTSYHSQAVHIRPVCRNARCTSISWELRQTLSVVFDAFITGQGKKDWSLFRMFSRTLTEPCPLASESRVYVDITTYNQDNETLEVHPPPTTTYQDVILGTRKTYAIYDLLDTAMINNSRNLNIQLKWKRPPENEAPPVPFLHAQRYVSGYGLQKGELSTLLYNTHPYRAFPVLLLDTVPWYLRLYVHTLTITSKGKENKPSYIHYQPAQDRLQPHLLEMLIQLPANSVTKVSIQFERALLKWTEYTPDPNHGFYVSPSVLSALVPSMVAAKPVDWEESPLFNSLEPVTCAALRC

SEQ ID NO: 50042 - protein, 104 aa, Homo sapiens
  MOD_RES (1)..(1): Any amino acid
XFQGPVLIGSSHGGVNIEDVAAESPEAIIKEPIDIEEGIKKEQALQLAQKMGFPPNIVESAAENMVKLYSLFLKYDATMIEINPMVEDSDGADEDLPTLALLTF

SEQ ID NO: 50043 - protein, 307 aa, Homo sapiens
MAERQEEQRGSPPLRAEGKADAEVKLILYHWTHSFSSQKVRLVIAEKALKCEEHDVSLPLSEHNEPWFMRLNSTGEVPVLIHGENIICEATQIIDYLEQTFLDERTPRLMPDKESMYYPRVQHYRELLDSLPMDAYTHGCILHPELTVDSMIPAYATTRIRSQIGNTESELKKLAEENPDLQEAYIAKQKRLKSKLLDHDNVKYLKKILDELEKVLDQVETELQRRNEETPEMGSLSPWLECSGMIIVCCSLDLLGSSNPSTSASQVAETTEITNASLLIGVNILLTSFKMEKRTNMMVSLEAQVRK

SEQ ID NO: 50044 - protein, 41 aa, Homo sapiens
MGNHAGKRELNAEKASTNSETNRGESEKKRNLGELSRTTSE

SEQ ID NO: 50045 - protein, 55 aa, Homo sapiens
MSVDMNSQGSDSNEEDYDPNCEEEEEEEEDDPGDIEDYYVGVASDVEQQGADAFD

SEQ ID NO: 50046 - protein, 631 aa, Homo sapiens
MLKFRTVHGGLRLLGIRRTSTAPAASPNVRRLEYKPIKKVMVANRGEIAIRVFRACTELGIRTVAIYSEQDTGQMHRQKADEAYLIGRGLAPVQAYLHIPDIIKVAKENNVDAVHPGYGFLSERADFAQACQDAGVRFIGPSPEVVRKMGDKVEARAIAIAAGVPVVPGTDAPITSLHEAHEFSNTYGFPIIFKAAYGGGGRGMRVVHSYEELEENYTRAYSEALAAFGNGALFVEKFIEKPRHIEVQILGDQYGNILHLYERDCSIQRRHQKVVEIAPAAHLDPQLRTRLTSDSVKLAKQVGYENAGTVEFLVDRHGKHYFIEVNSRLQVEHTVTEEITDVDLVHAQIHVAEGRSLPDLGLRQENIRINGCAIQCRVTTEDPARSFQPDTGRIEVFRSGEGMGIRLDNASAFQGAVISPHYDSLLVKVIAHGKDHPTAATKMSRALAEFRVRGVKTNIAFLQNVLNNQQFLAGTVDTQFIDENPELFQLRPAQNRAQKLLHYLGHVMVNGPTTPIPVKASPSPTDPVVPAVPIGPPPAGFRDILLREGPEGFARAVRNHPGLLLMDTTFRDAHQSLLATRVRTHDLKKIAPYVAHNFSKLFSMENWGDAAAGGQCCGLHQLPRQRGLQVL

SEQ ID NO: 50047 - protein, 219 aa, Homo sapiens
MSGVRAVRISIESACEKQVHEVGLDGTETYLPPLSMSQNLARLAQRIDFSQGSGSEEEEAAGTEGDAQEWPGAGSSADQDDEEGSLFPHHGTFEVIKNTDLDLDKKIPEDYCPLDVQIPSDLEGSAYIKVSIQKQAPDIGDLGTVNLFKRPLPKSKPGSPHWQTKLEAAQNVLLCKEIFAQLSREAVQIKSQVPHIVVKNQIISQPFPSLQLSISLCHS

SEQ ID NO: 50048 - protein, 81 aa, Homo sapiens
MQKVALFKLQSYWLPNFYTHTKMTMAKEEACHGLMQEYETRLYSVCYTHIGGLPLNMSIKKCHHFQKRYSSRKAKRKMWQL

SEQ ID NO: 50049 - protein, 543 aa, Homo sapiens
MTKHPPNRRGISFEVGAQLEARDRLKNWYPAHIEDIDYEEGKVLIHFKRWNHRYDEWFCWDSPYLRPLEKIQLRKEGLHEEDGSSEFQINEQVLACWSDCRFYPAKVTAVNKDGTYTVKFYDGVVQTVKHIHVKAFSKDQNIVGNARPKETDHKSLSSSPDKREKFKEQRKATVNVKKDKEDKPLKTEKRPKQPDKEGKLICSEKGKVSEKSLPKNEKEDKENISENDREYSGDAQVDKKPENDIVKSPQENLREPKRKRGRPPSIAPTAVDSNSQTLQPITLELRRRKISKGCEVPLKRPRLDKNSSQEKSKNYSENTDKDLSRRRSSRLSTNGTHEILDPDLVVSDLVDTDPLQDTLSSTKESEEGQLKSALEAGQVSSALTCHSFGDGSGAAGLELNCPSMGENTMKTEPTSPLVELQEISTVEVTNTFKKTDDFGSSNAPAVDLDHKFRCKVVDCLKFFRKAKLLHYHMKYFHGMEKSLEPEESPGKRHVQTRGPSASDKPSQETLTRKRVSASSPTTKDKEKNKEKKFKEFVRVKPKK

SEQ ID NO: 50050 - protein, 174 aa, Homo sapiens
MEEPEEPADSGQSLVPVYIYSPEYVSMCDSLAKIPKRASMVHSLIEAYALHKQMRIVKPKVASMEEMATFHTDAYLQHLQKVSQEGDDDHPDSIEYGLGYDCPATEGIFDYAAAIGGATITAAQCLIDGMCKVAINWSGGWHHAKKCRRRIQFHLQSHDRVPAQILPRIFPRNR

SEQ ID NO: 50051 - protein, 73 aa, Homo sapiens
MNRPAPVEISYENMRFLITHNPTNATLNKFTEELKKYGVTTLVRVCDATYDKAPVEKEGIHVLGTCAGCTCFD

SEQ ID NO: 50052 - protein, 2442 aa, Homo sapiens
MASGSCQGCEEDEETLKKLIVRLNNVQEGKQIETLVQILEDLLVFTYSERASKLFQGKNIHVPLLIVLDSYMRVASVQQVGWSLLCKLIEVCPGTMQSLMGPQDVGNDWEVLGVHQLILKMLTVHNASVNLSVIGLKTLDLLLTSGKITLLILDEESDIFMLIFDAMHSFPANDEVQKLGCKALHVLFERVSEEQLTEFVENKDYMILLSALTNFKDEEEIVLHVLHCLHSLAIPCNNVEVLMSGNVRCYNIVVEAMKAFPMSERIQEVSCCLLHRLTLGNFFNILVLNEVHEFVVKAVQQYPENAALQISALSCLALLTETIFLNQDLEEKNENQENDDEGEEDKLFWLEACYKALTWHRKNKHVQEAACWALNNLLMYQNSLHEKIGDEDGHFPAHREVMLSMLMHSSSKEVFQASANALSTLLEQNGMPEESREDTEFHHKLNMVKKQCFKNDIHKLVLAALNRFIGNPGIQKCGLKVISSIVHFPDALEMLSLEGAMDSVLHTLQMYPDDQEIQCLGLSLIGYLITKKNVFIGTGHLLAKILVSSLYRFKDVAEIQTKGFQTILAILKLSASFSKLLVHHSFDLVIFHQMSSNIMEQKDQQFLNLCCKCFAKVAMDDYLKNVMLERACDQNNSIMVECLLLLGADANQAKEGSSLICQVCEKESSPKLVELLLNSGSREQDVRKALTISIGKGDSQIISLLLRRLALDVANNSICLGGFCIGKVEPSWLGPLFPDKTSNLRKQTNIASTLARMVIRYQMKSAVEEGTASGSDGNFSEDVLSKFDEWTFIPDSSMDSVFAQSDDLDSEGSEGSFLVKKKSNSISVGEFYRDAVLQRCSPNLQRHSNSLGPIFDHEDLLKRKRKILSSDDSLRSSKLQSHMRHSDSISSLASEREYITSLDLSANELRDIDALSQKCCISVHLEHLEKLELHQNALTSFPQQLCETLKSLTHLDLHSNKFTSFPSYLLKMSCIANLDVSRNDIGPSVVLDPTVKCPTLKQFNLSYNQLSFVPENLTDVVEKLEQLILEGNKISGICSPLRLKELKILNLSKNHISSLSENFLEACPKVESFSARMNFLAAMPFLPPSMTILKLSQNKFSCIPEAILNLPHLRSLDMSSNDIQYLPGPAHWKSLNLRELLFSHNQISILDLSEKAYLWSRVEKLHLSHNKLKEIPPEIGCLENLTSLDVSYNLELRSFPNEMGKLSKIWDLPLDELHLNFDFKHIGCKAKDIIRFLQQRLKKAVPYNRMKLMIVGNTGSGKTTLLQQLMKTKKSDLGMQSATVGIDVKDWPIQIRDKRKRDLVLNVWDFAGREEFYSTHPHFMTQRALYLAVYDLSKGQAEVDAMKPWLFNIKARASSSPVILVGTHLDVSDEKQRKACMSKITKELLNKRGFPAIRDYHFVNATEESDALAKLRKTIINESLNFKIRDQLVVGQLIPDCYVELEKIILSERKNVPIEFPVIDRKRLLQLVRENQLQLDENELPHAVHFLNESGVLLHFQDPALQLSDLYFVEPKWLCKIMAQILTVKVEGCPKHPKGIISRRDVEKFLSKKRKFPKNYMSQYFKLLEKFQIALPIGEEYLLVPSSLSDHRPVIELPHCENSEIIIRLYEMPYFPMGFWSRLINRLLEISPYMLSGRERALRPNRMYWRQGIYLNWSPEAYCLVGSEVLDNHPESFLKITVPSCRKGCILLGQVVDHIDSLMEEWFPGLLEIDICGEGETLLKKWALYSFNDGEEHQKILLDDLMKKAEEGDLLVNPDQPRLTIPISQIAPDLILADLPRNIMLNNDELEFEQAPEFLLGDGSFGSVYRAAYEGEEVAVKIFNKHTSLRLLRQELVVLCHLHHPSLISLLAAGIRPRMLVMELASKGSLDRLLQQDKASLTRTLQHRIALHVADGLRYLHSAMIIYRDLKPHNVLLFTLYPNAAIIAKIADYGIAQYCCRMGIKTSEGTPGFRAPEVARGNVIYNQQADVYSFGLLLYDILTTGGRIVEGLKFPNEFDELEIQGKLPDPVKEYGCAPWPMVEKLIKQCLKENPQERPTSAQVFDILNSAELVCLTRRILLPKNVIVECMVATHHNSRNASIWLGCGHTDRGQLSFLDLNTEGYTSEEVADSRILCLALVHLPVEKESWIVSGTQSGTLLVINTEDGKKRHTLEKMTDSVTCLYCNSFSKQSKQKNFLLVGTADGKLAIFEDKTVKLKGAAPLKILNIGNVSTPLMCLSESTNSTERNVMWGGCGTKIFSFSNDFTIQKLIETRTSQLFSYAAFSDSNIITVVVDTALYIAKQNSPVVEVWDKKTEKLCGLIDCVHFLREVMVKENKESKHKMSYSGRVKTLCLQKNTALWIGTGGGHILLLDLSTRRLIRVIYNFCNSVRVMMTAQLGSLKNVMLVLGYNRKNTEGTQKQKEIQSCLTVWDINLPHEVQNLEKHIEVRKELAEKMRRTSVE

SEQ ID NO: 50053 - protein, 715 aa, Homo sapiens
MHIKLPLKPNDLKNRSSAFGTLNWFTKVLSVDESIIKPEQEFFTAPFEKNRMNDFYIVDRDAFFNPATRSRIVYFILSRVKYQVINNVSKFGINRLVNSGIYKAAFPLHDCKFRRQSEDPSCPNERYLLYREWAHPRSIYKKQPLDLIRKYYGEKIGIYFAWLGYYTQMLLLAAVVGVACFLYGYLNQDNCTWSKEVCHPDIGGKIIMCPQCDRLCPFWKLNITCESSKKLCIFDSFGTLVFAVFMGVWVTLFLEFWKRRQAELEYEWDTVELQQEEQARPEYEARCTHVVINEITQEEERIPFTAWGKCIRITLCASAVFFWILLIIASVIGIIVYRLSVFIVFSAKLPKNINGTDPIQKYLTPQTATSITASIISFIIIMILNTIYEKVAIMITNFELPRTQTDYENSLTMKMFLFQFVNYYSSCFYIAFFKGKFVGYPGDPVYWLGKYRNEECDPGGCLLELTTQLTIIMGGKAIWNNIQEVLLPWIMNLIGRFHRVSGSEKITPRWEQDYHLQPMGKLGLFYEYLEMIIQFGFVTLFVASFPLAPLLALVNNILEIRVDAWKLTTQFRRLVPEKAQDIGAWQPIMQGIAILAVVTNAMIIAFTSDMIPRLVYYWSFSVPPYGDHTSYTMEGYINNTLSIFKVADFKNKSKGNPYSDLGNHTTCRYRDFRYPPGHPQEYKHNIYYWHVIAAKLAFIIVMEPRRECHCSSLHS

SEQ ID NO: 50054 - protein, 62 aa, Homo sapiens
MEQKTVIPGMPTVIPPGLTREQERAYIVQLQIEDLTRKLRTGDLGIPPNPEDRSPSPEPIYN

SEQ ID NO: 50055 - protein, 152 aa, Homo sapiens
MLELQYHNEDLEKDKTSQNCLGRGMEQVAKKLGVAHEEIQRLTDELQVKEKEQCKLDSALKKAQLEIDKLKENLVKLKENDAADLQKAKEQNQRLDEEILALRNRVRSLDSEKKVLGEMVERLKGEVCESQENKQLGNHSPGKTVGGEQREQ

SEQ ID NO: 50056 - protein, 105 aa, Homo sapiens
MQSRPPPPPPPPPPPPPLLSPRITSETTSPSAPASARGIYLMGMCSRQERIQKDIDVVIQKSRAEKDCLFADFRYSDSTFTFTYVGGPRREYGAIDDVDIDLHID

SEQ ID NO: 50057 - protein, 173 aa, Homo sapiens
MNPAAEAEFNILLATDSYKVTHYKQYPPNTSKVYSYFECREKKTENSKLRKVKYEETVFYGLQYILNKYLKGKVVTKEKIQEAKDVYKEHFQDDVFNEKGWNYILEKYDGHLPIEIKAVPEGFVIPRGNVLFTVENTDPECYWLTNWIETDFSVELPDNQEKRGNQGTVLIRK

SEQ ID NO: 50058 - protein, 271 aa, Homo sapiens
MMTSVSSDHCRGAREKPQISAAQSTQPQKQVVQATAEQMRLAQVIFDKNDSDFEAKVKQLMEVTGKNQDECIVALHDCNGDVNKAINILLEGNSDTTSWETVGCKKKNFAKENSENKENREKKSEKESSRGRGNNNRKGRGGNRGREFRGEENGIDCNQVDKPSDRGKRARGRGFGRGRGRGAGRFSTQGMGTFNPADYSDSTSTDVCGTKLVVWEAAQNGADEGTVIRPWLRIWRACTTKNGKHHQLPDFGPVESSEFGPVYHHPKYTAE

SEQ ID NO: 50059 - protein, 482 aa, Homo sapiens
MLRLPTVFRQMRPVSRVLAPHLTRAYAKDVKFGADARALMLQGVDLLADAVAVTMGPKGRTVIIEQSWGSPKVTKDGVTVAKSIDLKDKYKNIGAKLVQDVANNTNEEAGDGTTTATVLARSIAKEGFEKISKGANPVEIRRGQKCEFQDAYVLLSEKKISSIQSIVPALEIANAHRKPLVIIAEDVDGEALSTLVLNRLKVGLQVVAVKAPGFGDNRKNQLKDMAIATGGAVFGEEGLTLNLEDVQPHDLGKVGEVIVTKDDAMLLKGKGDKAQIEKRIQEIIEQLDVTTSEYEKEKLNERLAKLSDGVAVLKVGGTSDVEVNEKKDRVTDALNATRAAVEEGIVLGGGCALLRCIPALDSLTPANEDQKIGIEIIKRTLKIPAMTIAKNAGVEGSLIVEKIMQSSSEVGYDAMAGDFVNMVEKGIIDPTKVVRTALLDAAGVASLLTTAEVVVTEIPKEEKDPGMGAMGGMGGGMGGGMF

SEQ ID NO: 50060 - protein, 75 aa, Homo sapiens
MDCMNKLKNNKEYLEFRRERSQMLLSRRNQLLLEFSFWNEPQPRMGPNIYELRTYKLKPGTMIEWGNNWARAIKY

SEQ ID NO: 50061 - protein, 86 aa, Homo sapiens
MSPTPPLFSLPEARTRFTKSTREALNNKNIKPLLSTFSQVPGSENEKKCTLDQAFRGILEEEIINHSSCENVLAIISLAIGGVTEA

SEQ ID NO: 50062 - protein, 111 aa, Homo sapiens
MQLHHSKHHAAYVNNLNVTEEKYQEALAKGDVTAQIALQPALKFNGGGHINHSIFWTNLSPNGGGEPKGELLEAIKRDFGSFDKFKEKLTAASVGVQGSGWGWLGFNKERG

SEQ ID NO: 50063 - protein, 199 aa, Homo sapiens
MKLGKKPMYKPVDPYSRMQSTYNYNMRGGAYPPRYFYPFPVPPLLYQVELSVGGQQFNGKGKTRQAAKHDAAAKALRILQNEPLPERLEVNGRESEEENLNKSEISQVFEIALKRNLPVNFESFPLKQVARESGPPHMKNFVTKVSVGEFVGEGEGKSKKISKKNAAIAVLEELKKLPPLPAVERVKPRIKKKTKPIVK

SEQ ID NO: 50064 - protein, 169 aa, Homo sapiens
  MOD_RES (1)..(1): Any amino acid
XPSPWRDRPMEESLLLFEAMRKGKFSEGEATLRMKLVMEDGKMDPVAYRVKYTPHHRTGDKWCIYPTYDYTHCLCDSIEHITHSLCTKEFQARRSSYFWLCNALDVYCPVQWEYGRLNLHYAVVSKRKILQLVATGAVRDWDDPRLFTLTALRRRGFPPEAINNFCARV

SEQ ID NO: 50065 - protein, 40 aa, Homo sapiens
MGKFMKPGKVVLVLAGRYSGRKAVIVKVLCGYPLGQNCRQ

SEQ ID NO: 50066 - protein, 276 aa, Homo sapiens
MVLLKLLEVYRKGSAGTFHKSTIFGNTIMTSQPVPNETIIVLPSNVINFSQAEKPEPTNQGQDSLKKHLHAEIKVIGTIQILCGMMVLSLGIILASASFSPNFTQVTSTLLNSAYPFIGPFFFIISGSLSIATEKRLTKLLVHSSLVGSILSALSALVGFIILSVKQATLNPASLQCELDKNNIPTRSYVSYFYHDSLYTTDCYTAKASLAGTLSLMLICTLLEFCLAVLTAVLRWKQAYSDFPGSVLFLPHSYIGNSGMSSKMTHDCGYEELLTS

SEQ ID NO: 50067 - protein, 293 aa, Homo sapiens
MFTSEKGVVEEWLSEFKTLPETSLPNYATNLKDKSSLVSSLYKVIQEPQSELLEPVCHQLFEFYRSGEEQLLQFTLQFLPELIWCYLAVSASRNVHSSGCIEALLLGVYNLEIVDKQGHTKVLSFTIPSLSKPSVYHEPSSIGSMALTESALSQHGLSKVVYSGPHPQREMLTAQNRFEVLTFLLLCYNAALTYMPSVSLQSLCQICSRICVCGYPRQHVRKYKGISSRIPVSSGFMVQMLTGIYFALRSLALVAQAGVQWHDLGSPQPPPPGFKRFSCLGLPSSWDYRLLMQ

SEQ ID NO: 50068 - protein, 236 aa, Homo sapiens
MAAAAGSCARVAAWGGKLRRGLAVSRQAVRSPGPLAAAVAGAALAGAGAAWHHSRVSVAARDGSFTVSAQKNVEHGIIYIGKPSLRKQRFMQFSSLEHEGEYYMTPRDFLFSVMFEQMERKTSVKKLTKKDIEDTLSGIQTAGCGSTFFRDLGDKGLISYTEYLFLLTILTKPHSGFHVAFKMLDTDGNEMIEKREFFKIDTIDSERQLQKIISKQDDLMTVKTNETGYQEAIVKE

SEQ ID NO: 50069 - protein, 121 aa, Homo sapiens
MAAQRLGKRVLSKLQSPSRARGPGGSPGGLQKRHARVTVKYDRRELQRRLDVEKWIDGRLEELYRGMEADMPDEINIDELLELESEEERSRKIQGLLKSCGKPVEVSFLSLILSLFWPQVL

SEQ ID NO: 50070 - protein, 169 aa, Homo sapiens
MLSLFPSPGPGSSRCKDKLNALAISVMNQWPGVKLRVTEGWDEDGHHSEESLHYEGRAVDITTSDRDRSKYGMLARLAVEAGFDWVYYESKAHIHCSVKAGKERKPLLRDTRYRASRGCSPAPPGRGADFSFRVDGAKSLCKMYAWWLLPASLMTKCISIPVKTCITMY

SEQ ID NO: 50071 - protein, 143 aa, Homo sapiens
MSFSLAPFLSPQSWPPPLPPAQSEIMKVVNLKQAILQAWKERWSDYQWAINMKKFFPKGATWDILNLADALLEQAMIGPSPNPLILSYLKYAISSQMVSYSSVLTAISKFDDFSRDLCVQALLDIMDMFCDRLSCHGKAEECI

SEQ ID NO: 50072 - protein, 53 aa, Homo sapiens
MLDRYEYQMSISIVMNSVEPSHKSTQRPPPPQGRQRWGGSLGSHNRVCVTNNH

SEQ ID NO: 50073 - protein, 534 aa, Homo sapiens
MVLGSDMAAYQQEEQMQLPRADAIRSRLIDTFSLIEHLQGLSQAVPRHTIRELLDPSRQKKLVLGDQHQLVRFSIKPQRIEQISHAQRLLSRLHVRCSQRPPLSLWAGWVLECPLFKNFIIFLVFLNTIILMVEIELLESTNTKLWPLKLTLEVAAWFILLIFILEILLKWLSNFSVFWKSAWNVFDFVVTMLSLLPEVVVLVGVTGQSVWLQLLRICRVLRSLKLLAQFRQIQIIILVLVRALKSMTFLLMLLLIFFYIFAVTGVYVFSEYTRSPRQDLEYHVFFSDLPNSLVTVFILFTLDHWYALLQDVWKVPEVSRIFSSIYFILWLLLGSIIFRSIIVAMMVTNFQNIRKELNEEMARREVQLKADMFKRQIIQRRKNMSHEALTSSHSKIEDRGASQQRESLDLSEVSEVESNYGATEEDLITSASKTEETLSKKREYQSSSCVSSTSSSYSSSSESRFSESIGRLDWETLVHENLPGLMEMDQDDRVWPRDSLFRYFELLEKLQYNLEERKKLQEFAVQALMNLEDK

SEQ ID NO: 50074 - protein, 77 aa, Homo sapiens
MVDLTQVMDDEVFMAFASYATIILSKMMLMSTATAFYRLTRKVFANPEDCVAFGKGENAKKYLRTDDRVERVRRAHL

SEQ ID NO: 50075 - protein, 266 aa, Homo sapiens
  MOD_RES (1)..(1): Any amino acid
XQEEQPLCHPIVERALKSCGPGGTAHVKLVVEWDKETRDFLFVNTEDEYIPDAESVRLQRERHHQPQTCTLSQCFQLYTKEERLAPDDAWRCPHCKQLQQGSITLSLWTLPDVLIIHLKRFRQEGDRRMKLQNMVKFPLTGLDMTPHVVKRSQSSWSLPSHWSPWRRPYGLGRDPEDYIYDLYAVCNHHGTMQGGHYTGLQCERLRVCAGESFRRVCLWQGDLTLEPHFPSGRQCANCEGSFHPLDLCPRANKRTFFLLFLSWVVQ

SEQ ID NO: 50076 - protein, 7385 aa, Homo sapiens
MSSSDEETLSERSCRSERSCRSERSYRSERSGSLSPCPPGDTLPWNLPLHEQKKRKSQDSVLDPAERAVVRVADERDRVQKKTFTKWVNKHLMKVRKHINDLYEDLRDGHNLISLLEVLSGIKLPREKGRMRFHRLQNVQIALDFLKQRQVKLVNIRNDDITDGNPKLTLGLIWTIILHFQISDIYISGESGDMSAKEKLLLWTQKVTAGYTGIKCTNFSSCWSDGKMFNALIHRYRPDLVDMERVQIQSNRENLEQAFEVAERLGVTRLLDAEDVDVPSPDEKSVITYVSSIYDAFPKVPEGGEGISATEVDSRWQEYQSRVDSLIPWIKQHTILMSDKTFPQNPVELKALYNQYIHFKETEILAKEREKGRIEELYKLLEVWIEFGRIKLPQGYHPNDVEEEWGKLIIEMLEREKSLRPAVERLELLLQIANKIQNGALNCEEKLTLAKNTLQADAAHLESGQPVQCESDVIMYIQECEGLIRQLQVDLQILRDENYYQLEELAFRVMRLQDELVTLRLECTNLYRKGHFTSLELVPPSTLTTTHLKAEPLTKATHSSSTSWFRKPMTRAELVAISSSEDEGNLRFVYELLSWVEEMQMKLERAEWGNDLPSVELQLETQQHIHTSVEELGSSVKEARLYEGKMSQNFHTSYAETLGKLETQYCKLKETSSFRMRHLQSLHKFVSRATAELIWLNEKEEEELAYDWSDNNSNISAKRNYFSELTMELEEKQDVFRSLQDTAELLSLENHPAKQTVEAYSAAVQSQLQWMKQLCLCVEQHVKENTAYFQFFSDARELESFLRNLQDSIKRKYSCDHNTSLSRLEDLLQDSMDEKEQLIQSKSSVASLVGRSKTIVQLKPRSPDHVLKNTISVKAVCDYRQIEITICKNDECVLEDNSQRTKWKVISPTGNEAMVPSVCFLIPPPNKDAIEMASRVEQSYQKVMALWHQLHVNTKSLISWNYLRKDLDLVQTWNLEKLRSSAPGECHQIMKNLQAHYEDFLQDSRDSVLFSVADRLRLEEEVEACKARFQHLMKSMENEDKEETVAKMYISELKNIRLRLEEYEQRVVKRIQSLASSRTDRDAWQDNALRIAEQEHTQEDLQQLRSDLDAVSMKCDSFLHQSPSSSSVPTLRSELNLLVEKMDHVYGLSTVYLNKLKTVDVIVRSIQDAELLVKGYEIKLSQEEVVLADLSALEAHWSTLRHWLSDVKDKNSVFSVLDEEIAKAKVVAEQMSRLTPERNLDLERYQEKGSQLQERWHRVIAQLEIRQSELESIQEVLGDYRACHGTLIKWIEETTAQQEMMKPGQAEDSRVLSEQLSQQTALFAEIERNQTKLDQCQKFSQQYSTIVKDYELQLMTYKAFVESQQKSPGKRRRMLSSSDAITQEFMDLRTRYTALVTLTTQHVKYISDALRRLEEEEKVVEEEKQEHVEKVKELLGWVSTLARNTQGKATSSETKESTDIEKAILEQQVLSEELTTKKEQVSEAIKTSQIFLAKHGHKLSEKEKKQISEQLNALNKAYHDLCDGSANQLQQLQSQLAHQTEQKECRAVAGVIDLGTVEIFPIFKAMQKGLLDQDTGLVLLESQVIMSGLIAPETGENLSLEEGIARNLINPQMYQQLRELQDALALISRLTESRGPLSVVEAIEKRIISETVGLKILEAHLATGGFSLSPSENCINLEEAFHQGLISAWLHSVLESYLRTSKNLIDPNTAEKIGLLDLMQRCIVHQESGFKLLPVKQLAGGMVSLKSGRKVSIFRAVQEGLIDRQVTVRLLEAQLFAGGIVDPRTGHRLTVEEAVRHNLIDQDMACAILIRQLQTGGIIDTVTGQRLTIDEAVSNDLVAAKIALVILESLWSFMGLLWPESGEILPITDALEQGIVSTELAHKILSNRQHIKALFLPATTEILSWKKAIESGILDRDLANNLKSICIPDVMPHMQLADSAEQNINPGAAVLPCSKSHPKATASQSENLLFQLMTHSYINVQNGQRLLLLDKELMETLTSRDEYQTSPPKVVEIGHQRQKTPEGLQESANVKISGTFSSGWTVRLPEFQFSSQNKEYPDREDCTTEKGKKTTVETEDSSVENPEQDLFVEQKERNPNIDALKVINKVKLEVQRQLIGTQREDQTAVSVRENASRGHLLTIPPAEAEGVPLVVDKDVFSVETPKKEHQPLRNTSFTCQNEQAHTLETEYIHDETGGSHIKPQSKKLQVQVKKTLGIKLELKSETDGNVHPLDKKEMLKKTFLAKDDHKESQEAQNIAGGSMMMSEKTDEEDSGREIFLSCSHPLELLEEATLNVLSAQLLDGGIFHEQTGQKLLLNEAISRGIVPSHTAVKLMEKLNMFQGFFDSQTCESLTTEEVINEGLMDEKLLHNVLMADKAISGVLDPRTQTLCSVKDAVTVGLLDKETATRILERQVVTGGIIDLKRGKKVSVTLASTLGLVDVADQPELINLEKASKGRDAEKTVRERLISLQMETTGLIDPDSKAPLTVVQSIDRGLLEREEAVRLLTKQVVDGGIIHHISGMRLSVDNAFRHGLIGEDLAEKLKRVENLNIHQIFNPETKENISLPKAIKLDLITSDLKREIQEVQAFTGNFVDLISGQRLTLAEAKKEGLLTNEAVLSPGMMHGIVDPENCRIVPYSELVKKCKIDIESGQRYLEVIPFSDIKDGVSDKVLTLSQAIQLGKVDFASTLKVLEAQANTGGIIDTATGKRLTLASALEEKLVDENMVRIIASHQVLNGGIVDIFSDQRVTLVEAIEKRLISPELANMIQIDSSEFSDHRAQIEKQEGIEVCALQNEFLGKDMLIACNQTAEMSCNKVEESERLFQVENQSAQEKVKVRVSDGEQAKKSREISLKEFGCKDQRKPRMSSDAKEFISIINPHNLKGKSLGQVSLTHPYSECDFKLKEVARNNMGNDTNEEQEKAVTKIEIISHMKQSTSCLDSEEIRENQGEVILEVQETYCETSGKLPSEQVLQQPMNARVKSKREKREVIVEESIRTCKPAFLSEEKLYQETAIRDEHDSHIKSQPREMTSSEKGKEADTEMGFSITFKIEESSSQVVPQGISVKHLDALTLFSSKQANEGKVNNLSLCLTLKPEENLSREIACGAQSEPFPCMTPRPEGLHYQESDGKAQVTGPSQISKTDKSFQGTTRQETNYQDSWVTSKTKETKHQISSSNECKEKSYQEVSFDPARGLKLEEITVSRPDSKEVRYLEFSDRKDLHHQGSKSDDKLCGTLKSEIATQELTGEKFLEMANPNVAGLEAGSIEDIVTQRGSRVLGSFLPEKLFKGVSQKENTGQQNAIISPTVLETSEEKTVSLTVCSAVKTEKTPQEKLRESPGSEQTPFMTAPEGKGNGGVNPEPFRATQNVFTRQLCLEHDEKLVSYLSLLRNIEMRTKQIQPLELNLAELQDLLCQAKVLERELKDLTTLVSQELECVNQIIISQPQEVPAQLLKALEKDAKNLQKSLSSVSDTWNSRLLHFQNAVEIEKTKVLNQHTQLEGRLQDLRAWVGNKNLILNSKGSNSEIDVDSLNLCLQQYEDLKQPMAERKAQLDALAFDIQFFISEHAQDLSPQQNRQMLRLLNELQRSFQDILEQTAAQVDALQGHLQQMEQEALVKTLQKQQNTCHQQLEDLCSWVGQAERALAGHQGRTTQQDLSALQKNQSDLKDLQDDIQNRATSFATVVKDIEGFMEENQTKLSPRELTALREKLHQAKEQYEALQEETRVAQKELEEAVTSALQQETEKSKAAKELAENKKKIDALLDWVTSVGSSGGQLLTNLPGMEQLSGASLEKGALDTTDGYMGVNQAPEKLDKQCEMMKARHQELLSQQQNFILATQSAQAFLDQHGHNLTPEEQQMLQQKLGELKEQYSTSLAQSEAELKQVQTLQDELQKFLQDHKEFESWLERSEKELENMHKGGSSPETLPSLLKRQGSFSEDVISHKGDLRFVTISGQKVLDMENSFKEGKEPSEIGNLVKDKLKDATERYTALHSKCTRLGSHLNMLLGQYHQFQNSADSLQAWMQACEANVEKLLSDTVASDPGVLQEQLATTKQLQEELAEHQVPVEKLQKVARDIMEIEGEPAPDHRHVQETTDSILSHFQSLSYSLAERSSLLQKAIAQSQSVQESLESLLQSIGEVEQNLEGKQVSSLSSGVIQEALATNMKLKQDIARQKSSLEATREMVTRFMETADSTTAAVLQGKLAEVSQRFEQLCLQQQEKESSLKKLLPQAEMFEHLSGKLQQFMENKSRMLASGNQPDQDITHFFQQIQELNLEMEDQQENLDTLEHLVTELSSCGFALDLCQHQDRVQNLRKDFTELQKTVKEREKDASSCQEQLDEFRKLVRTFQKWLKETEGSIPPTETSMSAKELEKQIEHLKSLLDDWASKGTLVEEINCKGTSLENLIMEITAPDSQGKTGSILPSVGSSVGSVNGYHTCKDLTEIQCDMSDVNLKYEKLGGVLHERQESLQAILNRMEEVHKEANSVLQWLESKEEVLKSMDAMSSPTKTETVKAQAESNKAFLAELEQNSPKIQKVKEALAGLLVTYPNSQEAENWKKIQEELNSRWERATEVTVARQRQLEESASHLACFQAAESQLRPWLMEKELMMGVLGPLSIDPNMLNAQKQQVQFMLKEFEARRQQHEQLNEAAQGILTGPGDVSLSTSQVQKELQSINQKWVELTDKLNSRSSQIDQAIVKSTQYQELLQDLSEKVRAVGQRLSVQSAISTQPEAVKQQLEETSEIRSDLEQLDHEVKEAQTLCDELSVLIGEQYLKDELKKRLETVALPLQGLEDLAADRINRLQAALASTQQFQQMFDELRTWLDDKQSQQAKNCPISAKLERLQSQLQENEEFQKSLNQHSGSYEVIVAEGESLLLSVPPGEEKRTLQNQLVELKNHWEELSKKTADRQSRLKDCMQKAQKYQWHVEDLVPWIEDCKAKMSELRVTLDPVQLESSLLRSKAMLNEVEKRRSLLEILNSAADILINSSEADEDGIRDEKAGINQNMDAVTEELQAKTGSLEEMTQRLREFQESFKNIEKKVEGAKHQLEIFDALGSQACSNKNLEKLRAQQEVLQALEPQVDYLRNFTQGLVEDAPDGSDASQLLHQAEVAQQEFLEVKQRVNSGCVMMENKLEGIGQFHCRVREMFSQLADLDDELDGMGAIGRDTDSLQSQIEDVRLFLNKIHVLKLDIEASEAECRHMLEEEGTLDLLGLKRELEALNKQCGKLTERGKARQEQLELTLGRVEDFYRKLKGLNDATTAAEEAEALQWVVGTEVEIINQQLADFKMFQKEQVDPLQMKLQQVNGLGQGLIQSAGKDCDVQGLEHDMEEINARWNTLNKKVAQRIAQLQEALLHCGKFQDALEPLLSWLADTEELIANQKPPSAEYKVVKAQIQEQKLLQRLLDDRKATVDMLQAEGGRIAQSAELADREKITGQLESLESRWTELLSKAAARQKQLEDILVLAKQFHETAEPISDFLSVTEKKLANSEPVGTQTAKIQQQIIRHKALNEEIVNRKKNVDQAIKNGQALLKQTTGEEVLLIQEKLDGIKTRYADITVTSSKALRTLEQARQLATKFQSTYEELTGWLREVEEELATSGGQSPTGEQIPQFQQRQKELKKEVMEHRLVLDTVNEVSRALLELVPWRAREGLDKLVSDANEQYKLVSDTIGQRVDEIDAAIQRSQQYEQAADAELAWVAETKRKLMALGPIRLEQDQTTAQLQVQKAFSIDIIRHKDSMDELFSHRSEIFGTCGEEQKTVLQEKTESLIQQYEAISLLNSERYARLERAQVLVNQFWETYEELSPWIEETRALIAQLPSPAIDHEQLRQQQEEMRQLRESIAEHKPHIDKLLKIGPQLKELNPEEGEMVEEKYQKAENMYAQIKEEVRQRALALDEAVSQSTQFHDKIEPMLETLENLSSRLRMPPLIPAEVDKIRECISDNKSATVELEKLQPSFEALKRRGEELIGRSQGADKDLAAKEIQDKLDQMVFFWEDIKARAEEREIKFLDVLELAEKFWYDMAALLTTIKDTQDIVHDLESPGIDPSIIKQQVEAAETIKEETDGLHEELEFIRILGADLIFACGETEKPEVRKSIDEMNNAWENLNKTWKERLEKLEDAMQAAVQYQDTLQAMFDWLDNTVIKLCTMPPVGTDLNTVKDQLNEMKEFKVEVYQQQIEMEKLNHQGELMLKKATDETDRDIIREPLTELKHLWENLGEKIAHRQHKLEGALLALGQFQHALEELMSWLTHTEELLDAQRPISGDPKVIEVELAKHHVLKNDVLAHQATVETVNKAGNELLESSAGDDASSLRSRLEAMNQCWESVLQKTEEREQQLQSTLQQAQGFHSEIEDFLLELTRMESQLSASKPTGGLPETAREQLDTHMELYSQLKAKEETYNQLLDKGRLMLLSRDDSGSGSKTEQSVALLEQKWHVVSSKMEERKSKLEEALNLATEFQNSLQEFINWLTLAEQSLNIASPPSLILNTVLSQIEEHKVFANEVNAHRDQIIELDQTGNQLKFLSQKQDVVLIKNLLVSVQSRWEKVVQRSIERGRSLDDARKRAKQFHEAWKKLIDWLEDAESHLDSELEISNDPDKIKLQLSKHKEFQKTLGGKQPVYDTTIRTGRALKEKTLLPEDSQKLDNFLGEVRDKWDTVCGKSVERQHKLEEALLFSGQFMDALQALVDWLYKVEPQLAEDQPVHGDLDLVMNLMDAHKVFQKELGKRTGTVQVLKRSGRELIENSRDDTTWVKGQLQELSTRWDTVCKLSVSKQSRLEQALKQAEVFRDTVHMLLEWLSEAEQTLRFRGALPDDTEALQSLIDTHKEFMKKVEEKRVDVNSAVAMGEVILAVCHPDCITTIKHWITIIRARFEEVLTWAKQHQQRLETALSELVANAELLEELLAWIQWAETTLIQRDQEPIPQNIDRVKALIAEHQTFMEEMTRKQPDVDRVTKTYKRKNIEPTHAPFIEKSRSGGRKSLSQPTPPPMPILSQSEAKNPRINQLSARWQQVWLLALERQRKLNDALDRLEELKEFANFDFDVWRKKYMRWMNHKKSRVMDFFRRIDKDQDGKITRQEFIDGILASKFPTTKLEMTAVADIFDRDGDGYIDYYEFVAALHPNKDAYRPTTDADKIEDEVTRQVAQCKCAKRFQVEQIGENKYRFGDSQQLRLVRILRSTVMVRVGGGWMALDEFLVKNDPCRARGRTNIELREKFILPEGASQGMTPFRSRGRRSKPSSRAASPTRSSSSASQSNHSCTSMPSSPATPASGTKVIPSSGSKLKRPTPTFHSSRTSLAGDTSNSSSPASTGAKTNRADPKKSASRPGSRAGSRAGSRASSRRGSDASDFDLLETQSACSDTSESSAAGGQGNSRRGLNKPSKIPTMSKKTTTASPRTPGPKR

SEQ ID NO: 50077 - protein, 1004 aa, Homo sapiens
MRDFGFGVLQTAPLRSSSPGPLFCGEAYGPYAVGSVNPLPSATPFGPLSPPPLPVTGFLEAASPFSVPLGGGAGSPAAAASSSSPFLAHQQTMQDELLLGLTQQPARPLSGAAATEKLPDHHPGGGTIAGVTHLLPSQDFKPSLHHPSSSSASSCCCCRTSSPQDFSKRQQQQLSSQKRKEFSPPHLPHPPDSKPPPPPPPLHCPGRFSPPPPPAGPLLQPAQLAQRQQQQPPQQFSLLHQQHLSPQDFAPRQRPADLPPLPQLPPSPPAAPRRRHGGAGSPRKTPAAGEGSAAESPNAGLASSTPVNPAPGSMESPNHPLLNSPSNLLPGGALGAGAFSSLQSPDLPHPGGGGGGGGGGPPGGGGGGGSASPPPLPGFGTPWSVQTASPPPQPQQPPPTQPQQQPPPPQQPPQPQPQPPGSSATTPGGGSGGSLSAMPPPSPDSENGFYPGLPSSMNPAFFPSFSPVSPHGCTGLSVPTSGGGGGGFGGPFSATAVPPPPPPAMNIPQQQPPPPAAPQQPQSRRSPVSPQLQQQHQAAAAAFLQQRNSYNHHQPLLKQSPWSNHQSSGWGTGSMSWGAMHGRDHRRTGNMGIPGTMNQISPLKKPFSGNVIAPPKFTRSTPSLTPKSWIEDNVFRTDNNSNTLLPLQDRSRMYDSLNMHSLENSLIDIMRAEHDPLKGRLSYPHPGTDNLLMLNARSYGRRRGRSSLFPIDDGLLDDGHSDQVGVLNSPTCYSAHQNGERIERFSRKVFVGGLPPDIDEDEITASFRRFGPLVVDWPHKAESKSYFPPKGYAFLLFQEESSVQALIDACIEEDGKLYLCVSSPTIKDKPVQIRPWNLSDSDFVMDGSQPLDPRKTIFVGGVPRPLRAVELAMIMDRLYGGVCYAGIDTDPELKYPKGAGRVAFSNQQSYIAAISARFVQLQHGDIDKRVEVKPYVLDDQMCDECQGARCGGKFAPFFCANVTCLQYYCEFCWANIHSRAGREFHKPLVKEGADRPRQIHFRWN

SEQ ID NO: 50078 - protein, 606 aa, Homo sapiens
MSRIEKMSILGVRSFGIEDKDKQIITFFSPLTILVGPNGAGKTTIIECLKYICTGDFPPGTKGNTFVHDPKVAQETDVRAQIRLQFRDVNGELIAVQRSMVCTQKSKKTEFKTLEGVITRTKHGEKVSLSSKCAEIDREMISSLGVSKAVLNNVIFCHQEDSNWPLSEGKALKQKFDEIFSATRYIKALETLRQVRQTQGQKVKEYQMELKYLKQYKEKACEIRDQITSKEAQLTSSKEIVKSYENELDPLKNRLKEIEHNLSKIMKLDNEIKALDSRKKQMEKDNSELEEKMEKVFQGTDEQLNDLYHNHQRTVREKERKLVDCHRELEKLNKESRLLNQEKSELLVEQGRLQLQADRHQEHIRARDSLIQSLATQLELDGFERGPFSERQIKNFHKLVRERQEGEAKTANQLMNDFAEKETLKQKQIDEIRDKKTGLGRIIELKSEILSKKQNELKNVKYELQQLEGSSDRILELDQELIKAERELSKAEKNSNVETLKMEVISLQNEKADLDRTLRKLDQEMEQLNHHTTTRTQMEMLTKDKADKDEQIRKIKSRHSDELTSLLGYFPNKKQLEDWLHSKSKEINQTRDRLAKLNPSKHLAEA

SEQ ID NO: 50079 - protein, 524 aa, Homo sapiens
MRTPQLALLQVFFLVFPDGVRPQPSSSPSGAVPTSLELQRGTDGGTLQSPSEATATRPAVPGLPTVVPTLVTPSAPGNRTVDLFPVLPICVCDLTPGACDINCCCDRDCYLLHPRTVFSFCLPGSVRSSSWVCVDNSVIFRSNSPFPSRVFMDSNGIRQFCVHVNNSNLNYFQKLQKVNATNFQALAAEFGGESFTSTFQTQSPPSFYRAGDPILTYFPKWSVISLLRQPAGVGAGGLCAESNPAGFLESKSTTCTRFFKNLASSCTLDSALNAASYYNFTVLKVPRSMTDPQNMEFQVPVILTSQANAPLLAGNTCQNVVSQVTYEIETNGTFGIQKVSVSLGQTNLTVEPGASLQQHFILRFRAFQQSTAASLTSPRSGNPGYIVGKPLLALTDDISYSAINCTSCCLIPVSLEIQVLWAYVGLLSNPQAHVSGVRFLYQCQSIQDSQQVTEVSLTTLVNFVDITQKPQPPRGQPKMDWKWPFDFFPFKVAFSRGVFSQKCSVSPILILCLLLLGVLNLETM

SEQ ID NO: 50080 - protein, 372 aa, Homo sapiens
MLMASTTSAVPGHPSLPSLPSNSSQERPLDTRDPLLARAELALLSIVFVAVALSNGLVLAALARRGRRGHWAPIHVFIGHLCLADLAVALFQVLPQLAWKATDRFRGPDALCRAVKYLQMVGMYASSYMILAMTLDRHRAICRPMLAYRHGSGAHWNRPVLVAWAFSLLLSLPQLFIFAQRNVEGGSGVTDCWACFAEPWGRRTYVTWIALMVFVAPTLGIAACQVLIFREIHASLVPGPSERPGGRRRGRRTGSPGEGAHVSAAVAKTVRMTLGRPLCYSCCWPASTAAPTPGSMHLSAAACPQSCEACSAVPGDAPHPAWVPKMSPAPPPAPPWPRTLHREELLGVLPLEALRSSAAFLGLVLGATGRGT

SEQ ID NO: 50081 - protein, 36 aa, Homo sapiens
AAAAAFGESAGQVGGAAEADVRGAEPPPCLLRGPLF

SEQ ID NO: 50082 - protein, 46 aa, Homo sapiens
RLPPSGSKPVAASTCSGKKTPRTGRHGANKENLELNGSILSGQPSS

SEQ ID NO: 50083 - protein, 137 aa, Homo sapiens
  MOD_RES (1)..(1): Any amino acid
XAAAPIHDADAQESSLGLTGLQSLLQGFSRLFLKVPRMEEKEALVPIQKATDSFHTELHPRVAFWIIKLPRRRSHQDALEGGHWLSEKRHRLQAIRDGLRKGTHKDVLEEGTESSSHSRLSPRKTHLLYILRPSRQL

SEQ ID NO: 50084 - protein, 75 aa, Homo sapiens
MSLLQSALDFLAGPGSLGGASGRDQSDFVGQTVELGELRLRVRRVLAEGGFAFVYEAQDVGSGREYALKGSWWNF

SEQ ID NO: 50085 - protein, 43 aa, Homo sapiens
MAYSTVQRVALASGLVLALSLLLPKAFLSRGKRQEPPPTPEEN

SEQ ID NO: 50086 - protein, 134 aa, Homo sapiens
RRCWGPPLAHGARRGRPSPQWRALARLGWEDCRDSRVREKPPWRVLFFGTDQFAREALRALHAARENKEEELIDKLEVVTMPSPSPKGLPVKQYAVQSQLPVYEWPDVGSGEYDVGVVASFGRLLNEALILKFP

SEQ ID NO: 50087 - protein, 60 aa, Homo sapiens
MDVRFYPAAAGDPASLDFAQCLGYYGYSKHFACRLESVLFIAVCAQPRKAPIPSTQPPST

SEQ ID NO: 50088 - protein, 242 aa, Homo sapiens
MLQEELIAQKKREIEAKMEQKAKQNQVASPQPPHPGEITNAHNSSCISNKFANDGSFLQQFLKLQKAQTSTDAPTSAPSAPPSTPTPSAGKRSLLISRRTGLGLASLPGPVKSYSHAKQLPVAHRPSVFQSPDEDEEEDYEQWLEIKVSPPEGAETRKVIEKLARFVAEGGPELEKVAMEDYKDNPAFAFLHDKNSREFLYYRKKVAEIRKEAQKSQAASQKVSPPEDEEVKNLAEKLARFI

SEQ ID NO: 50089 - protein, 261 aa, Homo sapiens
  MOD_RES (1)..(1): Any amino acid
XLMDLAGNKAAALDIAMIKMVAPSMASRVIDRAIQIFINNEWHDAVSRKTFPTVNPSTGEVICQVAEGDKEDVDKAVKAARAAFQLGSPWRRMDASHRGRLLNRLADLIERDRTYLAALETLDNGKPYVISYLVDLDMVLKCLRYYAGWADKYHGKTIPIDGDFFSYTRHEPVGVCGQIIPWNFPLLMQAWKLGPALATGNVVVMKVAEQTPLTALYVANLIKEAGFPPGVVNIVPGFGPTAGAAIASHEDVDKVAFTGST

SEQ ID NO: 50090 - protein, 81 aa, Homo sapiens
MPRRAGSGQLPLPRGWEEARDYDGKVFYIDHNTRRTSWIDPRDRLTKPLSFADCVGDELPWGWEAGFDPQIGVYYIDHINS

SEQ ID NO: 50091 - protein, 97 aa, Homo sapiens
MAEYLASIFGTEKDKVNCSFYFKIGVCRHGDRCSRLHNKPTFSQPCPLSSGPAPFKFCADHSAAQPVPESTEHSPNCRRITLRCSQNCRRSMGRLKR

SEQ ID NO: 50092 - protein, 182 aa, Homo sapiens
MSPRTGCGPGRGMGATVGEDGQSPLPRQRFPVPDSVLNMFPGTEEGPEDDSTKHGGRVRTFPHERGNWATHVYVPYEAKEEFLDLLDVLLPHAQTYVPRLVRMKVFHLSLSQSVVLRHHWILPFVQALKARMTSFHRFFFTANQVKIYTNQEKTRTFIGLEVTSGHAQFLDLVSEVDRVMEE

SEQ ID NO: 50093 - protein, 380 aa, Homo sapiens
  MOD_RES (1)..(1): Any amino acid
XLCLPIRSANIPDPLTPSESTQELHASDMPEYSVTNEFCRKHFLIGILLREVGFALQEDQDVRHLALAVLKNLMAKHSFDDRYREPRKQAQIASLYMPLYGMLLDNMPRIYLKDLYPFTVNTSNQGSRDDLSTNGGFQSQTAIKHANSVDTSFSKDVLNSIAVNHADSRASLASLDSNPSTNEKSSEKTDNCEKIPRPLSLIGSTLRFDKLDQAETRSLLMCFLHIMKTISYETLIAYWQRAPSPEVSDFFSILDVCLQNFRYLGKRNIIRKIAAAFKFVQSTQNNGTLKGSNPSCQTSGLLSQWMHSTSSHEGHKQHRSQTLPIIRGKNALSNPKLLQMLDNTMTSNSNEIDIVHHVDTEANIATEVCLTILDLLSLFT

SEQ ID NO: 50094 - protein, 38 aa, Homo sapiens
MASSEVARHLLFQSHMATKTTCMSSQGSDDEQILPTNS

SEQ ID NO: 50095 - protein, 53 aa, Homo sapiens
MDSLAESRWPPGLAVMKTIDDLLRCGICFEYFNIAMIIPQCSHNYCHRAGSEK

SEQ ID NO: 50096 - protein, 62 aa, Homo sapiens
MRLLSFVVLALFAVTQAEEGARLLASKSLLNRYAVEGRDLTLQYNIYNVGSRHVHEEKLRQG

SEQ ID NO: 50097 - protein, 133 aa, Homo sapiens
  MOD_RES (1)..(1): Any amino acid
XCCLARRWNQLDRSDVAVPLTLHGYSDLDSEEPGTGGAASRRGQPPAGARDSGRDVPLTQYQRDFGLWTTPAGPKDPPPGRGPGAGGRRGKSSAQSSAPPAPGARGVYVLPIGDADAAAAVTTSYRNSRLGLE

SEQ ID NO: 50098 - protein, 136 aa, Homo sapiens
MESRVADAGTGETARAAGGSPAVGCTTRGPVVSAPLGAARWKLLRQVLKQKHLDDCLRHVSVRRFESFNLFSVTEGKERETEEEVGAWVQYTSIFCPEYSISLRHNSGSLNVEDVLTSFDNTGNVYDVSLYCPCWS

SEQ ID NO: 50099 - protein, 66 aa, Homo sapiens
MAANPKPGSCQDTHPLTNDSAHCGIVINGILLSHEKEQIPDKHHNMNELQKQCSESKKLGRKELVP

SEQ ID NO: 50100 - protein, 198 aa, Homo sapiens
QEEDDSDEEVAPENFFSLPEKAEPPGVEPYPYPIPTVPEELPPGTEPEPAFQDDAANAPLEFKMAAGSSGAPWMPKPGDDYSYNQFSTYGDANAAGAYYQFKRLQGKRNRGREEINFVEIKGDDQLSGAQQWMTKSLTEEKTMKSFSKKKGEQPTGQQRRKHQITYLIHQAKERELELKNTWSENKLSRRQTQAKYGF

SEQ ID NO: 50101 - protein, 109 aa, Homo sapiens
MSSKGSSTDGRTDLANGSLSSSPEEMSGAEEGRETSSGIEVEASDLSLSLTGDDGGPNRTSTESRGTDTESSGEDKDSDSMEDTGHYSINDENRVHDRSEEEEEEEEEE

SEQ ID NO: 50102 - protein, 395 aa, Homo sapiens
MEEAEERHQVEIKVYKQKVKHLLYEHQNNLTEMKAEGTVVMKLAQKEHRIQESVLRKDMRALKVELKEQELASEVVVKNLRLKHTEEITRMRNDFERQVREIEAKYDKKMKMLRDELDLRRKTELHEVEERKNGQIHTLMQRHEEAFTDIKNYYNDITLNNLALINSLKEQMEDMRKKEDHLEREMAEVSGQNKRLADPLQKAREEMSEMQKQLANYERDKQILLCTKARLKVREKELKDLQWEHEVLEQRFTKVQQERDELYRKFTAAIQEVQQKTGFKNLVLERKLQALSAAVEKKEVQFNEVLAASNLDPAALTLVSRKLEDVLESKNSTIKDLQYELAQVCKAHNDLLRTYEAKLLAFGIPLDNVGFKPLETAVIGQTLGQGPAGLVGTPT

SEQ ID NO: 50103 - protein, 54 aa, Homo sapiens
  MOD_RES (1)..(1): Any amino acid
XLLLLGGAWAGNTQYAWETTAYRIKMAQSKKYLWFSPSHTPATTAAMWRTTTMI

SEQ ID NO: 50104 - protein, 49 aa, Homo sapiens
MKILLVFDFDNTIIDDNSDTWIVQCAPNKKLPIELRDSYRKGFWTEFMG

SEQ ID NO: 50105 - protein, 129 aa, Homo sapiens
MAVLSKEYGFVLLTGAASFIMVAHLAINVSKARKKYKVEYPIMYSTDPENGHIFNCIQRAHQNTLEVYPPFLFFLAVGGVYHPRIASGLGLAWIVGRVLYAYGYYTGEVSNRLASLGHTGRRRIVLGHT

SEQ ID NO: 50106 - protein, 2071 aa, Homo sapiens
MSVKEAGSSGRREQAAYHLHIYPQLSTTESQASCRVTATKDSTTSDVIKDAIASLRLDGTKCYVLVEVKESGGEEWVLDANDSPVHRVLLWPRRAQDEHPQEDGYYFLLQERNADGTIKYVHMQLVAQATATRRLVERGLLPRQQADFDDLCNLPELTEGNLLKNLKHRFLQQKIYTYAGSILVAINPFKFLPIYNPKYVKMYENQQLGKLEPHVFALADVAYYTMLRKRVNQCIVISGESGSGKTQSTNFLIHCLTALSQKGYASGVERTILGAGPVLEAFGNAKTAHNNNSSRFGKFIQVSYLESGIVRGAVVEKYLLEKSRLVSQEKDERNYHVFYYLLLGVSEEERQEFQLKQPEDYFYLNQHNLKIEDGEDLKHDFERLKQAMEMVGFLPATKKQIFAVLSAILYLGNVTYKKRATGREEGLEVGPPEVLDTLSQLLKVKREILVEVLTKRKTVTVNDKLILPYSLSEAITARDSMAKSLYSALFDWIVLRINHALLNKKDVEEAVSCLSIGVLDIFGFEDFERNSFEQFCINYANEQLQYYFNQHIFKLEQEEYQGEGITWHNIGYTDNVGCIHLISKKPTGLFYLLDEESNFPHATSQTLLAKFKQQHEDNKYFLGTPVMEPAFIIQHFAGKVKYQIKDFREKNMDYMRPDIVALLRGSDSSYVRELIGMDPVAVFRWAVLRAAIRAMAVLREAGRLRAERAEKAAGMSSPGAQSHPEELPRGASTPSEKLYRDLHNQMIKSIKGLPWQGEDPRSLLQSLSRLQKPRAFILKSKGIKQKQIIPKNLLDSKSLKLIISMTLHDRTTKSLLHLHKKKKPPSISAQFQTSLNKLLEALGKAEPFFIRCIRSNAEKKELCFDDELVLQQLRYTGMLETVRIRRSGYSAKYTFQDFTEQFQVLLPKDAQPCREVISTLLEKMKIDKRNYQIGKTKVFLKETERQALQETLHREVVRKILLLQSWFRMVLERRHFLQMKRAAVTIQACWRSYRVRRALERTQAAVYLQASWRGYWQRKLYRHQKQSIIRLQSLCRGHLQRKSFSQMISEKQKAEEKEREALEAARAGAEEGGQGQAAGGQQVAEQGPEPAEDGGHLASEPEVQPSDRSPLEHSSPEKEAPSPEKTLPPQKTVAAESHEKVPSSREKRESRRQRGLEHVKFQNKHIQSCKEESALREPSRRVTQEQGVSLLEDKKESREDETLLVVETEAENTSQKQPTEQPQAMAVGKVSEETEKTLPSGSPRPGQLERPTSLALDSRVSPPAPGSAPETPEDKSKPCGSPRVQEKPDSPGGSTQIQRYLDAERLASAVELWRGKKLVAAASPSAMLSQSLDLSDRHRATGAALTPTEERRTSFSTSDVSKLLPSLAKAQPAAETTDGERSAKKPAVQKKKPGDASSLPDAGLSPGSQVDSKSTFKRLFLHKTKDKKYSLEGAEELENAVSGHVVLEATTMKKGLEAPSGQQHRHAAGEKRTKEPGGKGKKNRNVKIGKITVSEKWRESVFRQITNANELKYLDEFLLNKINDLRSQKTPIESLFIEATEKFRSNIKTMYSVPNGKIHVGYKDLMENYQIVVSNLATERGQKDTNLVLNLFQSLLDEFTRGYTKNDFEPVKQSKAQKKKRKQERAVQEHNGHVFASYQVSIPQSCEQCLSYIWLMDKALLCSVCKMTCHKKCVHKIQSHCSYTYGRKGEPGVEPGHFGVCVDSLTSDKASVPIVLEKLLEHVEMHGLYTEGLYRKSGAANRTRELRQALQTDPAAVKLENFPIHAITGVLKQWLRELPEPLMTFAQYGDFLRAVELPEKQEQLAAIYAVLEHLPEANHNSLERLIFHLVKVALLEDVNRMSPGALAIIFAPCLLRCPDNSDPLTSMKDVLKITTCVEMLIKEQMRKYKVKMEEISQLEAAESIAFRRLSLLRQNANKSPKTRDIQEEELEVLLEEEAAGGDEDREKEILIERIQSIKEEKEDITYRLPELDPRGSDEENLDSETSASTESLLEERAGRGASEGPPAPALPCPGAPTPSPLPTVAAPPRRRPSSFVTVRVKTPRRTPIMPTANIKLPPGLPSHLPRWAPGA

SEQ ID NO: 50107 - protein, 118 aa, Homo sapiens
MFEEKASSPSGKMGGEEKPIGAGEEKQKEGGKKKNKEGSGDGGRAELNPWPEYIYTRLEMYNILKAEHDSILAEKAEKDSKPIKVTLPDGKQVDAESWKTTPYQIACGIRPGRQHRYC

SEQ ID NO: 50108 - protein, 618 aa, Homo sapiens
MPTTHQIHVEQSISLLLNFLLAAFDPEGHGKISVFAVKMALATLCGGKIMDKLRYIFSMISDSSGVMVYGRYDQFLREVLKLPTAVFEGPSFGYTEQSARSCFSQQKKVTLNGFLDTLMSDPPPQCLVWLPLLHRLANVENVFHPVECSYCHSESMMGFRYRCQQCHNYQLCQDCFWRGHAGGSHSNQHQMKEYTSWKSPAKKLTNALSKSLSCASSREPLHPMFPDQPEKPLNLAHIVPPRPVTSMNDTLFSHSVPSSGSPFITRRLPEGISASSPVAEEHSLIKLYVNQLDHGARMLESSNRLDEEHRLIARYAARLAAESSSSQPPQQRSAPDISFTIDANKQQRQLIAELENKNREILQEIQRLRLEHEQASQPTPEKAQQNPTLLAELRLLRQRKDELEQRMSALQESRRELMVQLEGLMKLLKTQGAGSPRSSPSHTISRPIPMPIRSASACSTPTHTPQDSLTGVGGDVQEAFAQSSRRNLRNDLLVAADSITNTMSSLVKELNSEVGSETESNVDSEFARTQFEDLVPSPTSEKAFLAQIHARKPGYIHSGATTSTMRGDMVTEDADPYVQPEDENYENDSVRQLENELQMEEYLKQKLQDEAYQVSLQG

SEQ ID NO: 50109 - protein, 149 aa, Homo sapiens
MKGSNRNKDHSAEGEGVGKRPKRKCLQWHPLLAKKLLDFSEEEEEEDEEEDIDKVQLLGADGLEQDVGETEDDESPEQRARRPMNAFLLFCKRHRSLVRQEHPRLDNRGATKILADWWAVLDPKEKQKYTDMAKEYKDAFMKANPGYKW

SEQ ID NO: 50110 - protein, 219 aa, Homo sapiens
MTLAASSQRSQIIRSKFRSVLQLRIHRRNQEQNPVQAPISQQSSLAPWPALRHPGAPLSTQPCSSRPGLLPAGLSGSFTVSPVSDPDPWISASDPPLAPALPSGTAPFLFSPGVLLPEPEYCPPWRSPKKESPKISQRWRESKPRGNLTYHQYMPPEPRQGSRADPQAEGSALGPPGPSLWEGTDSQQPHPRMKPSPLTPCPPGVPSPSPPPHKLELQT

SEQ ID NO: 50111 - protein, 75 aa, Homo sapiens
SFIFLCSFLMLNLFVAVIMDNFEYLTRDSSILGPHHLDEYVRVWAEYDPAACGFCGWTCPSQMTTPSTSIPPSWL

SEQ ID NO: 50112 - protein, 98 aa, Homo sapiens
MSVLSPEIKCETSKFTRSSFGSCLIFESSWKKAVLETQKIKKEYTTAFGLEELKECIKMPYLPGLQSCQKSVSSTPLEVPKRLPRADAEVSAVRFWLQ

SEQ ID NO: 50113 - protein, 15 aa, Homo sapiens
  MOD_RES (1)..(1): Any amino acid
XRQGNLRLLHLEVNM

SEQ ID NO: 50114 - protein, 109 aa, Homo sapiens
IVDGPTVWLLQLARDRSAEGRALYAVAQRCLPSNEDKEEFPLCALARYCLRAPFGRNLIFNSCGEQGFRGWEVEHGGNGWAIEKNLTPVPGAPSQTCFVTSFEEEVSPY

SEQ ID NO: 50115 - protein, 128 aa, Homo sapiens
MTMPVNGAHKDADLWSSHDKMLAQPLKDSDVEVYNIIKKESNRQRVGLELIASENFASRAVLEALGSCLNNKYSEGYPGQRLPCKLCCVHCPGGTPWAHHGPGPSGWGPPDPWVHDRQEENLCHVHLL

SEQ ID NO: 50116 - protein, 185 aa, Homo sapiens
  MOD_RES (1)..(1): Any amino acid
XSWGLRCMQCKTNGDCRVEECALGQDLCRTTIVRLWEGRAVTYSRSRYLECISCGSSDMSCERGRHQSLQCRSPEEQCLDVVTHWIQEGEEGRPKDDRHLRGCGYLPGCPGSNGFHNNDTFHFLKCCNTTKCNEGPILELENLPQNGRQCYSCKGNSTHGCSSEETFLIDCRGPMNQCLVATGTH

SEQ ID NO: 50117 - protein, 61 aa, Homo sapiens
MTAPVPAPRILLPLLLLLLLTPPPGGLQMVPLPWSPVAQAGLKLLEGTDISWTPAAGPARG

SEQ ID NO: 50118 - protein, 53 aa, Homo sapiens
MCCEKWSRVAEMFLFIEEREDCKILCLCSRAFVERPGDRRRGRWLFLWYCRIT

SEQ ID NO: 50119 - protein, 151 aa, Homo sapiens
MDVFMKGLSKAKEGVVAAAEKTKQGVAEAAGKTKEGVLYVGSKTKEGVVHGVATVAEKTKEQVTNVGGAVVTGVTAVAQKTVEGAGSIAAATGFVKKDQLGKNEEGAPQEGILEDMPVDPDNEAYEMPSEPPCCEEAQATWRGHAMCTCSS

SEQ ID NO: 50120 - protein, 191 aa, Homo sapiens
  MOD_RES (1)..(1): Any amino acid
XQSKVFLDDLPEDFSDALDEYNMKIMEDFTTFLRIVSKLADMNQEYQLPLSKIKFTGKECEDSQLVSHLMSCKEGRVAISPFVCLSGNFDDDLLRLETPNHVTLGTIGVNRSQAPVLLSQKFDNRGRKMSLNAYALDFYKHGSLIGLVQDNRMNEGDAYYLLKDFALTIKSIRCVIYLNIDFRFFNNLFII

SEQ ID NO: 50121 - protein, 250 aa, Homo sapiens
  MOD_RES (1)..(1): Any amino acid
XIAAEKLVPKPPPAKPSRPRPKSRISRYRTSSAQRLKRQKQANAQQAELSQAALEEGGSNSLVTPTEAGSLDSSGENRPLTGSDPTVVSITGSHVNRAASKYPKTKKYLVTEWLNDKAEKQECPVECPLRITTDPTVLATTLNMLPGLIHSPLICTTPKHYIRFGSPFIPERRRRPLLPDGTFSSCKKRWIKQALEEGMTQTSSVPQETRTQHLYQSNENSSSSSICKDNAEEERDLKSGISFPRTTKKD

SEQ ID NO: 50122 - protein, 66 aa, Homo sapiens
MAWPNVFQRGSLLSQFSHHHVVVFLLTFFSYSLLHASRKTFSNVKVSISEQWTPSAFNTSVELPVE

SEQ ID NO: 50123 - protein, 180 aa, Homo sapiens
LAREWHKTTKMSAAGTYAWMAPEVIRLSLFSKSSDVWSFGVLLWELLTGEVPYREIDALAVAYGVAMNKLTLPIPSTCPEPFARLLEECWDPDPHGRPDFGSILKRLEVIEQSALFQMPLESFHSLQEDWKLEIQHMFDDLRTKEKALSIRSQSRPLQLWISGKDPMGPAPLQAPASSPG

SEQ ID NO: 50124 - protein, 206 aa, Homo sapiens
MAAQQRDCGGAAQLAGPAAEADPLGRFTCPVCLEVYEKPVQVPCGHVFCSACLQECLKPKKPVCGVCRSALAPGVRAVELERQIESTETSCHGCRKNFFLSKIRSHVATCSKYQNYIMEGVKATIKDASLQPRNVPNRYTFPCPYCPEKNFDQEGLVEHCKLFHSTDTKSVVMSRVRACYLSHVTELPLHIKREIYDSCTLPVQQT

SEQ ID NO: 50125 - protein, 207 aa, Homo sapiens
MERAMEQLNRLTRSLRRARTVELPEDNETAVYTLMPMVMADQHRSVSELLSNSKFDVNYAFGRVKRSLLHIAANCGSVECLVLLLKKGANPNYQDISGCTPLHLAARNGQKKCMSKLLEYSADVNICNNEGLTATVQCLLDSGADINRPNVSGATPLYFACSHGQRDTAQILLLRGAKYLPDKNGVTPLDLCVQGGYGETCEVLIQY

SEQ ID NO: 50126 - protein, 27 aa, Homo sapiens
MMAADIPRVTTPLSSLVQVPQEEDRQE

SEQ ID NO: 50127 - protein, 122 aa, Homo sapiens
MSFDGDDFDDVEEDEGLDDLENAEEEGQENVEILPSGERPQANQKRITTPYMTKYERARVLGTRALQIAMCAPVMVELEGETDPLLIAMKELKARKIPIIIRRYLPDGSYEDWGVDELIITD

SEQ ID NO: 50128 - protein, 499 aa, Homo sapiens
MVACRAIGILSRFSAFRILRSRGYICRNFTGSSALLTRTHINYGVKGDVAVVRINSPNSKVNTLSKELHSEFSEVMNEIWASDQIRSAVLISSKPGCFIAGADINMLAACKTLQEVTQLSQEAQRIVEKLEKSTKPIVAAINGSCLGGGLEVAISCQYRIATKDRKTVLGTPEVLLGALPGAGGTQRLPKMVGVPAALDMMLTGRSIRADRAKKMGLVDQLVEPLGPGLKPPEERTIEYLEEVAITFAKGLADKKISPKRDKGLVEKLTAYAMTIPFVRQQVYKKVEEKVRKQTKGLYPAPLKIIDVVKTGIEQGSDAGYLCESQKFGELVMTKESKALMGLYHGQVLCKKNKFGAPQKDVKHLAILGAGLMGAGIAQVSVDKGLKTILKDATLTALDRGQQQVFKGLNDKVKKKALTSFERDSIFSNLTGQLDYQGFEKADMVIEAVFEDLSLKHRVLKEVEARQGLTLSPRLECSGMITAHCNLELLGSSEPLTSAS

SEQ ID NO: 50129 - protein, 167 aa, Homo sapiens
MDADKEKDLQKFLKNVDEISNLIQEMNSDDPVVQQKAVLETEKRLLLMEEDQEEDECRTTLNKTMISPPQTAMKSAEEINSEAFLASVEKDAKERAKRRRENKVLADALKEKGNEAFAEGNYETAILRYSEGLEKLKDMKVLYTNRAQAYMKLEDYEKALVDCEWAL

SEQ ID NO: 50130 - protein, 153 aa, Homo sapiens
MATMIPPVKLKWLEHLNSSWITEDSESIATREGVAVLYSKLVSNKEVVPLPQQVLCLKGPQLPDFERESLSSDEQDHYLDALLSSQLALAKMVCSDSPFAGALRKRLLVLQRVFYALSNKYHDKGKVKQQQHSPESSSGSADVHSVSERPRSS

SEQ ID NO: 50131 - protein, 26 aa, Homo sapiens
MGMACLTMTEMEGTSTSSIYQNGDIS

SEQ ID NO: 50132 - protein, 189 aa, Homo sapiens
DSSWQLFTVQVQTEAIGEGSLEPSPQSQAEDGRSQAAVGAVPEGAWKDTAQLHKSEEAVSVGQKRVLRYYLFQGQRYIWIETQQAFYQVSLLDHGRSCDDVHRSRHGLSLQDQMVRKAIYGPNVISIPVKSYPQLLVDEAFSIALWLADHYYWYALCIFLISSISICLSLYKTRKQSQTLRDMVKLSMR

SEQ ID NO: 50133 - protein, 208 aa, Homo sapiens
MGVRHPPCSHRLLAVCALVSLATAALLGHILLHDFLLVPRELSGSSPVLEETHPAHQQGASRPGPRDAQAHPGRPRAVPTQCDVPPNSRFDCAPDKAITQEQCEARGCCYIPAKQGLQGAQMGQPWCFFPPSYPSYKLENLSSSEMGYTATLTRTTPTFFPKDILTLRLDVMMETENRLHFTIKDPANRRYEVPLETPHVHSRAPSPL

SEQ ID NO: 50134 - protein, 65 aa, Homo sapiens
MSTVHEILCKLSLEGDHSTPPSAYGSVKAYTNFDAERDALNIETAIKTKGVDEVTIVNILTNRSN

SEQ ID NO: 50135 - protein, 527 aa, Homo sapiens
MAMSLPGSRRTSAGSRSGGTLGRSGLAVFAQCPQLPASQNEHLPLLPASRRTSPPVSVRDAYGTSSLSSSSNSGSYKGSDSSPTPRRSMKYTLCSDNHGIKPPTPEQYLTPLQQKEVCIRHLKARLKDTQDRLQDRDTEIDDLKTQLSRMQEDWIEEECHRVEAQLALKEARKEIKQLKQVIDTVKNNLIDKDKGLQKYFVDINIQNKKLETLLHSMEVAQNGMAKEDGTGESAGGSPARSLTRSSTYTKLSDPAVCGDRQPGDPSSGSAEDGADSGFAAADDTLSRTDALEASSLLSSGVDCGTEETSLHSSFGLGPRFPASNTYEKLLCGMEAGVQASCMQERAIQTDFVQYQPDLDTILEKVTQAQVCGTDPESGDRCPELDAHPSGPRDPNSAVVVTVGDELEAPEPITRGPTPQRPGANPNPGQSVSVVCPMEEEEEAAVAEKEPKSYWSRHYIVDLLAVVVPAVPTVAWLCRSQRRQGQPIYNISSLLRGCCTVALHSIRRISCRSLSQPSPSPAGGGSQL

SEQ ID NO: 50136 - protein, 164 aa, Homo sapiens
  MOD_RES (1)..(1): Any amino acid
XSSKTMNLCSKCFADFQKKQPDDDSAPSTSNSQSDLFSEETTSDNNNTSITTPTLSPSQQPLPTELNVTSPSKEECGPCTDTAHVSLITPTKRSCGTDSQSENEASPVKRPRLLENTERSEETSRSKQKSRRRCFQCQTKLELVQQELGSCRCGVSLERDVWHL

SEQ ID NO: 50137 - protein, 128 aa, Homo sapiens
MREGKRGPPCILSFRGTLERVEAQWELEVGPLGGGSVDRQRPAGRRKDARTEAQGVRPRAEESLVGPGPRPVPSPAGRPGQHHGRRPGSPSPPGRGLLDSEAPGRFAQGLLRLRVQAPCPAGSGGPCP

SEQ ID NO: 50138 - protein, 90 aa, Homo sapiens
MDSFKVVLEGPAPWGFRLQGGKDFNVPLSISRLTPGGKAAQAGVAVGDWVLSIDGENAGSLTHIEAQNKIRACGERLSLGLSRAQPVQSK

SEQ ID NO: 50139 - protein, 373 aa, Homo sapiens
MNRSSNVPRKGILKSGTRSLQKVRRVHFANARNARSLLSMLKDISAQIIQRAWLSHTNKMIFRLLKHAICAAEFYVTHEILKKVAPLEAKLIKDPTMQCKIRFRFRGETFPPFIVFKIFLHTDGHGYKYFSGKNVLMPSSKALLSHCFLWRRTFLTLAIHCRCLRKNILAIGQQTFLKPLSQAVDDACKLMGERKFHRIIMEDERIFPKSKVTDIMDVVTMQDYVQYRSFFDEAPAFSGGRNNSWRKLNLENIPRTMLMYDIVHYSESGVISNRLRNEMKFLLQRPVTQEIHKHQLRIVSEIRGPYLTVQPLYRPYKQQNQVKFLGRRSKQAQMKVEKMRKVYLAKEKNTSEVTEPKTGPSGTKDNYHLHSIF

SEQ ID NO: 50140 - protein, 135 aa, Homo sapiens
MESCTSAAERDGSGTNKRDKQYQAHWAFGDRRNGVISARTYFYANEAKCDSHMETFLRCIEASGRVSDDGFIAIKLTALGRPQFLLQFSEVLAKWRCFFHQMAVEQGQAGLAAMDTKLEVAVLQESVAKLGIASR

SEQ ID NO: 50141 - protein, 702 aa, Homo sapiens
ATAAAAAAVMAPPGCPGSCPNFAVVCSFLERYGPLLDLPELPFPELERVLQAPPPDVGNGEVPKELVELHLKLMRKIGKSVTADRWEKYLIKICQEFNSTWAWEMEKKGYLEMSVECKLALLKYLCECQFDDNLKFKNIINEEDADTMRLQPIGRDKDGLMYWYQLDQDHNVRMYIEEQDDQDGSSWKCIVRNRNELAETLALLKAQIDPVLLKNSSQQDNSSRESPSLEDEETKKEEETPKQEEQKESEKMKSEEQPMDLENRSTANVLEETTVKKEKEDEKELVKLPVIVKLEKPLPENEEKKIIKEESDSFKENVKPIKVEVKECRADPKDTKSSMEKPVAQEPERIEFGGNIKSSHEITEKSTEETEKLKNDQQAKIPLKKREIKLSDDFDSPVKGPLCKSVTPTKEFLKDEIKQEEETCKRISTITALGHEGKQLVNGEVSDERVAPNFKTEPIETKFYETKEESYSPSKDRNIITEGNGTESLNSVITSMKTGELEKETAPLRKDADSSISVLEIHSQKAQIEEPDPPEMETSLDSSEMAKDLSSKTALSSTESCTMKGEEKSPKTKKDKRPPILECLEKLEKSKKTFLDKDAQRLSPIPEEVPKSTLESEKPGSPEAAETSPPSNIIDHCEKLASEKEVVECQSTSTVGGQSVKKVDLETLKEDSEFTKVEMDNLDNAQTSGIEEPSETKGSMQK

SEQ ID NO: 50142 - protein, 205 aa, Homo sapiens
MWVTKLLPALLLQHVLLHLLLLPIAIPYAEGQRKRRNTIHEFKKSAKTTLIKIDPALKIKTKKVNTADQCANRCTRNKGLPFTCKAFVFDKARKQCLWFPFNSMSSGVKKEFGHEFDLYENKDYIRNCIIGKGRSYKGTVSITKSGIKCQPWSSMIPHEHSYRGKDLQENYCRNPRGEEGGPWCFTSNPEVRYEVCDIPQCSEGK

SEQ ID NO: 50143 - protein, 87 aa, Homo sapiens
MVKAPQSEERLARGGKENNSVLGSSCRRSILQSNSHDCPDWGCHFTRRRNRQKPGQQSSQSPQEAFSPTLEGVHCLPDICGPRGAHH

SEQ ID NO: 50144 - protein, 277 aa, Homo sapiens
  MOD_RES (1)..(1): Any amino acid
XTMGLSNILFVMAFLLSGAAPLKIQAYFNETADLPCQFANSQNQSLSELVVFWQDQENLVLNEVYLGKEKFDSVHSKYMGRTSFDSDSWTLRLHNLQIKDKGLYQCIIHHKKPTGMIRIHQMNSELSVLANFSQPEIVPISNITENVYINLTCSSIHGYPEPKKMSVLLRTKNSTIEYDGVMQKSQDNVTELYDVSISLSVSFPDVTSNMTIFCILETDKTRLLSSPFSIGTNTMEREESEQTKKREKIHIPERSDEAQRVFKSSKTSSCDKSDTCF

SEQ ID NO: 50145 - protein, 224 aa, Homo sapiens
  MOD_RES (1)..(1): Any amino acid
XAAATGPSFWLGNETLKVPLALFALNRQRLCERLRKNPAVQAGSIVVLQGGEETQRYCTDTGVLFRQESFFHWAFGVTEPGCYGVIDVDTGKSTLFVPRLPASHATWMGKIHSKEHFKEKYAVDDVQYVDEIASVLTSQKPSVLLTLRGVNTDSGSVCREASFDGISKFEVNNTILHPEIVECRVFKTDMELEVLRYTNKISSEAHREVMKAVKVGMKEYELER

SEQ ID NO: 50146 - protein, 76 aa, Homo sapiens
MIPWVEWNFLQVLEALMDKMPTSGVFLAGPLESVPGQHVWSESEDCLPFLQLAQDYISSCGKKTLHEVLEKVFKSF

SEQ ID NO: 50147 - protein, 70 aa, Homo sapiens
  MOD_RES (1)..(1): Any amino acid
XCDDSFTPQEKLWQQLRRGRYVEFNLLYDRGTKFGLFTPGSRIESILMSLPLTARQFSAILFLNSVEDFF

SEQ ID NO: 50148 - protein, 503 aa, Homo sapiens
MSEETVSESQFSLKTAALRVFDLPLTWYYSLSQIKFSPVAKKLFVVTAVSAISVIFLAHHFKRKRGKKKGKILPWEPEHLILEYTKRAASDKGSSCSSSRQNLTLSLSSTKDKGSQVCNYANGGLFSKYSGSAQSLASVQSVNSCHSCACGNSNSWDKADEDDIKLVNIPVTTPENLYLMGMELFEEALRRWEQALTFRNRQAEDEACGSIKLGAGDAIAEENVDDIISTEFIHKLEALLQRAYRLQEEFEATLGASDPNSLADDIDKDTDITMKGNVEDFGLRDTLSIASTDSFASAAELAEHREVRHTYSLESLCHCPFYEEAMHLVEEGKIYSRVLRTEMLECLGDSDFLAKLHCIRQAFQVILSESANRIFLAESGRKILSALIVKARKNPKKFEDVFDEMIYFLEQTDHWGSTEMELAARGVKNLNFYDVVLDFILMDSFEDLENPPTSIQNVVNNRWLNSSFKETAVASSCWSVLKQKRQQMKVNIMFIKYQNGIIF

SEQ ID NO: 50149 - protein, 131 aa, Homo sapiens
MEICADPQFIIGGATRTDICQGALGDCWLLAAIASLTLNEEILARVVPLNQSFQENYAGIFHFQFWQYGEWVEVVVDDRLPTKDGELLFVHSAEGSEFWSALLEKAYAKINGCYEALSGGATTEGFEDFTG

SEQ ID NO: 50150 - protein, 1742 aa, Homo sapiens
  MOD_RES (1)..(1): Any amino acid
XYCDEAVRDPSQAPPVDVHQPPAFLHKLLQLAGVRLHYEELPAQEEPPEPPLQIGSCSGYMELMVKLKQNEAFPGPKLEVAGQLGSLHLLLTPRQLQQLQELLSAVSLTDHEGLADKLNKSRPLGAEDLWLIEQDLNQQLQAGAVAEPLSPDPLTNPLLNLDNTDLFFSMAGLTSSVASALSELSLSDVDLASSVRSDMASRRLSAQAHPAGKMAPNPLLDTMRPDSLLKMTLGGVTLTLLQTSAPSSGPPDLATHFFTEFDATKDGPFGSRDFHHLRPRFQRACPCSHVRLTGTAVQLSWELRTGSRGRRTTSMEVHFGQLEVLECLWPRGTSEPEYTEILTFPGTLGSQASARPCAHLRHTQILRRVPKSRPRRSVACHCHSELALDLANFQADVELGALDRLAALLRLATVPAEPPAGLLTEPLPAMEQQTVFRLSAPRATLRLRFPIADLRPEPDPWAGQAVRAEQLRLELSEPQFRSELSSGPGPPVPTHLELTCSDLHGIYEDGGKPPVPCLRVSKALDPKSTGRKYFLPQVVVTVNPQSSSTQWEVAPEKGEELELSVESPCELREPEPSPFSSKRTMYETEEMVIPGDPEEMRTFQSRTLALSRCSLEVILPSVHIFLPSKEVYESIYNRINNDLLMWEPADLLPTPDPAAQPSGFPGPSGFWHDSFKMCKSAFKLANCFDLTPDSDSDDEDAHFFSVGASGGPQAAAPEAPSLHLQSTFSTLVTVLKGRITALCETKDEGGKRLEAVHGELVLDMEHGTLFSVSQYCGQPGLGYFCLEAEKATLYHRAAVDDYPLPSHLDLPSFAPPAQLAPTIYPSEEGVTERGASGRKGQGRGPHMLSTAVRIHLDPHKNVKEFLVTLRLHKATLRHYMALPEQSWHSQLLEFLDVLDDPVLGYLPPTVITILHTHLFSCSVDYRPLYLPVRVLITAETFTLSSNIIMDTSTFLLRFILDDSALYLSDKCEVETLDLRRDYVCVLDVDLLELVIKTWKGSTEGKLSQPLFELRCSNNVVHVHSCADSCALLVNLLQYVMSTGDLHPPPRPPSPTEIAGQKVQLSESPASLPSCPPVETALINQRDLADALLDTERSLRELAQPSGGHLPQASPISVYLFPGERSGAPPPSPPVGGPAGSLGSCSEEKEDEREEEGDGDTLDSDEFCILDAPGLGIPPRDGEPVVTQLHPGPIVVRDGYFSRPIGSTDLLRAPAHFPVPSTRVVLREVSLVWHLYGGRDFGPHPGHRARTGLSGPRSSPSRCSGPNRPQNSWRTQGGSGRQHHVLMEIQLSKVSFQHEVYPAEPATGPAAPSQELEERPLSRQVFIVQELEVRDRLASSQINKFLYLHTSERMPRRAHSNMLTIKALHVAPTTNLGGPECCLRVSLMPLRLNVDQDALFFLKDFFTSLVAGINPVVPGETSAEARPETRAQPSSPLEGQAEGVETTGSQEAPGGGHSPSPPDQQPIYFREFRFTSEVPIWLDYHGKHVTMDQVGTFAGLLIGLAQLNCSELKLKRLCCRHGLLGVDKVLGYALNEWLQDIRKNQLPGLLGGVGPMHSVVQLFQGFRDLLWLPIEQYRKDGRLMRGLQRGAASFGSSTASAALELSNRLVQAIQATAETVYDILSPAAPVSRSLQDKRSARRLRRGQQPADLREGVAKAYDTVREGILDTAQTICDVASRGHEQKGLTGAVGGVIRQLPPTVVKPLILATEATSSLLGGMRNQIVPDAHKDHALKWRSDSAQD

SEQ ID NO: 50151 - protein, 100 aa, Homo sapiens
MRRAAEERRREKAEELAARQRVREKIERDKAERAKKYGGSVGSQPPPVAPEPGPVPSSPSQEPPTKREYDQCRIQDSCLLLFSLWPRNVPAEGLCPIVPL

SEQ ID NO: 50152 - protein, 195 aa, Homo sapiens
  MOD_RES (1)..(1): Any amino acid
XEVEAALYYKDFQSLSILLAGSCALRNRTADQKVLCLLASLFGGKIAVLEINPAALVRAQQCPSMGQSLSVPASSCVLPTSPLYLGIAKEKSTKAASEQRRAARNVMKDQRLVFHSKVRSSGYASAPHVTMFSPKTNIKSEGKGSSRSRSSCAREAYPVECAVPTKPGPQVAAAPTCTRVCCIQYSGAPRPAGAG

SEQ ID NO: 50153 - protein, 190 aa, Homo sapiens
TMALPFALLMALVVLSCKSSCSLDCDLPQTHSLGHRRTMMLLAQMRRISLFSCLKDRHDFRFPQEEFDGNQFQKAEAISVLHEVIQQTFNLFSTKDSSVAWDERLLDKLYTELYQQLNDLEACVMQEVWVGGTPLMNEDSILAVRKYFQRITLYLTEKKYSPCAWEVVRAEIMRSFSSSRNLQERLRRKE

SEQ ID NO: 50154 - protein, 942 aa, Homo sapiens
MGPERTGAAPLPLLLVLALSQGILNCCLAYNVGLPEAKIFSGPSSEQFGYAVQQFINPKGNWLLVGSPWSGFPENRMGDVYKCPVDLSTATCEKLNLQTSTSIPNVTEMKTNMSLGLILTRNMGTGGFLTCGPLWAQQCGNQYYTTGVCSDISPDFQLSASFSPATQPCPSLIDVVVVCDESNSIYPWDAVKNFLEKFVQGLDIGPTKTQVGLIQYANNPRVVFNLNTYKTKEEMIVATSQTSQYGGDLTNTFGAIQYARKYAYSAASGGRRSATKVMVVVTDGESHDGSMLKAVIDQCNHDNILRFGIAVLGYLNRNALDTKNLIKEIKAIASIPTERYFFNVSDEAALLEKAGTLGEQIFSIEGTVQGGDNFQMEMSQVGFSADYSSQNDILMLGAVGAFGWSGTIVQKTSHGHLIFPKQAFDQILQDRNHSSYLGYSVAAISTGESTHFVAGAPRANYTGQIVLYSVNENGNITVIQAHRGDQIGSYFGSVLCSVDVDKDTITDVLLVGAPMYMSDLKKEEGRVYLFTIKEGILGQHQFLEGPEGIENTRFGSAIAALSDINMDGFNDVIVGSPLENQNSGAVYIYNGHQGTIRTKYSQKILGSDGAFRSHLQYFGRSLDGYGDLNGDSITDVSIGAFGQVVQLWSQSIADVAIEASFTPEKITLVNKNAQIILKLCFSAKFRPTKQNNQVAIVYNITLDADGFSSRVTSRGLFKENNERCLQKNMVVNQAQSCPEHIIYIQEPSDVVNSLDLRVDISLENPGTSPALEAYSETAKVFSIPFHKDCGEDGLCISDLVLDVRQIPAAQEQPFIVSNQNKRLTFSVTLKNKRESAYNTGIVVDFSENLFFASFSLPVDGTEVTCQVAASQKSVACDVGYPALKREQQVTFTINFDFNLQNLQNQASLSFQALSESQEENKADNLVNLKIPLLYDAEIHLTR

SEQ ID NO: 50155 - protein, 112 aa, Homo sapiens
MRRFLLLYATQQGQAKAIAEEICEQAVVHGFSADLHCISESDKYDLKTETAPLVVVVSTTGTGDPPDTARKFVKEIQNQTLPVDFFAHLRYGLLGLGDSEYTYFCNGGKIID

SEQ ID NO: 50156 - protein, 101 aa, Homo sapiens
MVSTPENRQTFITSVIKFLRQYEFDGLDFDWEYPGSRGSPPQDKHLFTVLVQMRKLKYREDLSNLPKITQLVGIITSSAVWPQSPLLLSITLGCPLLLRNA

SEQ ID NO: 50157 - protein, 108 aa, Homo sapiens
  MOD_RES (1)..(1): Any amino acid
XPATASALLLLLLGLAWTQGSHGWVGTAGCTGCGRVITAETCRQRRSELQLQPACVSHCLWWEVLSQDPCKGGSLTFFLGFPGATWPAAVGEVLVGNFLQPPPRPRKA

SEQ ID NO: 50158 - protein, 351 aa, Homo sapiens
MGVTPHHVCRPPGNVSQVVFHNHSNWSLEDTGALLSSGQKDYVTVQLQNGEIWELSRCSRNKRENTSSLGYEYTGSKKEFPCVDGYIYDQNTWKSTAVTQWNLVCDRKWLAMLIQPLFMFGVLLGSVTFGYFSDRLGRRVVLWATSSSMFLFGIAAAFAVDYYTFMAARFFLAMVASGYLVVGFVYVMEFIGMKSRTWASVHLHSFFAVGTLLVALTGYLVRTWWLYQMILSTVTVPFILCCWVLPETPFWLLSEGRYEEAQKIVDIMAKWNRASSCKLSELLSLDLQGPVSNSPTEVQKHNLSYLFYNWSITKRTLTVWLIWFTGSLGFYSFSLNSVNLGGNEYLNLFLL

SEQ ID NO: 50159 - protein, 609 aa, Homo sapiens
MRYRLAWLLHPALPSTFRSVLGARLPPPERLCGFQKKTYSKMNNPAIKRIGNHITKSPEDKREYRGLELANGIKVLLISDPTTDKSSAALDVHIGSLSDPPNIAGLSHFCEHMLFLGTKKYPKENEYSQFLSEHAGSSNAFTSGEHTNYYFDVSHEHLEGALDRFAQFFLCPLFDESCKDREVNAVDSEHEKNVMNDAWRLFQLEKATGNPKHPFSKFGTGNKYTLETRPNQEGIDVRQELLKFHSAYYSSNLMAVCVLGRESLDDLTNLVVKLFSEVENKNVPLPEFPEHPFQEEHLKQLYKIVPIKDIRNLYVTFPIPDLQKYYKSNPGHYLGHLIGHEGPGSLLSELKSKGWVNTLVGGQKEGARGFMFFIINVDLTEEGLLHVEDIILHMFQYIQKLRAEGPQEWVFQECKDLNAVAFRFKDKERPRGYTSKIAGILHYYPLEEVLTAEYLLEEFRPDLIEMVLDKLRPENVRVAIVSKSFEGKTDRTEEWYGTQYKQEAIPDEVIKKWQNADLNGKFKLPTKNEFIPTNFEILPLEKEATPYPALIKDTAMSKLWFKQDDKFFLPKACLNFEFFSFDKIVGFWLGAIAHTCNPNILGSRGRKIA

SEQ ID NO: 50160 - protein, 41 aa, Homo sapiens
  MOD_RES (1)..(1): Any amino acid
XDPQKAVDQPRQSLALSPRLECSGRILTHYNLCLLVSTGFK

SEQ ID NO: 50161 - protein, 412 aa, Homo sapiens
MGLSTVPDLLLPLVLLELLVGIYPSGVIGLVPHLGDREKRDSVCPQGKYIHPQNNSICCTKCHKEMGQVEISSCTVDRDTVCGCRKNQYRHYWSENLFQCFNCSLCLNGTVHLSCQEKQNTVCTCHAGFFLRENECVSCSNCKKSLECTKLCLPQIENVKGTEDSGTTVLLPLVIFFGLCLLSLLFIGLMYRYQRWKSKLYSIVCGKSTPEKEGELEGTTTKPLAPNPSFSPTPGFTPTLGFSPVPSSTFTSSSTYTPGDCPNFAAPRREVAPPYQGADPILATALASDPIPNPLQKWEDSAHKPQSLDTDDPATLYAVVENVPPLRWKEFVRRLGLSDHEIDRLELQNGRCLREAQYSMLATWRRRTPRREATLELLGRVLRDMDLLGCLEDIEEALCGPAALPPAPSLLR

SEQ ID NO: 50162 - protein, 104 aa, Homo sapiens
  MOD_RES (1)..(1): Any amino acid
XGATPPPPPPLPAGGAQGSSHDESSMSGLAAAIAGAKLRRVQRPEDASGGSSPSGTSKSDANRASSGGGGGGLMEEMNKLLAKRRKAASQSDKPAEKKEDESQM

SEQ ID NO: 50163 - protein, 95 aa, Homo sapiens
MGIQGLLQFIKEASEPIHVRKYKGQVVAVDTYCWLHKGAIACAEKLAKGEPTDRRRQANLLKGKQLLREGKVSEARECFTRSINITHAMAHKVIK

SEQ ID NO: 50164 - protein, 91 aa, Homo sapiens
  MOD_RES (1)..(1): Any amino acid
XKMTVWILLLLSLYPGFTSQKSDDDYEDYASNKTWVLTPKVPEGDVTVILNNLLEGYDNKLRPDIGVKPTLIHTDMYVNSIGPVNAINMHH

SEQ ID NO: 50165 - protein, 751 aa, Homo sapiens
MGSRSGRGRTEARSASESLQLRLLTPTFEGINGLLLKQHLVQNPVRLWQLLGGTFYFNTSRLKQKNKEKDKSKGKAPEEDEEERRRRERDDQMYRERLRTLLVIAVVMSLLNALSTSGGSISWNDFVHEMLAKGEVQRVQVVPESDVVEVYLHPGAVVFGRPRLALMYRMQVANIDKFEEKLRAAEDELNIEAKDRIPVSYKRTGFFGNALYSVGMTAVGLAILWYVFRLAGMTGREGGFSAFNQLKMARFTIVDGKMGKGVSFKDVAGMHEAKLEVREFVDYLKSPERFLQLGAKVPKGALLLGPPGCGKTLLAKAVATEAQVPFLAMAGPEFVEVIGGLGAARVRSLFKEARARAPCIVYIDEIDAVGKKRSTTMSGFSNTEEEQTLNQLLVEMDGMGTTDHVIVLASTNRADILDGALMRPGRLDRHVFIDLPTLQERREIFEQHLKSLKLTQSSTFYSQRLAELTPGFSGADIANICNEAALHAAREGHTSVHTLNFEYAVERVLAGTAKKSKILSKEEQKVVAFHESGHALVGWMLEHTEAVMKVSITPRTNAALGFAQMLPRDQHLFTKEQLFERMCMALGGRASEALSFNEVTSGAQDDLRKVTRIAYSMVKQFGMAPGIGPISFPEAQEGLMGIGRRPFSQGLQQMMDHEARLLVAKAYRHTEKVLQDNLDKLQALANALLEKEVINYEDIEALIGPPPHGPKKMIAPQRWIDAQREKQDLGEEETEETQQPPLGGEEPTWPK

SEQ ID NO: 50166 - protein, 490 aa, Homo sapiens
MAELTVEVRGSNGAFYKVYSRANDQEPCGWWLAKVRMMKGEFYVIEYAACDATYNEIVTFERLRPVNQNKTVKKNTFFKCTVDVPEDLREACANENAHKDFKKAVGACRIFYHPETTQLMILSASEATVKRVNILSDMHLRSIRTKLMLMSRNEEATKHLECTKQLAAAFHEEFVVREDLMGLAIGTHGSNIQQARKVPGVTAIELDEDTGTFRIYGESADAVKKARGFLEFVEDFIQVPRNLVGKVIGKNGKVIQEIVDKSGVVRVRIEGDNENKLPREDGMVPFVFVGTKESIGNVQVLLEYHIAYLKEVEQLRMERLQIDEQLRQIGSRSYSGRGRGRRGPNYTSGYGTNSELSNPSETESERKDELSDWSLAGEDDRDSRHQRDSRRRPGGRGRSVSGGRGRGGPRGGKSSISSVLKDPDSNPYSLLDNTESDQTADTDASESHHSTNRRRRSRRRRTDEDAVLMDGMTESDTASVNENGLGKRCD

SEQ ID NO: 50167 - protein, 434 aa, Homo sapiens
MLEAHMQSYKGNDPLGEWERYIQWVEENFPENKEYLITLLEHLMKEFLDKKKYHNDPRFISYCLKFAEYNSDLHQFFEFLYNHGIGTLSSPLYIAWAGHLEAQGELQHASAVLQRGIQNQAEPREFLQQQYRLFQTRLTETHLPAQARTSEPLHNVQVLNQMITSKSNPGNNMACISKNQGSELSGVISSACDKESNMERRVITISKSEYSVHSSLASKVDVEQVVMYCKEKLIRGESEFSFEELRAQKYNQRRKHEQWVNEDRHYMKRKEANAFEEQLLKQKMDELHKKLHQVVETSHEDLPASQERSEVNPARMGPSVGSQQELRAPCLPVTYQQTPVNMEKNPREAPPVVPPLANAISAALVSPATSQSIAPPVPLKAQTVTDSMFAVASKDAGCVNKSTHEFKPQSGAEIKEGCETHKVANTSSFHTTPN

SEQ ID NO: 50168 - protein, 390 aa, Homo sapiens
MNSHSYNGSVGRPLGSGPGALGRDPPDPEAGHPPQPPHSPGLQVVVAKSEPARPSPGSPRGQPQDQDDDEDDEEDEAGRQRASGKPSNVGHRLGHRRALFEKRKRLSDYALIFGMFGIVVMVTETELSWGVYTKESLYSFALKCLISLSTAILLGLVVLYHAREIQLFMVDNGADDWRIAMTCERVFLISLELAVCAIHPVPGHYRFTWTARLAFTYAPSVAEADVDVLLSIPMFLRLYLLGRVMLLHSKIFTDASSRSIGALNKITFNTRFVMKTLMTICPGTVLLVFSISSWIIAAWTVRVCERYHDKQEVTSNFLGAMWLISITFLSIGYGDMVPHTYCGKGVCLLTGIMGAGCTALVVAVVARKLELTKAEKHVHNFMMDTQLTKR

SEQ ID NO: 50169 - protein, 104 aa, Homo sapiens
  MOD_RES (1)..(1): Any amino acid
XTVWVCIKEQHVQGSPFTVMVRRKHRPHSGVFHCCTFCSSGGQKTARCACGGTMPGGYLGCGHGHKGHPGHPHWSCCGKFNEKSECTWTGGQSAPRSLLRTVAL

SEQ ID NO: 50170 - protein, 104 aa, Homo sapiens
  MOD_RES (1)..(1): Any amino acid
XSHSDWTQTRVLAEMLTEEEVVPSAPPLPVRPPKTSPGLRGASACPDVGPGFQTWPRDWRPSETRLAAPCDVAAASHPAVRAHGAQAKSSLPIEGQVGTQETAV

SEQ ID NO: 50171 - protein, 686 aa, Homo sapiens
MAISQHQFYLDRKQSKAKIPSARSLDEIAMDLTETGTQRASKLVTLETKSQFIMASNGSLISSGSQDSEVSEEQKREKILELKKKEKLLQEKLLKKVEELKKICLREAELTGKMPKEYPLNIGEKPPQVRRRVGTAFKLDDNLLPSEEDPALQELESNFLIQQKLVEAAKKLANEPDLCKTVKKKRKQDYTDAMKKLQEIENAINEYRIRCGKKPSQKATVLPEDIIPSESSSLSDTTTYDDPSDAFTFPGQRSSSVPHSPRILPPKSLGIERIHFRKSSINEQFVDTRQSREMLSTHSSPYKTLERRPQGGRSMPTTPVLTRNAYSSSHLEPESSSQHCRQRSGSLESQSHLLSEMDSDKPFFSLSKSQRSSSTEILDDGSSYTSQSSTEYYCVTPVTGPYYTTQTLDTRTRGRRRSKKQNVSTSNSGSMPNLAQKDSLRNGVYSKSQEPPSSSYYIAGYTPYAECDFYYSGGYVYENDTEGQYSVNPSYRSSAHYGYERQRDYSRSFHEDEVDRVPHNPYATLRLPRKAAAKSEHITKNIHKALVAEHLRGWYQRASGQKDQGHSPQTSFDSDRGSQRCLGFAGLQVPCSPSSRASSYSSVSSTNASGNWRTQLTIGLSDYETPAHSSYTSCYGNVYNPLPSPSRQYTEISQLDGTDGNQLEDNLESSEQRLFWHEDSKPGTLV

SEQ ID NO: 50172 - protein, 203 aa, Homo sapiens
MLRKHVEFRKQKDIDNIISWQPPEVIQQYLSGGMCGYDLDGCPVWYDIIGPLDAKGLLFSASKQDLLRTKMRECELLLQECAHQTTKLGRKVETITIIYDCEGLGLKHLWKPAVEAYGEFLCMFEENYPETLKRLFVVKAPKLFPVAYNLIKPFLSEDTRKKIMVLGANWKEVLLKHISPDQVPVEYGGTMTDPDGNPKCKSK

SEQ ID NO: 50173 - protein, 190 aa, Homo sapiens
MELQALIDSHFEARKKEEEELVALKERIEKRRAERAEQQRIRAEKERERQNRLAEEKARREEEDAKRRAEDDLKKKKALSSMGANYSSYLAKADQKRGKKQTAREMKKKILAERRKPLNIDHLGEDKLRDKAKELWETLHQLEIDKFEFGEKLKRQKYDITTLRSRIDQAQKHSKKAGTPAKGKVGGRWK

SEQ ID NO: 50174 - protein, 35 aa, Homo sapiens
KLSLSGQTNLSVLQRSSTGRCQLAPLHCDGGPLLC

SEQ ID NO: 50175 - protein, 269 aa, Homo sapiens
VKAATGEEVSAEDLGGADLHCRKSGVSDHWALDDHHALHLTRKVVRNLNYQKKLDVTIEPSEEPLFPADELYGIVGANLKRSFDVREVIARIVDGSRFTEFKAFYGDTLVTGFMVGREYEAEGIAKDGAKMVAAVACAQVPKITLIIGGSYGAGNYGMCGRAYSPRFLYIWPNARISVMGGEQAANVLATITKDQRAREGKQFSSADEAALKEPIIKKFEEEGNPYYSSARVWDDGIIDPADTRLVLGLSFSAALNAPIEKTDFGIFRM

SEQ ID NO: 50176 - protein, 93 aa, Homo sapiens
NAFPVSGQLYTTHLLSLDALLTVIDSTEAHCQAKVLNSLTQQEKKETARPSCEIVDGTREASNTDKKFARKPPRFSCLLPDPRELIEIKNKKK

SEQ ID NO: 50177 - protein, 1759 aa, Homo sapiens
MSCVHYKFSSKLNYDTVTFDGLHISLCDLKKQIMGREKLKAADCDLQITNAQTKEEYTDDNALIPKNSSVIVRRIPIGGVKSTSKTYVISRTEPAMATTKAIDDSSASISLAQLTKTANLAEANASEEDKIKAMMSQSGHEYDPINYMKKPLGPPPPSYTCFRCGKPGHYIKNCPTNGDKNFESGPRIKKSTGIPRSFMMEVKDPNMKGAMLTNTGKYAIPTIDAGRLLFHKLGTMGHKQIDTYFWNRGDVYGATATQITHLREAYAIGKKEKPPFLPEEPSSSSEEDDPIPDELLCLICKDIMTDAVVIPCCGNSYCDECIRTALLESDEHTCPTCHQNDVSPDALIANKFLRQAVNNFKNETGYTKRLRKQLPPPPPPIPPPRPLIQRNLQPLMRSPISRQQDPLMIPVTSSSTHPAPSISSLTSNQSSLAPPVSGNPSSAPAPVPDITATVSISVHSEKSDGPFRDSDNKILPAAALASEHSKGTSSIAITALMEEKGYQVPVLGTPSLLGQSLLHGQLIPTTGPVRINTARPGGGRPGWEHSNKLGYLVSPPQQIRRGERSCYRSINRGRHHSERSQRTQGPSLPATPVFVPVPPPPLYPPPPHTLPLPPGVPPPQFSPQFPPGQPPPAGYSVPPPGFPPAPANLSTPWVSSGVQTAHSNTIPTTQAPPLSREEFYREQRRLKEEEKKKSKLDEFTNDFAKELMEYKKIQKERRRSFSRSKSPYSGSSYSRSSYTYSKSRSGSTRSRSYSRSFSRSHSRSYSRSPPYPRRGRGKSRNYRSRSRSHGYHRSRSRSPPYRRYHSRSRSPQAFRGQSPNKRNVPQGETEREYFNRYREVPPPYDMKAYYGRSVDFRDPFEKERYREWERKYREWYEKYYKGYAAGAQPRPSANRENFSPERFLPLNIRNSPFTRGRREDYVGGQSHRSRNIGSNYPEKLSARDGHNQKDNTKSKEKESENAPGDGKGNKHKKHRKRRKGEESEGFLNPELLETSRKSREPTGVEENKTDSLFVLPSRDDATPVRDEPMDAESITFKSVSEKDKRERDKPKAKGDKTKRKNDGSAVSKKENIVKPAKGPQEKVDGERERSPRSEPPIKKAKEETPKTDNTKSSSSSQKDEKITGTPRKAHSKSAKEHQETKPVKEEKVKKDYSKDVKSEKLTTKEEKAKKPNEKNKPLDNKGEKRKRKTEEKGVDKDFESSSMKISKLEVTEIVKPSPKRKMEPDTEKMDRTPEKDKISLSAPAKKIKLNRETGKKIGSTENISNTKEPSEKLESTSSKVKQEKVKGKVRRKVTGTEGSSSTLVDYTSTSSTGGSPVRKSEEKTDTKRTVIKTMEEYNNDNTAPAEDVIIMIQVPQSKWDKDDFESEEEDVKSTQPISSVGKPASVIKNVSTKPSNIVKYPEKESEPSEKIQKFTKDVSHEIIQHEVKSSKNSASSEKGKTKDRDYSVLEKENPEKRKNSTQPEKESNLDRLNEQGNFKSLSQSSKEARTSDKHDSTRASSNKDFTPNRDKKTDYDTREYSSSKRRDEKNELTRRKDSPSRNKDSASGQKNKPREERDLPKKGTGDSKKSNSSPSRDRKPHDHKATYDTKRPNEETKSVDKNPCKDREKHVLEARNNKESSGNKLLYILNPPETQVEKEQITGQIDKSTVKPKPQLSHSSRLSSDLTRETDEAAFEPDYNESDSESNVSVKEEESSGNISKDLKDKIVEKAKESLDTAAVVQVGISRNQSHSSPSVSPSRSHSPSGSQTRSHSSSASSA

SEQ ID NO: 50178 - protein, 49 aa, Homo sapiens
MRSFKRVNFGTLLSSQKEAEELLPALKVGVLPGSGYTWLSKLSCFVFAF

SEQ ID NO: 50179 - protein, 373 aa, Homo sapiens
GLFCCRGCPAGHYLKAPCTEPCGNSTCLVCPQDTFLAWENHHNSECARCQACDEQASQVALENCSAVADTRCGCKPGWFVECQVSQCVSSSPFYCQPCLDCGALHRHTRLLCSRRDTDCGTCLPGFYEHGDGCVSCPTSTLGSCPERCAAVCGWRQMFWVQVLLAGLVVPLLLGATLTYTYRHCWPHKPLVTDEAGMEALTPPPATHLSPLDSAHTLLAPPDSSEKICTVQLVGNSWTPGYPETQEALCPQVTWSWDQLPSRALGPAAAPTLSPESPAGSPAMMLQPGPQLYDVMDAVPARRWKEFVRTLGLREAEIEAVEVEIGRFRDQQYEMLKRWRQQQPAGLGAVYAALERMGLDGCVEDLRSRLQRGP

SEQ ID NO: 50180 - protein, 83 aa, Homo sapiens
MTRGNQRELARQKNMKKQSDSVKGKRRDDGLSAAARKQRKYTQTYYAAVPAGWWGSGGGPATQPAAGGRWRFLHILGTQPQSH

SEQ ID NO: 50181 - protein, 675 aa, Homo sapiens
MAVLFPLSSCGWAAISLFLSAQSCYSASKQCQSQSPSCRLPGARISGDWSRRTKWRSHRLPRPGPVVRSEAGRDKGGVRGGGVAAAWGWCCRFPSCCSCASPEDTFSVVWFGVGPGMEGHAKGRQSHRCLWRLGEGGGDLRSVPYGDDFCMSFGNCPRDLCGAGIFGKGKGFLVFRLTPQVLVMNRIRIHVLPTNRGRITPVPRSQEPLSCAFTHRPCSHPRLEGQEFCIKHILEDKNAPFKQCSYISTKNGKRCPNAAPKPEKKDGVSFCAEHVRRNALALHAQMKKTNPGPVGETLLCQLSSYAKTELGSQTPESSRSEASRILDEDSWSDGEQEPITVDQTWRGDPDSEADSIDSDQEDPLKHAGVYTAEEVALIMREKLIRLQSLYIDQFKRLQHLLKEKKRRYLHNRKVEHEALGSSLLTGPEGLLAKERENLKRLKCLRRYRQRYGVEALLHRQLKERRMLATDGAAQQAHTTRSSQRCLAFVDDVRCSNQSLPMTRHCLTHICQDTNQVLFKCCQGSEEVPCNKPVPVSLSEDPCCPLHFQLPPQMYKPEQVLSVPDDLEAGPMDLYLSAAELQPTESLPLEFSDDLDVVGDGMQCPPSPLLFDPSLTLEDHLVKEIAEDPVDILGQMQMAGDGCRSQGSRNSEKASAPLSQSGLATANGKPEPTSIS

SEQ ID NO: 50182 - protein, 121 aa, Homo sapiens
MTEVVPSSALSEVSLRLLCHDDIDTVKHLCGDWFPIEYPDSWYRDITSNKKFFSLAATYRGAIVGMIVAEIKNRTKIHKEDGDILASNFSVDTQVAYILSLGVVKEFRKHGIGSLLLESLK

SEQ ID NO: 50183 - protein, 1287 aa, Homo sapiens
DSINNLQAELNKIFALRKQLEQDVLSYQNLRKTLEEQISEIRRREEESFSLYSDQTSYLSICLEENNRFQVEHFSQEELKKKVSDLIQLVKELYTDNQHLKKTIFDLSCMGFQGNGFPDRLASTEQTEIMKDLSKGGCKNGYLRHTESKISDCDGAHAPGCLEEGAFINLLAPLFNEKATLLLESRPDLLKVVRELLLGQLFLTEQEVSGEHLDGKTEKTPKQKGELVHFVQTNSFSKPHDELKLSCEAQLVKAGEVPKVGLKDASVQTVATEGDLLRFKHEATREAWEEKPINTALSAEHRPENLHGVPGWQAALLSLPGITNREAKKSRLPILIKPSRSLGNMYRLPATQEVVTQLQSQILELQGELKEFKTCNKQLHQKLILAEAVMEGRPTPDKTLLNAQPPVGAAYQDSPGEQKGIKTTSSVWRDKEMDSDQQRSYEIDSEICPPDDLASLPSCKENPEDVLSPTSVATYLSSKSQPSAKVSVMGTDQSESINTSNETEYLKQKIHDLETELEGYQNFIFQLQKHSQCSEAIITVLCGTEGAQDGLSKPKNGSDGEEMTFSSLHQVRYVKHVKILGPLAPEMIDSRVLENLKQQLEEQEYKLQKEQNLNMQLFSEIHNLQNKFRDLSPPRYDSLVQSQARELSLQRQQIKDGHGICVISRQHMNTMIKAFEELLQASDVDYCVAEGFQEQLNQCAELLEKLEKLFLNGKSVGVEMNTQNELMERIEEDNLTYQHLLPESPEPSASHALSDYETSEKSFFSRDQKQDNETEKTSVMVNSFSQDLLMEHIQEIRTLRKRLEESIKTNEKLRKQLERQGSEFVQGSTSIFASGSELHSSLTSEIHFLRKQNQALNAMLIKGSRDKQKENDKLRESLSRKTVSLEHLQREYASVKEENERLQKEGSEKERHNQQLIQEVRCSGQELSRVQEEVKLRQQLLSQNDKLLQSLRVELKAYEKLDEEHRRLREASGEGWKGQDPFRDLHSLLMEIQALRLQLERSIETSSTLQSRLKEQLARGAEKAQEGALTLAVQAVSIPEVPLQPDKHDGDKYPMESDNSFDLFDSSQAVTPKSVSETPPLSGNDTDSLSCDSGSSATSTPCVSRLVTGHHLWASKNGRHVLGLIEDYEALLKQISQGQRLLAEMDIQTQEAPSSTSQELGTKGPHPAPLSKFVSSVSTAKLTLEEAYRRLKLLWRVSLPEDGQCPLHCEQIGEMKAEVTKLHKKLFEQEKKLQNTMKLLQLSKRQEKVIFDQLVVTHKILRKARGNLELRPGGAHPGTCSPSRPGS

SEQ ID NO: 50184 - protein, 18 aa, Homo sapiens
MAAQKINEGLEHLAKAEK

SEQ ID NO: 50185 - protein, 185 aa, Homo sapiens
MAAVATCGSVAASTGSAVATASKSNVTSFQRRGPRASVTNDSGPRLVSIAGTRPSVRNGQLLVSTGLPALDQLLGGGLAVGTVLLIEEDKYNIYSPLLFKYFLAEGIVNGHTLLVASAKEDPANILQELPAPLLDDKCKKEFDEDVYNHKTPESNIKMKIAWRYQLLPKMEANWTSIIFKIWSLL

SEQ ID NO: 50186 - protein, 465 aa, Homo sapiens
MGITLHLLLHSDRDPIPDVPAVYFVMPTEENIDRMCQDLRNQLYESYYLNFISAISRSKLEDIANAALAASAVTQVAKVFDQYLNFITLEDDMFVLCNQNKELVSYRAINRPDITDTEMETVMDTIVDSLFCFFVTLGAVPIIRCSRGTAAEMVAVKLDKKLRENLRDARNSLFTGDTLGAGQFSFQRPLLVLVDRNIDLATPLHHTWTYQALVHDVLDFHLNRVNLEESSGVENSPAGARPKRKNKKSYDLTPVDKFWQKHKGSPFPEVAESVQQELESYRAQEDEVKRLKSIMGLEGEDEGAISMLSDNTAKLTSAVSSLPELLEKKRLIDLHTNVATAVLEHIKARKLDVYFEYEEKIMSKTTLDKSLLDIISDPDAGTPEDKMRLFLIYYISTQQAPSEADLEQYKKALTDAGCNLNPLQYIKQWKAFTKMASAPASYGSTTTKPMGCDTHGSRNSQDPSV

SEQ ID NO: 50187 - protein, 51 aa, Homo sapiens
MGETEKRIETHRIRCLSKLKMFLLAITCAFVSKTLSGSYMNSMLTQIERQF

SEQ ID NO: 50188 - protein, 93 aa, Homo sapiens
MSEDSEKEDYSDRTISDEDESDEDMFMKFVSEDLHRCALLTDWTPSCPEPVYIPTGLETEPLYPDSKEATVVYLAEDGEHIMTHVAVKYNLVL

SEQ ID NO: 50189 - protein, 126 aa, Homo sapiens
MERLGTPSGLDSTNGGSYAIHDSQAPSLSSGGESSPSSPAHNWEMNYQEAAIYLQEGENNDKFFTHPKDAKALAAYLFAHNHLFYLMELATALLLLLLSLCEAPAVPALRLGIYVHATLELFALMV

SEQ ID NO: 50190 - protein, 143 aa, Homo sapiens
MAMESTATAAVAAELVSADKIEDVPAPSTSADKVERMENGVLGNALEGVHVEEEEGEKTEDESLVENNDNIDEEAREELREQVYDAMGEKEEAKKTEDKSLAKPETDKEQDSEMEKGGREDMDISKSAEEPQEKVDLTLDWLT

SEQ ID NO: 50191 - protein, 135 aa, Homo sapiens
MNEAMATDSPRRPSRCTGGVVVRPQAVTEQSYMESVVTFLQDVVPQAYSGTPLTEEKEKIVWVRFENADLNDTSRNLEFHEIHSTGNEPPLLIMIGYSDGMQVWSIPISGEAQELFSVRHGPIRAARILPAPQFG

SEQ ID NO: 50192 - protein, 531 aa, Homo sapiens
MLKFRTVHGGLRLLGIRRTSTAPAASPNVRRLEYKPIKKVMVANRGEIAIRVFRACTELGIRTVAIYSEQDTGQMHRQKADEAYLIGRGLAPVQAYLHIPDIIKVAKENNVDAVHPGYGFLSERADFAQACQDAGVRFIGPSPEVVRKMGDKVEARAIAIAAGVPVVPGTDAPITSLHEAHEFSNTYGFPIIFKAAYGGGGRGMRVVHSYEELEENYTRAYSEALAAFGNGALFVEKFIEKPRHIEVQILGDQYGNILHLYERDCSIQRRHQKVVEIAPAAHLDPQLRTRLTSDSVKLAKQVGYENAGTVEFLVDRHGKHYFIEVNSRLQVEHTVTEEITDVDLVHAQIHVAEGRSLPDLGLRQENIRINGCAIQCRVTTEDPARSFQPDTGRIEVFRSGEGMGIRLDNASAFQGAVISPHYDSLLVKVIAHGKDHPTAATKMSRALAEFRVRGVKPFLLCLPCLCCMVTPSHPPLSCRPTSPSCRMCSTTSSSWQALWTPSSSTRTQSCSSCGLHRTGPKSCCTTSAMSW

SEQ ID NO: 50193 - protein, 35 aa, Homo sapiens
MLNDQLMLLERTFLNPRAFPEERYYSHVLWAPRTG

SEQ ID NO: 50194 - protein, 634 aa, Homo sapiens
MERFLFPAPDLPARSPLVNGSSQGVGVEERGTRKSGHVGLGATPPSHSIQGSRLHLNLPEVDSFPPHPAKFSLCAMGDVKESKMQITPETPGRIPVLNPFESPSDYSNLHEQTLASPSVFKSTKLPTPGKFRWSIDQLAVINPVEIDPEDIHRQALYLSHSRIDKDVEDKRQKAIEEFFTKDVIVPSPWTDHEGKQLSQCHSSKCTNINSDSPVGKKLTIHSEKSDAACQTLLSLPVDFNLENILGDYFRADEFADQSPGNLSSSSLRRKLFLDGNGSISDSLPSASPGSPHSGVQTSLEMFYSIDLSPVKCRSPLQTPSSGQFSSSPIQASAKKYSLGSITSPSPISSPTFSPIEFQIGETPLSEQRKFTVHSPDASSGTNSNGITNPCIRSPYIDGCSPIKNWSPMRLQMYSGGTQYRTSVIQIPFTLETQGEDEEDKENIPSTDVSSPAMDAAGIHLRQFSNEASTHGTHLVVTAMSVTQNQSSASEKELALLQDVEREKDNNTVDMVDPIEIADETTWIKEPVDNGSLPMTDFVSGIAFSIENSHMCMSPLAESSVIPCESSNIQMDSGYNTQNCGSNIMDTVGAESYCKESDAQTCEVESKSQAFNMKQDHTTQRCWMKTASPFQCSSP

SEQ ID NO: 50195 - protein, 145 aa, Homo sapiens
MAEAGPQAPPPPGTPSRHEKSLGLLTTKFVSLLQEAKDGVLDLKLAADTLAVRQKRRIYDITNVLEGIGLIEKKSKNSIQWNLPSVTIGHQPFSLTLTLWPTSLMRTSADALLEIPSWPSGPHQAPAWRCPSQRVSMGRRSTRFT

SEQ ID NO: 50196 - protein, 625 aa, Homo sapiens
MATKARVMYDFAAEPGNNELTVNEGEIITITNPDVGGGWLEGRNIKGERGLVPTDYVEILPSDGKDQFSCGNSVADQAFLDSLSASTAQASSSAASNNHQVDILAQIGCVESLSQSPPSSPSPSPSSIYKVGSGNDPWSAWSASKSGNWESSEGWGAQPEGAGAQRNTNTPNNWDTAFGHPQAYQGPATGDDDDWDEDWDGPKSSSYFKDSESADAGGAQRGNSRASSSSMKIPLNKFPGFAKPGTEQYLLAKQLAKPKEKIPIIVGDYGPMWVYPTSTFDCVVADPRKGSKMYGLKSYIEYQLTPTNTNRSVNHRYKHFDWLYERLLVKFGSAIPIPSLPDKQVTGRFEEEFIKMRMERLQAWMTRMCRHPVISESEVFQQFLNFRDEKEWKTGKRKAERDELAGVMIFSTMEPEAPDLDLVEIEQKCEAVGKFTKAMDDGVKELLTVGQEHWKRCTGPLPKEYQKIGKALQSLATVFSSSGYQGETDLNDAITEAGKTYEEIASLVAEQPKKDLHFLMECNHEYKGFLGCFPDIIGTHKGAIEKVKESDKLVATSKITLQDKQNMVKRVSIMSYALQAEMNHFHSNRIYDYNSVIRLYLEQQVQFYETIAEKLRQALSRFPVM

SEQ ID NO: 50197 - protein, 468 aa, Homo sapiens
MAFPAGFGWAAATAAYQVEGGWDADGKGPCVWDTFTHQGGERVFKNQTGDVACGSYTLWEEDLKCIKQLGLTHYRFSLSWSRLLPDGTTGFINQKGIDYYNKIIDDLLKNGVTPIVTLYHFDLPQTLEDQGGWLSEAIIESFDKYAQFCFSTFGDRVKQWITINEANVLSVMSYDLGMFPPGIPHFGTGGYQAAHNLIKAHARSWHSYDSLFRKKQKGMVSLSLFAVWLEPADPNSVSDQEAAKRAITFHLDLFAKPIFIDGDYPEVVKSQIASMSQKQGYPSSRLPEFTEEEKKMIKGTADFFAVQYYTTRLIKYQENKKGELGILQDAEIEFFPDPSWKNVDWIYVVPWGVCKLLKYIKDTYNNPVIYITENGFPQSDPAPLDDTQRWEYFRQTFQELFKAIQLDKVNLQVYCAWSLLDNFEWNQGYSSRFGLFHVDFEDPARPRVPYTSAKEAKIIRNNGLEAHL

SEQ ID NO: 50198 - protein, 321 aa, Homo sapiens
MTQQPLRGVTSLRFNQDQSCFCCAMETGVRIYNVEPLMEKGHLVLIWDDAREGKDSKEKLVLEFTFTKPVLSVRMRHDKIVIVLKNRIYVYSFPDNPRKLFEFDTRDNPKGLCDLCPSLEKQLLVFPGHKCGSLQLVDLASTKPGTSSAPFTINAHQSDIACVSLNQPGTVVASASQKGTLIRLFDTQSKEKLVELRRGTDPATLYCHDSSFLCASSDKGTVHIFALKDTRLNRRSALARVGKVGPMIGQYVDSQWSLASFTVPAESACICAFGRNTSKNVNSVIAICVDGTFHKYVFTPDGNCNREAFDVYLDICDDDDF

SEQ ID NO: 50199 - protein, 620 aa, Homo sapiens
MDAEAEDKTLRTRSKGTEVPMDSLIQELSVAYDCSMAKKRTAEDQALGVPVNKRKSLLMKPRHYSPKADCQEDRSDRTEDDGPLETHGHSTAEEIMIKPMDESLLSTAQENSSRKEDRYSCYQELMVKSLMHLGKFEKNVSVQTVSENLNDSGIQSLKAESDEADECFLIHSDDGRDKIDDSQPPFCSSDDNESNSESAENGWDSGSNFSEETKPPRVPKYVLTDHKKDLLEVPEIKTEGDKFIPCENRCDSETERKDPQNALAEPLDGNAQPSFPDVEEEDSESLAVMTEEGSDLEKAKGNLSLLEQAIALQAERGCVFHNTYKELDRFLLEHLAGERRQTKVIDMGGRQIFNNKHSPRPEKRETKCPIPGCDGTGHVTGLYPHHRSLSGCPHKVRVPLEILAMHENVLKCPTPGCTGRGHVNSNRNTHRSLSGCPIAAAEKLAMSQDKNQLDSPQTGQCPDQAHRTSLVKQIEFNFPSQAITSPRATVSKEQEKFGKVPFDYASFDAQVFGKRPLIQTVQGRKTPPFPESKHFPNPVKFPNRLPSAGAHTQSPGRASSYSYGQCSEDTHIAAAAAILNLSTRCREATDILSNKPQSLHAKGAEIEVDENGTLDLSMKK

SEQ ID NO: 50200 - protein, 84 aa, Homo sapiens
MGFGSDLKNSHEAVLKLQDWELRLLETVKKFMALRIKSDKEYASTLQNLCNQVDKESTVQMNYVSNVSKGRKLKRPRNDTTKPQ

SEQ ID NO: 50201 - protein, 86 aa, Homo sapiens
MWERMDEGCGETIYVIGQGSDGTEYGLSEADMEASYATVKSMAEQIEADVILLRERQEAGGRVRDYLVRKRVGDNDFLEVRVAVVG

SEQ ID NO: 50202 - protein, 261 aa, Homo sapiens
  MOD_RES (1)..(1): Any amino acid
XGELGRSGPRLLHGPRPCCVVQLRTLSYKSPAPALTSRRCQGDTRAALPFFGSPVKRQLHVREAAGQVVSAEEVVQLITNLKRGKRCGKELADQGAELFLDDSKMKNFITCFKDPQFLVTFFSRLRPNRSGRYEAAFPFLSPCGRERNFLRCEDRPVVFTHLLTADHGPPRLSYCGGGEALAVPFEPARLLPLAANGRLYHPAPERAGGVGLVRSALAFELSACFEYGPGAPALPSHVRWQGRRLALTMDLAPLLLAARSP

SEQ ID NO: 50203 - protein, 76 aa, Homo sapiens
NQPVAFVRRIPWTAASSQLKEHFAQFGHVRRCILPFDKETGFHRGLGWVQFSSEEGLRNALQQENHIIDGVKSMVS

SEQ ID NO: 50204 - protein, 317 aa, Homo sapiens
MPKVKSGAIGRRRGRQEQRRELKSAGGLMFNTGIGQHILKNPLIINSIIDKAALRPTDVVLEVGPGTGNMTVKLLEKAKKVVACELDPRLVAELHKRVQGTPVASKLQVLVGDVLKTDLPFFDTCVANLPYQISSPFVFKLLLHRPFFRCAILMFQREFALRLVAKPGDKLYCRLSINTQLLARVDHLMKVGKNNFRPPPKVESSVVRIEPKNPPPPINFQEWDGLVRITFVRKNKTLSAAFKSSAVQQLLEKNYRIHCSVHNIIIPEDFSIADKIQQILTSTGFSDKRARSMDIDDFIRLLHGFNAEGWSGILNLR

SEQ ID NO: 50205 - protein, 42 aa, Homo sapiens
MLRSTLAQQGTPVYSVAWGPDSEKVLYTAGKQLIIKPLQPNA

SEQ ID NO: 50206 - protein, 136 aa, Homo sapiens
MFLYASGPAPPAGTCRWGGQGGTSLSFLVLVTGCTSVGRIPDAEIYKITATDFYPLQEEAKEEERLIALKKILSSGVFYFSWPNDGSRFDLTVRTQKQGDDSSEWGNSFFWNQLLHVPLRQHQVSCCDWLLKIICG

SEQ ID NO: 50207 - protein, 249 aa, Homo sapiens
MSVFRDRAEWADIDPVPQNDGPNPVVQIIYSDKFRDVYDYFRAVLQRDERSERAFKLTRDAIELNAANYTVWHFRRVLLKSLQKDLHEEMNYITAIIEEQPKNYQVWHHRRVLVEWLRDPSQELEFIADILNQDAKNYHAWQHRQWVIQEFKLWDNELQYVDQLLKEDVRNNSVWNQRYFVISNTTGYNDRAVLEREVQYTLEMIKLVPHNESAWNYLKGILQDRGLSKYPNLLNQLLDLQPSHSSPYL

SEQ ID NO: 50208 - protein, 883 aa, Homo sapiens
MDHYDSQQTNDYMQPEEDWDRDLLLDPAWEKQQRKTFTAWCNSHLRKAGTQIENIEEDFRDGLKLMLLLEVISGERLAKPERGKMRVHKISNVNKALDFIASKGVKLVSIGAEEIVDGNVKMTLGMIWTIILRFAIQDISVEETSAKEGLLLWCQRKTAPYKNVNIQNFHISWKDGLGFCALIHRHRPELIDYGKLRKDDPLTNLNTAFDVAEKYLDIPKMLDAEDIVGTARPDEKAIMTYVSSFYHAFSGAQKLLEWIRRTIPWLENRVPENTMHAMQQKLEDFRDYRRLHKPPKVQEKCQLEINFNTLQTKLRLSNRPAFMPSEGRMVSDINNAWGCLEQVEKGYEEWLLNEIRRLERLDHLAEKFRQKASIHEAWTDGKEAMLRQKDYETATLSEIKALLKKHEAFESDLAAHQDRVEQIAAIAQELNELDYYDSPSVNARCQKICDQWDNLGALTQKRREALERTEKLLETIDQLYLEYAKRAAPFNNWMEGAMEDLQDTFIVHTIEEIQGLTTAHEQFKATLPDADKERLAILGIHNEVSKIVQTYHVNMAGTNPYTTITPQEINGKWDHVRQLVPRRDQALTEEHARQQHNERLRKQFGAQANVIGPWIQTKMEEIGRISIEMHGTLEDQLSHLRQYEKSIVNYKPKIDQLEGDHQLIQEALIFDNKHTNYTMEHIRVGWEQLLTTIARTINEVENQILTRDAKGISQEQMNEFRASFNHFDRDHSGTLGPEEFKACLISLGYDIGNDPQKKTGMMDTDDFRACLISMGYNMGEAEFARIMSIVDPNRLGVVTFQAFIDFMSRETADTDTADQVMASFKILAGDKNYITMDELRRELPPDQAEYCIARMAPYTGPDSVPGALDYMSFSTALYGESDL

SEQ ID NO: 50209 - protein, 663 aa, Homo sapiens
MMFRDQVGILAGWFKGWNECEQTVALLSLLKRVTRTQARFLQLCLEHSLADCNDIHLLESEANSAAIVSQWQQESKEKVVSLLLSHLPLLQPGNTEAKSEYMRLLQKVLAYSIESNAFIEESRQLLSYALIHPATTLEDRNALALWLSHLEERLASGFRSRPEPSYHSRQGSDEWGGPAELGPGEAGPGWQDKPPRENGHVPFHPSSSVPPAINSIGSNANTGLPCQIHPSPLKRSMSLIPTSPQVPGEWPSPEELGARAAFTTPDHAPLSPQSSVASSGSEQTEEQGSSRNTFQEDGSGMKDVPSWLKSLRLHKYAALFSQMSYEEMMTLTEQHLESQNVTKGARHKIALSIQKLRERQSVLKSLEKDVLEGGNLRNALQELQQIIITPIKAYSVLQATVAAATTTPTAKDGAPGEPPLPGAEPPLAHPGTDKGTEAKDPPAVENYPPPPAPAPTDGSEPAPAPVADGDIPSQFTRVMGKVCTQLLVSRPDEENITSYLQLIEKCLTHEAFTETQKKRLLSWKQQVLKLLRTFPRKAALEMQNYRQQKGWAFGSNSLPIAGSVGMGVARRTQRQFPMPPRALPPGRMGLLSPSGIGGVSPRHALTPQPWRPGPTEPVVCQPWRQQQHAQSEPQLCAAHPLAPGPLVTPGHSHVPSRLPGSWA

SEQ ID NO: 50210 - protein, 225 aa, Homo sapiens
  MOD_RES (1)..(1): Any amino acid
XTQSLIKDLKNLYLNKAVNFSDHLLSSAAEGDGGLCGSRSSWVSDYSQSTSDTIEKIKRIKNFKTKTFQEKKEQLIPENRLLLKEVGPTGEGRVSVIEQLLDEGADPNCCDEDNRPVITVAVMNKHHEAIPVLVQRGADIDQQWGPLRNTALHEATLLGLAGRESTATLLGCNASIQKKNAGGQTAYDLALNTGDDLVTSLFAAKFGQGLEDQLAQTRSLSLDDC

SEQ ID NO: 50211 - protein, 88 aa, Homo sapiens
MFYIIGGVATLLLILVIIVFKEKPKYPPSRAQSLSYALTSPDASYLGSIARLFKNLNFVLLVITYGLNAGAFYALSTLLNRMVIWHYP

SEQ ID NO: 50212 - protein, 543 aa, Homo sapiens
MPSLPQEGVIQGPSPLDLNTELPYQSTMKRKVRKKKKKGTITANVAGTKFEIVRLVIDEMGFMKTPDEDETSNLIWCDSAVQQEKISELQNYQRINHFPGMGEICRKDFLARNMTKMIKSRPLDYTFVPRTWIFPAEYTQFQNYVKELKKKRKQKTFIVKPANGAMGHGISLIRNGDKLPSQDHLIVQEYIEKPFLMEGYKFDLRIYILVTSCDPLKIFLYHDGLVRMGTEKYIPPNESNLTQLYMHLTNYSVNKHNEHFERDETENKGSKRSIKWFTEFLQANQHDVAKFWSDISELVVKTLIVAEPHVLHAYRMCRPGQPPGSESVCFEVLGFDILLDRKLKPWLLEINRAPSFGTDQKIDYDVKRGVLLNALKLLNIRTSDKRRNLAKQKAEAQRRLYGQNSIKRLLPGSSDWEQQRHQLERRKEELKERLAQVRKQISREEHENRHMGNYRRIYPPEDKALLEKYENLLAVAFQTFLSGRAASFQRELNNPLKRMKEEDILDLLEQCEIDDEKLMGKTTKTRGPKGRITHYVVKLFKNT

SEQ ID NO: 50213 - protein, 238 aa, Homo sapiens
  MOD_RES (1)..(1): Any amino acid
XQPNCALKEHSMSNIASVKSPYEAENSGEELDQRYSKAKPMCNTCGKVFSEASSLRRHMRIHKGVKPYVCHLCGKAFTQCNQLKTHVRTHTGEKPYKCELCDKGFAQKCQLVFHSRMHHGEEKPYKCDVCNLQFATSSNLKIHARKHSGEKPYVCDRCGQRFAQASTLTYHVRRHTGEKPYVCDTCGKAFAVSSSLITHSRKHTGEKPYICGICGKSFISSGELNKHFRSHTVVWSMN

SEQ ID NO: 50214 - protein, 92 aa, Homo sapiens
MDELLRERDILNKNMLKAVNATQKQTDLVKLHEQAKRNLEGEIQNYKDEAQKQRKIIFHLEKERDRYINQASDLTQKADSVRMPWPLDKGKW

SEQ ID NO: 50215 - protein, 267 aa, Homo sapiens
MKASLQRPEIKLESLKEDIKEFFKISGWEKKLQNAVYSELSVFPLPSHPAAPPEHLKEPLVYMRKAQGSWEKRILKSLNSMCTELSIPLARKRPVGEQKELLNKWNEMGTDEPDLSLFRPVYAPKDFLEVLINLRNPNYENGDSLSFRTHLGLIQVPLKVKDIPELKECFVELGLNIGQLGIDDSTQVPPELFENEHVRIGQKVLAEQDSAAAQQYIRQGSPTALRAELWALILNISSQPEDVLYYEQLKTNVIQHDLLVDSLIYKD

SEQ ID NO: 50216 - protein, 2016 aa, Homo sapiens
MANFLLPRGTSSFRRFTRESLAAIEKRMAEKQARGSTTLQESREGLPEEEAPRPQLDLQASKKLPDLYGNPPQELIGEPLEDLDPFYSTQKTFIVLNKGKTIFRFSATNALYVLSPFHPIRRAAVKILVHSLFNMLIMCTILTNCVFMAQHDPPPWTKYVEYTFTAIYTFESLVKILARGFCLHAFTFLRDPWNWLDFSVIIMAYVSENIKLGNLSALRTFRVLRALKTISVIPGLKTIVGALIQSVKKLADVMVLTVFCLSVFALIGLQLFMGNLRHKCVRNFTALNGTNGSVEADGLVWESLDLYLSDPENYLLKNGTSDVLLCGNSSDAGTCPEGYRCLKAGENPDHGYTSFDSFAWAFLALFRLMTQDCWERLYQQTLRSAGKIYMIFFMLVIFLGSFYLVNLILAVVAMAYEEQNQATIAETEEKEKRFQEAMEMLKKEHEALTIRGVDTVSRSSLEMSPLAPVNSHERRSKRRKRMSSGTEECGEDRLPKSDSEDGPRAMNHLSLTRGLSRTSMKPRSSRGSIFTFRRRDLGSEADFADDENSTAGESESHHTSLLVPWPLRRTSAQGQPSPGTSAPGHALHGKKNSTVDCNGVVSLLGAGDPEATSPGSHLLRPVMLEHPPDTTTPSEEPGGPQMLTSQAPCVDGFEEPGARQRALSAVSVLTSALEELEESRHKCPPCWNRLAQRYLIWECCPLWMSIKQGVKLVVMDPFTDLTITMCIVLNTLFMALEHYNMTSEFEEMLQVGNLVFTGIFTAEMTFKIIALDPYYYFQQGWNIFDSIIVILSLMELGLSRMSNLSVLRSFRLLRVFKLAKSWPTLNTLIKIIGNSVGALGNLTLVLAIIVFIFAVVGMQLFGKNYSELRDSDSGLLPRWHMMDFFHAFLIIFRILCGEWIETMWDCMEVSGQSLCLLVFLLVMVIGNLVVLNLFLALLLSSFSADNLTAPDEDREMNNLQLALARIQRGLRFVKRTTWDFCCGLLRQRPQKPAALAAQGQLPSCIATPYSPPPPETEKVPPTRKETRFEEGEQPGQGTPGDPEPVCVPIAVAESDTDDQEEDEENSLGTEEESSKQQESQPVSGGPEAPPDSRTWSQVSATASSEAEASASQADWRQQWKAEPQAPGCGETPEDSCSEGSTADMTNTAELLEQIPDLGQDVKDPEDCFTEGCVRRCPCCAVDTTQAPGKVWWRLRKTCYHIVEHSWFETFIIFMILLSSGALAFEDIYLEERKTIKVLLEYADKMFTYVFVLEMLLKWVAYGFKKYFTNAWCWLDFLIVDVSLVSLVANTLGFAEMGPIKSLRTLRALRPLRALSRFEGMRVVVNALVGAIPSIMNVLLVCLIFWLIFSIMGVNLFAGKFGRCINQTEGDLPLNYTIVNNKSQCESLNLTGELYWTKVKVNFDNVGAGYLALLQVATFKGWMDIMYAAVDSRGYEEQPQWEYNLYMYIYFVIFIIFGSFFTLNLFIGVIIDNFNQQKKKLGGQDIFMTEEQKKYYNAMKKLGSKKPQKPIPRPLNKYQGFIFDIVTKQAFDVTIMFLICLNMVTMMVETDDQSPEKINILAKINLLFVAIFTGECIVKLAALRHYYFTNSWNIFDFVVVILSIVGTVLSDIIQKYFFSPTLFRVIRLARIGRILRLIRGAKGIRTLLFALMMSLPALFNIGLLLFLVMFIYSIFGMANFAYVKWEAGIDDMFNFQTFANSMLCLFQITTSAGWDGLLSPILNTGPPYCDPTLPNSNGSRGDCGSPAVGILFFTTYIIISFLIVVNMYIAIILENFSVATEESTEPLSEDDFDMFYEIWEKFDPEATQFIEYSVLSDFADALSEPLRIAKPNQISLINMDLPMVSGDRIHCMDILFAFTKRVLGESGEMDALKIQMEEKFMAANPSKISYEPITTTLRRKHEEVSAMVIQRAFRRHLLQRSLKHASFLFRQQAGSGLSEEDAPEREGLIAYVMSENFSRPLGPPSSSSISSTSFPPSYDSVTRATSDNLQVRGSDYSHSEDLADFPPSPDRDRESIV

SEQ ID NO: 50217 - protein, 1202 aa, Homo sapiens
QLEKDKKQLEKENKRLRQQAEIKDTTLEENNVKIGNLEKENKTLSKEIGIYKESCVRLKELEKENKELVKRATIDIKTLVTLREDLVSEKLKTQQMNNDLEKLTHELEKIGLNKERLLHDEQSTDDSRYKLLESKLESTLKKSLEIKEEKIAALEARLEESTNYNQQLRQELKTVKKNYEALKQRQDEERMVQSSPPISGEDNKWERESQETTRELLKVKDRLIEVERNNATLQAEKQALKTQLKQLETQNNNLQAQILALQRQTVSLQEQNTTLQTQNAKLQVENSTLNSQSTSLMNQNAQLLIQQSSLENENESVIKEREDLKSLYDSLIKDHEKLELLHERQASEYESLISKHGTLKSAHKNLEVEHRDLEDRYNQLLKQKGQLEDLEKMLKVEQEKMLLENKNHETVAAEYKKLCGENDRLNHTYSQLLKETEVLQTDHKNLKSLLNNSKLEQTRLEAEFSKLKEQYQQLDITSTKLNNQCELLSQLKGNLEEENRHLLDQIQTLMLQNRTLLEQNMESKDLFHVEQRQYIDKLNELRRQKEKLEEKIMDQYKFYDPSPPRRRGNWITLKMRKLIKSKKDINRERQKSLTLTPTRSDSSEGFLQLPHQDSQDSSSVGSNSLEDGQTLGTKKSSMVALKRLPFLRNRPKDKDKMKACYRRSMSMNDLVQSMVLAGQWTGSTENLEVPDDISTGKRRKELGAMAFSTTAINFSTVNSSAGFRSKQLVNNKDTTSFEDISPQGVSDDSSTGSRVHASRPASLDSGRTSTSNSNNNASLHEVKAGAVNNQSRPQSHSSGEFSLLHDHEAWSSSGSSPIQYLKRQTRSSPVLQHKISETLESRHHKIKTGSPGSEVVTLQQFLEESNKLTSVQIKSSSQENLLDEVMKSLSVSSDFLGKDKPVSCGLARSVSGKTPGDFYDRRTTKPEFLRPGPRKTEDTYFISSAGKPTPGTQGKIKLVKESSLSRQSKDSNPYATLPRASSVISTAEGTTRRTSIHDFLTKDSRLPISVDSPPAAADSNTTAASSEYHLHQWSSHILDIPTHTIGSCAQNDLAIDMPEPLYAQARNSRTGRSHFLNQTFATIRMPSDAFGMLAKDSIGPFTVAHSSQPFLSLNTELVSNISGLPPRPVIRITDQASASLDKPAQKENEQFSDHQNPSNSNLQFSINSNNLVTSACLYPDDTEAALLVSEDNQTVWYEYGCI

SEQ ID NO: 50218 - protein, 50 aa, Homo sapiens
ENREVDRNEGLKFARKHSMLFIETGIRSVAQAGVQWCDHSSLQPQPSSPK

SEQ ID NO: 50219 - protein, 168 aa, Homo sapiens
GILQPTLYDPDFPQSLNYGGIGTIIGHELTHGYDDWGGQYDRSGNLLHWWTEASYSRFLRKAECIVRLYDNFTVYNQRAYQKWVREHGPEHPLPRLKYTHDQLFFIAFAQNWCIKRRSQSIYLQVLTDKHAPEHYRVLGSVSQFEEFGRAFHCPKDSPMNPAHKCSVW

SEQ ID NO: 50220 - protein, 169 aa, Homo sapiens
  MOD_RES (1)..(1): Any amino acid
XPGQPLTKNKFKVLYEKEQKGPVTALCHCNGHLVSAIGQKLYIHQMISVKNFILAADVMKSISLLRYQEESKTLSLVSRDAKPLEVYSVDFMVDNAQLGFLVSDRDRNLMVYMYLPEAKESFGGMRLLRRADFHVGAHVNTFWRTPCRGATEGLSKKSVVWENKHITWF

SEQ ID NO: 50221 - protein, 93 aa, Homo sapiens
MTFDLTKITKTSSSFEVRTWDPEGVIFYGDTNPKDDWFMLGLRDGRPEIQLHNHWAQLTVGAGPRLDDGRWHQVEVKMEGDSVLLEVDGEEVL

SEQ ID NO: 50222 - protein, 60 aa, Homo sapiens
MAALLRSARWLLRAGAAPRLPLSLRLLPGGPGRLHAASYLPAARAGPVAGRDWVSPCWPR

SEQ ID NO: 50223 - protein, 875 aa, Homo sapiens
MASAAVESFVTKQLDLLELERDAEVEERRSWQENISLKELQSRGVCLLKLQVSSQRTGLYGRLLVTFEPRRYGSAAALPSNSFTSGDIVGLYDAANEGSQLATGILTRVTQKSVTVAFDESHDFQLSLDRENSYRLLKLANDVTYRRLKKALIALKKYHSGPASSLIEVLFGRSAPSPASEIHPLTFFNTCLDTSQKEAVLFALSQKELAIIHGPPGTGKTTTVVEIILQAVKQGLKVLCCAPSNIAVDNLVERLALCKQRILRLGHPARLLESIQQHSLDAVLARSDSAQIVADIRKDIDQVFVKNKKTQDKREKSNFRNEIKLLRKELKEREEAAMLESLTSANVVLATNTGASADGPLKLLPESYFDVVVIDECAQALEASCWIPLLKARKCILAGDHKQLPPTTVSHKAALAGLSLSLMERLAEEYGARVVRTLTVQYRMHQAIMRWASDTMYLGQLTAHSSVARHLLRDLPGVAATEETGVPLLLVDTAGCGLFELEEEDEQSKGNPGEVRLVSLHIQALVDAGVPARDIAVVSPYNLQVDLLRQSLVHRHPELEIKSVDGFQGREKEAVILSFVRSNRKGEVGFLAEDRRINVAVTRARRHVAVICDSRTVNNHAFLKTLVEYFTQHGEVRTAFEYLDDIVPENYSHENSQGSSHAATKPQGPATSTRTGSQRQEGGQEAAAPARQGRKKPAGKSLASEAPSQPSLNGGSPEGVESQDGVDHFRAMIVEFMASKKMQLEFPPSLNSHDRLRVHQIAEEHGLRHDSSGEGKRRFITVSKRAPRPRAALGPPAGTGGPAPLQPVPPTPAQTEQPPREQRGPDQPDLRTLHLERLQRVRSAQGQPASKEQQASGQQKLPEKKKKKAKDPWLR

SEQ ID NO: 50224 - protein, 223 aa, Homo sapiens
  MOD_RES (1)..(1): Any amino acid
XEDFRFQPEENTVETEEPLSARRLTENMRRLKRGAKPVTNFVKNLSALSDWYSVYTSAIAFTVYMNAVWHGWAIPLFLFLAILRLSLNYLIARGWRIQWSIVPEVSEPVEPPKEDLTVSEKFQLVLDVAQKAQNLFGKMADILEKIKNLFMWVQPEITQKLYVALWAAFLASCFFPYRLVGLAVVLTRDLSLEGQRLPAPSKDGPSWDLGSLELSCPSWVGHH

SEQ ID NO: 50225 - protein, 182 aa, Homo sapiens
MKLVFLVLLFLGALGFLWMPFIRQPGLCLAGRRRSVQWCAVSQPEATKCFQWQRNMRKVRGPPVSCIKRDSPIQCIQAIAENRADAVTLDGGFIYEAGLAPYKLRPVAAEVYGTERQPRTHYYAVAVVKKGGSFQLNELQGLKSCHTGLRRTAGWNVPIGTLRPFLNWTGPPEPIEAAVARF

SEQ ID NO: 50226 - protein, 55 aa, Homo sapiens
MNVMLENYKNLVFLAGIAVSKQDPITSLEQEKEPWNMKICEMVDESPETFGQSKT

SEQ ID NO: 50227 - protein, 1175 aa, Homo sapiens
MDALIIPVTMEVPCDSRGQRMWWAFLASSMVTFFGGLFIILLWRTLKYLWTVCCHCGGKTKEAQKINNGSSQADGTLKPVDEKEEAVAAEVGWMTSVKDWAGVMISAQTLTGRVLVVLVFALSIGALVIYFIDSSNPIESCQNFYKDFTLQIDMAFNVFFLLYFGLRFIAANDKLWFWLEVNSVVDFFTVPPVFVSVYLNRSWLGLRFLRALRLIQFSEILQFLNILKTSNSIKLVNLLSIFISTWLTAAGFIHLVENSGDPWENFQNNQALTYWECVYLLMVTMSTVGYGDVYAKTTLGRLFMVFFILGGLAMFASYVPEIIELIGNRKKYGGSYSAVSGRKHIVVCGHITLESVSNFLKDFLHKDRDDVNVEIVFLHNISPNLELEALFKRHFTQVEFYQGSVLNPHDLARVKIESADACLILANKYCADPDAEDASNIMRVISIKNYHPKIRIITQMLQYHNKAHLLNIPSWNWKEGDDAICLAELKLGFIAQSCLAQGLSTMLANLFSMRSFIKIEEDTWQKYYLEGVSNEMYTEYLSSAFVGLSFPTVCELCFVKLKLLMIAIEYKSANRESRSRKRILINPGNHLKIQEGTLGFFIASDAKEVKRAFFYCKACHDDITDPKRIKKCGCKRPKMSIYKRMRRACCFDCGRSERDCSCMSGRVRGNVDTLERAFPLSSVSVNDCSTSFRAFEDEQPSTLSPKKKQRNGGMRNSPNTSPKLMRHDPLLIPGNDQIDNMDSNVKKYDSTGMFHWCAPKEIEKVILTRSEAAMTVLSGHVVVCIFGDVSSALIGLRNLVMPLRASNFHYHELKHIVFVGSIEYLKREWETLHNFPKVSILPGTPLSRADLRAVNINLCDMCVILSANQNNIDDTSLQDKECILASLNIKSMQFDDSIGVLQANSQGFTPPGMDRSSPDNSPVHGMLRQPSITTGVNIPIITELVNDTNVQFLDQDDDDDPDTELYLTQPFACGTAFAVSVLDSLMSATYFNDNILTLIRTLVTGGATPELEALIAEENALRGGYSTPQTLANRDRCRVAQLALLDGPFADLGDGGCYGDLFCKALKTYNMLCFGIYRLRDAHLSTPSQCTKRYVITNPPYEFELVPTDLIFCLMQFDHNAGQSRASLSHSSHSSQSSSKKSSSVHSIPSTANRQNRPKSRESRDKQNRKEMVYR

SEQ ID NO: 50228 - protein, 78 aa, Homo sapiens
MIGFLTEDKKKWNLGSNAKDPRGMYQCKGSQNKSKPLQVYYRTSDKQTLLPNDQLYQPLKDREDDQYSHLQGNQLRRN

SEQ ID NO: 50229 - protein, 228 aa, Homo sapiens
TISWFRDGQLLPSSNYSNIKIYNTPSASYLEVTPDSENDFGNYNCTAVNRIGQESLEFILVQADTPSSPSIDQVEPYSSTAQVQFDEPEATGGVPILKYKAEWRAVGEEVWHSKWYDAKEASMEGIVTIVGLKPETTYAVRLAALNGKGLGEISAASEFKTQPVHSPPPREPSAPKLEGQMGEDGNSIKVNLIKQDDGGSPIRHYLVRYRALSSEWKPEIRLPSGSDH

SEQ ID NO: 50230 - protein, 198 aa, Homo sapiens
VHHIVKQALQRYSEDRIGLADYALESGGASVISTRCSETYETKTALLSLFGIPLWYHSQSPRVILQPDVHPGNCWAFQGPQGFAVVRLSARIRPTAVTLEHVPKALSPNSTISSAPKDFAIFGFDEDLQQEGTLLGKFTYDQDGEPIQTFHFQVRDAAVLAEVAQTPHPGSRCSLGTYPARHGVQRGKPCSPFPQLKM

SEQ ID NO: 50231 - protein, 300 aa, Homo sapiens
MGYIQSWRPNFPENLAQKLPNLVELYLHSNNIVVVPEAIGSLVKLQCLDLSDNALEIVCPEIGRLRALRHLRLANNQLQFLPPEVGDLKELQTLDISTNRLLTLPERLHMCLSLQYLTVDRNRLWYVPRHLCQLPSLNELSMAGNRLAFLPLDLGRSRELQYVYVDNNIHLKGLPSYLYNKVIGCSGCGAPIQVSEVKLLSFSSGQRTVFLPAEVKAIGTEHDHVLPLQELAMRGLYHTYHSLLKDLNFLSPISLPRSLLELLHCPLGHCHRCSEPMFTIVYPKLFPLRETPMAGLHQWK

SEQ ID NO: 50232 - protein, 100 aa, Homo sapiens
MAGSVADSDAVVKLDDGHLNNSLSSPVQADVYFPRLIVPFCGHIKGGMRPGKKVLVMGIVDLNPERWKFFVSTHVSECLWMDTNFLIFTIAFKRYLQLTP

SEQ ID NO: 50233 - protein, 17 aa, Homo sapiens
MKRNTCDLLSRSKSDKK

SEQ ID NO: 50234 - protein, 224 aa, Homo sapiens
RPLLKDAAHPSEATFSCDCVADALILRVRSELSGLPFYWNFHCMLASPSLVSQHLIRPLMGMSLALQCQVRELATLLHMKDLEIQDYQESGATLIRDRLKTEPFEENSFLEQFMIEKLPEACSIGDGKPFVMNLQDLYMAVTTQEVQVGQKHQGAGEPSRGDPHTSNSASLQGIDSQCVNQPEQLVSSAPTLSAPEKESTGTSGPLQRPQLSKVKRKKPRGLFS

SEQ ID NO: 50235 - protein, 122 aa, Homo sapiens
MSAVCGGAARMLRTPGRHGYAAEFSPYLPGRLACATAQHYGIAGCGTLLILDPDEAGLRLFRSFDWNDGLFDVTWSENNEHVLITCSGDGSLQLWDTAKAAGPLQVYKEHAQEYVQGSCVVK

SEQ ID NO: 50236 - protein, 132 aa, Homo sapiens
MEGSLEREAPAGALAAVLKHSSTLPPESTQVRGYDFNRGVNYRALLEAFGTTGFQATNFGRAVQQVNAMIEKKLEPLSQDEDQHADLTQSRRPLTSCTIFLGYTSNLISSGIRETIRYLVQHNMVGTWWTYW

SEQ ID NO: 50237 - protein, 148 aa, Homo sapiens
MAWVLKMDEVIESGLVHDFDASLSGIGQELGAGAYSMSDVLALPIFKQEDSSLPLDGETEHPPFQYVMCAATSPAVKLHDETLTYLNQGQSYEIRMLDNRKMGDMPEINGKLVKSIIRVVFHDRRLQYTEHQQLEGWKWNRPGDRLLD

SEQ ID NO: 50238 - protein, 84 aa, Homo sapiens
MAQSINITELNLPQLEMLKNQLDQTAEDAKDFFKRKIDFLTKQMEKIQPALQEKHAMKQAVMEMMSQKIQQLTALGAAQATAKA

SEQ ID NO: 50239 - protein, 150 aa, Homo sapiens
VSLPSPTSTDMLKKEEAIPWPGTLAIVHSYIAYKAAKEEEKQKLLKWSSDLKQEREQLEQKVKQLSNSISKCMEMKNTILARQKEMHSSLEKVKQLIRLIHGIDLSKPVDSEATVGAISNGPDCTPPANAATSTPAPSPSSQSCTANCNQ

SEQ ID NO: 50240 - protein, 77 aa, Homo sapiens
  MOD_RES (1)..(1): Any amino acid
XNRGTVIVERWWKVPLAGEGRKPRLHRRHRVYKLVEDTKHRPKENLELILTQSVESKARAEALPLRLMLESGVTWSQ

SEQ ID NO: 50241 - protein, 137 aa, Homo sapiens
MDEAHIDQVRRKALQEEIDRESGKTEASETRKWTGTQFGQWDTAGFENEDQKLKFLRLMGGFKNLSPSFSRPASTIARPNMALGKKAADSLQQNLQRDYDRAMSWKYSRGAGLGFSTAPNKIFYIDRNASKSVKLED

SEQ ID NO: 50242 - protein, 10 aa, Homo sapiens
MSLADLTKTN

SEQ ID NO: 50243 - protein, 346 aa, Homo sapiens
MDLNLSLLAREATPGLLPGLNGLPRPTPPKVAKKPKKAVLFFEVEILDAKTREKLCFLDKVEPHATIAEIKNLFTKTHPQWYPARQSLRLDPKGKSLKDEDVLQKLPVGTTATLYFRDLGAQISWVTVFLTEYAGPLFIYLLFYFRVPFIYGHKYDFTSSRHTVVHLACICHSFHYIKRLLETLFVHRFSHGTMPLRNIFKNCTYYWGFAAWMAYYINHPLYTPPTYGAQQVKLALAIFVICQLGNFSIHMALRDLRPAGSKTRKIPYPTKNPFTWLFLLVSCPNYTYEVGSWIGFAIMTQCLPVALFSLVGFTQMTIWAKGKHRSYLKEFRDYPPLRMPIIPFLL

SEQ ID NO: 50244 - protein, 76 aa, Homo sapiens
MSPFSLLILVICAFSLFFLINLTRGLSILLVFSKNQLLALLLLSIVSLFSISLISALIFFDLLPSTFFGFILLFFF

SEQ ID NO: 50245 - protein, 225 aa, Homo sapiens
MKGYQSLVFNFFFLKLSAENESTPIQQLLEHFLRQLQRKDPHGFFAFPVTDAIAPGYSMIIKHPMDFGTMKDKIVANEYKSVTEFKADFKLMCDNAMTYNRPDTVYYKLAKKILHAGFKMMSKERLLALKRSMSFMQDMDFSQQAALLGNEDTAVEEPVPEVVPVQVETAKKSKKPSREVISCMFEPEGNACSLTDSTAEEHVLALVEHAADEARDRINRFLPGG

SEQ ID NO: 50246 - protein, 438 aa, Homo sapiens
MSLTVVSMACVGFFLLQGAWPLMGGQDKPFLSARPSTVVPQGGHVALQCHYRRGFNNFMLYKEDRSHVPIFHGRIFQESFIMGPVTPAHAGTYRCRGSRPHSLTGWSAPSNPLVIMVTGNHRKPSLLAHPGTLLKSGETVILQCWSDVMFEHFFLHREGISEDPSRLVGQIHDGVSKANFSIGPLMPVLAGTYRCYGSVPHSPYQLSAPSDPLDIVITGLYEKPSLSAQPGPTVQAGENVTLSCSSWSSYDIYHLSREGEAHERRLRAVPKVNRTFQADFPLGPATHGGTYRCFGSFRALPCVWSNSSDPLLVSVTGICRHLHVLIGTSVVIFLFILLLFFLLYRWCSNKKNAAVMDQEPAGDRTVNRQDSDEQDPQEVTYAQLDHCVFIQRKISRPSQRPKTPPTDTSVYTELPNAEPRSKVVSCPRAPQSGLEGVF

SEQ ID NO: 50247 - protein, 198 aa, Homo sapiens
  MOD_RES (1)..(1): Any amino acid
XLTEDFFAFHNHSAEGYEQDTEFGNTAHLGDCHEILPTSTTPDYKIFGGPTSDMEVSSSSVTTMASIPEITPKVIDTWRPKLTSSRKFVVQDDPNTSDFTDPLSGIPKGVRWEVQSGESNQMVHMNVLITCVFAAFVLGAFIAGVAVYCYRDMFVRKNRKIHKDAESAQSCTDSSGSFAKLNGLFDSPVKEYQQNIDS

SEQ ID NO: 50248 - protein, 186 aa, Homo sapiens
MTGGIFVAPVVILGTCYGFICYNIWCNVRGKTASRQSKGAEQAGVAFQKGFLLAPCVSSVKSISRAKIRTVKMTFVIVTAYIVCWAPFFIIQMWSVWDPMSVWTESENPTITITALLGSLNSCCNPWIYMFFSGHLLQDCVQSFPCCQNMKEKFNKEDTDSMSRRQTFYSNNRSPTNSTDKKMRTG

SEQ ID NO: 50249 - protein, 113 aa, Homo sapiens
MSALLRLLRTGAPAAACLRLGTSAGTGSRRAMALYHTEERGQPCSQNYRLFFKNVTGHYISPFHDIPLKVNSKEENGIPMKKARNDEYENLFNMIVEIPRWTNAKMEVLKIAM

SEQ ID NO: 50250 - protein, 33 aa, Homo sapiens
  MOD_RES (1)..(1): Any amino acid
XGWEQLEVTCTPYLKETLNSIWNVEDHINPKCE

SEQ ID NO: 50251 - protein, 116 aa, Homo sapiens
STHNELEKNRRAHLRLCLERLKVLIPLGPDCTRHTTLGLLNKAKAHIKKLEEAERKSQHQLENLEREQRFLKWRLEQLQGPQEMERIRMDSIGSTISSDRSDSERGRQLASSLMKY

SEQ ID NO: 50252 - protein, 222 aa, Homo sapiens
MSDEEARQSGGSSQAGVVTVSDVQELMRRKEEIEAQIKANYDVLESQKGIGMNEPLVDCEGYPRSDVDLYQVRTARHNIICLQNDHKAVMKQVEEALHQLHARDKEKQARDMAEAHKEAMSRKLGQSESQGPPRAFAKVNSISPGSPASIAGLQVDDEIVEFGSVNTQNFQSLHNIGSVVQHSEGPLNVTVIRRGEKHQLRLVPTRWAGKGLLGCNIIPLQR

SEQ ID NO: 50253 - protein, 108 aa, Homo sapiens
MCYVPSPVLASVGDTGERRGRRPRGRFQFPRHVWHLRCSTSSSIDPSMCRALTACQALGIQRRSPLLGAHSLVAGRPPPRQTVPVQDDDRFEDLEEANPFSFREFLKT

SEQ ID NO: 50254 - protein, 111 aa, Homo sapiens
MDFVMKQALGGATKDMGKMLGGEEEKDPDAQKKEEERQEALRQQEEERKAKHARMEAEREKVRQQIRDKYGLKKKEEKEAEEKAALEQPCEGSLTRPKKAIPAGCGDEEEE

SEQ ID NO: 50255 - protein, 55 aa, Homo sapiens
  MOD_RES (1)..(1): Any amino acid
XGFGGSRGGGGSYNDFGNYNNQSSNFGPMKGGNFGGRSSGPYGGGGQYFAKPRNQ

SEQ ID NO: 50256 - protein, 206 aa, Homo sapiens
  MOD_RES (1)..(1): Any amino acid
XGPKKIAELNLEALANHQEIQAAGQEPKNTAEVLQHPNTSVLECLDSVGQKLLFLTRETDAGELPSSRNCQTIKCLSNKEMRIKWTEISTVYAGPFSKNCNLRALKRLFKSFGPVQSMTFVLETRQVQRPVTELTLDCDTLVNELEGDSENQGSIYLSGVSETFKEQLLQEPRLFLGLEAVILPKDLKSGKQKKYCFLKFKSFGSA

SEQ ID NO: 50257 - protein, 263 aa, Homo sapiens
MSGALDVLQMKEEDVLKFLAAGTHLGGTNLDFQMEQYIYKRKSDGIYIINLKRTWEKLLLAARAIVAIENPADVSVISSRNTGQRAVLKFAAATGATPIAGRFTPGTFTNQIQAAFREPRLLVVTDPRADHQPLTEASYVNLPTIALCNTDSPLRYVDIAIPCNNKGAHSVGLMWWMLAREVLRMRGTISREHPWEVMPDLYFYRDPEEIEKEEQAAAEKAVTKEEFQGEWTAPAPEFTATQPEVADWSEGVQVPSVPIQQFP

SEQ ID NO: 50258 - protein, 141 aa, Homo sapiens
MGTNDEDELSLGLPTELKRKKEQLDSGHRPSKETQSAAGLTLPLNSDQTFHLMSNLAGDVITAAVTAAIKDQLEGVQQALSQAAPIPEEDTDTEEGDDFELLDQSELDQIESELGLTQDQEAEAQQNKKSSGFLSNLLGGH

SEQ ID NO: 50259 - protein, 662 aa, Homo sapiens
MAITLQPSDLIFEFASNGMDDDIHQLEDPSVFPAVIVEQVPYPDLLHLYSGLELDDVHNGIITDGTLCMTQDQILEGSFLLTDDNEATSHTMSTAEVLLNMESPSDILDEKQIFSTSEMLPDSDPAPAVTLPNYLFPASEPDALNRAGDTSDQEGHSLEEKASREESAKKTGKSKKRIRKTKGNRSTSPVTDPSIPIRKKSKDGKGSTIYLWEFLLALLQDRNTCPKYIKWTQREKGIFKLVDSKAVSKLWGKQKNKPDMNYETMGRALRYYYQRGILAKVEGQRLVYQFKEMPKDLVVIEDEDESSEATAAPPQASTASVASASTTRRTSSRVIQICPPGQGQLFLGEAKNSACRSPAICESGIGTVARRGDPHYLHHARLSSRGPGQAHQSCECIFSAQQHPPRSGPRGSGSALTLQTIPLTTVLTNGPPASTTAPTQLVLQSVPAASTFKDTFTLQASFPLNASFQDSQVAAPGAPLILSGLPQLLAGANRPTNPAPPTVTGAGPAGPSSQPPGTVIAAFIRTSGTTAAPRVKEGPLRSSSYVQGMVTGAPMEGLLVPEETLRELLRDQAHLQPLPTQVVSRGSHNPSLLGNQTLSPPSRPTVGLTPVAELELSSGSGSLLMAEPSVTTSGSLLTRSPTPAPFSPFNPTSLIKMEPHDI

SEQ ID NO: 50260 - protein, 923 aa, Homo sapiens
MGTPRAQHPPPPQLLFLILLSCPWIQGLPLKEEEILPEPGSETPTVASEALAELLHGALLRRGPEMGYLPGSDRDPTLATPPAGQTLAVPSLPRATEPGTGPLTTAVTPNGVRGAGPTAPELLTPPPGTTAPPPPSPASPGPPLGPEGGEEETTTTIITTTTVTTTVTSPVLCNNNISEGEGYVESPDLGSPVSRTLGLLDCTYSIHVYPGYGIEIQVQTLNLSQEEELLVLAGGGSPGLAPRLLANSSMLGEGQVLRSPTNRLLLHFQSPRVPRGGGFRIHYQAYLLSCGFPPRPAHGDVSVTDLHPGGTATFHCDSGYQLQGEETLICLNGTRPSWNGETPSCMASCGGTIHNATLGRIVSPEPGGAVGPNLTCRWVIEAAEGRRLHLHFERVSLDEDNDRLMVRSGGSPLSPVIYDSDMDDVPERGLISDAQSLYVELLSETPANPLLLSLRFEAFEEDRCFAPFLAHGNVTTTDPEYRPGALATFSCLPGYALEPPGPPNAIECVDPTEPHWNDTEPACKAMCGGELSEPAGVVLSPDWPQSYSPGQDCVWGVHVQEEKRILLQVEILNVREGDMLTLFDGDGPSARVLAQLRGPQPRRRLLSSGPDLTLQFQAPPGPPNPGLGQGFVLHFKEVPRNDTCPELPPPEWGWRTASHGDLIRGTVLTYQCEPGYELLGSDILTCQWDLSWSAAPPACQKIMTCADPGEIANGHRTASDAGFPVGSHVQYRCLPGYSLEGAAMLTCYSRDTGTPKWSDRVPKCALKYEPCLNPGVPENGYQTLYKHHYQAGESLRFFCYEGFELIGEVTITCVPGHPSQWTSQPPLCKVAYEELLDNRKLEVTQTTDPSRQLEGGNLALAILLPLGLVIVLGSGVYIYYTKLQGKSLFGFSGSHSYSPITVESDFSNPLYEAGDTREYEVSI

SEQ ID NO: 50261 - protein, 167 aa, Homo sapiens
MRFCPWPHWRHREARRVWELVFPECPVPDGSRPPLSQSCPCRTGTRTAGHRVSGPVEAPAVVLGYMSQSKHTEARELMYSGALLFFSHGQQNSAADLSMLVLESLEKAEVEVADELLENLAKVFSLMDPNSPERVTFVSRALKWSSGGSGKLGHPRLHQLLALTLWK

SEQ ID NO: 50262 - protein, 17 aa, Homo sapiens
MESTTTSFPNETATIIS

SEQ ID NO: 50263 - protein, 361 aa, Homo sapiens
MGSFQLEDFAAGWIGGAASVIVGHPLDTVKTRLQAGVGYGNTLSCIRVVYRRESMFGFFKGMSFPLASIAVYNSVVFGVFSNTQRFLSQHRCGEPEASPPRTLSDLLLASMVAGVVSVGLGGPVDLIKIRLQMQTQPFRDANLGLKSRAVAPAEQPAYQGPVHCITTIVRNEGLAGLYRGASAMLLRDVPGYCLYFIPYVFLSEWITPEACTGPSPCAVWLAGGMAGAISWGTATPMDVVKSRLQADGVYLNKYKGVLDCISQSYQKEGLKRHHCERGAGLPHECGHVPWVRAVAAGYPRGPRSDEPISARSLLRLSPLPDILFSLLSYLSLASPALCHPGCRSLLLQDAGLLSQLGVSSH

SEQ ID NO: 50264 - protein, 41 aa, Homo sapiens
MEGGLADGEPDRTSVLKEGRKIFLKIKMNLHFLCQRASLNL

SEQ ID NO: 50265 - protein, 76 aa, Homo sapiens
MHCAEAGKALIKFNHCEKYIYSFSVPQCCPLCQQDLGSRKLEDAPVSIANPFTNGHQEKCSFLLRPTQGTFLRGCV

SEQ ID NO: 50266 - protein, 128 aa, Homo sapiens
MRTPRLRAQPRGAVYQAPSPPPAPVGLGSMAVFRSGLLVLTTPLASLAPRLASILTSAARLVNHTLYVHLQPGMSLEGPAQPQSSPVQATFEVLDFITHLYAGADVHRHLDVRILLTNIRTKSTFLPP

SEQ ID NO: 50267 - protein, 76 aa, Homo sapiens
MPIMGSSVYITVELAIAVLAILGNVLVCWAVWLNSNLQNVTNYFVVSLAAADIAVGVLAIPFAITISTGFCAACHG

SEQ ID NO: 50268 - protein, 1727 aa, Homo sapiens
MHLKHLRTLLSPQDGAAKVTCMAWSQNNAKFAVCTVDRVVLLYDEHGERRDKFSTKPADMKYGRKSYMVKGMAFSPDSTKIAIGQTDNIIYVYKIGEDWGDKKVICNKFIQTSAVTCLQWPAEYIIVFGLAEGKVRLANTKTNKSSTIYGTESYVVSLTTNCSGKGILSGHADGTIVRYFFDDEGSGESQGKLVNHPCPPYALAWATNSIVAAGCDRKIVAYGKEGHMLQTFDYSRDPQEREFTTAVSSPGGQSVVLGSYDRLRVFNWIPRRSIWEEAKPKEITNLYTITALAWKRDGSRLCVGTLCGGVEQFDCCLRRSIYKNKFELTYVGPSQVIVKNLSSGTRVVLKSHYGYEVEEVKILGKERYLVAHTSETLLLGDLNTNRLSEIAWQGSGGNEKYFFENENVCMIFNAGELTLVEYGNNDTLGSVRTEFMNPHLISVRINERCQRGTEDNKKLAYLIDIKTIAIVDLIGGYNIGTVSHESRVDWLELNETGHKLLFRDRKLRWVPGSDVLVAQNRNSLCVWYNIEAPERVTMFTIRGDVIGLERGGGKTEVMVMEGVTTVAYTLDEGLIEFGTAIDDGNYIRATAFLETLEMTPETEAMWKTLSKLALEARQLHIAERCFSALGQVAKARFLHETNEIADQVSREYGGEGTDFYQVRARLAMLEKNYKLAEMIFLEQNAVEEAMGMYQELHRWDECIAVAEAKGHPALEKLRRSYYQWLMDTQQEERAGELQESQGDGLAAISLYLKAGLPAKAARLVLTREELLANTELVEHITAALIKGELYERAGDLFEKIHNPQKALECYRKGNAFMKAVELARLAFPVEVVKLEEAWGDHLVQQKQLDAAINHYIEARCSIKAIEAALGARQWKKAIYILDLQDRNTASKYYPLVAQHYASLQEYEIAEELYTKGDRTKDAIDMYTQAGRWEQAHKLAMKCMRPEDVSVLYITQAQEMEKQGKYREAERLYVTVQEPDLAITMYKKHKLYDDMIRLVGKHHPDLLSDTHLHLGKELEAEGRLQEAEYHYLEAQEWKATVNMYRASGLWEEAYRVARTQGGANAHKHVAYLWAKSLGGEAAVRLLNKLGLLEAAVDHAADNCSFEFAFELSRLALKHKTPEVHLKYAMFLEDEGKFEEAEAEFIRAGKPKEAVLMFVHNQDWEAAQRVAEAHDPDSVAEVLVGQARGALEEKDFQKAEGLLLRAQRPGLALNYYKEAGLWSDALRICKDYVPSQLEALQEEYEREATKKGARGVEGFVEQARHWEQAGEYSRAVDCYLKVRDSGNSGLAEKCWMKAAELSIKFLPPQRNMEVVLAVGPQLIGIGKHSAAAELYLNLDLVKEAIDAFIEGEEWNKAKRVAKELDPRYEDYVDQHYKEFLKNQGKVDSLVGVDVIAALDLYVEQGQWDKCIETATKQNYKILHKYVALYATHLIREGSSAQALALYVQHGAPANPQNFNIYKRIFTDMVSSPGTNCAEAYHSWADLRDVLFNLCENLVKSSEANSPAHEEFKTMLLIAHYYATRSAAQSVKQLETVAARLSVSLLRHTQLLPVDKAFYEAGIAAKAVGWDNMAFIFLNRFLDLTDAIEEGTLDGLDHSDFQDTDIPFEVPLPAKQHVPEAEREEVRDWVLTVSMDQRLEQVLPRDERGAYEASLVAASTGVRALPCLITGYPILRNKIEFKRPGKAANKDNWNKFLMAIKTSHSPVCQDVLKFISQWCGGLPSTSFSFQ

SEQ ID NO: 50269 - protein, 333 aa, Homo sapiens
MVYRYCCKLNKKLKSYSLSRKKIVHYTCFDQRKRANAAFLIGAYAVIYLKKTPEEAYRALLSGSNPPYLPFRDASFGNCTYNLTILDCLQGIRKGLQHGFFDFETFDVDEYEHYERVENGDFNWIVPGKFLAFSGPHPKSKIENGYPLHAPEAYFPYFKKHNVTAVVRLNKKIYEAKRFTDAGFEHYDLFFIDGSTPSDNIVRRFLNICENTEGAIAVHCKAGLGRTGTLIACYVMKHYRFTHAEIIAWIRICRPGSIIGPQQHFLEEKQASLWVQGDIFRSKLKNRPSSEGSINKILSGLDDMSIGGNLSKTQNMERFGEGQRMETVGRNDF

SEQ ID NO: 50270 - protein, 31 aa, Homo sapiens
MLLVYDLYLSPKLWALATPQKNGRVQEKVME

SEQ ID NO: 50271 - protein, 50 aa, Homo sapiens
MAIPGRQWGFTLVAQAGVQWCNLGSPQPPPPGFKRFSCLSLPNSCNYRPL

SEQ ID NO: 50272 - protein, 355 aa, Homo sapiens
MGLLSNSGQPERKFMQTFVLAPEGSVPNKFYVHNDMFRYEDEVFGDSEPELDEESEDEVEEEQEERQPSPEPVQENANSGYYEAHPVTNGIEEPLEESSHEPEPEPESETKTEELKPQVEEKNLEELEEKSTTPPPAEPVSLPQEPPKPRVEAKPEVQSQPPRVREQRPRERPGFPPRGPRPGRGDMEQNDSDNRRIIRYPDSHQLFVGNLPHDIDENELKEFFMSFGNVVELRINTKGVGGKLPNFGFVVFDDSEPVQRILIAKPIMFRGEVRLNVEEKKTRAARERETRGGGDDRRDIRRNDRGPGGPRGIVGGGMMRDRDGRGPPPRGGMAQKLGSGRGTGQMEGRFTGQRR

SEQ ID NO: 50273 - protein, 115 aa, Homo sapiens
  MOD_RES (1)..(1): Any amino acid
XTPVSTMSSSQPVSRPLQPIQPAPPLQPSGVPTSGPSQTTIHLLPTAPTTVNVTHRPVTQVTTRLPVPRAPANHQVVYTTLPAPPAQAPLRGTVMQAPAVRQVNPQNRELNRENC

SEQ ID NO: 50274 - protein, 112 aa, Homo sapiens
  MOD_RES (1)..(1): Any amino acid
XLVKLEKLFLGYNKIQDITELEKLDVISTLRELTVYGNPICRKMLHRHMLIFRLPNLQMLDGSPVNSDDRAKAEFHLAELQAKKNSRSNIIRMLWFEKKRGWREKGNQLRGF

SEQ ID NO: 50275 - protein, 63 aa, Homo sapiens
MERAREVIPRSQHQETPVYLGATAGMRLLRVPGSLLAKRKVPMAGLLSTICWANSVRKQGGSA

SEQ ID NO: 50276 - protein, 431 aa, Homo sapiens
MGQFLSSTFLEGSPATVWHDKLCDGERRGAREAVRIFQDQAKAKEEKLEKCGEDDETIPSEYRLKPATDKDGKPLLPEPEEKPKPRSESELIDELSEDFDRSECKEKPSKPTEKTEESKAAAPAPVSEAVCRTSMCSIQSAPPEPATLKGTVPDDAVEALADSLGKKEADPEDGKPVMDKVKEKAKEEDREKLGEKEETIPPDYRLEEVKDKDGKPLLPKESKEQLPPMSEDFLLDALSEDFSGPQNASSLKFEDAKLAAAISEVVSQTPASTTQAGAPPRDTSQSDKDLDDALDKLSDSLGQRQPDPDENKPMEDKVKEKAKAEHRDKLGERDDTIPPEYRHLLDDNGQDKPVKPPTKKSEDSKKPADDQDPIDALSGDLDSCPSTTETSQNTAKDKCKKAASSSKAPKNGGKAKDSAKTTEETSKPKDD

SEQ ID NO: 50277 - protein, 181 aa, Homo sapiens
  MOD_RES (1)..(1): Any amino acid
XLHEFDSLKDPEVNEFRRKMRKFSEEKILSLVGLSWMDWLKQTYPPEHEPSIPENLEDKLYGGKLIVAVHFENCQDVFSFQVSPNMNPIKVNELAIQKRLTIHGKEDEVSPYDYVLQVSGRVEYVFGDHPLIQFQHVWENNNPFQIVLVKGNKLNTEETVKVHVRAGLFHGTELLCKTIVS

SEQ ID NO: 50278 - protein, 35 aa, Homo sapiens
MEVQAPPGTTIGHVLQTWHPFLPKFSIQDADRQTV

SEQ ID NO: 50279 - protein, 757 aa, Homo sapiens
MAKRSSLYIRIVEGKNLPAKDITGSSDPYCIVKVDNEPIIRTATVWKTLCPFWGEEYQVHLPPTFHAVAFYVMDEDALSRDDVIGKVCLTRDTIASHPKGFSGWAHLTEVDPDEEVQGEIHLRLEVWPGARACRLRCSVLEARDLAPKDRNGTSDPFVRVRYKGRTRETSIVKKSCYPRWNETFEFELQEGAMEALCVEAWDWDLVSRNDFLGKVVIDVQRLRVVQQEEGWFRLQPDQSKSRRHDEGNLGSLQLEVRLRDETVLPSSYYQPLVHLLCHEVKLGMQGPGQLIPLIEETTSTECRQDVATNLLKLFLGQGLAKDFLDLLFQLELSRTSETNTLFRSNSLASKSVESFLKVAGMQYLHGVLGPIINKVFEEKKYVELDPSKVEVKDVGCSGLHRPQTEAEVLEQSAQTLRAHLGALLSALSRSVRACPAVVRATFRQLFRRVRERFPGAQHENVPFIAVTSFLCLRFFSPAIMSPKLFHLRERHADARTSRTLLLLAKAVQNVGNMDTPASRAKEAWMEPLQPTVHQGVAQLKDFITKLVDIEEKDELDLQRTLSLQAPPVKEGPLFIHRTKGKGPLMSSSFKKLYFSLTTEALSFAKTPSSKCVNELNQWLSALRKVSINNTGLLGSYHPGVFRGDKWSCCHQKEKTGQGCDKTRSRVTLQEWNDPLDHDLEAQLIYRHLLGVEAMLWERHRELSGGAEAGTVPTSPGKVPEDSLARLLRVLQDLREAHSSSPAGSPPSEPNCLLELQT

SEQ ID NO: 50280 - protein, 66 aa, Homo sapiens
MRMCTPIRGLLMALAVMFGTAMAFAPIPRITWEHREVHLVQFHEPDIYNYSALLLSEDKDTLYIGA

SEQ ID NO: 50281 - protein, 210 aa, Homo sapiens
MQQLQQQHLLSLQRQGLLTIQPGQPALPLQPLAQGMIPTELQQLWKEVTSAHTAEETTGNNHSSLDLTTTCVSSSAPSKTSLIMNPHASTNGQLSVHTPKRESLSHEEHPHSHPLYGHGVCKWPGCEAVCEDFQSFLKHLNSEHALDDRSTAQCRVQMQVVQQLELQLAKDKERLQAMMTHLHVKSTEPKAAPQPLNLVSSVTLSKSASE

SEQ ID NO: 50282 - protein, 977 aa, Homo sapiens
MASTRCKLARYLEDLEDVDLKKFKMHLEDYPPQKGCIPLPRGQTEKADHVDLATLMIDFNGEEKAWAMAVWIFAAINRRDLYEKAKRDEPKWGSDNARVSNPTVICQEDSIEEEWMGLLEYLSRISICKMKKDYRKKYRKYVRSRFQCIEDRNARLGESVSLNKRYTRLRLIKEHRSQQEREQELLAIGKTKTCESPVSPIKMELLFDPDDEHSEPVHTVVFQGAAGIGKTILARKMMLDWASGTLYQDRFDYLFYIHCREVSLVTQRSLGDLIMSCCPDPNPPIHKIVRKPSRILFLMDGFDELQGAFDEHIGPLCTDWQKAERGDILLSSLIRKKLLPEASLLITTRPVALEKLQHLLDHPRHVEILGFSEAKRKEYFFKYFSDEAQARAAFSLIQENEVLFTMCFIPLVCWIVCTGLKQQMESGKSLAQTSKTTTAVYVFFLSSLLQPRGGSQEHGLCAHLWGLCSLAADGIWNQKILFEESDLRNHGLQKADVSAFLRMNLFQKEVDCEKFYSFIHMTFQEFFAAMYYLLEEEKEGRTNVPGSRLKLPSRDVTVLLENYGKFEKGYLIFVVRFLFGLVNQERTSYLEKKLSCKISQQIRLELLKWIEVKAKAKKLQIQPSQLELFYCLYEMQEEDFVQRAMDYFPKIEINLSTRMDHMVSSFCIENCHRVESLSLGFLHNMPKEEEEEEKEGRHLDMVQCVLPSSSHAACSHGLVNSHLTSSFCRGLFSVLSTSQSLTELDLSDNSLGDPGMRVLCETLQHPGCNIRRLWLGRCGLSHECCFDISLVLSSNQKLVELDLSDNALGDFGIRLLCVGLKHLLCNLKKLWLVNSGLTSVCCSALSSVLSTNQNLTHLYLRGNTLGDKGIKLLCEGLLHPDCKLQVLELDNCNLTSHCCWDLSTLLTSSQSLRKLSLGNNDLGDLGVMMFCEVLKQQSCLLQNLGLSEMYFNYETKSALETLQEEKPELTVVFEPSW

SEQ ID NO: 50283 - protein, 135 aa, Homo sapiens
MEAPEYLDLDEIDFSDDISYSVTSLKTIPELCRRCDTQNEDRSVSSSSWNCGISTLITNTQKPTGIADVYSKFRPVKRVSPLKHQPETLENNESDDQKNQKVVEYQKGGESDLGPQPQELGPGDGVGGPPGKSSE

SEQ ID NO: 50284 - protein, 116 aa, Homo sapiens
MAQTYVYQWPWTLLLLAVSGFCNFAQNVIAFSILNLVSPLSYSVANATKRIMVITVSLIMLRNPVTSTNVLGMMTAILGVFLYNKTKYDANQQARKHLLPVTTADLSSKERHRSPL

SEQ ID NO: 50285 - protein, 1217 aa, Homo sapiens
MSDLDSEVLPLPPRYRFRDLLLGDPSFQNDDRLPVEDFSLDSSLSQVQVEFYVNENTFKERLKLFFIKNQRSSLRIRLFNFSLKLLTCLLYIVRVLLDDPALGIGCWGCPKQNYSFNDSSSEINWAPILWVERKMTLWAIQVIVAIISFLETMLLIYLSYKGNIWEQIFRVSFVLEMINTLPFIITIFWPPLRNLFIPVFLNCWLAKHALENMINDFHRAILRTQSAMFNQVLILFCTLLCLVFTGTCGIQHLERAGENLSLLTSFYFCIVTFSTVGYGDVTPKIWPSQLLVVIMICVALVVLPLQFEELVYLWMERQKSGGNYSRHRAQTEKHVVLCVSSLKIDLLMDFLNEFYAHPRLQDYYVVILCPTEMDVQVRRVLQIPLWSQRVIYLQGSALKDQDLMRAKMDNGEACFILSSRNEVDRTAADHQTILRAWAVKDFAPNCPLYVQILKPENKFHVKFADHVVCEEECKYAMLALNCICPATSTLITLLVHTSRGQEGQESPEQWQRMYGRCSGNEVYHIRMGDSKFFREYEGKSFTYAAFHAHKKYGVCLIGLKREDNKSILLNPGPRHILAASDTCFYINITKEENSAFIFKQEEKRKKRAFSGQGLHEGPARLPVHSIIASMGTVAMDLQGTEHRPTQSGGGGGGSKLALPTENGSGSRRPSIAPVLELADSSALLPCDLLSDQSEDEVTPSDDEGLSVVEYVKGYPPNSPYIGSSPTLCHLLPVKAPFCCLRLDKGCKHNSYEDAKAYGFKNKLIIVSAETAGNGLYNFIVPLRAYYRSRKELNPIVLLLDNKPDHHFLEAICCFPMVYYMEGSVDNLDSLLQCGIIYADNLVVVDKESTMSAEEDYMADAKTIVNVQTMFRLFPSLSITTELTHPSNMRFMQFRAKDSYSLALSKLEKRERENGSNLAFMFRLPFAAGRVFSISMLDTLLYQSFVKDYMITITRLLLGLDTTPGSGYLCAMKITEGDLWIRTYGRLFQKLCSSSAEIPIGIYRTESHVFSTSEPHDLRAQSQISVNVEDCEDTREVKGPWGSRAGTGGSSQGRHTGGGDPAEHPLLRRKSLQWARRLSRKAPKQAGRAAAAEWISQQRLSLYRRSERQELSELVKNRMKHLGLPTTGYEDVANLTASDVMNRVNLGYLQDEMNDHQNTLSYVLINPPPDTRLEPSDIVYLIRSDPLAHVASSSQSRKSSCSHKLSSCNPETRDETQL

SEQ ID NO: 50286 - protein, 889 aa, Homo sapiens
MSSAPRRPAKGADSFCTPEPESLGPGTPGFPEQEEDELHRTLGVERFEEILQEAGSRGGEEPGRSYGEEDFEYHRQSSHHIHHPLSTHLPPDARRRKTPQGPGRKPRRRPGASPTGETPTIEEGEEDEDEASEAEGARALTQPSPVSTPSSVQFFLQEDDSADRKAERTSPSSPAPLPHQEATPRASKGAQAGTQVEEAEAEAVAVASGTAGGDDGGASGRPLPKAQPGHRSYNLQERRRIGSMTGAEQALLPRVPTDEIEAQTLATADLDLMKSHRFEDVPGVRRHLVRKNAKGSTQSGREGREPGPTPRARPRAPHKPHEVFVELNELLLDKNQEPQWRETARWIKFEEDVEEETERWGKPHVASLSFRSLLELRRTLAHGAVLLDLDQQTLPGVAHQVVEQMVISDQIKAEDRANVLRALLLKHSHPSDEKDFSFPRNISAGSLGSLLGHHHGQGAESDPHVTEPLMGGVPETRLEVERERELPPPAPPAGITRSKSKHELKLLEKIPENAEATVVLVGCVEFLSRPTMAFVRLREAVELDAVLEVPVPVRFLFLLLGPSSANMDYHEIGRSISTLMSDKQFHEAAYLADEREDLLTAINAFLDCSVVLPPSEVQGEELLRSVAHFQRQMLKKREEQGRLLPTGAGLEPKSAQDKALLQMVEAAGAAEDDPLRRTGRPFGGLIRDVRRRYPHYLSDFRDALDPQCLAAVIFIYFAALSPAITFGGLLGEKTQDLIGVSELIMSTALQGVVFCLLGAQPLLVIGFSGPLLVFEEAFFSFCSSNHLEYLVGRVWIGFWLVFLALLMVALEGSFLVRFVSRFTQEIFAFLISLIFIYETFYKLVKIFQEHPLHGCSASNSSEVDGDPAGDWGLWGAHRHPHHGACGLQY

SEQ ID NO: 50287 - protein, 174 aa, Homo sapiens; identical to SEQ ID NO: 47355

SEQ ID NO: 50288 - protein, 106 aa, Homo sapiens
MTPSLSLSEPTCNRDKGLDQKTSMTSLTSSPACVLLAPSAPAKHASFLFLGRACSCLKAFTWAVPLLELAGPSAAALTSKDSWHMRKKPRRGEQRSQEWLLLRSVS

SEQ ID NO: 50289 - protein, 69 aa, Homo sapiens
MPHIPEDEEPPGEPQAAQSPAGQGPPAAGVSCSPTPTIVLTGDATSPEGETDKNLANRVHSPHKRLSHR

SEQ ID NO: 50290 - protein, 118 aa, Homo sapiens
QHSHSIQHSPERSGSGSVGNGSSRYSPSQNSPIHHIPSRRSPAKTIAPQNAPRDESRGRSSFYPDGGDQETAKTGKFLKRFTDEESRVFLLDRVPLYTRIWMHEKSLPSERKAHLGSK

SEQ ID NO: 50291 - protein, 256 aa, Homo sapiens
GKNLHPDVTGRLLSQGVIAFRCPRSFMDQPLAEHFSPFRVQHMDLSNSVIEVSTLHGILSQCSKLQNLSLEGLRLSDPIVNTLAKNSNLVRLNLSGCSGFSEFALQTLLSSCSRLDELNLSWCFDFTEKHVQVAVAHVSETITQLNLSGYRKNLQKSDLSTLVRRCPNLVHLDLSDSVMLKNDCFQEFFQLNYLQHLSLSRCYDIIPETLLGHECKCTRSIKNIKSKLSEEPTLTRIQQKNNANLTSEPTGKQSQQ

SEQ ID NO: 50292 - protein, 388 aa, Homo sapiens
  MOD_RES (1)..(1): Any amino acid
XAQLDSIGFSIIRKCIHAVETRGINEQGLYRIVGVNSRVQKLLSVLMDPKTASETETDICAEWEIKTITSALKTYLRMLPGPLMMYQFQRSFIKAAKLENQESRVSEIHSLVHRLPEKNRQMLQLLMNHLANVANNHKQNLMTVANLGVVFGPTLLRPQEETVAAIMDIKFQNIVIEILIENHEKIFNTVPDMPLTNAQLHLSRKKSSDSKPPSCSERPLTLFHTVQSTEKQEQRNSIINSSLESVSSNPNSILNSSSSLQPNMNSSDPDLAVVKPTRPNSLPPNPSPTSPLSPSWPMFSAPSSPMPTSSTSSDSSPVRPEEAVHEDSSTPFRKAKALYACKAEHDSELSFTAGTVFDNVHPSQEPGWLEGTLNGKTGLIPENYVEFL

SEQ ID NO: 50293 - protein, 145 aa, Homo sapiens
MDNRFATAFVIACVLSLISTIYMAASIGTDFWYEYRSPVQENSSDLNKSIWDEFISDEADEKTYNDALFRYNGTVGLWRRCITIPKNMHWYSPPERTESFDVVTKCVSFTLTEQFMEKFVDPGNHNSGIDLLRTYLWRCQFLLPF

SEQ ID NO: 50294 - protein, 87 aa, Homo sapiens
MYHCHSGSKPTEKGANEYAYAKWKLCSASAICFIFMIAEVVGGHIAGSLAVVTDAAHLLIDLTSFLLSLFSLWLSSKPPSKRLTFGW

SEQ ID NO: 50295 - protein, 234 aa, Homo sapiens
MAPVKISHVVSFSSQDPKYPVENLLNPDSPRRPWLGCPQDKSGQLKVELQLERAVPTGYIDVGNCGCAFLQIDVGHSSWPLDRPFITLLPATTLMSLTDSKQGKNRSGVRMFKDVDFLAPASGELWDRLRLTCSRPFTRHQSFGLAFLRVCSSLDSLDDSVVGPSALLSSVLNKIREFKTCFFSWSLKKMELEFSPLLLSINLNDLQFAADAEVSTVSNCMFISIALQSAMIIF

SEQ ID NO: 50296 - protein, 465 aa, Homo sapiens
MSYTGFVQGSETTLQSTYSDTSAQPTCDYGYGTWNSGTNRGYEGYGYGYGYGQDNTTNYGYGMATSHSWEMPSSDTNANTSASGSASADSVLSRINQRLDMVPHLETDMMQGGVYGSGGERYDSYESCDSRAVLSERDLYRSGYDYSELDPEMEMAYEGQYDAYRDQFRMRGNDTFGPRAQGWARDARSGRPMASGYGRMWEDPMGARGQCMSGASRLPSLFSQNIIPEYGMFQGMRGGGAFPGGSRFGFGFGNGMKQMRRTWKTWTTADFRTKKKKRKQGGSPDEPDSKATRTDCSDNSDSDNDEGTEGEATEGLEGTEAVEKGSRVDGEDEEGKEDGREEGKEDPEKGALTTQDENGQTKRKLQAGKKSQDKQKKRQRDRMVERAPALALASSASDSCSCWTFLSLAGARPLGSPDKADPVAQIRTSGRGSSLCVLCANTGPSMRTRWPAILTASSTRNTLST

SEQ ID NO: 50297 - protein, 438 aa, Homo sapiens
MSLTVVSMACVGFFLLQGAWPLMGGQDKPFLSARPSTVVPRGGHVALQCHYRRGFNNFMLYKEDRSHVPIFHGRIFQESFIMGPVTPAHAGTYRCRGSRPHSLTGWSAPSNPVVIMVTGNHRKPSLLAHPGPLLKSGETVILQCWSDVMFEHFFLHREGISEDPSHLVGQIHDGVSKANFSIGPLMPVLAGTYRCYGSVPHSPYQLSAPSDPLDIVITGLYEKPSLSAQPGPTVQAGENVTLSCSSWSSYDIYHLSREGEAHERRLRAVPKVNRTFQADFPLGPATHGGTYRCFGSFRALPCVWSNSSDPLLVSVTGICRHLHVLIGTSVVIFLFILLLFFLLYRWCSNKKNAAVMDQEPAGDRTVNRQDSDEQDPQEVTYAQLDHCVFIQRKISRPSQRPKTPLTDTSVYTELPNAEPRSKVVSCPRAPQSGLEGVF

SEQ ID NO: 50298 - protein, 60 aa, Homo sapiens
MGFQPPAALLLRLFLLQGILRLLWGDLGVYGAAVTSLSSLLLSECPALRSARPWSETPRV

SEQ ID NO: 50299 - protein, 156 aa, Homo sapiens
PPGGVPGTQPLLPNSMDPTRQQGHPNMGGSMQRMNPPRGMGPMGPGPQNYGSGMRPPPNSLGPAMPGINMGPGAGRPWPNPNSANSIPYSSSSPGTYVGPPGGGGPPGTPIMPSPADSTNSSDNIYTMINPVPPGGSRSNVSLLSNNLHIRHHNKS

SEQ ID NO: 50300 - protein, 545 aa, Homo sapiens
MPLNQKAKRELCIGWGDPSGLPRRSYRLLLLHQEGHIEHSRYLSLLDAVDNSKMALNSGSPPAIGPYYENHGYQPENPYPAQPTVVPTVYEVHPAQYYPSPVPQYAPRVLTQASNPVVCTQPKSPSGTVCTSKTKKALCITLTLGTFLVGAALAAGLLWKFMGSKCSNSGIECDSSGTCINPSNWCDGVSHCPGGEDENRCVRLYGPNFILQVYSSQRKSWHPVCQDDWNENYGRAACRDMGYKNNFYSSQGIVDDSGSTSFMKLNTSAGNVDIYKKLYHSDACSSKAVVSLRCIACGVNLNSSRQSRIVGGESALPGAWPWQVSLHVQNVHVCGGSIITPEWIVTAAHCVEKPLNNPWHWTAFAGILRQSFMFYGAGYQVEKVISHPNYDSKTKNNDIALMKLQKPLTFNDLVKPVCLPNPGMMLQPEQLCWISGWGATEEKGKTSEVLNAAKVLLIETQRCNSRYVYDNLITPAMICAGFLQGNVDSCQGDSGGPLVTSKNNIWWLIGDTSWGSGCAKAYRPGVYGNVMVFTDWIYRQMRADG

SEQ ID NO: 50301 - protein, 109 aa, Homo sapiens
  MOD_RES (1)..(1): Any amino acid
XEKRHVLHLVCNVKSPSKMPEINAKVAESTEEPAGSNRGQYPEDSSSDGLRQREVLRNLSSPGWENISRPEAAQQAFQGLGPGFSGYTPYGWLQLSWFQQIYARQYYMQ

SEQ ID NO: 50302 - protein, 82 aa, Homo sapiens
  MOD_RES (1)..(1): Any amino acid
XPLDISSDGDVDATVLRELYPDSPPGCTLGALPTGCDLCFPDTNWTPSWAGWATRPPWSLSSHWSRPSAKRMSSRWCSRSSW

SEQ ID NO: 50303 - protein, 719 aa, Homo sapiens
  MOD_RES (1)..(1): Any amino acid
XVSVAPNAKITFELVYEELLKRRLGVYELLLKVRPQQLVKHLQMDIHIFEPQGISFLETESTFMTNQLVDALTTWQNKTKQKSPEQQETVLDGNLIIRYDVDRAISGGSIQIENGYFVHYFAPEGLTTMPKNVVFVIDKSGSMSGRKIQQTREALIKILDDLSPRDQFNLIVFSTEATQWRPSLVPASAENVNKARSFAAGIQALGGTNINDAMLMAVQLLDSSNQEERLPEGSVSLIILLTDGDPTVGETNPRSIQNNVREAVSGRYSLFCLGFGFDVSYAFLEKLALDNGGLARRIHEDSDSALQLQDFYQEVANPLLTAVTFEYPSNAVEEVTQNNFRLLFKGSEMVVAGKLQDRGPDVLTATVSGKLPTQNITFQTESSVAEQEAEFQSPKYIFHNFMERLWAYLTIQQLLEQTVSASDADQQALRNQALNLSLAYSFVTPLTSMVVTKPDDQEQSQVAEKPMEGESRNRNVHSAGAAGSRMNFRPGVLSSRQLGLPGPPDVPDHAAYHPFRRLAILPASAPPATSNPDPAVSRVMNMKIEETTMTTQTPGVEVTGQYEREKAGFSWIEVTFKNPLVWVHASPEHVVVTRNRRSSAYKWKETLFSVMPGLKMTMDKTGLLLLSDPDKVTIGLLFWDGRGEGLRLLLRDTDRFSSHVGGTLGQFYQEVLWGSPAASDDGRRTLRVQGNDHSATRERRLDYQEGPPGVEISCWSVEL

SEQ ID NO: 50304 - protein, 352 aa, Homo sapiens
MDRTETRFRKRGQIKGKITTSRQPHPQNEQSPQRSTSGYSLQEVVDDEVLGSSAPGVDPSPPCRSLGWKRKKEWSDESEEEPEKELAPEPEETWVVEMLCGLKMKLKQQRVSPILPEHHKDFNSQLAPGVDPSPPHRSFCWKRKREWWDESEESLEEEPRKVLAPEPEEIWVAEMLCGLKMKLKRRRVSLVLPEHHEAFNRLLEDPVIKRFLAWDKDLRVSDKYLLAMVIAYFSRAGLPSWQYQRIHFFLALYLANDMEEDDEDPKQNIFYFLYGKTRSRIPLVRNRRFQLCRCLNPRARKNRSQIALFQKLRFQFFCSMSGRAWVSREELEEIQAYDPEHWVWARDRARLS

SEQ ID NO: 50305 - protein, 722 aa, Homo sapiens
  MOD_RES (1)..(1): Any amino acid
XTKTLGPKPFQLPFRPQDDLLARALAQGPKTVDVPASLPTPPHNNQEELRIQDHCGDRDTPDSFVPSSSPESVVGVEVSRYPDLSLVKEEPPEPVPSPIIPILPSTAGKSSESRRNDIKTEPGTLYFASPFGPSPNGPRSGLISVAITLHPTAAENISSVVAAFSDLLHVRIPNSYEVSSAPDVPSMGLVSSHRINPGLEYRQHLLLRGPPPGSANPPRLVSSYRLKQPNVPFPPTSNGLSGYKDSSHGIAESAALRPQWCCHCKVVILGSGVRKSFKDLTLLNKDSRESTKRVEKDIVFCSNNCFILYSSTAQAKNSENKESIPSLPQSPMRETPSKAFHQYSNNISTLDVHCLPQLPEKASPPASPPIAFPPAFEAAQVEAKPDELKVTVKLKPRLRAVHGGFEDCRPLNKKWRGMKWKKWSIHIVIPKGTFKPPCEDEIDEFLKKLGTSLKPDPVPKDYRKCCFCHEEGDGLTDGPARLLNLDLDLWVHLNCALWSTEVYETQAGALINVELALRRGLQMKCVFCHKTGATSGCHRFRCTNIYHFTCAIKAQCMFFKDKTMLCPMHKPKGIHEQELSYFAVFRRVYVQRDEVRQIASIVQRGERDHTFRVGSLIFHTIGQLLPQQMQAFHSPKALFPVGYEASRLYWSTRYANRRCRYLCSIEEKDGRPVFVIRIVEQGHEDLVLSDISPKGWTAMARSQFPATSASWVQVILLPQPPE

SEQ ID NO: 50306 - protein, 181 aa, Homo sapiens
MAASCLVLLALCLLLPLLLLGGWKRWRRGRAARHVVAVVLGDVGRSPRMQYHALSLAMHGFSVTLLGFCNSKPHDELLQNNRIQIVGLTELQSLAVGPRVFQYGVKVVLQAMYLLWKLMWREPGAYIFLQVGSVCLFGFCLFVLEAESSSVAQAGVQWHNHSLTAASSSWAQVILPPQPPE

SEQ ID NO: 50307 - protein, 237 aa, Homo sapiens
VIAAVFDRDINCRRAASAAFQENVGRQGTFPHGIDILTTADYFAVGNRSNCFLVISVFIAGFPEYTQPMIDHLVTMKISHWDGVIRELAARALHNLAQQAPEFSATQVFPRLLSMTLSPDLHMRHGSILACAEVAYALYKLAAQENRPVTDHLDEQAVQGLKQIHQQLYDRQLYRGLGGQLMRQADLVIVPQMPPEHTVQGCHLSDVPMGARSCLLSGIKTIPHMSWTAGDLVALGV

SEQ ID NO: 50308 - protein, 140 aa, Homo sapiens
MYHSLSETRHPLQPEEQEVGIDPLSSYSNKSGGDSNKNGRRTSSTLDSEGTFNSYRKEWEELFVNNNYLATIRQKGINGQLRSSRFRSICWKLFLCVLPQDKSQWISRIEELRAWYSNIKEIHITNPRKVVGQQDLMINN

SEQ ID NO: 50309 - protein, 127 aa, Homo sapiens
MVTRLLQQQALKALQDMSSTAPPAPQPSTRKAKTIPVQAFEVKLDVTLGDLTKIGKSQKFTLSVDVEGGRLVLLRRQRDSQEDWTTFTHDRIRQLIKSQRVQNKLGVVFEKEKDRTQRKDFIFVSAR

SEQ ID NO: 50310 - protein, 210 aa, Homo sapiens
  MOD_RES (1)..(1): Any amino acid
XEVQVLVLDGRGHLLGRLAAIVAKQVLLGRKVVVVRCEGINISGNFYRNKLKYLAFLRKRMNTNPSRGPYHFRAPSRIFWRTVRGEQSVGTAGMLPHKTKRGQAALDRLKVFDGIPPPYDKKKRMVVPAALKVVRLKPTRKFAYLGRLAHEVGWKYQAVTATLEEKRKEKAKIHYRKKKQLMRLRKQAEKNVEKKIDKYTEVLKTHGLLV

SEQ ID NO: 50311 - protein, 178 aa, Homo sapiens
FYPADPAALKEEITRYLVFLQIKRDLYHGRLLCKTSDAALLAAYILQAEIGDYDSGKHPEGYSSKFQFFPKHSEKLERKIAEIHKTELSGQTPATSELNFLRKAQTLETYGVDPHPCKDVSGNAAFLAFTPFGFVVLQGNKRVHFIKWNEVTKLKFEGKTFYLYVSQKEKKGIGSCPV

SEQ ID NO: 50312 - protein, 193 aa, Homo sapiens
MSAETPITLNIDPQDLQVQTFTVEKLLEPLIIQVTTLVNCPQNPSSRKKGRSKRASVLLASVEEATWNLLDKGEKIAQEATVLKDELTASLEEVRKESEALKVSAERFTDDPCFLPKREAVVQAARALLAAVTRLLILADMIDVMCLLQHVSAFQRTFESLKNVANKSDLQKTYQKLGKELENLDYLAFKRQQ

SEQ ID NO: 50313 - protein, 111 aa, Homo sapiens
MILFSACCICGLIGGILNFQFLRAVTKKTSSLYPLHLASMSLACIGIGGCTLSSWLTCRLASYEQRRMFSEREHSLHHSHEMAEKRLRAIEITDLPSCPVVPPTPELPTRK

SEQ ID NO: 50314 - protein, 61 aa, Homo sapiens
  MOD_RES (1)..(1): Any amino acid
XSGLGPGGVRGFGDGGGAPSWAPEDAWMGTHPKYLEMMELDIGDATQVYVAFLVYLDLMER

SEQ ID NO: 50315 - protein, 446 aa, Homo sapiens
MSGFNFGGTGAPTGGFTFGTAKTATTTPATGFSFSTSGTGGFNFGAPFQPATSTPSTGLFSLATQTPATQTTGFTFGTATLASGGTGFSLGIGASKLNLSNTAATPAMANPSGFGLGSSNLTNAISSTVTSSQGTAPTGFVFGPSTTSVAPATTSGGFSFTGGSTAQPSGFNIGSAGNSAQPTAPATLPFTPATPAATTAGATQPAAPTPTATITSTGPSLFASIATAPTSSATTGLSLCTPVTTAGAPTAGTQGFSLKAPGAASGTSTTTSTAATATATQVNAWDRTLIENGEKITSLHREVEKVKLDQKRLDQELDFILSQQKELEDLLSPLEELVKEQSGTIYLQHADEEREKTYKLAENIDAQLKRMAQDLKDIIEHLNTSGAPADTSDPLQQICKILNAHMDSLQWIDQNSALLQRKVEEVTKVCEGRRKEQERSFRITFD

SEQ ID NO: 50316 - protein, 101 aa, Homo sapiens
  MOD_RES (1)..(1): Any amino acid
XALKVPDGTSAAWYILTIIGIYAVIFVFRLASNILRKNDKSLEDVYYSNLTSELKMTGLQGKVAKCSTLSISNRAVLQPCQAHLGAKGGSSGPQTATPETP

SEQ ID NO: 50317 - protein, 151 aa, Homo sapiens
MRWGHHLPRASWGSGFRRALQRPDDRIPFLIHWSWPLQGERPFGPPRAFIRHHGSSVDSAPPPGRHGRLFPSASATEAIQRHRRNLAEWFSRLPREERQFGPTFALDTVHVDPVIRESTPDELLRPPAELALEHQPPQAGLPPLALSQLFN

SEQ ID NO: 50318 - protein, 256 aa, Homo sapiens
  MOD_RES (1)..(1): Any amino acid
XGLEGSLGVGDTLYLVNGLHPLTLRWEETRTPESQPDTPPGTPLVSQDEKRDAELPKKRMRKSNPGWENLEKLLVFTAAGVKPQGKLVIFTNQMSIGRGKLPAEEFKAKVEAVVEKLGVPFQVLVATHAGLYRKPVTGMWDHLQEQANDGTPISIGDSIFVGDAAGRPANWAPGRKKKDFSCADRLFALNLGLPFATPEEFFLKWPAAGFELPAFDPRTVSRSGPLCLPESRALLSASPEVVVAVGFPGAGKSTFL

SEQ ID NO: 50319 - protein, 682 aa, Homo sapiens
MIEDSGKRGNTMAERRQLFAEMRAQDLDRIRLSTYRTACKLRFVQKKCNLHLVDIWNVIEALRENALNNLDPNTELNVSRLEAVLSTIFYQLNKRMPTTHQIHVEQSISLLLNFLLAAFDPEGHGKISVFAVKMALATLCGGKIMDKLRYIFSMISDSSGVMVYGRYDQFLREVLKLPTAVFEGPSFGYTEQSARSCFSQQKKVTLNGFLDTLMSDPPPQCLVWLPLLHRLANVENVFHPVECSYCHSESMMGFRYRCQQCHNYQLCQDCFWRGHAGGSHSNQHQMKEYTSWKSPAKKLTNALSKSLSCASSREPLHPMFPDQPEKPLNLAHIVPPRPVTSMNDTLFSHSVPSSGSPFITRSMLESSNRLDEEHRLIARYAARLAAESSSSPPQQRSAPDISFTIDANKQQRQLIAELENKNREILQEIQRLRLEHEQASQPTPEKAQQNPTLLAELRLLRQRKDELEQRMSALQESRRELMVQLEGLMKLLKTQGAGSPRSSPSHTISRPIPMPIRSASACSTPTHTPQDSLTGVGGDVQEAFAQSSRRNLRNDLLVAADSITNTMSSLVKELNSEVGSETESNVDSEFARTQFEDLVPSPTSEKAFLAQIHARKPGYIHSGATTSTMRGDMVTEDADPYVQPEDENYENDSVRQLENELQMEEYLKQKLQDEAYQVSLQG

SEQ ID NO: 50320 - protein, 381 aa, Homo sapiens
MLVTFKDVAVTFTREEWRQLDLAQRTLYREVMLETCGLLVSLGDRAQVHTREPTTYPPVLSERAFLRGSLTLESSTSSDSRLGRARDEEGLLEMQKGKVTPETDLHKETHLGKVSLEGEGLGTDDGLHSRALQEWLSADVLHECDSQQPGKDALIHAGTNPYKCKQCGKGFNRKWYLVRHQRVHTGMKPYECNACGKAFSQSSTLIRHYLIHTGEKPYKCLECGKAFKRRSYLMQHHPIHTGEKPYECSQCRKAFTHRSTFIRHNRTHTGEKPFECKECEKAFSNRAHLIQHYIIHTGEKPYDCMACGKAFRCSSELIQHQRIHTGEKPYECTQCGKAFHRSTYLIQHSVIHTGEMPYKCIECGKAFKRRSHLLQHQRVHT

SEQ ID NO: 50321 - protein, 150 aa, Homo sapiens
MDVGSKEVLMESPPDYSAAPRGRFGIPCCPVHLKRLLIVVVVVVLIVVVIVGALLMGLHMSQKHTEMVLEMSIGAPEAQQRLALSEHLVTTATFSIGSTGLVVYDYQQLLIAYKPAPGTCCYIMKIAPESIPSLEALTRKVHNFQVCVCG

SEQ ID NO: 50322 - protein, 289 aa, Homo sapiens
MSVDPACPQSLPCFEESDCKESSPMPVICGPEENYPSLQMSSAEMPHTETVSPLPSSMDLLIQDSPDSSTSPKGKQPTSAENSVAKKEDKVPVKKQKTRTVFSSTQLCVLNDRFQRQKYLSLQQMQELSNILNLSYKQVKTWFQNQRMKSKRWQKNNWPKNSNGVTQGCLVNPTGNLPMWSNQTWNNSTWSNQTQNIQSWSNHSWNTQTWCTQSWNNQAWNSPFYNCGEESLQSCMHFQPNSPASDLEAALEAAGEGLNVIQQTTRYFSTPQTMDLFLNYSMNMQPEDV

SEQ ID NO: 50323 - protein, 270 aa, Homo sapiens
MNDFGIKNMDQVAPVANSYRGTLKRQPAFDTFDGSLFAVFPSLNEEQTLQEVPTGLDSISHDSANCELPLLTPCSKAVMSQALKATFSGFKKEQRRLGIPKNPWLWSEQQVCQWLLWATNEFSLVNVNLQRFGMNGQMLCNLGKERFLELAPDFVGDILWEHLEQMIKENQEKTEDQYEENSHLTSVPHWINSNTLGFGTEQAPYGMQTQNYPKGGLLDSMCPASTPSVLSSEQEFQMFPKSRLSSVSVTYCSVSQDFPGSNLNLLTNNS

SEQ ID NO: 50324 - protein, 181 aa, Homo sapiens
MVTCAHLGRRARLPAAQPSACPGTCFSQEERMAAGYLPRWSQELVTFEDVSMDFSQEEWELLEPAQKNLYREVMLENYRNVVSLEALKNQCTDVGIKEGPLSPAQTSQVTSLSSWTGYLLFQPVASSHLEQREALWIEEKGTPQASCSVSLLLPRLQCSGVISAHCNLHLPGSSDSSASAS

SEQ ID NO: 50325 - protein, 171 aa, Homo sapiens
MFENLNTALTPKLQASRSFPHLSKPVAPGSAPLGSGEPGGPGLWVGSSQHLKNLGKAMGAKVNDFLRRKEPSSLGSVGVTEINKTAGAQLASGTDAAPEAWLEDERSVLQETFPRLDPPPPITRKRTPRALKTTQDMLISSQPVLSSLEYGTEPSPGQAQDSAPTAQPDVP

SEQ ID NO: 50326 - protein, 159 aa, Homo sapiens
LKDAHPKLHVYKKEAFPEAFHYANNPRVTPLLMYSDLGYVIHGRINVQFNNGEHGFDNKDMDMKTIFRAVGPSFRAGLEVEPFESVHVYELMCRLLGIVPEANDGHLATLLPMLHTESALPPDGRPTLLPKGRSALPPSSRPLLVMGLLGTVILLSEVA

SEQ ID NO: 50327 - protein, 193 aa, Homo sapiens
  MOD_RES (1)..(1): Any amino acid
XWRHLKKRAQDAVIILGGGGLLFASYLMATGDERFYAEHLMPTLQGLLDPESAHRLAVRFTSLGLLPRARFQDSDMLEVRVLGHKFRNPVGIAAGFDKHGEAVDGLYKMGFGFVEIGSVTPKPQEGNPRPRVFRLPEDQAVINRYGFNSHGLSVVEHRLRARQQKQAKLTEESRALAESQMPLEQIIGGEDSV

SEQ ID NO: 50328 - protein, 44 aa, Homo sapiens
MPKPAGLKLLTSRDPPTLAFQSAGTKDVRHHVQLLLCLLISTCP

SEQ ID NO: 50329 - protein, 269 aa, Homo sapiens
MEREMEDLPRPSISAEPGTVIPLGSHVTFVCRGPVGVQTFRLERESRSTYNDTEDVSQASPSESEARFRIDSVSEGNAGPYRCIYYKPPKWSEQSDYLELLVKETSGGRDSPDTEPGSSAGPTQRPSDNSHNEHAPASQGLKAEHLYILIGVSVVFLFCLLLLVLFCLHRQNQIKQGPPRSKDEEQKPQQRPDLAVDVLERTADKATVNGLPEKDRETDTSALAAGSSQEVTYAQLDHWALTQRTARAVSPQSTKPMAESITYAAVARH

SEQ ID NO: 50330 - protein, 68 aa, Homo sapiens
MVSPMKPLEIKTQCSGPRMDPKICPADPAFFSFINNSDLWVANIETGEERRLTFCHQGLSNVLDDPKS

SEQ ID NO: 50331 - protein, 72 aa, Homo sapiens
MDGEDIPDFSSLKEETAYWKELSLKYKQSFQEARDELVEFQEGSRELEAELEAQLVQAEQRNRDLQADNQRL

SEQ ID NO: 50332 - protein, 65 aa, Homo sapiens
IDNIRLCFHGLSSAVKLKLLLGTLHLPRRTVDEGLALSTRLECSGTIVTHCSLDLLTSDLPISAS

SEQ ID NO: 50333 - protein, 164 aa, Homo sapiens
MVNSVVFFEITRDGKPLGRISIKLFADKIPKTAENFRALSTGEKGFRYKGSCFHRIIPGFMCQGGDFTRPNGTGDKSIYGEKFDDENLIRKHTGSGILSMANAGPNTSGSQFFICAAKTEWLDGKHVAFGKVKERVNIVEATEHFGYRNSKTSKKITIADCGQF

SEQ ID NO: 50334 - protein, 339 aa, Homo sapiens
MLGKDYMLAIILVNCDDDLWGDHSLEVEAGLPPGWRKIHDAAGTYYWHVPSGSTQWQRPTWELGDAEDPGTGTEGIWGLRPPKGRSFSSLESSLDRSNSLSWYGGESYIQSMEPGAKCFAVRSLGWVEVPEEDLAPGKSSIAVNNCIQQLAQTRSRSQPPDGAWGEGQNMLMILKKDAMSLVNPLDHSLIHCQPLVHIRVWGVGSSKGRDRDFAFVASDKDSCMLKCHVFCCDVPAKAIASALHGLCAQILSERVEVSGDASCCSPDPISPEDLPRQVELLDAVSQAAQKYEALYMGTLPVTKAMGRGQYRGGAIVAVPCAPCDIYWCWPRPTHLWPHR

SEQ ID NO: 50335 - protein, 107 aa, Homo sapiens
MAKERGLISPSDFAQLQKYMEYSTKKVSDVLKLFEDGEMAKYVQGDAIGYEGFQQFLKIYLEVDNVPRHLSLALFQSFETGHCLNETNVTKDVVCLNDVSCYFSLLE

SEQ ID NO: 50336 - protein, 325 aa, Homo sapiens
MAAEGWIWRWGWGRRCLGRPGLLGPGPGPTTPLFLLLLLGSVTADITDGNSEHLKREHSLIKPYQGVGSSSMPLWDFQGSTMLTSQYVRLTPDERSKEGSIWNHQPCFLKDWEMHVHFKVHGTGKKNLHGDGIALWYTRDRLVPGPVFGSKDNFHGLAIFLDTYPNDETTERVFPYISVMVNNGSLSYDHSKDGRWTELAGCTADFRNRDHDTFLAVRYSRGRLTVMTDLEDKNEWKNCIDITGVRLPTGYYFGASAGTGDLSDNHDIISMKLFQLMVEHTPDEESIDWTKIEPSVNFLKSPKAPPFLLPQTTWTTPRGTSAAGP

SEQ ID NO: 50337 - protein, 109 aa, Homo sapiens
  MOD_RES (1)..(1): Any amino acid
XMPSGLCAHLFGLSDCPVLSGSGAVYRVCAGTATFHLLQAVLLVHLHSPTSPRAQLHNSMALHWHLWRLCIHPTAVGAYYSFCPFLEQELSNPALASYKLLSSAAISCI

SEQ ID NO: 50338 - protein, 143 aa, Homo sapiens
MKRGRLPSSSEDSDDNGSLSTTWSQNSRSQHRRSSCSRHEDRKPSEVFRTDLITAMKLHDSYQLNPDEYYVLADPWRQEWEKGVQVPVSPGTIPQPVARVVSEEKSLMFIRPKKYIVSSGSEPPELGYVDIRTLADSVCRYDL

SEQ ID NO: 50339 - protein, 117 aa, Homo sapiens
GKQEEIQQKGQAEKKELQHKIDEMEEKEQELQAKIEALQADNDFTNERLTALQGIQVDDFLPKINGSTEKEKLIVEGHLTKAVEETKLSKENQTRAKESDFSDTLSPSKEKSSDDTT

SEQ ID NO: 50340 - protein, 160 aa, Homo sapiens
MFVPRSLKIKRNANDDGKSCVAKIIKPDPEDLQLDKSRDVPVDAVATEAATIDRHISESCPFPSPGGQLAEVHSVSPEQGAKDSHPSEEPVKSFSKTQRWAEPGEPICVVCGRYGEYICDKTDEDVCSLECKAKHLLQVKEKEEKSKLSNPQKADSEPES

SEQ ID NO: 50341 - protein, 285 aa, Homo sapiens
MQKHYTVAWFLYSAPGVDPSPPCRSLGWKRKKEWSDESEEEPEKELAPEPEETWVVEMLCGLKMKLKQQRVSPILPEHHKDFNSQLAPGVDPSPPHRSFCWKRKREWWDESEESLEEEPRKVLAPEPEEIWVAEMLCGLKMKLKRRRVSLVLPEHHEAFNRLLEDPVIKRFLAWDKDLRVSDKYLLAMVIAYFSRAGLPSWQYQRIHFFLALYLANDMEEDDEDPKQNIFYFLKNRSQIALFQKLRFQFFCSMSGRAWVSREELEEIQAYDPEHWVWARDRARLS

SEQ ID NO: 50342 - protein, 99 aa, Homo sapiens
MSGYSSDRDRGRDRGFGAPRFGGSRAGPLSGKKFGNPGEKLVKKKWNLDELPKFEKNFYQEHPDLARRTAQEVETYRRSKEITVRVWKNQSEKNNLPCP

SEQ ID NO: 50343 - protein, 18 aa, Homo sapiens
SYSNAPQHILAQAFKPRN

SEQ ID NO: 50344 - protein, 191 aa, Homo sapiens
MAPLCSLARWNYFFLYDGSKVKEEGDPTRAGICYFYPSQTLLDQQELLCGQIAGVVRCVSDISDSPPTLVRLRKLKFAIKVDGDYLWVLGCAVELPDVSCKRFLDQLVGFFNFYNGPVSLAYENCSQEELSTEWDTFIEQILKNTSDLHKIFNSLWNLDQTKALSYTLSSCSVQPFPLFSLPDCEHADGWA

SEQ ID NO: 50345 - protein, 2723 aa, Homo sapiens
MASRERLFELWMLYCTKKDPDYLKLWLDTFVSSYEQFLDVDFEKLPTRVDDMPPGISLLPDNILQVLRIQLLQCVQKMADGLEEQQQALSILLVKFFIILCRNLSNVEEIGTCSYINYVITMTTLYIQQLKSKKKEKEMADQTCIEEFVIHALAFCESLYDPYRNWRHRISGRILSTVEKSRQKYKPASLTVEFVPFFYQCFQESEHLKESLKCCLLHLFGAIVAGGQRNALQAISPATMEVLMRVLADCDSWEDGDPEEVGRKAELTLKCLTEVVHILLSSNSDQRQVETSTILENYFKLLNSDHSALPNQRRSRQWENRFIALQIKMLNTITAMLDCTDRPVLQAIFLNSNCFEHLIRLLQNCKLFLNANNKVADKNEKDLANKLLTEMNEDQVFQGQLDCLAISTIQALTAVMNKSPAAKEVFKERIGYTHMLEVLKSLGQPPLELLKELMNMAVEGDHTSVGILGISNVQPLLLLIQWLPELQSHDLQIFISDWLKRICCINRQSRTTCVNANMGIRIIETLDLHSSLHQTCAENLIAIHGSLGSQSVSSEEIRRLLRLLRVDESESVHPYVTPVTRAILTMARKLSLESALQYFNLSHSMAGISVPPIQKWPGSAFSFSAWFCLDQDQLTLGIANKGGKRKQLYSFFTGSGMGFEAFITHSGMLVVAVCTKREYATVMLPDHSFCDSLWHNITVVHMPGKRPFGQSFVYIYDNGQQKVSAPLRFPAMNEPFTSCCIGSAGQRTTTPPPSQIPDPPFSSPITPHRTSFGGILSSASWGGTIEKSKLITKLISAGTQDSEWGCPTSLEGQLGSVIIFYEPLQPPQVKALYLAGPNCLSPWKCQESDMADLPGNILLYYTAKACKNSICLDLSTNCLHGRLTGNKVVNWDIKDIINCIGGLNVLFPLLEQISHFSEGQIPEEKNESTVPESVTPVEGDWLVWTSTKASESRLERNLVATFILIVKHFIQRHPINQGNLIHSHGVATLGALLQKVPSTLMDVNVLMAVQLLIEQVSLEKNMQLLQQMYQYLLFDFRIWNRGDFPFRIGHIQYLSTIIKDSRRVFRKKYGVQFLLDTLRIYYGNGCKYNELSLDDIRTIRTSLYGLIKYFLCKGGSHEEIQSIMGYIAATNEEEQLFGILDVLFSLLRTSPTRGQLFLLLFEPGNADILYALLLNQKYSDRLREIIFKIMEQMLKCTNVYERSKQHIRLREVGYSGLGLLLNEALVNTSLIKNLTHQIINTDPVINFKDLLSVVYISHRAHINVRVAICRKVLQILQFQPDAAHQISQQVGWQDTLVRLFLKAKFENGNTLHKHSRAVLMKDNDKNMSTEDTKKNSDEKTDEEKITSFASANVSSDQWSLEDRHSLDSNTPLFPEDSSVGELSFKSENQEEFWHSNPSHLSLDLSGIDSCEMSDSGSQVPDSLPSTPSPVESTKSFSVHSDRESSITNDMGFSDDFSLLESQERCEEELLQLLTHILNYVMCKGLEKSDDDTWIERGQVFSALSKPGISSELLRPSDEIKLTLLQKMLEWAISENREAKTNPVTAENAFRLVLIIQDFLQSEGLVNSNMWTEKLLEDMMLLFDCLSVCYSESPVWVKLSQIQIQLLLGFIGRGNLQVCAMASAKLNTLLQTKVIENQDEACYILGKLEHVLSQSIKEQTEIYSFLIPLVRTLVSKIYELLFMNLHLPSLPFTNGSSSFFEDFQEYCNSNEWQVYIEKYIVPYMKQYEAHTFYDGHENMALYWKDCYEALMVNMHKRDREGGESKLKFQELFVEPFNRKARQENLRYNNMLKQLSSQQLATLRRWKAIQLYLTCERGPWAKRKQNPIHWKLANVENYSRMRLKLVPNYNFKTHEEASALRDNLGIQHSQPSSDTLLLEVVKQVKVSDMVEDKLDLPEEDITARVNVDEKEEQDQKEKLVLMEDCELITIIDVIPGRLEITTQHIYFYDGSIEKEDGVGFDFKWPHSQIREIHLRRYNLRRSALEIFHVDQSNYFLNFKKEVRNKIYSRLLSLHSPNSYYGSRSPQELFKASGLTQKWVNREISNFDYLIQINTMAGRTYNDLAQYPVFPWILQDYTSEELDLNNPAVFRDLSKPIGVVNEKNAKAMREKYENFEDPMGTIDKFHYGTHYSNSAGVMHYLIRVEPFTTLHIQLQSGRFDCADRQFHSIPATWQALMDNPYDVKELIPEFFYFPEFLENQNQFNLGRLQISKELVNDVILPKWAKSAEDFIYKHRKALESEYVSAHLHEWIDLIFGYKQRGPAAVEALNVFYYCSYEGAVDLDALTDEKERKALEGMINNFGQTPCQLLKEPHPPRLSAEEAVQKPTKIDTSTLNLFQHLPELKSFFIEGISDGIPLLKATIPKNQYRSFMSQGSPELLITISMNYVIGTHGWLPYDRNISNYFTFIKDQTVTNPKTQRSINGSFAPGLEITSKLFVVSHDAKLLFSAGYWDNSIQVMSLTKGKIISHIIRHMDIVTCLATDYCGIHLISGSRDTTCMIWQITQQGGVPVGLASKPFQILYGHTNEVLSVGISTELDMAVSGSRDGTVIIHTIQKGQYMRTLRPPCESSLFLTIPNLAISWEGHIVVYSSTEEKTTLKDKNALHLFSINGKYLGSQILKEQVSDICIIGEHIVTGSIQGFLSIRDLHSLNLSINPLAMRLPIHCVCVTKEYSHILVGLEDGKLIVVGVGKPAEMRSGQLSRKFWGSSKRLSQISAGETEYNTQDSK

SEQ ID NO: 50346 - protein, 733 aa, Homo sapiens
MPSVSKAAAAALSGSPPQTEKPTHYRYLKEFRTEQCPLFSQHKCAQHRPFTCFHWHFLNQRRRRPLRRRDGTFNYSPDVYCSKYNEATGVCPDGDECPYLHRTTGDTERKYHLRYYKTGTCIHETDARGHCVKNGLHCAFAHGPLDLRPPVCDVRELQAQEALQNGQLGGGEGVPDLQPGVLASQAMIEKILSEDPRWQDANFVLGSYKTEQCPKPPRLCRQGYACPHYHNSRDRRRNPRRFQYRSTPCPSVKHGDEWGEPSRCDGGDGCQYCHSRTEQQFHPEIYKSTKCNDMRQTGYCPRGPFCAFAHVEKSLGMVNEWGCHDLHLTSPSSTGSGQPGNAKRRDSPAEGGPRGSEQDSKQNHLAVFAAVHPPAPSVSSSVASSLASSAGSGSSSPTALPAPPARALPLGPASSTVEAVLGSALDLHLSNVNIASLEKDLEEQDGHDLGAAGPRSLAGSAPVAIPGSLPRAPSLHSPSSASTSPLGSLSQPLPGPVGSSAMTPPQQPPPLRSEPGTLGSAASSYSPLGLNGVPGSIWDFVSGSFSPSPSPILSAGPPSSSSASPNGAELARVRRQLDEAKRKIRQWEESWQQVKQVCDAWQREAQEAKERARVADSDRQLALQKKEEVEAQVKQLQEELEGLGVASTLPGLRGCGDIGTIPLPKLHSLQSQLRLDLEAVDGVIFQLRAKQCVACRERAHGAVLRPCQHHILCEPCAATAPECPYCKGQPLQW

SEQ ID NO: 50347 - protein, 205 aa, Homo sapiens
MSASSSGGSPRFPSCGKNGVTSLTQKKVLRAPCGAPSVTVTKSHKRGMKGDTVNVRRSVRVKTKVKMQKGERQMAKRFLEERKEELEEVAHELAETEHENTVLRHNIERMKEEKDFTILQKKHLQQEKECLMSKLVEAEMDGAAAAKQVMALKDTIGKLKTEKQMTCTDINTLTRQKELLLQKLSTFEETNRTLRDLLREQHCKE

SEQ ID NO: 50348 - protein, 52 aa, Homo sapiens
MEEYEKFCEKSLARIQEASLSTESFLPAQSESISLIRFHGVAILSPLKARSY

SEQ ID NO: 50349 - protein, 312 aa, Homo sapiens
MAALTIATGTGNWFSALALGVTLLKCLLIPTYHSTDFEVHRNWLAITHSLPISQWYYEATSEWTLDYPPFFAWFEYILSHVAKYFDQEMLNVHNLNYSSSRTLLFQRFSVIFMDVLFVYAVRECCKCIDGKKVGKELTEKPKFILSVLLLWNFGLLIVDHIHFQYNGFLFGLMLLSIARLFQKRHMEGAFLFAVLLHFKHIYLYVAPAYGVYLLRSYCFTANKPDGSIRWKSFSFVRVISLGLVVFLVSALSLGPFLALNQLPQVFSRLFPFKRGLCHAYWAPNFWALYNALDKVLSVIGMVASIFYSDSEY

SEQ ID NO: 50350 - protein, 130 aa, Homo sapiens
MRATPLAAPAGSLSRKKRLELDDNLDTERPVQKRARSGPQPRLPPCLLPLSPPTAPDRATAVATASRLGPYVLLEPEEGGRAYQALHCPTGTEYTCKVYPVQEALAVLEPYARLPPHKHVARPTEVLAGT

SEQ ID NO: 50351 - protein, 244 aa, Homo sapiens
MASDCEPALNQAEGRNPTLERYLGALREAKNDSEQFAALLLVTKAVKAGDIDAKTRRRIFDAVGFTFPNRLLTTKEAPDGCPDHVLRALGVALLACFCSDPELAAHPQVLNKIPILSTFLTARGDPDDAARRSMIDDTYQCLTAVAGTPRGPRHLIAGGTVSALCQAYLGHGYGFDQALALLVGLLAAAETQCWKEAEPDLLAVLRGLSEDFQKAEDASKFELCQLLPLFLPPTTVPPECYRDL

SEQ ID NO: 50352 - protein, 18 aa, Homo sapiens
  MOD_RES (1)..(1): Any amino acid
XLFTSFTTGNASFFPDLP

SEQ ID NO: 50353 - protein, 270 aa, Homo sapiens
MSGRSGKKKMSKLSRSARAGVIFPVGRLMRYLKKGTFKYRISVGAPVYMAAVIEYLAAEILELAGNAARDNKKARIAPRHILLAVANDEELNQLLKGVTIASGGVLPRIHPELLAKKRGTKGKSETILSPPPEKRGRKATSGKKGGKKSKAAKPRTSKKSKPKDSDKEGTSNSTSEDGPGDGFTILSSKSLVLGQKLSLTQSDISHIGSMRVEGIVHPTTAEIDLKEDIGKALEKAGGKEFLETVKELRKSQGPLEVAEETAFPNRLRPR

SEQ ID NO: 50354 - protein, 219 aa, Homo sapiens
MVKETQYYDILGVKPSASPEEIKKAYRKLALKYHPDKNPDEGEKFKLISQAYEVLSDPKKRDVYDQGGEQAIKEGGSGSPSFSSPMDIFDMFFGGGGRMARERRGKNVVHQLSVTLEDLYNGVTKKLALQKNVICEKCEGVGGKKGSVEKCPLCKGRGMQIHIQQIGPGMVQQIQTVCIECKGQGERINPKDRCESCSGAKVIREKKIIEVHVEKETRP

SEQ ID NO: 50355 - protein, 138 aa, Homo sapiens
MAWQGLVLAACLLMFPSTTADCLSRCSLCAVKTQDGPKPINPLICSLQCQAALLPSEEWERCQSFLSFFTPSTLGLNDKEDLGSKSVGEGPYSELAKLSGSFLKELEKSKFLPSISTKENTLSKSLEEKLRGLSDGFR

SEQ ID NO: 50356 - protein, 1044 aa, Homo sapiens
MALSPGANLVFHEDPKMTPSPPSCGAPGLGSGTIPQPHPDMAQVPMLNLLPSPGLALVPDLNDSLSPVSGEASGLVSENTPRPDDSRAIAPASLQITSSCSGEALDLDSKDVSRPDSQGRLCPASNPILSPSSTEAPRLSSGNHPQSNSEDAFKCLSSKIFKLGQRNSNPSRHELNPFIRHHSREGLVLGHCISRPSSKALLIPTSNSSLDLDSNPLLNMGSRNTSKLNLNVAPDSHGTLIPDTNETITLASHNISESVSKGAFSTTWSTSSKETMNVASSGHSRSDLSVTITQASYVTLIPGSSYGISLHSSTHEPNSTISPPSCMTLILGSNETLSLDSSLLFSDTSTLTLSSQQDDAKDNSIHTVPLEENLESWSEMASIKVGQFPLGFPISNPAGKDAVTLQGIPEGAFDEVTSCLVKVPEKTEGGNNMALVENVTTLQKSQDLLEAEGEKKTMIKKIMRQIQEEPLDSLSSSVRKQAMEILTQLSHTQPTLGMRERSELVNVCVHSVFSLPSVQAMQEKDEAKAETIQALYHQTLEALQTLLKALFIEDPTPAGLKSILEALGPWMNSGKAHERARAVNTNVSVLNHMLLTLPFFMPLGFPALGLLLGRLILHIGDPDEEIGCEALDGIIILYTILELQKRARDKEETNKKELYESNKHFLGPYNPVSPCQNILRVIEEFGDFLGPQQIKDLLLAALEGLKGSSEAPGKDSREMMQLASEVMLSSVLEWYRHRALEVIPEIMQGIYMQLSHIQEPRARQVALLPVSLLASSFMTEVVVALLMCPLPLNSNGAEMWRQLILCKPSCDVRDLLDLLLGSLKEKPVTKEGRASIVPLAAASGLCELLSVNSCMGRVRRIYPQLLLALLIQVHYHIGLNLPGCVAPPKDTKKGAQPSPFVPVRWVVKVVKTLLLRMGCSYETTFLEDQGGWELMEQVESHHRGVALLARAMVQYSCQELCRILYLLIPLLERGDEKHRITATAFFVEQPCEEGIVILMLRISWERQQQAVTGARSWRVTHSALPHGADGHQTETSSNLLVLQV

SEQ ID NO: 50357 - protein, 305 aa, Homo sapiens
MKGESKRITLVLQQPQSGGPQGHRHVVLGSLPGKIVLQGNQLAALTQAKNAQGQPAKVVTIQLQVQQPQQKIQIVPQPPSSQPQPQQPPSTQPVTLSSVQQAQIMGPGQSPGQRLSVPVKVVLQPQAGSSQGASSGLSVVKVLSASEVAALSSPASSAPHSGGKTGMEENRRLEHQKKQEKANRIVAEAIARARARGEQNIPRVLNEDELPSVRPEEEGEKKRRKKSAGERLKEEKPKKSKTSGASKTKGKSKLNTITPVVGKKRKRNTSSDNSDVEVMPAQSPREDEESSIQKRRSNRQVKRKK

SEQ ID NO: 50358 - protein, 196 aa, Homo sapiens
MSYPQFGYPYSSAPQFLMATNSLSTCCESGGRTLADSGPAASAQAPVYCPVYESRLLATARHELNSAAALGVYGGPYGGSQGYGNYVTYGSEASAFYSLNSFDSKDGSGSAHGGLAPAAAAYYPYEPALGQYPYDRGPSLSPLQSLSPGMEPWTAARGARTPRARPPARSRPGCRSTARTPTPPRARRSCWPSSPR

SEQ ID NO: 50359 - protein, 195 aa, Homo sapiens
MRSFKRVNFGTLLSSQKEAEELLPALKEFLSNPPAGFPSSRSDAERRQACDAILRACNQQLTAKLACPRHLGSLLELAELACDGYLVSTPQRPPLYLERILFVLLRNAAAQGSPEATLRLAQPLHACLVQCSREAAPQDYEAVARGSFSLLWKGAEALLERRAAFAARLKALSFLVLLEDESTPCEVPHFASPTA

SEQ ID NO: 50360 - protein, 178 aa, Homo sapiens
MAPPVRYCIPGERLCNLEEGSPGSGTYTRHGYIFSSLAGCLMKSSENGALPVVSVVRETESQLLPDVGAIVTCKVSSINSRFAKVHILYVGSMPLKNSFRGTIRKEDVRATEKDKISLGDAQSNYLLTTAENELGVVVAHSESGIQMVPISWCEMQCPKTHTKEFRKVARVQPEFLQT

SEQ ID NO: 50361 - protein, 47 aa, Homo sapiens
LYARTQRRSKLKESLDSGNQNGGNDDKTKNAERNYLNVLPGTTENTS

SEQ ID NO: 50362 - protein, 731 aa, Homo sapiens
MAACEGRRSGALGSSQSDFLTPPVGGAPWAVATTVVMYPPPPPPPHRDFISVTLSFGENYDNSKSWRRRSCWRKWKQLSRLQRNMILFLLAFLLFCGLLFYINLADHWKALAFRLEEEQKMRPEIAGLKPANPPVLPAPQKADTDPENLPEISSQKTQRHIQRGPPHLQIRPPSQDLKDGTQEEATKRQEAPVDPRPEGDPQRTVISWRGAVIEPEQGTELPSRRAEVPTKPPLPPARTQGTPVHLNYRQKGVIDVFLHAWKGYRKFAWGHDELKPVSRSFSEWFGLGLTLIDALDTMWILGLRKEFEEARKWVSKKLHFEKDVDVNLFESTIRILGGLLSAYHLSGDSLFLRKAEDFGNRLMPAFRTPSKIPYSDVNIGTGVAHPPRWTSDSTVAEVTSIQLEFRELSRLTGDKKFQEAVEKVTQHIHGLSGKKDGLVPMFINTHSGLFTHLGVFTLGARADSYYEYLLKQWIQGGKQETQLLEDYVEAIEGVRTHLLRHSEPSKLTFVGELAHGRFSAKMDHLVCFLPGTLALGVYHGLPASHMELAQELMETCYQMNRQMETGLSPEIVHFNLYPQPGRRDVEVKPADRHNLLRPETVESLFYLYRVTGDRKYQDWGWEILQSFSRFTRVSTCPRPAWSRPPGHRHGWAVGLRLAPLLVVAVTWIREGRACRSLGVATLQLGGPGIPIPTELHGCGTQSTWRGWAPLIFISQGLSREGLCCGPSIPPV

SEQ ID NO: 50363 - protein, 92 aa, Homo sapiens
ALYSHEDVCVFKCSVSRETECSRVGKQSFIITLGCNSVLIQFATPNDFCSFYNILKTCRGHTLERSVFSERTEESSAVQYFQMRKLRLREVK

SEQ ID NO: 50364 - protein, 163 aa, Homo sapiens
MSSLPGCIGLDAATATVESEEIAELQQAVVEELGISMEELRHFIDEELEKMDCVQQRKKQLAELETWVIQKESEVAHVDQLFDDASRAVTNCESLVKDFYSKLGLQYRDSSSEDESSRPTEIIEIPDEDDDVLSIDSGDAGSRTPKDQKLREAMAALRKSAQD

SEQ ID NO: 50365 - protein, 194 aa, Homo sapiens
MLNTLQTNAGYLEQVKRQRGDPQTQLEAMELYLARSGLQVEDLDRLNIIHVTGTKGKGSTCAFTECILRSYGLKTGFFSSPHLVQVRERIRINGQPISPELFTKYFWRLYHRLEETKVDLAVVEVGIGGAYDCTNIIRKPVVCGVSSLGIDHTSLLGDTVEKIAWQKGGIFKQGVPAFTVLQPEGPLAVLRDRA

SEQ ID NO: 50366 - protein, 98 aa, Homo sapiens
  MOD_RES (1)..(1): Any amino acid
XCWDIALGPLKQIPMNLFIMYMAGNTISIFPTMMVCMMAWRPIQALMAISANVRKFKPEVSSGFGLSHWEPDGFGIGCLQVPVHGTVTYTCIGLVSLH

SEQ ID NO: 50367 - protein, 110 aa, Homo sapiens
  MOD_RES (1)..(1): Any amino acid
XQTQAWKYGYPFKDLHRIICMTVRSGTPSAWSPLQLLSGTCPSSPPFCASACSSFSWWSFMSSTASWAFSAASARSDRQNLHLQAWVFSSSAVLNPFYKEWVRIINKLPL

SEQ ID NO: 50368 - protein, 53 aa, Homo sapiens
  MOD_RES (1)..(1): Any amino acid
XPSGPSGMRPGSSRSFSNTQTPTTLLPSSSQLPTDGWKSEWSTSVHVWCSSQR

SEQ ID NO: 50369 - protein, 99 aa, Homo sapiens
MSGTEEAILGGRDSHPAAGGGSVLCFGQCQYTAEEYQAIQKALRQRLGPEYISSRMAGGGQKVCYIEGHRVINLANEMFGYNGWAHSITQQNVGFPCWE

SEQ ID NO: 50370 - protein, 302 aa, Homo sapiens
MTGSLVSDRSHDDIVTRMKNIECIELGRHRLKPWYFSPYPQELTTLPVLYLCEFCLKYGRSLKCLQRHLTKCDLRHPPGNEIYRKGTISFFEIDGRKNKSYSQNLCLLAKCFLDHKTLYYDTDPFLFYVMTEYDCKGFHIVGYFSKEKESTEDYNVACILTLPPYQRRGYGKLLIEFSYELSKVEGKTGTPEKPLSDLGLLSYRSYWSQTILEILMGLKSESGERPQITINEISEITSIKKEDVISTLQYLNLINYYKGQYILTLSEDIVDGHERAMLKRLLRIDSKCLHFTPKDWSKRGKW

SEQ ID NO: 50371 - protein, 85 aa, Homo sapiens
MATLSVIGSSSLIAYAVFHNIQKSPEIRPLFYLSFCDLLLGLCWLTETLLYGASVANKDIICYNLQAVGQGRRGFAMFARLVLNA

SEQ ID NO: 50372 - protein, 51 aa, Homo sapiens
MPSVTFGSVHPSDVLDMPVDPNEPTYCLCHQVSYGEMIGCDNPDCSIEWFH

SEQ ID NO: 50373 - protein, 193 aa, Homo sapiens
  MOD_RES (1)..(1): Any amino acid
XFIHIGTSKHIEVKTQGCYKIQNFNNVIPEGMNLSFLIALISNNGNYTCVVTYPENGRTFHLTRTLTVKVVGSPKNAVPPVIHSPNDHVVYEKEPGEELLIPCTVYFSFLMDSRNEVWWTIDGKKPDDITIDVTINESISHSRTEDETRTQILSIKKVTSEDLKRSYVCHARSAKGEVAKAAKVKQKGNRCGQ

SEQ ID NO: 50374 - protein, 87 aa, Homo sapiens
MLKKKQSNGYYHCESSIVIGKKPIGIRDLINEALHRETMGLKSKVKQIKELLLKPETQARIRRELFEGRLINNSNSANDVDFSTTLT

SEQ ID NO: 50375 - protein, 64 aa, Homo sapiens
MNSLEQAEAPRVVSLIPAVVSGNCQDLKAFERRLTEYIHCLQPATGRWRSVLLHIIMESPIFHH

SEQ ID NO: 50376 - protein, 257 aa, Homo sapiens
MEAENAGSYSLQQAQAFYTFPFQQLMAEAPNMAVVNEQQMPEEVPAPAPAQEPVQEAPKGRKRKPRTTEPKQPVEPKKPVESKKSGKSAKSKEKQEKITDTFKVKRKVDRFNGVSEAELLTKTLPDILTFNLDIVIIGINPGLMAAYKGHHYPGPGNHFWLSEVQLNHMDDHTLPGKYGIGFTNMVERTTPGSKDLSSKEFREGGRILVQKLQKYQPRIAVFNGKCIYEIFSKEVFGVKVKNLEFGLQPHKIPDTET

SEQ ID NO: 50377 - protein, 281 aa, Homo sapiens
MGKGNEDPDLHCSSIQCSTDQPPFQQISFTEKGSDEKKPFKGKGKTAFSHSSEKHTQRQGSDPNPNKENSEETKLKAGNSTAGSEPESSSYQENCRKRKISSKDICQDRAGNCPEEECNLTLNKKSRSSTAVHNSEIQETCDAHHRGSSRACTGRSKRHRSRALEVQTPSLRKSLVTSVRAMSEAVYQDLAQVWAQQIHSPLTCEQLTLLTRLRGPLCAQVQTLYSMATQAAYVFPAESWLVPATLPGPGDSALDREAHPFPGQEITEPVSGSDEAKLGAP

SEQ ID NO: 50378 - protein, 39 aa, Homo sapiens
MDFLRNLFSQTLSLGSQKERLLDELTLEGVARYMQSERC

SEQ ID NO: 50379 - protein, 171 aa, Homo sapiens
METESEQNSNSTNGSSSSGGSSRPQIAQMSLYERQAVQALQALQRQPNAAQYFHQFMLQQQLSNAQLHSLAAVQQATIAASRQASSPNTSTTQQQTTTTQASINLATTSAAQLISRSQSVSSPSATTLTQSVLLGNTTSPPLNQSQAQMYLRPQLGNLLQVNRTLGRNVPL

SEQ ID NO: 50380 - protein, 119 aa, Homo sapiens
MVLLSIPFFSIPVVWTLTNVIHNLATYVFLHTVKGTPFETPDQGKARLLTHWEQMDYGLQFTSSRKFLSISPIVLYLLASFYTKYDAAHFLINTASLLSVLLPKLPQFHGVRVFGINKY

SEQ ID NO: 50381 - protein, 348 aa, Homo sapiens
MTSELDIFVGNTTLIDEDVYRLWLDVTDAVALRVRSGILEQTGATAAVLQSDTMDHYRTFHMLERLLHAPPKLLHQLIFQIPPSRQALLIERYYAFDEAFVREVLGKKLSKGTKKDLDDISTKTGITLKSCRRQFDNFKRVFKVVEEMRGSLVDNIQQHFLLSDRLARDYAAIVFFANNRFETGKKKLQYLSFGDFAFCAELMIQNWTLGAVDSQMDDMDMDLDKEFLQDLKELKVLVADKDLLDLHKSLVCTALRGKLGVFSEMEANFKNLSRGLVNVAAKLTHNKDYSLGPAVCGTLPLRPLATQRRAVLPESVFSVCPLPRWLPTPGPLGPLHGHPPRLPPAPVS

SEQ ID NO: 50382 - protein, 186 aa, Homo sapiens
MDCRVHMRPIGLTWVLQLTLAWILLEACGGSRPLQARSQQHHGLAADLGKGKLHLAGPCCPSEMDTTETSGPGNHPERCGVPSPECESFLEHLQRALRSRFRLRLLGVRQAQPLCEELCQAWFANCEDDITCGPTWLPLSEKRGCEPSCLTYGQTFADGTDLCRSALGHALPVAAPGARHCFNISI

SEQ ID NO: 50383 - protein, 48 aa, Homo sapiens
MAEVQVLVLDGRGHLLGRLAAIVAKQAGRWWSYAVKASTFLAISTETS

SEQ ID NO: 50384 - protein, 738 aa, Homo sapiens
MQFLHKLILNHNPLTTVEDPYLFKLPALKYLDMGTTLVPLTTLKNILMMTVELEKLILPSHMACCLCQFKNSIEAVCKTVKLHCNSACLTNTTHCPEEASVGNPEGAFMKVLQARKNYTSTELIVEPEEPSDSSGINLSGFGSEQLDTNDESDFISTLSYILPYFSAVNLDVKSLLLPFIKLPTTGNSLAKIQTVGQNRQRVKRVLMGPRSIQKRHFKEVGRQSIRREQGAQASVENAAEEKRLTSPAPREVEQPHTQQGPEKLAGNAVYTKPSFTQEHKAAVSVLKPFSKGTPSTSSPAKALPQVRDRSKDLTHAISILESAKARVTNTKTSKPIVHARKKYRFHKTRSHVTHRTTKVKKSPKVRKKSYLSRLMLANRLPFSAAKSLINSPSQGAFSSLGDLSPQENPFLEVSALSEHFIEKNNTKHTTARNAFEENDFMENTNMPEGTISENTNYNHPPEADSAGTAFNLGPTVKQTETKWEYNNVGTDLSPEPKSFNYPLLSSPGDQFEIQLTQQLQSLIPNNNVRRLIAHVIRTLKMDCSGAHVQVTCAKLISRTGHLMKLLSGQQEVKASKIEWDTDQWKIENYINESTEAQSEQKEKSLELKKEVPGYGYTDKLILALIVTGILTILIILFCLIVICCHRRSLQEDEEGFSRGIFRFLPWRGCSSRRESQDGLSSFGQPLWFKDLYKPLSATRINNHAWKLHKKSSNEDKILNRDPGDSEAPTEEEESEALP

SEQ ID NO: 50385 - protein, 216 aa, Homo sapiens
MLPLGMRDAAVAGLASSLSHLLVLGLYLGPQPDSRPALLPQLAANAVLFLCGNVAGVYHKALMERALRATFREALSSLHSRRRLDTEKKHQEHLLLSILPAYLAREMKAEIMARLQAGQGSRPESTNNFHSLYVKRHQGVSVLYADIVGFTRLASECSPKELVLMLNELFGKFDQIAKETAGSHWRGHQHACGRALRQRTVWSHRAAEVAVRRLVT

SEQ ID NO: 50386 - protein, 234 aa, Homo sapiens
NSCVDCSVTQSNKVSVTPPEESQNSDTPPRPDRLPLDEKGHVTWSFHGPENAIPIPDLSEGNSSDINYQTRKTVSLTPSPTTQVETPDLVDHDNTSPLFRTPLSFTNPLHSDDSDSDERNSDGAVTQNKTNISTASATVSAATSTESISTRKVLPMSIARHNIAGTTHSGAEKDTPVRSEWSELQSQERSEQKKSEGLITSENEKCDHPAGGIHYEMCIECPPTFSDKREQISE

SEQ ID NO: 50387 - protein, 1250 aa, Homo sapiens [sequence omitted]

SEQ ID NO: 50388 - protein, 48 aa, Homo sapiens
MFRAQWMFELAPGVSSSNLENRPCRAARGSLQKTSADTKGKQEQAKEE

SEQ ID NO: 50389 - protein, 511 aa, Homo sapiens
MGGRKMATDEENVYGLEENAQSRQESTRRLILVGRTGAGKSATGNSILGQRRFFSRLGATSVTRACTTGSRRWDKCHVEVVDTPDIFSSQVSKTDPGCEERGHCYLLSAPGPHALLLVTQLGRFTAQDQQAVRQLSHGAFSPSTWLLLNCVCSTSLSPVNSIPAHRRRAGLSLLPLHLPERGPAARASVTATLEDRAQQPFLERMGGFQRGKYGTMAEGRSEDNLSATPPALRIILVGKTGCGKSATGNSILGQPVFESKLRAQSVTRTCQVKTGTWNGRKVLVVDTPSIFESQADTQELYKNIGDCYLLSAPGPHVLLLVIQLGRFTAQDTVAIRKVKEVFGTGAMRHVVILFTHKEDLGGQALDDYVANTDNCSLKDLVRECERRYCAFNNWGSVEEQRQQQAELLAVIERLGREREGSFHSNDLFLDAQLLQRTGAGACQEDYRQYQAKVEWQVEKHKQELRENESNWAYKALLRVKHLMLLHYEIFVFLLLCSILFFIIFLFIFHYI

SEQ ID NO: 50390 - protein, 90 aa, Homo sapiens
MLRYPYFCRMYKECLSCWLESGIPNLGVWPNRIHTTAEKYREYEAREQTDQTQAQELHRSQDRDFETMAKLHIPVMVDEVVHCLSPQKGQ

SEQ ID NO: 50391 - protein, 140 aa, Homo sapiens
  MOD_RES (1)..(1): Any amino acid
XEESADARSFEMTEFNQALEEIKGQVVENNSVTEFSEEKNRTENYNRQDGQRVQGGVPAGSDEYEDECPHLIALSSLNREFRPFRDEENVGAMNQYRTRTLSITSSGSAVSCSTIPPVSSHSTCTECLLHHYCDLIALSH

SEQ ID NO: 50392 - protein, 148 aa, Homo sapiens
  MOD_RES (1)..(1): Any amino acid
XAAEADRTLFVGNLETKVTEELLFELFHQAGPVIKVKIPKDKDGKPKQFAFVNFKHEVSVPYAMNLLNGIKLYGRPIKIQFRSGSSHAPQDVSLSYPQHHVGNSSPTSTSPSSRYERTMDNMTSSAQIIQRSFSSPENFQRQAVITLV

SEQ ID NO: 50393 - protein, 127 aa, Homo sapiens
MSPHPTALLGLVLCLAQTIHTQEEDLPRPSISAEPGTVIPLGSHVTFVCRGPVGVQTFRLERDSRSTYNDTEDVSQASPSESEARFRIDSKALEARTPRTQSPAPQLDPRRGRRTTVTMSMHLLPKA

SEQ ID NO: 50394 - protein, 65 aa, Homo sapiens
  MOD_RES (1)..(1): Any amino acid
XAALYPSTDLSGASSSSLPSSPSSSSPNEVMALKDVREVKEENTLNEKLFLLACDKETNGTNSES

SEQ ID NO: 50395 - protein, 504 aa, Homo sapiens
  MOD_RES (1)..(1): Any amino acid
XLGSFFTEYLQNQLLTKGMVILRDKIRFYEELQRDKAAAAAVLGAVRKRPSVVPMAGQDPALSTSHPFYDVARHGILQVAGDDRFGRRVVTFSCCRMPPSHELDHQRLLEYLKYTLDQYVENDYTIVYFHYGLNSRNKPSLGWLQSAYKEFDRKYKKNLKALYVVHPTSFIKVLWNILKPLISHKFGKKVIYFNYLSELHEHLKYDQLVIPPEVLRYDEKLQSLHEGRTPPPTKTPPPRPPLPTQQFGVSLQYLKDKNQGELIPPVLRFTVTYLREKGLRTEGLFRRSASVQTVREIQRLYNQGKPVNFDDYGDIHIPAVILKTFLRELPQPLLTFQAYEQILGITSLPLAPLELSREPHALPGVESSLRVTGCRQILRSLPEHNYVVLRYLMGFLHAVSRESIFNKMNSSNLACVFGLNLIWPSQGVSSLSALVPLNMFTELLIEYYEKIFSTPEAPGEHGLAPWEQGSRAAPLQEAVPRTQATGLTKPTLPPSPLMAARRRL

SEQ ID NO: 50396 - protein, 101 aa, Homo sapiens
MAGVLKKRLRILYTKILDVLEEIPKNAAYRKYTEQITNEKLAMVKAEPDVKKLEDQLQGGQLEEVILQAEHELNLARKMREWKLWEPLVEEPPADQWKWPI

SEQ ID NO: 50397 - protein, 71 aa, Homo sapiens
MRVRWGIQQNSGFGKTSLNRRGRVMPGKRRPNGVITGLAARKTTGIRKGISPMNRPPLSDKNIEQYFPVLK

SEQ ID NO: 50398 - protein, 177 aa, Homo sapiens
  MOD_RES (1)..(1): Any amino acid
XTDLVPEEDVKKLRTTIRVDLSNVLDLHAFDSLSGISLQKKLQHVPGTQPHLDQSIVTITFEVPGNAKEEHLNMFIQNLLWEKNVRNKDNHCMEVIRLKGLVSIKDKSQQVIVQGVHELYDLEETPVSWKDDTERTNRLVLIGRNLDKDILKQLFIATVTETEKQWTTHFKEDQVCT

SEQ ID NO: 50399 - protein, 495 aa, Homo sapiens
MRDAGDPSPPNKMLRRSDSPENKYSDSTGHSKAKNVHTHRVRERDGGTSYSPQENSHNHSALHSSNSHSSNPSNNPSKTSDAPYDSADDWSEHISSSGKKYYYNCRTEVSQWEKPKEWLEREQRQKEANKMAVNSFPKDRDYRREVMQATATSGFASGKSTSGDKPVSHSCTTPSTSSASGLNPTSAPPTSASAVPVSPVPQSPIPPLLQDPNLLRQLLPALQATLQLNNSNVDISKINEAVTQASLQSIIHKFLTAGPSAFNITSLISQAAQLSTQAQPSNQSPMSLTSDASSPRSYVSPRISTPQTNTVPIKPLISTPPVSSQPKVSTPVVKQGPVSQSATQQPVTADKQQGHEPVSPRSLQRSSSQRSPSPGPNHTSNSSNASNATVVPQNSSARSTCSLTPALAAHFSENLIKHVQGWPADHAEKQASRLREEAHNMGTIHMSEICTELKNLRSLVRVCEIQATLREQRILFLRQQIKELEKLKNQNSFMV

SEQ ID NO: 50400 - protein, 192 aa, Homo sapiens
  MOD_RES (1)..(1): Any amino acid
XRRGGTWKLLGSVVYAHSKELVTAWYIGFLCLILASFLVYLAEKGENDHFDTYADALWWGLITLTTIGYGDKYPQTWNGRLLAATFTLIGVSFFALPAGILGSGFALKVQEQHRQKHFEKRRNPAAGLIQVSPGVPRGPAQPLSWSHLVEEWRPLGLWHCPVCGWATALTLCRNLWKERGCEVCVLRNGSNP

SEQ ID NO: 50401 - protein, 75 aa, Homo sapiens
MSNEVETSATNGQPDQQAAPKAPSKKEKKKGPEKTDEYLLARFKGDGVKYKAKLIGIDDVPDARGDKMSQDSMMK

SEQ ID NO: 50402 - protein, 58 aa, Homo sapiens
MGSLSPVATPTHPGLACKTVFQTPTPTPCSIPDNPTKTSGPKGAMRCCWSTCRTWQAH

SEQ ID NO: 50403 - protein, 137 aa, Homo sapiens
MTAEDSTAAMSSDSAAGSSAKVPEGVAGAPNEAALLALMERTGYSMVQENGQRKYGGPPPGWEGPHPQRGCEVFVGKIPRDVYEDELVPVFEAVGRIYELRLMMDFDGKNRGYAFVMYCHKHEAKRAVRELNNYEIR

SEQ ID NO: 50404 - protein, 232 aa, Homo sapiens
  MOD_RES (1)..(1): Any amino acid
XRPCCIGTKGRCEITSREYCDFMRGYFHEEATLCSQVHCMDDVCGLLPFLNPEMTVLRDLEKLAGWHRIAIIYLLSGVTGNLASAIFLPYRAEVGPAGSQFGILACLFVELFQSWQILARPWRAFFKLLAVVLFLFTFGLLPWIDNFAHISGFISGLFLSFAFLPYISFGKFDLYRKRCQIIIFQVVFLGLLAGLVVLFYVYPVRCEWCEFLTCIPFTDKFCEKYELDAQLH

SEQ ID NO: 50405 - protein, 156 aa, Homo sapiens
MMGSPVSHLLAGFCVWVVLGWVGGSVPNLGPAEQEQNHYLAQLFGLYGENGTLTAGGLARLLHSLGLGRVQGLRLGQHGPLTGRAASPAADNSTHRPQNPELSVDVWAGMPLGPSGWGDLEESKAPHLPRGPAPSGLDLLHRLLLLDHSLADHLNE

SEQ ID NO: 50406 - protein, 115 aa, Homo sapiens
MPYVDRQNRICGFLDIEEHENSGKFLRRYFILDTQANCLLWYMDNPQNLAMGAGAVGALQLTYISKVSIATPKQKPKTPFCFVINALSQRYFLQANDQKDMKDWVEALNQASKIT

SEQ ID NO: 50407 - protein, 124 aa, Homo sapiens
MAAAGVVSGKIIYEQEGVYIHSSCGKTNDQDGLISGILRVLEKDAEVIVDWRPLDDALDSSSILYARKDSSSVVEWTQAPKERGHRGSEHLNSYEAEWDMVNTVSFKRKPHTNGDLHRIKEHFL

SEQ ID NO: 50408 - protein, 210 aa, Homo sapiens
MPDSPVDVKTQSRLTPPTMPPPPTTQGAPRTSSFTPTTLTNGTSHSPTALNGAPSPPNGFSNGPSSSSSSSLANQQLPPACGARQLSKLKRFLTTLQQFGNDISPEIGERVRTLVLGLVNSTLTIEEFHSKLQEATNFPLRPFVIPFLKANLPLLQRELLHCARLAKQNPAQYLAQHEQLLLDASTTSPVDSSELLLDVNENGKRRTPDR

SEQ ID NO: 50409 - protein, 48 aa, Homo sapiens
MDVTEEVWDKTLDINVKAPALMTKAVVPEMEKRGGGSVVIVSSIAAFS

SEQ ID NO: 50410 - protein, 72 aa, Homo sapiens
MVMVANKKSQDQMTEDLSLFLGNNTIRFTVWLHGVLDKLRSVTTEPSSLKSSDTNIFDSNVPSNKSNFSRGD

SEQ ID NO: 50411 - protein, 111 aa, Homo sapiens
MQFGELLAAVRKAQANVMLFLEEKEQAALSQANGIKAHLEYRSAEMEKSKQELERMAAISNTVQFLERSMTSELKCLPLFSANIGLPNLSPAPGNSSSNMRMTSRLTRTQH

SEQ ID NO: 50412 - protein, 204 aa, Homo sapiens
MSTETELQVAVKTSAKKDSRKKGQDRSEATLIKRFKGEGVRYKAKLIGIDEVSAARGDKLCQDSMMKLKGVVAGARSKGEHKQKIFLTISFGGIKIFDEKTGALQHHHAVHEISYIAKDITDHRAFGYVCGKEGNHRFVAIKTAQAAEPVILDLRDLFQLIYELKQREELEKKAQKDKQCEQAVYQVPTSQKKEGVYDVPKSQP

SEQ ID NO: 50413 - protein, 382 aa, Homo sapiens
MCQLLERVPDTSSSSSDSDSDSDSSGTSLSEDEAPGEARNGRRPARGSSGEKENRGGRRAVRPGSGGPLLSWPLGPAPPPRPPQLERHVVRPPPRSPEPDTLPLAAGSDHPLPRAAWLRVFQHLGPRELCICMRVCRTWSRWCYDKRLWPRMDLSRRKSLTPPMLSGVVRRQPRALDLSWTGVSKKQLMWLLNRLQGLQELVLSGCSWLSVSALGSAPLPALRLLDLRWIEDVKDSQLRELLLPPPDTKPGQTESRGRLQGVAELRLAGLELTDASLRLLLRHAPQLSALDLSHCAHVGDPSVHLLTAPTSPLRETLVHLNLAGCHRLTDHCLPLFRRCPRLRRLDLRSCRQLSPEACARLAAAGPPGPFRCPEEKLLLKDS

SEQ ID NO: 50414 - protein, 89 aa, Homo sapiens
MLWFQGNSMQLARSSFGLFLRNCSASKTTLPVLTLFTKDPCPLCDEAKEVLKPYENRRSTSQSLGNAIYRKKVLHSCCCPGGLNFLMKE

SEQ ID NO: 50415 - protein, 142 aa, Homo sapiens
ESRFPTTMALSVLVTIEMCNALNSVSENQSLLRMPPWMNPWLLVAVAMSMALHFLILLVPPLPLIFQVTPLSGRQWVVVLQISLPVILLDEALKYLSRNHMHGPGTQHRLAVRAAQRGRKQGRNEPEVSAGNRVESPVCTSD

SEQ ID NO: 50416 - protein, 103 aa, Homo sapiens
MSPVLSGIHSIYSAWVTSVNITDCKPPSISGAAHQGPTAPGRMVRILANGEIVQDDDPRVRTTTQPPRGSIPRQSFFNRGHGAPPGGPGPRQQQAGARLGAAQ

SEQ ID NO: 50417 - protein, 60 aa, Homo sapiens
MEMFTFLLTCIFLPLLRGHSLFTCEPITVPRCMKMAYNMTFFPNLMGHYDQSIAAVEMEL

SEQ ID NO: 50418 - protein, 62 aa, Homo sapiens
MAMAPSPSLVQVYTSPAAVAVWEWQDGLGTWHPYSATVCSFIEQQFVQQKGQRFGLGSLAHS

SEQ ID NO: 50419 - protein, 153 aa, Homo sapiens
ALVSVPRAQAVWLGRLDPEQLLGPWYVLAVASREKGFAMEKDMKNVVGVVVTLTPENNLRTLSSQHGLGGCDQSVMDLIKRNSGWVFENPSIGVLELWVLATNFRDYAIIFTQLEFGDEPFNTVELYSLTETASQEAMGLFTKWSRSLGFLSQ

SEQ ID NO: 50420 - protein, 92 aa, Homo sapiens
  MOD_RES (1)..(1): Any amino acid
XCVALAVLAWGFLWVWDSSERMKSREQGGRLGAESRTLLVIAHPDDEAMFFAPTVLGLARLRHWVYLLCFSAVFRRELSEYTEGLTSEPLTA

SEQ ID NO: 50421 - protein, 69 aa, Homo sapiens
MMDLKEEKPRARELRISRGFDLASFNPHGISTFIDNDDTVYLFVVNHPEFKNTVEIFKFEEAENSLLHL

SEQ ID NO: 50422 - protein, 116 aa, Homo sapiens
PSSRPNRMASNIFGPTEEPQNIPKRTNPPGGKGSGIFDESTPVQTRQHLNPPGGKTSDIFGSPVTATSRLAHPNKPKDHVFLCEGEEPKSDLKAARSIPAGAEPGIMWIQGKLLRL

SEQ ID NO: 50423 - protein, 157 aa, Homo sapiens
MQESQETHISNHLDEVVAAVSITHRKKFQNKLLQTALFQPPREKLHLCEEKAKSYSNSHEYKQAVHELVRCVALTRICYGDSHWKLAEAHVNLAQGYLQLKGLSLQAKQHAEKARQILANSIVPPYSENTDVFKFSIELFHTMGRALLSLQKFKEAA

SEQ ID NO: 50424 - protein, 168 aa, Homo sapiens
MAEIGEDLDKSDVSSLIFLMKDYMGRGKISKEKSFLDLVVELEKLNLVAPDQLDLLEKCLKNIHRIDLKTKIQKYKQSVQGAGTSYRNVLQAAIQKSLKDPSNNFRLHNGRSKEQRLKEQLGAQQEPVKKSIQESEAFLPQSIPEERYKMKSKPLGICLIIDCIGNET

SEQ ID NO: 50425 - protein, 167 aa, Homo sapiens
  MOD_RES (1)..(1): Any amino acid
XNLSPEKIFHVIVAPCYDKKLEALQESLPPALHGSRGADCVLTSGEIAQIMEQGDLSVRDAAVDTLNKDFQEVTLEKNGEVVLRFAAAYGFRNIQNMILKLKKGKFPFHFVEVLACAGGCLNGRGQAQTPDGHADKALLRQMEGIYADIPVRRPESSAHVQELYQEW

SEQ ID NO: 50426 - protein, 949 aa, Homo sapiens
MEHGTLLAQPGLWTRDTSWALLYFLCYILPQTAPQVLRIGGIFETVENEPVNVEELAFKFAVTSINRNRTLMPNTTLTYDIQRINLFDSFEASRRACDQLALGVAALFGPSHSSSVSAVQSICNALEVPHIQTRWKHPSVDNKDLFYINLYPDYAAISRAILDLVLYYNWKTVTVVYEDSTGLIRLQELIKAPSRYNIKIKIRQLPSGNKDAKPLLKEMKKGKEFYVIFDCSHETAAEILKQILFMGMMTEYYHYFFTTLDLFALDLELYRYSGVNMTGFRLLNIDNPHVSSIIEKWSMERLQAPPRPETGLLDGMMTTEAALMYDAVYMVAIASHRASQLTVSSLQCHRHKPWRLGPRFMNLIKEARWDGLTGHITFNKTNGLRKDFDLDIISLKEEGTEKAAGEVSKHLYKVWKKIGIWNSNSGLNMTDSNKDKSSNITDSLANRTLIVTTILEEPYVMYRKSDKPLYGNDRFEGYCLDLLKELSNILGFIYDVKLVPDGKYGAQNDKGEWNGMVKELIDHRADLAVAPLTITYVREKVIDFSKPFMTLGISILYRKPNGTNPGVFSFLNPLSPDIWMYVLLACLGVSCVLFVIARFTPYEWYNPHPCNPDSDVVENNFTLLNSFWFGVGALMQQGSELMPKALSTRIVGGIWWFFTLIIISSYTANLAAFLTVERMESPIDSADDLAKQTKIEYGAVRDGSTMTFFKKSKISTYEKMWAFMSSRQQTALVRNSDEGIQRVLTTDYALLMESTSIEYVTQRNCNLTQIGGLIDSKGYGVGTPIGSPYRDKITIAILQLQEEGKLHMMKEKWWRGNGCPEEDNKEASALGVENIGGIFIVLAAGLVLSVFVAIGEFIYKSRKNNDIEQKGKSSRIRFYFRNKVRFHGRKKQSLGVEKCLSFNAIMEELGISLKNQKKIKKKSRTKGKSSFTSILTCHQRRTQRKETVA

SEQ ID NO: 50427 - protein, 141 aa, Homo sapiens
MNCRSEVLEVSVEGRQVEEAMLAVLHTVLLHRSTGKFHYKKEGTYSIGTVGTQDVDCDFIDFTYVRVSSEELDRALRKVVGEFKDALRNSGGDGLGQMSLEFYQKKKSRWPFSDECIPWEVWTVKVHVVALATEQERQICR

SEQ ID NO: 50428 - protein, 2487 aa, Homo sapiens
  MOD_RES (1)..(1): Any amino acid
XEEEEDDDDEEEEVSEVESFILDQDDLENPMLETASKLLLSGTADGADLRTVDPETQARLEALLEAAGIGKLSTADGKAFADPEVLRRLTSSVSCALDEAAAALTRMRAESTANAGQSDNRSLAEACSEGDVNAVRKLLIEGRSVNEHTEEGESLLCLACSAGYYELAQVLLAMHANVEDRGIKGDITPLMAAANGGHVKIVKLLLAHKADVNAQSSTGNTALTYACAGGYVDVVKVLLESGASIEDHNENGHTPLMEAGSAGHVEVARLLLENGAGINTHSNEFKESALTLACYKGHLEMVRFLLEAGADQEHKTDEMHTALMEACMDGHVEVARLLLDSGAQVNMPADSFESPLTLAACGGHVELAALLIERGASLEEVNDEGYTPLMEAAREGHEEMVALLLGQGANINAQTEETQETALTLACCGGFLEVADFLIKAGADIELGCSTPLMEAAQEGHLELVKYLLAAGANVHATTATGDTALTYACENGHTDVADVLLQAGADLEHESEGGRTPLMKAARAGHVCTVQFLISKGANVNRTTANNDHTVLSLACAGGHLAVVELLLAHGADPTHRLKDGSTMLIEAAKGGHTSVVCYLLDYPNNLLSAPPPDVTQLTPPSHDLNRAPRVPVQALPMVVPPQEPDKPPANVATTLPIRNKAASKQKSSSHLPANSQDVQGYITNQSPESIVEEAQGKLTELEQRIKEAIEKNAQLQSLELAHADQLTKEKIEELNKTREEQIQKKQKILEELQKVERELQLKTQQQLKKQYLEVKAQRIQLQQQQQQSCQHLGLLTPVGVGEQLSEGDYARLQQVDPVLLKDEPQQTAAQMGFAPIQPLAMPQALPLAAGPLPPGSIANLTELQGVIVGQPVLGQAQLAGLGQGILTETQQGLMVASPAQTLNDTLDDIMAVSGRASAMSNTPTHSIAASISQPQTPTPSPIISPSAMLPIYPAIDIDAQTESNHDTALTLACAGGHEELVQTLLERGASIEHRDKKGFTPLILAATAGHVGVVEILLDNGADIEAQSERTKDTPLSLACSGGRQEVVELLLARGANKEHRNVSDYTPLSLAASGGYVNIIKILLNAGAEINSRTGSKLGISPLMLAAMNGHTAAVKLLLDMGSDINAQIETNRNTALTLACFQGRTEVVSLLLDRKANVEHRAKTGLTPLMEAASGGYAEVGRVLLDKGADVNAPPVPSSRDTALTIAADKGHYKFCELLIGRGAHIDVRNKKGNTPLWLAANGGHLDVVQLLVQAGADVDAADNRKITPLMAAFRKGHVKVVRYLVKEVNQFPSDSECMRYIATITDKEMLKKCHLCMESIVQAKDRQAAEANKNASILLEELDLEKLREESRRLALAAKREKRKEKRRKKKEEQRRKLEEIEAKNKENFELQAAQEKEKLKVEDEPEVLTEPPSATTTTTIGISATWTTLAGSHGKRNNTITTTSSKRKNRKNKITPENVQIIFDDPLPISYSQPEKVNGESKSSSTSESGDSDNMRISSCSDESSNSNSSRKSDNHSPAVVTTTVSSKKQPSVLVTFPKEERKSVSGKASIKLSETISEGTSNSLSTCTKSGPSPLSSPNGKLTVASPKRGQKREEGWKEVVRRSKKVSVPSTVISRVIGRGGCNINAIREFTGAHIDIDKQKDKTGDRIITIRGGTESTRQATQLINALIKDPDKEIDELIPKNRLKSSSANSKIGSSAPTTTAANTSLMGIKMTTVALSSTSQTATALTVPAISSASTHKTIKNPVNNVRPGFPVSLPLAYPPPQFAHALLAAQTFQQIRPPRLPMTHFGGTFPPAQSTWGPFPVRPLSPARATNSPKPHMVPRHSNQNSSGSQVNSAGSLTSSPTTTTSSSASTVPGTSTNGSPSSPSVRRQLFVTVVKTSNATTTTVTTTASNNNTAPTNATYPMPTAKEHYPVSSPSSPSPPAQPGGVSRNSPLDCGSASPNKVASSSEQEAGSPPVVETTNTRPPNSSSSSGSSSAHSNQQQPPGSVSQEPRPPLQQSQVPPPEVRMTVPPLATSSAPVAVPSTAPVTYPMPQTPMGCPQPTPKMETPAIRPPPHGTTAPHKNSASVQNSSVAVLSVNHIKRPHSVPSSVQLPSTLSTQSACQNSVHPANKPIAPNFSAPLPFGPFSTLFENSPTSAHAFWGGSVVSSQSTPESMLSGKSSYLPNSDPLHQSDTSKAPGFRPPLQRPAPSPSGIVNMDSPYGSVTPSSTHLGNFASNISGGQMYGPGAPLGGAPAAANFNRQHFSPLSLLTPCSSASNDSSAQSVSSGVRAPSPAPSSVPLGSEKPSNVSQDRKVPVPIGTERSARIRQTGTSAPSVIGSNLSTSVGHSGIWSFEGIGGNQDKVDWCNPGMGNPMIHRPMSDPGVFSQHQAMERDSTGIVTPSGTFHQHVPAGYMDFPKVGGMPFSVYGNAMIPPVAPIPDGAGGPIFNGPHAADPSWNSLIKMVSSSTENNGPQTVWTGPWAPHMNSVHMNQLG

SEQ ID NO: 50429 - protein, 140 aa, Homo sapiens
MTTYLEFIQQNEERDGVRFSWNVWPSSRLEATRMVVPVAALFTPLKERPDLPPIQYEPVLCSRTTCRAVLNPLCQVDYRAKLWACNFCYQRNQFPPSYAGISELNQPAELLPQFSSIEYVVLRGPQMPLIFLYVVDTCME

SEQ ID NO: 50430 - protein, 209 aa, Homo sapiens
MARGERRRRAVPAEGVRTAERAARGGPGRRDGRGGGPRSTAGGVALAVVVLSLALGMSGRWVLAWYRARRAVTLHSAPPVLPADSSSPAVAPDLFWGTYRPHVYFGMKTRSPKPLLTGLMWAQQGTTPGTPKLRHTCEQGDGVGPYGWEFHDGLSFGRQHIQDGALRLTTEFVKRPGGQHGGDWSWRVTVEPQDSATMSSGPPTQDCPC

SEQ ID NO: 50431 - protein, 168 aa, Homo sapiens
MASWLPETLFETVGQGPPPSKDYYQLLVTRSQVIFRWWKISLRSEYRSTKPGEAKETHEDFLENSHLQGKFDFLERLSDDLLLTIISYLDLEDIARLCQTSHRFAKLCMSDKLWEQIVQSTCDTITPDVRALAEDTGWRQLFFTNKLQLQRQLRKRKQKYGNLREKQP

SEQ ID NO: 50432 - protein, 115 aa, Homo sapiens
MAFPRVKPAPDETSFSEALLKRNQDLAPNSAEQASILSLVTKINNVIDNLIVAPGTFEVQIEEVRQVGSYKKGTMTTGHNVADLVVILKILPTLEAVAALGNKVVESLRAQDPSE

SEQ ID NO: 50433 - protein, 116 aa, Homo sapiens
MDVERLQEALKDFEKRGKKEVCPVLDQFLCHVAKTGETIIPFTIQRLCELLTDPRRNYTGTDKFLRGVEKNVMVVSCVYPSSEKNNSNSLNRMNGVMFPGNSPSYTESPHDNKWVA

SEQ ID NO: 50434 - protein, 129 aa, Homo sapiens
FRVQYYVENGRLISDRAARYYYYWHLRKQVLHSQCVLREEAYFLLAAFALQADLGNFKRNKHYGKYFEPEAYFPSWVVSKRGKDYILKHIPNMHKDQFALTASEAHLKYIKEAVRLDDVAVHYYRLYKV

SEQ ID NO: 50435 - protein, 92 aa, Homo sapiens
VSQLLASPVLYTDLNYSINNLSISANVENKYSLYVGLVLAVSSSIFIGSSFILKKKGLLQLASKGFTRAGQGGHSYLKEWLWWVGLLSSSIN

SEQ ID NO: 50436 - protein, 248 aa, Homo sapiens
MAGAQPGVHALQLKPVCVSDSLKKGTKFVKWDDDSTIVTPIILRTDPQGFFFYWTDQNKETELLDLSLVKDARCGRHAKAPKDPKLRELLDVGNIGRLEQRMITVVYGPDLVNISHLNLVAFQEEVAKEWTNEVFSLATNLLAQNMSRDAFLEKAYTKLKLQVTPEGRIPLKNIYRLFSADRKRVETALEACSLPSSRVEKANEAAKSEQSCGKAPPKHFHLHFIKQNKMLEPACYCFFVRCFGIGKI

SEQ ID NO: 50437 - protein, 170 aa, Homo sapiens
MNKHQKPVLTGQRFKTRKRDEKEKFEPTVFRDTLVQGLNEAGDDLEAVAKFLDSTGSRLDYRRYADTLFDILVAGSMLAPGGTRIDDGDKTKMTNHCVFSANEDHETIRNYAQVFNKLIRRYKYLEKAFEDEMKKPFPKQSRQSWRCCRGFCWAMAPCPPPSSPVSSPTA

SEQ ID NO: 50438 - protein, 22 aa, Homo sapiens
ISEESEELDQKTFSIKPVDFCI

SEQ ID NO: 50439 - protein, 100 aa, Homo sapiens
MPSKGPLQSVQVFGRKKTATAVAHCKRGNGLIKVNGRPLEMIEPRTLQYKLLEPVLLLGKERFAGVDIRVRVKGGGHVAQIYAIRQSISKALVAYYQKCE

SEQ ID NO: 50440 - protein, 170 aa, Homo sapiens
MAAAAAEQQQFYLLLGNLLSPDNVVRKQAEETYENIPGQSKITFLLQAIRNTTAAEEARQMAAVLLRRLLSSAFDEVYPALPSDVQTAIKSELLMIIQMETQSSMRKKVCDIAAELARNLIDEDGNNQWPEGLKFLFDSVSSQNVGLREAALHIFWNFPGIFGNQQQHYL

SEQ ID NO: 50441 - protein, 104 aa, Homo sapiens
MERYAGALEEVADGARQQERHYQLLSALQSLLIPAALVLHHAERPGPGASRRHRVRNRAGATGDPAPHRKEPVQPAPAPTERASSAQAGAAAEAPGSPAGLPAP

SEQ ID NO: 50442 - protein, 201 aa, Homo sapiens
MALLCLDGVFLSSAENDFVHRIQEELDRFLLQKQLSKVLLFPPLSSRLRYLIHRTAENFDLLSSFSVGEGWKRRTVICHQDIRVPSSDGLSGPCRAPASCPSRYHGPRPISNQGAAAVPRGARAGRWYRGRKPDQPLYVPRVLRRQEEWGLTSTSVLKREAPAGRDPEEPGDVGAGDPNSDQGLPVLMTQGTEDLKGPGQS

SEQ ID NO: 50443 - protein, 138 aa, Homo sapiens
MSLQWTAVATFLYAEVFVVLLLCIPFISPKRWQKIFKSRLVELLVSYGNTFFVVLIVILVLLVIDAVREIRKYDDVTEKVNLQNNPGAMEHFHMKLFRAQRNLYIAGFSLLLSFLLRRLVTLISQQATLLASNEAFKK

SEQ ID NO: 50444 - protein, 881 aa, Homo sapiens
  MOD_RES (1)..(1): Any amino acid
XQPSPEPHSPTEPPAWGSSIVKVPSGIFDVNSRKSSTGSISNVLFSTQDPVEDAVFGEATNLKKNGDRGEKRQKHFPERSCSFSSESRAGMLLKKSSLDSNSSEMAIMMGADAKILTAALTCPKTSLLHIARTHSFENVSCHLPDSRTCMSESTWNPEHRSSPVPEMLEESQELLEPVVDDVPKTTATVDTYESLLSDSNSNQSRDLKTVSKDLRNKRSSLYGIAKVVQREDVETGLDPLSLLATECTGGKTPDSEDKLFSPVIARNLADEIESYMNLKSPLGSKSSSMELHREENRESGMTTAFIHALERRSSLPLDHGSPAQENPESEKSSPAVSRSKTFTGRFKQQTPSRTHKERSTSLSALVRSSPHGSLGSVVNSLSGLKLDNILSGPKIDVLKSGMKQAATVASKMWVAVASAYSYSDDEEETNRDYSFPAGLEDHILGENISPNTSISGLVPSELTQSNTSLGSSSSSGDVGKLHYPTGEVPFPRGMKGQDFEKSDHGSSQNTSMSSIYQNCAMEVLMSSCSQCRACGALVYDEEIMAGWTADDSNLNTACPFCKSNFLPLLNIEFKDLRGSASFFLKPSTSGDSLQSGSIPLANESLEHKPVSSLAEPDLINFMDFPKHNQIITEETGSAVEPSDEIKRASGDVQTMKISSVPNSLSKRNVSLTRSHSVGGPLQNIDFTQRPFHGISTVSLPNSLQEVVDPLGKRPNPPPVSVPYLSPLVLRKELESLLENEGDQVIHTSSFINQHPIIFWNLVWYFRRLDLPSNLPGLILTSEHCNEGVQLPLSSLSQDSKLVYIQLLWDNINLHQEPREPLYVSWRNFNSEKKSSLLSEEQQETSTLVETIRQSIQHNNVLKPINLLSQQMKPGMKRQRGI

SEQ ID NO: 50445 - protein, 158 aa, Homo sapiens
MRPPQCLLHTPSLASPLLLLLLWLLGGGVGAEGREDAELLVTVRGGRLRGIRLKTPGGPVSAFLGIPFAEPPMGPRRFLPPEPKQPWSGVVDATTFQSVCYQYVDTLYPGFEGTEMWNPNRELSEDCLYLNVWTPYPRPTSPTPVLVWIYGGGFYSGA

SEQ ID NO: 50446 - protein, 451 aa, Homo sapiens
MCWVRSDNKRPCLEFSQLSVKDSFRDLFIPRIETILMMYTRNNLNCAEPLFEQNNSLNVNFNTQKKTVWLIHGYRPVGSIPLWLQNFVRILLNEEDMNVIVVDWSRGATTFIYNRAVKNTRKVAVSLSVHIKNLLKHGASLDNFHFIGVSLGAHISGFVGKIFHGQLGRITGLDPAGPRFSRKPPYSRLDYTDAKFVDVIHSDSNGLGIQEPLGHIDFYPNGGNKQPGCPKSIFSGIQFIKCNHQRAVHLFMASLETNCNFISFPCRSYKDYKTSLCVDCDCFKEKSCPRLGYQAKLFKGVLKERMEGRPLRTTVFLDTSGTYPFCTYYFVLSIIVPDKTMMDGSFSFKLLNQLGMIEEPRLYEKNKPFYKLQEVKILAQFYNDFVNISSIGLTYFQSSNLQCSTCTYKIQSLMLKSLTYPERPPLCRYNIVLKDREEVFLNPNTCTPKNT

SEQ ID NO: 50447 - protein, 126 aa, Homo sapiens
MASNVTNKTDPRSMNSRVFIGNLNTLVVKKSDVEAIFSKYGKIVGCSVHKGFAFVQYVNERNARAAVAGEDGRMIAGQVLDINLAAEPKVNRGKAGVKRSAAEMYGSSFDLDYDFQRDYYDRMYSY

SEQ ID NO: 50448 - protein, 950 aa, Homo sapiens
  MOD_RES (1)..(1): Any amino acid
XKREHAKQHGMIRTEITGAEIAEEMEKERRLFQLQMCEYLIKVNEIKTKKGVDLLQNLIKYYHAQCNFFQDGLKTADKLKQYIEKLAADLYNIKQTQDEEKKQLTALRDLIKSSLQLDQKESRRDSQSRQGGYSMHQLQGNKEYGSEKKGYLLKKSDGIRKVWQRRKCSVKNGILTISHATSNRQPAKLNLLTCQVKPNAEDKKSFDLISHNRTYHFQAEDEQDYVAWISVLTNSKEEALTMAFRGEQSAGENSLEDLTKAIIEDVQRLPGNDICCDCGSSEPTWLSTNLGILTCIECSGIHREMGVHISRIQSLELDKLGTSELLLAKNVGNNSFNDIMEANLPSPSPKPTPSSDMTVRKEYITAKYVDHRFSRKTCSTSSAKLNELLEAIKSRDLLALIQVYAEGVELMEPLLEPGQELGETALHLAVRTADQTSLHLVDFLVQNCGNLDKQTALGNTVLHYCSMYSKPECLKLLLRSKPTVDIVNQAGETALDIAKRLKATQCEDLLSQAKSGKFNPHVHVEYEWNLRQEEIDESDDDLDDKPSPIKKERSPRPQSFCHSSSISPQDKLALPGFSTPRDKQRLSYGAFTNQIFVSTSTDSPTSPTTEAPPLPPRNAGKGPTGPPSTLPLSTQTSSGSSTLSKKRPPPPPPGHKRTLSDPPSPLPHGPPNKGAVPWGNDGGPSSSSKTTNKFEGLSQQSSTSSAKTALGPRVLPKLPQKVALRKTDHLSLDKATIPPEIFQKSSQLAELPQKPPPGDLPPKPTELAPKPQIGDLPPKPGELPPKPQLGDLPPKPQLSDLPPKPQMKDLPPKPQLGDLLAKSQTGDVSPKAQQPSEVTLKSHPLDLSPNVQSRDAIQKQASEDSNDLTPTLPETPVPLPRKINTGKNKVRRVKTIYDCQADNDDELTFIEGEVIIVTGEEDQEWWIGHIEGQPERKGVFPVSFVHILSD

SEQ ID NO: 50449 - protein, 222 aa, Homo sapiens
MLSPNDKMLGKLDPFYQPSVSKQKTSAEIISEARNALRTVRTQRPFTPQEAQRKLFGPASSRTSENRPPSSFSLHASSFESSDSRPISGTRLSPLELKPKVPASPTREEDSCFSFPKPPVDPAKIRRVSNARARLFRAASQRALLPDRSLPPSDSKKTVESKETVMMGDSMVKINGIYLTKSNAICHLKSHPLQLTDDGGFSEIKEQEMFKGTTSLPSHLKN

SEQ ID NO: 50450 - protein, 413 aa, Homo sapiens
MKVNRETKRLYVGGLSQDISEADLQNQFSRFGEVSDVEIITRKDDQGNPQKVFAYINISVAEADLKKCMSVLNKTKWKGGTLQIQLAKESFLHRLAQEREAAKAKKEESTTGNANLLEKTGGVDFHMKAVPGTEVPGHKNWVVSKFGRVLPVLHLKNQHKRKIIKYDPSKYCHNLKKIGEDFSNTIPISSLTWELEGGNDPMSKKRRGEFSDFHGPPKKIIKVQKDESSTGSLAMSTRPRRVIERPPLTQQQAAQKRTCDSITPSKSSPVPVSDTQKLKNLPFKTSGLETAKKRNSISDDDTDSEDELRMMIAKEENLQRTTQPSINESESDPFEVVRDDFKSGVHKLHSLIGLGIKNRVSCHDSDDDIMRNDREYDSGDTDEIIAMKKNVAKVKNSTEFSQMEKSTKKTSFK

SEQ ID NO: 50451 - protein, 53 aa, Homo sapiens
MILMEGIGCMRHSSLTRQPKLPYRSLASARGGLQEFVSVWVRDPRIQKEDFWH

SEQ ID NO: 50452 - protein, 88 aa, Homo sapiens
MSLLATLGLELDRALLPASGLGWLVDYGKLPPAPAPLAPYEVLGGALEGGLPVGGEPLAGKGRWKVELGSGGQGKMGEEELIHVFNKY

SEQ ID NO: 50453 - protein, 162 aa, Homo sapiens
MGSPGMVLGLLVQIWDDPTQNRNRIASFPGFLFVLLGVGSMGVAAIVWGAWFWGRRSCQQRDSGNSPGNAFYSNVLYRPRGAPKKSEDCSGEGKDQRGQSIYSTSFPQPAPRQPHLASRPCPSPRPCPSPRPGHPVSMVRVSPRPSPTQQPRPKGFPKVGEE

SEQ ID NO: 50454 - protein, 130 aa, Homo sapiens
MALTSDLGKQIKLKEVEGTLLQPATVDNWSQIQSFEAKPDDLLICTYPKAGTTWIQEIVDMIEQNGDVEKCQRAIIQHRHPFIEWARPPQPSAAATVFLGKQLQVPLCSSKCQRLYGFLLPFPKDEPHAS

SEQ ID NO: 50455 - protein, 46 aa, Homo sapiens
MSSVAVLTQESFAEHRSGLVPQQIKVATLNSEEESDPPTYKDAFPP

SEQ ID NO: 50456 - protein, 38 aa, Homo sapiens
MESQEFIVLYTHQKMKKSKVWQDGILKITHLGNKIQCL

SEQ ID NO: 50457 - protein, 226 aa, Homo sapiens
MLLRSKPALPPPLMLLLLGPLGPLSPGALPRPAQAQDVVDLDFFTQEPLHLVSPSFLSVTIDANLATDPRFLILLGSPKLRTLARGLSPAYLRFGGTKTDFLIFDPKKESTFEERSYWQSQVNQDICKYGSIPPDVEEKLRLEWPYQEQLLLREHYQKKFKNSTYSRSSVDVLYTFANCSGLDLIFGLNALLRTADLQWNSSNAQLLLDYCSSKGYNISWELGNAS

SEQ ID NO: 50458 - protein, 158 aa, Homo sapiens
MSDLRITEAFLYMDYLCFRALCCKGPPPARPEYDLVCIGLTGSGKTSLLSKLCSESPDNVVSTTGFSIKAVPFQNAILNVKELGGADNIRKYWSRYYQGSQGVIFVLDSASSEDDLEAARNELHSALQHPQLCTLPFLILANHQDKPAARSVQEKIQD

SEQ ID NO: 50459 - protein, 393 aa, Homo sapiens
MECLRSLPCLLPRAMRLPRRTLCALALDVTSVGPPVAACGRRANLIGRSRAAQLCGPDRLRVAGEVHRFRTSDVSQATLASVAPVFTVYLKAVITPECLLILDYRNLNLEQWLFRELPSQLSGEGQLVTYPLPFEFRAIEALLQYWINTLQGKLSILQPLILETLDALVDPKHSSVDRSKLHILLQNGKSLSELETDIKIFKESILEILDEEELLEELCVSKWSDPQVFEKSSAGIDHAEEMELLLENYYRLADDLSNAARELRVLIDDSQSIIFINLDSHRNVMMRLNLQLTMGTFSLSLFGLMGVAFGMNLESSLEEDHRIFWLITGIMFMGSGLIWRRLLSFLGRQLEAPLPPMMASLPKKTLLADRSMELKNSLRLDGLGSGRSILTNR

SEQ ID NO: 50460 - protein, 170 aa, Homo sapiens
MYNDTLNGSTEKRSAELPDAVGPIVQLQEKLYVPVKEYPDFNFVGRILGPRGLTAKQLEAETGCKIMVRGKGSMRDKKKEEQNRGKPNWEHLNEDLHVLITVEDAQNRAEIKLKRAVEEVKKLLVPAAEGEDSLKKMQLMELAILNGTYRDANIKSPALAFSLAATAQAA

SEQ ID NO: 50461 - protein, 96 aa, Homo sapiens
NIQLVADGCCNLQKQIQITQLFGVPVVVALNVFKTDTRAEIDLVCELAKRAGAFDAVPCYHWSVGGKGSVDLARAVREAASKRSRFQFLYDVQPFS

SEQ ID NO: 50462 - protein, 231 aa, Homo sapiens
MDPEHAKPESSEAPSGNLKQPETAAALASSGSVVSSVPKAQRNISAKTAPRKHPAVSIRSAQSAAAARPQGSEGTAPSRKATTRPPPKPTLPPPTPSAHTESKLLNEMAIKERVEGRAKVPYKFRDSLKRFSFSPTGMLKILRLSLILGALACFIITQANESFITITSLEICIVVFFILIYVLTLHHLLTYLHWPLLDLTNSIITAVFLSVVAILAMQEKKRRHLLYVGGR

SEQ ID NO: 50463 - protein, 317 aa, Homo sapiens
MQFFGRLVNTFSGVTNLFSNPFRVKEVAVADYTSSDRVREEGQLILFQNTPNRTWDCVLVNPRNSQSGFRLFQLELEADALVNFHQYSSQLLPFYESSPQVLHTEVLQHLTDLIRNHPSWSVAHLAVELGIRECFHHSRIISCANCAENEEGCTPLHLACRKGDGEILVELVQYCHTQMDVTDYKGETVFHYAVQGDNSQVLQVCGDDHQHGQQPDPQQRPPLRSQPPPLGQERRDGPHAAETGLQREQHQLRGEHGPARGGDAQPLRLCHSAADPRGQRGCPRRARQHPAAPGHVERQRGDDQGPHRVRSRSGHPE

SEQ ID NO: 50464 - protein, 142 aa, Homo sapiens
MEYDLQALNIKYAMDAFGGPIWSMAASPSGSQLLVGCEDGSVKLFQITPDKIQFERNFDRQKSRILSLSWHPSGTHIAAGSIDYISVFDVKSGSAVHKMIVDRQYMGVSKRKCIVWGVAFLSDGTIISVDSAGKVQFWDSAT

SEQ ID NO: 50465 - protein, 651 aa, Homo sapiens
MTPILTVLICLGLSLGPRTHVQAGHLPKPTLWAEPGSVITQGSPVTLRCQGGQETQEYRLYREKKTAPWITRIPQELVKKGQFPIPSITWEHTGRYRCYYGSDTAGRSESSDPLELVVTGAYIKPTLSAQPSPVVNSGGNVTLQCDSQVAFDGFILCKEGEDEHPQCLNSQPHARGSSRAIFSVGPVSPSRRWWYRCYAYDSNSPYEWSLPSDLLELLVLGVSKKPSLSVQPGPIVAPEETLTLQCGSDAGYNRFVLYKDGERDFLQLAGAQPQAGLSQANFTLGPVSRSYGGQYRCYGAHNLSSEWSAPSDPLDILIAGQFYDRVSLSVQPGPTVASGENVTLLCQSQGWMQTFLLTKEGAADDPWRLRSTYQSQKYQAEFPMGPVTSAHAGTYRCYGSQSSKPYLLTHPSDPLELVVSGPSGGPSSPTTGPTSTSAGPEDQPLTPTGSDPQSGLGRHLGVVIGILVAVILLLLLLLLLFLILRHRRQGKHWTSTQRKADFQHPAGAVGPEPTDRGLQWRSSPAADAQEENLYAAVKHTQPEDGVEMDTRSPHDEDPQAVTYAEVKHSRPRREMASPPSPLSGEFLDTKDRQAEEDRQMDTEAAASEAPQDVTYAQLHSLTLRREATEPPPSQEGPSPAVPSIYATLAIH

SEQ ID NO: 50466 - protein, 180 aa, Homo sapiens
MRFCPFAERTRLVLKAKGIRHEVININLKNKPEWFFKKNPFGLVPVLENSQGQLIYESAITCEYLDEAYPGKKLLPDDPYEKACQKMILELFSKVLTNKKTTFFGGNSISMIDYLIWPWFERLEAMKLNECVDHTPKLKLWMAAMKEDPTVSALLTSEKDWQGFLELYLQNSPEACDYGL

SEQ ID NO: 50467 - protein, 785 aa, Homo sapiens
MGFMTMPASQEHTPHPCRSAMAPRSLSCHSVGSMDSVGGGPGGASGGLTEDSSTRRPPAKPRRHPSTKLSMVGPGSGAETPPSKKAGSQKPTPEGRESSRKVPPQKPRRSPNTQLSVSFDESCPPGPSPRGGNLPLQRLTRGSRVAGDPDVGAQEEPVYIEMVGDVFRGGGRSGGGLAGPPLGGGGPTPPAGADSDSEESEAIYEEMKYPLPEEAGEGRANGPPPLTATSPPQQPHALPPHAHRRPASALPSRRDGTPTKTTPCEIPPPFPNLLQHRPPLLAFPQAKSASRTPGDGVSRLPVLCHSKEPAGSTPAPQVPARERETPPPPPPPPAANLLLLGPSGRARSHSTPLPPQGSGQPRGERELPNSHSMICPKAAGAPAAPPAPAALLPGPPKDKAVSYTMVYSAVKVTTHSVLPAGPPLGAGEPKTEKEISVLHGMLCTSSRPPVPGKTSPHGGAMGAAAGVLHHRGCLASPHSLPDPTVGPLTPLWTYPATAAGLKRPPAYESLKAGGVLNKGCGVGAPSPMVKIQLQEQGTDGGAFASISCAHVIASAGTPEEEEEEVGAATFGAGWALQRKVLYGGRKAKELDTEVEDGARAWNGSAEGPGKVEREDRGPGTSGIPVRSQGAEGLLARIHHGDRGGSRTALPIPCQTFPACHRNGDFTGGYRLGRSASTSGVRQVVLHTPRPCSQPRDALSQPHPALPLPLPLPPQPARERDGKLLEVIERKRCVCKEIKARHRPDRGLCKQESMPILPSWRRGPEPRKSGTPPCRRQHTVLWDTAI

SEQ ID NO: 50468 - protein, 601 aa, Homo sapiens
MVTCTQNMKAALKSLLYHSRNLGYLQNNKITSISIYAFRGLNSLTKLYLSHNRITFLKPGVFEDLHRLEWLIIEDNHLSRISPPTFYGLNSLILLVLMNNVLTRLPDKPLCQHMPRLHWLVMRKNKINHLNENTFAPLQKLDELDLGSNKIENLPPLIFKDLKELSQLNLSYNPIQKIQANQFDYLVKLKSLSLEGIEISNIQQRMFRPLMNLSHIYFKKFQYCGYAPHVRSCKPNTDGISSLENLLASIIQRVFVWVVSAVTCFGNIFVICMRPYIRSENKLYAMSIISLCCADCLMGIYLFVIGGFDLKFRGEYNKHAQLWMESTHCQLVGSLAILSTEVSVLLLTFLTLEKYICIVYPFRCVRPGKCRTITVLILIWITGFIVAFIPLSNKEFFKNYYGTNGVCFPLHSEDTESIGAQIYSVAIFLGINLAAFIIIVFSYGSMFYSVHQSAITATEIRNQVKKEMILAKRFFFIVFTDALCWIPIFVVKFLSLLQVEIPGTITSWVVIFILPINSALNPILYTLTTRPFKEMIHRFWYNYRQRKSMDSKGQKTYAPSFIWVEMWPLQEMPPELMKPDLFTYPCEMSLISQSTRLNSYS

SEQ ID NO: 50469 - protein, 163 aa, Homo sapiens
MAAAAAATAAAAASIRERQTVALKRMLNFNVPHIKNSTGEPVWKVLIYDRFGQDIISPLLSVKELRDMGITLHLLLHSDRDPIPDVPAVYFVMPTEENIDRMCQDLRNQLYESYYLNFISAISRSKLEDIANAALAASAVTQVAKPLTGQISQTRKWKLLWTL

SEQ ID NO: 50470 - protein, 150 aa, Homo sapiens
MGCIKSKGKDSLSDDGVDLKTQPVRNTERTIYVRDPTSNKQQRPVPESQLLPGQRFQTKDPEEQGDIVVALYPYDGIHPDDLSFKKGEKMKVLEEHGEWWKAKSLLTKKEGFIPSNYVAKLNTLETEEWFFKDITRKDAERQLLAPGNSA

SEQ ID NO: 50471 - protein, 866 aa, Homo sapiens
MFFACYCALRTNVKKYRYQDEDAPHDHSLPRLTHEVRGPELVHVSEKNLSQIENVHGYVLQSHISPLKASPAPIIVNTDTLDTIPYVNGTEIEYEFEEITLERGNSGLGFSIAGGTDNPHIGDDPGIFITKIIPGGAAAEDGRLRVNDCILRVNEVDVSEVSHSKAVEALKEAGSIVRLYVRRRRPILETVVEIKLFKGPKGLGFSIAGGVGNQHIPGDNSIYVTKIIDGGAAQKDGRLQVGDRLLMVNNYSLEEVTHEEAVAILKNTSEVVYLKVGKPTTIYMTDPYGPPDITHSYSPPMENHLLSGNNGTLEYKTSLPPISPGRYSPIPKHMLVDDDYTRPPEPVYSTVNKLCDKPASPRHYSPVECDKSFLLSAPYSHYHLGLLPDSEMTSHSQHSTATRQPSMTLQRAVSLEGEPRKVVLHKGSTGLGFNIVGGEDGEGIFVSFILAGGPADLSGELQRGDQILSVNGIDLRGASHEQAAAALKGAGQTVTIIAQYQPEDYARFEAKIHDLREQMMNHSMSSGSGSLRTNQKRSLYVRAMFDYDKSKDSGLPSQGLSFKYGDILHVINASDDEWWQARRVMLEGDSEEMGVIPSKRRVERKERARLKTVKFNAKPGVIDSKGDIPGLGDDGYGTKTLKHVSSNASDSESSYRGQEDLILSYEPVTRQEINYTRPVIILGPMKDRINDDLISEFPDKFGSCVPHTTRPKRDYEVDGRDYHFVISREQMEKDIQEHKFIEAGQYNDNLYGTSVQSVRFVAERGKHCILDVSGNAIKRLQVAQLYPIAIFIKPRSLEPLMEMNKRLTEEQAKKTYDRAIKLEQEFGEYFTAIVQGDTLEDIYNQCKLVIEEQSGPFIWIPSKEKL

SEQ ID NO: 50472 - protein, 44 aa, Homo sapiens
MIRPQSSMSKHIPQFCGVLGHTFMEFLKGSGDYCQAQHDLYADK

SEQ ID NO: 50473 - protein, 73 aa, Homo sapiens
MLKEDCASELKVHLAKSLPLPSSVNRPRIDLIVFVVNLHSKYSLQNTEESLRHVDASFFLGKVCFLATGGGRL

SEQ ID NO: 50474 - protein, 625 aa, Homo sapiens
  MOD_RES (1)..(1): Any amino acid
XDEDALRTLIDQHKEFMKKLEEKRAELNKATTMGDTVLAICHPDSITTIKHWITIIRARFEEVLAWAKQHQQRLASALAGLIAKQELLEALLAWLQWAETTLTDKDKEVIPQEIEEVKALIAEHQTFMEEMTRKQPDVDKVTKTYKRRAADPSSLQSHIPVLDKGRAGRKRFPASSLYPSGSQTQIETKNPRVNLLVSKWQQVWLLALERRRKLNDALDRLEELREFANFDFDIWRKKYMRWMNHKKSRVMDFFRRIDKDQDGKITRQEFIDGILSSKFPTSRLEMSAVADIFDRDGDGYIDYYEFVAALHPNKDAYKPITDADKIEDEVTRQVAKCKCAKRFQVEQIGDNKYRFGDSQQLRLVRILRSTVMVRVGGGWMALDEFLVKNDPCRAKGRTNMELREKFILADGASQGMAAFRPRGRRSRPSSRGASPNRSTSVSSQAAQAASPQVPATTTPKILHPLTRNYGKPWLTNSKMSTPCKAAECSDFPVPSAEGTPIQGSKLRLPGYLSGKGFHSGEDSGLITTAAARVRTQFADSKKTPSRPGSRAGSKAGSRASSRRGSDASDFDISEIQSVCSDVETVPQTHRPTPRAGSRPSTAKPSKIPTPQRKSPASKLDKSSKR

SEQ ID NO: 50475 - protein, 221 aa, Homo sapiens
MFCQNPGAANSQLSTSQPSLRHKVNEHEQDGNELQTTPEFRAHVAKKLGALLDSFITISEAAKEPAKAKVQKVALEDDGFRLFFTSVPGGREKEESPQPRRKRQPSSSSSEDSDEEWRRCREAAVSASDILQESAIHSPGTVEKEAKKKRKLKKKAKKVASVDSAVAATTPTSMATVQKQKSGELNGDQVSLGTKKKKKAKKASETSPFPPAKSATAIPAN

SEQ ID NO: 50476 - protein, 321 aa, Homo sapiens
MNDISQKAEIKEMLASDDEEDVSSKVEKAYVPKLTGTVKGRFAEMEKQRQEEQRKRTEEERKRRIEQDMLEKRKIQRELAKRAEQIEDINNTGTESASEEGDDSLLITVVPVKSYKTSGKMKKNFEDLEKEREEKERIKYEEDKRIRYEEQRPSLKEAKCLSLVMDDEIESEAKKESLSPGKLKLTFEELERQRQENRKKQAEEEARKRLEEEKRAFEEARRQMVNEDEENQDTAKIFKGYRPGKLKLSFEEMERQRREDEKRKAEEEARRRIEEEKKAFAEARRNMVVDDDSPEMYKTISQEFLTPGKLEINFEELLKQK

SEQ ID NO: 50477 - protein, 113 aa, Homo sapiens
MKGSNRNKDHSAEGEGVGKRPKRKCLQWHPLLAKKLLDFSEEEEEEDEEEDIDKVQLLGADGLEQDVGETEDDESPEQRARRPMNAFLLFCKRHRSLVRQEHPRLDNRGATKI

SEQ ID NO: 50478 - protein, 78 aa, Homo sapiens
LALLALLMSLTQGVLTALRLRKMTFGRVSDLGQFIRESEPEPDVRKSKGSMFSQAMKKWVQGNTDEAQEELAWKIAKM

SEQ ID NO: 50479 - protein, 73 aa, Homo sapiens
MSVTLHTDVGDIKIEVFCERTPKTCEELEEEATVFGARSLRMNTVNILSTMLEVLYLWLIMARTPMDLSSSSP

SEQ ID NO: 50480 - protein, 69 aa, Homo sapiens
  MOD_RES (1)..(1): Any amino acid
XPGCWFFKLPHKDGNSCNVGSPFAKDFLPKMEDGTLQAGPGGASGPRALEINKMISFWRNAHKRISLTE

SEQ ID NO: 50481 - protein, 187 aa, Homo sapiens
  MOD_RES (1)..(1): Any amino acid
XMPLAACQALCTFLPLGSYRKAVAQYFPQLLTTLMFQVFYNSELKPILKDRALYAQDALRVLLNCSGLQQVDITLMKENFWDQLSEDLCYYHGVCFIAKTLSEYNFPQFPETLSYLYKLSVEGPRRSEDTVIVLIFLTELLNNFFKDPLPEEFLVLFINWINDSNPVVSRLILHRIVHMSPIINKVD

SEQ ID NO: 50482 - protein, 122 aa, Homo sapiens
MNAAVRAVVRMGIYVGAKVYFIYEGYQGMVDGGSNIAEADWESVSSILQVGGTIIGSARCQAFRTREGRLKAACNLLQRGITNLCVIGGDGSLTGANLFRKEWSGLLEELARNATRGPSFWR

SEQ ID NO: 50483 - protein, 422 aa, Homo sapiens
  MOD_RES (1)..(1): Any amino acid
XLEKSLEYSTVPTPLPPVPPPPPPPPPTKKKGQKPGRKDTITEKPIAPAEPVEPVLSGSMAIGAVSLAVAKACAMLLNKPLYLNIALLKHNQEQPTTLSMPLLMVSLVSCGKSSSGKLNLMKEVICIPHPELTTKQGVEMLMEMQKHINKIIEMPSPPKAETKKGHDGSKRGQQQITGKMSHLGCLTINCDSIEQPLLLIQEICANLGLELGTNLHLAINCAGHELMDYNKGKYEVIMGTYKNAAEMVDLYVDLINKYPSIIALIDPFRKEDSEQWDSIYHALGSRCYIIAGTASKSISKLLEQGNISIPKSNGLIIKHTNQTTMSDLVEITNLIDSKKHITVFGSTEGESSDDSLVDLAVGLGVRFIKLGGLSRGERVTKYNRLLTIEEELVQNGTLATSSSSCDARIGGQEQETMTLVKV

SEQ ID NO: 50484 - protein, 410 aa, Homo sapiens
MSLVDLGKRLLEAARKGQDDEVRTLMANGAPFTTDWLGTSPLHLAAQYGHYSTAEVLLRAGVSRDARTKVDRTPLHMAAADGHAHIVELLVRNGADVNAKDMLKMTALHWATERHHRDVVELLIKYGADVHAFSKFDKSAFDIALEKNNAEILVILQEAMQNQVNVNPERANPVTDPVSMAAPFIFTSGEVVNLASLISSTNTKTTSANTEEIIEGNSVDSSIQQVMGSGGQRVITIVTDGVPLGNIQTSIPTGGIGQPFIVTVQDGQQVLTVPAGKVAEETVIKEEEEEKLPLTKKPRIGEKTNSVEESKEGNERELLQQQLQEANRRAQEYRHQLLKKEQEAEQYRLKLEAIARQQPNGVDFTMVEEVAEVDAVVVTEGELEERETKVTGSAGTTEPHTRVSMATVSS

SEQ ID NO: 50485 - protein, 100 aa, Homo sapiens
MSSTSSKRAPTTATQRLKQDYLRIKKDPVPYICAEPLPSNILEWHYVVRGPEMTPYEGIPVLDHLQLGQPECGSTSVGWALHHRVIAHDQRWGCQQAVVR

SEQ ID NO: 50486 - protein, 407 aa, Homo sapiens
  MOD_RES (1)..(1): Any amino acid
XETPMLVAVLTYVGYGVLTLFGYLRDFLRYWRIEKCHHATEREEQKDFVSLYQDFENFYTRNLYMRIRDNWNRPICSVPGARVDIMERQSHDYNWSFKYTGNIIKGVINMGSYNYLGFARNTGSCQEAAAKVLEEYGAGVCSTRQEIGNLDKHEELEELVARFLGVEAAMAYGMGFATNSMNIPALVGKGCLILSDELNHASLVLGARLSGATIRIFKHNNMQSLEKLLKDAIVYGQPRTRRPWKKILILVEGIYSMEGSIVRLPEVIALKKKYKAYLYLDEAHSIGALGPTGRGVVEYFGLDPEDVDVMMGTFTKSFGASGGYIGGKKELIDYLRTHSHSAVYATSLSPPVVEQIITSMKCIMGQDGTSLGNGITIHEVVQTRNTYHRFSPLSPVFSHQCLWIMLP

SEQ ID NO: 50487 - protein, 119 aa, Homo sapiens
MARTAGDTLDVFTMIDIFKYVIYGIAAAFFVYGILLMVEGFFTTGAIKDLYGDFKITTCGRCVSAWFIMLTYLFMLAWLGVTAFTSLPVYMYFNLWTICRNTTLVEGANLCLDLRQFGK

SEQ ID NO: 50488 - protein, 556 aa, Homo sapiens
MEEPEEPADSGQSLVPVYIYSPEYVSMCDSLAKIPKRASMVHSLIEAYALHKQMRIVKPKVASMEEMATFHTDAYLQHLQKVSQEGDDDHPDSIEYGLGYDCPATEGIFDYAAAIGGATITAAQCLIDGMCKVAINWSGGWHHAKKDEASGFCYLNDAVLGILRLRRKFERILYVDLDLHHGDGVEDAFSFTSKVMTVSLHKFSPGFFPGTGDVSDVGLGKGRYYSVNVPIQDGIQDEKYYQICESVLKEVYQAFNPKAVVLQLGADTIAGDPMCSFNMTPVGIGKCLKYILQWQLATLILGGGGYNLANTARCWTYLTGVILGKTLSSEIPDHEFFTAYGPDYVLEITPSCRPDRNEPHRIQQILNYIKAQQLQLAASLPANLSNFCQGSEMPTTSRPALDVKGGTSPAKEDANQEMSSVAYSNLAVKDRKAVAILHYPGVASNGTKASGAPTSSSGSPIGSPTTTPPTKPPSFNLHPAPHLLASMHLQKLNSQYQGMAAATPGQPGEAGPLQNWDFGAQAGGAESLSPSAGAQSPAIIDSDPVDEEVLMSLVVE

SEQ ID NO: 50489 - protein, 172 aa, Homo sapiens
MQRRLVQQWSVAVFLLSYAVPSCGRSVEGLSRRLKRAVSEHQLLHDKGKSIQDLRRRFFLHHLIAEIHTAEIRATSEVSPNSKPSPNTKNHPVRFGSDDEGRYLTQETNKVETYKEQPLKTPGKKKKGKPGKRKEQEKKKRRTRSAWLDSGVTGSGLEGDHLSDTSTTSLEL

SEQ ID NO: 50490 - protein, 61 aa, Homo sapiens
MVAPKSHTDDWAPGPFSSKPQRSQLQIFSSVLQTSLLFLLMGPTPGKHLSAAWPGTPLSSR

SEQ ID NO: 50491 - protein, 188 aa, Homo sapiens
MSLQWTAVATFLYAEVFVVLLLCIPFISPKRWQKIFKSRLVELLVSYGNTFFVVLIVILVLLVIDAVREIRKYDDVTEKVNLQNNPGAMEHFHMKLFRAQRNLYIAGFSLLLSFLLRRLVTLISQQATLLASNEAFKKQAESASEAAKKYMEENDQLKKGAAVDGGKLDVGNAEVKLEEENRSLKADL

SEQ ID NO: 50492 - protein, 99 aa, Homo sapiens
  MOD_RES (1)..(1): Any amino acid
XLKVNNVPRSGNSALPQDPLHPGCPENLEGILTNDVGKTGEPQSDQQMRQEEPLPEHPQDGAKLSRKQLVLRRGLLLLGVFLILLLVKLRAVSWDQLCP

SEQ ID NO: 50493 - protein, 384 aa, Homo sapiens
MALRLLKLAATSASARVVAAGAQRVRGIHSSVQCKLRYGMWHFLLGDKASKRLTERSRVITVDGNICTGKGKLAKEIAEKLGFKHFPEAGIHYPDSTTGDGKPLATDYNGNCSLEKFYDDPRSNDGNSYRLQSWLYSSRLLQYSDALEHLLTTGQGVVLERSIFSDFVFLEAMYNQGFIRKQCVDHYNEVKSVTICDYLPPHLVIYIDVPVPEVQRRIQKKGDPHEMKITSAYLQDIENAYKKTFLPEMSEKCEVLQYSAREAQDSKKVVEDIEYLKFDKGPWLKQDNRTLYHLRLLVQDKFEVLNYTSIPIFLPEVTIGAHQTDRVLHQFREKERSWRRIRMLTRAAGNSLAGWTKAWKDSGIGRSGTRRSGVEAARGPDGVT

SEQ ID NO: 50494 - protein, 279 aa, Homo sapiens
METCTCGEITIDILFSHWPFYVPKLVENCVCLLRNLSYQVHREIPQAERYQEAAPNVANNTGPHAASCFGAKKGKGKKPIEDPANDTVDFPKRTSPARGYELLFQPEVVRIYISLLKESKTPAILEASAGAIQNLCAGRWTYGRYIRSALRQEKALSAIADLLTNEHERVVKAASGALRNLAVDARNKELIGKHAIPNLVKNLPGGQQNSSWNFSEDTVISILNTINEVIAENLEAAKKLRETQGIEKLVLINKSGVSLCHPGWSAVAQSLQPPPPGFK

SEQ ID NO: 50495 - protein, 2332 aa, Homo sapiens
MAARAAAAAAAAAARARARAGSGERRAPPGPRPAPGARDLEAGARGAAAAAAAPGPMLGGGGDGGGGLNSVHHHPLLPRHELNMAHNAGAAAAAGTHSAKSGGSEAALKEGGSAAALSSSSSSSAAAAAASSSSSSGPGSAMETGLLPNHKLKTVGEAPAAPPHQQHHHHHHAHHHHHHAHHLHHHHALQQQLNQFQQQQQQQQQQQQQQQQQQHPISNNNSLGGAGGGAPQPGPDMEQPQHGGAKDSAAGGQADPPGPPLLSKPGDEDDAPPKMGEPAGGRYEHPGLGALGTQQPPVAVPGGGGGPAAVPEFNNYYGSAAPASGGPGGRAGPCFDQHGGQQSPGMGMMHSASAAAAGAPGSMDPLQNSHEGYPNSQCNHYPGYSRPGAGGGGGGGGGGGGGSGGGGGGGGAGAGGAGAGAVAAAAAAAAAAAGGGGGGGYGGSSAGYGVLSSPRQQGGGMMMGPGGGGAASLSKAAAGSAAGGFQRFAGQNQHPSGATPTLNQLLTSPSPMMRSYGGSYPEYSSPSAPPPPPSQPQSQAAAAGAAAGGQQAAAGMGLGKDMGAQYAAASPAWAAAQQRSHPAMSPGTPGPTMGRSQGSPMDPMVMKRPQLYGMGSNPHSQPQQSSPYPGGSYGPPGPQRYPIGIQGRTPGAMAGMQYPQQQDSGDATWKETFWLMPPQYGQQGVSGYCQQGQQPYYSQQPQPPHLPPQAQYLPSQSQQRYQPQQDMSQEGYGTRSQPPLAPGKPNHEDLNLIQQERPSSLPDLSGSIDDLPTGTEATLSSAVSASGSTSSQGDQSNPAQSPFSPHASPHLSSIPGGPSPSPVGSPVGSNQSRSGPISPASIPGSQMPPQPPGSQSESSSHPALSQSPMPQERGFMAGTQRNPQMAQYGPQQTGPSMSPHPSPGGQMHAGISSFQQSNSSGTYGPQMSQYGPQGNYSRPPAYSGVPSASYSGPGPGMGISANNQMHGQGPSQPCGAVPLGRMPSAGMQNRPFPGNMSSMTPSSPGMSQQGGPGMGPPMPTVNRKAQEAAAAVMQAAANSAQSRQGSFPGMNQSGLMASSSPYSQPMNNSSSLMNTQAPPYSMAPAMVNSSAASVGLADMMSPGESKLPLPLKADGKEEGTPQPESKSKKSSSSTTTGEKITKVYELGNEPERKLWVDRYLTFMEERGSPVSSLPAVGKKPLDLFRLYVCVKEIGGLAQVNKNKKWRELATNLNVGTSSSAASSLKKQYIQYLFAFECKIERGEEPPPEVFSTGDTKKQPKLQPPSPANSGSLQGPQTPQSTGSNSMAEVPGDLKPPTPASTPHGQMTPMQGGRSSTISVHDPFSDVSDSSFPKRNSMTPNAPYQQGMSMPDVMGRMPYEPNKDPFGGMRKVPGSSEPFMTQGQMPNSSMQDMYNQSPSGAMSNLGMGQRQQFPYGASYDRRHEPYGQQYPGQGPPSGQPPYGGHQPGLYPQQPNYKRHMDGMYGPPAKRHEGDMYNMQYSSQQQEMYNQYGGSYSGPDRRPIQGQYPYPYSRERMQGPGQIQTHGIPPQMMGGPLQSSSSEGPQQNMWAARNDMPYPYQNRQGPGGPTQAPPYPGMNRTDDMMVPDQRINHESQWPSHVSQRQPYMSSSASMQPITRPPQPSYQTPPSLPNHISRAPSPASFQRSLENRMSPSKSPFLPSMKMQKVMPTVPTSQVTGPPPQPPPIRREITFPPGSVEASQPVLKQRRKITSKDIVTPEAWRVMMSLKSGLLAESTWALDTINILLYDDSTVATFNLSQLSGFLELLVEYFRKCLIDIFGILMEYEVGDPSQKALDHNAARKDDSQSLADDSGKEEEDAECIDDDEEDEEDEEEDSEKTESDEKSSIALTAPDAAADPKEKPKQASKFDKLPIKIVKKNNLFVVDRSDKLGRVQEFNSGLLHWQLGGGDTTEHIQTHFESKMEIPPRRRPPPPLSSAGRKKEQEGKGDSEEQQEKSIIATIDDVLSARPGALPEDANPGPQTESSKFPFGIQQAKSHRNIKLLEDEPRSRDETPLCTIAHWQDSLAKRCICVSNIVRSLSFVPGNDAEMSKHPGLVLILGKLILLHHEHPERKRAPQTYEKEEDEDKGVACSKDEWWWDCLEVLRDNTLVTLANISGQLDLSAYTESICLPILDGLLHWMVCPSAEAQDPFPTVGPNSVLSPQRLVLETLCKLSIQDNNVDLILATPPFSRQEKFYATLVRYVGDRKNPVCREMSMALLSNLAQGDALAARAIAVQKGSIGNLISFLEDGVTMAQYQQSQHNLMHMQPPPLEPPSVDMMCRAAKALLAMARVDENRSEFLLHEGRLLDISISAVLNSLVASVICDVLFQIGQL

SEQ ID NO: 50496 - protein, 998 aa, Homo sapiens
MATPGPRDIPLLPGSPRRLSPQAGSRGGQGPKHGQQCLKMPGPRAPGLQGGSNRDPGQPCGGESTRSSSVINNYLDANEPVSLEARLSRMHFHDSQRKVDYVLAYHYRKRGVHLAQGFPGHSLAIVSNGETGKEPHAGGPGDIELGPLDALEEERKEQREEFEHNLMEAGLELEKDLENKSQGSIFVRIHAPWQVLAREAEFLKIKVPTKKMYEIKAGGSIAKKFSAALQKLSSHLQPRVPEHSNNKMKNLSYPFSREKMYLYNIQEKDTFFDNATRSRIVHEILKRTACSRANNTMGINSLIANNIYEAAYPLHDGEYDSPEDDMNDRKLLYQEWARYGVFYKFQPIDLIRKYFGEKIGLYFAWLGLYTSFLIPSSVIGVIVFLYGCATIEEDIPSREMCDQQNAFTMCPLCDKSCDYWNLSSACGTAQASHLFDNPATVFFSIFMALWATMFLENWKRLQMRLGYFWDLTGIEEEEEHSRPEYETKVREKMLKESNQSAVQKLETNTTECGDEDDEDKLTWKDRFPGYLMNFASILFMIALTFSIVFGVIVYRITTAAALSLNKATRSNVRVTVTATAVIINLVVILILDEIYGAVAKWLTKIEVPKTEQTFEERLILKAFLLKFVNAYSPIFYVAFFKGRFVGRPGSYVYVFDGYRMEECAPGGCLMELCIQLSIIMLGKQLIQNNIFEIGVPKLKKLFRKLKDETEAGETDSAHSKHPEQWDLDYSLEPYTGLTPEYMEMIIQFGFVTLFVASFPLAPVFALLNNVIEVRLDAKKFVTELRRPDAVRTKDIGIWFDILSGIGKFSVISNAFVIAITSDFIPRLVYQYSYSHNGTLHGFVNHTLSFFNVSQLKEGTQPENSQFDQEVQFCRFKDYREPPWAPNPYEFSKQYWFILSARLAFVIIFQNLVMFLSVLVDWMIPDIPTDISDQIKKEKSLLVDFFLKEEHEKLKLMDEPALRSPGGGDRSRSRAASSAPSGQSQLGSMMSSGSQHTNV

SEQ ID NO: 50497 - protein, 1070 aa, Homo sapiens
MIKRVQNLLGHYLIHGFRVRPEPNGDLDLEAMVAVFGSKGLRVVKISWGQGHFWELWRSGLWNMSDWIWDARWLEGNIALALGHNSVVLYDPVVGCILQEVPCTDRCTLSSACLIGDAWKELTIVAGAVSNQLLVWYPATALADNKPVAPDRRISGHVGIIFSMSYLESKGLLATASEDRSVRIWKVGDLRVPGGRVQNIGHCFGHSARVWQVKLLENYLISAGEDCVCLVWSHEGEILQAFRGHQGRGIRAIAAHERQAWVITGGDDSGIRLWHLVGRGYRGLGVSALCFKSRSRPGTLKAVTLAGSWRLLAVTDTGALYLYDVEVKCWEQLLEDKHFQSYCLLEAAPGPEGFGLCAMANGEGRVKVVPINTPTAAVDQTLFPGKVHSLSWALRGYEELLLLASGPGGVVACLEISAAPSGKAIFVKERCRYLLPPSKQRWHTCSAFLPPGDFLVCGDRRGSVLLFPSRPGLLKDPGVGGKARAGAGAPVVGSGSSGGGNAFTGLGPVSTLPSLHGKQGVTSVTCHGGYVYTTGRDGAYYQLFVRDGQLQPVLRQKSCRGMNWLAGLRIVPDGSMVILGFHANEFVVWNPRSHEKLHIVNCGGGHRSWAFSDTEAAMAFAYLKDGDVMLYRALGGCTRPHVILREGLHGREITCVKRVGTITLGPEYGVPSFMQPDDLEPGSEGPDLTDIVITCSEDTTVCVLALPTTTGSAHALTAVCNHISSVRAVAVWGIGTPGGPQDPQPGLTAHVVSAGGRAEMHCFSIMVTPDPSTPSRLACHVMHLSSHRLDEYWDRQRNRHRMVKVDPETRYMSLAVCELDQPGLGPLVAAACSDGAVRLFLLQDSGRILQLLAETFHHKRCVLKVHSFTHEAPNQRRRLLLCSAATDGSLAFWDLTTMLDHDSTVLEPPVDPGLPYRLGTPSLTLQAHSCGINSLHTLPTREGHHLVASGSEDGSLHVFVLAVEMLQLEEAVGEAGLVPQLRVLEEYSVPCAHAAHVTGLKILSPSIMVSASIDQRLTFWRLGHGEPTFMNSTVFHVPDVADMDCWPVSPEFGHRCALGGQGLEVYNWYD

SEQ ID NO: 50498 - protein, 79 aa, Homo sapiens
  MOD_RES (1)..(1): Any amino acid
XFRSAVVKEDAMPATLMTLLFSNIDPIYEFHRGFLREVEQRLALWEGPSKAHTKGSHQRIGDILLRNMRQLKAAHEFTT

SEQ ID NO: 50499 - protein, 217 aa, Homo sapiens [sequence omitted]

SEQ ID NO: 50500 - protein, 401 aa, Homo sapiens
MKTLLLLLLVLLELGEAQGSLHRVPLRRHPSLKKKLRARSQLSEFWKSHNLDMIQFTESCSMDQSAKEPLINYLDMEYFGTISIGSPPQNFTVIFDTGSSNLWVPSVYCTSPACKTHSRFQPSQSSTYSQPGQSFSIQYGTGSLSGIIGADQVSAFSYQVEGLTVVGQQFGESVTEPGQTFVDAEFDGILGLGYPSLAVGGVTPVFDNMMAQNLVDLPMFSVYMSSNPEGGAGSELIFGGYDHSHFSGSLNWVPVTKQAYWQIALDNIQVGGTVMFCSEGCQAIVDTGTSLITGPSDKIKQLQNAIGAAPVDGEYAVECANLNVMPDVTFTINGVPYTLSPTAYTLLDFVDGMQFCSSGFQGLDIHPPAGPLWILGDVFIRQFYSVFDRGNNRVGLAPAVP

SEQ ID NO: 50501 - protein, 724 aa, Homo sapiens
MATMLEGRCQTQPRSSPSGREASLWSSGFGMKLEAVTPFLGKYRPFVGRCCQTCTPKSWESLFHRSITDLGFCNVILVKEENTRFRGWLVRRLCYFLWSLEQHIPPCQDVPQKIMESTGVQNLLSGRVPGGTGEGQVPDLVKKEVQRILGHIQAPPRPFLVRLFSWALLRFLNCLFLNVQLHKGQMKMVQKAAQAGLPLVLLSTHKTLLDGILLPFMLLSQGLGVLRVAWDSRACSPALRALLRKLGGLFLPPEASLSLDSSEGLLARAVVQAASAPLGLWTGALAVLRSLWSRWGCSHRICSRVHLAQPFSLQEYIVSARSCWGGRQTLEQLLQPIVLGQCTAVPDTEKEQEWTPITGPLLALKEEDQLLVRRLSCHVLSASVGSSAVMSTAIMATLLLFKHQKLLGEFSWLTEEILLRGFDVGFSGQLRSLLQHSLSLLRAHVALLRIRQGDLLVVPQPGPGLTHLAQLSAELLPVFLSEAVGACAVRGLLAGRVPPQGPWELQGILLLSQNELYRQILLLMHLLPQDLLLLKPCQSSYCYCQEVLDRLIQCGLLVAEETPGSRPACDTGRQRLSRKLLWKPSGDFTDSDSDDFGEADGRYFRLSQQSHCPDFFLFLCRLLSPLLKAFAQAAAFLRQGQLPDTELGYTEQLFQFLQATAQEEGIFECADPKLAISAVWTFRDLGVLQQTPSPAGPRLHLSPTFASLDNQEKLEQFIRQFICS

SEQ ID NO: 50502 - protein, 145 aa, Homo sapiens
MEDDEEETTASTLRGKPRPPPVSAQSAFSYIPPRRLDPKEHSYYYRPARTGIISLYDCIFKRRLDYDQKLHRDDREHAKSLGLHVNEEERPVGVLTSSVYGKRINQPIEPLNRDFGRANHVQADFYRKNDIPSLKEPGFGHIAPS

SEQ ID NO: 50503 - protein, 522 aa, Homo sapiens
LDFLLLQDPASTCVPEPASQHTLRSGPGCLQQPEQQGVRDPGGIWAKLGAAEASAERLQGRRSRGASGSEPQQMGSDVRDLNALLPAVPSLGGGGGCALPVSGAAQWAPVLDFAPPGASAYGSLGGPAPPPAPPPPPPPPPHSFIKQEPSWGGAEPHEEQCLSAFTVHFSGQFTGTAGACRYGPFGPPPPSQASSGQARMFPNAPYLPSCLESQPAIRNQGYSTVTFDGTPSYGHTPSHHAAQFPNHSFKHEDPMGQQGSLGEQQYSVPPPVYGCHTPTDSCTGSQALLLRTPYSSDNLYQMTSQLECMTWNQMNLGATLKGVAAGSSSSVKWTEGQSNHSTGYESDNHTTPILCGAQYRIHTHGVFRGIQDVRRVPGVAPTLVRSASETSEKRPFMCAYPGCNKRYFKLSHLQMHSRKHTGEKPYQCDFKDCERRFSRSDQLKRHQRRHTGVKPFQCKTCQRKFSRSDHLKTHTRTHTGKTSEKPFSCRWPSCQKKFARSDELVRHHNMHQRNMTKLQLAL

SEQ ID NO: 50504 - protein, 69 aa, Homo sapiens
  MOD_RES (1)..(1): Any amino acid
XVGAFLKNAWDKEPVLVVSFVVGGLAVILPPLSPYFKYSVMINKATPYNYPVEAGFHRVSQDCLDLLTL

SEQ ID NO: 50505 - protein, 133 aa, Homo sapiens
MLSRLRVVSTTCTLACRHLHIKEKGKPLMLNPRTNKGMAFTLQERQMLGLQGLLPPKIETQDIQALRFHRNLKKMTSPLEKYIYIMGIQERNEKLFYRILQDDIESLMPIVYTPTVGLACSQYGHIFRRPKLL

SEQ ID NO: 50506 - protein, 126 aa, Homo sapiens
MTTACQEANYGALLRELCLTQFQVDMEAVGETLWCDWGRTIRSYRELADCTWHMAEKLGCFWPNAEVDRFFLAVHGRYFRSCPISGRAVRDPPGSILYPFIVVPITVTLLVTALVVWQSKRTEGIV

SEQ ID NO: 50507 - protein, 33 aa, Homo sapiens
MPQFTFACFCGLHGFCKMKRKKEEVHRERETAV

SEQ ID NO: 50508 - protein, 356 aa, Homo sapiens
MPRVKAAQAGRQSSAKRHLAEQFAVGEIITDMAKKEWKVGLPIGQGGFGCIYLADMNSSESVGSDAPCVVKVEPSDNGPLFTELKFYQRAAKPEQIQKWIRTRKLKYLGVPKYWGSGLHDKNGKSYRFMIMDRFGSDLQKIYEANAKRFSRKTVLQLSLRILDILEYIHEHEYVHGDIKASNLLLNYKNPDQVYLVDYGLAYRYCPEGVHKEYKEDPKRCHDGTIEFTSIDAHNGVAPSRRGDLEILGYCMIQWLTGHLPWEDNLKDPKYVRDSKIRYRENIASLMDKCFPEKNKPGEIAKYMETVKLLDYTEKPLYENLRDILLQGLKAIGSKDDGKLDLSVVENGGLKAKTITK

SEQ ID NO: 50509 - protein, 238 aa, Homo sapiens
MASREDELRNCVVCGDQATGYHFNALTCEGCKGFFRRTVSKSIGPTCPFAGSCEVSKTQRRHCPACRLQKCLDAGMRKDMILSAEALALRRAKQAQRRAQQTPVQLSKEQEELIRTLLGAHTRHMGTMFEQFVQFRPPAHLFIHHQPLPTLAPVLPLVTHFADINTFMVLQVIKFTKDLPVFRSLPIEDQISLLKGAAVEICHIVLNTTFCLQTQNFLCGPLRYTIEDGARGEMVLEQ

SEQ ID NO: 50510 - protein, 139 aa, Homo sapiens
MEETQGELTSSCGSKTMANVSLAFRDVSIDLSQEEWECLDAVQRDLYKDVMLENYSNLVSLGYTIPKPDVITLLEQEKEPWIVMREGTRNWFTDLEYKYITKNLLSEKNVCKIYLSQLQTGEKSKNTIHEDTIFRNGLQ

SEQ ID NO: 50511 - protein, 261 aa, Homo sapiens
MALVHKLLRGTYFLRKFSKPTSALYPFLGIRFAEYSSSLQKPVASPGKASSQRKTEGDLQGDHQKEVALDITSSEEKPDVSFDKAIRDEAIYHFRLLKDEIVDHWRGPEGHPLHEVLLEQAKVVWQFRGKEDLDKWTVTSDKTIGGRSEVFLKMGKNNQSALLYGTLSSEAPQDGESTRSGYCAMISRIPRGAFERKMSYDWSQFNTLYLRVRGDGRPWMVNIKEDTDFFQRTNQMYSYFMFTRGGPYWQEVKATLLKLVS

SEQ ID NO: 50512 - protein, 1141 aa, Homo sapiens
MRSVAHAAIFQSLCITPDTLAFNTSGNVCFMEQLSDDPEGAFVPPEFDVTGNTFEAHIYSLGATLKAALEYVAEPTLEPRLSQDLEALLSRMQAEDPGDRPDLESIIALCEEKLQLTSSCRVCRSLSAVGRRVLSIESFGALQDVSESSWRERPAPGNAGPRRPPGDPSTDPEVLPTPEGPESETSRGPRASPTKALLSTPVRNGESHSREGLAGLVLDAERTLGELDRDALRRSRLRKVQTFPRLLSDSPEATLCLPLTRGKSQLPISELFSPDPRKAFLDRKNGLSSFQAQPKCRLWPEQEPEHQLGRVPCAGRSTDRGPGVPGSPGQPETSHPSQGPAEAPADPRDASGEAQTPRDDERIPEGARQLESAAAEQWVSLQDLLSQLGRPFREYELWALCLACLRALQTRPEHPAYLCLDSVLVAEDGAVLFQPPPANGSYDSFFLAPELAEERLVTEKASVYCVAAVLWTAAKFSVPRNHKLALPRRLKTLLLDMARRSAPERPSAAEAIKVCGSYLLQRGMDSRKILAHLRASICQVYQEEETISLQNAFSVVELKPSVAPAPEPSPGFLPVNSDTGLVAVPGPVPGQHPCGEEATQLPAAFTSEATHFKPIVLAQNASVARDQPALAQEESEERGGQREGEGEEKLSLEAHAGSPSLKTPDGPVPGPGPQGAAPEPLGASVQRDSAQGRPCPPPQAPANQPEGASSAAPGSPVPAPPTKASALPVEQGPAEPIPPGVASGGLRPDALGPTTAHHGPRHPPKPPRSKATERPGQEPEGPGATPAGERDDQSPDSVPERPRPADRRLCLPCVDASPLPGRTACPSLQEATRLIQEEFAFDGYLDNGLEALIMGEYIFALKDLTFATFCGAISEKFCDLYWDEKLLQNLFKVVNGQASPSPSTAEEAGSQLEGSQSPRSPSSKRPSLHRLGKEKPAMARTSSRAPCSPTSVSDVDSDALSRGNFEVGFRPQRSVKAERAQQPEAGEDRRPAGGASDVEAVTRLARSKGVGPALSPGPAGFQSCSPGWCSAFYEADCFGADVHNYVKDLGRQQADGALPDAQSPELEQQLMMEKRNYRKTLKFYQKLLQKEKRNKGSDVKTMLSKLKGQLEEMKSRVQFLSLVKKYLQASGLRAPLCPVRQ

SEQ ID NO: 50513 - protein, 70 aa, Homo sapiens
MPHIDNDVKLDFKDVLLRPKRSTLKSRSEVDLTRSFSFRNSKQTYSGVPIIAANMDTVGTFEMAKVLCKS

SEQ ID NO: 50514 - protein, 1018 aa, Homo sapiens
MNQKQALQEEFFHNPQAIDIESEDFSSLPPEVKHEILTDMKEFTKRRRTLFEAMPEESDDFSQYQLKGLLKKNYLNQHIEHVQKEMNQQHSGHIRRQYEDEGGFLKEVESRRVVSEDTSHYILIKGIQAKTVAEVDSESLPSSSKMHGMSFDVKSSPCEKLKTEKEPDATPPSPRTLLAMQAALLGSSSEEELESENRRQARGRNAPAAVDEGSISPRTLSAIKRALDDDEDVKVCAGDDVQTGGPGAEEMRINSSTENSDEGLKVRDGKGIPFTATLASSSVNSAEEHVASTNEGREPTDSVPKEQMSLVHVGTEAFPISDESMIKDRKDRLPLESAVVRHSDAPGLPNGRELTPASPTCTNSVSKNETHAEVLEQQNELCPYESKFDSSLLSSDDETKCKPNSASEVIGPVSLQETSSIVSVPSEAVDNVENVVSFNAKEHENFLETIQEQQTTESAGQDLISIPKAVEPMEIDSEESESDGSFIEVQSVISDEELQAEFPETSKPPSEQGEEELVGTREGEAPAESESLLRDNSERDDVDGEPQEAEKDAEDSLHEWQDINLEELETLESNLLAQQNSLKAQKQQQERIAATVTGQMFLESQELLRLFGIPYIQAPMEAEAQCAILDLTDQTSGTITDDSDIWLFGARHVYRNFFNKNKFVEYYQYVDFHNQLGLDRNKLINLAYLLGSDYTEGIPTVGCVTAMEILNEFPGHGLEPLLKFSEWWHEAQKNPKIRPNPHDTKVKKKLRTLQLTPGFPNPAVAEAYLKPVVDDSKGSFLWGKPDLDKIREFCQRYFGWNRTKTDESLFPVLKQLDAQQTQLRIDSFFRLAQQEKEDAKRIKSQRLNRAVTCMLRKEKEAAASEIEAVSVAMEKEFELLDKAKGKTQKRGITNTLEESSSLKRKRLSDSKGKNTCGGFLGETCLSESSDGSSSEDAESSSLMNVQRRTAAKEPKTSASDSQNSVKEAPVKNGGATTSSSSDSDDDGGKEKMVLVTARSVFGKKRRKLRRARGRKRKT

SEQ ID NO: 50515 - protein, 365 aa, Homo sapiens [sequence omitted]

SEQ ID NO: 50516 - protein, 35 aa, Homo sapiens
MMESCSVVRLECSGMISALCNLRLPGSSNSPASAS

SEQ ID NO: 50517 - protein, 257 aa, Homo sapiens
MAIFSVYVVNKAGGLIYQLDSYAPRAEAEKTFSYPLDLLLKLHDERVLVAFGQRDGIRVGHAVLAINGMDVNGRYTADGKEVLEYLGNPANYPVSIRFGRPRLTSNEKLMLASMFHSLFAIGSQLSPEQGSSGIEMLETDTFKLHCYQTLTGIKFVVLADPRQAGIDSLLRKIYEIYSDFALKNPFYSLEMPIRACRGKATVGWCSGTWTLFTQPSWTLGPSWCGCFVGGRRQPCWPHKSLQPPRRLCSNCSAWQWC

SEQ ID NO: 50518 - protein, 211 aa, Homo sapiens
MVVVIVCLLNHYKVSTRSFINRPNQSRRREDGLPQIMHAPRSRDRFTAPSFIQRDRFSRFQPTYPYVQHEIDLPPTISLSDGEEPPPYQGPCTLQLRDPEQQMELNRESVRAPPNRTIFDSDLIDIAMYSGGPCPPSSNSGISASTCSSNGRMEGPPPTYSEVMGHHPGASFLHHQRSNAHRGSRLQFQQNNAESTIVPIKGKDRKPGNLV

SEQ ID NO: 50519 - protein, 197 aa, Homo sapiens
MAFLIHNAPESSSACGKATDEFKHVKEYSCQRHKGNLPRVHGALRHPTSCSSSSEIMSVLFFYIMRYKQSDPENPDNDRFVLAKRLSFVDVATGWLGQGLGVACGMAYTGKYFDRASYRVFCLMSDGESSEGSVWEAMAFASYYSLDNLVAIFDVNRLGHSGALPAEHCINIYQRRCEAFGWNTYVVDGRDVEALCQ

SEQ ID NO: 50520 - protein, 459 aa, Homo sapiens
MSYGEIEGKFLGPREEVTSEPRCKKLKSTTESYVFHNHSNADFHRIQEKTGNDWVPVTIIDVRGHSYLQENKIKTTDLHRPLHDEMPGNRPDVIESIDSQVLQEARPPLVSADDEIYSTSKAFIGPIYKPPEKKKRNEGRNEAHVLNGINDRGGQKEKQKFNSEKSEIDNELFQFYKEIEELEKEKDGFENSCKESEPSQEQFVPFYEGHNNGLLKPDEEKKDLSNKAMPSHCDYQQNLGNEPDKYPCNGQVIPTFCDTSFTSFRPEWQSVYPFIVPYGPPLPSLNYHLNIQRFSGPPNPPSNIFQAQDDSQIQNGYYVNNCHVNWNCMTFDQNNEYTDCSENRSSVHPSGNGCSMQDRYVSNGFCEVRERCWKDHCMDKHNGTDRFVNQQFQEEKLNKLQKLLILLRGLPGSGKTTLSRILLGQNRDGIVFSTDDYFHHQDGYSKTSYRSGKISSYNR

SEQ ID NO: 50521 - protein, 39 aa, Homo sapiens
MATNFLAHEKIWFDKFKYDDAERRFYEQMNGPVAGASRQ

SEQ ID NO: 50522 - protein, 119 aa, Homo sapiens
MGPLQFRDVAIEFSLEEWHCLDTAQRNLYRNVMLENYSNLVFLGIVVSKPDLIAHLEQGKKPLTMKRHEMVANPSGPGVVVVLMCNPRILGGQAKRIPGAQKFENSLGNIWRPLSMKKI

SEQ ID NO: 50523 - protein, 166 aa, Homo sapiens
MAGFAELGLSSWLVEQCRQLGLKQPTPVQLGCIPAILEGRDCLGCAKTGSGKTAAFVLPILQKLSEDPYGIFCLVLTPTRGPAELNKMAPVQWLTPVIPALWELQGAGLPDRRAVPGPGEASRAERLHHRRWHGHGGPGAGALSETTRGHRHAGAPGRSPAQLQHF

SEQ ID NO: 50524 - protein, 202 aa, Homo sapiens
MVCRPVFPCRRRFCPRPFLVGLVVAICLFYQTLTLRGSRKLTAAAPGAVPHTSTETQASRCKKGFSQDKQCFLLSGNAQETRKVKESMETHFGSHGRRAILYRPPFYSKTELQLHQHILTQHGYTVVIAEERLNAGLGPGLLEQGDLGSWDLLICLSSKKAEGTPCISKEVMCQLGLHQKQLRRREERQRPGSPASRRLSVR

SEQ ID NO: 50525 - protein, 171 aa, Homo sapiens
MATGLLRAKKEAFVAFRDVAVYFTQEEWRLLSPAQRTLHREVMLETYNHLVSLEIPSSKPKLIAQLERGEAPWREERKCPLDLCPDGALLCCQAGIQWCYIGSLQPLPPGFKQFPCLSLLSSWDYRCTPPHLANFLYFSRDGVSPCWPGWSQSPDLVIHPPQPPKVLGLQA

SEQ ID NO: 50526 - protein, 72 aa, Homo sapiens
MFQQFQASCLVLFFLVGFAQQTLKPQNRKVDCNKGVTGTIYEYGALTLNGEEYIQFKQFAGKHVLFVNVAAY

SEQ ID NO: 50527 - protein, 32 aa, Homo sapiens
MDLGECTKIHDLALRADYEIASKERDLFFELD

SEQ ID NO: 50528 - protein, 41 aa, Homo sapiens
MSPESKKLFNIIILGVAFMFMFTAFQTCGNVAVSWNLSSLL

SEQ ID NO: 50529 - protein, 198 aa, Homo sapiens
MAAENDANIAIVGNVRLVGEVPSSMTTESTATAMQSEMSTSIMETTTTLATSTARRGKPPTKEPISQTTDDILVASAECPSDDEDIDPCEPSSGGLANPTRAGGREPYPGSAEVIRESSSTTGMVVGIVAAAALCILILLYAMYKYRNRDEGSYHVDESRNYISNSAQSNGAVVKEKQPSSAKSSNKNKKNKDKEYYV

SEQ ID NO: 50530 - protein, 249 aa, Homo sapiens
MASGSVAECLQQETTCPVCLQYFAEPMMLDCGHNICCACLARCWGTAETNVSCPQCRETFPQRHMRPNRHLANVTQLVKQLRTERPSGPGGEMGVCEKHREPLKLYCEEDQMPICVVCDRSREHRGHSVLPLEEAVEGFKEQIQNQLDHLKRVKDLKKRRRAQGEQARAELLSLTQMEREKIVWEFEQLYHSLKEHEYRLLARLEELDLAIYNSINGAITQFSCNISHLSSLIAQLEEKQQQPTRELLQ

SEQ ID NO: 50531 - protein, 496 aa, Homo sapiens
MTKSNGEEPKMGGRMERFQQGVRKRTLLAKKKVQNITKEDVKSYLFRNAFVLLTVTAVIVGMAALDSKASGKMGMRAVVYYMTTTIIAVVIGIIIVIIIHPGKGTKENMHREGKIVRVTAADAFLDLIRNMFPPNLVEACFKQFKTNYEKRSFKVPIQANETLVGAVINNVSEAMETLTRITEELVPVPGSVNGVNALGLVVFSMCFGFVIGNMKEQGQALREFFDSLNEAIMRLVAVIMWYAPVGILFLIAGKIVEMEDMGVIGGQLAMYTVTVIVGLLIHAVIVLPLLYFLVTRKNPWVFIGGLLQALITALGTSSSSATLPITFKCLEENNGVDKRVTRFVLPVGATINMDGTALYEALAAIFIAQVNNFELNFGQIITISITATAASIGAAGIPQAGLVTMVIVLTSVGLPTDDITLIIAVDWFLDRLRTTTNVLGDSLGAGIVEHLSRHELKNRDVEMGNSVIEENEMKKPYQLIAQDNETEKPIDSETKM

SEQ ID NO: 50532 - protein, 102 aa, Homo sapiens
MHRKHLQEIPDLSSNVATSFTWGWDSSKTSELLSGMGVSALEKEEPDSENIPQELLSNLGHPESPPRKRLKSKGSDKDFVIVRRPKLNRENFPGLMSLYGRP

SEQ ID NO: 50533 - protein, 117 aa, Homo sapiens
MGTWGAPHRTLPCRNRGAMQPRVLLVVALLALLASARASEAEDASLLSFMQGYMKHATKTAKDALSSVQESQVAQQARGWVTDGFSSLKDYWSTVKDKFSEFWDLDPEVRPTSAVAA

SEQ ID NO: 50534 - protein, 790 aa, Homo sapiens
MIVLPLYSRLDKRFLCLKNIRTFLSTCCEKFGLKRSELFEAFDLFDVQDFGKVIYTLSALSWTPIAQNRGIMPFPTEEESVGDEDIYSGLSDQIDDTVEEDEDLYDCVENEEAEGDEIYEDLMRSEPVSMPPKMTEYDKRCCCLREIQQTEEKYTDTLGSIQQHFLKPLQRFLKPQDIEIIFINIEDLLRVHTHFLKEMKEALGTPGAANLYQVFIKYKERFLVYGRYCSQVESASKHLDRVAAAREDVQMKLEECSQRANNGRFTLRDLLMVPMQRVLKYHLLLQELVKHTQEAMEKENLRLALDAMRDLAQCVNEVKRDNETLRQITNFQLSIENLDQSLAHYGRPKIDGELKITSVERRSKMDRYAFLLDKALLICKRRGDSYDLKDFVNLHSFQVRDDSSGDRDNKKWSHMFLLIEDQGAQGYELFFKTRELKKKWMEQFEMAISNIYPENATANGHDFQMFSFEETTSCKACQMLLRGTFYQGYRCHRCRASAHKECLGRVPPCGRHGQDFPGTMKKDKLHRRAQDKKRNELGLPKMEVFQEYYGLPPPPGAIGPFLRLNPGDIVELTKAEAEQNWWEGRNTSTNEIGWFPCNRVKPYVHGPPQDLSVHLWYAGPMERAGAESILANRSDGTFLVRQRVKDAAEFAISIKYNVEVKHIKIMTAEGLYRITEKKAFRGLTELVEFYQQNSLKDCFKSLDTTLQFPFKEPEKRTISRPAVGSTKYFGTAKARYDFCARDRSELSLKEGDIIKILNKKGQQGWWRGEIYGRVGWFPANYVEEDYSEYC

SEQ ID NO: 50535 - protein, 172 aa, Homo sapiens
MIYSCCIFVYCMFECFKIKNSVNYHLLFTLVLFSLIVTTVYLKVKEPIFHQVMYGMLVFTLVLRSIYIVTWVYPWLRGLGYTSLGIFLLGFLFWNIDNIFCESLRNFRKKVPPIIGITTQFHAWWHILTGLGSYLHILFSLYTRTLYLRYRPKVKFLFGIWPVILFEPLRKH

SEQ ID NO: 50536 - protein, 769 aa, Homo sapiens
MRLWKAVVVTLAFMSVDICVTTAIYVFSHLDRSLLEDIRHFNIFDSVLDLWAACLYRSCLLLGATIGVAKNSALGPRRLRASWLVITLVCLFVGIYAMVKLLLFSEVRRPIRDPWFWALFVWTYISLGASFLLWWLLSTVRPGTQALEPGAATEAEGFPGSGRPPPEQASGATLQKLLSYTKPDVAFLVAASFFLIVAALGETFLPYYTGRAIDGIVIQKSMDQFSTAVVIVCLLAIGSSFAAGIRGGIFTLIFARLNIRLRNCLFRSLVSQETSFFDENRTGDLISRLTSDTTMVSDLVSQNINVFLRNTVKVTGVVVFMFSLSWQLSLVTFMGFPIIMMVSNIYGKYYKRLSKEVQNALARASNTAEETISAMKTVRSFANEEEEAEVYLRKLQQVYKLNRKEAAAYMYYVWGSGLTLLVVQVSILYYGGHLVISGQMTSGNLIAFIIYEFVLGDCMESVGSVYSGLMQGVGAAEKVFEFIDRQPTMVHDGSLAPDHLEGRVDFENVTFTYRTRPHTQVLQNVSFSLSPGKVTALVGPSGSGKSSCVNILENFYPLEGGRVLLDGKPISAYDHKYLHRVISLVSQEPVLFARSITDNISYGLPTVPFEMVVEAAQKANAHGFIMELQDGYSTETGEKGAQLSGGQKQRVAMARALVRNPPVLILDEATSALDAESEYLSPQIQQAIHGNLQKHTVLIIAHRLSTVEHAHLIVVLDKGRVVQQGTHQQLLAQGGLYAKLVQRQMLGLQPAADFTAGHNEPVANGSHKA

SEQ ID NO: 50537 - protein, 1646 aa, Homo sapiens
MSTPDPPLGGTPRPGPSPGPGPSPGAMLGPSPGPSPGSAHSMMGPSPGPPSAGHPIPTQGPGGYPQDNMHQMHKPMESMHEKGMSDDPRYNQMKGMGMRSGGHAGMGPPPSPMDQHSQGYPSPLGGSEHASSPVPASGPSSGPQMSSGPGGAPLDGADPQALGQQNRGPTPFNQNQLHQLRAQIMAYKMLARGQPLPDHLQMAVQGKRPMPGMQQQMPTLPPPSVSATGPGPGPGPGPGPGPGPAPPNYSRPHGMGGPNMPPPGPSGVPPGMPGQPPGGPPKPWPEGPMANAAAPTSTPQKLIPPQPTGRPSPAPPAVPPAASPVMPPQTQSPGQPAQPAPMVPLHQKQSRITPIQKPRGLDPVEILQEREYRLQARIAHRIQELENLPGSLAGDLRTKATIELKALRLLNFQRQLRQEVVVCMRRDTALETALNAKAYKRSKRQSLREARITEKLEKQQKIEQERKRRQKHQEYLNSILQHAKDFKEYHRSVTGKIQKLTKAVATYHANTEREQKKENERIEKERMRRLMAEDEEGYRKLIDQKKDKRLAYLLQQTDEYVANLTELVRQHKAAQVAKEKKKKKKKKKAENAEGQTPAIGPDGEPLDETSQMSDLPVKVIHVESGKILTGTDAPKAGQLEAWLEMNPGYEVAPRSDSEESGSEEEEEEEEEEQPQAAQPPTLPVEEKKKIPDPDSDDVSEVDARHIIENAKQDVDDEYGVSQALARGLQSYYAVAHAVTERVDKQSALMVNGVLKQYQIKGLEWLVSLYNNNLNGILADEMGLGKTIQTIALITYLMEHKRINGPFLIIVPLSTLSNWAYEFDKWAPSVVKVSYKGSPAARRAFVPQLRSGKFNVLLTTYEYIIKDKHILAKIRWKYMIVDEGHRMKNHHCKLTQVLNTHYVAPRRLLLTGTPLQNKLPELWALLNFLLPTIFKSCSTFEQWFNAPFAMTGEKVDLNEEETILIIRRLHKVLRPFLLRRLKKEVEAQLPEKVEYVIKCDMSALQRVLYRHMQAKGVLLTDGSEKDKKGKGGTKTLMNTIMQLRKICNHPYMFQHIEESFSEHLGFTGGIVQGLDLYRASGKFELLDRILPKLRATNHKVLLFCQMTSLMTIMEDYFAYRGFKYLRLDGTTKAEDRGMLLKTFNEPGSEYFIFLLSTRAGGLGLNLQSADTVIIFDSDWNPHQDLQAQDRAHRIGQQNEVRVLRLCTVNSVEEKILAAAKYKLNVDQKVIQAGMFDQKSSSHERRAFLQAILEHEEQDEEEDEVPDDETVNQMIARHEEEFDLFMRMDLDRRREEARNPKRKPRLMEEDELPSWIIKDDAEVERLTCEEEEEKMFGRGSRHRKEVDYSDSLTEKQWLKKITGKDIHDTASSVARGLQFQRGLQFCTRASKAIEEGTLEEIEEEVRQKKSSRKRKRDSDAGSSTPTTSTRSRDKDDESKKQKKRGRPPAEKLSPNPPNLTKKMKKIVDAVIKYKDSSSGRQLSEVFIQLPSRKELPEYYELIRKPVDFKKIKERIRNHKYRSLNDLEKDVMLLCQNAQTFNLEGSLIYEDSIVLQSVFTSVRQKIEKEDDSEGEESEEEEEGEEEGSESESRSVKVKIKLGRKEKAQDRLKGGRRRPSRGSRAKPVVSDDDSEEEQEEDRSGSGSEED

SEQ ID NO: 50538 - protein, 258 aa, Homo sapiens
MSIGVNCTQITATECDFTAASPSAGFPMDFNVTLRLRAELGALHSAWVTMPWFQHYRNVTVGPPENIEVTPGEGSLIIRFSSPFDIADTSTAFFCYYVHYWEKGGIQQVKGPFRSNSISLDNLKPSRVYCLQVQAQLLWNKSNIFRVGHLSNISCYETMADASTELQQVILISVGTFSLLSVLAGACFFLVLKYRGLIKYWFHTPPSIPLQIEEYLKDPTQPILEALDKDSSPKDDVWDSVSIISFPEKEQEDVLQTL

SEQ ID NO: 50539 - protein, 142 aa, Homo sapiens
MEDTQAIDWDVEEEEETEQSSESLRCNVEPVGRLHIFSGAHGPEKDFPLHLGKNVVGRMPDCSVALPFPSISKQHAEIEILAWDKAPILRDCGSLNVPSPGCLSALCLPGPSDSRRDTQSTGRNSTPEASVGGLGGGSRFSF

SEQ ID NO: 50540 - protein, 152 aa, Homo sapiens
MFPPSGSTGLIPPSHFQARPLSTLPRMAPTWLSDIPLVQPPGHQDVSERRLDTQRPQVTMWERDVSSDRQEPGRRGRSWGLEGSQALSQQAEVIVRQLQELRWLEEEVWLLRETSLQQKMRLEAQAMELEALARAEKAGRAEAEGLRAALAG

SEQ ID NO: 50541 - protein, 100 aa, Homo sapiens
MERHTSHPNRKVPAKEEANAVPLCRAKPSPSYINLQASSPPATFLNIQTTKLPSAQGMPRTPGMYVCKPPASDPARPTTDGCFGTFTGICDTTGSWEGKQ

SEQ ID NO: 50542 - protein, 105 aa, Homo sapiens
MSGQSLTDRITAAQHSVTGSAVSKTVCKATTHEIMGPKKKHLDYLIQCTNEMNVNIPQLADSLFERTTNSSWVVVFKSLITTHHLMVYGNEDMTCLHLLGGIVDI

SEQ ID NO: 50543 - protein, 338 aa, Homo sapiens
MVAFAGWSLPVQYRDSHTDSHLHTRQHCSLFDVSHMLQTKILGSDRVKLMESLVVGDIAELRPNQGTLSLFTNEAGGILDDLIVTNTSEGHLYVVSNAGCWEKDLALMQDKVRELQNQGRDVGLEVLDNALLALQGPTAAQVLQAGVADDLRKLPFMTSAVMEVFGVSGCRVTRCGYTGEDGVEISVPVAGAVHLATAILKNPEVKLAGLAARDSLRLEAGLCLYGNDIDEHTTPVEGSLSWTLGKRRRAAMDFPGAKVIVPQLKGRVQRRRVGLMCEGAPMRAHSPILNMEGTKIGTVTSGCPSPSLKKNVAMGYVPCEYSRPGTMLLVELPSGPCF

SEQ ID NO: 50544 - protein, 112 aa, Homo sapiens
MDVHDLFRRLGAGAKFDTRRFSADAARFQIGKRKYDFDSSEVLQGLDFFGNKKSVPGVCGASQTHQKPQNGEKKEESLTERKREQSKKKRKTMTSETGFHHVSQYGLDLLTS

SEQ ID NO: 50545 - protein, 583 aa, Homo sapiens
  MOD_RES (1)..(1): Any amino acid
XRKDCVGSKESALAKIDAELEEVGPSRRVGEETVGDNSPSSVVEEQYLNKLTSCPQPLNETSYSKIALDGKTTISSTSEYERNRGERRSHKKFKPNVTRGRGSKRVRGKTSKKEPRASKAMLVTLRASQEEDDDADDFESDYEEESYHLAPEEVNKAPVFVPVGLRSPEPVSAQIEETMEELEITVNVPDVGCIAVVEHELPNTDVTTEEMKQEENLSVPFEMTTSEHIQDEPGTNDGSTEAAITLLTMGDLVLQSEISSEQGDGVCIIPHVHSKDKSHIPSSLDNVNHKIVHECQELSSPVITTSPASFEENKIVLEEQSSREEISLMEKVKENATPTRNTISKVTSNLRIRSRLAKPKPNLEKTLGTNRLDDYQEVSSLCVTKGAEMETQRETEKNASKATELENKNLGPVTTAENKDQSKLACVHGIKGTSISSEVNLTERNENQEESSQEVHMLSVAPVASSETGPCTLGLDRGLGENSVEEPQIKDSKGDSVLTLPVPEYTPTSIPEVQQENIINPQDLTVFVYQQLQLVKMPWVYLFLEEIILKSRLIIWILYLGRDFNAGLIKMTTFLLPKNVHSL

SEQ ID NO: 50546 - protein, 102 aa, Homo sapiens
MAFNFGAPSGTSGTAAATAAPAGGFGGFGTTSTTAGSAFSFSAPTNTGTTGLFGGTQNKGFGFGTGFGTTTGTSTGLGTGLGTGLGFGGFNTQQQQQTSSRL

SEQ ID NO: 50547 - protein, 49 aa, Homo sapiens
MATEGMILTNHDHQIRVGVLTVSDSCFRNLAEDRSGINLKDLVQDPSLG

SEQ ID NO: 50548 - protein, 851 aa, Homo sapiens
MGGCSSTCPKIALVPPCSTSSTTTLVGENVSEEEAQGINGNRPAKHSAASPKPQVPPKPLHLQNSPSSNIHQTPRHKALPSAKPRMEEIKPASASCVSKEKPSKVSDLISRFEGGSSLSNYSDLKKESAVNLNAPRTPGRHGLTTTPQQKLLSQHLPQRQGNDTDKTQGAQTCVANGVMAAQNQMECEEEKAATLSSDTSIQASEPLLDTHIVNGERDETATAPASPTTDSCDGNASDSSYRTPGIGPVLPLEERGAETETKVQERENGESPLELEQLDQHHEMKETNEQKLHKIANELLLTERAYVNRLDLLDQVFYCKLLEEANRGSFPAEMVNKIFSNISSINAFHSKFLLPELEKRMQEWETTPRIGDILQKLAPFLKMYGEYVKGFDNAMELVKNMTERIPQFKSVVEEIQKQKICGSLTLQHHMLEPVQRIPRYEMLLKDYLRKLPPDSLDWNDAKKSLEIISTAASHSNSAIRKMENLKKLLEIYEMLGEEEDIVNPSNELIKEGQILKLAARNTSAQERYLFLFNNMLLYCVPKFSLVGSKFTVRTRVGIDGMKIVETQNEEYPHTFQVSGKERTLELQASSAQDKEEWIKALQETIDAFHQRHETFRNAIAKDNDIHSEVSTAELGKRAPRWIRDNEVTMCMKCKEPFNALTRRRHHCRACGYVVCWKCSDYKAQLEYDGGKLSKVCKDCYQIISGFTDSEEKKRKGILEIESAEVSGNSVVCSFLQYMEKSKPWQKAWCVIPKQDPLVLYMYGAPQDVRAQATIPLLGYVVDEMPRSADLPHSFKLTQSKSVHSFAADSEELKQKWLKVILLAVTGETPGGPNEHPATLDDHPEPKKKSEC

SEQ ID NO: 50549 - protein, 91 aa, Homo sapiens
MKPILLQGHERSITQIKYNREGDLLFTVAKDPIVNVWYSVNGERLGTYMGHTGAVWCVDADWDTKHVLTGSADNSCRLWDCETVWRGVGEC

SEQ ID NO: 50550 - protein, 173 aa, Homo sapiens
MSFPRGSQTQKIKHPIGTRKGPLEVPPPTEKDWPKDDEQDHVLVDPDEELDSLPQPYRMINKLVNLLFDQSWEIIEERNALREAESSQIQPTVYPPLGEIQLNKMPNCMAVSQDYVFIGGAKGFSIYNLYSAKQIYAWEKLKVDVTSIWATDLGNEILIAPVDEMGIVLHLPF

SEQ ID NO: 50551 - protein, 352 aa, Homo sapiens
MDCRTKANPDRTFDLVLKVKCHASENEDPVVLWKFPEDFGDQEILQSVPKFCFPFDVERVSQNQVGQHFTFVLTDIESKQRFGFCRLTSGGTICLCILSYLPWFEVYYKLLNTLADYLAKELENDLNETLRSLYNHPVPKANTPVNLSVHSYFIAPDVTGLPTIPESRNLTEYFVAVDVNNMLQLYASMLHERRIVIISSKLSTLTACIHGSAALLYPMYWQHIYIPVLPPHLLDYCCAPMPYLIGIHSSLIERVKNKSLEDVVMLNVDTNTLESPFSDLNNLPSDVVSALKNKLKKQSTATGDGVARAFLRAQAALFGSYRDALRYKPGTRGHINNGCIQSRKEVHCSTQQ

SEQ ID NO: 50552 - protein, 120 aa, Homo sapiens
MDVFMKGLSMAKEGVVAAAEKTKQGVTEAAEKTKEGVLYVVAEKTKEQASHLGGAVFSGAGNIAAATGLVKREEFPTDLKPEEVAQEAAEEPLIEPLMEPEGESYEDPPQEEYQEYEPEA

SEQ ID NO: 50553 - protein, 177 aa, Homo sapiens
MRTAAGAVSPDSRPETRRQTRKNEEAAWGPRVCRAEREDNRKCPPSILKRSRPEHHRPEAKPQRTSRRVWFREPPAVTVHYIADKNATATVRAVCVRPARAGPGPILRPGQARGNGTGGPAGPAPRPCPAPAARGPHLLARPPAALTGRTGRTGRASRRAQALRGLRDSLSPGPAAW

SEQ ID NO: 50554 - protein, 71 aa, Homo sapiens
MGSRNSSSAGSGSGDPSEGLPRRGAGLRRSEEEEEEDEDVDLAQRPSEVGAGRRCSKFTIHSGPLGLRGRE

SEQ ID NO: 50555 - protein, 198 aa, Homo sapiens
MATNFLAHEKIWFDKFKYDDAERRFYEQMNGPVAGASRQENGASVILRDIARARENIQKSLAGSSGPGASSGTSGDHGELVVRIASLEVENQSLRGVVQELQQAISKLEARLNVLEKSSPGHRATAPQTQHVSPMRQVEPPAKKPATPAEDDEDDDIDLFGSDNEEEDKEAAQLREERLRQYAEKKAKKPALVAKSSI

SEQ ID NO: 50556 - protein, 39 aa, Homo sapiens
MGKESGWDSGAAGLSVTSKVIGGFAGTALGAWLGSPPSS

SEQ ID NO: 50557 - protein, 213 aa, Homo sapiens
MTPGTQSPFFLLLLLTVLTGSGHASSTPGGEKETSATQRSSVPSSTEKNAVSMTSSVLSSHSPGSGSSTTQGQDVTLAPATEPASGSAATWGQDVTSVPVTRPALGSTTPPAGVPGWGIALLVLVCVLVALAIVYLIALAVCQCRRKNYGQLDIFPARDTYHPMSEYPTYHTHGRYVPPSSTDRSPYEKVSAGNGGSSLSYTNPAVAATSANL

SEQ ID NO: 50558 - protein, 193 aa, Homo sapiens
MGRPAGLFPPLCPFLGFRPEACWERHMQIERAPSVPPFLRWAGYRPGPVRRRGKVELIKFVRVQWRRPQVEWRRRRWGPGPGASMAGSEELGLREDTLRVLAAFLRRGEAAGSPVPTPPRSPAQEEPTDFLSRLRRCLPCSLGRGAAPSESPRPCSLPIRPCYGLEPGGHPGCFTRGLELAIGLSSFSEAATR

SEQ ID NO: 50559 - protein, 61 aa, Homo sapiens
MRYRLAWLLHPALPSTFRSVLGARLPPPERLCGNYQVVFQSSGTILHFHQQCVKIPISLYP

SEQ ID NO: 50560 - protein, 279 aa, Homo sapiens
MSWKMALQIPGGFWAAAVTVMLVMLSTPVAEARDFPKDFLVQFKGMCYFTNGTERVRGVARYIYNREEYGRFDSDVGEFQAVTELGRSIEDWNNYKDFLEQERAAVDKVCRHNYEAELRTTLQRQVEPTVTISPSRTEALNHHNLLVCSVTDFYPAQIKVQWFRNDQEETAGVVSTSLIRNGDWTFQILVMLEITPQRGDIYTCQVEHPSLQSPITVEWRAQSESAQSKMLGGVGGFVLGLIFLGLGLIIRHRGQKGPRGPPPAGNISAMIQSGERAQA

SEQ ID NO: 50561 - protein, 497 aa, Homo sapiens
MPHPRRYHSSERGSRGSYREHYRSRKHKRRRSRSWSSSSDRTRRRRREDSYHVRSRSYDDRSSDRRVYDRRYCGSYRRNDYSRDRGDAYYDTDYRHSYEYQRENSSYRSQRSSRRKHRRRRRRSRTFSRSSSHSSRRAKSVEDDAEGHLIYHVGDWLQERYEIVSTLGEGTFGRVVQCVDHRRGGARVALKIIKNVEKYKEAARLEINVLEKINEKDPDNKNLCVQMFDWFDYHGHMCISFELLGLSTFDFLKDNNYLPYPIHQVRHMAFQLCQAVKFLHDNKLTHTDLKPENILFVNSDYELTYNLEKKRDERSVKSTAVRVVDFGSATFDHEHHSTIVSTRHYRAPEVILELGWSQPCDVWSIGCIIFEYYVGFTLFQTHDNREHLAMMERILGPIPSRMIRKTRKQKYFYRGRLDWDENTSAGRYVRENCKPLRRYLTSEAEEHHQLFDLIESMLEYEPAKRLTLGEALQHPFFARLRAEPPNKLWDSSRDISR

SEQ ID NO: 50562 - protein, 379 aa, Homo sapiens
MAFQKAVKGTILVGGGALATVLGLSQFAHYRRKQMNLAYVKAADCISEPVNREPPSREAQLLTLQNTSEFDILVIGGGATGSGCALDAVTRGLKTALVERDDFSSGTSSRSTKLIHGGVRYLQKAIMKLDIEQYRMVKEALHERANLLEIAPHLSAPLPIMLPVYKWWQLPYYWVGIKLYDLVAGSNCLKSSYVLSKSRALEHFPMLQKDKLVGAIVYYDGQHNDARMNLAIALTAARYGAATANYMEVVSLLKKTDPQTGKVRVSGARCKDVLTGQEFDVRAKCVINATGPFTDSVRKMDDKDAAAICQPSAGVHIVMPGYYSPESMGLLDPATSDGRVIFFLPWQKMTIAGTTDTPTDVTHHPIPSEEDINFILNEV

SEQ ID NO: 50563 - protein, 60 aa, Homo sapiens
  MOD_RES (1)..(1): Any amino acid
XETMADASTELQQVILISVGTFSLLSVLAGACFFLVLKYRGLIKYWFHTPPSIPLQIEEV

SEQ ID NO: 50564 - protein, 702 aa, Homo sapiens
MRLPDLRPWTSLLLVDAALLWLLQGPLGTLLPQGLPGLWLEGTLRLGGLWGLLKLRGLLGFVGTLLLPLCLATPLTVSLRALVAGASRAPPARVASAPWSWLLVGYGAAGLSWSLWAVLSPPGAQEKEQDQVNNKVLMWRLLKLSRPDLPLLVAAFFFLVLAVLGETLIPHYSGRVIDILGGDFDPHAFASAIFFMCLFSFGSSLSAGCRGGCFTYTMSRINLRIREQLFSSLLRQDLGFFQETKTGELNSRLSSDTTLMSNWLPLNANVLLRSLVKVVGLYGFMLSISPRLTLLSLLHMPFTIAAEKVYNTRHQEVLREIQDAVARAGQVVREAVGGLQTVRSFGAEEHEVCRYKEALEQCRQLYWRRDLERALYLLVRRVLHLGVQMLMLSCGLQQMQDGELTQGSLLSFMIYQESVGSYVQTLVYIYGDMLSNVGAAEKVFSYMDRQPNLPSPGTLAPTTLQGVVKFQDVSFAYPNRPDRPVLKGLTFTLRPGEVTALVGPNGSGKSTVAALLQNLYQPTGGQVLLDEKPISQYEHCYLHSQVVSVGQEPVLFSGSVRNNIAYGLQSCEDDKVMAAAQAAHADDFIQEMEHGIYTDVGEKGSQLAAGQKQRLAIARALVRDPRVLILDEATSALDVQCEQALQDWNSRGDRTVLVIAHRLQTVQRAHQILVLQEGKLQKLAQLEGQDLYSRLVQQRLMD

SEQ ID NO: 50565 - protein, 66 aa, Homo sapiens
MLTLQTWLVQALFIFLTTESTELKNTSGLMFQILQRVILPSGHLTLLQGTILIQKIKCIQMAISLM

SEQ ID NO: 50566 - protein, 752 aa, Homo sapiens
MGRSNSRSHSSRSKSRSQSSSRSRSRSHSRKKRYSSRSRSRTYSRSRSRDRMYSRDYRRDYRNNRGMRRPYGYRGRGRGYYQGGGGRYHRGGYRPVWNRRHSRSPRRGRSRSRSPKRRSVSSQRSRSRSRRSYRSSRSPRSSSSRSSSPYSKSPVSKRRGSQEKQTKKAEGEPQEESPLKSKSQEEPKDTFEHDPSESIDEFNKSSATSGDIWPGLSAYDNSPRSPHSPSPIATPPSQSSSCSDAPMLSTVHSAKNTPSQHSHSIQHSPERSGSGSVGNGSSRYSPSQNSPIHHIPSRRSPAKTIAPQNAPRDESRGRSSFYPDGGDQETAKTGKFLKRFTDEESRVFLLDRGNTRDKEASKEKGSEKGRAEGEWEDQEALDYFSDKESGKQKFNDSEGDDTEETEDYRQFRKSVLADQGKSFATASHRNTEEEGLKYKSKVSLKGNRESDGFREEKNYKLKETGYVVERPSTTKDKHKEEDKNSERITVKKETQSPEQVKSEKLKDLFDYSPPLHKNLDAREKSTFREESPLRIKMIASDSHRPEVKLKMAPVPLDDSNRPASLTKDRLLASTLVHSVKKEQEFRSIFDHIKLPQASKSTSESFIQHIVSLVHHVKEQYFKSAAMTLNERFTSYQKATEEHSTRQKSPEIHRRIDISPSTLRKHTRLAGEERVFKEENQKGDKKLRCDSADLRHDIDRRRKERSKERGDSKGSRESSGSRKQEKTPKDYKEYKSYKDDSKNVFVFYTAYGG

SEQ ID NO: 50567 - protein, 84 aa, Homo sapiens
MLLLYLGIEVIRLFFGTKGNLCQRKMPLSISVALTFPSAMMASYYLLLQTYVLRLEAIMNGILLFFCGSELLLEVLTLAAFSRI

SEQ ID NO: 50568 - protein, 84 aa, Homo sapiens
MSEYIRVTEDENDEPIEIPSEDDGTVLLSTVTAQFPGACGLRYRNPVSQCMRGVRLVEGILHAPDAGWGNLVYVVNYPKGQERS

SEQ ID NO: 50569 - protein, 446 aa, Homo sapiens
MEALLEGIQNRGHGGGFLTSCEAELQELMKQIDIMVAHKKSEWEGRTHALETCLKIREQELKSLRSQLDVTHKEVGMLHQQVEEHEKIKQEMTMEYKQELKKLHEELCILKRSYEKLQKKQMREFRGNTKNHREDRSEIERLTAKIEEFRQKSLDWEKQRLIYQQQVSSLEAQRKALAEQSEIIQAQLVNRKQKLESVELSSQSEIQHLSSKLERANDTICANELEIERLTMRVNDLVGTSMTVLQEQQQKEEKLRESEKLLEALQEEKRELKAALQSQENLIHEARIQKEKLQEKVKATNTQHAVEAISLESVSATCKQLSQELMEKYEELKRMEAHNNEYKAEIKKLKEQILQGEQSYSSALEGMKMEISHLTQELHQRDITIASTKGSSSDMEKRLRAEMQKAEDKAVEHKEILDQLESLKLENRHLSEMVMKLELGLHEVHK

SEQ ID NO: 50570 - protein, 276 aa, Homo sapiens
  MOD_RES (1)..(1): Any amino acid
XLDLLELERDAEVEERRSWQENISLKELQSRGVCLLKLQVSSQRTGLYGRLLVTFEPRRYGSAAALPSNSFTSGDIVGLYDAANEGSQLATGILTRVTQKSVTVAFDESHDFQLSLDRENSYRLLKLANDVTYRRLKKALIALKKYHSGPASSLIEVLFGRSAPSPASEIHPLTFFNTCLDTSQKEAVLFALSQKELAIIHGPPGTGKTTTVVEIILQAVKQGLKVGSACHFPVRARPLLVCCVQWVLSDLSASVLVGWVRNITEHLLIEPWTAPV

SEQ ID NO: 50571 - protein, 165 aa, Homo sapiens
MGSWALLWPPLLFTGLLVRPPGTMAQAQYCSVNKDIFEVEENTNVTEPLVDIHVPEGQEVTLGALSTPFAFRIQGNQLFLNVTPDYEEKSLLEAQLLCQSGGTLTKEIRVEEDTKVNSTVIPETQLQAEDRDKDDILFYTLQEMTAGASDYFSLVSVNRPALRLD

SEQ ID NO: 50572 - protein, 652 aa, Homo sapiens
MRRPCLQGTYCDQHTNLCYSSGWPSAFGTSPATSFPLAHQSPGTSPVTSPQLTHVPLETGPMISPPPTHRTPGTCLTISPPLARRPVETSPMASPTLSHRVLETGLMISLPSHWFSGRSYNDPLLSPASSPPTGSFYHGSLKPLDSCEPKPQLDLPLEKNCCGFPLSSQAGMPGSPSSPQEGSYHYSHLSSEAYIPTPGSPCYAICLCPGSTDSPCSPQSQAPRKACIESLLSWEATGNSYLILTPDTTTSGPPCSQEPSRPHGPHSVLSFPSPLGNQFISPPQSLPRRSYNEPPLPTPVSPQPKSPKSPELRQSHTPHKCLSLVNTPQHTPSGQPKPAKAHTCPPPPSCLSGPSCMQPYITTPSNSSPKELPPGTTLLTVVPRALKSVIPTSFPLCLPCDPVSANSYAQSSRHGPSIGPPCNTHICSVVPSTPHPCPLSGSLNHSTGPPPIVPLCDTYSTPRGPPQPRCQPVMPPCSTHIYSFIPLRTPFDPQSLPIVPRVRAYPDTVPCGLHIYPVASQGPCKEPLQIPYSCPLPSSKDSSCSTNPSCSSTIISKCQSSDSESRSSHQSQSRSQSKSPHDGRSQSWSKRHHLSRSPSQKSSPYPSRSWGRSSNPQQNTSQGQSESPQLSINEHQGESPQISRGQGKSKSL

SEQ ID NO: 50573 - protein, 253 aa, Homo sapiens
MSPGAMRRSLPSTSSTSSTKRLKSVEDEMDSPGEEPFYTGQGRSPGSGSQSSGWHEVEPGMPSPTTLKKSEKSGFSSPSPSQTSSLGTAFTQHHRPVITGPRASPHATPSTLHFPTSPIIQQPGPYFSHPAIRYHPQETLKEFVQLVCPDAGQQAGQVGFLNPNGSSQGKVHNPFLPTPMLPPPPPPPMARPVPLPVPDTKPPTTSTEGGAASPTSPTYSTPSTSPANRFVSVGPRDPSFVNIPQQTQSWYLG

SEQ ID NO: 50574 - protein, 22 aa, Homo sapiens
MTEGRRCQVHLLDDRKLELLVQ

SEQ ID NO: 50575 - protein, 115 aa, Homo sapiens
MAWMLLLILIMVHPGSCALWVSQPPEIRTLEGSSAFLPCSFNASQGRLAIGSVTWFRDEVVPGKEVRNGTPEFRGRLAPLASSRFLHDHQAELHIRDVRGHDASIYVCRVENILS

SEQ ID NO: 50576 - protein, 135 aa, Homo sapiens
MASLQVFEKMHRMDLSERAKDEVREAALKSFNKRKPLSLGITRKERPPLDVDEMLERFKTEAQAFTETKGNVICLGKEVFKGKKPDKDNRCRYILKTKFREMWKSWPGDSKEVQVMAERYKMLIPFSNPRVLPGP

SEQ ID NO: 50577 - protein, 145 aa, Homo sapiens
MMEGLKKRTRKAFGIRKKEKDTDSTGSPDRDGIKKSNGAPNGFYAEIDWERYNSPELDEEGYSIRPEEPGSTKGKHFYSSSESEEEEESHKKFNIKIKPLQSKDILKNAATVDELKASIGNIALSPSPVVKKWQDPGVPHQLQNL

SEQ ID NO: 50578 - protein, 149 aa, Homo sapiens
MAGSPTCLTLIYILWQLTEHLSKPKVTMGLQSNKNGTCVTNLTCCMEHGEEDVIYTWKALGQAANESHNGSILPISWRWGESDMTFICVARNPVSRNFSSPILARKLCEENNPKGRSSKYGLLHCGNTEKDGKSPLTAHDARHTKAICL

SEQ ID NO: 50579 - protein, 213 aa, Homo sapiens
MEEPQKSYVNTMDLERDEPLKSTGPQISVSEFSCHCCYDILVNPTTLNCGHSFCRHCLALWWASSKKTECPECREKWEGFPKVSILLRDAIEKLFPDAIRLRFEDIQQNNDIVQSLAAFQKYGNDQIPLAPNTGRANQQMGGGFFSGVLTALTGVAVVLLVYHWSSRESEHDLLVHKAVAKWTAEEVVLWLEQLGPWASLYRERFLSERVNGR

SEQ ID NO: 50580 - protein, 58 aa, Homo sapiens
  MOD_RES (1)..(1): Any amino acid
XSQLQRSIFSALVVAWYSSACHVSNTLRPLTYGDKSLSPHELKALRWKDSWDILIRKH

SEQ ID NO: 50581 - protein, 475 aa, Homo sapiens
MVDTEMPFWPTNFGISSVDLSVMEDHSHSFDIKPFTTVDFSSISTPHYEDIPFTRTDPVVADYKYDLKLQEYQSAIKVEPASPPYYSEKTQLYNKPHEEPSNSLMAIECRVCGDKASGFHYGVHACEGCKGFFRRTIRLKLIYDRCDLNCRIHKKSRNKCQYCRFQKCLAVGMSHNAIRFGRMPQAEKEKLLAEISSDIDQLNPESADLRALAKHLYDSYIKSFPLTKAKARAILTGKTTDKSPFVIYDMNSLMMGEDKIKFKHITPLQEQSKEVAIRIFQGCQFRSVEAVQEITEYAKSIPGFVNLDLNDQVTLLKYGVHEIIYTMLASLMNKDGVLISEGQGFMTREFLKSLRKPFGDFMEPKFEFAVKFNALELDDSDLAIFIAVIILSGDRPGLLNVKPIEDIQDNLLQALELQLKLNHPESSQLFAKLLQKMTDLRQIVTEHVQLLQVIKKTETDMSLHPLLQEIYKDLY

SEQ ID NO: 50582 - protein, 94 aa, Homo sapiens
MEKQPQNSRRGLAPREVPPAVGLLLIMALMNTLLYLCLDHFFIAPRQSTVDPTHCPYGHFRIGQMKNCSPWLSCEELRTEVRQLKRVGEGAVKR

SEQ ID NO: 50583 - protein, 151 aa, Homo sapiens
MGNVPSAVKHCLSYQQLLREHLWIGDSVAGALDPAQETSQLSGLPEFVKIVEVGPRDGLQNEKVIVPTDIKIEFINRLSQTGLSVIEVTSFVSSRWVPQVAAGATEISVFGAASESFSKKNINCSIEESMGKFEEVVKSARHMNIPARGYL

SEQ ID NO: 50584 - protein, 501 aa, Homo sapiens
MADTRSVHETRFEAAVKVIQSLPKNGSFQPTNEMMLKFYSFYKQATEGPCKLSRPGFWDPIGRYKWDAWSSLGDMTKEEAMIAYVEEMKKIIETMPMTEKVEELLRVIGPFYEIVEDKKSGRSSDITSVRLEKISKCLEDLGNVLTSTPNAKTVNGKAESSDSGAESEEEEAQEEVKGAEQSDNDKKMMKKSADHKNLEVIVTNGYDKDGFVQDIQNDIHASSSLNGRSTEEVKPIDENLGQTGKSAVCIHQDINDDHVEDVTGIQHLTSDSDSEVYCDSMEQFGQEESLDSFTSNNGPFQYYLGGHSSQPMENSGFREDIQVPPGNGNIGNMQVVAVEGKGEVKHGGEDGRNNSGAPHREKRGGETDEFSNVRRGRGHRMQHLSEGTKGRQVGSGGDGERWGSDRGSRGSLNEQIALVLMRLQEDMQNVLQRLQKLETLTALQAKSSTSTLQTAPQPTSQRPSWWPFEMSPGVLTFAIIWPFIAQWLVYLYYQRRRRKLN

SEQ ID NO: 50585 - protein, 76 aa, Homo sapiens
MFGVYDNIGILGNFEKHPKELIRGPIWLRGWKGNELQRCIRKRKMVGSRMFADDLHNLNKRIRYLYKHFNRHGKFR

SEQ ID NO: 50586 - protein, 633 aa, Homo sapiens
MASEGTNIPSPVVRQIDKQFLICSICLERYKNPKVLPCLHTFCERCLQNYIPAHSLTLSCPVCRQTSILPEKGVAALQNNFFITNLMDVLQRTPGSNAEESSILETVTAVAAGKPLSCPNHDGNVLQSQLDTLLQGQESIKSCSNFTAQALNHGTETEVLLVKKQMSEKLNELADQDFPLHPRENDQLDFIVETEGLKKSIHNLGTILTTNAVASETVATGEGLRQTIIGQPMSVTITTKDKDGELCKTGNAYLTAELSTPDGSVADGEILDNKNGTYEFLYTVQKEGDFTLSLRLYDQHIRGSPFKLKVIRSADVSPTTEGVKRRVKSPGSGHVKQKAVKRPASMYSTGKRKENPIEDDLIFRVGTKGRNKGEFTNLQGVAASTNGKILIADSNNQCVQIFSNDGQFKSRFGIRGRSPGQLQRPTGVAVHPSGDIIIADYDNKWVSIFSSDGKFKTKIGSGKLMGPKGVSVDRNGHIIVVDNKACCVFIFQPNGKIVTRFGSRGNGDRQFAGPHFAAVNSNNEIIITDFHNHSVKVFNQEGEFMLKFGSNGEGNGQFNAPTGVAVDSNGNIIVADWGNSRIQVFDGSGSFLSYINTSADPLYGPQGLALTSDGHVVVADSGNHCFKVYRYLQ

SEQ ID NO: 50587 - protein, 270 aa, Homo sapiens
MLRWLRDFVLPTAACQDAEQPTRYETLFQALDRNGDGVVDIGELQEGLRNLGIPLGQDAEEKIFTTGDVNKDGKLDFEEFMKYLKDHEKKMKLAFKSLDKNNDGKIEASEIVQSLQTLGLTISEQQAELILQSIDVDGTMTVDWNEWRDYFLFNPVTDIEEIIRFWKHSTGIDIGDSLTIPDEFTEDEKKSGQWWRQLLAGGIAGAVSRTSTAPLDRLKIMMQGESEAQRIDFSFTTNERGNAVSLPPVLLVLMLHETSEVSFSFILGWG

SEQ ID NO: 50588 - protein, 38 aa, Homo sapiens
MAASRLELNLVRLLSRCEAMAAEKRDPDEWRLEKQTGL

SEQ ID NO: 50589 - protein, 116 aa, Homo sapiens
MVQAHGGRSRAQPLTLSLGAAMTQPPPEKTPAKKHVRLQERRGSNVALMLDVRSLGAVEPICSVNTPREVTLHFLRTAGHPLTRWALQRQPPSPKQLEEEFLKRKPMDPSRSASRT

SEQ ID NO: 50590 - protein, 268 aa, Homo sapiens
MGEPQGSMRILVTGGSGLVGKAIQKVVADGAGLPGEDWVFVSSKDADLTDTAQTRALFEKVQPTHVIHLAAMVGGLFRNIKYNLDFWRKNVHMNDNVLHSAFEVGARKVVSCLSTCIFPDKTTYPIDETMIHNGPPHNSNFGYSYAKRMIDVQNRAYFQQYGCTFTAVIPTNVFGPHDNFNIEDGHVLPGLIHKVHLAKSSGSALTVWGTGNPRRQFIYSLDLAQLFIWVLREYNEVEPIILSVGEEDEVSIKEAAEAVVEAMDFHGE

SEQ ID NO: 50591 - protein, 234 aa, Homo sapiens
MVSGNNSDSAHCIGTGLRGKETTLVTPQDSPRKCPIKGSPEEATADGHTNGRTKKFMSSPLTFHSDDQSGSVVIFGGIDSSYYTGSLNWVPVTVEGYWQITVDSITMNGEAIACAEGCQAIVDTGTSLLTGPTSPIANIQSDIGASENSDGDMVVSCSAISSLPDIVFTINGVQYPVPPSAYILQSEGSCISGFQGMNLPTESGELWILGDVFIRQYFTVFDRANNQVGLAPVA

SEQ ID NO: 50592 - protein, 268 aa, Homo sapiens
MALVLILQLLTLWPLCHTDITPSAAPFIVPPASYHPKPWLGAQPATVVTPGVNVTLRCRAPQPAWRFGLFKPGEIAPLLFRDVSSELAEFFLEEVTPAQGGIYRCCYRRPDWGPGVWSQPSDVLELLVTEELPRPSLVALPGPVVGPGANVSLRCAGRLRNMSFVLYREGVAAPLQYRHSAQPWADFTLLGARAPGTYSCYYHTPSAPYVLSQRSEVLVISWEDSGSSDYTRGNLVRLGLAGLVLISLGALVTFDWRSQNRAPAGIRP

SEQ ID NO: 50593 - protein, 128 aa, Homo sapiens
MDLPDSASRVFCGRILSMVNTDDVNAIILAQKNMLDRFEKTNEMLLNFNNLSSARLQQMSERFLHHTRTLVEMKRDLDSIFRRIRTLKGKLARQHPEAFSRKCHAGFLLPSTSALSTQGRLLEGHLGA

SEQ ID NO: 50594 - protein, 106 aa, Homo sapiens
MIYTMKKVHALWASVCLLLNLAPAPLNADSEEDEEHTIITDTELPPLKLMHSFCAFKADDGPCKAIMKRFFFNIFTRQCEEFIYGGCEGNQNRFESLEECKKMCTR

SEQ ID NO: 50595 - protein, 118 aa, Homo sapiens
MSLLQSALDFLAGPGSLGGASGRDQSDFVGQTVELGELRLRVRRVLAEGGFAFVYEAQDVGSGREYALKRLLSNEEEKNRAIIQEVCFMLCSLGEPAGCLSVGSGGHSHAAASLRTAP

SEQ ID NO: 50596 - protein, 117 aa, Homo sapiens
MSGPVPSRARVYTDVNTHRPREYWDYESHVVEWGNQDDYQLVRKLGRGKYSEVFEAINITNNEKVVVKILKPVKKKKIKREIKILENLRGGPNIITLADIVKDPVAKRLIALETEMC

SEQ ID NO: 50597 - protein, 80 aa, Homo sapiens
MFLTIIVCGMVAALSAIRANCHQEPSVCLQAACPESWIGFQRKCFYFSDDTKNWTSSQRFCDSQDADLAQVESFQELVRK

SEQ ID NO: 50598 - protein, 338 aa, Homo sapiens
MSLMVVSMACVGFFLLQGAWPHEGVHRKPSLLAHPGPLVKSEETVILQCWSDVRFEHFLLHREGKYKDTLHLIGEHHDGVSKANFSIGPMMQDLAGTYRCYGSVTHSPYQLSAPSDPLDIVITGLYEKPSLSAQPGPTVLAGESVTLSCSSRSSYDMYHLSREGEAHERRFSAGPKVNGTFQADFPLGPATHGGTYRCFGSFRDSPYEWSNSSDPLLVSVTGNPSNSWPSPTEPSSKTGNPRHLHVLIGTSVVKIPFTILLFFLLHRWCSNKKNAAVMDQEPAGNRTVNSEREITRPSERPKTPPTDTSMYIELPNAEPRSKVVFCPRAPQSGLEGIF

SEQ ID NO: 50599 - protein, 82 aa, Homo sapiens
MGLPQPGLWLKRLWVLLEVAVHVVVGKVLLILFPDRVKRNILAMGEKTGMTRNPHFSHDNWIPTFFSTQYFWFVLKVIGHWC

SEQ ID NO: 50600 - protein, 115 aa, Homo sapiens
MQVMNLNVPMRPGILVQRQSKEVLATPLENRRDMEAEEENQINEKQEPENAGETGQEEDDGLQKIHTSVTRTPSVVESQKRPLKGVTFSREVIVVDLGNEYPTPRSYTREHKERK

SEQ ID NO: 50601 - protein, 143 aa, Homo sapiens
MGQVACHPKKRGQPLLRPRARAAWTTGVVQEGRMRDVGGAQVLATGKTPGAEIDFKYALIGTAVGVAISAGFLALKICMIRRHLFDDDSSDLKSTPGGLSGEGCGARAWLCPTQRGTEGHSVMLATARMNPQAQSPTGCKGRQ

SEQ ID NO: 50602 - protein, 241 aa, Homo sapiens
MNPAAEAEFNILLATDSYKKYDGHLPIEIKAVPEGFVIPRGNVLFTVENTDPECYWLTNWIETILVQSWYPITVATNSREQKKILAKYLLETSGNLDGLEYKLHDFGYRGVSSQETAGIGASAHLVNFKGTDTVAGLALIKKYYGTKDPVPGYSVPAAEHSTITAWGKDHEKDAFEHIVTQFSSVPVSVVSDSYDIYNACEKIWGEDLRHLIVSRSTQAPLIIRPDSGNPLDTVLKVNFHM

SEQ ID NO: 50603 - protein, 256 aa, Homo sapiens
MKDKGHDGVKELDSLNSDRLRTVQLNVCSSEEVEKVVEIVRSSLKDPEKGMWGLVNNAGISTFGEVEFTSLETYKQVAEVNLWGTVRMTKSFLPLIRRAKGRVVNISSMLGRMANPARSPYCITKFGVEAFSDCLRYEMYPLGVKVSVVEPGNFIAATSLYSPESIQAIAKKMWEELPEVVRKDYGKKYFDEKIAKMETYCSSGSTDTSPVIDAVTHALTATTPYTRYHPMDYYWWLRMQIMTHLPGAISDMIYIR

SEQ ID NO: 50604 - protein, 40 aa, Homo sapiens
MADEELEALRRQRLAELQAKHGDPGDAAQQEAKHSSTEEK

SEQ ID NO: 50605 - protein, 97 aa, Homo sapiens
MAFLMKSMISNQVKNLGFGGGSEENKEEGGASDPAAAQGMTREEYEEYQKQMIEEKMERDAAFTQKKAERACLRVHLREKYRLPKCTGICMSPPCCR

SEQ ID NO: 50606 - protein, 115 aa, Homo sapiens
MNAPPAFESFLLFEGEKITINKDTKVPNACLFTINKEDHTLGNIIKSQLLKDPQVLFAGYKVPHPLEHKIIIRVQTTPDYSPQEAFTNAITDLISELSLLEERFRTCLLPLRLLP

SEQ ID NO: 50607 - protein, 374 aa, Homo sapiens
MSGPVPSRARVYTDVNTHRPREYWDYESHVVEWGNQDDYQLVRKLGRGKYSEVFEAINITNNEKVVVKILKPVKKKKIKREIKILENLRGGPNIITLADIVKDPVQLYQTLTDYDIRFYMYEILKALDYCHSMGIMHRDVKPHNVMIDHEHRKLRLIDWGLAEFYHPGQEYNVRVASRYFKGPELLVDYQMYDYSLDMWSLGCMLASMIFRKEPFFHGHDNYDQLVRIAKVLGTEDLYDYIDKYNIELDPRFNDILGRHSRKRWERFVHSENQHLVSPEALDFLDKLLRYDHQSRLTAREAMEHPYFYTVVKDQARMGSSSMPGGSTPVSSANMMSGISSVPTPSPLGPLAGSPVIAAANPLGMPVPAAAGAQQ

SEQ ID NO: 50608 - protein, 175 aa, Homo sapiens
MVGALCGCWFRLGGARPLIPLGPTVVQTSMSRSQVALLGLSLLLMLLLYVGLPGPPEQTSCLWGDPNVTVLAGLTPGNSPIFYREVLPLNQAHRVEVVLLHGKAFNSHTWEQLGTLQLLSQRGYRAVALDLPGGTWLCGDRVDLARHQPYTLLHLAQLPHGCGACLQGTLESRPL

SEQ ID NO: 50609 - protein, 493 aa, Homo sapiens
MDPPIQIFSVVCVGGGVDPGPGRGSREEKASLPGAFTSVWWLPSLIGQKWPRQAYDLLLWRGCAPPPHVFLPICSPEGCLLCTWVLEPFSTRIDSSPLARLCPTLLCPEVQEPKPPPWPQEGFRGEAPNREPRQPDTPARMELTELLLVVMLLLTARLTLSSPAPPACDLRVLSKLLRDSHVLHSRLSQCPEVHPLPTPVLLPAVDFSLGEWKTQMEETKAQDILGAVTLLLEGVMAARGQLGPTCLSSLLGQLSGQVRLLLGALQSLLGTQLPPQGRTTAHKDPNAIFLSFQHLLRGKVRFLMLVGGSTLCVRRAPPTTAVPSRTSLVLTLNELPNRTSGLLETNFTASARTTGSGLLKWQQGFRAKIPGLLNQTSRSLDQIPGYLNRIHELLNGTRGLFPGPSRRTLGAPDISSGTSDTGSLPPNLQPGYSPSPTHPPTGQYTLFPLPPTLPTPVVQLHPLLPDPSAPTPTPTSPLLNTSYTHSQNLSQEG

SEQ ID NO: 50610 - protein, 615 aa, Homo sapiens
MARACLIQRLPIKRDCTPVFVRGLSSPSAAMALLSEGLDEVPAACLSPCGPPNPTELFSESRRLALEELVAGGPEAFAAFLRRERLARFLNPDEVHAILRAAERPGEEGAAAAAAAEDSFGSSHDCSSGTYFPEQSDLEPPLLELGWPAFYQGAYRGATRVETHFQPRGAGEGGPYGCKDALRQQLRSAREVIAVVMDVFTDIDIFRDLQEICRKQGVAVYILLDQALLSQFLDMCMDLKVHPEQEKLMTVRTITGNIYYARSGTKIIGKVHEKFTLIDGIRVATGSYSFTWTDGKLNSSNLVILSGQVVEHFDLEFRILYAQSKPISPKLLSHFQSSNKFDHLTNRKPQSKELTLGNLLRMRLARLSSTPRKADLDPEMPAEGKAERKPHDCESSTVSEEDYFSSHRDELQSRKAIDAATQTEPGEEMPGLSVSEVGTQTSITTACAGTQTAVITRIASSQTTIWSRSTTTQTDMDENILFPRGTQSTEGSPVSKMSVSRSSSLKSSSSVSSQGSVASSTGSPASIRTTDFHNPGYPKYLGTPHLELYLSDSLRNLNKERQFHFAGIRSRLNHMLAMLSRRTLFTENHLGLHSGNFSRVNLLAVRDVALYPSYQ

SEQ ID NO: 50611 - protein, 39 aa, Homo sapiens
MAKPCGVRLSGEARKQVEVFRQNLFQEVFSFLICKSWTQ

SEQ ID NO: 50612 - protein, 79 aa, Homo sapiens
MADNLDEFIEEQKARLAEDKAELESDPPYMEMKGKLSAKLSENSKILISMAKENIPPNSQQTRGSLVLPISLSWLPSHP

SEQ ID NO: 50613 - protein, 102 aa, Homo sapiens
MSNCLQNFLKITSTRLLCSRLCQQLRSKRKFFGTVPISRLHRRVVITGIGLVTPLGVGTHLVWDRLIGGESGIVSLVGEEYKSIPCSVAAYVPRGSDEEPGL

SEQ ID NO: 50614 - protein, 63 aa, Homo sapiens
MATTAAPAGGARNGAGPEWGGFEENIQWKNKALNPGMSRGLNGWNRKVLHSRSHCLHRAEAQL

SEQ ID NO: 50615 - protein, 424 aa, Homo sapiens
MDGRTPRPQDAPARRKPKAKAPLPPAETKYTDVSSAADSVESTAFIMEQKENMIDKDVELSVVLPGDIIKSTTVHGSKPMMDLLIFLCAQYHLNPSSYTIDLLSAEQNHIKFKPNTPIGMLEVEKVILKPKMLDKKKPTPIIPEKTVRVVINFKKTQKTIVRVSPHASLQELAPIICSKCEFDPLHTLLLKDYQSQEPLDLTKSLNDLGLRELYAMDVNRATSVTVFSKSSLQESCQISQNLDIMKEKENKGFFSFFQRSKKKRDQTASAPATPLVNKHRPTFTRSNTISKPYISNTLPSDAPKKRRAPLPPMPASQSVPQDLAHIQERPASCIVKSMSVDETDKSPCEAGRVRAGSLQLSSMSAGNSSLRRTKRKAPSPPSKIPPHQSDENSRVTALQPVDGVPPDSASEANSPEELSSPGNI

SEQ ID NO: 50616 - protein, 73 aa, Homo sapiens
MESTLGAGIVIAEALQNQLAWLENVWLWITFLGDPKILFLFYFPAAYYASRRVGIAVLWISLITEWLNLIFKW

SEQ ID NO: 50617 - protein, 160 aa, Homo sapiens
MLPAVGSVDEEEDPAEEDCPELVPIETTQSEEEEKSGLGAKIPVTIITGYLGAGKTTLLNYILTEQHSKRVAVILNESGEGSALEKSLAVSQGGELYEEWLELRNGCLCCSVKDNGLRAIENLMQKKGKFDDILLETTGLADPGIITIVDSKYGLKVKYH

SEQ ID NO: 50618 - protein, 48 aa, Homo sapiens
MRRKVPGEGLPLPKTPEKRGDLIIEFEVIFPERIPQTSRTVLEQVLPI

SEQ ID NO: 50619 - protein, 100 aa, Homo sapiens
MWLSPEEVLVANALWVTERANPFFVLQRRRGHGRGGGLTGLLVGTLDVVLDSSARVAPYRILHQTQDSQVYWTVACGNHRRREQEPAAPGRRGPREVQGG

SEQ ID NO: 50620 - protein, 179 aa, Homo sapiens
MKGGSRVSNPAVMAQEEEDVRDYNLTEEQKAIKAKYPPVNRKYEYLDHTADVQLHAWGDTLEEAFEQCAMAMFGYMTDTGTVEPLQTVEVETQGDDLQSLLFHFLDEWLYKFSADEFFIPREVKVLSIDQRNFKLRSIGWGEEFSLSKHPQGTEVKAITYSAMQVYNEENPEVFVIIDI

SEQ ID NO: 50621 - protein, 47 aa, Homo sapiens
MGNLLKVLTCTDLEQGPNFFLDFENAQPTESEKEIYNQVNVVLKDAE

SEQ ID NO: 50622 - protein, 296 aa, Homo sapiens
MADSCRNLTYVRGSVGPATSTLMFVAGVVGNGLALGILSARRPARPSAFAVLVTGLAATDLLGTSFLSPAVFVAYARNSSLLGLARGGPALCDAFAFAMTFFGLASMLILFAMAVERCLALSHPYLYAQLDGPRCARLALPAIYAFCVLFCALPLLGLGQHQQYCPGSWCFLRMRWAQPGGAAFSLAYAGLVALLVAAIFLCNGSVTLSLCRMYRQQKRHQGSLGPRPRTGEDEVDHLILLALMTVVMAVCSLPLTHVERPRQDRMRWLTPVIPALWEAEAGGSFEVRSSRPVWPT

SEQ ID NO: 50623 - protein, 124 aa, Homo sapiens
DGKSYLLSLPTGDVPMDGMSVSDLGPVVLSLLKMPEKYVGQNIGLSTCRHTAEEYAALLTKHTRKMTPEDYEKLGFPGARDLANMFRFYALRPDRDIELTLRLNPKALTLDQWLEQHKGDFNLL

SEQ ID NO: 50624 - protein, 71 aa, Homo sapiens
MVEASLSVRHPEYNRPLLANDLMLIKLDESVSESDTIRSISIASQCPTAGNSCLVSGWGLLANECLPCCSA

SEQ ID NO: 50625 - protein, 535 aa, Homo sapiens
MLHLHHSWTPNIDRLAEDGVKLTQHISAASLCTPSRAAFLTGRYPVRSGMVSSIGYRVLQWTGASGGLPTNETTFAKILKEKGYATGLIGKWHLGLNCESASDHCHHPLHHGFDHFYGMPFSLMGDCARWELSEKRVNLEQKLNFLFQVLALVALTLVAGKLTHLIPVSWMPVIWSALSAVLLLASSYFVGALIVHADCFLMRNHTITEQPMCFQRTTPLILQEVASFLKRNKHGPFLLFVSFLHVHIPLITMENFLGKSLHGLYGDNVEEMDWMVGRILDTLDVEGLSNSTLIYFTSDHGGSLENQLGNTQYGGWNGIYKGGKGMGGWEGGIRVPGIFRWPGVLPAGRVIGEPTSLMDVFPTVVRLAGGEVPQDRVIDGQDLLPLLLGTAQHSDHEFLMHYCERFLHAARWHQRDRGTMWKVHFVTPVFQPEGAGACYGRKVCPCFGEKVVHHDPPLLFDLSRDPSETHILTPASEPVFYQVMERVQQAVWEHQRTLSPVPLQLDRLGNIWRPWLQPCCGPFPLCWCLREDDPQ

SEQ ID NO: 50626 - protein, 109 aa, Homo sapiens
MLLPNILLTGTPGVGKTTLGKELASKSGLKYINVGDLAREEQLYDGYDEEYDCPILDEDRVVDELDNQMREGGVIVDYHGCDFFPERWFHIVFVLRTDTNVLYERLETR

SEQ ID NO: 50627 - protein, 56 aa, Homo sapiens
MDCYRTSLSSSWIYPTVILCLFGFFSMMRPSEPFLIPYLSGPDKNLTSAEVEACHN

SEQ ID NO: 50628 - protein, 75 aa, Homo sapiens
MSLRRHIGNPEVRARSRPESRRGRAHRKRLMWAGKSSQRLPPPGRREGAGVRRGRDAGAGRAGLGGRGAAFRTPF

SEQ ID NO: 50629 - protein, 312 aa, Homo sapiens
MEILSNSTSKFPTFLLTGIPGLESAHVWISIPFCCFYAIALSGNSVILFVIITQQSLHEPMYYFLFRLSATDLGLTVSSLSTTLGILWFEAREISLYSCIVQMFFLHGFTFMESGVLVATAFDRYVAICDPLRYTTILTNSRIIQMGLLMITRAIVLILPLLLLLKPLYFCRMNALSHSYCYHPDVIQLACSDIRANSICGLIDLILTTGIDTPCIVLSYILIIHSVLRIASPEEWHKVFSTCVSHVGAVAFFYIHMLSLSLVYRYGRSAPRVVHSVMANVYLLLPPVLNPIIDSVKTKQIRKAMLSLLLTK

SEQ ID NO: 50630 - protein, 389 aa, Homo sapiens
MPEIRVTPLGAGQDVGRSCILVSIAGKNVMLDCGMHMGFNDDRRFPDFSYITQNGRLTDFLDCVIISHFHLDHCGALPYFSEMVGYDGPIYMTHPTQAICPILLEDYRKIAVDKKGEANFFTSQMIKDCILLETFWERMNLKVPIYFSTGLTEKANHYYKLFIPWTNQKIRKTFVQRNMFEFKHIKAFDRAFADNPGPMVVFATPGMLHAGQSLQIFRKWAGNEKNMVIMPGYCVQGTVGHKILSGQRKLEMEGRQVLEVKMQVEYMSFSAHADAKGIMQLVSSEQALKELGLAEHQLRFTCRVHLHDTRKEQETALRVYSHLKSVLKDHCVQHLPDGSVTVESVLLQAAAPSEDPGTKVLLVSWTYQDEELGSFLTSLLKKGLPQAPS

SEQ ID NO: 50631 - protein, 77 aa, Homo sapiens
MEREMGALPRPSISAEPGTVISPGSHVTFMCRGPVGVQTFRLEREDRAKYKDSYNVFRLGPSESEARFHIDSVSEGN

SEQ ID NO: 50632 - protein, 105 aa, Homo sapiens
MGGCAGSRRRFSDSEGEETVPEPRLPLLDHQGAHWKNAVGFWLCSWRTSSPHSSSNCWLLLAFTCCPTAPGFSSVGFVLLEASSWLPFLILWGPACVLFLVAHIS

SEQ ID NO: 50633 - protein, 854 aa, Homo sapiens
MASNQNSPIRTFGLNLSSDSSALGAVASDSEQSKTEEERESRSLFPGSLKPKLGKRDYLEKAGELIKLALKKEEEDDYEAASDFYRKGVDLLLEGVQGESSPTRREAVKRRTAEYLMRAESISSLYGKPQLDDVSQVLLVMDTRTEQTFILKGLRKSSEYSRNRKTIIPRCVPNMVCLHKYIISEESVFLVLQHAEGGKLWSYISKFLNRSPEESFDIKEVKKPTLAKVHLQQPTSSPQDSSSFESRGSDGGSMLKALPLKSSLTPSSQDDSNQEDDGQDSSPKWPDSGSSSEEECTTSYLTLCNEYGQEKIEPGSLNEEPFMKTEGNGVDTKAIKSFPAHLAADSDSPSTQLRAHELKFFPNDDPEAVSSPRTSDSLSRSKNSPMEFFRIDSKDSASELLGLDFGEKLYSLKSEPLKPFFTLPDGDSASRSFNTSESKVEFKAQDTISRGSDDSVPVISFKDAAFDDVSGTDEGRPDLLVNLPGELESTREAAAMGPTKFTQTNIGIIENKLLEAPDVLCLRLSTEQCQAHEEKGIEELSDPSGPKSYSITEKHYAQEDPRMLFVAAVDHSSSGDMSLLPSSDPKFQGLGVVESAVTANNTEESLFRICSPLSGANEYIASTDTLKTEEVLLFTDQTDDLAKEEPTSLFQRDSETKGESGLVLEGDKEIHQIFEDLDKKLALASRFYIPEGCIQRWAAEMVVALDALHREGIVCRDLNPNNILLNDRGHIQLTYFSRWSEVEDSCDSDAIERMYCAPEVGAITEETEACDWWSLGAVLFELLTGKTLVECHPAGINTHTTLNMPECVSEEARSLIQQLLQFNPLERLGAGVAGVEDIKSHPFFTPVDWAELMR

SEQ ID NO: 50634 - protein, 431 aa, Homo sapiens
MSYTGFVQGSETTLQSTYSDTSAQPTCDYGYGTWNSGTNRGYEGYGYGYGYGQDNTTNYGINQRLDMVPHLETDMMQGGVYGSGGERYDSYESCDSRAVLSERDLYRSGYDYSELDPEMEMAYEGQYDAYRDQFRMRGNDTFGPRAQGWARDARSGRPMASGYGRMWEDPMGARGQCMSGASRLPSLFSQNIIPEYGMFQGMRGGGAFPGGSRFGFGFGNGMKQMRRTWKTWTTADFRTKKKKRKQGGSPDEPDSKATRTDCSDNSDSDNDEGTEGEATEGLEGTEAVEKGSRVDGEDEEGKEDGREEGKEDPEKGALTTQDENGQTKRKLQAGKKSQDKQKKRQRDRMVERAPALALASSASDSCSCWTFLSLAGARPLGSPDKADPVAQIRTSGRGSSLCVLCANTGPSMRTRWPAILTASSTRNTLST

SEQ ID NO: 50635 - protein, 118 aa, Homo sapiens
MPVRKQDTQRALHLLEEYRSKLSQTEDRQLRSSIERVINIFQSNLFQALIDIQEFYEVTLLDNPKCIDRSKPSEPIQPVNTWEISSLPSSTVTSETLPSSLSPSVEEAHNIRLLLLWC

SEQ ID NO: 50636 - protein, 70 aa, Homo sapiens
MSPEEWTYLVVLLISIPIGFLFKKAGPGLKRWGAAAVGLGLTLFTCGPHTLHSLVTILGTWALIQAQPCW

SEQ ID NO: 50637 - protein, 40 aa, Homo sapiens
MLAFAARTVDRSQGCGVTSAARQSLSSSQVFPHQNDLRRF

SEQ ID NO: 50638 - protein, 108 aa, Homo sapiens
MAGPLWRTAAFVQRHRTGLLVGSCAGLFGVPISYHLFPDPVVQWLYQYWPQGQPAPLPPQLQSLFQEVLQDIGVPSGHCYKPFTTFTFQPEREHHRKVKKFALNHKTL

SEQ ID NO: 50639 - protein, 436 aa, Homo sapiens
MAGRRVNVNVGVLGHIDSGKTALARALSTTASTAAFDKQPQSRERGITLDLGFSCFSVPLPARLRSSLPEFQAAPEAEPEPGEPLLQVTLVDCPGHASLIRTIIGGAQIIDLMMLVIDVTKGMQTQSAECLVIGQIACQKLVVVLNKIDLLPEGKRQAAIDKMTKKMQKTLENTKFRGAPIIPVAAKPGGPEAPETEAPQGIPELIEVVKKVKSMQMFHMPITSAMQGDRLGICVTQFDPKLLERGLVCAPESLHTVHAALISVEKIPYFRGPLQTKAKFHITVGHETVMGRLMFFSPAPDNFDQEPILDSFNFSQEYLFQEQYLSKDLTPAVTDNDEADKKAGQATEGHCPRQQWALVEFEKPVTCPRLCLVIGSRLDADIHTNTCRLAFHGILLHGLEDRNYADSFLPRLKVYKLKHKHGLVERVASAPSPRRS

SEQ ID NO: 50640 - protein, 141 aa, Homo sapiens
MQRHYVMYYEMSYGLNIEMHKQAEIVKRLNGICAQVLPYLSQEHQQQVLGAIERAKQVTAPELNSIIRQQLQAHQLSQLQALALPLTPLPVGLQPPSLPAVSAGTGLLSLSALGSQAHLSKEDKNGHDGDTHQEDDGEKSD

SEQ ID NO: 50641 - protein, 60 aa, Homo sapiens
MESNLYQDQSEDKREKKEAKEKEEKRKKEKKTAKEGESNLGLDLEEKEPGDHERAKSTVM

SEQ ID NO: 50642 - protein, 128 aa, Homo sapiens
MAAGTAVGAWVLVLSLWGAVVGAQNITARIGEPLVLKCKGAPKKPPQRLEWKLNTGRTEAWKVLSPQGGGPWDSVARVLPNSSLFLPAVGIQDEGIFRCQAMNRNGKETKSNYRVRVYQFENLHNYSL

SEQ ID NO: 50643 - protein, 112 aa, Homo sapiens
MMPFGKISQQLCGVKKLPWSCDSRYFWGWLNAVFNKVDYDRIRDVGPDRAASEWLLRCGAMVRYHGQERWQKDYNHLPTGPLDKYKIQAIDATDSCIMSIGFDHMETSNICC

SEQ ID NO: 50644 - protein, 163 aa, Homo sapiens
  MOD_RES (1)..(1): Any amino acid
XARDAAEFELFFRRCPFGGAFALAAGLRDCVRFLRAFRLRDADVQFLASVLPPDTDPAFFEHLRALDCSEVTVRALPEGSLAFPGVPLLQVSGPLLVVQLLETPLLCLVSYASLVATNAARLRLIAGPEKRLLEMGLRRAQGPDGGLTASTYSYLGDVGASSW

SEQ ID NO: 50645 - protein, 451 aa, Homo sapiens
MAAGETQLYAKVSNKLKSRSSPSLLEPLLAMGFPVHTALKALAATGRKTAEEALAWLHDHCNDPSLDDPIPQEYALFLCPTGPLLEKLQEFWRESKRQCAKNRAHEVFPHVTLCDFFTCEDQKVECLYEALKRAGDRLLGSFPTAVPLALHSSISYLGFFVSGSPADVIREFAMTFATEASLLADCSVKPCTKQLHLTLAHKFYPHHQRTLEQLARAIPLGHSCQWTAALYSRDMRFVHYQTLRALFQYKPQNVDELTLSPGDYIFVDPTQQDEASEGWVIGISQRTGCRGFLPENYTDRASESDTWVKHRMYTFSLATDLNSRKDGEASSRCSGEFLPQTARSLSSLQALQATVARKSVLVVRHGERVDQIFGKAWLQQCSTPDGKYYRPDLNFPCSLPRRSRGIKDFENDPPLSSCGIFQSRIAGMFEDCLVGKVTITATLIMASRHPA

SEQ ID NO: 50646 - protein, 128 aa, Homo sapiens
MPFCTNGVDDMFEPHSWNLKELSDDCFQQWGVRPRPSWITTMYGGKNISSHTNIVFSNGELDPWSGGGVTKDITDTLVAVTISEGAHHLDLRTKNALDPMSVLLARSLEVRHMKNWIRDFYDSAGKQH

SEQ ID NO: 50647 - protein, 297 aa, Homo sapiens
MAGSGAKRSRDGELETSLNTQGCTTEGDLLFAQKCKELQGFIPPLTDLLNGLKMGRFERGLSSFQQSVAMDRIQRIVGVLQKPQMGERYLGTLLQVEGMLKTWFPQIAAQKSSLGGGKHQLTKHFPSHHSDSAASSPASPMEKMDQTQLGHLALKPKQPWHLTQWPAMNLTWIHTTPICNPPLSSPGTISFSHGPLGTGTGIGVILFLQHGVQPFTHSAPTTPVPPTTASPVIPGEPMKLSGEGPRCYSLPVTLPSDWSYTLSPPSLPTLARKMTIGHREQQRSHPPVAADAHLLNL

SEQ ID NO: 50648 - protein, 140 aa, Homo sapiens
MQQHSGQHLITAVADHLFKLKTTSWELGRFRSAIELDTPSMTAEQVAAIEQSVNEKIRDRLPVNVRELSLDDPEVEQVSGRGLPDDHAGPIRVVNIEGVDSNMCCGTHVSNLSDLQVIKILGTEKGKKNRTNLIFLSGNR

SEQ ID NO: 50649 - protein, 403 aa, Homo sapiens
MGSNSEVARLLASSDPLAQIAEDKPYAELWMGTHPRGDAKILDNRISQKTLSQWIAENQDSLGSKVKDTFNGNLPFLFKVLSVETPLSIQAHPNKELAEKLHLQAPQHYPDANHKPEMAIALTPFQGLCGFRPVEEIVTFLKKVPEFQFLIGDEAATHLKQTMSHDSQAVASSLQSCFSHLMKSEKKVVVEQLNLLVKRISQQAAAGNNMEDIFGELLLQLHQQYPGDIGCFAIYFLNLLTLKPGEAMFLEANVPHAYLKGDCVECMACSDNTVRAGLTPKFIDVPTLCEMLSYTPSSSKDRLFLPTRSQEDPYLSIYDPPVPDFTIMKTEVPGSVTEYKVLALDSASILLMVQGTVIASTPTTQTPIPLQRGGVLFIGANESVSLKLTEPKDLLIFRACCLL

SEQ ID NO: 50650 - protein, 332 aa, Homo sapiens
MGLGPVFLLLAGIFPFAPPGAAAEPHSLRYNLTVLSWDGSVQSGFLAEVHLDGQPFLRYDRQKCRAKPQGQWAEDVLGNKTWDRETRDLTGNGKDLRMTLAHIKDQKEGLHSLQEIRVCEIHEDNSTRSSQHFYYDGELFLSQNLETEEWTVPQSSRAQTLAMNVRNFLKEDAMKTKTHYHAMHADCLQELRRYLESGVVLRRTVPPMVNVTRSEASEGNITVTCRASSFYPRNIILTWRQDGVSLSHDTQQWGDVLPDGNGTYQTWVATRICRGEEQRFTCYMEHSGNHSTHPVPSGKVLVLQSHWQTFHVSAVAAGCCYFCYYYFLCPLL

SEQ ID NO: 50651 - protein, 80 aa, Homo sapiens
MAAAAAEQQQFYLLLGNLLSPDNVVRKQAEETYENIPGQSKITFLLQAIRNTTAAEEARQMAAVLLRRLLSSAFDEVYPA

SEQ ID NO: 50652 - protein, 311 aa, Homo sapiens
MNDDGKVNASSEGYFILVGFSNWPHLEVVIFVVVLIFYLMTLIGNLFIIILSYLDSHLHTPMYFFLSNLSFLDLCYTTSSIPQLLVNLWGPEKTISYAGCMIQLYFVLALGTTECVLLVVMSYDRYAAVCRPLHYTVLMHPRFCHLLAVASWVSGFTNSALHSSFTFWVPLCGHRQVDHFFCEVPALLRLSCVDTHVNELTLMITSSIFVLIPLILILTSYGAIVRAILRMQSTTGLQKVFGTCGAHLMAVSLFFIPAMCMYLQPPSGNSQDQGKFIALFYTVVTPSLNPLIYTLRNKVVRGAVKRLMGWE

SEQ ID NO: 50653 - protein, 50 aa, Homo sapiens
MFNTESSFHMFPYQSQIAVFKEFLLRATKYNKLQMLGDDLRTDKKIILVE

SEQ ID NO: 50654 - protein, 127 aa, Homo sapiens
MESGKTASPKSMPKDAQMMAQILKDMGITEYEPRVINQMLEFAFRYVTTILDDAKIYSSHAKKATVDADDVRLAIQCRADQSFTSPPPRDFLLDIARQRNQTPLPLIKPYSGPRLPPDRYCLTAPNY

SEQ ID NO: 50655 - protein, 140 aa, Homo sapiens
MVGKLKQNLLLACLVISSVTVFYLGQHAMECHHRIEERSQPVKLESTRTTVRTGLDLKANKTFAYHKDMPLIFIGGVPRSGTTLMRAMLDAHPDIRCGEETRVIPRILALKQMWSRSSKEKIRLDEAGVTDEVLDSAMQA

SEQ ID NO: 50656 - protein, 49 aa, Homo sapiens
  MOD_RES (1)..(1): Any amino acid
XGGSIRFPSSFCGICGLKPTGNRLRSTPALSPCVWGTMRLTTIPCPPRP

SEQ ID NO: 50657 - protein, 117 aa, Homo sapiens
MEPFSCDTFVALPPATVDNRIIFGKNSDRLYDEVQEVVYFPAVVHDNLGERLKCTYIEIDQVPETYAVVLSRPAWLWGAEMGANEHGVCIGNEAVWGREEVCDEEALLGMDLVRGSS

SEQ ID NO: 50658 - protein, 163 aa, Homo sapiens
MAKMEVKTSLLDNMIGVGDMVLLEPLNEETFINNLKKRFDHSEIYTYIGSVVISVNPYRSLPIYSPEKVEEYRNRNFYELSPHIFALSDEAYRSLRDQDKDQCILITGESGAGKTEASKLVMSYVAAVCGKGAEVNQVKEQLLQSNPVLEAFGNAKTVRNDNS

SEQ ID NO: 50659 - protein, 430 aa, Homo sapiens
MSNRPNNNPGGSLRRSQRNTAGAQPQDDSIGGRSHLGQAKHKGYSPPESRKSNSKAPKVQSNTTSELSRGHLSKRSCSSSSAVIVPQPEDPDRANTSERQKTGQVPKKDNSRGVKRSASPDYNRTNSPSSAKKPKALQHTESPSETNKPHSKSKKRHLDQEQQLKSAQSPSTSKAHTRKSGATGGSRSQKRKRTESSCVKSGSGSESTGAEERSAKPTKLASKSATSAKAGCSTITDSSSAASTSSSSSAVASASSTVPPGARVKQGKDQNKARRSRSASSPSPRRSSREKEQSKTGGSSKFDWAARFSPKVSLPKTKLSLPGSSKSETSKPGPSGLQAKLASLRKSTKKRSESPPAELPSLRRSTRQKTTGSCASTSRRGSGLGKRGAAEARRQEKMADPESNQEAVNSSAARTDEAPQGAAEEGFRTS

SEQ ID NO: 50660 - protein, 1768 aa, Homo sapiens
MTTMLQKSDSNASFLRAARAGNLDKVVEYLKGGIDINTCNQNGLNALHLAAKEGHVGLVQELLGRGSSVDSATKKGNTALHIASLAGQAEVVKVLVKEGANINAQSQNGFTPLYMAAQENHIDVVKYLLENGANQSTATEDGFTPLAVALQQGHNQAVAILLENDTKGKVRLPALHIAARKDDTKSAALLLQNDHNADVQSKMMVNRTTESGFTPLHIAAHYGNVNVATLLLNRGAAVDFTARNGITPLHVASKRGNTNMVKLLLDRGGQIDAKTRDGLTPLHCAARSGHDQVVELLLERGAPLLARTKNGLSPLHMAAQGDHVECVKHLLQHKAPVDDVTLDYLTALHVAAHCGHYRVTKLLLDKRANPNARALNGFTPLHIACKKNRIKVMELLVKYGASIQAITESGLTPIHVAAFMGHLNIVLLLLQNGASPDVTNIRGETALHMAARAGQVEVVRCLLRNGALVDARAREEQTPLHIASRLGKTEIVQLLLQHMAHPDAATTNGYTPLHISAREGQVDVASVLLEAGAAHSLATKKGFTPLHVAAKYGSLDVAKLLLQRRAAADSAGKNGLTPLHVAAHYDNQKVALLLLEKGASPHATAKNGYTPLHIAAKKNQMQIASTLLNYGAETNIVTKQGVTPLHLASQEGHTDMVTLLLDKGANIHMSTKSGLTSLHLAAQEDKVNVADILTKHGADQDAHTKLGYTPLIVACHYGNVKMVNFLLKQGANVNAKTKNGYTPLHQAAQQGHTHIINVLLQHGAKPNATTANGNTALAIAKRLGYISVVDTLKVVTEEVTTTTTTITEKHKLNVPETMTEVLDVSDEEGDDTMTGDGGEYLRPEDLKELGDDSLPSSQFLDGMNYLRYSLEGGRSDSLRSFSSDRSHTLSHASYLRDSAVMDDSVVIPSHQVSTLAKEAERNSYRLSWGTENLDNVALSSSPIHSGFLVSFMVDARGGAMRGCRHNGLRIIIPPRKCTAPTRVTCRLVKRHRLATMPPMVEGEGLASRLIEVGPSGAQFLGKLHLPTAPPPLNEGESLVSRILQLGPPGTKFLGPVIVEIPHFAALRGKERELVVLRSENGDSWKEHFCDYTEDELNEILNGMDEVLDSPEDLEKKRICRIITRDFPQYFAVVSRIKQDSNLIGPEGGVLSSTVVPQVQAVFPEGALTKRIRVGLQAQPMHSELVKKILGNKATFSPIVTLEPRRRKFHKPITMTIPVPKASSDVMLNGFGGDAPTLRLLCSITGGTTPAQWEDITGTTPLTFVNECVSFTTNVSARFWLIDCRQIQESVTFASQVYREIICVPYMAKFVVFAKSHDPIEARLRCFCMTDDKVDKTLEQQENFAEVARSRDVEVLEGKPIYVDCFGNLVPLTKSGQHHIFSFFAFKENRLPLFVKVRDTTQEPCGRLSFMKEPKSTRGLVHQAICNLNITLPIYTKESESDQEQEEEIDMTSEKNPQDEQERIEERLAYIADHLGFSWTELARELDFTEEQIHQIRIENPNSLQDQSHALLKYWLERDGKHATDTNLVECLTKINRMDIVHLMETNTEPLQERISHSYAEIEQTITLDHSEGFSVLQEELCTAQHKQKEEQAVSKESETCDHPPIVSEEDISVGYSTFQDGVPKTEGDSSATALFPQTHKEQVQQDFSGKMQDLPEESSLEYQQEYFVTTPGTETSETQKAMIVPSSPSKTPEEVSTPAEEEKLYLQTPTSSERGGSPIIQEPEEPSEHREESSPRKTSLVIVESADNQPETCERLDEDAAFEKDNNE

SEQ ID NO: 50661 - protein, 441 aa, Homo sapiens
MSPISGASPSWRAAPKASDLLGARGPGGTFQGRDLRGGAHASSSSLNPMPPSQLQLSTVDAHARTPVLQVHPLESPAMISLTPPTTATGVFSLKARPGLPPGINVASLEWVSREPALLCTFPNPSAPRKDSTLSAVPQSSYPLLANGVCKWPGCEKVFEEPEDFLKHCQADHLLDEKGRAQCLLQREMVQSLEQQLVLEKEKLSAMQAHLAGKMALTKASSVASSDKGSCCIVAAGSQGPVVPAWSGPREAPDSLFAVRRHLWGSHGNSTFPEFLHNMDYFKFHNMRPPFTYATLIRWAILEAPEKQRTLNEIYHWFTRMFAFFRNHPATWKVSSSEVAVTGMASSAIAAQSGQAWVWAHRHIGEERDVGCWWWLLASEVDAHLLPVPGLPQNAIRHNLSLHKCFVRVESEKGAVWTVDELEFRKKRSQRPSRCSNPTPGP

SEQ ID NO: 50662 - protein, 167 aa, Homo sapiens
MSNNGADLTFGYISCFVAILLFGSNFVPLKKFDTGDGMFLQWVLCAAIWLVALVVNLILHCPKFWPFAMLGGCIWATGNIAVVPIIKTIGLGLGILIWGSFNALTGWASSRFGWFGLDAEEVSNPLLNYIGAGLSVVSAFIFLFIKSEIPNNTCSMDTTPLITEHVI

SEQ ID NO: 50663 - protein, 420 aa, Homo sapiens
MPRVKAAQAGRQSSAKRHLAEQFAVGEIITDMAKKEWKVGLPIGQGGFGCIYLADMNSSESVGSDAPCVVKVEPSDNGPLFTELKFYQRAAKPEQIQKWIRTRKLKYLGVPKYWGSGLHDKNGKSYRFMIMDRFGSDLQKIYEANAKRFSRKTVLQLSLRILDILEYIHEHEYVHGDIKASNLLLNYKNPDQVYLVDYGLAYRYCPEGVHKEYKEDPKRCHDGTIEFTSIDAHNGVAPSRRGDLEILGYCMIQWLTGHLPWEDNLKDPKYVRDSKIRYRENIASLMDKCFPEKNKPGEIAKYMETVKLLDYTEKPLYENLRDILLQGLKAIGSKDDGKLDLSVVENGGLKAKTITKKRKKEIEESKEPGVEDTEWSNTQTEEAIQTRSEESQGAIHRSMSQPEASSSSYDSSRTRKRVQK

SEQ ID NO: 50664 - protein, 281 aa, Homo sapiens
MAAPTPARPVLTHLLVALFGMGSWAAVNGIWVELPVVVKELPEAAAFQGLLLLLPPPPSVPTGELGSGLQVGAPGAEEEVEESSPLQEPPSQAAGTTPGPDPKAYQLLSARSACLLGLLAATNALTNGVLPAVQSFSCLPYGRLAYHLAVVLGSAANPLACFLAMGVLCRSLAGLGGLSLLGVFCGGYLMALAVLSPCPPLVGTSAGVVLVVLSWVLCLGVFSYVKVAASSLLHGGGRPALLAAGVAIQVGSLLGAVAMFPPTSIYHVFHSRKDCADPCDS

SEQ ID NO: 50665 - protein, 225 aa, Homo sapiens
MRLREPLLSGSAAMPGASLQRACRLLVAVCALHLGVTLVYYLAGRDLSRLPQLVGVSTPLQGGSNSAAAIGQSSGELRTGGARPPPPLGASSQPRPGGDSSPVVDSGPGPASNLTSVPVPHTTALSLPACPEESPLLVGPMLIEFNMPVDLELVAKQNPNVKMGGRYAPRDCVSPHKVAIIIPFRNRQEHLKYWLYYLHPVLQRQQLDYGIYVINQYEKIRRLLW

SEQ ID NO: 50666 - protein, 103 aa, Homo sapiens
MNNSLENTISFEEYIRVKARSVPQHRMKEFLDSLASKGPEALQEFQQTATTTMVYQQGGNCIYTDSTEVAGSLLELACPVTTSVQPQTQQEQQIQVQQPQQVQ

SEQ ID NO: 50667 - protein, 480 aa, Homo sapiens
MDAPARLLAPLLLLCAQQLRGTRAMNDIGDYVGSNLEISWLPNLDGLIAGYARNFRPGIGGPPVNVALALEVASIDHISEANMEYTMTVFLHQSWRDSRLSYNHTNETLGLDSRFVDKLWLPDTFIVNAKSAWFHDVTVENKLIRLQPDGVILYSIRITSTVACDMDLAKYPMDEQECMLDLESCFLCGRSAPARAPGAGPGSAAHLCAFPPDGYSSEDIVYYWSESQEHIHGLDKLQLAQFTITSYRFTTELMNFKSAGQFPRLSLHFHLRRNRGVYIIQSYMPSVLLVAMSWVSFWISQAAVPARVSLGITTVLTMTTLMVSARSSLPRASAIKALDVYFWICYVFVFAALVEYAFAHFNADYRKKQKAKVKVSRPRAEMDVRNAIVLFSLSAAGVTQELAISRRQRRVPGNLMGSYRSVGVETGETKKEGAARSGGQGGIRARLRPIDADTIDIYARAVFPAAFAAVNVIYWAAYAM

SEQ ID NO: 50668 - protein, 8 aa, Homo sapiens
MAPPAHKS

SEQ ID NO: 50669 - protein, 117 aa, Homo sapiens
  MOD_RES (1)..(1): Any amino acid
XRNSGSASRSDPVTLNLLHGPDLPRIHPSYTNYRSGDNLYLSCFANSNPPAQYSWTINGKFQQSGQNLFIPQITTKHSGLYVCSVRNSATGEESSTSLTVKVSASTRIGLLPLLNPT

SEQ ID NO: 50670 - protein, 268 aa, Homo sapiens
MIHSLFLINSSGDIFLEKHWKSVVSRSVCDYFFEAQERATEAENVPPVIPTPHHYLLSVYRHKIFFVAVIQTEVPPLFVIEFLHRVVDTFQDYFGVCSEPVIKDNVVVVYEVLEEMLDNGFPLATESNILKELIKPPTILRTVVNTITGSTNVGDQLPTGQLSVVPWRRTGVKYTNNEAYFDVIEEIDAIIDKSGSTITAEIQGVIDACVKLTGMPDLTLSFMNPRLLDDVSFHPCVRFKRWESERILSFIPPDGNFRLLSYHVSAQK

SEQ ID NO: 50671 - protein, 340 aa, Homo sapiens
MWSEGRYEYERIPRERAPPRSHPSDESGYRWTRDDHSASRQPEYRDMRDGFRRKSFYSSHYARERSPYKRDNTFFRESPVGRKDSPHSRSGSSVSSRSYSPERSKSYSFHQSQHRKSVRPGASYKRQNEGNPERDKERPVQSLKTSRDTSPSSGSAVSSSKVLDKPSRLTEKELAEAASKWAAEKLEKSDESNLPEISEYEAGSTAPLFTDQPEEPESNTTHGIELFEDSQLTTRSKAIASKTKEIEQVYRQDCETFGMVVKMLIEKDPSLEKSIQFALRQNLHEIESAGQTWQQVPPVRNTEMDHDGTPENEGEETAQSNLETALIKSTLEPALCAFFL

SEQ ID NO: 50672 - protein, 133 aa, Homo sapiens
MSDGARKRRRKGTRESGQKAKTEGSEGGSSSGLAPLLGQSGRYLAGPGRGWPNLTACSRAGFQTKGTQRSEPAQKPHLARKTEGVSRCPSEDHSEGAAAAKTGTPGGLRGNPVRRQQCPPFRPSCTIFCRTVF

SEQ ID NO: 50673 - protein, 178 aa, Homo sapiens
MATANSIIVLDDDDEDEAAAQPGPSHPLPNAASPGAEAPSSSEPHGARGSSSSGGKKCYKLENEKLFEEFLELCKMQTADHPEVVPFLYNRQQRAHSLFLASAEFCNILSRVLSRARSRPAKLYVYINELCTVLKAHSAKKKLNLAPAATTSNEPSGNNPPTHLSLDPTNAENTASQS

SEQ ID NO: 50674 - protein, 111 aa, Homo sapiens
AAPPKAPIRVRNLTIRAGALTGKENNMLQPETHIFTAPEEGSSQGALLLGQAPEPLSLPCTPVTLEQQLVSPSGDPHRAPALPSMSPKSLTRLWFLPTQSGSGSWRPLRLC

SEQ ID NO: 50675 - protein, 56 aa, Homo sapiens
MDPLQKRNPASPSKSSPMTAAETSQEGPAPSQPSYSEQPMMGLSNLSPGPGPSQAV

SEQ ID NO: 50676 - protein, 150 aa, Homo sapiens
MTLQGRADLSGNQGNAAGRLATVHEPVVTQWAVHPPAPAHPSLLDKMEKAPPQPQHEGLKSKEHLPQQPAEGKTASRRVPRLRAVVESQAFKNILVDEMDMMHARAATLIQANWRGYWLRQKLISQMMAAKAIQEAWRRFNKRHILHSSK

SEQ ID NO: 50677 - protein, 122 aa, Homo sapiens
MAAPVVTAPGRALLRAGAGRLLRGGVQELLRPRHEGNAPDLACNFSLSQNRGTVIVERWWKVPLAGEGRKPRLHRRHRVYKLVEDTKHRPKENLELILTQSVESKARAEALPLRLVRCWSPG

SEQ ID NO: 50678 - protein, 64 aa, Homo sapiens
MAGSEPRSGTNSPPPPFSDWGRLEAAILSGWKTFWQSVSKERVARTTSREEVDEAASTLTRLPL

SEQ ID NO: 50679 - protein, 125 aa, Homo sapiens
EFIEELLSPPFGGLVAFVKEAEALIERGQAERLRGEEARVTQLIRGFGSSWKSSVESLSQDVMRSFTNFRNGTSIIQGALTQLIQLYHRFHRVLSQPQLRALPARAELINIHHLMVELKKHKPNF

SEQ ID NO: 50680 - protein, 191 aa, Homo sapiens
QCLCSNSQVGVQKIDDAMRNFAEKVFASEVKDEGGRQEISPFDVDEICPISHHEMQAHIFHLETLSTSTEARRKKRFQGRKTVNLSIPLSETSSTKLSHIDEYISSSPTYQTVPDFQRVQITGDYASGVTVEDFEIVCKGLYRALCIREKYMQKSFQRFPKTPSKYLRNIDGEAWVANESFYPVRPIPTGA

SEQ ID NO: 50681 - protein, 159 aa, Homo sapiens
MLGFLSARQTGLEDPLRLRRAESTRRVLGLELNKDRDVERIHGGGINTLDIEPVEGRYMLSGGSDGVIVLYDLENSSRQSYYTCKAVCSIGRDHPDVHRYSVETVQWYPHDTGMFTSSSFDKTLKVWDTNTLQTESRSVTHAGVQWPVAQSQLTATSPS

SEQ ID NO: 50682 - protein, 173 aa, Homo sapiens
MDPDSDQPLNSLDVKPLRKPRIPMETFRKVGIPIIIALLSLASIIIVVVLIRLSKDRSTLQVLDSATGNWFSACFDNFTEALAETACRQMGYSSKPTFRAVEIGPDQDLDVVEITENSQELRMRNSSGPCLSGSLVSLHCLACGKSLKTPRVVGVEEASVDSWPWQVSIQYDK

SEQ ID NO: 50683 - protein, 24 aa, Homo sapiens
MSVVLVLLPTLLLVMLTGAQRACP

SEQ ID NO: 50684 - protein, 178 aa, Homo sapiens
MSGGWELELNGTEAKLVRKVAGEKITVTFNINNSIPPTFDGEEEPSQGQKVEEQEPELTSTPNFVVEVIKNDDGKKALVLDCHYPEDEVGQEDEAESDIFSIREVSFQSTGESEWKDTNYTLNTDSLDWALYDHLMDFLADRGVDNTFADELVELSTALEHQEYITFLEDLKSFVKSQ

SEQ ID NO: 50685 - protein, 396 aa, Homo sapiens
MKWVTFISLLFLFSSAYSRGVFRRDAHKSEVAHRFKDLGEENFKALVLIAFAQYLQQCPFEDHVKLVNEVTEFAKTCVADESAENCDKSLHTLFGDKLCTVATLRETYGEMADCCAKQEPERNECFLQHKDDNPNLPRLVRPEVDVMCTAFHDNEETFLKKYTYETTLEKCCAAADPHECYAKVFDEFKPLVEEPQNLIKQNCELFEQLGEYKFQNALLVRYTKKVPQVSTPTLVEVSRNLGKVGSKCCKHPEAKRMPCAEDYLSVVLNQLCVLHEKTPVSDRVTKCCTESLVNRRPCFSALEVDETYVPKEFNAETFTFHADICTLSEKERQIKKQTALVELVKHKPKATKEQLKAVMDDFAAFVEKCCKADDKETCFAEEGKKLVAASQAALGL

SEQ ID NO: 50686 - protein, 118 aa, Homo sapiens
MLPKRSRRTVSKSIGPTCPFAGSCEVSKTQRRHCPACRLQKCLDAGMRKDIPCPLKTRSPFSREQLWKSVTSYSIPLSVSKHKTSSAGLFATQLKMEPVTDLELPREMRLISCKRRWH

SEQ ID NO: 50687 - protein, 571 aa, Homo sapiens
MGRIGISCLFPASWHFSISPVGCPRILNTNLRQIMVISVLAAAVSLLYFSVVIIRNKYGRLTRDKKFQRYLARVTDIEATDTNNPNVNYGIVVDCGSSGSRVFVYCWPRHNGNPHDLLDIRQMRDKNRKPVVMKIKPGISEFATSPEKVSDYISPLLNFAAEHVPRAKHKETPLYILCTAGMRILPESQQKAILEDLLTDIPVHFDFLFSDSHAEVISGKQEGVYAWIGINFVLGRFEHIEDDDEAVVEVNIPGSESSEAIVRKRTAGILDMGGVSTQIAYEVPKTEEVAKNLLAEFNLGCDVHQTEHVYRVYVATFLGFGGNAARQRYEDRIFANTIQKNRLLGKQTGLTPDMPYLDPCLPLDIKDEIQQNGQTIYLRGTGDFDLCRETIQPFMNKTNETQTSLNGVYQPPIHFQNSEFYGFSEFYYCTEDVLRMGGDYNAAKFTKAAKDYCATKWSILRERFDRGLYASHADLHRLKYQCFKSAWMFEVFHRGFSFPVNYKSLKTALQVYDKEVQWTLGAILYRTRFLPLRKIGMLIIPCSGGCPKLCCAVWQPPPYGATKHLQCAAWN

SEQ ID NO: 50688 - protein, 232 aa, Homo sapiens
MKAVLRKAGGTGPGEEKQFLEVWEKNRKLKSFNLSALEKHGPVYEDDCFGCLSWSHSETHLLYVAEKKRPKAESFFQTKALDVSASDDEIARLKKPDQAIKGDQFVFYEDWGENMVSKSIPVLCVLDVESGNISVLEGVPENVSPGQAFWAPGDAGVVFVGWWHEPFRLGIRFCTNRRSALYYVDLIGGKCELLSDDSLAVSSPRLSPDQCRIVYLQYPSLIPHHQCSQLCL

SEQ ID NO: 50689 - protein, 109 aa, Homo sapiens
MVHGSVTFRDVAIDFSQEEWECLQPDQRTLYRDVMLENYSHLISLGSSISKPDVITLLEQEKEPWMVVRKETSRRYPDLELKYGPEKVSPENDTSEVNLPKQVIKQIST

SEQ ID NO: 50690 - protein, 306 aa, Homo sapiens
  MOD_RES (1)..(1): Any amino acid
XHVGGTKDSEDNYGDSEDLDLQATQCFLENQGLEAVQSMEDEPTQAFMLTPPQELGPSHCSFQTTGLLNCKMPPAEKASRIRAAEKVSRGDQESPDACLPPTVPEAPAPPQKPLNSQSQKHLAPPPLLSPLLPSIKPTVRKTRQDGSQEAPEAPLSSELEPFHPKPKIRTRKSSRMTPFPATSAAPEPHPSTSTAQPVTPKPTSQATRSRTNRSSVKTPEPVVPTAPELQPSTSTDQPVTSEPTSQVTRGRKSRSSVKTPETVVPTALELQPSTSTDRPVTSEPTSQATRGRKNRSSVKTPEPVVP

SEQ ID NO: 50691 - protein, 253 aa, Homo sapiens
MLGSGFKAERLRVNLRLVINRLKLLEKKKTELAQKARKEIADYLAAGKDERARIRVEHIIREDYLVEAMEILELYCDLLLARFGLIQSMKELDSGLAESVSTLIWAAPRLQSEVAELKIVADQLCAKYSKEYGKLCRTNQIGTVNDRLMHKLSVEAPPKILVERYLIEIAKNYNVPYEPDSVVMAEAPPGVETDLIDVGFTDDVKKGGPGRGGSGGFTAPVGGPDGTVPMPMPMPMPMPSANTPFSYPLPKGP

SEQ ID NO: 50692 - protein, 216 aa, Homo sapiens
MASESETLNPSARIMTFYPTMEEFRNFSRYIAYIESQGAHRAGLAKVVPPKEWKPRASYDDIDDLVIPAPIQQLVTGQSGLFTQYNIQKKAMTVREFRKIANSDKYCTPRYSEFEELERKYWKNLTFNPPIYGADVNGTLYEKHVDEWNIGRLRTILDLVEKESGITIEGVNTPYLYFGMWKTSFAWHTEDMDLYSINYLHFGEPKSWLQMNTCFP

SEQ ID NO: 50693 - protein, 225 aa, Homo sapiens
MEEEEMNDGSQMVRSQESLTFQDVAVDFTREEWDQLYPAQKNLYRDVMLENYRNLVALGYQLCKPEVIAQLELEEEWVIERDSLLDTHPGDQSHVMSVVRSSVHARWIVGKVIGTKMQKTAKVRVTRLVLDPYLLKYFNKRKTYFAHDALQQCTVGDIVLLRALPVPRAKHVKHELAEIVFKVGKVIDPVTGKPCAGTTYLESPLSSETTQLSKNLEELNISSAQ

SEQ ID NO: 50694 - protein, 82 aa, Homo sapiens
MAQKPKVDPHVGRLGYLQALVTEFQETQSQDAKEQVLANLANFAYDPSNYEYLRQLQVLDLFLDSLSEENETLVEFAIAAAV

SEQ ID NO: 50695 - protein, 256 aa, Homo sapiens
  MOD_RES (1)..(1): Any amino acid
XSLRLWDSHVCGVSLLSHRWALTAAHCFETDLSDPSGWMVQFGQLTSMPSFWSLQAYYTRYFVSNIYLSPRYLGNSPYDIALVKLSAPVTYTKHIQPICLQASTFEFENRTDCWVTGWGYIKEDEALPSPHTLQEVQVAIINNSMCNHLFLKYSFRKDIFGDMVCAGNAQGGKDACFGDSGGPLACNKNGLWYQIGVVSWGVGCGRPNRPGVYTNISHHFEWIQKLMAQSGMSQPDPSWPLLFFPLLWALPLLGPV

SEQ ID NO: 50696 - protein, 444 aa, Homo sapiens
MLLMVVSMACVGFFLVQRAGPHMGGQDKPFLSAWPSAVVPRGGHVTLRCHYRHRFNNFMLYKEDRIHVPIFHGRLFQESFNMSPVTTAHAGNYTCRGSHPHSPTGWSAPSNPVVIMVTGNHRKPSLLAHPGPLVKSGERVILQCWSDIMFEHFFLHKEGISKDPSRLVGQIHDGVSKANFSIGPMMLALAGTYRCYGSVTHTPYQLSAPSDPLDIVVTGPYEKPSLSAQPGPKVQAGESVTLSCSSRSSYDMYHLSREGGAHERRLPAVRKVNRTFQADFPLGPATHGGTYRCFGSFRHSPYEWSDPSDPLLVSVTGNPSSSWPSPTEPSSKSGNPRHLHILIGTSVVIILFILLLFFLLHLWCSNKKNAAVMDQEPAGNRTANSEDSDEQDPEEVTYAQLDHCVFTQRKITRPSQRPKTPPTDTILYTELPNAKPRSKVVSCP

SEQ ID NO: 50697 - protein, 383 aa, Homo sapiens [sequence omitted]

SEQ ID NO: 50698 - protein, 366 aa, Homo sapiens
MYSRHAQRIPPGKKMASRKEGTGSTATSSSSTAGAAGKGKGKGGSGDSAVKQVQIDGLVVLKIIKHYQEEGQGTEVVQGVLLGLVVEDRLEITNCFPFPQHTEDDADFDEVQYQMEMMRSLRHVNIDHLHVGWYQSTYYGSFVTRALLDSQFSYQHAIEESVVLIYDPIKTAQGSLSLKAYRLTPKLMEVCKEKDFSPEALKKANITFEYMFEEVPIVIKNSHLINVLMWELEKKSAVADKHELLSLASSNHLGKNLQLLMDRVDEMSQDIVKYNTYMRNTSKQQQQKHQYQQRRQQENMQRQSRGEPPLPEEDLSKLFKPPQPPARMDSLLIAGQINTYCQNIKEFTAQNLGKLFMAQALQEYNN

SEQ ID NO: 50699 - protein, 135 aa, Homo sapiens
MGAGPSLLLAALLLLLSGDGAVRCDTPANCTYLDLLGTWVFQVGSSGSQRDVNCSVMGPQEKKVVVYLQKLDTAYDDLGNSGHFTIIYNQGFEIVLNDYKWFAFFKDVTDFISHLFMQLGTVGIYDLPHLRNKLV

SEQ ID NO: 50700 - protein, 289 aa, Homo sapiens
MQRADSEQPSKRPRCDDSPRTPSNTPSAEADWSPGLELHPDYKTWGPEQVCSFLRRGGFEEPVLLKNIRENEITGALLPCLDESRFENLGVSSLGERKKLLSYIQRLVQIHVDTMKVINDPIHGHIELHPLLVRIIDTPQFQRLRYIKQLGGGYYVFPGASHNRFEHSLGVGYLAGCLVHALGEKQPELQISERDVLCVQIAGLCHDLGHGPFSHMFDGRFIPLARPEVKWTHEQGSVMMFEHLINSNGIKPVMEQYGLIPEEDICFIKEQIVGPLESPVEDSLIWCLS

SEQ ID NO: 50701 - protein, 406 aa, Homo sapiens
MAAETLLSSLLGLLLLGLLLPASLTGGVGSLNLEELSEMRYGIEILPLPVMGGQSQSSDVVIVSSKYKQRYECRLPAGAIHFQREREEETPAYQGPGIPELLSPMRDAPCLLKTKDWWTYEFCYGRHIQQYHMEDSASGAPNDFQNNVQVKVIRSPADLIRFIEELKGGTKKGKPNIGQEQPVDDAAEVPQREPEKERGDPERQREMEEEEDEDEDEDEDEDERQLLGEFEKELEGILLPSDRDRLRSEVKAGMERELENIIQETEKELDPDGLKKESERDRAMLALTSTLNKLIKRLEEKQSPELVKKHKKKRVVPKKPPPSPQPTGKIEIKIVRPWAEGTEEGARWLTDEDTRNLKEIFFNILVPGAEEAQKERQRQKELESNYRRVWGSPGGEGTGDLDEFDF

SEQ ID NO: 50702 - protein, 38 aa, Homo sapiens
MSLWGLVSKMPPEKVQRLYVDFPQHLRHLLGDWLESQP

SEQ ID NO: 50703 - protein, 54 aa, Homo sapiens
MDCYRTSLSSSWIYPTVILCLFGFFSMMRPSEPFLIPYLSGPDKNLTSAEITNE

SEQ ID NO: 50704 - protein, 365 aa, Homo sapiens
MAVMAPRTLLLLLLGALALTQTWAGSHSMRYFFTSVSRPGRGEPRFIAVGYVDDTQFVRFDSDAASQRMEPRAPWIEQEGPEYWDQETRNVKAHSQTDRESLRIALRYYNQSEAGSHTIQMMYGCDVGPDGRLLRGYQQDAYDGKDYIALNEDLRSWTAADMAAQITQRKWEAARVAEQLRAYLEGTCVEWLRRYLENGKETLQRTDAPKTHMTHHAVSDHEATLRCWALSFYPAEITLTWQRDGEDQTQDTELVETRPAGDGTFQKWASVVVPSGQEQRYTCHVQHEGLPKPLTLRWEPSSQPTIPIVGIIAGLVLFGAMFAGAVVAAVRWRRKSSDRKGGSYSQAASSDSAQGSDMSLTACKV

SEQ ID NO: 50705 - protein, 688 aa, Homo sapiens
MNVRGAAPGVRASPRPWQFPTSQRLPAGSPEAAPCSASGCCWPGSAASWRQDPEQISYIIPIDEKLYTVHLKQRYFLADNFMIYLYNQGSMNTYSSDIQTQCYYQGNIEGYPDSMVTLSTCSGLRGILQFENVSYGIEPLESAVEFQHVLYKLKNEDNDIAIFIDRSLKEQPMDDNIFISEKSEPAVPDLFPLYLEMHIVVDKTLYDYWGSDSMIVTNKVIEIVGLANSMFTQFKVTIVLSSLELWSDENKISTVGEADELLQKFLEWKQSYLNLRPHDIAYLLIYMDYPRYLGAVFPGTMCITRYSAGVALQCGPASCCDFRTCVLKDGAKCYKGLCCKDCQILQSGVECRPKAHPECDIAENCNGSSPECGPDITLINGLSCKNNKFICYDGDCHDLDARCESVFGKGSRNAPFACYEEIQSQSDRFGNCGRDRNNKYVFCGWRNLICGRLVCTYPTRKPFHQENGDVIYAFVRDSVCITVDYKLPRTVPDPLAVKNGSQCDIGRVCVNRECVESRIIKASAHVCSQQCSGHGVCDSRNKCHCSPGYKPPNCQIRSKGFSIFPEEDMGSIMERASGKTENTWLLGFLIALPILIVTTAIVLARKQLKKWFAKEEEFPSSESKSEGSTQTYASQSSSEGSTQTYASQTRSESSSQADTSKSKSEDSAEAYTSRSKSQDSTQTQSSSN

SEQ ID NO: 50706 - protein, 463 aa, Homo sapiens
MVCKRKGAGVPACTPCKQPLCPPPSSPTSEGAPTEAGGDAVRAGGTAPLSAQQQHECGDADCRESPENPCDCHREPPPETPDINQLPPSILLKIFSNLSLDERCLSASLVCKYWRDLCLDFQFWKQLDLSSRQQVTDELLEKIASRSQNIIEINISDCRSMSDNGVCVLAFKCPGLLRYTAYRCKQLSDTSIIAVASHCPLLQKVHVGNQDKLTDEGLKQLGSKCRELKDIHFGQCYKISDEGMIVIAKGCLKLQRIYMQENKLVTDQSVKAFAEHCPELQYVGFMGCSVTSKGVIHLTKLRNLSSLDLRHITELDNETVMEIVKRCKNLSSLNLCLNWIINDRCVEVIAKEGQNLKELYLVSCKITDYALIAIGRYSMTIETVDVGWCKEITDQGATLIAQSSKSLRYLGLMRCDKVNEVTVEQLVQQYPHITFSTVLQDCKRTLERAYQMGWTPNMSAASS

SEQ ID NO: 50707 - protein, 610 aa, Homo sapiens
MDDDKPFQPKNISKMAELFMECEEEELEPWQKKVEETQDEDDDELIFVGEISSSKPAISNILNRGHSSSSSKGIKSEPHSPGIPEIFRTASQRCRDPPSNPVAASPRFHLVSKSSQSSVTVENASKPDFTKNSQVGSDNSSILLFDSTQESLPPSQDIPAIFREGMKNTSYVLKHPSTSKVNSVTPKKPKTSEDVPQINPSTSLPLIGSPPVTSSQVMLSKGTNTSSPYDAGADYLRACPKCNVQFNLLDPLKYHMKHCCPDMITKFLGVIVKSERPCDEDKTDSETGKLIMLVNEFYYGRHEGVTEKEPKTYTTFKCFSCSKVLKNNIRFMNHMKHHLELEKQNNESWENHTTCQHCYRQYPTPFQLQCHIESTHTPHEFSTICKICELSFETEHILLQHMKDTHKPGEMPYVCQKKGVHRCPKCRLQFLTSKEKAEHKAQHRTFIKPKELEGLPPGAKVTIRASLGPLQSKLPTAPFGCAPGTSFLQVTPPTSQNTTARNPRKSNASRSKTSKLHATTSTASKVNTSKPRGRIAKSKAKPSYKQKRQRNRKNKMSLALKNIRCRRGIHKCIECHSKIKDFASHFSIYIHCSFCKYNTNCNKAFVNHMM

SEQ ID NO: 50708 - protein, 234 aa, Homo sapiens
MIRLGGWCARRLCSAAVPAGRRGAAGGLGLAGGRALRVLVDMDGVLADFEGGFLRKFRARFPDQPFIALEDRRGFWVSEQYGRLRPGLSEKAISIWESKNFFFELEPLPGAVEAVKEMASLQNTDVFICTSPIKMFKYCPYEKYAWVEKYFGPDFLEQIVLTRDKTVVSADLLIDDRPDITGKWPATGAEPTPSWEHVLFTACHNQHLQLQPPRRRLHSWADDWKAILDSKRPC

SEQ ID NO: 50709 - protein, 192 aa, Homo sapiens
MIFSLASCIITAKLCTWAICFLTTSEEVQKKLYEEINQVFGNGPVTPEKIEQLRYCQHVLCETVRTAKLTPVSAQLQDIEGKIDRFIIPRETLVLYALGVVLQDPNTWPSPHKFDPDRFDDELVMKTFSSLGFSGTQECPELRFAYMVTTVLLSVLVKRLHLLSVEGQVIETKYELVTSSREEAWITVSKRY

SEQ ID NO: 50710 - protein, 647 aa, Homo sapiens
MPPNINWKEIMKVDPDDLPRQEELADNLLISLSKVEVNELKSEKQENVIHLFRITQSLMKMKAQEVELALEEVEKAGEEQAKFENQLKTKVMKLENELEMAQQSAGGRDTRFLRNEICQLEKQLEQKDRELEDMEKELEKEKKVNEQLALRNEEAENENSKLRRENKRLKKKNEQLCQDIIDYQKQIDSQKETLLSRRGEDSDYRSQLSKKNYELIQYLDEIQTLTEANEKIEVQNQEMRKNLEESVQEMEKMTDEYNRMKAIVHQTDNVIDQLKKENDHYQLQVQELTDLLKSKNEEDDPIMVAVNAKVEEWKLILSSKDDEIIEYQQMLHNLREKLKNAQLDADKSNVMALQQGIQERDSQIKMLTEQVEQYTKEMEKNTCIIEDLKNELQRNKGASTLSQQTHMKIQSTLDILKEKTKEAERTAELAEADAREKDKELVEALKRLKDYESGVYGLEDAVVEIKNCKNQIKIRDREIEILTKEINKLELKISDFLDENEALRERVGLEPKTMIDLTEFRNSKHLKQQQYRAENQILLKEIESLEEERLDLKKKIRQMAQERGKRSATSGLTTEDLNLTENISQGDRISERKLDLLSLKNMSEAQSKNEFLSRELIEKERDLERSRTVIAKFQNKCYRIKECRRNL

SEQ ID NO: 50711 - protein, 508 aa, Homo sapiens
MPSMLERISKNLVKEIGSKDLTPVKYLLSATKLRQFVILRKKKDSRSSFWEQSDYVPVEFSLNDILEPSSSVLETVVTGPFHFSDIMIQKHKADMGVNVGIEVSVSGEASVDHGCSLEFQIVTIPSPNLEDFQKRKLLDPEPSFLKECRRRGDNLYVVTEAVELINNTVLYDSSSVNILGKIALWITYGKGQGQGESLRVKKKALTLQKGMVMAYKRKQLVIKEKAILISDDDEQRTFQDEYEISEMVGYCAARSEGLLPSFHTISPTLFNASSNDMKLKPELFLTQQFLSGHLPKYEQVHILPVGRIEEPFWQNFKHLQEEVFQKIKTLAQLSKDVQDVMFYSILAMLRDRGALQDLMNMLELDSSGHLDGPGGAILKKLQQDSNHAWFNPKDPILYLLEAIMVLSDFQHDLLACSMEKRILLQQQELVRSILEPNFRYPWSIPFTLKPELLAPLQSEGLAITYGLLEECGLRTELDNPRSTWDVEAKMPLSALYGTLSLLQQLAEA

SEQ ID NO: 50712 - protein, 131 aa, Homo sapiens
MAVLWRLSAVCGALGGRALLLRTPVVRPAHISAFLQDRPIPEWCGVQHIHLSPSHHSGSKAASLHWTSERVVSVLLLGLLPAAYLNPCSAMDYSLAAALTLHGALDKLLLTMFMGMPCRKLPRQGFWHFQL

SEQ ID NO: 50713 - protein, 289 aa, Homo sapiens
MCSTMSAPTCLAHLPPCFLLLALVLVPSDASGQSSRNDWQVLQPEGPMLVAEGETLLLRCMVVGSCTDGMIKWVKVSTQDQQEIYNFKRGSFPGVMPMIQRTSEPLNCDYSIYIHNVTREHTGTYHCVRFDGLSEHSEMKSDEGTSVLVKGAGDPEPDLWIIQPQELVLGTTGDTVFLNCTVLGDGPPGPIRWFQGAGLSREAIYNFGGISHPKETAVQASNNDFSILLQNVSSEDAGTYYCVKFQRKPNRQYLSGQGTSLKVKAKSTSSKEAEFTSEPATEMSPTGLQ

SEQ ID NO: 50714 - protein, 530 aa, Homo sapiens
MMTPQVITPQQMQQILQQQVLSPQQLQALLQQQQAVMLQQQQLQEFYKKQQEQLHLQLLQQQQQQQQQQQQQQQQQQQQQQQQQQQQQQQQQQQQQQQQHPGKQAKEQQQQQQQQQQLAAQQLVFQQQLLQMQQLQQQQHLLSLQRQGLISIPPGQAALPVQSLPQAGLSPAEIQQLWKEVTGVHSMEDNGIKHGGLDLTTNNSSSTTSSNTSKASPPITHHSIVNGQSSVLSARRDSSSHEETGASHTLYGHGVCKWPGCESICEDFGQFLKHLNNEHALDDRSTAQCRVQMQVVQQLEIQLSKERERLQAMMTHLHMRPSEPKPSPKPAIMESSDRQLTLNEIYSWFTRTFAYFRRNAATWKNAVRHNLSLHKCFVRVENVKGAVWTVDEVEYQKRRSQKITGSPTLVKNIPTSLGYGAALNASLQAALAESSLPLLSNPGLINNASSGLLQAVHEDLNGSLDHIDSNGNSSPGCSPQPHIHSIHVKEEPVIAEDEDCPMSLVTTANHSPELEDDREIEEEPLSEDLE

SEQ ID NO: 50715 - protein, 114 aa, Homo sapiens
APSQRPMCTSSDSSSVRCAAWDSRSGSSFRSTGGGAGRSTPKVSSPGPGGPDCDRDGEPGPAAAASPGARAALPEVRCGVLCHLRAAESPGEAVGEDGDSTDQELLLRTDRCCL

SEQ ID NO: 50716 - protein, 460 aa, Homo sapiens
MALSVRTLPLRGFLVPRPQPTRSQDAPSPRLPLSSAPAPCRHKNEEDNHSYYVSRLYGPSEPHSRELWVDVAEANRSQVKIHTILSNTHRQASRVVLSFDFPFYGHPLRQITIATGGFIFMGDVIHRMLTATQYVAPLMANFNPGYSDNSTVVYFDNGTVFVVQWDHVYLQGWEDKGSFTFQAALHHDGRIVFAYKEIPMSVPEISSSQHPVKTGLSDAFMILNPSPDVPESRRRSIFEYHRIELDPSKVTSMSAVEFTPLPTCLQHRSCDACMSSDLTFNCSWCHVLQRCSSGFDRYRQEWMDYGCAQEAEGRMCEDFQDEDHDSASPDTSFSPYDGDLTTTSSSLFIDSLTTEDDTKLNPYAGGDGLQNNLSPKTKGTPVHLGTIVGIVLAVLLVAAIILAGIYINGHPTSNAALFFIERRPHHWPAMKFRSHPDHSTYAEVEPSGHEKEGFMEAEQC

SEQ ID NO: 50717 - protein, 68 aa, Homo sapiens
MLVPLAKLSCLAYQCFHALKIKKNYLPLCATRWSSTSTVPRITTHYTIYPRDKDKRWEVTHQEQLPVL

SEQ ID NO: 50718 - protein, 89 aa, Homo sapiens
MSRPLLITFTPATDPSDLWKDGQQQPQPEKPESTLDGAAARAFYEALIGDESSAPDSQRSQTEPARERKRKKRRIMKAPAAEAVAEGAS

SEQ ID NO: 50719 - protein, 258 aa, Homo sapiens
MGSRAELCTLLGGFSFLLLLIPGEGAKGGSLRESQGVCSKQTLVVPLHYNESYSQPVYKPYLTLCAGRRICSTYRTMYRVMWREVRREVQQTHAVCCQGWKKRHPGALTCEAICAKPCLNGGVCVRPDQCECAPGWGGKHCHVGSFTCGCPHDLVLGVDGRTCMEGSPEPPTSASILSVAVREAEKDERALKQEIHELRGRLERLEQWAGQAGAWVRAVLPVPPEELQPEQVAELWGRGDRIESLSDQVLLLEERLGA

SEQ ID NO: 50720 - protein, 57 aa, Homo sapiens
MWAAAGGLWRSRAGLRALFRSRDAALFPGCERGLHCSAVSCKNWLKKFASKTKWMKT

SEQ ID NO: 50721 - protein, 279 aa, Homo sapiens
MFPDQPEKPLNLAHIVPPRPVTSMNDTLFSHSVPSSGSPFITRRLPEGISASSPVAEEHSLIKLYVNQLDHGARSPPKDSEVEQNKLLARAAPAFLKGKGIQYSLNVADRLADEHVLIGLYVNMLRNNPSCMLESSNRLDEEHRLIARYAARLAAESSSSQPPQQRSAPDISFTIDANKQQRQLIAELENKNREILQEIQRLRLEHEQASQPTPEKAQQNPTLLAELRLLRQRKDELEQRMSALQESRRELMVQLEGLMKLLKEEELKQGVSYVPYCRS

SEQ ID NO: 50722 - protein, 29 aa, Homo sapiens
NGGRDYALRGPEHPGSGGAPEPQGWIHFI

SEQ ID NO: 50723 - protein, 101 aa, Homo sapiens
MAKTPSDHLLSTLEELVPYDFEKFKFKLQNTSVQKEHSRIPRSQIQRARPVKMATLLVTYYGEEYAVQLTLQVLRAINQRLLAEELHRAAIQGHWRHLAQG

SEQ ID NO: 50724 - protein, 148 aa, Homo sapiens
MADTIFGSGNDQWVCPNDRQLALRAKLQTGWSVHTYQTEKQRRKQHLSPAEVEAILQVIQRAERLDVLEQQRIGRLVERLETMRRNVMGNGLSQCLLCGEVLGFLGSSSVFCKDCRKVWKRSGAWFYKGLPKYILPLKTPGRADDPHF

SEQ ID NO: 50725 - protein, 142 aa, Homo sapiens
MNTNPSRGPYHFRAPSRIFWRTVRGMLPHKTKRGQAALDRLKVFDGIPPPYDKKKRMVVPAALKVVRLKPTRKFAYLGRLAHEVGWKYQAVTATLEEKRKEKAKIHYRKKKQLMRLRKQAEKNVEKKIDKYTEVLKTHGLLV

SEQ ID NO: 50726 - protein, 216 aa, Homo sapiens
MVLNKKYGSYLGVNLGFGFGVTMGVHVAGRISGAHMNAAVTFANCALGRVPWRKFPVYVLGQFLGSFLAAATIYSLFYTAILHFSGGQLMVTGPVATAGIFATYLPDHMTLWRGFLNEAWLTGMLQLCLFAITDQENNPALPGTEALVIGILVVIIGVSLGMNTGYAINPSRDLPPRIFTFIAGWGKQVFRWHHLPGLHWLHHPTGAPEIGGFCGV

SEQ ID NO: 50727 - protein, 366 aa, Homo sapiens
MKKLYKTYATKEGIPKSNRSHLYNTVRLFTPCTRHKQAPGDQVTGILPSVELLFNLDRITTVEHLLKSVLLYNINNSVSFSSAVKCVCNLMIKEPKSSSRTLGRAPYSFTFNSQFEFGKKHKWIQIDVTSLLQPLVASNKRSIHMSINFTCMKDQLEHPSAQNGLFNMTLVSPSLILYLNDTSAQAYHSWYSLHYKRRPSQGPDQERSLSAYPVGEEAAEDGRSSHHRHRRGQETVSSELKKPLGPASFNLSEYFRQFLLPQNECELHDFRLSFSQLKWDNWIVAPHRYNPRYCKGDCPRAVGHRYGSPVHTMVQNIIYEKLDSSVPRPSCVPAKYSPLSVLTIEPDGSIAYKEYEDMIATKCTCR

SEQ ID NO: 50728 - protein, 471 aa, Homo sapiens
MGRESRHYRKRSASRGRSGSRSRSRSPSDKRSKRGDDRRSRSRDRDRRRERSRSRDKRRSRSRDRKRLRSRSKEKTDGGESSKEKKKDKDDKEDEKEKDAGNFDQNKLEEEMRKRKERVEKWREEQRKKAMENIGELKKEIEEMKQGKKWSLEDDDDDEDDPAEAEKEGNEMEGEELDPLDAYMEEVKEEVKKFNMRSVKGGGGNEKKSGPTVTKVVTVVTTKKAVVDSDKKKGELMENDQDAMEYSSEEEEVDLQTALTGYQTKQRKLLEPVDHGKIEYEPFRKNFYVEVPELAKMSQEEVNVFRLEMEGITVKGKGCPKPIKSWVQCGISMKILNSLKKHGYEKPTPIQTQAIPAIMSGRDLIGIAKTGSGKTIAFLLPMFRHIMDQRSLEEGEGPIAVIMTPTRELALQITKECKKFSKTLGLRVVCVYGGTGISEQIAELKRGAEIIVCTPGRMIDMLAANSGDAVR

SEQ ID NO: 50729 - protein, 697 aa, Homo sapiens
MAAETGSGKTGAFSIPVIQIVYETLKDQQEGKKGKTTIKTGASVLNKWQMNPYDRGSAFAIGSDGLCCQSREVKEWHGCRATKGLMKGKHYYEVSCHDQGLCRVGWSTMQASLDLGTDKFGFGFGGTGKKSHNKQFDNYGEEFTMHDTIGCYLDIDKGHVKFSKNGKDLGLAFEIPPHMKNQALFPACVLKNAELKFNFGEEEFKFPPKDGFVALSKAPDGYIVKSQHSGNAQVTQTKFLPNAPKALIVEPSRELAEQTLNNIKQFKKYIDNPKLRELLIIGGVAARDQLSVLENGVDIVVGTPGRLDDLVSTGKLNLSQVRFLVLDEADGLLSQGYSDFINRMHNQIPQVTSDGKRLQVIVCSATLHSFDVKKLSEKIMHFPTWVDLKGEDSVPDTVHHVVVPVNPKTDRLWERLGKSHIRTDDVHAKDNTRPGANSPEMWSEAIKILKGEYAVRAIKEHKMDQAIIFCRTKIDCDNLEQYFIQQGGGPDKKGHQFSCVCLHGDRKPHERKQNLERFKKGDVRFLICTDVAARGIDIHGVPYVINVTLPDEKQNYVHRIGRVGRAERMGLAISLVATEKEKVWYHVCSSRGKGCYNTRLKEDGGCTIWYNEMQLLSEIEEHLNCTISQVEPDIKVPVDEFDGKVTYGQKRAAGGGSYKGHVDILAPTVQELAALEKEAQTSFLHLGYLPNQLFRTF

SEQ ID NO: 50730 - protein, 342 aa, Homo sapiens
MNLKVPIYFSTGLTEKANHYYKLFIPWTNQKIRKTFVQRNMFEFKHIKAFDRAFADNPGPMVVFATPGMLHAGQSLQIFRKWAGNEKNMVIMPGYCVQGTVGHKILSGQRKLEMEGRQVLEVKMQVEYMSFSAHADAKGIMQLVGQAEPESVLLVHGEAKKMEFLKQKIEQELRVNCYMPANGETVTLPTSPSIPVGISLGLLKREMAQGLLPEAKKPRLLHGTLIMKDSNFRLVSSEQALKELGLAEHQLRFTCRVHLHDTRKEQETALRVYSHLKSVLKDHCVQHLPDGSVTVESVLLQAAAPSEDPGTKVLLVSWTYQDEELGSFLTSLLKKGLPQAPS

SEQ ID NO: 50731 - protein, 206 aa, Homo sapiens
MEPNDSTSTAVEEPDSLEVLVKTLDSQTRTFIVGAQMNVKEFKEHIAASVSIPSEKQRLIYQGRVLQDDKKLQEYNVGGKVIHLVERAPPQTHLPSGASSGTGSASATHGGGSPPGTRGPGASVHDRNANSYVMVGTFNLPSEPRVRLVMAQHMIRDIQTLLSRMECRGGPQPQHSQPPPQPPAVTPEPVALSSQTSEPVESEAPP

SEQ ID NO: 50732 - protein, 685 aa, Homo sapiens
MKPSWLQCRKVTSAGGLGGPLPGSSPARGAGAALRALVVPGPRGGLGGRGCRALSSGSGSEYKTHFAASVTDPERFWGKAAEQISWYKPWTKTLENKHSPSTRFVEGMLNICYNAVDRHIENGKGDKIAIIYDSPVTNTKATFTYKEVLEQVSKLAGVLVKHGIKKGDTVVIYMPMIPQAMYTMLACARIGAIHSLIFGGFASKELSSRIDHVKPKVVVTASFGIEPGRRVEYVPLVEEALKIGQHKPDKILIYNRPNMEAVPLAPGRDLDWDEEMAKAQSHDCVPVLSEHPLYILYTSGTTGLPKGVIRPTGGYAVMLHWSMSSIYGLQPGEVWWAASDLGWVVGHSYICYGPLLHGNTTVLYEGKPVGTPDAGAYFRVLAEHGVAALFTAPTAIRAIRQQDPGAALGKQYSLTRFKTLFVAGERCDVETLEWSKNVFRVPVLDHWWQTETGSPITASCVGLGNSKTPPPGQAGKSVPGYNVMILDDNMQKLKARCLGNIVVKLPLPPGAFSGLWKNQEAFKHLYFEKFPGYYDTMDAGYMDEEGYLYVMSRVDDVINVAGHRISAGAIEESILSHGTVADCAVVGKEDPLKGHVPLALCVLRKDINATEEQVLEEIVKHVRQNIGPVAAFRNAVFVKQLPKTRSGKIPRSALSAIVNGKPYKITSTIEDPSIFGHVEEMLKQA

SEQ ID NO: 50733 - protein, 463 aa, Homo sapiens
MDVLTALLLVHLIPVSTPKNGMSSKSRKRIMPDPVTEPPVTDPVYEALLYCNIPSVAERSMEGHAPHHFKLVSVHVFIRHGDRYPLYVIPKTKRPEIDCTLVANRKPYHPKLEAFISHMSKGSGASFESPLNSLPLYPNHPLCEMGELTQTGVVQHLQNGQLLRDIYLKKHKLLPNDWSADQLYLETTGKSRTLQSGLALLYGFLPDFDWKKIYFRHQPSALFCSGSCYCPVRNQYLEKEQRRQYLLRLKNSQLEKTYGEMAKIVDVPTKQLRAANPIDSMLCHFCHNVSFPCTRNGCVDMEHFKVIKTHQIEDERERREKKLYFGYSLLGAHPILNQTIGRMQRATEGRKEELFALYSAHDVTLSPVLSALGLSEARFPRFAARLIFELWQDREKPSEHSVRILYNGVDVTFHTSFCQDHHKRSPKPMCPLENLVRFVKRDMFVALGGSGTNYYDACHREGF

SEQ ID NO: 50734 - protein, 556 aa, Homo sapiens
GQVFFLSNDLDLYDEETDLSIQCRALNIAEDLGQIQYIFSDKTGTLTENKMVFRRCTIMGSEYSHQENAKRLETPKELDSDGEEWTQYQCLSFSARWAQDPATMRSQKGAQPLRRSQSARVPIQGHYRQRSMGHRESSQPPVAFSSSIEKDVTPDKNLLTKVRDAALWLETLSDSRPAKASLSTTSSIADFFLALTICNSVMVSTTTEPRQRVTIKPSSKALGTSLEKIQQLFQKLKLLSLSQSFSSTAPSDTDLGESLGANVATTDSDERDDASVCSGGDSTDDGGYRSSMWDQGDILESGSGTSLEEALEAPATDLARPEFCYEAESPDEAALVHAAHAYSFTLVSRTPEQVTVRLPQGTCLTFSLLCTLGFDSVRKRMSVVVRHPLTGEIVVYTKGADSVIMDLLEDPACVPDINMEKKLRKIRARTQKHLDLYARDGLRTLCIAKKVVSEEDFRRWASFRREAEASLDNRDELLMETAQHLENQLTLLGATGIEDRLQEGVPDTIATLREAGIQLWVLTGDKQETAVNIAHSCRLLNQTDTVYTINTENQVR

SEQ ID NO: 50735 - protein, 321 aa, Homo sapiens
MQEADISGYIPNGEWDLVGIPGKRSERFYECCKEPYPDVTFTVTMRRRTLYYGLNLLIPCVLISALALLVFLLPADSGEKISLGITVLLSLTVFMLLVAEIMPATSDSVPLIAQYFASTMIIVGLSVVVTVIVLQYHHHDPDGGKMPKWTRVILLNWCAWFLRMKRPGEDKVRPACQHKQRRCSLASVEMSAVAPPPASNGNLLYIGFRGLDGVHCVPTPDSGVVCGRMACSPTHDEHLLHGGQPPEGDPDLAKILEEVRYIANRFRCQDESEAVCSEWKFAACVVDRLCLMAFSVFTIICTIGILMSAPNFVEAVSKDFA

SEQ ID NO: 50736 - protein, 126 aa, Homo sapiens
MILEGGGVMNLNPGNNLLHQPPAWTDSYSTCNVSSGFFGGQWHEIHPQYWTKYQVWEWLQHLLDTNQLDANCIPFQEFDINGEHLCSMSLQEFTRAAGTAGQLLYSNLQHLKWNGDSLFLCLSLPC

SEQ ID NO: 50737 - protein, 331 aa, Homo sapiens
MAPRRARGCRTLGLPALLLLLLLRPPATRDARDRLAVLAGRSRISESFNHEVQTHEACVRLRTMENCPQCHHHRTSRQQAGITCPPPMSVEHADIWVKSYSLYSRERYICNSGFKRKAGTSSLTECVLNKATNVAHWTTPSLKCIRDPALVHQRPAPPSTVTTAGVTPQPESLSPSGKEPAASSPSSNNTAATTAAIVPGSQLMPSKSPSTGTTEISSHESSHGTPSQTTAKNWELTASASHQPPGVYPQGHSDTTVAISTSTVLLCGLSAVSLLACYLKSRWLAKRSLPGDAEAPNMSRGGRNAWEQLSRAPATSLLRTPVESALSASRP

SEQ ID NO: 50738 - protein, 38 aa, Homo sapiens
MNSRQAWRLFLSQGRGDRWVSRPRGHFSPALRRVFKPF

SEQ ID NO: 50739 - protein, 65 aa, Homo sapiens
MMERRMECGAVIMNGCIYVTGGYSYSKGTYLQSIEKYDPDLNKWEIVGNLPSAMRSHGCVCVYNV

SEQ ID NO: 50740 - protein, 177 aa, Homo sapiens
MSSRKQGSQPRGQQSAEEENFKKPTRSNMQRSKMRGASSGKKTAGPQQKNLEPALPGRWGGRSAENPPSGSVRKTRKNKQKTPGNGDGGSTSEAPQPPRKKRARADPTVESEEAFKNRMEVKVKIPEELKPWLVEDWDLVTRQKQLFQLPAKKNVDAILEEYANCKKSQGNVDNKEY

SEQ ID NO: 50741 - protein, 232 aa, Homo sapiens
MVAERTHKAAATGARGPGELGAPGTVALVAARAERGARLPSPGSCGLLTLALCSLALSLLAHFRTAELQARVLRLEAERGEQQMETAILGRVNQLLDEKWKLHSRRRREAPKTSPGCNCPPGPPGPTGRPGLPGDKGAIGMPGRVGVKGQPGEKLLPFGSSLSRSSSPYLPAPRSLSPFLSPRRGPPETLGCPSLVPAAPLVNQELEVSLDFRVPLGWTANRATQDQRATWV

SEQ ID NO: 50742 - protein, 1782 aa, Homo sapiens
MAGASVKVAVRVRPFNSREMSRDSKCIIQMSGSTTTIVNPKQPKETPKSFSFDYSYWSHTSPEDINYASQKQVYRDIGEEMLQHAFEGYNVCIFAYGQTGAGKSYTMMGKQEKDQQGIIPQLCEDLFSRINDTTNDNMSYSVEVSYMEIYCERVRDLLNPKNKGNLRVREHPLLGPYVEDLSKLAVTSYNDIQDLMDSGNKARTVAATNMNETSSRSHAVFNIIFTQKRHDAETNITTEKVSKISLVDLAGSERADSTGAKGTRLKEGANINKSLTTLGKVISALAEMDSGPNKNKKKKKTDFIPYRDSVLTWLLRENLGGNSRTAMVAALSPADINYDETLSTLRYADRAKQIRCNAVINEDPNNKLIRELKDEVTRLRDLLYAQGLGDITDMTNALVGMSPSSSLSALSSRAASVSSLHERILFAPGSEEAIERLKETEKIIAELNETWEEKLRRTEAIRMEREALLAEMGVAMREDGGTLGVFSPKKTPHLVNLNEDPLMSECLLYYIKDGITRVGREDGERRQDIVLSGHFIKEEHCVFRSDSRGGSEAVVTLEPCEGADTYVNGKKVTEPSILRSGNRIIMGKSHVFRFNHPEQARQERERTPCAETPAEPVDWAFAQRELLEKQGIDMKQEMEQRLQELEDQYRREREEATYLLEQQRLDYESKLEALQKQMDSRYYPEVNEEEEEPEDEVQWTERECELALWAFRKWKWYQFTSLRDLLWGNAIFLKEANAISVELKKKVQFQFVLLTDTLYSPLPPDLLPPEAAKDRETRPFPRTIVAVEVQDQKNGATHYWTLEKLRQRLDLMREMYDRAAEVPSSVIEDCDNVVTGGDPFYDRFPWFRLVGSSAISGCNSYPLLNTCMSERMAALTPSPTFSSPDSDATEPAEEQSVGEEEEEEEEEEDEEEEDLEDDVFPEHALCDGRDPFYDRPPLFSLVGRAFVYLSNLLYPVPLVHRVAIVSEKGEVKGFLRVAVQAISADEEAPDYGSGVRQSGTAKISFDDQHFEKFQSESCPVVGMSRSGTSQEELRIVEGQGQGADVGPSADEVNNNTCSAVPPEGLLLDSSEKAALDGPLDAALDHLRLGNTFTFRVTVLQASSISAEYADIFCQFNFIHRHDEAFSTEPLKNTGRGPPLGFYHVQNIAVEVTKSFIEYIKSQPIVFEVFGHYQQHPFPPLCKDVLSPLRPSRRHFPRVMPLSKPVPATKLSTLTRPCPGPCHCKYDLLVYFEICELEANGDYIPAVVDHRGGMPCMGTFLLHQGIQRRITVTLLHETGSHIRWKEVRELVVGRIRNTPETDESLIDPNILSLNILSSGYIHPAQDDRTFYQFEAAWDSSMHNSLLLNRVTPYREKIYMTLSAYIEMENCTQPAVVTKDFCMVFYSRDAKLPASRSIRNLFGSGSLRASESNRVTGVYELSLCHVADAGSPGMQRRRRRVLDTSVAYVRGEENLAGWRPRSDSLILDHQWELEKLSLLQEVEKTRHYLLLREKLETAQRPVPEALSPAFSEDSESHGSSSASSPLSAEGRPSPLEAPNERQRELAVKCLRLLTHTFNREYTHSHVCVSASESKLSEMSVTLLRDPSMSPLGVATLTPSSTCPSLVEGRYGATDLRTPQPCSRPASPEPELLPEADSKKLPSPARATETDKEPQRLLVPDIQEIRVSPIVSKKGYLHFLEPHTSGWARRFVVVRRPYAYMYNSDKDTVERFVLNLATAQVEYSEDQQAMLKTPNTFAVCTEHRGILLQAASDKDMHDWLYAFNPLLAGTIRSKLSRRRSAQMRV

SEQ ID NO: 50743 - protein, 265 aa, Homo sapiens
MASSAAGCVVIVGSGVIGRSWAMLFASGGFQVKLYDIEQQQIRNALENIRKEMKLLEQAGSLKGSLSVEEQLSLISGCPNIQEAVEGAMHIQVNPPYYIPLVELVPHPETAPTTVDRTHALMKKIGQCPMRVQKEVAGFVLNRLQYAIISEAWRLVEEGIVSPSDLDLVMSEGLGMRYAFIGPLETMHLNAEGMLSYCDRYSEGIKHVLQTFGPIPEFSRATAEKVNQDMCMKVPDDPEHLAARRQWRDECLMRLAKLKSQVQPQ

SEQ ID NO: 50744 - protein, 529 aa, Homo sapiens
MALQRINQELEDKLYRMGQHYEEEKRALSHEIVALNSHLLEAKVTIDKLSEDNELYRKDCNLAAQLLQCSQTYGRVHKVSELPSDFQERVSLHMEKHGCSLPSPLCHPAYADSVPTCVIAKVLEKPDPASLSSRLSDASARDLAFCDGVEKPGPRPPYKGDIYCSDTALYCPEERRRDRRPSVDAPVTDVGFLRAQNSTDSAAEEEEEAEAAAFPAGFQHEAFPSYAGSLPTSSSYSSFSATSEEKEHAQASTLTASQQAIYLNSRDELFDRKPPATTYEGSPRFAKATAAVAAPLEAEVAPGFGRTMSPYPAETFRFPASPGPQQALMPPNLWSLRAKPGTARLPGEDMRGQWRPLSVEDIGAYSYPVSAAGRASPCSFSERYYGGAGGSPGKKADGRASPLYASYKADSFSEGDDLSQGHLAEPCFLRAGGDLSLSPGRSADPLPGYAPSEGGDGDRLGVQLCGTASSPEPEQGSRDSLEPSSMEASPEMHPAARLSPQQAFPRTGGSGLSRKDSLTKAQLYGTLLN

SEQ ID NO: 50745 - protein, 176 aa, Homo sapiens
MCSTSGCDLEEIPLDDDDLNTIEFKILAYYTRHHVFKSTPALFSPKLLRTRSLSQRGLGNCSANESWTEVSWPCRNSQSSEKAINLGKKKSSWKAFFGVVEKEDSQSTPAKVSAQGQRTLEYQDSHSQQWSRCLSNVEQCLEHEAVDPKVISIANRVAEIVYSWPPPQATQAGGFK

SEQ ID NO: 50746 - protein, 497 aa, Homo sapiens [sequence omitted]

SEQ ID NO: 50747 - protein, 70 aa, Homo sapiens
MFQPLSSPDSHRKGTGFGLGIVFSLTFFKRRMWPLAFGSGMGLGMAYSNCQHDFQAPYLLHGKYVKEQEQ

SEQ ID NO: 50748 - protein, 454 aa, Homo sapiens
MAAGFGRCCRVLRSISRFHWRSQHTKANRQREPGLGFSFEFTEQQKEFQATARKFAREEIIPVAAEYDKTGEYPVPLIRRAWELGLMNTHIPENCDYSVCPLLEACTLYLDAFFLLLTGSNLNLHLNLGGLGLGTFDACLISEELAYGCTGVQTAIEGNSLGQMPIIIAGNDQQKKKYLGRMTEEPLMCAYCVTEPGAGSDVAGIKTKAEKKGDEYIINGQKMWITNGGKANWYFLLARSDPDPKAPANKAFTGFIVEADTPGIQIGRKELNMGQRCSDTRGIVFEDVKVPKENVLIGDGAGFKVAMGAFDKTRPVVAAGAVGLAQRALDEATKYALERKTFGKLLVEHQAISFMLAEMAMKVELARMSYQRAAWEVDSGRRNTYYASIAKAFAGDIANQLATDAVQILGGNGFNTEYPVEKLMRDAKIYQIYEGTSQIQRLIVAREHIDKYKN

SEQ ID NO: 50749 - protein, 221 aa, Homo sapiens
  MOD_RES (1)..(1): Any amino acid
XKKELTLKDVECKFSKMKTAYEEVTTELEEFKEAFAGAVKANNSMSKKLMKSDKKIAVISTKLFTEKQRMKYFLSTLPTRPEPELPCVENLNSIELNRKYIPKTAIRIPTSNPQTSNNCKNFLTEMELDRVEQIITGTKKSFAMLSTCSRLLSFVESTAPRKHRRALPIMRSLVPNRRTTVASTESRTNRPGGVRSPGLQLEGTSTLQWEQGPIAHPRHRC

SEQ ID NO: 50750 - protein, 103 aa, Homo sapiens
MSLGSELFRDVAIVFSQEEWQWLAPAQRDLYRDVMLETYSNLVSLGLAVSKPDVISFLEQGKEPWMVERVVSGGLCPGAKGQRGRDAGCACCKRTEQNPGQLW

SEQ ID NO: 50751 - protein, 145 aa, Homo sapiens
MRSAAKPWNPAIRAGGHGPDRVRPLPAASSGMKSSKSSTSLAFESRLSRLKRASSEDTLNKPGSTAASGVVRLKKTATAGAISELTESRLRSGTGQARWLMPVIPALWEAEVGGSRGQEMETILTNTGPLQQLNGQAFQPHGNFQ

SEQ ID NO: 50752 - protein, 261 aa, Homo sapiens
MGQPWAAGSTDGAPAQLPLVLTALWAAAVGLELAYVLVLGPGPPPLGPLARALQLALAAFQLLNLLGNVGLFLRSDPSIRGVMLAGRGLGQGWAYCYQCQSQVPPRSGHCSACRVCILRRDHHCRLLGRCVGFGNYRPFLCLLLHAAGVLLHVSVLLGPALSALLRAHTPLHMAALLLLPWLMLLTDNPCPATALTTTKRSPWCPRSILCMCLQQLSEHPRLPPAHLHREVPSTPQAQCCGNQPHAPSSLRNSDLQATCTS

SEQ ID NO: 50753 - protein, 631 aa, Homo sapiens
MRSGKASCTLETVWEDKHKYEEAERRFYEHEATQAAASAQQLPAEGPAMNGPGQDDPEDADEAEAPDGGSRRDPRKSQDSRKPLQKKRKRSPKSGLGPADLALLGLSAERVWLDKSLFDQAESSYRQKLADVAAQAAWPPALAPWGLCTHGNQVACHHVTWGIWVNKSSFDQAERAFVEWSQALLLAPDGSRRQGTPNTGQQVAVPDLAHQPSPPVNGQPPLGSLQALVREVWLEKPRYDAAERGFYEALFDGHPPGKVRLQERAGLAEGARRGRRDRRGRNILGNKRAGLRRADGEAPSALPYCYFLQKDAEAPWLSKPAYDSAECRHHAAEALRVAWCLEAASLSHRPGPRSGLSVSSLRPNRKMATNFLAHEKIWFDKFKYDDAERRFYEQMNGPVAGASRQENGASVILRDIARARENIQKSLAGSSGPGASSGTSGDHGELVVRIASLEVENQSLRGVVQELQQAISKLEARLNVLEKSSPGHRATAPQTQHVSPMRQVEPPAKKPATPAEDDEDDDIDLFGSDNEEEDKEAAQLREERLRQYAEKKAKKPALVAKSSILLDVKPWDDETDMAQLEACVRSIQLDGLVWGASKLVPVGYGIRKLQIQCVGGRQGGDRLAGGGDHQV

SEQ ID NO: 50754 - protein, 80 aa, Homo sapiens
MVGEGSIQSSRYKKESKSGLVKPGSEADFSSSSSTGSISAPEVHMSTAGSKRSSSSRNRGPHGRSNGASSHKPGSSPSSP

SEQ ID NO: 50755 - protein, 180 aa, Homo sapiens
VADDQKLMIWDTRSNNTSKPSHSVDAHTAEVNCLSFNPYSEFILATGSADKTVALWDLRNLKLKLHSFESHKDEIFQVQWSPHNETILASSGTDRRLNVWDLSKIGEEQSPEDAEDGPPELLFIHGGHTAKISDFSWNPNEPWVICSVSEDNIMQVWQMAENIYNDEDPEGSVDPEGQGS

SEQ ID NO: 50756 - protein, 72 aa, Homo sapiens
MGPGHSGQWQEEVRNHSWWWGEGASTLPLLPACATFTAWCNSHLRKAGTQIENIEEDFRDGLKLMLLLEVIS

SEQ ID NO: 50757 - protein, 961 aa, Homo sapiens
MKGLSGSRTQPPLCSGHTCGLAPPEDCEHLHHGPDARPPYLLSPADSCPGGRHRCSPRSSVHSECVMMPVVLGDHVSSSTFPRMHYSSHYDTRDDCAVAHAGAKINRIPANLLDQFEKQLPLHRDGFHTLQYQRTSAAAEQRSESPGRIRHLVHSVQKLFTKSHSLEGSSKSNANGTKADGRADDHHHAHHAKHSKRSKSKERKPEGKPRPGMSSWWSSDDNLDSDSTYRTPSVLNRHHLGPVAHCYPDALQSPFGDLSLKTSKSNNDVKCSACEGLALTPDAKYLKRSSWSTLTVSQAKEAYRKSSLNLDKPLLHQDAKPALRPCHYLQVPQDEWGGYPTGGKDEEIPCRRMRSGSYIKAMGDEESGESDSSPKTSPKSAILQEPLLKSIGQRPLGEHQTQTYLQAASDVPVGHSLDPAANYNSPKFRSRNQSYMRAVSTLSQASCVSQVSEAEINGQFESVCESVFSEVESQAMDALDLPGCFRTRSHSYLRAIQAGYSQDDECIPMMTPSDITSTIRSTAAVSYTNYKKTPPPVPPRTTSKPLISVTAQSSTESTQDAYQDSRAQRMSPWPQDSRGLYNSTDSLDSNKAMNLALETAAAQRHLPESQSSSVRTSDKAILVSKAEELLKSRCSSIGIQVETATDSDTESRGLREYHSVGVQVEDEKRHGRFKRSNSVTAAVQADLELEGFPGHITTEDKGLQFGSSFQRHSEPSTPTQYSAVRTVRTQGLFSYREDYRTQVDTSTLPPPDPWLEPAIDTVETGRMSPCRRDGSWFLKLLHAETKRMEGWCKEMEREAEENDLSEEILGKIRSAVGSAQLLMSQKFQQFYWLCQQNMDPSAMPRPTSQDLAGYWDMLQLSIEDVSMKFDELQRLRLNDWKMMESPERKEERKVPPPIPKKPPKGKFPITREKSLDLPDRQRQEARRRLMAAKRAASFRQNSASERADSIEIYIPEAQTRL

SEQ ID NO: 50758 - protein, 45 aa, Homo sapiens
  MOD_RES (1)..(1): Any amino acid
XVHKAVVEVDESGTRAAAATGTIFTFRYSLNGHCVPGTVPSAEEK

SEQ ID NO: 50759 - protein, 366 aa, Homo sapiens
MRVMAPRTLILLLSGALALTETWAGSHSMRYFYTAVSRPGRGEPHFIAVGYVDDTQFVRFDSDAASPRGEPRAPWVEQEGPEYWDRETQKYKRQAQTDRVSLRNLRGYYNQSEAGSHIIQRMYGCDVGPDGRLLRGYDQYAYDGKDYIALNEDLRSWTAADTAAQITQRKWEAAREAEQLRAYLEGLCVEWLRRYLKNGKETLQRAEHPKTHVTHHPVSDHEATLRCWALGFYPAEITLTWQWDGEDQTQDTELVETRPAGDGTFQKWAAVVVPSGEEQRYTCHVQHEGLPEPLTLRWEPSSQPTIPIVGIVAGLAVLAVLAVLGAVVAVVMCRRKSSGGKGGSCSQAASSNSAQGSDESLIACKA

SEQ ID NO: 50760 - protein, 159 aa, Homo sapiens
MLVIPPGLSEEEEALQKKFNKLKKKKKALLALKKQSSSSTTSQGGVKRSLSEQPVMDTATATEQAKQLVKSGAISAIKAETKNSGFKRSRTLEGKLKDPEKGPVPTFQPFQRSISADDDLQESSRRPQRKSLYESFVSSSDRLRELGPDGEEAEGPGAG

SEQ ID NO: 50761 - protein, 188 aa, Homo sapiens
MDSLDHMLTDPLELGPCGDGHGTRIMEDCLLGGTRVSLPEDLLEDPEIFFDVVSLSTWQEVLSDSQREHLQQFLPQFPEDSAEQQNELILALFSGENFRFGNPLHIAQKLFRDGHFNPEVVKYRQLCFKSQYKRYLNSQQQYFHRLLKQILASRSDLLEMARRSGPALPFRQKRPSPSRTPEEREWRT

SEQ ID NO: 50762 - protein, 32 aa, Homo sapiens
  MOD_RES (1)..(1): Any amino acid
XRKIHEDELNDMKDYLSQCQQEQESFIDYKST

SEQ ID NO: 50763 - protein, 416 aa, Homo sapiens
MSPSHVVVNVSTARSGPLTTSSAPVSRAESLRPGSRSCTMSMSPTVIILACLGFFLDQSVWAHVGGQDKPFCSAWPSAVVPQGGHVTLRCHYRRGFNIFTLYKKDGVPVPELYNRIFWNSFLISPVTPAHAGTYRCRGFHPHSPTEWSAPSNPLVIMVTGLYEKPSLTARPGPTVRAGENVTLSCSSQSSFDIYHLSREGEAHELRLPAVPSINGTFQADFPLGPATHGETYRCFGSFHGSPYEWSDPSDPLPVSVTGNPSSSWPSPTEPSFKTGIARHLHAVIRYSVAIILFTILPFFLLHRWCSKKKDAAVMNQEPAGHRTVNREDSDEQDPQEVTYAQLDHCIFTQRKITGPSQRSKRPSTDTSVCIELPNAEPRALSPAHEHHSQALMGSSRETTALSQTQLASSNVPAAGI

SEQ ID NO: 50764 - protein, 191 aa, Homo sapiens
MASGCKIGPSILNSDLANLGAECLRMLDSGADYLHLDVMDGHFVPNITFGHPVVESLRKQLGQDPFFDMHMMVSKPEQWVKPMAVAGANQYTFHLEATENPGALIKDIRENGMKVGLAIKPGTSVEYLAPWANQIDMALVMTVEPGFGGQKFMEDMMPKVHWLRTQFPSLDIEVDGGVGPDTVHKCAEELT

SEQ ID NO: 50765 - protein, 79 aa, Homo sapiens
MASDEGKLFVGGLSFDTNEQSLEQVFSKYGQISEVCRWTADPSRPGRQVVRQPIPWVPWWLCRGPGLLPWGPRTGPWVL

SEQ ID NO: 50766 - protein, 515 aa, Homo sapiens
MGLEALVPLAMIVAIFLLLVDLMHRHQRWAARYPPGPLPLPGLGNLLHVDFQNTPYCFDQLRRRFGDVFSLQLAWTPVVVLNGLAAVREAMVTRGEDTADRPPAPIYQVLGFGPRSQGVILSRYGPAWREQRRFSVSTLRNLGLGKKSLEQWVTEEAACLCAAFADQAGRPFRPNGLLDKAVSNVIASLTCGRRFEYDDPRFLRLLDLAQEGLKEESGFLREVLNAVPVLPHIPALAGKVLRFQKAFLTQLDELLTEHRMTWDPAQPPRDLTEAFLAKKEKAKGSPESSFNDENLRIVVGNLFLAGMVTTSTTLAWGLLLMILHLDVQRGRRVSPGCPIVGTHVCPVRVQQEIDDVIGQVRRPEMGDQAHMPCTTAVIHEVQRFGDIIPLSVTHMTSRDIEVQGFRIPKGTTLITNLSSVLKDEAVWKKPFRFHPEHFLDAQGHFVKPEAFLPFSAGRRACLGEPLARMELFLFFTSLLQHFSFSVAAGQPRPSHSRVVSFLVTPSPYELCAVPR

SEQ ID NO: 50767 - protein, 49 aa, Homo sapiens
MLGLRPPLLALVGLLSLGCVLSQECTKFKVSSCRECIESGPGCTWCQKL

SEQ ID NO: 50768 - protein, 56 aa, Homo sapiens
  MOD_RES (1)..(1): Any amino acid
XEIDAVGKKRSTTMSGFSNTEEEQTLNQLLVEMDVFYAEIEELKLVYPYHGVLHSD

SEQ ID NO: 50769 - protein, 867 aa, Homo sapiens
MVVSAGHWSSEKAEMNILEINETLRPQLPENKQQLRNLKEKCFLTQLAGFLANRQKKYKYEECKDLIKFMLRNERQFKEEKLAEQLKQAEELRQYKVLVHSQERELTQLKEKLREGRDASRSLNEHLQALLTPDEPDKSQGQDLQEQLAEGCRLAQHLVQKLSPENDEDEDEDVQVEEDEKVLESSAPREVQKTEESKVPEDSLEECAITCSNSHGPCDSNQPHKNIKITFEEDEVNSTLVVDRESSHDECQDALNILPVPGPTSSATNVSMVVSAGPLSGEKAAINILEINEKLRPQLAEKKQQFRNLKEKCFLTQLAGFLANQQNKYKYEECKDLIKSMLRNERQFKEEKLAEQLKQAEELRQYKVLVHAQERELTQLREKLREGRDASRSLNEHLQALLTPDEPDKSQGQDLQEQLAEGCRLAQHLVQKLSPENDNDDDEDVQVEVAEKVQKSSAPREMQKAEEKEVPEDSLEECAITCSNSHGPYDCNQPHRKTKITFEEDKVDSTLIGSSSHVEWEDAVHIIPENESDDEEEEEKGPVSPRNLQESEEEEVPQESWDEGYSTLSIPPEMLASYKSYSSTFHSLEEQQVCMAVDIGRHRWDQVKKEDHEATGPRLSRELLDEKEPEVLQDSLGRCYSTPSGYLELPDLGQPYSSAVYSLEEQYLGLALDVDRIKKDQEEEEDQGPPCPRLSRELLEVVEPEVLQDSLDRCYSTPSSCLEQPDSCQPYGSSFYALEEKHVGFSLDVGEIEKKGKGKKRRGRRSKKERRRGRKEGEEDQNPPCPRLNSMLMEVEEPEVLQDSLDICYSTPSMYFELPDSFQHYRSVFYSFEEEHISFALYVDNRFFTLTVTSLHLVFQMGVIFPQ

SEQ ID NO: 50770 - protein, 448 aa, Homo sapiens
MIPTLTALLCLGLSLGPRTHMQAGPLPKPTLWAEPGSVISWGNSVTIWCQGTLEAREYRLDKEESPAPWDRQNPLEPKNKARFSIPSMTEDYAGRYRCYYRSPVGWSQPSDPLELVMTGAYSKPTLSALPSPLVTSGKSVTLLCQSRSPMDTFLLIKERAAHPLLHLRSEHGAQQHQAEFPMSPVTSVHGGTYRCFSSHGFSHYLLSHPSDPLELIVSGSLEGPRPSPTRSVSTAAGPEDQPLMPTGSVPHSGLRRHWEVLIGVLVVSILLLSLLLFLLLQHWRQGKHRTLAQRQADFQRPPGAAEPEPKDGGLQRRSSPAADVQGENFSGAAVKNTQPEDGVEMDTRSPHDEDPQAVTYAKVKHSRPRREMASPPSPLSGEFLDTKDRQAEEDRQMDTEAAASEAPQDVTYARLHSFTLRQKATEPPPSQEGASPAEPSVYATLAIH

SEQ ID NO: 50771 - protein, 38 aa, Homo sapiens
MSALLSLCFVLPLAAPGHGTQGWEPCTACSSLKAWAEC

SEQ ID NO: 50772 - protein, 143 aa, Homo sapiens
  MOD_RES (1)..(1): Any amino acid
XFCVAFAYWAGSVHTALVFLGLNAGGKGSPKNVESFASMLRHSPLTQMGPAKDKLVIGRIFHIVENDLYIDFGGKFHCVCRRPEVDGEKYQKGTRVRLRLLDLELTSRFLGATTDTTVLEANAVLLGIQESKDSRSKEEHHEK

SEQ ID NO: 50773 - protein, 325 aa, Homo sapiens
MSFLRWVSEKFIVEGLRDLELFGEQPPGDTRRKTNDASSESIASFSKQEVMSSFLPEGGCYELLTVIGKGFEDLMTVNLARYKPTGEYVTVRRINLEACSNEMVTFLQGELHVSKLFNHPNIVPYRATFIADNELWVVTSFMAYGSAKDLICTHFMDGMNELAIAYILQGVLKALDYIHHMGYVHRSVKASHILISVDGKVYLSGLRSNLSMISHGQRQRVVHDFPKYSVKVLPWLSPEVLQQNLQGYDAKSDIYSVGITACELANGHVPFKDMPATQMLLEKLNGTVPCLLDTSTIPAEELTMSPSRSVANSGLSDSLTTSTPR

SEQ ID NO: 50774 - protein, 351 aa, Homo sapiens
MVLSQDGSVQSGFLAEGHLDGQPFLRYDRQKRRAKPQGQWAENVLGAKTWDTETEDLTENGQDLRRTLTHIKDQKGGLHSLQEIRVCEIHEDSSTRGSRHFYYDGELFLSQNLETQESTVPQSSRAQTLAMNVTNFWKEDAMKTKTHYRAMQADCLQKLQRYLKSGVAIRRTVPPMVNVTCSEVSEGNITVTCRASSFYPRNITLTWRQDGVSLSHNTQQWGDVLPDGNGTYQTWVATRIRQGEEQRFTCYMEHSGNHGTHPVPSGKALVLQSQRTDFPYVSAAMPCFVIIIILCVPCCKKKTSAAEGPELVSLQVLDQHPVGTGDHRDAAQLGFQPLMSATGSTGSTEGT

SEQ ID NO: 50775 - protein, 170 aa, Homo sapiens
MKSRIPVVLLACGSFNPITNMHLRMFEVARDHLHQTGMYQVIQGIISPVNDTYGKKDLAASHHRVAMARLALQTSDWIRVDPWESEQAQWMETVKVLRHHHSKLLRSPPQMEGPDHGKALFSTPAGILKRILQTLFEHLTGTDSGLRLRTETASPSPHLKLETGYEWSCA

SEQ ID NO: 50776 - protein, 240 aa, Homo sapiens
MGPLPAPSCTQRITWKGLLLTASLLNFWNPPTTAEVTIEAQPPKVSEGKDVLLLVHNLPQNLPGYFWYKGEMTDLYHYIISYIVDGKIIIYGPAYSGRETVYSNASLLIQNVTRKDAGTYTLHIIKRGDETREEIRHFTFTLYYGPDLPRIYPSFTYYRSGENLDLSCFTESNPPAEYFWTINGKFQQSGQKLFIPQITRNHSGLYACSVHNSATGKEISKSMTVKVSGPCHGDLTESQS

SEQ ID NO: 50777 - protein, 137 aa, Homo sapiens
  MOD_RES (1)..(1): Any amino acid
XVKRKADTTTPTPTAILAPGSPASPPGSLEPKAARLPPMRRESGRPIKPPRKDLPDSQQQHQSSKKGKLSEQLKHCNGILKELLSKKHAAYAWPFYKPVDASALGLHDYHDIIKHPMDLSTVKLLMLPPSAAEDGEP

SEQ ID NO: 50778 - protein, 2614 aa, Homo sapiens [sequence omitted]

SEQ ID NO: 50779 - protein, 159 aa, Homo sapiens
MRPGGFLGAGQRLSRAMSRCVLEPRPPGKRWMVSGVGRRRRGSRSLASVRPLCPGSRVPPNCCSVFLTGLAWTHRQQQQHHHHHHHHHHHHHHHHHHQWLSPHCASWEPGSASRLHGHYRREQSHLSGSCGKRPRVDLTQAPHDWRGSICKDGALQCLR

SEQ ID NO: 50780 - protein, 211 aa, Homo sapiens
MVEMHKNMVISLDYPRQVPVCGGDGEGATMLLHKSQDSWGMRIQHFGPRTWKERSFGRGAQLPALGELSHRRGGAPALRVAFLHRPALGASLLGGLRLLEPLPQLHLPVFLLSPALPPQLRPQCRGEPRVASAHLCLLLRGLHHPRKCFHCVHCLIPRAHAPHLHSLAVDQEAHSKSGGSQVLQLETAALHHQLHLLLLGAGCLLSAQHVL

SEQ ID NO: 50781 - protein, 2299 aa, Homo sapiens
MDFLIIFLLLFIGTSETQVDVSNVVPGTRYDITISSISTTYTSPVTRIVTTNVTKPGPPVFLAGERVGSAGILLSWNTPPNPNGRIISYIVKYKEVCPWMQTVYTQVRSKPDSLEVLLTNLNPGTTYEIKVAAENSAGIGVFSDPFLFQTAESAPGKVVNLTVEAYNASAVKLIWYLPRQPNGKITSFKISVKHARSGIVVKDVSIRVEDILTGKLPECNENSESFLWSTASPSPTLGRVTPPSRTTHSSSTLTQNEISSVWKEPISFVVTHLRPYTTYLFEVSAATTEAGYIDSTIVRTPESVPEGPPQNCVTGNITGKSFSILWDPPTIVTGKFSYRVELYGPSGRILDNSTKDLKFAFTNLTPFTMYDVYIAAETSAGTGPKSNISVFTPPDVPGAVFDLQLAEVESTQVRITWKKPRQPNGIINQYRVKVLVPETGIILENTLLTGNNEYINDPMAPEIVNIVEPMVGLYEGSAEMSSDLHSLATFIYNSHPDKNFPARNRAEDQTSPVVTTRNQYITDIAAEQLSYVIRRLVPFTEHMISVSAFTIMGEGPPTVLSVRTRQQVPSSIKIINYKNISSSSILLYWDPPEYPNGKITHYTIYAMELDTNRAFQITTIDNSFLITGLKKYTKYKMRVAASTHVGESSLSEENDIFVRTSEDEPESSPQDVEVIDVTADEIRLKWSPPEKPNGIIIAYEVLYKNIDTLYMKNTSTTDIILRNLRPHTLYNISVRSYTRFGHGNQVSSLLSVRTSETVPDSAPENITYKNISSGEIELSFLPPSSPNGIIQKYTIYLKRSNGNEERTINTTSLTQNIKVLKKYTQYIIEVSASTLKGEGVRSAPISILTEEDAPDSPPQDFSVKQLSGVTVKLSWQPPLEPNGIILYYTVYVWNRSSLKTINVTETSLELSDLDYNVEYSAYVTASTRFGDGKTRSNIISFQTPEGAPSDPPKDVYYANLSSSSIILFWTPPSKPNGIIQYYSVYYRNTSGTFMQNFTLHEVTNDFDNMTVSTIIDKLTIFSYYTFWLTASTSVGNGNKSSDIIEVYTDQDIPEGFVGNLTYESISSTAINVSWVPPAQPNGLVFYYVSLILQQTPRHVRPPLVTYERSIYFDNLEKYTDYILKITPSTEKGFSDTYTAQLYIKTEEDVPETSPIINTFKNLSSTSVLLSWDPPVKPNGAIISYDLTLQGPNENYSFITSDNYIILEELSPFTLYSFFAAARTRKGLGPSSILFFYTDESVPLAPPQNLTLINCTSDFVWLKWSPSPLPGGIVKVYSFKIHEHETDTIYYKNISGFKTEAKLVGLEPVSTYSIRVSAFTKVGNGNQFSNVVKFTTQESVPDVVQNMQCMATSWQSVLVKWDPPKKANGIITQYMVTVERNSTKVSPQDHMYTFIKLLANTSYVFKVRASTSAGEGDESTCHVSTLPETVPSVPTNIAFSDVQSTSATLTWIRPDTILGYFQNYKITTQLRAQKCKEWESEECVEYQKIQYLYEAHLTEETVYGLKKFRWYRFQVAASTNAGYGNASNWISTKTLPGPPDGPPENVHVVATSPFSISISWSEPAVITGPTCYLIDVKSVDNDEFNISFIKSNEENKTIEIKDLEIFTRYSVVITAFTGNISAAYVEGKSSAEMIVTTLESAPKDPPNNMTFQKIPDEVTKFQLTFLPPSQPNGNIQVYQALVYREDDPTAVQIHNLSIIQKTNTFVIAMLEGLKGGHTYNISVYAVNSAGAGPKVPMRITMDIKAPARPKTKPTPIYDATGKLLVTSTTITIRMPICYYSDDHGPIKNVQVLVTETGAQHDGNVTKWYDAYFNKARPYFTNEGFPNPPCTEGKTKFSGNEEIYIIGADNACMIPGNEDKICNGPLKPKKQYLFKFRATNIMGQFTDSDYSDPVKTLGEGLSERTVEIILSVTLCILSIILLGTAIFAFARIRQKQKEGGTYSPQDAEIIDTKLKLDQLITVADLELKDERLTRLLSYRKSIKPISKKSFLQHVEELCTNNNLKFQEEFSELPKFLQDLSSTDADLPWNRAKNRFPNIKPYNNNRVKLIADASVPGSDYINASYISGYLCPNEFIATQGPLPGTVGDFWRMVWETRAKTLVMLTQCFEKGRIRCHQYWPEDNKPVTVFGDIVITKLMEDVQIDWTIRDLKIERHGDCMTVRQCNFTAWPEHGVPENSAPLIHFVKLVRASRAHDTTPMIVHCSAGVGRTGVFIALDHLTQHINDHDFVDIYGLVAELRSERMCMVQNLAQYIFLHQCILDLLSNKGSNQPICFVNYSALQKMDSLDAMEGDVELEWEETTM

SEQ ID NO: 50782 - protein, 106 aa, Homo sapiens
MAKHIQKEIQRGVESWVSLGNRRPHLSIILVGDNPASHTYVRNKIRAASAVGICSELILKPKDVSQEELLDVTDQLNMDPRVSGILVQLPLPEAVQLCSGFEMLGI

SEQ ID NO: 50783 - protein, 165 aa, Homo sapiens
MISREAADQLLIVAEGSYLIRESQRQPGTYTLALRFGSQTRNFRLYYDGKHFVGEKRFESIHDLVTDGLITLYIETKAAEYIAKMTINPIYEHVGYTTLNREPAYKKHMPVLKETHDERDSTGQDGVSEKRLTSLVRRATLKENEQIPKYEKIHNFKVHTFRGPH

SEQ ID NO: 50784 - protein, 918 aa, Homo sapiens
MTTESGSDSESKPDQEAEPQEAAGAQGRAGAPVPEPPKEEQQQALEQFAAAAAHSTPVRREVTDKEQEFAARAAKQLEYQQLEDDKLSQKSSSSKLSRSPLKIVKKPKSMQCKVILLDGSEYTCDVEKRSRGQVLFDKVCEHLNLLEKDYFGLTYRDAENQKNWLDPAKEIKKQVRSGAWHFSFNVKFYPPDPAQLSEDITRYYLCLQLRDDIVSGRLPCSFVTLALLGSYTVQSELGDYDPDECGSDYISEFRFAPNHTKELEDKVIELHKSHRGMTPAEAEMHFLENAKKLSMYGVDLHHAKDSEGVEIMLGVCASGLLIYRDRLRINRFAWPKVLKISYKRNNFYIKIRPGEFEQFESTIGFKLPNHRAAKRLWKVCVEHHTFFRLLLPEAPPKKFLTLGSKFRYSGRTQAQTRRASALIDRPAPYFERSSSKRYTMSRSLDGASVNENHEIYMKDSMSAAEVGTGQYATTKGISQTNLITTVTPEKKAEEERDEEEDKRRKGEEVTPISAIRHEGKTDSERTDTAADGETTATESDQEEDAELKAQELEKTQDDLMKHQTNISELKRTFLETSTDTAVTNEWEKRLSTSPVRLAARQEDAPMIEPLVPEETKQSSGEKLMDGSEIFSLLESARKPTEFIGGVTSTSQSWVQKMETKTESSGIETEPTVHHLPLSTEKVVQETVLVEERRVVHASGDASYSAGDSGDAAAQPAFTGIKGKEGSALTEGAKEEGGEEVAKAVLEQEETAAASRERQEEQSAAIHISETLEQKPHFESSTVKTETISFGSVSPGGVKLEISTKEVPVVHTETKTITYESSQVDPGTDLEPGVLMSAQTITSETTSTTTTTHITKTVKGGISETRIEKRIVITGDADIDHDQALAQAIKEAKEQHPDMSVTKVVVHKETEITPEDGED

SEQ ID NO: 50785 - protein, 41 aa, Homo sapiens
MPSEGRCWETLKALRSSDKGRLCYYRDWLLRREAGCGDSCP

SEQ ID NO: 50786 - protein, 101 aa, Homo sapiens
  MOD_RES (1)..(1): Any amino acid
XERDSLKETIEELRCVQAQEGQLTTQGLMPLGSQESSDSLAAEIVTPEIREKLIRLQHENKMLKLNQEGSDNEKIALLQSLLDDANLRKNELETENRYLCP

SEQ ID NO: 50787 - protein, 92 aa, Homo sapiens
MRNWLVLLCPCVLGAALHLWLRLRSPPPACASGAGPADQLALFPQWKSTHYDVVVGVLSARNNHELRNVIRSTWMRHLLQHPTLSQRFESGN

SEQ ID NO: 50788 - protein, 799 aa, Homo sapiens
MPPATGGGLAESELRPRRGRCGPQAARAAGRDVAAEAVARSPKRPAWGSRRFEAVGWWALLALVTLLSFATRFHRLDEPPHICWDETHFGKMGSYYINRTFFFDVHPPLGKMLIGLAGYLSGYDGTFLFQKPGDKYEHHSYMGMRGFCAFLGSWLVPFAYLTVLDLSKSLSAALLTAALLTFDTGCLTLSQYILLDPILMFFIMAAMLSMVKYNSCADRPFSAPWWFWLSLTGVSLAGALGVKFVGLFIILQVGLNTIADLWYLFGDLSLSLVTVGKHLTARVLCLIVLPLALYTATFAVHFMVLSKSGPGDGFFSSAFQARLSGNNLHNASIPEHLAYGSVITVKNLRMAIGYLHSHRHLYPEGIGARQQQVTTYLHKDYNNLWIIKKHNTNSDPLDPSFPVEFVRHGDIIRLEHKETSRNLHSHYHEAPMTRKHYQVTGYGINGTGDSNDFWRIEVVNRKFGNRIKVLRSRIRFIHLVTGCVLGSSGKVLPKWGWEQLEVTCTPYLKETLNSIWNVEDHINPKLPNISLDVLQPSFPEILLESHMVMIRGNSGLKPKDNEFTSKPWHWPINYQGLRFSGVNDTDFRVYLLGNPVVWWLNLLSIALYLLSGSIIAVAMQRGARLPAEVAGNNPQVPSAVLNTLLPPNNTRALAIMTPILWIRKPRNHEIKKLAPGHTARLSQVLLRGGGQVLLGWTLHYFPFFLMGRVLYFHHYFPAMLFSSMLTGILWDTLLRLCAWGLASWPLARGIHVAGILSLLLGTAYSFYLFHPLAYGMVGPLAQDPQSPMAGLRWLDSWDF

SEQ ID NO: 50789 - protein, 389 aa, Homo sapiens
RYFRVILLLLLALTLLLLAGFLHSDLELDTPLFGGQAEGPPVTNIMFLKTHKTASSTVLNILYRFAETHNLSVALPAGSRVHLGYPWLFLARYVEGVGSQQRFNIMCNHLRFNLPQVQKVMPNDTFYFSILRNPVFQLESSFIYYKTYAPAFRGAPSLDAFLASPRTFYNDSRHLRNVYAKNNMWFDFGFDPNAQCEEGYVRARIAEVERRFRLVLIAEHLDESLVLLRRRLRWALDDVVAFRLNSRSARSVARLSPETRERARSWCALDWRLYEHFNRTLWAQLRAELGPRRLRGEVERLRARRRELASLCLQDGGALKNHTQIRDPRLRPYQSGKADILGYNLRPGLDNQTLGVCQRLVMPELQYMARLYALQFPEKPLKNIPFLGA

SEQ ID NO: 50790 - protein, 430 aa, Homo sapiens
MGQFLSSTFLEGSPATVWHDKLCDGERRGAREAVRIFQDQAKAKEEKLEKCGEDDETIPSEYRLKPATDKDGKPLLPEPEEKPKPRSESELIDELSEDFDRSECKEKPSKPTEKTEESKAAAPAPVSEAVCRTSMCSIQSAPPEPATLKGTVPDDAVEALADSLGKKEADPEDGKPVMDKVKEKAKEEDREKLGEKEETIPPDYRLEEVKDKDGKPLLPKESKEQLPPMSEDFLLDALSEDFSGPQNASSLKFEDAKLAAAISEVVSQTPASTTQAGAPPRDTSSDKDLDDALDKLSDSLGQRQPDPDENKPMEDKVKEKAKAEHRDKLGERDDTIPPEYRHLLDDNGQDKPVKPPTKKSEDSKKPADDQDPIDALSGDLDSCPSTTETSQNTAKDKCKKAASSSKAPKNGGKAKDSAKTTEETSKPKDD

SEQ ID NO: 50791 - protein, 99 aa, Homo sapiens
MLRKARRKLIYEKAKHYHKEYRQMYRTEIRMARMARKAGNFYVPAEPKLAFVIRIRGINGVSPKVRKVLQLLRLRQIFNGTFVKLNKASINMLRIVEPY

SEQ ID NO: 50792 - protein, 695 aa, Homo sapiens
MTELKAKGPRAPHVAGGPPSPEVGSPLLCRPAAGPFPGSQTSDTLPEVSAIPISLDGLLFPRPCQGQDPSDEKTQDQQSLSDVEGAYSRAEATRGAGGSSSSPPEKDSGLLDSVLDTLLAPSGPGQSQPSPPACEVTSSWCLFGPELPEDPPAAPATQRVLSPLMSRSGCKVGDSSGTAAAHKVLPRGLSPARQLLLPASESPHWSGAPVKPSPQAAAVEVEEEDGSESEESAGPLLKGKPRALGGAAAGGGAAAVPPGAAAGGVALVPKEDSRFSAPRVALVEQDAPMAPGRSPLATTVMDFIHVPILPLNHALLAARTRQLLEDESYDGGAGAASAFAPPRSSPCASSTPVAVGDFPDCAYPPDAEPKDDAYPLYSDFQPPALKIKEEEEGAEASARSPRSYLVAGANPAAFPDFPLGPPPPLPPRATPSRPGEAAVTAAPASASVSSASSSGSTLECILYKAEGAPPQQGPFAPPPCKAPGASGCLLPRDGLPSTSASAAAAGAAPALYPALGLNGLPQLGYQAAVLKEGLPQVYPPYLNYLRPDSEASQSPQYSFESLPQKICLICGDEASGCHYGVLTCGSCKVFFKRAMEGQHNYLCAGRNDCIVDKIRRKNCPACRLRKCCQAGMVLGGFRNLHIDDQITLIQYSWMSLMVFGLGWRSYKHVSGQMLYFAPDLILNDSFGRATKSNPV

SEQ ID NO: 50793 - protein, 164 aa, Homo sapiens
MRAYWPDVIHSFPNRSRFWKHEWEKHGTCAAQVDALNSQKKYFGRSLELYRELDLNSVLLKLGIKPSINYYQVADFKDALARVYGVIPKIQCLPPSQDEEVQTIGQIELCLTKQDQQLQNCTEPGEQPSPKQEVWLANGAAESRGLRVCEDGPVFYPPPKKTKH

SEQ ID NO: 50794 - protein, 1446 aa, Homo sapiens
  MOD_RES (1)..(1): Any amino acid
XLRPGIFLLELLLLLGQGTPQIHTSPRKSTLEGQLWPETLKNSPFPCNPNKLGVNMPSKSVHSLKPSDIKFVAAIGNLEIPPDPGTGDLEKQDWTERPQQVCMGVMTVLSDIIRYFSPSVPMPVCHTGKRVIPHDGAEDLWIQAQELVRNMKENLQLDFQFDWKLINVFFSNASQCYLCPSAQQAPSLSTVLLSQNGLAAGGVDELMGVLDYLQQEVPRAFVNLVDLSEVAEVSRQYHGTWLSPAPEPCNCSEETTRLAKVVMQWSYQEAWNSLLASSRYSEQESFTVVFQPFFYETTPSLHSEDPRLQDSTTLAWHLWNRMMEPAGEKDEPLSVKHGRPMKCPSQESPYLFSYRNSNYLTRLQKPQDKLEVREGAEIRCPDKDPSDTVPTSVHRLKPADINVIGALGDSLTAGNGAGSTPGNVLDVLTQYRGLSWSVGGDENIGTVTTLANILREFNPSLKGFSVGTGKETSPNAFLNQAVAGGRAEDLPVQARRLVDLMKNDTRIHFQEDWKIITLFIGGNDLCDFCNDLVPRAFVNLVTVLEIVNLRELYQEKKVYCPRMILRSLCPCVLKFDDNSTELATLIEFNKKFQEKTHQLIESGRYDTREDFTVVVQPFFENVDMPKTSEGLPDNSFFAPDCFHFSSKSHSRAASALWNNMLEPVGQKTTRHKFENKINITCPNQVQPFLRTYKNSMQGHGTWLPCRDRAPSALHPTSVHALRPADIQVVAALGDSLTAGNGIGSKPDDLPDVTTQYRGLSYSAGGDGSLENVTTLPNILREFNRNLTGYAVGTGDANDTNAFLNQAVPGAKAEDLMSQVQTLMQKMKDDHRVNFHEDWKVITVLIGGSDLCDYCTDSNLYSAANFVHHLRNALDVLHREVPRVLVNLVDFLNPTIMRQVFLGNPDKCPVQQASVLCNCVLTLRENSQELARLEAFSRAYRSSMRELVGSGRYDTQEDFSVVLQPFFQNIQLPVLADGLPDTSFFAPDCIHPNQKFHSQLARALWTNMLEPLGSKTETLDLRAEMPITCPTQNEPFLRTPRNSNYTYPIKPAIENWGSDFLCTEWKASNSVPTSVHQLRPADIKVVAALGDSLTTAVGARPNNSSDLPTSWRGLSWSIGGDGNLETHTTLPNILKKFNPYLLGFSTSTWEGTAGLNVAAEGARARDMPAQAWDLVERMKNSPDINLEKDWKLVTLFIGVNDLCHYCENPEAHLATEYVQHIQQALDILSEELPRAFVNVVEVMELASLYQGQGGKCAMLAAQNNCTCLRHSQSSLEKQELKKVNWNLQHGISSFSYWHQYTQREDFAVVVQPFFQNTLTPLNERGDTDLTFFSEDCFHFSDRGHAEMAIALWNNMLEPVGRKTTSNNFTHSRAKLKCPSPESPYLYTLRNSRLLPDQAEEAPEVLYWAVPVAAGVGLVVGIIGTVVWRCRRGGRREDPPMSLRTVAL

SEQ ID NO: 50795 - protein, 130 aa, Homo sapiens
MSVLGRLGTFETQILQRAPLRSFTETPAYFASKDGISKDGSGDGNKKSASEGSSKKSGSGNSGKGGNQLRCPKCGDLCTHVETFVSSTRFVKCEKCHHFFVVLSEADSKKSIIKEPESAAEAVKLAFQQK

SEQ ID NO: 50796 - protein, 254 aa, Homo sapiens
MASAGSTARRAGSGSWHSERGEGRGARPQPTPSGSMQQANKVSLKATWTDAESKQPSPSKESDQTAIDQTAIGSYYQLFAAAVGNVEWLRFCLNQSLREIPTDDKGFTAIHFAAQWGKLACLQVLVEEYKFPVDLLTNNSQTPLHLVIHRDNTTVALPCIYYLLEKGADLNAFLKDAMWKKDKKDFAREMTKMKMFKSQLTLMEHNYLIEYQGQGCSVHFPFAFSPITPETLLWQDISLLSDCGFLWRRRELSF

SEQ ID NO: 50797 - protein, 78 aa, Homo sapiens
MRLLRRRHMPLRLAMVGCAFVLFLFLLHRDVSSREEATEKPWLKSLVSRKDHVLDLMLEAMNNLRDSMPKLQIRAPEA

SEQ ID NO: 50798 - protein, 84 aa, Homo sapiens
MAAAMETEQLGVEIFETADCEENIESQDRPKLEPFYVERYSWSQLKKLLADTRKYHGYMMAKAPHDFMFVKRNDPDGPHSDRIY

SEQ ID NO: 50799 - protein, 464 aa, Homo sapiens
MLRRALLCLAVAALVRADAPEEEDHVLVLRKSNFAEALAAHKYLLVEFYAPWCGHCKALAPEYAKAAGKLKAEGSEIRLAKVDATEESDLAQQYGVRGYPTIKFFRNGDTASPKEYTGDVESDSAKQFLQAAEAIDDIPFGITSNSDVFSKYQLDKDGVVLFKKFDEGRNNFEGEVTKENLLDFIKHNQLPLVIEFTEQTAPKIFGGEIKTHILLFLPKSVSDYDGKLSNFKTAAESFKGKILFIFIDSDHTDNQRILEFFGLKKEECPAVRLITLEEEMTKYKPESEELTAERITEFCHRFLEGKIKPHLMSQELPEDWDKQPVKVLVGKNFEDVAFDEKKNVFVEFYAPWCGHCKQLAPIWDKLGETYKDHENIVIAKMDSTANEVEAVKVHSFPTLKFFPASADRTVIDYNGERTLDGFKKFLESGGQDGAGDDDDLEDLEEAEEPDMEEDDDQKAVKDEL

SEQ ID NO: 50800 - protein, 96 aa, Homo sapiens
  MOD_RES (1)..(1): Any amino acid
XINKMTDKLKTHVKARTAQLAKIKWVISVAFYVLQAALMISLIWKYYSVPVAVVPSKWITPLDRLVAFPTRVAGDDGLIEFTTVTLESPKAWLVEA

SEQ ID NO: 50801 - protein, 345 aa, Homo sapiens
MPGISARGLSHEGRKQLAVNLTRVLALYRSILDAYIIEFFTDNLWDTLPCSWQEALDGLKPPQLATMLLGMPGEGEVVRYRSVWPLTLLALKSTACALAFTRMPGFQTPSEFLENPSQSSRLTAPFRKHVRPKKQHEIRRLGEGHLSRFMALGLGLMVKSIEGDQRLVERAQRLDQELLQALEKEEKRNPQVVQTSPRHSPHHVVRWVDPTALCEELLLPLENPCQGRARLLLTGLHACGDLSVALLRHFSCCPEVVALASVGCCYMKLSDPGGYPLSQWVAGLPGYELPYRLREGACHALEEYAERLQKAGPGLRTHCYRAALETVIRRARPELRRPGVQGIPR

SEQ ID NO: 50802 - protein, 99 aa, Homo sapiens
  MOD_RES (1)..(1): Any amino acid
XNQFWAIRGNEVRAGYPRGIHTLGFPPTVRKIDAAISDKEKNKTYFFVEDKYWRFDEKRNSMEPGFPKQIAEDFPGIDSKIDAVFEEFDRAGTECCLHS

SEQ ID NO: 50803 - protein, 334 aa, Homo sapiens
MLETLRERLLSVQQDFTSGLKTLSDKSREAKVKSKPRYEDTWAALHRRAKDCASAGELVDSEVVMLSAHWEKKKTSLVELQEQLQQLPALIADLESMTANLTHLEASFEEVENNLLHLEDLCGQCELERCKHMQSQQLENYKKNKRKELETFKAELDAEHAQKVLEMEHTQQMKLKERQKFFEEAFQQDMEQYLSTGYLQIAERREPIGSMSSMEVNVDMLEQMDLMDISDQEALDVFLNSGGEENTVLSPALGPESSTCQNEITLQVPNPSELRAKPPSSSSTCTDSATRDISEGGESPVVQSDEEEVQVDTALATSHTDREATPDGGEDSDS

SEQ ID NO: 50804 - protein, 194 aa, Homo sapiens
MEKWYLMTVVVLIGLTVRWTVSLNSYSGAGKPPMFGDYEAQRHWQEITFNLPVKQWYFNSSDNNLQYWGLDYPPLTAYHSLLCAYVAKFINPDWIALHTSRGYESQAHKLFMRTTVLIADLLIYIPAVVLYCCCLKEISTKKKIANALCILLYPGLILIDYGHFQWNFTTPCHFFAFYLASVLKKASKERGLCC

SEQ ID NO: 50805 - protein, 196 aa, Homo sapiens
SDPNHFIIGTDMGLISHGTRQDLRVAPKLFKPQQHGIRPVKVNVIDFSPFGEPIFLAGCSDGSIRLHQLSSAFPLLQWDSSTDSHAVTGLQWSPTRPAVFLVQDDTSNIYIWDLLQSDLGPVAKQQVSPNRLVAMAAVGEPEKAGGSFLALVLARASGSIDIQHLKRRWAAPEVDECNRLRLLLQEALWPEGKLHK

SEQ ID NO: 50806 - protein, 196 aa, Homo sapiens
MKQLKRKRKSNFSVQETQTLLKEITKRKEVIFSKQLNTTINVMKRMAWEEIAQCVNAVGEGEQRTGTEVKRRYLDWRALMKRKRMKANIKLVGSGFPLPSSDLDDSLTEEIDEKIGFRNDANFDWQNVADFRDAGGSLTEVKVEEEERDPQSPEFEIEEEEEMLSSVIPDSRRENELPDFPHIDEFFTLNSTPSRS

SEQ ID NO: 50807 - protein, 225 aa, Homo sapiens
  MOD_RES (1)..(1): Any amino acid
XEEYGKLFDFVNAKKLNIKNRGLKEKKEGMNPSYDEYADSDEDQHDAYLERMKEEGKIREENANDSSDDSGEETDESFNPGEEEEDVAEEFDSNASASSSSNEGDSDRDEKKRKQLKKAKMAKDRKSRKKPVEVKKGKDPNAPKRPMSAYMLWLNASREKIKSDHPGISITDLSKKAGEIWKGMSKEKKEEWDRKAEDARRDYEKAMKEYEGGRGESSKRDKSKK

SEQ ID NO: 50808 - protein, 59 aa, Homo sapiens
MASTVVAVGLTIAAAGFAGRYVLQAMKHMEPQVKQVFQSLPKSAFSGGYYRALLPIKGK

SEQ ID NO: 50809 - protein, 1146 aa, Homo sapiens
MEVDTEEKRHRTRSKGVRVPVEPAIQELFSCPTPGCDGSGHVSGKYARHRSVYGCPLAKKRKTQDKQPQEPAPKRKPFAVKADSSSVDECDDSDGTEDMDEKEEDEGEEYSEDNDEPGDEDEEDEEGDREEEEEIEEEDEDDDEDGEDVEDEEEEEEEEEEEEEEEENEDHQMNCHNTRIMQDTEKDDNNNDEYDNYDELVAKSLLNLGKIAEDAAYRARTESEMNSNTSNSLEDDSDKNENLGRKSELSLDLDSDVVRETVDSLKLLAQGHGVVLSENMNDRNYADSMSQQDSRNMNYVMLGKPMNNGLMEKMVEESDEEVCLSSLECLRNQCFDLARKLSETNPQERNPQQNMNIRQHVRPEEDFPGRTPDRNYSDMLNLMRLEEQLSPRSRVFASCAKEDGCHERDDDTTSVNSDRSEEVFDMTKGNLTLLEKAIALETERAKAMREKMAMEAGRRDNMRSYEDQSPRQLPGEDRKPKSSDSHVKKPYYDPSRTEKKESKCPTPGCDGTGHVTGLYPHHRSLSGCPHKDRVPPEILAMHESVLKCPTPGCTGRGHVNSNRNSHRSLSGCPIAAAEKLAKAQEKHQSCDVSKSSQASDRVLRPMCFVKQLEIPQYGYRNNVPTTTPRSNLAKELEKYSKTSFEYNSYDNHTYGKRAIAPKVQTRDISPKGYDDAKRYCKDPSPSSSSTSSYAPSSSSNLSCGGGSSASSTCSKSSFDYTHDMEAAHMAATAILNLSTRCREMPQNLSTKPQDLCATRNPDMEVDENGTLDLSMNKQRPRDSCCPILTPLEPMSPQQQAVMNNRCFQLGEGDCWDLPVDYTKMKPRRIDEDESKDITPEDLDPFQEALEERRYPGEVTIPSPKPKYPQCKESKKDLITLSGCPLADKSIRSMLATSSQELKCPTPGCDGSGHITGNYASHRSLSGCPRAKKSGIRIAQSKEDKEDQEPIRCPVPGCDGQGHITGKYASHRSASGCPLAAKRQKDGYLNGSQFSWKSVKTEGMSCPTPGCDGSGHVSGSFLTHRSLSGCPRATSAMKKAKLSGEQMLTIKQRASNGIENDEEIKQLDEEIKELNESNSQMEADMIKLRTQITTMESNLKTIEEENKVIEQQNESLLHELANLSQSLIHSLANIQLPHMEDGVWWGQ

SEQ ID NO: 50810 - protein, 72 aa, Homo sapiens
MSAFRNHCPHLDSVGEITKEDLIQKSLGTCQDCKVQGPNLWACLENRCSYVGCGESQVDHSTIHSQETKHYL

SEQ ID NO: 50811 - protein, 453 aa, Homo sapiens
  MOD_RES (1)..(1): Any amino acid
XDKIMAELQAFQKCSFMDVNSNSHAEPSRADSHVKDTRSGATVPPKEKKGIFGSWRTKQSKNLEFFHEDVRKSDVEYENGPQMEFQKVTTGAVRPSDPPKWERGMENSISDASRTSEYKTEIIMKENSISNMSLLRDSRNYSQETVPKASFGFSGISPLEDEINKGSKISGLQYSIPDTENQTLNYGKTKEMEKQNTDKCHVSSHTRLTESSVHDFKTEDQEVITTDFGQVVLRPKEARHANVNPNEDGESSSSSPTEENAATDNIAFMITETTVQVLSSGEVHDIVSQKGEDIQTVNIDARKEMTPRQEGTDNEDPVVCLDKKPVIIIFDEPMDIRSAYKRLSTIFEECDEELERMMMEEKIEEEEEEENGDSVVQNNNTSQMSHKKVAPGNLRTGQQVETKSQPHSLATETRNPGGQEMNRTELNKFSHVDSPNSECKGEDATDDQFESPK

SEQ ID NO: 50812 - protein, 53 aa, Homo sapiens
MATNFSDIVKQGYVKMKSRKLGIYRRCWLVFRKSSSKGPQRLEKYPDEKSVCL

SEQ ID NO: 50813 - protein, 25 aa, Homo sapiens
MLQGHSSVFQALLGTFFTWGMTAAG

SEQ ID NO: 50814 - protein, 109 aa, Homo sapiens
MKENKENSSPSVTSANLDHTKPCWYWDKKDLAHTPSQLEGLDPATEARYRREGARFIFDVGTRLGLHYDTLATGIIYFHRFYMFHSFKQFPRYVTGACCLFLAGKVEET

SEQ ID NO: 50815 - protein, 19 aa, Homo sapiens
MTESASSTSGQEFDVFSVM

SEQ ID NO: 50816 - protein, 16 aa, Homo sapiens
MDNGMFSGFIMIKNLL

SEQ ID NO: 50817 - protein, 226 aa, Homo sapiens
MVLRSLVEYSQDVLAHPVSEEHLPDVSLIGEFSDPAELGKLLQLVLGCAISCEKKQDHIQRIMTLEESVQHVVMEAIQELMTKDTPDSLSPETYGNFDSQSRRYYFLSEEAEEGDELQQRCLDLERQLMLLSEEKQSLAQENAGLRERMGRPEGEGTPGLTAKKLLLLQSQLEQLQEENFRLESGREDERLRCAELEREVAELQHRNQALTSLAQEAQALKDEMDE

SEQ ID NO: 50818 - protein, 588 aa, Homo sapiens
MDGIVPDIAVGTKRGSDELFSTCVTNGPFIMSSNSASAANGNDSKKFKGDSRSAGVPSRVIHIRKLPIDVTEGEVISLGLPFGKVTNLLMLKGKNQAFIEMNTEEAANTMVNYYTSVTPVLRGQPIYIQFSNHKELKTDSSPNQAVRGPAADPSSPGTSGVGPAAGAGDSRLCLPQRAQAALQAVNSVQSGNLALAASAAAVDAGMAMAGQSPVLRIIVENLFYPVTLDVLHQIFSKFGTVLKIITFTKNNQFQALLQYADPVSAQHAKLSLDGQNIYNACCTLRIDFSKLTSLNVKYNNDKSRDYTRPDLPSGDSQPSLDQTMAAAFGAPGIISASPYAGAGFPPTFAIPQAAGLSVPNVHGALAPLAIPSAAAAAAAAGRIAIPGLAGAGNSVLLVSNLNPERVTPQSLFILFGVYGDVQRVKILFNKKENALVQMADGNQAQLAMSHLNGHKLHGKPIRITLSKHQNVQLPREGQEDQGLTKDYGNSPLHRFKKPGSKNFQNIFPPSATLHLSNIPPSVSEEDLKVLFSSNGGVVKGFKFFQKDRKMALIQMGSVEEAVQALIDLHNHDLGENHHLRVSFSKSTI

SEQ ID NO: 50819 - protein, 289 aa, Homo sapiens
MTARTLSLMASLVAYDDSDSEAETEHAGSFNATGQQKDTSGVARPPGQDFASGTLDVPKAGAQPTKHGSCEDPGGYRLPLAQLGRSDWGSCPSQRLQWPGKEPQVTFPIKEPSCSSLWTSHVPASHMPLAAARFKQVKLSRNFPKSSFHAQSESETVGKNGSSFQKKKCEDCVVPYTPRRLRQRQALSTETGKGKDVEPQGPPAGRAPAPLYVGPGVSEFIQPYLNSHYKETTVPRKVLFHLRGHRGPVNTIQWCPVLSKSHMLLSTSMDKTFKEPSYLVVEVTLESLP

SEQ ID NO: 50820 - protein, 81 aa, Homo sapiens
MGDLFQGRGPSRVGCAPAHDTARRYRYYQNVCTQSYSFVWWDWARWEREIDWMALNGINLALAWSGQEAIWQRVYLALGLT

SEQ ID NO: 50821 - protein, 68 aa, Homo sapiens
MFQAAERPQEWAMEGPRDGLKKERLLDDRHDSGLDSMKDEEYEQMLTEDGDSFLHLAIIHEEKALTME

SEQ ID NO: 50822 - protein, 268 aa, Homo sapiens
MLYFSRSHFPRPCGGQVSAGSGLTLLLLLLPALWRGWLEGDGQQAVPARGEPQQDCCVKTELLGEETPMAADEGSAEKQAGEAHMAADGETNGSCENSDASSHANAAKHTQDSARVNPQDGTNTLTRIAENGVSERDSEAAKQNHVTADDFVQTSVIGSNGYILNKPALQAQPLRTTSTLASSLPGHAAKTLPGGAGKGRTPSAFPQTPAAPPATLGEGSADTEDRKLPAPGADVKVHRARKTMPKSVVGLHAASKDPREVREARDHK

SEQ ID NO: 50823 - protein, 198 aa, Homo sapiens
MGELFRSEEMTLAQLFLQSEAAYCCVSELGELGKVQFRDANFEKIENELKEINTNQEALKRNFLELTELKFILRKTQQFFDEMADPDLLEESSSLLEPSEMGRGTPLRLGFVAGVINRERIPTFERMLWRVCRGNVFLRQAEIENPLEDPVTGDYVHKSVFIIFFQGDQLKNRVKKICEGFRASLYPCPETPQERKEM

SEQ ID NO: 50824 - protein, 63 aa, Homo sapiens
MASVAAARAVPVGSGLRGLQRTLPLVVILGATGTGKSTLALQLGQRLGGEIVSADSMQELASF

SEQ ID NO: 50825 - protein, 252 aa, Homo sapiens
MMLEFFGIKLTDKTGNVARAVNWQERFQHLNESQHNYLRITRILKSLGELGYESFKSPLVKFILHEALVENTIPNIKQSALEYFVYTIRDRRERRKLLRFAQKHYTPSENFIWGPPRKEQSEGSKAQKMSSPLASSHNSQTSMHKKAKDSKNSSSAVHLNSKTAEDKKVAPKEPVEETDRPSPEPSNEAAKPRNTEKDSNAENMNSQPEKTVTTPTEKKESVSPENNEEGGNDNQDNENPGNTNCHDVVLVQ

SEQ ID NO: 50826 - protein, 43 aa, Homo sapiens
MPLGRLAGSARSEEGSEAFLEGMVDWELSRLQRQCKVMEGERR

SEQ ID NO: 50827 - protein, 66 aa, Homo sapiens
MPIVDKLKEALKPGRKDSADDGELGKLLASSAKKVLLQKIEFEPASKSFSYQLEALKSKYVLLNPK

SEQ ID NO: 50828 - protein, 3685 aa, Homo sapiens
MLWWEEVEDCYEREDVQKKTFTKWVNAQFSKFGKQHIENLFSDLQDGRRLLDLLEGLTGQKLPKEKGSTRVHALNNVNKALRVLQNNNVDLVNIGSTDIVDGNHKLTLGLIWNIILHWQVKNVMKNIMAGLQQTNSEKILLSWVRQSTRNYPQVNVINFTTSWSDGLALNALIHSHRPDLFDWNSVVCQQSATQRLEHAFNIARYQLGIEKLLDPEDVDTTYPDKKSILMYITSLFQVLPQQVSIEAIQEVEMLPRPPKVTKEEHFQLHHQMHYSQQITVSLAQGYERTSSPKPRFKSYAYTQAAYVTTSDPTRSPFPSQHLEAPEDKSFGSSLMESEVNLDRYQTALEEVLSWLLSAEDTLQAQGEISNDVEVVKDQFHTHEGYMMDLTAHQGRVGNILQLGSKLIGTGKLSEDEETEVQEQMNLLNSRWECLRVASMEKQSNLHRVLMDLQNQKLKELNDWLTKTEERTRKMEEEPLGPDLEDLKRQVQQHKVLQEDLEQEQVRVNSLTHMVVVVDESSGDHATAALEEQLKVLGDRWANICRWTEDRWVLLQDILLKWQRLTEEQCLFSAWLSEKEDAVNKIHTTGFKDQNEMLSSLQKLAVLKADLEKKKQSMGKLYSLKQDLLSTLKNKSVTQKTEAWLDNFARCWDNLVQKLEKSTAQISQAVTTTQPSLTQTTVMETVTTVTTREQILVKHAQEELPPPPPQKKRQITVDSEIRKRLDVDITELHSWITRSEAVLQSPEFAIFRKEGNFSDLKEKVNAIEREKAEKFRKLQDASRSAQALVEQMVNEGVNADSIKQASEQLNSRWIEFCQLLSERLNWLEYQNNIIAFYNQLQQLEQMTTTAENWLKIQPTTPSEPTAIKSQLKICKDEVNRLSDLQPQIERLKIQSIALKEKGQGPMFLDADFVAFTNHFKQVFSDVQAREKELQTIFDTLPPMRYQETMSAIRTWVQQSETKLSIPQLSVTDYEIMEQRLGELQALQSSLQEQQSGLYYLSTTVKEMSKKAPSEISRKYQSEFEEIEGRWKKLSSQLVEHCQKLEEQMNKLRKIQNHIQTLKKWMAEVDVFLKEEWPALGDSEILKKQLKQCRLLVSDIQTIQPSLNSVNEGGQKIKNEAEPEFASRLETELKELNTQWDHMCQQVYARKEALKGGLEKTVSLQKDLSEMHEWMTQAEEEYLERDFEYKTPDELQKAVEEMKRAKEEAQQKEAKVKLLTESVNSVIAQAPPVAQEALKKELETLTTNYQWLCTRLNGKCKTLEEVWACWHELLSYLEKANKWLNEVEFKLKTTENIPGGAEEISEVLDSLENLMRHSEDNPNQIRILAQTLTDGGVMDELINEELETFNSRWRELHEEAVRRQKLLEQSIQSAQETEKSLHLIQESLTFIDKQLAAYIADKVDAAQMPQEAQKIQSDLTSHEISLEEMKKHNQGKEAAQRVLSQIDVAQKKLQDVSMKFRLFQKPANFEQRLQESKMILDEVKMHLPALETKSVEQEVVQSQLNHCVNLYKSLSEVKSEVEMVIKTGRQIVQKKQTENPKELDERVTALKLHYNELGAKVTERKQQLEKCLKLSRKMRKEMNVLTEWLAATDMELTKRSAVEGMPSNLDSEVAWGKATQKEIEKQKVHLKSITEVGEALKTVLGKKETLVEDKLSLLNSNWIAVTSRAEEWLNLLLEYQKHMETFDQNVDHITKWIIQADTLLDESEKKKPQQKEDVLKRLKAELNDIRPKVDSTRDQAANLMANRGDHCRKLVEPQISELNHRFAAISHRIKTGKASIPLKELEQFNSDIQKLLEPLEAEIQQGVNLKEEDFNKDMNEDNEGTVKELLQRGDNLQQRITDERKREEIKIKQQLLQTKHNALKDLRSQRRKKALEISHQWYQYKRQADDLLKCLDDIEKKLASLPEPRDERKIKEIDRELQKKKEELNAVRRQAEGLSEDGAAMAVEPTQIQLSKRWREIESKFAQFRRLNFAQIHTVREETMMVMTEDMPLEISYVPSTYLTEITHVSQALLEVEQLLNAPDLCAKDFEDLFKQEESLKNIKDSLQQSSGRIDIIHSKKTAALQSATPVERVKLQEALSQLDFQWEKVNKMYKDRQGRFDRSVEKWRRFHYDIKIFNQWLTEAEQFLRKTQIPENWEHAKYKWYLKELQDGIGQRQTVVRTLNATGEEIIQQSSKTDASILQEKLGSLNLRWQEVCKQLSDRKKRLEEQKNILSEFQRDLNEFVLWLEEADNIASIPLEPGKEQQLKEKLEQVKLLVEELPLRQGILKQLNETGGPVLVSAPISPEEQDKLENKLKQTNLQWIKVSRALPEKQGEIEAQIKDLGQLEKKLEDLEEQLNHLLLWLSPIRNQLEIYNQPNQEGPFDVKETEIAVQAKQPDVEEILSKGQHLYKEKPATQPVKRKLEDLSSEWKAVNRLLQELRAKQPDLAPGLTTIGASPTQTVTLVTQPVVTKETAISKLEMPSSLMLEVPALADFNRAWTELTDWLSLLDQVIKSQRVMVGDLEDINEMIIKQKATMQDLEQRRPQLEELITAAQNLKNKTSNQEARTIITDRIERIQNQWDEVQEHLQNRRQQLNEMLKDSTQWLEAKEEAEQVLGQARAKLESWKEGPYTVDAIQKKITETKQLAKDLRQWQTNVDVANDLALKLLRDYSADDTRKVHMITENINASWRSIHKRVSEREAALEETHRLLQQFPLDLEKFLAWLTEAETTANVLQDATRKERLLEDSKGVKELMKQWQDLQGEIEAHTDVYHNLDENSQKILRSLEGSDDAVLLQRRLDNMNFKWSELRKKSLNIRSHLEASSDQWKRLHLSLQELLVWLQLKDDELSRQAPIGGDFPAVQKQNDVHRAFKRELKTKEPVIMSTLETVRIFLTEQPLEGLEKLYQEPRELPPEERAQNVTRLLRKQAEEVNTEWEKLNLHSADWQRKIDETLERLRELQEATDELDLKLRQAEVIKGSWQPVGDLLIDSLQDHLEKVKALRGEIAPLKENVSHVNDLARQLTTLGIQLSPYNLSTLEDLNTRWKLLQVAVEDRVRQLHEAHRDFGPASQHFLSTSVQGPWERAISPNKVPYYINHETQTTCWDHPKMTELYQSLADLNNVRFSAYRTAMKLRRLQKALCLDLLSLSAACDALDQHNLKQNDQPMDILQIINCLTTIYDRLEQEHNNLVNVPLCVDMCLNWLLNVYDTGRTGRIRVLSFKTGIISLCKAHLEDKYRYLFKQVASSTGFCDQRRLGLLLHDSIQIPRQLGEVASFGGSNIEPSVRSCFQFANNKPEIEAALFLDWMRLEPQSMVWLPVLHRVAAAETAKHQAKCNICKECPIIGFRYRSLKHFNYDICQSCFFSGRVAKGHKMHYPMVEYCTPTTSGEDVRDFAKVLKNKFRTKRYFAKHPRMGYLPVQTVLEGDNMETPVTLINFWPVDSAPASSPQLSHDDTHSRIEHYASRLAEMENSNGSYLNDSISPNESIDDEHLLIQHYCQSLNQDSPLSQPRSPAQILISLESEERGELERILADLEEENRNLQAEYDRLKQQHEHKGLSPLPSPPEMMPTSPQSPRDAELIAEAKLLRQHKGRLEARMQILEDHNKQLESQLHRLRQLLEQPQAEAKVNGTTVSSPSTSLQRSDSSQPMLLRVVGSQTSDSMGEEDLLSPPQDTSTGLEEVMEQLNNSFPSSRGRNTPGKPMREDTM

SEQ ID NO: 50829 - protein, 120 aa, Homo sapiens
VKNKKTQDKREKSNFRNEIKLLRKELKEREEAAMLESLTSANVVLATNTAVPLETPGSLFPPGASADGPLKLLPESYFDVVVIDECAQALEASCWIPLLKARKCILAGDHKQLPPTTVSH

SEQ ID NO: 50830 - protein, 311 aa, Homo sapiens
MSKRPSYAPPPTPAPATASSGITIPKPPKPPDKPLMPYMRYSRKVWDQVKASNPDLKLWEIGKIIGGMWRDLTDEEKQEYLNEYEAEKIEYNESMKAYHNSPAYLAYINAKSRAEAALEEESRQRQSRMEKGEPYMSIQPAEDPDDYDDGFSMKHTATARFQRNHRLISEILSESVVPDVRSVVTTARMQVLKRQVQSLMVHQRKLEAELLQIEERHQEKKRKFLESTDSFNNELKRLCGLKVEVDMEKIAAEIAQAEEQARKRQEEREKEAAEQAERSQSSIVPEEEQAANKGEEKKDDENIPMETVTNV

SEQ ID NO: 50831 - protein, 89 aa, Homo sapiens
  MOD_RES (1)..(1): Any amino acid
XVGHLRATEKMKTRELHRESSNFDSIYICPSTFACAQLATGAACRLVEAVLSGEDTTQSRMQLAVFAFSTLWLWLLAMPRLSVGMPYGS

SEQ ID NO: 50832 - protein, 303 aa, Homo sapiens
MLKAVILIGGPQKGTRFRPLSFEVPKPLFPVAGVPMIQHHIEACAQVLHYVEKPSTFISDIINCGIYLFSPEALKPLRDVFQRNQQDGQLEDSPGLWPGAGTIRLEQDVFSALAGQGQIYVHLTDGIWSQIKSAGSALYASRLYLSRYQDTHPERLAKHTPGGPWIRGNVYIHPTAKVAPSAVLGPNVSIGKGVTVGEGVRLRESIVLHGATLQEHTCVLHSIVGWGSTVGRWARVEGTPSDPNPNDPRARMDSESLFKDGKLLPAITILGCRVRIPAEVLILNSIVLPHKELSRSFTNQIIL

SEQ ID NO: 50833 - protein, 87 aa, Homo sapiens
MGNIFEKLFKSLLGKKKMRILILSLDTAGKTTILYKLKLGETVPAVPTVGFCVETVEYKNNTFGVWDVGSHFKIRPLWQHFFQNTKA

SEQ ID NO: 50834 - protein, 68 aa, Homo sapiens
MLKEVAQVTNSMFGASRKKFVEGVDSDYHDENMYYSQSSMFPHRSEKDMLASPSTSGQLSQFGASLYG

SEQ ID NO: 50835 - protein, 549 aa, Homo sapiens
MDVVEVAGSWWAQEREDIIMKYEKGHRAGLPEDKGPKPFRSYNNNVDHLGIVHETELPPLTAREAKQIRREISRKSKWVDMLGDWEKYKSSRKLIDRAYKGMPMNIRGPMWSVLLNIEEMKLKNPGRYQIMKEKGKRSSEHIQRIDRDVSGTLRKHIFFRDRYGTKQRELLHILLAYEEYNPEVGYCRDLSHIAALFLLYLPEEDAFWALVQLLASERHSLQGFHSPNGGTVQGLQDQQEHVVATSQPKTMGHQDKKDLCGQCSPLGCLIRILIDGISLGLTLRLWDVYLVEGEQALMPITRIAFKVQQKRLTKTSRCGPWARFCNRFVDTWARDEDTVLKHLRASMKKLTRKQGDLPPPAKPEQGSSASRPVPASRGGKTLCKGDRQAPPGPPARFPRPIWSASPPRAPRSSTPCPGGAVREDTYPVGTQGVPSPALAQGGPQGSWRFLQWNSMPRLPTDLDVEGPWFRHYDFRQSCWVRAISQEDQLAPCWQAEHPAERVRSAFAAPSTDSDQGTPFRARDEQPCAPTSGPCLCGLHLESSQFPPGF

SEQ ID NO: 50836 - protein, 109 aa, Homo sapiens
MAASTSMVPVAVTAAVAPVLSINSDFSDLREIKKQLLLIAGLTRERGLLHSSKWKMPRIWMPIPWPRPTLTLKSMIGQHISCMAAIARKPIFCICIPDIWPPGKRTSEK

SEQ ID NO: 50837 - protein, 85 aa, Homo sapiens
MSASQDSRTEPNPEERPREAPGAHPAPGGRVHFAAQAGLLANCGWAGPPSFGGERPEIQRQWPRWDGARRRHRVTGMRLLTALMT

SEQ ID NO: 50838 - protein, 723 aa, Homo sapiens
MVPWVRTMGQKLKQRLRLDVGREICRQYPLFCFLLLCLSAASLLLNRYIHILMIFWSFVAGVVTFYCSLGPDSLLPNIFFTIKYKPKLGLQELFPQGHSCAVCGKVKCKRHRPSLLLENYQPWLDLKISSKVDASLSEVLELVLENFVYPWYRDVTDDESFVDELRITLRFFASVLIRRIHKVDIPSIITKKLLKAAMKHIEVIVKARQKVKNTEFLQQAALEEYGPELHVALRSRRDELHYLRKLTELLFPYILPPKATDCRSLTLLIREILSGSVFLPSLDFLADPDTVNHLLIIFIDDSPPEKATEPASPLVPFLQKFAEPRNKKPSVLKLELKQIREQQDLLFRFMNFLKQEGAVHVLQFCLTVEEFNDRILRPELSNDEMLSLHEELQKIYKTYCLDESIDKIRFDPFIVEEIQRIAEGPYIDVVKLQTMRCLFEAYEHVLSLLENVFTPMFCHSDEYFRQLLRGAESPTRNSKLNRGSLSLDDFRNTQKRGESFGISRIGSKIKGVFKSTTMEGAMLPNYGVAEGEDDFIEEGIVVMEDDSPVEAVSTPNTPRNLAAWKISIPYVDFFEDPSSERKEKKERIPVFCIDVERNDRRAVGHEPEHWSVYRRYLEFYVLESKLTEFHGAFPDAQLPSKRIIGPKNYEFLKSKREEFQEYLQKLLQHPELSNSQLLADFLSPNGGETQFLDKILPDVNLGKIIKSVPGKLMKEVSIWNLLS

SEQ ID NO: 50839 - protein, 47 aa, Homo sapiens
MQEAPAALPTEPGPSPVPAFLGKLWALVGDPGTDHLIRWSPTVFGRW

SEQ ID NO: 50840 - protein, 64 aa, Homo sapiens
MVMEKPSPLLVGREFVRQYYTLLNKAPEYLHRFYGRNSSYVHGGVDASGKPQEAVYGQNNQKMK

SEQ ID NO: 50841 - protein, 153 aa, Homo sapiens
MQFMLLFSRQGKLRLQKWYVPLSDKEKKKITRELVQTVLARKPKMCSFLEWRDLKIVYKRYASLYFCCAIEDQDNELITLEIIHRYVELLDKYFGSVCELDIIFNFEKAYFILDEFLLGGEVQETSKKNVLKAIEQADLLQEPRHEYFNVPVY

SEQ ID NO: 50842 - protein, 1313 aa, Homo sapiens
MSSNDSSLMAGIIYYSQEKYFHHVQQAAAVGLEKFSNDPVLKFFKAYGVLKEEHIQDAISDLESIRHHPDVSLCSTMALIYAHKRCEIIDREAIQELEYSLKEIRKTVSGTALYYAGLFLWLIGRHDKAKEYIDRMLKISRGFREAYVLRGWVDLTSDKPHTAKKAIEYLEQGIQDTKDVLGLMGKAMYFMMQQNYSEALEVVNQITVTSGSFLPALVLKMQLFLARQDWEQTVEMGHRILEKDESNIDACQILTVHELAREGNMTTATNHVRNLIKALETREPENPSLHLKKIIVVSRLCGSHQVILGLVCSFIERTFMATPSYVHVATELGYLFILKNQVKEALLWYSEAMKLDKDGMAGLTGIILCHILEGHLEEAEYRLEFLKEVQKSLGKSEVLIFLQALLMSRKHKGEEETTALLKEAVELHFSSMQGIPLGSEYFEKLDPYFLVCIAKEYLLFCPKQPRLPGQIVSPLLKQVAVILNPVVKAAPALIDPLYLMAQVRYYSGELENAQSILQRCLELDPASVDAHLLMCQIYLAQGNFGMCFHCLELGVSHNFQVRDHPLYHLIKARALNKAGDYPEAIKTLKMVIKLPALKKEEGRKFLRPSVQPSQRASILLELVEALRLNGELHEATKVMQDTINEFGGTPEENRITIANVDLVLSKGNVDVALNMLRNILPKQSCYMEAREKMANIYLQTLRDRRLYIRCYRELCEHLPGPHTSLLLGDALMSILEPEKALEVYDEAYRQNPHDASLASRIGHAYVKAHQYTEAIEYYEAAQKINGQDFLCCDLGKLLLKLKKVNKAEKVLKQALEHDIVQDIPSMMNDVKCLLLLAKVYKSHKKEAVIETLNKALDLQSRILKRVPLEQPEMIPSQKQLAASICIQFAEHYLAEKEYDKAVQSYKDVFSYLPTDNKVMLELAQLYLLQGHLDLCEQHCAILLQTEQNHETASVLMADLMFRKQKHEAAINLYHQVLEKAPDNFLVLHKLIDLLRRSGKLEDIPAFFELAKKVSSRVPLEPGFNYCRGIYCWHIGQPNEALKFLNKARKDSTWGQSAIYHMVQICLNPDNEVVGGEAFENQGAESNYMEKKELEQQGVSTAEKLLREFYPHSDSSQTQLRLLQGLCRLATREKANMEAALGSFIQIAQAEKDSVPALLALAQAYVFLKQIPKARMQLKRLAKTPWVLSEAEDLEKSWLLLADIYCQGSKFDLALELLRRCVQYNKSCYKAYEYMGFIMEKEQSYKDAVTNYKLAWKYSHHANPAIGFKLAFNYLKDKKFVEAIEICNDVLREHPDYPKIREEILEKARRSLRP

SEQ ID NO: 50843 - protein, 411 aa, Homo sapiens
MTRPAFQPPATPAKHSSSTSSKGAKASNPEPSFKANENGLPPSSIFLSPNEAFRSPPIPYPRSYLPYPAPEGIAVSPLSLHGKGPVYPHPVLLPNGSLFPGHLAPKPGLPYGLPTGRPEFVTYQDALGLGMVHPMLIPHTPIEITKEEKPERRSRSHERARYEDPTLRNRFSEILETSSTKLHPDVPTDKNLKPNPNWNQGKTVVKSDKLVYVDLLREEPDAKTDTNVSKPSFAAESVGQSAEPPKPSVEPALQQHRDFIALREELGRISDFHETYTFKQPVFTVSKDSVLAGTNKENLGLPVSTPFLEPPLGSDGPAVTFGKTQEDPKPFCVGSAPPSVDVTPTYTKDGADEAESNDGKVLKPKPSKLAKRIANSAGYVGDRFKCVTTELYADSSQLSREQRALQVSPPT

SEQ ID NO: 50844 - protein, 134 aa, Homo sapiens
MRGKTFRFEMQRDLVSFPLSPAVRVKLVSAGFQTAEELLEVKPSELSKEVGISKAEALETLQIIRRECLTNKPRYAGTSESHKKCTALELLEQEHTQGFIITFCSALDDILGGGVPLMKTTEICGAPGVGKTQL

SEQ ID NO: 50845 - protein, 23 aa, Homo sapiens
MGSSQSVEIPGGGTEGYHVLRHQ

SEQ ID NO: 50846 - protein, 84 aa, Homo sapiens
MNVMLENYKNLVFLGIAVSKQDPITSLEQEKEPWNMKICEMVDESPGYMCRMCSYVFFFYQRPLARARHKRFFSTSDTEKTWQM

SEQ ID NO: 50847 - protein, 150 aa, Homo sapiens
MTAASCFQSQNPGVSTVVLGAYDLRRRERQSRQTFSISSMSENGYDPQQNLNDLMLLQLDREANLTSSVTILPLPLQNATVEAGTRCQVAGWGSQRSGGRLSRFPRFVNVTVTPEDQCRPNNVCTGVLTRRGGICNVSAPCGGRRGPERY

SEQ ID NO: 50848 - protein, 160 aa, Homo sapiens
MSAQESCLSLIKYFLFVFNLFFFVLGSLIFCFGIWILIDKTSFVSFVGRLQAPIHCSPEASWSLSLLPANGVVHTNNNDHESHFSSTSYLSGLVAGLAFVPLQIWSKVLAISGIFTMGIALLGCVGALKELRCLLGLYFGMLLLLFATQITLGILISTQR

SEQ ID NO: 50849 - protein, 34 aa, Homo sapiens
MSRRKQAKPQHFQSDPEVASLPRRDGTHGHSHVE

SEQ ID NO: 50850 - protein, 152 aa, Homo sapiens
MPRKRKCDLRAVRVGLLLGGGGVYGSRFRFTFPGCRALSPWRVRVQRRRCEMSTMFADTLLIVFISVCTALLAEGITWVLVYRTDKYKRLKAEVEKQSKKLEKKKETITESAGRQQKKKIDRVSPYRPGWSTVTRSWPTAASNSWAQVILPL

SEQ ID NO: 50851 - protein, 60 aa, Homo sapiens
MGAGPSLLLAALLLLLSGDGAVRCDTPANCTYLDLLGTWVFQVGSSGSQRDVNCSVMGCH

SEQ ID NO: 50852 - protein, 19 aa, Homo sapiens
MLDDNRLSNPSCFASLAGL

SEQ ID NO: 50853 - protein, 531 aa, Homo sapiens
MAARRRRSTGGGRARALNESKRVNNGNTAPEDSSPAKKTRRCQRQESKKMPVAGGKANKDRTEDKQDGMPGRSWASKRVSESVKALLLKGKAPVDPECTAKVGKAHVYCEGNDVYDVMLNQTNLQFNNNKYYLIQLLEDDAQRNFSVWMRWGRVGKMGQHSLVACSGNLNKAKEIFQKKFLDKTKNNWEDREKFEKVPGKYDMLQMDYATNTQDEEETKKEESLKSPLKPESQLDLRVQELIKLICNVQAMEEMMMEMKYNTKKAPLGKLTVAQIKAGYQSLKKIEDCIRAGQHGRALMEACNEFYTRIPHDFGLRTPPLIRTQKELSEKIQLLEALGDIEIAIKLVKTELQSPEHPLDQHYRNLHCALRPLDHESYEFKVISQYLQSTHAPTHSDYTMTLLDLFEVEKDGEKEAFREDLHNRMLLWHGSRMSNWVGILSHGLRIAPPEAPITGYMFGKGIYFADMSSKSANYCFASRLKNTGLLLLSEVALGQCNELLEANPKAEGLLQGKHSTKGLGKMAPSSAHFVTL

SEQ ID NO: 50854 - protein, 108 aa, Homo sapiens
MEVAANCSLRVKRPLLDPRFEGYKLSLEPLPCYQLELDAAVAEVKLRDDQYTLEHMHAFGMYNYLHCDSWYQDSVYYIDTLGRIMNLTVMLILKYLNHSIGYCTHLSD

SEQ ID NO: 50855 - protein, 222 aa, Homo sapiens
MPRRASRLIHNMDLRTMTQSLVTLAEDNIAFFSSQGPGETAQRLSGVFAGVREQALGLEPALGRLLGVAHLFDLDPETPANGYRSLVHTARCCLAHLLHKSRYVASNRRSIFFRTSHNLAELEAYLAALTQLRALVYYAQRLLVTNRPGVLFFEGDEGLTADFLREYVTLHKGCFYGRCLGFQFTPAIRPFLQTISIGLVSFGEHYKRNETGLSVAASSLFT

SEQ ID NO: 50856 - protein, 190 aa, Homo sapiens
MVIWVILSLLGELGKPGLLTSLKNMEQPSKDFCDSHKKSSKSSTYSASSYSSSGKRQNLACFLTNPHCGSLVNADGHGEVWTDWNNMSKFFQYGWRCTTNENTYSNRTLMGNWNQERYDLRNIVQPKPLPSQFGHYFETTYDTSYNNKMPLSTHRFKREPHWFPGHQPELDPPRYKCTEKSTYMNSYSKP

SEQ ID NO: 50857 - protein, 62 aa, Homo sapiens
MVFSNNDEGLINKKLPKELLLRMLFSLLLNFTWSNPECTKYVHSIGLDSFCNVDLCTELPKH

SEQ ID NO: 50858 - protein, 135 aa, Homo sapiens
MAAGQREARPQVSLTFEDVAVLFTRDEWRKLAPSQRNLYRDVMLENYRNLVSLGLPFTKPKVISLLQQGEDPWEVEKDGSGVSSLGSKSSHKTTKSTQTQDSSFQGLILKRSNRNVPWDLKLEKPYIYEGRLEKK

SEQ ID NO: 50859 - protein, 108 aa, Homo sapiens
MNCQQLWLGFLLPMTVSGRVLGLAEVAPVDYLSQYGYLQKPLEGSNNFKPEDITEALRPLEKEAPDFPHLEPALHPSTPHSPGSPASSLPGLEQCGSLDLPRGAGWCG

SEQ ID NO: 50860 - protein, 120 aa, Homo sapiens
MAASKVKQDMPPPGGYGPIDYKRNLPRRGLSGYSMLAIGIGTLIYGHWSIMKWNRERRRLQIEDFEARIALLPLLQAETDRRTLQMLRENLEEEAIIMKDVPDWKDYRREPPYLVQPCQL

SEQ ID NO: 50861 - protein, 38 aa, Homo sapiens
MLRRRGSPGMGVHVGAALGALWFCLTADRYQTAGAQLC

SEQ ID NO: 50862 - protein, 187 aa, Homo sapiens
MGHALCVCSRGTVIIDNKRYLFIQKLGEGDLKPTNILLGDEGQPVLMDLGSMNQACIHVEGSRQALTLQDWAAQRCTISYRAPELFSVQSHCVIDERTDVWSLGCVLYAMMFGEGPYDMVFQKGDSVALAVQNQLSIPQSPRHSSALRQLLNSMMTVDPHQRPHIPLLLSQLEALQPPAPGQHTTQI

SEQ ID NO: 50863 - protein, 65 aa, Homo sapiens
MAVSTVFSTSSLGIGLFVAVGSVSPSGKEDLGFPTPPSSPLAEVTTLTSYLDKLSTSLDWEPLGD

SEQ ID NO: 50864 - protein, 506 aa, Homo sapiens
MEMETTEPEPDCVVQPPSPPDDFSCQMRLSEKITPLKTCFKKKDQKRLGTGTLRSLRPILNTLLESGSLDGVFRSRNQSTDENSLHEPMMKKAMEINSSCPPAENNMSVLIPDRTNVGDQIPEAHPSTEAPERVVPIQDHSFPSETLSGTVADSTPAHFQTDLLHPVSSDVPTSPDCLDKVIDYVPGIFQENSFTIQYILDTSDKLSTELFQDKSEEASLDLVFELVNQLQYHTHQENGIEICMDFLQGTCIYGRDCLKHHTVLPYHWQIKRTTTQKWQSVFNDSQEHLERFYCNPENDRMRMKYGGQEFWADLNAMNVYETTEFDQLRRLSTPPSSNVNSIYHTVWKFFCRDHFGWREYPESVIRLIEEANSRGLKEVRFMMWNNHYILHNSFFRREIKRRPLFRSCFILLPYLQTLGGVPTQAPPPLEATSSSQIICPDGVTSANFYPETWVYMHPSQDFIQVPVSAEDKSYRIIYNLFHKTVPEFKYRILQILRVQNQFLWEK

SEQ ID NO: 50865 - protein, 30 aa, Homo sapiens
MKSEMAQIQQNAVQNHTATMLEIGTSLLSQ

SEQ ID NO: 50866 - protein, 88 aa, Homo sapiens
AQYLAAKALKKQSWRFHTKYMMWFQRHEEPKTITDEFEQIPDHLLVHSLTAFSPGQGTYIYFDYEKWGQRKKEGFTFEYRYLEDRDLQ

SEQ ID NO: 50867 - protein, 128 aa, Homo sapiens
MVQPFTTIPFPPPPQNGIPTEYGVPHTQDYAGQTGEHNLTLYGSTQAHGEQSSNSPSTQNGSLTTEGGAQTDGQQSQTQSSENSESKSTPKRLHVSNIPFRFRDPDLRQMFGFGKILDVEIIFNERGS

SEQ ID NO: 50868 - protein, 298 aa, Homo sapiens
  MOD_RES (1)..(1): Any amino acid
XSKRTPLHAAAQKGSVEICHVLLQAGANINAVDKQQRTPLMEAVVNNHLEVARYMVQRGGCVYSKEEDGSTCLHHAAKIGNLEMVSLLLSTGQVDVNAQGQLPPPSLPSHPQDSGGWTPIIWAAEHKHIEVIRMLLTRGADVTLTDNEENICLHWASFTGSAAIAEVLLNARCDLHAVNYHGDTPLHIAARESYHDCVLLFLSRGANPELRNKEGDTAWDLTPERSDVWFALQLNRKLRLGVGNRAIRTEKIICRDVARGYENVPIPCVNGVDGEPCPEDYKYISENCETSTMNIDRN

SEQ ID NO: 50869 - protein, 343 aa, Homo sapiens
MGRCSRENCKYLHPPPHLKTQLEINGRNNLIQQKNMAMLAQQMQLANAMMPGAPLQPVPMFSVAPSLATNASAAAFNPYLGPVSPSLVPAEILPTAPMLVTGNPGVPVPAAAAAAAQKLMRTDRLEVCREYQRGNCNRGENDCRFAHPADSTMIDTNDNTVTVCMDYIKGRCSREKCKYFHPPAHLQAKIKAAQYQVNQAAAAQAAATAAAMTQSAVKSLKRPLEATFDLGIPQAVLPPLPKRPALEKTNGATAVFNTGIFQYQQALANMQLQQHTAFLPPGSILCMTPATSVVPMVHGATPATVSAATTSATSVPFAATATANQIPIISAEHLTSHKYVTQM

SEQ ID NO: 50870 - protein, 726 aa, Homo sapiens
MAQWNQLQQLDTRYLEQLHQLYSDSFPMELRQFLAPWIESQDWAYAASKESHATLVFHNLLGEIDQQYSRFLQESNVLYQHNLRRIKQFLQSRYLEKPMEIARIVARCLWEESRLLQTAATAAQQGGQANHPTAAVVTEKQQMLEQHLQDVRKRVQDLEQKMKVVENLQDDFDFNYKTLKSQGDMQDLNGNNQSVTRQKMQQLEQMLTALDQMRRSIVSELAGLLSAMEYVQKTLTDEELADWKRRQQIACIGGPPNICLDRLENWITSLAESQLQTRQQIKKLEELQQKVSYKGDPIVQHRPMLEERIVELFRNLMKSAFVVERQPCMPMHPDRPLVIKTGVQFTTKVRLLVKFPELNYQLKIKVCIDNLCSYRDSGDVAALRGSRKFNILGTNTKVMNMEESNNGSLSAEFKHLTLREQRCGNGGRANCDASLIVTEELHLITFETEVYHQGLKIDLETHSLPVVVISNICQMPNAWASILWYNMLTNNPKNVNFFTKPPIGTWDQVAEVLSWQFSSTTKRGLSIEQLTTLAEKLLGPGVNYSGCQITWAKFCKENMAGKGFSFWVWLDNIIDLVKKYILALWNEGYIMGFISKERERAILSTKPPGTFLLRFSESSKEGGVTFTWVEKDISGKTQIQSVEPYTKQQLNNMSFAEIIMGYKIMDATNILVSPLVYLYPDIPKEEAFGKYCRPESQEHPEADPGAAPYLKTKFICVTPFIDAVWK

SEQ ID NO: 50871 - protein, 634 aa, Homo sapiens
MTPILTVLICLGLSLGPRTHVQAGHLPKPTLWAEPGSVITQGSPVTLRCQGGQETQEYRLYREKKTALWITRIPQELVKKGQFPIPSITWEHAGRYRCYYGSDTAGRSESSDPLELVVTGAYIKPTLSAQPSPVVNSGGNVILQCDSQVAFDGFSLCKEGEDEHPQCLNSQPHARGSSRAIFSVGPVSPSRRWWYRCYAYDSNSPYEWSLPSDLLELLVLGVSKKPSLSVQPGPIVAPEETLTLQCGSDAGYNRFVLYKDGERDFLQLAGAQPQAGLSQANFTLGPVSRSYGGQYRCYGAHNLSSEWSAPSDPLDILIAGQFYDRVSLSVQPGPTVASGENVTLLCQSQGWMQTFLLTKEGAADDPWRLRSTYQSQKYQAEFPMGPVTSAHAGTYRCYGSQSSKPYLLTHPSDPLELVVSAGPEDQPLTPTGSDPQSGLGRHLGVVIGILVAVILLLLLLLLLFLILRHRRQGKHWTSTQRKADFQHPAGAVGPEPTDRGLQWRSSPAADAQEENLYAAVKHTQPEDGVEMDTRSPHDEDPQAVTYAEVKHSRPRREMASPPSPLSGEFLDTKDRQAEEDRQMDTEAAASEAPQDVTYAQLHSLTLRREATEPPPSQEGPSPAVPSIYATLAIH

SEQ ID NO: 50872 - protein, 198 aa, Homo sapiens
METGRQTGVSAEMLAMPRGLKGSKKDGIPEDLDGNLEAPRDQEGELRSEDVMDLTEGDSEASASAPPAAKRRKTHTKGKKESKPTVDAEEAQRMTTLLSAMSEEQLSRYEVCRRSAFPRARVAGLMRAITGSSVSENAAIAMAGIAKLFVGEVVEEALDVCEMWGETLPLQPKHLREAVRRLKPKGLFPNSNCKRIMF

SEQ ID NO: 50873 - protein, 129 aa, Homo sapiens
MQYLNIKEDCNAMAFCAKMRSSKKTEVNLEAPEPGVEVIFYLSDREPLRLGSGEYTAEELCIRAAQACRISPLCHNLFALYDENTKLWYAPNRTITVDDKMSLRLHYRMSLCSSGEATHYVWSPQPDAV

SEQ ID NO: 50874 - protein, 227 aa, Homo sapiens
MEDLEETLFEEFENYSYDLDYYSLESDLEEKVQLGVVHWVSLVLYCLAFVLGIPGNAIVIWFTGFKWKKTVTTLWFLNLAIADFIFLLFLPLYISYVAMNFHWPFGIWLCKANSFTAQLNMFASVFFLTVISLDHYIHLIHPVLSHRHRTLKNSLIVIIFIWLLASLIGGPALYFRDTVEFNNHTLCYNNFQKHDPDLTLIRHHVLTWVKFIIGYLFPLLTMSICYL

SEQ ID NO: 50875 - protein, 43 aa, Homo sapiens
MSSTSSKRAPTTATQRLKQDYLRIKKDPVPYICAEPLPSNILE

SEQ ID NO: 50876 - protein, 363 aa, Homo sapiens
MNKPSDGRPKYLVVNADEGEPGTCKDREILRHDPHKLLEGCLVGGRAMGARAAYIYIRGEFYNEASNLQVAIREAYEAGLIGKNACGSGYDFDVFVVRGAGAYICGEETALIESIEGKQGKPRLKPPFPADVGVFGCPTTVANVETVAVSPTICRRGGTWFAGFGRERNSGTKLFNISGHVNHPCTVEEEMSVPLKELIEKHAGGVTGGWDNLLAVIPGGSSTPLIPKSVCETVLMDFDALVQAQTGLGTAAVIVMDRSTDIVKAIARLIEFYKHESCGQCTPCREGVDWMNKVMARFVRGDARPAEIDSLWEISKQIEGHTICALGDGAAWPVQGLIRHFRPELEERMQRFAQQHQARQAAS

SEQ ID NO: 50877 - protein, 65 aa, Homo sapiens
MSGGGVIRGPAGNNDCRIYVGNLPPDIRTKDIEDVFYKYGAIRDIDLKNRRGGPPFAFVEFEDPR

SEQ ID NO: 50878 - protein, 366 aa, Homo sapiens
MAQQANVGELLAMLDSPMLGVRDDVTAVFKENLNSDRGPMLVNTLVDYYLETSSQPALHILTTLQEPHDKHLLDRINEYVGKAATRLSILSLLGHVIRLQPSWKHKLSQAPLLPSLLKCLKMDTDVVVLTTGVLVLITMLPMIPQSGKQHLLDFFDIFGRLSSWCLKKPGHVAEVYLVHLHASVYALFHRLYGMYPCNFVSFLRSHYSMKENLETFEEVVKPMMEHVRIHPELVTGSKDHELDPRRWKRLETHDVVIECAKISLDPTEASYEDGYSVSHQISARFPHRSADVTTSPYADTQNSYGCATSTPYSTSRLMLLNMPGQLPQTLSSPSTRLITEPPQVWCQLVCLLSPLLSGEADPLGQI

SEQ ID NO: 50879 - protein, 334 aa, Homo sapiens
MDDDIAALVVDNGSGMCKAGFAGDDAPRAVFPSIVGRPRHQGVMVGMGQKDSYVGDEAQSKRGILTLKYPIEHGIVTNWDDMEKIWHHTFYNELRVAPEEHPVLLTEAPLNPKANREKMTQIMFETFNTPAMYVAIQAVLSLYASGRTTGIVMDSGDGVTHTVPIYEGYALPHAILRLDLAGRDLTDYLMKILTERGYSFTTTAEREIVRDIKEKLCYVALDFEQEMATAASSSSLEKSYELPDGQVITIGNERFRCPEALFQPSFLGMESCGIHETTFNSIMKCDVDIRKDLYANTVLSGGTTMYPGIADRMQKEITALAPSTMKIKVGVFPA

SEQ ID NO: 50880 - protein, 190 aa, Homo sapiens
LLHMISNDIGQLACLHARLHSLDRVYFGGFFIRGHPVTMRTITYSINFFSKGEVQALFLRHEGYLGAIGAFLKGAEQDNPNQYSWGENYAGSSGLMSASPELGPAQRARSGTFDLLEMDRLERPLVDLPLLLDPPSYVPDTVDLTDDALARKYWLTCFEEALDGAKIPLLATWWVSEDVASARHVASKGS

SEQ ID NO: 50881 - protein, 96 aa, Homo sapiens
MNHIVQTFSPVNSGQPPNYEMLKEEQEVAMLGVPHNPAPPMSTVIHIRSETSVPDHVVWSLFNTLFMNTCCLGFIAFAYSVKLGDPGPLTISSPPV

SEQ ID NO: 50882 - protein, 562 aa, Homo sapiens
MTVLEITLAVILTLLGLAILAILLTRWARRKQSEMYISRYSSEQSARLLDYEDGRGSRHAYSTQSDTSYDNRERSKRDYTPSTNSLALSRSSIALPQGSMSSIKCLQTTEEPPSRTAGAMMQFTAPIPGATGPIKLSQKTIVQTLGPIVQYPGSNVRSHPHTITGPPSAPRGPPMAPIIISQRTASQLAAPIRIPQVHTMDSSGKITLTPVVILTGYMDEELAKKSCSKIQILKCGGTARSQNSREENKEALKNDIIFTNSVESLKSAHIKEPEREGKGTDLEKDKIGMEVKVDSDAGIPKRQETQLKISEMSVPQGQGAQIKKSVSDVPRGQESQVKKSESGVPKGQEAQVTKSGLVVLKGQEAQVEKSEMGVPRRQESQVKKSQSGVSKGQEAQVKKRESVVLKGQEAQVEKSELKVPKGQEGQVEKTEADVPKEQEVQEKKSEAGVLKGPESQVKNTEVSVPETLESQVKKSESGVLKGQEAQEKKESFEDKGNNDKEKERDAEKDPNKKEKGDKNTKGDKGKDKVKGKRESEINGEKSKGSKRAKANTGRKYNKKVEE

SEQ ID NO: 50883 - protein, 47 aa, Homo sapiens
MPLPEPSEQEGESVKAGQEPSPKPGTDVIPAAPRKPREFSKLVLLTA

SEQ ID NO: 50884 - protein, 38 aa, Homo sapiens
MSESLVVCDVAEDLVEKLRKFRFRKETNNAAIIRHFTR

SEQ ID NO: 50885 - protein, 163 aa, Homo sapiens
MDADSDVALDILITNVVCVFRTRCHLNLRKIALEGANVIYKRDVGKVLMKLRKPRITATIWSSGKIICTGATSEEEAKFGARRLARSLQKLGFQVIFTDFKVVNVLAVCNMPFEIRLPEFTKNNRPHASYEPELHPAVCYRIKSLRATLQIFSTGSITVTGIL

SEQ ID NO: 50886 - protein, 87 aa, Homo sapiens
MSSQPAGNQTSPGATEDYSYGSWYIDEPQGGEELQPEGEVPSCHTSIPPGLYHACLASLSVSPTQVEPGLQAAASLGSGTCVPHWGW

SEQ ID NO: 50887 - protein, 289 aa, Homo sapiens
MLNNLTDCEDGDGGANPGDGNPKESSPFINSTDTEKGKEYDGKNMALFEEEMDTSPMVSSLLSGLANYTNLPQGSREHEEAENNEGGKKKPVQAPRMGTFMGVYLPCLQNIFGVILFLRLTWVVGIAGIMESFCMVFICCSCTMLTAISMSAIATNGVVPAGGSYYMISRSLGPEFGGAVGLCFYLGTTFAGAMYILGTIEILLRREQPLLIGSYASWGQDRGGVLLKRKKPRGPRPTEEAPPRCLRWGAGVSPQSACRLLPVSHGSSPKTEIVELEGAPSPEFPPWDK

SEQ ID NO: 50888 - protein, 233 aa, Homo sapiens
GKVKLQQNPGKFDELDMSPGDPKWLDVIERDLHRQFPFHEMFVSRGGHGQQDLFRVLKAYTLYRPEEGYCQAQAPIAAVLLMHMPAEQAFWCLVQICEKYLPGYYSEKLEAIQLDGEILFSLLQKVSPVAHKHLSRQKIDPLLYMTEWFMCAFSRTLPWSSVLRVWDMFFCEGVKIIFRVGLVLLKHALGSPEKVKACQGQYETIERLRSLSPKIMQEAFLVQESCPHLSSCK

SEQ ID NO: 50889 - protein, 252 aa, Homo sapiens
MLSSCVRPVPTTVRFVDSLICNSSRSFMDLKALLSSLNDFASLSFAESWDNVGLLVEPSPPHTVNTLFLTNDLTEEVMEEVLQKKADLILSYHPPIFRPMKRITWNTWKERLVIRALENRVGIYSPHTAYDAAPQGVNNWLAKGLGACTSRPIHPSKAPNYPTEGNHRVEFNVNYTQDLDKVMSAVKGIDGVSVTSFSARTGNEEQTRINLNCTQKALMQVVDFLSRNKQLYQKHQDNTFYKSAGCQLKFVT

SEQ ID NO: 50890 - protein, 44 aa, Homo sapiens
MESVREWEMQFKEKYDYVGRLLKPGEEPSEYTDEEDTKDHNKQD

SEQ ID NO: 50891 - protein, 542 aa, Homo sapiens
MKMMHMAHCVTLVQLSISCDHLIDKDIGSKSDPLCVLLQDVGGGSWAELGRTERVRNCSSPEFSKTLQLEYRFETVQKLRFGIYDIDNKTPELRDDDFLGGAECSLGQIVSSQVLTLPLMLKPGKPAGRGTITVSAQELKDNRVVTMEVEARNLDKKDFLGKSDPFLEFFRQGDGKWHLVYRSEVIKNNLNPTWKRFSVPVQHFCGGNPSTPIQVQCSDYDSDGSHDLIGTFHTSLAQLQAVPAEFECIHPEKQQKKKSYKNSGTIRVKICRVETEYSFLDYVMGGCQINFTVGVDFTGSNGDPSSPDSLHYLSPTGVNEYLMALWSVGSVVQDYDSDKLFPAFGFGAQVPPDWQVSHEFALNFNPSNPYCAGIQGIVDAYRQALPQVRLYGPTNFAPIINHVARFAAQAAHQGTASQYFMLLLLTDGAVTDVEATREAVVRASNLPMSVIIVGVGGADFEAMEQLDADGGPLHTRSGQAAARDIVQFVPYRRFQNAPREALAQTVLAEVPTQLVSYFRAQGWAPLKPLPPSAKDPAQAPQA

SEQ ID NO: 50892 - protein, 768 aa, Homo sapiens
MAAHGKLRRERGLQAEYETQVKEMRWQLSEQLRCLELQGELRRELLQELAEFMRRRAEVELEYSRGLEKLAERFSSRGGRLGSSREHQSFRKEPSLLSPLHCWAVLLQHTRQQSRESAALSEVLAGPLAQRLSHIAEDVGRLVKKSRDLEQQLQDELLEVVSELQTVAEICVEMELRDEILPRAQNIQSRLDRQTIETEEVNKTLKATLQALLEVVASDDGDVLDSFQTSPSTESLKSTSSDPGSRQAGRRRGQQQETETFYLTKLQEYLSGRSILAKLQAKHEKLQEALQRGDKEEQEVSWTQYTQRKFQKSRQPRPSSQYNQRLFGGDMEKFIQSSGQPVPLVVESCIRFINLNGLQHEGIFRVSGAQLRVSEIRDAFERGEDPLVEGCTAHDLDSVAGVLKLYFRSLEPPLFPPDLFGELLASSELEATAERVEHVSRLLWRLPAPVLVVLRYLFTFLNHLAQYSDENMMDPYNLAVCFGPTLLPVPAGQDPVALQGRVNQLVQTLIVQPDRVFPPLTSLPGPVYEKCMAPPSASCLGDAQLESLGADNEPELEAEMPAQEDDLEGVVEAVACFAYTGRTAQELSFRRGDVLRLHERASSDWWRGEHNGMRGLIPHKYITLPAGTEKQVVGAGLQTAGESGSSPEGLLASELVHRPEPCTSPEAMGPSGHRRRCLVPASPEQHVEVDKAVAQNMDSVFKELLGKTSVRQGLGPASTTSPSPGPRSPKAPPSSRLGRNKGFSRGPGAPASPSASHPQGLDTTPKPH

SEQ ID NO: 50893 - protein, 40 aa, Homo sapiens
MAFTLYSLLQAALLCVNAIAVLHEERFLKNRNEGWQHAVH

SEQ ID NO: 50894 - protein, 28 aa, Homo sapiens
MKLTSCLERALGDVFLLIGKECPFLLRD

SEQ ID NO: 50895 - protein, 765 aa, Homo sapiens
MGDEDDDESCAVELRITEANLTGHEEKVSVENFELLKVLGTGAYGKVFLVRKAGGHDAGKLYAMKVLRKAALVQRAKTQEHTRTERSVLELVRQAPFLVTLHYAFQTDAKLHLILDYVSGGEMFTHLYQRQYFKEAEVRVYGGEIVLALEHLHKLGIIYRDLKLENVLLDSEGHIVLTDFGLSKEFLTEEKERTFSFCGTIEYMAPEIIRSKTGHGKAVDWWSLGILLFELLTGASPFTLEGERNTQAEVSRRILKCSPPFPPRIGPVAQDLLQRLLCKDPKKRLGAGPQGAQEVRNHPFFQGLDWVALAARKIPAPFRPQIRSELDVGNFAEEFTRLEPVYSPPGSPPPGDPRIFQGYSFVAPSILFDHNNAVMTDGLEAPGAGDRPGRAAVARSAMMQYELDLREPALGQGSFSVCRRCRQRQSGQEFAVKILSRRLEANTQREVAALRLCQSHPNVVNLHEVHHDQLHTYLVLELLRGGELLEHIRKKRHFSESEASQILRSLVSAVSFMHEEAGVVHRDLKPENILYADDTPGAPVKIIDFGFARLRPQSPGVPMQTPCFTLQYAAPELLAQQGYDESCDLWSLGVILYMMLSGQVPFQGASGQGGQSQAAEIMCKIREGRFSLDGEAWQGVSEEAKELVRGLLTVDPAKRLKLEGLRGSSWLQDGSARSSPPLRTPDVLESSGPAVRSGLNATFMAFNRGKREGFFLKSVENAPLAKRRKQKLRSATASRRGSPAPANPGRAPVASKGAPRRANGPLPPS

SEQ ID NO: 50896 - protein, 185 aa, Homo sapiens
MMCLKKQDLYNKFKGRVRTVSPSSKSPWVESEYLDYLFEVEPAPPVLVLTQTEEILSANATYQLPPCMPPLDLKYEVAFWKEGAGNKTLFPVTPHGQPVQITLQPAASEHHCLSARTIYTFSVPKYSKFSKPTCFLLEVPEANWAFLVLPSLLILLLVIAAGGVIWKTLMGNPWFQRAKMPRALV

SEQ ID NO: 50897 - protein, 629 aa, Homo sapiens [sequence omitted]

SEQ ID NO: 50898 - protein, 59 aa, Homo sapiens
MRMCTPIRGLLMALAVMFGTAMAFAPIPRITWEHREVHLVQFHEPDIYNYSALLLSEDK

SEQ ID NO: 50899 - protein, 88 aa, Homo sapiens
MRPRGLPPLLVVLLGCWASVSAQTDATPAVTTEGLNSTEAALATFGTFPSTRPPGTPRAPGPSSGPRPTPVTDGATASFVVKKQSSIH

SEQ ID NO: 50900 - protein, 78 aa, Homo sapiens
MASEVGHNLESPETPGGGGWTRVEFPPPAPKGAATVWCLNRLGSRKLSLIWITFNTGWNMKSRLIILIQQVRKIQLHS

SEQ ID NO: 50901 - protein, 135 aa, Homo sapiens
MGGAVSAGEDNDELIDNLKEAQYIRTELVEQAFRAIDRADYYLEEFKENAYKDLAWKHGNIHLSAPCIYSEVMEALDLQPGLSFLNLGSGTGYLSSMVGLILGPFGVNHGVELHSDVIEYAKQKLDFFIRTSDSF

SEQ ID NO: 50902 - protein, 21 aa, Homo sapiens
MAKERGLISPSDFAQLQKYME

SEQ ID NO: 50903 - protein, 263 aa, Homo sapiens
MALVLILQLLTLWPLCHTDITPSVPPASYHPKPWLGAQPATVVTPGVNVTLRCRAPQPAWRFGLFKPGEIAPLLFRDVSSELAEFFLEEVTPAQGGSYRCCYRRPDWGPGVWSQPSDVLELLVTEELPRPSLVALPGPVVGPGANVSLRCAGRLRNMSFVLYREGVAAPLQYRHSAQPWADFTLLGARAPGTYSCYYHTPSAPYVLSQRSEVLVISWEDSGSSDYTRGNLVRLGLAGLVLISLGALVTFDWRSQNRAPAGIRP

SEQ ID NO: 50904 - protein, 199 aa, Homo sapiens
  MOD_RES (1)..(1): Any amino acid
XFMSILFNKLWELLYKLQFVYTYIAPWQITWGSAFHAFAQPFAVPHSAMLFIQAAVSAFFSTPLNPFLGSAIFITSYVRPVKFWERDYKVLPLSSRLECNDTISTHCNLRLPECNGAILIHCNLRLPGTYCQQREVEAITEGVEEDEGFCCCEPGHIPHMLSFNAAFSQRWLAWEVIVTKYILEGYSITDNSAASMLQV

SEQ ID NO: 50905 - protein, 125 aa, Homo sapiens
MQTSSSRSVHLSEWQKNYFAITSGICTGPKADAYRAQILRIQYAWANSEISQVCATKLFKKYAEKYSAIIDSDNVESGLNNYAENILTLAGSQQTDSDKWQSGLSINNVFKMSSVQKMMQAGKKF

SEQ ID NO: 50906 - protein, 202 aa, Homo sapiens
MQPILLLLAFLLLPRADAGEIIGGHEAKPHSRPYMAYLMIWDQKSLKRCGGFLIRDDFVLTAAHCWGRLERKAKRTRAVQPLRLPSNKAQVKPGQTCSVAGWGQTAPLGKHSHTLQEVKMTVQEDRKCESDLRHYYDSTIELCVGDPEIKKTSFKGDSGGPLVCNKVAQGIVSYGRNNGMPPRACTKVSSFVHWIKKTMKRY

SEQ ID NO: 50907 - protein, 155 aa, Homo sapiens
MAGIKALISLSFGGAIGLMFLMLGCALPIYNKYWPLFVLFFYILSPIPYCIARRLVDDTDAMSNACKELAIFLTTGIVVSAFGLPIVFARAHLMESCSVAQPGVQWRDLTSLQALPPGFTPFSCLSLPSSWDYRCPPPRPADIFCVFSGDEVSPC

SEQ ID NO: 50908 - protein, 292 aa, Homo sapiens
MEDGVYEPPDLTPEERMELENIRRRKQELLVEIQRLREELSEAMSEVEGLEANEGSKTLQRNRKMAMGRKKFNMDPKKGIQFLVENELLQNTPEEIARFLYKGEGLNKTAIGDYLGEREELNLAVLHAFVDLHEFTDLNLVQALRQFLWSFRLPGEAQKIDRMMEAFAQRYCLCNPGVFQSTDTCYVLSFAVIMLNTSLHNPNVRDKPGLERFVAMNRGINEGGDLPEELLRNLYDSIRNEPFKIPEDDGNDLTHTFFNPDREGWLLKLGTGPGEDVEAALVYPHRQLPLLL

SEQ ID NO: 50909 - protein, 189 aa, Homo sapiens
  MOD_RES (1)..(1): Any amino acid
XLYKDGDIHRGFQSLLSEVNRTGTQYLLRTANRLFGEKTCDFLPDFKEYCQKFYQAELEELSFAEDTEECRKHINDWVAEKTEGKISEVLDAGTVDPLTKLVLVNAIYFKGKWNEQFDRKYTRGMLFKTNEEKKTVQMMFKEAKFKMGYADEVHTQVLELPYVEEELSMVILLPDDNTDLAVIKAGGEL

SEQ ID NO: 50910 - protein, 98 aa, Homo sapiens
MPDVKAEDEVDFRASSISEEVAVGSIAATLKMKQGPMTQAINRENWCTIEPCPDAASLLASKQSPECENFLDVGLGRECTSKQGVLKRESGSDSDLFH

SEQ ID NO: 50911 - protein, 119 aa, Homo sapiens
MEFGLSWVFLVAILKGVQCEVQLVESGGGLVQPGGSLRLSCAASGFTFSDHYMSWVRQAQGKGLELVGLIRNKANSYTTEYAASVKGRLTISREDSKNTLYLQMSNLKTEDLAVYYCAR

SEQ ID NO: 50912 - protein, 51 aa, Homo sapiens
MAPAADREGYWGPTTSTLDWCEENYSVTWYIAEFCSFLPSSLKSNLKEYSE

SEQ ID NO: 50913 - protein, 74 aa, Homo sapiens
MSRYTSPVNPAVFPHLTVVLLAIGMFFTAWFFVYEVTSTKYTRDIYKELLISLVASLFMGFGVLFLLLWVGIYV

SEQ ID NO: 50914 - protein, 133 aa, Homo sapiens
MKSNPAIQAAIDLTAGAAGGTACVLTGQPFDTMKVKMQTFPDLYRGLTDCCLKTYSQVGFRGFYKGTSPALIANIAENSVLFMCYGFCQQVVRKVAGLDKQAKLSTVWSVIKSILRKDGPLGFYHGLSSTLLR

SEQ ID NO: 50915 - protein, 289 aa, Homo sapiens
MHLSSHRLDEYWDRQRNRHRMVKVDPETRYMSLAVCELDQPGLGPLVAAACSDGAVRLFLLQDSGRILQLLAETFHHKRCVLKVHSFTHEAPNQRRRLLLCSAATDGSLAFWDLTTMLDHDSTVLEPPVDPGLPYRLGTPSLTLQAHSCGINSLHTLPTREGHHLVASGSEDGSLHVFVLAVEMLQLEEAVGEAGLVPQLRVLEEYSVPCAHAAHVTGLKILSPSIMVSASIDQRLTFWRLGHGEPTFMNSTVFHVPDVADMDCWPVSPEFGHRCALGGQGLEVYNWYD

SEQ ID NO: 50916 - protein, 262 aa, Homo sapiens
MEPNDSTSTAVEEPDSLEVLVKTLDSQTRTFIVGAQMNVKEFKEHIAASVSIPSEKQRLIYQGRVLQDDKKLQEYNVGGKVIHLVERAPPQTHLPSGASSGTGSASATHGGGSPPGTRGPGASVHDRNANSYVMVGTFNLPSDGSAVDVHINMEQAPIQSEPRVRLVMAQHMIRDIQTLLSRMECRGGPQPQHSQPPPQPPAVTPEPVALSSQTSEPVESEAPPREPMEAEEVEERAPAQNPELTPGPAPAGPTPAPETNAP

SEQ ID NO: 50917 - protein, 300 aa, Homo sapiens
MQISQVPRSKALEVTKLAIEAGFRHIDSAHLYNNEEQVGLAIRSKIADGSVKREDIFYTSKLWSTFHRPELVRPALENSLKKAQLDYVDLYLIHSPMSLKPGEELSPTDENGKVIFDIVDLCTTWEAMEKCKDAGLAKSIGVSNFNRRQLEMILNKPGLKYKPVCNQVECHPYFNRSKLLDFCKSKDIVLVAYSALGSQRDKRWVDPNSPVLLEDPVLCALAKKHKRTPALIALRYQLQRGVVVLAKSYNEQRIRQNVQVFEFQLTAEDMKAIDGLDRNLHYFNSDSFASHPNYPYSDEY

SEQ ID NO: 50918 - protein, 161 aa, Homo sapiens
GRKASEKTGGREGEPADRGLQLGGKAFGLLKAQQEERLDEINKQFLDDPKYSSDEDLPSKLEGFKEKYMEFDLNGNGDIDIMSLKRMLEKLGVPKTHLELKKLIGEVSSGSGETFSYPDFLRMMLGKRSAILKMILMYEEKAREKEKPTGPPAKKAISELP

SEQ ID NO: 50919 - protein, 559 aa, Homo sapiens
MERLEIQRIEKEKWHRLEAKDLERRNEELEELYLLERCFPEAEKLKQETKLLSQWKHYIQCDGSPDPSVAQEMNTFISLWKEKTNETFEEVIEKSKVVLNLIEKLKFILLETPPCDLQDKNIIQYQESILQLQELLHLKFGVATEILLKQASTLADLDSGNMEKVIKDENVTLYVWANLKKNPRHRSVRFSETQIGFEIPRILATSDIAVRLLHTHYDHVSALHPVSTPSKEYTSAVTELVKDDVKNVEKAISKEVEEESKQQERGSHLIQEEEIKVEEEQGDIEVKMGKNETSVTFFINYKGKHWRTDGISNVSYKPKERLVTFSLDTFGPVTLIQDAHINMPYQSWELRPLDVNKVLLTVTTVFTEIQIQIKENLCMLSSIKLKDKKHISILEGTWMTPIPFIIALKEAGLNIFPTRHSHFYVIINNKVPLVEVKAYRQMALLSSAFAFGWSKWNLLCNSTKVVFKVREHLTEACTENPNWALLMFSGDRAQRLKIKEESEAFSEALKEETEFHSTLYHMVKDFASEEAMEKVRSSNCQFVNSVCHMLLSTRLLSYS

SEQ ID NO: 50920 - protein, 714 aa, Homo sapiens
MLETYSHLLSVGYQVPEAEVVMLEQGKEPWALQGERPRQSCPGEKLWDHNQCRKILSYKQVSSQPQKMYPGEKAYECAKFEKIFTQKSQLKVHLKVLAGEKLYVCIECGKAFVQKPEFIIHQKTHMREKPFKCNECGKSFFQVSSLFRHQRIHTGEKLYECSQCGKGFSYNSDLSIHEKIHTGERHHECTDCGKAFTQKSTLKMHQKIHTGERSYICIECGQAFIQKTHLIAHRRIHTGEKPYECSNCGKSFISKSQLQVHQRVHTRVKPYICTEYGKVFSNNSNLVTHKKVQSREKSSICTECGKAFTYRSELIIHQRIHTGEKPYECSDCGKAFTQKSALTVHQRIHTGEKSYICMKCGLAFIQKAHLIAHQIIHTGEKPHKCGHCGKLFTSKSQLHVHKRIHTGEKPYMCNKCGKAFTNRSNLITHQKTHTGEKSYICSKCGKAFTQRSDLITHQRIHTGEKPYECNTCGKAFTQKSHLNIHQKIHTGERQYECHECGKAFNQKSILIVHQKIHTGEKPYVCTECGRAFIRKSNFITHQRIHTGEKPYECSDCGKSFTSKSQLLVHQPVHTGEKPYVCAECGKAFSGRSNLSKHQKTHTGEKPYICSECGKTFRQKSELITHHRIHTGEKPYECSDCGKSFTKKSQLQVHQRIHTGEKPYVCAECGKAFTDRSNLNKHQTTHTGDKPYKCGICGKGFVQKSVFSVHQSSHA

SEQ ID NO: 50921 - protein, 712 aa, Homo sapiens
MACQQSRYHSFSSASRLQPRPSGVTIDESFLTEDKSTQNRKLLQKRRTLTGQFSMGGHLSPWPTYTSGQTILQNRKPCSDDYRKRVGSCQQHPFRTAKPQYLEELENYLRKELLLLDLGTDSTQELRLQPYREIFEFFIEDFKTYKPLLSSIKNAYEGMLAHQREKIRALEPLKAKLVTVNEDCNERILAMRAEEKYEISLLKKEKMNLLKLIDKKNEEKISLQSEVTKLRKNLAEEYLHYLSERDACKILIADLNELRYQREDMSLAQSPGIWGEDPVKLTLALKMTRQDLTRTQMELNNMKANFGDVVPRRDFEMQEKTNKDLQEQLDTLRASYEEVRKEHEILMQLHMSTLKERDQFFSELQEIQRTSTPRPDWTKCKDVVAGGPERWQMLAEGKNSDQLVDVLLEEIGSGLLREKDFFPGLGYGEAIPAFLRFDGLVENKKPSKKDVVNLLKDAWKERLAEEQKETFPDFFFNFLEHRFGPSDAMAWAYTIFENIKIFHSNEVMSQFYAVLMGKRSENVYVTQKETVAQLLKEMTNADSQNEGLLTMEQFNTVLKSTFPLKTEEQIQELMEAGGWHPSSSNADLLNYRSLFMEDEEGQSEPFVQKLWEQYMDEKDEYLQQLKQELGIELHEEVTLPKLRGGLMTIDPSLDKQTVNTYMSQAFQLPESEMPEEGDEKEEAVVEILQTALERLQVIDIRRVGPREPEPAS

SEQ ID NO: 50922 - protein, 439 aa, Homo sapiens
MHSLNKTWANYSDCLRFLQPDISIGKQEFFERLYVMYTVGYSISFGSLAVAILIIGYFRRLHCTRNYIHMHLFVSFMLRATSIFVKDRVVHAHIGVKELESLIMQDDPQNSIEATSVDKSQYIGCKIAVVMFIYFLATNYYWILVEGLYLHNLIFVAFFSDTKYLWGFILIGWGFPAAFVAAWAVARATLADARCWELSAGDIKWIYQAPILAAIGLNFILFLNTVRVLATKIWETNAVGHDTRKQYRKLAKSTLVLVLVFGVHYIVFVCLPHSFTGLGWEIRMHCELFFNSFQGFFVSIIYCYCNGEVQAEVKKMWSRWNLSVDWKRTPPCGSRRCGSVLTTVTHSTSSQSQVAASTRMVLISGKAAKIASRQPDSHITLPGYVWSNSEQDCLPHSFHEETKEDSGRQGDDILMEKPSRPMESNPDTEGCQGETEDVL

SEQ ID NO: 50923 - protein, 266 aa, Homo sapiens
MSPTTSSQILARKRRRGIIEKRRRDRINNSLSELRRLVPSAFEKQGSAKLEKAEILQMTVDHLKMLHTAGGKGYFDAHALAMDYRSLGFRECLAEVARYLSIIEGLDASDPLRVRLVSHLNNYASQREAASGAHAGLGHIPWGTVFGHHPHIAHPLLLPQNGHGNAGTTASPTEPHHQGRLGSAHPEAPALRAPPSGSLGPVLPVVTSASKLSPPLLSSVASLSAFPFSFGSFHLLSPNALSPSAPTQAANLGKPYRPWGTEIGAF

SEQ ID NO: 50924 - protein, 69 aa, Homo sapiens
SAAGMGASGAPQPPNILLLLMDDRGRHCSQDGYPSAMASTPPTPMPETPTHRRRLWAASQTRSSSCRSF

SEQ ID NO: 50925 - protein, 47 aa, Homo sapiens
MFCVTPPELETKMNITKGGLVLFSANSNSSCMELSKKIADFFPLSLL

SEQ ID NO: 50926 - protein, 227 aa, Homo sapiens
MAQPPRLSRSGASSLWDPASPAPTSGPRPRLWEGQDVLARWTDGLLYLGTIKKVDSAREVCLVQFEDDSQFLVLWKDISPAALPGEELLCCVCRSETVVPGNRLVSCEKCRHAYHQDCHVPRAPAPGEGEGTSWVCRQCVFAIATKRGGALKKGPYARAMLGMKLSLPYGLKGLDWDAGHLSNRQQSYCYCGGPGEWNLKMLQCRSCLQWFHEACTQCLSKPLLYGD

SEQ ID NO: 50927 - protein, 359 aa, Homo sapiens
MAPLGTTVLLWSLLRSSPGVERVCFRARIQPWHGGLLQPLPCSFEMGLPRRRFSSEAESGSPETKKPTFMDEEVQSILTKMTGLNLQKTFKPAIQELKPPTYKLMTQAQLEEATRQAVEAAKVRLKMPPVLEERVPINDVLAEDKILEGTETTKYVFTDISYSIPHRERFIVVREPSGTLRKASWEERDRMIQVYFPKEGRKILTPIIFKEENLRTMYSQDRHVDVLNLCFAQFEPDSTEYIKVHHKTYEDIDKRGKYDLLRSTRYFGGMVWYFVNNKKIDGLLIDQIQRDLIDDATNLVQLYHVLHPDGQSAQGAKDQAAEGINLIKVFAKTEAQKGAYIELTLQTYQEALSRHSAAS

SEQ ID NO: 50928 - protein, 185 aa, Homo sapiens
QRLLLERTHCLVHKKPLQEVEIAAITHGALHGLAYLHSHALIHRDIKAGNILLTEPGQVKLADFGSASMASPANSFVGTPYWMAPEVILAMDEGQYDGKVDIWSLGITCIELAERKPPLFNMNAMSALYHIAQNDSPTLQSNEWTDSFRRFVDYCLQKIPQERPTSAELLRHDFVRRDRPLRVLI

SEQ ID NO: 50929 - protein, 86 aa, Homo sapiens
MPYIDESPTMSPQLSARSQGGGDGVSPTPPEGLAPGVEAGKGLEMRKLVLSGFLASEEIYINQLEALLLPMKPLKATATTSQPVLT

SEQ ID NO: 50930 - protein, 44 aa, Homo sapiens
MQAARCPTDELSLTNCAVVNEKDFQSGQHVIVRTSPNHRYTFTL

SEQ ID NO: 50931 - protein, 108 aa, Homo sapiens
MAAPSAGSWSTFQHKELMAADRGRRILGVCGMHPHHQETLKKNRVVLAKQLLLSELLEHLLEKDIITLEMRELIQAKVGSFSQNVELLNLLPKRGPQAFDAFCEALHS

SEQ ID NO: 50932 - protein, 203 aa, Homo sapiens
MFSVFEEITRIVVKEMDAGGDMIAVRSLVDADRFRCFHLVGEKRTFFGCRHYTTGLTLMDILDTDGDKWLDELDSGLQGQKAEFQILDNVDSTGELIVRLPKEITISGSFQGFHHQKIKISENRISQQYLATLENRKLKRELPFSFRSINTRENLYLVTETLETVKEETLKSDRQYKFWSQISQGHLSYKHKESLWVRRIPET

SEQ ID NO: 50933 - protein, 128 aa, Homo sapiens
MLTDPDLPQEFERMSSKRPASPYGEADGEVAMVTSRQKVEEEESDGLPAFHLPLHEVDGNKVMSSFAPHNSSTSPQKAEEGGRQSGESLSSTALGTPERRKGSLADVVDTLKQRKMEELIKNEPEGSH

SEQ ID NO: 50934 - protein, 24 aa, Homo sapiens
MDFNMKKLASDAGIFFTRAVQGRH

SEQ ID NO: 50935 - protein, 589 aa, Homo sapiens
MGSNLSPQLCLMPFILGLLSGGVTTTPWSLAQPQGSCSLEGVEIKGGSFRLLQEGQALEYVCPSGFYPYPVQTRTCRSTGSWSTLKTQDQKTVRKAECRAIHCPRPHDFENGEYWPRSPYYNVSDEISFHCYDGYTLRGSANRTCQVNGRWSGQTAICDNGAGYCSNPGIPIGTRKVGSQYRLEDSVTYHCSRGLTLRGSQRRTCQEGGSWSGTEPSCQDSFMYDTPQEVAEAFLSSLTETIEGVDAEDGHGPGEQQKRKIVLDPSGSMNIYLVLDGSDSIGASNFTGAKKCLVNLIEKVASYGVKPRYGLVTYATYPKIWVKVSEADSSNADWVTKQLNEINYEDHKLKSGTNTKKALQAVYSMMSWPDDVPPEGWNRTRHVIILMTDGLHNMGGDPITVIDEIRDLLYIGKDRKNPREDYLDVYVFGVGPLVNQVNINALASKKDNEQHVFKVKDMENLEDVFYQMIDESQSLSLCGMVWEHRKGTDYHKQPWQAKISVIRPSKGHESCMGAVVSEYFVLTAAHCFTVDDKEHSIKVSVGGEKRDLEIEVVLFHPNYNINGKKEAGIPEFYDYDVALIKLKNKLKYG

SEQ ID NO: 50936 - protein, 273 aa, Homo sapiens [sequence omitted]

SEQ ID NO: 50937 - protein, 185 aa, Homo sapiens
MAARCSTRWLLVVVGTPRLPAISGRGARPPREGVVGAWLSRKLSVPAFASSLTSCGPRALLTLRPGVSLTGTKHNPFICTASFHTSAPLAKEDYYQILGVPRNASQKEIKKAYYQLAKKYHPDTNKDDPKAKEKFSQLAEAYEYFMELTFNQAAKGVNKEFTVNIMDTCERCNGKGNEPGTKVQH

SEQ ID NO: 50938 - protein, 97 aa, Homo sapiens
MASVPVYCLCRLPYDVTRFMIECDMCQDWFHGSCVGVEEEKAADIDLYHCPNCEVLHGPSIMKKRRGSSKGHDTHKGKPVKTGSPTFVRELRSRTFD

SEQ ID NO: 50939 - protein, 202 aa, Homo sapiens
MSCSESPAANSFLVDSLISSGRGEAGGGGGGAGGGGGGGYYAHGGVYLPPAADLPYGLQSCGLFPTLGGKRNEAASPGSGGGGGGLGPGAHGYGPSPIDLWLDAPRSCRRRAATRGWPVPRAAPGARFRSPARASLRLGRCGPEGASPRFAAAPHAGLRQRRGLAGRRGGARVVLGRGGALPGPFREQQSLAGEGFPGQFQR

SEQ ID NO: 50940 - protein, 204 aa, Homo sapiens
MEQDPKPPRLRLWALIPWLPRKQRPRISQTSLPVPGPGSGPQRDSDEGVLKEISITHHVKAGSEKADPSHFELLKVLGQGSFGKVFLVRKVTRPDSGHLYAMKVLKKATLKVRDRVRTKMERDILADVNHPFVVKLHYAFQTEGKLYLILDFLRGGDLFTRLSKEVIYMIQKKNIHEEVFLPPQPPLFPSIGDVHGGGCEVLPG

SEQ ID NO: 50941 - protein, 66 aa, Homo sapiens
MPTAAAPIISSVQKLVLYETRARYFLVGSNNAETKYRVLKIDRTEPKDLVIIDDRVSTNISKCGPI

SEQ ID NO: 50942 - protein, 327 aa, Homo sapiens
MRSMKALQKALSRAGSHCGRGGWGHPSRSPLLGGGVRHHLSEAAAQGRETPHSHQPQHQDHDSSESGMLSRLGDLLFYTIAEGQERIPIHKFTTALKATGLQTSDPRLRDCMSEMHRVVQESSSGGLLDRDLFRKCVSSNIVLLTQAFRKKFVIPDFEEFTGHVDRIFEDVKELTGGKVAAYIPQLAKSNPDLWGVSLCTVDGQRHSVGHTKIPFCLQSCVKPLTYAISISTLGTDYVHKFVGKEPSGLRYNKLSLNEEGIPHNPMVNAGAIVVSSLIKMDCNKAEKFDFVLQYLNKMAGNEYMGFSNATEGNFSPSPNTHSSNFKY

SEQ ID NO: 50943 - protein, 321 aa, Homo sapiens
MLTFMASDSEEEVCDERTSLMSAESPTPRSCQEGRQGPEDGENTAQWRSQENEEDGEEDPDRYVCSGVPGRPPGLEEELTLKYGAKHVIMLFVPVTLCMIVVVATIKSVRFYTEKNGQLIYTPFTEDTPSVGQRLLNSVLNTLIMISVIVVMTIFLVVLYKYRCYKFIHGWLIMSSLMLLFLFTYIYLGEVLKTYNVAMDYPTLLLTVWNFGAVGMVCIHWKGPLVLQQAYLIMISALMALVFIKYLPEWSAWVILGAISVYDLVAVLCPKGPLRMLVETAQERNEPIFPALIYSCTVLGIGGPSRKEDHRVPGLMELTAL

SEQ ID NO: 50944 - protein, 330 aa, Homo sapiens
MGKLCLGPTLCPAAAAEESRDAEPRRELLCSGRPWTWRAAARVTTMIPWVLLACALPCAADPLLGAFARRDFRKGSPQLVCSLPGPQGPPGPPGAPGPSGMMGRMGFPGKDGQDGHDGDRGDSGEEGPPGRTGNRGKPGPKGKAGAIGRAGPRGPKGVNGTPGKHGTPGKKGPKGKKGEPGLPGPCSCGSGHTKSAFSVAVTKSYPRERLPIKFDKILMNEGGHYNASSGKFVCGVPGIYYFTYDITLANKHLAIGLVHNGQYRIRTFDANTGNHDVASGSTILALKQGDEVWLQIFYSEQNGLFYDPYWTDSLFTGFLIYADQDDPNEV

SEQ ID NO: 50945 - protein, 176 aa, Homo sapiens
MLPLSHPGGVTNTAQYQNRLMVYEPNQNKWISRSPMLQRRVYHSMAAVQRKLYVLGGNDLDYNNDRILVRHIDSYNIDTDQWTRCNFNLLTGQNESGVAVHNGRIYLVGGYSIWTNEPLACIQVLDVSREGKEEVFYGPTLPFASNGIAACFLPAPYFTCPNLQTLQVPHHRIGTI

SEQ ID NO: 50946 - protein, 170 aa, Homo sapiens
  MOD_RES (1)..(1): Any amino acid
XKGSLPLQKLHLVSRSIYHSHHPTLKLQRPQLRTSFQQFSSLTNLPLRKLKFSPIKYGYQPRRNFWPARLATRLLKLRYLILGSAVGGGYTAKKTFDQWKDMIPDLSEYKWIVPDIVWEIDEYIDFEKIRKALPSSEDLVKLAPDFDKIVESLSLLKDFFTSGYQSCSLK

SEQ ID NO: 50947 - protein, 127 aa, Homo sapiens
MALSSRARAFSVEALVGRPSKRKLQDPIQAEQPELREKKGGEEEEERRSSAAGKSEPLEKQPKTEPSTSASSGCGSDSGYGNSSESLEEKDIQMELQGSELWKRFHDIGTEMIITKAGGCSPLFGSR

SEQ ID NO: 50948 - protein, 417 aa, Homo sapiens
TIARQLAEILLRGMCEQSYWNPLEDPPCQSPLDDPLRKGANTKTYTLTRRARVYSGENIFCPQENTEEALLLLLISESMANRDAVLSRIPEHKSDRLISLQSASVVYDLLTIALGRRGQYEMLSECLERAMKFAFEEFHLWYQFALSLMAAGKSARAVKVLKECIRLKPDDATIPLLAAKLCMGSLHWLEEAEKFAKTVVDVGEKTSEFKAKGYLALGLTYSLQATDASLRGMQEVLQRKALLAFQRAHSLSPTDHQAAFYLALQLAISRQIPEALGYVRQALQLQGDDANSLHLLALLLSAQKHYHDALNIIDMALSEYPENFILLFSKVKLQSLCRGPDEALLTCKHMLQIWKSCYNLTNPSDSGRGSSLLDRTIADRRQLNTITLPDFSDPETGNQCSWIAFGEMLVDMGIQCI

SEQ ID NO: 50949 - protein, 109 aa, Homo sapiens
MSVNVNRSVSDQFYRYKMPRLIAKVEGKGNGIKTVIVNMVDVAKALNRPPTYPTKYFGCELGAQTQFDVKNDRYIVNGSHEANKLQDMLDGFIKKFVLCPECENPETDL

SEQ ID NO: 50950 - protein, 134 aa, Homo sapiens
MAYFPGTGRTDQETQLDLSLCGREPESLENLFLDPDMAQEKMKLGFKSLPSSTTADGNILRRVNSAPLINGLGRSLTVSPRLECSGMISAHCNLCLPGSSDSPASDSRVAGTSGTRHHAHLIFCIFSRDGVSPC

SEQ ID NO: 50951 - protein, 189 aa, Homo sapiens
MYSGNRSGGHGYWDGGGAAGAEGPAPAGTLSPAPLFSPGTYERLALLLGSIGLLGVGNNLLVLVLYYKFQRLRTPTHLLLVNISLSDLLVSLFGVTFTFVSCLRNGWVWDTVGCVWDGFSGSLFGIVSIATLTVLAYERYIRVVHARVINFSWAWRAITYIWLYSLAWAGAPLLGWNSFVVWKIFRQFK

SEQ ID NO: 50952 - protein, 196 aa, Homo sapiens
MISEGGWGWQGWGRSQGLRPAPCSWVSRMVSPPAAIQETQLHFLADTLPSPLSILLPPHKQEELSQSQLLIADLLPASDLGNFQTSRETQSYQKAQPTPISFSPDHRKVSRDVIPGAALGTASSRCWQMLCPSPSVPGTRWGRPQWKLLNSVTGQSSDTVISQFSLAMSFPNFPVPQLRFLNTCSTDETKKSSVNK

SEQ ID NO: 50953 - protein, 71 aa, Homo sapiens
MFHVSFRYIFGLPPLILVLLPVASSDCDIEGKDGKQYESVLMVSIDQLLNQPYKKKEKRTERKQQSAMSNN

SEQ ID NO: 50954 - protein, 53 aa, Homo sapiens
MSGAGVGGASEESQAMQAHVSIILPVHNAEPWLDECLRSVLQQDFEGQVWGYH

SEQ ID NO: 50955 - protein, 444 aa, Homo sapiens
MLLMVVSMACVGFFLVQRAGPHVGGQDKPFLSAWPSAVVPRGGHVTLRCHYRHRFNNFMLYKEDRIHVPIFHGRLFQESFNMSPVTTAHAGNYTCRGSHPHSPTGWSAPSNPVVIMVTGNHRKPSLLAHPGPLVKSGERVILQCWSDIMFEHFFLHKEGISKDPSRLVGQIHDGVSKANFSIGPMMLALAGTYRCYGSVTHTPYQLSAPSDPLDIVVTGPYEKPSLSAQPGPKVQAGESVTLSCSSRSSYDMYHLSREGGAHERRLPAVRKVNRTFQADFPLGPATHGGTYRCFGSFRHSPYEWSDPSDPLLVSVTGNPSSSWPSPTEPSSKSGNPRHLHILIGTSVVIILFILLLFFLLHLWCSNKKNAAVMDQEPAGNRTANSEDSDEQDPEEVTYAQLDHCVFTQRKITRPSQRPKTPPTDTILYTELPNAKPRSKVVSCP

SEQ ID NO: 50956 - protein, 121 aa, Homo sapiens
MFDRENKAGVNFSEFTGVWKYITDWQNVFRTYDRDNSGMIDKNELKQALSGFGYRLSDQFHDILIRKFDRQGRGQIAFDDFIQGCIVLQRLTDIFRRYDTDQDGWIQVSYEQYLSMVFSIV

SEQ ID NO: 50957 - protein, 96 aa, Homo sapiens
MQLNDKWQGLCWPMMDFLRCVTAALIYFAISITAIAKYSDGASKAAGVFGFFATIVFATDFYLIFNDVAKFLKQGDSADETTAHKTEEENSDSDSD

SEQ ID NO: 50958 - protein, 620 aa, Homo sapiens
MPLHQLGDKPLTFPSPNSAMENGLDHTPPSRRASPGTPLSPGSLRSAAHSPLDTSKQPLCQLWAEKHGARGTHEVRYVSAGQSVACGWWAFAPPCLQVLNTPKGILFFLCAAAFLQGMTVNGFINTVITSLERRYDLHSYQSGLIASSYDIAACLCLTFVSYFGGSGHKPRWLGWGVLLMGTGSLVFALPHFTAGRYEVELDAGVRTCPANPGAVCADSTSGLSRYQLVFMLGQFLHGVGATPLYTLGVTYLDENVKSSCSPVYIAIFYTAAILGPAAGYLIGGALLNIYTEMGRRTELTTESPLWVGAWWVGFLGSGAAAFFTAVPILGYPRQLPGSQRYAVMRAAEMHQLKDSSRGEASNPDFGKTIRDLPLSIWLLLKNPTFILLCLAGATEATLITGMSTFSPKFLESQFSLSASEAATLFGYLVVPAGGGGTFLGGFFVNKLRLRGSAVIKFCLFCTVVSLLGILVFSLHCPSVPMAGVTASYGGSLLPEGHLNLTAPCNAACSCQPEHYSPVCGSDGLMYFSLCHAGCPAATETNVDGQKVSGAAAYRPCPPLDPGKGPPCLPLVIGAIVGLPRCTETVAVSLRIFPLVLAMPLQGNALQLVRESPSFWFSYSL

SEQ ID NO: 50959 - protein, 397 aa, Homo sapiens
YTLEQALLSASQEIEMHADNPAAIQTVVLQRDDLQNGLLSTCRELSRATAELERAWREYDKLEYDVTVTRNQMQEQLDHLGEVQTESAGIQRAQIQKELWRIQDVMEGLSKHKQQRGTTEIGSHFPVGVVPPRAKSPTPESSTIASYVTLRKTKKMMDLRTERPRSAVEQLCLAESTRPRMTVEEQMERIRRHQQACLREKKKGLNVIGASDQSPLQSPSNLRDNPFRTTQTRRRDDKELDTAIRENDVKPDHETPATEIVQLKETEPQNVDFSKELKKTENISYEMLFEPEPNGVNSVEMMDKERNKDKMPEDVTFSPQDETQTANHKPEEHPEENTKNSVDEQEETVISYESTPEVSRGNQTMAVKSLSPSPESSASPVPSTQPQLTEGSHFMCV

SEQ ID NO: 50960 - protein, 194 aa, Homo sapiens
MALLEAVMDCGFGNWQDVANQMCTKTKEECEKHYMKHFINNPLFASTLLNLKQAEEAKTADTAIPFHSTDDPPRPTFDSLLSRDMAGYMPARADFIEEFDNYAEWDLRDIDFVEDDSDILHALKMAVVDIYHSRLKERQRRKKIIRDHGLINLRKFQLMERRYPKEVQDLYETMRRFARIVGPVEHDKFIESHA

SEQ ID NO: 50961 - protein, 2564 aa, Homo sapiens
MAQVPGEVDNMEGLPAPNNNPAARWESPDRGWEREQPAASTAAASLFECSRIKALADEREAVQKKTFTKWVNSHLARVGCHIGDLYVDLRDGFVLTRLLEVLSGEQLPRPTRGRMRIHSLENVDKALQFLKEQRVHLENVGSHDIVDGNHRLTLGLVWTIILRFQIQVIKIETEDNRETRSAKDALLLWCQMKTAGYPEVNIQNFTTSWRDGLAFNALIHRHRPDLVDFSKLTKSNANYNLQRAFRTAEQHLGLARLLDPEDVNMEAPDEKSIITYVVSFYHYFSKMKALAVEGKRIGKVLDQVLEVGKIIERYEELAAELLAWIHRTVGLISNQKFANSLSGVQQQLQAFTAYCTLEKPVKFQEKGNLEVLLFSIQSKLRACNRRLFVPREGCGIWDIDKAWGELEKAEHEREAALRAELIRQEKLELLAQRFDHKVAMRESWLNENQRLVSQDNFGYELPAVEAAMKKHEAIEADIAAYEERVQGVAELAQALAAEGYYDIRRVAAQRDSVLRQWALLTGLVGARRTRLEQNLALQKVFQEMVYMVDWMEEMQAQLLSRECGQHLVEADDLLQKHGLLEGDIAAQSERVEALNAAALRFSQLQGYQPCDPQVICNRVNHVHGCLAELQEQAARRRAELEASRSLWALLQELEEAESWARDKERLLEAAGGGGAAGAAGAAGTAGGAHDLSSTARLLAQHKILQGELGGRRALLQQALRCGEELVAAGGAVGPGADTVHLVGLAERAASARRRWQRLEEAAARRERRLQEARALHQFGADLDGLLDWLRDAYRLAAAGDFGHDEASSRRLARQHRALTGEVEAHRGPVSGLRRQLATLGGASGAGPLVVALQVRVVEAEQLFAEVTEVAALRRQWLRDALAVYRMFGEVHACELWIGEKEQWLLSMRVPDSLDDVEVVQHRFESLDQEMNSLMGRVLDVNHTVQELVEGGHPSSDEVRSCQDHLNSRWNRIVELVEQRKEEMSAVLLVENHVLEVAEVRAQVREKRRAVESAPRAGGALQWRLSGLEAALQALEPRQAALLEEAALLAERFPAQAARLHQGAEELGAEWGALASAAQACGEAVAAAGRLQRFLHDLDAFLDWLVRAQEAAGGSEGPLPNSLEEADALLARHAALKEEVDQREEDYARIVAASEALLAADGAELGPGLALDEWLPHLELGWHKLLGLWEARREALVQAHIYQLFLRDLRQALVVLRNQEMALSGAELPGTVESVEEALKQHRDFLTTMELSQQKMQVAVQAAEGLLRQGNIYGEQAQEAVTRLLEKNQENQLRAQQWMQKLHDQLELQHFLRDCHELDGWIHEKMLMARDGTREDNHKLHKRWLRHQAFMAELAQNKEWLEKIEREGQQLMQEKPELAASVRKKLGEIRQCWAELESTTQAKARQLFEASKADQLVQSFAELDKKLLHMESQLQDVDPGGDLATVNSQLKKLQSMESQVEEWYREVGELQAQTAALPLEPASKELVGERQNAVGERLVRLLEPLQERRRLLLASKELHQVAHDWTTSWAWVQERLPLAMQTERGNGLQAVQQHIKKNQGLRREIQAHGPRLEEVLERAGALASLRSPEAEAVRRGLEQLQSAWAGLREAAERRQQVLDAAFQVEQYYFDVAEVEAWLGEQELLMMSEDKGKDEQSTLQLLKKHLQLEQGVENYEESIAQLSRQCRALLEMGHPDSEQISRRQSQVDRLYVALKELGEERRVALEQQYWLYQLSRQVSELEHWIAEKEVVAGSPELGQDFEHVSVLQEKFSEFASETGMAGRERLAAVNQMVDELIECGHTAAATMAEWKDGLNEAWAELLELMGTRAQLLAASRELHKFFSDARELQGQIEEKRRRLPRLTTPPEPRPSASSMQRTLRAFEHDLQLLVSQVRQLQEGAAQLRTVYAGEHAEAIASREQEVLQGWKELLSACEDARLHVSSTADALRFHSQVRDLLSWMDGIASQIGAADKPRDVSSVEVLMNYHQGLKTELEARVPELTTCQELGRSLLLNKSAMADEIQAQLDKLGTRKEEVSEKWDRHWEWLQQMLEVHQFAQEAVVADAWLTAQEPLLQSRELGSSVDEVEQLIRRHEAFRKAAAAWEERFSSLRRLTTIEKIKAEQSKQPPTPLLGRKFFGDPTELAAKAAPLLRPGGYERGLEPLARRASDTLSAEVRTRVGYVRQELKPERLQPRIDRLPEIPGRVEPAALPAAPEDAAETPATPAAAEQVRPRPERQESADRAEELPRRRRPERQESVDQSEEAARRRRPERQESAEHEAAHSLTLGRYEQMERRRERRERRLERQESSEQEMPIRGDLVKGKATLADIVEQLQEKEAGPGLPAGPSLPQPRELPPGRLPNGLELPERTPRPDRPRARDRPKPRRRPRPREGGEGGGSRRSRSAPAQGGSAPAPPPPPTHTVQHEGFLLRKRELDANRKSSNRSWVSLYCVLSKGELGFYKDSKGPASGSTHGGEPLLSLHKATSEVASDYKKKKHVFKLQTQDGSEFLLQAKDEEEMNGWLEAVASSVAEHAEIARWGQTLPTTSSTDEGNPKREGGDRRASGRRK

SEQ ID NO: 50962 - protein, 1506 aa, Homo sapiens
MEPRSMEYFCAQVQQKDVGGRLQVGQELLLYLGAPGAISDLEEDLGRLGKTVDALTGWVGSSNYRVSLMGLEILSAFVDRLSTRFKSYVAMVIVALIDRMGDAKDKVRDEAQTLILKLMDQVAPPMYIWEQLASGFKHKNFRSREGVCLCLIETLNIFGAQPLVISKLIPHLCILFGDSNSQVRDAAILAIVEIYRHVGEKVRMDLYKRGIPPARLEMIFAKFDEVQSSGGMILSVCKDKSFDDEESVDGNRPSSAASAFKVPAPKTSGNPANSARKPGSAGGPKVGGASKEGGAGAVDEDDFIKAFTDVPSIQIYSSRELEETLNKIREILSDDKHDWDQRANALKKIRSLLVAGAAQYDCFFQHLRLLDGALKLSAKDLRSQVVREACITVAHLSTVLGNKFDHGAEAIVPTLFNLVPNSAKVMATSGCAAIRFIIRHTHVPRLIPLITSNCTSKSVPVRRRSFEFLDLLLQEWQTHSLERHAAVLVETIKKGIHDADAEARVEARKTYMGLRNHFPGEAETLYNSLEPSYQKSLQTYLKSSGSVASLPQSDRSSSSSQESLNRPFSSKWSTANPSTVAGRVSAGSSKASSLPGSLQRSRSDIDVNAAAGAKAHHAAGQSVRSGRLGAGALNAGSYASLEDTSDKLDGTASEDGRVRAKLSAPLAGMGNAKADSRGRSRTKMVSQSQPGSRSGSPGRVLTTTALSTVSSGVQRVLVNSASAQKRSKIPRSQGCSREASPSRLSVARSSRIPRPSVSQGCSREASRESSRDTSPVRSFQPLGPGYGISQSSRLSSSVSAMRVLNTGSDVEEAVADALKKPARRRYESYGMHSDDDANSDASSACSERSYSSRNGSIPTYMRQTEDVAEVLNRCASSNWSERKEGLLGLQNLLKNQRTLSRVELKRLCEIFTRMFADPHGKRVFSMFLETLVDFIQVHKDDLQDWLFVLLTQLLKKMGADLLGSVQAKVQKALDVTRESFPNDLQFNILMRFTVDQTQTPSLKVKVAILKYIETLAKQMDPGDFINSSETRLAVSRVITWTTEPKSSDVRKAAQSVLISLFELNTPEFTMLLGALPKTFQDGATKLLHNHLRNTGNGTQSSMGSPLTRPTPRSPANWSSPLTSPTNTSQNTLSPSAFDYDTENMNSEDIYSSLRGVTEAIQNFSFRSQEDMNEPLKRDSKKDDGDSMCGGPGMSDPRAGGDATDSSQTALDNKASLLHSMPTHSSPRSRDYNPYNYSDSISPFNKSALKEAMFDDDADQFPDDLSLDHSDLVAELLKELSNHNERVEERKIALYELMKLTQEESFSVWDEHFKTILLLLLETLGDKEPTIRALALKVLREILRHQPARFKNYAELTVMKTLEAHKDPHKEVVRSAEEAASVLATSISPEQCIKVLCPIIQTADYPINLAAIKMQTKVIERVSKETLNLLLPEIMPGLIQGYDNSESSVRKACVFCLVAVHAVIGDELKPHLSQLTGSKMKLLNLYIKRAQTGSGGADPTTDVSGQS

SEQ ID NO: 50963 - protein, 682 aa, Homo sapiens
MAAAATAAEGVPSRGPPGEVIHLNVGGKRFSTSRQTLTWIPDSFFSSLLSGRISTLKDETGAIFIDRDPTVFAPILNFLRTKELDPRGVHGSSLLHEAQFYGLTPLVRRLQLREELDRSSCGNVLFNGYLPPPVFPVKRRNRHSLVGPQQLGGRPAPVRRSNTMPPNLGNAGLLGRMLDEKTPPSPSGQPEEPGMVRLVCGHHNWIAVAYTQFLVCYRLKEASGWQLVFSSPRLDWPIERLALTARVHGGALGEHDKMVAAATGSEILLWALQAEGGGSEIGRIGVWNAVTKHWQVQEVQPITSYDAAGSFLLLGCNNGSIYYVDVQKFPLRMKDNDLLVSELYRDPAEDGVTALSVYLTPKTSDSGNWIEIAYGTSSGGVRVIVQHPETVGSGPQLFQTFTVHRSPVTKIMLSEKHLISVCADNNHVRTWSVTRFRGMISTQPGSTPLASFKILALESADGHGGCSAGNDIGPYGERDDQQVFIQKVVPSASQLFVRLSSTGQRVCSVRSVDGSPTTAFTVLECEGSRRLGSRPRRYLLTGQANGSLAMWDLTTAMDGLGQAPAGGLTEQELMEQLEHCELAPPAPSAPSWGCLPSPSPRISLTSLHSASSNTSLSGHRGSPSPPQAEARRRGGGSFVERCQELVRSGPDLRRPPTPAPWPSSGLGTPLTPPKMKLNETSF

SEQ ID NO: 50964 - protein, 170 aa, Homo sapiens
MSLSFCGNNISSYNINDGVLQNSCFVDALNLVPHVFLLFITFPILFIGWGSQSSKVQIHHNTWLHFPGHNLRWILTFALLFVHVCEIAEGIVSDSRRESRHLHLFMPAVMGFVATTTSIVYYHNIETSNFPKLLLVPGVSVSGLESKDIFPRFKPFTDAVGMPHFTRITM

SEQ ID NO: 50965 - protein, 9 aa, Homo sapiens
  MOD_RES (1)..(1): Any amino acid
XECNLRYLG

SEQ ID NO: 50966 - protein, 122 aa, Homo sapiens
MAARCSTRWLLVVVGTPRLPAISGRGARPPREGVVGAWLSRKLSVPAFASSLTSCGPRALLTLRPGVSLTGGVLLCRPGWSAMARSWLTATSASQEQNITLSFVLPPSTRVPLWPKKIIIRY

SEQ ID NO: 50967 - protein, 331 aa, Homo sapiens
MAPPAPGPASGGSGEVDELFDVKNAFYIGSYQQCINEAQRVKLSSPERDVERDVFLYRAYLAQRKFGVVLDEIKPSSAPELQAVRMFADYLAHESRRDSIVAELDREMSRSVDVTNTTFLLMAASIYLHDQNPDAALRALHQGDSLEWVSSPGRALHLEAQPMEAASPDGRTAMTVQILLKLDRLDLARKELKRMQDLDEDATLTQLATAWVSLATGGEKLQDAYYIFQEMADKCSPTLLLLNGQAACHMAQGRWEAAEGLLQEALDKDSGYPETLVNLIVLSQHLGKPPEVTNRYLSQLKDAHRSHPFIKEYQAKENDFDRLVLQYAPSA

SEQ ID NO: 50968 - protein, 136 aa, Homo sapiens
FRQKYWNKLQTLRQQPFAYGTLTVRSLLDTREHCLNEFNFPDPYSKVKQRENGVALRCFPGVVRSLDALGWEERQLALVKGLLAGNVFDWGAKAVSAVLESDPYFGFEEAKRKLQERPWLVDSYSEWLQRLKITVE

SEQ ID NO: 50969 - protein, 205 aa, Homo sapiens
MNSIKSFSDHAQCGRLEVHLVGGFSDDRQLSQKLTHQLLSEFDRQEDDIHLVTLCVTELNDREENENHFPVIYGIAVNIKTAEIYRASFQDRGPEEQLRAARTLAGGPMISIYDAETEQLRIGPYSWTPFPHVDFWLHQDDKQILENLSTSPLAEPPHFVEHIRSTLMFLKKHPSPAHTLFSGNKALLYKKNEDGLWEKISSPGS

SEQ ID NO: 50970 - protein, 61 aa, Homo sapiens
MAEGSGEVVAVSATGAANGLNNGAGGTSATTCNPLSRKLHKILETRLDNDKVPSRLSGWDW

SEQ ID NO: 50971 - protein, 58 aa, Homo sapiens
MVQIVISSARAGGLAEWVLMELQGEIEARYSTGLAGNLLGDLHYTTEGYIGLQVPVHM

SEQ ID NO: 50972 - protein, 883 aa, Homo sapiens
MPVRKQDTQRALHLLEEYRSKLSQTEDRQLRSSIERVINIFQSNLFQALIDIQEFYEVTLLDNPKCIDRSKPSEPIQPVNTWEISSLPSSTVTSETLPSSLSPSVEKYRYQDEDTPPQEHISPQITNEVIGPELVHVSEKNLSEIENVHGFVSHSHISPIKANPPPVLVNTDSLETPTYVNGTDADYEYEEITLERGNSGLGFSIAGGTDNPHIGDDSSIFITKIITGGAAAQDGRLRVNDCILRVNEVDVRDVTHSKAVEALKEAGSIVRLYVKRRKPVSEKIMEIKLIKGPKGLGFSIAGGVGNQHIPGDNSIYVTKIIEGGAAHKDGKLQIGDKLLAVNNVCLEEVTHEEAVTALKNTSDFVYLKVAKPTSMYMNDGYAPPDITNSSSQPVDNHVSPSSFLGQTPASPARYSPVSKAVLGDDEITREPRKVVLHRGSTGLGFNIVGGEDGEGIFISFILAGGPADLSGELRKGDRIISVNSVDLRAASHEQAAAALKNAGQAVTIVAQYRPEEYSRFEAKIHDLREQMMNSSISSGSGSLRTSQKRSLYVRALFDYDKTKDSGLPSQGLNFKFGDILHVINASDDEWWQARQVTPDGESDEVGVIPSKRRVEKKERARLKTVKFNSKTRDKGEIPDDMGSKGLKHVTSNASDSESSYLILITDEYGCSKGGQEEYVLSYEPVNQQEVNYTRPVIILGPMKDRINDDLISEFPDKFGSCVPHTTRPKRDYEVDGRDYHFVTSREQMEKDIQEHKFIEAGQYNNHLYGTSVQSVREVAEKGKHCILDVSGNAIKRLQIAQLYPISIFIKPKSMENIMEMNKRLTEEQARKTFERAMKLEQEFTEHFTAIVQGDTLEDIYNQVKQIIEEQSGSYIWVPAKEKL

SEQ ID NO: 50973 - protein, 36 aa, Homo sapiens
MAASGEPQRQWQEEVAAVVVVGSCMTDLVRRYIRTQ

SEQ ID NO: 50974 - protein, 50 aa, Homo sapiens
MAPKKLSCLRSLLLPLSLTLLLPQTGPRSAMCLAACTTFGYRGCFGPTGF

SEQ ID NO: 50975 - protein, 456 aa, Homo sapiens
MGNGESQLSSVPAQKLGWFIQEYLKPYEECQTLIDEMVNTICDVLQEPEQFPLVQGVAIGGSYGRKTVLRGNSDGTLVLFFSDLKQFQDQKRSQRDILDKTGDKLKFCLFTKWLKNNFEIQKSLDGFTIQVFTKNQRISFEVLAAFNALSLNDNPSPWIYRELKRSLDKTNASPGEFAVCFTELQQKFFDNRPGKLKDLILLIKHWHQQCQKKIKDLPSLSPYALELLTVYAWEQGCRKDNFDIAEGVRTVLELIKCQEKLCIYWMVNYNFEDETIRNILLHQLQSARPVILDPVDPTNNVSGDKICWQWLKKEAQTWLTSPNLDNELPAPSWNVLPAPLFTTPGHLLDKFIKEFLQPNKCFLEQIDSAVNIIRTFLKENCFRQSTAKIQIVRKVYQPCTSIMDIHPMIARPAGENTHQRTDEHLHHNYCIPLDLFGYRNPNKAKYVFRKIFRKLT

SEQ ID NO: 50976 - protein, 794 aa, Homo sapiens
MGELFRSEEMTLAQLFLQSEAAYCCVSELGELGKVQFRDLNPDVNVFQRKFVNEVRRCEEMDRKLRFVEKEIRKANIPIMDTGENPEVPFPRDMIDLEMADPDLLEESSSLLEPSEMGRGTPLRLGFVAGVINRERIPTFERMLWRVCRGNVFLRQAEIENPLEDPVTGDYVHKSVFIIFFQGDQLKNRVKKICEGFRASLYPCPETPQERKEMASGVNTRIDDLQMVLNQTEDHRQRVLQAAAKNIRVWFIKVRKMKAIYHTLNLCNIDVTQKCLIAEVWCPVTDLDSIQFALRRGTEHSGSTVPSILNRMQTNQTPPTYNKTNKFTYGFQNIVDAYGIGTYREINPAPYTIITFPFLFAVMFGDFGHGILMTLFAVWMVLRESRILSQKNENEMFSTVFSGRYIILLMGVFSMYTGLIYNDCFSKSLNIFGSSWSVRPMFTYNWTEETLRGNPVLQLNPALPGVFGGPYPFGIDPIWNIATNKLTFLNSFKMKMSVILGIIHMLFGVSLSLFNHIYFKKPLNIYFGFIPEIIFMTSLFGYLVILIFYKWTAYDAHTSENAPSLLIHFINMFLFSYPESGYSMLYSGQKGIQCFLVVVALLCVPWMLLFKPLVLRRQYLRRKHLGTLNFGGIRVGNGPTEEDAEIIQHDQLSTHSEDADEPSEDEVFDFGDTMVHQAIHTIEYCLGCISNTASYLRLWALSLAHAQLSEVLWTMVIHIGLSVKSLAGGLVLFFFFTAFATLTVAILLIMEGLSAFLHALRLHWVEFQNKFYSGTGFKFLPFSFEHIREGKFEE

SEQ ID NO: 50977 - protein, 164 aa, Homo sapiens
  MOD_RES (1)..(1): Any amino acid
XLKMETPGMTTPSLKTDGGRRTATSPPPTTSQTIISTIPSTAMHTRSTAAPIPILPERGEAIQEFPSSPMGQAPGTWSSSGGPWTSPPHSSSRRLASPLAPLSVIPSTSQTMARSSSQSQTTRFSPTPTHSQQASQAGTLWPWWLRSGTMLTSPLVGGPHFIRL

SEQ ID NO: 50978 - protein, 170 aa, Homo sapiens
MWATLPLLCAGAWLLGVPVCGAAELCVNSLEKFHFKSWMSKHRKTYSTEEYHHRLQTFASNWRKINAHNNGNHTFKMALNQFSDMSFAEIKHKYLWSEPQNCSATKSNYLRGTGPYPPSVDWRKKGNFVSPVKNQGACGSCWTFSTTGALESAIAIATGKMLSLQPQLSS

SEQ ID NO: 50979 - protein, 458 aa, Homo sapiens
MLFQEATAFENMTKDWNYLEGSQKDCYRDTMLDSYENTVPQGSFLQLSMMPQRAGNDPPGVSNASEMEMEISNMREKFLMSVTKLVESKSYNSKVFSKEKYFQTIKEVKEAKEKGKKSSRDYRRAAKYDVISVQGTEKLIEATHGERDRIRYYVHKEELFDILHDTHLSIGHGGRTRMLKELQGKYGNVTKEVIVLYLTLCKQCHQKNPVPKRGLAPKPMTFKDIDSTCQVEILDMQSSADGEFKFILYYQDHSTKFIILRPLRTKQAHEVVSVLLDIFTILGTPSVLDSDSGVEFTNQVVHELNELWPDLKIVSGKYHPGQSQGSLEGASRDVKNMISTWMQSNHSCHWAKGLRFMQMVRNQAFDVSLQQSPFEAMFGYKAKFGLYSSNLPRETVATLQTEEELEIAEEQLENSLWIRQEERAEIGADRSDMDDDMDPTPEASEPSTSQGTSGLLCW

SEQ ID NO: 50980 - protein, 46 aa, Homo sapiens
MGKLVALVLLGVGLSLVGEMFLAFRVGFYLLQRKGECLSRSGASRT

SEQ ID NO: 50981 - protein, 113 aa, Homo sapiens
MATNFSDIVKQGYVKMKSRKLGIYRRCWLVFRKSSSKGPQRLEKYPDEKSVCLRGCPKVTEISNVKCVTRLPKETKRQAVAIIFTDDSARTFTCDSELEAEEWYKTLSVECLG

SEQ ID NO: 50982 - protein, 105 aa, Homo sapiens
MSKSKVDNQFYSVEVGDSTFTVLKRYQNLKPIGSGAQGIVCAAYDAVLDRNVAIKKLSRPFQNQTHAKRAYRELVLMKCVNHKNLLSNGTDGCQLMSSDSDGIRP

SEQ ID NO: 50983 - protein, 27 aa, Homo sapiens
MSVGVSTSAPLSPTSGTSVGMSTFSIM

SEQ ID NO: 50984 - protein, 706 aa, Homo sapiens
MSLKPRVVDFDETWNKLLTTIKAVVMLEYVERATWNDRFSDIYALCVAYPEPLGERLYTETKIFLENHVRHLHKRVLESEEQVLVMYHRYWEEYSKGADYMDCLYRYLNTQFIKKNKLTEADLQYGYGGVDMNEPLMEIGELALDMWRKLMVEPLQAILIRMLLREIKNDRGGEDPNQKVIHGVINSFVHVEQYKKKFPLKFYQEIFESPFLTETGEYYKQEASNLLQESNCSQYMEKVLGRLKDEEIRCRKYLHPSSYTKVIHECQQRMVADHLQFLHAECHNIIRQEKKNDMANMYVLLRAVSTGLPHMIQELQNHIHDEGLRATSNLTQENMPTLFVESVLEVHGKFVQLINTVLNGDQHFMSALDKALTSVVNYREPKSVCKAPELLAKYCDNLLKKSAKGMTENEVEDRLTSFITVFKYIDDKDVFQKFYARMLAKRLIHGLSMSMDSEEAMINKLKQACGYEFTSKLHRMYTDMSVSADLNNKFNNFIKNQDTVIDLGISFQIYVLQAGAWPLTQAPSSTFAIPQELEKSVQMFELFYSQHFSGRKLTWLHYLCTGEVKMNYLGKPYVAMVTTYQMAVLLAFNNSETVSYKELQDSTQMNEKELTKTIKSLLDVKMINHDSEKEDIDAESSFSLNMNFSSKRTKFKITTSMQKDTPQVISQSRARFNPSISMIKKCIEVLIDKQYIERSQASADEYSYVA

SEQ ID NO: 50985 - protein, 277 aa, Homo sapiens
MSLMVVSMACVGFFLLQGAWTHEGGQDKPLLSAWPSAVVPRGGHVTLLCRSRLGFTIFSLYKEDGVPVPELYNKIFWKSILMGPVTPAHAGTYRCRGSHPRSPIEWSAPSNPLVIVVTGNSSSSSSSPTEPSSKTGIRRHLHILIGTSVAIILFIILFFFLLHCCCSNKKNAAVMDQEPAGDRTVNREDSDDQDPQEVTYAQLDHCVFTQTKITSPSQRPKTPPTDTTMYMELPNAKPRSLSPAHKHHSQALRGSSRETTALSQNRVASSHVPAAGI

SEQ ID NO: 50986 - protein, 342 aa, Homo sapiens
MAAGTAVGAWVLVLSLWGAVVGAQNITARIGEPLVLKCKGAPKKPPQRLEWKLGGGPWDSVARVLPNSSLFLPAVGIQDEGIFRCQAMNRNGKETKSNYRVRVYQIPGKPEIVDSASELTAGVPNKVGTCVSEGSYPAGTLSWHLDGKPLVPNEKGVSVKEQTRRHPETGLFTLQSELMVTPARGGDPRPTFSCSFSPGLPRHRALRTAPIQPRVWEPVPLEEVQLVVEPEGGAVAPGGTVTLTCEVPAQPSPQIHWMKDVSDLERGAGRTRRGGANCRLCGRIRAGNSSPGPGDPGRPGDSRPAHWGHLVAKAATPRRGEEGPRKPGGRGGACRTESVGGT

SEQ ID NO: 50987 - protein, 106 aa, Homo sapiens
MRSAAKPWNPAIRAGGHGPDRVRPLPAASSGMKSSKSSTSLAFESRLSRLKRASSEDTLNKPGSTAASGVVRLKKTATAGAISELTESRLRSGTGGKGLFIPEGDM

SEQ ID NO: 50988 - protein, 374 aa, Homo sapiens
MLVPLAKLSCLAYQCFHALKIKKNYLPLCATRWSSTSTVPRITTHYTIYPRDKDKRWEGVNMERFAEEADVVIVGAGPAGLSAAVRLKQLAVAHEKDIRVCLVEKAAQIGAHTLSGACLDPGAFKELFPDWKEKGAPLNTPVTEDRFGILTEKYRIPVPILPGLPMNNHGNYIVRLGHLVSWMGEQAEALGVEVYPGYAAAEVLFHDDGSVKGIATNDVGIQKDGAPKATFERGLELHAKVTIFAEGCHGHLAKQLYKKFDLRANCEPQTYGIGLKELWVIDEKNWKPGRVDHTVGWPLDRHTYGGSFLYHLNEGEPLVALGLVVGLDYQNPYLSPFREFQRWKHHPSIRPTLEGGKRIAYGARALNEGGFQEE

SEQ ID NO: 50989 - protein, 257 aa, Homo sapiens
MRSGKASCTLETVWEDKHKYEEAERRFYEHEATQAAASAQQLPAEGPAMNGPGQDDPEDADEAEAPDGGSRRDPRKSQDSRKPLQKKRKRSPKSGLGPADLALLGLSAERVWLDKSLFDQAESSYRQKLADVAAQAAWPPALAPWGLCTHGNQVACHHVTWGIWVNKSSFDQAERAFVEWSQALLLAPDGSRRQGTPNTGQQVAVPDLAHQPSPPVNGQPPLGSLQALVREVWLEKPRYDAAERGFYEALFDGHPPG

SEQ ID NO: 50990 - protein, 90 aa, Homo sapiens
MWVPVVFLTLSVTWIGAAPLILSRIVGGWECEKHSQPWQVLVASRGRAVCGGVLVHPQWVLTAAHCIRNKSVILLGRHSLFHPEDTGQAR

SEQ ID NO: 50991 - protein, 33 aa, Homo sapiens
MFNFDTFWKNFKSKLGFINWDAINKDQRSSRIP

SEQ ID NO: 50992 - protein, 69 aa, Homo sapiens
MAPEEDAGGEALGGSFWEAGNYRRTVQRVEDGHRLCGDLVSCFQERARIEKAYAQQLADWARKWRGTVE

SEQ ID NO: 50993 - protein, 55 aa, Homo sapiens
MPRGSRSAASRPARPPPPLPPSPCRWGPAPTRSGSSWTVPPLRVTCPCVRASARP

SEQ ID NO: 50994 - protein, 201 aa, Homo sapiens
MEPPGGSLGPGRGTRDKKKGRSPDELPSAGGDGGKSKKFTLKRLMADELERFTSMRIKKEKEKPNSAHRNSSASYGDDPTAQSLQDVSDEQVLVLFEQMLLDMNLNEEKQQPLREKDIIIKREMVSQYLYTSKAGMSQKESSKSAMMYIQELRSGLRDMPLLSCLESLRVSLNNNPVSWVQTFGAEGLASLLDILKRLHDD

SEQ ID NO: 50995 - protein, 56 aa, Homo sapiens
MANEVIKCKAAVAWEAGKPLSIEEIEVAPPKAHEVRIKVTLSSHFTSHSVENANFV

SEQ ID NO: 50996 - protein, 455 aa, Homo sapiens
MSLTVVSMACVGFFLLQGAWPLMGGQDKPFLSAWPSTVVPRGGHVALQCHYRRGFNNFMLYKEDRSHVPIFHGRIFQESFIMGPVTPAHAGTYRCRGSRPHSLTGWSAPSNPLVIMVTGNHRKPSLLAHPGPLLKSGETVILQCWSDVMFEHFFLHREGISEDPSRLVGQIHDGVSKANFSIGPLMPVLAGTYRCYGSVPHSPYQLSAPSDPLDIVITGLYEKPSLSAQPGPTVQAGENVTLSCSSWSSYDIYHLSREGEAHERRLRAVPKVNRTFQADFPLGPATHGGTYRCFGSFRALPCVWSNSSDPLLVSVTGNPSSSWPSPTEPSSKSGICRHLHVLIGTSVVIFLFILLLFFLLYRWCSNKKNAAVMDQEPAGDRTVNRQDSDEQDPQEVTYAQLDHCVFIQRKISRPSQRPKTPLTDTSVYTELPNAEPRSKVVSCPRAPQSGLEGVF

SEQ ID NO: 50997 - protein, 197 aa, Homo sapiens
MAAWKSWTALRLCATVVVLDMVVCKGFVEDLDESFKENRNDDIWLVDFYAPWCGHCKKLEPIWNEVGLEMKSIGSPVKVGKMDATSYSSIASEFGVRGYPTIKLALIRPLPSQQMFEHMQKRHRVFFVYVGGESPLKEKYIDAASELIVYTYFFSASEEVVPEYVTLKEMPAVLVFKDETYFVYDGKFQIFNSCKTF

SEQ ID NO: 50998 - protein, 172 aa, Homo sapiens
MQLALFKNMKSWHFILKSGSLFPSLECSHIWLNSFEKILETGLANMNIYLGFQNSLLQIVIPEKIQTNTNDSSEIEYEQISYIIPIDEKLYTVHLKQRYFLADNFMIYLYNQGSMNTYSSDIQTQCYYQGNIEGYPDSMVTLSTCSGLRGILQFENVSYGIEPLESAVEFQH

SEQ ID NO: 50999 - protein, 154 aa, Homo sapiens
  MOD_RES (1)..(1): Any amino acid
XLQEKMAVSTGVKVPRNFRLLEELEEGQKGVGDGTVSWGLEDDEDMTLTRWTGMIIGPPRTNYENRIYSLKVECGPKYPEAPPSVRFVTKINMNGINNSSGMSLTLSPRLEYNCAILAHCNLCLPASSDSPASTSRVAGITGTCHHAQLIFVFL

SEQ ID NO: 51000 - protein, 46 aa, Homo sapiens
MCTVDLGEPLHSLIITGGSIHPMEMEMLSLFSIPENSSESQSINGL

SEQ ID NO: 51001 - protein, 178 aa, Homo sapiens
MAGAEGAAGRQSELEPVVSLVDVLEEDEELENEACAVLGGSDSEKCSYSQGSVKRQALYACSTCTPEGEEPAGICLACSYECHGSHKLFELYTKRNFRCDCGNSKFKNLECKLLPIPDEMIQCVVCEDWFHGRHLGAIPPESGDFQEMVCQACMKRCSFLWAYAAQLAVTKISTEDDG

SEQ ID NO: 51002 - protein, 173 aa, Homo sapiens
MEPGAGHLDGHRAGSPSLRQALCDGSAVMFSSKERGRCTVINFVPLEAPLRSTPRSRQVTEACGGEGRAVPLGSEPEWSVGGMEATLEQHLEDTMKNPSIVGVLCTDSQGLNLGCRGTLSDEHAGVISVLAQQAAKLTSDPTDIPVVCLESDNGNIMIQKHDGITVAVHKMAS

SEQ ID NO: 51003 - protein, 127 aa, Homo sapiens
MELKLMMEKLGAPQTHLGLKSMIKEVDEDFDGKLSFREFLLIFHKAAAGELQEDSGLMALAKLSEIDVALEGVKGAKNFFEAKVQALSSASKFEAELKAEQDERKREEEERRLRQAAFQKLKANFNT

SEQ ID NO: 51004 - protein, 509 aa, Homo sapiens
MSMGAPRSLLLALAAGLAVARPPNIVLIFADDLGYGDLGCYGHPSSTTPNLDQLAAGGLRFTDFYVPVSLCTPSRAALLTGRLPVRMGMYPGVLVPSSRGGLPLEEVTVAEVLAARGYLTGMAGKWHLGVGPEGAFLPPHQGFHRFLGIPYSHDQGPCQNLTCFPPATPCDGGCDQGLVPIPLLANLSVEAQPPWLPGLEARYMAFAHDLMADAQRQDRPFFLYYASHHTHYPQFSGQSFAERSGRGPFGDSLMELDAAVGTLMTAIGDLGLLEETLVIFTADNGPETMRMSRGGCSGLLRCGKGTTYEGGVREPALAFWPGHIAPGVTHELASSLDLLPTLAALAGAPLPNVTLDGFDLSPLLLGTGKSPRQSLFFYPSYPDEVRGVFAVRTGKYKAHFFTQGSAHSDTTADPACHASSSLTAHEPPLLYDLSKDPGENYNLLGGVAGATPEVLQALKQLQLLKAQLDAAVTFGPSQVARGEDPALQICCHPGCTPRPACCHCPDPHA

SEQ ID NO: 51005 - protein, 485 aa, Homo sapiens
MYTSHEDIGYDFEDGPKDKKTLKPHPNIDGGWAWMMVLSSFFVHILIMGSQMALGVLNVEWLEEFHQSRGLTAWVSSLSMGITLIVGPFIGLFINTCGCRQTAIIGGLVNSLGWVLSAYAANVHYLFITFGVAAGLGSGMAYLPAVVMVGRYFQKRRALAQGLSTTGTGFGTFLMTVLLKYLCAEYGWRNAMLIQGAVSLNLCVCGALMRPLSPGKNPNDPGEKDVRGLPAHSTESVKSTGQQGRTEEKDGGLGNEETLCDLQAQECPDQAGHRKNMCALRILKTVSWLTMRVRKGFEDWYSGYFGTASLFTNRMFVAFIFWALFAYSSFVIPFIHLPEIVNLYNLSEQNDVFPLTSIIAIVHIFGKVILGVIADLPCISVWNVFLLANFTLVLSIFILPLMHTYAGLAVICALIGFSSGYFSLMPVVTEDLVGIEHLANAYGIIICANGISALLGPPFAGKLSEVLRAQSACTYGALCYKVPDK

SEQ ID NO: 51006 - protein, 87 aa, Homo sapiens
MNPRQGYSLSGYYTHPFQGYEHRQLRYQQPGPGSSPSSFLLKQIEFLKGQLPEAPVIGKQTPSLPPSLPGLRPRFPVLLASSTRGRN

SEQ ID NO: 51007 - protein, 272 aa, Homo sapiens
MAVFVVLLALVAGVLGNEFSILKSPGSVVFRNGNWPIPGERIPDVAALSMGFSVKEDLSWPGLAVGNLFHRPRATVMVMVKGVNKLALPPGSVISYPLENVDLLFLSELQVLHDISSLLSRHKHLAKDHSPDLYSLELAGLDEIGKRYGEDSEQFRDASKILVDALQKFADDMYSLYGGNAVVELVTVKSFDTSLIRKTRTILEAKQAKNPASPYNLAYKYNFEYSVVFNMVLWIMIALALAVIITSYNIWNMDPGYDSIIYRMTNQKIRMD

SEQ ID NO: 51008 - protein, 137 aa, Homo sapiens
MRVISQRYPDIRIEGENYLPQPIYRHIASFLSVFKLVLIGLIIVGKDPFAFFGMQAPSIWQWGQENKVYACMMVFFLSNMIENQCMSTGAFEITLNDVPVWSKLESGHLPSMQQLVQILDNEMKLNVHMDSIPHHRS

SEQ ID NO: 51009 - protein, 44 aa, Homo sapiens [sequence omitted]

SEQ ID NO: 51010 - protein, 59 aa, Homo sapiens
  MOD_RES (1)..(1): Any amino acid
XRSIEGCCICRAKSSSSRFTDSKRYEKDFQSCFGDNVFLCCLGWSAVAIHRCDHCAPQP

SEQ ID NO: 51011 - protein, 185 aa, Homo sapiens
  MOD_RES (1)..(1): Any amino acid
XSILEGCRREVRRETWKPGPGSEAAGKSLVNNPPGILPPSPAHVREGRRGAQIADPTLAEMGKNLKEAVKMLEDSQRRTEEENGKKLISGDIPGPLQGSGQDMVSILQLVQNLMHGDEDEEPQSPRIQNIGEQGHMALLGHSLGAYISTLDKEKLRKLTTRILSDTTLWLCRIFRYENGCAYFHE

SEQ ID NO: 51012 - protein, 75 aa, Homo sapiens
MEARSMLVPPQASVCFEDVAMAFTQEEWEQLDLAQRTLYREVTLETWEHIVSLAGARRGPVQGRAGGPPRLESYP

SEQ ID NO: 51013 - protein, 150 aa, Homo sapiens
MFSAIRSQHSGVDICINNAGLARPDTLLSGSTSGWKDMFNVNVLALSICTREAYQSMKERNVDDGHIININSMSGHRVLPLSVTHFYSATKYAVTALTEGLRQELREAQTHIRATCISPGVVETQFAFKLHDKDPEKAAATYEQMKCLKP

SEQ ID NO: 51014 - protein, 238 aa, Homo sapiens
MHQLLQALHQKLAALRQGPEGLVGADKPISYRTKPPASIHRELLGVCSDPYTLAQQLTHVELERLRHIGPEEFVQAFVNKDPLASTKPCFSDKTSNLEAYVKWFNRLCYLVATEICMPAKKKQRAQVIEFFIDVARECFNIGNFNSLMAIISGMNMSPVSRLKKTWAKVRTAKFFILEHQMDPTGNFCNYRTALRGAAHRSLTAHSSREKEATLGGRGEQITRLSFLSSACSSKTSTS

SEQ ID NO: 51015 - protein, 128 aa, Homo sapiens
MNGEAIACAEGCQAIVDTGTSLLTGPTSPIANIQSDIGASENSDGDMVVSCSAISSLPDIVFTINGVQYPVPPSAYILQSEGSCISGFQGMNLPTESGELWILGDVFIRQYFTVFDRANNQVGLAPVA

SEQ ID NO: 51016 - protein, 179 aa, Homo sapiens
MRALRRLIQGRILLLTICAAGIGGTFQFGYNLSIINAPTLHIQEFTNETWQARTGEPLPDHLVLLMWSLIVSLYPLGGLFGALLAGPLAITLGRKKSLLVNNIFVVSAAILFGFSRKAGSFEMIMLGRLLVGVNAGVSMNIQPMYLGESAPKELRGAVAMSSAIFTALGIVMGQVVGLR

SEQ ID NO: 51017 - protein, 261 aa, Homo sapiens
MSWKKALRIPGDLRVATVTLMLAMLSSLLAEGRDSPEDFVFQFKGMCYFTNGTERVRLVTRYIYNREEYARFDSDVGVYRAVTPQGRPDAEYWNSQKEVLEGTRAELDTVCRHNYEVAFRGILQRRVEPTVTISPSRTEALNHHNLLVCSVTDFYPGQIKVRWFRNDQEETAGVVSTPLIRNGDWTFQILVMLEMTPQRGDVYTCHVEHPSLQSPITVEWRAQSESAQSKMLSGVGGFVLGLIFLGLGLIIRQRSQKGLLH

SEQ ID NO: 51018 - protein, 94 aa, Homo sapiens
MTDTVFSNSSNRWMYPSDRPLQSNDKEQLQAGWSVHPGGQPDRQRKQEELTDEEKEIINRVIARAEKMEEMEQERIGRLVDRLENMRKNVAGDG

SEQ ID NO: 51019 - protein, 731 aa, Homo sapiens
MQSTSNHLWLLSDILGQGATANVFRGRHKKTGDLFAIKVFNNISFLRPVDVQMREFEVLKKLNHKNIVKLFAIEEETTTRHKVLIMEFCPCGSLYTVLEEPSNAYGLPESEFLIVLRDVVGGMNHLRENGIVHRDIKPGNIMRVIGEDGQSVYKLTDFGAARELEDDEQFVSLYGTEEYLHPDMYERAVLRKDHQKKYGATVDLWSIGVTFYHAATGSLPFRPFEGPRRNKEVMYKIITGKPSGAISGVQKAENGPIDWSGDMPVSCSLSRGLQVLLTPVLANILEADQEKCWGFDQFFAETSDILHRMVIHVFSLQQMTAHKIYIHSYNTATIFHELVYKQTKIISSNQELIYEGRRLVLEPGRLAQHFPKTTEENPIFVVSREPLNTIGLIYEKISLPKVHPRYDLDGDASMAKAITGVVCYACRIASTLLLYQELMRKGIRWLIELIKDDYNETVHKKTEVVITLDFCIRNIEKTVKVYEKLMKINLEAAELGEISDIHTKLLRLSSSQGTIETSLQDIDSRLSPGGSLADAWAHQEGTHPKDRNVEKLQVLLNCMTEIYYQFKKDKAERRLAYNEEQIHKFDKQKLYYHATKAMTHFTDECVKKYEAFLNKSEEWIRKMLHLRKQLLSLTNQCFDIEEEVSKYQEYTNELQETLPQKMFTASSGIKHTMTPIYPSSNTLVEMTLGMKKLKEEMEGVVKELAENNHILERRSFAVAQAGVQWRDLSSL

SEQ ID NO: 51020 - protein, 707 aa, Homo sapiens
MSVNISTAGKGVDPNTVDTYDSGDDWEIGVGNLIIDLDADLEKDRQKFEMNNSTTTTSSSNSKDCGGPASSGAGATAALADGLKFASVQASAPQGNSHKETSKSKVKRSKTSKDANKSLPSAALYGIPEISSTGKRQEVQGRPGEATGMNSALGQSVSSGGSGNPNSNSTSTSTSAATAGAGSCGKSKEEKPGKSQSSRGAKRDKDAGKSRKDKHDLLQGHQNGSGSQAPSGGHLYGFGAKSNGGGASPFHCGGTGSGSVAAAGEVSKSAPDSGLMGNSMLVKKEEEEEESHRRIKKLKTEKVDPLFTVPAPPPPISSSLTPQILPSYFSPSSSNIAAPVEQLLVRTRSVGVNTCEVGVVTEPECLGPCEPGTSVNLEGIVWHETEEGVLVVNVTWRNKTYVGTLLDCTKHDWAPPRFCESPTSDLEMRGGRGRGKRARSAAAAPGSEASFTESRGLQNKNRGGANGKGRRGSLNASGRRTPPNCAAEDIKASPSSTNKRKNKPPMELDLNSSSEDNKPGKRVRTNSRSTPTTPQGKPETTFLDQGCSSPVLIDCPHPNCNKKYKHINGLRYHQAHAHLDPENKLEFEPDSEDKISDCEEGLSNVALECSEPSTSVSAYDQLKAPASPGAGNPPGTPKGKRELMSNGPGSIIGAKAGKNSGKKKGLNNELNNLPVISNMTAALDSCSAADGSLAAEMPKLEAEGLID

SEQ ID NO: 51021 - protein, 292 aa, Homo sapiens
MGKKSRVKTQKSGTGATATVSPKEILNLTSELLQKCSSPAPGPGKEWEEYVQIRTLVEKIRKKQKGLSVTFDGKREDYFPDLMKWASENGASVEGFEMVNFKEEGFGLRATRDIKAEELFLWVPRKLLMTVESAKNSVLGPLYSQDRILQAMGNIALAFHLLCERASPNSFWQPYIQTLPSEYDTPLYFEEDEVRYLQSTQAIHDVFSQYKNTARQYAYFYKVIQTHPHANKLPLKDSFTYEDYRWAVSSVMTRQNQIPTEDGSRVTLALIPLWDMCNHTNGLVTTSSPVLC

SEQ ID NO: 51022 - protein, 305 aa, Homo sapiens
MDRLGSFSNDPSDKPPCRGCSSYLMEPYIKCAECGPPPFFLCLQCFTRGFEYKKHQSDHTYEIMTSDFPVLDPSWTAQEEMALLEAVMDCGFGNWQDVANQMCTKTKEECEKHYMKHFINNPLFASTLLNLKQAEEAKTADTAIPFHSTDDPPRPTFDSLLSRDMAGYMPARADFIEEFDNYAEWDLRDIDFVEDDSDILHALKMAVVDIYHSRLKERQRRKKIIRDHGLINLRKFQLMERRYPKEVQDLYETMRRFARIVGPVEHDKFIESHACRWFLSLEQYLCVYIYINRRDNGVFYVKFYK

SEQ ID NO: 51023 - protein, 212 aa, Homo sapiens
  MOD_RES (1)..(1): Any amino acid
XRGPLDVSSSHTPTWRKLLLTGALLTSCTCSAFSELPFSAQLNTLTEGASVHLPVPGRLEDSLQLMPLKTFPAAIRGVIQSELNYSVILQWVVTMDPEPVLSWTFSGVPCGMGEKLFIRRLSCEQLGTYMCIATNSKKQLVSEPVTISLPKPIMQPTEAEPMEPDPTLSLSGGSAIGLLAAGILGAGALIAGMCFIIIQSLRTDRQRIGICS

SEQ ID NO: 51024 - protein, 69 aa, Homo sapiens
MGSRFRDGPPLRGSNMDFREPTEEERAQRPRLQLKPRTVATPLNQVANPNSAIFGGARPREEVVQKEQE

SEQ ID NO: 51025 - protein, 597 aa, Homo sapiens
MQWPPPWRRSPLVSATPPPGPTRGLLCPRRVSEAGDSSTEGARTGHRHYVTPAESAMEGRSQPLPSLRPASPTNAPAHGRGSDCTAKEPPLANVCRQNYGAAQDPVEPAGRRSASHVTGSSLGKAEVACGRRWRWAELLADTSWSPAGRATEMKVKMLSRNPDNYVRETKLDLQRVPRNYDPALHPFEVPREYIRALNATKLERVFAKPFLASLDGHRDGVNCLAKHPEKLATVLSGACDGEVRIWNLTQRNCIRTIQAHEGFVRGICTRFCGTSFFTVGDDKTVKQWKMDGPGYGDEEEPLHTILGKTVYTGIDHHWKEAVFATCGQQVDIWDEQRTNPICSMTWGFDSISSVKFNPIETFLLGSCASDRNIVLYDMRQATPLKKVILDMRTNTICWNPMEAFIFTAANEDYNLYTFDMRALDTPVMVHMDHVSAVLDVDYSPTGKEFVSASFDKSIRIFPVDKSRSREVYHTKRMQHVICVKWTSDSKYIMCGSDEMNIRLWKANASEKLGVLTSREKAAKDYNQKLKEKFQHYPHIKRIARHRHLPKSIYSQIQEQRIMKEARRRKEVNRIKHSKPGSVPLVSEKKKHVVAVVK

SEQ ID NO: 51026 - protein, 346 aa, Homo sapiens
ELLRIAKKLEKMVARKNTEGALDLLKKLHSCQMSIQLLQTTRIGVAVNGVRKHCSDKEVVSLAKVLIKNWKRLLDSPGPPKGEKGEEREKAKKKEKGLECSDWKPEAGLSPPRKKREDPKTRRDSVDSKSSASSSPKRPSVERSNSSKSKAESPKTPSSPLTPTFASSMCLLAPCYLTGDSVRDKCVEMLSAALKADDDYKDYGVNCDKMASEIEDHIYQELKSTDMKYRNRVRSRISNLKDPRNPGLRRNVLSGAISAGLIAKMTAEEMASDELRELRNAMTQEAIREHQMAKTGGTTTDLFQCSKCKKKNCTYNQVQTRSADEPMTTFVLCNECGNRWKMESAS

SEQ ID NO: 51027 - protein, 743 aa, Homo sapiens
MSSLAAKRLGMNRRPAGSGGGGGEAATWGHRFWRPQERPTDRNQGEMAHTCRGTINLSTAHIDTEDSCGILLTSGARSYHLKASSEVDRQQWITALELAKAKAVRVMNTHSDDSGDDDEATTPADKSELHHTLKNLSLKLDDLSTCNDLIAKHGAALQRSLTELDGLKIPSESGEKLKVVNERATLFRITSNAMINACRDFLELAEIHSRKWQRALQYEQEQRVHLEETIEQLAKQHNSLERAFHSAPGRPANPSKSFIEGSLLTPKGEDSEEDEDTEYFDAMEDSTSFITVITEAKEDSRKAEGSTGTSSVDWSSADNVLDGASLVPKGSSKVKRRVRIPNKPNYSLNLWSIMKNCIGRELSRIPMPVNFNEPLSMLQRLTEDLEYHHLLDKAVHCTSSVEQMCLVAAFSVSSYSTTVHRIAKPFNPMLGETFELDRLDDMGLRSLCEQVSHHPPSAAHYVFSKHGWSLWQEITISSKFRGKYISIMPLGAIHLEFQASGNHYVWRKSTSTVHNIIVGKLWIDQSGDIEIVNHKTNDRCQLKFLPYSYFSKEAARKVTGVVSDSQGKAHYVLSGSWDEQMECSKVMHSSPSSPSSDGKQKTVYQTLSAKLLWKKYPLPENAENMYYFSELALTLNEHEEGVAPTDSRLRPDQRLMEKGRWDEANTEKQRLEEKQRLSRRRRLEACGPGSSCSSEEEKEADAYTPLWFEKRLDPLTGEMACVYKGGYWEAKEKQDWHMCPNIF

SEQ ID NO: 51028 - protein, 70 aa, Homo sapiens
MKPKLMYQELKVPAEEPANELPMNEIEAWKAAEKKARWVLLVLILAVVGFGALMTQLFLWEYGDLHLFGP

SEQ ID NO: 51029 - protein, 111 aa, Homo sapiens
MLAVGPAMDRDYPQHEPPPAGSLLYSPPPLQSAMLHCPYWNTFSLPPYPAFSSDSRPFMSSASFLGSQPCPDTSYAPVATASSLPPKTCDFAQDSSYFEDFSNISIFSSSV

SEQ ID NO: 51030 - protein, 516 aa, Homo sapiens
MGCGCSSHPEDDWMENIDVCENCHYPIVPLDGKGTLLIRNGSEVRDPLVTYEGSNPPASPLQGDPRQQGLKDKACGSLAVGFHLSPTYFLPGLAFLVPHPVTPGFLPIPARFSLMPLVFTDNLVIALHSYEPSHDGDLGFEKGEQLRILEQSGEWWKAQSLTTGQEGFIPFNFVAKANSLEPEPWFFKNLSRKDAERQLLAPGNTHGSFLIRESESTAGSFSLSVRDFDQNQGEVVKHYKIRNLDNGGFYISPRITFPGLHELVRHYTRYYNGHTKVAVKSLKQGSMSPDAFLAEANLMKQLQHQRLVRLYAVVTQEPIYIITEYMENGSLVDFLKTPSGIKLTINKLLDMAAQIAEGMAFIEERNYIHRDLRAANILVSDTLSCKIADFGLARLIEDNEYTAREGAKFPIKWTAPEAINYGTFTIKSDVWSFGILLTEIVTHGRIPYPGMTNPEVIQNLERGYRMVRPDNCPEELYQLMRLCWKERPEDRPTFDYLRSVLEDFFTATEGQYQPQP

SEQ ID NO: 51031 - protein, 314 aa, Homo sapiens
MIIFNLSSYNPGPFILVGIPGLEQFHVWIGIPFCIIYIVAVVGNCILLYLIVVEHSLHEPMFFFLSMLAMTDLILSTAGVPKALSIFWLGAREITFPGCLTQMFFLHYNFVLDSAILMAMAFDHYVAICSPLRYTTILTPKTIIKSAMGISFRSFCIILPDVFLLTCLPFCRTRIIPHTYCEHIGVAQLACADISINFWYGFCVPIMTVISDVILIAVSYAHILCAVFGLPSQDACQKALGTCGSHVCVILMFYTPAFFSILAHRFGHNVSRTFHIMFANLYIVIPPALNPMVYGVKTKQIRDKVILLFSKGTG

SEQ ID NO: 51032 - protein, 2457 aa, Homo sapiens
MRGRRGRPPKQPAAPAAERCAPAPPPPPPPPTSGPIGGLRSRHRGSSRGRWAAAQAEVAPKTRLSSPRGGSSSRRKPPPPPPAPPSTSAPGRGGRGGGGGRTGGGGGGGHLARTTAARRAVNKVVYDDHESEEEEEEEDMVSEEEEEEDGDAEETQDSEDDEEDEMEEDDDDSDYPEEMEDDDDDASYCTESSFRSHSTYSSTPGRRKPRVHRPRSPILEEKDIPPLEFPKSSEDLMVPNEHIMNVIAIYEVLRNFGTVLRLSPFRFEDFCAALVSQEQCTLMAEMHVVLLKAVLREEDTSNTTFGPADLKDSVNSTLYFIDGMTWPEVLRVYCESDKEYHHVLPYQEAEDYPYGPVENKIKVLQFLVDQFLTTNIAREELMSEGVIQYDDHCRVCHKLGDLLCCETCSAVYHLECVKPPLEEVPEDEWQCEVCVAHKVPGVTDCVAEIQKNKPYIRHEPIGYDRSRRKYWFLNRRLIIEEDTENENEKKIWYYSTKVQLAELIDCLDKDYWEAELCKILEEMREEIHRHMDITEDLTNKARGSNKSFLAAANEEILESIRAKKGDIDNVKSPEETEKDKNETENDSKDAEKNREEFEDQSLEKDSDDKTPDDDPEQGKSEEPTEVGDKGNSVSANLGDNTTNATSEETSPSEGRSPVGCLSETPDSSNMAEKKVASELPQDVPVGDFKSEKSNGELSESPGAGKGASGSTRIITRLRNPDSKLSQLKSQQVAAAAHEANKLFKEGKEVLVVNSQGEISRLSTKKEVIMKGNINNYFKLGQEGKYRVYHNQYSTNSFALNKHQHREDHDKRRHLAHKFCLTPAGEFKWNGSVHGSKVLTISTLRLTITQLENNIPSSFLHPNWASHRANWIKAVQMCSKPREFALALAILECAVKPVVMLPIWRESLGHTRLHRMTSIEREEKEKVKKKEKKQEEEETMQQATWVKYTFPVKHQVWKQKGEEYRVTGYGGWSWISKTHVYRFVPKLPGNTNVNYRKSLEGTKNNMDENMDESDKRKCSRSPKKIKIEPDSEKDEVKGSDAAKGADQNEMDISKITEKKDQDVKELLDSDSDKPCKEEPMEVDDDMKTESHVNCQESSQVDVVNVSEGFHLRTSYKKKTKSSKLDGLLERRIKQFTLEEKQRLEKIKLEGGIKGIGKTSTNSSKNLSESPVITKAKEGCQSDSMRQEQSPNANNDQPEDLIQGCSESDSSVLRMSDPSHTTNKLYPKDRVLDDVSIRSPETKCPKQNSIENDIEEKVSDLASRGQEPSKSKTKGNDFFIDDSKLASADDIGTLICKNKKPLIQEESDTIVSSSKSALHSSVPKSTNDRDATPLSRAMDFEGKLGCDSESNSTLENSSDTVSIQDSSEEDMIVQNSNESISEQFRTREQDVEVLEPLKCELVSGESTGNCEDRLPVKGTEANGKKPSQQKKLEERPVNKCSDQIKLKNTTDKKNNENRESEKKGQRTSTFQINGKDNKPKIYLKGECLKEISESRVVSGNVEPKVNNINKIIPENDIKSLTVKESAIRPFINGDVIMEDFNERNSSETKSHLLSSSDAEGNYRDSLETLPSTKESDSTQTTTPSASCPESNSVNQVEDMEIETSEVKKVTSSPITSEEESNLSNDFIDENGLPINKNENVNGESKRKTVITEVTTMTSTVATESKTVIKVEKGDKQTVVSSTENCAKSTVTTTTTTVTKLSTPSTGGSVDIISVKEQSKTVVTTTVTDSLTTTGGTLVTSMTVSKEYSTRDKVKLMKFSRPKKTRSGTALPSYRKFVTKSSKKSIFVLPNDDLKKLARKGGIREVPYFNYNAKPALDIWPYPSPRPTFGITWRYRLQTVKSLAGVSLMLRLLWASLRWDDMAAKAPPGGGTTRTETSETEITTTEIIKRRDVGPYGIRSEYCIRKIICPIGVPETPKETPTPQRKGLRSSALRPKRPETPKQTGPVIIETWVAEEELELWEIRAFAERVEKEKAQAVEQQAKKRLEQQKPTVIATSTTSPTSSTTSTISPAQKVMVAPISGSVTTGTKMVLTTKVGSPATVTFQQNKNFHQTFATWVKQGQSNSGVVQVQQKVLGIIPSSTGTSQQTFTSFQPRTATVTIRPNTSGSGGTTSNSQVITGPQIRPGMTVIRTPLQQSTLGKAIIRTPVMVQPGAPQQVMTQIIRGQPVSTAVSAPNTVSSTPGQKSLTSATSTSNIQSSASQPPRPQQGQVKLTMAQLTQLTQGHGGNQGLTVVIQGQGQTTGQLQLIPQGVTVLPGPGQQLMQAAMPNGTVQRFLFTPLATTATTASTTTTTVSTTAAGTGEQRQSKLSPQMQVHQDKTLPPAQSSSVGPAEAQPQTAQPSAQPQPQTQPQSPAQPEVQTQPEVQTQTTVSSHVPSEAQPTHAQSSKPQVAAQSQPQSNVQGQSPVRVQSPSQTRIRPSTPSQLSPGQQSQVQTTTSQPIPIQPHTSLQIPSQGQPQSQ

SEQ ID NO: 51033 - protein, 128 aa, Homo sapiens
MLAVGPAMDRDYPQHEPPPAGSLLYSPPPLQSAMLHCPYWNTFSLPPYPAFSSDSRPFMSSASFLGSQPCPDTSYAPVATASSLPPKTCDFAQDSSYFEDFSNISIFSSSVDSLSDIVDTPDFLPADS

SEQ ID NO: 51034 - protein, 466 aa, Homo sapiens
MALLQTHDVVAHEVYSDEALRVTPPPTSPYLNGDSPESANGDMDMENVTRVRLVQFQKNTDEPMGITLKMNELNHCIVARIMHGGMIHRQGTLHVGDEIREINGISVANQTVEQLQKMLREMRGSITFKIVPSYRTQSSSCEDLPSTTQPKGRQIYVRAQFEYDPAKDDLIPCKEAGIRFRVGDIIQIISKDDHNWWQGKLENSKNGTAGLIPSPELQEWRVACIAMEKTKQEQQASCTWFGKKKKQYKDKYLAKHNAVFDQLDLVTYEEVVKLPAFKRKTLVLLGAHGVGRRHIKNTLITKHPDRFAYPIPHTTRPPKKDEENGKNYYFVSHDQMMQDISNNEYLEYGSHEDAMYGTKLETIRKIHEQGLIAILDVEPQALKVLRTAEFAPFVVFIAAPTITPGLNEDESLQRLQKESDILQRTYAHYFDLTIINNEIDETIRHLEEAVELVCTAPQWVPVSWVY

SEQ ID NO: 51035 - protein, 474 aa, Homo sapiens
MAAGLLTAGPRGSTFFSSVTVAFAQERWRCLVSTPRDRFKEGIPGKSRSLVLLGLPVSQPGMNSQLEQREGAWMLEGEDLRSPSPGWKIISGSPPEQALSEASFQDPCVEMPPGDSDHGTSDLEKSFNLRPVLSPQQRVPVEARPRKCETHTESFKNSEILKPHRAKPYACNECGKAFSYCSSLSQHQKSHTGEKPYECSECGKAFSQSSSLIQHQRIHTGEKPYKCSECGRAFSQNANLTKHQRTHTGEKPYRCSECEKAFSDCSALVQHQRIHTGEKPYECSDCGKAFRHSANLTNHQRTHTGEKPYKCSECGKAFSYCAAFIQHQRIHTGEKPYRCAACGKAFSQSANLTNHQRTHTGEKPYKCSECGKAFSQSTNLIIHQKTHTGEKPYKCNECGKFFSESSALIRHHIIHTGEKPYECNECGKAFNQSSSLSQHQRIHTGVKPYECSECGKAFRCSSAFVRHQRLHAGE

SEQ ID NO: 51036 - protein, 312 aa, Homo sapiens
MAEAVFHAPKRKRRVYETYESPLPIPFGQDHGPLKEFKIFRAEMINNNVIVRNAEDIEQLYGKGYFGKGILSRSRPSFTISDPKLVAKWKDMKTNMPIITSKRYQHSVEWAAELMRRQGQDESTVRRILKDYTKPLEHPPVKRNEEAQVHDKLNSGMVSNMEGTAGGERPSVVNGDSGKSGGVGDPREPLGCLQEGSGCHPTTESFEKSVREDASPLPHVCCCKQDALILQRGLHHEDGSQHIGLLHPGDRGPDHEYVLVEEAECAMSEREAAPNEELVQRNRLICRRNPYRIFEYLQLSLEECTQKCLFCL

SEQ ID NO: 51037 - protein, 132 aa, Homo sapiens
MPDRLDTSVSCFVVKIWGGKENIYQLLIEWKVCLDGLKYLGQQIHARNQNEIIFGLNDGYYGAPFEHKGYSNAQKTILLQVDQNCVRNSYDVFSLLRLHRAQCAIKQTQVTVQKIGKEIEEKLRLTSTSNEL

SEQ ID NO: 51038 - protein, 204 aa, Homo sapiens
MKSISLLRYQEESKTLSLVSRVHLWRRCSCLVSDRDRNLMVYMYLPEAKESFGGMRLLRRADFHVGAHVNTFWRTPCRGATEGLSKKSVVWENKHITWFATLDGGIGLLLPMQEKTYRRLLMLQNALTTMLPHHAGLNPRAFRMLHVDRRTLQNAVRNVLDGELLNRYLYLSTMERSELAKKIGTTPDIILDDLLETDRVTAHF

SEQ ID NO: 51039 - protein, 196 aa, Homo sapiens
MCCKVMLLGDTGVGKTCFLIQFKDGAFLSGTFIATVGIDFRNKVVTVDGVRVKLQIWDTAGQERFRSVTHAYYRDAQALLLLYDITNKSSFDNIRAWLTEIHEYAQRDVVIMLLGNKADMSSERVIRSEDGETLAREYGVPFLETSAKTGMNVELAFLAIAKELKYRAGHQADEPSFQIRDYVESQKKRSSCCSFM

SEQ ID NO: 51040 - protein, 1495 aa, Homo sapiens
  MOD_RES (1)..(1): Any amino acid
XNYSRPPAYSGVPSASYSGPGPGMGISANNQMHGQGPSQPCGAVPLGRMPSAGMQNRPFPGNMSSMTPSSPGMSQQGGPGMGPPMPTVNRKAQEAAAAVMQAAANSAQSRPPYIRSPAYPSQSGAGGRPMFSSQHPNYGNSQAPMVHQPDQYGQGSFPGMNQSGLMASSSPYSQPMNNSSSLMNTQAPPYSMAPAMVNSSAASVGLADMMSPGESKLPLPLKADGKEEGTPQPESKSKDSYSSQGISQPPTPGNLPVPSPMSPSSASISSFHGDESDSISSPGWPKTPSSPKSSSSTTTGEKITKVYELGNEPERKLWVDRYLTFMEERGSPVSSLPAVGKKPLDLFRLYVCVKEIGGLAQVNKNKKWRELATNLNVGTSSSAASSLKKQYIQYLFAFECKIERGEEPPPEVFSTGDTKKQPKLQPPSPANSGSLQGPQTPQSTGSNSMAEVPGDLKPPTPASTPHGQMTPMQGGRSSTISVHDPFSDVSDSSFPKRNSMTPNAPYQQGMSMPDVMGRMPYEPNKDPFGGMRKVPGSSEPFMTQGQMPNSSMQDMYNQSPSGAMSNLGMGQRQQFPYGASYDRRHEPYGQQYPGQGPPSGQPPYGGHQPGLYPQQPNYKRHMDGMYGPPAKRHEGDMYNMQYSSQQQEMYNQYGGSYSGPDRRPIQGQYPYPYSRERMQGPGQIQTHGIPPQMMGGPLQSSSSEGPQQNMWAARNDMPYPYQNRQGPGGPTQAPPYPGMNRTDDMMVPDQRINHESQWPSHVSQRQPYMSSSASMQPITRPPQPSYQTPPSLPNHISRAPSPASFQRSLENRMSPSKSPFLPSMKMQKVMPTVPTSQVTGPPPQPPPIRREITFPPGSVEASQPVLKQRRKITSKDIVTPEAWRVMMSLKSGLLAESTWALDTINILLYDDSTVATFNLSQLSGFLELLVEYFRKCLIDIFGILMEYEVGDPSQKALDHNAARKDDSQSLADDSGKEEEDAECIDDDEEDEEDEEEDSEKTESDEKSSIALTAPDAAADPKEKPKQASKFDKLPIKIVKKNNLFVVDRSDKLGRVQEFNSGLLHWQLGGGDTTEHIQTHFESKMEIPPRRRPPPPLSSAGRKKEQEGKGDSEEQQEKSIIATIDDVLSARPGALPEDANPGPQTESSKFPFGIQQAKSHRNIKLLEDEPRSRDETPLCTIAHWQDSLAKRCICVSNIVRSLSFVPGNDAEMSKHPGLVLILGKLILLHHEHPERKRAPQTYEKEEDEDKGVACSKDEWWWDCLEVLRDNTLVTLANISGQLDLSAYTESICLPILDGLLHWMVCPSAEAQDPFPTVGPNSVLSPQRLVLETLCKLSIQDNNVDLILATPPFSRQEKFYATLVRYVGDRKNPVCREMSMALLSNLAQGDALAARAIAVQKGSIGNLISFLEDGVTMAQYQQSQHNLMHMQPPPLEPPSVDMMCRAAKALLAMARVDENRSEFLLHEGRLLDISISAVLNSLVASVICDVLFQIGQL

SEQ ID NO: 51041 - protein, 80 aa, Homo sapiens
MASSPAVDVSCRRREKRRQLDARRSKCRIRLGGHMEQWCLLKERLGFSLHSQLAKFLLDRTACVTCGLRGSCSPPHGLSE

SEQ ID NO: 51042 - protein, 68 aa, Homo sapiens
MNLPPDRPGLLSLSVSPEVETTPPALASGLPCALPWTVGCSGSDAVTALCPSLRGLACICSILWDPAW

SEQ ID NO: 51043 - protein, 279 aa, Homo sapiens
MGRVFLTGEKANSILKRYPRANGFFEEIRQGNIERECKEEFCTFEEAREAFENNEKTITGVILLAVGVWGKLTLGTYISLIAENSTNAPYVLIGTGTTIVVFGLFGCFATCRGSPWMLKLYAMFLSLVFLAELVAGISGFVFRHEIKDTFLRTYTDAMQTYNGNDERSRAVDHVQRSLSCCGVQNYTNWSTSPYFLEHGIPPSCCMNETDCNPQDLHNLTVAATKVNQKGCYDLVTSFMETNMGIIAGVAFGIAFSQLIGMLLACCLSRFITANQYEMV

SEQ ID NO: 51044 - protein, 144 aa, Homo sapiens
MALSWLQRVELALFAAAFLCGAVAAAAMTRTQGSFSGRCPLYGVATLNGSSLALSRPSAPSLCYFVAGASGLLALYCLLLLLFWIYSSCIEDSHRGAIGLRIALAISAIAVFLVLVSACILRFGTRSLCNSIISLNTTIRPLLG

SEQ ID NO: 51045 - protein, 154 aa, Homo sapiens
MVSSAQMGFNLQALLEQLSQDELSKFKYLITTFSLAHELQKIPHKEVDKADGKQLVEILTTHCDSYWVEMASLQVFEKMHRMDLSERAKDEVREAALKSFNKRKPLSLGITRKERPPLDVDEMLERFKTEAQAFTETKGNVICLGKEVFKGKKP

SEQ ID NO: 51046 - protein, 580 aa, Homo sapiens
MHDVIKKVKKKGEWKVLVVDQLSMRMLSSCCKMTDIMTEGITIVEDINKRREPLPSLEAVYLITPSEKSVHSLISDFKDPPTAKYRAAHVFFTDSCPDALFNELVKSRAAKVIKTLTEINIAFLPYESQVYSLDSADSFQSFYSPHKAQMKNPILERLAEQIATLCATLKEYPAVRYRGEYKDNALLAQLIQDKLDAYKADDPTMGEGPDKARSQLLILDRGFDPSSPVLHELTFQAMSYDLLPIENDVYKYETSGIGEARVKEVLLDEDDDLWIALRHKHIAEVSQEVTRSLKDFSSSKRMNTGEKTTMRDLSQMLKKMPQYQKELSKYSTHLHLAEDCMKHYQGTVDKLCRVEQDLAMGTDAEGEKIKDPMRAIVPILLDANVSTYDKIRIILLYIFLKNGITEENLNKLIQHAQIPPEDSEIITNMAHLGVPIVTDSTLRRRSKPERKERISEQTYQLSRWTPIIKDIMEDTIEDKLDTKHYPYISTRSSASFSTTAVSARYGHWHKNKAPGEYRSGPRLIIFILGGVSLNEMRCAYEVTQANGKWEVLIGSTHILTPQKLLDTLKKLNKTDEEISS

SEQ ID NO: 51047 - protein, 510 aa, Homo sapiens
MALRAPALLPLLLLLLPLRAAGCPAACRCYSATVECGALRLRVVPLGIPPGTQTLFLQDNNIARLEPGALAPLAALRRLYLHNNSLRALEAGAFRAQPRLLELALTSNRLRGLRSGAFVGLAQLRVLYLAGNQLARLLDFTFLHLPELHLQENSIELLEDQALAGLSSLALLDLSRNQLGTISREALQPLASLQVLRLTENPWRCDCALHWLGAWIKEGGQRLLTSRDRKIMCAEPPRLALQSLLDVSHSSLICIPPSVHVQPLELTANLGEDLRVACQASGYPQPLVTWRKVPQPREGRPRAQAQLEGGLLGLGGHSASDTGSGMLFLSNITLAHAGKYECEASNAGGAARVPFRLLVNASRQQPQQPAQPPPPAARPAGSEPRPEAGSMAFRALGVATQTAIAAAIALLALTALLLVAMICRRRRRRKKARGPPGEGALFVNDYLDGPCTFAQLEELRDERGHEMFVINRSKPLFAEGPAEAPADCGPEQGAGPGLRVPPPVAYEIHC

SEQ ID NO: 51048 - protein, 1472 aa, Homo sapiens
MDTTAAAALPAFVALLLLSPWPLLGSAQGQFSAGGCTFDDGPGACDYHQDLYDDFEWVHVSAQEPHYLPPEMPQGSYMIVDSSDHDPGEKARLQLPTMKENDTHCIDFSYLLYSQKGLNPGTLNILVRVNKGPLANPIWNVTGFTGRDWLRAELAVSTFWPNEYQVIFEAEVSGGRSGYIAIDDIQVLSYPCDKSPHFLRLGDVEVNAGQNATFQCIATGRDAVHNKLWLQRRNGEDIPVAQTKNINHRRFAASFRLQEVTKTDQDLYRCVTQSERGSGVSNFAQLIVREPPRPIAPPQLLGVGPTYLLIQLNANSIIGDGPIILKEVEYRMTSGSWTETHAVNAPTYKLWHLDPDTEYEIRVLLTRPGEGGTGLPGPPLITRTKCAEPMRTPKTLKIAEIQARRIAVDWESLGYNITRCHTFNVTICYHYFRGHNESKADCLDMDPKAPQHVVNHLPPYTNVSLKMILTNPEGRKESEETIIQTDEDVPGPVPVKSLQGTSFENKIFLNWKEPLDPNGIITQYEISYSSIRSFDPAVPVAGPPQTVSNLWNSTHHVFMHLHPGTTYQFFIRASTVKGFGPATAINVTTNISAPTLPDYEGVDASLNETATTITVLLRPAQAKGAPISAYQIVVEELHPHRTKREAGAMECYQVPVTYQNAMSGGAPYYFAAELPPGNLPEPAPFTVGDNRTYQGFWNPPLAPRKGYNIYFQAMSSVEKETKTQCVRIATKAAATEEPEVIPDPAKQTDRVVKIAGISAGILVFILLLLVVILIVKKRRSYYSYSYYLKLAKKRKDAMGNTRQEMTHMVNAMDRSYADQSTLHAEDPLSITFMDQHNFSPRLPNDPLVPTAVLVPITDENHSATAESSRLLDVPRYLCEGTESPYQTGQLHPAIRVADLLQHINLMKTSDSYGFKEEYESFFEGQSASWDVAKKDQNRAKNRYGNIIAYDHSRVILQPVEDDPSSDYINANYIDIWLYRDGYQRPSHYIATQGPVHETVYDFWRMIWQEQSACIVMVTNLVEVGRVKCYKYWPDDTEVYGDFKVTCVEMEPLAEYVVRTFTLERRGYNEIREVKQFHFTGWPDHGVPYHATGLLSFIRRVKLSNPPSAGPIVVHCSAGAGRTGCYIVIDIMLDMAEREGVVDIYNCVKALRSRRINMVQTEEQYIFIHDAILEACLCGETAIPVCEFKAAYFDMIRIDSQTNSSHLKDEFQTLNSVTPRLQAEDCSIACLPRNHDKNRFMDMLPPDRCLPFLITIDGESSNYINAALMDSYRQPAAFIVTQYPLPNTVKDFWRLVYDYGCTSIVMLNEVDLSQGCPQYWPEEGMLRYGPIQVECMSCSMDCDVINRIFRICNLTRPQEGYLMVQQFQYLGWASHREVPGSKRSFLKLILQVEKWQEECEEGEGRTIIHCLNGGGRSGMFCAIGIVVEMVKRQNVVDVFHAVKTLRNSKPNMVEAPEQYRFCYDVALEYLESS

SEQ ID NO: 51049 - protein, 70 aa, Homo sapiens
  MOD_RES (1)..(1): Any amino acid
XPFPGTIKSRDMSWKRHHLIPETFGVKRRRKRGPVESDPLRGEPEGASRAGGDQNRPAGLRLGCPWNYLH

SEQ ID NO: 51050 - protein, 150 aa, Homo sapiens
MVVALRYVWPLLLCSPCLLIQIPEEYEGHHVMEPPVITEQSPRRLVVFPTDDISLKCEASGKPEVQFRWTRDGVHFKPKEELGVTVYQSPHSGSFTITGNNSNFAQRFQGIYRCFASNKLGTAMSHEIRLMAEGAPKWPKETVKPVEVEE

SEQ ID NO: 51051 - protein, 86 aa, Homo sapiens
  MOD_RES (1)..(1): Any amino acid
XLEDLDGFEGYSLSDWLCLAFVESKFNISKINENADGSFDYGLFQINSHYWCNDYKSYSENLCHVDCQGIHCAKRIVSGARGMNNW

SEQ ID NO: 51052 - protein, 529 aa, Homo sapiens
MGSSRAPWMGRVGGHGMMALLLAGLLLPGTLAKSIGTFSDPCKDPTRITSPNDPCLTGKGDSSGFSSYSGSSSSGSSISSARSSGGGSSGSSSGSSIAQGGSAGSFKPGTGYSQVSYSSGSGSSLQGASGSSQLGSSSSHSGNSGSHSGSSSSHSSSSSSFQFSSSSFQVGNGSALPTNDNSYRGILNPSQPGQSSSSSQTFGVSSSGQSVSSNQRPCSSDIPDSPCSGGPIVSHSGPYIPSSHSVSGGQRPVVVVVDQHGSGAPGVVQGPPCSNGGLPGKPCPPITSVDKSYGGYEVVGGSSDSYLVPGMTYSKGKIYPVGYFTKENPVKGSPGVPSFAAGPPISEGKYFSSNPIIPSQSAASSAIAFQPVGTGGVQLCGGGSTGSKGPCSPSSSRVPSSSSISSSSGLPYHPCGSASQSPCSPPGTGSFSSSSSSQSSGKIILQPCGSKSSSSGHPCMSVSSLTLTGGPDGSPHPDPSAGAKPCGSSSAGKIPCRSIRDILAQVKPLGPQLADPEVFLPQGELLNSP

SEQ ID NO: 51053 - protein, 135 aa, Homo sapiens
MQTVYYGSLGLWLALVDGLVRSSPSLDQMFDAEILGFSTPPGRLSMMSFILNALTCALGLLYFIRRGKQCLDFTVTVHFFHLLGCWFYSSRFPSALTWWLVQAVCIALMAVIGEYLCMRTELKEIPLNSAPKSNV

SEQ ID NO: 51054 - protein, 240 aa, Homo sapiens
MNKQRGTFSEVSLAQDPKRQQRKPKGNKSSISGTEQEIFQVELNLQNPSLNHQGIDKIYDCQGLLPPPEKLTAEVLGIICIVLMATVLKTIVLIPFLEQNNFSPNTRTQKARHCGHCPEEWITYSNSCYYIGKERRTWEESLQACASKNSSSLLCIDNEEEMKFLASILPSSWIGVFRNSSHHPWVTINGLAFKHEIKDSDHAERNCAMLHVRGLISDQCGSSRIIRRGFIMLTRLVLNS

SEQ ID NO: 51055 - protein, 279 aa, Homo sapiens
MKQVAPDKTCMQFSIRRPKLPSSETHPEESMYKRLGVSAWLNHLNELGQVEEEYKLRKAIFFGGIDVSIRGEVWPFLLRYYSHESTSEEREALRLQKRKEYSEIQQKRLSMTPEEHRAFWRNVQFTVDKDVVRTDRNNQFFRGEDNPNVESMRRILLNYAVYNPAVGYSQGMSDLVAPILAEVLDESDTFWCFVGLMQNTIFVSSPRDEDMEKQLLYLRELLRLTHVRFYQHLVSLGEDGLQMLFCHRWLLLCFKREFPEAEALRIWEACWAHYQGADV

SEQ ID NO: 51056 - protein, 130 aa, Homo sapiens
MATIEALRPYQPLGALVVTTPQAVSVGDVRRELTFCRKTGLRVMGIVENMSGFTCPHCTECTSVFSRGGGEELAQLAGVPFLGSVPLDPALMRTLEEGHDFIQEFPGSPAFAALTSIAQKILDATPACLP

SEQ ID NO: 51057 - protein, 497 aa, Homo sapiens
MGLEALVPLAVIVAIFLLLVDLMHRRQRWAARYSPGPLPLPGLGNLLHVDFQNTPYCFDQLRRRFGDVFSLQLAWTPVVVLNGLAAVREALVTHGEDTADRPPVPITQILGFGPRSQGVFLARYGPAWREQRRFSVSTLRNLGLGKKSLEQWVTEEAACLCAAFANHSGRPFRPNGLLDKAVSNVIASLTCGRRFEYDDPRFLRLLDLAQEGLKEESGFLREVLNAVPVLLHIPALAGKVLRFQKAFLTQLDELLTEHRMTWDPAQPPRDLTEAFLAEMEKAKGNPESSFNDENLRIVVADLFSAGMVTTSTTLAWGLLLMILHPDVQRRVQQEIDDVIGQVRRPEMGDQAHMPYTTAVIHEVQRFGDIVPLGVTHMTSRDIEVQGFRIPKGTTLITNLSSVLKDEAVWEKPFRFHPEHFLDAQGHFVKPEAFLPFSAGRRACLGEPLARMELFLFFTSLLQHFSFSVPTGQPRPSHHGVFAFLVTPSPYELCAVPR

SEQ ID NO: 51058 - protein, 210 aa, Homo sapiens
MVSSCCGSVCSDQGCGQVLCQETCCRPSCCQTTCCRTTCYRPSCCVSSCCRPQCCQSVCCQPTCCRPSCCETTCCHPRCCISSCCRPSCCMSSCCKPQCCQSVCCQPTCCHPSCCISSCCRPSCCVSRCCRPQCCQSVCCQPTCCRPSCCISSCCRPSCCESSCCRPCCCRPCCCLRPVCGRVSCHTTCYRPTCVISTCPRPLCCASSCC

SEQ ID NO: 51059 - protein, 282 aa, Homo sapiens
MELLIMAYALKTACARNIIGVIPYFPYSKQSKMRKRGSIVCKLLASMLAKAGLTHIITMDLHQKEIQGFFSFPVDNLRASPFLLQYIQEEIPNYRNAVIVAKSPDAAKRAQSYAERLRLGLAVIHGEAQCTELDMDDGRHSPPMVKNATVHPGLELPLMMAKEKPPITVVGDVGGRIAIIVDDIIDDVESFVAAAEILKERGAYKIYVMATHGILSAEAPRLIEESSVDEVVVTNTVPHEVQKLQCPKIKTVDISLILSEAIRRIHNGESMAYLFRNITVDD

SEQ ID NO: 51060 - protein, 162 aa, Homo sapiens
MDAVDATMEKLRAQCLSRGASGIQGLARFFRQLDRDGSRSLDADEFRQGLAKLGLVLDQAEAEGVCRKWDRNGSGTLDLEEFLRALRPPMSQAREAVIAAAFAKLDRSGDGVVTVDDLRGVYSGRAHPKVTLAEFQDYYSGVSASMNTDEEFVAMMTSAWQL

SEQ ID NO: 51061 - protein, 1872 aa, Homo sapiens
MANLEESFPRGGTRKIHKPEKAFQQSVEQDNLFDISTEEGSTKRKKSQKGPAKTKKLKIEKRESSKSAREKFEILSVESLCEGMRILGCVKEVNELELVISLPNGLQGFVQVTEICDAYTKKLNEQVTQEQPLKDLLHLPELFSPGMLVRCVVSSLGITDRGKKSVKLSLNPKNVNRVLSAEALKPGMLLTGTVSSLEDHGYLVDIGVDGTRAFLPLLKAQEYIRQKNKGAKLKVGQYLNCIVEKVKGNGGVVSLSVGHSEVSTAIATEQQSWNLNNLLPGLVVKAQVQKVTPFGLTLNFLTFFTGVVDFMHLDPKKAGTYFSNQAVRACILCVHPRTRVVHLSLRPIFLQPGRPLTRLSCQNLGAVLDDVPVQGFFKKAGATFRLKDGVLAYARLSHLSDSKNVFNPEAFKPGNTHKCRIIDYSQMDELALLSLRTSIIEAQYLRYHDIEPGAVVKGTVLTIKSYGMLVKVGEQMRGLVPPMHLADILMKNPEKKYHIGDEVKCRVLLCDPEAKKLMMTLKKTLIESKLPVITCYADAKPGLQTHGFIIRVKDYGCIVKFYNNVQGLVPKHELSTEYIPDPERVFYTGQVVKVVVLNCEPSKERMLLSFKLSSDPEPKKEPAGHSQKKGKAINIGQLVDVKVLEKTKDGLEVAVLPHNIRAFLPTSHLSDHVANGPLLHHWLQAGDILHRVLCLSQSEGRVLLCRKPALVSTVEGGQDPKNFSEIHPGMLLIGFVKSIKDYGVFIQFPSGLSGLAPKAIMSDKFVTSTSDHFVEGQTVAAKVTNVDEEKQRMLLSLRLSDCGLGDLAITSLLLLNQCLEELQGVRSLMSNRDSVLIQTLAEMTPGMFLDLVVQEVLEDGSVVFSGGPVPDLVLKASRYHRAGQEVESGQKKKVVILNVDLLKLEVHVSLHQDLVNRKARKLRKGSEHQAIVQHLEKSFAIASLVETGHLAAFSLTSHLNDTFRFDSEKLQVGQGVSLTLKTTEPGVTGLLLAVEGPAAKRTMRPTQKDSETVDEDEEVDPALTVGTIKKHTLSIGDMVTGTVKSIKPTHVVVTLEDGIIGCIHASHILDDVPEGTSPTTKLKVGKTVTARVIGGRDMKTFKYLPISHPRFVRTIPELSVRPSELEDGHTALNTHSVSPMEKIKQYQAGQTVTCFLKKYNVVKKWLEVEIAPDIRGRIPLLLTSLSFKVLKHPDKKFRVGQALRATVVGPDSSKTLLCLSLTGPHKLEEGEVAMGRVVKVTPNEGLTVSFPFGKIGTVSIFHMSDSYSETPLEDFVPQKVVRCYILSTADNVLTLSLRSSRTNPETKSKVEDPEINSIQDIKEGQLLRGYVGSIQPHGVFFRLGPSVVGLARYSHVSQHSPSKKALYNKHLPEGKLLTARVLRLNHQKNLVELSFLPGDTGKPDVLSASLEGQLTKQEERKTEAEERDQKGEKKNQKRNEKKNQKGQEEVEMPSKEKQQPQKPQAQKRGGRECRESGSEQERVSKKPKKAGLSEEDDSLVDVYYREGKEEAEETNVLPKEKQTKPAEAPRLQLSSGFAWNVGLDSLTPALPPLAESSDSEEDEKPHQATQIKKSKKERELEKQKAEKELSRIEEALMDPGRQPESADDFDRLVLSSPNSSILWLQYMAFHLQATEIEKARAVAERALKTISFREEQEKLNVWVALLNLENMYGSQESLTKVFERAVQYNEPLKVFLHLADIYAKSEKFQEAGELYNRMLKRFRQEKAVWIKYGAFLLRRSQAAASHRVLQRALECLPSKEHVDVIAKFAQLEFQLGDAERAKAIFENTLSTYPKRTDVWSVYIDMTIKHGSQKDVRDIFERVIHLSLAPKRMKFFFKRYLDYEKQHGTEKDVQAVKAKALEYVEAKSSVLED

SEQ ID NO: 51062 - protein, 702 aa, Homo sapiens
MLLLLGLCLGLSLCVGSQEEAQSWGHSSEQDGLRVPRQVRLLQRLKTKPLMTEFSVKSTIISRYAFTTVSCRMLNRASEDQDIEFQMQIPAAAFITNFTMLIGDKVYQGEITEREKKSGDRVKEKRNKTTEENGEKGTEIFRASAVIPSKDKAAFFLSYEELLQRRLGKYEHSISVRPQQLSGRLSVDVNILESAGIASLEVLPLHNSRQRGSGRGEDDSGPPPSTVINQNETFANIIFKPTVVQQARIAQNGILGDFIIRYDVNREQSIGDIQVLNGYFVHYFAPKDLPPLPKNVVFVLDSSASMVGTKLRQTKDALFTILHDLRPQDRFSIIGFSNRIKVWKDHLISVTPDSIRDGKVYIHHMSPTGGTDINGALQRAIRLLNKYVAHSGIGDRSVSLIVFLTDGKPTVGETHTLKILNNTREAARGQVCIFTIGIGNDVDFRLLEKLSLENCGLTRRVHEEEDAGSQLIGFYDEIRTPLLSDIRIDYPPSSVVQATKTLFPNYFNGSEIIIAGKLVDRKLDHLHVEVTASNSKKFIILKTDVPVRPQKAGKDVTGSPRPGGDGEGDTNHIERLWSYLTTKELLSSWLQSDDEPEKERLRQRAQALAVSYRFLTPFTSMKLRGPVPRMDGLEEAHGMSAAMGPEPVVQSVRGAGTQPGPLLKKPYQPRIKISKTSVRGFRREEQIFSNVMKFPFASILEL

SEQ ID NO: 51063 - protein, 35 aa, Homo sapiens
MAETSALPTGFGELEVLAVGMVLLVEGVRWYLIVP

SEQ ID NO: 51064 - protein, 181 aa, Homo sapiens
MDADKEKDLQKFLKNVDEISNLIQEMNSDDPVVQQKAVLETEKRLLLMEEDQEEDECRTTLNKTMISPPQTAMKSAEEINSEAFLASVEKDAKERAKRRRENKVLADALKEKGNEAFAEGNYETAILRYSEGLEKLKDMKVLYTNRAQCDEKCTKAYFHMGKANLALKNYSVSRECYKKIL

SEQ ID NO: 51065 - protein, 232 aa, Homo sapiens
MNNLTELQPGLFHHLRFLEELRLSGNHLSHIPGQAFSGLYSLKILMLQNNQLGGIPAEALWELPSLQSLRLDANLISLVPERSFEGLSSLRHLWLDDNALTEIPVRALNNLPALQAMTLALNRISHIPDYAFQNLTSLVVLDLNYNKLQEFPVAIRTLGRLQELSLNGAMDIQEFPDLKGTTSLEILTLTRAGIRLLPSGMCQQLPRLRVLELSHNQIEELPSLHRCQKLEE

SEQ ID NO: 51066 - protein, 475 aa, Homo sapiens
  MOD_RES (1)..(1): Any amino acid
XHTGEKPYTCEECGKAFNQFSNLTTHKRIHTAEKFYKCTECGEAFSRSSNLTKHKKIHTEKKPYKCEECGKAFKWSSKLTEHKLTHTGEKPYKCEECGKAFNWPSTLTKHNRIHTGEKPYKCEVCGKAFNQFSNLTTHKRIHTAEKPYKCEECGKAFSRSSNLTKHKKIHIEKKPYKCEECGKAFKWSSKLTEHKITHTGEKPYKCEECGKAFNHFSILTKHKRIHTGEKPYKCEECGKAFTQSSNLTTHKKIHTGEKFYKCEECGKAFTQSSNLTTHKKIHTGGKPYKCEECGKAFNQFSTLTKHKIIHTEEKPYKCEECGKAFKWSSTLTKHKIIHTGEKPYKCEECGKAFKLSSTLSTHKIIHTGEKPYKCEKCGKAFNRSSNLIEHKKIHTGEQPYKCEECGKAFNYSSHLNTHKRIHTKEQPYKCKECGKAFNQYSNLTTHNKIHTGEKLYKPEDVTVILTTPQTFSNIK

SEQ ID NO: 51067 - protein, 121 aa, Homo sapiens
MAGQHLPVPRLEGVSREQFMQHLYPQRKPLVLEGIDLGPCTSKWTVDYLSQVGGKKEVKIHVAAVAQMDFIKLYLLTSWSRGQLKRNIKNSLFQRMRNTTYGHLEKTLERMLQISESSFLC

SEQ ID NO: 51068 - protein, 239 aa, Homo sapiens
MDKEKDGIPISSLREITLLLRLRHPNIVELKEVVVGNHLESIFLVMGYCEQDLASLLENMPTPFSEAQVKCIVLQVLRGLQYLHRNFIIHRDLKVSNLLMTDKGCVKTADFGLARAYGVPVKPMTPKVVTLWYRAPELLLGTTTQTTSIDMWVSKGLAAVRSSVPRAGGVSRRLAAVRSTVLCRAVGCILAELLAHRPLLPGTSEIHQIDLIVQLLGTPSENIWPGFSKLPLVGQYSLR

SEQ ID NO: 51069 - protein, 1854 aa, Homo sapiens
ANGTECRSGWVGPNGGITNFDNFAFAMLTVFQCITMEGWTDVLYWMNDAMGFELPWVYFVSLVIFGSFFVLNLVLGVLSGEFSKEREKAKARGDFQKLREKQQLEEDLKGYLDWITQAEDIDPENEEEGGEEGKRNTSMPTSETESVNTENVSGEGENRGCCGSLWCWWRRRGAAKAGPSGCRRWGQAISKSKLSRRWRRWNRFNRRRCRAAVKSVTFYWLVIVLVFLNTLTISSEHYNQPDWLTQIQDIANKVLLALFTCEMLVKMYSLGLQAYFVSLFNRFDCFVVCGGITETILVELEIMSPLGISVFRCVRLLRIFKVTRHWTSLSNLVASLLNSMKSIASLLLLLFLFIIIFSLLGMQLFGGKFNFDETQTKRSTFDNFPQALLTVFQILTGEDWNAVMYDGIMAYGGPSSSGMIVCIYFIILFICGNYILLNVFLAIAVDNLADAESLNTAQKEEAEEKERKKIARKESLENKKNNKPEVNQIANSDNKVTIDDYREEDEDKDPYPPCDVPVGEEEEEEEEDEPEVPAGPRPRRISELNMKEKIAPIPEGSAFFILSKTNPIRVGCHKLINHHIFTNLILVFIMLSSAALAAEDPIRSHSFRNTILGYFDYAFTAIFTVEILLKMTTFGAFLHKGAFCRNYFNLLDMLVVGVSLVSFGIQSSAISVVKILRVLRVLRPLRAINRAKGLKHVVQCVFVAIRTIGNIMIVTTLLQFMFACIGVQLFKGKFYRCTDEAKSNPEECRGLFILYKDGDVDSPVVRERIWQNSDFNFDNVLSAMMALFTVSTFEGWPALLYKAIDSNGENIGPIYNHRVEISIFFIIYIIIVAFFMMNIFVGFVIVTFQEQGEKEYKNCELDKNQRQCVEYALKARPLRRYIPKNPYQYKFWYVVNSSPFEYMMFVLIMLNTLCLAMQHYEQSKMFNDAMDILNMVFTGVFTVEMVLKVIAFKPKHYFTDAWNTFDALIVVGSVVDIAITEVNPTESENVPVPTATPGNSEESNRISITFFRLFRVMRLVKLLSRGEGIRTLLWTFIKSFQALPYVALLIAMLFFIYAVIGMQMFGKVAMRDNNQINRNNNFQTFPQAVLLLFRCATGEAWQEIMLACLPGKLCDPESDYNPGEEYTCGSNFAIVYFISFYMLCAFLIINLFVAVIMDNFDYLTRDWSILGPHHLDEFKRIWSEYDPEAKGRIKHLDVVTLLRRIQPPLGFGKLCPHRVACKRLVAMNMPLNSDGTVMFNATLFALVRTALKIKTEGNLEQANEELRAVIKKIWKKTSMKLLDQVVPPAGDDEVTVGKFYATFLIQDYFRKFKKRKEQGLVGKYPAKNTTIALQAGLRTLHDIGPEIRRAISCDLQDDEPEETKREEEDDVFKRNGALLGNHVNHVNSDRRDSLQQTNTTHRPLHVQRPSIPPASDTEKPLFPPAGNSVCHNHHNHNSIGKQVPTSTNANLNNANMSKAAHGKRPSIGNLEHVSENGHHSSHKHDREPQRRSSVKRTRYYETYIRSDSGDEQLPTICREDPEIHGYFRDPHCLGEQEYFSSEECYEDDSSPTWSRQNYGYYSRYPGRNIDSERPRGYHHPQGFLEDDDSPVCYDSRRSPRRRLLPPTPASHRRSSFNFECLRRQSSQEEVPSSPIFPHRTALPLHLMQQQIMAVAGLDSSKAQKYSPSHSTRSWATPPATPPYRDWTPCYTPLIQVEQSEALDQVNGSLPSLHRSSWYTDEPDISYRTFTPASLTVPSSFRNKNSDKQRSADSLVEAVLISEGLGRYARDPKFVSATKHEIADACDLTIDEMESAASTLLNGNVRPRANGDVGPLSHRQDYELQDFGPGYSDEEPDPGRDEEDLADEMICITTL

SEQ ID NO: 51070 - protein, 375 aa, Homo sapiens
MAPPTELLARPERGSAPGSRAMGRLVAVGLLGIALALLGERLLALRNRLKASREVESVDLPHCHLIKGIEAGSEDIDILPNGLAFFSVGLKFPGLHSFAPDKPGGILMMDLKEEKPRARELRISRGFDLASFNPHGISTFIDNDDTVYLFVVNHPEFKNTVEIFKFEEAENSLLHLKTVKHELLPSVNDITAVGPAHFYATNDHYFSDPFLKYLETYLNLHWANVVYYSPNEVKVVAEGFDSANGINISPDDKYIYVADILAHEIHVLEKHTNMNLTQLKVLELDTLVDNLSIDPSSGDIWVGCHPNGQKLFVYDPNNPPSSEVLRIQNILSEKPTVTTVYANNGSVLQGSSVASVYDGKLLIGTLYHRALYCEL

SEQ ID NO: 51071 - protein, 247 aa, Homo sapiens
MIKRRAHPGAGGDRTRPRRRRSTESWIERCLNESENKRYSSHTSLGNVSNDENEEKENNRASKPHSTPATLQWLEENYEIAEGVCIPRSALYMHYLDFCEKNDTQPVNAASFGKIIRQQFPQLTTRRLGTRGQSKYHYYGIAVKESSQYYDVMYSKKGAAWVSETGKKEVSKQTVAYSPRSKLGTLLPEFPNVKDLNLPASLPEEKVSTFIMMYRTHCQRILDTVIRANFDEECRPTCCLCWAPPRW

SEQ ID NO: 51072 - protein, 122 aa, Homo sapiens
MRFLAATFLLLALSTAAQAEPVQFKDCGSVDGVIKEVNVSPCPTQPCQLSKGQSYSVNVTFTSNIQSKSSKAVVHGILMGVPVPFPIPEPDGCKSGINCPIQKDKTYSYLNKLPVKSEYPSV

SEQ ID NO: 51073 - protein, 565 aa, Homo sapiens
MGKEPWVPDSVDMTSAMARGAYGRPGSDFCHGTEGKDLPSEHNVSVEGVAQDRSPEATLCPQKTCPCDICGLRLKDILHLAEHQTTHPRQKPFVCEAYVKGSEFSANLPRKQVQQNVHNPIRTEEGQASPVKTCRDHTSDQLSTCREGGKDFVATAGFLQCEVTPSDGEPHEATEGVVDFHIALRHNKCCESGDAFNNKSTLVQHQRIHSRERPYECSKCGIFFTYAADLTQHQKVHNRGKPYECCECGKFFSQHSSLVKHRRVHTGESPHVCGDCGKFFSRSSNLIQHKRVHTGEKPYECSDCGKFFSQRSNLIHHKRVHTGRSAHECSECGKSFNCNSSLIKHWRVHTGERPYKCNECGKFFSHIASLIQHQIVHTGERPHGCGECGKAFSRSSDLMKHQRVHTGERPYECNECGKLFSQSSSLNSHRRLHTGERPYQCSECGKFFNQSSSLNNHRRLHTGERPYECSECGKTFRQRSNLRQHLKVHKPDRPYECSECGKAFNQRPTLIRHQKIHIRERSMENVLLPCSQHTPEISSENRPYQGAVNYKLKLVHPSTHPGEVP

SEQ ID NO: 51074 - protein, 263 aa, Homo sapiens
MRKNGVGGCLSLEATPRLCSLNLPFSAEGADSKGWEAGPESPAVVAMVTDYGAFIKIPGCRKQGLVHRTHMSSCRVDKPSEIVDVGDKVWVKLIGREMKNDRIKVSLSMKVVNQGTGKDLDPNNVIIEQEERRRRSFQDYTGQKITLEAVLNTTCKKCGCKGHFAKDCFMQPGGTKYSLIPDEEEEKEEAKSAEFEKPDPTRNPSRKRKKEKKKKKHRDRKSSDSDSSDSESDTGKRARHTSKDSKAAKKKKKKKKHKKKHKE

SEQ ID NO: 51075 - protein, 37 aa, Homo sapiens
MTPILTVLICLGLSLDPRTHVQAGPLPKPTLWAEPGS

SEQ ID NO: 51076 - protein, 99 aa, Homo sapiens
MALLTPQGVKEVFQLQRPQGRERLRRLLNWEEFDEQRDSRRSILLDTLYESIIFAVGKGFPWVEVAQVVKFTEELLRETKGSVQEPTQPTSCVGMPAEA

SEQ ID NO: 51077 - protein, 43 aa, Homo sapiens
YRGMMIYVSTGAWGWAGSCFWQWSFCPPACVGCIEERLPVPSS

SEQ ID NO: 51078 - protein, 148 aa, Homo sapiens
MAMQKIFAREILDSRGNPTVEVDLHTAKGRFRAAVPSGASTGIYEALELRDGDKGRYLGKGVLKAVENINNTLGPALLQKKLSVVDQEKVDKFMIELDGTENKSKFGANAILGVSLAVCKAGAAEKGVPLYRHIADLAGNPDLILPVP

SEQ ID NO: 51079 - protein, 479 aa, Homo sapiens
MATDSWALAVDEQEAAAESLSNLHLKEEKIKPDTNGAVVKTNANAEKTDEEEKEDRAAQSLLNKLIRSNLVDNTNQVEVLQRDPNSPLYSVKSFEELRLKPQLLQGVYAMGFNRPSKIQENALPMMLAEPPQNLIAQSQSGTGKTAAFVLAMLSRVEPSDRYPQCLCLSPTYELALQTGKVIEQMGKFYPELKLAYAVRGNKLERGQKISEQIVIGTPGTVLDWCSKLKFIDPKKIKVFVLDEADVMIATQGHQDQSIRIQRMLPRNCQMLLFSATFEDSVWKFAQKVVPDPNVIKLKREEETLDTIKQYYVLCSSRDEKFQALCNLYGAITIAQAMIFCHTRKTASWLAAELSKEGHQVALLSGEMMVEQRAAVIERFREGKEKVLVTTNVCARGIDVEQVSVVINFDLPVDKDGNPDNETYLHRIGRTGRFGKRGLAVNMVDSKHSMNILNRIQEHFNKKIERLDTDDLDEIEKIAN

SEQ ID NO: 51080 - protein, 400 aa, Homo sapiens
MAGQMPHSHQYSDRRQPNISDQQVSALSYSDQIQQPLTNQRRMPQTFRDPATAPLRKLSVDLIKTYKHINEVYYAKKKRRHQQGQGDDSSHKKERKVYNDGYDDDNYDYIVKNGEKWMDRYEIDSLIGKGSFGQVVKAYDRVEQEWVAIKIIKNKKAFLNQAQIEVRLLELMNKHDTEMKYYIVHLKRHFMFRNHLCLVFEMLSYNLYDLLRNTNFRGVSLNLTRKFAQQMCTALLFLATPELSIIHCDLKPENILLCNPKRSAIKIVDFGSSCQLGQRIYQYIQSRFYRSPEVLLGMPYDLAIDMWSLGCILVEMHTGEPLFSGANEVDQMNKIVEVLGIPPAHILDQAPKARKFFEKLPDGTWNLKKTKDGKREYKPPGTRKLHNILGVETGGPGGRR

SEQ ID NO: 51081 - protein, 55 aa, Homo sapiens
MPFDFRRFDIYRKVPKDLTQPTYTGAIISICCCLFILFLFLSELTGFITTEVGWA

SEQ ID NO: 51082 - protein, 47 aa, Homo sapiens
MSGGKSAQGPEEGGVCITEALITKRNLTFPEDGELSEKMHSAMLWNE

SEQ ID NO: 51083 - protein, 321 aa, Homo sapiens
MQEADISGYIPNGEWDLVGIPGKRSERFYECCKEPYPDVTFTVTMRRRTLYYGLNLLIPCVLISALALLVFLLPADSGEKISLGITVLLSLTVFMLLVAEIMPATSDSVPLIAQYFASTMIIVGLSVVVTVIVLQYHHHDPDGGKMPKWTRVILLNWCAWFLRMKRPGEDKVRPACQHKQRRCSLASVEMSAVAPPPASNGNLLYIGFRGLDGVHCVPTPDSGVVCGRMACSPTHDEHLLHGGQPPEGDPDLAKILEEVRYIANRFRCQDESEAVCSEWKFAACVVDRLCLMAFSVFTIICTIGILMLAPNFVEAVSKDFA

SEQ ID NO: 51084 - protein, 330 aa, Homo sapiens
MLLILLSVALLALSSAQNLNEDVSQEESPSLIAGNPQGPSPQGGNKPQGPPPPPGKPQGPPPQGGNKPQGPPPPGKPQGPPPQGDKSRSPRSPPGKPQGPPPQGGNQPQGPPPPPGKPQGPPPQGGNRPQGPPPPGKPQGPPPQGDKSRSPSPPGKPQGPPPQGGNQPQGPPPPPGKPQGPPPQGGKKPQGPPPPGKPQGPPPQGDKSRSSQSPPGKPQGPPPQGGNQPQGPPPPPGKPQGPPPQGGNKPQGPPPPGKPQGPPAQGGSKSQSARSPPGKPQGPPQQEGNNPQGPPPPAGGNPQQPQAPPAGQPQGPPRPPQGGRPSRPPQ

SEQ ID NO: 51085 - protein, 261 aa, Homo sapiens
MSWKKALRIPGGLRAATVTLMLSMLSTPVAEGRDSPEDFVYQFKGMCYFTNGTERVRLVSRSIYNREEIVRFDSDVGEFRAVTLLGLPAAEYWNSQKDILERKRAAVDRVCRHNYQLELRTTLQRRVEPTVTISPSRTEALNHHNLLVCSVTDFYPAQIKVRWFRNDQEETAGVVSTPLIRNGDWTFQILVMLEMTPQRGDVYTCHVEHPSLQSPITVEWRAQSESAQSKMLSGIGGFVLGLIFLGLGLIIHHRSQKGLLH

SEQ ID NO: 51086 - protein, 54 aa, Homo sapiens
MAEVEETLKRIQSHKGVIGTMVVNAEDPRFVTFKYARQLTAFQRKSGQQITIKD

SEQ ID NO: 51087 - protein, 94 aa, Homo sapiens
  MOD_RES (1)..(1): Any amino acid
XGKKNRTNLIFLSGNRVLKWMERSHGTEKALTALLKCGAEDHVEAVKKLQNSTKILQKNNLNLLRDLAVHIAHSLRNSPDWGGVVILHRRPSCS

SEQ ID NO: 51088 - protein, 112 aa, Homo sapiens
MSLVLNDLLICCRQLEHDRATERKKEVEKFKRLIRDPETIKHLDRHSDSKQGKYLNWDAVFRFLQKYIQKETECLRIAKPNVSASTQASRQKKMQEISSLVKYFIKCANRSK

SEQ ID NO: 51089 - protein, 57 aa, Homo sapiens
MSEKKQPVDLGLLEEDDEFEEFPAEDWAGLDEDEDAHVWEDNWDDDNVEDDFSNQLR

SEQ ID NO: 51090 - protein, 111 aa, Homo sapiens
MVRMNVLADALKSINNAEKRGKRQVLIRPCSKVIVRFLTVMMKHGYIGEFEIIDDHRAGKIVVNLTGRLNKVGVQWHDLGYCNLCLPGSSDSPASASLVAEITVWGDQPQI

SEQ ID NO: 51091 - protein, 52 aa, Homo sapiens
MPIFTFLSEQGTLKLPEVYQRCRSLGTILEHHPQLCMKDPLYSSRPGIPLNF

SEQ ID NO: 51092 - protein, 350 aa, Homo sapiens
MAEIKEKICDYLFNVSDSSALNLAKNIGLTKARDINAVLIDMERQGDVYRQGTTPPIWHLTDKKRERMQIKRNTNSVPETAPAAIPETKRNAEFLTCNIPTSNASNNMVTTEKVENGQEPVIKLENRQEARPEPARLKPPVHYNGPSKAGYVDFENGQWATDDIPDDLNSIRAAPGEFRAIMEMPSFYSHGLPRCSPYKKLTECQLKNPISGLLEYAQFASQTCEFNMIEQSGPPHEPRFKFQVVINGREFPPAEAGSKKVAKQDAAMKAMTILLEEAKAKDSGKSEESSHYSTEKESEKTAESQTPTPSATSFFSGKSPVTTLLECMHKLGNSCEFRLLSKEGPAHEPK

SEQ ID NO: 51093 - protein, 184 aa, Homo sapiens
MPGLLNWITGAALPLTASDVTSCVSGYALGLTASLTYGNLEAQPFQGLFVYPLDECTTVIGFEAVIADRVVTVQIKDKAKLESGHFDASHVRSPTVTGDLGRGFGADPVRGQPGDHCPHGECHHLHQHLLGAPNAAQRGCEGPSACCLCPNRAPVLHQEHWHLQPTGPGQRQALLRCLGPGLLE

SEQ ID NO: 51094 - protein, 123 aa, Homo sapiens
MAAVTHYLYLCQFSWMLIQSVNFWYVLVMNDEHTERRYLLFFLLSWGLPAFVVILLIVILKGIYHQSMSQIYGLIHGDLCFIPNVYAALFTAALVPLTCLVVVFVVFIHAYQVKPQWKAYDDV

SEQ ID NO: 51095 - protein, 55 aa, Homo sapiens
MAAERKTRLSKNLLRMKFMQRGLDSETKKQLEEEEKKIISEEHWYLDLPELKEKE

SEQ ID NO: 51096 - protein, 494 aa, Homo sapiens
MSGRGAGGFPLPPLSPGGGAAFRPMGPAGPAAQYQRPGMSPGNRMPMAGLQVGPPAGSPFGAAAPLRPGMPPTMMDPFRKRLLVPQAQPPMPAQRRGLKRRKMADKVLPQRIRELVPESQAYMDLLAFERKLDQTIARKRMEIQEAIKKPLTQKRKLRIYISNTFSPSKAEGDSAGTAGTPGGTPAGDKVASWELRVEGKLLDDPSKQKRKFSSFFKSLVIELDKELYGPDNHLVEWHRMPTTQETDGFQVKRPGDLNVKCTLLLMLDHQPPQYKLDPRLARLLGVHTQTRAAIMQALWLYIKHNQLQDGHEREYINCNRYFRQIFSCGRLRFSEIPMKLAGLLQHPDPIVINHVISVDPNDQKKTACYDIDVEVDDPLKAQMSNFLASTTNQQEIASLDVKIHETIESINQLKTQRDFMLSFSTDPQDFIQEWLRSQRRDLKIITDVIGNPEEERRAAFYHQPWAQEAVGRHIFAKVQQRRQELEQVLGIRLT

SEQ ID NO: 51097 - protein, 467 aa, Homo sapiens
MEMFTFLLTCIFLPLLRGHSLFTCEPITVPRCMKMAYNMTFFPNLMGHYDQSIAAVEMEHFLPLANLECSPNIETFLCKAFVPTCIEQIHVVPPCRKLCEKVYSDCKKLIDTFGIRWPEELECDRLQYCDETVPVTFDPHTEFLGPQKKTEQVQRDIGFWCPRHLKTSGGQGYKFLGIDQCAPPCPNMYFKSDELEFAKSFIGTVSIFCLCATLFTFLTFLIDVRRFRYPERPIIYYSVCYSIVSLMYFIGFLLGDSTACNKADEKLELGDTVVLGSQNKACTVLFMLLYFFTMAGTVWWVILTITWFLAAGRKWSCEAIEQKAVWFHAVAWGTPGFLTVMLLAMNKVEGDNISGVCFVGLYDLDASRYFVLLPLCLCVFVGLSLLLAGIISLNHVRQVIQHDGRNQEKLKKFMIRIGVFSGLYLVPLVTLLGCYVYEQVNRITWEITWVSDHCRQYHIPCPYQSNQ

SEQ ID NO: 51098 - protein, 100 aa, Homo sapiens
MAKWGEGDPRWIVEERADATNVNNWHWTERDASNWSTDKLKTLFLAVQVQNEEGKCEVTEVSKLDGEASINNRKGKLIFFYEWSVKLNWTGKSKLGCQRD

SEQ ID NO: 51099 - protein, 614 aa, Homo sapiens
MRPVINRCAPGSLDLMLPQAASEGIVFHSLQISLCFRSWLPAMLAVLLSLAPSASSDISASRPNILLLMADDLGIGDIGCYGNNTMRTPNIDRLAEDGVKLTQHISAASLCTPSRAAFLTGRYPVRSGMVSSIGYRVLQWTGASGGLPTNETTFAKILKEKGYATGLIGKWHLGLNCESASDHCHHPLHHGFDHFYGMPFSLMGDCARWELSEKRVNLEQKLNFLFQVLALVALTLVAGKLTHLIPVSWMPVIWSALSAVLLLASSYFVGALIVHADCFLMRNHTITEQPMCFQRTTPLILQEVASFLKRNKHGPFLLFVSFLHVHIPLITMENFLGKSLHGLYGDNVEEMDWMVGRILDTLDVEGLSNSTLIYFTSDHGGSLENQLGNTQYGGWNGIYKGGKGMGGWEGGIRVPGIFRWPGVLPAGRVIGEPTSLMDVFPTVVRLAGGEVPQDRVIDGQDLLPLLLGTAQHSDHEFLMHYCERFLHAARWHQRDRGTMWKVHFVTPVFQPEGAGACYGRKVCPCFGEKVVHHDPPLLFDLSRDPSETHILTPASEPVFYQVMERVQQAVWEHQRTLSPVPLQLDRLGNIWRPWLQPCCGPFPLCWCLREDDPQ

SEQ ID NO: 51100 - protein, 147 aa, Homo sapiens
MGSQGSGGVPLVQAPYTVLLLPLGTSRQDPGAQSFFLWLRRMQALEREQDALWQGLELLQHGQAWFEDHLREAQRQQLHLGALGENFLTDLHSEPGRPPLAQIQKVNICLQNLIHEKLSRQQKGVTQPKEEMAQRGCTKGPRGPTRV

SEQ ID NO: 51101 - protein, 32 aa, Homo sapiens
  MOD_RES (1)..(1): Any amino acid
XGFGGSRGGGGYGGSGDGYNGFGNDGKFFRNK

SEQ ID NO: 51102 - protein, 430 aa, Homo sapiens
MPPRRSIVEVKVLDVQKRRVPNKHYVYIIRVTWSSGSTEAIYRRYSKFFDLQMQMLDKFPMEGGQKDPKQRIIPFLPGKILFRRSHIRDVAVKRLIPIDEYCKALIQLPPYISQCDEVLQFFETRPEDLNPPKEEHIGKKKSGGDQTSVDPMVLEQYVVVANYQKQESSEISLSVGQVVDIIEKNESGWWFVSTAEEQGWVPATCLEGQDGVQDEFSLQPEEEEKYTVIYPYTARDQDEMNLERGAVVEVIQKNLEGWWKIRYQGKEGWAPASYLKKNSGEPLPPKPGPGSPSHPGALDLDGVSRQQNAVGREKELLSSQRDGRFEGRPVPDGDAKQRSPKMRQRPPPRRDMTIPRGLNLPKPPIPPQVEEEYYTIAEFQTTIPDGISFQAGLKVEDHKNVHLESPVEVPLRRIKMRTALGKHVAASMEM

SEQ ID NO: 51103 - protein, 639 aa, Homo sapiens
MVASARVQKLVRRYKLAIATALAILLLQGLVVWSFSGLEEDEAGEKGRQRKPRPLDPGEGSKDTDSSAGRRGSTGRRHGRWRGRAESPGVPVAKVVRAVTSRQRASRRVPPAPPPEAPGRQNLSGAAAGEALVGAAGFPPHGDTGSVEGAPQPTDNGFTPKCEIVGKDALSALARASTKQCQQEIANVVCLHQAGSLMPKAVPRHCQLTGKMSPGIQWDESQAQQPMDGPPVRIAYMLVVHGRAIRQLKRLLKAVYHEQHFFYIHVDKRSDYLHREVVELAQGYDNVRVTPWRMVTIWGGASLLRMYLRSMRDLLEVPGWAWDFFINLSATDYPTRTNEELVAFLSKNRDKNFLKSHGRDNSRFIKKQGLDRLFHECDSHMWRLGERQIPAGIVVDGGSDWFVLTRSFVEYVVYTDDPLVAQLRQFYTYTLLPAESFFHTVLENSLACETLVDNNLRVTNWNRKLGCKCQYKHIVDWCGCSPNDFKPQDFLRLQQVSRPTFFARKFESTVNQEVLEILDFHLYGSYPPGTPALKAYWENTYDAADGPSGLSDVMLTAYTAFARLSLHHAATAAPPMGTPLCRLALIGTPKSVFSGTLGGYWGRWTSLWPCSAGPGAPTSQPQWSGSTQPMWWPHLMTSQ

SEQ ID NO: 51104 - protein, 136 aa, Homo sapiens
MSKLGLRQVTGVTRVTIRKSKNILFVITKPDVYKSPASDTYIVFGEAKIEDLSQQAQLAAAEKFKVQGEAVSNIQENTQTPTVQEESEEEEVDETGVEVKDIELVMSQANVSRAKAVRALKNNSNDIVNAIMELTM

SEQ ID NO: 51105 - protein, 188 aa, Homo sapiens
MYSSSCETTRNTTGIEESTDGMILGPEDLSYQIYDVSGESNSAVSTEDLKECLKKQLEFCFSRENLSKDLYLISQMDSDQFIPIWTVANMEEIKKLTTDPDLILEVLRSSPMVQVDEKGEKVRPSHKRCIVILREIPETTPIEEVKGLFKSENCPKVISCEFAHNSNWYITFQSDTDAQQAFILKRRS

SEQ ID NO: 51106 - protein, 122 aa, Homo sapiens
MSAAMRERFDRFLHEKNCMTDLLAKLEAKTGVNRSFIALGVIGLVALYLVFGYGASLLCNLIGFGYPAYISIKAIESPNKEDDTQWLTYWVVYGVFSIAEFFSDIFLSWFPFYYMLKRRKLP

SEQ ID NO: 51107 - protein, 138 aa, Homo sapiens
MNKVEQKSQESVSFKDVTVGFTQEEWQHLDPSQRALYRDVMLENYSNLVSVGYCVHKPEVIFRLQQGEEPWKQEEEFPSQSFPEVWTADHLKERSQENQSKHLWEVVFINNEMLTKEQGDVIGIPFNVDAPEMLMPLD

SEQ ID NO: 51108 - protein, 186 aa, Homo sapiens
  MOD_RES (1)..(1): Any amino acid
XIIDKRLQDEDASSTQQRRQIFRVNKDASGRSTNSHQSSTENELKYSEPRPWSSTDSDSSLRNLKPAVTKASSFSGISVLTRGDSSGSSKSIGRLSKTGSESSGSVGSSTGSLSHIQQPLPGQPFINPDGSPVVYNPPMTQQPVRSQVPGPPQPPLPAPPQQPAANHIFSQQDNLGSQFSHMSLAR

SEQ ID NO: 51109 - protein, 351 aa, Homo sapiens
MTHIVREVDRPGSKVNKKEVVEAVTIVETPPMVVVGIVGYVETPRGLRTFKTVFAEHISDECKRRFYKNWHKSKKKAFTKYCKKWQDEDGKKQLEKDFSSMKKYCQVIRVIAHTQMRLLPLRQKKAHLMEIQVNGGTVAEKLDWARERLEQQVPVNQVFGQDEMIDVIGVTKGKGYKGVTSRWHTKKLPRKTHRGLRKVACIGAWHPARVAFSVARAGQKGYHHRTEINKKIYKIGQGYLIKDGKLIKNNASTDYDLSDKSINPLGGFVHYGEVTNDFVMLKGCVVGTKKRVLTLRKSLLVQTKRRALEKIDLKFIDTTSKFGHGRFQTMEEKKAFMGPLKKDRIAKEEGA

SEQ ID NO: 51110 - protein, 456 aa, Homo sapiens
MPPAVGGPVGYTPPDGGWGWAVVIGAFISIGFSYAFPKSITVFFKEIEGIFHATTSEVSWISSIMLAVMYGGGPISSILVNKYGSRIVMIVGGCLSGCGLIAASFCNTVQQLYVCIGVIGGLGLAFNLNPALTMIGKYFYKRRPLANGLAMAGSPVFLCTLAPLNQVFFGIFGWRGSFLILGGLLLNCCVAGALMRPIGPKPTKAGKDKSKASLEKAGKSGVKKDLHDANTDLIGRHPKQEKRSVFQTINQFLDLTLFTHRGFLLYLSGNVIMFFGLFAPLVFLSSYGKSQHYSSEKSAFLLSILAFVDMVARPSMGLVANTKPIRPRIQYFFAASVVANGVCHMLAPLSTTYVGFCVYAGFFGFAFGWLSSVLFETLMDLVGPQRFSSAVGLVTIVECCPVLLGPPLLGRLNDMYGDYKYTYWACGVVLIISGIYLFIGMGINYRLLAKEQKANE

SEQ ID NO: 51111 - protein, 245 aa, Homo sapiens
MWTMSSWTMKMMRWRQQLGEMGLRPLPRRMSRAPMSPSTALAFVTSCSSQSCSGPLSTVALSIRQKVAVFFGGLSIKKDEEVLKKNCPHIVVGTPGRILALARNKSLNLKHIKHFILDECDKMLEQLDMRRDVQEIFRMTPHEKQVMMFSATLSKEIRPVCRKFMQDPMEIFVDDETKLTLHGLQQYYVKLKDNEKNRKLFDLLDVLEFNQVVIFVKSVQRCIALAQLLVEQNFPAIAIHRGMPQ

SEQ ID NO: 51112 - protein, 279 aa, Homo sapiens
AVPIPLCVSGVQPLALRLPEGELPSRETFPACINNSVFSVRFFRTTAVCKDDLVTVKTPAFAESVTEGDVRWEKAVGDTVAEDEVVCEIETDKTSVQVPSPANGVIEALLVPDGGKVEGGTPLFTLRKTGAAPAKAKPAEAPAAAAPKAEPTAAAVPPPAAPIPTQMPPVPSPSQPPSGKPVSAVKPTVAPPLAEPGAGKGLRSEHREKMNRMRQRIAQRLKEAQNTCAMLTTFNEIDMSNIQEMRARHKEAFLKKHNLKLGFMSAFVKASAFALQEQP

SEQ ID NO: 51113 - protein, 70 aa, Homo sapiens
MWGLGARGPDRGLLLALALGGLARAGGVEVEPGGAHGESGGFQVVTFEWAHVQDPYVIALWILVASLAKI

SEQ ID NO: 51114 - protein, 90 aa, Homo sapiens
MSKSLTLKNPGRVAYDSGGIKMFWEKKIEHHARHLQNEDIRVRRSALNKLRVGWAEQLEGRNKMLQGPGRCPDRVPEATESLHTKDKKAA

SEQ ID NO: 51115 - protein, 81 aa, Homo sapiens
IAGIENDEGFGAPAGSHAAPAQPGPTSGAGSEDMGTTVNGDVFQEANGPADGYAAIAQADRLTQEPESIRKWREEQRKRLS

SEQ ID NO: 51116 - protein, 134 aa, Homo sapiens
IPEDGPALIIFYHGAIPIDFYYFMAKIFIHKGRTCRVVADHFVFKIPGFSLLLDVFCALHGPREKCVEILRSGHLLAISPGGVREALISDETYNIVWGHRRGFAQVAIDAKVGYLGGFMKNSAIHLLQCMEVFQ

SEQ ID NO: 51117 - protein, 724 aa, Homo sapiens
MLRELQETNAALQDVRELLRQQVREITFLKNTVMECDACGMQQSVRTGLPSVRPLLHCAPGFCFPGVACIQTESGARCGPCPAGFTGNGSHCTDVNECNAHPCFPRVRCINTSPGFRCEACPPGYSGPTHQGVGLAFAKANKQVCTDINECETGQHNCVPNSVCINTRGSFQCGPCQPGFVGDQASGCQRRAQRFCPDGSPSECHEHADCVLERDGSRSCVCAVGWAGNGILCGRDTDLDGFPDEKLRCPERQCRKDNCVTVPNSGQEDVDRDGIGDACDPDADGDGVPNEKDNCPLVRNPDQRNTDEDKWGDACDNCRSQKNDDQKDTDQDGRGDACDDDIDGDRIRNQADNCPRVPNSDQKDSDGDGIGDACDNCPQKSNPDQADVDHDFVGDACDSDQDQDGDGHQDSRDNCPTVPNSAQEDSDHDGQGDACDDDDDNDGVPDSRDNCRLVPNPGQEDADRDGVGDVCQDDFDADKVVDKIDVCPENAEVTLTDFRAFQTVVLDPEGDAQIDPNWVVLNQGREIVQTMNSDPGLAVGYTAFNGVDFEGTFHVNTVTDDDYAGFIFGYQDSSSFYVVMWKQMEQTYWQANPFRAVAEPGIQLKAVKSSTGPGEQLRNALWHTGDTESQVRLLWKDPRNVGWKDKKSYRWFLQHRPQVGYIRVRFYEGPELVADSNVVLDTTMRGGRLGVFCFSQENIIWANLRYRCNDTIPEDYETHQLRQA

SEQ ID NO: 51118 - protein, 67 aa, Homo sapiens
MAEGSRIPQARALLQQCLHARLQIRPADGDVAAQWVEVQRGLVIYVCFFKGADKELLPKMDLRLWLH

SEQ ID NO: 51119 - protein, 889 aa, Homo sapiens
MELVKAALAEALRLLRLQVPPSSLQGSGTPAPPGDSSLAAPPGLPPTCTPSLVSRGTQTETEVELKSSPGPPGLSNGPPAPQGASEEPSGTQSEGGGSSSSGAGSPGPPGILRPLQPPQRADTPRRNSSSSSSPSERPRQKLSRKAISSANLLVRSGSTESRGGKDPLSSPGGPGSRRSNYNLEGISVKMFLRGRPITMYIPSGIRSLEELPSGPPPETLSLDWVYGYRGRDSRSNLFVLRSGEVVYFIACVVVLYRPGGGPGGPGGGGQRHYRGHTDCVRCLAVHPDGVRVASGQTAGVDKDGKPLQPVVHIWDSETLLKLQEIGLGAFERGVGALAFSAADQGAFLCVVDDSNEHMLSVWDCSRGMKLAEIKSTNDSVLAVGFNPRDSSCIVTSGKSHVHFWNWSGGVGVPGNGTLTRKQGVFGKYKKPKFIPCFVFLPDGDILTGDSEGNILTWGRSPSDSKTPGRGGAKETYGIVAQAHAHEGSIFALCLRRDGTVLSGGGRDRRLVQWGPGLVALQEAEIPEHFGAVRAIAEGLGSELLVGTTKNALLRGDLAQGFSPVIQGHTDELWGLCTHPSQNRFLTCGHDRQLCLWDGESHALAWSIDLKETGLCADFHPSGAVVAVGLNTGRWLVLDTETREIVSDVIDGNEQLSVVRYSPDGLYLAIGSHDNVIYIYSVSSDGAKSSRFGRCMGHSSFITHLDWSKDGNFIMSNSGDYEILYWDVAGGCKQLKNRYESRDREWATYTCVLGFHVYVPVRSCQGAEPHVRGPRQPRDQRPIHARRLAPRLAGRQGRQHLPVASAGRWGRGAGARHALSNPLPVPRLLPRRLIAAWRDRLARRRGPAPPCPSLAQSPTTRGRLFPGLTSRHSRSRIFLEGANGAPAHTV

SEQ ID NO: 51120 - protein, 133 aa, Homo sapiens
MDLIQSAVLYSVMTLVSTYLVAFAYKNVKFVLKHKVAQKREDAVSKEVTRKLSEADNRKMSRKEKDERILWKKNEVADYEATTFSIFYNNTLFLVVVIVASFFILKNFNPTVNYILSISASSGLIALLSTGSK

SEQ ID NO: 51121 - protein, 367 aa, Homo sapiens
MKGVDDLDFFIGDEAIEKPTYATKWPIRHGIVEDWDLMERFMEQVIFKYLRAEPEDHYFLLTEPPLNTPENREYTAEIMFESFNVPGLYIAVQAVLALAASWTSRQVGERTLTGTVIDSGDGVTHVIPVAEGYVIGSCIKHIPIAGRDITYFIQQLLRDREVGIPPEQSLETAKAVKERYSYVCPDLVKEFNKYDTDGSKWIKQYTGINAISKKEFSIDVGYERFLGPEIFFHPEFANPDFTQPISEVVDEVIQNCPIDVRRPLYKNIVLSGGSTMFRDFGRRLQRDLKRTVDARLKLSEELSGGRLKPKPIDVQVITHHMQRYAVWFGGSMLASTPEFYQVCHTKKDYEEIGPSICRHNPVFGVMS

SEQ ID NO: 51122 - protein, 198 aa, Homo sapiens
MATQQKASDERISQFDHNLLPELSALLGLDAVQLAKELEEEEQKERAKMQKGYNSQMRSEAKRLKTFVTYEPYSSWIPQEMAAAGFYFTGVKSGIQCFCCSLILFGAGLTRLPIEDHKRFHPDCGFLLNKDVGNIAKYDIRVKNLKSRLRGGKMRYQEEEARLASFRNWPFYVQGISPCVLSEAGFVFTAEFMEAQRL

SEQ ID NO: 51123 - protein, 195 aa, Homo sapiens
MAAPEGSGLGEDARLDQETAQWLRWDKNSLTLEAVKRLIAEGNKEELRKCFGARMEFGTAGLRAAMGPGISRMNDLTIIQTTQGFCRYLEKQFSDLKQKGIVISFDARAHPSSGGSSRRFARLAATTFISQGIPVYLFSDITPTPFVVEALKALEWRLRPSLCLKNFLALPSRRWNEKALRKLLTFLIRKYILEL

SEQ ID NO: 51124 - protein, 180 aa, Homo sapiens
MLPAVGSVDEEEDPAEEDCPELVPIETTQSEEEEKSGLGAKIPVTIITGYLGAGKTTLLNYILTEQHSKRVAVILNESGEGSALEKSLAVSQGGELYEEWLELRNGCLCCSVKDNGLRAIENLMQKKGKFDDILLETTGLADPGAVTSMFWVDAELGSDIYLDGIITIVDSKYGLKVKYH

SEQ ID NO: 51125 - protein, 200 aa, Homo sapiens
MPDPSKQPKNQLNPIGSLQELAIHHGWRLPEYTLSQEGGPAHKREYTTICRLESFMETGKGASKKQAKRNAAEKFLAKFSNISPENHISLTNVVGHSLGCTWHSLRNSPGEKINLLKRSLLSIPNTDYIQLLSEIAKEQGFNITYLDIDELSANGQYQCLAELSTSPITVCHGSGISCGNAQSDAAHNALQYLKIIAERK

SEQ ID NO: 51126 - protein, 340 aa, Homo sapiens
KKIHTGEKPYICEECGKAFKYSSALNTHKRIHTGEKPYKCDKCDKAFIASSTLSKHEIIHTGKKPYKCEECGKAFNQSSTLTKHKKIHTGEKPYKCEECGKAFNQSSTLTKHKKIHTGEKPYVCEECGKAFKYSRILTTHKRIHTGEKPYKCNKCGKAFIASSTLILTRHKRVHTGEKPYKCEECGKAFKYSSTLSSHKRSHTGEKPYKCEECGKAFVASSTLSKHEIIHTGKKPYKCEECGKAFNQSSSLTKHKKIHTGEKPYKCEECGKAFNQSSSLTKHKKIHTGEKPYKCEECGKAFNQSSTLIKHKKIHTREKPYKCEECGKAFHLSTHLTTHKI

SEQ ID NO: 51127 - protein, 267 aa, Homo sapiens
MLRPAGLWRLCRRPWAARVPAENLGRREVTSGVSPRGSTSPRTLNIFDRDLKRKQKNWAARQPEPTKFDYLKEEVGSRIADRVYDIPRNFPLALDLGCGRGYIAQYLNKETIGKFFQADIAENALKNSSETEIPTVSVLADEEFLPFKENTFDLVVSSLSLHWVNDLPRALEQIHYILKPDGVFIGAMFGGDTLYELRCSLQLAETEREGGFSPHISPFTAVNDLGHLLGRAGFNTLTVDTDEIQVNYPGMFELMEDLQEQKSRMLT

SEQ ID NO: 51128 - protein, 194 aa, Homo sapiens
MAEKVLVTGGAGYIGSHTVLELLEAGYLPVVIDNFHNAFRGGGSLPESLRRVQELTGRSVEFEEMDILDQGALQRLFKKYSFMAVIHFAGLKAVGESVQKPLDYYRVNLTGTIQLLEIMKAHGVKNLVFSSSATVYGNPQYLPLDEAHPTGGCTNPYGKSKFFIEEMIRDLCQADKTWNAVLLRYFNPTGAHAS

SEQ ID NO: 51129 - protein, 21 aa, Homo sapiens
MRSGKASCTLETVWEDKHKYE

SEQ ID NO: 51130 - protein, 264 aa, Homo sapiens
MENYGIEWHSVRDSEGQKLLIGVGPEGISICKDDFSPINRIAYPVVQMATQSGKNVYLTVTKESGNSIVLLFKMISTRAASGLYRAITETHAFYRCDTVTSAVMMQYSRDLKGHLASLFLNENINLGKKYVFDIKRTSKEVYDHARRALYNAGVVDLVSRNNQSPSHSPLKSSESSMNCSSCEGLSCQQTRVLQEKLRKLKEAMLCMVCCEEEINSTFCPCGHTVCCESCAAQLQSCPVCRSRVEHVQHVYLPTHTSLLNLTVI

SEQ ID NO: 51131 - protein, 357 aa, Homo sapiens
MDALIIPVTMEVPCDSRGQRMWWAFLASSMVTFFGGLFIILLWRTLKYLWTVCCHCGGKTKEAQKINNGSSQADGTLKPVDEKEEAVAAEVGWMTSVKDWAGVMISAQTLTGRVLVVLVFALSIGALVIYFIDSSNPIESCQNFYKDFTLQIDMAFNVFFLLYFGLRFIAANDKLWFWLEVNSVVDFFTVPPVFVSVYLNRSWLGLRFLRALRLIQFSEILQFLNILKTSNSIKLVNLLSIFISTWLTAAGFIHLVENSGDPWENFQNNQALTYWECVYLLMVTMSTVGYGDVYAKTTLGRLFMVFFILGGLAMFASYVPEIIELIGNRKKYGGSYSAVSGRKQCLPATCPKLLLSS

SEQ ID NO: 51132 - protein, 70 aa, Homo sapiens
MAGSQDIFDAIVMADERFHGEGYREGYEEGSSLGVMEGRQHGTLHGAKIGSEQKDEGLRIIDWNDPEIPL

SEQ ID NO: 51133 - protein, 247 aa, Homo sapiens
MEQLNLADSGLVGKEARRCRRASPPMGMPSAWWLQNEAGCLFAARQVNGQQGGGSEPAAAAAVVAAGDKWKPPQGTDSIKMENGQSTAAKLGLPPLTPEQQEALQKAKKYAMEQSIKSVLVKQTIAHQQQQLTNLQMAAQRQRALAIMCRVYVGSIYYELGEDTIRQAFAPFGPIKSIDMSWDSVTMKHKGFAFVEYEVPEAAQLALEQMNSVMLGGRNIKVGRPSNIGQAQPIIDQLAEEARAFNR

SEQ ID NO: 51134 - protein, 74 aa, Homo sapiens
MHPDLSPHLHTEECNVLINLLKECHKNHNILKFFGYCNDVDRELRKCLKNEVLALSPKLECSRVIVTHGSLKLK

SEQ ID NO: 51135 - protein, 568 aa, Homo sapiens
MPLELTQSRVQKIWVPVDHRPSLPRSCGPKLTNSPTVIVMVGLPARGKTYISKKLTRYLNWIGVPTKVFNVGEYRREAVKQYSSYNFFRPDNEEAMKVRKQCALAALRDVKSYLAKEGGQIAVFDATNTTRERRHMILHFAKENDFKAFFIESVCDDPTVVASNIMEVKISSPDYKDCNSAEAMDDFMKRISCYEASYQPLDPDKCDRDLSLIKVIDVGRRFLVNRVQDHIQSRIVYYLMNIHVQPRTIYLCRHGENEHNLQGRIGGDSGLSSRGKKFASALSKFVEEQNLKDLRVWTSQLKSTIQTAEALRLPYEQWKALNEIDAGVCEELTYEEIRDTYPEEYALREQDKYYYRYPTGESYQDLVQRLEPVIMELERQENVLVICHQAVLRCLLAYFLDKSAEEMPYLKCPLHTVLKLTPVAYGCRVESIYLNVESVCTHRERSEDAKKGPNPLMRRNSVTPLASPEPTKKPRINSFEEHVASTSAALPSCLPPEVPTQLPGQELKSGIPGRDPEPPVQPPEGQSILWIPREVTVASRSGPGAAPSIPEPRLVSLPHLSGSAASGS

SEQ ID NO: 51136 - protein, 32 aa, Homo sapiens
  MOD_RES (1)..(1): Any amino acid
XGPGLCTCAVCKFPHLVPASLGLAAVQAQFSK

SEQ ID NO: 51137 - protein, 270 aa, Homo sapiens
MAWWKAWIEQEGVTVKSSSHFNPDPDAETLYKAMKGIGTNEQAIIDVLTKRSNTQRQQIAKSFKAQFGKDLTETLKSELSGKFERLIVALMYPPYRYEAKELHDAMKGSRDDVSSFVDPALALQDAQDLYAAGEKIRGTDEMKFITILCTRSATHLLRVFEEYEKIANKSIEDSIKSETHGSLEEAMLTVVKCTQNLHSYFAERLYYAMKGAGTRDGTLIRNIVSRSEIDLNLIKCHFKKMYGKTLSSMIMEDTSGDYKNALLSLVGSDP

SEQ ID NO: 51138 - protein, 312 aa, Homo sapiens
MSANTSMVTEFLLLGFSHLADLQGLLFSVFLTIYLLTVAGNFLIVVLVSTDAALQSPMYLFLRTLSALEIGYTSVTVPLLLHHLLTGRRHISRSGCALQMFFFLFFGATECCLLAAMAYDRYAAICEPLRYPLLLSHRVCLQLAGSAWACGVLVGLGHTPFIFSLPFCGPNTIQQFFCEIQPVLQLVCGDTSLNELQIILATALLILCPFGLILGSYGRILVTIFRIPSVAGRRKAFSTCSSHLIVVSLFYGTALFIYIRPKASYDPATDPLVSLFYAVVTPILNPIIYSLRNTEVKAALKRTIQKTVPMEI

SEQ ID NO: 51139 - protein, 709 aa, Homo sapiens
MSVESEQLTGVPLDDSAITPMCEVTGGRSYSVCSPRMLNQCLESLVQKVQSGVVINFEKAGPDPSPVEDGQPDISRPFGSQPWHSCHKLIYVRPNPKTGVPIGHWPVPESFWPDQNSPTLPPRTSHPVVKFSCTDCEPMVIDKLPFDKYELEPSPLTQFILERKSPQTCWQVYVSNSAKYSELGHPFGYLKASTALNCVNLFVMPYNYPVLLPLLDDLFKVHKAKPTLKWRQSFESYLKTMPPYYLGPLKKAVRMMGAPNLIADSMEYGLSYSVISYLKKLSQQAKIESDRVIGSVGKKVVQETGIKVRSRSHGLSMAYRKDFQQLLQGISEDVPHRLLDLNMKEYTGFQVALLNKDLKPQTFRNAYDIPRRNLLDHLTRMRSNLLKSTRRFLKGQDEDQVHSVPIAQMGNYQEYLKQVPSPLRELDPDQPRRLHTFGNPFKLDKKGMMIDEADEFVAGPQNKHKRPGEPNMQGIPKRRRCMSPLLRGRQQNPVVNNHIGGKGPPAPTTQAQPDLIKPLPLHKISETTNDSIIHDVVENHVADQLSSDITPNAMDTEFSASSPASLLERPTNHMEALGHDHLGTNDLTVGGFLENHEEPRDKEQCAEENIPASSLNKGKKLMHCRSHEEVNTELKAQIMKEIRKPGRKYERIFTLLKHVQGSLQTRLIFLQNVIKEASRFKKRMLIEQLENFLDEIHRRANQINHINSN

SEQ ID NO: 51140 - protein, 703 aa, Homo sapiens
MEIDMTYQLKVIQQSLEQEEAEHKATKARLADKNKIYESIEEAKSEAMKEMEKKLLEERTLKQKVENLLLEAEKRCSLLDCDLKQSQQKINELLKQKDVLNEDVRNLTLKIEQETQKRCLTQNDLKMQTQQVNTLKMSEKQLKQENNHLMEMKMNLEKQNAELRKERQDADGQMKELQDQLEAEQYFSTLYKTQVRELKEECEEKTKLGKELQQKKQELQDERDSLAAQLEITLTKADSEQLARSIAEEQYSDLEKEKIMKELEIKEMMARHKQELTEKDATIASLEETNRTLTSDVANLANEKEELNNKLKDVQEQLSRLKDEEISAAAIKAQFEKQLLTERTLKTQAVNKLAEIMNRKEPVKRGNDTDVRRKEKENRKLHMELKSEREKLTQQMIKYQKELNEMQAQIAEESQIRIELQMTLDSKDSDIEQLRSQLQALHIGLDSSSIGSGPGDAEADDGFPESRLEGWLSLPVRNNTKKFGWVKKYVIVSSKKILFYDSEQDKEQSNPYMVLDIDKLFHVRPVTQTDVYRADAKEIPRIFQILYANEGESKKEQEFPVEPVGEKSNYICHKGHEFIPTLYHFPTNCEACMKPLWHMFKPPPALECRRCHIKCHKDHMDKKEEIIAPCKVYYDISTAKNLLLLANSTEEQQKWVSRLVKKIPKKPPAPDPFARSSPRTSMKIQQNQSIRRPSRQLAPNKPS

SEQ ID NO: 51141 - protein, 434 aa, Homo sapiens
MNDRDLQMLKGEKLQVLKGTGDWWLARSLVTGREGYVPSNFVARVESLEMERWFFRSQGRKEAERQLLAPINKAGSFLIRESETNKGAFSLSVKDVTTQGELIKHYKIRCLDEGGYYISPRITFPSLQALVQHYSKKGDGLCQRLTLPCVRPAPQNPWAQDEWEIPRQSLRLVRKLGSGQFGEVWMGYYKNNMKVAIKTLKEGTMSPEAFLGEANVMKALQHERLVRLYAVVTKEPIYIVTEYMARGCLLDFLKTDEGSRLSLPRLIDMSAQIAEGMAYIERMNSIHRDLRAANILVSEALCCKIADFGLARIIDSEYTAQEGAKFPIKWTAPEAIHFGVFTIKADVWSFGVLLMEVVTYGRVPYPGMSNPEVIRNLERGYRMPRPDTCPPELYRGVIAECWRSRPEERPTFEFLQSVLEDFYTATERQYELQP

SEQ ID NO: 51142 - protein, 151 aa, Homo sapiens
MLPFSTATTLTTAASPLAARALHWHVGELQTGLRGHRVLGPGRHLPLLVDHQRAHCPLGRGELWAFSQYYPHPGEETGASSGQPPYPVSVLASLQVDTFPDPTLWNSLHHLQLPARQCWPGHPPPPGAGTGFLPGLHCCHPLLLPQPRGED

SEQ ID NO: 51143 - protein, 207 aa, Homo sapiens
MTPYEGGYYHGKLIFPREFPFKPPSIYMITPNGRFKCNTRLCLSITDFHPDTWNPAWSVSTILTGLLSFMVEKGPTLGSIETSDFTKRQLAVQSLAFNLKDKVFCELFPEVVEEIKQKQKAQDELSSRPQTLPLPDVVPDGETHLVQNGIQLLNGHAPGAVPNLAGLQQANRHHGLLGGALANLFVIVGFAAFAYTVKYVLRSIAQE

SEQ ID NO: 51144 - protein, 164 aa, Homo sapiens
  MOD_RES (1)..(1): Any amino acid
XKKHQVETAFERLQQELEQQRCLLLARLRELEQQIWKERDEYITKVSEEVTRLGAQVKELEEKCQQPASELLQDVRVNQSRCEMKTFVSPEAISPDLVKKIRDFHRKILTLPEMMRMFSENLAHHLEIDSDRQPEPGSLGRQEVSEVHPAEEEPARQPPALRRP

SEQ ID NO: 51145 - protein, 161 aa, Homo sapiens
MSEEIITPVYCTGVSAQVQKQRARELGLGRHENAIKYLGQDYEQLRVRCLQSGTLFRDEAFPPVPQSLGYKDLGPNSSKTYGIKWKRPTELLSNPQFIVDGATRTDICQGALGDCWLLAAIASLTLNDTLLHRVVPHGQSFQNGYAGIFHFQLWQFGEWVD

SEQ ID NO: 51146 - protein, 314 aa, Homo sapiens
MVVVGILLAYLAGWVLEWRWLAVLGCVPPSLMLLLMCFMPETPRFLLTQHRRQEAMAALRFLWGSEQGWEDPPIGAEQSFHLALLRQPGIYKPFIIGVSLMAFQQLSGVNAVMFYAETIFEEAKFKDSSLASVVVGVIQVLFTAVAALIMDRAGRRLLLVLSGVVMVFSTSAFGAYFKLTQGGPGNSSHVAISAPVSAQPVDASVGLAWLAVGSMCLFIAGFAVGWGPIPWLLMSEIFPLHVKGVATGICVLTNWLMAFLVTKEFSSLMEVLRPYGAFWLASAFCIFSVLFTLFCVPETKGKTLEQITAHFEGR

SEQ ID NO: 51147 - protein, 112 aa, Homo sapiens
MLLWPLLLLLLLLPTLALLRQQRSQDARLSWLAGLQHRVAWGALVWAATWQRRRLEQSTLHVHQSQQQALRWCLQGAQRPHCSLRRSTGSHQSCLKLLGNWLPEAFLLSLGL

SEQ ID NO: 51148 - protein, 192 aa, Homo sapiens
MPWEEPAGEKPSCSHSQKAFHMEPAQKPCFTTDMVTWALLCISAETVRGEAPSQPRGIPHRSPVSVDDLWLEKTQRKKLQKQAHVERRLHIGAVHKDGVKCWRKTIITSPESLNLPRRSHPLSQSAPTGLNHMGWPEHTPGTAVGRPCYLTRQKHPALPSNRPQQQVLVLAEPRRKPSTFWHSISRLAPFRK

SEQ ID NO: 51149 - protein, 69 aa, Homo sapiens
  MOD_RES (1)..(1): Any amino acid
XRRPVTGESPGMHRPEAMLLLLTLALLGGPTWAGKMYGPGGGKYFSTTEDYDHEITGLRVSVGLLLVKR

SEQ ID NO: 51150 - protein, 172 aa, Homo sapiens
MLTSLHYLDNRFVQPRLESLVSRSRWKEQYKERVENYSNVSIHLKNPENCSCQACGLHRYCKYSVHLSGELYNTRTMQIDNFMSHDKQVFTVGRICASRTRIYHKLKHFKFKLYQECCTIAMTEEVEDEQVKETVERIFRRSKENGWIKEKYGQLEEYLNFADYFQEEKFEL

SEQ ID NO: 51151 - protein, 463 aa, Homo sapiens
MKIMDSELMHSIVGSYHKPPERVFVPSFTQNEPSQNCHPANLEVTSPKILHSPNSQALILALKTLQEKIHRLELERTQAEDNLNILSREAAQYKKALENETNERNLAHQELIKQKKDISIQLSSAQSRCTLLEKQLEYTKRMVLNVEREKNMILEQQAQLQREKEQDQMKLYAKLEKLDVLEKECFRLTTTQKTAEDKIKHLEEKLKEEEHQRKLFQDKASELQTGLEISKIIMSSVSNLKHSKEKKKSSKKTKCIKRRPPWQICSKFGALPFVAEKMRQHRDPHILQKPFNVTETRCLPKPSRTTSWCKAIPPDSEKSISICDNLSELLMAMQDELDQMSMEHQELLKQMKETESHSVCDDIECELECLLKKMEIKGEQISKLKKHQDSVCKLQQKVQNSKMSEASGIQQEDSYPKGSKNIKNSPRKCLTDTNLFQKNSSFHPIRVHNLQMKLRRDDIMWEQ

SEQ ID NO: 51152 - protein, 203 aa, Homo sapiens
  MOD_RES (1)..(1): Any amino acid
XPKPGTAPTSLVSAWNSSSSSKKVAQPPLSAQATGSGQPTRKAGKGSRGGRKGGPPFTQEEEEDGGPALQELLSTRPTGSVSSTLGLASIQPSKVGKKKKVGSEKPGTTLPQPPPATCPPGALQAPEAPASRAEGPVAVVVNGHMEGPAPARSAPKEPPGLPRPLGSFPCPTPQEDFPALGGPCPPRMPPPPDPGCCLPHGRT

SEQ ID NO: 51153 - protein, 896 aa, Homo sapiens
  MOD_RES (1)..(1): Any amino acid
XSHPKATQTQIDAVCCRRCVSFILRTTIGGLLGEKAQLAAVKDICQAIWKLKKVMDVAASQHMLVCALQELGNLIHNLGTTAAPLLQDSSTGLLDSILSVILHPSISVRLAAAWCLHCIAVALPSYLTPLLDRCLERLTGHKSSPEAVTGFSFAVAALLGAVKHCPLGIPHGKGKIIMTLAEDLLCSAAQNSRLSAQRTQAGWLLISALMTLGPAVVSHHLARVLLLWKCVFPASPKDLETEKSRGDSFTWQVTLEGRAGALCAIKSFVSHCGDLLTEEVTQRLLPPLPCAVDLLTQLSSILKMYGSPLKTPSVVYRQRLYELLILLPPETYEGNLCAILRELAADLTAPDIQVAASTFLLPPLCHQDDLLILSPFLQETDHRFIEEQLLLGNGVACGSLEYDPYSIYEKDVEGDSVPKPLPPALSVISSASKLFGVVCAHVGETQRLLILEQLLDSIKHTKGARQQVVQLHVVSSVSSFLKYVAGSKGCLGPEEMKRFALTLVMGALESPNPLLRCAAAESWARLAQVVDDGAFTAGLAQVSFDKLKSARDVVTRTGHSLALGSLHRYLGGISSSQHLNSCIGILYTLAQDSTSPDVQTWALHSLSLIIDSAGPLYYVHVEPTLSLIIMLLLNVPPTHAEVHQSLGRCLNALITTLGPELQGNSTSISTLRTSCLLGCAVMQDNPDCLVQAQAISCLQQLHMFAPRHVNLSSLVSCLCVNLCSPYLLLRRAVLACLRQLVQREAAEVSEHAVMLAKDSREELTPDANIREVGLEGALLILLDKETDERLCHDIKETLNYMLTSMAVEKLSLWLKLCKDVLAASADFTAVTCVDTMQEEEGDKGDDASVLTTRRDEKSHPFTNPRWATRVFAAECVCRIINQCENANSAHFDIALA

SEQ ID NO: 51154 - protein, 35 aa, Homo sapiens
MGPEALSSLLLLLLVASGDADMKGHFDPGPDHPRQ

SEQ ID NO: 51155 - protein, 271 aa, Homo sapiens
MASEKPLAAVTCTAPVNIAVIKYWGKRDEELVLPINSSLSVTLHQDQLKTTTTAVISKDFTEDRIWLNGREEDVGQPRLQACLREIRCLARKRRNSRDGDPLPSSLSCKVHVASVNNFPTAAGLASSAAGYACLVAAGVGLSPVIPVLKRLMGEKHCRPGVQDQPGQHTYTLARVYGVESDLSEVARRGSGSACRSLYGGFVEWQMGEQADGKDSIARQVAPESHWPELRVLILVVSAEKKLTGSTVGMRASVETSPLLRFRAESVVPARM

SEQ ID NO: 51156 - protein, 192 aa, Homo sapiens
  MOD_RES (1)..(1): Any amino acid
XGYSMVRASHGVRKGAWYFEITVDEMPPDTAARLGWSQPLGNLQAPLGYDKFSYSWRSKKGTKFHQSIGKHYSSGYGQGDVLGFYINLPEDTETAKSLPDTYKDKALIKFKSYLYFEEKDFVDKAEKSLKQTPHSEIIFYKNGVNQGVAYKDIFEGVYFPAISLYKSCTVSINFGPCFKYPPKDLTYRPVSN

SEQ ID NO: 51157 - protein, 195 aa, Homo sapiens
MSNSDYLPDYPLNSDLVKRLKSALDAKDEERVRDLICTEITPVDAVIELANDDWMKDPSAQLPTGMLLGLWTLEYKRELTTPLCIAAAHGHTACVRHLLGRGADPDASPGGRGALHEACLGGHTACVRLLLQHRADPDLLSAEGLAPLHLCRTAASLGCAQALLEHGASVQRVGGTGRDTPLHVAAQRGLDEHAR

SEQ ID NO: 51158 - protein, 281 aa, Homo sapiens
MSRIFQMTASRSPLRLQMAMWSTCFATSVRTNPVQRILGGHLDAKGSFPWQAKMVSHHNLTTGATLINEQWLLTTAKNLFLNHSENATAKDIAPTLTLYVGKKQLVEIEKVVLHPNYHQVDIGLIKLKQKVLVNERVMPICLPSKNYAEVGRVGYVSGWGQSDNFKLTDHLKYVMLPVADQYDCITHYEGSTCPKWKAPKSPVGVQPILNEHTFCVGMSKYQEDTCYGDAGSAFAVHDLEEDTWYAAGILSFDKSCAVAEYGVYVKVTSIQHWVQKTIAEN

SEQ ID NO: 51159 - protein, 141 aa, Homo sapiens
MKGGFTGGDEYQKHFLPRDYLATYYSFDGSPSPEAEMLKFNLECLHKTFGPGLQGDTLIDIGSGPTIYQVLAACDSFQDITLSDFTDRNREELEKWLKKEPGAYDWTPAVKFACELEGNRDMELINNTTLVNSRHPAITGP

SEQ ID NO: 51160 - protein, 51 aa, Homo sapiens
MPPRITDLSLPNYLMASSVGLLPTQLLNSYLGTTLRTMEDVIAEQSVSGYF

SEQ ID NO: 51161 - protein, 100 aa, Homo sapiens
MATEGLHENETLASLKSEAESLKGKLEEERAKLHDVELHQVAERVEALGQFVMKTRRTLKGHGNKVLCMDWCKDKRRIVSSSQDGKVIVWDSFTTNKWFG

SEQ ID NO: 51162 - protein, 1085 aa, Homo sapiens
MKVNRETKRLYVGGLSQDISEADLQNQFSRFGEVSDVEIITRKDDQGNPQKVFAYINISVAEADLKKCMSVLNKTKWKGGTLQIQLAKESFLHRLAQEREAAKAKKEESTTGNANLLEKTGGVDFHMKAVPGTEVPGHKNWVVSKFGRVLPVLHLKNQHKRKIIKYDPSKYCHNLKKIGEDFSNTIPISSLTWELEGGNDPMSKKRRGEFSDFHGPPKKIIKVQKDESSTGSLAMSTRPRRVIERPPLTQQQAAQKRTCDSITPSKSSPVPVSDTQKLKNLPFKTSGLETAKKRNSISDDDTDSEDELRMMIAKEENLQRTTQPSINESESDPFEVVRDDFKSGVHKLHSLIGLGIKNRVSCHDSDDDIMRNDREYDSGDTDEIIAMKKNVAKVKNSTEFSQMEKSTKKTSFKNRENCELSDHCIKLQKRKSNVESALSHGLKSLNRKSPSHSSSSEDADSASELADSEGGEEYNAMMKNCLRVNLTLADLEQLAGSDLKVPNEDTKSDGPETTTQCKFDRGSKSPKTPTGLRRGRQCIRPAEIVASLLEGEENTCGKQKPKENNLKPKFQAFKGVGCLYEKESMKKSLKDSVASNNKDQNSMKHEDPSIISMEDGSPYVNGSLGEVTPCQHAKKANGPNYIQPQKRQTTFESQDRKAVSPSSSEKRSKNPISRPLEGKKSLSLSAKTHNIGFDKDSCHSTTKTEASQEERSDSSGLTSLKKSPKVSSKDTREIKTDFSLSISNSSDVSAKDKHAEDNEKRLAALEARQKAKEVQKKLVHNALANLDGHPEDKPTHIIFGSDSECETEETSTQEQSHPGEEWVKESMGKTSGKLFDSSDDDESDSEDDSNRFKIKPQFEGRAGQKLMDLQSHFGTDDRFRMDSRFLETDSEEEQEEVNEKKTAEEEELAEEKKKALNVVQSVLQINLSNSTNRGSVAAKKFKDIIHYDPTKQDHATYERKRDDKPKESKAKRKKKREEAEKLPEVSKEMYYNIAMDLKEIFQTTKYTSEKEEGTPWNEDCGKEKPEEIQDPAALTSDAEQPSGFTFSFFDSDTKDIKEDRVSVTQAGVQWCNLGSLADNTNSVVL

SEQ ID NO: 51163 - protein, 40 aa, Homo sapiens
HSAVYATSLSPPVVEQIITSMKCIMGQDGTSLGLFCFLSP

SEQ ID NO: 51164 - protein, 101 aa, Homo sapiens
  MOD_RES (1)..(1): Any amino acid
XDVVQELLKYSSDKAYGRKVLTWDGKMSAVSQDAIEDSRQARTETVVDDWDEEFDRGKEKKIKKFKREKRRNFNAFQKLQTRRNFWSVTHPAKAASLSYRR

SEQ ID NO: 51165 - protein, 168 aa, Homo sapiens
  MOD_RES (1)..(1): Any amino acid
XSSGAHGEEGSARMWKTLTFFVALPGVAVSMLNVYLKSHHGEHERPEFIAYPHLRIRTKGSGRITAAVIEHLERLALVDFGSREAVARLEKAIAFADRLRAVDTDGVEPMESVLEDRCLYLRSDNVVEGNCADELLQNSHRVVEEYFVAPPGNISLPKLDEQEPFPHS

SEQ ID NO: 51166 - protein, 366 aa, Homo sapiens
MRVMAPRTLILLLSGALALTETWACSHSMRYFYTAVSRPGRGEPRFIAVGYVDDTQFVQFDSDAASPRGEPRAPWVEQEGPEYWDRETQKYKRQAQTDRVNLRKLRGYYNQSEAGSHTLQRMYGCDLGPDGRLLRGYNQFAYDGKDYIALNEDLRSWTAADKAAQITQRKWEAAREAEQRRAYLEGTCVEWLRRYLENGKKTLQRAEHPKTHVTHHPVSDHEATLRCWALGFYPAEITLTWQRDGEDQTQDTELVETRPAGDGTFQKWAAVVVPSGEEQRYTCHVQHEGLPEPLTLRWGPSSQPTIPIVGIVAGLAVLAVLAVLGAVMAVVMCRRKSSGGKGGSCSQAASSNSAQGSDESLIACKA

SEQ ID NO: 51167 - protein, 89 aa, Homo sapiens
MIAKEELESVLEEEVDDFPTFGDSQSDYDTSILSTLIGRVSALKRILHGRKNMIHDRLQTAGKNEPWKKKTKRFGTKQGKRRMSLSVSW

SEQ ID NO: 51168 - protein, 136 aa, Homo sapiens
MSWKKALRIPGDLRVATVTLMLAMLSSLLAEGRDSPEDFVFQFKGMCYFTNGTERVRLVTRYIYNREEYARFDSDVGVYRAVTPQGRPDAEYWNSQKEVLEGTRAELDTVCRHNYEVAFRGILQRRGMVTGLSRSW

SEQ ID NO: 51169 - protein, 296 aa, Homo sapiens
MSQGTTPWGPTPAGTTPESERDTEFQEHEKILSPDFLSVAQITDLLMEDIDGVQEKLRIFLNFKNLETCLKDAILLDYYVSGFLWARGMDFSIIQYSKFMTLLAMSLQNLKTLHMSLEESIKWLGEVMAEIGPTHSQKSEDWNIFDVKQANAIIDYLKISLFQHYKLYEFMFYSAREEIVIGTEQVIEVVKSACGPFPNPLEEGISFDIYSTFIEPPTILDTEMKRLDQEQGPEESQPETDTSDMDPLVGFTIEDVKSVLDQVTDDILIGIQTEINEKLQIQEEAFNARIEKLKKA

SEQ ID NO: 51170 - protein, 188 aa, Homo sapiens
MSEARRDSTSSLQRKKPPWLKLDIPSAVPLTAEEPSFLQPLRRQAFLRSVSMPAETAHISSPHHELRRPVLQRQTSITQTIRRGTADWFGVSKDSDSTQKWQRKSIRHCSQRYGKLKPQVLRELDLPSQDNVSLTSTETPPPLYVGPCQLGMQKLPLRFPPAPAAAQARVGGQDELPGGRSADERPLR

SEQ ID NO: 51171 - protein, 176 aa, Homo sapiens
MVVITNKHKPWIEAEYQGIVMENDNTVLLNPPLFALDKDAPLRYAGEICGFRLHGSGVPFEAVILDKATGEGLIRAKEPVDCEAQKEHTFTIQAYDCGEGPDGANTKKSHKATVHVRVNDVNEFAPVFVERLYRAAVTEGKLYDRILRVEAIDGDCSPQYSQICYYEILTPNTPFL

SEQ ID NO: 51172 - protein, 753 aa, Homo sapiens
MVEQPPGMMPNGQDMSTMESGPNNHGNFQGDSNFNRMWQPEWGMHQQPPHPPPDQPWMPPTPGPMDIVPPSEDSNSQDSGEFAPDNRHIFNQNNHNFGGPPDNFAVGPVNQFDYQHGAAFGPPQGGFHPPYWQPGPPGPPAPPQNRRERPSSFRDRQRSPIALPVKQEPPQIDAVKRRTLPAWIREGLEKMEREKQKKLEKERMEQQRSQLSKKEKKATEDAEGGDGPRLPQRSKFDSDEEEEDTENVEAASSGKVTRSPSPVPQEEHSDPEMTEEEKEYQMMLLTKMLLTEILLDVTDEEIYYVAKDAHRKATKAPAKQLAQSSALASLTGLGGLGGYGSGDSEDERSDRGSESSDTDDEELRHRIRQKQEAFWRKEKEQQLLHDKQMEEEKQQTERVTKEMNEFIHKEQNSLSLLEAREADGDVVNEKKRTPNETTSVLEPKKEHKEKEKQGRSRSGSSSSGSSSSNSRTSSTSSTVSSSSYSSSSGSSRTSSRSSSPKRKKRHSRSRSPTIKARRSRSRSYSRRIKIESNRARVKIRDRRRSNRNSIERERRRNRSPSRERRRSRSRSRDRRTNRASRSRSRDRRKIDDQRGNLSGNSHKHKGEAKEQERKKERSRSIDKDRKKKDKEREREQDKRKEKQKREEKDFKFSSQDDRLKRKRESERTFSRSGSISVKIIRHDSRQDSKKSTTKDSKKHSGSDSSGRSSSESPGSSKEKKAKKPKHSRSRSVEKSQRSGKKASRKHKSKSRSR

SEQ ID NO: 51173 - protein, 88 aa, Homo sapiens
MTPPRLFWVWLLVAGTQGVNDGDMRLADGGATNQGRVEIFYRGQWGTVCDNLWDLTDASVVCRALGFENATQALGRAAFGQGSGPIML

SEQ ID NO: 51174 - protein, 238 aa, Homo sapiens
MDPEHAKPESSEAPSGNLKQPETAAALASSGSVVSSVPKAQRNISAKTAPRKHPAVSIRSAQSAAAARPQGSEGTAPSRKATTRPPPKPTLPPPTPSAHTESKLLNEMAIKERVEGRAKVPYKFRDSLKRFSFSPTGMLKILRLVSGELDLTNSIITAVFLSVVAILAMQEKKRRHLLYVGGSLCLTAVIVCCIDAFVVTTKMRTNLKRFLGVEVERKLSPAKDAYPETGPDAPQRPA

SEQ ID NO: 51175 - protein, 27 aa, Homo sapiens
  MOD_RES (1)..(1): Any amino acid
XTSVVKTVYSLQPPSALSGGQPAATNH

SEQ ID NO: 51176 - protein, 96 aa, Homo sapiens
MGMCSRQERIQKDIDVVIQKSRAEKDCLFADFRYSDSTFTFTYVGGPRSVSYSVHVSEDYPDNTYVSSSENDEDVLVTTEPIPVIFHRIATGIKTE

SEQ ID NO: 51177 - protein, 120 aa, Homo sapiens
MASPDPPATSYAPSDVPSGVALFLTIPFAFFLPELGIITQAASVSEPQCVIPAPAAAPLPPMRGFQLLCADIWVLGLDHGSRHPHSIPLAARMGDVCLAHLVSHLLDVPVVLLVWILQKI

SEQ ID NO: 51178 - protein, 111 aa, Homo sapiens
MGDPAPARSLDDIDLSALRALWFQFFYHSGSSLESPGMLNGPFQHRNSRIMTHRSAEKTLLGSLSLWRWSAMEPTDRCTRVGMSRRGSWLPSRSWMSRRTRRKRSNRRSTC

SEQ ID NO: 51179 - protein, 356 aa, Homo sapiens
MPKIVLNGVTVDFPFQPYKCQQEYMTKVLECLQQKVNGILESPTGTGKTLCLLCTTLAWREHLRDGISARKIAERAQGELFPDRALSSWGNAAAAAGDPIACYTDIPKIIYASRTHSQLTQVINELRNTSYRSLLRPGHVSVMLTSSDRRGSCVSPYSSRCRATLWVLETAPPRPTVLSPTRPKVCVLGSREQLCIHPEVKKQESNHLQIHLCRKKVASRSCHFYNNVEEKSLEQELASPILDIEDLVKSGSKHRVCPYYLSRNLKQQADIIFMPYNYLLDAKSRRAHNIDLKGTVVIFDEAHNVEKMCEESASFDLTPHDLASGLDVIDQVLEEQTKAAQQGEPHPEFSADSPSP

SEQ ID NO: 51180 - protein, 58 aa, Homo sapiens
MRAHAGHKRSECGGEWRETPRKQKQHGKASISPSSGARRTVTPTRKRPYECKVCGKAF

SEQ ID NO: 51181 - protein, 74 aa, Homo sapiens
MAAGKSGGSAGEITFLEALARSESKRDGGFKNNWSFDHEEESEGDTDKECFTSVWATAPFIITTLCAFTDEMLI

SEQ ID NO: 51182 - protein, 129 aa, Homo sapiens
MSGTEEAILGGRDSHPAAGGGSVLCFGQCQYTAEEYQAIQKALRQRLGPEYISSRMAGGGQKVCYIEGHRVINLANEMFGYNGWAHSITQQNVDFVDLNNGKFYVGVCAFVRVQLKDGSYHEDVGYGVS

SEQ ID NO: 51183 - protein, 95 aa, Homo sapiens
MVASDMMVLLKTFFSCHKEFQTVPFYIFSESYGGKMAAGIGLELYKAIQRGTIKCNFAGVALGDSWISPVDSVLSWGPYLYSMSLLEDKGLAEVS

SEQ ID NO: 51184 - protein, 754 aa, Homo sapiens
MNFEAVLHYKHQNQARDEKKKLRHASGANITNATTAATTAATATTTASTEGSNSESEAESTENSPTPSPLQKKVTEDLSKTLLMYTVPAVQGFFRSISLSRGNNLQDTLRVLTLWFDYGHWPDVNEALVEGVKAIQIDTWLQVIPQLIARIDTPRPLVGRLIHQLLTDIGRYHPQALIYPLTVASKSTTTARHNAANKILKNMCEHSNTLVQQAMMVSEELIRVAILWHEMWHEGLEEASRLYFGERNVKGMFEVLEPLHAMMERGPQTLKETSFNQAYGRDLMEAQEWCRKYMKSGNVKDLTQAWDLYYHVFRRISKQLPQLTSLELQYVSPKLLMCRDLELAVPGTYDPNQPIIRIQSIAPSLQVITSKQRPRKLTLMGSNGHEFVFLLKGHEDLRQDERVMQLFGLVNTLLANDPTSLRKNLSIQRYAVIPLSTNSGLIGWVPHCDTLHALIRDYREKKKILLNIEHRIMLRMAPDYDHLTLMQKVEVFEHAVNNTAGDDLAKLLWLKSPSSEVWFDRRTNYTRSLAVMSMVGYILGLGDRHPSNLMLDRLSGKILHIDFGDCFEVAMTREKFPEKIPFRLTRMLTNAMEVTGLDGNYRITCHTVMEVLREHKDSVMAVLEAFVYDPLLNWRLMDTNTKGNKRSRTRTDSYSAGQSVEILDGVELGEPAHKKTGTTVPESIHSFIGDGLVKPEALNKKAIQIINRVRDKLTGRDFSHDDTLDVPTQVELLIKQATSHENLCQCYIGWCPFW

SEQ ID NO: 51185 - protein, 325 aa, Homo sapiens
MYHNSSQKRHWTFSSEEQLARLRADANRKFRCKAVANGKVLPNDPVFLEPHEEMTLCKYYEKRLLEFCSVFKPAMPRSVVGTACMYFKRFYLNNSVMEYHPRIIMLTCAFLACKVDEFNVSSPQFVGNLRESPLGQEKALEQILEYELLLIQQLNFHLIVHNPYRPFEGFLIDLKTRYPILENPEILRKTADDFLNRIALTDAYLLYTPSQIALTAILSSASRAGITMESYLSESLMLKENRTCLSQLLDIMKSMRNLVKKYEPPRSEEVAVLKQKLERCHSAELALNVITKKRKGYEDDDYVSKKSKHEEIAKLWHQSKVHTYH

SEQ ID NO: 51186 - protein, 154 aa, Homo sapiens
MPAFMLKKIVLGNFSSGPVDPMMADAIDFMVDRLESLGQSELASRLTLNCQNSYVEPHKIRDIPVTIMDVFDQSALSTEAKEEMYKLYPNARRAHLKTGGNFPYLCRSAEVNLYVQIHLLQFHGTKYAAIDPSMVSAEELEVQKGSLGISQEEQ

SEQ ID NO: 51187 - protein, 108 aa, Homo sapiens
MGTSALWALWLLLALCWAPRESGATGTGRKAKCEPSQFQCTNGRCITLLWKCDGDEDCVDGSDEKNCVKKTCAESDFVCNNGQCVPSRWKCDGDPDCEDGSDESPEQC

SEQ ID NO: 51188 - protein, 102 aa, Homo sapiens
MKGEAGHMLHNEKSKQEGHIWGSMRRTAFILGSGLLSFVAFWNSVTWHLQRFWGASGYFWQAQWERLLTTFEGKEWILFFIGWRDLASQWDGSKQRVNSEIS

SEQ ID NO: 51189 - protein, 426 aa, Homo sapiens
MVGAKAGPSPGTSLGLAQQHSGGSSVLVKSPFCQVCCCGPAPCASCCHSRWPSLTASTCSRLFYILLHVGASAICCLLLSRTVVERVWGKTHRIQMPSGLCAHLFGLSDCPVLSGSGAVYRVCAGTATFHLLQAVLLVHLHSPTSPRAQLHNSFWLLKLLFLLGLCAIAFCIPDEHLFPAWHYIGICGGFAFILLQLVLITAFAHSWNKNWQTGAAQDCSWFLAVLLATLGFYSMAGVGAVLLFHYYTHPAGCLLNKMLLSLHLCFCGLISFLSIAPCIRLTMRPPTWLRYLDPCGLSRFTAMSFRSPHCVSAALKQWRQTKGKGVGLRGQLTKKPLQLLQSKSSIFPTTILPSTSSSSLPHSMSWLPLPTGSAMREQNWKRPSSRVAGPPSGSRLPHAGPAYSSIWGCYWHHSVGPPPRNPSPLS

SEQ ID NO: 51190 - protein, 187 aa, Homo sapiens
MFGVTGPGLEQSSQLLEEFLSLQMEILTELGLHFRVLDMPTQELGLPAYRKFDIEAWMPGRGRFGEVTSASNCTDFQSRRLHIMFQTEAGELQFAHTVNATACAVPRLLIALLESNQQKDGSVLVPPALQSYLGTDRITAPTHVPLQYIGPNQPRKPGLPGQPALHARAPGPRGPPLLCPCCLRVSH

SEQ ID NO: 51191 - protein, 372 aa, Homo sapiens
PLASTPLSSSLVSPEHRRKSEPTIKCTATQEGGRYLPSGIFPEKSWLASPGSPRAQQAGIAHTLPSSSACCLAYENPGTPCRPTSPKPLSPRPSAQRMGLHYPGRGSAISMVSLGSYSYVDSSSGDPERPKIPKGQTSFLLSLQTLNQDEQKEESREGGQGPRGLGTVPWLRDLPGSENHMPWEEPAGEKPSCSHSQKAFHMEPAQKPCFTTDMVTWALLCISAETVRGEAPSQPRGIPHRSPVSVDDLWLEKTQRKKLQKQAHVERRLHIGAVHKDGVKCWRKTIITSPESLNLPRRSHPLSQSAPTGLNHMGWPEHTPGTAVGRPCYLTRQKHPALPSNRPQQQVLVLAEPRRKPSTFWHSISRLAPFRK

SEQ ID NO: 51192 - protein, 387 aa, Homo sapiens
GLFRLAAGASVLKRLKQTMASDPHSLEEFCSDPHAVAGALKSYLRELPEPLMTFDLYDDWMRAASLKEPGARLQALQEVCSRLPPENLSNLRYLMKFLARLAEEQEVNKMTPSNIAIVLGPNLLWPPEKEGDQAQLDAASVSSIQVVGVVEALIQSADTLFPGDINFNVSGLFSAVTLQDTVSDRLASEELPSTAVPTPATTPAPAPAPAPAPAPALASAATKERTESEVPPRPASPKVTRSPPETAAPVEDMARRTRPTMPPPQVSGSRSSPPAPPLPPGSGSPGTPQALPRRLVGSSLRAPTVPPPLPPTPPQPARRQSRRSPASPSPASPGPASPSPVSLSNPAQVDLGAATAEGGAPEAISGVPTPPAIPPQPRPRSLASETN

SEQ ID NO: 51193 - protein, 140 aa, Homo sapiens
  MOD_RES (1)..(1): Any amino acid
XELMNKLLSPVVPQISAPQSNKERLKNMALSIAERYRAQGISANKFVDSTFYLLLDLITFFDEYHSGHIDRAFDIIERLKLVPLNQESVEERVAAFRNFSDEVSSFFLSCGIPFSPLPPKAFSFPVPNSFKNSSYSNYPD

SEQ ID NO: 51194 - protein, 85 aa, Homo sapiens
  MOD_RES (1)..(1): Any amino acid
XYPSYLAPEVIAQGIFKTTDHMPSKKPLPSGPKSDVWSLGIILFELCVMRKVKLQVVLSSLPNLYNYLMVEESNLAHNHCSTHKC

SEQ ID NO: 51195 - protein, 236 aa, Homo sapiens
ETSFGSSENITMTSLSKVTTFVSEDALPETTFPALASFKDTIPQTSEQKEYENRDYKDFTKQDLPTAERSQEATCPSPASSGASQETPNECSDDFGEFQSEKPKISKFDFLVATSQSKMKSSEEMIKSELATFDLSVQALEQPFRDRSNTLNEKPALPVIRDKYKDLTGEVEENERYAYEWQRCLGSALNVIKKANDTLNGISSSSVCTEVIQSAQGMEYLLGVVEVYRVTKRVEL

SEQ ID NO: 51196 - protein, 62 aa, Homo sapiens
DSILDIKVPIFKGPGEMPEIRSYMEEFPFPYYIILRDVNALPETLSDALRQWFELVTASDHP

SEQ ID NO: 51197 - protein, 29 aa, Homo sapiens
MDGPVAEHAKQEPFHVVTPLLESWALSQV

SEQ ID NO: 51198 - protein, 146 aa, Homo sapiens
MPSPDSMTFEDIIVDFTQEEWALLDTSQRKLFQDVMLENISHLVSIGKQLCKSVVLSQLEQVEKLSTQRISLLQGREVGIKHQEIPFIQHIYQKGTSTISTMRSHTQEDPFLCNDLGEDFTQHIALTQNVITYMRTKHFVSKKFGK

SEQ ID NO: 51199 - protein, 144 aa, Homo sapiens
MSIKRRGMFEPYLKSFYIRSTDPTQIKILKLEVLTNLANETNIPTVLREFQTYIRSMDKDFVAATIQAIGRCATNIGRVRDTCLNGLVQLLSNRDELVVAESVVVIKKLLQMQPAQHGEIIKHLAKLTDNIQVFRWKEQRHWTM

SEQ ID NO: 51200 - protein, 170 aa, Homo sapiens
MGSAPCLGLRGKGLAMLHVTRGVWGSRVRVWPLLPALLGPPRALSSLAAKMGEYRKMWNPREPRDWAQQYRERFIPFSKEQLLRLLIQEFHSSPAEKAALEAFSAHVDFCTLFHYHQILARLQVTVNLDQYVYIHFWALGQRVGQMPLKSSVGSRRGFFTKLPPAERRYF

SEQ ID NO: 51201 - protein, 92 aa, Homo sapiens
MAKFGVHRILLLAISLTKCLESTKLLADLKKCGDLECEALINRVSAMRDYRGPDCRYLNFTKGEEISVYVKLAGEREDLWAGSKGKEFGYFP

SEQ ID NO: 51202 - protein, 39 aa, Homo sapiens
MGAGVGVAGCTRGHRNCTQTQACHGVSPGDRVSALLRQT

SEQ ID NO: 51203 - protein, 70 aa, Homo sapiens
MADQRMDISSTISDFMSPGPTDLLSSSLGTSGVDCNRKRKGSSTDYQLVDFSFDSQVEFGEHNGWRSDAH

SEQ ID NO: 51204 - protein, 107 aa, Homo sapiens
MSLLQPGPVFPSGNSENSDLTVLPNHICSKILSFSTFANHYFSCLLQICYAINLGKEIIEVQKDPEALAQLMLSIPLTNDGKYVLLNDQPDDDDGNPNEHRGAESEA

SEQ ID NO: 51205 - protein, 155 aa, Homo sapiens
MSPAKCKICFPDREVKPSMSGLHLVKRGREHKKLDLHRDFTVASPAEFVTRFGGDRVIEKVLIANNGIAAVKCMRSIRRWAYEMFRNERAIRFVVMVTPEDLKANAEYIKMADHYVPVPGGPNNNNYANVELIVDIAKRIPVQAVWAGWGHASEN

SEQ ID NO: 51206 - protein, 67 aa, Homo sapiens
MNRPIQVKPADSESRGGKDRKLFVGMLNKQQSEDDVRRLFEAFGNIEECTILRGPDGNSKGCAFVKY

SEQ ID NO: 51207 - protein, 1263 aa, Homo sapiens
MSGGLGLRRSPEMSGKIEKADSQRSHLSSFTMKLMDKFHSPKIKRTPSKKGKPAEVSVKIPEKPVNKEATDRFLPEGYPLPLDLEQQAVEFMSTSAVASRSQRQKNLSWLEEKEKEVVSALRYFKTIVDKMAIDKKVLEMLPGSASKVLEAILPLVQNDPRIQHSSALSSCYSRVYQSLANLIRWSDQVMLEGVNSEDKEMVTTVKGVIKAVLDGVKELVRLTIEKQGRPSPTSPVKPSSPASKPDGPAELPLTDREVEILNKTTGMSQSTELLPDATDEEVAPPKPPLPGIRVVDNSPPPALPPKKRQSAPSPTRVAVVAPMSRATSGSSLPVGINRQDFDVDCYAQRRLSGGSHSYGGESPRLSPCSSIGKLSKSDEQLSSLDRDSGQCSRNTSCETLDHYDPDYEFLQQDLSNADQIPQQTAWNLSPLPESLGESGSPFLGPPFQLPLGGHPQPDGPLAPGQQTDTPPALPEKKRRSAASQTADGSGCRVSYERHPSQYDNISGEDLQSTAPIPSVPYAPFAAILPFQHGGSSAPVEFVGDFTAPESTGDPEKPPPLPEKKNKHMLAYMQLLEDYSEPQPSMFYQTPQNEHIYQQKNKLLMEVYGFSDSFSGVDSVQELAPPPALPPKQRQLASCAASSFSSVSHCVQQTKVAFTPEDGSAAQGLSVSVSNSFLSRHGSLPVPSYKSVFRSYSQDFVPHHQASVPPFLPPTSSSSPHFPPAHQSQSSDLAVPTMAGPPPSTVDGPLSASQESSFHGNTVCLPSETSFTDSSENASEEAGEGEYVNLYSSGQSSEELAPSRGEPPAGKDGHPRDPSAVSGVPGKDSRDGSERAPKSPDALESAQSEEEVDELSLIDHNEIMSRLTLKQEGDDGPDVRGGSGDILLVHATETDRKDLVLYCEAFLTTYRTFISPEELIKKLQYRYEKFSPFADTFKKRVSKNTFFVLVRVVDELCLVELTEEILKLLMELVFRLVCNGELSLARVLRKNILDKVDQKKLLRCATSSQPLAARGVAARPGTLHDFHSHEIAEQLTLLDAELFYKIEIPEVLLWAKEQNEEKSPNLTQFTEHFNNMSYWVRSIIMLQEKAQDRERLLLKFIKIMKHLRKLNNFNSYLAILSALDSAPIRRLEWQKQTSEGLAEYCTLIDSSSSFRAYRAALSEVEPPCIPYLGLILQDLTFVHLGNPDYIDGKVNFSKRWQQFNILDSMRCFQQAHYDMRRNDDIINFFNDFSDHLAEEALWELSLKIKPRNITRRKTDREEKT

SEQ ID NO: 51208 - protein, 154 aa, Homo sapiens
MLNNWDKWMAKKHKKIRLRCQKGIPPSLRGRAWQYLSGGKVKLQQNPGKFDELDMSPGDPKWLDVIERDLHRQFPFHEMFVSRGGHGQQDLFRVLKAYTLYRPEEGYCQAQAPIAAVLLMHMPAEQAFWCLVQICEKYLPGYYSEKLEAIQLDG

SEQ ID NO: 51209 - protein, 35 aa, Homo sapiens
MAPKKKGKKGKAKGTPIVDGLAPEDMSKEQLFIFR

SEQ ID NO: 51210 - protein, 56 aa, Homo sapiens
MMVALRGASALLVLFLAAFLPPPQCTQDPAMVHYIYQRFRVLEQGLEKCTQAVTTC

SEQ ID NO: 51211 - protein, 211 aa, Homo sapiens
MYNRVIWWLKDEEIKRFLEDTTDDGELSKFVKDFSGNASCHPPEAKTWASRPQVPEPRPQAPDLYDDDLEFRPPSRPQSSDNQQYFCAPAPLSPSARPRSPWGKLDPYDSSEDDKEYVGFATLPNQVHRKSVKKGFDFTLMVAGESGLGKSTLVNSLFLTDLYRDRKLLGAEERIMQTVEITKHAVDIEEKGVRLRLTIVDTPGFGDAVNN

SEQ ID NO: 51212 - protein, 85 aa, Homo sapiens
  MOD_RES (1)..(1): Any amino acid
XERVFAETHYPDIYTREELALKIDLTEARGALWAGVAGGGGGGPGAGAAELLKAWQPAESGPGPFSGVLSSFHRKPGPALKTNLF

SEQ ID NO: 51213 - protein, 394 aa, Homo sapiens
MPRVKAAQAGRQSSAKRHLAEQFAVGEIITDMAKKEWKVGLPIGQGGFGCIYLADMNSSESVGSDAPCVVKVEPSDNGPLFTELKFYQRAAKPEQIQKWIRTRKLKYLGVPKYWGSGLHDKNGKRFMIMDRFGSDLQKIYEANAKRFSRKTVLQLSLRILDILEYIHEHEYVHGDIKASNLLLNYKNPDQVYLVDYGLAYRYCPEGVHKEYKEDPKRCHDGTIEFTSIDAHNGVAPSRRGDLEILGYCMIQWLTGHLPWEDNLKDPKYVRDSKIRYRENIASLMDKCFPEKNKPGEIAKYMETVKLLDYTEKPLYENLRDILLQGLKAIGSKDDGKLDLSVVENGGLKAKTITKKRKKEIEESKEPGVEDTEWSNTQTEEAIQTRSRTRKRVQK

SEQ ID NO: 51214 - protein, 85 aa, Homo sapiens
VGMSNASVALTVYFDEVSPTPPITVTHKPEEDTFGVSIAVGLAAFACVLLVVLFVMINKYGRRSKFGMKDGLELLAVLLKCDSKQ

SEQ ID NO: 51215 - protein, 52 aa, Homo sapiens
MVHTLASNGANSIWEHSLLDPAQVQSGRRKANPQDKVHPIKSEFIRAKYQML

SEQ ID NO: 51216 - protein, 767 aa, Homo sapiens
MGGKNKQRTKGNLRPSNSGRAAELLAKEQGTVPGFIGFGTSQSDLGYVPAIQGAEEIDSLVDSDFRMVLRKLSKKDVTTKLKAMQEFGTMCTERDTETVKGVLPYWPRIFCKISLDHDRRVREATQQAFEKLILKVKKQLAPYLKSLMGYWLMAQCDTYTPAAFAAKDAFEAAFPPSKQPEAIAFCKDEITSVLQDHLIKETPDTLSDPQTVPEEEREAKFYRVVTCSLLALKRLLCLLPDNELDSLEEKFKSLLSQNKFWKYGKHSVPQIRSAYFELVSALCQRIPQLMKEEASKVSPSVLLSIDDSDPIVCPALWEAVLYTLTTIEDCWLHVNAKKSVFPKLSTVIREGGRGLATVIYPYLLPFISKLPQSITNPKLDFFKNFLTSLVAGLSTERTKTSSLESSAVISAFFECLRFIMQQNLGEEEIEQMLVNDQLIPFIDAVLKDPGLQHGQLFNHLAETLSSWEAKADTEKDEKTAHNLENVLIHFWERLSEICVAKISEPEADVESVLGVSNLLQVLQKPKSSLKSSKKKNGKVRFADEILESNKENEKCVSSEGEKIEGWELTTEPSLTHNSSGLLSPLRKKPLEDLVCKLADISINYVNERKSEQHLRFLSTLLDSFSSSRVFKMLLGDEKQSIVQAKPLEIAKLVQKNPAVQFLYQKLIGWLNEDQRKDFGFLVDILYSALRCCDNDMERKKVLDDLTKVDLKWNSLLKIIEKECTCREVQILTSVWKKILFLSSDWKFLASVCCLRFHDSLASSSPYS

SEQ ID NO: 51217 - protein, 128 aa, Homo sapiens
GQYLNLDKDHNGMLSKEELSRYGTATMTNVFLDRVFQECLTYDGEMAIQELMKIHGQDPVSFQDVKDEIFDMVKPKDPLKISLQDLINSNQGDTVTTILIDLNGFWTYENREALVANDSENSADLDDT

SEQ ID NO: 51218 - protein, 141 aa, Homo sapiens
MGTQKIIKEFINKTLTDKGNAPPSEVLLTSLWSLSVAIFSVGGMIGSFSVGLFVNRFGRRNSMLIVNLLAVTGGCFMGLCKVAKSVEMLILGRLVIGLFCGLCTGFVPMYIGEISPTALRGAFGTLNQLGIVVGILVAQIF

SEQ ID NO: 51219 - protein, 306 aa, Homo sapiens
MAPWPPKGLVPAMLWGLSLFLNLPGPIWLQPSPPPQSSPPPQPHPCHTCRGLVDSFNKGLERTIRDNFGGGNTAWEEENLSKYKDSETRLVEVLEGVCSKSDFECHRLLELSEELVESWWFHKQQEAPDLFQWLCSDSLKLCCPAGTFGPSCLPCPGGTERPCGGYGQCEGEGTRGGSGHCDCQAGYGGEACGQCGLGYFEAERNASHLVCSACFGPCARCSGPEESNCLQCKKGWALHHLKCVDIDECGTEGANCGADQFCVNTEGSYECRDCAKACLGCMGAGPGRCKKCSPGYQQVGSKCLGL

SEQ ID NO: 51220 - protein, 227 aa, Homo sapiens
MSSTLPALLCVGLCLSQRISAQQQTLPKPFIWAEPHFMVPKEKQVTICCQGNYGAVEYQLHFEGSLFAVDRPKPPERINKVQFYIPDMNSRMAGQYSCIYRVGELWSEPSNLLDLVVTEMYDTPTLSVHPGPEVISGEKVTFYCRLDTATSMFLLLKEGRSSHVQRGYGKVQAEFPLGPVTTAHRGTYRCFGSYNNHAWSFPSEPVKLLVTGDIENTSLAPEDPTFP

SEQ ID NO: 51221 - protein, 198 aa, Homo sapiens
MPTILWLMDWSDMNSNLDLLALLGLGISSFVLITGCANMLLMAALWGLYMSLVNVGHVWYSFGWESQLLETGFLGIFLCPLWTLSRLPQHTPTSRIVLWGFRWLIFRIMLGAGLIKIRGDRCWRDLTCMDFHYETQPMPNPVAYYLHHSPWWFHRFETLSNHFIELLVPFFLFLGRRACIIHGVLQILFQAVLIVSGN

SEQ ID NO: 51222 - protein, 326 aa, Homo sapiens
MEEGNNNEEVIHLNNFHCHRGQEWINLRDGPITISDSSDEERIPMLVTPAPQQHEEEDLDDDVILTEDDSEDDYGEFLDLGPPGISEFTKPSGQTEREPKPGPSHNQAANDIVNPRSEQKVIILEEGSLLYTESDPLETQNQSSEDSETELLSNLGESAALADDQAIEEDCWLDHPYFQSLNQQPREITNQVVPQERQPEAELGRLLFQHEFPGPAFPRPEPQQGGISGPSSPQPAHPLGEFEDQQLASDDEEPGPAFPMQESQEPNLENIWGQEAAEVDQELVELLVKETRCSIFVEAMKNGSVKWGQRTRSLKTFLDLIFYVDR

SEQ ID NO: 51223 - protein, 128 aa, Homo sapiens
MTKKTRDLRRQLRKAVMDHVSDSFLETNVPLLVLIEAAKNGNEKEVKEYAQVFREHANKLIEVANLACSISNNEEGVKLVRMSASQLEALCPQVINAALALAAKPQSKLAQENMDLFKEQWEKQVRVL

SEQ ID NO: 51224 - protein, 1314 aa, Homo sapiens
MDSQELKTLINYYCQERYFHHVLLVASEGIKRYGSDPVFRFYHAYGTLMEGKTQEALREFEAIKNKQDVSLCSLLALIYAHKMSPNPDREAILESDARVKEQRKGAGEKALYHAGLFLWHIGRHDKAREYIDRMIKISDGSKQGHVLKAWLDITRGKEPYTKKALKYFEEGLQDGNDTFALLGKAQCLEMRQNYSGALETVNQIIVNFPSFLPAFVKKMKLQLALQDWDQTVETAQRLLLQDSQNVEALRMQALYYVCREGDIEKASTKLENLGNTLDAMEPQNAQLFYNITLAFSRTCGRSQLILQKIQTLLERAFSLNPQQSEFATELGYQMILQGRVKEALKWYKTAMTLDETSVSALVGFIQCQLIEGQLQDADQQLEFLNEIQQSIGKSAELIYLHAVLAMKKNKRQEEVINLLNDVLDTHFSQLEGLPLGIQYFEKLNPDFLLEIVMEYLSFCPMQPASPGQPLCPLLRRCISVLETVVRTVPGLLQTVFLIAKVKYLSGDIEAAFNNLQHCLEHNPSYADAHLLLAQVYLSQEKVKLCSQSLELCLSYDFKVRDYPLYHLIKAQSQKKMGEIADAIKTLHMAMSLPGMKRIGASTKSKDRKTEVDTSHRLSIFLELIDVHRLNGEQHEATKVLQDAIHEFSGTSEEVRVTIANADLALAQGDIERALSILQNVTAEQPYFIEAREKMADIYLKHRKDKMLYITCFREIAERMANPRSFLLLGDAYMNILEPEEAIVAYEQALNQNPKDGTLASKMGKALIKTHNYSMAITYYEAALKTGQKNYLCYDLAELLLKLKWYDKAEKVLQHALAHEPVNELSALMEDGRCQVLLAKVYSKMEKLGDAITALQQARELQARVLKRVQMEQPDAVPAQKHLAAEICAEIAKHSVAQRDYEKAIKFYREALVHCETDNKIMLELARLYLAQDDPDSCLRQCALLLQSDQDNEAATMMMADLMFRKQDYEQAVFHLQQLLERKPDNYMTLSRLIDLLRRCGKLEDVPRFFSMAEKRNSRAKLEPGFQYCKGLYLWYTGEPNDALRHFNKARKDRDWGQNALYNMIEICLNPDNETVGGEVFENLDGDLGNSTEKQESVQLAVRTAEKLLKELKPQTVQGHVQLRIMENYCLMATKQKSNVEQALNTFTEIAASEKEHIPALLGMATAYMILKQTPRARNQLKRIAKMNWNAIDAEEFEKSWLLLADIYIQSAKYDMAEDLLKRCLRHNRSCCKAYEYMGYIMEKEQAYTDAALNYEMAWKYSNRTNPAVDHDPLNCNLQSCVLGLVFKPSAVTCPFFLRLDSESLIFLVAVSWKL

SEQ ID NO: 51225 - protein, 404 aa, Homo sapiens
MISPDPRPSPGLARWAESYEAKCERRQEIRESRRCRPNVTTCRQVGKTLRIQQREQLQRARLQQFFRRRNLELEEKGKAQHPQAREQGPSRRPGQVTGTSSEVFPAQHPPPSGICRDLSDHLSSQAGGLPPQDTPIKKPPKHHRGTQTKAEGPTIKNDASQQTNYGVAVLDKEIIQLSDYLKEALQRELVLKQKMVILQDLLSTLIQASDSSWKGQLNEDKLKGKLRSLENQLYTCTQKYSPWGMKKVLLEMEDQKNSYEQKAKESLQKVLEEKMNAEQQLQSTQRSLALAEQKCEEWRSQYEALKEDWRTLGTQHRELESQLHVLQSKLQGADSRDLQMNQALRFLENEHQQLQAKIECLQGDRDLCSLDTQDLQDQLKRSEAEKLTLVTRVQQLQEAAGWTT

SEQ ID NO: 51226 - protein, 153 aa, Homo sapiens
MALIPDLAMETWLLLAVSLVLLYLHNRCDLISVSLCRYGTHSHGLFKKLGIPGPTPLPFLGNILSYHKGFCMFDMECHKKYGKVWGFYDGQQPVLAITDPDMIKTVLVKECYSVFTNRRPFGPVGFMKSAISIAEDEEWKRLRSLLSPTFTSG

SEQ ID NO: 51227 - protein, 659 aa, Homo sapiens
  MOD_RES (1)..(1): Any amino acid
XHLLFGKVNNIPSQSTRHSTVATECLSKNTEENLLSLKNSLNDCSNQVILAKASQEHHLSEETKCSASLFSSQCSELEDLTANTNTQDPFLIGSSKQMRHQSESQGVGLSDKELVSDDEERGTGLEENNQEEQSMDSNLGEAASGCESETSVSEDCSGLSSQSDILTTQQRDTMQHNLIKLQQEMAELEAVLEQHGSQPSNSYPSIISDSSALEDLRNPEQSTSEKDSHIHGQRNNSMFSKRPREHISAVLTSQKSSEYPISQNPEGLSADKFEVSADSSTSKNKEPGVERSSPSKCPSLDDRWYMHSCSGSLQNRNYPSQEELIKVVDVEEQQLEESGPHDLTETSYLPRQDLEGTPYLESGISLFSDDPESDPSEDRAPESARVGNIPSSTSALKVPQLKVAESAQSPAAAHTTDTAGYNAMEESVSREKPELTASTERVNKRMSMVVSGLTPEEFMLVYKFARKHHITLTNLITEETTHVVMKTDAEFVCERTLKYFLGIAGGKWVVSYFWVTQSIKERKMLNEHDFEVRGDVVNGRNHQGPKRARESQDRKIFRGLEICCYGPFTNMPTDQLEWMVQLCGASVVKELSSFTLGTGVHPIVVVQPDAWTEDNGFHAIGQMCEAPVVTREWVLDSVALYQCQELDTYLIPQIPHSHY

SEQ ID NO: 51228 - protein, 89 aa, Homo sapiens
VHSVLYSSPAILLKEIILVDDASVDEYLHDKLDEYVKQFSIVKIVRQRERKGLITARLLGATVATAETLTFLDAHSFSTGDYSNDSPSR

SEQ ID NO: 51229 - protein, 422 aa, Homo sapiens
MKLQTQKKRLRSEDLIAEFAQVTNWSSCCLRVFAWHPHTNKFAVALLDDSVRVYNASSTIVPSLKHRLQRNVASLAWKPLSASVLAVACQSCILIWTLDPTSLSTRPSSGCAQVLSHPGHTPVTSLAWAPSGGRLLSASPVDAAIRVWDVSTETCVPLPWFRGGGVTNLLWSPDGSKILATTPSAVFRVWEAQMWTCERWPTLSGRCQTGCWSPDGSRLLFTVLGEPLIYSLSFPERCGEGKGCVGGAKSATIVADLSETTIQTPDGEERLGGEAHSMVWDPSGERLAVLMKGKPRVQDGKPVILLFRTRNSPVFELLPCGIIQGEPGAQPQLITFHPSFNKGALLSVGWSTGRIAHIPLYFVNAQFPRFSPVLGRAQEPPAGGGGSIHDLPLFTETSPTSAPWDPLPGPPPVLPHSPHSHL

SEQ ID NO: 51230 - protein, 98 aa, Homo sapiens
MGNLLKVLTCTDLEQGPNFFLDFENAQPTESEKEIYNQVNVVLKDAEGILEDLQSYRGAGHEIREAIQHPADEKLQEKAWGAVVPLVGKLKKFYEFSQ

SEQ ID NO: 51231 - protein, 371 aa, Homo sapiens
MAVMAPRTLLLLLSGALALTQTWAGSHSMRYFFTSVSRPGRGEPRFIAVGYVDDTQFVRFDSDAASQRMEPRAPWIEQEGPEYWDQETRNVKAQSQTDRVDLGTLRGYYNQSEAGSHTIQIMYGCDVGSDGRFLRGYRQDAYDGKDYIALNEDLRSWTAADMAAQITKRKWEAAHEAEQLRAYLDGTCVEWLRRYLENGKETLQRTDPPKTHMTHHPISDHEATLRCWALGFYPAEITLTWQRDGEDQTQDTELVETRPAGDGTFQKWAAVVVPSGEEQRYTCHVQHEGLPKPLTLRWELSSQPTIPIVGIIAGLVLLGAVITGAVVAAVMWRRKSSGGEGVKDRKGGSYTQAASSDSAQGSDVSLTACKV

SEQ ID NO: 51232 - protein, 64 aa, Homo sapiens
MHHQWLLLAACFWVIFMFMVASKFITLTFKDPDVYSAKQEFLFLTTMPEVRKLPEEKHIPEELK

SEQ ID NO: 51233 - protein, 106 aa, Homo sapiens
  MOD_RES (1)..(1): Any amino acid
XDSGKVTTVVATLGQGPERSQEVAYTDIKVIGNGSFGVVYQARLAETRELVAIKKVLQDKRFKVYMYQLFRSLAYIHSQGVCHRDIKPQNLLVDPDTAVLKLCDFG

SEQ ID NO: 51234 - protein, 324 aa, Homo sapiens
MSATGDQDLIQEDQEAPVNQEGAQAEAVGDREGGDSGPDSGNTVAGVAGPMRGLGEEEGEQAAGLAAAPGGGNAEEDSEIRIVVEMVEEEEDEEEEEEEEEEERNEADNFDLVAAARRYPIRGFRMEFLDMVHSLLLRIYHNDHILIRMRGGRLMRRRRTAAPSGSEEPRLLLVHERLGVGAAGPEGEGLGLLQEAALVPEPEVPADLAEMAREPAEEPAEEASEKPTEEAAEEPAEEASEKPTEEAAEEELAEEAAEEPAKEEPAAEEESAEEPATEEAAAPEEVTKYQHEKWDEEAQDAAGKEEKEEKEKDAENKVKNSKGT

SEQ ID NO: 51235 - protein, 298 aa, Homo sapiens
  MOD_RES (1)..(1): Any amino acid
XEAPPMDKVPNPKMAPLGDEAPTLEKVLTPELSEEEVSTRDDIQFHHFSSEEALQKVKYFVAKEDPSSQEEAHTPEAPPPQPPSSERCLGEMKCTLVRGDSSPRQAELKSGPASRPALEKPHPHEEATTLPEEAPSNDERTPEEEAPPNEQRPLREEVLPKEGVASKEEVTLKEELPPKEEVAPKEEVPPIERAFAQKTRPIKPPPDSQETLALPSLVPQNYTENKNEGVDVTSLRGEVESLRRALELMEVQLERKLTDIWEELKSEKEQRRRLEVQVMQGTQKSQTPRVIHTQTQTY

SEQ ID NO: 51236 - protein, 420 aa, Homo sapiens
MAAVGSGGYARNDAGEKLPSVMAGVPARRGQSSPPPAPPICLRRRTRLSTASEETVQNRVSLEKVLGITAQNSSGLTCDPGTGHVAYLAGCVVVILDPKENKQQHIFNTARKSLSALAFSPDGKYIVTGENGHRPAVRIWDVEEKNQVAEMLGHKYGVACVAFSPNMKHIVSMGYQHDMVLNVWDWKKDIVVASNKVSCRVIALSFSEDSSYFVTVGNRHVRFWFLEVSTETKVTSTVPLVGRSGILGELHNNIFCGVACGRGRMAGSTFCVSYSGLLCQFNEKRVLEKWINLKVSLSSCLCVSQELIFCGCTDGIVRIFQAHSLHYLANLPKPHYLGVDVAQGLEPRKAEAVYPDTVALTFDPIHQWLSCVYKDHSIYIWDVKDINRVGKVWSELFHSSYVWNVETEFHSCCPGWSAMV

SEQ ID NO: 51237 - protein, 116 aa, Homo sapiens
MLEPQENGVIDLPDYEHVEDETFPPFPPPASPERQDGEGTEPDEESGNGAPVRVPPKRTVKRNIPKLDAQRLISERGLPALRHVFDKAKFKGKGHEAEDLKMLIRHMEHWAHRLFP

SEQ ID NO: 51238 - protein, 320 aa, Homo sapiens
MTPGKHSGASARAANGGAWGYRDFRGGQKKGWCTTPQLVATMPVSPAGSHKQQNFGLNNATQPKKSISFFATMKATSVKGYTGANQSRMAVSKTVLIPPELKTVEKPNPNIKTTQVFDINGTDVTPRPLYHPDPLTGTAKPSKLLTSQEGSLGSEFISSYSLYQNTINPSTLGQFTRSVLGSSTVSKSSVSASESIAEDLEEPSYKRERLTSFTDLQVIRAAPEKIVTKEDLEKNIEIILTETETLRFFDLPTVMVSVESEEAEKVTQRNKNYEVLCRNRLGNDLYVERMMQTFNGAPKNKDVQCDKIIMEDKGNFYHSA

SEQ ID NO: 51239 - protein, 12 aa, Homo sapiens
MNSSPAGTPSPQ

SEQ ID NO: 51240 - protein, 341 aa, Homo sapiens
MASRWGPLIGLAPCCLWLLGAVLLMDASARPANHSSTRERVANREENEILPPDHLNGVKLEMDGHLNRGFHQEVFLGKDLGGFDEDAEPRRSRRKLMVIFSKVDVNTDRKISAKEMQRWIMEKTAEHFQEAMEESKTHFRAVDPDGDGHVSWDEYKVKFLASKGHSEKEVADAIRLNEELKVDEETQEVLENLKDRWYQADSPPADLLLTEEEFLSFLHPEHSRGMLRFMVKEIVRDLDQDGDKQLSVPEFISLPVGTVENQQGQDIDDNWVKDRKKEFEELIDSNHDGIVTAEELENVPTLPLQPIGTLNSHFVRLAAELGGGKATLTCAPLARRATWTP

SEQ ID NO: 51241 - protein, 47 aa, Homo sapiens
MSVPGPSSPDGALTRPPYCLEAGEPTPGSRSAAQAGVQWCDHSSLQP

SEQ ID NO: 51242 - protein, 706 aa, Homo sapiens
MTTEVGSVSEVKKDSSQLGTDATKEKPKEVAENQQNQSSDPEEEKGSQPPPAAESQSSLRRQKREKETSESRGISRFIPPWLKKQKSYTLVVAKDGGDKKEPTQAVVEEQVLDKEEPLPEEQRQAKGDAEEMAQKKQEIKVEVKEEKPSVSKEEKPSVSKVEMQPTELVSKEREEKVKETQEDKLEGGAAKRETKEVQTNELKAEKASQKVTKKTKTVQCKVTLLDGTEYSCDLEKHAKGQVLFDKVCEHLNLLEKDYFGLLFQESPEQKNWLDPAKEIKRQLRNLPWLFTFNVKFYPPDPSQLTEDITRYFLCLQLRQDIASGRLPCSFVTHALLGSYTLQAELGDYDPEEHGSIDLSEFQFAPTQTKELEEKVAELHKTHRGLSPAQADSQFLENAKRLSMYGVDLHHAKDSEGVDIKLGVCANGLLIYKDRLRINRFAWPKILKISYKRSNFYIKVRPAELEQFESTIGFKLPNHRAAKRLWKVCVEHHTFYRLVSPEQPPKAKFLTLGSKFRYSGRTQAQTRQASTLIDRPAPHFERTSSKRVSRSLDGAPIGVMDQSLMKDFPGAAGEISAYGPGLVSIAVVQDGDGRREVRSPTKAPHLQLIEGKIDGGAGGDSGTLLTAQTITSESVSTTTTTHITKTVKGGISETRIEKRIVITGDGDIDHDQALAQAIREAREQHPDMSVTRVVVHKETELAEEGED

SEQ ID NO: 51243 - protein, 137 aa, Homo sapiens
  MOD_RES (1)..(1): Any amino acid
XMTTPSLKTDGGRRTATSPPPTTSQTIISTIPSTAMHTRSTAAPIPILPERGVSLFPYGADAGDLEFVRRTVDFTSPLFKPATGFPLGSSLRDSLYASQAGTLWPWWLRSGTMLTSPLVGGPHFIRNTRRSMVNTAC

SEQ ID NO: 51244 - protein, 50 aa, Homo sapiens
  MOD_RES (1)..(1): Any amino acid
XSNDVNGEAKETQPIFLEDTEKENSHMKASDMLETKIGKSHLFCLFLILL

SEQ ID NO: 51245 - protein, 118 aa, Homo sapiens
MNQAFWKTYKSKVLQTLSGESEEDLAEERENPALVGSETAEPTEETFNPMSQLARRVQGVGVKGWLTMSSLFNKEDEDKLLPSEPCADQYVRVCLWWFWKGPEVPLLPGPFLLVCLSF

SEQ ID NO: 51246 - protein, 68 aa, Homo sapiens
MRLTRCQAALAAAITLNLLVLFYVSWLQHQPRNSRARGPRRASAAGPRVTVLVREFEAFDNAVPELVD

SEQ ID NO: 51247 - protein, 107 aa, Homo sapiens
MKRSKELITKNHSQEETSILRCWKCRKCIASSGCFMEYLENQVIKDKDDSVDAQNICHVWHMNVEALPEWISCLIQKAQWTVGKLNCPFCGARLGGFNFVSTPKCSC

SEQ ID NO: 51248 - protein, 495 aa, Homo sapiens
MEREPAGTEEPGPPGRRRRREGRTRTVRSNLLPPPGAEDPAAGAAKGERRRRRGCAQHLADNRLKTTKYTLLSFLPKNLFEQFHRPANVYFVFIALLNFVPAVNAFQPGLALAPVLFILAITAFRDLWEDYSRHRSDHKINHLGCLVFSREEKKYVNRFWKEIHVGDFVRLRCNEIFPADILLLSSSDPDGLCHIETANLDGETNLKRRQVVRGFSELVSEFNPLTFTSVIECEKPNNDLSRFRGCIIHDNGKKAGLYKENLLLRGCTLRNTDAVVGIVIYAGHETKALLNNSGPRYKRSKLERQMNCDVLWCVLLLVCMSLFSAVGHGLWIWRYQEKKSLFYVPKSDGSSLSPVTAAVYSFLTMIIVLQVLIPISLYVSIEIVKACQVYFINQDMQLYDEETDSQLQCRALNITEDLGQIQYIFSDKTGTLTENKMVFRRCTVSGVEYSHDANEGLLRDAQWSTRLAGSISISFSGLLTGPCCFDSAPCLCLKF

SEQ ID NO: 51249 - protein, 102 aa, Homo sapiens
MGLLQLLAFSFLALCRARVRAQEPEFSYGCAEGSCYPATGDLLIGRAQKLSVTSTCGLHKPEPYCIVSHLQEDKKCFICNSQDPYHETLNPDSHLIENVVTT

SEQ ID NO: 51250 - protein, 775 aa, Homo sapiens
MHYDGHVRFDLPPQGSVLARNVSTRSCPPRTSPAVDLEEEEEESSVDGKGDRKSTGLKLSKKKARRRHTDDPSKECFTLKFDLNVDIETEIVPAMKKKSLGEVLLPVFERKGIALGKVDIYLDQSNTPLSLTFEAYRFGGHYLRVKAPAKPGDEGKVEQGMKDSKSLSLPILRPAGTGPPALERVDAQSRRESLDILAPGRRRKNMSEFLGEASIPGQEPPTPSSCSLPSGSSGSTNTGDSWKNRAASRFSGFFSSGPSTSAFGREVDKMEQLEGKLHTYSLFGLPRLPRGLRFDHDSWEEEYDEDEDEDNACLRLEDSWRELIDGHEKLTRRQCHQQEAVWELLHTEASYIRKLRVIINLFLCCLLNLQESGLLCEVEAERLFSNIPEIAQLHRRLWASVMAPVLEKARRTRALLQPGDFLKGFKMFGSLFKPYIRYCMEEEGCMEYMRGLLRDNDLFRAYITWAEKHPQCQRLKLSDMLAKPHQRLTKYPLLLKSVLRKTEEPRAKEAVVAMIGSVERFIHHVNACMRQRQERQRLAAVVSRIDAYEVVESSSDEVDKLLKEFLHLDLTAPIPGASPEETRQLLLEGSLRMKEGKDSKMDVYCFLFTDLLLVTKAVKKAERTRVIRPPLLVDKIVCRELRDPGSFLLIYLNEFHSAVGAYTFQASGQALCRGWVDTIYNAQNQLQQLRAQEPPGSQQPLQSLEEEEDEQEEEEEEEEEEEEGEDSGTSAASSPTIMRKSSGSPDSQHWKLTLAQLYRIRTTLLLNSTLTASEV

SEQ ID NO: 51251 - protein, 251 aa, Homo sapiens
MSVEGTTPPIEADTLDSSDAQGGLEPRVEKTRPEPTEVLHACKTQVAELELWLQQANVAVEPETLNADMQQVLEQQLVGCQAMLTEIEHKVAFLLETCKDQGLGDNGATQHEAEALSLKLKTVKCNLEKVQMMLQEKHSEDQVLELKPMEQKDFIKFIEFNAKKMWPQYCQHDNDTTQESSASNQASSPENDVPDSILSPQGQNGDKWQYLHHELSSKIKLPLPQLVEPQVSLYLHGANSLFIFENPTSIH

SEQ ID NO: 51252 - protein, 332 aa, Homo sapiens
GRCDVNVRNRKLQSPLHLAVQQAHVGLVPLLVDAGCSVNAEDEEGDTALHVALQRHQLLPLVADGAGGDPGPLQLLSRTWGAGCWGCQVPGDASLGPAPAPALTGVCPAAQLQASGLPGSAELTVGAAVACFLALEGADVSYTNHRGRSPLDLAAEGRVLKALQGCAQRFRERQAGGGAAPGPRQTLGTPNTVTNLHVGAAPGPEAAECLVCSELALLVLFSPCQHRTVCEECARRMKKCIRCQVVVSKKLRPDGSEVASAAPAPGPPRQLVEELQSRYRQMEERITCPICIDSHIRLVFQCGHGACAPCGSALSACPICRQPIRDRIQIFV

SEQ ID NO: 51253 - protein, 721 aa, Homo sapiens
MERAAPSRRVPLPLLLLGGLALLAAGVDADVLLEACCADGHRMATHQKDCSLPYATESKECRAVGLASLCQDLNGAWAVWKVGRASQAEGTASARAQRRGMVQEQCCHSQLEELHCATGISLANEQDRCATPHGDNASLEATFVKRCCHCCLLGRAAQAQGQSCEYSLMVGYQCGQVFQACCVKSQETGDLDVGGLQETDKIIEVEEEQEDPYLNDRCRGGGPCKQQCRDTGDEVVCSCFVGYQLLSDGVSCEDVNECITGSHSCRLGESCINTVGSFRCQRDSSCGTGYELTEDNSCKDIDECESGIHNCLPDFICQNTLGSFRCRPKLQCKSGFIQDALGNCIDINECLSISAPCPIGHTCINTEGSYTCQKNVPNCGRGYHLNEEGTRCVDVDECAPPAEPCGKGHRCVNSPGSFRCECKTGYYFDGISRMCVDVNECQRYPGRLCGHKCENTLGSYLCSCSVGFRLSVDGRSCEDINECSSSPCSQECANVYGSYQCYCRRGYQLSDVDGVTCEDIDECALPTGGHICSYRCINIPGSFQCSCPSSGYRLAPNGRNCQDIDECVTGIHNCSINETCFNIQGGFRCLAFECPENYRRSAATRCERLPCHENRECSKLPLRITYYHLSFPTNIQAPAVVFRMGPSSAVPGDSMQLAITGGNEEGFFTTRKVSPHSGVVALTKPVPEPRDLLLTVKMDLSRHGTVSSFVAKLFIFVSAEL

SEQ ID NO: 51254 - protein, 36 aa, Homo sapiens
MAAACGPGAAGYCLLLGLHLFLLTAGPALGWIPSHS

SEQ ID NO: 51255 - protein, 283 aa, Homo sapiens
YHPMFFTHDRAFEELFGICIQLLNKTWKEMRATAEDFNKVMQVVREQITRALPSKPNSLDQFKSKLRSLSYSEILRLRQSERMSQDDFQSPPIVELREKIQPEILELIKQQRLNRLCEGSSFRKIGNRRRQERFWYCRLALNHKVLHYGDLDDNPQGEVTFESLQEKNIKAIVTGKDCPHMKEKSALKQNKEVLELAFSILYDPDETLNFIAPNKYEYCIWIDGLSALLGKDMSSELTKSDLDTLLSMEMKLRLLDLENIQIPEAPPPIPKEPSSYDFVYHYG

SEQ ID NO: 51256 - protein, 771 aa, Homo sapiens
MSSSSWLLLSLVAVTAAQSTIEEQAKTFLDKFNHEAEDLFYQSSLASWNYNTNITEENVQNMNNAGDKWSAFLKEQSTLAQMYPLQEIQNLTVKLQLQALQQNGSSVLSEDKSKRLNTILNTMSTIYSTGKVCNPDNPQECLLLEPGLNEIMANSLDYNERLWAWESWRSEVGKQLRPLYEEYVVLKNEMARANHYEDYGDYWRGDYEVNGVDGYDYSRGQLIEDVEHTFEEIKPLYEHLHAYVRAKLMNAYPSYISPIGCLPAHLLGDMWGRFWTNLYSLTVPFGQKPNIDVTDAMVDQAWDAQRIFKEAEKFFVSVGLPNMTQGFWENSMLTDPGNVQKAVCHPTAWDLGKGDFRILMCTKVTMDDFLTAHHEMGHIQYDMAYAAQPFLLRNGANEGFHEAVGEIMSLSAATPKHLKSIGLLSPDFQEDNETEINFLLKQALTIVGTLPFTYMLEKWRWMVFKGEIPKDQWMKKWWEMKREIVGVVEPVPHDETYCDPASLFHVSNDYSFIRYYTRTLYQFQFQEALCQAAKHEGPLHKCDISNSTEAGQKLFNMLRLGKSEPWTLALENVVGAKNMNVRPLLNYFEPLFTWLKDQNKNSFVGWSTDWSPYADQSIKVRISLKSALGDKAYEWNDNEMYLFRSSVAYAMRQYFLKVKNQMILFGEEDVRVANLKPRISFNFFVTAPKNVSDIIPRTEVEKAIRMSRSRINDAFRLNDNSLEFLGIQPTLGPPNQPPVSIWLIVFGVVMGVIVVGIVILIFTGIRDRKKT

SEQ ID NO: 51257 - protein, 40 aa, Homo sapiens
MTKKTRDLRRQLRKAVMDHVSDSFLETNVPLLVLIEAAKN

SEQ ID NO: 51258 - protein, 29 aa, Homo sapiens
MDWKEVLRRRLATPNTCPNKIYLVFSAAC

SEQ ID NO: 51259 - protein, 81 aa, Homo sapiens
  MOD_RES (1)..(1): Any amino acid
XKRGVCQQFCLPSHTVDPSEWAEEELGFDLDREVYPLVVHAVVDEGDEYFGHCHVLLGTFEKHTDGTFCVKPLKQKQVVSI

SEQ ID NO: 51260 - protein, 2817 aa, Homo sapiens
MGLPLARLAAVCLALSLAGGSELQTEGRTRNHGHNVCSTWGNFHYKTFDGDVFRFPGLCDYNFASDCRGSYKEFAVHLKRGPGQAEAPAGVESILLTIKDDTIYLTRHLAVLNGAVVSTPHYSPGLLIEKSDAYTKVYSRAGLTLMWNREDALMLELDTKFRNHTCGLCGDYNGLQSYSEFLSDGVLFSPLEFGNMQKINQPDVVCEDPEEEVAPASCSEHRAECERLLTAEAFADCQDLVPLEPYLRACQQDRCRCPGGDTCVCSTVAEFSRQCSHAGGRPGNWRTATLCPKTCPGNLVYLESGSPCMDTCSHLEVSSLCEEHRMDGCFCPEGTVYDDIGDSGCVPVSQCHCRLHGHLYTPGQEITNDCEQCVCNAGRWVCKDLPCPGTCALEGGSHITTFDGKTYTFHGDCYYVLAKGDHNDSYALLGELAPCGSTDKQTCLKTVVLLADKKKNVVVFKSDGSVLLNELQVNLPHVTASFSVFRPSSYHIMVSMAIGVRLQVQLAPVMQLFVTLDQASQGQVQGLCGNFNGLEGDDFKTASGLVEATGAGFANTWKAQSSCHDKLDWLDDPCSLNIESANYAEHWCSLLKKTETPFGRCHSAVDPAEYYKRCKYDTCNCQNNEDCLCAALSSYARACTAKGVMLWGWREHVCNKDVGSCPNSQVFLYNLTTCQQTCRSLSEADSHCLEGFAPVDGCGCPDHTFLDEKGRCVPLAKCSCYHRGLYLEAGDVVVRQEERCVCRDGRLHCRQIRLIGQSCTAPKIHMDCSNLTALATSKPRALSCQTLAAGYYHTECVSGCVCPDGLMDDGRGGCVVEKECPCVHNNDLYSSGAKIKVDCNTCTCKRGRWVCTQAVCHGTCSIYGSGHYITFDGKYYDFDGHCSYVAVQDYCGQNSSLGSFSIITENVPCGTTGVTCSKAIKIFMGRTELKLEDKHRVVIQRDEGHHVAYTTREVGQYLVVESSTGIIVIWDKRTTVFIKLAPSYKGTVCGLCGNFDHRSNNDFTTRDHMVVSSELDFGNSWKEAPTCPDVSTNPEPCSLNPHRRSWAEKQCSILKSSVFSICHSKVDPKPFYEACVHDSCSCDTGGDCECFCSAVASYAQECTKEGACVFWRTPDLCPIFCDYYNPPHECEWHYEPCGNRSFETCRTINGIHSNISVSYLEGCYPRCPKDRPIYEEDLKKCVTADKCGCYVEDTHYPPGASVPTEETCKSCVCTNSSQVVCRPEEGKILNQTQDGAFCYWEICGPNGTVEKHFNICSITTRPSTLTTFTTITLPTTPTTFTTTTTTTTPTSSTVLSTTPKLCCLWSDWINEDHPSSGSDDGDRETFDGVCGAPEDIECRSVKDPHLSLEQLGQKVQCDVSVGFICKNEDQFGNGPFGLCYDYKIRVNCCWPMDKCITTPSPPTTTPSPPPTSTTTLPPTTTPSPPTTTTTTPPPTTTPSPPITTTTTPPPTTTPSPPISTTTTPPPTTTPSPPTTTPSPPTTTPSPPTTTTTTPPPTTTPSPPTTTPITPPASTTTLPPTTTPSPPTTTTTTPPPTTTPITTTTTVTPTPTPTGTQTPTTTPITTTTTVTPTPTPTGTQTPTSTPITTTTTVTPTPTPTGTQTPTTTPITTTTTVTPTPTPTGTQTPTPTAITTTTTVTPTPTPTGTQTPTTTPITTTTTVTPTPTPTGTQSPTPTAITTTTTVTPTPTPTGTQTPTSTPITTTTTVTPTPTPTGTQTPTPTPISTTTTVTPTPTPTGTQTPTTTPITTTTTVTPTPTPTGTQTPTTVLITTTTTMTPTPTPTSTKSTTVTPITTTTTVTATPTPTGTQTPTMIPISTTTTVTPTPTPTTGSTGPPTHTSTAPIAELTTSNPPPESSTPQTSRSTSSPLTESTTLLSTLPPAIEMTSTAPPSTPTAPTTTSGGHTLSPPPSTTTSPPGTPTRGTTTGSSSAPTPSTVQTTTTSAWTPTPTPLSTPSIIRTTGLRPYPSSVLICCVLNDTYYAPGEEVYNGTYGDTCYFVNCSLSCTLEFYNWSCPSTPSPTPTPSKSTPTPSKPSSTPSKPTPGTKPPECPDFDPPRQENETWWLCDCFMATCKYNNTVEIVKVECEPPPMPTCSNGLQPVRVEDPDGCCWHWECDCYCTGWGDPHYVTFDGLYYSYQGNCTYVLVEEISPSVDNFGVYIDNYHCDPNDKVSCPRTLIVRHETQEVLIKTVHMMPMQVQVQVNRQAVALPYKKYGLEVYQSGINYVVDIPELGVLVSYNGLSFSVRLPYHRFGNNTKGQCGTCTNTTSDDCILPSGEIVSNCEAAADQWLVNDPSKPHCPHSSSTTKRPAVTVPGGGKTTPHKDCTPSPLCQLIKDSLFAQCHALVPPQHYYDACVFDSCFMPGSSLECASLQAYAALCAQQNICLDWRNHTHGACLVECPSHREYQACGPAEEPTCKSSSSQQNNTVLVEGCFCPEGTMNYAPGFDVCVKTCGCVGPDNVPREFGEHFEFDCKNCVCLEGGSGIICQPKRCSQKPVTHCVEDGTYLATEVNPADTCCNITVCKCNTSLCKEKPSVCPLGFEVKSKMVPGRCCPFYWCESKGVCVHGNAEYQPGSPVYSSKCQDCVCTDKVDNNTLLNVIACTHVPCNTSCSPGFELMEAPGECCKKCEQTHCIIKRPDNQHVILKPGDFKSDPKNNCTFFSCVKIHNQLISSVSNITCPNFDASICIPGSITFMPNGCCKTCTPRNETRVPCSTVPVTTEVSYAGCTKTVLMNHCSGSCGTFVMYSAKAQALDHSCSCCKEEKTSQREVVLSCPNGGSLTHTYTHIESCQCQDTVCGLPTGTSRRARRSPRHLGSG

SEQ ID NO: 51261 - protein, 4588 aa, Homo sapiens
METKENRWVPVTVLPGCVGCRTVAALASWTVRDVKERIFAETGFPVSEQRLWRGGRELSDWIKIGDLTSKNCHLFVNLQSKGLKGGGRFGQTTPPLVDFLKDILRRYPEGGQILKELIQNAEDAGATEVKFLYDETQYGTETLWSKDMAPYQGPALYVYNNAVFTPEDWHGIQEIARSRKKDDPLKVGRFGIGFNSVYHITDVPCIFSGDQIGMLDPHQTLFGPHESGQCWNLKDDSKEISELSDQFAPFVGIFGSTKETFINGNFPGTFFRFPLRLQPSQLSSNLYNKQKVLELFESFRADADTVLLFLKSVQDVSLYVREADGTEKLVFRVTSSESKALKHERPNSIKILGTAISNYCKKTPSNNITCVTYHVNIVLEEESTKDAQKTSWLVCNSVGGRGISSKLDSLADELKFVPIIGIAMPLSSRDDEAKGATSDFSGKAFCFLPLPPGEESSTGLPVHISGFFGLTDNRRSIKWRELDQWRDPAALWNEFLVMNVVPKAYATLILDSIKRLEMEKSSDFPLSVDVIYKLWPEASKVKVHWQPVLEPLFSELLQNAVIYSISCDWVRLEQVYFSELDENLEYTKTVLNYLQSSGKQIAKVPGNVDAAVQLTAASGTTPVRKVTPAWVRQVLRKCAHLGCAEEKLHLLEFVLSDQAYSELLGLELLPLQNGNFVPFSSSVSDQDVIYITSAEYPRSLFPSLEGRFILDNLKPHLVAALKEAAQTRAQQQLWGYSGRPCTQLQLLNPERFARLIKEVMNTFWPGRELIVQWYPFDENRNHPSVSWLKMVWKNLYIHFSEDLTLFDEMPLIPRTILEEGQTCVELIRLRIPSLVILDDESEAQLPEFLADIVQKLGGFVLKKLDASIQHPLIKKYIHSPLPSAVLQIMEKMPLQKLCNQITSLLPTHKDALRKFLASLTDSSEKEKRIIQELAIFKRINHSSDQGISSYTKLKGCKVLHHTAKLPADLRLSISVIDSSDEATIRLANMLKIEQLKTTSCLKLVLKDIENAFYSHEEVTQLMLWVLENLSSLKNENPNVLEWLTPLKFIQISQEQMVSAGELFDPDIEVLKDLFCNEEGTYFPPSVFTSPDILHSLRQIGLKNEASLKEKDVVQVAKKIEALQVGACPDQDVLLKKAKTLLLVLNKNHTLLQSSEGKMTLKKIKWVPACKERPPNYPGSLVWKGDLCNLCAPPDMCDVGHAILIGSSLPLVESIHVNLEKALGIFTKPSLSAVLKHFKIVVDWYSSKTFSDEDYYQFQHILLEIYGFMHDHLNEGKDSFRALKFPWVWTGKKFCPLAQAVIKPIHDLDLQPYLHNVPKTMAKFHQLFKVCGSIEELTSDHISMVIQKIYLKSDQDLSEQESKQNLHLMLNIIRWLYSNQIPASPNTPVPIHHSKNPSKLIMKPIHECCYCDIKVDDLNDLLEDSVEPIILVHEDIPMKTAEWLKVPCLSTRLINPENMGFEQSGQREPLTVRIKNILEEYPSVSDIFKELLQNADDANATECSFLIDMRRNMDIRENLLDPGMAACHGPALWSFNNSQFSDSDFVNITRLGESLKRGEVDKVGKFGLGFNSVYHITDIPIIMSREFMIMFDPNINHISKHIKDKSNPGIKINWSKQQKRLRKFPNQFKPFIDVFGCQLPLTVEAPYSYNGTLFRLSFRTQQEAKVSEVSSTCYNTADIYSLVDEFSLCGHRLIIFTQSVKSMYLKYLKIEETNPSLAQDTVIIKKKSCSSKALNTPVLSVLKEAAKLMKTCSSSNKKLPSDEPKSSCILQITVEEFHHVFRRIADLQSPLFRGPDDDPAALFEMAKSGQSKKPSDELSQKTVECTTWLLCTCMDTGEALKFSLSESGRRLGLVPCGAVGVQLSEIQDQKWTVKPHIGEVFCYLPLRIKTGLPVHINGCFAVTSNRKEIWKTDTKGRWNTTFMRHVIVKAYLQVLSVLRDLATSGELMDYTYYAVWPDPDLVHDDFSVICQGFYEDIAHGKGKELTKVFSDGSTWVSMKNVRFLDDSILKRRDVGSAAFKIFLKYLKKTGSKNLCAVELPSSVKLGFEEAGCKQILLENTFSEKQFFSEVFFPNIQEIEAELRDPLMIFVLNEKVDEFSGVLRVTPCIPCSLEGHPLVLPSRLIHPEGRVAKLFDIKDGRFPYGSTQDYLNPIILIKLVQLGMAKDDILWDDMLERAVSVAEINKSDHVAACLRSSILLSLIDEKLKIRDPRAKDFAAKYQTIRFLPFLTKPAGFSLDWKGNSFKPETMFAATDLYTAEHQDIVCLLQPILNENSHSFRGCGSVSLAVKEFLGLLKKPTVDLVINQLKEVAKSVDDGITLYQENITNACYKYLHEALMQNEITKMSIIDKLKPFSFILVENAYVDSEKVSFHLNFEAAPYLYQLPNKYKNNFRELFETVGVRQSCTVEDFALVLESIDQERGTKQITEENFQLCRRIISEGIWSLIREKKQEFCEKNYGKILLPDTNLMLLPAKSLCYNDCPWIKVKDTTVKYCHADIPREVAVKLGAVPKRHKALERYASNVCFTTLGTEFGQKEKLTSRIKSILNAYPSEKEMLKELLQNADDAKATEICFVFDPRQHPVDRIFDDKWAPLQGPALCVYNNQPFTEDDVRGIQNLGKGTKEGNPYKTGQYGIGFNSVYHITDCPSFISGNDILCIFDPHARYAPGATSISPGRMFRDLDADFRTQFSDVLDLYLGTHFKLDNCTMFRFPLRNAEMAKVSEISSVPASDRMVQNLLDKLRSDGAELLMFLNHMEKISICEIDKSTGALNVLYSVKGKITDGDRLKRKQFHASVIDSVTKKRQLKDIPVQQITYTMDTEDSEGNLTTWLICNRSGFSSMEKVSKSVISAHKNQDITLFPRGGVAACITHNYKKPHRAFCFLPLSLETGLPFHVNGHFALDSARRNLWRDDNGVGVRSDWNNSLMTALIAPAYVELLIQLKKRYFPGSDPTLSVLQNTPIHVVKDTLKKFLSFFPVNRLDLQPDLYCLVKALYNCIHEDMKRLLPVVRAPNIDGSDLHSAVIITWINMSTSNKTRPFFDNLLQDELQHLKNADYNITTRKTVAENVYRLKHLLLEIGFNLVYNCDETANLYHCLIDADIPVSYVTPADIRSFLMTFSSPDTNCHIGKLPCRLQQTNLKLFHSLKLLVDYCFKDAEENEIEVEGLPLLITLDSVLQTFDAKRPKFLTTYHELIPSRKDLFMNTLYLKYSNILLNCKVAKVFDISSFADLLSSVLPREYKTKSCTKWKDNFASESWLKNAWHFISESVSVKEDQEETKPTFDIVVDTLKDWALLPGTKFTVSANQLVVPEGDVLLPLSLMHIAVFPNAQSDKVFHALMKAGCIQLALNKICSKDSAFVPLLSCHTANIESPTSILKALHYMVQTSTFRAEKLVENDFEALLMYFNCNLNHLMSQDDIKILKSLPCYKSISGRYVSIGKFGTCYVLTKSIPSAEVEKWTQSSSSAFLEEKIHLKELYEVIGCVPVDDLEVYLKHLLPKIENLSYDAKLEHLIYLKNRLSSAEELSEIKEQLFEKLESLLIIHDANSRLKQAKHFYDRTVRVFEVMLPEKLFIPNDFFKKLEQLIKPKNHVTFMTSWVEFLRNIGLKYILSQQQLLQFAKEISVRANTENWSKETLQNTVDILLHHIFQERMDLLSGNFLKELSLIPFLCPERAPAEFIRFHPQYQEVNGTLPLIKFNGAQVNPKFKQCDVLQLLWTSCPILPEKATPLSIKEQEGSDLGPQEQLEQVLNMLNVNLDPPLDKVINNCRNICNITTLDEEMVKTRAKVLRSIYEFLSAEKREFRFQLRGVAFVMVEDGWKLLKPEEVVINLEYESDFKPYLYKLPLELGTFHQLFKHLGTEDIISTKQYVEVLSRIFKNSEGKQLDPNEMRTVKRVVSGLFRSLQNDSVKVRSDLENVRDLALYLPSQDGRLVKSSILVFDDAPHYKSRIQGNIGVQMLVDLSQCYLGKDHGFHTKLIMLFPQKLRPRLLSSILEEQLDEETPKVCQFGALCSLQGRLQLLLSSEQFITGLIRIMKHENDNAFLANEEKAIRLCKALREGLKVSCFEKLQTTLRVKGFNPIPHSRSETFAFLKRFGNAVILLYIQHSDSKDINFLLALAMTLKSATDNLISDTSYLIAMLGCNDIYRIGEKLDSLGVKYDSSEPSKLELPMPGTPIPAEIHYTLLMDPMNVFYPGEYVGYLVDAEGGDIYGSYQPTYTYAIIVQEVEREDADNSSFLGKIYQIDIGYSEYKIVSSLDLYKFSRPEESSQSRDSAPSTPTSPTEFLTPGLRSIPPLFSGRESHKTSSKHQSPKKLKVNSLPEILKEVTSVVEQAWKLPESERKKIIRRLYLKWHPDKNPENHDIANEVFKHLQNEINRLEKQAFLDQNADRASRRTFSTSASRFQSDKYSFQRFYTSWNQEATSHKSERQQQNKEKCPPSAGQTYSQRFFVPPTFKSVGNPVEARRWLRQARANFSAARNDLHKNANEWVCFKCYLSTKLALIAADYAVRGKSDKDVKPTALAQKIEEYSQQLEGLTNDVHTLEAYGVDSLKTRYPDLLPFPQIPNDRFTSEVAMRVMECTACIIIKLENFMQQKV

SEQ ID NO: 51262 - protein, 96 aa, Homo sapiens
IYSPDHSSNNFSSSPSTPVGSPQGLAGTSQWPRAGAPGALSPSYDGGLHGLVGGSHPEDGLAGSTSLMHNHAALPSQPGTLPDLSRPPDSYSGLGR

SEQ ID NO: 51263 - protein, 109 aa, Homo sapiens
QHGALSRYLFRCCYCCFWCLDKYLLHLNQNAYTTTAINGTDFCTSAKDAFKILSKNSSHFTSINCFGDFIIFLGKSFVKRSNKLNNARAQQDKHSLRNEEGTELQAIVR

SEQ ID NO: 51264 - protein, 393 aa, Homo sapiens
MSQPGQKPAASPRPRRAAAARRTHEHVSEKTSESPSKPGEKKGSDEKKAASLGSSQSSRTYAGGTASATKVSASSGATSKSSSMNPTETKAVKTEPEKKSQSTKLSVVHEKKSQEGKPKEHTEPKSLPKQASDTGSNDAHNKKAVSRSAEQQPSEKSTEPKTKPQDMISAGGESVAGITAISGKPGDKKKEKKSLTPAVPVESKPDKPSGKSGMDAALDDLIDTLGGPEETEEENTTYTGPEVSDPMSSTYIEELGKREVTIPPKYRELLAKPIGPDDAIDALSSDFTCGSPTAAGKKTEKEESTEVLKAQSAGTVRSAAPPQEKKRKVEKDTMSDQALEALSASLGTRQAEPELDLRSIKEVDEAKAKEEKLEKCGEDDETIPSEYRLKPAT

SEQ ID NO: 51265 - protein, 184 aa, Homo sapiens
MNGDLELDHDAPPENHTICVKYITSFTAAFSFSLETQLTIGYGTMFPSGDCPSAIALLAIQMLLGLMLEAFITGAFVAKIARPKNRAFSIRFTDTAVVAHMDGKPNLIFQVANTRPSPLTSVRVSAVLYQERENGKLYQTSVDFHLDGISSDECPFFIFPLTYYHSITPSSPLATLLQHENPSH

SEQ ID NO: 51266 - protein, 181 aa, Homo sapiens
MMLKGITRLISRIHKLDPGRFLHMGTQARQSIAAHLDNQVPVESPRAISRTNENDPAKHGDQHEGQHYNISPQDLETVFPHGLPPRFVMQVKTFSEACLMDWLILHIPDAHLWVKNCRDLLQSSYNKQRFDQPLEASTWLKNFKTTNERFLNQGITRVRNATDAVGIVLKELKRQSSLGMF

SEQ ID NO: 51267 - protein, 242 aa, Homo sapiens
MASSPDMDLATVSALRKMGVKLTPHNKETVQHSDVLFLAVKPHIIPFILDEIGADIEDRHIVVSCAAGVTISSIEKKLSAFRPAPRVIRCMTNTPVVVREGATVYATGTHAQVEDGRLMEQLLSSVGFCTEVEEDLIDAVTGLSGSGPAYAFTALDALADGGVKMGLPRRLAVRLGAQALLGAAKMLLHSEQHPGQLKDNVSSPGGATIHALHVLESGGFRSLLINAVEASCIRTRELQSMA

SEQ ID NO: 51268 - protein, 24 aa, Homo sapiens
MDARRMKKEEGLTENTGLPRKLLE

SEQ ID NO: 51269 - protein, 197 aa, Homo sapiens
MALRVVRSVRALLCTLRAVPSPAAPCPPRPWQLGVGAVRTLRTGPALLSVRKFTEKHEWVTTENGIGTVGISNFAQEALGDVVYCSLPEVGTKLNKQDEFGALESVKAASELYSPLSGEVTEINEALAENPGLVNKSCYEDALEVKRNETAGLRSRCQQGCIPSQGSRGESVHLPFPASRGCLHSLACGPFLHLQNQ

SEQ ID NO: 51270 - protein, 244 aa, Homo sapiens [sequence omitted]

SEQ ID NO: 51271 - protein, 87 aa, Homo sapiens
LAAVEKLHHLQPSVIENCVAAAGFSVGEFAALVFAGAMEFAEGTGRSLVLCKAVVLGSLGVRDTAKNDTGPTQVMGREHMDRGDIGT

SEQ ID NO: 51272 - protein, 913 aa, Homo sapiens
MQSRRARPRREVIQNSKEVLSLLQEKNPAFKPVLAIIQAGDDNLMQEINQNLAEEAGLNITHICLPPDSSEAEIIDEILKINEDTRVHGLALQISENLFSNKVLNALKPEKDVDGVTDINLGKLVRGDAHECFVSPVAKAVIELLEKSVGVNLDGKKILVVGAHGSLEAALQCLFQRKGSMTMSIQWKTRQLQSKLHEADIVVLGSPKPEEIPLTWIQPGTTVLNCSHDFLSGKVGCGSPRIHFGGLIEEDDVILLAAALRIQNMVSSGRRWLREQQHRRWRLHCLKLQPLSPVPSDIEISRGQTPKAVDVLAKEIGLLADEIEIYGKSKAKVRLSVLERLKDQADGKYVLVAGITPTPLGEGKSTVTIGLVQALTAHLNVNSFACLRQPSQGPTFGVKGGAAGGGYAQVIPMEEFNLHLTGDIHAITAANNLLAAAIDTRILHENTQTDKALYNRLVPLVNGVREFSEIQLARLKKLGINKTDPSTLTEEEVSKFARLDIDPSTITWQRVLDTNDRFLRKITIGQGNTEKGHYRQAQFDIAVASEIMAVLALTDSLADMKARLGRMVVASDKSGQPVTADDLGVTGALTVLMKDAIKPNLMQTLEGTPVFVHAGPFANIAHGNSSVLADKIALKLVGEEGFVVTEAGFGADIGMEKFFNIKCRASGLVPNVVVLVATVRALKMHGGGPSVTAGVPLKKEYTEENIQLVADGCCNLQKQIQITQLFGVPVVVALNVFKTDTRAEIDLVCELAKRAGAFDAVPCYHWSVGGKGSVDLARAVREAASKRSRFQFLYDVQVPIVDKIRTIAQAVYGAKDIELSPEAQAKIDRYTQQGFGNLPICMAKTHLSLSHQPDKKGVPRDFILPISDVRASIGAGFIYPLVGTMSTMPGLPTRPCFYDIDLDTETEQVKGLF

SEQ ID NO: 51273 - protein, 267 aa, Homo sapiens
MVIRSTVWLGFPNFVDSVSDMNHTEIWPAAFCVGSAMWIQLLYSACFWWLFCYAVDAYLVIRRSAGLSTILLYHIMAWGLATLLCVEGAAMLYYPSVSRCERGLDHAIPHYVTMYLPLLLVLVANPILFQKTVTAVASLLKGRQGIYTENERRMGAVIKIRFFKIMLVLIICWLSNIINESLLFYLEMQTDINGGSLKPVRTAAKTTWFIMGILNPAQGFLLSLAFYGWTGCSLGFQSPRKEIQWESLTTSAAEGAHPSPLMPHENP

SEQ ID NO: 51274 - protein, 109 aa, Homo sapiens
  MOD_RES (1)..(1): Any amino acid
XPYQPQNNHDSLLSRWQNRTMENLVELHNKAPVWNSDTQSYVLNFRGRVTQASVKNFQIVHKNDPDYIVMQFGRVADDVFTLDYNYPLCAVQAFGIGLSSFDRVPLTAI

SEQ ID NO: 51275 - protein, 114 aa, Homo sapiens
MVKETQYYDILGVKPSASPEEIKKAYRKLALKYHPDKNPDEGEKFKLISQAYEVLSDPKKRDVYDQGGEQAIKEGGSGSPSFSSPMDIFDMFFGGGGRMARERRECCTPVICNS

SEQ ID NO: 51276 - protein, 163 aa, Homo sapiens
  MOD_RES (1)..(1): Any amino acid
XKRTLNDSRLLREDVEFQPLTLMVLVGPGAGGAAGSSEMQRVPARVLDTDTITQVKEKVLDQVYKGTPFSQRPSVHALDLEWRSGLAGHLTLSDEDLTSVTQNHWKRLNTLQHYKVPDGATVGLVPQLHRGSTISQSLAQRCPLGESESLGPDLGPLESRLGR

SEQ ID NO: 51277 - protein, 49 aa, Homo sapiens
MCDLRRPAAGGMMDLAYVCEWEKWSKSTHCPSVPLACAWSCRNLIAFTM

SEQ ID NO: 51278 - protein, 399 aa, Homo sapiens
MASEVAEEWAQGTFKLNSNDEDIHTANERRLKELIGATAGKLHTGRSRNDQVVTDLRLWMRQTCSTLSGLLWELIRTMVDRAEAERDVLFPGYTHLQRAQPIRWSHWILSHAVALTRDSERLLEVRKRINVLPLGSGAIAGNPLGVDRELLRAELNFGAITLNSMDATSERDFVAEFLFWASLCMTHLSRMAEDLILYCTKEFSFVQLSDAYSTGSSLMPQKKNPDSLELIRSKAGRVFGRCAGLLMTLKGLPSTYNKDLQEDKEAVFEVSDTMSAVLQVATGVISTLQIHQENMGQALSPDMLATDLAYYLVRKGMPFRQAHEASGKAVFMAETKGVALNQLSLQELQTISPLFSGDVICVWDYGHSVEQYGALGGTARSSVDWQIRQVRALLQAQQA

SEQ ID NO: 51279 - protein, 103 aa, Homo sapiens
MTKHPPNRRGISFEVGAQLEARDRLKNWYPAHIEDIDYEEGKVLIHFKRWNHRYDEWFCWDSPYLRPLEKIQLRKEGLHEEDGSSRRFLALSPSLKCSGAVLA

SEQ ID NO: 51280 - protein, 166 aa, Homo sapiens
MAGLTAAAPRPGVLLLLLSILHPSRPGGVPGAIPGGVPGGVFYPGAGLGALGGGALGPGGKPLKPVPGGLAGAGLGAGLGAFPAVTFPGALVPGGVADAAAAYKAAKAGVGPFGGPQPGVPLGYPIKAPKLPGGYGLPYTTGKLPYGYGPGGVAGAAGKAGYPTGT

SEQ ID NO: 51281 - protein, 353 aa, Homo sapiens
  MOD_RES (1)..(1): Any amino acid
XALERRSSLPLDHGSPAQENPESEKSSPAVSRSKTFTGRFKQQTPSRTHKERSTSLSALVRSSPHGSLGSVVNSLSGLKLDNILSGPKIDVLKSGMKQAATVASKMWVAVASAYSYSDDEEETNRDYSFPAGLEDHILGENISPNTSISGLVPSELTQSNTSLGSSSSSGDVGKLHYPTGEVPFPRGMKGQDFEKSDHGSSQNTSMSSIYQNCAMEVLMSSCSQCRACGALVYDEEIMAGWTADDSNLNTACPFCKSNFLPLLNIEFKDLRGSASFFLKPSTSGDSLQSGSIPLANESLEHKPVSSLAEPDLINFMDFPKHNQIITEETGSAVEPRYQRVQRPLYVVINGVPL

SEQ ID NO: 51282 - protein, 206 aa, Homo sapiens
MSARKSSDASACSSSEISVKEFLAKAKEDFLKKWENPTQNNAGLEDFERKKTLGTGSFGRVMLVKHKATEQYYAMKILDKQKVVKLKQIEHTLNEKRILQAVNFPFLVRLEYAFKDNSNLYMVMEYVPGGEMFSHLRRIGRFSEPHARFYAAQIVLTFEYLHSLDLIYRDLKPENLLIDHQGYIQVTDFGFAKRVKGRTWTLCGTP

SEQ ID NO: 51283 - protein, 78 aa, Homo sapiens
MRLLGAVQKGWIRCNTTIRKSGFGGITMLFTGYFVLCCSWSFRRLKKLCRPLPWKSTVPPCIGVAKTTGDCRSKTCLD

SEQ ID NO: 51284 - protein, 91 aa, Homo sapiens
  MOD_RES (1)..(1): Any amino acid
XVMRNVTQQINERKRRLENIDKIAQWQASVLDWEGEDILDRSSELIYTGEMAWIYQPYGRNQQRVFFLFDHQMVLCKKALKFLKTRRGRLQ

SEQ ID NO: 51285 - protein, 2062 aa, Homo sapiens
FMQHPKNFGLIASFLERKTVAECVLYYYLTKKNENYKSLVRRSYRRRGKSQQQQQQQQQQQQQQQQQPMPRSSQEEKDEKEKEKEAEKEEEKPEVENDKEDLLKEKTDDTSGEDNDEKEAVASKGRKTANSQGRRKGRITRSMANEANSEEAITPQQSAELASMELNESSRWTEEEMETAKKGLLEHGRNWSAIARMVGSKTVSQCKNFYFNYKKRQNLDEILQQHKLKMEKERNARRKKKKAPAAASEEAAFPPVVEDEEMEASGVSGNEEEMVEEAEATVNNSSDTESIPSPHTEAAKDTGQNGPKPPATLGADGPPPGPPTPPPEDIPAPTEPTPASEATGAPTPPPAPPSPSAPPPVVPKEEKEEETAAAPPVEEGEEQKPPAAEELAVDTGKAEEPVKSECTEEAEEGPAKGKDAEAAEATAEGALKAEKKEGGSGRATTAKSSGAPQDSDSSATCSADEVDEAEGGDKNRLLSPRPSLLTPTGDPRANASPQKPLDLKQLKQRAAAIPPIQVTKVHEPPREDAAPTKPAPPAPPPPQNLQPESDAPQQPGSSPRGKSRSPAPPADKEAEKPVFFPAFAAEAQKLPGDPPCWTSGLPFPVPPREVIKASPHAPDPSAFSYAPPGHPLPLGLHDTARPVLPRPPTISNPPPLISSAKHPSVLERQIGAISQGMSVQLHVPYSEHAKAPVGPVTMGLPLPMDPKKLAPFSGVKQEQLSPRGQAGPPESLGVPTAQEASVLRGTALGSVPGGSITKGIPSTRVPSDSAITYRGSITHGTPADVLYKGTITRIIGEDSPSRLDRGREDSLPKGHVIYEGKKGHVLSYEGGMSVTQCSKEDGRSSSGPPHETAAPKRTYDMMEGRVGRAISSASIEGLMGRAIPPERHSPHHLKEQHHIRGSITQGIPRSYVEAQEDYLRREAKLLKREGTPPPPPPSRDLTEAYKTQALGPLKLKPAHEGLVATVKEAGRSIHEIPREELRHTPELPLAPRPLKEGSITQGTPLKYDTGASTTGSKKHDVRSLIGSPGRTFPPVHPLDVMADARALERACYEESLKSRPGTASSSGGSIARGAPVIVPELGKPRQSPLTYEDHGAPFAGHLPRGSPVTTREPTPRLQEGSLSSSKASQDRKLTSTPREIAKSPHSTVPEHHPHPISPYEHLLRGVSGVDLYRSHIPLAFDPTSIPRGIPLDAAAAYYLPRHLAPNPTYPHLYPPYLIRGYPDTAALENRQTIINDYITSQQMHHNAATAMAQRADMLRGLSPRESSLALNYAAGPRGIIDLSQVPHLPVLVPPTPGTPATAMDRLAYLPTAPQPFSSRHSSSPLSPGGPTHLTKPTTTSSSERERDRDRERDRDREREKSILTSTTTVEHAPIWRPGTEQSSGSSGGGGGSSSRPASHSHAHQHSPISPRTQDALQQRPSVLHNTGMKGIITAVEPSTPTVLRSTSTSSPVRPAATFPPATHCPLGGTLDGVYPTLMEPVLLPKEAPRVARPERPRADTGHAFLAKPPARSGLEPASSPSKGSEPRPLVPPVSGHATIARTPAKNLAPHHASPDPPAPPASASDPHREKTQSKPFSIQELELRSLGYHGSSYSPEGVEPVSPVSSPSLTHDKGLPKHLEELDKSHLEGELRPKQPGPVKLGGEAAHLPHLRPLPESQPSSSPLLQTAPGVKGHQRVVTLAQHISEVITQDYTRHHPQQLSAPLPAPLYSFPGASCPVLDLRRPPSDLYLPPPDHGAPARGSPHSEGGKRSPEPNKTSVLGGGEDGIEPVSPPEGMTEPGHSRSAVYPLLYRDGEQTEPSRMGSKSPGNTSQPPAFFSKLTESNSAMVKSKKQEINKKLNTHNRNEPEYNISQPGTEIFNMPAITGTGLMTYRSQAVQEHASTNMGLEAIIRKALMGKYDQWEESPPLSANAFNPLNASASLPAAMPITAADGRSDHTLTSPGGGGKAKVSGRPSSRKAKSPAPGLASGDRPPSVSSVHSEGDCNRRTPLTNRVWEDRPSSAGSTPFPYNPLIMRLQAGVMASPPPPGLPAGSGPLAGPHHAWDEEPKPLLCSQYETLSDSE

SEQ ID NO: 51286 - protein, 191 aa, Homo sapiens
MANFQNFKPRSNREEMKFHEFVEKLQDIQQRGGEERLYLQQTLNDTVGRKIVMDFLGFNWNWINKQQGKRGWGQLTSNLLLIGMEGNVTPAHYDEQQNFFAQIKGYKRCILFPPDQFECLYPYPVHHPCDRQSQVDFDNPDYERFPNFQNVVGYETVVGPGDVLYIPMYWWHHIESLLNGGITITVNFWYK

SEQ ID NO: 51287 - protein, 144 aa, Homo sapiens
LVHKWAWTKDDVILHVLPLHHVHGVVNALLCPLWVGATCVMMPEFSPQQVWEKFLSSETPRINVFMAVPTIYTKLMEYYDRHFTQPHAQDFLRAVCEEKIRFRGDPTAWSTGAHCLRKPTEGSLLLHHPRRGRREGDQGPQPML

SEQ ID NO: 51288 - protein, 45 aa, Homo sapiens
MEFVKCLGHPEEFYNLVRFRIGGKRKVMPKMDQITSHEGRFWNEV

SEQ ID NO: 51289 - protein, 148 aa, Homo sapiens
  MOD_RES (1)..(1): Any amino acid
XMIAIYGTNFCTSARNAFFLLMRNIIRVAVLDKVTDFLFLLGKLLIVGSVGILAFFFFTHRIRIVQDTAPPLNYYWVPILTVIVGSYLIAHGFFSVYGMCVDTLFLCFCEDLERNDGSQERPYFMSPELRDILLKGSAEEGKRAEAEE

SEQ ID NO: 51290 - protein, 127 aa, Homo sapiens
MKYLRHRRPNATLILAIGAFTLLLFSLLVSPPTCKVQEQPPAIPEALAWPTPPTRPAPAPCHANTSMVTHPDFATQPQHVQNFLLYRHCRHFPLLQDVPPSKCAQPVFLLLVIKSSPSNYVRRELLR

SEQ ID NO: 51291 - protein, 97 aa, Homo sapiens
MLLLLLLAPLFLRPPGAGGAQTPNATSEGCQIIHPPWEGGIRYRGLTRDQVKAINFLPVDYEIEYVCRGEREVVGPKVRKCLANGSWTDMDTPSRCV

SEQ ID NO: 51292 - protein, 1391 aa, Homo sapiens
MAALLRSARWLLRAGAAPRLPLSLRLLPGGPGRLHAASYLPAARAGPVAGGLLSPARLYAIAAKEKDIQEESTFSSRKISNQFDWALMRLDLSVRRTGRIPKKLLQKVFNDTCRSGGSHALLLLRSCGSLLPELKLEERTEFAHRIWDTLQKLGAVYDVSHYNALLKVYLQNEYKFSPTDFLAKMEEANIQPNRVTYQRLIASYCNVGDIEGASKILGFMKTKDLPVTEAVFSALVTGHARAGDMENAENILTVMRDAGIEPGPDTYLALLNAYAEKGDIDHVKQTLEKVEKSELHLMDRDLLQIIFSFSKAGYPQYVSEILEKVTCERRYIPDAMNLILLLVTEKLEDVALQILLACPVSKEDGPSVFGSFFLQHCVTMNTPVEKLTDYCKKLKEVQMHSFPLQFTLHCALLANKTDLAKALMKAVKEEGFPIRPHYFWPLLVGRRKEKNVQGIIEILKGMQELGVHPDQETYTDYVIPCFDSVNSARAILQENGCLSDSDMFSQAGLRSEAANGNLDFVLSFLKSNTLPISLQSIRSSLLLGFRRSMNINLWSEITELLYKDGRYCQEPRGPTEAVGYFLYNLIDSMSDSEVQAKEEHLRQYFHQLEKMNVKIPENIYRGIRNLLESYHVPELIKDAHLLVESKNLDFQKTVQLTSSELESTLETLKAENQPIRDVLKQLILVLCSEENMQKALELKAKYESDMVTGGYAALINLCCRHDKVEDALNLKEEFDRLDSSAVLDTGKYVGLVRVLAKHGKLQDAINILKEMKEKDVLIKDTTALSFFHMLNGAALRGEIETVKQLHEAIVTLGLAEPSTNISFPLVTVHLEKGDLSTALEVAIDCYEKYKVLPRIHDVLCKLVEKGETDLIQKAMDFVSQEQGEMVMLYDLFFAFLQTGNYKEAKKIIETPGIRARSARLQWFCDRCVANNQVETLEKLVELTQKLFECDRDQMYYNLLKLYKINGDWQRADAVWNKIQEENVIPREKTLRLLAEILREGNQEVPFDVPELWYEDEKHSLNSSSASTTEPDFQKDILIACRLNQKKGAYDIFLNAKEQNIVFNAETYSNLIKLLMSEDYFTQAMEVKAFAETHIKGFTLNDAANSRLIITQVRRDYLKEAVTTLKTVLDQQQTPSRLAVTRVIQALAMKGDVENIEVVQKMLNGLEDSIGLSKMVFINNIALAQIKNNNIDAAIENIENMLTSENKVIEPQYFGLAYLFRKVIEEQLEPAVEKISIMAERLANQFAIYKPVTDFFLQLVDAGKVDDARALLQRCGAIAEQTPILLLFLLRNSRKQGKASTVKSVLELIPELNEKEEAYNSLMKSYVSEKDVTSAKALYEHLTAKNTKLDDLFLKRYASLLKYAGEPVPFIEPPESFEFYAQQLRKLRENSS

SEQ ID NO: 51293 - protein, 51 aa, Homo sapiens
MIPPSSPREDGVDGLPKEAVGAEQPPSPASTSSQESKEQMLSMDCAAKPVR

SEQ ID NO: 51294 - protein, 409 aa, Homo sapiens
MQPSSLLPLALCLLAAPASALVRIPLHKFTSIRRTMSEVGGSVEDLIAKGPVSKYSQAVPAVTEGPIPEVLKNYMDAQYYGEIGIGTPPQCFTVVFDTGSSNLWVPSIHCKLLDIACWIHHKYNSDKSSTYVKNGTSFDIHYGSGSLSGYLSQDTVSVPCQSASSASALGGVKVERQVFGEATKQPGITFIAAKFDGILGMAYPRISVNNVLPVFDNLMQQKLVDQNIFSFYLSRDPDAQPGGELMLGGTDSKYYKGSLSYLNVTRKAYWQVHLDQVEVASGLTLCKEGCEAIVDTGTSLMVGPVDEVRELQKAIGAVPLIQGEYMIPCEKVSTLPAITLKLGGKGYKLSPEDYTLKAGKTLCLSGFMGMDIPPPSGPLWILGDVFIGRYYTVFDRDNNRVGFAEAARL

SEQ ID NO: 51295 - protein, 184 aa, Homo sapiens
  MOD_RES (1)..(1): Any amino acid
XAFLVNTARGGLVDEKALAQALKEGRIRGAALDVHESEPFSFSQGPLKDAPNLICTPHAAWYSEQASIEMREEAAREIRRAITGRIPDSLKNCVNKDHLTAATHWASMDPAVVHPELNGAAYSRYPPGVVGVAPTGIPAAVEGIVPSAMSLSHGLPPVAHPPHAPSPGQTVKPEADRDHASDQL

SEQ ID NO: 51296 - protein, 497 aa, Homo sapiens
MHAINGFVFGNLPELNMCAQKRVAWHLFGMGNEIDVHTAFFHGQMLTTRGHHTDVANIFPATFVTAEMVPWEPGTWLISCQVNSHFRDGMQALYKVKSCSMAPPVDLLTGKVRQYFIEAHEIQWDYGPMGHDGSTGKNLREPGSISDKFFQKSSSRIGGTYWKVRYEAFQDETFQEKMHLEEDRHLGILGPVIRAEVGDTIQVVFYNRASQPFSMQPHGVFYEKDYEGTVYNDGSSYPGLVAKPFEKVTYRWTVPPHAGPTAQDPACLTWMYFSAADPIRDTNSGLVGPLLVCRAGALGADGKQKGVDKEFFLLFTVLDENKSWYSNANQAAAMLDFRLLSEDIEGFQDSNRMHAINGFLFSNLPRLDMCKGDTVAWHLLGLGTETDVHGVMFQGNTVQLQGMRKGAAMLFPHTFVMAIMQPDNLGTFEIYCQAGSHREAGMRAIYNVSQCPGHQATPRQRYQAARIYYIMAEEVEWDYCPDRSWEREWHNQSEKDS

SEQ ID NO: 51297 - protein, 103 aa, Homo sapiens [sequence omitted]

SEQ ID NO: 51298 - protein, 865 aa, Homo sapiens [sequence omitted]

SEQ ID NO: 51299 - protein, 306 aa, Homo sapiens
  MOD_RES (1)..(1): Any amino acid
XLREGEDLSKKNPIAKIHSDLAEERGLKITYKYTGKGITEPPFGIFVFNKDTGELNVTSILDREETPFFLLTGYALDARGNNVEKPLELRIKVLDINDNEPVFTQDVFVGSVEELSAAHTLVMKINATDADEPNTLNSKISYRIVSLEPAYPPVFYLNKDTGEIYTTSVTLDREEHSSYTLTVEARDGNGEVTDKPVKQAQVQIRILDVNDNIPVVENKVLEGMVEENQVNVEVTRIKVFDADEIGSDNWLANFTFASGNEGGYFHIETDAQTNEGIVTLIKVSTKYSKLAWAKLVLERNLIYFEP

SEQ ID NO: 51300 - protein, 137 aa, Homo sapiens
MEGALADMKFYFIQILEKLSEAMSVLPEDMRIMPDLCGLTLEHSVLEAGKFKIKVPANFITWCPIMAHSFTQQPLPASKPQDTDLHQHMGQHYLPNSVEKRTFHHWVMRVDSDSWLLNARHDWRPFIVLLEKSMKKL

SEQ ID NO: 51301 - protein, 130 aa, Homo sapiens
MVREKYIRPLTTEEWVEKMMDADPEFPPDFAEAFESQLSLSDSPSLCRPVYSKKGLEHKADLQQHLFPVPPGHLECTPESLWKELSLQHEGLKELIHKQMRPFSQGIVILSRSWAVDLNLQEKPGVICDA

SEQ ID NO: 51302 - protein, 45 aa, Homo sapiens
MPSRGTRPEDSSVLIPTDNSTPHKEDLSSKTEQKCCLRARIYWMN

SEQ ID NO: 51303 - protein, 163 aa, Homo sapiens
  MOD_RES (1)..(1): Any amino acid
XPWPRESRLPEDDERPPEEYDQPWEWKKERISKAFAGDTHNGWAWTARDPAEMPPFLSLILSWYHGAISRTDAENLLRLCKEASYLVRNSETSKNDFSLSLKSSQGFMHMKLSRTKEHKYVLGQNSPPFSSVPEIVHHYASRKLPIKGAEHMSLLYPVAIRTL

SEQ ID NO: 51304 - protein, 124 aa, Homo sapiens
MDMVEKESGDREALQLWSALQLKIPDLFRDLEIIPALLHGDLWGGNVAEDSSGPVIFDPASFYGHSEYELAIAGMFGGFSSSFYSAYHGKIPKAPGFEKRLQLYQLFHYLNHWNHFGSGYRGSS

SEQ ID NO: 51305 - protein, 151 aa, Homo sapiens
MAGLTAAAPRPGVLLLLLSILHPSRPGGVPGAIPGGVPGGVFYPALGPGGKPLKPGLGAFPAVTFPGALVPGGVADAAAAYKAAKAGAGLGGVPGVGGLGVSAGAVVPQPGAGVKPGKVPGVGLPGVYPGGVLPGARFPGVGVLPGVPTGA

SEQ ID NO: 51306 - protein, 690 aa, Homo sapiens
MMRSRSKSPRRPSPTARGANCDVELLKTTTRDREELKCMLEKYERHLAEIQGNVKVLKSERDKIFLLYEQAQEEITRLRREMMKSCKSPKSTTAHAILRRVETERDVAFTDLRRMTTERDSLRERLKIAQETAFNEKAHLEQRIEELECTVHNLDDERMEQMSNMTLMKETISTVEKEMKSLARKAMDTESELGRQKAENNSLRLLYENTEKDLSDTQRHLAKKKYELQLTQEKIMCLDEKIDNFTRQNIAQREEISILGGTLNDLAKEKECLQACLDKKSENIASLGESLAMKEKTISGMKNIIAEMEQASRQCTEALIVCEQDVSRMRRQLDETNDELAQIARERDILAHDNDNLQEQFAKAKQENQALSKKLNDTHNELNDIKQKVQDTNLEVNKLKNILKSEESENRQMMEQLRKANEDAENWENKARQSEADNNTLKLELITAEAEGNRLKEKVDSLNREVEQHLNAERSYKSQISTLHKSVVKMEEELQKVQFEKVSALADLSSTRELCIKLDSSKELLNRQLVAKDQEIEMRENELDSAHSEIELLRSQMANERISMQNLEALLVANRDKEYQSQIALQEKESEIQLLKEHLCLAENKMAIQSRDVAQFRNVVTQLEADLDITKRQLGTERFERERAVQELRRQNYSSNAYHMSSTMKPNTKCHSPERAHHRSPDRGLDRSLE

SEQ ID NO: 51307 - protein, 424 aa, Homo sapiens
MAAVATCGSVAASTGSAVATASKSNVTSFQRRGPRASVTNDSGPRLVSIAGTRPSVRNGQLLVSTGLPALDQLLGGGLAVGTVLLIEEDKYNIYSPLLFKYFLAEGIVNGHTLLVASAKEDPANILQELPAPLLDDKCKKEFDEDVYNHKTPESNIKMKIAWRYQLLPKMEIGPVSSSRFGHYYDASKRMPQELIEASNWHGFFLPEKISSTLKVEPCSLTPGYTKLLQFIQNIIYEEGFDGSNPQKKQRNILRIGIQNLGSPLWGDDICCAENGGNSHSLTKFLYVLRGLLRTSLSACIITMPTHLIQNKAIIARVTTLSDVVVGLESFIGSERETNPLYKDYHGLIHIRQIPRLNNLICDESDVKDLAFKLKRKLFTIECITKLRSYDLRRQRYFLSRHLQRKFSIKKNPYFKKPHTLKKIY

SEQ ID NO: 51308 - protein, 443 aa, Homo sapiens
MVSKSDQLLIVVSILEGRHFPKRPKHMLVVEAKFDGEQLATDPVDHTDQPEFATELAWEIDRKALHQHRLQRTPIKLQCFALDPVTSAKETIGYIVLDLRTAQETKQAPKWYQLLSNKYTKFKSEIQISIALETDTKPPVDSFKAKGAPPRDGKVPAILAGLDPRDIVAVLNEEGGYHQIGPAEYCTDSFIMSVTIAFATQLEQLIPCTMKLPERQPEFFFYYSLLGNDVTNEPFNDLINPNFEPERASVRIRSSVEILRVYLALQSKLQIHLCCGDQSLGSTEIPLTGLLKKGSTEINQHPVTVEGAFTLDPPNRAKQKLAPIPVELAPTVGVSVALQREGIDSQSPPTKDDATESEVESLQYDKDTKPNPKASSSVPASLAQLVTTSNASEVASGQKIAVPATSHHFCFSIDLRSIHALEIGFPINCILRCDLILFQSIIF

SEQ ID NO: 51309 - protein, 26 aa, Homo sapiens
NSDDLHVLTVISALQDFKGHLHQSSL

SEQ ID NO: 51310 - protein, 48 aa, Homo sapiens
MSNGYRTLSQHLNDLKKENFSLKLRIYFLEERMQQKYEASREDIYKRG

SEQ ID NO: 51311 - protein, 105 aa, Homo sapiens
MARTAGDTLDVFTMIDIFKYVIYGIAAAFFVYGILLMVEGFFTTGAIKDLYGDFKITTCGRCVSAWFIMLTYLFMLAWLGVTAFTSLPVYMYFNLWTICRNTTLV

SEQ ID NO: 51312 - protein, 477 aa, Homo sapiens
MADNEKLDNQRLKNFKNKGRDLETMRRQRNEVVVELRKNKRDEHLLKRRNVPHEDICEDSDIDGDYRVQNTSLEAIVQNASSDNQGIQLSAVQAARKLLSSDRNPPIDDLIKSGILPILVHCLERDDNPSLQFEAAWALTNIASGTSEQTQAVVQSNAVPLFLRLLHSPHQNVCEQAVWALGNIIGDGPQCRDYVISLGVVKPLLSFISPSIPITFLRNVTWVMVNLCRHKDPPPPMETIQEILPALCVLIHHTDVNTAALRAVGNIVTGTDEQTQVVLNCDALSHFPALLTHPKEKINKEAVWFLSNITAGNQQQVQAVIDANLVPMIIHLLDKGDFGTQKEAAWAISNLTISGRKDQVAYLIQQNVIPPFCNLLTVKDAQVVQVVLDGLSNILKMAEDEAETIGNLIEECGGLEKIEQLQNHENEDIYKLAYEIIDQFFSSDDIDEDPSLVPEAIQGGTFGFNSSANVPTEGFQF

SEQ ID NO: 51313 - protein, 1027 aa, Homo sapiens
MGKDQGFSRHFRIFIPKKHRARFDEVVSQGLLGKLCRARRAQGAQRLRRSRSEERPERLLVSTRASAPPRRPDEPPPRRASLLVGGLAGPGGARRTVRVYKGNKSFGFTLRGHGPVWIESVLPGSPADNAALKSGDRILFLNGLDMRNCSHDKVVSMLQGSGAMPTLVVEEGLVPFASDSDSLDSPNPSSALTSLQWVAEILPSSIRVQGRTFSQQLEHLLTPPERYGVCRALESFFQHRNIDTLIVDVYPVLDTPAKQVLWQFIYQLLTYEEQELCQEKIACFLGYTAMTEPEPELDLESEPTPEPQPRSSLRASSMCRRSLRSQGLEAGLSCGPSECPEMPLPLIPGERQAGDGTSLPETPNPKMMSAVYAELESRLNSSFKGKMGTVSKSRASPPGPSPAVTTGPRTLSGVSWPSERLLPSPCYHPLCSGGLASPSSSESHPYASLDSSRAPSPQPGPGPICPDSPPSPDPTRPPSRRKLFTFSHPVRSRDTDRFLDVLSEQLGPRVTIVDDFLTPENDYEEMSFHDDQGSFVTNERSSASDCISSSEEGSSLTYSSISDHIPPPPLSPPPPPPLPFHDAKPSSRSSDGSRGPAQALAKPLTQLSHPVPPPPPPPLPPPVPCAPPMLSRGLGHRRSETSHMSVKRLRWEQVENSEGTIWGQLGEDSDYDKLSDMVKYLDLELHFGTQKPAKPVPGPEPFRKKEVVEILSHKKAYNTSILLAHLKLSPAELRQVLMSMEPRRLEPAHLAQLLLFAPDADEEQRYQAFREAPGRLSEPDQFVLQMLSVPEYKTRLRSLHFQATLQEKTEEIRGSLECLRQASLELKNSRKLAKILEFVLAMGNYLNDGQPKTNKTTGFKINFLTELNSTKTVDGKSTFLHILAKSLSQHFPELLGFAQDLPTVPLAAKVNQRALTSDLADLHGTISEIQDACQSISPSSEDKFAMVMSSFLETAQPALRALDGLQREAMEELGKALAFFGEDSKATTSEAFFGIFAEFMSKFERALSDLQAGEGLRSSGMVSPLAW

SEQ ID NO: 51314 - protein, 35 aa, Homo sapiens
MGELMAFLLPLIIVLMVKHSDSQQNGAIYLPTPDR

SEQ ID NO: 51315 - protein, 634 aa, Homo sapiens
MGENKDKPYLLYFNIFSCILSSNIISVAENGLQCPTPQVCVSSCPEDPWTVGKNEFSQTVGEVFYTKNRNFCLPGVPWNMTVITSLQQELCPSFLLPSAPALGRCFPWTNITPPALPGITNDTTIQQGISGLIDSLNARDISVKIFEDFAQSWYWILVALGVALVLSLLFILLLRLVAGPLVLVLILGVLGVLAYGIYYCWEEYRVLRDKGASISQLGFTTNLSAYQSVQETWLAALIVLAVLEAILLLVLIFLRQRIRIAIALLKEASKAVGQMMSTMFYPLVTFVLLLICIAYWAMTALYLATSGQPQYVLWASNISSPGCEKVPINTSCNPTAHLVNSSCPGLMCVFQGYSSKGLIQRSVFNLQIYGVLGLFWTLNWVLALGQCVLAGAFASFYWAFHKPQDIPTFPLISAFIRTLRYHTGSLAFGALILTLVQIARVILEYIDHKLRGVQNPVARCIMCCFKCCLWCLEKFIKFLNRNAYIMIAIYGKNFCVSAKNAFMLLMRNIVRVVVLDKVTDLLLFFGKLLVVGGVGVLSFFFFSGRIPGLGKDFKSPHLNYYWLPIMTSILGAYVIASGFFSVFGMCVDTLFLCFLEDLERNNGSLDRPYYMSKSLLKILGKKNEAPPDNKKRKK

SEQ ID NO: 51316 - protein, 946 aa, Homo sapiens
MWVPVLALPVCTYAETLMDSTTATAELGWMVHPPSGWEEVSGYDENMNTIRTYQVCNVFESSQNNWLRTKFIRRRGAHRIHVEMKFSVRDCSSIPSVPGSCKETFNLYYYEADFDSATKTFPNWMENPWVKVDTIAADESFSQVDLGGRVMKINTEVRSFGPVSRSGFYLAFQDYGGCMSLIAVRVFYRKCPRIIQNGAIFQETLSGAESTSLVAARGSCIANAEEVDVPIKLYCNGDGEWLVPIGRCMCKAGFEAVENGTVCRGCPSGTFKANQGDEACTHCPINSRTTSEGATNCVCRNGYYRADLDPLDMPCTTIPSAPQAVISSVNETSLMLEWTPPRDSGGREDLVYNIICKSCGSGRGACTRCGDNVQYAPRQLGLTEPRIYISDLLAHTQYTFEIQAVNGVTDQSPFSPQFASVNITTNQAAPSAVSIMHQVSRTVDSITLSWSQPDQPNGVILDYELQYYEKQELSEYNATAIKSPTNTVTVQGLKAGAIYVFQVRARTVAGYGRYSGKMYFQTMTEAEYQTSIQEKLPLIIGSSAAGLVFLIAVVVIAIVCNRRGFERADSEYTDKLQHYTSGHMTPGMKIYIDPFTYEDPNEAVREFAKEIDISCVKIEQVIGAGEFGEVCSGHLKLPGKREIFVAIKTLKSGYTEKQRRDFLSEASIMGQFDHPNVIHLEGVVTKSTPVMIITEFMENGSLDSFLRQNDGQFTVIQLVGMLRGIAAGMKYLADMNYVHRDLAARNILVNSNLVCKVSDFGLSRFLEDDTSDPTYTSALGGKIPIRWTAPEAIQYRKFTSASDVWSYGIVMWEVMSYGERPYWDMTNQDVINAIEQDYRLPPPMDCPSALHQLMLDCWQKDRNHRPKFGQIVNTLDKMIRNPNSLKAMAPLSSGINLPLLDRTIPDYTSFNTVDEWLEAIKMGQYKESFANAGFTSFDVVSQMMME

SEQ ID NO: 51317 - protein, 81 aa, Homo sapiens
PGGGLPQLALKLRLQVLLLARVLRGHPPLLLDVVRNACDLFIPLDKLGLWRCGPGIVGLCGLVSSILSILTLIYPWLRLKP

SEQ ID NO: 51318 - protein, 317 aa, Homo sapiens
MVKLSIVLTPRFLSHDQGQLTKELQQHVKSVTCPCEYLRKVINTLADHRHRGTDFGGSPWLLIITVFLRSYKFAISLCTSYLCVSFLKTIFPSQNGHDGSTDVQQRARRSNCRRQEGIKIVLEDIFTLWRQVETKVRAKIRKMKVTTKVNRHDKINGKRKTAKEHLRKLSMKEREHGEKERQVSEAEENGKLDMKEIHTYMEMFQRAQALRRRAEDYYRCKITPSARKPLCNRVSLLVFLAFGHSLPGQDMDTFFSLRLCAQALQREMAERKAAYKHHSPIPVGNRVAQKHLHPHPVGPPSNILSVRGSIFVIANGP

SEQ ID NO: 51319 - protein, 1763 aa, Homo sapiens
MTTMLQKSDSNASFLRAARAGNLDKVVEYLKGGIDINTCNQNGLNALHLAAKEGHVGLVQELLGRGSSVDSATKKGNTALHIASLAGQAEVVKVLVKEGANINAQSQNGFTPLYMAAQENHIDVVKYLLENGANQSTATEDGFTPLAVALQQGHNQAVAILLENDTKGKVRLPALHIAARKDDTKSAALLLQNDHNADVQSKMMVNRTTESGFTPLHIAAHYGNVNVATLLLNRGAAVDFTARNGITPLHVASKRGNTNMVKLLLDRGGQIDAKTRDGLTPLHCAARSGHDQVVELLLERGAPLLARTKNGLSPLHMAAQGDHVECVKHLLQHKAPVDDVTLDYLTALHVAAHCGHYRVTKLLLDKRANPNARALNGFTPLHIACKKNRIKVMELLVKYGASIQAITESGLTPIHVAAFMGHLNIVLLLLQNGASPDVTNIRGETALHMAARAGQVEVVRCLLRNGALVDARAREEQTPLHIASRLGKTEIVQLLLQHMAHPDAATTNGYTPLHISAREGQVDVASVLLEAGAAHSLATKKGFTPLHVAAKYGSLDVAKLLLQRRAAADSAGKNGLTPLHVAAHYDNQKVALLLLEKGASPHATAKNGYTPLHIAAKKNQMQIASTLLNYGAETNIVTKQGVTPLHLASQEGHTDMVTLLLDKGANIHMSTKSGLTSLHLAAQEDKVNVADILTKHGADQDAHTKLGYTPLIVACHYGNVKMVNFLLKQGANVNAKTKNGYTPLHQAAQQGHTHIINVLLQHGAKPNATTANGNTALAIAKRLGYISVVDTLKVVTEEVTTTTTTITEKHKLNVPETMTEVLDVSDEEGDDTMTGDGGEYLRPEDLKELGDDSLPSSQFLDGMNYLRYSLEGGRSDSLRSFSSDRSHTLSHASYLRDSAVMDDSVVIPSHQVSTLAKEAERNSYRLSWGTENLDNVALSSSPIHSGFLVSFMVDARGGAMRGCRHNGLRIIIPPRKCTAPTRVTCRLVKRHRLATMPPMVEGEGLASRLIEVGPSGAQFLGPVIVEIPHFAALRGKERELVVLRSENGDSWKEHFCDYTEDELNEILNGMDEVLDSPEDLEKKRICRIITRDFPQYFAVVSRIKQDSNLIGPEGGVLSSTVVPQVQAVFPEGALTKRIRVGLQAQPMHSELVKKILGNKATFSPIVTLEPRRRKFHKPITMTIPVPKASSDVMLNGFGGDAPTLRLLCSITGGTTPAQWEDITGTTPLTFVNECVSFTTNVSARFWLIDCRQIQESVTFASQVYREIICVPYMAKFVVFAKSHDPIEARLRCFCMTDDKVDKTLEQQENFAEVARSRDVEVLEGKPIYVDCFGNLVPLTKSGQHHIFSFFAFKENRLPLFVKVRDTTQEPCGRLSFMKEPKSTRGLVHQAICNLNITLPIYTKESESDQEQEEEIDMTSEKNPQDEQERIEERLAYIADHLGFSWTELARELDFTEEQIHQIRIENPNSLQDQSHALLKYWLERDGKHATDTNLVECLTKINRMDIVHLMETNTEPLQERISHSYAEIEQTITLDHSEGFSVLQEELCTAQHKQKEEQAVSKESETCDHPPIVSEEDISVGYSTFQDGVPKTEGDSSATALFPQTHKEQVQQDFSGKMQDLPEESSLEYQQEYFVTTPGTETSETQKAMIVPSSPSKTPEEVSTPAEEEKLYLQTPTSSERGGSPIIQEPEEPSEHREESSPRKTSLVIVESADNQPETCERLDEDAAFEKGDDMPEIPPETVTEEEYIDEHGHTVVKKDNNE

SEQ ID NO: 51320 - protein, 319 aa, Homo sapiens
MGDILAHESELLGLVKEYLDFAEFEDTLKTFSKECKIKGKPLCKTVGGSFRDSKSLTIQKDLVAAFDNGDQKVFFDLWEEHISSSIRDGDSFAQKLEFYLHIHFAIYLLKYSVGRPDKEELDEKISYFKTYLETKGAALSQTTEFLPFYALPFVPNPMVHPSFKELFQDSWTPELKLKLIKFLALISKASNTPKLLTIYKENGQSNKEILQQLHQQLVEAERRSVTYLKRYNKIQADYHNLIGVTAELVDSLEATVSGKMITPEYLQSVCVRLFSNQMRQSLAHSVDFTRPGTVRLCAQGRVPVVYPPKFKKNVTLKIA

SEQ ID NO: 51321 - protein, 774 aa, Homo sapiens
MPPATGGGLAESELRPRRGRCGPQAARAAGRDVAAEAVARSPKRPAWGSRRFEAVGWWALLALVTLLSFATRFHRLDEPPHICWDETHFGKMGSYYINRTFFFDVHPPLGKMLIGLAGYLSGYDGTFLFQKPGDKYEHHSYMGMRGFCAFLGSWLVPFAYLTVLDLSKSLSAALLTAALLTFDTGCLTLSQYILLDPILMFFIMAAMLSMVKYNSCADRPFSAPWWFWLSLTGVSLAGALGVKFVGLFIILQVGLNTIADLWYLFGDLSLSLVTVGKHLTARVLCLIVLPLALYTATFAVHFMVLSKSGPGDGFFSSAFQARLSGNNLHNASIPEHLAYGSVITVKNLRMAIGYLHSHRHLYPEGIGARQQQVTTYLHKDYNNLWIIKKHNTNSDPLDPSFPVEFVRHGDIIRLEHKETSRNLHSHYHEAPMTRKHYQVTGYGINGTGDSNDFWRIEVVNRKFGNRIKVLRSRIRFIHLVTGCVLGSSGKVLPKWGWEQLEVTCTPYLKETLNSIWNVEDHINPKLPNISLDVLQPSFPEILLESHMVMIRGNSGLKPKDNEFTSKPWHWPINYQGLRFSGVNDTDFRVYLLGNPVVWWLNLLSIALYLLSGSIIAVAMQRGARLPAEVAGPASRRRPGPARLDTPLLPVFPDGPGPLLPPLLPSHALLKHVDRHSVGHPPAALCLGLGLMAPGEGHTCGGNPEPAPGNCLQLLPLPPSGLRDGWSPGPGPPKSNGRTKVAGLMGLLRPLQRFQPGSRNFPGEPAGKQYWTIRP

SEQ ID NO: 51322 - protein, 1219 aa, Homo sapiens
MLFPLQVAAVTSSVRDDPLEHCVSPRTRARSPEICKMADNLDEFIEEQKARLAEDKAELESDPPYMEMKLSAKLSENSKILISMAKENIPPNSQQTRGSLGIDYGLSLPLGEDYERKKHKLKEELRQDYRRYLTQERLKLERNKEYNQFLRGKEESSEKFRQVEKSTEPKSQRNKKPIGQVKPDLTSQIQTSCENSEGPRKDVLTPSEAYEELLNQRRLEEDRYRQLDDEIELRNRRIIKKANEEVGISNLKHQRFASKAGIPDRRFHRFNEDRVFDRRYHRPDQDPEVSEEMDERFRYESDFDRRLSRVYTNDRMHRNKRGNMPPMEHDGDVIEQSNIRISSAENKSAPDNETSKSANQDTCSPFAGMLFGGEDRELIQRRKEKYRLELLEQMAEQQRNKRREKDLELRVAASGAQDPEKSPDRLKQFSVAPRHFEEMIPPERPRIAFQTPLPPLSAPSVPPIPSVHPVPSQNEDLRSGLSSALGEMVSPRIAPLPPPPLLPPLATNYRTPYDDAYYFYGSRNTFDPSLAYYGSGMMGVQPAAYVSAPVTHQLAQPVVNTVGQNELKITSDQVINSGLIFEDKPKPSKQSLQSYQEALQQQIREREERRKKEREEKEEYEAKLEAEMRTYNPWGKGGGGAPLRDAKGNLITDLNRMHRQNIDAYHNPDARTYEDKRAVVSLDPNLATSNAENLEDAANKSSGHMQTQSSPFARGNVFGEPPTELQIKQQELYKNFLRFQIEEKKQREEAERERLRIAEEKEERRLAEQRARIQQEYEEEQEKKREKEEEQRLKNEEHIRLAEERQKEAERKKKEEEEKYNLQLQHYCERDNLIGEETKHMRQPSPIVPALQNKIASKLQRPPSVDSIIRSFIHESSMSRAQSPPVPARKNQLRAEEEKKNVIMELSEMRKQLRSEERRLQERLLHMDSDDEIPIRKKERNPMDIFDMARHRLQAPVRRQSPKGLDAATFQNVHDFNELKDRDSETRVDLKFMYLDPPRDHHTLEIQQQALLREQQKRLNRIKMQEGAKVDLDAIPSAKVREQRMPRDDTSDFLKNSLLESDSAFIGAYGETYPAIEDDVLPPPSQLPSARERRRNKWKGLDIDSSRPNVAPDGLSLKSISSVNVDELRVRNEERMRRLNEFHNKPINTDDESSLVDPDDIMKHIGDDGSNSVATEPWLRPGTSETLKRFMAEQLNQEQQQIPGKPGTFTWQGLSTAHG

SEQ ID NO: 51323 - protein, 564 aa, Homo sapiens
MDGKCKEIAEELFTRSLAESELRSAPYEFPEESPIEQLEERRQRLERQISQDVKLEPDILLRAKQDFLKTDSDSDLQLYKEQGEGQGDRSLRERDVLEREFQRVTISGEEKCGVPFTDLLDAAKSVVRALFIREKYMALSLQSFCPTTRRYLQQLAEKPLETRTYEQGPDTPVSADAPVHPPALEQHPYEHCEPSTMPGDLGLGLRMVRGVVHVYTRREPDEHCSEVELPYPDLQEFVADVNVLMALIINGPIKSFCYRRLQYLSSKFQMHVLLNEMKELAAQKKVPHRDFYNIRKVDTHIHASSCMNQKHLLRFIKRAMKRHLEEIVHVEQGREQTLREVFESMNLTAYDLSVDTLDVHADRNTFHRFDKFNAKYNPIGESVLREIFIKTDNRVSGKYFAHIIKEVMSDLEESKYQNAELRLSIYGRSRDEWDKLARWAVMHRVHSPNVRWLVQVPRLFDVYRTKGQLANFQEMLENIFLPLFEATVHPASHPELHLFLEHVDGFDSVDDESKPENHVFNLESPLPEAWVEEDNPPYAYYLYYTFANMAMLNHLRRGASTRLC

SEQ ID NO: 51324 - protein, 1024 aa, Homo sapiens
MADPEVCCFITKILCAHGGRMALDALLQEIALSEPQLCEVLQVAGPDRFVVLETGGEAGITRSVVATTRARVCRRKYCQRPCDNLHLCKLNLLGRCNYSQSERNLCKYSHEVLSEENFKVLKNHELSGLNKEELAVLLLQSDPFFMPEICKSYKGEGRQQICNQQPPCSRLHICDHFTRGNCRFPNCLRSHNLMDRKVLAIMREHGLNPDVVQNIQDICNSKHMQKNPPGPRAPSSHRRNMAYRARSKSRDRFFQGSQEFLASASASAERSCTPSPDQISHRASLEDAPVDDLTRKFTYLGSQDRARPPSGSSKATDLGGTSQAGTSQRFLENGSQEDLLHGNPGSTYLASNSTSAPNWKSLTSWTNDQGARRKTVFSPTLPAARSSLGSLQTPEAVTTRKGTGLLSSDYRIINGKSGTQDIQPGPLFNNNADGVATDITSTRSLNYKSTSSGHREISSPRIQDAGPASRDVQATGRIADDADPRVALVNGKYKGKTLWASTFVHDIPNGSSQVVDKTTDVEKTGATGFGLTMAVKAEKDMLRTGSQSLRNLVPTTPGESTAPAQVSTLPQSPAALSSSNRAAVWGAQGQNCTQVPVSSASELTRKTTGSAQYSLSDVTSTTSSRVDDHDSEEICLDHLCKGCPLNGSCSKVHFHLPYRWQMLIGKTWTDFEHMETIEKGYCNPGIHLCSVGSYTINFRVMSCDSFPIRRLSTPSSVTKPANSVFTTKWIWYWKNESGTWIQYGEEKDKRKNSNVDSSYLESLYQSCPRGVVPFQAGSRNYELSFQGMIQTNIASKTQKDVIRRPTFVPQWYVQQMKRGPDHQPAKTSSVSLTATFRPQEDFCFLSSKKYKLSEIHHLHPEYVRVSEHFKASMKNFKIEKIKKIENSELLDKFTWKKSQMKEEGKLLFYATSRAYVESICSNNFDSFLHETHENKYGKGIYFAKDAIYSHKNCPYDAKNVVMFVAQVLVGKFTEGNITYTSPPPQFDSCVDTRSNPSVFVIFQKDQVYPQYVIEYTEDKACVIS

SEQ ID NO: 51325 - protein, 189 aa, Homo sapiens
MGDSPGGAAILGLAGKLRRVWRESLPPIQALRSHFLGQPRLSGGSPDRHPSAPPVLQELKLPTFRAHSPLLKSRRFFVDILTLLSSHCQLCPAARHLAVYLLDHFMDRYNVTTSKQLYTVAVSCLLLASKFEDREDHVPKLEQINSTRILSSQNFTLTKKELLSTELLLLEAFSWNLCLPTPAHFLDYY

SEQ ID NO: 51326 - protein, 146 aa, Homo sapiens
MMCSRVPSEQSSGTSLLPKDGAPFSWDSLDEDGLDDSLLELSEGEEDDGDVNYTEEEIDALLKEDDPSYEQSSGEDDGGHVEKGERGSQILLDTPREKNSSYSLGPVAETPDLFKLPQLSTSSGHGPAHTKPLNRRSVLEKNLIKV

SEQ ID NO: 51327 - protein, 143 aa, Homo sapiens
  MOD_RES (1)..(1): Any amino acid
XISQTDLFGNPMMYDLKENGDKIPITNENRKNLDFQALEETTEYDGGYTRDSVLIREFWEIVHSFTDEQKRLFLQFTTGTDRAPVGGLGKLKMIIAKNGPDTERLPTSHTCFNVLLLPEYSSKEKLKERLLKAITYAKGFGML

SEQ ID NO: 51328 - protein, 110 aa, Homo sapiens
  MOD_RES (1)..(1): Any amino acid
XSNCQMRTLDSGIGTFPLPDSGNRSTGRYLCQPDSPEDAEPLLPLQSALSAVSSMRAQTLEREVPSSTDGQRPADSAIVHSTSDPIMTARGMRPLQSRLPKPASSEIETT

SEQ ID NO: 51329 - protein, 114 aa, Homo sapiens
MMQNPQILAALQERLDGLVETPTGYIESLPRVVKRRVNALKNLQVKCAQIEAKFYEEVHDLERKYAVLYQPLFDKRFEIINAIYEPTEEECEWKPDEEDEISEELKEKAKIEDE

SEQ ID NO: 51330 - protein, 77 aa, Homo sapiens
MLGQLLPHTARGLGAAEMPGQGPGSDWTERSSSAEPPAVAGTEGGGGGSAGYSCYQNSKGSASRPHHRPEALPVQHC

SEQ ID NO: 51331 - protein, 410 aa, Homo sapiens
MGAIPAGFRPSTLSQLLEEGNQFRANYFLQPELMPSQLAFRDLMWDATEGTIRSRPSRISLILTLWSCKMIPLPGMSIQVLSRHVRLCLFDGNKVLSNIHTVRATWQPKKPKTWTFSPQVTRILPCLLDGDCFIRSNSASPDLGILFELGISYIRNSTGERGELSCGWVFLKLFDASGVPIPAKTYELFLNGGTPYEKGIEVDPSISRRAHGSVFYQIMTMRRQPQLLVKLRSLNRRSRNVLSLLPETLIGNMCSIHLLIFYRQILGDVLLKDRMSLQSTDLISHPMLATFPMLLEQPDVMDALRSSWAGKESTLKRSEKRDKEFLKSTFLLVYHDCVLPLLHSTRLPPFRWAEEETETARWKVITDFLKQNQENQGALQALLSPDGVHEPFDLSEQTYDFLGEMRKNAV

SEQ ID NO: 51332 - protein, 574 aa, Homo sapiens
MAAAAPRRPTQGTVTFEDVAVNFSQEEWCLLSEAQRCLYRDVMLENLALISSLGCWCGSKDEEAPCKQRISVQRESQSRTPRAGVSPKKAHPCEMCGLILEDVFHFADHQETHHKQKLNRSGACGKNLDDTAYLHQHQKQHIGEKFYRKSVREASFVKKRKLRVSQEPFVFREFGKDVLPSSGLCQEAAAVEKTDSETMHGPPFQEGKTNYSCGKRTKAFSTKHSVIPHQKLFTRDGCYVCSDCGKSFSRYVSFSNHQRDHTAKGPYDCGECGKSYSRKSSLIQHQRVHTGKTAYPCEECGKSFSQKGSLISHQRVHTGERPYECREYGKSFGQKGNLIQHQQGHTGERAYHCGECGKSFRQKFCFINHQRVHTGERPYKCGECGKSFGQKGNLVQHQRGHTGERPYECKECGKSFRYRSHLTEHQRLHTGERPYNCRECGKLFNRKYHLLVHERVHTGERPYACEVCGKLFGNKNCVTIHQRIHTGERPYECNECGKSFLSSSALHVHKRVHSGQKPYKCSECGKSFAECSSLIKHRRIHTGERPYECTKCGKTFQRSSTLLHHQSSHRRKAL

SEQ ID NO: 51333 - protein, 92 aa, Homo sapiens
MIVFRLGRIRTPQGPGMVLLLPFIDSFQRVDLRTRAFNVPPCKLASKDGAVLSVGADVQFRIWDPVLSVMTVKDLNTATRMTAQNAMTKALL

SEQ ID NO: 51334 - protein, 59 aa, Homo sapiens
MANSANTNTVPKLYRSVIEDVINDVRDIFLDDGVDEQVLMELKTILNKTVAAQKMFILW

SEQ ID NO: 51335 - protein, 356 aa, Homo sapiens
MMDLRNTPAKSLDKFIEDYLLPDTCFRMQINHAIDIICGFLKERCFRGSSYPVCVSKVVKGGSSGKGTTLRGRSDADLVVFLSPLTTFQDQLNRRGEFIQEIRRQLEACQRERAFSVKFEVQAPRWGNPRALSFVLSSLQLGEGVEFDVLPAFDALAHRGVHRPAERGRVLHLLHRTTERLPEAAPHQAQEPHPPSQALVPKCMALPPGLCKKKLGKLPPQYALELLTVYAWERGSMKTHFNTAQGFRTVLELVINYQQLCIYWTKYYDFKNPIIEKYLRRQLTKPRPVILDPADPTGNLGGGDPKGWRQLAQEAEAWLNYPCFKNWDGSPVSSWILLVRPPASSLPFIPAPLHEA

SEQ ID NO: 51336 - protein, 57 aa, Homo sapiens
MAFPHLQQPSFLLASLKADSINKPFAQQCQDLVKVIEDFPAKMVSSLAGTSAAYRGA

SEQ ID NO: 51337 - protein, 42 aa, Homo sapiens
MNHKTCYNPLFNYEDMQEITQHFAVCHVDAPGQQDGAASFPA

SEQ ID NO: 51338 - protein, 150 aa, Homo sapiens
MSQEKDFYKKSPLQTIGEEQTQNPYTELLVLKAHHDIVRFLVQLDDYRFASAGDDGIVVVWNAQTGEKLLELNGHTQKITAIITFPSLESCEEKNQLILTASADRTVIVWDGDTTRQVQRISCFQSTVKCLTVLQRLDVWLSGGNDLCVW

SEQ ID NO: 51339 - protein, 68 aa, Homo sapiens
MRRCSLCAFERFRGTCGPPGVQEPSSPSTALGPAGTSSGEPALVRCLLPGPPSCCVTHCGQRWPPPYC

SEQ ID NO: 51340 - protein, 209 aa, Homo sapiens; identical to SEQ ID NO: 43167

SEQ ID NO: 51341 - protein, 119 aa, Homo sapiens
MTTPNKTPPGADPKQLERTGTVREIGSQAVWSLSSCKPGFGVDQLRDDNLETYWQSDGSQPHLVNIQFRRKTTVKTLCIYADYKSDESYTPSKISVRVGNNFHNLQEIREVCAAKISDS

SEQ ID NO: 51342 - protein, 27 aa, Homo sapiens
MSSTVSYWILNSTRNSIATLQGGRRLY

SEQ ID NO: 51343 - protein, 76 aa, Homo sapiens
KMESSISSSSEEQIRRMNENSHVQVPFQQLNQLAAYPYAVWYYPQIMQYVPFPPFSDISNPTAHENYEKNNVMLQW

SEQ ID NO: 51344 - protein, 546 aa, Homo sapiens
  MOD_RES (1)..(1): Any amino acid
XVLVADSFDRRFFPISKDQPRVLLPLANVALIDYTLEFLTATGVQETFVFCCWKAAQIKEHLLKSKWCRPTSLNVVRIITSELYRSLGDVLRDVDAKALVRSDFLLVYGDVISNINITRALEEHRLRRKLEKNVSVMTMIFKESSPSHPTRCHEDNVVVAVDSTTNRVLHFQKTQGLRRFAFPLSLFQGSSDGVEVRYDLLDCHISICSPQVAQLFTDNFDYQTRDDFVRGLLVNEEILGNQIHMHVTAKEYGARVSNLHMYSAVCADVIRRWVYPLTPEANFTDSTTQSCTHSRHNIYRGPEVSLGHGSILEENVLLGSGTVIGSNCFITNSVIGPGCHIGDNVVLDQTYLWQGVRVAAGAQIHQSLLCDNAEVKERVTLKPRSVLTSQVVVGPNITLPEGSVISLHPPDAEEDEDDGEFSDDSGADQEKDKVKMKGYNPAEVGAAGKGYLWKAAGMNMEEEEELQQNLWGLKINMEEESESESEQSMDSEEPDSRGGSPQMDDIKVFQNEVLGTLQRGKEENISCDNLVLEINSLNLPTGMPIT

SEQ ID NO: 51345 - protein, 123 aa, Homo sapiens
MALSQGLLTFRDVAIEFSQEEWKCLDPAQRTLYRDVMLENYRNLVSLDISSKCMMNTLSSTGQGNTEVIHTGTLQRQASYHIGAFCSQEIEKDIHDFVFQWQEDETNDHEAPMTEIKKLTSST

SEQ ID NO: 51346 - protein, 169 aa, Homo sapiens
METPLDVLSRAASLVHADDEKREAALRGEPRIQTLPVASALSSHRTGPPPISPSKRKFSMEPGDEDLDCDNDHVSKMSRIFNPHLNKTANGDCRRDPRERSRSPIERAVAPTMSLHGSHLYTSLPSLGLEQPLALTKNSLDASRPAGLSPTLTPGERQQVGLCLGGWRG

SEQ ID NO: 51347 - protein, 57 aa, Homo sapiens
MSCPCKQNFLHSSEVGGWKWVPQGQAPPEDPPCLSSYCSCGPCVSWLEALHLQDSSS

SEQ ID NO: 51348 - protein, 136 aa, Homo sapiens
MEERKPAHVLRSFKYAAFMNEELRNLSLSGHVGFDSLPDQLVNKSTSQGFCFNILCVGETGIGKSTLMDTLFNTKFESDPATHNEPGVRLKARSYELQESNVRLKLTIVDTVGFGDQINKDDSYKPIVEYIDAQFE

SEQ ID NO: 51349 - protein, 196 aa, Homo sapiens
MVGEDADLPCHLFPTMSAETMELKWVSSSLRQVVNVYADGKEVEDRQSAPYRGRTSILRDGITAGKAALRIHNVTASDSGKYLCYFQDGDFYEKALVELKVAALGSNLHVEVKGYEDGGIHLECRSTGWYPQPQIQWSNAKGENIPAVEAPVVADGVGLYEVAASVIMRGGSGEGVSCIIRNSLLGLEKTASISIA

SEQ ID NO: 51350 - protein, 139 aa, Homo sapiens
MKSLKAKFRKSDTNEWNKNDDRLLQAVENGDAEKVASLLGKKGASATKHDSEGKTAFHLAAAKGHVECLRVMITHGVDVTAQDTTGHSALHLAAKNSHHECIRKLLQSKCPAESVDSSGKTALHYAAAQGCLQAVQILC

SEQ ID NO: 51351 - protein, 119 aa, Homo sapiens
MYLQVETRTSSRLHLKRAPGIRSWSLLVGILSIGLAAAYYSGDSLGWKLFYVTGCLFVAVQNLEDWEEAIFDKSTGKVVLKTFSLYKKLLTLFRAGHDQVVVLLHDVRDVSVEEEKVRY

SEQ ID NO: 51352 - protein, 238 aa, Homo sapiens
MARARGSPCPPLPPGRMSWPHGALLFLWLFSPPLGAGGGGVAVTSAAGGGSPPATSCPVACSCSNQASRVICTRRDLAEVPASIPVNTRYLNLQENGIQVIRTDTFKHLRHLEILQLSKNLVRKIEVGAFNGLPSLNTLELFDNRLTTVPTQAFEYLSKLRELWLRNNPIESIPSYAFNRVPSLRRLDLGELKRLEYISEAAFEGLVNLRYLNLGMCNLKDIPNLTALVRLEELELSG

SEQ ID NO: 51353 - protein, 455 aa, Homo sapiens
MDSPGYNCFVDKDKMDAAIQDLGPKELSCTELQELKQLARQGYWAQSHALRGKVYQRLIRDIPCRTVTPDASVYSDIVGKIVGKHSSSCLPLPEFVDNTQVPSYCLNARGEGAVRKILLCLANQFPDISFCPALPAVVALLLHYSIDEAECFEKACRILACNDPGRRLIDQSFLAFESSCMTFGDLVNKYCQAAHKLMVAVSEDVLQVYADWQRWLFGELPLCYFARVFDVFLVEGYKVLYRVALAILKFFHKVRAGQPLESDSVKQDIRTFVRDIAKTVSPEKLLEKAFAIRLFSRKEIQLLQMANEKALKQKGITVKQKSVSLSKRQFVHLAVHAENFRSEIVSVREMRDIWSWVPERFALCQPLLLFSSLQHGYSLARFYFQCEGHEPTLLLIKTTQKEVCGAYLSTDWSERNKFGGKLGFFGTGECFVFRLQPEVQRYEWVVIKHPELTKP

SEQ ID NO: 51354 - protein, 144 aa, Homo sapiens
MTPQSLLQTTLFLLSLLFLVQASASSGAHGRGHREDFRFCSQRNQTHRSSLHYKPTPDLRISIENSEEALTVHAPFPAAHPASRSFPDPRGLYHFCLYWNRHAGRLHLLYGKRDFLLSDKASSLLCFQHQEESLAQGPPLLATS

SEQ ID NO: 51355 - protein, 43 aa, Homo sapiens
MLTEASLSIWGWGSLGIVLFLITFGPFVIFYLTFYILCFVGGA

SEQ ID NO: 51356 - protein, 118 aa, Homo sapiens
MHWLRKVQGLCTLWGTQMSSRTLYINSRQLVSLQWGHQEVPAKFNFASDVLDHWADMEKAGKRLPSPALWWVNGKGKELMWNFRELSENSQQAANVLSGACGLQRGDRVAVVLPRVPE

SEQ ID NO: 51357 - protein, 45 aa, Homo sapiens
MTPLVSRLSRLWVRWTCGHHEEATSSRGKWSQEAGSQPGREAEAC

SEQ ID NO: 51358 - protein, 142 aa, Homo sapiens
MAPGSRGERSSFRSRRGPGVPSPQPDVTMLSRLLKEHQAKQNERKELQEKRRREAITAATCLTEALVDHLNVGVAQAYMNQRKLDHEVKTLQVQAAQFAKQTGQWIGMVENFNQALKVGHTPYLTTPILGPHWLPPVRLPQV

SEQ ID NO: 51359 - protein, 20 aa, Homo sapiens
MNAPLDGLSVSSSSTGSLGS

SEQ ID NO: 51360 - protein, 245 aa, Homo sapiens
MAVKKIAIFGATGQTGLTTLAQAVQAGYEVTVLVRDSSRLPSEGPRPAHVVVGDVLQAADVDKTVAGQDAVIVLLGTRNDLSTEPPLCPRPSPTPRPPAPPPPPAPPLPPLPPPPPTSDSHSLSPLRSHDSDVRGRPEHCGSHEGSWCGQAFLLWDPTKVPPRLQAVTDDHIRMHKVLRESGLKYVAVMPPHIGDQPLTGAYTVTLDGRGPSRVISKHDLGHFMLRCLTTDEYDGHSTYPSHQYQ

SEQ ID NO: 51361 - protein, 657 aa, Homo sapiens
  MOD_RES (1)..(1): Any amino acid
XSPPCAARAAAAPPPWRRPRPHWKVRVAAIEATGAVIHFGNGKSVDDVLSHFAQRLFDDVPQVRRAVASVVGGWLLCLRDRYSFFHKLIPLLLSSLNDEVPEVRQLAASLWEDVGLQWQKENEEDLKDKLDFAPPTPPHYPPHERRPVLGCRELVFRNLSKILPALCHDITDWVVGTRVKSAQLLPVLLLHAEDHATQHLEVVLRTLFQACTDEEAAVVQSCTRSAELVGTFVSPEVFLKLILSTLKKTPSASGLLVLASAMRGCPREALQPHLAAIATELAQAHICQASENDLYLERLLLCVQALVSVCHEDCGVASLQLLDVLLTIVALAGATGLRDKAQETMDSLAMVEGVSSCQDLYRKHIGPLLERVTASHLDWTAHSPELLQFSVIVAQSGPALGEALPHVVPTLRACLQPSQDPQMRLKLFSILSTVLLRATDTINSQGQFPSYLETVTKDILAPNLQWHAGRTAAAIRTAAVSCLWALTSSEVLSAEQIRDVQETLMPQVLTTLEEDSKMTRLISCRIINTFLKTSGGMTDPEKLIRIYPELLKRLDDVSNDVRMAAASTLVTWLQCVKGANAKSYYQSSVQYLYRELLVHLDDPERAIQDAILEVLKEGSGLFPDLLVRETEAVIHKHRSATYCEQLLQHVQAVPATQ

SEQ ID NO: 51362 - protein, 71 aa, Homo sapiens
MAAANPWDPASAPNGAGLVLGHFIASGMVNQEMLNMSKKTVSCFVNFTRLQQITNIQAEIYQLRSVILCKA

SEQ ID NO: 51363 - protein, 963 aa, Homo sapiens
MLYYLKQEVIGNECQKVFDGVDASDIDVWVPEPDHSEVPAEWWDFDADKSLLIGVFKHGYEKYNTIRADPALCFLERVGKPDEKAVAAEQRANDYMDGDVEDPEYKPAPAIFKDDIEDDVSSPGDLVIADGDGQLMEGDKVYWPTQSALTTRLRRLITAYQRTNKNRQIQQIQPTFSVPTSVMQPIYEEATLNPKMAAKIERQQRWTRREEADFYRVVSTFGVVFDPDRGQFDWTKFRAMARLHKKTDDSLEKYLYAFMSMCRRVCRLPSKEESTTHMKAYDEESVASLSTTQDETQDSFQMNNGTPESAYILQGGYMLAASYWPKDRVMINRLDSICQTVLKGKWPSARRSYDANTVASFYTTKLLDSPGAATEYSDPSVPTPPGAGVKEEHDQSTQMSKVKKHVREKEFTVKIKDEGGLKLTFQKQGLAQKRPFDGEDGALGQQQYLTRLRELQSASETSLVNFPKSIPVSGTSIQPTLGANGVILDNQPIVKKRRGRRKNVEGVDIFFFNRNKPPNHVSLGLTSSQISTGINPALSYTQPQGIPDTESPVPVINLKDGTRLAGDDAPKRKDLEKWLKEHPGYVEDLGAFIPRMQLHEGRPKQKRHRCRNPNKLDVNSLTGEERVQLINRRNARKVGGAFAPPLKDLCRFLKENSEYGVAPEWGDVVKQSGFLPESMYERILTGPVVREEVSRRGRRPKSGIAKATAAAAAASATSVSGNPLLANGLLPGVDLTTLQALQQNLQNLQSLQVTAGLMGMPTGLPSGGEAKNMAAMFPMLLSGMAGLPNLLGMGGLLTKPTESGTEDKKGSDSKESEGKTERTESQSSENGGENSVSSSPSTSSTAALNTAAAANPLALNPLLLSNILYPGMLLTPGLNLHIPTLSQSNTFDVQNKNSDLGSSKSVEVKEEDSRIKDQEDKGGTEPSPLNENSTDEGSEKADASSGSDSTSSSSEDSDSSNED

SEQ ID NO: 51364 - protein, 47 aa, Homo sapiens
YTAFTVAVTRWRTRFRIEMNKADNDAGNAAIDSLLNYETVKLFLYIL

SEQ ID NO: 51365 - protein, 86 aa, Homo sapiens
CNCGLVFHLQDPWVPTGPGAVQKQREHPPDYQWYALDQLPPDVQHKANESAILSTACFYGLVRPPRSGLYKLSYNQNPTSILIKYT

SEQ ID NO: 51366 - protein, 110 aa, Homo sapiens
EYLILLQQRNRILKHLKSKDPVQLRLEHLEQGFSVYVNGANSELKSSPRKAIHSDFSRSASHTEGTHDYGRRTLFREAEEALRRSSRTAPSKVQRRGWHQVWRLWPQPTL

SEQ ID NO: 51367 - protein, 173 aa, Homo sapiens
MLEEPRPRPPPSGLAGLLFLALCSRALSNEILGLKLPGEPPLTANTVCLTLSGLSKRQLGLCLRNPDVTASALQGLHIAVHECQHQLRDQRWNCSALEGGGRLPHHSAILKRGFRESAFSFSMLAAGVMHAVATACSLGKLVSCGCGWKGSGKLPGTSRHECESTTTGWGARW

SEQ ID NO: 51368 - protein, 142 aa, Homo sapiens
MENDNTVLLNPPLFALDKDAPLRYAGEICGFRLHGSGVPFEAVILDKATGEGLIRAKEPVDCEAQKEHTFTIQAYDCGEGPDGANTKKSHKATVHVRVNDVNEFAPVFVERLYRAAVTEGKLYDRILRVEAIDGDCSPQYSQ

SEQ ID NO: 51369 - protein, 160 aa, Homo sapiens
  MOD_RES (1)..(1): Any amino acid
XLREMLIRVNMEDLREQTHTRHYELYRRCKLEEMGFKDTDPDSKPFSLQETYEAKRNEFLGELQKKEEEMRQMFVMRVKEKEAELKEAEKELHEKFDLLKRTHQEEKKKVEDKKKELEEEVNNFQKKKAAAQLLQSQAQQSGAQQTKKDKDKKNPWLCTE

SEQ ID NO: 51370 - protein, 125 aa, Homo sapiens
MSSCVSSQPSSNRAAPQDELGGRGSSSSESQKPCEALRGLSSLSIHLGMESFIVVTECEPGCAVDLGLARDRPLEADGQEVPLDTSGSQARPHLSGRKLSLQERSQGGLAAGGSLDMNGRCICPS

SEQ ID NO: 51371 - protein, 996 aa, Homo sapiens
MWRCGGRQGLCVLRRLSGGHAHHRAWRWNSNRACERALQYKLGDKIHGFTVNQVTSVPELFLTAVKLTHDDTGARYLHLAREDTNNLFSVQFRTTPMDSTGVPHILEHTVLCGSQKYPCRDPFFKMLNRSLSTFMNAFTASDYTLYPFSTQNPKDFQNLLSVYLDATFFPCLRELDFWQEGWRLEHENPSDPQTPLVFKGVVFNEMKGAFTDNERIFSQHLQNRLLPDHTYSVVSGGDPLCIPELTWEQLKQFHATHYHPSNARFFTYGNFPLEQHLKQIHEEALSKFQKIEPSTVVPAQTPWDKPREFQITCGPDSFATDPSKQTTISVSFLLPDITDTFEAFTLSLLSSLLTSGPNSPFYKALIESGLGTDFSPDVGYNGYTREAYFSVGLQGIAEKDIETVRSLIDRTIDEVVEKGFEDDRIEALLHKIEIQMKHQSTSFGLMLTSYIASCWNHDGDPVELLKLGNQLAKFRQCLQENPKFLQEKVKQYFKNNQHKLTLSMRPDDKYHEKQAQVEATKLKQKVEALSPGDRQQIYEKGLELRSQQSKPQDASCLPALKVSDIEPTIPVTELDVVLTAGDIPVQYCAQPTNGMVYFRAFSSLNTLPEELRPYVPLFCSVLTKLGCGLLDYREQAQQIELKTGGMSASPHVLPDDSHMDTYEQVGVLFSSLCLDRNLPDMMQLWSEIFNNPCFEEEEHFKVLVKMTAQELANGIPDSGHLYASIRAGRTLTPAGDLQETFSGMDQVRLMKRIAEMTDIKPILRKLPRIKKHLLNGDNMRCSVNATPQQMPQTEKAVEDFLRSIGRSKKERRPVRPHTVEKPVPSSSGGDAHVPHGSQVIRKLVMEPTFKPWQMKTHFLMPFPVNYVGECIRTVPYTDPDHARDPNTIETLQSFGKAVDWAKSGKFTQQDIDEAKLSVFSTVDAPVAPSDKGMDHFLYGLSDEMKQAHREQLFAVSHDKLLAVSDRYLGTGKSTHGLAILGPENPKIAKDPSWIIQ

SEQ ID NO: 51372 - protein, 183 aa, Homo sapiens
NGQDNCGDGEDERDCPEVTCAPNQFQCSITKRCIPRVWVCDRDNDCVDGSDEPANCTQMTCGVDEFRCKDSGRCIPARWKCDGEDDCGDGSDEPKEECGEPRPHSRRKTVYLDERTCEPYQFRCKNNRCVPGRWQCDYDNDCGDNSDEESCTPRPCSESEFSCANGRCIAGRWKCDGDHDCAD

SEQ ID NO: 51373 - protein, 130 aa, Homo sapiens
  MOD_RES (1)..(1): Any amino acid
XGIELHSDVVEYAKEKLESFIKNSDSFDKFEFCEPAFVVGNCLQIASDSHQYDRIYCGAGVQKDHENYMKILLKVGGILVMPIEDQLTQIMRTGQNTWESKNILAVSFAPLVQPSKNDNGKPDSVGLHLG

SEQ ID NO: 51374 - protein, 160 aa, Homo sapiens
  MOD_RES (1)..(1): Any amino acid
XHLERIVEIARLRAVQRKARFAKLKVCVFKEEMPITPYECPLLNSLRFERSESDGQLFEHHCEVDVSFGPWEAVADVYDLLHCLVTDLSAQGLTVDHQCIGVCDKHLVNHYYCKRPIYEFKITWWLPSAYHAESSQLYSGSFCSSFLGLRIFWELSEPCA

SEQ ID NO: 51375 - protein, 69 aa, Homo sapiens
MAGPAGSQSLGPLCFHSSPQALYTVLLIVLVMMSLVFGKWLQGFRRVSWPGWRNPQTPSVWVHLSRMLR

SEQ ID NO: 51376 - protein, 298 aa, Homo sapiens
MPGLLNWITGAALPLTASDVTSCVSGYALGLTASLTYGNLEAQPFQGLFVYPLDECTTVIGFEAVIADRVVTVQIKDKAKLESGHFDASHVRSPTVTGNILQDGVSIAPHSCTPGKVTLDEDLERILFVANLGTIAPMENVTIFISTSSELPTLPSGAVRVLLPAVCAPTVPQFCTKSTGTSNQQAQGKDRHCFGAWAPGSWNKLCLATLLNTEVSNPMEYEFNFQLEIRGPCLLAGGEIEAAWPWSHCRSGAPNGAGMSLISGLDLGVPQRTPLSPDLMSLYPPCLSMPLRGGESHS

SEQ ID NO: 51377 - protein, 280 aa, Homo sapiens
MMTSVGTNRARGNWEQPQNQNQTQHKQRPQATAEQIRLAQMISDHNDADFEEKVKQLIDITGKNQDECVIALHDCNGDVNRAINVLLEGNPDTHSWEMVGKKKGVSGQKDGGQTESNEEGKENRDRDRDYSRRRGGPPRRGRGASRGREFRGQENGLDGTKSGGPSGRGTERGRRGRGRGRGGSGRRGGRFSAQGMGTFNPADYAEPANTDDNYGNSSGNTWNNTGHFEPDDGTSAWRTATEEWGTEDWNEDLSETKIFTASNVSSVPLPAENVTITAGQ

SEQ ID NO: 51378 - protein, 139 aa, Homo sapiens
MATHQKDCSLPYATESKECRMVQEQCCHSQLEELHCATGISLANEQDRCATPHGDNASLEATFVKRCCHCCLLGRAAQAQGQSCEYSLMVGYQCGQVFQACCVKSQETGDLDVGGLQETDKIIEVEEEQEDPYLNDRCR

SEQ ID NO: 51379 - protein, 132 aa, Homo sapiens
MAAAAPRRPTQGTVTFEDVAVNFSQEEWCLLSEAQRCLYRDVMLENLALISSLGCWCGSKDEEAPCKQRISVQRESQSRTPRAGVSPKKAHPCEMCGLILEDVFHFADHQETHHKQKLNRSGACGKNLDDTA

SEQ ID NO: 51380 - protein, 356 aa, Homo sapiens
MNENKDTDSKKSEEYEDDFEKDLEWLINENEKSDASIIEMACEKEENINQDLKENETVMEHTKRHSDPDKSLQDEVSPRRNDIISVPGIQPLDPISDSDSENSFQESKLESQKDLEEEEDEEVRRYIMEKIVQANKLLQNQEPVNDKRERKLKFKDQLVDLEVPPLEDTTTFKNYFENERNMFGKLSQLCISNDFGQEDVLLSLTNGSCEENKDRTILVERDGKFELLNLQDIASQGFLPPINNANSTENDPQQLLPRSSNSSVSGTKKEDSTAKIHAVTHSSTGEPLAYIAQPPLNRKTCPSSAVNSDRSKGNGKSNHRTQSAHISPVTSTYCLSPRQKELQKQLEEKREKLKRE

SEQ ID NO: 51381 - protein, 503 aa, Homo sapiens
MSHVAVENALGLDQQFAGLDLNSSDNQSGGSTASKGRYIPPHLRNREATKGFYDKDSSGWSSSKDKDAYSSFGSRSDSRGKSSFFSDRGSGSRGRFDDRGRSDYDGIGSRGDRSGFGKFERGGNSRWCDKSDEDDWSKPLPPSERLEQELFSGGNTGINFEKYDDIPVEATGNNCPPHIESFSDVEMGEIIMGNIELTRYTRPTPVQKHAIPIIKEKRDLMACAQTGSGKTAAFLLPILSQIYSDGPGEALRAMKENGRYGRRKQYPISLVLAPTRELAVQIYEEARKFSYRSRVRPCVVYGGADIGQQIRDLERGCHLLVATPGRLVDMMERGKIGLDFCKYLVLDEADRMLDMGFEPQIRRIVEQDTMPPKGVRHTMMFSATFPKEIQMLARDFLDEYIFLAVGRVGSTSENITQKVVWVEESDKRSFLLDLLNATGKDSLTLVFVETKKGADSLEDFLYHEGYACTSIHGDRSQRDREEALHQFRSGKSPILVATALFSR

SEQ ID NO: 51382 - protein, 1581 aa, Homo sapiens
MADRGCPLEAAPLPAEVRESLAELELELSEGDITQKGYEKKRAKLLARYIPLIQGIDPSLQAENRIPGPSQTTAAAPKQQKSRPTASRDERFRSDVHTEAVQAALAKYKERKMPMPSKRRSVLVHSSVETYTPPDTSSASEDEGSLRRPGRLTSTPLQSHSSVEPWLDRVIQGSSTSSSASSTSSHPGGRPTTAPSAAATPGAAATTALAGLEAHTHIDLHSAPPDVTTGLVEHSYFERPQVASVRSVPRGCSGSMLETADGVPVNSRVSSKIQQLLNTLKRPKRPPLKEFFVDDFEELLEVQQPDPNQPKPEGSETSVLRGEPLTAGVPRPPSLLATLQRWGTTQPKSPCLTALDTTGKAVYTLTYGKLWSRSLKLAYTLLNKLTSKNEPLLKPGDRVALVFPNSDPVMFMVAFYGCLLAELVPVPIEVPLTRKDAGSQQVGFLLGSCGVFLALTTDACQKGLPKAQTGEVAAFKGWPPLSWLVIDGKHLAKPPKDWHPLAQDTGTGTAYIEYKTSKEGSTVGVTVSHASLLAQCRALTQACGYSEAETLTNVLDFKRDAGLWHGVLTSVMNRMHVVSVPYALMKANPLSWIQKVCFYKARAALVKSRDMHWSLLAQRGQRDVSLSSLRMLIVADGANPWSISSCDAFLNVFQSRGLRPEVICPCASSPEALTVAIRRPPDLGGPPPRKAVLSMNGLSYGVIRVDTEEKLSVLTVQDVGQVMPGANVCVVKLEGTPYLCKTDEVGEICVSSSATGTAYYGLLGITKNVFEAVPVTTGGAPIFDRPFTRTGLLGFIGPDNLVFIVGKLDGLMVTGVRRHNADDVVATALAVEPMKFVYRGRIAVFSVTVLHDDRIVLVAEQRPDASEEDSFQWMSRVLQAIDSIHQVGVYCLALVPANTLPKAPLGGIHISETKQRFLEGTLHPCNVLMCPHTCVTNLPKPRQKQPEVGPASMIVGNLVAGKRIAQASGRELAHLEDSDQARKFLFLADVLQWRAHTTPDHPLFLLLNAKGTVTSTATCVQLHKRAERVAAALMEKGRLSVGDHVALVYPPGVDLIAAFYGCLYCGCVPVTVRPPHPQNLGTTLPTVKMIVEVSKSACVLTTQAVTRLLRSKEAAAAVDIRTWPTILDTDDIPKKKIASVFRPPSPDVLAYLDFSVSTTGILAGVKMSHAATSALCRSIKLQCELYPSRQIAICLDPYCGLGFALWCLCSVYSGHQSVLVPPLELESNVSLWLSAVSQYKARVTFCSYSVMEMCTKGLGAQTGVLRMKGVNLSCVRTCMVVAEERPRIALTQSFSKLFKDLGLPARAVSTTFGCRVNVAICLQPNRLGKLAEQGTAGPDPTTVYVDMRALRHDRVRLVERGSPHSLPLMESGKILPGVKVIIAHTETKGPLGDSHLGEIWVSSPHNATGYYTVYGEEALHADHFSARLSFGDTQTIWARTGYLGFLRRTELTDASGGRHDALYVVGSLDETLELRGMRYHPIDIETSVIRAHRSIAECAVFTWTNLLVVVVELDGLEQDALDLVALVTNVVLEEHYLVVGVVVIVDPGVIPINSRGEKQRMHLRDGFLADQLDPIYVAYNM

SEQ ID NO: 51383 - protein, 562 aa, Homo sapiens
  MOD_RES (1)..(1): Any amino acid
XLLLDLFFKYTWNNFLHFQVELCIAAILSHAAREERTEASGSESRVEPPHENGNRSLETPQPAASLPDNTMVTHLFQKCCLVQRILEAWEANDHTQAAGGMRRGNMGHLTRIANAVVQNLERGPVQTHISEVIRGLPADCRGRWESFVEETLTETNRRNTVDLAFSDYQIQQMTANFVDQFGFNDEEFADQDDNINAPFDRIAEINFNIDADEDSPSAALFEACCSDRIQPFDDDEDEDIWEDSDTRCAARVMARPRFGAPHASESCSKNGPERGGQDGKASLEAHRDAPGAGAPPAPGKKEAPPVEGDSEAGAMWTAVFDEPANSTPTAPGVVRDVGSSVWAAGTSAPEEKGWAKFTDFQPFCCSESGPRCSSPVDTECSHAEGSRSQGPEKAFSPASPCAWNVCVTRKAPLLASDSSSSGGSHSEDGDQKAASAMDAVSRGPGREAPPLPTVARTEEAVGRVGCADSRLLSPACPAPKEVTAAPAVAVPPEATVAITTALSKAGPAIPTPAVSSALAVAVPLGPIMAVTAAPAMVATLGTVTKDGKTDAPPEGAALNGPV

SEQ ID NO: 51384 - protein, 112 aa, Homo sapiens
MSSSMWYIMQSIQSKYSLSERLIRTIAAIRSFPHDNVEDLIRGGADVNCTHGTLKPLHCACMVSDADCVELLLEKGAEVNALDGYNRTALHYAAEKDEACVEVLLEYGANPN

SEQ ID NO: 51385 - protein, 355 aa, Homo sapiens
MASRWGPLIGLAPCCLWLLGAVLLMDASARPANHSSTRERVANREENEILPPDHLNGVKLEMDGHLNRGFHQEVFLGKDLGGFDEDAEPRRSRRKLMVIFSKVDVNTDRKISAKEMQRWIMEKTAEHFQEAMEESKTHFRAVDPDGDGHVSWDEYKVKFLASKGHSEKEVADAIRLNEELKVDEETQEVLENLKDRWYQADSPPADLLLTEEEFLSFLHPEHSRGMLRFMVKEIVRDLDQDGDKQLSVPEFISLPVGTVENQQGQDIDDNWVKDRKKEFEELIDSNHDGIVTAEELESYMDPMNEYNALNEAKQMIAVADENQNHHLEPEEVLKYSEFFTGSKLVDYARSVHEEF

SEQ ID NO: 51386 - protein, 323 aa, Homo sapiens
  MOD_RES (1)..(1): Any amino acid
XRGQGPEPAPGGGVEGVGARGVALKLFVQLLGCSRFGGAVVRAGEAEPSGAARSASSGREEPQPEEGEEEEEKEEERGPQWRLGARKPGSWTGEAAVCADSAPAARAPQALARASGRGGRVARRGAEESGPPHSPSRRGSASRAGPGRASETMNFLLSWVHWSLALLLYLHHAKWSQAAPMAEGGGQNHHEVVKFMDVYQRSYCHPIETLVDIFQEYPDEIEYIFKPSCVPLMRCGGCCNDEGLECVPTEESNITMQIMRIKPHQGQHIGEMSFLQHNKCECRPKKDRARQEKKSVRGKGKGQKRKRKKSRYKSWSVCDKPRR

SEQ ID NO: 51387 - protein, 234 aa, Homo sapiens
MAIYKQSQHMTEVVRRCPHHERCSDSDGLAPPQHLIRVEGNLRVEYLDDRNTFRHSVVVPYEPPEVGSDCTTIHYNYMCNSSCMGGMNRRPILTIITLEDSSGNLLGRNSFEVRVCACPGRDRRTEEENLRKKGEPHHELPPGSTKRALPNNTSSSPQPKKKPLDGEYFTLQIRGRERFEMFRELNEALELKDAQAGKEPGGSRAHSSHLKSKKGQSTSRHKKLMFKTEGPDSD

SEQ ID NO: 51388 - protein, 212 aa, Homo sapiens
EHQPRSGLLQSSLITLYTMYLTWSAMSNEPDRSCNPNLMSFITRITAPTLAPGNSTAVVPTPTPPSKSGSLLDSDNFIGLFVFVLCLLYSSIRTSTNSQVDKLTLSGSDSVILGDTTTSGASDEEDGQPRRAVDNEKEGVQYSYSLFHLMLCLASLYIMMTLTSWYSPDAKFQSMTSKWPAVWVKISSSWVCLLLYVWTLVAPLVLTSRDFS

SEQ ID NO: 51389 - protein, 86 aa, Homo sapiens
MAASTGYVRLWGAARCWVLRRPMLAAAGGRVPTAAGAWLLRGQRTCDASPPWALWGRGPAIGGQWRGTSTSPAGSQSGARRRRRTS

SEQ ID NO: 51390 - protein, 1892 aa, Homo sapiens
MASGLGSPSPCSAGSEEEDMDALLNNSLPPPHPENEEDPEEDLSETETPKLKKKKKPKKPRDPKIPKSKRQKKELGDSSGEGPEFVEEEEEVALRSDSEGSDYTPGKKKKKKLGPKKEKKSKSKRKEEEEEEDDDDDSKEPKSSAQLLEDWGMEDIDHVFSEEDYRTLTNYKAFSQFVRPLIAAKNPKIAVSKMMMVLGAKWREFSTNNPFKGSSGASVAAAAAAAVAVVESMVTATEVAPPPPPVEVPIRKAKTKEGKGPNARRKPKGSPRVPDAKKPKPKKVAPLKIKLGGFGSKRKRSSSEDDDLDVESDFDDASINSYSVSDGSTSRSSRSRKKLRTTKKKKKDHQDYCEVCQQGGEIILCDTCPRAYHMVCLDPDMEKAPEGKWSCPHCEKEGIQWEAKEDNSEGEEILEEVGGDLEEEDDHHMEFCRVCKDGGELLCCDTCPSSYHIHCLNPPLPEIPNGEWLCPRCTCPALKGKVQKILIWKWGQPPSPTPVPRPPDADPNTPSPKPLEGRPERQFFVKWQGMSYWHCSWVSELQLELHCQVMFRNYQRKNDMDEPPSGDFGGDEEKSRKRKNKDPKFAEMEERFYRYGIKPEWMMIHRILNHSVDKKGHVHYLIKWRDLPYDQASWESEDVEIQDYDLFKQSYWNHRELMRGEEGRPGKKLKKVKLRKLERPPETPTVDPTVKYERQPEYLDATGGTLHPYQMEGLNWLRFSWAQGTDTILADEMGLGKTVQTAVFLYSLYKEGHSKGPFLVSAPLSTIINWEREFEMWAPDMYVVTYVGDKDSRAIIRENEFSFEDNAIRGGKKASRMKKEASVKFHVLLTSYELITIDMAILGSIDWACLIVDEAHRLKNNQSKFFRVLNGYSLQHKLLLTGTPLQNNLEELFHLLNFLTPERFHNLEGFLEEFADIAKEDQIKKLHDMLGPHMLRRLKADVFKNMPSKTELIVRVELSPMQKKYYKYILTRNFEALNARGGGNQVSLLNVVMDLKKCCNHPYLFPVAAMEAPKMPNGMYDGSALIRASGKLLLLQKMLKNLKEGGHRVLIFSQMTKMLDLLEDFLEHEGYKYERIDGGITGNMRQEAIDRFNAPGAQQFCFLLSTRAGGLGINLATADTVIIYDSDWNPHNDIQAFSRAHRIGQNKKVMIYRFVTRASVEERITQVAKKKMMLTHLVVRPGLGSKTGSMSKQELDDILKFGTEELFKDEATDGGGDNKEGEDSSVIHYDDKAIERLLDRNQDETEDTELQGMNEYLSSFKVAQYVVREEEMGEEEEVEREIIKQEESVDPDYWEKLLRHHYEQQQEDLARNLGKGKRIRKQVNYNDGSQEDRDWQDDQSDNQSDYSVASEEGDEDFDERSEAPRRPSRKGLRNDKDKPLPPLLARVGGNIEVLGFNARQRKAFLNAIMRYGMPPQDAFTTQWLVRDLRGKSEKEFKAYVSLFMRHLCEPGADGAETFADGVPREGLSRQHVLTRIGVMSLIRKKVQEFEHVNGRWSMPELAEVEENKKMSQPGSPSPKTPTPSTPGDTQPNTPAPVPPAEDGIKIEENSLKEEESIEGEKEVKSTAPETAIECTQAPAPASEDEKVVVEPPEGEEKVEKAEVKERTEEPMETEPKGAADVEKVEEKSAIDLTPIVVEDKEEKKEEEEKKEVMLQNGETPKDLNDEKQKKNIKQRFMFNIADGGFTELHSLWQNEERAATVTKKTYEIWHRRHDYWLLAGIINHGYARWQDIQNDPRYAILNEPFKGEMNRGNFLEIKNKFLARRFKLLEQALVIEEQLRRAAYLNMSEDPSHPSMALNTRFAEVECLAESHQHLSKESMAGNKPANAVLHKVLKQLEELLSDMKADVTRLPATIARIPPVAVRLQMSERNILSRLANRAPEPTPQQVAQQQ

SEQ ID NO: 51391 - protein, 46 aa, Homo sapiens
MEEMFHKKSEAVRRLVEAAEEAHLKHEFDADLQTLQLSMGFIGLNL

SEQ ID NO: 51392 - protein, 140 aa, Homo sapiens
MVSWKGIYFILTLFWGSFFGSIFMLSPFLPLMFVNPSWYRWINNRLVATWLTLPVALLETMFGVKVIITGDAFVPGERSVIIMNHRTRMDWMFLWNCLMRYSYLRLEKICLKASLKGVPGFAQSHLKPNDTGILQQDCCC

SEQ ID NO: 51393 - protein, 96 aa, Homo sapiens
MCVRSCFQSPRLQWVWRTAFLKHTQRRHQGSHRWTHLGGSTYRAVIFDMGGVLIPSPGRVAAEWEVQNRIPSGTILKALMEGGENGPWMRFMRAEI

SEQ ID NO: 51394 - protein, 3118 aa, Homo sapiens
MPGAAGVLLLLLLSGGLGGVQAQRPQQQRQSQAHQQRGLFPAVLNLASNALITTNATCGEKGPEMYCKLVEHVPGQPVRNPQCRICNQNSSNPNQRHPITNAIDGKNTWWQSPSIKNGIEYHYVTITLDLQQVFQIAYVIVKAANSPRPGNWILERSLDDVEYKPWQYHAVTDTECLTLYNIYPRTGPPSYAKDDEVICTSFYSKIHPLENGEIHISLINGRPSADDPSPELLEFTSARYIRLRFQRIRTLNADLMMFAHKDPREIDPIVTRRYYYSVKDISVGGMCICYGHARACPLDPATNKSRCECEHNTCGDSCDQCCPGFHQKPWRAGTFLTKTECEACNCHGKAEECYYDENVARRNLSLNIRGKYIGGGVCINCTQNTAGINCETCTDGFFRPKGVSPNYPRPCQPCHCDPIGSLNEVCVKDEKHARRGLAPGSCHCKTGFGGVSCDRCARGYTGYPDCKACNCSGLGSKNEDPCFGPCICKENVEGGDCSRCKSGFFNLQEDNWKGCDECFCSGVSNRCQSSYWTYGKIQDMSGWYLTDLPGRIRVAPQQDDLDSPQQISISNAEARQALPHSYYWSAPAPYLGNKLPAVGGQLTFTISYDLEEEEEDTERVLQLMIILEGNDLSISTAQDEVYLHPSEEHTNVLLLKEESFTIHGTHFPVRRKEFMTVLANLKRVLLQITYSFGMDAIFRLSSVNLESAVSYPTDGSIAAAVEVCQCPPGYTGSSCESCWPRHRRVNGTIFGGICEPCQCFGHAESCDDVTGECLNCKDHTGGPYCDKCLPGFYGEPTKGTSEDCQPCACPLNIPSNNFSPTCHLDRSLGLICDGCPVGYTGPRCERCAEGYFGQPSVPGGSCQPCQCNDNLDFSIPGSCDSLSGSCLICKPGTTGRYCELCADGYFGDAVDAKNCQPCRCNAGGSFSEVCHSQTGQCECRANVQGQRCDKCKAGTFGLQSARGCVPCNCNSFGSKSFDCEESGQCWCQPGVTGKKCDRCAHGYFNFQEGGCTACECSHLGNNCDPKTGRCICPPNTIGEKCSKCAPNTWGHSITTGCKACNCSTVGSLDFQCNVNTGQCNCHPKFSGAKCTECSRGHWNYPRCNLCDCFLPGTDATTCDSETKKCSCSDQTGQCTCKVNVEGIHCDRCRPGKFGLDAKNPLGCSSCYCFGTTTQCSEAKGLIRTWVTLKAEQTILPLVDEALQHTTTKGIVFQHPEIVAHMDLMREDLHLEPFYWKLPEQFEGKKLMAYGGKLKYAIYFEAREETGFSTYNPQVIIRGGTPTHARIIVRHMAAPLIGQLTRHEIEMTEKEWKYYGDDPRVHRTVTREDFLDILYDIHYILIKATYGNFMRQSRISEISMEVAEQGRGTTMTPPADLIEKCDCPLGYSGLSCEACLPGFYRLRSQPGGRTPGPTLGTCVPCQCNGHSSLCDPETSICQNCQHHTAGDFCERCALGYYGIVKGLPNDCQQCACPLISSSNNFSPSCVAEGLDDYRCTACPRGYEGQYCERCAPGYTGSPGNPGGSCQECECDPYGSLPVPCDPVTGFCTCRPGATGRKCDGCKHWHAREGWECVFCGDECTGLLLGDLARLEQMVMSINLTGPLPAPYKMLYGLENMTQELKHLLSPQRAPERLIQLAEGNLNTLVTEMNELLTRATKVTADGEQTGQDAERTNTRAKSLGEFIKELARDAEAVNEKAIKLNETLGTRDEAFERNLEGLQKEIDQMIKELRRKNLETQKEIAEDELVAAEALLKKVKKLFGESRGENEEMEKDLREKLADYKNKVDDAWDLLREATDKIREANRLFAVNQKNMTALEKKKEAVESGKRQIENTLKEGNDILDEANRLADEINSIIDYVEDIQTKLPPMSEELNDKIDDLSQEIKDRKLAEKVSQAESHAAQLNDSSAVLDGILDEAKNISFNATAAFKAYSNIKDYIDEAEKVAKEAKDLAHEATKLATGPRGLLKEDAKGCLQKSFRILNEAKKLANDVKENEDHLNGLKTRIENADARNGDLLRTLNDTLGKLSAIPNDTAAKLQAVKDKARQANDTAKDVLAQITELHQNLDGLKKNYNKLADSVAKTNAVVKDPSKNNAVADADATVKNLEQEADRLIDKLKPIKELEDNLKKNISEIKELINQARKQANSIKVSVSSGGDCIRTYKPEIKKGSYNNIVVNVKTAVADNLLFYLGSAKFIDFLAIEMRKGKVSFLWDVGSGVGRVEYPDLTIDDSYWYRIVASRTGRNGTISVRALDGPKASIVPSTHHSTSPPGYTILDVDANAMLFVGGLTGKLKKADAVRVITFTGCMGETYFDNKPIGLWNFREKEGDCKGCTVSPQVEDSEGTIQFDGEGYALVSRPIRWYPNISTVMFKFRTFSSSALLMYLATRDLRDFMSVELTDGHIKVSYDLGSGMASVVSNQNHNDGKWKSFTLSRIQKQANISIVDIDTNQEENIATSSSGNNFGLDLKADDKIYFGGLPTLRNLRPEVNLKKYSGCLKDIEISRTPYNILSSPDYVGVTKGCSLENVYTVSFPKPGFVELSPVPIDVGTEINLSFSTKNESGIILLGSGGTPAPPRRKRRQTGQAYYAILLNRGRLEVHLSTGARTMRKIVIRPEPNLFHDGREHSVHVERTRGIFTVQVDENRRYMQNLTVEQPIEVKKLFVGGAPPEFQPSPLRNIPPFEGCIWNLVINSVPMDFARPVSFKNADIGRCAHQKLREDEDGAAPAEIVIQPEPVPTPAFPTPTPVLTHGPCAAESEPALLIGSKQFGLSRNSHIAIAFDDTKVKNRLTIELEVRTEAESGLLFYMARINHADFATVQLRNGLPYFSYDLGSGDTHTMIPTKINDGQWHKIKIMRSKQEGILYVDGASNRTISPKKADILDVVGMLYVGGLPINYTTRRIGPVTYSIDGCVRNLHMAEAPADLEQPTSSFHVGTCFANAQRGTYFDGTGFAKAVGGFKVGLDLLVEFEFRTTTTTGVLLGISSQKMDGMGIEMIDEKLMFHVDNGAGRFTAVYDAGVPGHLCDGQWHKVTANKIKHRIELTVDGNQVEAQSPNPASTSADTNDPVFVGGFPDDLKQFGLTTSIPFRGCIRSLKLTKGTGKPLEVNFAKALELRGVQPVSCPAN

SEQ ID NO: 51395 - protein, 617 aa, Homo sapiens
MSAGFWQPGPGGPPCRLCGEASRGRAPSRDEGSLLLGSRRPRRDAAERCAAALMASRRKSEAKQMPRAAPATRVTRRSTQESLTAGGTDLKRELHPPATSHEAPGTKRSPSAPAATSSASSSTSSYKRAPASSAPQPKPLKRFKRAAGKKGARTRQGPGAESEDLYDFVFIVAGEKEDGEEMEIGEVACGALDGSDPSCLGLPALEASQRFRSISTLELFTVPLSTEAALTLCHLLSSWVSLESLTLSYNGLGSNIFRLLDSLRALSGQAGCRLRALHLSDLFSPLPILELTRAIVRALPLLRVLSIRVDHPSQRDNPGVPGNAGPPSHIIGDEEIPENCLEQLEMGFPRGAQPAPLLCSVLKASGSLQQLSLDSATFASPQDFGLVLQTLKEYNLALKRLSFHDMNLADCQSEVLFLLQNLTLQEITFSFCRLFEKRPAQFLPEMVAAMKGNSTLKGLRLPGNRLGNAGLLALADVFSEDSSSSLCQLDISSNCIKPDGLLEFAKRLERWGRGAFGHLRLFQNWLDQDAVTAREAIRRLRATCHVVSDSWTHPRPSQIMLAPCDGARTSQSHARYHQLAGAEAWAAQNPNHQFYLSLSVTFFLFFPSSLALRSWRP

SEQ ID NO: 51396 - protein, 150 aa, Homo sapiens
  MOD_RES (1)..(1): Any amino acid
XPMEIKPGISLATVSAVLHTKDNKHLLQPPPRPAQPTSGKKRKRVSDDVPDCKVLKPLLSGSIPVEQFVQTLEKISQMCSLPSPPLSFLLEQHGFSDIKVEDTAKGHIVLLQEAETLIQIEEDSTHIICDNDEMLRVRLRDLVLKFLQKF

SEQ ID NO: 51397 - protein, 88 aa, Homo sapiens
MPKGGCPKAPQQEELPLSSDMVEKQTGKKDKDKVSLTKTPKLERGDGGKEVRERASKRKLPFTAGANGEQKDSDTERWARARPRTRPL

SEQ ID NO: 51398 - protein, 201 aa, Homo sapiens
MPSALAIFTCRPNSHPFQERHVYLDEPIKIGRSVARCRPAQNNATFDCKVLSRNHALVWFDHKTGKFYLQDTKSSNGTFINSQRLSRGSEESPPCEILSGDIIQFGVDVTENTRKVTHGCIVSTIKLFLPDGMEARLRSDVIHAPLPSPVDKVAANTPSMYSQELFQLSQYLQVFRGSNMHGAVISCDNSAFFWIPPKGPL

SEQ ID NO: 51399 - protein, 283 aa, Homo sapiens
MWQLWASLCCLLVLANARSRPSFHPLSDELVNYVNKRNTTWQAGHNFYNVDMSYLKRLCGTFLGGPKPPQRVMFTEDLKLPASFDAREQWPQCPTIKEIRDQGSCGSCWAFGAVEAISDRICIHTNAHVSVEVSAEDLLTCCGSMCGDGCNGGYPAEAWNFWTRKGLVSGGLYESHVGCRPYSIPPCEHHVNGSRPPCTGEGDTPKCSKICEPGYSPTYKQDKHYGYNSYSVSNSEKDIMAEIYKNGPVEGAFSVYSDFLLYKSGLDRASHQWMNTQGGPCPG

SEQ ID NO: 51400 - protein, 177 aa, Homo sapiens
MMDLRNTPAKSLDKFIEDYLLPDTCFRMQINHAIDIICGFLKERCFRGSSYPVCVSKVVKGGSSGKGTTLRGRSDADLVVFLSPLTTFQDQLNRRGEFIQEIRRQLEACQRERAFSVKFEVQAPRWGNPRALSFVLSSLQLGEGVEFDVLPAFDALGESSQLLFLPLPISEQKSPTV

SEQ ID NO: 51401 - protein, 292 aa, Homo sapiens
MAVPGSFPLLVEGSWGPDPPKNLNTKLQMYFQSPKRSGGGECEVRQDPRSPSRFLVFFYPEDVRQKVLERKNHELVWQGKGTFKLTVQLPATPDEIDHVFEEELLTKESKTKEDVKEPDVSEELDTKLPLDGGLDKMEDIPEECENISSLVAFENLKANVTDIMLILLVENISGLSNDDFQVEIIRDFDVAVVTFQKHIDTIRFVDDCTKHHSIKQLQLSPRLLEVTNTIRVENLPPGADDYSLKLFFENPYNGGGRVANVEYFPEESSALIEFFDRKDRCCCQLRSLGSRA

SEQ ID NO: 51402 - protein, 204 aa, Homo sapiens
VMLSNPVLENPVNLEAARILVKDESLYRTILRLFNRPLQMKDDSQELPKDPRKCIRPIKTTSFSDYYQTWSRIATSKATEYYRTPLLKVPNFIGQYYKWKKMDLQHQKEWNLKYSVIKCWLARKRMPHEVTHSMEEIKLCPTLNEIFLESPTAINSITDIYETEEEGWKSDTSLYENDTDEPREEEVEDLISWTNTLNTNTSED

SEQ ID NO: 51403 - protein, 79 aa, Homo sapiens
  MOD_RES (1)..(1): Any amino acid
XFESLAIQLLQFNILFLWLSSQALTLRPCTTSGTSISQPPGSCFAPWDRTHRTWFRPLSTSSARLDHPCADRPTSATRR

SEQ ID NO: 51404 - protein, 184 aa, Homo sapiens
MPLLDGDLEGSGKHSSRKVDSPFGPGSPSKGFFSRGPQPRPSSPMSAPVRPKTSPGSPKTVFPFSYQESPPRSPRRMSFSGIFRSSSKESSPNSNPATSPGGIRFFSRSRKTSGLSSSPSTPTQVTKQHTFPLESYKHEPERLENRIYASSSPPDTGQRFCPSSFQSPTRPPLASPTHYAPSKA

SEQ ID NO: 51405 - protein, 114 aa, Homo sapiens
MQSEPIRVLVTGAAGQIAYSLLYSIGNGSVFGKDQPIILVLLDITPMMGVLDGVLMELQDCALPLLKDVIATDKEDVAFKDLDVAILVGSMPRREGMERKDLLKANVKIFKSQG

SEQ ID NO: 51406 - protein, 190 aa, Homo sapiens
MDPAARVVRALWPGGCALAWRLGGRPQPLLPTQSRAGFAGAAGGPSPVAAARKGSPRLLGAAALALGGALGLYHTARWHLRAQDLHAERSAAQLSLSSRLQLTLYQYKTCPFCSKVRAFLDFHALPYQVVEVNPVRRAEIKFSSYRKVPILVAQEGESSQQLNDSSVIISALKTYLVSGPWKRSSPTTQP

SEQ ID NO: 51407 - protein, 347 aa, Homo sapiens [sequence omitted]

SEQ ID NO: 51408 - protein, 182 aa, Homo sapiens
HLGKIEELLSGENRGPILLPYQFRMEEIEGFRYRCRDAMRSVTKQAIREARLKEIKEELLHSEKLKTYFEDNPRDLQLLRHDLPLHPAVVKPHLGHVPDYLVPPALRGLVRPHKKRKKLSSSCRKAKVRLLGTADSPRTPPNLLFCHHQNVEAPCPREGKRGCPREGKRGHPRTGPQKSGVG

SEQ ID NO: 51409 - protein, 651 aa, Homo sapiens
MNHFRKMEVINLTTLPMIPVDEHLAVSLVARNTMVKTVRKELENNPPSCLIGSMHQVNQKIADINLRTEPSANSLAIERFELEKKALREKTRSSPEDKVKRQRKSQYSCKGSELRHARSSVIKRKTADKNLLAELYQYSNFNSSKPNKLPNGVDFCDMVGNVVRAERDCLSGKHFCSGRELEKFLSSSSPRAIWLDSFWWIFHERYQPNKELQNNLFDRIAQHYALLLFRVPKSHSEEALLKRLPSLLSKAVYTSFCCCFPQSWFDTHEFKSDICNTMSLWISGTYPSPQSYDSWDYSELDPERFRREELMLYRRRLTKGREFSLFAGKRAFSQKPAQSRKFYHPQSSSANSPSEKTSSAKQNSEKSLRMQNTAKEHHCQTLVLKKPTQEVKRISEARECENMFPKKSCAACKSPELTSNLFNIYGKSPLIVYFLQNYASLQQHGKNVLIVRREKTTSTPDCTPTYTDVISETLCSMKKRKDNLNQLYQHHWTEWNYFDKHLKELQDNFSREMKNIDPKAADTKKANHMFIPPSAVNEESPDKKTKGSLQREIEFKGCSNKNHGKGRSVNMRGKEEREREEKQKLNISFHSLPSPEELHNLEPGSAYRIRDISATRTPLRRPSSWEPSLIYQEQVLLKTHTLSMEEDKFRC

SEQ ID NO: 51410 - protein, 46 aa, Homo sapiens
MELSDSDRPVSFGSTSSSASSRDSHGSFGSRMTLVSNSHMGLFNQD

SEQ ID NO: 51411 - protein, 20 aa, Homo sapiens
MATGLGEPVYGLSEDEPGSP

SEQ ID NO: 51412 - protein, 246 aa, Homo sapiens
MALYLNGATVVAGFGGALGYLLGAIDWAHLELGRLLGTEFQVMFFFSALVLTLCFTVHLCSISEAPLTEVAKGIPPQQTPQDPPLSSDGMYEYGSIEKVKNGYVNPELAMQGAKNKNHAEQTRRAMTLKSLLRALVNMPPHYRYLCISHLIGWTAFLSNMLFFTDFMGQIVYRGDPYSAHNSTEFLIYERGVEVGCWGLCINSVFSSLYSYFQKVLVSYIGLKGLYFTGYLLFGLGTGFIGLFPNV

SEQ ID NO: 51413 - protein, 82 aa, Homo sapiens
MTAAPASPQQIRDRLLQAIDPQSNIRNMVAVLEVISSLEKYPITKEALEVSIPDPSIWEGRTGGRGWYQPGPSAASGSISVF

SEQ ID NO: 51414 - protein, 280 aa, Homo sapiens [sequence omitted]

SEQ ID NO: 51415 - protein, 102 aa, Homo sapiens
  MOD_RES (1)..(1): Any amino acid
XAHATEDLENNGSKKDGVCGPPPSKKMKLFGFKEDPFVFIPEDDPLFPPIELLTRGSKSGVEITAVKSLTVLSGWHRREYIHCIHLLTQELLLYQWKMLRYC

SEQ ID NO: 51416 - protein, 241 aa, Homo sapiens
VSGQAEVDDILAAVRPTTRLVTIMLANNETGIVMPVPEISQRIKALNQERVAAGLPPILVHTDAAQALGKQRVDVEDLGVDFLTIVGHKFYGPRIGALYIRGLGEFTPLYPMLFGGGQERNFRPGTENTPMIAGLGKAAELVTQNCEAYEAHMRDVRDYLEERLEAEFGQKRIHLNSQFPGTQRLPNTCNFSIRGPRLQGHVVLAQCRVLMASVGAACHSDHGDHSSCSSVSPSPGRPQCC

SEQ ID NO: 51417 - protein, 101 aa, Homo sapiens
MRLEELKRLQNPLEQVNDGKYSFENHQLAMDAENNIEKYPLNLQPLESKHSASMARVPAAAGAPGEEEPVPTLCLLREAEQLCQHEHLLRQQHTRLPRGWD

SEQ ID NO: 51418 - protein, 238 aa, Homo sapiens
  MOD_RES (1)..(1): Any amino acid
XLQWLMGAPAGLKMNRALDQVLGRFFLYHIHLWISYIHLMSPFVEHILWHVGLSACLGLTVALSLLSDIIALLTFHIYCFYVYGARLYCLKIHGLSSLWRLFRGKKWNVLRQRVDSCSYDLDQLFIGTLLFTILLFLLPTTALYYLVFTLLRLLVVAVQGLIHLLVDLINSLPLYSLGLRLCRPYRLAGSEPWRPEATGLCSSALGFSGLGSLNCRPGAKRGKVRGTRSQQGGHHPLA

SEQ ID NO: 51419 - protein, 215 aa, Homo sapiens
MTECSGTSQPPPASVPTTAASEGRMVIQDIPAVTSRGHVENTPDLVSDSTYYSSFYQPSLFPYYNNLYNCPQYSMALAADSASGEVGNPLGGSPVKNSLRGLPGPYVPGQTGNQWQMKNMENRHAMSSQYRMHSYYPPPSYLGQSVPQFFTFEDAPSYPEARASVFSPPSSQDSGLVSLSSSSPISNKSTKAVLECEPASEPSSFTVTPVIEEDE

SEQ ID NO: 51420 - protein, 19 aa, Homo sapiens
MSIMEMQAMEVNTSASEIL

SEQ ID NO: 51421 - protein, 145 aa, Homo sapiens
MATMIPPVKLKWLEHLNSSWITEDSESIATREGVAVLYSKLVSNKEVVPLPQQVLCLKGPQLPDFERESLSSDEQDHYLDALLSSQLALAKMVCSDSPFAGALRKRLLVLQRVFYALSNKYHDKGKVKQQQHSPESSSGSADVHS

SEQ ID NO: 51422 - protein, 309 aa, Homo sapiens
MAFVKSGWLLRQSTILKRWKKNWFDLWSDGHLIYYDDQTRQNIEDKVHMPMDCINIRTGQECRDTQPPDGKSKDCMLQIVCRDGKTISLCAESTDDCLAWKFTLQDSRTNTAYVGSAVMTDETSVVSSPPPYTAYAAPAPEELHSKGPKIHTTTSAKTQAVLPTRCFFPSESPIRRSVQISVLLPAVNIRRRIKLTFPQPARPRAPRSLCLWQTWFAGKRAPSLPTAATAPALPSCPSPPAPSQALPPSLAGWRSPSSAPLPPEQALAPRSFQLSKHQARPRPHRPGTPPVPAWPGVPPPPPARPPALR

SEQ ID NO: 51423 - protein, 43 aa, Homo sapiens
MSGWKTLSQQQQRDAPSKILLCGKSFLTSEKTSALPGETQRRL

SEQ ID NO: 51424 - protein, 200 aa, Homo sapiens
VKGRARSSRPLGRAALARGSPPVRLPALPHQGYLGLLGRTLAASASALRPVAAVQELCSPLQDMVIQALQKTNNRSIEAAIEFISKMSYQDPRREQMAAAAARPINASMKPGNVQQSVNRKQSWKGSKESLVPQRHGPPLGESVAYHSESPNSQTDVGRPLSGSGISAFVQAHPSNGQRVNPPPPPQVRSVTPPPPPRGQ

SEQ ID NO: 51425 - protein, 168 aa, Homo sapiens
MAMRELVEAECGGANPLMKLAGHFTQDKALRQEGLRPGPWPPGAPASEAASKPLGVASEDELVAEFLQDQNAPLVSRAPQTFKMDDLLAEMQQIEQSNFRQAPQRAPGVADLALSENWAQEFLAAGDAVDVTQDYNETDWSQEFISEVTVLTRSRYDEYHPEEDLQHT

SEQ ID NO: 51426 - protein, 144 aa, Homo sapiens
MSGPVPSRARVYTDVNTHRPREYWDYESHVVEWGNQDDYQLVRKLGRGKYSEVFEAINITNNEKVVVKILKPVKKKKIKREIKILENLRGGPNIITLADIVKDPVSRTPALVFEHVNNTDFKQLYQTLTDYDIRFYMYEILKAL

SEQ ID NO: 51427 - protein, 829 aa, Homo sapiens
MISRLAAAQSCASHWPPSADSHILPFSTPGPSTCLPNYYRCSSGTCVMDTWVCDGYRDCADGSDEEACPLLANVTAASTPTQLGRCDRFEFECHQPKTCIPNWKRCDGHQDCQDGRDEANCPTHSTLTCMSREFQCEDGEACIVLSERCDGFLDCSDESDEKACSDELTVYKVQNLQWTADFSGDVTLTWMRPKKMPSASCVYNVYYRVVGESIWKTLETHSNKTNTVLKVLKPDTTYQVKVQVQCLSKAHNTNDFVTLRTPEGLPDAPRNLQLSLPREAEGVIVGHWAPPIHTHGLIREYIVEYSRSGSKMWASQRAASNFTEIKNLLVNTLYTVRVAAVTSRGIGNWSDSKSITTIKGKVIPPPDIHIDSYGENYLSFTLTMESDIKVNGYVVNLFWAFDTHKQERRTLNFRGSILSHKVGNLTAHTSYEISAWAKTDLGDSPLAFEHVMTRGVRPPAPSLKAKAINQTAVECTWTGPRNVVYGIFYATSFLDLYRNPKSLTTSLHNKTVIVSKDEQYLFLVRVVVPYQGPSSDYVVVKMIPDSRLPPRHLHVVHTGKTSVVIKWESPYDSPDQDLLYAVAVKDLIRKTDRSYKVKSRNSTVEYTLNKLEPGGKYHIIVQLGNMSKDSSIKITTVSLSAPDALKIITENDHVLLFWKSLALKEKHFNESRGYEIHMFDSAMNITAYLGNTTDNFFKISNLKMGHNYTFTVQARCLFGNQICGEPAILLYDELGSGADASATQAARSTDVAAVVVPILFLILLSLGVGFAILYTKHRRLQSSFTAFANSHYSSRLGSAIFSSGDDLGEDDEDAPMITGFSDDVPMVIA

SEQ ID NO: 51428 - protein, 82 aa, Homo sapiens
EQVQKGPLKLKGVAELGVTKRKKKKKDKDKAKLLEAMGTSKKNEEEKRRGLDKRTPAQAAFEKMQEKRRCGFTMLARLISNF

SEQ ID NO: 51429 - protein, 521 aa, Homo sapiens
MEATSREAAPAKSSASGPNAPPALFELCGRAVSAHMGVLESGVWALPGPILQSILPLLNIYYLERIEETALKKGLSTQAIWRRLWDELMKTRPSSLESVTCWRAKFMEAFFSHVLRGTIDVSSDRRLCDQRFSPLLHSSRHVRQLTICNMLQGATELVAEPNRRVLETLASSLHTLKFRHLLFSDVAAQQSLRQLLHQLIHHGAVSQVSLYSWPVPESALFILILTMSAGFWQPGPGGPPCRLCGEASRGRAPSRDEGSLLLGSRRPRRDAAERCAAALMASRRKSEAKQMPRAAPATRVTRRSTQESLTAGGTDLKRELHPPATSHEAPGTKRSPSAPAATSSASSSTSSYKRAPASSAPQPKPLKRFKRAAGKKGARTRQGPGAESEDLYDFVFIVAGEKEDGEEMEIGEVACGALDGSDPSCLGLPALEASQRFRSISTLELFTVPLSTEAALTLCHLLSSWVSLESLTLSYNGEHPGVAGIGLRLPSSTSCVPNSREVGGANWGYDQEVREEGLYAS

SEQ ID NO: 51430 - protein, 1085 aa, Homo sapiens
IRDYKDEQGRLLCELFIRAPKRRNQPDYYEVVSQPIDLMKIQQKLKMEEYDDVNLLTADFQLLFNNAKSYYKPDSPEYKAACKLWDLYLRTRNEFVQKGEADDEDDDEDGQDNQGTVTEGSSPAYLKEILEQLLEAIVVATNPSGRLISELFQKLPSKVQYPDYYAIIKEPIDLKTIAQRIQNGSYKSIHAMAKDIDLLAKNAKTYNEPGSQVFKDANSIKKIFYMKKAEIEHHEMAKSSLRMRTPSNLAAARLTGPSHSKGSLGEERNPTSKYYRNKRAVQGGRLSAITMALQYGSESEEDAALAAARYEEGESEAESITSFMDVSNPFYQLYDTVRSCRNNQGQLIAEPFYHLPSKKKYPDYYQQIKMPISLQQIRTKLKNQEYETLDHLECDLNLMFENAKRYNVPNSAIYKRVLKLQQVMQAKKKELARRDDIEDGDSMISSATSDTGSAKRKRNTHDSEMLGLRRLSSKKNIRKQRMKILFNVVLEAREPGSGRRLCDLFMVKPSKKDYPDYYKIILEPMDLKIIEHNIRNDKYAGEEGMIEDMKLMFRNARHYNEEGSQVYNDAHILEKLLKEKRKELGPLPDDDDMASPKLKLSRKSGISPKKSKYMTPMQQKLNEVYEAVKNYTDKRGRRLSAIFLRLPSRSELPDYYLTIKKPMDMEKIRSHMMANKYQDIDSMVEDFVMMFNNACTYNEPESLIYKDALVLHKVLLETRRDLEGDEDSHVPNVTLLIQELIHNLFVSVMSHQDDEGRCYSDSLAEIPAVDPNFPNKPPLTFDIIRKNVENNRYRRLDLFQEHMFEVLERARRMNRTDSEIYEDAVELQQFFIKIRDELCKNGEILLSPALSYTTKHLHNDVEKERKEKLPKEIEEDKLKREEEKRAEKSEDSSGAAGLSGLHRTYSQDCSFKNSMYHVGDYVYVEPAEANLQPHIVCIERLWEDSAGEKWLYGCWFYRPNETFHLATRKFLEKEVFKSDYYNKVPVSKILGKCVVMFVKEYFKLCPENFRDEDVFVCESRYSAKTKSFKKIKLWTMPISSVRFVPRDVPLPVVRVASVFANADKGDDEKNTDNSEDSRAEDNFNL

SEQ ID NO: 51431 - protein, 741 aa, Homo sapiens
MGPDCPPPPPPPPPNNNNNNNSKHTGHKSACVPNMTERRRDELSEEINNLREKVMKQSEENNNLQSQVQKLTEENTTLREQVEPTPEDEDDDIELRGAAAAAAPPPPIEEECPEDLPEKFDGNPDMLAPFMAQCQIFMEKSTRDFSVDRVRVCFVTSMMTGRAARWASAKLERSHYLMHNYPAFMMEMKHVFEDPQRREVAKRKIRRLRQGMGSVIDYSNAFQMIAQDLDWNEPALIDQYHEGLSDHIQEELSHLEVAKSLSALIGQCIHIERRLARAAAARKPRSPPRALVLPHIASHHQVDPTEPVGGARMRLTQEEKERRRKLNLCLYCGTGGHYADNCPAKASKSSPGKLPGPAVEGPSATGPEIIRSPQDDASSPHLQVMLQIHLPGRHTLFVRAMIDSGASGNFIDHEYVAQNGIPLRIKDWPILVEAIDGRPIASGPVVHETHDLIVDLGDHREVLSFDVTQSPFFPVVLGVRWLSTHDPNITWSTRSIVFDSEYCRYHCRMYSPIPPSLPPPAPQPPLYYPVDGYRVYQPVRYYYVQNVYTPVDEHVYPDHRLVDPHIEMIPGAHSIPSGHVYSLSEPEMAALRDFVARNVKDGLITPTIAPNGAQVLQVKRGWKLQVSYDCRAPNNFTIQNQYPRLSIPNLEDQAHLATYTEFVPQIPGYQTYPTYAAYPTYPVGFAWYPVGRDGQGRSLYVPVMITWNPHWYRQPPVPQYPPPQPPPPPPPPPPPPSYSTL

SEQ ID NO: 51432 - protein, 46 aa, Homo sapiens
  MOD_RES (1)..(1): Any amino acid
XASRCWRWWGWSAWPRTRLPPAGSTPSRSRAPLGLDGSAGRPASAE

SEQ ID NO: 51433 - protein, 182 aa, Homo sapiens
MSSDSELAVFGEAAPFLRKSERERIEAQNRPFDAKTSVFVAEPKESFVKGTIQSREGGKVTVKTEGGATLTVKDDQVFPMNPPKYDKIEDMAMMTHLHEPAVLYNLKERYAAWMIYTYSGLFCVTVNPYKWLPVYKPEVVTAYRGKKRQEAPPHIFSISDNAYQFMLTDRENQSILITGESG

SEQ ID NO: 51434 - protein, 37 aa, Homo sapiens
  MOD_RES (1)..(1): Any amino acid
XNGALKTSSGFLAKSSIVEELSVQWMEYHYKDFQVKK

SEQ ID NO: 51435 - protein, 159 aa, Homo sapiens
  MOD_RES (1)..(1): Any amino acid
XLRPPDLAQRVQLWEHFQSLLWTYSRLREQEQCFAVEALERLIHPQLCELCIEALERHVIQAVNTSPERGGEEALHAFLLVHSKLLAFYSSHSASSLRPADLLALILLVQDLYPSESTAEDDIQETDSFSLPEEYFTPAPSPGDQSSGEDRRKAGGNNS

SEQ ID NO: 51436 - protein, 75 aa, Homo sapiens
MDRNREAEMELRRGPSPTRAGRGHEVDGDKATCHTCCICGKSFPFQSSLSQHMRKHTGEKPYKCPYCDHRASQKG

SEQ ID NO: 51437 - protein, 102 aa, Homo sapiens
ALLNAFTATFELSDDGRFEVWNAMTRGQHCDTWSYVLIPAAQPGQFTVDHGVGRSWLLPPGTLDQFICLGRAQGLSDDNIVFPDVTGGALDLSSLPWVAAPA

SEQ ID NO: 51438 - protein, 73 aa, Homo sapiens
MFGVYDNIGILGNFEKHPKELIRGPIWLRGWKGNELQRCIRKRKMVGSRMFADDLHNLNKRIRYLYKHFNRHG

SEQ ID NO: 51439 - protein, 263 aa, Homo sapiens
  MOD_RES (1)..(1): Any amino acid
XVRKYFQLDVTLAQLYHHWGSVDSHFQEVAQKFQGVRLLRQDPIECLFSFICSSNNNIARITGMVERLCQAFGPRLIQLDDVTYHGFPSLQALAGPEVEAHLRKLGLGYRARYVSASARAILEEQGGLAWLQQLRESSYEEAHKALCILPGVGTKGLLGNAFDGHQLLRPLIFCQDHLREGPPIGRGDSQGEELEPQLPSSLSSIPYGFCDHCWTKDVDDPPLVTHPSPGSRDGHMTQAWPVKVVSPLATVIGHVMQASLLAL

SEQ ID NO: 51440 - protein, 81 aa, Homo sapiens
VNIAALLSVMLQPYMPTVSATIQAQLQLPPPACSILLTNFLCTLPAGHQIGTVSPLFQKLENDQIESLRQRFGGGQKRPST

SEQ ID NO: 51441 - protein, 205 aa, Homo sapiens
MRVEHARMHAKHRGHEAMHAEMVLILIATLVVAQLLLVQWKQRHPRSYNMVTLFQMWVVPLYFTVKLHWWRFLVIWILFSAVTAFVTFRATRKPLVQTTPRLVYKWFLLIYKISYATGIVGYMAVMFTLFGLNLLFKIKPEDAMDFGISLLFYGLYYGVLERDFAEMCADYMASTIGRCSASTSSASVAGASWERSKRVPTAKRR

SEQ ID NO: 51442 - protein, 177 aa, Homo sapiens
MDLLWMPLLLVAACVSAVHSSPEVNAGVSSIHITKPVHILEERSLLVLTPAGLTQMLNQTRFLMVLFHEVLLLLPRLKYNGAILAHRNLHLPGSSDSPASASQVAGITDNPSSKQSRNLAEELGKAVEIMGKGKNGIGFGKVDITIEKELQQEFGITKAPELKLFFEGNRSEPISCK

SEQ ID NO: 51443 - protein, 101 aa, Homo sapiens
MLFLCFDRIRVTVDGEFLHYIFPLQFLDSPEWDSLRPTEEGIFQVTLTAETDCRYVSWRRKKLYLLFAQHRYISRLFSVLIGSDIADKLYALNDRVYIGKR

SEQ ID NO: 51444 - protein, 53 aa, Homo sapiens
MTPTQIGPSLLPIMWQLYPDGRYRSSDSSFWRLVYHIKIDGVEDMLLELLPDD

SEQ ID NO: 51445 - protein, 146 aa, Homo sapiens
MRMCTPIRGLLMALAVMFGTAMAFAPIPRITWEHREVHLVQFHEPDIYNYSALLLSEDKDTLYIGAREAVFAVNALNISEKQHEVYWKVSEDKKAKCAEKGKSKQTECLNYIRVLQPLSATSLYVCGTNAFQPACDHLNLTSFKFL

SEQ ID NO: 51446 - protein, 202 aa, Homo sapiens
EIIEFPILKLNGRTMEIESTFHMYVQPVVHPQLTPFCTELTGIIQAMVDGQPSLQQVLERVDEWMAKEGLLDPNVKSIFVTCGDWDLKVMLPGQCQYLGLPVADYFKQWINLKKGSSPGTASGTSCYQSEEAQRKENTPGVKAYSFAMGCWPKNGLLDMNKGLSLQHIGRPHSGIDDCKNIANIMKTLAYRGFIFKQTSKPF

SEQ ID NO: 51447 - protein, 975 aa, Homo sapiens
MEDYEQELCGVEDDFHNQFAAELEVLAELEGASTPSPSGVPLFTAGRPPRTFEEALARGDAASSPAPAASVGSSQGGARKRQVDADLQPAGSLPHAPRIKRPRLQVVKRLNFRSEEMEEPPPPDSSPTDITPPPSPEDLAELWGHGFSEAAADVGLTRASPAARNPVLRRPPILEDYVHVTSTEGVRAYLVLRADPMAPGVQGSLLHVPWRGGGQLDLLGVSLASLKKQVDGERRERLLQEAQKLSDTLHSLRSGEEEAAQPLGAPEEEPTDGQDASSHCLWVDEFAPRHYTELLSDDFTNRCLLKWLKLWDLVVFGHERPSRKPRPSVEPARVSKEATAPGKWKSHEQVLEEMLEAGLDPSQRPKQKVALLCGPPGLGKTTLAHVIARHAGYSVVEMNASDDRSPEVFRTRIEAATQMESVLGAGGKPNCLVIDEIDGAPVAAINVLLSILNRKGPQEVGPQGPAVPSGGGRRRRAEGGLLMRPIICICNDQFAPSLRQLKQQAFLLHFPPTLPSRLVQRLQEVSLRQGMRADPGVLAALCEKTDNDIRACINTLQFLYSRGQRELSVRDVQATRVGLKDQRRGLFSVWQEVFQLPRAQRRRVGQDPALPADTLLLGDGDAGSLTSASQRFYRVLHAAASAGEHEKVVQGLFDNFLRLRLRDSSLGAVCVALDWLAFDDLLAGAAHHSQSFQLLRYPPFLPVAFHVLFASSHTPRITFPSSQQEAQNRMSQMRNLIQTLVSGIAPATRSRATPQALLLDALCLLLDILAPKLRPVSTQLYSTREKQQLASLVGTMLAYSLTYRQERTPDGQYIYRLEPNVEELCRFPELPARKPLTYQTKQLIAREIEVEKMRRAEASARVENSPQVDGSPPGLEGLLGGIGEKGVHRPAPRNHEQRLEHIMRRAAREEQPEKDFFGRVVVRSTAVPSAGDTAPEQDSVERRMGTAVGRSEVWFRFNEGVSNAVRRSLYIRDLL

SEQ ID NO: 51448 - protein, 52 aa, Homo sapiens
MAQGFAVGFDPLGLGDLSSGSLSSLSSRGHLGSDSGSTATRYLLRKQQRLLN

SEQ ID NO: 51449 - protein, 198 aa, Homo sapiens
METGRQTGVSAEMLAMPRGLKGSKKDGIPEDLDGNLEAPRDQEGELRSEDVMDLTEGDSEASASAPPAAKRRKTHTKGKKESKPTVDAEEAQRMTTLLSSMSEEQLSRYEVCRRSAFPRARVAGLMRAITGSSVSENAAIAMAGIAKLFVGEVVEEALDVCEMWGETPPLQPKHLREAVRRLKPKGLFPNSNCKRIMF

SEQ ID NO: 51450 - protein, 114 aa, Homo sapiens
MGWKPSEARGQSQSFQASGLQPRSLKAARRATGRPDRSRAAPPNMDPDPQAGVQASGTPTSSVTAARSTGCGGCAGSAVCAWTTTSARSATCTTSMSSPTPSTATRPLTRALSH

SEQ ID NO: 51451 - protein, 75 aa, Homo sapiens
MTTSSIRRQMKNIVNNYSEAEIKVREATSNDPWGPSSSLMTEIADLTYNVVAFSEIMSMVWKRLNDHGKNWRHVY

SEQ ID NO: 51452 - protein, 293 aa, Homo sapiens
MGTALLQRGGCFLLCLSLLLLGCWAELGSGLEFPGAEGQWTRFPKWNACCESEMSFQLKTRSARGLVLYFDDEGFCDFLELILTRGGRLQLSFSIFCAEPATLLADTPVNDGAWHSVRIRRQFRNTTLFIDQVEAKWVEVKSKRRDMTVFSGLFVGGLPPELRAAALKLTLASVREREPFKGWIRDVRVNSSQVLPVDSGEVKLDDEPPNSGGGSPCEAGEEGEGGVCLNGGVCSVVDDQAVCDCSRTGFRGKDCSQEDNNVEGLAHLMMGDQGKSKEMNDYLNYKKVKICYT

SEQ ID NO: 51453 - protein, 138 aa, Homo sapiens
MAAVFDLDLETEEGSEGEGEPELSPASNLNGSGEVSWHLPWLLPLGFSQDACPLAELRAAGLEPVGHYEEVELTETSVNVGPERIGPHCFELLRVLGKGGYGKVFQVRKVQGTNLGKIYAMKVLRKAKIVRNAKDTAH

SEQ ID NO: 51454 - protein, 326 aa, Homo sapiens
RLIHPQLCELCIEALERHVIQAVNTSPERGGEEALHAFLLVHSKLLAFYSSHSASSLRPADLLALILLVQDLYPSESTAEDDIQETDSFSLPEEYFTPAPSPGDQSSGSTIWLEGGTPPMDALQIAEDTLQTLVPHCPVPSGPRRIFLDANVKESYCPLVPHTMYCLPLWQGINLVLLTRSPSAPLALVLSQLMDGFSMLEKKLKEGPEPGASLRSQPLVGDLRQRMDKFVKNRGAQEIQSTWLEFKAKAFSKSEPGSSWELLQACGKLKRQLCAIYRLNFLTTAPSRGGPHLPQHLQDQVQRLMREKLTDWKDFLLVKSRRNITM

SEQ ID NO: 51455 - protein, 76 aa, Homo sapiens
  MOD_RES (1)..(1): Any amino acid
XLGDYSQVLFERPGIWKDLKTMGSVSLSIFFITLLVLGRQVRLLMEEQIQKRAGGDRDHGEPEPRAAGERASRARG

SEQ ID NO: 51456 - protein, 141 aa, Homo sapiens
MELKRGKTFIKSSLQVSHEKPPDPAAVAAAREGTGPWSVLPGGQQRPHSEKGPQASPSAQEYDRCPNKGAQLDPKGGPAALCGATFKPVRKCKTHDSMSGAGRATAATGQLVGSASFPGSPGSRRMIDYRHFVPQMPFVPA

SEQ ID NO: 51457 - protein, 46 aa, Homo sapiens
SARSAAAEERSVNSSTMVPLWISSVGIWNTGMMEMCSLQSSSTEEP

SEQ ID NO: 51458 - protein, 710 aa, Homo sapiens
GDVGAAAATAHNGFSCSNCSMLSERKDVLTAHPAAPGPVSRVYSRDRNQKCGASFYVNRILWLARYTASSFSSFLVQLFQVVLMKLSYESENYKLKTHESKDCESESYKSKSHESKAHASYYGRMNVREVLREDGHLSVNGEALCYFLLQILRRIGAVGQAVSRTAWSALWLAVVAPGKAASGVFWWLGIGWYQFVTLISWLNVFLLTRCLRNICKFLVLLIPLFLLLAGLSLRGQGNFFSFLPVLNWASMHRTQRVDDPQDVFKPTTSRLKQPLQGDSEAFPWHWMSGVEQQVASLSGQCHHHGENLRELTTLLQKLQARVDQMEGGAAGPSASVRDAVGQPPRETDFMAFHQEHEVRMSHLEDILGKLREKSEAIQKELEQTKQKTISAVGEQLLPTVEHLQLELDQLKSELSSWRHVKTGCETVDAVQERVDVQVREMVKLLFSEDQQGGSLEQLLQRFSSQFVSKGDLQTMLRDLQLQILRNVTHHVSVTKQLPTSEAVVSAVSEAGASGITEAQARAIVNSALKLYSQDKTGMVDFALESGGGSILSTRCSETYETKTALMSLFGIPLWYFSQSPRVVIQPDIYPGNCWAFKGSQGYLVVRLSMMIHPAAFTLEHIPKTLSPTGNISSAPKDFAVYGLENEYQEEGQLLGQFTYDQDGESLQMFQALKRPDDTAFQIVELRIFSNWGHPEYTCLYRFRVHGEPVK

SEQ ID NO: 51459 - protein, 106 aa, Homo sapiens
MMNRTTPDQELAPASEPVWERPWSVEEIRRSSQSWSLAADAGLLQFLQEFSQQTISRTHEIKKQVDGLIRETKATDCRLHNVFNDFLMLSNTQFIENRVYDEEKAL

SEQ ID NO: 51460 - protein, 52 aa, Homo sapiens
  MOD_RES (1)..(1): Any amino acid
XDFCPPGHNTKKASYSGVSLFSNPVQYWEIQPSTFRCVYVRSAIQLGNYKKK

SEQ ID NO: 51461 - protein, 198 aa, Homo sapiens
MAPILPGTRRVTSGASPQVPLPFWRECISVHVGQAGVQMGNACWELYCLEHGIQPDGQMPSDKTIGGGDDSFTTFFCETGAGKHVPRAVFVDLEPTVIDEIRNGPYRQLFHPEQLITGKEDAANNYARGHYTIGKEIIDPVLDRIRKLSDQCTGLQGFLVFHSFGGGTGSGFTSLLMERLSVDYGKKSKLEFSIYPAP

SEQ ID NO: 51462 - protein, 276 aa, Homo sapiens
  MOD_RES (1)..(1): Any amino acid
XIEPVYFYIGIVFGLQGIYVTALFVTSWLMSGTWLAGMLTVAWFVINRVDTTRIEYSIPLRENWALPYFACQIAALTGYLKSNLNTYGERFCYLLMSASTYTFMMMWEYSHYLLFLQAISLFLLDTFSVEQSDKLNVKKGSFVAKIIKVINFYLVCTLTITLNIIMKMFVPHKENGHMLKFLEVKFGLNMTKNFTMNWLLCQESLQAPSQDFFLRLTQSSLLPFYILVLIICFLSMLQVIFRRINGKSLKETVTLEDGRIGERPEIIYHVIHTILL

SEQ ID NO: 51463 - protein, 104 aa, Homo sapiens
  MOD_RES (1)..(1): Any amino acid
XGTVFLTTRQTLCREQKSFLSRLCQGEELQSDRDETGAYLIDRDPTYFGPILNFLRHGKLVLDKDMAEEGVLEEAEFYNIGPLIRIIKDRMEEKDYTVTQVPSM

SEQ ID NO: 51464 - protein, 209 aa, Homo sapiens
MNYARFITAASAARNPSPIRTMTDILSRGPKSMISLAGGLPNPNMFPFKTAVITVENGKTIQFGEEMMKRALQYSPSAGIPELLSWLKQLQIKLHNPPTIHYPPSQGQMDLCVTSGSQQGLCKVFEMIINPGDNVLLDEPAYSGTLQSLHPLGCNIINVASDESGIVPDSLRDILSRWKPEDAKNPQKNTPKFLYTVPNGNNPTGNSLT

SEQ ID NO: 51465 - protein, 41 aa, Homo sapiens
MMAQSNMFTVADVLSQDELRKKLYQTFKDRGILDTLKSTEV

SEQ ID NO: 51466 - protein, 69 aa, Homo sapiens
MSRVLQKDAEQESQMRAEIQDMKQELSTVNMMDEFARYARLERKINKMTDKLKTHGTVSLAAWRLHESG

SEQ ID NO: 51467 - protein, 72 aa, Homo sapiens
  MOD_RES (1)..(1): Any amino acid
XQLGMFTHKEFEQLAPVLDGFSLMTYDYSTAHQPGPNAPLSWVRACVQVLDPKSKWRSKILLGLNFYGTSRH

SEQ ID NO: 51468 - protein, 122 aa, Homo sapiens
MKLLTGLVFCSLVLGVSSRSFFSFLGEAFDGARDMWRAYSDMREANYIGSDKYFHARGNYDAAKRGPGGAWAAEVITDARENIQRFFGHGAEDSLADQAANEWGRSGKDPNHFRPAGLPEKY

SEQ ID NO: 51469 - protein, 117 aa, Homo sapiens
  MOD_RES (1)..(1): Any amino acid
XRWECCAFSPGPACVVALAVASLPLNCAASADSKRGRWARDSSTCASRRVCGAAGDVRGDSCPSVAASVAPACDPGGQNYTKAMRLFVGEPVWTAYNRPADHFEARGQYVKFLAQTA

SEQ ID NO: 51470 - protein, 107 aa, Homo sapiens
  MOD_RES (1)..(1): Any amino acid
XTMLLTRINCADWSDVCTKQNVTEFPIIKMYKKGENPVSYAGMLGTEDLLKFIQLNRISYPVNITSIQEAEEYLSGELYKDLILYSSVSVLGLFSPTMKTGRKKVND

SEQ ID NO: 51471 - protein, 1293 aa, Homo sapiens
MKSCGVSLATAAAAAAAFGDEEKKMAAGKASGESEEASPSLTAEEREALGGLDSRLFGFVRFHEDGARTKALLGKAVRCYESLILKAEGKVESDFFCQLGHFNLLLEDYPKALSAYQRYYSLQSDYWKNAAFLYGLGLVYFHYNAFQWAIKAFQEVLYVDPSFCRAKEIHLRLGLMFKVNTDYESSLKHFQLALVDCNPCTLSNAEIQFHIAHLYETQRKYHSAKEAYEQLLQTENLSAQVKATVLQQLGWMHHTVDLLGDKATKESYAIQYLQKSLEADPNSGQSWYFLGRCYSSIGKVQDAFISYRQSIDKSEASADTWCSIGVLYQQQNQPMDALQAYICAVQLDHGHAAAWMDLGTLYESCNQPQDAIKCYLNATRSKSCSNTSALAARIKYLQACKPHHPNTEPVLGLSQTPISQQSLPLHMIPSSQVDDLSSPAKRKRTSSPTKNTSDNWSGGHAVSHPPVQQQAHSWCLTPQKLQMRPTGVAQVRSTGIPNGPTADSSLPTNSVSGQQPQLALTRVPSVSQPGVRPACPGQPLANGPFSAGHVPCSTSRTLGSTDTILIGNNHITGSGSNGNVPYLQRNALTLPHNRTNLTSSAEEPWKNQLSNSTQGLHKGQSSHSAGPNGERPLSSTGPSQHLQAAGSGIQNQNGHPTLPSNSVTQGAALNHLSSHTATSGGQQGITLTKESKPSGNILTVPETSRHTGETPNSTASVEGLPNHVHQMTADAVCSPSHGDSKSPGLLSSDNPQLSALLMGKANNNVGTGTCDKVNNIHPAVHTKTDNSVASSPSSAISTATPSPKSTEQTTTNSVTSLNSPHSGLHTINGEGMEESQSPMKTDLLLVNHKPSPQIIPSMSVSIYPSSAEVLKACRNLGKNGLSNSSILLDKCPPPRPPSSPYPPLPKDKLNPPTPSIYLENKRDAFFPPLHQFCTNPNNPVTVIRGLAGALKLDLGLFSTKTLVEANNEHMVEVRTQLLQPADENWDPTGTKKIWHCESNRSHTTIAKYAQYQASSFQESLREENEKRSHHKDHSDSESTSSDNSGRRRKGPFKTIKFGTNIDLSDDKKWKLQLHELTKLPAFVRVVSAGNLLSHVGHTILGMNTVQLYMKVPGSRTPGHQENNNFCSVNINIGPGDCEWFVVPEGYWGVLNDFCEKNNLNFLMGSWWPNLEDLYEANVPVYRFIQRPGDLVWINAGTVHWVQAIGWCNNIAWNVGPLTACQYKLAVERYEWNKLQSVKSIVPMVHLSWNMARNIKVLSSKNSEAMSDIEGSSHCCRKRDYMAWADKRRTSSLL

SEQ ID NO: 51472 - protein, 43 aa, Homo sapiens
SNDGEERLAVVRLLAKLFGSKDSDLATQNRPLWQCFLGRIFKG

SEQ ID NO: 51473 - protein, 142 aa, Homo sapiens
MKLFGFGSRRGQTAQGSIDHVYTGSGYRIRDSELQKIHRAAVKGDAAEVERCLARRSGELDALDKQHRLSIARKRLVPLFCWNMAPIQTLRISTATLLSIMPCIVRAPHWQKNCFPMVHILKHWTRYRSINFLSKIFVLTLT

SEQ ID NO: 51474 - protein, 51 aa, Homo sapiens
SGFLLSQDPEFGWRNVFFLLFAVNLLGLLFYLIFGEADVQEWAKERKLTRL

SEQ ID NO: 51475 - protein, 2237 aa, Homo sapiens [sequence omitted]

SEQ ID NO: 51476 - protein, 641 aa, Homo sapiens
MAAAAAATAAAAASIRERQTVALKRMLNFNVPHIKNSTGEPVWKVLIYDRFGQDIISPLLSVKELRDMGITLHLLLHSDRDPIPDVPAVYFVMPTEENIDRMCQDLRNQLYESYYLNFISAISRSKLEDIANAALAASAVTQVAKVFDQYLNFITLEDDMFVLCNQNKELVSYRAINRPDITDTEMETVMDTIVDSLFCFFVTLGAVPIIRCSRGTAAEMVAVKLDKKLRENLRDARNSLFTGDTLGAGQFSFQRPLLVLVDRNIDLATPLHHTWTYQALVHDVLDFHLNRVNLEESSGVENSPAGARPKRKNKKSYDLTPVDKFWQKHKGSPFPEVAESVQQELESYRAQEDEVKRLKSIMGLEGEDEGAISMLSDNTAKLTSAVSSLPELLEKKRLIDLHTNVATAVLEHIKARKLDVYFEYEEKIMSKTTLDKSLLDIISDPDGTPEDKMRLFLIYYISTQQAPSEADLEQYKKALTDAGCNLNPLQYIKQWKAFTKMASAPASYGSTTTKPMGLLSRVMNTGSQFVMEGVKNLVLKQQNLPVTRILDNLMEMKSNPETDDYRYFDPKMLRGNDSSVPRNKNPFQEAIVFVVGGGNYIEYQNLVDYIKGKQGKHILYGCSELFNATQFIKQLSQLGQK

SEQ ID NO: 51477 - protein, 53 aa, Homo sapiens
MELGELLYNKSEYIETASGNKVSRQSVLCGSQNIVLNGKCCILSFTYWRPCLY

SEQ ID NO: 51478 - protein, 96 aa, Homo sapiens
MAQKPLRLLACGDVEGKFDILFNRVQAIQKKSGNFDLLLCVGNFFGSTQDAEWEEYKTGIKKGRSGYQKMWFCFGFQSCHGLETKIPFCCFGKDLL

SEQ ID NO: 51479 - protein, 16 aa, Homo sapiens
MVQLAPAAAMDEVTFR

SEQ ID NO: 51480 - protein, 114 aa, Homo sapiens
EKRGPTSSNPRKRHREDSDVEMVEDDSRKEMTAACTPRRRIINLTSVLSLQEEINEQGHEVLREMLHNHSFVGCVNPQWALAQHQTKLYLLNTTKLRVKCLAPFQTPGSGLWNT

SEQ ID NO: 51481 - protein, 299 aa, Homo sapiens
MRSVGEGAREWIRECQHQFRHHRWNCTTLDRDHTVFGRVMLRSSREAAFVYAISSAGVVHAITRACSQGELSVCSCDPYTRGRHHDQRGDFDWGGCSDNIHYGVRFAKAFVDAKEKRLKDARALMNLHNNRCGRTAVRRFLKLECKCHGVSGSCTLRTCWRALSDFRRTGDYLRRRYDGAVQVMATQDGANFTAARQGYRRATRTDLVYFDNSPDYCVLDKAAGSLGTAGRVCSKTSKGTDGCEIMCCGRGYDTTRVTRVTQCECKFHWCCAVRCKECRNTVDVHTCKAPKKAEWLDQT

SEQ ID NO: 51482 - protein, 164 aa, Homo sapiens
MDELVHDLASALEQTSEQNKLGELWEEMALSPRQQRRQLRKRRGRKRRSDFTHLAEHTCCYSEASESSLDEATKDCREVAPVTNFSDSDDTMVAKRHPALNAIVKSKQHSWHESDSFTENAPCRPLRRRRKENTPWTSSGHGLCESAENRTFLSKTGRKERMEC

SEQ ID NO: 51483 - protein, 103 aa, Homo sapiens
MDWGTLHTFIGGVNKHSTSIGKVWITVIFIFRVMILVVAAQEVWGDEQEDFVCNTLQPGCKNVCYDHFFPVSHIRLWALQLIFVSTPALLVAMHVAYYRHETT

SEQ ID NO: 51484 - protein, 176 aa, Homo sapiens
RNHLLESEDSYTREALAAEDREAKLRKKVTVLEEKLVSSSNAMENASHQASVQVESLQEQLNVVSKQRDETALQLSVSQEQVKQYALSLANLQMVLEHFQQEEKAMYSAELEKQKQLIAEWKKNAENLEGKVISLQECLDEANAALDSASRLTEQLDVKEEQIEELKRQNIIKKVR

SEQ ID NO: 51485 - protein, 73 aa, Homo sapiens
MDPVVLSYMDSLLRQSDVSLLDPPSWLNDHIIGFAFEYFANSQFHDCSDHVSFISPEVTQFIKCTSNPAEIAM

SEQ ID NO: 51486 - protein, 191 aa, Homo sapiens
MVSSQPKYDLIREVGRGSYGVVYEAVIRKTSARVAVKKIRCHAPENVELALREFWALSSIKSQHPNVIHLEECILQKDGMVQKMSHGSNSSLYLQLVETSLKGEIAFDPRSAYYLWFVMDFCDGGDMNEYLLSRKPNRKTNTSFMLQLSSALAFLHKNQIIHRDLKPDNILISQTRLDTSDLEPTLKVADF

SEQ ID NO: 51487 - protein, 48 aa, Homo sapiens
MTTQAPTFTQPLQSVVVLEGSTATFEAHISGFPVPEVSWFRDGQVIST

SEQ ID NO: 51488 - protein, 134 aa, Homo sapiens
MAAHHRQNTAGRRKVQVSYVIRDEVEKYNRNGVNALQLDPALNRLFTAGRDSIIRIWSVNQHKQDPYIASMEHHTDWVNDIVLCCNGKTLISASSDTTVKVWNAHKGFCMSTLRTHKYVCSITGLRKGLSICQG

SEQ ID NO: 51489 - protein, 65 aa, Homo sapiens
MKENYCLQAALVCLGMLCHSHAFAPERRGHLRPSFHGHHEKGKEGQVLQRSKRGWVWNQFFVIEE

SEQ ID NO: 51490 - protein, 116 aa, Homo sapiens
MRLTQDPIQVLLIFAKEDSQSDGFWWACDRAGYRCNIARTPESALECFLDKHHEIIVIDHRQTQNFDAEAVCRSIRATNPSEHTVILAVVSRVSDDHEEASVLPLLHAGFNRVCTR

SEQ ID NO: 51491 - protein, 201 aa, Homo sapiens
MEGAWALPTWKEEGREQAAGQGEEEECPICTEPYGPRERRLALLNCSHGLCVGCLHRLLGSASSADLGRVRCPLCRQKTPVLEWEICRLQEELLQADGPSRQPRREAPASYHRNPGPWGSLEHRYQLRFLAGPVGGRGCLPFLPCPPCLGARLWTLRERGPCARRLALLSLLALELLGLLLVFTPLLLLGLLFVLLDRSGR

SEQ ID NO: 51492 - protein, 178 aa, Homo sapiens
EYHQREVRDVAHLMWFERLYVWLQCFEKYILYPALILNALTIDAFLISNHRRLGTHWDIFLMIIAGMKLLRTSFCNPVYQFINLSFTVIFFHFDYKDISESFLLDFFMVSILFSKLGDLLHKLQFVLTYVAPWQMAWGSSFHVFAQLFAIPRILSASIFTLQLRFTFYGSKLFIDPWQ

SEQ ID NO: 51493 - protein, 311 aa, Homo sapiens
  MOD_RES (1)..(1): Any amino acid
XNDSYSCLGWFSPGQVFVLDEYCARNGVRGCHRHLCYLRDLLERAENGAMIDPTLLHYSFAFCASHVHGNRPDGIGTVTVEEKERFEEIKERLRVLLENQITHFRYCFPFGRPEGALKATLSLLERVLMKDIVTPVPQEEVKTVIRKCLEQAALVNYSRLSEYAKIEENQKDAENVGRLITPAKKLEDTIRLAELVIEVLQQNEEHHAEGKEAFAWWSDLMVEHAETFLSLFAVDMDAALEVQPPDTWDSFPLFQLLNDFLRTDYNLCNGKFHKHLQDLFAPLVVRYVDLMESSIAQSIHRGFERESWEPV

SEQ ID NO: 51494 - protein, 148 aa, Homo sapiens
MTEMSEKENEPDDAATHSPPGTVSALQETKLQRFKRSLSLKTILRSKSLENFFLRSGSELKCPTEETPNRACDVRCAKSASTSGALRRSPTSNAQARRPPPSAATSVPLSWCMSRHQSVPQAKSPHPLGTVGRWTLSTRPCAMAPPWH

SEQ ID NO: 51495 - protein, 99 aa, Homo sapiens
MLTARLPGKPSADESQAVQIHMGLALGMFLSRLCEEKLSDISGQEMNLLLMKSLDALENCCFDTSLEYNTGCILGVGLVLSLMSHSSQMQSRVHVAALL

SEQ ID NO: 51496 - protein, 268 aa, Homo sapiens
EDCTSVTDLPNAFDGPITITIVNRDGTRYVQKGEYRTNPEDIYPSNPTDDDVSSGSSSERSSTSGGYIFYTFSTVHPIPDEDSPWITDSTDRIPATIQATPSSTTEETATQKEQWFGNRWHEGYRQTPKEDSHSTTGTAAASAHTSHPMQGRTTPSPEDSSWTDFFNPISHPMGRGHQAGRRMDMDSSHSITLQPTANPNTGLVEDLDRTGPLSMTTQQSNSQSFSTSHEGLEEDKDHPTTSTLTSSNRNDVTGGRRDPNHSEGSTTL

SEQ ID NO: 51497 - protein, 60 aa, Homo sapiens
NIYYPVDLKNSSEHRKHVSSILCELKPKDLGMKSKTSRHLIQKDLKKYIKDIVKKNLLWI

SEQ ID NO: 51498 - protein, 358 aa, Homo sapiens
MAAFSEMGVMPEIAQAVEEMDWLLPTDIQAESIPLILGGGDVLMAAETGSGKTGAFSIPVIQIVYETLKDQQEGKKGKTTIKTGASVLNKWQMNPYDRGSAFAIGSDGLCCQSREVKEWHGCRATKGLMKGKHYYEVSCHDQGLCRVGWSTMQASLDLGTDKFGFGFGGTGKKSHNKQFDNYGEEFTMHDTIGCYLDIDKGHVKFSKNGKDLGLAFEIPPHMKNQALFPACVLKNAELKFNFGEEEFKFPPKDGFVALSKAPDGYIVKSQHSGNAQVTQTKFLPNAPKALIVEPSRELAEQTLNNIKQFKKYIDNPKLRELLIIGGVAARDQLSVLENGWLVCFFSGRYSCRYSGKTR

SEQ ID NO: 51499 - protein, 76 aa, Homo sapiens
MLEACNNNLEMAVTMFLDGGGIAEEPSTSSASVSTVRPHTEEEVRAPIPQKQEILVEPEPLFGAPKRRRPARSIFD

SEQ ID NO: 51500 - protein, 183 aa, Homo sapiens
MGSCCSCPDKDTVPDNHRNKFKVINVDDDGNELGSGIMELTDTELILYTRKRDSVKWHYLCLRRYGYDSNLFSFESGRRCQTGQGIFAFKCARAEELFNMLQEIMQNNSINVVEEPVVERNNHQTELEVPRTPRTPTTPGFAAQNLPNGYPRYPSFGDASSHPSSRHPSVGSARLPSVGEEST

SEQ ID NO: 51501 - protein, 125 aa, Homo sapiens
MTEESEETVLYIEHRYVCSECNQLYGSLEEVLMHQNSHVPQQHFELVGVADPGVTVATDTASGTGLYQTLVQESQYQCLECGQLLMSPSQLLEHQELHLKMMAPQEAVPAEPSPKAPPLSSSTIH

SEQ ID NO: 51502 - protein, 687 aa, Homo sapiens
  MOD_RES (1)..(1): Any amino acid
XKAGADIELGCSTPLMEASQEGHLELVKYLLASGANVHATTATGDTALTYACENGHTDVADVLLQAGADLDKQEDMKTILEGIDPAKHQEHESEGGRTPLMKAARAGHLCTVQFLISKGANVNRATANNDHTVVSLACAGGHLAVVELLLAHGADPTHRLKDGSTMLIEAAKGGHTNVVSYLLDYPNNVLSVPTTDVSQLPPPSQDQSQEPDRTSQENSPALLGVQKAVSTRVPTGSNSSSQTTECLTPESCSQTTSNVASQSMPPVYPSVDIDAHTESNHDTALTLACAGGHEELVSVLIARDAKIEHRDKKGFTPLILAATAGHVGVVEILLDKGGDIEAQSERTKDTPLSLACSGGRQEVVDLLLARGANKEHRNVSDYTPLSLAASGGYVNIIKILLNAGAEINSRTGSKLGISPLMLAAMNGHVPAVKLLLDMGSDINAQIETNRNTALTLACFQGRAEVVSLLLDRKANVEHRAKTGLTPLMEAASGGYAEVGRVLLDKGADVNAPPVPSSRDTALTIAADKGHYKFCELLIHRGAHIDVRNKKGNTPLWLASNGGHFDVVQLLVQAGADVDAADNRKITPLMSAFRKGHVKVVQYLVKEVNQFPSDIECMRYIATITDKELLKKCHQCVETIVKAKDQQAAEANKNASILLKELDLEKSREESRKQALAAKREKRKEKRK

SEQ ID NO: 51503 - protein, 1889 aa, Homo sapiens
  MOD_RES (1)..(1): Any amino acid
XDMDALLNNSLPPPHPENEEDPEEDLSETETPKLKKKKKPKKPRDPKIPKSKRQKKELGDSSGEGPEFVEEEEEVALRSDSEGSDYTPGKKKKKKLGPKKEKKSKSKRKEEEEEEDDDDDSKEPKSSAQLLEDWGMEDIDHVFSEEDYRTLTNYKAFSQFVRPLIAAKNPKIAVSKMMMVLGAKWREFSTNNPFKGSSGASVAAAAAAAVAVVESMVTATEVAPPPPPVEVPIRKAKTKEGKGPNARRKPKGSPRVPDAKKPKPKKVAPLKIKLGGFGSKRKRSSSEDDDLDVESDFDDASINSYSVSDGSTSRSSRSRKKLRTTKKKKKGEEEVTAVDGYETDHQDYCEVCQQGGEIILCDTCPRAYHMVCLDPDMEKAPEGKWSCPHCEKEGIQWEAKEDNSEGEEILEEVGGDLEEEDDHHMEFCRVCKDGGELLCCDTCPSSYHIHCLNPPLPEIPNGEWLCPRCTCPALKGKVQKILIWKWGQPPSPTPVPRPPDADPNTPSPKPLEGRPERQFFVKWQGMSYWHCSWVSELQLELHCQVMFRNYQRKNDMDEPPSGDFGGDEEKSRKRKNKDPKFAEMEERFYRYGIKPEWMMIHRILNHSVDKKGHVHYLIKWRDLPYDQASWESEDVEIQDYDLFKQSYWNHRELMRGEEGRPGKKLKKVKLRKLERPPETPTVDPTVKYERQPEYLDATGGTLHPYQMEGLNWLRFSWAQGTDTILADEMGLGKTVQTAVFLYSLYKEGHSKGPFLVSAPLSTIINWEREFEMWAPDMYVVTYVGDKDSRAIIRENEFSFEDNAIRGGKKASRMKKEASVKFHVLLTSYELITIDMAILGSIDWACLIVDEAHRLKNNQSKFFRVLNGYSLQHKLLLTGTPLQNNLEELFHLLNFLTPERFHNLEGFLEEFADIAKEDQIKKLHDMLGPHMLRRLKADVFKNMPSKTELIVRVELSPMQKKYYKYILTRNFEALNARGGGNQVSLLNVVMDLKKCCNHPYLFPVAAMEAPKMPNGMYDGSALIRASGKLLLLQKMLKNLKEGGHRVLIFSQMTKMLDLLEDFLEHEGYKYERIDGGITGNMRQEAIDRFNAPGAQQFCFLLSTRAGGLGINLATADTVIIYDSDWNPHNDIQAFSRAHRIGQNKKVMIYRFVTRASVEERITQVAKKKMMLTHLVVRPGLGSKTGSMSKQELDDILKFGTEELFKDEATDGGGDNKEGEDSSVIHYDDKAIERLLDRNQDETEDTELQGMNEYLSSFKVAQYVVREEEMGEEEEVEREIIKQEESVDPDYWEKLLRHHYEQQQEDLARNLGKGKRIRKQVNYNDGSQEDRDWQDDQSDNQSDYSVASEEGDEDFDERSEAPRRPSRKGLRNDKDKPLPPLLARVGGNIEVLGFNARQRKAFLNAIMRYGMPPQDAFTTQWLVRDLRGKSEKEFKAYVSLFMRHLCEPGADGAETFADGVPREGLSRQHVLTRIGVMSLIRKKVQEFEHVNGRWSMPELAEVEENKKMSQPGSPSPKTPTPSTPGDTQPNTPAPVPPAEDGIKIEENSLKEEESIEGEKEVKSTAPETAIECTQAPAPASEDEKVVVEPPEGEEKVEKAEVKERTEEPMETEPKGAADVEKVEEKSAIDLTPIVVEDKEEKKEEEEKKEVMLQNGETPKDLNDEKQKKNIKQRFMFNIADGGFTELHSLWQNEERAATVTKKTYEIWHRRHDYWLLAGIINHGYARWQDIQNDPRYAILNEPFKGEMNRGNFLEIKNKFLARRFKLLEQALVIEEQLRRAAYLNMSEDPSHPSMALNTRFAEVECLAESHQHLSKESMAGNKPANAVLHKGILKQLEELLSDMKADVTRLPATIARIPPVAVRLQMSERNILSRLANRAPEPTPQQVAQQQ

SEQ ID NO: 51504 - protein, 55 aa, Homo sapiens
MFGQIQSPGYPDSYPSDSEVTWNITVPDGFRIKLYFMHFNLESSYLCEYDYVKVE

SEQ ID NO: 51505 - protein, 52 aa, Homo sapiens
MGKQKKTRKYATMKRMLSLRDQRLKEKDRLKPKKKEKKDPSALKEREVIYFQ

SEQ ID NO: 51506 - protein, 828 aa, Homo sapiens
  MOD_RES (1)..(1): Any amino acid
XERETLRKATRATQRTGSFPQAWHSTAAGVAWVAPLSPQHQRAWLCRCFGAWQQFVQRGSRYRDHLADRRTGTLRKCLEQWVRMKQLRESDGAKVTQLSLCRQKAGREAVYTAGPGACGLGAVGQAQGQQEQGRGSLQDACWTLALCWALLLWKMRLFQRQWANSFFQGLQQRMLQRSLRWWHLRALGPDATSSCTKTPSALEPLSSSTLQDSLEKVPRAPTLPDTLQGSLLWAAGQRQQGQCLLLWQARAQQFQGTARWYQHTRQRRIFLSWSRWATAQWAWRELASHRAWDRTCRAVLGLWRQRLLQSRLVEWWAQERGWRLARDALCHWHSCWQGQQFLHEKCQTWVQVHLQGLQKVVFRSWQQAAAHQRCTVTRPEQLLLQSYFQAWCEVVRDTGVLRAQHQAFQDGLRRRALGAVFATWREAQEVAAGAQEQRVAQASLARWRSCGQQGQEDGQQKKARAPQAFPAWPVAPGMHHEAQQQAGESAGAQAAQCWTWCWALWVHESCRGQVSRAHASWKPRAWVLEASVQSAVRGGVQRAILTQLRPAELRRFLRTVQLRVRLGLPGAGKTRSCWTQATELVPPAPSLQCSLGGRRKPRGTAWAQRCREHSLCPAFQLWPQWPGQSSWVPGLPLWTRDQGPRAHSSPEPRACKAQSKAHKRRLRILEKQAQAHGSALLLALKGHDALGHQEEVPAAPVPRGTASRAAGFPAGQVPGSGMAALGGCPRGRAAGADPAQGVAPEMGLADVVAADPATASGSAVTAAGRWAFKKWHQRLAARSPRRGAASSPRPWSKPGPKGPESGQEAARAPRGWGLGAEHGAQLQL

SEQ ID NO: 51507 - protein, 147 aa, Homo sapiens
AGPASLARWTLGFCDERLVPFDHAESTYGLYRTHLLSRLPIPESQVITINPELPVEEAAEDYAKKLRQAFQGDSIPVFDLLILGVGPDGHTCSLFPDHPLLQRILEDQEENPLPAALVQPHTGKLCWFLDEAAARLLTVPFEKHSTL

SEQ ID NO: 51508 - protein, 169 aa, Homo sapiens
KDVINEAWFPEDQRVLTPNLVAALPPSTHGAGWQLFCRTVWSAHSGPTRMATAVARCAPDEELLSCSSFSRSGKRRGERMEAQGGKLVCRAHNAFGGEGVYAIARCCLLPQANCSVHTAPPAEASMGTRVHCHQQGHVLTGFLALASDLKERGSDGDGHWRRSIPAFHI

SEQ ID NO: 51509 - protein, 281 aa, Homo sapiens
MPGPRRLRSPGGSGCSSRGSGPRLSTRRWRPCCYCGGSGVWLLRTPPSPSAWPARRCPRHRFEFCEPAFVVGNCLQIASDSHQYDRIYCGAGVQKDHENYMKILLKVGGILVMPIEDQLTQIMRTGQNTWESKNILAVSFAPLVQPSKNDNGKPDSVGLPPCAVRNLQDLARIYIRRTLRNFINDEMQAKGIPQRAPPKRKRKRVKQRINTYVFVGNQLIPQPLDSEEDEKMEEDNKEEEEKDHNEAMKPEEPPQNLLREKIMKLPLPESLKAYLTYFRDK

SEQ ID NO: 51510 - protein, 797 aa, Homo sapiens
MAVQGSQRRLLGSLNSTPTAIPQLGLAANQTGARCLEVSISDGLFLSLGLVSLVENALVVATIAKNRNLHSPMYCFICCLALSDLLVSGSNVLETAVILLLEAGALVARAAVLQQLDNVIDVITCSSMLSSLCFLGAIAVDRYISIFYALRYHSIVTLPRARRAVAAIWVASVVFSTLFIAYYDHVAVLLCLVVFFLAMLVLMAVLYVHMLARACQHAQGIARLHKRQRPVHQGFGLKGAVTLTILLGIFFLCWGPFFLHLTLIVLCPEHPTCGCIFKNFNLFLALIICNAIIDPLIYAFHSQELRRTLKEVLTCSCSQDRALVSWDVKSLGGSVCQELLPQQPQEKGLCDQKASSTALQRLLQKEFWEVISDEHGIDPSGNYVGDSDLQLERISVYYNEASSHKYVPRAILVDLEPGTMDSVRSGAFGHLFRPDNFIFGQSGAGNNWAKGHYTEGAELVDSVLDVVRKECENCDCLQGFQLTHSLGGGTGSGMGTLLISKVREEYPDRIMNTFSVVPSPKVSDTVVEPYNATLSIHQLVENTDETYCIDNEALYDICFRTLKLATPTYGDLNHLVSATMSGVTTSLRFPGQLNADLRKLAVNMVPFPRLHFFMPGFAPLTARGSQQYRALTVPELTQQMFDAKNMMAACDPRHGRYLTVATVFRGRMSMKEVDEQMLAIQSKNSSYFVEWIPNNVKVAVCDIPPRGLKMSSTFIGNSTAIQELFKRISEQFTAMFRRKAFLHWYTGEGMDEMEFTEAESNMNDLVSEYQQYQDATAEEEGEMYEDDEEESEAQGPK

SEQ ID NO: 51511 - protein, 64 aa, Homo sapiens
MGQQPGKVLGDQRRPSLPALHFIKGAGKKESSRHGGPHCNVFVEHALQRPVASDFEPQGLSEAA

SEQ ID NO: 51512 - protein, 186 aa, Homo sapiens
MSLVCLTDFQAHAREQLSKSTRDFIEGGADDSITRDDNIAAFKRIRLRPRYLRDVSEVDTRTTIQGEEISAPICIAPTGFHCLVWPDGEMSTARAPEGLRWFQLYVHPDLQLNKQLIQRVESLGFKALVITLDTPVCGNRRHDIRNQLRRNLTLTDLQSPKKGNAIPYFQMTPISTSLCWNDLSWF

SEQ ID NO: 51513 - protein, 115 aa, Homo sapiens
VQAKCYQLLLSVFQHSNRALSTPYIHSLAPIVVEKLKAVERNRPASNIELLAVQEGIKVLETLVALGEEQNILGSQPESTLRSLPPDPILLPPAHNSQAPVIYPPRPPKVLGLQA

SEQ ID NO: 51514 - protein, 62 aa, Homo sapiens
MRKPRAAVGSGHRKQAASQEGRQKHAKNNSQAKPSACDGFQKVPGVLSVQSEKAPHGPASPG

SEQ ID NO: 51515 - protein, 80 aa, Homo sapiens
MGVYGPQDRSESEKRDVQRDPPPWHPRREGERPARARSLPLAAAGQGFLRKTWISEHENSPTMSQNGYFEDSSPLALGGL

SEQ ID NO: 51516 - protein, 83 aa, Homo sapiens
  MOD_RES (1)..(1): Any amino acid
XNWPFLEGCACTPERMAEAGFIHCPTENEPDLAQCFFCFKELEGWEPDDDPIGPGTVAYACNTSTLGGRGGRITRSGDRDHLG

SEQ ID NO: 51517 - protein, 904 aa, Homo sapiens
MSSPASTPSRRGSRRGRATPAQTPRSEDARSSPSQRRRGEDSTSTGELQPMPTSPGVDLQSPAAQDVLFSSPPQMHSSAIPLDFDVSSPLTYGTPSSRVEGTPRSGVRGTPVRQRPDLGSAQKGLQVDLQSDGAAAEDIVASEQSLGQKLVIWGTDVNVAACKENFQRFLQRFIDPLAKEEENVGIDITEPLYMQRLGEINVIGEPFLNVNCEHIKSFDKNLYRQLISYPQEVIPTFDMAVNEIFFDRYPDSILEHQIQVRPFNALKTKNMRNLNPEDIDQLITISGMVIRTSQLIPEMQEAFFQCQVCAHTTRVEMDRGRIAEPSVCGRCHTTHSMALIHNRSLFSDKQMIKLQESPEDMPAGQTPHTVILFAHNDLVDKVQPGDRVNVTDGVLLSSPRLESNGTILAHRNLRLPGSSHSPASASRVAGITGIYRAVPIRVNPRVSNVKSVYKTHIDVIHYRKTDAKRLHGLDEEAEQKLFSEKRVELLKELSRKPDIYERLASALAPSIYEHEDIKKGILLQLFGGTRKDFSHTGRGKFRAEINILLCGDPGTSKSQLLQYVYNLVPRGQYTSGKGSSAVGLTAYVMKDPETRQLVLQTGALVLSDNGICCIDEFDKMNESTRSVLHEVMEQQTLSIAKAGIICQLNARTSVLAAANPIESQWNPKKTTIENIQLPHTLLSRFDLIFLLLDPQDEAYDRRLAHHLVALYYQSEEQAEEELLDMAVLKDYIAYAHSTIMPRLSEEASQALIEAYVDMRKIGSSRGMVSAYPRQLESLIRLAEAHAKVRLSNKVEAIDVEEAKRLHREALKQSATDPRTGIVDISILTTGMSATSRKRKEELAEALKKLILSKGKTPALKYQQLFEDIRGQSDIAITKDMFEEALRALADDDFLTVTGKTVRLL

SEQ ID NO: 51518 - protein, 192 aa, Homo sapiens
MASLQRSRVLRCCSCRLFQAHQVKKSVKWTCKACGEKQSFLQAYGEGSGADCRRHVQKLNLLQGQVSELPLRSLEETVSASEEENVGHQQAGNVKQQEKSQPSESRWLKYLEKDSQELELEGTGVCFSKQPSSKMEEPGPRFSQDLPRKRKWSRSTVQPPCSRGVQDSGGSEVAWGPQKVSDKQFLSGPSDH

SEQ ID NO: 51519 - protein, 138 aa, Homo sapiens
MADGELNVDSLITRLLEVRGCRPGKIVQMTEAEVRGLCIKSREIFLSQPILLELEAPLKICGDIHGQYTDLLRLFEYGGFPPEANYLFLGDYVDRGKQSLETICLLLAYKIKYPENFFLLRGNHECASINRIYGFYDE

SEQ ID NO: 51520 - protein, 184 aa, Homo sapiens
  MOD_RES (1)..(1): Any amino acid
XAIGLQPDARGVATSLGLNERLFVVNPQEVHELIPHPDQLGPTVGSAEGLDLVSAKDLAGQLTDHDWSLFNSIHQVELIHYVLGPQHLRDVTTANLERFMRRFNELQYWVATELCLCPVPGPRAQLLRKFIKLAAHLKEQKNLNSFFAVMFGLSNSAISRLAHTWERLPHKVRKLYSALERLLC

SEQ ID NO: 51521 - protein, 156 aa, Homo sapiens
MAFASWWYKTHVSEKTSESPSKPGEKKGSDEKKAASLGSSQSSRTYAGGTASATKVSASSGATSKSSSMNPTETKAIPVSQQMEGPHLPNKKKHKKQAVKTEPEKKSQSTKLSVVHEKKSQEGKPKEHTEPKSLPKQASDTGSNDAHNKKAVSRSA

SEQ ID NO: 51522 - protein, 194 aa, Homo sapiens
MAYGRRTSVRFRSSGMTLDNISRAAVDRIIRVDHAGEYGANRIYAGQMAVLGRTSVGPVIQKMWDQEKDHLKKFNELMVTFRVRPTVLMPLWNVLGFALGAGTALLGKEGAMACTVAVEESIAHHYNNQIRTLMEEDPEKYEELLQLIKKFRDEELEHHDIGLDHDAELAPAYAVLKSIIQAGCRVAIYLSERL

SEQ ID NO: 51523 - protein, 93 aa, Homo sapiens
MYGFCSVKDSQAALPKYVLINWVGEDVPDARKCACASHVAKVAEFFQGVDVIVNASSVEDIDAGAIGQRLSNGLARLSSPVLHRLRLREDENA

SEQ ID NO: 51524 - protein, 19 aa, Homo sapiens
LLRPSEPDSTGYIVIGAPA

SEQ ID NO: 51525 - protein, 138 aa, Homo sapiens
MALEAAGGPPEETLSLWKREQARLKAHVVDRDTEAWQRDPAFSGLQRVGGVDVSFVKGDSVRACASLVVLSFPELEALGWPATLASLQTCRVLGWPRNFCRWMGWRTTPCTRRRSDSCRLEETHSLCWETLGLSWEWP

SEQ ID NO: 51526 - protein, 35 aa, Homo sapiens
  MOD_RES (1)..(1): Any amino acid
XKTGLEKMRSGKMAPKPQSRCTSTRSAEFIDQEAD

SEQ ID NO: 51527 - protein, 131 aa, Homo sapiens
MIFWSFVAGVVTFYCSLGPDSLLPNIFFTIKYKPKQLGLQELFPQGHSCAVCGKVKCKRHRPSLLLENYQPWLDLKISSKVDASLSEVLELVLENFVYPWYRDVTDDESFVDELRITLRFFASVLIRRIHK

SEQ ID NO: 51528 - protein, 170 aa, Homo sapiens
MTSVAKVYYSQTTQTESRPLMGPGIRRRRVLTKDGRSNVRMEHIADKRFLYLKDLWTTFIDMQWRYKLLLFSATFAGTWFLFGVVWYLVAVAHGDLLELDPPANHTPCVVQVHTLTGAFLFSLESQTTIGYGFRYISEECPLAIVLLIAQLVLTTILEIFITGHGKRRWD

SEQ ID NO: 51529 - protein, 171 aa, Homo sapiens
MLLTRKQTCQLGILLSIHRQHSKIDQILIHQQIELLEVLTGFETNNKYEIKNSFGQRVYFAAEDTDCCTRNCCGPSRPFTLRIIDNMGQEVITLERPLRCSSCCCPCCLQEIEIQAPPGVPIGYVIQTWHPCLPKFTIQNEKREDVLKISGPCVVCSCCGDVDFEIKSLDE

SEQ ID NO: 51530 - protein, 60 aa, Homo sapiens
  MOD_RES (1)..(1): Any amino acid
XKSEAKIAHKRTRYTTEGRKKEARSKSKADNVGSALGPDWHEGLNLKGTKEQYSQHPHQK

SEQ ID NO: 51531 - protein, 150 aa, Homo sapiens
MDQNNSLPPYAQGLASPQGAMTPGIPIFSPMMPYGTGLTPQPIQNTNSLSILEEQQRQQQQQQQQQQQQQQQQQQQQQQQQQQQQQQQQQQQQQQAVAAAAVQQSTSQQATQGTSGQAPQLFHSQTLTTAPLPGTTPLYPSPMTPMTPIT

SEQ ID NO: 51532 - protein, 73 aa, Homo sapiens
MLPYNNKDRDALKRRNKSKKNNSSSRRAHLRLCLEKLKGLVPLGPESSRHTTLSLLTKAKLHIKDKYPQHWRC

SEQ ID NO: 51533 - protein, 590 aa, Homo sapiens [sequence omitted]

SEQ ID NO: 51534 - protein, 76 aa, Homo sapiens
MTITSERSVPADVFQIQATSVYPGAYNAFQIRAGNSQGDFYIRQINNVSAMLVLARPVTGPREYVLDLEMVTMNSL

SEQ ID NO: 51535 - protein, 54 aa, Homo sapiens
  MOD_RES (1)..(1): Any amino acid
XVNELYVDDPDKDSGGKIDVSLNISLPNLHCEFFGPQTMSSWRSPARPAPAMDE

SEQ ID NO: 51536 - protein, 244 aa, Homo sapiens
MALRVTRNSKINAENKAKINMAGAKRVPTAPAATSKPGLRPRTALGDIGNKVSEQLQAKMPMKKEAKPSATGKVIDKKLPKPLEKVPMLVPVPVSEPVPEPEPEPEPEPVKEEKLSPEPILVDTASPSPMETSGCAPAEEDLCQAFSDVILAVNDVDAEDGADPNLCSEYVKDIYAYLRQLENNCVPKKMLQLVGVTAMFIASKYEEMYPPEIGDFAFVTDNTYTKHQIRQMEMKILRALNFGL

SEQ ID NO: 51537 - protein, 231 aa, Homo sapiens
MRECISIHVGQAGVQIGNACWELYCLEHGIQPDGQMPSDKTIGGGDDSFNTFFSETGAGKHVPRAVFVDLEPTVIGELTSVTQVRSQGAGTGGLSWGAPLVTHPLSLPAPRPSSSSPLLLPHHVLQMKFALAPTASSSTLSNLSQAKKMLPITMPEGTTPLARRSLTSCWTEFASWPTSARVSRASWFSTALVGELVLGSPRCSWNVSQLIMARSPSWSSLFTRRPRFPQL

SEQ ID NO: 51538 - protein, 63 aa, Homo sapiens
MEGISNFKTPSKLSEKKKSVLCSTPTINIPASPFMQKLGFGTGVNVYLMKSICTKKRNCFMET

SEQ ID NO: 51539 - protein, 215 aa, Homo sapiens
MWKIRELEKQMEDAYRGTKRKMLPSSSSRMRSDGFDEESQRYYWRPKNEISGTLEDDFLKAKSWNKKFYDYEANMPDRWGHSGYKELYPEEFETDSSDQQDITNGKKTSPQVKSSTHESRKHKKSKKSHKKKQKKRSHKKQKKSKKEATDITADSSSEFSEETGASGTRKGKQPHKRKKKSRKKSLKKPALFLEAESNTSHSDDSASSSSEESEE

SEQ ID NO: 51540 - protein, 159 aa, Homo sapiens
DKIEDEVTRQVAQCKCAKRFQVEQIGENKYRFGDSQQLRLVRILRSTVMVRVGGGWMALDEFLVKNDPCRVHHPGSKIKRSDSSSSISSQSPIARGRTNIELREKFILPEGASQGMTPFRSRGRRSKPSSRAASPTRSSSSASQSNHSCTSMPSSPATP

SEQ ID NO: 51541 - protein, 60 aa, Homo sapiens
MVQKYQSPVRVYKYPFELIMAAYERRFPTCPLIPMFVGSDTVNEFKSEDGAIHVIERRCK

SEQ ID NO: 51542 - protein, 53 aa, Homo sapiens
MGRRSTSSTKSGKFMNPTDQARKEARKRELKKNKKQRMMVRAAVLKMKDPKQI

SEQ ID NO: 51543 - protein, 341 aa, Homo sapiens
MPHKGHSGVNQLGGVFVNGRPLPDSTRQKIVELAHSGARPCDISRILQVSNGCVSKILGRYYETGSIRPRAIGGSKPRVATPEVVSKIAQYKRECPSIFAWEIRDRLLSEGVCTNDNIPSVSSINRVLRNLASEKQQMGADGMYDKLRMLNGQTGSWGTRPGWYPGTSVPGQPTQDGCQQQEGGGENTNSISSNGEDSDEAQMRLQLKRKLQRNRTSFTQEQIEALEKEFERTHYPDVFARERLAAKIDLPEARIQVWFSNRRAKWRREEKLRNQRRQASNTPSHIPISSSFSTSVYQPIPQPTTPVSSFTSGSMLGRTDTALTNTYSALPPMPSFTMANN

SEQ ID NO: 51544 - protein, 2466 aa, Homo sapiens
MGRKTSRVQQGPPRSPACSAHGERSWGLEFPPFRWLLGIAGRTHLAALPPFQWVLAFEIFIPLVLFFILLGLRQKKPTISVKEVAFYTAAPLTSAGILPVMQSLCPDGQRDEFGFLQYANSTVTQLLERLDRVVEEGNLFDPARPSLGSELEALRQHLEALSAGPGTSGSHLDRSTVSSFSLDSVARNPQELWRFLTQNLSLPNSTAQALLAARVDPPEVYHLLFGPSSALDSQSGLHKGQEPWSRLGGNPLFRMEELLLAPALLEQLTCTPGSGELGRILTVPESQKGALQGYRDAVCSGQAAARARRFSGLSAELRNQLDVAKVSQQLGLDAPNGSDSSPQAPPPRRLQALLGDLLDAQKVLQDVDVLSALALLLPQGACTGRTPGPPASGAGGAANGTGAGAVMGPNATAEEGAPSAAALATPDTLQGQCSAFVQLWAGLQPILCGNNRTIEPEALRRGNMSSLGFTSKEQRNLGLLVHLMTSNPKILYAPAGSEVDRVILKANETFAFVGNVTHYAQVWLNISAEIRSFLEQGRLQQHLRWLQQYVAELRLHPEALNLSLDELPPALRQDNFSLPSGMALLQQLDTIDNAACGWIQFMSKVSVDIFKGFPDEESIVNYTLNQAYQDNVTVFASVIFQTRKDGSLPPHVHYKIRQNSSFTEKTNEIRRAYWRPGPNTGGRFYFLYGFVWIQDMMERAIIDTFVGHDVVEPGSYVQMFPYPCYTRDDFLFVIEHMMPLCMVISWVYSVAMTIQHIVAEKEHRLKEVMKTMGLNNAVHWVAWFITGFVQLSISVTALTAILKYGQVLMHSHVVIIWLFLAVYAVATIMFCFLVSVLYSKAKLASACGGIIYFLSYVPYMYVAIREEVAHDKITAFEKCIASLMSTTAFGLGSKYFALYEVAGVGIQWHTFSQSPVEGDDFNLLLAVTMLMVDAVVYGILTWYIEAVHPGMYGLPRPWYFPLQKSYWLGSGRTEAWEWSWPWARTPRLSVMEEDQACAMESRRFEETRGMEEEPTHLPLVVCVDKLTKVYKDDKKLALNKLSLNLYENQVVSFLGHNGAGKTTTMSILTGLFPPTSGSATIYGHDIRTEMDEIRKNLGMCPQHNVLFDRLTVEEHLWFYSRLKSMAQEEIRREMDKMIEDLELSNKRHSLVQTLSGGMKRKLSVAIAFVGGSRAIILDEPTAGVDPYARRAIWDLILKYKPGRTILLSTHHMDEADLLGDRIAIISHGKLKCCGSPLFLKGTYGDGYRLTLVKRPAEPGGPQEPGLASSPPGRAPLSSCSELQVSQFIRKHVASCLLVSDTSTELSYILPSEAAKKGAFERLFQHLERSLDALHLSSFGLMDTTLEEVFLKVSEEDQSLENSEADVKESRKDVLPGAEGPASGEGHAGNLARCSELTQSQASLQSASSVGSARGDEGAGYTDVYGDYRPLFDNPQDPDNVSLQEVEAEALSRVGQGSRKLDGGWLKVRQFHGLLVKRFHCARRNSKALFSQILLPAFFVCVAMTVALSVPEIGDLPPLVLSPSQYHNYTQPRGNFIPYANEERREYRLRLSPDASPQQLVSTFRLPSGVGATCVLKSPANGSLGPTLNLSSGESRLLAARFFDSMCLESFTQGLPLSNFVPPPPSPAPSDSPASPDEDLQAWNVSLPPTAGPEMWTSAPSLPRLVREPVRCTCSAQGTGFSCPSSVGGHPPQMRVVTGDILTDITGHNVSEYLLFTSDRFRLHRYGAITFGNVLKSIPASFGTRAPPMVRKIAVRRAAQVFYNNKGYHSMPTYLNSLNNAILRANLPKSKGNPAAYGITVTNHPMNKTSASLSLDYLLQGTDVVIAIFIIVAMSFVPASFVVFLVAEKSTKAKHLQFVSGCNPIIYWLANYVWDMLNYLVPATCCVIILFVFDLPAYTSPTNFPAVLSLFLLYGWSITPIMYPASFWFEVPSSAYVFLIVINLFIGITATVATFLLQLFEHDKDLKVVNSYLKSCFLIFPNYNLGHGLMEMAYNEYINEYYAKIGQFDKMKSPFEWDIVTRGLVAMAVEGVVGFLLTIMCQYNFLRRPQRMPVSTKPVEDDVDVASERQRVLRGDADNDMVKIENLTKVYKSRKIGRILAVDRLCLGVRPGECFGLLGVNGAGKTSTFKMLTGDESTTGGEAFVNGHSVLKELLQVQQSLGYCPQCDALFDELTAREHLQLYTRLRGISWKDEARVVKWALEKLELTKYADKPAGTYSGGNKRKLSTAIALIGYPAFIFLDEPTTGMDPKARRFLWNLILDLIKTGRSVVLTSHSMEECEALCTRLAIMVNGRLRCLGSIQHLKNRFGDGYMITVRTKSSQSVKDVVRFFNRNFPEAMLKERHHTKVQYQLKSEHISLAQVFSKMEQVSGVLGIEDYSVSQTTLDNVFVNFAKKQSDNLEQQETEPPSALQSPLGCLLSLLRPRSAPTELRALVADEPEDLDTEDEGLISFEEERAQLSFNTDTLC

SEQ ID NO: 51545 - protein, 87 aa, Homo sapiens
  MOD_RES (1)..(1): Any amino acid
XVYKLVEDTKHRPKENLELILTQSVENVGVRGDLVSVKKSLGRNRLLPQGLAVYASPENKKLFEEEKLLRQEGKLEKIQTKAGEAVS

SEQ ID NO: 51546 - protein, 159 aa, Homo sapiens
MTRKRTYWVPNSSGGLVNRGIDIGDDMVSGLIYKTYTLQDGPWSQQERNPEAPGRAAVPPWGKYDAALRTMIPFRPKPRFPAPQPLDNAGLFSYLTVSWLTPLMIQSLRSRLDENTIPPLSVHDASDKNVQRLHRLWEEEVSRRGIEKASVLLVMLRFQ

SEQ ID NO: 51547 - protein, 118 aa, Homo sapiens
MAAHLVKRCTCLLREAARQAPAMAPVGRLRLAWVAHKTLTSSATSPISHLPGSLMEPVEKERASTPYIEKQVDHLIKKATRPEELLELLGGSHDLDSNQAAMVLIRLSHLLSEKPEDK

SEQ ID NO: 51548 - protein, 495 aa, Homo sapiens
MKSSLLLRGVHFCFHLPGATPSTKESSQPDAFSSGGGSKPSYEAIPESSPPSGITSASNTTPGEPAASSSRPVAPSGTALSTTSSKLETPPSKLGELLFPSSLAGETLGSFSGLRVGQADDSTKPTNKASSTSLTSTQPTKTSGVPSGFNFTAPPVLGKHTEPPVTSSATTTSVAPPAATSTSSTAVFGSLPVTSAGSSGVISFGGTSLSAGKTSFSFGSQQTNSTVPPSAPPPTTAATPLPTSFPTLSFGSLLSSATTPSLPMSAGRSTEEATSSALPEKPGDSEVSASAASLLEEQQSAQLPQAPPQTSDSVKKEPVLAQPAVSNSGTAASSTSLVALSAEATPATTGVPDARTEAVPPASSFSVPGQTAVTAAAISSAGPVAVETSSTPIASSTTSIVAPGPSAEAAAFGTVTSGSSVFAQPPAASSSSAFNQLTNNTATAPSATPVFGQVAASTAPSLFGQQTGSTASTAAATPQVSSSGFSSPAFGTTAP

SEQ ID NO: 51549 - protein, 236 aa, Homo sapiens
MDMGNPGTLSPTKPGSQYYQYSSNNPRRRPLHSSAMEVQTKKVRKVPPGLPSSVYAPSASTADYNRDSPGYPSSKPATSTFPSSFFMQDGHHSSDPWSSSSGMNQPGYAGMLGNSSHIPQSSSYCSLHPHERLSYPSHSSADINSSLPPMSTFHRSGTNHYSTSSCTPPANGTDSIMANRGSGAAGSSQTGDALGKALASIYSPDHTNNSFSSNPSTPVGSPPSLSAGTAVWSRNG

SEQ ID NO: 51550 - protein, 84 aa, Homo sapiens
MDRLLRLGGGMPGLGQGPPTDAPAVDTAEQVYISSLALLKMLKHGRAGVPMEVMGLMLGEFVDDYTVRVIDVFAMPQSGTGVSV

SEQ ID NO: 51551 - protein, 198 aa, Homo sapiens
METGRQTGVSAEMLAMPRGLKGSKKDGIPEDLDGNLEEPRDQEGELRSEDVMDLTEGDSEASASAPPAAKRRKTHTKRKKERKPTVDAEEAQRMTTLLSAMSEEQLSRYEVCRRSAFPRARIAGLMRSITGSSVSENAAIAMAGIAKVFVGEVVEEALDMCEMWGETPPLQPKHLREAVHRLKPKGLFPNSNYKRVMF

SEQ ID NO: 51552 - protein, 91 aa, Homo sapiens
MASAAVESFVTKQLDLLELERDAEVEERRSWQENISLKELQSRGVCLLKLQVSSQRTGLYGRLLVTFEPRRYGSAAALPSNSFTSGVCVLT

SEQ ID NO: 51553 - protein, 230 aa, Homo sapiens
MNLGDGLKLETELLDGKTKLILSPYEHKSKISVKMGNKAKIAKCPLRTKTGHILKSTQDTCIGSEKLLQKKPVGSETSQAKGEKNGMTFSSTKDLCKQCIDKDCLHIQKEISPATPNMQKTRNTVNTSLVGKQKPHKKHITAENMKSSLVCLTQDQLQQILMTVNQGNRSLSLTENGKEAKSQYSLYLNSISNQPKDENIMGLFKKTEMVSSVPAENKSVLNEHQETSKQ

SEQ ID NO: 51554 - protein, 79 aa, Homo sapiens
MIDIQKDTAVEGEEIEVNCTAMASKPATTIRWFKGNTELKGKSEVEEWSDMYTVTSQLMLKVHKEDDGVPVICQVEHPA

SEQ ID NO: 51555 - protein, 285 aa, Homo sapiens
MNSSPAGTPSPQPSRANGNINLGPSANPNAQPTDFDFLKVIGKGNYGKVLLAKRKSDGAFYAVKVLQKKSILKKKEQSHIMAERSVLLKNVRHPFLVGLRYSFQTPEKLYFVLDYVNGGELFFHLQRERRFLEPRARFYAAEVASAIGYLHSLNIIYRDLKPENILLDCQGHVVLTDFGLCKEGVEPEDTTSTFCGTPEYLAPEVLRKEPYDRAVDWWCLGAVLYEMLHGLPPFYSQDVSQMYENILHQPLQIPGGRTVAACDLLQSLLHKDQRQRLGSKADFVA

SEQ ID NO: 51556 - protein, 92 aa, Homo sapiens
MNLDSIHRLIEETQIFQMQQSSIKSRGDMVAPASPPRDTCNTCFPLHGLQSHAAHNFCAHSYNTNKWDICEELRLRELEEVKARAAQMEKTM

SEQ ID NO: 51557 - protein, 96 aa, Homo sapiens
AFLCAVGLTSYSVLVIRIVQPELKALAIGFHSMIMRSLGGILVPIYFGALIDTTCMKWSTNSCGARGACRIYNSTYLGRAFFGLKYLLGMRHYSWN

SEQ ID NO: 51558 - protein, 221 aa, Homo sapiens
MRFLAATFLLLALSTAAQAEPVQFKDCGSVDGVIKEVNVSPCPTQPCQLSKGQSYSVNVTFTSNIQSKSSKAVVHGILMGVPVPFPIPEPDGCKSGINCPIQKDKTYSYLNKLPVKSEYPSIKLVVEWQLQDDKNQSLFCWEIPVQIVSLSGGFSSLSASLSSVHLANESAETLDSTSSSAASTTVTCSPMVSSDSLKRRCSVAETELRVAGSQWLSHVSF

SEQ ID NO: 51559 - protein, 1041 aa, Homo sapiens
  MOD_RES (1)..(1): Any amino acid
XSIQNELTQPPTITKQSAKDHIVDPRDNILIECEAKGNPAPSFHWTRNSRFFNIAKDPRVSMRRRSGTLVIDFRSGGRPEEYEGEYQCFARNKFGTALSNRIRLQVSKSPLWPKENLDPVVVQEGAPLTLQCNPPPGLPSPVIFWMSSSMEPITQDKRVSQGHNGDLYFSNVMLQDMQTDYSCNARFHFTHTIQQKNPFTLKVLTTRGVAERTPSFMYPQGTASSQMVLRGMDLLLECIASGVPTPDIAWYKKGGDLPSDKAKFENFNKALRITNVSEEDSGEYFCLASNKMGSIRHTISVRVKAAPYWLDEPKNLILAPGEDGRLVCRANGNPKPTVQWMVNGEPLQSAPPNPNREVAGDTIIFRDTQISSRAVYQCNTSNEHGYLLANAFVSVLDVPPRMLSPRNQLIRVILYNRTRLDCPFFGSPIPTLRWFKNGQGSNLDGGNYHVYENGSLEIKMIRKEDQGIYTCVATNILGKAENQVRLEVKDPTRIYRMPEDQVARRGTTVQLECRVKHDPSLKLTVSWLKDDEPLYIGNRMKKEDDSLTIFGVAERDQGSYTCVASTELDQDLAKAYLTVLADQATPTNRLAALPKGRPDRPRDLELTDLAERSVRLTWIPGDANNSPITDYVVQFEEDQFQPGVWHDHSKYPGSVNSAVLRLSPYVNYQFRVIAINEVGSSHPSLPSERYRTSGAPPESNPGDVKGEGTRKNNMEITWTPMNATSAFGPNLRYIVKWRRRETREAWNNVTVWGSRYVVGQTPVYVPYEIRVQAENDFGKGPEPESVIGYSGEDLPSAPRRFRVRQPNLETINLEWDHPEHPNGIMIGYTLKYVAFNGTKVGKQIVENFSPNQTKFTVQRTDPVSRYRFTLSARTQVGSGEAVTEESPAPPNEATPTAAYTNNQADIATQGWFIGLMCAIALLVLILLIVCFIKRSRGGKYPVREKKDVPLGPEDPKEEDGSFDYSDEDNKPLQGSQTSLDGTIKQQESDDSLVDYGEGGEGQFNEDGSFIGQYTVKKDKEETEGNESSEATSPVNAIYSLA

SEQ ID NO: 51560 - protein, 165 aa, Homo sapiens
MCIIFFKFDPRPVSKNAYRLILAANRDEFYSRPSKLADFWGNNNEILSGLDMEEGKEGGTWLGISTRGKLAALTNYLQPQLDWQARGRGELVTHFLTTDVDSLSYLKKVSMEGHLYNGFNLIAADLSTAKGDVICYYGNRGEPDPIVLTPGTYGLSNALLETPWR

SEQ ID NO: 51561 - protein, 131 aa, Homo sapiens
MDLLGKQLSFYSFGIIGIIMLVGWLLGKDILEMFTISVSLAVAAIPEGLPIVVTVTLALGVMRMVKKRAIVKKLPIVETLGCCNVICSDKTGTLTKNEMTVTHIFTSDGLHAEVTGVGYNQFGEVIVDGDV

SEQ ID NO: 51562 - protein, 516 aa, Homo sapiens
MSNDGRSRNRDRRYDEVPSDLPYQDTTIRTHPTLHDSERAVSADPLPPPPLPLQPPFGPDFYSSDTEEPAIAPDLKPVRRFVPDSWKNFFRGKKKDPEWDKPVSDIRYISDGVECSPPASPARPNHRSPLNSCKDPYGGSEGTFSSRKEADAVFPRDPYGSLDRHTQTVRTYSEKVEEYNLRYSYMKSWAGLLRILGVVELLLGAGVFACVTAYIHKDSEWYNLFGYSQPYGMGGVGGLGSMYGGYYYTGPKTPFVLVVAGLAWITTIIILVLGMSMYYRTILLDSNWWPLTEFGINVALFILYMAAAIVYVNDTNRGGLCYYPLFNTPVNAVFCRVEGGQIAAMIFLFVTMIVYLISALVCLKLWRHEAARRHREYMEQQEINEPSLSSKRKMCEMATSGDRQRDSEVNFKELRTAKMKPELLSGHIPPGHIPKPIVMPDYVAKYPVIQTDDERERYKAVFQDQFSEYKELSAEVQAVLRKFDELDAVMSRLPHHSESRQEHERISRIHEEFKKK

SEQ ID NO: 51563 - protein, 76 aa, Homo sapiens
  MOD_RES (1)..(1): Any amino acid
XGKTTGTPPDSSLVTYELHSRPEQDKFSQAAKVAELEKRLTELETAVRCDQDAQNPLSAGLQGACLMVSLEETGQR

SEQ ID NO: 51564 - protein, 164 aa, Homo sapiens
MHRDARAQKASRGATRRYYLGAVELSWDYMQSDLGELPVDARFPPRVPKSFPFNTSVVYKKTLFVEFTDHLFNIAKPRPPWMGLLGPTIQAEVYDTVVITLKNMASHPVSLHAVGVSYWKASEGAEYDDQTSQREKEDDKVFPGGSHTYVWQVLKENGPMASDP

SEQ ID NO: 51565 - protein, 160 aa, Homo sapiens
MPVERMRMRPWLEEQINSNTIPGLKWLNKEKKIFQIPWMHAARHGWDVEKDAPLFRNWAIHTGKHQPGVDKPDPKTWKANFRCAMNSLPDIEEVKDKSIKKGNNAFRVYRMLPLSERPSKKGKKPKTEKEDKVKHIKQEPVESSLGLSNGVSDLSPEYAV

SEQ ID NO: 51566 - protein, 161 aa, Homo sapiens
  MOD_RES (1)..(1): Any amino acid
XLTSLPALAVPPPTPTKTAPPALVNGLELSEPRSWLYLEEMVNSLLNTAQQLKTLFEQAKHASTYREAATNQAKIHADAERKEVIHPPRLPKVLGLQQSCVNCGREAMSECTGCHKVNYCSTFCQRKDWKDHQHICGQSAAVTVQADEVHVAESVMEKVTV

SEQ ID NO: 51567 - protein, 1224 aa, Homo sapiens
  MOD_RES (1)..(1): Any amino acid
XQAKPQHLKSDEELLPPDGAPEHAAPGEGAEDADSGPESRSGGEETSVCEKCCAEFFKWADFLEHQRSCTKLPPVLIVHEDAPAPPPEDFPEPSPASSPSERAESEAAEEAGAEGAEGEARPVEKEAEPMDAEPAGDTRAPRPPPAAPAPPTPAYGAPSTNVTLEALLSTKVAVAQFSQGARAAGGSGAGGGVAAAAVPLILEQLMALQQQQIHQLQLIEQIRSQVALMQRPPPRPSLSPAAAPSAPGPAPSQLPGLAALPLSAGAPAAAIAGSGPAAPAAFEGAQPLSRPESGASTPGGPAEPSAPAAPSAAPAPAAPAPAPAPQSAASSQPQSASTPPALAPGSLLGAAPGLPSPLLPQTSASGVIFPNPLVSIAATANALDPLSALMKHRKGKPPNVSVFEPKASAEDPFFKHKCRFCAKVFGSDSALQIHLRSHTGERPFKCNICGNRFSTKGNLKVHFQRHKEKYPHIQMNPYPVPEYLDNVPTCSGIPYGMSLPPEKPVTTWLDSKPVLPTVPTSVGLQLPPAVPGAHGYADSPSATPASRSPQRPSPASSECASLSPGLNHVESGVSATAESPQSLLGGPPVTKAEPVSLPCTNARAGDAPVGAQASAAPTSVDGAPTSLGSPGLPAVSEQFKAQFPFGGLLDSMQTSETSKLQQLVENIDKKMTDPNQCVICHRVLSCQSALKMHYRTHTGERPFKCKICGRAFTTKGNLKTHFGVHRAKPPLRVQHSCPICQKKFTNAVVLQQHIRMHMGGQIPNTPLPEGFQDAMDSELAYDDKNAETLSSYDDDMDENSMEDDAELKDAATDPAKPLLSYAGSCPPSPPSVISSIAALENQMKMIDSVMSCQQLTGLKSVENGSGESDRLSNDSSSAVGDLESRSAGSPALSESSSSQALSPAPSNGESFRSKSPGLGAPEEPQEIPLKTERPDSPAAAPGSGGAPGRAGIKEEAPFSLLFLSRERGPSQSTPSLISSAAPTMIKMEVNGHGKAMALGEGPPLPAGVQVPAGPQTVMGPGLAPMLAPPPRRTPKQHNCQSCGKTFSSASALQIHERTHTGEKPFGCTICGRAFTTKGNLKVHMGTHMWNNAPARRGRRLSVENPMALLGGDALKFSEMFQKDLAARAMNVDPSFWNQYAAAITNGLAMKNNEISVIQNGGIPQLPVSLGGSALPPLGSMASGMDKARTGSSPPIVSLDKASSETAASRPFTRFIEDNKEIGIN

SEQ ID NO: 51568 - protein, 849 aa, Homo sapiens
MRVLCEQRYCAVCREELRQVVFGKKLPAFATIPIHQLQHEKKYDIYFADGKVYALYRQLLQHECPRCPELPPFSLFGDLEQHMRRQHELFCCRLCLQHLQIFTYERKWYSRKDLARHRMQGDPDDTSHRGHPLCKFCDERYLDNDELLKHLRRDHYFCHFCDSDGAQDYYSDYAYLREHFREKHFLCEEGRCSTEQFTHAFRTEIDLKAHRTACHSRSRAEARQNRHIDLQFSYAPRHSRRNEGVVGGEDYEEVDRYSRQGRVARAGTRGAQQSRRGSWRYKREEEDREVAAAVRASVAAQQQEEARRSEDQEEGGRPKKEEAAARGPEDPRGPRRSPRTQGEGPGPKETSTNGPVSQEAFSVTGPAAPGCVGVPGALPPPSPKLKDEDFPSLSASTSSSCSTAATPGPVGLALPYAIPARGRSAFQEEDFPALVSSVPKPGTAPTSLVSAWNSSSSSKKVAQPPLSAQATGSGQPTRKAGKGSRGGRKGGPPFTQEEEEDGGPALQELLSTRPTGSVSSTLGLASIQPSKVGKKKKVGSEKPGTTLPQPPPATCPPGALQAPEAPASRAEGPVAVVVNGHMEGPAPARSAPKEPPGLPRPLGSFPCPTPQEDFPALGGPCPPRMPPPPGFSAVVLLKGTPPPPPPGLVPPISKPPPGFSGLLPSPHPACVPSPATTTTTKAPRLLPAPRAYLVPENFRERNLQLIQSIRDFLQSDEARFSEFKSHSGEFRQGLISAAQYYKSCRDLLGENFQKVFNELLVLLPDTAKQQELLSAHTDFCNREKPLSTKSKKNKKSAWQATTQQAGLDCRVCPTCQQVLAHGDASSHQALHAARDDDFPSLQAIARIIT

SEQ ID NO: 51569 - protein, 37 aa, Homo sapiens
MGTRAFSHDSIFIPDGGAESEQTVQAMSQDNILGKVK

SEQ ID NO: 51570 - protein, 28 aa, Homo sapiens
MFRRPVLQVLRQFVRHESETTTSLVLER

SEQ ID NO: 51571 - protein, 43 aa, Homo sapiens
MEVLRPQLIRIDGRNYRKNPVQEQTYQHEEDEEDFYQGWSAVA

SEQ ID NO: 51572 - protein, 891 aa, Homo sapiens
MTENKTVSSSSTRDDQTNIGLTCQEVKALREKAWSRTNEGNAMSQSLVLYGASKENSEGFHESKMTNTEGVNKGIYFSYPCRRHSCAVVNIPAPCVNKMISHIQDVESKIQEHLKRFETSFEEWSRTSSTKDLKEDWSVTTPVKEVKPGEKRDEKCPELKQEMETLLSEAIRLIKSLETDRADAEEALKQQRSRKNMINMKIDSWSVWKLQELPLAVQKEHEAYLSDVIELQWHLEDKANQLQHFEKQKTELEEANAKIQADIDYMNEHGPLLDSKQNQELQDLKNHYKKKMEVMDLHRKVNEELEEALEACENARLKAQQIKEEIDKDIYQDEKTIEAYKREIYQLNSLFDHYSSSVINVNTNIEEKEEEVTEAIRETKSSKNELHSLSKMLEDLRRVYDQLTWKQKSHENQYLEAVNDFYAAKKTWDIELSDVAKDFSAISLACTKLTEDNKKLEIDINKITVKTNESIRKKSKYESEIKYLTIMKLKNDKHLKNIYKEAYRIGTLFHLTKHKTDEMEDKIAEVRRKFKGREEFLKKLTQGEVAAGMVLQKKLYSIYEVQALERKELIKNRAICAMSLAELQEPLLQLEDEAERIRSLDKEHSVMLNNIIDQKDLIRRKVGKVKKKLRKKGKKTLDALIETESKRSAIFKDLEATKSKTMIFYAKINELNEELKAKEEEKKSFDQTLEILKNKFITMRFKREHAQTVFDHYMQEKKDCEERIFEEDQRFRVLLAVRQKTLQDTQKIIADSLEENLRLAQEYQQLQITFLKEKDNYFNIYDKQLSLDTSIRDKKQVAGFLPKKLPNSLPIISDELSNFQLCQLQRRMHTLWQEHFKLVVLFSQMRLANFQTDSQESIQKILAVQEESSNLMQHILGFFQTLTDGTCENDG

SEQ ID NO: 51573 - protein, 174 aa, Homo sapiens
MEVLIGDPITTCLSPSVYDIICNLGFQLRENCDINSIVTQNGEVCWKTITDCVSYTESEQGLDYWGSVRLLGPVCEAVHSHFLSLTKGQFEIRYAPWFQWTSFPEVFLLIGKECPFLLRDLLSSEELAQVFSQSVMNVLKVFVGSPCGLNLRNVLWHGFASPEEIPPKYCSMMI

SEQ ID NO: 51574 - protein, 160 aa, Homo sapiens
MAFTFAAFCYMLALLLTAALIFFAIWHIIAFDELKTDYKNPIDQCNTLNPTVEKVKKIKRVKIALKLVLPEYLIHAFFCVMFLCAAEWLTLGLNMPLLAYHIWRYMSRPVMSGPGLYDPTTIMNADILAYCQKEGWCKLAFYLLAFFYYLYGMIYVLVSS

SEQ ID NO: 51575 - protein, 210 aa, Homo sapiens
MTSTGQDSTTTRQRRSRQNPQSPPQDSSVTSKRNIKKGAVPRSIPNLAEVKKKGKMKKLGQAMEEDLIVGLQGMDLNLEAEALAGTGLVLDEQLNEFHCLWDDSFPEGPERLHAIKEQLIQEGLLDRCVSFQARFAEKEELMLVHSLEYIDLMETTQYMNEGELRVLADTYDSVYLHPNSYSCACLASGSVLRLVDAVLGAEIRNGMAII

SEQ ID NO: 51576 - protein, 20 aa, Homo sapiens
  MOD_RES (1)..(1): Any amino acid
XQRDIEKASKDKEEVRHVRL

SEQ ID NO: 51577 - protein, 86 aa, Homo sapiens
MTTYLEFIQQNEERDGVRFSWNVWPSSRLEATRMVVPVAALFTPLKERPDLPPIQYEPVLCSRTTCRAVLNPLCSLFSTQKLEFYE

SEQ ID NO: 51578 - protein, 449 aa, Homo sapiens
MCFLFSTFPRTGKCHVQTIQLCRRLTVEFMHYIIAARALRKVFLSIKGIYYQAEVLGQPIVWITPYAFSHDHPTDVDYRVMATFTEFYTTLLGFVNFRLYQLLNLHYPPKLEGQAQAEAKAGEGTYALDSESCMEKLAALSASLARVVVPATEEEAEVDEFPTDGEMSAQEEDRRKELEAQEKHKKLFEGLKFFLNREVPREALAFIIRSFGGEVSWDKSLCIGATYDVTDSRITHQIVDRPGQQTSVIGRCYVQPQWVFDSVNARLLLPVAEYFSGVQLPPHLSPFVTEKEGDYVPPEKLKLLALQRGEDPGNLNESEEEEEEDDNNEGDGDEEGENEEEEEDAEAGSEKEEEARLAALEEQRMEGKKPRVMAGTLKLEDKQRLAQEEESEAKRLAIMMMKKREKYLYQKIMFGKRRKIREANKLAEKRKAHDEAVRSEKKAKKARPE

SEQ ID NO: 51579 - protein, 61 aa, Homo sapiens
MERREHLTLTFHSPEVPKIKGNRKYQRIISNIPGPSFSSLSLPYLLALAGSSALGSLIEEA

SEQ ID NO: 51580 - protein, 573 aa, Homo sapiens
MGKCLSCCKEDQSFQRCSPEDQVSTDAQHRGASSISQPSISLGHKTSYSPVTHKVNAAKASRRLLSVSSPSFSERRYSLFVGFQKRNASPYWQQSRANFDSEEDTGFTDIKSSSDHCGSFISRRRRFSSRKLSIVSYYKSAIFFDPQASGQNVFNLNEIEIFSKTSSNTDAKKHITISAPEYNTKNFKNFETNTTSPAFGNTIDTASYQQSTSSFFSLASDISSPDQQNGIANDIQQRGQLCKDLKDFLHPRPESYSTDHSPIMIPQHPSQSGTFPFLHKAGFSSSYKNSGCFIPPQSELTSGLFEDEDFAVLFQDEDRSSPIEIPKIRYITANTDTEEQSFPVPKAFNTRVEELNLDVLLQKVDHLRMSESGKSESFELLRDHKEKFRDEIEFMWRFARAYGDMYELSTNTQEKKHYANIGKTLSERAINRAPMNGHCHLWYAVLCGYVSEFEGLQNKINYGHLFKEHLDIAIKLLPEEPFLYYLKGRYCYTVSKLSWIEKKMAATLFGKIPSSTVQEALHNFLKAEELCPGYSNPNYMYLAKCYTDLEENQNALKFCNLALLLPTVTKEEL

SEQ ID NO: 51581 - protein, 150 aa, Homo sapiens
MGAAVFFGCTFVAFGPAFALFLITVAGDPLRVIILVAGKADEGLASLSEDGRSPISIRQMAYVSGLSFGIISGVFSVINILADALGPGVVGIHGDSPYYFLTSAFLTAAIILLHTFWGVVFFDACERRRYWALGLVVGSHLLTSGLTFLN

SEQ ID NO: 51582 - protein, 659 aa, Homo sapiens
MDSQGRVWAQEMLLRVSPDHVTLLDPASKEELESYPLGAIVRCDAVMPPGRSRSLLLLVCQEPERAQPDVHFFQGLRLGAELIREDIQGALHNYRSGRGERRAAALRATQEELQRDRSPAAETPPLQRRPSVRAVISTVERGAGRGRPQAKPIPEAEEAQRPEPVGTSSNADSASPDLGPRGPDLAVLQAEREVDILNHVFDDVESFVSRLQKSAEAARVLEHRERGRRSRRRAAGEGLLTLRAKPPSEAEYTDVLQKIKYAFSLLARLRGNIADPSSPELLHFLFGPLQMIVNTSGGPEFASSVRRPHLTSDAVALLRDNVTPRENELWTSLGDSWTRPGLELSPEEGPPYRPEFFSGWEPPVTDPQSRAWEDPVEKQLQHERRRRQQSAPQVAVNGHRDLEPESEPQLESETAGKWVLCNYDFQARNSSELSVKQRDVLEVLDDSRKWWKVRDPAGQEGYVPYNILTPYPGPRLHHSQSPARSLNSTPPPPPAPAPAPPPALARPRWDRPRWDSCDSLNGLDPSEKEKFSQMLIVNEELQARLAQGRSGPSRAVPGPRAPEPQLSPGSDASEVRAWLQAKGFSSGTVDALGVLTGAQLFSLQKEELRAVSPEEGARVYSQVTVQRSLLEDKEKVSELEAVMEKQKKKVEGEVEMEVI

SEQ ID NO: 51583 - protein, 131 aa, Homo sapiens
MLTLASKLKRDDGLKGSRTAATASDSTRRVSVRDKLLVKEVAELEANLPCTCKVHFPDPNKLHCFQLTVTPDEGYYQGGKFQFETEVPDAYNMVDLLNFDDPLNIEAAEHHLRDKEDFRNKVDDYIKRYAR

SEQ ID NO: 51584 - protein, 552 aa, Homo sapiens
MAECNLVAILISSIDNPLDKNLDNGGNSCLDFRPLNSFSQPQVLLAAAVCTKAGKAIVSRQFVEMTRTRIEGLLAAFPKLMNTGKQHTFVETESVRYVYQPMEKLYMVLITTKNSNILEDLETLRLFSRVIPEYCRALEENEISEHCFDLIFAFDEIVALGYRENVNLAQIRTFTEMDSHEEKVFRAVRETQEREAKAEMRRKAKELQQARRDAERQGKKAPGFGGFGSSAVSGGSTAAMITETIIETDKPKVAPAPARPSGPSKALKLGAKGKEVDNFVDKLKSEGETIMSSSMGKRTSEATKMHAPPINMESVHMKIEEKITLTCGRDGGLQNMELHGMIMLRISDDKYGRIRLHVENEDKKGVQLQTHPNVDKKLFTAESLIGLKNPEKSFPVNSDVGVLKWRLQTTEESFIPLTINCWPSESGNGCDVNIEYELQEDNLELNDVVITIPLPSGVGAPVIGEIDGEYRHDSRRNTLEWCLPVIDAKNKSGSLEFSIAGQPNDFFPVQVSFVSKKNYCNIQVTKVTQVDGNSPVRFSTETTFLVDKYEIL

SEQ ID NO: 51585 - protein, 226 aa, Homo sapiens
  MOD_RES (1)..(1): Any amino acid
XSGFGARLLELCNQGLFECLALNLHCLGGQQMELAAVINGRIRRMSRGVNPSLVSWLTTMMGLRLQVVLEHMPVGPDAILRYVRRVGDPPQPLPEEPMEVQGAERASPEPQRENASPAPGTTAEEAMSRGPPPAPEGGSRDEQDGASAETEPWAAAVPPEWVPIIQQDIQSQRKVKPQPPLSDAYLSGMPAKRRKLRSDIQKRLQEDPNYSPQRFPNAQRAFADDP

SEQ ID NO: 51586 - protein, 125 aa, Homo sapiens
MDSVKQSAALCLLRLYRTSPDLVPMGDWTSRVVHLLNDQHLGVVTAATSLITTLAQKNPEEFKTSVSLAVSRLSRIVTSASTDLQDYTYYFVPAPWLSVKLLRLLQCYPPPDPAVRGRLTECLET

SEQ ID NO: 51587 - protein, 130 aa, Homo sapiens
MGISNRVTNENSNCEMRKEKRLCYIQPCDSNILKTIKIPKGKTCQPTFQLSKAEKFVFSGCSSTQSYKPTFCGICLDKRCCIPNKSKMITIQFDCPNEGSFKWKMLWITSCVCQRNCREPGDIFSELKIL

SEQ ID NO: 51588 - protein, 450 aa, Homo sapiens
MMTKVLGMAPVLGPRPPQEQVGPLMVKVEEKEEKGKYLPSLEMFRQRFRQFGYHDTPGPREALSQLRVLCCEWLRPEIHTKEQILELLVLEQFLTILPQELQAWVQEHCPESAEEAVTLLEDLERELDEPGHQVSTPPNEQKPVWEKISSSGTAKESPSSMQPQPLETSHKYESWGPLYIQESGEEQEFAQDPRKVRDCRLSTQHEESADEQKGSEAEGLKGDIISVIIANKPEASLERQCVNLENEKGTKPPLQEAGSKKGEHTLGRNLTCAPSVGKLSATAQTSPSTTEHTWWTGPMTVSVEKLLGRAQTFLNIRECTQKRRHISAKIVARLSAGKAASFVTIGSTLGRSLISVTNVGRASVSMRASAPTRDSTPERSHISVRSVGKPSTTAPTSINTTESTPGKSPTGVITVERPSVASPIFPNISESTLEREKHRNFQALLLLSLF

SEQ ID NO: 51589 - protein, 647 aa, Homo sapiens
MVLPSRLHWIRNRPWRDRIRRRQLNRLPTRLPEIMLVGSQSFSPGGPNGIIRSQSFAGFSGLQERRSRCNSFIENSSALKKPQAKLKKMHNLGHKNNNPPKEPQPKRVEEVYRALKNGLDEYLEVHQTELDKLTAQLKDMKRNSRLGVLYDLDKQIKTIERYMRRLEFHISKVDELYEAYCIQRRLQDGASKMKQAFATSPASKAARESLTEINRSFKEYTENMCTIEVELENLLGEFSIKMKGLAGFARLCPGDQYEIFMKYGRQRWKLKGKIEVNGKQSWDGEETVFLPLIVGFISIKVTELKGLATHILVGSVTCETKELFAARPQVVAVDINDLGTIKLNLEITWYPFDVEDMTASSGAGNKAAALQRRMSMYSQGTPETPTFKDHSFFSNLPDDIFENGKAAEEKMPLSLSFSDLPNGDCALTSHSTGSPSNSTNPEITITPAEFNLSSLASQNEGMDDTSSASSRNSLGEGQEPKSHLKEEDPEEPRKPASAPSEACRRQSSGAGAEHLFLENDVAEALLQESEEASELKPVELDTSEGNITKQLVKRLTSAEVPMATDRLLSEGSVGGESEGCRSFLDGSLEDAFNGLLLALEPHKEQYKEFQDLNQEVMNLDDILKDAKHLDDQKLNGAASWTEITEGE

SEQ ID NO: 51590 - protein, 764 aa, Homo sapiens
MLSLARPPLPPTGLRTSLSLLRVSWIQGEGEDPCVEAVGERGGPQNPDSRARLDQSDEDFKPRIVPYYRDPNKPYKKVLRTRYIQTELGSRERLLVAVLTSRATLSTLAVAVNRTVAHHFPRLLYFTGQRGARAPAGMQVVSHGDERPAWLMSETLRHLHTHFGADYDWFFIMQDDTYVQAPRLAALAGHLSINQDLYLGRAEEFIGAGEQARYCHGGFGYLLSRSLLLRLRPHLDGCRGDILSARPDEWLGRCLIDSLGVGCVSQHQGQQYRSFELAKNRDPEKEGSSAFLSAFAVHPVSEGTLMYRLHKRFSALELERAYSEIEQLQAQIRNLTVLTPEGEAGLSWPVGLPAPFTPHSRFEVLGWDYFTEQHTFSCADGAPKCPLQGASRADVGDALETALEQLNRRYQPRLRFQKQRLLNGYRRFDPARGMEYTLDLLLECVTQRGHRRALARRVSLLRPLSRVEILPMPYVTEATRVQLVLPLLVAEAAAAPAFLEAFAANVLEPREHALLTLLLVYGPREGGRGAPDPFLGVKAAAAELERRYPGTRLAWLAVRAEAPSQVRLMDVVSKKHPVDTLFFLTTVWTRPGPEVLNRCRMNAISGWQAFFPVHFQEFNPALSPQRSPPGPPGAGPDPPSPPGADPSRGAPIGGRFDRQASAEGCFYNADYLAARARLAGELAGQEEEEALEGLEVMDVFLRFSGLHLFRAVEPGLVQKFSLRDCSPRLSEELYHRCRLSNLEGLGGRAQLAMALFEQEQANST

SEQ ID NO: 51591 - protein, 151 aa, Homo sapiens
MFPKLQSEPQVLLIRAQTLYKKFVKSTGFLGSEQWAVIHIVDQRVRFYPVAFFCCWGPAVILMIIKLTKPQDTKLHMALYVLQALTATSQGLLNCGVYGWTQHKFHQLKQEARRDADTQTPLLCSQKRFYSRGLNSLESTLTFPASTSTIF

SEQ ID NO: 51592 - protein, 400 aa, Homo sapiens
MYVSSEHKGRRVTALCWDTAILRVFVGDHAGKVSAIKLNTSKQAKAAAAFVMFPVQTITTVDSCVVQLDYLDGRLLISSLTRSFLCDTEREKFWKIGNKERDGEYGACFFPGRCSGGQQPLIYCARPGSRMWEVNFDGEVISTHQFKKLLSLPPLPVITLRSEPQYDHTAGSSQSLSFPKLLHLSEHCVLTWTERGIYIFIPQNVQVLLWSEVKDIQDVAVCRNELFCLHLNGKVSHLSLISVERCVERLLRRGLWNLAARTCCLFQNSVIASRARKTLTADKLEHLKSQLDHGTYNDLISQLEELILKFEPLDSACSSRRSSISSHESFSILDSGIYRIISSRRGSQSDEDSCSLHSQTLSEDERFKEFTSQQEEDLPDQCCGSHGNEGDECVCCWFLM

SEQ ID NO: 51593 - protein, 383 aa, Homo sapiens
MGLGRVLLFLAVAFPFAPPAAAAEPHSLRYNLMVLSQDGSVQSGFLAEGHLDGQPFLRYDRQKRRAKPQGQWAEDVLGAETWDTETEDLTENGQDLRRTLTHIKDQKGGLHSLQEIRVCEMHEDSSTRGSRHFYYNGELFLSQNLETQESTVPQSSRAQTLAMNVTNFWKEDAMKTKTHYRAMQADCLQKLQRYLKSGVAIRRTVPPMVNVTCSEVSEGNITVTCRASSFYPRNITLTWRQDGVSLSHNTQQWGDVLPDGNGTYQTWVATRIRQGEEQRFTCYMEHSGNHGTHPVPSGKALVLQSQRTDFPYVSAAMPCFVIIIILCVPCCKKKTSAAEGPELVSLQVLDQHPVGTGDHRDAAQLGFQPLMSATGSTGSTEGA

SEQ ID NO: 51594 - protein, 52 aa, Homo sapiens
MQPPPGMPLPPADIGPPPYEPPGHPMPQPGFIPPHMSADGTYMPPDVIWAAA

SEQ ID NO: 51595 - protein, 1226 aa, Homo sapiens
MWGSDRLAGAGGGGAAVTVAFTNARDCFLHLPRRLVAQLHLLQNQAIEVVWSHQPAFLSWVEGRHFSDQGENVAEINRQVGQKLGLSNGGQVFLKPCSHVVSCQQVEVEPLSADDWEILELHAVSLEQHLLDQIRIVFPKAIFPVWVDQQTYIFIQIVALIPAASYGRLETDTKLLIQPKTRRAKENTFSKADAEYKKLHSYGRDQKGMMKELQTKQLQSNTVGITESNENESEIPVDSSSVASLWTMIGSIFSFQSEKKQETSWGLTEINAFKNMQSKVVPLDNIFRVCKSQPPSIYNASATSVFHKHCAIHVFPWDQEYFDVEPSFTVTYGKLVKLLSPKQQQSKTKQNVLSPEKEKQMSEPLDQKKIRSDHNEEDEKACVLQVVWNGLEELNNAIKYTKNVEVLHLGKVWIPDDLRKRLNIEMHAVVRITPVEVTPKIPRSLKLQPRENLPKDISEEDIKTVFYSWLQQSTTTMLPLVISEEEFIKLETKDGLKEFSLSIVHSWEKEKDKNIFLLSPNLLQKTTIQVLLDPMVKEENSEEIDFILPFLKLSSLGGVNSLGVSSLEHITHSLLGRPLSRQLMSLVAGLRNGALLLTGGKGSGKSTLAKAICKEAFDKLDAHVERVDCKALRALNDMIKEFISMGSLVALIATSQSQQSLHPLLVSAQGVHIFQCVQHIQPPNQEQRCEILCNVIKNKLDCDINKFTDLDLQHVAKETGGFVARDFTVLVDRAIHSRLSRQSISTREKLVLTTLDFQKALRGFLPASLRSVNLHKPRDLGWDKIGGLHEVRQILMDTIQLPAKYPELFANLPIRQRTGILLYGPPGTGKTLLAGVIARESRMNFISVKGPELLSKYIGASEQAVRDIFIRAQAAKPCILFFDEFESIAPRRGHDNTGVTDRVVNQLLTQLDGVEGLQGVYVLAATSRPDLIDPALLRPGRLDKCVYCPPPDQVSRLEILNVLSDSLPLADDVDLQHVASVTDSFTGADLKALLYNAQLEALHGMLLSSGLQDGSSSSDSDLSLSSMVFLNHSSGSDDSAGDGECGLDQSLVSLEMSEILPDESKFNMYRLYFGSSYESELGNGTSSDLSSQCLSAPSSMTQDLPGVPGKDQLFSQPPVLRTASQEGCQELTQEQRDQLRADISIIKGRYRSQSGEDESMNQPGPIKTRLAISQSHLMTALGHTRPSISEDDWKNFAELYESFQNPKRRKNQSGTMFRPGQKVTLA

SEQ ID NO: 51596 - protein, 457 aa, Homo sapiens
MAAEAADLGLGAAVPVELRRERRMVCVEYPGVVRDVAKMLPTLGGEEGVSRIYADPTKRLELYFRPKDPYCHPVCANRFSTSSLLLRIRKRTRRQKGVLGTEAHSEVTFDMEILGIISTIYKFQGMSDFQYLAVHTEAGGKHTSMYDKVLMLRPEKEAFFHQELPLYIPPPIFSRLDAPVDYFYRPETQHREGYNNPPISGENLIGLSRARRPHNAIFVNFEDEEVPKHLWIRFGYDPRKNPDAKIYQVLDFRIRCGMKHGYAPSDLPVKAKRSTYNYSLPITVKKTSSQLVTMHDLKQGLGPSGTSGARKPASSKYKLKVSLQTLRDSVYIFREGALPPYRQMFYQLCDLNVEELQKIIHRNDGAENSCTERDGWCLPKTSDELRDTMSLMIRQTIRSKRPALFSSSAKADGGKEQLTYESGEDEEDEEEEEEEEEDFKPSDGSENEMETEILDYV

SEQ ID NO: 51597 - protein, 360 aa, Homo sapiens
MGLSPCCPGWFQTPGHSLSSCLSLPKRWDCRPNMCSTSGCDLEEIPLDDDDLNTIEFKILAYYTRHHVFKSTPALFSPKLLRTRSLSQRGLGNCSANESWTEVSWPCRNSQSSEKAINLGKKKSSWKAFFGVVEKEDSQSTPAKVSAQGQRTLEYQDSHSQQWSRCLSNVEQCLEHEAVDPKVISIANRVAEIVYSWPPPQATQAGGFKSKEIFVTEGLSFQLQGHVPVASSSKKDEEEQILAKIVELLKYSGDQLERKLKKDKALMGHFQDGLSYSVFKTITDQVLMGVDPRGESEVKAQGFKAALVIDVTAKLTAIDNHPMNRVLGFGTKYLKENFSPWIQQHGGWEKILGISHEEVD

SEQ ID NO: 51598 - protein, 342 aa, Homo sapiens
MSMSPTVIILACLGFFLDQSVWAHVGGQDKPFCSAWPSAVVPQGGHVTLRCHYRRGFNIFTLYKKDGVPVPELYNRIFWNSFLISPVTPAHAGTYRCRGFHPHSPTEWSAPSNPLVIMVTGLYEKPSLTARPGPTVRTGENVTLSCSSQSSFDIYHLSREGEAHELRLPAVPSINGTFQADFPLGPATHGETYRCFGSFHGSPYEWSDASDPLPVSVTGNPSSSWPSPTEPSFKTDAAVMNQEPAGHRTVNREDSDEQDPQEVTYAQLDHCIFTQRKITGPSQRSKRPSTDTSVCIELPNAEPRALSPAHEHHSQALMGSSRETTALSQTQLASSNVPAAGI

SEQ ID NO: 51599 - protein, 173 aa, Homo sapiens
MAFYSYNSVLAIARTRFPSHFVHPTCSSYSPSCAFLHLPDSHLNKTCMKNYESKKYSDPSQPGNTVLHPGTRLIQKLHTSTCWLQEVPGKPQLEQATKHPQVTSPQATKETGMEIKEGKQSYRQKIMDELKYYYNGFYLLWIDAKVAARMVWRLLHGQVLTRRERRRVGKNHI

SEQ ID NO: 51600 - protein, 102 aa, Homo sapiens
MTHEEHHAAKTLGIGKAIAVLTSGGDAQGMNAAVRAVVRVGIFTGARVFFVHEGYQGLVDGGDHIKEATWESVSMMLQLLSSLKIHGQKFNMQCLVKALPRC

SEQ ID NO: 51601 - protein, 283 aa, Homo sapiens
MELLLSQSCIWWPMVGEGRTIISCGIKAMERSGNYLIWLQKGEMLLKPHSRVQVFEGAEDNLPDRDALRAALAIQQLAEGLTADDLLLVLISGGGSALLPAPIPPVTLEEKQTLTRLLAARGATIQELNTIRKALSQLKGGGLAQAAYPAQVVSLILSDVVGDPVEVIASGPTVASSHNVQDCLHILNRYGLRAALPRSVKTVLSRADSDPHGPHTCGHVLNVIIGSNVLALAEAQRQAEALGYQAVVLSAAMQGWGTPAAHRDDRYQCHGHPPLVPAASVMA

SEQ ID NO: 51602 - protein, 130 aa, Homo sapiens
MSPAFRAMDVEPRAKGVLLEPFVHQVGGHSCVLRFNETTLCKPLVPREHQFYETLPAEMRKFTPQYKGKSQLLEGLPHWRGDVRDRGHGRPWQPSLEPSLPPTLCFPSLSSFSSSWPSAQHLTPSVFNPW

SEQ ID NO: 51603 - protein, 276 aa, Homo sapiens
MGARGAPSRRRQAGRRLRYLPTGSFPFLLLLLLLCIQLGGGQKKKENLLAEKVEQLMEWSSRRSIFRMNGDKFRKFIKAPPRNYSMIVMFTALQPQRQCSVCRQANEEYQILANSWRYSSAFCNKLFFSMVDYDEGTDVFQQLNMNSAPTFMHFPPKGRPKRADTFDLQRIGFAAEQLAKWIADRTDVHIRVFRPPNYSGTIALALLVSLVGGLLYLRRNNLEFIYNKTGWAMVSLCIVFAMTSGQMWNHIRGPPYAHKNPHNGQVMPLSPWGWFF

SEQ ID NO: 51604 - protein, 87 aa, Homo sapiens
MGNIFEKLFKSLLGKKKMRILILSLDTAGKTTILYKLKLGETVPAVPTVGFCVETVEYKNNTFAVWDVGSHFKIRPLWQHFFQNTKA

SEQ ID NO: 51605 - protein, 681 aa, Homo sapiens
MADPVAGIAGSAAKSVRPFRSSEAYVEAMKEDLAEWLNALYGLGLPGGGDGFLTGLATGTTLCQHANAVTEAARALAAARPARGVAFQAHSVVPGSFMARDNVATFIGWCRVELGVPEVLMFETEDLVLRKNEKSVVLCLLEVARRGARLGLLAPRLVQFEQEIERELRAAPPAPNAPAAGEDTTETAPAPGTPARGPRMTPSDLRNLDELVREILGRCTCPDQFPMIKVSEGKYRVGDSSLLIFVRVLRSHVMVRVGGGWDTLEHYLDKHDPCRCSSTAHRPPQPRVCTFSPQRVSPTTSPRPASPVPGSERRGSRPEMTPVSLRSTKEGPETPPRPRDQLPPHPRSRRYSGDSDSSASSAQSGPLGTRSDDTGTGPRRERPSRRLTTGTPASPRRPPALRSQSRDRLDRGRPRGAPGGRGAQLSVPSPARRARSQSREEQAVLLVRRDRDGQHSWVPRGRGSGGSGRSTPQTPRARSPAAPRLSRVSSPSPELGTTPASIFRTPLQLDPQQEQQLFRRLEEEFLANARALEAVASVTPTGPAPDPARAPDPPAPDSAYCSSSSSSSSLSVLGGKCGQPGDSGRTANGLPGPRSQALSSSSDEGSPCPGMGGPLDAPGSPLACTEPSRTWARGRMDTQPDRKPSRIPTPRGPRRPSGPAELGTWHALHSVTPRAEPDSWM

SEQ ID NO: 51606 - protein, 66 aa, Homo sapiens
MELGLGGLSTLSHCPWPRQQPALWPTLAALALLSSVAEASLGSAPRSPAPREGPPPVLASPAGHLP

SEQ ID NO: 51607 - protein, 203 aa, Homo sapiens
MCDVQVHKTRPLLSIRSDKTLQDIVYKLVPGLFKDEMKRRRDFYAAYPLTEVPNGSNEDRGEVLEQEKGALSDDEIVSLSIEFYEGARQGPGREEGPPGEWGWGQRENRGALPAMPSSHDRHASCQVSPQQDGCAQQVQGGGSVRGRATEGILHPHGHRLHLPLAAERASPPQVPCPASLQAAHPSHGAHPLRGHQHQRGVRV

SEQ ID NO: 51608 - protein, 185 aa, Homo sapiens [sequence omitted]

SEQ ID NO: 51609 - protein, 679 aa, Homo sapiens
MIGYLGYCKGVEPKTECERLAGTESPVREEPGEDFPAARRLYWDDLKRKLSEKLDSTDFTGTIKLLNENSYVPREAGSQKDENLALYVENQFREFKLSKVWRDQHFVKIQVKDSAQNSVIIVDKNGRLVYLVENPGGYVAYSKAATVTGKLVHANFGTKKDFEDLYTPVNGSIVIVRAGKITFAEKVANAESLNAIGVLIYMDQTKFPIVNAELSFFGHAHLGTGDPYTPGFPSFNHTQFPPSRSSGLPNIPVQTISRAAAEKLFGNMEGDCPSDWKTDSTCRMVTSESKNVKLTVSNVLKEIKILNIFGVIKGFVEPDHYVVVGAQRDAWGPGAAKSGVGTALLLKLAQMFSDMVLKDGFQPSRSIIFASWSAGDFGSVGATEWLEGYLSSLHLKAFTYINLDKAVLGTSNFKVSASPLLYTLIEKTMQNVKHPVTGQFLYQDSNWASKVEKLTLDNAAFPFLAYSGIPAVSFCFCEDTDYPYLGTTMDTYKELIERIPELNKVARAAAEVAGQFVIKLTHDVELNLDYERYNSQLLSFVRDLNQYRADIKEMGLSLQWLYSARGDFFRATSRLTTDFGNAEKTDRFVMKKLNDRVMRVEYHFLSPYVSPKESPFRHVFWGSGSHTLPALLENLKLRKQNNGAFNETLFRNQLALATWTIQGAANALSGDVWDIDNEF

SEQ ID NO: 51610 - protein, 25 aa, Homo sapiens
TEHGTEAIFVAAVGIRPSHHAAAQS

SEQ ID NO: 51611 - protein, 695 aa, Homo sapiens
MWGFLKRPVVVTADINLSLVALTGMGLLSRLWRLTYPRAVVLFRRIRWQFFVEQNWSSVVAFPEYSSNVPVWSLRLLPALAGALSVPMAYQIVLELHFSHCAAMGAALLMLIENALITQSRLMLLESVLIFFNLLAVLSYLKFFNCQKHSPFSLSWWFWLTLTGVACSCAVGIKYMGVFTYVLVLGVAAVHAWHLLGDQTLSNVCVFCHLLARAVALLVIPVVLYLLFFYVHLILVFRSGPHDQIMSSAFQASLEGGLARITQGQPLEVAFGSQVTLRNVFGKPVPCWLHSHQDTYPMIYENGRGSSHQQQVTCYPFKDVNNWWIVKDPRRHQLVVSSPPRPVRHGDMVQLVHGMTTRSLNTHDVAAPLSPHSQEVSCYIDYNISMPAQNLWRLEIVNRGSDTDVWKTILSEVRFVHVNTSAVLKLSGAHLPDWGYRQLEIVGEKLSRGYHGSTVWNVEEHRYGASQEQRERERELHSPAQVDVSRNLSFMARFSELQWRMLALRSDDSEHKYSSSPLEWVTLDTNIAYWLHPRTSAQIHLLGNIVIWVSGSLALAIYALLSLWYLLRRRRNVHDLPQDAWLRWVLAGALCAGGWAVNYLPFFLMEKTLFLYHYLPALTFQILLLPVVLQHISDHLCRSQLQRSIFSALVVAWYSSACHVSNTLRPLTYGDKSLSPHELKALRWKDSWDILIRKH

SEQ ID NO: 51612 - protein, 442 aa, Homo sapiens
MVRSRQMCNTNMSVPTDGAVTTSQIPASEQETLVRPKPLLLKLLKSVGAQKDTYTMKEVLFYLGQYIMTKRLYDEKQQHIVYCSNDLLGDLFGVPSFSVKEHRKIYTMIYRNLVVVNQQEENSDELSGERQRKRHKSDSISLSFDESLALCVIREICCERSSSSESTGTPSNPDLDAGVSEHSGDWLDQDSVSDQFSVEFEVESLDSEDYSLSEEGQELSDEDDEVYQVTVYQAGESDTDSFEEDPEISLADYWKCTSCNEMNPPLPSHCNRCWALRENWLPEDKGKDKGEISEKAKLENSTQAEEGFDVPDCKKTIVNDSRESCVEENDDKITQASQSQESEDYSQPSTSSSIIYSSQEDVKEFEREETQDKEESVESSLPLNAIEPCVICQGRPKNGCIVHGKTGHLMACFTCAKKLKKRNKPCPVCRQPIQMIVLTYFP

SEQ ID NO: 51613 - protein, 301 aa, Homo sapiens
MRDPASKRSRGFGFVTFSSMAEVDAAMAARPHSIDGRVVEPKRAVAREESGKPGAHVTVKKLFVGGIKEDTEEHHLRDYFEEYGKIDTIEIITDRQSGKKRGFGFVTFDDHDPVDKIVLQKYHTINGHNAEVRKALSRQEMQEVQSSRSGRGGNFGFGDSRGGGGNFGPGPGSNFRGGSDGYGSGRGFGDGYNGYGGGPGGGNFGGSPGYGGGRGGYGGGGPGYGNQGGGYGGGYDNYGGGNYGSGNYNDFGNYNQQPSNYGPMKSGNFGGSRNMGGPYGGGNYGPGGSGGSGGYGGRSRY

SEQ ID NO: 51614 - protein, 244 aa, Homo sapiens
MVNRVQDHIQSRTVYYLMNIHVTPRSIYLCRHGESELNIRGRIGGDSGLSVRGKQYAYALANFIQSQGISSLKVWTSHMKRTIQTAEALGVPYEQWKALNEIDAGVCEEMTYEEIQEHYPEEFALRDQDKYRYRYPKGESYEDLVQRLEPVIMELERQENVLVICHQAVMRCLLAYFLDKSSDELPYLKCPLHTVLKLTPVAYGCKVESIYLNVEAVNTHREKPENVDITREPEEALDTVPAHY

SEQ ID NO: 51615 - protein, 411 aa, Homo sapiens
MNSEKSMHRKSTELVNEITCENTEWPGQRSTNFQIISSYPDDESVYCTTEKYNVMEHRHNDMHYECMTPCQVTSDSDKEKTIAFLLKELDILRTSNKKLQQKLAKEDKEQRKLKFKLELQEKETEAKIAEKTAALVEEVYFAQKERDEAVMSRLQLAIEERDEAIARAKHMEMSLKVLENINPEENDMTLQELLNRINNADTGIAIQKNGAIIVDRIYKTKECKMRITAEEMSALIEERDAALSKCKRLEQELHHVKEQNQTSANNMRHLTAENNQERALKAKLLSMQQARETAVQQYKKLEEEIQTLRVYYSLHKSLSQEENLKDQFNYTLSTYEEALKNRENIVSITQQQNEELATQLQQALTERANMELQLQHAREASQVANEKVQKLERLVDVLRKKVGTGTMRTVI

SEQ ID NO: 51616 - protein, 163 aa, Homo sapiens
MPWSSRGALLRDLVLGVLGTAAFLLDLGTDLWAAVQYALGGRYLWAALVLALLGLASVALQLFSWLWLRADPAGLHGSQPPRRCLALLHLLQLGYLYRCVQELRQGLLVWQQEEPSEFDLAYADFLALDISMLRLFETFLETAPQLTLVLAIMLQSGRAEYYQ

SEQ ID NO: 51617 - protein, 124 aa, Homo sapiens
MATVAELKAVLKDTLEKKGVLGHLKARIRAEVFNALDDDREPRPSLSHENLLINELIREYLEFNKYKYTASVLIADGVSLYCDLSSLHPPPPGFKQFSCLSLPSTWNYRIWSTCSSVGQTVSHP

SEQ ID NO: 51618 - protein, 214 aa, Homo sapiens
MMYWIVFAFFTTAETLTDIVLSWFPFYFELKIAFVIWLLSPYTKGSSVLYRKFVHPTLSNKEKEIDEYITQARDKSYETMMRVGKRGLNLAANAAVTAAAKGVLSEKLRSFSMQDLTLIRDEDALPLQRPDGRLRPSPGSLLDTIEDLGDDPALSLRSSTNPADSRTEASEDDMGDKAPKRAKPIKKAPKAEPLASKTLKTRPKKKTSGGGDSA

SEQ ID NO: 51619 - protein, 226 aa, Homo sapiens
MNVPKIKGTHTAMKSGILAAESIFNQLTSENLQSKTIGLHVTEYEDNLKNSWVWKELYSVRNIRPSCHGVLGVYGGMIYTGIFYWILRGMEPWTLKHKGSDFERLKPAKDCTPIEYPKPDGQISFDLLSSVALSGTNHEHDQPAHLTLRDDSIPVNRNLSIYDGPEQRFCPAGVYEFVPVEQGDGFRLQINAQNCVHCKTCDIKDPSQNINWVVPEGGGGPAYNGM

SEQ ID NO: 51620 - protein, 126 aa, Homo sapiens
MKKKLVVLGLLAVVLVLVIVGLCLWLPSASKEPDNHVYTRAAVAADAKQCSKIGRDALRDGGSAVDAAIAALLCVGLMNAHSMGIGGGLFLTIYNSTTRKAEVINAREVAPRLAFATMFNSSEQSQ

SEQ ID NO: 51621 - protein, 79 aa, Homo sapiens
MISAAQLLDELMGRDRNLAPDEKRSNVRWDHESVCKYYLCGFCPAELFTNTRSDLDVFGRGDNIRDVSKFLEDDKWMEE

SEQ ID NO: 51622 - protein, 72 aa, Homo sapiens
MVSESHHEALAAPPVTTVATVLPSNATEPASPGEGKEDAFSKLKEKFMNELHKIPLPPWALIAIAIVAVLLV

SEQ ID NO: 51623 - protein, 40 aa, Homo sapiens
MSKSKVDNQFYSVEVGDSTFTVLKRYQNLKPIGSGAQGIV

SEQ ID NO: 51624 - protein, 182 aa, Homo sapiens
MELEVRRVRQAFLSGRSRPLRFRLQQLEALRRMVQEREKDILTAIAADLCKSEFNVYSQEVITVLGEIDFMLENLPEWVTAKPVKKNVLTMLDEAYIQPQPLGVVLIIGAWNYPFVLTIQPLIGAIAAGNAVIIKPSELSENTAKILAKLLPQYLDQPFCSNSCDDPIKKDEMEDSEMSRIE

SEQ ID NO: 51625 - protein, 192 aa, Homo sapiens
MALNIATHVLKPGGCFVAKIFRGRDVTLLYSQLQVFFSSVLCAKPRSSRNSSIEAFAVCQGYDPPEGFIPDLSKPLLDHSYDPDFNQLDGPTRIIVPFVTCGDLSSYDSDRSYPLDLEGGSEYKYTPPTQPPISPPYQEACTLKRKGQLAKEIRPQDCPISRVDTFPQPLAAPQCHTLLAPEMEDNEMSCSP

SEQ ID NO: 51626 - protein, 288 aa, Homo sapiens
MSTPTDPGAMPHPGPSPGPGPSPGPILGPSPGPGPSPGSVHSMMGPSPGPPSVSHPMPTMGSTDFPQEGMHQMHKPIDGIHDKGIVEDIHCGSMKGTGMRPPHPGMGPPQSPMDQHSQGYMSPHPSPLGAPEHVSSPMSGGGPTPPQMPPSQPGALIPGDPQAMSQPNRGPSPFSPVQLHQLRAQILAYKMLARGQPLPETLQLAVQGKRTLPGLQQQQQQQQQQQQQQQQQQQQQQQPQQQPPQPQTQQQQQPALVNYNRPSALNAGNSNLKTPADSVSGEGLLPDS

SEQ ID NO: 51627 - protein, 267 aa, Homo sapiens
MIIGGIDHSLYTGSLWYTPIRREWYYEVIIVRVEINGQDLKMDCKEYNYDKSIVDSGTTNLRLPKKVFEAAVKSIKAASSTEKFPDGFWLGEQLVCWQAGTTPWNIFPVISLYLMGEVTNQSFRITILPQQYLRPVEDVATSQDDCYKFAISQSSTGTVMGAVIMEGFYVVFDRARKRIGFAVSACHVHDEFRTAAVEGPFVTLDMEDCGYNIPQTDESTLMTIAYVMAAICALFMLPLCLMVCQWRCLRCLRQQHDDFADDISLLK

SEQ ID NO: 51628 - protein, 65 aa, Homo sapiens
MKVSAALLCLLLIAATFIPQGLAQPDAINAPVTCCYNFTNRKISVQRLASYRRITSSKCPKEAVM

SEQ ID NO: 51629 - protein, 77 aa, Homo sapiens
MSKRPSYAPPPTPAPATQMPSTPGFVGYNPYSHLAYNNYRLGGNPGTNSRVTVGESTITASGKQLELTRNAFRIRSF

SEQ ID NO: 51630 - protein, 1122 aa, Homo sapiens
MVSNLKRIMAQKWMPDQISVSEFIAETTEDYNSPTTSSFTTRLHNCRNTVTLLEEALDQDRTALQKVKKSVKAIYNSGQDHVQNEENYAQVLDKFGSNFLSRDNPDLGTAFVKFSTLTKELSTLLKNLLQGLSHNVIFTLDSLLKGDLKGVKGDLKKPFDKAWKDYETKFTKIEKEKREHAKQHGMIRTEITGAEIAEEMEKERRLFQLQMCEYLIKVNEIKTKKGVDLLQNLIKYYHAQCNFFQDGLKTADKLKQYIEKLAADLYNIKQTQDEEKKQLTALRDLIKSSLQLDQKEDSQSRQGGYSMHQLQGNKEYGSEKKGYLLKKSDGIRKVWQRRKCSVKNGILTISHATSNRQPAKLNLLTCQVKPNAEDKKSFDLISHNRTYHFQAEDEQDYVAWISVLTNSKEEALTMAFRGEQSAGENSLEDLTKAIIEDVQRLPGNDICCDCGSSEPTWLSTNLGILTCIECSGIHREMGVHISRIQSLELDKLGTSELLLAKNVGNNSFNDIMEANLPSPSPKPTPSSDMTVRKEYITAKYVDHRFSRKTCSTSSAKLNELLEAIKSRDLLALIQVYAEGVELMEPLLEPGQELGETALHLAVRTADQTSLHLVDFLVQNCGNLDKQTALGNTVLHYCSMYSKPECLKLLLRSKPTVDIVNQAGETALDIAKRLKATQCEDLLSQAKSGKFNPHVHVEYEWNLRQEEIDESDDDLDDKPSPIKKERSPRPQSFCHSSSISPQDKLALPGFSTPRDKQRLSYGAFTNQIFVSTSTDSPTSPTTEAPPLPPRNAGKGPTGPPSTLPLSTQTSSGSSTLSKKRPPPPPPGHKRTLSDPPSPLPHGPPNKGAVPWGNDGGPSSSSKTTNKFEGLSQQSSTSSAKTALGPRVLPKLPQKVALRKTDHLSLDKATIPPEIFQKSSQLAELPQKPPPGDLPPKPTELAPKPQIGDLPPKPGELPPKPQLGDLPPKPQLSDLPPKPQMKDLPPKPQLGDLLAKSQTGDVSPKAQQPSEVTLKSHPLDLSPNVQSRDAIQKQASEDSNDLTPTLPETPVPLPRKINTGKNKVRRVKTIYDCQADNDDELTFIEGEVIIVTGEEDQEWWIGHIEGQPERKGVFPVSFVHILSD

SEQ ID NO: 51631 - protein, 231 aa, Homo sapiens
MKDIDIGKEYIIPSPGYRSVRERTSTSGTHRDREDSKFRRTRPLECQDALETAARAEGLSLDASMHSQLRILDEEHPKGKYHHGLSALKPIRTTSKHQHPVDNAGLFSCMTFSWLSSLARVAHKKGELSMEDVWSLSKHESSDVNCRRLERLWQEELNEVGPDAASLRRVVWIFCRTRLILSIVCLMITQLAGFSGPVSSNHPFRQSPGARPRPALTLLFCCRGCAQLWAR

SEQ ID NO: 51632 - protein, 54 aa, Homo sapiens
MALTLFDTDEYRPPVWKSYLYQLQQEAPHPRRITCTCEARIISHWMLKPLEERL

SEQ ID NO: 51633 - protein, 241 aa, Homo sapiens
MSTVKEQLIEKLIEDDENSQCKITIVGTGAVGMACAISILLKDLADELALVDVALDKLKGEMMDLQHGSLFFSTSKITSGKDYSVSANSRIVIVTAGARQQEGETRLALVQRNVAIMKSIIPAIVHYSPDCKILVVSNPVDILTYIVWKISGLPVTRVIGSGCNLDSARFRYLIGEKLGVHPTSCHGWIIGEHGDSSVPLWSGVNVAGVALKTLDPKLGTDSDKEHWKNIHKQVIQRDYME

SEQ ID NO: 51634 - protein, 118 aa, Homo sapiens
MFPPSGSTGLIPPSHFQARPLSTLPRMAPTWLSDIPLVQPPGHQDVSERRLDTQRPQVTMWERDVSSDRQEPGRRGRSWGLEGSQALSQQAEVIVRQLQELRRLEEEVRLLRETSLQQ

SEQ ID NO: 51635 - protein, 573 aa, Homo sapiens
MTGFKQHGGCRGAAPGLSDSKCSGLLPRVGSSVGPERGRARPPGTMAGSDTAPFLSQADDPDDGPVPGTPGLPGSTGNPKSEEPEVPDQEGLQRITGLSPGRSALIVAVLCYINLLNYMDRFTVAGVLPDIEQFFNIGDSSSGLIQTVFISSYMVLAPVFGYLGDRYNRKYLMCGGIAFWSLVTLGSSFIPGEHFWLLLLTRGLVGVGEASYSTIAPTLIADLFVADQRSRMLSIFYFAIPVGSGLGYIAGSKVKDMAGDWHWALRVTPGLGVVAVLLLFLVVREPPRGAVERHSDLPPLNPTSWWADLRALARNPSFVLSSLGFTAVAFVTGSLALWAPAFLLRSRVVLGETPPCLPGDSCSSSDSLIFGLITCLTGVLGVGLGVEISRRLRHSNPRADPLVCATGLLGSAPFLFLSLACARGSIVATYIFIFIGETLLSMNWAIVADILLYVVIPTRRSTAEAFQIVLSHLLGDAGSPYLIGLISDRLRRNWPPSFLSEFRALQFSLMLCAFVGALGGAAFLGTAIFIEADRRRAQLHVQGLLHEAGSTDDRIVVPQRGRSTRVPVASVLI

SEQ ID NO: 51636 - protein, 152 aa, Homo sapiens
MLSTLSQCEFSMGKTLLVYDMNLREMENYEKIYKEIECSIAGAHEKIAECKKQILQAKRIRKNRQEYDALAKVIQHHPDRHETLKELEALGKELEHLSHIKESVEDKLELRRKQFHVLLSTIHELQQTLENDEKLSEVEEAQEASMETDPKP

SEQ ID NO: 51637 - protein, 641 aa, Homo sapiens
MEILLIIRFCCNCTYALLYKPIDRVTRSTLVLHDLLKHTPVDHPDYPLLQDALRISQNFLSSINEDIDPRRTAVTTPKGETRQLVKDGFLVEVSESSRKLRHVFLFTDVLLCAKLKKTSAGKHQQYDCKWYIPLADLVFPSPEESEASPQVHPFPDHELEDMKMKISALKSEIQKEKANKGQSRAIERLKKKMFENEFLLLLNSPTIPFRIHNRNGKSYLFLLSSDYERSEWREAIQKLQKKDLQAFVLSSVELQVLTGSCFKLRTVHNIPVTSNKDDDESPGLYGFLHVIVHSAKGFKQSANLYCTLEVDSFGYFVSKAKTRVFRDTAEPKWDEEFEIELEGSQSLRILCYEKCYDKTKVNKDNNEIVDKIMGKGQIQLDPQTVETKNWHTDVIEMNGIKVEFSMKFTSRDMSLKRTPSKKQTGVFGVKISVVTKRERSKVPYIVRQCVEEVEKRGIEEVGIYRISGVATDIQALKAVFDANNKDILLMLSDMDINAIAGTLKLYFRELPEPLLTDRLYPAFMEGIALSDPAAKENCMMHLLRSLPDPNLITFLFLLEHLKRVAEKEPINKMSLHNLATVFGPTLLRPSEVESKAHLTSAADIWSHDVMAQVQVLLYYLQHPPISFAELKRNTLYFSTDV

SEQ ID NO: 51638 - protein, 902 aa, Homo sapiens
MDSNTAPLGPSCPQPPPAPQPQARSRLNATASLEQERSERPRAPGPQAGPGPGVRDAAAPAEPQAQHTRSRERADGTGPTKGDMEIPFEEVLERAKAGDPKAQTEVGKHYLQLAGDTDEELNSCTAVDWLVLAAKQGRREAVKLLRRCLADRRGITSENEREVRQLSSETDLERAVRKAALVMYWKLNPKKKKQVAVAELLENVGQVNEHDGGAQPGPVPKSLQKQRRMLERLVSSELWGAHAVFSHASAKNYIALDDFVEITKKYAKGVIPSSLFLQDDEDDDELAGKSPEDLPLRLKVVKYPLHAIMEIKEYLIDMASRAGMHWLSTIIPTHHINALIFFFIVSNLTIDFFAFFIPLVIFYLSFISMVICTLKVFQDSKAWENFRTLTDLLLRFEPNLDVEQAEVNFGWNHLEPYAHFLLSVFFVIFSFPIASKDCIPCSELAVITGFFTVTSYLSLSTHAEPYTRRALATEVTAGLLSLLPSMPLNWPYLKVLGQTFITVPVGHLVVLNVSVPCLLYVYLLYLFFRMAQLRNFKGTYCYLVPYLVCFMWCELSVVILLESTGLGLLRASIGYFLFLFALPILVAGLALVGVLQFARWFTSLELTKIAVTVAVCSVPLLLRWWTKASFSVVGMVKSLTRSSMVKLILVWLTAIVLFCWFYVYRSEGMKVYNSTLTWQQYGALCGPRAWKETNMARTQILCSHLEGHRVTWTGRFKYVRVTDIDNSAESAINMLPFFIGDWMRCLYGEAYPACSPGNTSTAEEELCRLKLLAKHPCHIKKFDRYKFEITVGMPFSSGADGSRSREEDDVTKDIVLRASSEFKSVLLSLRQGSLIEFSTILEGRLGSKWPVFELKAISCLNCMAQLSPTRRHVKIEHDWRSTVHGAVKFAFDFFFFPFLSAA

SEQ ID NO: 51639 - protein, 979 aa, Homo sapiens
MGTRLPLVLRQLRRPPQPPGPPRRLRVPCRASSGGGGGGGGGREGLLGQRRPQDGQARSSCSPGGRTPAARDSIVREVIQNSKEVLSLLQEKNPAFKPVLAIIQAGDDNLMQEINQNLAEEAGLNITHICLPPDSSEAEIIDEILKINEDTRVHGLALQISENLFSNKVLNALKPEKDVDGVTDINLGKLVRGDAHECFVSPVAKAVIELLEKSVGVNLDGKKILVVGAHGSLEAALQCLFQRKGSMTMSIQWKTRQLQSKLHEADIVVLGSPKPEEIPLTWIQPGTTVLNCSHDFLSGKVGCGSPRIHFGGLIEEDDVILLAAALRIQNMVSSGRRWLREQQHRRWRLHCLKLQPLSPVPSDIEISRGQTPKAVDVLAKEIGLLADEIEIYGKSKAKVRLSVLERLKDQADGKYVLVAGITPTPLGEGKSTVTIGLVQALTAHLNVNSFACLRQPSQGPTFGVKGGAAGGGYAQVIPMEEFNLHLTGDIHAITAANNLLAAAIDTRILHENTQTDKALYNRLVPLVNGVREFSEIQLARLKKLGINKTDPSTLTEEEVSKFARLDIDPSTITWQRVLDTNDRFLRKITIGQGNTEKGHYRQAQFDIAVASEIMAVLALTDSLADMKARLGRMVVASDKSGQPVTADDLGVTGALTVLMKDAIKPNLMQTLEGTPVFVHAGPFANIAHGNSSVLADKIALKLVGEEGFVVTEAGFGADIGMEKFFNIKCRASGLVPNVVVLVATVRALKMHGGGPSVTAGVPLKKEYTEENIQLVADGCCNLQKQIQITQLFGVPVVVALNVFKTDTRAEIDLVCELAKRAGAFDAVPCYHWSVGGKGSVDLARAVREAASKRSRFQFLYDVQVPIVDKIRTIAQAVYGAKDIELSPEAQAKIDRYTQQGFGNLPICMAKTHLSLSHQPDKKGVPRDFILPISDVRASIGAGFIYPLVGTMSTMPGLPTRPCFYDIDLDTETEQVKGLF

SEQ ID NO: 51640 - protein, 411 aa, Homo sapiens
MGWITEDLIRRNAEHNDCVIFSLEELSLHQQEIERLEHIDKWCRDLKILYLQNNLIGKIENVSKLKKLEYLNLALNNIEKIENLEGCEELAKLDLTVNFIGELSSIKNLQHNIHLKELFLMGNPCASFDHYREFVVATLPQLKWLDGKEIEPSERIKALQDYSVIEPQIREQEKDHCLKRAKLKEEAQRKHQEEDKNEDKRSNAGFDGRWYTDINATLSSLESKDHLQAPDTEEHNTKKLDNSEDDLEFWNKPCLFTPESRLETLRHMEKQRKKQEKLSEKKKKVKPPRTLITEDGKALNVNEPKIDFSLKDNEKQIILDLAVYRYMDTSLIDVDVQPTYVRVMIKGKLVLPAEVKPDSSSAKRSQTTGHLVICMPKVGEVITGGQRAFKSMKTTSDRSREQTNTSYSTGF

SEQ ID NO: 51641 - protein, 98 aa, Homo sapiens
MKRLAARCFAGLLILSPLTVISDSRPADSGKCCWLWFKASVCRPSKTAIWRKWKRKYGLRSEKDEEMWIKILQKKMWKKLRREEAALPLRNCHQIPPN

SEQ ID NO: 51642 - protein, 268 aa, Homo sapiens
MSRYLKNLLEQDHVQGQILLPDLLGLPALGELPPAAAAGLARGLSPAPGLPDLRALEADIHGNRRGAERPVRPGAIPAHLRGRGGRVHHPHPAPAARAPQHLGHRVPGGDHHVLERLGDGGCGSHLPVHPRWLLRGLLRPPGRGLPAGWREPAPPPGRGRPNAAPVAYAGGRAARGRGHRLQCPHHGHRHSAPLLLHHRPICQVRQDCGTQHGRVHPLHADRQHRPAGHHGAQLFHSDPDFLPQGPGCRAAGRGPGAGCLPRAPAERL

SEQ ID NO: 51643 - protein, 407 aa, Homo sapiens
MGANTSRKPPVFDENEDVNFDHFEILRAIGKGSFGKVCIVQKNDTKKMYAMKYMNKQKCVERNEVRNVFKELQIMQGLEHPFLVNLWYSFQDEEDMFMVVDLLLGGDLRYHLQQNVHFKEETVKLFICELVMALDYLQNQRIIHRDMKPDNILLDEHGHVHITDFNIAAMLPRETQITTMAGTKPYMAPEMFSSRKGAGYSFAVDWWSLGVTAYELLRGRRPYHIRSSTSSKEIVHTFETTVVTYPSAWSQEMVSLLKKLLEPNPDQRFSQLSDVQNFPYMNDINWDAVFQKRLIPGFIPNKGRLNCDPTFELEEMILESKPLHKKKKRLAKKEKDMRKCDSSQTCLLQEHLDSVQKEFIIFNREKVNRDFNKRQPNLALEQTKDPQVTNGQMDTGLSETFQTSKVS

SEQ ID NO: 51644 - protein, 565 aa, Homo sapiens
MNFDVIKGKPVRIMWSQRDPSLRKSGVGNIFIKNLDKSIDNKALYDTFSAFGNILSCKVVCDENGSKGYGFVHFETQEAAERAIEKMNGMLLNDRKVFVGRFKSRKEREAELGARAKEFTNVYIKNFGEDMDDERLKDLFGKFGPALSVKVMTDESGKSKGFGFVSFERHEDAQKAVDEMNGKELNGKQIYVGRAQKKVERQTELKRKFEQMKQDRITRYQGVNLYVKNLDDGIDDERLRKEFSPFGTITSAKVMMEGGRSKGFGFVCFSSPEEATKAVTEMNGRIVATKPLYVALAQRKEERQAHLTNQYMQRMASVRAVPNPVINPYQPAPPSGYFMAAIPQTQNRAAYYPPSQIAQLRPSPRWTAQGARPHPFQNMPGAIRPAAPRPPFSTMRPASSQVPRVMSTQRVANTSTQTMGPRPAAAAAAATPAVRTVPQYKYAAGVRNPQQHLNAQPQVTMQQPAVHVQGQEPLTASMLASAPPQEQKQMLGERLFPLIQAMHPTLAGKITGMLLEIDNSELLHMLESPESLRSKVDEAVAVLQAHQAKEAAQKAVNSATGVPTV

SEQ ID NO: 51645 - protein, 187 aa, Homo sapiens
MAGARAAAAAASAGSSASSGNQPPQELGLGELLEEFSRTQYRAKDGSGTGGSKVERIEKRCLELFGRDYCFSVIPNTNGDICGHYPRHIVFLEYESSEKEKDTSGDTHLFDKVRGYDIKLLRYLSVKYICDLMVENKKVKFGMNVTSSEKVDKAQRYADFTLLSIPYPVLGSGATNTKLPEAAAFLS

SEQ ID NO: 51646 - protein, 172 aa, Homo sapiens
MAVPPGHGPFSGFPGPQEHTQVLPDVRLLPRRLPLAFRDATSAPLRKLSVDLIKTYKHINEVYYAKKKRRAQQAPPQDSSNKKEKKVLNHGYDDDNHDYIVRSGERWLERYEIDSLIGKGSFGQVVKAYDHQTQELVAIKIIKNKKAFLNQAQIELRLLELMNQHDTEMKYY

SEQ ID NO: 51647 - protein, 76 aa, Homo sapiens
MNAPPAFESFLLFEGEKITINKDTKVPNACLFTINKEDHTLGNIIKSRACFPFAFCRDCQFPEASPATLPVQPAEL

SEQ ID NO: 51648 - protein, 23 aa, Homo sapiens
MDLSALRVEEVQNVINAMQKILE

SEQ ID NO: 51649 - protein, 263 aa, Homo sapiens
MPLTALLRNLGKMTANSVLEPGNSEVSLVCEKLCNEKLLKKARIHPFHILIALETYKTGHGLRGKLKWRPDEEILKALDAAFYKTFKTVEPTGKRFLLAVDVSASMNQRVLGSILNASTVAAAMCMVVTRTEKDSYVVAFSDEMVPCPVTTDMTLQQVLMAMSQIPAGGTDCSLPMIWAQKTNTPADVFIVFTDNETFAGGVHPAIALREYRKKMDIPAKLIVCGMTSNGFTIADPDDRGMLDMCGFDTGALDVIRNFTLDMI

SEQ ID NO: 51650 - protein, 126 aa, Homo sapiens
MEETQGELTSSCGSKTMANVSLAFRDVSIDLSQEEWECLDAVQRDLYKDVMLENYSNLVSLGYTIPKPDVITLLEQEKEPWIVMREGTRNWFTESRSVTQAGVQWHNLGSLQPPPPGFKQFFCLSL

SEQ ID NO: 51651 - protein, 372 aa, Homo sapiens
MDSVRSGPFGQIFRPDNFVFGQSGAGNNWAKGHYTEGAELVDSVLDVVRKEAESCDCLQGFQLTHSLGGGTGSGMGTLLISKIREEYPDRIMNTFSVVPSPKVSDTVVEPYNATLSVHQLVENTDETYCIDNEALYDICFRTLKLTTPTYGDLNHLVSATMSGVTTCLRFPGQLNADLRKLAVNMVPFPRLHFFMPGFAPLTSRGSQQYRALTVPELTQQVFDAKNMMAACDPRHGRYLTVAAVFRGRMSMKEVDEQMLNVQNKNSSYFVEWIPNNVKTAVCDIPPRGLKMAVTFIGNSTAIQELFKRISEQFTAMFRRKAFLHWYTGEGMDEMEFTEAESNMNDLVSEYQQYQDATAEEEEDFGEEAEEEA

SEQ ID NO: 51652 - protein, 123 aa, Homo sapiens
MARTKQTARKSTGGKAPRKQLATKAARKSAPSTGGVKKPHRYRPGTVALREIRRYQKSTELLIRKLPFQRLVREIAQDFKTDLRFQSAAIGALQVKWWVGRLRVCIPVVYQEQFQIVACAYII

SEQ ID NO: 51653 - protein, 2476 aa, Homo sapiens
MNTEELELLSDSKYRNYVAAIDKALKNFEYSSEWADLISALGKLNKVLQNNAKYQVVPKKLTIGKRLAQCLHPALPGGVHRKALETYEIIFKIIGPKRLAKDLFLYSSGLFPLLANAAMSVKPTLLSLYEIYYLPLGKTLKPGLQGLLTGILPGLEEGSEYYERTNMLLEKVAAAVDQSAFYSALWGSLLTSPAVRLPGITYVLAHLNRKLSMEDQLYIIGSDIELMVEAVSTSVQDSSVLVQRSTLDLILFCFPFHMSQATRPDMIRILSAALHVVLRRDMSLNRRLYAWLLGPRSTRHSNPEEHATYYFTTFSKELLVQAMVGILQVNGFGEENTLMQDLKPFRILISLLDKPELGPVILEDVLIEVFRTLYSQCKAELDLQTEPPFSKDHAQLSSKLRENKKTAELIKTANLLFNSFEPYYMWDYVARWFEECCRRTLHVRLQIGPGDSNDSSELQLTNFCLLVDFLLDIVSLPTRSMRVLCQETYIEIQTEHLPQLLLRMISALTSHLQTLHLSELTDSLRLCSKILSKVQPPLLSASTGGVLQFPSGQNNSVKEWEDKKVSSVSHENPTEVFEDGENPPSSRSSESGFTEFIQYQADRTDDIDRELSEGQGAAAIPIGSTSSETETASTVGSEETIIQTPSVVTQGTATRSRKTAQKTAMQCCLEYVQQFLTRLINLYIIQNNSFSQSLATEHQGDLGREQGETSKWDRNSQGDVKEKNISKQKTSKEYLSAFLAACQLFLECSSFPVYIAEGNHTSELRSEKLETDCEHVQPPQWLQTLMNACSQASDFSVQSVAISLVMDLVGLTQSVAMVTGENINSVEPAQPLSPNQGRVAVVIRPPLTQGNLRYIAEKTEFFKHVALTLWDQLGDGTPQHHQKSVELFYQLHNLVPSSSICEDVISQQLTHKDKKIRMEAHAKFAVLWHLTRDLHINKSSSFVRSFDRSLFIMLDSLNSLDGSTSSVGQAWLNQVLQRHDIARVLEPLLLLLLHPKTQRVSVQRVQAERYWNKSPCYPGEESDKHFMQNFACSNVSQVQLITSKGNGEKPLTMDEIENFSLTVNPLSDRLSLLSTSSETIPMVVSDFDLPDQQIEILQSSDSGCSQSSAGDNLSYEVDPETVNAQEDSQMPKESSPDDDVQQVVFDLICKVVSGLEVESASVTSQLEIEAMPPKCSDIDPDEETIKIEDDSIQQSQNALLSNESSQFLSVSAEGGHECVANGISRNSSSPCISGTTHTLHDSSVASIETKSRQRSHSSIQFSFKEKLSEKVSEKETIVKESGKQPGAKPKVKLARKKDDDKKKSSNEKLKQTSVFFSDGLDLENWYSCGEGDISEIESDMGSPGSRKSPNFNIHPLYQHVLLYLQLYDSSRTLYAFSAIKAILKTNPIAFVNAISTTSVNNAYTPQLSLLQNLLARHRISVMGKDFYSHIPVDSNHNFRSSMYIEILISLCLYYMRSHYPTHVKVTAQDLIGNRNMQMMSIEILTLLFTELAKVIESSAKGFPSFISDMLSKCKVQKVILHCLLSSIFSAQKWHSEKMAGKNLVAVEEGFSEDSLINFSEDEFDNGSTLQSQLLKVLQRLIVLEHRVMTIPEENETGFDFVVSDLEHISPHQPMTSLQYLHAQPITCQGMFLCAVIRALHQHCACKMHPQWIGLITSTLPYMGKVLQRVVVSVTLQLCRNLDNLIQQYKYETGLSDSRPLWMASIIPPDMILTLLEGITAIIHYCLLDPTTQYHQLLVSVDQKHLFEARSGILSILHMIMSSVTLLWSILHQADSSEKMTIAASASLTTINLGATKNLRQQILELLGPISMNHGVHFMAAIAFVWNERRQNKTTTRTKVIPAASEEQLLLVELVRSISVMRAETVIQTVKEVLKQPPAIAKDKKHLSLEVCMLQFFYAYIQRIPVPNLVDSWASLLILLKDSIQLSLPAPGQFLILGVLNEFIMKNPSLENKKDQRDLQDVTHKIVDAIGAIAGSSLEQTTWLRRNLEVKPSPKIMVDGTNLESDVEDMLSPAMETANITPSVYSVHALTLLSEVLAHLLDMVFYSDEKERVIPLLVNIMHYVVPYLRNHSAHNAPSYRACVQLLSSLSGYQYTRRAWKKEAFDLFMDPSFFQMDASCVNHWRAIMDNLMTHDKTTFRDLMTRVAVAQSSSLNLFANRDVELEQRAMLLKRLAFAIFSSEIDQYQKYLPDIQERLVESLRLPQVPTLHSQVFLFFRVLLLRMSPQHLTSLWPTMITELVQVFLLMEQELTADEDISRTSGPSVAGLETTYTGGNGFSTSYNSQRWLNLYLSACKFLDLALALPSENLPQFQMYRWAFIPEASDDSGLEVRRQGIHQREFKPYVVRLAKLLRKRAKDKEEDFKTVILEGLEMAKHQKNPEEDNSGRTLGWEPGHLLLTICTVRSMEQLLPFFNVLSQVFNSKVTSRCGGHSGSPILYSNAFPNKDMKLENHKPCSSKARQKIEEMVEKDFLEGMIKT

SEQ ID NO: 51654 - protein, 121 aa, Homo sapiens
MAEFSQKRGKRRSDEGLGSMVDFLLANARLVLGVGGAAVLGIATLAVKRFIDRATSPRDEDDTKADSWKELSLLKATPHLQPRPPPAALSQPVLPLAPSSSAPGCSDMFPAPSLCRRACRN

SEQ ID NO: 51655 - protein, 509 aa, Homo sapiens
MGDPFMLQQSTNPAPGILGPPPPSFHLGGPAVGPRGNLGAGNGNLQGPRHMQKGRVETSRVVHIMDFQRGKNLRYQLLQLVEPFGVISNHLILNKINEAFIEMATTEDAQAAVDYYTTTPALVFGKPVRVHLSQKYKRIKKPEGKPDQKFDQKQELGRVIHLSNLPHSGYSDSAVLKLAEPYGKIKNYILMRMKSQAFIEMETREDAMAMVDHCLKKALWFQGRCVKVDLSEKYKKLVLRIPNRGIDLLKKDKSRKRSYSPDGKESPSDKKSKTDGSQKTESSTEGKEQEEKSGEDGEKDTKDDQTEQEPNMLLESEDELLVDEEEAAALLESGSSVGDETDLANLGDVASDGKKEPSDKAVKKDGSASAAAKKKLKKVDKIEELDQENEAALENGIKNEENTEPGAESSENADDPNKDTSENADGQSDENKDDYTIPDEYRIGPYQPNVPVGIDYVIPKTGFYCKLCSLFYTNEEVAKNTHCSSLPHYQKLKKFLNKLAEERRQKKET

SEQ ID NO: 51656 - protein, 91 aa, Homo sapiens
MLRIPVRKALVGLSKSPKGCVRTTATAASNLIEVFVDGQSVMVEPGTTVLQACEKVGMQIPRFCYHERLSVAGNCRMCLVEIEKAPKVLDT

SEQ ID NO: 51657 - protein, 71 aa, Homo sapiens
MAVARAGVLGVQWLQRASRNVMPLGARTASHMTKDMFPGPYPRTPEERAAAAKKYNMRVEDYEPYPDDGMG

SEQ ID NO: 51658 - protein, 67 aa, Homo sapiens
MPPLLPLRLCRLWPRNPPSRLLGAAAGQRSRPSTYYELLGVHPGASTEEVKRAFFSKSKEEGEADAP

SEQ ID NO: 51659 - protein, 37 aa, Homo sapiens
MARELRALLLWGRRLRPLLRAPALAAVPGGSRRAIEM

SEQ ID NO: 51660 - protein, 143 aa, Homo sapiens
MWRGRAGALLRVWGFWPTGVPRRRPLSCDAASQAGSNYPRCWNCGGPWGPGREDRFFCPQCRALQAPDPTRDYFSLMDCNRSFRVDTAKLQHRYQQLQRLVHPDFFSQRSQTEKDFSEKHSTLVNDAYKTLLAPLSRGLYLVS

SEQ ID NO: 51661 - protein, 280 aa, Homo sapiens
MLQKEEQVAVLRPHFPPHSLPPNSDSSESGMLSRLGDLLFYTIAEGQERIPIHKFTTALKATGLQTSDPRLRDCMSEMHRVVQESSSGGLLDRDLFRKCVSSNIVLLTQAFRKKFVIPDFEEFTGHVDRIFEDVKELTGGKVAAYIPQLAKSNPDLWGVSLCTVDGQRHSVGHTKIPFCLQSCVKPLTYAISISTLGTDYVHKFVGKEPSGLRYNKLSLNEEGIPHNPMVNAGAIVVSSLIKMDCNKAEKFDFVLQYLNKMAGNEYMGFSNATAFLRGWT

SEQ ID NO: 51662 - protein, 472 aa, Homo sapiens
MVPHAILARGRDVCRRNGLLILSVLSVIVGCLLGFFLRTRRLSPQEISYFQFPGELLMRMLKMMILPLVVSRNMFPANLVEATFKQYRTKTTPVVKSPKVAPEEAPPRRILIYGVQEENGSHVQNFALDLTPPPEVVYKSEPGTSDGMNVLGIVFFSATMGIMLGRMGDSGAPLVSFCQCLNESVMKIVAVAVWYFPFGIVFLIAGKILEMDDPRAVGKKLGFYSVTVVCGLVLHGLFILPLLYFFITKKNPIVFIRGILQALLIALATSSSSATLPITFKCLLENNHIDRRIARFVLPVGATINMDGTALYEAVAAIFIAQVNNYELDFGQIITISITATAASIGAAGIPQAGLVTMVIVLTSVGLPTDDITLIIAVDWALDRFRTMINVLGDALAAGIMAHICRKDFARDTGTETCFPSPETAALRDQASEPPGDRGSPAEWLCEECSRGLRAHPGPHLPPPRPRSSGAG

SEQ ID NO: 51663 - protein, 207 aa, Homo sapiens
MPRPGHPRPASGPPRLGPWERPTELCLETYDKPPQPPPSRRTRRPDPKDPGHHGPESITFISGSAEPALESPTCLLRTPLRGLLKPTGPRSTMECPPALIVHPPAGGMASGSSQPWAAASATPMLSSKASLCIPTRGPPPQPLMRTPAARSHWPIPHPCDTACPAPLPVVLVAPRSTILSMSRTWTCRRWAVAPCRAEKLMCSSSRS

SEQ ID NO: 51664 - protein, 403 aa, Homo sapiens
MGATEPGGDTSSDEFHPFIEALLPHVRAFSYTWFNLQARKRKYFKKHEKRMSKDEERAVKDELLGEKPEIKQKWASRLLAKLRKDIRPEFREDFVLTITGKKPPCCVLSNPDQKGKIRRIDCLRQADKVWRLDLVMVILFKGIPLESTDGERLYKSPQCSNPGLCVQPHHIGVTIKELDLYLAYFVHTPESGQSDSSNQQGDADIKPLPNGHLSFQDCFVTSGVWNVTELVRVSQTPVATASGPNFSLADLESPSYYNINQVTLGRRSITSPPSTSTTKRPKSIDDSEMESPVDDVFYPGTGRSPAAGSSQSSGWPNDVDAGSPRATASALHFPSTSIIQQSSPYFTHPTIRYHHHHGQDSLKEFVQFVCSDGSGQATGQHSQRQAPPLPTGLSASDPGTATF

SEQ ID NO: 51665 - protein, 144 aa, Homo sapiens
MPSSVSWGILLLAGLCCLVPVSLAEDPQGDAAQKTDTSHHDQDHPTFNKITPNLAEFAFSLYRQLAHQSNSTNIFFSPVSIATAFAMLSLGTKADTHDEILEGLNFNLTEIPEAQIHEGFQELLRTLNQPDSQLQLTTGNGLFL

SEQ ID NO: 51666 - protein, 383 aa, Homo sapiens
MEEEETQLEEELDKAQEDILKHQASISELKRNFMESTPEPRPNEWEKRRITPLSLQTQGSSHETLNIVEEKKRAEVGKDERVITEEMNGKEISPGSGPGEIRKVEPVTQKDSTSLSSESSSSSSESEEEDVGEYRPHHRVTEGTIREEQEYEEEVEEEPRPAAKVVEREEAVPEASPVTQAGASVITVETVIQENVGAQKIPGEKSVHEGALKQDMGEEAEEEPQKVNGEVSHVDIDVLPQIICCSEPPVVKTEMVTISDASQRTEISTKEVPIVQTETKTITYESPQIDGGAGGDSGTLLTAQTITSESVSTTTTTHITKTVKGGISETRIEKRIVITGDGDIDHDQALAQAIREAREQHPDMSVTRVVVHKETELAEEGED

SEQ ID NO: 51667 - protein, 116 aa, Homo sapiens
MLLTQSLFGGLFPRTRETMRRYKVSLFYLGCSRTPNVKLSSCLGLPCCWDYSYKFIQLSEFGFGQVIIVSEEPWKENISCSSTTFIKSTICLNPDSEFRPCFNAWLSLIRENAVGL

SEQ ID NO: 51668 - protein, 101 aa, Homo sapiens
MDMFPLTWVFLALYFSRHQVRGQPDPPCGGRLNSKDAGYITSPGYPQDYPSHQNCEWIVYAPEPNQKIVLNFNPHFEIEKHDCKYDFIEIRDGDSESADLL

SEQ ID NO: 51669 - protein, 445 aa, Homo sapiens
MTEVKCQHYKKKRTEQEETIASLQMEVCRLKKEEEDRIVTQNRVFAYLCKRVPHTVLDRQLLCLIDYYESKIRKIHTQRQYKEDESQSEEENDYRNLDASPTYKGLLMSLQNQLKESKSKIDALSSEKLNLQKDLETRPTQHELRLYKQQVKKLEKALKKNVKLQELINHKKAEDTEKKDEPSKYNQQQALIDQRYFQVLCSINSIIHNPRAPVIIYKQTKGGVQNFNKDLVQDCGFEHLVPVIEMWADQLTSLKDLYKSLKTLSAELVPWLNLKKQDENEGIKVEDLLFIVDTMLEEVENKEKDSNMPHFQTLQAIVSHFQKLFDVPSLNGVYPRMNEVYTRLGEMNNAVRNLQELLELDSSSSLCVLVSTVGKLCRLINEDVNEQVMQVLGPEDLQSIIYKLEEHEEFFPAFQAFTNDLLEILEIDDLDAIVPAVKKLKVLSY

SEQ ID NO: 51670 - protein, 75 aa, Homo sapiens
MDFKAIAQQTAQEVLGYNRDTSGWKVVKTSVQWCAPIVPATQEANTGGLLEHRSLRLSCTMIVPVNSQYTTDWAT

SEQ ID NO: 51671 - protein, 110 aa, Homo sapiens
MSAEVETSEGVDESEKKNSGALEKENQMRMADLSELLKEGTKEAHDRAENTQFVKDFLKGNIKKELFKLATTALYFTYSALEEEMERNKDHPAFAPLYFPMELHRKEALT

SEQ ID NO: 51672 - protein, 83 aa, Homo sapiens
MKLVSVALMYLGSLAFLGADTARLDVASEFRKKWNKWALSRGKRELRMSSSYPTGLADVKAGPAQTLIRPQDMKGASRSPEDR

SEQ ID NO: 51673 - protein, 718 aa, Homo sapiens
MADKRKLQGEIDRCLKKVSEGVEQFEDIWQKLHNAANANQKEKYEADLKKEIKKLQRLRDQIKTWVASNEIKDKRQLIDNRKLIETQMERFKVVERETKTKAYSKEGLGLAQKVDPAQKEKEEVGQWLTNTIDTLNMQVDQFESEVESLSVQTRKKKGDKDKQDRIEGLKRHIEKHRYHVRMLETILRMLDNDSILVDAIRKIKDDVEYYVDSSQDPDFEENEFLYDDLDLEDIPQALVATSPPSHSHMEDEIFNQSSSTPTSTTSSSPIPPSPANCTTENSEDDKKRGRSTDSEVSQSPAKNGSKPVHSNQHPQSPAVPPTYPSGPPPAASALSTTPGNNGVPAPAAPPSALGPKASPAPSHNSGTPAPYAQAVAPPAPSGPSTTQPRPPSVQPSGGGGGGSGGGGSSSSSNSSAGGGAGKQNGATSYSSVVADSPAEVALSSSGGNNASSQALGPPSGPHNPPPSTSKEPSAAAPTGAGGVAPGSGNNSGGPSLLVPLPVNPPSSPTPSFSDAKAAGALLNGPPQFSTAPEIKAPEPLSSLKSMAERAAISSGIEDPVPTLHLTERDIILSSTSAPPASAQPPLQLSEVNIPLSLGVCPLGPVPLTKEQLYQQAMEEAAWHHMPHPSDSERIRQYLPRNPCPTPPYHHQMPPPHSDTVEFYQRLSTETLFFIFYYLEVQQGPRGSLGPPGFAATAAVPPRAGGVRALRHSIWQPRP

SEQ ID NO: 51674 - protein, 131 aa, Homo sapiens
MARSLVCLGVIILLSAFSGPGVRGGPMPKLADRKLCADQECSHPISMAVALQDYMAPDCRFLTIHRGQVVYVFSKLKGRGRLFWGGSVQGDYYGDLAARLGYFPSSIVREDQTLKPGKVDVKTDTSSSNSW

SEQ ID NO: 51675 - protein, 272 aa, Homo sapiens
MDLGECTKIHDLALRADYEIASKERDLFFELDAMDHLESFIAECDRRTELAKKRLAETQEEISAEVSAKAEKVHELNEEIGKLLAKAEQLGAEGNVDESQKILMEVEKVRAKKKEAEEEYRNSMPASSFQQQKLRVCEVCSAYLGLHDNDRRLADHFGGKLHLGFIQIREKLDQLRKTVAEKQEKRNQDRLRRREEREREERLSRRSGSRTRDRRRSRSRDRRRRRSRSTSRERRKLSRSRSRDRHRRHRSRSRSHSRGHRRASRDRSAKYK

SEQ ID NO: 51676 - protein, 725 aa, Homo sapiens
MEGDAVEAIVEESETFIKGKERKTYQRRREGGQEEDACHLPQNQTDGGEVVQDVNSSVQMVMMEQLDPTLLQMKTEVMEGTVAPEAEAAVDDTQIITLQVVNMEEQPINIGELQLVQVPVPVTVPVATTSVEELQGAYENEVSKEGLAESEPMICHTLPLPEGFQVVKVGANGEVETLEQGELPPQEDPSWQKDPDYQPPAKKTKKTKKSKLRYTEEGKDVDVSVYDFEEEQQEGLLSEVNAEKVVGNMKPPKPTKIKKKGVKKTFQCELCSYTCPRRSNLDRHMKSHTDERPHKCHLCGRAFRTVTLLRNHLNTHTGTRPHKCPDCDMAFVTSGELVRHRRYKHTHEKPFKCSMCDYASVEVSKLKRHIRSHTGERPFQCSLCSYASRDTYKLKRHMRTHSGEKPYECYICHARFTQSGTMKMHILQKHTENVAKFHCPHCDTVIARKSDLGVHLRKQHSYIEQGKKCRYCDAVFHERYALIQHQKSHKNEKRFKCDQCDYACRQERHMIMHKRTHTGEKPYACSHCDKTFRQKQLLDMHFKRYHDPNFVPAAFVCSKCGKTFTRRNTMARHADNCAGPDGVEGENGGETKKSKRGRKRKMRSKKEDSSDSENAEPDLDDNEDEEEPAVEIEPEPEPQPVTPAPPPAKKRRGRPPGRTNQPKQNQPIIQVEDQNTGAIENIIVEVKKEPDAEPAEGEEEEAQPAATDAPNGDLTPEMILSMMDR

SEQ ID NO: 51677 - protein, 1020 aa, Homo sapiens
MAAEEGVASAASAGGSWGTAAMGRVLPMLLVPVPAEAMGQLGSRAQLRTQPEALGSLTAAGSLQVLSLTPGSRGGGRCCLEGPFWHFLWEDSRNSSTPTEKPKLLALGENYELLIYEFNLKDGRCDATILYSCSREALQKLIDDQDISISLLSLRILSFHNNTSLLFINKCVILHIIFPERDAAIRVLNCFTLPLPAQAVDMIIDTQLCRGILFVLSSLGWIYIFDVVDGTYVAHVDLALHKEDMCNEQQQEPAKISSFTSLKVSQDLDVAVIVSSSNSAVALNLNLYFRQHPGHLLCERILEDLPIQGPKGVDEDDPVNSAYNMKLAKFSFQIDRSWKAQLSSLNETIKNSKLEVSCCAPWFQDILHLESPESGNHSTSVQSWAFIPQDIMHGQYNVLQKDHAKTSDPGRSWKIMHISEQEEPIELKCVSVTGFTALFTWEVERMGYTITLWDLETQGMQCFSLGTKCIPVDSSGDQQLCFVLTENGLSLILFGLTQEEFLNRLMIHGSASTVDTLCHLNGWGRCSIPIHALEAGIENRQLDTVNFFLKSKENLFNPSSKSSVSDQFDHLSSHLYLRNVEELIPALDLLCSAIRESYSEPQSKHFSEQLLNLTLSFLNNQIKELFIHTEELDEHLQKGVNILTSYINELRTFMIKFPWKLTDAIDEYDVHENVPKVKESNIWKKLSFEEVIASAILNNKIPEAQTFFRIDSHSAQKLEELIGIGLNLVFDNLKKNNIKEASELLKNMGFDVKGQLLKICFYTTNKNIRDFLVEILKEKNYFSEKEKRTIDFVHQVEKLYLGHFQENMQIQSFPRYWIKEQDFFKHKSVLDSFLKYDCKDEFNKQDHRIVLNWALWWDQLTQESILLPRISPEEYKSYSPEALWRYLTARHDWLNIILWIGEFQTQHSYASLQQNKWPLLTVDVINQNTSCNNYMRNEILDKLARNGVFLASELEDFECFLLRLSRIGGVIQDTLPVQNYKTKEGWDFHSQFILYCLEHSLQHLLYVYLDCYKSQTDLPG

SEQ ID NO: 51678 - protein, 521 aa, Homo sapiens
MQPGLSPGSPGDPRPPTPETDYPESLTSYPEEDYSPVGSFGEPGPTSPLTTPPGWSCHVSQDKQMLYTNHFTQEQVPVPAPRSIHKSSQDGDTPAQASPPEEKVPAELDEVGSWEEVSPATAAVRTKTLDKAGVLHRTKTADKGKRLRKKHWSASWTVLEGGVLTFFKDSKTSAAGGLRQPSKFSTPEYTVELRGATLSWAPKDKSSRKNVLELRSRDGSEYLIQHDSEAIISTWHKAIAQGIQELSAELPPEESESSRVDFGSSERLGSWQEKEEDARPNAAAPALGPVGLESDLSKVRHKLRKFLQRRPTLQSLREKGYIKDQVFGCALAALCERERSRVPRFVQQCIRAVEARGLDIDGLYRISGNLATIQKLRYKVDHDERLDLDDGRWEDVHVITGALKLFFRELPEPLFPFSHFRQFIAAIKLQDQARRSRCVRDLVRSLPAPNHDTLRMLFQHLCRVIEHGEQNRMSVQSVAIVFGPTLLRPEVEETSMPMTMVFQNQVVELILQQCADIFPPH

SEQ ID NO: 51679 - protein, 385 aa, Homo sapiens
MSSPNIWSTGSSVYSTPVFSQKMTVWILLLLSLYPGFTSQKSDDDYEDYASNKTWVLTPKVPEGDVTVILNNLLEGYDNKLRPDIGVKPTLIHTDMYVNSIGPVNAINMEYTIDIFFAQTWYDRRLKFNSTIKVLRLNSNMVGKIWIPDTFFRNSKKADAHWITTPNRMLRIWNDGRVLYTLRLTIDAECQLQLHNFPMDEHSCPLEFSSYGYPREEIVYQWKRSSVEVGDTRSWRLYQFSFVGLRNTTEVVKTTSGDYVVMSVYFDLSRRMGYFTIQTYIPCTLIVVLSWVSFWINKDAVPARTSLGITTVLTMTTLSTIARKSLPKVSYVTAMDLFVSVCFIFVFSALVEYGTLHYFVSNRKPSKDKDKKKKNPVCIIFHWHH

SEQ ID NO: 51680 - protein, 118 aa, Homo sapiens
MTMGDMKTPDFDDLLAAFDIPDMVDPKAAIESGHDDHESHMKQNAHGEDDSHAPSSSDVGVSVIVKNVRNIDSSEGGEKDGHNPTGNGLHNGFLTASSLDSYSKDGAKSLKGDVPASE

SEQ ID NO: 51681 - protein, 267 aa, Homo sapiens
MASRIGLRMQLMREQAQQEEQRERMQQQAVMHYMQQQQQQQQQQLGGPPTPAINTPVHFQSPPPVPGEVLKVQSYLENPTSYHLQQSQHQKVREYLSETYGNKFAAHISPAQGSPKPPPAASPGVRAGHVLSSSAGNSAPNSPMAMLHIGSNPERELDDVIDNIMRLDDVLGYINPEMQMPNTLPLSSSHLNVYSSDPQVTASLVGVTSSSCPADLTQKRELTDAESRALAKERQKKDNHNLIERRRRFNINDRIKELGMLIPKAND

SEQ ID NO: 51682 - protein, 518 aa, Homo sapiens
  MOD_RES (1)..(1): Any amino acid
XEQYRIRQVNIYYYLEDDSMSVIEPVVENSGILQGKLIKRQRLAKNDRGDHYHWKDLNRGINITIYGKTFRVVDCDQFTQVFLESQGIELNPPEKMALDPYTELRKQPLRKYVTPSDFDQLKQFLTFDKQVLRFYAIWDDTDSMYGECRTYIIHYYLMDDTVEIREVHERNDGRDPFPLLMNRQRVPKVLVENAKNFPQCVLEISDQEVLEWYTAKDFIVGKSLTILGRTFFIYDCDPFTRRYYKEKFGITDLPRIDVSKREPPPVKQELPPYNGFGLVEDSAQNCFALIPKAPKKDVIKMLVNDNKVLRYLAVLESPIPEDKDRRFVFSYFLATDMISIFEPPVRNSGIIGGKYLGRTKVVKPYSTVDNPVYYGPSDFFIGAVIEVFGHRFIILDTDEYVLKYMESNAAQYSPEALASIQNHVRKREAPAPEAESKQTEKDPGVQELEALIDTIQKQLKDHSCKDNIREAFQIYDKEASGYVDRDMFFKICESLNVPVDDSLVKEKKKKSKGSFAVI

SEQ ID NO: 51683 - protein, 61 aa, Homo sapiens
MAGSRCQEAIVVSGGEREELGSVAPLRGTLAPHHRLLVSVSSFFHARPCEETTKQALSRMP

SEQ ID NO: 51684 - protein, 95 aa, Homo sapiens
  MOD_RES (1)..(1): Any amino acid
XAMQDLESTRPDSPALFVDKPTEGERTERLIKAKLRSIMMSQDLENVTSKEIRNELEKQMNCNLKELKEFIDNEMLLILGQMDKPSLIFDHLYLG

SEQ ID NO: 51685 - protein, 215 aa, Homo sapiens
RSNDSGIQQSSDDGRESLPSTVSANSLYEPEGERQDSSMFLDSKHLNPGLQLYRASYEKNLPKMAEALAHGADVNWANSEENKATPLIQAVLGGSLVTCEFLLQNGANVNQRDVQGRGPLHHATVLGHTGQVCLFLKRGANQHATDEEGKDPLSIAVEAANADIVTLLRLARMNEEMRESEGLYGQPGQYSTNNHTEMQYKKCIQEFISLQLEDS

SEQ ID NO: 51686 - protein, 184 aa, Homo sapiens
MSKLWRRGSTSGAMEAPEPGEALELSLAGAHGHGVHKKKHKKHKKKHKKKHHQEEDAGPTQPSPAKPQLKLKIKLGGQVLGTKSVPTFTVIPEGPRSPSPLMVVDNEEEPMEGVPLEQYRAWLDEDSNLSPSPLRDLSGGLGGQEEEEEQRWLDALEKGELDDNGDLKKEINERLLTARQRRCC

SEQ ID NO: 51687 - protein, 156 aa, Homo sapiens
  MOD_RES (1)..(1): Any amino acid
XAEPGGEAQEHWVHEACAVWTGGVYLVAGKLFGLQEAMKVAVDMMCSSCQEAGATIGCCHKGCLHTYHYPCASDAGTSPPRNRRALEPIQAVQGDPPWAQLPKPRPHLTLQFPSSLAPAILLSFCLPRPLLGNARDMEMRHSPGTCLRSAQSSEGR

SEQ ID NO: 51688 - protein, 37 aa, Homo sapiens
MLKAKILFVGPCEQRPLFALIFTEWKNCFGQLSDRIF

SEQ ID NO: 51689 - protein, 357 aa, Homo sapiens
MLQFVRAGARAWLRPTGSQGLSSLAEEAARATENPEQVASEGLPEPVLRKVELPVPTHRRPVQAWVESLRGFEQERVGLADLHPDVFATAPRLDILHQVAMWQKNFKRISYAKTKTRAEVRGGGRKPWPQKGTGRARHGSIRSPLWRGGGVAHGPRGPTSYYYMLPMKVRALGLKVALTVKLAQDDLHIMDSLELPTGDPQYLTELAHYRRWGDSVLLVDLTHEEMPQSIVEATSRLKTFNLIPAVATRWRHEPKSSPVPQPTPLAGFPTSLRMKAQVIRVARQALHDVPRHLPALPSFALGLPHQNGSQESQPGTGPSLALGQQVMSWEQLLGQRLTGNKRPGRVWPRAAGLTKSH

SEQ ID NO: 51690 - protein, 88 aa, Homo sapiens
YQIRCGYPTRILGNFLTKKYNHLNLFLFQGFRLVPFLVELRAVMDWVWTDTTLSLSSWMCVEDIYANIFIIKCSRETEKVHEDLPVFF

SEQ ID NO: 51691 - protein, 70 aa, Homo sapiens
MFDRNICPVILHVKRTNSVLALRLVHSLNGSGKTTFPCFPLLKPGISEGSSRDHPRRKQLILTSLLQDLL

SEQ ID NO: 51692 - protein, 55 aa, Homo sapiens
MSYYQRPFSPSAYSLPASLNSSIVMQHGTSLDSTDTYPQHAQSLDGTTSSSIPLY

SEQ ID NO: 51693 - protein, 829 aa, Homo sapiens
MRTTKVYKLVIHKKGFGGSDDELVVNPKVFPHIKLGDIVEIAHPNDEYSPLLLQVKSLKEDLQKETISVDQTVTQVFRLRPYQDVYVNVVDPKDVTLDLVELTFKDQYIGRGDMWRLKKSLVSTCAYITQKVEFAGIRAQAGELWVKNEKVMCGYISEDTRVVFRSTSAMVYIFIQMSCEMWDFDIYGDLYFEKAVNGFLADLFTKWKEKNCSHEVTVVLFSRTFYDAKSVDEFPEINRASIRQDHKGRFYEDFYKVVVQNERREEWTSLLVTIKKLFIQYPVLVRLEQAEGFPQGDNSTSAQGNYLEAINLSFNVFDKHYINRNFDRTGQMSVVITPGVGVFEVDRLLMILTKQRMIDNGIGVDLVCMGEQPLHAVPLFKLHNRSAPRDSRLGDDYNIPHWINHSFYTSKSQLFCNSFTPRIKLAGKKPASEKAKNGRDTSLGSPKESENALPIQVDYDAYDAQVFRLPGPSRAQCLTTCRSVRERESHSRKSASSCDVSSSPSLPSRTLPTEEVRSQASDDSSLGKSANILMIPHPHLHQYEVSSSLGYTSTRDVLENMMEPPQRDSSAPGRFHVGSAESMLHVRPGGYTPQRALINPFAPSRMPMKLTSNRRRWMHTFPVGPSGEAIQIHHQTRQNMAELQGSGQRDPTHSSAELLELAYHEAAGRHSNSRQPGDGMSFLNFSGTEELSVGLLSNSGAGMNPRTQNKDSLEDSVSTSPDPILTLSAPPVVPGFCCTVGVDWKSLTTPACLPLTTDYFPDRQGLQNDYTEGCYDLLPEADIDRSVSEKKALGLVGEGFGYIPHMHQNTGFVLASATHILKLERYRGD

SEQ ID NO: 51694 - protein, 261 aa, Homo sapiens
  MOD_RES (1)..(1): Any amino acid
XVCVVMAAVSLSPASARLNPRRIAAIPSWPAPGSHRKFSAPRHGSLGFLPRKRSSRHRGKVKSFPKDDPSKPVHLTAFLGYKAGMTHIVREVDRPGSKVNKKEVVEAVTIVETPPMVVVGIVGYVETPRGLRTFKTVFAEHISDECKRRFYKNWHKSKKKAFTKYCKKWQDEDGKKQLEKDFSSMKKYCQVIRVIAHTQMRLLPLRQKKAHLMEIQVNGGTVAEKLDWARERLEQQVPVNQVFGQDEMIDVIGVTKGKGYK

SEQ ID NO: 51695 - protein, 85 aa, Homo sapiens
MASSAEGDEGTVVALAGVLQSGFQELSLNKLATSLGASEQALRLIISIFLGLPSGWILLHCHRQLRYQVDNATLCSDFEADWFGC

SEQ ID NO: 51696 - protein, 130 aa, Homo sapiens
MEGRCCRAGEISGEVSTGSPQKREEDVCQCRPECSQVKRSCPSCGSELGVEEKRGKGNPISIQLFPPELVEHIISFLPVRDLVALGQTCRYFHEVCDGEGVWRRICRRLSPRLQDQGSGVRPWKRAAILN

SEQ ID NO: 51697 - protein, 696 aa, Homo sapiens
  MOD_RES (1)..(1): Any amino acid
XNITCSPDEFTCSSGRCISRNFVCNGQDDCSDGSDELDCAPPTCGAHEFQCSTSSCIPISWVCDDDADCSDQSDESLEQCGRQPVIHTKCPASEIQCGSGECIHKKWRCDGDPDCKDGSDEVNCPSRTCRPDQFECEDGSCIHGSRQCNGIRDCVDGSDEVNCKNVNQCLGPGKFKCRSGECIDISKVCNQEQDCRDWSDEPLKECHINECLVNNGGCSHICKDLVIGYECDCAAGFELIDRKTCGDIDECQNPGICSQICINLKGGYKCECSRGYQMDLATGVCKAVGKEPSLIFTNRRDIRKIGLERKEYIQLVEQLRNTVALDADIAAQKLFWADLSQKAIFSASIDDKVGRHVKMIDNVYNPAAIAVDWVYKTIYWTDAASKTISVATLDGTKRKFLFNSDLREPASIAVDPLSGFVYWSDWGEPAKIEKAGMNGFDRRPLVTADIQWPNGITLDLIKSRLYWLDSKLHMLSSVDLNGQDRRIVLKSLEFLAHPLALTIFEDRVYWIDGENEAVYGANKFTGSELATLVNNLNDAQDIIVYHELVQPSGKNWCEEDMENGGCEYLCLPAPQINDHSPKYTCSCPSGYNVEENGRDCQRINVTTAVSEVSVPPKGTSAAWAILPLLLLVMAAVGGYLMWRNWQHKNMKSMNFDNPVYLKTTEEDLSIDIGRHSASVGHTYPAISVVSTDDDLA

SEQ ID NO: 51698 - protein, 64 aa, Homo sapiens
  MOD_RES (1)..(1): Any amino acid
XALTSEVCLKGLPKTQNGEIVQFKGWPRLKWVVTDSKYLSKPPKDWQPHISPAGTEPAYIEGKQ

SEQ ID NO: 51699 - protein, 140 aa, Homo sapiens
MPTTSRPALDVKGGTSPAKEDANQEMSSVAYSNLAVKDRKAVAILHYPGVASNGTKASGAPTSSSGSPIGSPTTTPPTKPPSFNLHPAPHLLASMHLQKLNSQYQGMAAATPGQPGEAGPLQNWDFGAQAGGAESLSPSA

SEQ ID NO: 51700 - protein, 134 aa, Homo sapiens
MPHSAGGTAGVGLEAAEPTALLTRAEPPSEPTEIRPQKRKKGPAPKMLGNELCSVCGDKASGFHYNVLSCEGCKGFFRRSVIKGAHYICHSGGHCPMDTYMRRKCQECRLRKCRQAGMREECVLSEEQIRLKKL

SEQ ID NO: 51701 - protein, 455 aa, Homo sapiens
MMRVSEPILDMDMANYSEVLDPTYTTLEFETMQILYNSSDSSAPETSMNTTDNGVNCLCAICGDRATGKHYGASSCDGCKGFFRRSIRKSHVYSCRFSRQCVVDKDKRNQCRYCRLRKCFRAGMKKEAVQNERDRISTRRSTFDGSNIPSINTLAQAEVRSRQISVSSPGSSTDINVKKIASIGDVCESMKQQLLVLVEWAKYIPAFCELPLDDQVALLRAHAGEHLLLGATKRSMMYKDILLLGNNYVIHRNSCEVEISRVANRVLDELVRPFQEIQIDDNEYACLKAIVFFDPDAKGLSDPVKIKNMRFQVQIGLEDYINDRQYDSRGRFGELLLLLPTLQSITWQMIEQIQFVKLFGMVKIDNLLQEMLLGGASNDGSHLHHPMHPHLSQDPLTGQTILLGPMSTLVHADQISTPETPLPSPPQGSGQEQYKIAANQASVISHQHLSKQKQL

SEQ ID NO: 51702 - protein, 48 aa, Homo sapiens
MGAGPSLLLAALLLLLSGDGAVRCDTPANCTYLDLLGTWVFQDHKKKK

SEQ ID NO: 51703 - protein, 150 aa, Homo sapiens
MPEAGFQATNAFTECKFTCTSGKCLYLGSLVCNQQNDCGDNSDEENCLLVTEHPPPGIFNFLAWQGLMNVRLRGKRMEPASTFCHSQSGVTSPCSPSCLQACRALPISAASAWLPLRTTTALSPSPTPILLRVQRSWSSPKSSSSSWWSR

SEQ ID NO: 51704 - protein, 214 aa, Homo sapiens
  MOD_RES (1)..(1): Any amino acid
XWLDFLSMSVALTPLDLCNPARTLLLSEELLLYEGRNKAAEVTLFAYSDLLLFTKEDEPGRCDVLRNPLYLQSVKLQEGSSEDLKFCVLYLAEKAECLFTLEAHSQEQKKRVCWCLSENIAKQQQLAASPPDSKMFETEADEKREMALEEGKGPGAEDSPPSKEPSPGQELPPGQDLPPNKDSPSGQEPAPSQEPLSSKDSATSEGSPPGPDAP

SEQ ID NO: 51705 - protein, 117 aa, Homo sapiens
MLWFQGAIPAAIATAKRSGAVFVVFVADGLTVSPRLECSGAISAHCNFHLPSASNSPASASYVGDDEQSTQMAASWEDDKVTEASSNSFVAIKIDTKSEACLQFSQIYPVVCVPSSF

SEQ ID NO: 51706 - protein, 304 aa, Homo sapiens
HGLPLLPLLSLLVGAWLKLGNGQATSMVQLQGGRFLMGTNSPDSRDGDGPVREATVKPFAIDIFPVTNKDFRDFVREKKYRTEAEMFGWSFVFEDFVSDELRNKATQPMKSGRCLCWAGASCSRSPSFSQSVLWWLPVEKAFWRQPAGPGSGIRERLEHPVLHVSWNDARAYCAWRGKRLPTEEEWEFAARGGLKGQVYPWGNWFQPNRTNLWQGKFPKGDKAEDGFHGVSPVNAFPAQNNYGLYDLLGNVWEWTASPYQAAEQDMRVLRGASWIDTADGSANHRARVTTRMGNTPDSASDNLG

SEQ ID NO: 51707 - protein, 153 aa, Homo sapiens
MDELFPLIFPAEPAQASGPYVEIIEQPKQRGMRFRYKCEGRSAGSIPGERSTDTTKTHPTIKINGYTGPGTVRISLVTKDPPHRPHPHELVGKDCRDGFYEAELCPDRCIHSSYRRAAWGLRPECCAALLPGDSAGPIRQAPPPAACPFSSHL

SEQ ID NO: 51708 - protein, 168 aa, Homo sapiens
MWSEGRYEYERIPRERAPPRSHPSDGYNRLVNIVPKKPPLLDRPGEGSYNRYYSHVDYRDYDEGRSFSHDRRSGPPHRGDESGYRWTRDDHSASRQPEYRDMRDGFRRKSFYSSHYARERSPYKRDNTFFRESPVGRKDSPHSRSGSSVSSRSYSPERSKSYSFHQSQ

SEQ ID NO: 51709 - protein, 172 aa, Homo sapiens
MAELQEVQITEEKPLLPGQTPEAAKEAELAARILLDQGQTHSVETPYGSVTFTVYGTPKPKRPAILTYHDVGLNYKSCFQPLFQFEDMQEIIQNFVRVHVDAPGMEEGAPVFPLGYQYPSLDQLADMIPCVLQYLNFSTIIGVGVGAGAYILARYALNHPDTVEGLVLINID

SEQ ID NO: 51710 - protein, 124 aa, Homo sapiens
MAGLCYRRQPSSACGRGGLRGGSRGASRVCVRPALCYGAPGSSLRVAAAGAAGSGWRRAAGPGERGLEDEEDWVPGGNRTGSASTATVRGLRALDPRAACASVSGWVAPSVPWGCCGPRPGWAR

SEQ ID NO: 51711 - protein, 91 aa, Homo sapiens
MDIPLDLSSSAGSGKRRRRGNLPKESVQILRDWLYEHRYNAYPSEQEKALLSQQTHLSTLQVCNWFINARRRLLPDMLRKDGKDPNQFTIS

SEQ ID NO: 51712 - protein, 543 aa, Homo sapiens
MPSEGRCWETLKALRSSDKGRLCYYRDWLLRREDVLEECMSLPKLSSYSGWVVEHVLPHMQENQPLSETSPSSTSASALDQPSFVPKSPDASSAFSPASPATPNGTKGKDESQHTESMVLQSSRGIKVEGCVRMYELVHRMKGTSSYPTAESQAEAERALREMRDLLMNLGQEITRACEDKRRQDEEEAQVKLQEAQMQQGPEAHKEPPAPSQGPGGKQNEDLQVKVQDITMQWYQQLQDASMQCVLTFEGLTNSKDSQAKKIKMDLQKAATIPVSQISTIAGSKLKEIFDKIHSLLSGKPVQSGGRSVSVTLNPQGLDFVQYKLAEKFVKQGEEEVASHHEAAFPIAVVASGIWELHPRVGDLILAHLHKKCPYSVPFYPTFKEGMALEDYQRMLGYQVKDSKVEQQDNFLKRMSGMIRLYAAIIQLRWPYGNRQEIHPHGLNHGWRWLAQILNMEPLSDVTATLLFDFLEVCGNALMKQYQVQFWKMLILIKEDYFPRIEAITSSGQMGSFIRLKQFLEKCLQHKDIPVPKGFLTSSFWRS

SEQ ID NO: 51713 - protein, 72 aa, Homo sapiens
  MOD_RES (1)..(1): Any amino acid
XNEQEQPLGQWHLSKRDTGAALLAESRAEKNRLWGPLEVRRVGRSSKQLVDIPEGQLEARAGRGRGQWLQLI

SEQ ID NO: 51714 - protein, 46 aa, Homo sapiens
MVDLTQVMDDEVFMAFASYATIILSKMMLMSTATAFYRLTRKSPPE

SEQ ID NO: 51715 - protein, 150 aa, Homo sapiens
  MOD_RES (1)..(1): Any amino acid
XGNDFQWCFSQVKGAIDEDVAEADIISTVEFNYSGDLLATGDKGGRVVIFQREQENKSRPHSRGEYNVYSTFQSHEPEFDYLKSLEIEEKINKIRWLPQQNAAHFLLSTNDKTIKLWKISERDKRAEGYNLKDEDGRLRDPFRITALRMT

SEQ ID NO: 51716 - protein, 490 aa, Homo sapiens
MDVAIEFSVEEWQCLDTAQQNLYRNVMLENYRNLVFLGIAVSKPDLITCLEQGKEPWNMERHEMVAKPPGMCCYFAQDLRPEQSIKASLQRIILRKYEKCGHHNLQLKKGYKSVDEYKVHKGSYNGFNQCLTTTQSKIFQCDKYVKDFHKFSNSNRHKTEKNPFKCKECGKSFCVLSHLTQHKRIHTTVNSYKLEECGKAFNVSSTLSQHKRIHTGQKHYKCEECGIAFNKSSHLNTHKIIHTGEKSYKREECGKAFNISSHLTTHKIIHTGENAYKCKECGKAFNQSSTLTRHKIIHAGEKPYICEHCGRAFNQSSNLTKHKRIHTGDKPYKCEECGKAFNVSSTLTQHKRIHTGEKPYKCEECGKAFNVSSTLTQHKRIHTGEKPYKCEECGKAFNTSSHLTTHKRIHTGEKPYKCEECGKAFNQFSQLTTHKIIHTGEKPYKCKECGKAFKRSSNLTEHRIIHTGEKPYKCEECGKAFNLSSHLTTH

SEQ ID NO: 51717 - protein, 299 aa, Homo sapiens [sequence omitted]

SEQ ID NO: 51718 - protein, 406 aa, Homo sapiens
MAAEARVSRWYFGGLASCGAACCTHPLDLLKVHLQTQQEVKLRMTGMALRVVRTDGILALYSGLSASLCRQMTYSLTRFAIYETVRDRVAKGSQGPLPFHEKVLLGSVSGLAGGFVGTPADLVNVRMQNDVKLPQGQRRNYAHALDGLYRVAREEGLRRLFSGATMASSRGALVTVGQLYCRWMCHVPVPAPGCAEDSPDELQGGVSGRFPLRRGDSEARASGLLQGPRPSWHPPHPPHRAHFCVSGTATQKLWHQSAILTSRGNGWAARPDTLGSSKESQAQHLLLGPRPPWPWPPVLRSRPLLSPHLLAELLLASSPLSCSCTTPALATRLSRLGTAWPCPSPAGSSSGEQGLPEADFSPLLGQGRGIIPASCPRCPKQHLPALSIEDLGGRVWVQPGCCSPKC

SEQ ID NO: 51719 - protein, 103 aa, Homo sapiens
  MOD_RES (1)..(1): Any amino acid
XEITSSPQGLDNPALLRDMLLANPHELSLLKERNPPLAEALLSGDLEKFSRVLVEQQQDRARREQERIRLFSADPFDLEAQAKIEEDIRCPDDYHEPSLCRKV

SEQ ID NO: 51720 - protein, 75 aa, Homo sapiens
MASYPSGSGKPKAKYPFKKRASLQASTAAPDDWCKVSTVLRVFSVPRSVPSRKGVPWVGPFLALFGSAIGQLIRI

SEQ ID NO: 51721 - protein, 68 aa, Homo sapiens
MKYITSLNEDSTVHGFLVQLPLDSENSINTEEVINAIAPEKDVDGLTSINAGKLARGDLNDCFIPCTP

SEQ ID NO: 51722 - protein, 981 aa, Homo sapiens
MAADEGSAEKQAGEAHMAADGETNGSCENSDASSHANAAKHTQDSARVNPQDGTNTLTRIAENGVSERDSEAAKQNHVTADDFVQTSVIGSNGYILNKPALQAQPLRTTSTLASSLPGHAAKTLPGGAGKGRTPSAFPQTPAAPPATLGEGSADTEDRKLPAPGADVKVHRARKTMPKSVVGLHAASKDPREVREARDHKEPKEEINKNISDFGRQQLLPPFPSLHQSLPQNQCYMATTKSQTAAAVSRKKKRRMGTYSLVPKKKTKVLKQRTVIEMFKSITHSTVGSKGEKDLGASSLHVNGESLEMDSDEDDSEELEEDDGHGAEQAAAFPTEDSRTSKESMSEADRAQKMDGESEEEQESVDTGEEEEGGDESDLSSESSIKKKFLKRKGKTDSPWIKPARKRRRRSRKKPSGALGSESYKSSAGSAEQTAPGDSTGYMEVSLDSLDLRVKGILSSQAEGLANGPDVLETDGLQEVPLCSCRMETPKSREITTLANNQCMATESVDHELGRCTNSVVKYELMRPSNKAPLLVLCEDHRGRMVKHQCCPGCGYFCTAGNFMECQPESSISHRFHKDCASRVNNASYCPHCGEESSKAKEVTIAKADTTSTVTPVPGQEKGSALEGRADTTTGSAAGPPLSEDDKLQGAASHVPEGFDPTGPAGLGRPTPGLSQGPGKETLESALIALDSEKPKKLRFHPKQLYFSARQGELQKVLLMLVDGIDPNFKMEHQNKRSPLHAAAEAGHVDICHMLVQAGANIDTCSEDQRTPLMEAAENNHLEAVKYLIKAGALVDPKDAEGSTCLHLAAKKGHYEVVQYLLSNGQMDVNCQDDGGWTPMIWATEYKHVDLVKLLLSKGSDINIRDNEENICLHWAAFSGCVDIAEILLAAKCDLHAVNIHGDSPLHIAARENRYDCVVLFLSRDSDVTLKNKEGETPLQCASLNSQVWSALQMSKALQDSAPDRPSPVERIVSRDIARGYE

SEQ ID NO: 51723 - protein, 295 aa, Homo sapiens
  MOD_RES (1)..(1): Any amino acid
XTKLATGSKDTTVIIWQVDPDTHLLKLLKTLEGHAYGVSYIAWSPDDNYLVACGPDDCSELWLWNVQTGELRTKMSQSHEDSLTSVAWNPDGKRFVTGGQRGQFYQCDLDGNLLDSWEGVRVQCLWCLSDGKTVLASDTHQRIRGYNFEDLTDRNIVQEDHPIMSFTISKNGRLALLNVATQGVHLWDLQDRVLVRKYQGVTQGFYTIHSCFGGHNEDFIASGSEDHKVYIWHKRSELPIAELTGHTRTVNCVSWNPQIPSMMASASDDGTVRIWGPAPFIDHQNIEEECSSMDS

SEQ ID NO: 51724 - protein, 210 aa, Homo sapiens
  MOD_RES (1)..(1): Any amino acid
XGSPLGEVVEQGITRVRNATDAVGIVLKELKRQSSLGMFHLLVAVDGINALWGRTTLKREDKSPIAPEELALVHNLRKMMKNDWHGGAIVSALSQTGSLFKPRKAYLPQELLGKGFTTWPRLVWNSWAQAICPSQPPKVLGLQEGFDALDPFIPILVSNYNPKEFESCIQYYLENNWLQHEKAPTEEGKKELLFLSNANPSLLERHCAYL

SEQ ID NO: 51725 - protein, 112 aa, Homo sapiens
MSLTARVSCSMLSCFGEEGPPSLEYIQAKDLFPPKELVKEEENLQVPFTVLQGEGVEFLGRAADALIAISNYRLHIKFKDSVINVPLRMIDSVESRDMFQLHISCKDSKVVR

SEQ ID NO: 51726 - protein, 48 aa, Homo sapiens
MAGTALKRLMAEYKQLTLNPPEGIVAGPMNEENFFEWEALIISALLGP

SEQ ID NO: 51727 - protein, 117 aa, Homo sapiens
MDWNWRILFLVVIAAGAQSQVQLVQSGAEVKKPGASVKVSCKASGYTITSYCMHWVHQVHAQGLEWMGLVCPSDGSTSYAQKFQARVTITRDTSMSTAYMELSSLRSEDTAMYYCVR

SEQ ID NO: 51728 - protein, 46 aa, Homo sapiens
  MOD_RES (1)..(1): Any amino acid
XTVVELKYTGNASALFILPDQDKMEEVEAMLLPETLKRWRDSLEFR

SEQ ID NO: 51729 - protein, 219 aa, Homo sapiens
MANSMNGRNPGGRGGNPRKGRILGIIDAIQDAVGPPKQAAADRRTVEKTWKLMDKVVRLCQNPKLQLKNSPPYILDILPDTYQHLRLILSKYDDNQKLAQLSENEYFKIYIDSLMKKSKRAIRLFKEGKERMYEEQSQDRRNLTKLSLIFSHMLAEIKAIFPNGQFQGDNFRITKADAAEFWRKFFGDKTIVPWKVFRQCLHEVHQISSGLEAMALKST

SEQ ID NO: 51730 - protein, 399 aa, Homo sapiens
MPSPLGPPCLPVMDPETTLEEPETARLRFRGFCYQEVAGPREALARLRELCCQWLQPEAHSKEQMLEMLVLEQFLGTLPPEIQAWVRGQRPGSPEEAAALVEGLQHDPGQLLGWITAHVLKQEVLPAAQKTEEPLGSPHPSGTVESPGEGPQDTRIEGSVQLSCSVKEEPNVDGQEVAPSSPPLAAQSPEGNHGHQEPASTSFHPPRIQEEWGLLDRSQKELYWDAMLEKYGTVVSLGLPPHQPEAQAQSELGMLLTGTGVCRSLRSETRLEPAATPRKPYTCEQCGRGFDWKSVFVIHHRTHTSGPGVQSPGLATGESTEKPPQGEVAFPHHPRRSLTGPRSYPCEECGCSFSWKSQLVIHRKSHTGQRRHFCSDCGRAFDWKSQLVIHRKGHRPEVP

SEQ ID NO: 51731 - protein, 94 aa, Homo sapiens
MDARWWAVVVLAAFPSLGAGGETPEAPPESWTQLWFFRFVVNAAGYASFMVPGYLLVQYFRRKNYLETGVLSDLGCAAGKSDDPQLWGHSHITG

SEQ ID NO: 51732 - protein, 113 aa, Homo sapiens
MPSRLRKTRKLRGHVSHGHGRIGKHRKHPGGRGNAGGLHHHRINFDKYEQTRVNAAKNKTGAAPIIDVVRSGYYKVLGKGKLPKQPVIVKAKFFSRRAEEKIKSVGGACVLVA

SEQ ID NO: 51733 - protein, 75 aa, Homo sapiens
MHHRMNEMNLSPVGMEQLTSSSVSNALPVSGSHLGLAASPTHSAIPAPGLPVAIPNLGPSLSSLPSALSLMLPMG

SEQ ID NO: 51734 - protein, 312 aa, Homo sapiens
MAEDVSSAAPSPRGCADGRDADPTEEQMAETERNDEEQFECQELLECQVQVGAPEEEEEEEEDAGLVAEAEAVAAGWMLDFLCLSLCRAFRDGRSEDFRRTRNSAEAIIHGLSSLTACQLRTIYICQFLTRIAAGKTLDAQFENDERITPLESALMIWGSIEKEHDKLHEEIQNLIKIQAIAVCMENGNFKEAEEVFERIFGDPNSHMPFKSKLLMIISQKDTFHSFFQHFSYNHMMEKIKSYVNYVLSEKSSTFLMKAAAKVVESKRTRTITSQDKPSGNDVEMETEANLDTRKRIAVTDNTTCPEGRKSA

SEQ ID NO: 51735 - protein, 71 aa, Homo sapiens
MKPHRIRMTHNLLLNYGLYRKMEIYRPHKATAEEMTKYHSDEYIKFLRSIRPDNMSEYSKQMQRFNVGEDC

SEQ ID NO: 51736 - protein, 147 aa, Homo sapiens
MSQEGDYGRWTISSSDESEEEKPKPDKPSTSSLLCARQGAANEPRYTCSEAQKAAHKRKISPVKFSNTDSVLPPKRQKSGSQEDLGWCLSSSDDELQPEMPQKQAEKVVIKKEKDISAPNDGTAQRTENHGAPACHRLKEEEDEYET

SEQ ID NO: 51737 - protein, 438 aa, Homo sapiens
MSLTVVSMACVGFFLLQGAWPLMGGQDKPFLSARPSTVVPRGGHVALQCHYRRGFNNFMLYKEDRSHVPIFHGRIFQESFIMGPVTPAHAGTYRCRGSRPHSLTGWSTPSNPLVIMVTGNHRKPSLLAHPGPLLKSGETVILQCWSDVMFEHFFLHREGISEDPSRLVGQIHDGVSKANFSIGPLMPVLAGTYRCYGSVPHSPYQLSAPSDPLDIVITGLYEKPSLSAQPGPTVQAGENVTLSCSSWSSYDIYHLSREGEAHERRLRAVPKVNRTFQADFPLGPATHGGTYRCFGSFRALPCVWSNSSDPLLVSVTGICRHLHVLIGTSVVIFLFILLLFFLLYRWCSNKKNAAVMDQEPAGDRTVNRQDSDEQDPQEVTYAQLDHCVFIQRKISRPSQRPKTPLTDTSVYTELPNAEPRSKVVSCPRAPQSGLEGVF

SEQ ID NO: 51738 - protein, 389 aa, Homo sapiens
MAAPVVAPPGVVVSRANKRSGAGPGGSGGGGARGAEEEPPPPLQAVLVADSFDRRFFPISKDQPRVLLPLANVALIDYTLEFLTATGVQETFVFCCWKAAQIKEHLLKSKWCRPTSLNVVRIITSELYRSLGDVLRDVDAKALVRSDFLLVYGDVISNINITRALEEHRLRRKLEKNVSVMTMIFKESSPSHPTRCHEDNVVVAVDSTTNRVLHFQKTQGLRRFAFPLSLFQGSSDGVEVRYDLLDCHISICSPQVAQLFTDNFDYQTRDDFVRGLLVNEEILGNQIHMHVTAKEYGARVSNLHMYSAVCADVIRRWVYPLTPEANFTDSTTQSCTHSRHNIYRGPEVSLGHGSILEENVLLGSGTVIGSNCFITNSVIGPGCHIGEHR

SEQ ID NO: 51739 - protein, 209 aa, Homo sapiens
MDLKALLSSLNDFASLSFAESWDNVGLLVEPSPPHTVNTLFLTNDLTEEVMEEVLQKKADLILSYHPPIFRPMKRITWNTWKERLVIRALENRVGIYSPHTAYDAAPQGVNNWLAKGLGACTSRPIHPSKAPNYPTEGNHRVEFNVNYTQDLDKVMSAVKGIDGVSVTSFSARTGNEEQTRINLNCTQKALMQVVDFLSRNKQLYQKTE

SEQ ID NO: 51740 - protein, 459 aa, Homo sapiens
MGKEKTHINIVVIGHVDSGKSTTTGHLIYKCGGIDKRTIEKFEKEAAEGSFKYAWVLDKLKAERERGITIDISLWKFETSKYYVTIIDAPGHRDFIKNMITGTSQADCAVLIVAAGVGEFEAGISKNGQTREHALLAYTLGVKQLIVGVNKMDSTEPPYSQKRYEEIVKEVSTYIKKIGYNPDTVAFVPISGWNGDNMLEPSANMPWFKGWKVTRKDGNASGTTLLEALDCILPPTRPTDKPLRLPLQDVYKIGGIGTVPVGRVETGVLKPGMVVTFAPVNVTTEVKSVEMHHEALSEALPGDNVGFNVKNVSVKDVRRGNVAGDSKNDPPMEAAGFTAQVIILNHPGQISAGYAPVLDCHTAHIACKFAELKEKIDRRSGKKLEDGPKFLKSGDAAIVDMVPGKPMCVESFSDYPPLGRFAVRDMRQTVAVGVIKAVDKKAAGAGKVTKSAQKAQKAK

SEQ ID NO: 51741 - protein, 156 aa, Homo sapiens
MSKCARKKYIKTNPRQMTMETVESQHDGSITASLTESKSAHVQTQTGQNSIPALAQVAAIAETDESAESEGVIDSHKRREILSRRPSYRKILNELSSDVPGVPKIEEERSEEEGTPPSIATMAVPTSIYQTSTGQYIAIAQGGTIQISNPGSDGVQ

SEQ ID NO: 51742 - protein, 166 aa, Homo sapiens
MFPDYGYGWFHTSLILEGKNYLQWLTERLTERGVKFFQRKVESFEEVAREGADVIVNCTGVWAGALQRDPLLQPGRGQIMKVDAPWMKHFILTHDPERGIYNSPYIIPGTQTVTLGGIFQLGNWSELNNIQDHNTIWEGCCRLEPTLKNARIIGERTGFRPVRPQI

SEQ ID NO: 51743 - protein, 46 aa, Homo sapiens
MKSLKKDSRLRITPTRLLEASENVKGWHAGGRIPGLDEVQKSQERV

SEQ ID NO: 51744 - protein, 69 aa, Homo sapiens
  MOD_RES (1)..(1): Any amino acid
XDARVLGPGVSYVVRYMGCIEVLRSMRSLDFNTRTQVTSSCHHSGCRQDLDTDPASGSGPPARCSNPHI

SEQ ID NO: 51745 - protein, 609 aa, Homo sapiens
MKEQDLCNKIMAKILENYNTLFEVEYTENDHLRCENLARLIIVKEVYYKNSLPILLTRGLERDMPKPPPKTKNMESLNSTRSHERTGPDDFEWMSDERKGNEKDGGHTQHFESPTMKIQEHPSLSDTKQQRNQDAGDQEESFVSEVPQSDLTALCDEKNWEEPIPAFSSWQRENSDSDEAHLSPQAGRLIRQLLDEDSDPMLSPRFYAYGQSRQYLDDTEVPPSPPNSHSFMRRRSSSLGSYDDEQEDLTPAQLTRRIQSLKKKIRKFEDRFEEEKKYRPSHSDKAANPEVLKWTNDLAKFRRQLKESKLKISEEDLTPRMRQRSNTLPKSFGSQLEKEDEKKQELVDKAIKPSVEATLESIQRKLQEKRAESSRPEDIKDMTKDQIANEKVALQKALLYYESIHGRPVTKNERQVMKPLYDRYRLVKQILSRANTIPIIGSPSSKRRSPLLQPIIEGETASFFKEIKEEEEGSEDDSNVKPDFMVTLKTDFSARCFLDQFEDDADGFISPMDDKIPSKCSQDTGLSNLHAASIPELLEHLQEMREEKKRIRKKLRDFEDNFFRQNGRNVQKEDRTPMAEEYSEYKHIKAKLRLLEVLISKRDTDSKSM

SEQ ID NO: 51746 - protein, 452 aa, Homo sapiens
  MOD_RES (1)..(1): Any amino acid
XTFIDLSNKMPSLLFGSEIFPVSFHVKSSSSDCTTESSRTFPEHCAPARLALGEALQCPSQPPKWTFSFFLSHGCPGMATFREDTGVHSQTHTQAPPQPPAPLQDYGGTAIVQTRADCSVLGLHTLLALCSPGCYRIWTKKRSFSSHMPTMQRLFMTQFTQGLKGLRSPASIADKVFCSLPYSVGRVLSIWSQHGPSVCSFEISSLHSPHCKRQPSLGTTSSHTMLPYVPLPGMEATYNTSGSQTRLEPPFPALVPKSCLVAESAVSKLLLSASEFQVRGLDELDGVKAACPCPQSSPPEQKEAEPEKRPKKVSQIRIRKTIPRPDPNLTPMGLPRPKRLKKKEFSLEEIYTNKNYKSPPANRDLDSSCPSTDSETGHFLVFGYAQRQAQPHPLLASRRLIGCSSPEGRGHPRSYPYWRRLLVLCWYLPGWRAGRVTWLRLATWAGRGDSSL

SEQ ID NO: 51747 - protein, 237 aa, Homo sapiens
SLTWFTTIVPLVLVITMTAVKDATDDYFRHKSDNQVNNRQSEVLINSKLQNEKWMNVKVGDIIKLENNQFVAADLLLLSSSEPHGLCYVETAELDGETNLKVRHALSVTSELGADISRLAGFDGIVVCEVPNNKLDKFMGILSWKDSKHSLNNEKIILRGCILRNTSWCFGMVIFAGPDTKLMQNSGKTKFKRTSIDRLMNTLVLWEIQSGRVKLGTNSELSSFGMKERRALCSPDS

SEQ ID NO: 51748 - protein, 97 aa, Homo sapiens
MSVILLTPDELTNSSETRLSLEDLFRKDFVLHDPEARWINDTDVVYKSENGHVIKLNIETNATTLLLENTTFVTFKASRHSVSPDLKYVLLAYDVKQ

SEQ ID NO: 51749 - protein, 61 aa, Homo sapiens
MGYDVTRFQGDVDEDLICPICSGVLEEPVQVISLPALPDQSQLYHPGASMRRSSRLPGTSL

SEQ ID NO: 51750 - protein, 106 aa, Homo sapiens
  MOD_RES (1)..(1): Any amino acid
XDIAPSEEAINDRTVNYVLKCREVRSRASIAVAPFDHDSLYLGASNSLPGDPASCSVLGSLNLHLYRDPALLGLRCPLYPSFPEEAALEAEAELGGQPSLISLPSC

SEQ ID NO: 51751 - protein, 306 aa, Homo sapiens
MPPSGLRLLPLLLPLLWLLVLTPGRPAAGLSTCKTIDMELVKRKRIEAIRGQILSKLRLASPPSQGEVPPGPLPEAVLALYNSTRDRVAGESAEPEPEPEADYYAKEVTRVLMVETHNEIYDKFKQSTHSIYMFFNTSELREAVPEPVLLSRAELRLLRLKLKVEQHVELYQKYSNNSWRYLSNRLLAPSDSPEWLSFDVTGVVRQWLSRGAPRRRTAACGSCTLTSARTSAGSGSTSPRATMPTSASGPAPTFGAWTRSTARSWPCTTSITRAPRRRRAACRRRWSRCPSCTTWAASPRWSSCPT

SEQ ID NO: 51752 - protein, 50 aa, Homo sapiens
MALSAETESHIYRALRTASGAAAHLVALGFTIFVAVLARPGSTPGILHHQ

SEQ ID NO: 51753 - protein, 68 aa, Homo sapiens
MKIWTSEHVFDHPWETVTTAAMQKYPNPMNPSVVGVDVLDRHIDPSGKLHSHRLLSTEWGLPSIVKSF

SEQ ID NO: 51754 - protein, 25 aa, Homo sapiens
MSRVPAFLSAAEVEEHLRSSSLLIP

SEQ ID NO: 51755 - protein, 399 aa, Homo sapiens
  MOD_RES (1)..(1): Any amino acid
XPLVLLLAVLLLAVLCKVYLGLFSGSSPNPFSEDVKRPPAPLVTDKEARKKVLKQGVTPNHSAFSMHALLVNHYMKGGFYPRGGSSEIAFHTIPVIQRAGGAVLTKATVQSVLLDSAGKACGVSVKKGHELVNIYCPIVVSNAGLFNTYEHLLPGNARCLPGVKQQLGTVRPGLGMTSVFICLRGTKEDLHLPSTNYYVYYDTDMDQAMERYVSMPREEAAEHIPLLFFAFPSAKDPTWEDRFPGRSTMIMLIPTAYEWFEEWQAELKGKRGSDYETFKNSFVEASMSVVLKLFPQLEGKVESVTAGSPLTNQFYLAAPRGACYGADHDLGRLHPCVMASLRAQSPIPNLYLTGQDIFTCGLVGALQGALLCSSAILKRNLYSDLKNLDSRIRAQKKKN

SEQ ID NO: 51756 - protein, 35 aa, Homo sapiens
  MOD_RES (1)..(1): Any amino acid
XSPEPMPLERFGRRFPLAPGRRLEELSLPRGSPTT

SEQ ID NO: 51757 - protein, 851 aa, Homo sapiens
MQRSIMSFFHPKKEGKAKKPEKEASNSSRETEPPPKAALKEWNGVVSESDSPVKRPGRKAARVLGSEGEEEDEALSPAKGQKPALDCSQVSPPRPATSPENNASLSDTSPMDSSPSGIPKRRTEAETPTESVSEPEVATKQELQEEEEQTKPPRRAPKTLSSFFTPRKPAVKKEVKEEEPGAPGKEGAAEGPLDPSGYNPAKNNYHPVEDACWKPGQKVPYLAVARTFEKIEEVSARLRMVETLSNLLRSVVALSPPDLLPVLYLSLNHLGPPQQGLELGVGDGVLLKAVAQATGRQLESVRAEAAEKGDVGLVAENSRSTQRLMLPPPPLTASGVFSKFRDIARLTGSASTAKKIDIIKGLFVACRHSEARFIARSLSGRLRLGLAEQSVLAALSQAVSLTPPGQEFPPAMVDAGKGKTAEARKTWLEEQGMILKQTFCEVPDLDRIIPVLLEHGLERLPEHCKLSPGIPLKPMLAHPTRGISEVLKRFEEAAFTCEYKYDGQRAQIHALEGGEVKIFSRNQEDNTGKYPDIISRIPKIKLPSVTSFILDTEAVAWDREKKQIQPFQVLTTRKRKEVDASEIQVQVCLYAFDLIYLNGESLVREPLSRRRQLLRENFVETEGEFVFATSLDTKDIEQIAEFLEQSVKDSCEGLMVKTLDVDATYEIAKRSHNWLKLKKDYLDGVGDTLDLVVIGAYLGRGKRAGRYGGFLLASYDEDSEELQAICKLGTGFSDEELEEHHQSLKALVLPSPRPYVRIDGAVIPDHWLDPSAVWEVKCADLSLSPIYPAARGLVDSDKGISLRFPRFIRVREDKQPEQATTSAQVACLYRKQSQIQNQQGEDSGSDPEDTY

SEQ ID NO: 51758 - protein, 285 aa, Homo sapiens
MSDLDSEVLPLPPRYRFRDLLLGDPSFQNDDRVQVEFYVNENTFKERLKLFFIKNQRSSLRIRLFNFSLKLLTCLLYIVRVLLDDPALGIGCWGCPKQNYSFNDSSSEINWAPILWVERKMTLWAIQVIVAIISFLETMLLIYLSYKGNIWEQIFRVSFVLEMINTLPFIITIFWPPLRNLFIPVFLNCWLAKHALENMINDFHRAILRTQSAMFNQVLILFCTLLCLVFTGTCGIQHLERAGENLSLLTSFYFCIVTFSTVGYGDVTPKIWPSQLLVVIMICVA

SEQ ID NO: 51759 - protein, 147 aa, Homo sapiens
MFPAGPPSHSLLRLPLLQLLLLVVQAVGRGLGRASPAGGPLEDVVIERYHIPRACPREVQMGDFVRYHYNGTFEDGKKFDSSGAHSTGCHPLLRCGSAGCVEQGRHRAGEHIAAPAPLPPHGPGRRLCPLPLQWHPAGRHLLRHQLQ

SEQ ID NO: 51760 - protein, 79 aa, Homo sapiens
MARRPRHSIYSSDEDDEDFEMCDHDYDGLLPKSGKRHLGKTRWTREENRTDVQCQHRWQKVLNPELIKGPWTKEEDQRN

SEQ ID NO: 51761 - protein, 157 aa, Homo sapiens
MVGILSIVAQTAFLSILMRSLGNKNTVLLGLGFQMLQLAWYGFGSQAWMMWAAGTVAAMSSITFPAISALVSRNAESDQQGFRSCPGDHNWNKRTMQWPGPALYGFIFYMFHVELTELGPKLNSNNVPLQGSCHPRPAVFIWGMYSPYVFSGCLIHS

SEQ ID NO: 51762 - protein, 293 aa, Homo sapiens
  MOD_RES (1)..(1): Any amino acid
XASMFYEVSTRTSSSFAAAMARLGGAVLSFSEATSSVQKGESLADSVQTMSCYADVVVLRHPQPGAVELAAKHCRRPVINAGDGVGEHPTQALLDIFTIREELGTVNGMTITMVGDLKHGRTVHSLACLLTQYRVSLRYVAPPSLRMPPTVRAFVASRGTKQVRPSQPCLEAMEMWVGQSEPSAASTMALLTLQEEFESIEEALPDTDVLYMTRIQKERFGSTQEYEACFGQFILTPHIMTRAKKKMVVMHPMPRVNEISVEVDSDPRAAYFRQAENGMYIRMALLATVLGRF

SEQ ID NO: 51763 - protein, 462 aa, Homo sapiens
  MOD_RES (335)..(335): Any amino acid
MEAAHFFEGTEKLLEVWFSRQQPDANQGSGDLRTIPRSEWDILLKDVQCSIISVTKTDKQEAYVLSESSMFVSKRRFILKTCGTTLLLKALVPLLKLARDYSGFDSIQSFFYSRKNFMKPSHQGYPHRNFQEEIEFLNAIFPNGAAYCMGRMNSDCWYLYTLDFPESRVISQPDQTLEILMSELDPAVMDQFYMKDGVTAKDVTRESGIRDLIPGSVIDATMFNPCGYSMNGMKSDGTYWTIHITPEPEFSYVSFETNLSQTSYDDLIRKVVEVFKPGKFVTTLFVNQSSKCRTVLASPQKIEGFKRLDCQSAMFNDYNFVFTSFAKKQQQQQSXLRKMKKKRKKRTHVEGGGCFLDVDAGGSAFHNHHCVVAESPRCNDSVIILNCMHYYIKELDILHECSLLCLGILCHSCCEIEVHVEKTFYYMKLYNTCESNSIWFMHSVIFLQVSSKIPHRQGFRPH

SEQ ID NO: 51764 - protein, 72 aa, Homo sapiens
MASGILVNVKEEVTCPICLELLTQPLSLDCGHSFCQACLTANHKKSMLDKGESSCPVCRISYQPENIRPNRH

SEQ ID NO: 51765 - protein, 103 aa, Homo sapiens
MLENYGNVASLGFPLLKPAVISQLEGGIDIQTDNDLTKEMYEGKENVSFELQRDFSQETDFSEASLLEKQQEVHSAGNIKKEKSNTIDGTVKDETSPVEECFF

SEQ ID NO: 51766 - protein, 147 aa, Homo sapiens
MRPWWSPVKIQGQNKEMLAAACQMFLGKTEAEIAHIALETLEGHQRAIMAHMTVEEIYKDRQKFSEQVFKVASSDLVNMGISVVSYTLKDIHDDQDYLHSLGKARTAQVQKDARIGEAEAKRDAGIREAKAKQEKVSAQYLSEIEMA

SEQ ID NO: 51767 - protein, 254 aa, Homo sapiens
MAKPCGVRLSGEARKQVEVFRQNLFQEAEEFLYRFLPQKIIYLNQLLQEDSLNVADLTSLRAPLDIPIPDPPPKDDEMETDKQEKKEGKRDKRKGLNPLFLTVHKCGFLPGNEKVLSLLALVKPEVWTLKEKCILVITWIQHLIPKIEDGNDFGVAIQEKVLERVNAVKTKVEAFQTTISKYFSERGDAVAKASKETHVMDYRALVHERDEAAYGELRAMVLDLRAFYAELYHIISSNLEKIVNPKGEEKPSMY

SEQ ID NO: 51768 - protein, 1182 aa, Homo sapiens
MVKLANPLYTEWILEAIQKIKKQKQRPSEERICHAVSTSHGLDKKTVSEQLELSVQDGSVLKVTNKGLASYKDPDNPGRFSSVKPGTFPKSAKGSRGSCNDLRNVDWNKLLRRAIEGLEEPNGSSLKNIEKYLRSQSDLTSTTNNPAFQQRLRLGAKRAVNNGRLLKDGPQYRVNYGSLDGKGAPQYPSAFPSSLPPVSLLPHEKDQPRADPIPICSFCLGTKESNREKKPEELLSCADCGSSGHPSCLKFCPELTTNVKALRWQCIECKTCSACRVQGRNADNMLFCDSCDRGFHMECCDPPLSRMPKGMWICQVCRPKKKGRKLLHEKAAQIKRRYAKPIGRPKNKLKQRLLSVTSDEGSMNAFTGRGSPGRGQKTKVCTTPSSGHAASGKDSSSRLAVTDPTRPGATTKITTTSTYISASTLKVNKKTKGLIDGLTKFFTPSPDGRRSRGEIIDFSKHYRPRKKVSQKQSCTSHVLATDTEIKINIKQESADVNVIGNKDVVTEEDLDVFKQAQELSWEKIECESGVEDCGRYPSVIEFGKYEIQTWYSSPYPQEYARLPKLYLCEFCLKYMKSKNILLRHSKKCGWFHPPANEIYRRKDLSVFEVDGNMSKIYCQNLCLLAKLFLDHKTLYYDVEPFLFYVLTKNDEKGCHLVGYFSKEKLCQQKYNVSCIMIMPQHQRQGFGRFLIDFSYLLSRREGQAGSPEKPLSDLGRLSYLAYWKSVILEYLYHHHERHISIKAISRATGMCPHDIATTLQHLHMIDKRDGRFVIIRREKLILSHMEKLKTCSRANELDPDSLRWTPILISNAAVSEEEREAEKEAERLMEQASCWEKEEQEILSTRANSRQSPAKVQSKNKYLHSPESRPVTGERGQLLELSKESSEEEEEEEDEEEEEEEEEEEEDEEEEEEEEEEEEEENIQSSPPRLTKPQSVAIKRKRPFVLKKKRGRKRRRINSSVTTETISETTEVLNEPFDNSDEERPMPQLEPTCEIEVEEDGRKPVLRKAFQHQPGKKRQTEEEEGKDNHCFKNADPCRNNMNDDSSNLKEGSKDNPEPLKCKQVWPKGTKRGLSKWRQNKERKTGFKLNLYTPPETPMEPDEQVTVEEQKETSEGKTSPSPIRIEEEVKETGEALLPQEENRREETCAPVSPNTSPGEKPEDDLIKPEEEEEEEEEEEEEEE

SEQ ID NO: 51769 - protein, 152 aa, Homo sapiens
MDNRQNVTPALIFAITVATIGSFQFGYNTGVINAPETIIKEFINKTLTDKANAPPSEVLLTNLWSLSVAIFSVGGMIGSFSVGLFVNRFGRRNSMLIVNLLAATGGCLMGLCKIAESVEMLILGRLVIGLFCGLCTGFVPMYIGEISPTALR

SEQ ID NO: 51770 - protein, 362 aa, Homo sapiens
MALRLLKLAATSASARVVAAGAQRVRGIHSSVQCKLRYGMWHFLLGDKASKRLTERSRVITVDGNICTGKGKLAKEIAEKLGFKHFPEAGIHYPDSTTGDGKPLATDYNGNCSLEKFYDDPRSNDGNSYRLQSWLYSSRLLQYSDALEHLLTTGQGVVLERSIFSDFVFLEAMYNQGFIRKQCVDHYNEVKSVTICDYLPPHLVIYIDVPVPEVQRRIQKKGDPHEMKITSAYLQDIENAYKKTFLPEMSEKCEVLQYSAREAQDSKKVVEDIEYLKFDKGPWLKQDNRTLYHLRLLVQDKFEVLNYTSIPIFLPEVTIGAHQTDRVLHQFREVFQESEAKRLDVEEVCWKKTPLKDRGEEV

SEQ ID NO: 51771 - protein, 105 aa, Homo sapiens
MWRGRAGALLRVWGFWPTGVPRRRPLSCDAASQAGSNYPRCWNCGGPWGPGREDRFFCPQCRALQAPDPTRDYFSLMDCNRSFRVDTAKLQHRLKRTSQRSIRPW

SEQ ID NO: 51772 - protein, 134 aa, Homo sapiens
  MOD_RES (1)..(1): Any amino acid
XNKSTNVIVDSGGGLLKPTVASQNQNLPVAKLPPSKLVSDDLDSSLANLVGNLGIGNGTTKNDVNWSQPGEKKLTGGSNWQPKVAPTTAWNAATMPPQMGSVPVMTQPTLIYSQPVMRPPNPFGPVSGAQIQFM

SEQ ID NO: 51773 - protein, 125 aa, Homo sapiens
MCLQDLTAVESEFLSQFNMTFPSDSMSEDCLYLSIYTPAHSHEGSNLPVMVWIHGGALVFGMASLYDGSMLAALENVVVVIIQYRLGVLGFFSTGDKHATGNWGYLDQVAALRWVQQNIAHFGGN

SEQ ID NO: 51774 - protein, 93 aa, Homo sapiens
  MOD_RES (1)..(1): Any amino acid
XSSANLGSGCEEKRHEGSSSESVPPGTTISRVKLLDTMVDTFLQKLVAAGSSPLLHWDGSAGPRLPSGGQSVKQAFSWAACRLPQGRKLPEIH

SEQ ID NO: 51775 - protein, 263 aa, Homo sapiens
MMQPSLDIKPFMSFPVDSSSAVGLFPNFNTMDPVQKAVINHTFGVSIPPKKKQVISCNVCQLRFNSDSQAEAHYKGSKHAKKVKALDATKNKPKMVPSKDSAKANPSCSITPITGNNSDKSEDKGKLKASSSSQPSSSESGSFLLKSGTTPLPPGAATSPSKSTNGAPGTVVESEEEKAKKLLYCSLCKVAVNSLSQLEAHNTGSKHKTMVEARNGAGPIKSYPRPGSRLKMQNGSKGSGLQNKTFHCEICDVHVNSEIQLKQ

SEQ ID NO: 51776 - protein, 126 aa, Homo sapiens
MTTRQATKDPLLRGVSPTPSKIPVRSQKRTPFPTVTSCAVDQENQDPRRWVQKPPLNIQRPLVDSAGPRPKARHQAETSQRLVGISQPRNPLEELRPSPRGQNVGPGPPAQTGTCWSHGNTASMAE

SEQ ID NO: 51777 - protein, 76 aa, Homo sapiens
MESCCTNQAGLELLASRDPLTTLASQITRITDLKLSTEALLPTLRVIYQSRKRRFWDLMMMSKKILMIIVKEVIIL

SEQ ID NO: 51778 - protein, 284 aa, Homo sapiens
MRCSPGGVWLALAASLLHVSLQGEFQRKLYKELVKNYNPLERPVANDSQPLTVYFSLSLLQIMDVDEKNQVLTTNIWLQMSWTDHYLQWNVSEYPGVKTVRFPDGQIWKPDILLYNSADERFDATFHTNVLVNSSGHCQYLPPGIFKSSCYIDVRWFPFDVQHCKLKFGSWSYGGWSLDLQMQEADISGYIPNGEWDLVVTMRRRTLYYGLNLLIPCVLISALALLVFLLPADSGEKISLGITVLLSLTVFMLLVAEIMPATSDSVPLIAQYFASTMIIVGLSV

SEQ ID NO: 51779 - protein, 991 aa, Homo sapiens
MSVLGEYERHCDSINSDFGSESGGCGDSSPGPSASQGPRAGGGAAEQEELHYIPIRVLGRGAFGEATLYRRTEDDSLVVWKEVDLTRLSEKERRDALNEIVILALLQHDNIIAYYNHFMDNTTLLIELEYCNGGNLYDKILRQKDKLFEEEMVVWYLFQIVSAVSCIHKAGILHRDIKTLNIFLTKANLIKLGDYGLAKKLNSEYSMAETLVGTPYYMSPELCQGVKYNFKSDIWAVGCVIFELLTLKRTFDATNPLNLCVKIVQGIRAMEVDSSQYSLELIQMVHSCLDQDPEQRPTADELLDRPLLRKRRREMEEKVTLLNAPTKRPRSSTVTEAPIAVVTSRTSEVYVWGGGKSTPQKLDVIKSGCSARQVCAGNTHFAVVTVEKELYTWVNMQGGTKLHGQLGHGDKASYRQPKHVEKLQGKAIRQVSCGDDFTVCVTDEGQLYAFGSDYYGCMGVDKVAGPEVLEPMQLNFFLSNPVEQVSCGDNHVVVLTRNKEVYSWGCGEYGRGSLVSVHFFTGRLGLDSEEDYYTPQKVDVPKALIIVAVQCGCDGTFLLTQSGKVLACGLNEFNKLGLNQCMSGIINHEAYHEVPYTTSFTLAKQLSFYKIRTIAPGKTHTAAIDERGRLLTFGCNKCGQLGVGNYKKRLGINLLGGPLGGKQVIRVSCGDEFTIAATDDNHIFAWGNGGNGRLAMTPTERPHGSDICTSWPRPIFGSLHHVPDLSCRGWHTILIVEKVLNSKTIRSNSSGLSIGTVFQSSSPGGGGGGGGGEEEDSQQESETPDPSGGFRGTMEADRGMEGLISPTEAMGNSNGASSSCPGWLRKELENAEFIPMPDSPSPLSAAFSESEKDTLPYEELQGLKVASEAPLEHKPQVEASSPRLNPAVTCAGKGTPLTPPACACSSLQVEVERLQGLVLKCLAEQQKLQQENLQIFTQLQKLNKKLEGGQQVGMHSKGTQTAKEEMEMDPKPDLDSDSWCLLGTDSCRPSL

SEQ ID NO: 51780 - protein, 394 aa, Homo sapiens
MELSAVGERVFAAESIIKRRIRKGRIEYLVKWKGWAIKYSTWEPEENILDSRLIAAFEQKERERELYGPKKRGPKPKTFLLKPSASASSPKLHSSAAVHRLKKDIRRCHRMSRRPLPRPDPQGGSPGLRPPISPFSETVRIINRKVKPREPKRNRIILNLKVIDKGAGGGGAGQGAGALARPKVPSRNRVIGKSKKFSESVLRTQIRHMKFGAFALYKPPPAPLVAPSPGKAEASAPGPGLLLAAPAAPYDARSSGSSGCPSPTPQSSDPDDTPPKLLPETVSPSAPSWREPEVLDLSLPPESAATSKRAPPEVTAAAGPAPPTAPEPAGASSEPEAGDWRPEMSPCSNVVVTDVTSNLLTVTIKEFCNPEDFEKVAAGVAGAAGGGGSIGASK

SEQ ID NO: 51781 - protein, 18 aa, Homo sapiens
MEKKWKYCAVYYIIQIHF

SEQ ID NO: 51782 - protein, 105 aa, Homo sapiens
MTKKTRDLRRQLRKAVMDHVSDSFLETNVPLLVLIEAAKNGNEKEVKEYAQVFREHANKLIEVANLACSISNNEEGVKLVRMSASQLEALCPQVINAALALAAKP

SEQ ID NO: 51783 - protein, 57 aa, Homo sapiens
MHDFYRCHTCNTTDRNAICVNCIKKCHQGHDVEFIRHDRFFCDCGAGTLSNPCTLAG

SEQ ID NO: 51784 - protein, 955 aa, Homo sapiens
MADDDVLFEDVYELCEVIGKGPFSVVRRCINRETGQQFAVKIVDVAKFTSSPGLSTEDLKREASICHMLKHPHIVELLETYSSDGMLYMVFEFMDGADLCFEIVKRADAGFVYSEAVASHYMRQILEALRYCHDNNIIHRDVKPHCVLLASKENSAPVKLGGFGVAIQLGESGLVAGGRVGTPHFMAPEVVKREPYGKPVDVWGCGVILFILLSGCLPFYGTKERLFEGIIKGKYKMNPRQWSHISESAKDLVRRMLMLDPAERITVYEALNHPWLKERDRYAYKIHLPETVEQLRKFNARRKLKGAVLAAVSSHKFNSFYGDPPEELPDFSEDPTSSGAVSQVLDSLEEIHALTDCSEKDLDFLHSVFQDQHLHTLLDLYDKINTKSSPQIRNPPSDAVQRAKEVLEEISCYPENNDAKELKRILTQPHFMALLQTHDVVAHEVYSDEALRVTPPPTSPYLNGDSPESANGDMDMENVTRVRLVQFQKNTDEPMGITLKMNELNHCIVARIMHGGMIHRQGTLHVGDEIREINGISVANQTVEQLQKMLREMRGSITFKIVPSYRTQSSSCERDSPSTSRQSPANGHSSTNNSVSDLPSTTQPKGRQIYVRAQFEYDPAKDDLIPCKEAGIRFRVGDIIQIISKDDHNWWQGKLENSKNGTAGLIPSPELQEWRVACIAMEKTKQEQQASCTWFGKKKKQYKDKYLAKHNADLVTYEEVVKLPAFKRKTLVLLGAHGVGRRHIKNTLITKHPDRFAYPIPHTTRPPKKDEENGKNYYFVSHDQMMQDISNNEYLEYGSHEDAMYGTKLETIRKIHEQGLIAILDVEPQGLEKSSGQGWLEAKSQSWSWSSTSSPWVPHWSSPERRFLLALKVLRTAEFAPFVVFIAAPTITPGLNEDESLQRLQKESDILQRTYAHYFDLTIINNEIDETIRHLEEAVELVCTAPQWVPVSWVY

SEQ ID NO: 51785 - protein, 1181 aa, Homo sapiens
MANGGGGGGGSSGGGGGGGGSSLRMSSNIHANHLSLDASSSSSSSSSSSSSSSSSSSSSSVHEPKMDALIIPVTMEVPCDSRGQRMWWAFLASSMVTFFGGLFIILLWRTLKYLWTVCCHCGGKTKEAQKINNGSSQADGTLKPVDEKEEAVAAEVGWMTSVKDWAGVMISAQTLTGRVLVVLVFALSIGALVIYFIDSSNPIESCQNFYKDFTLQIDMAFNVFFLLYFGLRFIAANDKLWFWLEVNSVVDFFTVPPVFVSVYLNRSWLGLRFLRALRLIQFSEILQFLNILKTSNSIKLVNLLSIFISTWLTAAGFIHLVENSGDPWENFQNNQALTYWECVYLLMVTMSTVGYGDVYAKTTLGRLFMVFFILGGLAMFASYVPEIIELIGNRKKYGGSYSAVSGRKHIVVCGHITLESVSNFLKDFLHKDRDDVNVEIVFLHNISPNLELEALFKRHFTQVEFYQGSVLNPHDLARVKIESADACLILANKYCADPDAEDASNIMRVISIKNYHPKIRIITQMLQYHNKAHLLNIPSWNWKEGDDAICLAELKLGFIAQSCLAQGLSTMLANLFSMRSFIKIEEDTWQKYYLEGVSNEMYTEYLSSAFVGLSFPTVCELCFVKLKLLMIAIEYKSANRESRILINPGNHLKIQEGTLGFFIASDAKEVKRAFFYCKACHDDITDPKRIKKCGCKRLIYFEDEQPSTLSPKKKQRNGGMRNSPNTSPKLMRHDPLLIPGNDQIDNMDSNVKKYDSTGMFHWCAPKEIEKVILTRSEAAMTVLSGHVVVCIFGDVSSALIGLRNLVMPLRASNFHYHELKHIVFVGSIEYLKREWETLHNFPKVSILPGTPLSRADLRAVNINLCDMCVILSANQNNIDDTSLQDKECILASLNIKSMQFDDSIGVLQANSQGFTPPGMDRSSPDNSPVHGMLRQPSITTGVNIPIITELVNDTNVQFLDQDDDDDPDTELYLTQPFACGTAFAVSVLDSLMSATYFNDNILTLIRTLVTGGATPELEALIAEENALRGGYSTPQTLANRDRCRVAQLALLDGPFADLGDGGCYGDLFCKALKTYNMLCFGIYRLRDAHLSTPSQCTKRYVITNPPYEFELVPTDLIFCLMQFDHNAGQSRASLSHSSHSSQSSSKKSSSVHSIPSTANRQNRPKSRESRDKQKYVQEERL

SEQ ID NO: 51786 - protein, 115 aa, Homo sapiens
MPAIMTMLADHAARQLLDFSQKLDINLLDNVVNCLYHGEGAQQRMAQEVLTHLKEHPDAWTRVDTILEFSQNMNTKYYGLQILENVIKTRWKILPRNQCEDTETRMAQTLANFYQ

SEQ ID NO: 51787 - protein, 185 aa, Homo sapiens
MSTSWSDRLQNAADMPANMDKHALKKYRREAYHRVFVNRSLAMEKIKCFGFDMDYTLAVYKSPEYESLGFELTVERLVSIGYPQELLSFAYDSTFPTRGLVFDTLYGNLLKVDAYGNLLVCAHGFNFIRGPETREQYPNKFIQRDDTERFYILNTLFNLPETYLLACLVDFFTNCPRYTRSFLLF

SEQ ID NO: 51788 - protein, 157 aa, Homo sapiens
MTKLSAQVKGSLNITTPGLQIWRIEAMQMVPVPSSTFGSFFDGDCYIILAIHKTASSLSYDIHYWIGQDSSLDEQGAAAIYTTQMDDFLKGRAVQHREVQGNESEAFRGYFKIRKGGVASGMKHVETNSYDVQRLLHVKGKRNVVAGEVEMSWKSFN

SEQ ID NO: 51789 - protein, 198 aa, Homo sapiens
  MOD_RES (1)..(1): Any amino acid
XEKRRRRLEQRQQPDEQRRRSGAMENYDDPHKTPASPVVHIRGLIDGVVEADLVEALQEFGPISYVVVMPKKRQALVEFEDVLGACNAVNYAADNQIYIAGHPAFVNYSTSQKISRPGDSDDSRSVNSVLLFTILNPIYSITTDVLYTICNPCGPVQRIVIFRKNGVQAMVEFDSVQSAQRAKASLNGADIYSGCCTL

SEQ ID NO: 51790 - protein, 102 aa, Homo sapiens
MEPEREGTERHPRKVRESRQAPNKLVGAAEAMKAGWDLEESQPEAKKARLSTILFTDNCEVTHDQLCELLKYAVLGKSNVPKPSWCQLFHQNHLNNVVVFVL

SEQ ID NO: 51791 - protein, 411 aa, Homo sapiens
MPPYPGLRATRPAFMCHRRQAIKLQVDDTEDSDEEWTPRQQVKPPWMALRVEQRKHQKGMPKASFSNESSLKELSRTANLLNASGSEQAQKPVSPSGEASTSGQHSRLKLELRKKETERKMYSLRERKGHAYKEVSEPQDDDYLYCEMCQNFFIDSCAAHGPPTFVKDSAVDKGHPNRSALSLPPGLRIGPSGIPQAGLGVWNEASDLPLGLHFGPYEGRITEDEEAANNGYSWLITKGRNCYEYVDGKDKSWANWMRYVNCARDDEEQNLVAFQYHRQIFYRTCRVIRPGCELLVWYGDEYGQELGIKWGSKWKKELMAGREPKPEIHPCPSCCLAFSSQKFLSQHVERNHSSQNFPGPSARKLLQPENPCPGDQNQEQQYPDPHSRNDKTKGQEIKERSKLLNKRTWQR

SEQ ID NO: 51792 - protein, 177 aa, Homo sapiens
MAQGLVTFADVAIDFSQEEWACLNSAQRDLYWDVMLENYSNLVSLDLESAYENKSLPTEKNIHEIRASKRNSDRRSKSLGRNWICEGTLERPQRSRGRYVNQMIINYVKRPATREGTPPRTHQRHHKENSFECKDCGKAFSRGYQLSQHQKIHTGEKPYECKECKKAFRWGNQLTQH

SEQ ID NO: 51793 - protein, 103 aa, Homo sapiens
MHRRGVGAGAIAKKKLAEAKYKERGTVLAEDQLAQMSKQLDMFKTNLEEFASKHKQEIRKNPEFRVQFQDMCATIGVDPLASGVTLEKDFGLRCWAWGTSITN

SEQ ID NO: 51794 - protein, 46 aa, Homo sapiens
MKVGYERDFLRYLQSLLAEVERRIRRGHARLALSQNQQSSGAAGPT

SEQ ID NO: 51795 - protein, 36 aa, Homo sapiens
MKFVYKEEHPFEKRRSEGEKIRKKYPDRVPLVSSTS

SEQ ID NO: 51796 - protein, 34 aa, Homo sapiens
  MOD_RES (1)..(1): Any amino acid
XLTAENLSWYKDDEGGSDFAHLPSLPALSCRNVY

SEQ ID NO: 51797 - protein, 573 aa, Homo sapiens
MAQGFAVGFDPLGLGDLSSGSLSSLSSRGHLGSDSGSTATRYLLRKQQRLLNGPPRGIRASSPMGRVILINSPIEANSDESDIIHSVRVEKSPAGRLGFSVRGGSEHGLGIFVSKVEEGSSAERAGLCVGDKITEVNGLSLESTTMGSAVKVLTSSSRLHMMVRRMGRVPGIKFSKEKTTWVDVVNRRLVVEKCGSTPSDTSSEDGVRRIVHLYTTSDDFCLGFNIRGGKEFGLGIYVSKVDHGGLAEENGIKVGDQVLAANGVRFDDISHSQAVEVLKGQTHIMLTIKETGRYPAYKEMVSEYCWLDRLSNGVLQQLSPASESSSSVSSCASSAPYSSGSLPSDRMDICLGQEEPGSRGPGWGRADTAMQTEPDAGGRVETWCSVRPTVILRDTAIRSDGPHPGRRLDSALSESPKTALLLALSRPRPPITRSQSYLTLWEEKQQRKKEKSGSPGEKGALQRSKTLMNLFFKGGRQGRLARDGRREAWTLDSGSLAKTYPRLDIEKDGVLLLLPRRECNGTISAHCDLRLPRSSDPPTSASQSAGMTRVHHHAQLIFLHLFVEMGVSPCCPG

SEQ ID NO: 51798 - protein, 97 aa, Homo sapiens
MCVCLVAPMKEIPITAPSNGRARLSLVFYASARRALSQSLGCAVLFIVKTLWSIWECAAPHVQAVCLRVCSIKKGRNFSQKEANVPSVPALEAGHNV

SEQ ID NO: 51799 - protein, 374 aa, Homo sapiens
  MOD_RES (1)..(1): Any amino acid
XHLLQWLLLLLPTLCGPGTAAWTTSSLACAQGPEFWCQSLEQALQCRALGHCLQEVWGHVGADDLCQECEDIVHILNKMAKEAIFQDTMRKFLEQECNVLPLKLLMPQCNQVLDDYFPLVIDYFQNQTDSNGICMHLGLCKSRQPEPEQEPGMSDPLPKPLRDPLPDPLLDKLVLPVLPGALQARPGPHTQDLSEQQFPIPLPYCWLCRALIKRIQAMIPKGALAVAVAQVCRVVPLVAGGICQCLAERYSVILLDTLLGRMLPQLVCRLVLRCSMDDSAGPREWLPRDSECHLCMSVTTQAGNSSEQAIPQAMLQACVGSWLDREKCKQFVEQHTPQLLTLVPRGWDAHTTCQALGVCGTMSSPLQCIHSPDL

SEQ ID NO: 51800 - protein, 406 aa, Homo sapiens
MNNSGADEIGKLFVGGLDWSTTQETLRSYFSQYGEVVDCVIMKDKTTNQSRGFGFVKFKDPNCVGTVLASRPHTLDGRNIDPKPCTPRGMQPERTRPKEGWQKGPRSDNSKSNKIFVGGIPHNCGETELREYFKKFGVVTEVVMIYDAEKQRPRGFGFITFEDEQSVDQAVNMHFHDIMGKKVEVKRAEPRDSKSQAPGQPGASQWGSRVVPNAANGWAGQPPPTWQQGYGPQGMWVPAGQAIGGYGPPPAGRGAPPPPPPFTSYIVSTPPGGFPPPQGFPQGYGAPPQFSFGYGPPPPPPDQFAPPGVPPPPATPGAAPLAFPPPPSQAAPDMSKPPTAQPDFPYGQYGYGQDLSGFGQGFSDPSQQPPSYGGPSVPGSGGPPAGGSGFGRGQNHNVQGFHPYRR

SEQ ID NO: 51801 - protein, 172 aa, Homo sapiens
MGGDAGDREPGPAARSLGEGQAGFATADHSSQERETEKAMDRLARGTQSIPNDSPARGEGTHSEEEGFAMDEEDSDGELNTWELSEGTNCPPKEQPGDLFNEDWDSELKADQGNPYDADDIQESISQELKPWVCCAPQGDMIYDPSWHHPPPLIPYYSKMVFETGQFDDAED

SEQ ID NO: 51802 - protein, 447 aa, Homo sapiens
  MOD_RES (1)..(1): Any amino acid
XGDPCAWTGQGRGTRRMSPATTGTFLLTVYSIFSKVHSDRNVYPSAGVLFVHVLEREYFKGEFPPYPKPGEISNDPITFNTNLMGYPDRPGWLRYIQRTPYSDGVLYGSPTAENVGKPTIIEITAYNRRTFETARHNLIINIMSAEDFPLPYQAEFFIKNMNVEEMLASEVLGDFLGAVKNVWQPERLNAINITSALDRGGRVPLPINDLKEGVYVMVGADVPFSSCLREVENPQNQLRCSQEMEPVITCDKKFRTQFYIDWCKISLVDKTKQVSTYQEVIRGEGILPDGGEYKPPSDSLKSRDYYTDFLITLAVPSAVALVLFLILAYIMCCRREGVEKRNMQTPDIQLVHHSAIQKSTKELRDMSKNREIAWPLSTLPVFHPVTGEIIPPLHTDNYDSTNMPLMQTQQNLPHQTQIPQQQTTEIIFSITAFVNLRRFSFDNFSKI

SEQ ID NO: 51803 - protein, 114 aa, Homo sapiens
MTPNSMTENGLTAWDKPKHCPDREHDWKLVGMSEACLHRKSHSERRSTLKNEQSSPHLIQTTWTSSIFHLDHDDVNDQSVSSAQTFQTEEKKCKGYIPSYLDKDELCVVCGDKA

SEQ ID NO: 51804 - protein, 263 aa, Homo sapiens
MAEDVSSAAPSPRGCADGRDADPTEEQMAETERNDEEQFECQELLECQVQVGAPEEEEEEEEDAGLVAEAEAVAAGWMLDFLCLSLCRAFRDGRSEDFRRTRNSAEDAQFENDERITPLESALMIWGSIEKEHDKLHEEIQNLIKIQAIAVCMENGNFKEAEEVFERIFGDPNSHMPFKSKLLMIISQKDTFHSFFQHFSYNHMMEKIKSYVNYVLSEKSSTFLMKAAAKVVESKRTRTITSQDKPSGNDVEMETEANLDTRK

SEQ ID NO: 51805 - protein, 123 aa, Homo sapiens
MTAVHAGNINFKWDPKSLEIRTLAVERLLEPLVTQVTTLVNTNSKGPSNKKRGRSKKAHVLAASVEQATENFLEKGDKIAKESQFLKEELVAAVEDVRKQGDLMKAAAGEFADDPCSSVKRGN

SEQ ID NO: 51806 - protein, 271 aa, Homo sapiens
MAEGSFSVQSESYSVEDMDEGSDEVGEEEMVEGNDYEEFGAFGGYGTLTSFDIHILRAFGSLGPGLRILSNEPWELENPVLAQTLVEALQLDPETLANETAARAANVARAAASNRAARAAAAAARTAFSQVVASHRVATPQTSQMLVTSKMAAPEAPATSAQSQTGSPAQEAATEGPSSACAFSQAPCAREVDANRPSTAFLGQNDVFDFTQPAGVSGMAFPRPKRPAPAQEAATEGPSAASGVPQTGPGREVAATRPKTTKSGKALAKTR

SEQ ID NO: 51807 - protein, 74 aa, Homo sapiens
MENLTKHSIECSSFRGDWECKNQFERKQGSQEGHFSEMIFTPEDMPTFSIQHQRIHTDEKLLECKECGKDFSFV

SEQ ID NO: 51808 - protein, 205 aa, Homo sapiens
MKGSNRNKDHSAEGEGVGKRPKRKCLQWHPLLAKKLLDFSEEEEEEDEEEDIDKVQLLGADGLEQDVGETEDDESPEQRARRPMNAFLLFCKRHRSLVRQEHPRLDNRGATKILADWWAVLDPKEKQKYTDMAKEYKDAFMKANPGYKWCPTTNKPVKSPTPTVNPRKKLWAFPSDSSRDLPSPKKAKTEEMPQLNFGMADPTQM

SEQ ID NO: 51809 - protein, 142 aa, Homo sapiens
MVELARLDRRRPGSSDRVLFARFSKTEGGARRASPDQEAEDLWLSPLTMEDLVCYSFQVARGMEFLASRKCIHRDLAARNILLSESDVVKICDFGLARDIYKDPDYVRKGSARLPLKWMAPESIFDKVYTTQSDVWSFGVLL

SEQ ID NO: 51810 - protein, 78 aa, Homo sapiens
MCNEETEIKEAQSYQNSPVSSATNQDAGYGSPFSESSDQLAHFKGSSSREEKEDPQCPDSVSYPQDSLAQIKAVYANL

SEQ ID NO: 51811 - protein, 208 aa, Homo sapiens
  MOD_RES (1)..(1): Any amino acid
XGTLRSCFSWSGGLGDFSRTPSPSPSTALQQFRRKSDSPTSLPENNMSDVSQLKSEESSDDESHPLREEACSSQSQESGEFSLQSSNASKLSQCSSKDSDSEVPGLYKSSSADSLSTTKIKPLGPARASGLSKKPASIQKRKHHNAENKPGLQIKLNELWKNFGFKKDSEKLPPCKKPLSPVRDNIQLTPEAEEDIFNKPECGRVQRA

SEQ ID NO: 51812 - protein, 463 aa, Homo sapiens
MKKKLVVLGLLAVVLVLVIVGLCLWLPSASKEPDNHVYTRAAVAADAKQCSKIGRDALRDGGSAVDAAIAALLCVGLMNAHSMGIGGGLFLTIYNSTTRKAEVINAREVAPRLAFATMFNSSEQSQKGGLSVAVPGEIRGYELAHQRHGRLPWARLFQPSIQLARQGFPVGKGLAAALENKRTVIEQQPVLCEVFCRDRKVLREGERLTLPQLADTYETLAIEGAQAFYNGSLTAQIVKDIQAAGGIVTAEDLNNYRAELIEHPLNISLGDVVLYMPSAPLSGPVLALILNILKGYNFSRESVESPEQKGLTYHRIVEAFRFAYAKRTLLGDPKFVDVTEVVRNMTSEFFAAQLRAQISDDTTHPISYYKPEFYTPDDGGTAHLSVVAEDGSAVSATSTINLYFGSKVRSPVSGILFNNEMDDFSSPSITNEFGVPPSPANFIQPGKQPLSSMCPTIMVGQDG

SEQ ID NO: 51813 - protein, 95 aa, Homo sapiens
MATLQSAAPLLPSRCGFTLLAPRPGTSWRLPAAWVLGNRGFLHRCYRRQTREGFFSFCIMAQFGGQKNPPWATQFTATAVSQPAALGVQQPSLLG

SEQ ID NO: 51814 - protein, 169 aa, Homo sapiens
  MOD_RES (1)..(1): Any amino acid
XCQVCGKTFSQSGSRNVHMRKHHLQLGAAGSQEQEQTAEPLMGSSLLEEASVPSKNLVSMNSQPSLGGESLNLPNTNSILGVDDEVLAEGSPRSLSSVPDVTHHLVTMQSGRQSYEVSVLTAVNPQEVESCYVAQAGVQWHHLGSLQPLPPEFKRFFCLSLLSSWDHSY

SEQ ID NO: 51815 - protein, 182 aa, Homo sapiens
MEAAAQFFVESPDVVYGPEAIEAQYEYRTTRVSREGGVLKVDQGAEEGGVLGRAGRLGEKGTGPGIHCAACLQVHPTSTRFTFRTARQVPRLGVMLVGWGGNNGSTLTAAVLANRLRLSWPTRSGRKEANYYGSLTQAGTVSLGLDAEGQEVFVPFSAVLPMVAPNDLVFDGWDISSLNLAE

SEQ ID NO: 51816 - protein, 42 aa, Homo sapiens
MEFPGGNDNYLTITGPSHPFLSGAEVSQSCRRRGDIPYTKLG

SEQ ID NO: 51817 - protein, 82 aa, Homo sapiens
MELLTFRDVTIEFSLEEWEFLNPAQQSLYRKVMLENYRNLVSLGLTVSKPELISRLEQRQEPWNVKRHETIAKPPGTYRVGQ

SEQ ID NO: 51818 - protein, 63 aa, Homo sapiens
  MOD_RES (1)..(1): Any amino acid
XRGSPHKEPQFMLQSKPRMLEDSDEQLDYTVLPMKKDVDRTDRKRGCCPTSSSLPISLRVRLS

SEQ ID NO: 51819 - protein, 71 aa, Homo sapiens
MAGLRRPQPGCYCRTAAAVNLLLGVFQVLLPCCRPGGAQGQAIEPLPNVVELWQAEEGELLLPTQLLGQTI

SEQ ID NO: 51820 - protein, 231 aa, Homo sapiens [sequence omitted]

SEQ ID NO: 51821 - protein, 298 aa, Homo sapiens
MVAPVWYLVAAALLVGFILFLTRSRGRAASAGQEPLHNEELAGAGRVAQPGPLEPEEPRAGGRPRRRRDLGSRLQAQRRAQRVAWAEADENEEEAVILAQEEEGVEKPAETHLSGKIGAKKLRKLEEKQARKAQREAEEAEREERKRLESQREAEWKKEEERLRLEEEQKEEEERKAREEQAQREHEEYLKLKEAFVVEEEGVGETMTEEQSQSFLTEFINYIKQSKVVLLEDLASQVGLRTQVSPGTWPAVCSVARGLWLAERTCPKDRVLMHRLPCPQPRVSSAQKSPGTLGILHF

SEQ ID NO: 51822 - protein, 121 aa, Homo sapiens
MRRSAAPSQLQGNSFKKPKFIPPGRSNPGLNEEITKLNPDIKLFEGVAINNTFLPSQNDLRICSLNLPSEESTREINNRDNCSGKYCFEAPTLATLDPPHTVQTWMRRHRLVPVHYSSFGS

SEQ ID NO: 51823 - protein, 18 aa, Homo sapiens
MKRRLDDQESPVYAAQQR

SEQ ID NO: 51824 - protein, 128 aa, Homo sapiens
FMFTAFQTCGNVAQTVIRSLNRTDFHGSGYTSMAIIYGVFSASNLITPSVVAIVGPQLSMFASGLFYSMYIAVFIQPFPWSFYTASVFIGIAAAVLWTAQGNCLTINSDEHSIGRNSGIFWALLQSRE

SEQ ID NO: 51825 - protein, 120 aa, Homo sapiens
MAGQRVLLLVGFLLPGVLLSEAAKILTISTVGGSHYLLMDRVSQILQDHGHNVTMLNHKRGPFMPDFKKEEKSYQVISWLAPEDHQREFKKSFDFFLEETLGGRTWRTSLPSLGTLVLSL

SEQ ID NO: 51826 - protein, 79 aa, Homo sapiens
MPDRTEKHSTMPDSPVDVKTQSRLTPPTMPPPPTTQGAPRTSSFTPTTLTNGTSHSPTALNGAPSPPNGFSNGPSSSSS

SEQ ID NO: 51827 - protein, 362 aa, Homo sapiens
MGTCDIVTEANISSGPESNTTGITAFSMRTVTNYFIVNLALADLCMAAFNAAFNFVYASHNIWYFGRAFCYFQNLFPITAMFVSIYSMTAIAADRYMAIVHPFQPRLSAPSTKAVIAGIWLVALALASPQCFYSTVTMDQGATKCVVAWPEDSGGKTLLLYHLVVIALIYFLPLAVMFVAYSVIGLTLWRRAVPGHQAHGANLRHLQAMKKFVKTMVLVVLTFAICWLPYHLYFILGSFQEDIYCHKFIQQVYLALFWLAMSSTMYNPIIYCCLNHRFRSGFRLAFRCCPWVTPTKEDKLELTPTTSLSTRVNRCHTKETLFMAGDTAPSEATSGEAGRPQDGSGLWFGYGLLAPTKTHVEI

SEQ ID NO: 51828 - protein, 140 aa, Homo sapiens
MEPLCPLLLVGFSLPLARALRGNETTADSNETTTTSGPPDPGASQPLLAWLLLPLLLLLLVLLLAAYFFRFRKQRKAVVSTSDKKMPNGILEEQEQQRVMLLSRSPSGPKKYFPIPVEHLEEEIRIRSADDCKQFREEFN

SEQ ID NO: 51829 - protein, 171 aa, Homo sapiens
MTPLALSPPRSTPEPDLSSIPQDAATVPSLAAPQALTVCLYINKQANAGPYLERKKVQQLPEHFGPERPSAVLQQAVQACIDCAHQQKLVFSLVKQGYGGEMVSVSASFDGKQHLRSLPVVNSIGYVLRFLAKLCRSLLCDDLFSHQPFPRGCSASEKVQEKEEGRMESGG

SEQ ID NO: 51830 - protein, 877 aa, Homo sapiens
LEKDRETQRNVLEHQLLELEKKDQMIESQRGQVQDLKKQLVTLECLALELEENHHKMECQQKLIKELEGQRETQRVALTHLTLDLEERSQELQAQSSQIHDLESHSTVLARELQERDQEVKSQREQIEELQRQKEHLTQDLERRDQELMLQKERIQVLEDQRTRQTKILEEDLEQIKLSLRERGRELTTQRQLMQERAEEGKGPSKAQRGSLEHMKLILRDKEKEVECQQEHIHELQELKDQLEQQLQGLHRKVGETSLLLSQREQEIVVLQQQLQEAREQGELKEQSLQSQLDEAQRALAQRDQELEALQQEQQQAQGQEERVKEKADALQGALEQAHMTLKERHGELQDHKEQARRLEEELAVEGRRVQALEEVLGDLRAESREQEKALLALQQQCAEQAQEHEVETRALQDSWLQAQAVLKERDQELEALRAESQSSRHQEEAARARAEALQEALGKAHAALQGKEQHLLEQAELSRSLEASTATLQASLDACQAHSRQLEEALRIQEGEIQDQDLRYQEDVQQLQQALAQRDEELRHQQEREQLLEKSLAQRVQENMIQEKQNLGQEREEEEIRGLHQSVRELQLTLAQKEQEILELRETQQRNNLEALPHSHKTSPMEEQSLKLDSLEPRLQRELERLQAALRQTEAREIEWREKAQDLALSLAQTKASVSSLQEVAMFLQASVLERDSEQQRLQDELELTRRALEKERLHSPGATSTAELGSRGEQGVQLGEVSGVEAEPSPDGMEKQSWRQRLEHLQQAVARLEIDRSRLQRHNVQLRSTLEQVVLLQAQLTLERKQKQDYITRSAQTSRELAGLHHSLSHSLLAVAQAPEATVLEAETRRLDESLTQSLTSPGPVLLHPSPSTTQAASR

SEQ ID NO: 51831 - protein, 365 aa, Homo sapiens
MATNFSDIVKQGYVKMKSRKLGIYRRCWLVFRKSSSKGPQRLEKYPDEKSVCLRGCPKVTEISNVKCVTRLPKETKRQAVAIIFTDDSARTFTCDSELEAEEWYKTLSVECLGSRLNDISLGEPDLLAPGVQCEQTDRFNVFLLPCPNLDVYGECKLQITHENIYLWDIHNPRVKLVSWPLCSLRRYGRDATRFTFEAGRMCDAGEGLYTFQTQEGEQIYQRVHSATLAIAEQHKRVLLEMEKNVRLLNKGTEHYSYPCTPTTMLPRSAYWHHITGSQNIAEASSYAGESLPCPTPTCQEALWRMRPIGQGSFDLALSSEPASVPTGEGYGAAQASSETDLLNRFILLKPKPSQGDSSEAKTPSQ

SEQ ID NO: 51832 - protein, 40 aa, Homo sapiens
MMSSVSTESKLQQAVSLQGVDPETCMIVFKNHWAQVVKIL

SEQ ID NO: 51833 - protein, 84 aa, Homo sapiens
MAQFGGQKNPPWATQFTATAVSQPAALGVQQPSLLGASPTIYTQQTALAAAGLTTQTPANYQLTQTAALQQQAAAAAAALQQHK

SEQ ID NO: 51834 - protein, 147 aa, Homo sapiens
MTEQMTLRGTLKGHNGWVTQIATTPQFPDMILSASRDKTIIMWKLTRDETNYGIPQRALRGHSHFVSDVVISSDGQFALSGSWDGTLRLWDLTTGTTTRRFVGHTKDVLSVAFSSDNRQIVSGSRDKTIKLWNTLGVCKYTVQAGVQ

SEQ ID NO: 51835 - protein, 87 aa, Homo sapiens
MGTRLLPALFLVLLVLGFEVQGTQQPQQDEMPSPTFLTQVKESLSSYWESAKTAAQNLDLYSKSTAAMSTYTGIFTDQVLSVLKGEE

SEQ ID NO: 51836 - protein, 74 aa, Homo sapiens
MEPGSDDFLPPPECPVFEPSWAEFRDPLGYIAKIRPIAEKSGICKIRPPASGIPALTPTPWGFLPCLFLYQAGV

SEQ ID NO: 51837 - protein, 57 aa, Homo sapiens
MARRFQEELAAFLFEYDTPRMVLVRNKKVGVIFRLIQLVVLVYVIGGRPSWQATVRE

SEQ ID NO: 51838 - protein, 97 aa, Homo sapiens
MSLFKARDWWSTILGDKEEFDQGCLCLANVDNSGNGQDKIIVGSFMGYLRIFSPHPAKTGDGAQAEDLLLEVDLRDPVLQVEVGKFVSGTEMLHLAV

SEQ ID NO: 51839 - protein, 188 aa, Homo sapiens
MIIYRDLISHDEMFSDIYKIREIADGLCLEVEGKMVSRTEGNIDDSLIGGNASAEGPEGEGTESTVITGVDIVMNHHLQETSFTKEAYKKYIKDYMKSIKGKLEEQRPERVKPFMTGAAEQIKHILANFKNYQFFIGENMNPDGMVALLDYREDGVTPYMIFFKDGLEMEKCVSTRKWVKINNVKKTF

SEQ ID NO: 51840 - protein, 78 aa, Homo sapiens
MGPLQFRDVAIEFSLEEWHCLDAAQRNLYRDVMLENYRNLIFLGIVVSKPNLITCLEQGKKPLTMKRHEMIAKPPGGL

SEQ ID NO: 51841 - protein, 116 aa, Homo sapiens
MMLRVLVGAVLPAMLLAAPPPINKLALFPDKSAWCEAKNITQIVGHSGCEAKSIQNRACLGQCFSYSVPNTFPQSTESLVHCDSCMPAQSMWEIVTLECPGHEEVPRVDKLVEKIL

SEQ ID NO: 51842 - protein, 188 aa, Homo sapiens [sequence omitted]

SEQ ID NO: 51843 - protein, 132 aa, Homo sapiens
MLLPLLLLLPMCWAVEVKRPRGVSLTSESSCSPSRQAGGGRGQHWALGIGIYSLLTQFPGSAPLVGMGGQRWYLVEKALTCPGLSFLYPADHHFYDESKPFTCLDGSATIPFDQVNDDYCDCKDGSDEPGTA

SEQ ID NO: 51844 - protein, 402 aa, Homo sapiens
MLFEGKVNPQTQSLLAECGEWTRRSLHLRVLGRQLILPTDKGVQHFQGSTPASAVHRPPLSACGHSSNIRELCISGSQIVPAALSASALPGPDDTGVADLTARSSLEEEVYHVDGKIEEYFAFDRKEDDDECLEQKPAQPGRKWRKLGLPPVSPRDCVKDAVAAEVFDHVWTNMVELLEELIRKHWETTLTEGKKQRETLKVAGNRFPHVLVPHAHADGASGPPSGHAEAHGISLASRLNPPQIHHFSSSFYSDMNGVMTIQAKPLQRRPAYFADRTQNEKEDKASGGGAGALSSAPHRLGRASDTHGLSPSAKKTPVPWRLPSLASDSQRLKTPNIYSDEVLRGTTADWRGPHGFPTGSNVTEQVPPASHGDQGAEYSSSWMPPCFLQRKASTKPCVECHA

SEQ ID NO: 51845 - protein, 33 aa, Homo sapiens
MLWKLLLRSQSCRLCSFRKMRSPPKYRPFLACF

SEQ ID NO: 51846 - protein, 570 aa, Homo sapiens
MEDSQDLNEQSVKKTCTESDVSQSQNSRSMEMQDLASPHTLVGGGDTPGSSKLEKSNLSSTSVTTNGTGVITSSGYSPRSAHQYSPQLYPSKPYPHILSTPAAQTMSAYAGQTQYSGMQQPAVYTAYSQTGQPYSLPTYDLGVMLPAIKTESGLSQTQSPLQSGCLSYSPGFSTPQPGQTPYSYQMPGSSFAPSSTIYANNSVSNSTNFSGSQQDYPSYTAFGQNQYAQYYSASTYGAYMTSNNTADGTPSSTSTYQLQESLPGLTNQPGTDLHPGEFDTMQSPSTPIKDLDERTCRSSGSKSRGRGRKNNPSPPPDSDLERVFVWDLDETIIVFHSLLTGSYAQKYGKDPPMAVTLGLRMEEMIFNLADTHLFFNDLEECDQVHIDDVSSDDNGQDLSTYSFATDGFHAAASSANLCLPTGVRGGVDWMRKLAFRYRRVKELYNTYKNNVGGLLGPAKRDAWLQLRAEIEGLTDSWLTNALKSLSIISTRSNCINVLVTTTQLIPALAKVLLYSLGGAFPIENIYSATKIGKESCFERIVSRFGTNITYVVIGDGRDEEHAANQKRLPA

SEQ ID NO: 51847 - protein, 66 aa, Homo sapiens
  MOD_RES (1)..(1): Any amino acid
XLQEQMDELLQQCFLHALKCRVKKADLPLLTSTFLGSHMFSCCPEGRQLDIKKSSYKKEGELSGGQ

SEQ ID NO: 51848 - protein, 157 aa, Homo sapiens
MALVFEKCELATCTPREPGVAGGDVCSSDSFNEDIAVFAKQVRAEKPLFSSNPELDNLMIQAIQVLRFHLLELEKVHELCDNFCHRYISCLKGKMPIDLVIDERDGSSKSDHEELSGSSTNLADHNPSSWRDHDDATSTHSAGTPGPSSGGHASQSG

SEQ ID NO: 51849 - protein, 51 aa, Homo sapiens
MCMVIFAPKGFLKRFFSGSLQKAFCNLCICNMRWLFWRPAAECGLRQQDRK

SEQ ID NO: 51850 - protein, 124 aa, Homo sapiens
MFSDDFGSFMRPHSEPLAFPAAHPTARPGGAGNIKTLGDAYEFAVDVRDFSPEDIIVTTSNNHIELAADGTVMNTFAHKCQLPEDVDPTSVTSALREDGSLTIRARRHPHTEHVQQTFRTEIKI

SEQ ID NO: 51851 - protein, 121 aa, Homo sapiens
  MOD_RES (1)..(1): Any amino acid
XIKWKGWSYIHSTWESEESLQQQKVKGLKKLENFKKKEDEIKQWLGKVSPEDVEYFNCQQELASELNKQYQIVERVIAHSRKPAPSNEPEYLCKWMGLPYSECSWEDEALIGKKFQNCIDS

SEQ ID NO: 51852 - protein, 169 aa, Homo sapiens
MCVQPEFHCGDPCCTTCRHHPCPPGQGVQSQGKFSFGFQCIDCASGTFSGGHEGHCKPWTDCTQFGFLTVFPGNKTHNAVCVPGSPPAEPLGWLTVVLLAVAACVLLLTSAQLGLHIWQLRSQCMWPRETQLLLEVPPSTEDARSCQFPEEERGERSAEEKGRLGDLWV

SEQ ID NO: 51853 - protein, 70 aa, Homo sapiens
MPPLTLEGIQDRVLYVLKLYDKIDPEKLSVNSHFMKDLGLDSLDQVEIIMAMEDEFGFEIPDIDAEKLMC

SEQ ID NO: 51854 - protein, 223 aa, Homo sapiens
MEYMSTGSDNKEEIDLLIKHLNVSDVIDIMENLYASEEPAVYEPSLMTMCQDSNQNDERSKSLLLSGQEVPWLSSVRYGTVEDLLAFANHISNTAKHFYGQRPQESGILLNMVITPQNGRYQIDSDVLLIPWKLTYRNIGSDFIPRGAFGKVYLAQDIKTKKRMACKLIPVDQFKPSDVEIQACFRHENIAELYGAVLWGETVHLFMEAGEGGSVLEKLESCG

SEQ ID NO: 51855 - protein, 148 aa, Homo sapiens
MAGLAARLVLLAGAAALASGSQGDREPVYRDCVLQCEEQNCSGGALNHFRSRQPIYMSLAGWTCRDDCKYECMWVTVGLYLQEGHKVPQFHGKWPFSRFLFFQEPASAVASFLNGLASLVMLCRYRTFVPASSPMYHTCVAFAWLSGR

SEQ ID NO: 51856 - protein, 97 aa, Homo sapiens
MPFNGEKQCVGEDQPSDSDSSRFSESMASLSDYECSRQSFASDSSSKSSSPASTSPPRVVTFDEVMATARNLSNLTLAHEIAVNENFQLKQEALPEK

SEQ ID NO: 51857 - protein, 471 aa, Homo sapiens
MKIPNIGNVMNKFEILGVVGEGAYGVVLKCRHKETHEIVAIKKFKDSEENEEVKETTLRELKMLRTLKQENIVELKEAFRRRGKLYLVFEYVEKNMLELLEEMPNGVPPEKVKSYIYQLIKAIHWCHKNDIVHRDIKPENLLISHNDVLKLCDFGFARNLSEGNNANYTEYVATRWYRSPELLLGAPYGKSVDMWSVGCILGELSDGQPLFPGESEIDQLFTIQKVLGPLPSEQMKLFYSNPRFHGLRFPAVNHPQSLERRYLGILNSVLLDLMKNLLKLDPADRYLTEQCLNHPTFQTQRLLDRSPSRSAKRKPYHVESSTLSNRNQAGKSTALQSHHRSNSKDIQNLSVGLPRADEGLPANESFLNGNLAGASLSPLHTKTYQASSQPGSTSKDLTNNNIPHLLSPKEAKSKTEFDFNIDPKPSEGPGTKYLKSNSRSQQNRHSFMESSQSKAGTLQPNEKQSRHSYID

SEQ ID NO: 51858 - protein, 14 aa, Homo sapiens
MQRGKPCRALPTLK

SEQ ID NO: 51859 - protein, 60 aa, Homo sapiens
MWATCCNWFCLDGQPEEVPPPQGARMQAYSNPGYSSFPSPTGLEPSCKSCGAHFANTARK

SEQ ID NO: 51860 - protein, 43 aa, Homo sapiens
MTTCCFFRESSSAGPLALLSIPSTTRAQAPSCQGERMSTISCC

SEQ ID NO: 51861 - protein, 75 aa, Homo sapiens
MFSPWKISMFLSVREDSVPTTASFRVSVRRPRLKCSGTIIARCSLDLPGLNDSPTSASRVAGTTGHCAWHHPGPL

SEQ ID NO: 51862 - protein, 87 aa, Homo sapiens
MDYLTTFTEKSGRLLRGTANRLLGFGGGGEARQVRFEDYLREPAQGDLGCGSPPHRPPAPSSPEGPDYYKGRHKFKAGCYSESRPGV

SEQ ID NO: 51863 - protein, 91 aa, Homo sapiens
MADSSGRGAGKPATGPTNSSSAKKKDKRVQGGRVIESRYLQYEKKTTQKQIAVGSERVTCSPRCWKGMAQLHLTWISLLLMTKASSKRRHS

SEQ ID NO: 51864 - protein, 66 aa, Homo sapiens
MSRAVRLPVPCPVQLGTLRNDSLEAQLHEYVKQGNYVKVKKILKKALELPQTALRSEEEWRSKEEN

SEQ ID NO: 51865 - protein, 44 aa, Homo sapiens
MTIGDVSLVQELLDSGISVDSNFQYGWTPLMYAASVANAELVRV

SEQ ID NO: 51866 - protein, 160 aa, Homo sapiens
MYNDTLNGSTEKRSAELPDAVGPIVQLQEKLYVPVKEYPDFNFVGRILGPRGLTAKQLEAETGCKIMVRGKGSMRDKKKEEQNRGKPNWEHLNEDLHVLITVEDAQNRAEIKLKRAVEEVKKLLVPAAEGEDSLKKMQLMELAILNGTYRDANIKSPTAQ

SEQ ID NO: 51867 - protein, 31 aa, Homo sapiens
  MOD_RES (1)..(1): Any amino acid
XALSMLGQSDAYGAADARDLSTLLTMFGLPQ

SEQ ID NO: 51868 - protein, 174 aa, Homo sapiens
MSYSCKSRGSNLRVHFKNTRETAQAIKGMHIRKATKYLKDVTLQKQCVPFRRYNGGVGRCAQAKQWGWTQGRWPKKSAEFLLHMLKNAESNAELKGLDVDSLVIEHIQVNKAPKMRRRTYRAHGRINPYMSSPCHIEMILTEKEQIVPKPEEEVAQKKKISQKKLKKQKLMARE

SEQ ID NO: 51869 - protein, 75 aa, Homo sapiens
  MOD_RES (1)..(1): Any amino acid
XLWLVASGGRHSAFPVSHPKGVGLACLPSTVASTGGCHWETGRAWEFRELRPAWTPLQRSQDPQGVETTDWRTPC

SEQ ID NO: 51870 - protein, 193 aa, Homo sapiens
MSKRKAPQETLNGGITDMLTELANFEKNVSQAIHKYNAYRKAASVIAKYPHKIKSGAEAKKLPGVGTKIAEKIDEFLATGKLRKLEKIRQDDTSSSINFLTRVSGIGPSAARKFVDEGIKTLEDLRKNEDKLNHHQRIGLKYFGDFEKRIPREEMLQMQDIVLNEVKKVDSEYIATVCGSFRRDSAVYINTPE

SEQ ID NO: 51871 - protein, 768 aa, Homo sapiens
MGTKMADLDSPPKLSGVQQPSEGVGGGRCSEISAELIRSLTELQELEAVYERLCGEEKVVERELDALLEQQNTIESKMVTLHRMGPNLQLIEGDAKQLAGMITFTCNLAENVSSKVRQLDLAKNRLYQAIQRADDILDLKFCMDGVQTALRSEDYEQAAAHTHRYLCLDKSVIELSRQGKEGSMIDANLKLLQEAEQRLKAIVAEKFAIATKEGDLPQVERFFKIFPLLGLHEEGLRKFSEYLCKQVASKAEENLLMVLGTDMSDRRAAVIFADTLTLLFEGIARIVETHQPIVETYYGPGRLYTLIKYLQVECDRQVEKVVDKFIKQRDYHQQFRHVQNNLMRNSTTEKIEPRELDPILTEVTLMNARSELYLRFLKKRISSDFEVGDSMASEEVKQEHQKCLDKLLNNCLLSCTMQELIGLYVTMEEYFMRETVNKAVALDTYEKGQLTSSMVDDVFYIVKKCIGRALSSSSIDCLCAMINLATTELESDFRDVLCNKLRMGFPATTFQDIQRGVTSAVNIMHSSLQQGKFDTKGIESTDEAKMSFLSDCTKLFSQGIGGEQAQAKFDSCLSDLAAVSNKFRDLLQEGLTELNSTAIKPQVQPWINSFFSVSHNIEEEEFNDYEANDPWVQQFILNLEQQMAEFKASLSPVIYDSLTGLMTSLVAVELEKVVLKSTFNRLGGLQFDKELRSLIAYLTTVTTWTIRDKFARLSQMATILNLERVTEILDYWGPNSGPLTWRLTPAEVRQVLALRIDFRSEDIKRLRL

SEQ ID NO: 51872 - protein, 62 aa, Homo sapiens
MEAMADRFPDVLPASATDPNCRTSHSSPRPPGSIQWGISSKRNQTNVFQPLHSVASLCVRKG

SEQ ID NO: 51873 - protein, 1363 aa, Homo sapiens
MKSCAVSLTTAAVAFGDEAKKMAEGKASRESEEESVSLTVEEREALGGMDSRLFGFVRLHEDGARTKTLLGKAVRCYESLILKAEGKVESDFFCQLGHFNLLLEDYSKALSAYQRYYSLQADYWKNAAFLYGLGLVYFYYNAFHWAIKAFQDVLYVDPSFCRAKEIHLRLGLMFKVNTDYKSSLKHFQLALIDCNPCTLSNAEIQFHIAHLYETQRKYHSAKEAYEQLLQTENLPAQVKATVLQQLGWMHHNMDLVGDKATKESYAIQYLQKSLEADPNSGQSWYFLGRCYSSIGKVQDAFISYRQSIDKSEASADTWCSIGVLYQQQNQPMDALQAYICAVQLDHGHAAAWMDLGTLYESCNQPQDAIKCYLNAARSKRCSNTSTLAARIKFLQNGSDNWNGGQSLSHHPVQQVYSLCLTPQKLQHLEQLRANRDNLNPAQKHQLEQLESQFVLMQQMRHKEVAQVRTTGIHNGAITDSSLPTNSVSNRQPHGALTRVSSVSQPGVRPACVEKLLSSGAFSAGCIPCGTSKILGSTDTILLGSNCIAGSESNGNVPYLQQNTHTLPHNHTDLNSSTEEPWRKQLSNSAQAYLGHLTGFIQDNCNKGLHKSQSSCLSGPNEEQPLFSTGSAQYHQATSTGIKKANEHLTLPSNSVPQGDADSHLSCHTATSGGQQGIMFTKESKPSKNRSLVPETSRHTGDTSNGCADVKGLSNHVHQLIADAVSSPNHGDSPNLLIADNPQLSALLIGKANGNVGTGTCDKVNNIHPAVHTKTDHSVASSPSSAISTATPSPKSTEQRSINSVTSLNSPHSGLHTVNGEGLGKSQSSTKVDLPLASHRSTSQILPSMSVSICPSSTEVLKACRNPGKNGLSNSCILLDKCPPPRPPTSPYPPLPKDKLNPPTPSIYLENKRDAFFPPLHQFCTNPKNPVTVIRGLAGALKLDLGLFSTKTLVEANNEHMVEVRTQLLQPADENWDPTGTKKIWRCESNRSHTTIAKYAQYQASSFQESLREENEKRTQHKDHSDNESTSSENSGRRRKGPFKTIKFGTNIDLSDNKKWKLQLHELTKLPAFARVVSAGNLLTHVGHTILGMNTVQLYMKVPGSRTPGHQENNNFCSVNINIGPGDCEWFVVPEDYWGVLNDFCEKNNLNFLMSSWWPNLEDLYEANVPVYRFIQRPGDLVWINAGTVHWVQAVGWCNNIAWNVGPLTACQYKLAVERYEWNKLKSVKSPVPMVHLSWNMARNIKVSDPKLFEMIKYCLLKILKQYQTLREALVAAGKEVIWHGRTNDEPAHYCSICEVEVFNLLFVTNESNTQKTYIVHCHDCARKTSKSLENFVVLEQYKMEDLIQVYDQFTLALSLSSSS

SEQ ID NO: 51874 - protein, 44 aa, Homo sapiens
MVDSTEYEVASQPEVETSPLGDGASPGPEQVKLKKEISLLNGVC

SEQ ID NO: 51875 - protein, 80 aa, Homo sapiens
MEEMEQERIGRLVDRLENMRKNVAGDGVNRCILCGEQLGMLGSACVVCEDCKKNVCTKCGVETNNRLHSVWLCKICIEQR

SEQ ID NO: 51876 - protein, 110 aa, Homo sapiens
TFPKDPVYTFSISQNPFPIENRDVLGETQDFHSLATYLSQNTSSVFLDTISDFHLLLFLVTNEVMPLQDSISLLLEAVRTRNEELAQTWKRSEQWATIEQLCKTGFHSVA

SEQ ID NO: 51877 - protein, 66 aa, Homo sapiens
MDPLFQQTHNVLYSHRPALSELLRYVAGPRDPVLHGTPGDGRQAVCAQGLRRRSLTLPTCWACPTQ

SEQ ID NO: 51878 - protein, 407 aa, Homo sapiens
VVNFPPALYEYVTGELGLALVLVLNKVDLAPPALVVAWKHYFHQHYPQLHVVLFTSFPRDPRTPQDPSSVLKKSRRRGRGWTRALGPEQLLRACEAITVGKVDLSSWREKIARDVAGATWGNGSGEEEEEEDGPAVLVEQQTDSAMEPTGPTQERYKDGVVTIGCVGFPNVGKSSLINGLVGRKVVSVSRTPGHTRYFQTYFLTPSVKLCDCPGLIFPSLLPRQLQVLAGIYPIAQIQEPYTAVGYLASRIPVQALLHLRHPEAEDPSAEHPWCAWDICEAWAEKRGYKTAKAARNDVYRAANSLLRLAVDGRLSLCFHPPGYSEQKGTWESHPETTELVVLQGRVGPAGDEEEEEEEELSSSCEEEGEEDRDADEEGEGDEETPTSAPGSSLAGRNPYALLGEDEC

SEQ ID NO: 51879 - protein, 544 aa, Homo sapiens
MSPSSKSVSTPSEAGSQDSGDLGPLTRTLQWDTDPSVLQLQSDSELGRRLHKLGVSKVTQVDFLPREVVSYSKETQTPLATHQSEEDEEDEEMVESKVGQDSELENQDKKQEVKEAPPRELTEEEKQQILHSEEFLIFFDRTIRVIERALAEDSDIFFDYSGRELEEKDGDVQAGANLSFNRQFYDEHWSKHRVVTCMDWSLQYPELMVASYNNNEDAPHEPDGVALVWNMKFKKTTPEYVFHCQSSVMSVCFARFHPNLVVGGTYSGQIVLWDNRSHRRTPVQRTPLSAAAHTHPVYCVNVVGTQNAHNLITVSTDGKMCSWSLDMLSTPQESMELVYNKSKPVAVTGMAFPTGDVNNFVVGSEEGTVYTACRHGSKAGIGEVFEGHQGPVTGINCHMAVGPIDFSHLFVTSSFDWTVKLWTTKHNKPLYSFEDNADYVYDVMWSPVHPALFACVDGMGRLDLWNLNNDTEVPTASVAIEGASALNRVRWAQAGKEVAVGDSEGRIWVYDVGEGLAMLPGWSQNSWTQAILLCWPPKVLGLQT

SEQ ID NO: 51880 - protein, 315 aa, Homo sapiens
MSIEKIWAREILDSRGNPTVEVDLYTAKGLFRAAVPSGASTGIYEALELRDGDKQRYLGKGVLKAVDHINSTIAPALISSGLSVVEQEKLDNLMLELDGTENKSLELVKEAIDKAGYTEKIVIGMDVAASEFYRDGKYDLDFKSPTDPSRYITGDQLGALYQDFVRDYPVVSIEDPFDQDDWAAWSKFTANVGIQIVGDDLTVTNPKRIERAVEEKACNCLLLKVNQIGSVTEAIQACKLAQENGWGVMVSHRSGETEDTFIADLVVGLCTGQIKTGAPCRSERLAKYNQLMRIEEELGDEARFAGHNFRNPSVL

SEQ ID NO: 51881 - protein, 710 aa, Homo sapiens
MERTAGKELALAPLQDWGEETEDGAVYSVSLRRQRSQRRSPAEGPGGSQAPSPIANTFLHYRTSKVRVLRAARLERLVGELVFGDREQDPSFMPAFLATYRTFVPTACLLGFLLPPMPPPPPPGVEIKKTAVQDLSFNKNLRAVVSVLGSWLQDHPQDFRDHPAHSDLGSVRTFLGWAAPGSAEAQKAEKLLEDFLEEAEREQEEEPPQVWTGPPRVAQTSDPDSSEACAEEEEGLMPQGPQLLDFSVDEVAEQLTLIDLELFSKVRLYECLGSVWSQRDRPGAAGASPTVRATVAQFNTVTGCVLGSVLGAPGLAAPQRAQRLEKWIRIAQRCRELRNFSSLRAILSALQSNPIYRLKRSWGAVSREPLSTFRKLSQIFSDENNHLSSREILFQEEATEGSQEEDNTPGSLPSKPPPGPVPYLGTFLTDLVMLDTALPDMLEGDLINFEKRRKEWEILARIQQLQRRCQSYTLSPHPPILAALHAQNQLTEEQSYRLSRVIEPPAASCPSSPRIRRRISLTKRLSAKLAREKSSSPSGSPGDPSSPTSSVSPGSPPSSPRSRDAPAGSPPASPGPQGPSTKLPLSLDLPSPRPFALPLGSPRIPLPAQQSSEARVIRVSIDNDHGNLYRSILLTSQDKAPSVVRRALQKHNVPQPWACDYQLFQVLPGDRVLLIPDNANVFYAMSPVAPRDFMLRRKEGTRNTLSVSPS

SEQ ID NO: 51882 - protein, 118 aa, Homo sapiens
MTVMSLSRDLKDDFHSDTVLSILNEQRIRGILCDVTIIVEDTKFKAHSNVLAASSLYFKNIFWSHTICISSHVLELDDLKAEVFTEILNYIYSSTVVVKRQETVTDLAAAGKKLGISF

SEQ ID NO: 51883 - protein, 138 aa, Homo sapiens
MAALTTLFKYIDENQDRYIKKLAKWVAIQSVSAWPEKRGEIRRMMEVAAADVKQLGGSVELVDIGKQKEIPVNVRFCLEGMEESGSEGLDELIFARKDTFFKDVDYVCISDNYWLGKKKPCITYGLRGICYFFIEVEC

SEQ ID NO: 51884 - protein, 132 aa, Homo sapiens
MRPALAVGLVFAGCCSNVIFLELLARKHPGCGNIVTFAQFLFIAVEGFLFEADLGRKPPAIPIRYYAIMVTMFFTVSVVNNYALNLNIAMPLHMIFRSIQYIQIYLHCPGVCGDIYLHFYVSKAGDFPVQLE

SEQ ID NO: 51885 - protein, 76 aa, Homo sapiens
MAAGLARLLLLLGLSAGGPAPAGAAKMKVVEEPNAFGVNNPFLPQASRLQAKRDPSPVSETGFHRVSQDGLDLLTS

SEQ ID NO: 51886 - protein, 99 aa, Homo sapiens
MKRIFSLLEKTWLGAPIQFAWQKTSGNYLAVTGADYIVKIFDRHGQKRSEINLPGNCVAMDWDKDGDVLAVIAEKSSCIYLWDANTNKTSQLDNGMRHK

SEQ ID NO: 51887 - protein, 75 aa, Homo sapiens
MAEEPQSVLQLPTSIAAGGEGLTDVSPETTTPEPPSSAAVSPGTEEPAGDTKKKNDSGLWPGAVAHSCNPSTLVG

SEQ ID NO: 51888 - protein, 294 aa, Homo sapiens
MEENLANRSHAELETALRDSSRVLQAMLATQLRSFDDHFQHLLNDSERTLQATFPGAFGELYTQNARAFRDLYSELRLYYRGANLHLEETLAEFWARLLERLFKQLHPQLLLPDDYLDCLGKQAEALRPFGEAPRELRLRATRAFVAARSFVQGLGVASDVVRKVAQVPLGPECSRAVMKLVYCAHCLGVPGARPCPDYCRNVLKGCLANQADLDAEWRNLLDSMVLITDKFWGTSGVESVIGSVHTWLAEAINALQDNRDTLTAKVIQGCGNPKVNPQGPGPEEKRRRGKLAP

SEQ ID NO: 51889 - protein, 276 aa, Homo sapiens
MNLSLVLAAFCLGIASAVPKFDQNLDTKWYQWKATHRRLYGANEEGWRRAVWEKNMKMIELHNGEYSQGKHGFTMAMNAFGDMTNEEFRQMMGCFRNQKFRKGKVFREPLFLDLPKSVDWRKKGYVTPVKNQKQCGSCWAFSATGALEGQMFRKTGKLVSLSEQNLVDCSRPQGNQGCNGGFMARAFQYVKENGGLDSEESYPYVAVVNGAPYLVIRALLLESGTLSEITDTFFRIHILYGRIYICKPMKSVSTDLRILLLMTLASQWSHLERRRP

SEQ ID NO: 51890 - protein, 843 aa, Homo sapiens
FDVGSEKTRIGLAQYSGDPRIEWHLNAFSTKDEVIEAVRNLPYKGGNTLTGLALNYIFENSFKPEAGSRTGVSKIGILITDGKSQDDIIPPSRNLRESGVELFAIGVKNADVNELQEIASEPDSTHVYNVAEFDLMHTVVESLTRTLCSRVEEQDREIKASAHAITGPPTELITSEVTARSFMVNWTHAPGNVEKYRVVYYPTRGGKPDEVVVDGTVSSTVLKNLMSLTEYQIAVFAIYAHTASEGLRGTETTLALPMASDLLLYDVTENSMRVKWDAVPGASGYLILYAPLTEGLAGDEKEMKIGETHTDIELSGLLPNTEYTVTVYAMFGEEASDPVTGQETTLALSPPRNLRISNVGSNSARLTWDPTSRQINGYRIVYNNADGTEINEVEVDPITTFPLKGLTPLTEYTIAIFSIYDEGQSEPLTGVFTTEEVPAQQYLEIDEVTTDSFRVTWHPLSADEGLHKLMWIPVYGGKTEEVVLKEEQDSHVIEGLEPGTEYEVSLLAVLDDGSESEVVTAVGTTLDSFWTEPATTIVPTTSVTSVFQTGIRNLVVGDETTSSLRVKWDISDSDVQQFRVTYMTAQGDPEEEVIGTVMVPGSQNNLLLKPLLPDTEYKVTVTPIYTDGEGVSVSAPGKTLPSSGPQNLRVSEEWYNRLRITWDPPSSPVKGYRIVYKPVSVPGPTLETFVGADINTILITNLLSGMDYNVKIFASQASGFSDALTGMVKTLFLGVTNLQAKHVEMTSLCAHWQVHRHATAYRVVIESLQDRQKQESTVGGGTTRHCFYGLQPDSEYKISVYTKLQEIEGPSVSIMEKTQSLPTRPPTFPPTIPPAKEGKRIIE

SEQ ID NO: 51891 - protein, 191 aa, Homo sapiens
MAAAMPLALLVLLLLGPGGWCLAEPPRDSLREELVITPLPSGDVAATFQFRTRWDSELQREGVSHYRLFPKALGQLISKYSLRELHLSFTQGFWRTRYWGPPFLQAPSVWINLGRSSVMSSQGSSAPLSTSSTPPTQSLPLPPSNPWVWPMTLTTTFCAMLCCRGRWSAPKTSPPGRSSCPVVPRQASLCC

SEQ ID NO: 51892 - protein, 166 aa, Homo sapiens
ITTLRTLGACPCPHHTSNLDPVLFRTSSFLASVLVLVATPFSWKIDDKPVKIDKWDGSAVKNSLDDSAKKVLLEKYKYVENFGLIDGRLTICTISCFFAIVALIWDYMHPFPESKPVLALCVISYFVMMGILTIYTSYKEKSIFLVAHRKDPTGMDPDDIWQLSSS

SEQ ID NO: 51893 - protein, 110 aa, Homo sapiens
MATGANATPLDFPSKKRKRSRWNQDTMEQKTVIPGMPTVIPPGLTREQERAYIGPLPLSPSTIARGSGLTPESSAPAKSWKRSGTTSSQRWLHSIRISSHLQITNLQQHV

SEQ ID NO: 51894 - protein, 901 aa, Homo sapiens
MAEPGHSHHLSARVRGRTERRIPRLWRLLLWAGTAFQVTQGTGPELHACKESEYHYEYTACDSTGSRWRVAVPHTPGLCTSLPDPIKGTECSFSCNAGEFLDMKDQSCKPCAEGRYSLGTGIRFDEWDELPHGFASLSANMELDDSAAESTGNCTSSKWVPRGDYIASNTDECTATLMYAVNLKQSGTVNFEYYYPDSSIIFEFFVQNDQCQPNADDSRWMKTTEKGWEFHSVELNRGNNVLYWRTTAFSVWTKVPKPVLVRNIAITEKGSSSCNVRPACTDKDYFYTHTACDANGETQLMYKWAKPKICSEDLEGAVKLPASGVKTHCPPCNPGFFKTNNSTCQPCPYGSYSNGSDCTRCPAGTEPAVGFEYKWWNTLPTNMETTVLSGINFEYKGMTGWEVAGDHIYTAAGASDNDFMILTLVVPGFRPPQSVMADTENKEVARITFVFETLCSVNCELYFMVGVNSRTNTPVETWKGSKGKQSYTYIIEENTTTSFTWAFQRTTFHEASRKYTNDVAKIYSINVTNVMNGVASYCRPCALEASDVGSSCTSCPAGYYIDRDSGTCHSCPTNTILKAHQPYGVQACVPCGPGTKNNKIHSLCYNDCTFSRNTPTRTFNYNFSALANTVTLAGGPSFTSKGLKYFHHFTLSLCGNQGRKMSVCTDNVTDLRIPEGESGFSKSITAYVCQAVIIPPEVTGYKAGVSSQPVSLADRLIGVTTDMTLDGITSPAELFHLESLGIPDVIFFYRSNDVTQSCSSGRSTTIRVRCSPQKTVPGSLLLPGTCSDGTCDGCNFHFLWESAAACPLCSVADYHAIVSSCVAGIQKTTYVWREPKLCSGGISLPEQRVTICKTIDFWLKVGISAGTCTAILLTVLTCYFWKKNQKLEYKYSKLVMNATLK

SEQ ID NO: 51895 - protein, 56 aa, Homo sapiens
LYMYQLFRSLAYIHSFGICHRDIKPQNLLLDPDTAVLKLCDFGRSWELQQGSKSEK

SEQ ID NO: 51896 - protein, 97 aa, Homo sapiens
AKLENQESRVSEIHSLVHRLPEKNRQMLQLLMNHLAKYAGGLGKKCVKCSLQWRTAANARWPSQRMLGKCSCNQATKQSFQGDFTYGDQGQIGVCCP

SEQ ID NO: 51897 - protein, 82 aa, Homo sapiens
MILNGVCVIWKGWIDLQRLDGMGCLEFDEERAQQEDALAQQAFEEARRRTREFEDRDRSHREEMEVRVSQLLAVTGKKTTRP

SEQ ID NO: 51898 - protein, 82 aa, Homo sapiens
MSLSPAWPGHPDQPLPREQMTSPAPPRIITSATADPEGTETALAGDTSDGLAALQLDGLPSGDIDGLVPTRDERGQPIPEWK

SEQ ID NO: 51899 - protein, 19 aa, Homo sapiens
EEGIVKSGTNNHVTVAIEN
